United States Patent Application Publication US 2014/0057251 A1 - sequence listing, part 179

SEQ ID NO: 364809 - DNA, 571 bp, Cannabis indica
tttttttgttcttagtatacatattttcagatattctaaagatattgtctttagcaataatgggtgcttagttttctttacctcaattgtaatattttgcagtgcacaataacacattctacaaaagattgtaaaatgtagaaactcaattggattttctttttttgtttttgaattactaaactttgatggtatcttatggttttcatgaagctttaatatttttgaagaggtgttacaacaatcagctgtaactttatagtgtgtacaagttgaatcttttacacatttcattgatcacatttataagagtatttgaagggagaaatgaatgaagatttagtaaactatttttatcaatacttgaaaattaaattcttagtttagatagctatataatctccattgcccattggattgaagggctatatactctaacttgaccaatgtataaaagttttttatttaatatatatactctagctatatataaatgtataaattttttataaaatcattattactgttattatgtttttatcattgtatattagaaatctaaataataaaa

SEQ ID NO: 364810 - DNA, 797 bp, Cannabis indica
tcttcctcctcaagtttcccagccctataaatagtgaggaatgttcactgggcaaggggaccgagagataaaaaagtcggtacgtagctaagctaagactatattattatctaagaattatatattcagagatacggttgtaagagctataagaattatataacgaggattaggctattaccgaactgctcaaggctgcacctctataaaattcctgtgtcttattatcgcttttatcatatattcactacgacatatcgtttatcgcttgtaaaagactcattgtcgttggctaaaagcgaagtcaacattttgtttctttcattgagaggagaatcacaaatcgctcttttcgacactcaacacgatggtgcaaactcgtagaggcctgtctcacctacaaaattcacagacgctggatccaacattgcatgacccagggagttcaagggttccacctactgtcaatcctggacagacgagaaacgtggtgaatggcgaaacagctcctattactgaaactatgcccggtgtgcaagagactgggaataatagtttcgcacacagctagggcactcataactcgactgttctgtctggaaccaatgcccagacgaccatcggagatgcaactgaattgcaaaatctccgtgccgtgctcggactcatgcagagtcatagcaacactctgcatcatgatcaggatgaactgcgtgctgcagtgaatctcgcatttgatgaacaaaggcctacgttcgctgaatggagagaaaaagagataaaggcagtaagggctc

SEQ ID NO: 364811 - DNA, 610 bp, Cannabis indica
aaatcatgtgaaccatgctacattaaatgttatttctgatctttattaacaagtaaatctgattatattgaaatgagttttatttagggcataaaacccaacaatagtagcagtcaagaactgtgtgaccaagacgatgacacagctgacattgaattcttgatggtggtgcaggaaatcgtcctcctcttccagtgaaagtgttaccacaactgttctgatttggttgataagatttatttcttgcatcacgagtgttgttcccaatatatcctcctctcgaattattgaagttgtttctaataggcatgggatatcgcatgttgcgattgaactgagctatgttagcttcaaggctcagatctagatcaaaggcatgatcaacttcagtctttgcaagatttacactcatctcatgttcttgatcgattttcttaattctggactctgaggcaagcaacaatgcttcaatttctgctacaatataaccttcaattctggtattggtggaaattatgaatgtatcatattcagcagggaggcctttgaaaatagcagaaatgtgatttcgatcgtttagagtttctccaacacttgctagcagatctac

SEQ ID NO: 364812 - DNA, 616 bp, Cannabis indica
caaggttgattatgctagagcagtttgggataaacgtattgtgcctaaacacaggttcctatcctcgcaaatagctaacacccagcttcttcctagagatttcctttctcagattatgaccatctcaagaactttatgcccagtttgtgaggtagagttcgaaactcatgaccatctattttttacttgttcctttgctaaacaggtaatggatgcaaacacttcttggcttggagagtatcaatggcctaattctattgaggatgtgttggaaatgtgtagaaaagggaggaagaatctccaaaatcgaatcattaatgcaatcttggctacgactttgtataacttgtggaagaatagaaatagatacattttttatttgtattgtactgctccaagtcatttgaggttgaatattagaaaggaggttcggttgagaatcttgagcaaggggccttttaaagctttccaaaagaacaattatttacttaatgtaattaataggtggtagcttttgttgtggggctgctggttgtagtagctgccgctggtttgttgttgtggcctcttgcctttgtgtgtatcttgcttgttttgaataaagattcctcttttt

SEQ ID NO: 364813 - DNA, 773 bp, Cannabis indica
caattaatttaatagttttaaaattctataatattatattaattaattttattttataagattataatgttcaatgtatttaaaatttttagatataaaattaattatttacatcaactacattatttataaaatcatgcatgaactagtaaataatatacattcatagtatacttattcttcaacttagtttaaggtagggttttgaaaaaagcccaaccatcagactggttcccaacgggaagaccggttcttggggacagggctggccctaggtataggcgggctaggcctatgcctagggcccacctagtctaggggcccaaaaaaaatttttcccttttaaaattacacaatttttttttgctaattttgaaaaataccatttttttctaaataagggcccaaaaatattttttttcctataccccactaaatttcagggtcggccctgcctagggatcaaccagtcgaccggttgttacaggctcccctgaaccggtcgaccggtttagtgcagggaaccccaaaaatgtcgtccacaactcaattcgagcccaaactctaccatactctctagaacaattgcatatactatactaaatccatttcaagcaacagaacacatcaaatagctcaaaaattaaaagcaccattagagagccgacttaagctctttaacttcaagtttgagtaattcgtagcacaactagctatctcagcacaaaatcaactaaaacaaacctatcttaaccccagaattcaaacccaaa

SEQ ID NO: 364814 - DNA, 602 bp, Cannabis indica
cagttcgaagccgctctccacactagatctttagttttgggaggaactttaagtgaccacaatttattccaaaaccggtggtcttctgtaggaattggaggctgtttatgatcttgaatcaattgataggcacttcggacagaataaagtccatttctctccgcaaaccagtaccaaaagtcgtcctctaccgcctgttttatttgaatgcccaggattaatgcagcgtcatcgggagtaaaaagatcattaacaacatcagcatcccaggagcgactatgggtttgaaacaagctattaaccgtgaagttctcaagtcccgggacattgggaattggagttgttctgtcaagagaaggcagccaaggatcggtggttatttgtacagtcaaaccagatcctattcccttccttaaaccgagcttaactgtgtcctttgcggcaaatatactgctccaaatgaagctaggattagaacccaactcagcagataaataatcaccttgtggatagtatctagccttgaaaactttactcacaagagaatcatgtcggaataagagtctccacccttgctttccaagcatagcaagattaaaatc

SEQ ID NO: 364815 - DNA, 575 bp, Cannabis indica
tgtttttctgttacctttgggtacttgcagagagttggagcgtctcatggctaagttctggtggcaaacagactatgttcatagaacgggtgttagttggatgagttgggatcgattgagtcgtcacaaacatgttgggggattgggttttcgaagtctgcgggacttgaatatggccctgttggggaaacaatgctggagattgttggttaatgatacgtccttggtgagtaaagtttttaaagctaaatactatgccaacggaactcttctttcagctgaattgggtgacaatccgagcttcgtatggaggagtattcttaaagcaaaaggtctaattcaggctgaggtaacccgtacaataggcacgggtgaacatacttcaattttatgtgacccttggcttccatacaacacgaatggctatgttttttcttcacatcttgcacttgttaatcagaatgtaagcatcattttcaaaatgaattcacgagaatgggattaagaggtaattaaggatctctttgatgatagagaccaagagctgattttttctatacaattgagttctactg

SEQ ID NO: 364816 - DNA, 720 bp, Cannabis indica
cttgtggggcaacgccagaagatatatctcgagagaaaaaggagttccacgtgctcggtccagctcgagatcgttgtttctttgtccagccatgccttggaacatatttttcagttcgtctagctgtgcctgtacgactgggataacttgctcaacattctggtcaatttgaatcatgtctgcatctttatgagcgagaatttgagcatcgggctccaggctgcacgatcgtcgtgacattctaatcgtctactcctctccttctattcagatcattccttaggtcatgagttctttccaacctttcgaatacaaaagtgccttgctgccttagcgattgattttcttggttgacaggtggaatggcaccgttaatctggttggaaccctcaggtatgatctctctcgatgaattactagacaaggtctgcccgcctaccacttgtcccacaagtggaactcgtgaccagggattgggcggcttaccatttgcagtctgggaagtattcatcgctggatcttcgttcgtctcacccagggggatgacattcggaggttgctgacctacagtttggtaggcttttcgtatcagcacggtagcttgtcaactacgattttctatctctatatgatgagctcttaacgcctccaactctctgtctctccacttggtaaatatacgccttcgtttttcgaacgcgagatttaccacagcgcgga

SEQ ID NO: 364817 - DNA, 1012 bp, Cannabis indica
taaaattatgtacaaccatatttgtataattttattttgttatttttgtatatttatgaaatattctcaataaaatttgtgagaaatacaaggcattgttgccaacaaaataagtttaattgaaatatgtggtgctcgcattgtagatggcctaaagtgtcatctcttttggtattaagacatcttaaattgtccttaaaaagtggtagctcttttgggtaggatgttggctacttgacaagagtgcctttttagatttattatctttggtctcaattctcaacattagagagtctttcaaaatacatgatctctgttcatatgatctctttatttgggcaaattattaatgaatgtaaacaactcatgttagagttgggtcatattagtattttttttcgttaaacgatcagcaaatgttgtagctcatagttttgctagagcttctcattttcattctggttgtatcttcggtttggagaatgttctaaccgatttgttaccttgtttggtaacggagtttgatggttaataaaatttaattttccattaaaataaaaataaaaatacatgaaccaattgaaagttacattttttacattaaagttttatttgtctaattttttaaaaacgtattttgtgtcaatcacaattttaatgttgagactcacaaattggttaacttttaattacatgcaataaagtactacaccttttgcttatcatttgttatagttttaatttttttgttaattaaatgttaccaatacccaaaaaaatcgttcttaaaagagagagagttatatattgggaaatttacataaaataatattttcggtaaatattttacatttttaagttgaaatatatattccaatatttttacgatgttctataaaaacaacaagaaaataataaaaaataaccacatgaacgtaacaggaaaacaacataaaaataatatataaataacaaaaacccaacaaaaaaaaataacaagagtataatataa

SEQ ID NO: 364818 - DNA, 847 bp, Cannabis indica
taacatagatgaaagttcaaggggcatgatttagtacatatcaaagtttgagaggcatgatttgatagctatcaaagtctggggagcatggtttagtacacaaacaatcactgaaacagtaaaattgaatgaaattagacaaagtccttaaatttagcaatctcaatagttcgaggggaatttctaacgaccaaaaaagttcagggagcacgatttagtacatgtcaaagtttgggagaaaaaattactaattaccctaattaaaataaatatttctatatattttatcactatgttatttatttttgttcgctatgtcatttatgtacaccatccgcataaaatttatgtataataaatatatatattattgctaataatataaaaataactcagttacaaaataaaccgatctcacatactaaatatctatattgtcatattttatttattataaatgataatgttattggtaattaaatttatttattaattcaaaaatattattcaaattaatataatggaaggtaataattcaatcttaccctttttcaaggtatgaacattagggtagttatattacaaggggaataacattccaaggctaaaccctcaaaacaaacaagataatgttttacattaccattaccttagtagcattgttgcccctgattttgcccaatatacgtggaccaaccagataaggacacgtggatcaagaaattcacaatatttgctaagtctttatgccataaggtagcgtccagggcgtagtccccggagaaggcacatggaacttcatatgctcccggaagctcgaatagcgctaaggcatctccgcgaggtg

SEQ ID NO: 364819 - DNA, 897 bp, Cannabis indica
gccaacacagttgctgacttaacctggctgcactctctgtttagtgaactaagaatttcgcattctcgagttcctaccatctggtgtgataatctcagcaccatcatgcacactatgaacactgtccttcgtgctcgaacaaaatatatagaacttgatctatactttgttcgagaaaaggtgctccaaggttttgtccaagttaaacatgtaccagcaactgatcagttagttgatggcctcacaaaagcaatatccaacaatcgattcatcactttcagaaacaaacttacaattgatgatgcaccaattgcaagtttgagggggagtattggaagagaagacaattaaagtagttagcttagttagagtttgttaattcttactgtcattaactaactctctttctctcttcttgtacctatataaactatattcgtgcagtgtaatcaacgccattcagtctttgatcttcatgctctctttttgtgatctttctctcactcttattctctttcttattcatctcgtttactctatttttcaccaattcaataatgtccaaaagatctcacaccaacgaattcggaccaaactatttgagaccgaactaaatgaattcggtgtaaatgatttgatcaattcagaccgttttaaattctctggttcggtcacagttttagaaatcttggtagtggttcaaaccaaaccaatccgtataattattatacatatacttaatatattttttttggacaaaatattaaaatttaggaacaactttaagtagaatattgatattaagtttatattattacgataataattttttatttgttacttatgtattataaacttattaaaaggaaaaaaataccgaaaaaatgaacaattatt

SEQ ID NO: 364820 - DNA, 378 bp, Cannabis indica
caaaacttaaagaattgaaaattcaactccaaaggttgtttgacatagggtttacgcagcctagtgtgtcaccctggggagctccagtattgtttgttaagaagaaggatggatctttgcagatgggcattgactaccgagaattgaataagctaacaatcaagaataaatatcgtttacctagaatcgatgacctttttgatcaacttcagggcaagacggtcttttcaaagattgatctccgatcgggctatcatcagttgagaatcccagatgaggatatcccaaagacggctttccatactaggtatggacattatgaatttttggttatgtcgtttggactaaccaatgctcccactgttggaaattatttta

SEQ ID NO: 364821 - DNA, 728 bp, Cannabis indica
ctgtgatctttaatgctggatatctagactgtaaatgaaactgcatttgtcgggtacttgagtttttgttgcagttatgttttttcaacagtctgtccactaattgtgtatatttgcaatttatttggatgcatatcccagttgtttcaaaaccagtgtactggttgttctcatcccaatgtccattgctttgaactagtacaagtattgatttcatttgtctgcaaattaacagtatgttcgctaaattgtatttttcatgtatgaaaatatttgaataacattaattaaccaataaatcaatatttttttaaataaaatattatttctttttcaaactaggttttaaaatttctaacaggcaattaagataaataattttattctaacttattaactttaaatcaacaatttctatttatttgaatatatatgtaactatatatatatatatattttaattcatgaataattttaacattcaaatgatttacatatttgaatttatttgtatttttcatatatagaaacatctgaattatattttttaaccaataaatcatcaataatttttatttatttttttaatgcaatattatatctttatcaaatcagaatttatcataacaaacagggagtaaagaaaatcaatttcatccaacttattaacaataaatcaacgtttttcttttaatttcaaagtaaatgtaactcaattttttattttt

SEQ ID NO: 364822 - DNA, 649 bp, Cannabis indica
ctggtcgttgcttaacttcgaccaaacctcccaaatgaaatgggagttggcgcgaggaggagaattgcgcatggaatttcgaagagaaggttttccatgaactaaactttccaggggccatcttgaaataccattgctaagcggcttccgacagagtggcaggaaagattctgcagcatacatctcctcgtaccccttgcaaatccatttgcatttctaagtacttgagatgggaaaggggaatcttctctccccgtatacatcttccacgttggcattttgaacttgtggggcagtggcaggagattgatctccgatgagaaaggagttccgcgtgctcgtctaactcaagatcattatttcgttgtctagccctaccgcgaaacatattttttagttcgtcgagttgagcttgtacggctaggctgacctgctcggcattctggtaaacttagattacgtcagcatctttctgagcggggattttgagtacgggctccgggctgaacgattgccgtaacagttttgatcatctgttcccctccttctattttagatcattccttaggtcatgggttgttcctaacctttcgaacacagaagcgcctggttgccttagcgatttattcgcttggttgacgggttggaa

SEQ ID NO: 364823 - DNA, 585 bp, Cannabis indica
ttacgcttgttttctttgatttcaggtttcaacactcggaatgtataaattggacaaatttcaaaaaagagtgatctataaaatagagtaaatgttgaaagaaaataaagctgaaacttaaagcctaaattcgactatgttctgatcatattttggaagaagtcaaaacataaaagttttagatctttctttatctttccaacgcatcttgaatcagctcatttggagtttgtatgagactgttatgcccattttactgaaagaggtgaaagtagaaaaattaggtccagtggccgcggcgagatcaccatggccggagccataaagtcacaacagaaacttggtttttagaagctcatctggccgcggcgagcgtccgtacgatcaggggtattttcgtctgtggaaccctaaaaataagttataaatagaaaactgcgattggaatttaggggaagcaattttgagacctaaaacacagcagaaagcggcaataagagcagaggaaatcaaagtgaagatccagagtcattccaccaacagtttctttctctattccttattaatttctttatgctgaatatt

SEQ ID NO: 364824 - DNA, 550 bp, Cannabis indica
aactaagcggtctttacagaggcagtggttggagctggtcaaggattatgattgtgaaatcctttaccatcctaggaaggtcaatgtagtggcaaatgcactaagcaggaagggtcccagcaagtatctagcatggttatgatttcaccccaccttgctgatcacatggttagattagatattgagttttttgtgagtaaacttaagaatttgacgctaaaatcaaatttgttggacagaattagagctacccagttagctgattcagagttagtaaagattcgagaagaatttttagctggtcaagctaaagacttcacagtgttaggtaatgggatgctattatacagaactcgagtttgcattctaaacaatgtggaacttaaaaatgagatgcttgaggaagctcataccactccttattcattgcatcgtggcaataccaaaatgtatcaagacttaaaactcttctattgatggtgcaagatgaagaaggatgtggtaaaatatgtatctcggtgcttacttgtcaacagattaaggctgaaca

SEQ ID NO: 364825 - DNA, 602 bp, Cannabis indica
gaggaagtaaagctcctagttcttgactactaatggtacagctaaggttggggcaaacattgcctcaacttcgaaacccagcaaaaagaagaagtggatgaatagcaagaagcctattaaagctgttaacagagctaataagaaaaaggctgctaatcccaatgcaaaacaaaaaggaaaatgcttctattgcaatgaaaagagacactgtaaaccccagtgtcctaagtttttggcaaagaaacaaggtatttttgtctatgctatgtactcatgtgttttagagaaatattatccccttaggttactaattctggatctactaaccatgattattttcttcttatttcaactccaaatgcttaaacttggattgttagcgagttgagtcagatggttggacagaagggtggagattgtccaagtgaagatgaagctcgaatcttttttttttttatttagttgtttcagtttacgaaaaatttagtttcaattattgatttggaattttattccctatttcatattattgcaaacaattcattatgatatttttgagaatatttataaaattttctctttaagaaattttcattatgaat

SEQ ID NO: 364826 - DNA, 651 bp, Cannabis indica
gtagcgtgccttagcattagggcgttacaataaatacccaacaaatcctttagattaagggttgaagtctcttacaatacttgcttaggcataaacaaagaacttatactcattgtattctcaaaggcttttctagctatatacataataatattgactcgtggactaagccttgttaacaccccaaccacgtaaaaatcctatgtttgttctatttctttctttgaagtatttatttcttcagttctaatttcttataattcgttttcagagaattttggtaaacattttggtgctttcattgagagctgaagaaagtagtgataccatctcaagattacattcaataatcatggtactcacccaaaataaatatggtcttcactttacttatcctaatgtaaaagctagggatacagaagatccaaacaagatgactagtcgccacaagaaccaacgtggtatagactagaaccgtgatgatcccataatcgaagatgaggaatcaagggagaatagttctaatgatgttgaagatgatccccaagacacactgaaagatgatcaccaagacatgcatgctgacagtgatggtcttcgcccttgcttagtgaaaattcataaactagacatagtgaaaattcataaact

SEQ ID NO: 364827 - DNA, 834 bp, Cannabis indica
cttagaaagttcttcactagacttggtgtcgtccctggaatggaaaaacaactggttttgctttgtgataacactggagccatagccaacagcaaagagcctcgaagccacaatagaagcaagcatatagaaaggaaatatcacatcatcagagaatatgtggcaagaggggatgtactggtggaaaaagtggacacataggacaacctagctgatccattcaccaagctcttggcaggaactgcatttgaaaatcaccattagaatttaggattaattgaaatgtactgattattttatattagtgcaagtcaaagtttgttgggttttatgccctaaataaaactccatttcaatgtaacctttatcttttaaatatcaataaagaaacataagtattttcatcactttgtgtgtcattaggttcatgatatcatttatatgtttatttgatttataaattcatccaaatccttatcacatttaagctcttgtttattgtgtcgtctatacagtggaaagtaatcaagattatgtgattagatatatattcctagttttatcagtactgagaggatttaactaatatgacaatctacaacatagtttacttgcaccttggataagtgctatattctttccagggcattggttaaagtaaagtttgggttggatgcatggagtatgcatcagaagggaccgatattgaactttgattcagatatattaaacttactgtaatatctattcaattcaatctcacccggtatatcgtagatcaaatgatcttaatcctgatatggttaggttcgatatcaagagtattatacatgt

SEQ ID NO: 364828 - DNA, 509 bp, Cannabis indica
aacatagatccaaacttccaacttgtacaacaaaataggaggttgttggataaagagcgtgcctgagctctaaaagatgaagtcaaaaggctgagcaccaatgacttcatcaccgaagcattgtatccgcttcgagtatctaaccatgtgttggtacctaaaccgaaaaataagtggagggtgtgtatagatttcaccgacttgaataaagcatgtccaaaggactgcttcccacttcctaggatcgaccagctagtagatgctatagttggtcatgagatcctaagcttcatggatgcttattcaagttacaaccaaatcaagatgcacccaccagaccaagaacacacaagtttcatggtagacctaggtctgtactactataaggtcatgccttttatgctaaaaattgcgagggccacctatctgagactagtgaataaaatgttaaaagatctcatgggctgcaacatggaggtgtatgtggatgacatgttggtcaagtctaa

SEQ ID NO: 364829 - DNA, 567 bp, Cannabis indica
atttgtcaacctgggtgttgggttcttatttcaaagctttcatgatgtcattttgatacttctaaggttgtagaacttgagggtgaggtcttctaccctgttcatgaccattccagagagaatgcctagagcagaattgacatttgagtgatcaaaaccaatgcaccaggttgattgtcaatttgggtgttgggctcagtttccaagcccttggatttttggttttcctcctgagttttctagtatcttcgttattttttatgacggaaaaaatgcctagaacatttttcgagaaaatgattgtgttgattggatttttagccaattgacgcgagttgtaataaatgagatttaaaccaaaattacaataataaatgctgttaataacaccagaaattgcaataaatgtaaataaaagacacaagaatttaaagaggttcgacccctgatgtcggtaatagcctacttttcttgtgttttattgatctgagttgtaaaaagtcaagaacaggctcttgattgcaaagaatgataaaagtgtttatttttctaagtgttcaagaatgc

SEQ ID NO: 364830 - DNA, 583 bp, Cannabis indica
tttttgggttaaaggctaaatttcacgaagctttgaacgagcaaggtgataatcaaacattgcgagattaaggttaaaatgccgtaaataatgaagctgtacaaactattacaaagaaaattacaaagtttcaagcctagattttctacgtatctcttacaacaagtcaagaaaaattgtattttctataatggaaacccaaaaaattgaagataaaaagttagaggagagaaagatcgaaaacttactcactatttgaagcctaggcattgtccagacgaagctgctcagatacttctgctagaaatcccatgtcaaacttgaaagaaaactccttttttgctttgaatttgtttcatggagaaaatggtgaaagtaatttctgaaagttttcaaccctatttataggctaacctgtgaataggggtaatcaattcaaaattctcgaacattttgatttcccccgagaagtaaatatttgcaaattaaaagcaataaagtgcctcaagagaataaccgtcaaaggcatgcaaggggaaactgttgggttttatgccctaaataaaacccattacaatctgat

SEQ ID NO: 364831 - DNA, 549 bp, Cannabis indica
ttccaacaactggtaattgatttgcttgcaagaaatttgtacttaaaacgatttgtatgtgatatggatggtttcatgttgatctatgtgttatatgattgtgttatatgatgattgattgatgtttgtgaattttcgcgaaaaatagttgaaattctatttctataattatttttattggatagtttgggaaaaattaagcaatttacttttttagagaactcaatttcgattttatttgaattggttatgaatttttgaaaatcggaaaaatatcgggatggtgtcacccacctacgcgcacagatgatggtgcaaccctcggatgcacgcgctcagacacaagctcgactgagcttcctcggtcagatacgattttgtctaaactcgtcccttgtgcgcgcggagaggctgcatgcagcctcctgcgccgagggacctcggccaagcctcccagcatacgcgcgcggacagtatgcattgcatactgtccgtaccacttgcaaattttttcgttttctttgatttttcatgctatttcatggaatt

SEQ ID NO: 364832 - DNA, 616 bp, Cannabis indica
ttttaaaaaagaattatttaatctgaaagtattgttattgtggagtgttagtgatttttgagcttacagtaatttatcaggcttaagcacaaaaggttacaaaaattgtccgatttgttgcattcacacatgggctcgtcgcttggcaaatggagacaagatgtgttatatgggtcacagacggtacttgcctacaaatcatcctgatagacgaaagaagaaagcatttgatggtactgaagagggagatatgactcctttgccactatcaggggaacaaattctccaacaagtagaacttgtagattttaagtatgaaaagacgcgaaaaaataagaaaacaaatggttgttttcaaagaaagtcaatcttttttcatcttccatattggaaaagtttactggttcgacattatttggatgtcatgcatattgaaaaaaaatgtgtgtgagagtattatcggtaccttacttgatattctcggcaaaactaaggatgatttaaatactcgtttagatctcgttgaaatgggtatacgacaatctctggcacctgagaagaaaggtggacgattatatttgcctcctgcttatttcactttgtccaaaaaggaaaa

SEQ ID NO: 364833 - DNA, 1497 bp, Cannabis indica
atttacattagtatacctaatattattatttaatttttttatctttataattttatttaattttgaaataattttcaaatagtaatattaggtgtacccactaacactaatgtgggggctatagctcccactaacaaaaatatcaccttttaaaaaattaaatataatttttatttaattagataattatagattaaaataatagaaaaaccctatctaataattacccaattacttccaaattacacaccctaagtttttttttctcaataaataaatacataaaacaataagtttgctattctttattaaaaaatattaagttttctaatgtaccttgtattggattgatattttatttattatttatttaaattaaaaggggtcttatgtaattcctcagttgaaaatgaaagatgtaatccctcattcatttttagccatccaaataaaactaatagttatctgaccattgatcaatttagaatagatatatagggacatttactatttcaaaacaggcaaccgaaatcaccagtacatattaaatatatattttttatttctttcttactttcttcctcttctgattattcaataacaatagtatcttataaatttagaataaaataatgatcatcactttctcattttgttggttatatgttattaataacgaattaatagttaaacttaaaaccagtctcgtatattttgttaacatttttgaatttatcaaaccaaacactaggatattatattttttattttaaaaaataatgttagtaatttgttatttttaaataaattaaaaatgaataatttaaatattaaaaattaaaacaaaaaaaagaataatttagtataaatttttaattgaaaaaagtgtcatgcccgaaattcggctacacttcagaggataacacgtgtcatacagtggaatatgaaccacctgatataataaagttatatcacttaatataaagaaaaaaagaataactcgtcaaatatagaattaatagagagtatttataactcgccgattgtatagtcttaagcgagacaaggataaaaaactattattactcatattgacgagacacatacatgcctcggagtacacaagcccaagaaaatgattcatttattcaaaggagtggattcaattacccaaagcaacctcatgttacatataacgagacatccaccttgctacagaaacttgacgaggcgaatcatctgctaacacttagtattttttctacattataatagacaaggacaacaacttggaaatatgtgagatacaattgtccaaattagcattaatcatcgataagttaagcgagatgctattttccaaataagtattgaccatcgaaaggataagaataacaagcagttatgcagttatcaagtgttatccaacatgtgatcaaaatgaaatgtgggaattaaccacgtttcattaaacggttataatttgaatttaaatgt

SEQ ID NO: 364834 - DNA, 608 bp, Cannabis indica
ggttacttttgtagccatttgagttctgatttcctttgtattccctcttggggaattttcacttaacaatgaataatccttccccattggtctcatctttctcatctcccttcttctaaatttctttagaattcaatgtagccttaacctctgtcatagtcagagtaactttgccatacaagatcgtattaacaaagtgcacagacatttacgaagtgaactcaacaggattatagccttgccttcatcattaattttcaacctaagattattctgatcaagaatgattctgttataatcatctagatgctttctcaatttctttgactcatccattcaaagtgtgtacaacttcttcttgagatacaaattgtttgtaagagattttttcatgtagattgatgccaacttgttccagagacccaaggccttgtcttcatttgaaacttctctcaagacctcatcaccaagactaaggaggatggcactatgtgctttggcttcaatctcaagtttcttcttactatcttcaattaatttcatgacttcatcatcaagtgcctcatagatcccttgctgaactgaaaggctttcattttaattctcca

SEQ ID NO: 364835 - DNA, 620 bp, Cannabis indica
tatatgtgtaactaattataatgtagaagttatttttatttataactgatttaaatttagacttggttttttataataaattaagagattattgttaaatgaagtaaaatagagattctagtgtatatatatgggtaaataccattttggaccctgtgttttgcaaaagttatcaattggaccctctgttttgttaaatgacaaaatggaccctgtattttctaaaatggtacaaataggaccctgaattgattttttgtcaaaataaaatttaattataatccgatctaaaagtgttatgacaaaattatttacattttctgtatctgttcgtattaggaattgttttcaagttgattatattaaaaaaaaaagttgtcaaaaattaagctcagggtcctatttttactattttggaaaatacagggtccattttgtcatttaacaaaacacagggtccaatcggtaacttttgcaaaacacagggtaccaaaatagtatttaccatatatatatactagtaaaccatttcgcgcttcgcgacggatatataaaatattttaaattatatataaaaaaataaattaatgtattttaattaataataattacttaataaa

SEQ ID NO: 364836 - DNA, 687 bp, Cannabis indica
ttcatatttaggatgttaataatcatacttgtgagtagatctaagatcctggtaaaataatttccaacagtctttgtgtgatgttcaggactttttgggtaaaaaagtatttcagactcttataatcattgtatatctcacatttctcgccgtataagtaatgccgccaattctagccaacatctttgtctatgtgtttattgatgattgattgatgtttgcaaattttgtacgtaaaataattgattttcgttctggaaatatttttattggattgaatggaaaaaataagcaattcttttttttacagaatttaattttgattttatctgaattagttatgaatctttgaaaatcggaaaaatcttaggaggtgtgacacgtccatgcgcgcgcggatgcctggttttctcatgtgcacgcgccttcggacaagcctgatgtccgaattttctcggttaggtgggcaggatttgggggccttgcacgcgcgggaatgctgctagcagcctccgtgtgcgtgaaatctcgcccagatcccctgttgtgagcgcgtggatggtatgcaatttgcaccaaatataattttttccaattttttcaagctttttcatggaattaatttcgaattttttgtgtaattttgtatttagatttttatttctcataattcaaatctaattatca

SEQ ID NO: 364837 - DNA, 604 bp, Cannabis indica
tttgattctccaaaatcacaagttctctcttattccgatgtctcatcttcacagatgtgtttactcgtgtcttcgcaccaaaactaccattcatctcctcttaatagtgcattggtgagtcgtaacaattttgcatcaggaaacaattctactccaagtggatacaaaagaagtacttcacaagaacctgataatcgaacaccgaattccgggagcatcatgtgcaactattgtaagaaaccagatcacactaagtttgagtgtaggaaattacagttcaaaaatcaaccaaaacattctactaatattgcaagcactagtgatgcatctaacagctcggtccttatttctgctgatgaatttgccaagttctcgaggtatcaagaatcacttaagtcttcatctccttctatgatttcaataactaattcaagtaactctaatgcatgtcttcttttccacatcctcaaaatgggtcattaattctagtgccacaaatcatatagcaagtaattccagtctctttttcacttttcagtctcataatcccactactgttactttagatgatggatcaccatcttctgttcttggatctagcact

SEQ ID NO: 364838 - DNA, 2174 bp, Cannabis indica
aggttatgtagagaccctggaatccttcctgtgaatttattgaagcagtagttgaaaaccaagaggttgggaagcttaaccccaacatcgtacggtatctcgccccagagattatttgaagctacagccaaatttactaatgaagtgagattatatatcgatggagggatcataccagtgagattgttaatggtgagatcgagttccttcaagttatgaagacgacccaaactattgggtatgtctccgctaagggtattggtacctaaattcaagatagtgagggatgaaagattgccaaatgactgagggattccgccatggaaatgattctgtctaagcttcaaaacttcaagctttgtcaagagactaagctcttcagggagtcttcctgagatgtcgttataagtaaagtcaatgacttttagctctttcaagttgtttagattcgagggtaggacgccattgatgagattgaagctgacattgagaagtctcaggcgaaaaagctttgttatttcgttgggaatgggtcctgtaaacggttattttggagttgaagagaatcaaggaaagagagattgccaatatgtggggcttatgggacccaggacaaccccaaaggcccagaaagatcaaggcccgactactctctggtgcattaggtcgcaagcaacaccagtccaattgcatggagatgatgagtgaggtttgggtccaagtagagagagtgtatcattggttgcatggtcaaattttagagttgactttgaaagagatcaaagcttcttgtctgtggagatggttaaggtggctggcctaactcctagaaacatggagttaagacatatgaaaatagttaagattgaaaacttgagaatataattaagagaatggaaacccatatttttggttggaaattatgagtaggtagtagtaggatggagtttgatatttatatagttttggcagccactttgcgcgtaaggcctcacacgtgagaatcaatcatattcatagtctcactcatacatgaaaaatctctcaagaccaagtaaaatggtacgaataattacacattaaagacttcaaagttccaagttgggaaagactgatatgatgtgggagaaaacaaaaagaatattgctttgacataatgatgacaagtatttcaaaggttcacaatatgagtattggttgtaggtattagttgtgtaatgttagaacttctgctgtgaattttgcaaaaattatgaaaagtgttgtttgatattaaaaagagtctcacatgggatagaaacatttatttataagtgtttatagggtgcaattatgagatttaaattgggtaaatactaaatagtagtataattacctaaaatttcaagtttataagtgacataaattcaatatatttcaagtacccaatatttttaaaactggaatttttttctaatttcgtcagtatagactctattattatcttaaacaggacacacataataaggctaaaattttaaattattgggtctagataaaaatatgtagtatcagttacttttaaatgttcttttaataaatgactaagatgcaaaatgagtttaaatttgggaactaagttagtaaatgtctatttttttttttaaaaaaaataataaaatgaccaaatataataaattaactaataaaaaattataaaaataatatttacttcatattaattttttttaaaaaaaattatatataataattaaatcaagtcatataatttttataaattttttagtattgcataataaaatattacaacaaaaataaataaatatattaaattattaaatatatacaatattatttaatatatcgtatatatataataaattaattataggaatttacttgggtggaggttgaaaaatccgttatatatatacacgcaaaaaaataattatttaagtgtcatcttattaaatactctccattcaagttttctttatatatataagtggaccacttcttaataaatattaccggttactaaacaatttaactataaatattaattttaaaaatattaaactattagattttgatccaacaacgaataataaaaagagaaatttaaatttctatgtttaatttaactacttattaaaaaaaatatcaaaaaataa

SEQ ID NO: 364839 - DNA, 602 bp, Cannabis indica
aataattatttatgttgttatatttgaattctgaatgcatttttatgtcatatagtgaaatttcataattttgcattttttgtgcccggcaacatggaacgcggtgtatggctcagtagaatcacaacttagtatttttagtatagtgggacggtttatttagacatcgggaatgtcgagattggtcgggaatttagaatttcccaaaataccattagtatcctttaaattagttttgtgtgggcaagggcattttggtctttttgcccttttagtgttttatctttatgtggatcaattaaatgaattattattgatttggattaattagttttggctgaaataagtaaataaaattatttttatctttcatttttacaaaattagaaaaataagaaaagaaacaacatccaaatttttctctcaagccctctctctccctttcggcctctctttcagcagcaaacaagtggtcttttccttggtaattcaagctggttttagcaaagattttgatctcaagtttttggtaagactcttgtagccttttcttaagtttcttgagttttaaggaaaagatgttttgcatgctttgaggtttt

SEQ ID NO: 364840 - DNA, 356 bp, Cannabis indica
ggtaaaataatttctaacataaaagaattaattttgttgaaaaatctattcatgtttcttttgatgatactaacccgcctacaagcaatagtttagaggatgatgttgtaggtttgagagatgaggttcaaaatcttgatattggagaatcatccaatgctccatcacaaactcccaaagaagaaccagccatggaaaaggtaaatgaaagctaaggtatgaattctaaccttccacatgagtagaaatcaaaagtgctcgtcatatagactaaattttaagtgaccctgttgggaatattttaccaggatctagatttactaacaagtatgttgaattaacatcctaaatatgaa

SEQ ID NO: 364841 - DNA, 616 bp, Cannabis indica
aaattaaaattgtatgtattacaaaataaagtgattgaaaattaatcatccatatcactatcattattaactaaatgatcattcacatcatcttcacaaaagtcaactaaaatttcttcgtcagattcttcaatagcatcttcgtcgtccacgttgcagtcatcttcgttgacaggcaaacttggttcagtgccaatgtccatcggaggttgattaggtagcaaaattaactccccaagatcaaatgttaacacaaaattggatgagtttgtgtcgtgtaccaaatcaatttcgacattagcatcatcatccacgatgtcccaaatttgtcggtaatttacattctcaactattttccaatttttccctctcaacaaatcaccgagataaaacacttgctttgcttgactagcaagtatgtacgggtcatctttataccatacaccactgacattaatactagtgataaggttctcgacgattgtttttttcggtcttggatttgtattgtaccacttgcacttaaataatgtgacagagtaaacaccagtgaaggttaactttagcacttgagtgagtgttccgtaataattaaaaccttctgttcctgccacaa

SEQ ID NO: 364842 - DNA, 526 bp, Cannabis indica
aatagaaaccaaattcaaagttattcatctgttttcctttttgtatacgtaaaaatgttctatttatgttgttgtaatgttctgtagctgttgttgtttttcagtctatacttgggttattggatgtcctcttgttgtatccttttcttccacattttgtgcatttgatttgtgtctttgtctcccaactaggtcttgttcttttcttctttggtcttcccgctttcaccctttcaagtggtggcaatatttcattatccttgatttcttgtggaatgtcccaactgctttgatttcttactagatataccgctgcttcataggtttccagccagttctttgtgttgtagtaatctgaatagtaattttgtaggtcaagatacatctctttcatcactaccaaggcatgcgcacatggcatttcatctatttgaaacctattgcatgtactggtcgttctcatcccaatgtccattgctttgaactagtacaagtattgatgtcattttgtctgcaattcaacagt

SEQ ID NO: 364843 - DNA, 529 bp, Cannabis indica
cacacagatgctaagcccattagcaattgatcaccaacaatatgggctaacacagcaaagaactatccaatcaacccaagttttaataaatccaatgaaattaatgtaagcccaaataaaagtctaacagataagactattatagtcgtttttagagcttcaatatgtattaaagaaaatgtttcaaattcaaaattgaatccaagattaagatttaggaaggacagtagtgatgaccaggggcggaggtattttagggatggtgtggccatgacccccaagaatttataaaatgtgtaatatatgtagtgtagctaaattatatatacctacttgcatataaatgtgtagtataagtatttgcatataaaaaaaataaagttataagtgaaaaaaaatatttaaattttatttttgaagctatagtttataattttttaaagtttatcggcaatcttaaataattacaatggtacacaatcataaaataaaatgcactaaatctttttgttagatctcaaaacagata

SEQ ID NO: 364844 - DNA, 1049 bp, Cannabis indica
aggccaagctacttgaactcaattgagttggtctccccattcctagtttctgggttttgatcattatcacgttggcttctccttgagcgtgttgatcgtgttaaatgtgttgttcgtaatttaggttgcctcagtgagcccattcgctcttttccaggacgacgattagtctcttcagggtgagtgttgtcattttccccattatcaactatggagaagaaattccttctttggttaggagggatttttctgagcttttatcatgtaggctctcaatgaaagcaccaaactattaacacagatttttgttaacgattatgagcctatttttgtaatagatttgacacaaaaattataaaagatctaagaaaaataatagaaacaaaaataacaccaggtttttacgtggttttgcaattaacgctgcatagtccatgagtctatcttattcagatatttctggatacagaattaggatttttacaatcagtacactcatttttctctctaagattttccgtccctttttctgcataatctgtccctatttatagtaatataggcaggtagttaattacattcaaattcaaatcccataacgatattccccgaaattgtgggctttaattatgctccacgtaaataaatgtagttaatatctgaaaatcacacagctgtgatttaaaccattttaaaggaagtcaacgctaacgtggattgtgacatgctgccaaacgcatctcccttaggcgtcttgcctagtacatgaacaacttggtttattcataagccttccagcaatggcatgagcaccagtgtattgagcaaatttaagaactgctctttgaccataagtgtaacgccctaaataattaggcacgctacccaaaatacttatgaaaccctaatcccctaatcgggattactaatcaaaatagcgcagaatttaaacttttataattaaacagaatgaacataaacttgtaatatatttaaactttcaaaatagttaggatccgaaaaatatttacaaactttattacaagtct

SEQ ID NO: 364845 - DNA, 649 bp, Cannabis indica
cttgagcagggacgttacaaatggtatcagcgccgccaggttttcttctgaagatcgtcacgacatgtacaatcatcatcagcaattagctcgtttcacggttcattgagcctttattgctttagtagtttattttaatagtatgtttaagaaatcctgataggaagcatgttagtagcctgatagttgagtaggtgcatgttttaaatttccaaaataagcggtaattagtaagttactcttgatcgtgatatgacaagactagctcttggttacacaggctgttccaatagaatggaagctaggcaaaacatcaagagtcagggtaattcggttgggtctagtggcggttagggagttcagattccctcaaatgttcgtggccaaggcagaggccctagaggcagggtacacggtcggggtgatgttaaccttttgtaggctacccaggaatgggaaaataggtttgcagcaatgcaagccagaatcaatgagcaagaagaagagatcagacacctaaggcagtagggagctcctgcaatacctgctccataaatgcaggtaggtccttccccgacctgtgtaggcaggaccaattgctgcagtgaaccgaatggaaacaactatatgaaaggttccgcaagcaggc

SEQ ID NO: 364846 - DNA, 526 bp, Cannabis indica
attcgatcgtttggccgaactcgccgtgggtattgtgccaacaaatttcagtacgaaagaaaagtacctagccaatttgaatgtgaagattaaacatgatctagtgatcactgccaacgaagcagcatcatatgcagaaatggttgagaaagccctgcgagccgagggtgcagtaaaattccttgaggagccccaagtgactccgagtgttggtggaatccccacccttcctactcctgtttatggtaaggatggtggtgattccaccattgatcagaagaggaaagttgcccctacatctggtggctcggggcagagcaagcggttccgtgggaaccaaggcagaggtggacgccagggttattcttaccctaagtgcccacattgtaagaaacatcatccgggagagtgcaaccggaagacatgctttcagtgcggcctggtggggcatttcaagaaagattgccctcaggcaaagaaagaagagccaaaatcagaggcaaaacctatacctgctcgggtgttt

SEQ ID NO: 364847 - DNA, 555 bp, Cannabis indica
gatgaattctgagagttataagttaattttcctttttgtcttaattgaactacatagcaagtttatatttgcaatgtaattaatatttttgagaatggtgcatagcaatttttgtggttagggcagtagttgactgtatggtgcatatcagggtttttgtgttaaagagttttcaattatggtcttttacttgtttagtatagtgacacatgttgtacatatgattaatgatgaaatttgattttgtgtttcaagaaataagaaagatacggtgctctaataatgatgaattttgagatagagagttttgtcctttgtaattgagattggataaaagaacgatcagatatcaagttgtgccaagatatagatacacatatcaattgaaataatgtctttgtaggtaatagggataacacttcgaagaaaacatcattatttaaacaccttatctttctcattttcggaaacataaaatctgtatttcatcattcattatatgtataacatgtgtgactatactaaacaagtaaaagaccataattgaaactcttt

SEQ ID NO: 364848 - DNA, 865 bp, Cannabis indica
atctaacatcctaaatataaatttcataaaaacaaagaattaaacacataaatgtataaaaattcttacattgatggtagcggtataactcattccgttcagatttctaactcttgatcctttctgttgtagagtatgatcaagatttgaacttggatttttcttcaggtaacaaaacgactgcacaatcttccacactattttgactcttgagtattgccttgaaatatgtggacaattactcaatcactcaaggtttaaaaatttaagaagaagaagaagagaattcaaaaattatgaaaactttctttgattttctatttgtctaacaaagtgaattaatagtgttatgaaaaataagagctatcatattctatttatattgtaactttagggctaaatttaaaatttaatatagaatataaaaaagataaaaatggctttatttaaacccttgtgggcgaaaatacataggtgggcccatgggttttaatttttccattttattgaaacttatatttcttttcaaaaatactctttttcattctaactatataaatgctaattttatgtatttaataattataatcaattatcaaattaaattttcatttaccttatttattaattagaccttttatagtctcttcattaataaataaactctaaacctctttttcttctcaaaattgcccttgtttagtgaaactcataaataagacatagtcttattcagaattttaatcgattaataaaattaattaattgagtctacaagacaatattatctcaagtagtgtggggaccatgagcctatttaatcaagcttccaacaagtagttctagaatttaccgagtaattttt

SEQ ID NO: 364849 - DNA, 820 bp, Cannabis indica
tccactcccctcctcctatttagatcattgctgagatcatgagtcgtccctaatctattaaatacagaaatgcctggctgccttagcgactgattggtttggccaatttgctgaccggcaccattaagtttgttggaattattgggtatgacttctcctgatgaattactagataaagtctgcccgcctacaacttggcccacaggtggaacctgtgaccggggattttggcggctgaccatttatagtctgagaggtattcatcgttggatcttcgtctgtttcctccatggggatgacgattacaggctgttgtctggtagtctgataggcttttcgtatcaacacagtggcctaccgactacggtcgtcaatgactgcttgctgagcccttaatgtttctatctccttatctctccattcagcgaacatgcgcctctactcttcaaacacaagattcaccgcagcacggagttcctcctgatcatgatgcagggtgttggtatgaccctgcatgactccaagagcagcacggaggttctggatttcagtgtcatctccaatagttgtttgaacattggtagcgggcggaatggctgtattatgaaggccctagttggctgctgaactggtatttccagtctcttgcacgccaggcgtgatttcactcacaggagtcgtcatactgtgacccgcagttaatggctgtctgagatttatggttggcgaaacccttgtgttccgtaggttctacagtgcatgatccaccgcctgtggattcaccggatcaagaacgtccctatgagtttgtaccaccatc

SEQ ID NO: 364850 - DNA, 490 bp, Cannabis indica
gggagtcgcaactacagcggcgagattgctgggacatcgatcccagtggtcgcgatcggcgcggtaggcggattattataagtgttgacaccctgatcgtccgcatggggatcacggagtgtctcagtattacgcggggcgcgagagcgtgccctaaaaattgcattaaggtgatcacgcagatcaccccgatgtacctggtaatgtcctccctgttgtgactgtacagagccggacctcgtgtatctacttggagtacgaccatgcgatgacgaagaggctgattctgcgtcattttctcttgaggtcgactgcgaggattacgccattcagggtcttcatcaacttgtgtgcttttggtttgggtaccttgcggattgattcctcaacgttggatggttcaggtccaaaccttcagggttggttctccgttccctgcgtacacggttagtatgacatctagaagtcgttacctgagggttatcggtgc

SEQ ID NO: 364851 - DNA, 466 bp, Cannabis indica
cgcctatggtagttagggtgttacatctccactttacatctgtattttctctatttttctctctgaaattgcttgatgaaatcagctctcctctgctctttatataggcatccaagtcctaaaaagatggaaaactgcacatgtttaaattccattcggatttgaatttttgggaaacctcacgccagaaattttttctcttttgataaagaggcgggccgcggcatgctaaacccatgccgcggcccgtgtggccaagtgaggggctccttcgactttttccatgtaggcgggtcgtggcatgctaataccatgccgcggcccgtgtggttctctgcacccaacttccacatgcttttatctttttttcgaatctgaatttgatcttttgccccgggatatttttatgcaatgttttatcatttttctactgatattttccaattcttcatctattttaaatctg

SEQ ID NO: 364852 - DNA, 583 bp, Cannabis indica
tcactgttctaacatccatattcttgcgtgatttttttcgtaaatttttagtttattggtattaagttttgtatacagtaaaaatttgctcatagtatacaatctggaaaagcaaaataataaacatgtgatatgaataggtgtagtatgaataaactaaaatttaccatatactacaaggttggtatttagttgtacaaatgagctgcatacatttgaactatataatgagcgattacaattataaagtgttgacagaggttttcggcaaccaataaaataataaaagattaaagagctgtaagaaatgacgagaaggatttttacgtggttggggcgttaatgagccttagtccacgagtctgtatatttatgagtgtatttaatacagagaatgttcttggtgagtatttactcttcttgcacttatgcaacccaaaattctcgaccccattaatgagctttgagggggtatttatagtgtttttggtggggtgattcccagaattatagtacatgtatttctgtaactatcaataaagttgggtgttcccaatgaatataccatgggtaatgcatggtc

SEQ ID NO: 364853 - DNA, 744 bp, Cannabis indica
ggggtgagtttggacaataaggagagtactggtggctccaatcctgaaatgatggatccaatgtcagtcgtaattaaaatctgtcatatcattcaacagtgttatcacatcatgacttctccttaacaaaggccctccagttacctctgctccataatctacccaactttttgtttcatcatcaagtccgttatattaaaaaaaaaaaagtaaaatacccacttgagaaattgggataacatctctctccgagctccttaaatctccctaagcagaatataatggctcattgttacataaaattcacaaggtatagcatttggatttaccttgcatgtcaaacacattcagtaaaatattagtaaaatttaataaaaataaactaaattagaatcaaagttaactatattgatattaactaaaatagtctgggacaattgcgcaaaaacttgttatggattttccaacacgcaagtatacgtatcatttttacaagtaatacacatgtaagtgagatcgttctcacgagaactgtaggtaagtactaaacaattaaattcttgtatttatttgacaatctaatgaaaggaactttttttaaaaccaaataatctaagcaaaaattaattactctaaactctattcattgttaattttaccataattaattaatttatttatttgttttgttatttaatgaacaatttattagtcacaacataaattttttgtgactaaatgaga

SEQ ID NO: 364854 - DNA, 755 bp, Cannabis indica
ctaacaagtatgttgaattaacatcctaaatatgaatatctctaacacaatgaaattaaacacacaaggatctagaaaaccttacatttatagtggaataatatgactcattccgttcagatctctaacccgtgttcctttctatcgtaaagtattatcatgatgtaagtctggatctctttctctccttcgagtttggttaccactgtcttccgcactatgatttagtacttgacttgctatgtgtgggcatgacactctatcaataagggcaaattcatgaagaacaatgaaggagggtttgaaaactgtatagaaggtgactctcatctactagctgtctgacagagttagaaactagatttggcaggttaaaaagtgtttagttcagttggatgagatgagagcaacaagttccttatatagtgtttcaactagggcttaaatttaaataatatggattaaaaaagaataaaataatgggcaaaaatcacacatagtggctggccactaaagggccttttattagttacaattttggcactttatttcaaccatgtatacttctttcaataataccatattttccaatttcaatcctataaatgccaaacctatttatttaataataaaattgccatttatattatttattaattaaaccatgcaaagtctcttaattaataaattaaccccaaaacctcttttcttcacaattaagctcttgcttagtgaaaattcataaataagacata

SEQ ID NO: 364855 - DNA, 905 bp, Cannabis indica
tggatcttcgggagaagactttttttaagctcatttcgggaggaagtaagcatatatcttcgggagaagatttgtttaagccttacttcgggaggaagtcaatagctaaagggagttcactacttggtgtgtttcagagaccagattagcaagatggattacaaaaagttgtagtaaatcactaaagggagtctaaatttatttaagtcaattgcttttgtaatctttgatactttactaattgattttattctgtggacgtggcccagtcaactagtagtgtttgaaaaaatactaataccacgtataattttcttgtgtcaagtttttaaattatgcactatttatttctagttctgttctaattctgcaaatttgtgttttgtagtgataggattatattttattgttgcagactgttacaattgtgtttatttactgaaatttattataattattggcatttgtaaaaatacagttttttcaattggtatcaaagcgggacactaaactcttaatgtggtcctttaatatttttttattttttttgtgtttttaaaatatgttttcctttgcagaaggaagttctattgtttgtcgaccactcctcaataattctaactatccttatttgaatgttagaatgagagcatttatcaagtctcaagatgagaaagcatggataataattctttcaggatggtctcatcctgttgtggtagattccaaaggtaattctaagttaaaacctgaacttgaatgttctaatgaagatgataaattgtttgtttacaataataaggtcgtgcatgctatatttaatggagtaggagagtgttttattaaacttatatattcacgtgtttctgctaaatatgcttggcaaatccttcaaactcaatttg

SEQ ID NO: 364856 - DNA, 587 bp, Cannabis indica
atttgtggctcacccccacatttttttgcataaagtgtatataaaatatcacttttgtgtattttctcttgaaatgactctttaaggttactttgaaaaataccattgatatttttagttttctcaacaaaactaaaatatcaaactcatatcaccacttacaaaataatgtgattatttttacccattattttgaagttttcttctcaatgagattaacccaaatattacaccaaaattaacaaaattctcatcaattttcttcaccactttgattatttaagattcaaaattacttctccaattttattatctttccacaattttttttttgaatccacattgatttactttatttgagtctaaaattgctcttccaatttatgacccatttcacaagtttggatcaacttttgatctatttattcttgctgtaacaagacaattctcataagtgtaactctcatatagtttacttttcttatctcataaaatgagataattattacttttaattctcacaaaatgtaacttctcacaagtcacaattttttttctcaaaatcaatattggaaaaggaattccaa

SEQ ID NO: 364857 - DNA, 505 bp, Cannabis indica
gtctatctaaggaacaatgtcccactcatcccaagagatagaagacatgagaaaggttccttatcgacagatgaaagtctaatgtatgttatcttatgcactagacaagacatttgctatgtagtaggaattgtgagcaggtatcacacaaacccaggggaggaacattacactgcagttaagcatattcttaaatatttgaaatatacaaggcattatgtgttagtctacaaggctggtgctttaaatctagtaggctatatcgatttagatttctatgcttgtcttaatgaaaggaagtctacattctggatggtatttacactagtgggtggagcacttatttggagaagtgtcaagcaatctacaatatcagactctaccatggaggccgaatacgtagctttcactaaggctactaaggaactagtctagctaagaatgttctacacagaacttggtgttgttcctgcaatggaaaaccactggttttactttgtgacaa

SEQ ID NO: 364858 - DNA, 557 bp, Cannabis indica
aagttgcaagtgagtttccggcgacagtttgtggctgttaggctatttttagcctatattttggatctttttatgtgcgttttccactgtgttgggacagaattacgcttgttttctatattttcaggttctttggaataatagaggtctcgggatgaaaaagtccaacaaaagacgagctgagccaagaaaaaaatactttttgagaaaagatgcatatctggtcgcggctagatcacgaagcagggagtaaggtttttgaggctacagtcgccgcggcgagatacaccctcgtcgcggccatagtgaagttacagaaaggcatttttaggcacctatatggccgcggcgagaggaaacttggccgcggcgagatccggtacggcccaggggtatttttgtccatcgaaccctaaaaattagttataaatggaaaactgcgattggaagtcaggggaggcgatttggaaacctaaaacacagcagagagaggcatgaagagcaaagtgattcaaagtgaagatccagaattcatccaccaacagtttctttcttta

SEQ ID NO: 364859 - DNA, 655 bp, Cannabis indica
ttaaattcctctcctttgggcttatgagagagttagggggccattagtagtgggtacgacatactgaacccagccctccctcacatgaacaatcccaattgtgaaggcccatttgtcttatttaaataattgtattaggctaattatactagtttaacctaattaaaattgaattagcaacataattaagtttgaaataaatagaattaattttttattggattatttcaaagttattttagaaaaacaaacttagtttaatgaaatattctagatagtaatttctagtactaatttatattttttaaaatttaattaaatagacaaatatatttaagttgaaaattaatttattaattttagaccaccttaattatgatatttttcttaaaacttaaaattagaattaataattaagttgattttaatcaagatacttaattctttatttctatttcatgaaatttaattaaataagcaaaatttatttaagttgaaaattaatttgtcaattaattttggaccaacttaaattagaatatttttttagatattaaattagatttactaattaagttgattttattctagttacttaattatttttatttgaatgaattcaattaaataaaaaaattatatttaagttggaaat

SEQ ID NO: 364860 - DNA, 1092 bp, Cannabis indica
tgtttctttatgcttcaatcgctgtggacatgatttggaaaacccgcaatgacaaggtacataactcgactcagggtaattttgtgaatgtaattaactctatctcccattgttatacaaattatgtctcatacctgttccccctgattcttcctgtggtcacgccttcttggacgcctccgccggaggactggatcaaaattaactgtgatgttaaagttggtggagactccatgtgcattgcggccctggccagagatcactcaggagcggttgtgtgggttgctacgtcctgtcttaacttcagggaccctctgattggtgaggcggcggcgtgtcagcttgcgttggacacggcgaggctcaggaagcatgactacgtcttagtggagagtgattcagaagtggttatcaaagcactgaaaggaatgcactatatttggaatattgataattatgtatctttgtgtagtcaactctcttattattttctttcttgtaattttgcttttatatcacgtgtttgtaattttgctgcccataatgtggctagataggctttcgcccagaactttacaggagttccatacctgtttctatcctttgtaatgacggcgaggcctaattttctttatctatgcaacatcttattttcaaaaaaaaaaaattaattttttcaggccgttaaaagttctcctcaaactattaagattgtttgatttaagaacttttgttcgatttcactaaagaaaatttgatatgtataaaaatttaagggacacaatttggtacacgttaaaattccaagatatgatttggtagacatttaagttagggacacaatttagtatatggacaatagtcacattagcaaaattgaatgaaactagacaaaaattcttaaatccaaaaaccataatagttcaagaagaattttaaacgatttgaaaattcaagggcataaaaaaatcctaattagtcttattaatatagtaaagaatatttgagggcattaggtaatatttttgttcattaattttctaatcacaaaataaaaataaaatttatgtttttaagattttatttttaaaa

SEQ ID NO: 364861 - DNA, 673 bp, Cannabis indica
tatgtaaactatagtatttttctcatatttatgtaaatagccctaaaaaaaatagtaataggagtcagaagtttcaaataagtaatttaaagaaagaggtatgtagaatttattttcaatgtaaggttgtaacacccgacaaaaaaaaacaaataatattatatcacaaaatgtaataacatgtttaaatatatattgtattcaaaatttattatattattattggtgtgaaaataattattttgttaatattatttaattaattctggtatatttatttttcttaaagctagggcttggcccattttatcaaaaactaatacggattggttcataactagattgatatataaagcttattaagataggtatatattgagaaatttacatatatactattttttgaccaaaactttacaaatatactgaaacatggcaaatacaacttttttactgtccaagcccgttttctttttttttttttatactgcccaagcccaataacttaacttttatactgtgaacagtaaaaaaacacaaaaaacgggactgcttcgtgtttggggacgggccggagtcggagataaccaagaaaaaaccattaaatccggcgaagagtttttgctaaatggagggataatcgaagaacaagatttacagaagattgtccccc

SEQ ID NO: 364862 - DNA, 893 bp, Cannabis indica
aaaagggctaccattgaggtagtgtgacaacgtctcctatggttacaatctatcagacaaagtgttttcgacaaattgggtaatccttgcttacactttcacacacttatgcttgacataatttgtggtaaaaattttcatatccttgaacatggtgttataaaactattacatactgttttacttgcctttaatattcttggtgactaagtcaactttttttcgtgcataacctgtatgacctcattccactagttcattagcttgataaaataatttctatctattcttgtgagtttgattttttcatcagggacaaaaacaagcagagattatgtactttttgttggcaaaactatcaaggttattttttttgttgtttaaaaaataaaaaatataaaaatatgtgtgaccgattttgtcaattaagctttcttaaaaattcttgttatttttcctgttatgtttcattattttcttaggcactatttttgctcttaagtgttgattggtgctttatgtgtcattatgtgttgtcttgttcgttctttgcaaattaatatgaggggcatatttttaaaaaattaaagagaaaggggggcataattttcgatgttttggctattttttctttttttctctcttttatggaaacatatttttattgcattttttctactgtgtttcctttatttttgttgagaatttggtcttacttttttgtggtgttttaggaaacttgtttttatttaattaattatttgtggtttccttttttggtggctttttcggttttgtttttgggtttttgaattcttagattttgtggggatatttttttcgttttttccatttatggtaacctttgttcaatttttgaaatatctttttgg

SEQ ID NO: 364863 - DNA, 1368 bp, Cannabis indica
agagagagagatgagagcaggtaatgacctattctcttttaagtttattgataccaagggataacactacttagatcactatatatgggatctaaagtagctctccaaaggttacaatgtataggaatcagagttggcaaatctcaagtatgagaatagcaatagtgggcgtgagtgagacacggatgagagattagacttagaacttagggttttagtgtttgattaaggctctttattatataggagagtttaaacccttcagataggtaagataagctgatatttacatattaatttagtaaaatataaatgactaaaataccctttaaaaataaatattttttctctatttttcgtgagctgttaaggcccaattcgtagtctggcttgttatccacgagtgaagctgtgcattaaagtcctgtcaggccaatgtctggccaaccatgcacctgcaggatgcatgctggctggccttatgatgtccaaaacctgaccgacctatgctggccaacctccttgaggtggctagttcgtcattcgtcatcccgtttgagtgcttggactccctattggttgaagtgctaagcagatgacttggctttctttttggcaagttgtactgccatgtggcactaatattggccacgtagacatgccatgtcatgtgggtaagaatcaggataacaattaatttattaaaaatataaatatttatttaaatttgaatttaaaaagtagttacatatatttatagtggttgagatattccctcaaagtagttgagagattttttttaggtggttgagagattccttcaatcgattatgaaaaatatataactataacagatccagttataaatatttattaaaataattaaatataattatttttattattttgaattcaaataaaagatttattggtttttattttatatactgtataaacctaaaaactatatacgtataagttttagaaaacctaaaagggttaattagattaaaccttggatcaaaatgtaaaatgaccctaaatctaacaattaagttaataaatgtcatttttataaaaaattaacaaaatgtccattctgttaaaagtttgatgatgaaattacaattataaccttgaataattaagtgtttggtatagttattttgcacaatagtatatcgtttttatgtgcaatagtatattaaaaaaaaactgaaaggtagtatattagtttaagattgtggtatattattttaatgtgctatggtatataatgaacgaaagatggaaattaaaaaatgtggaatattagtttaagtttgaggtatagttatatttcactaggaaatattgtctttatgttca

SEQ ID NO: 364864 - DNA, 637 bp, Cannabis indica
atctctttctctccttcgagtttagttactgctgtcttactcactatgattgagtacttgacttgctatgtgtgggcatgtcactctttcactcaaggttcgaatttaatgaagaataatgaaggaggctgaaatcactatggaaggaactctctcatctaggttggttgaatagtcaagttgacaagaggatgagatgagagcatcatgttccttttatagtgtttcaactagggctaagagctggattagatgaattaaaaaaaaaatattaggcaaaaatacacattagggccgaccactaaaggaccaatctctagttaattttttgccacttttcaaccacttattcttctttcaataatatcatattttccaattcaatcctataaatgccaaaactatttatgtaataatgattaattactaaataaaatttccatttgcgttatttattaattagaccatacaaagtctctttattaacaaattgaccccaaaaactcttttcttcataattaagcccttacttagtgaaaatttataaataagacatcgtctaattttagaattataattgattaaataaaatcaattaacttagtctgcaagaagtattatctcaactagtgagggg

SEQ ID NO: 364865 - DNA, 771 bp, Cannabis indica
tgaatgttctattttctccattgctctaatttttctgagatggttcctattggtttgttggtggtcatattttcttgtattaatattgtgttgtatacttgtatataacatatgtgacggaattaacgaagtcgcttgtttctaacgtggtatataggttatattgtattgtattatattaaattagattatatatcatattttatataatactatgttaaactttaattaatttatactaaattaaatatcatatatttagtttagttgtctataaaatttaataccaaatataattttacataaaagtattatataaaatacaattcgatataatacaatacaatagacctagtaagacgttccaaacgagccactaatatttatatttatacaggaagtaggtaaagtgatattattgatgtttatatttagagtaatttataataaaaatactaagtctaatttatattcgcagataaatacttacgattgttttttagttattctagaattgtttttaatattgttctattttgttgttttatggttgttttataaaaagatagtatttttttaaaaaaattcgcatggcagtaaaattgtaaattttgatccaaaattcaatatttttataaaaatccaaaaaaaaaatatgcttcttatatgttaaaacgatttctttaaaaaatagataatgatggtataatttttgaactcaaataattactattaaaaaaatattttaaactttttttagtaagaaaaaaa

SEQ ID NO: 364866 - DNA, 582 bp, Cannabis indica
attgaaaaagcactgtagcgtgccttagcattaggtcgttacagattacatgtagtttcatgtttatggtttaatatacaatttctgttaaatccagaacatagagttattcacaattgtagtgatgtcaacacagtggaagataatcctacatatattaaaagagccaataagtactactattcatgaaaaggtcaaccaaaacgattcgtttaatgggatcgcaccttttattccttccacctatatatatatatatcaataaaatattaataaaattattcaacaataaaaaatttactacactttccataattatatacccctatctcatctattctacattttatcactattttcttccccttttttttttctaacttatttatgaatctacattgttgaagaaatcattatattagttttttttaaaaatgtattttgcaatttataataagaaaccacaatacatttctttaaataaaaataattttattctaaagaggaaagtaaatttaaaaataattacaaaaaaaaaaaaactaataatgtttatatgactacaaaaaatactatttttag

SEQ ID NO: 364867 - DNA, 810 bp, Cannabis indica
tggtatttacctataaatttgttttttggaaaggaaaaacaaagaaaattacaatttttttctctcttctctctcctctgattgagaactgtgccatgcacacgagggggttccatggtccttctggccatggaaagcaccaaaaccccactggttttgggaagaaaaaaggtcactaccccactggttttgactggaaaaatggtactgcttcgaactataatccgaaaatccaaaaatattggagtttccacactaagcacaaggtgttcatgatcactttgacttgtgatggtggctcggtccgcatttgtgaaagaactagacactttgggtatgagattgctgtaacgattgatgctgtggattggatcatcgagacagtgaaggaagtccagcagaaaaaggaaaggcgaagggtcagtttcaaacgatcgtttcgaaacagttctagctgttatctcgtggagtacttcttgaacacaaaaggaagctttttgaagatttcagtgcttaagaacaatatgatgaaaacagtcataatacctgaagaagagaaggcaaatggttggtcggaatttttaaggtgcctcaacagcactatgaagagagagcaggcatttgataaccagattagagctccacagaaagcatacacaagtaatggaagagtgtcgaaaccagagagtcgtgggcaaaagtgtagtgaaggaagccagggagaccaatgaccaatcagaaacctcaaggtagagaatgggtactgccaaaaaagctgttaactgctaataaggacccctgtcggaattt

SEQ ID NO: 364868 - DNA, 315 bp, Cannabis indica
ataatcgatccaatctacacttttgcgaattggattggatttgagctattgtgcggattggattgtacctaaaaaataaaatccgcacttagtgcagatcggatgcactatgagcaaaatagtgcagattggattggatgaacactcctacataaaattgaaacagataaaattgaaacagaaaaagaaaaaattgtaacaacataagaaaaatagagaagagggggtagcataaaaaaataattaagattaggatatatttatttatatatatatatatatggtaatgagtgaaatttaaaaagaaaaaaaaaa

SEQ ID NO: 364869 - DNA, 748 bp, Cannabis indica
gggccgcttcctatgaaattttgggcaaaatttctagagcgttcactatactgggatagacgtgcatggccaatgacgcacgggcttttgattacacccttgaaaaggttgttgcgtggtacaatgttagagatagagttcaagactacaggtcactctagtaaaatctaaatcgtattcactacgcagaggttcaaatcgaaagatacatttgtttatgctcaatcttattgcttagaatactgctcgagaaaaatattttttaaaatttcaagtggaggattgttggaactttgtgaaatattacaaaaataaagtttgtgagtaagagtcccacatgggataaaaacacttcatttgaagtgtataactagttcaagtttgagatatggatttgggccccaaggggtacccagttttgtgcgcatgggtgaggactcacacaccggacccccacacacgcgtgtcgccgccgtccgtccgaccgtgccaagccgagcgggtgtggtgtcaccttattttttgggaaaattttatttattaaattattatttatttaattaattaaaacagtttttttaaacgtgttggatgaatcagtaaacaaaggtttcctgattttgtgcatcgttcccacgatctattccaacgttcccttccagtaacgtatttcttcacgttactatcagtgcattgcctatataatacgactgaacaatggaagaaaaatatattttttcactctgat

SEQ ID NO: 364870 - DNA, 396 bp, Cannabis indica
gttataataatcaatggtctccgtactagttgagataaactgcttgtaagactaagttaatcgatttagttaatcaattataattctaaaaattagactatgtctagtttgtgaattttcactaagatatggcttgattgtgaacaaatatgattttagggtttatttattaattaaaagactttatggagtctaattaataaataatataaatgaaaattttatttgataattattttaattattaaataaatagttttggcatttatatggttgaaagtgcaaaaggtggtatttgtgaaaaatagataaaatagttgagaaaaatggcaaaaatctaactagtgtagggctcactaaatggccggccactaggtgctatttttgctctatttt

SEQ ID NO: 364871 - DNA, 583 bp, Cannabis indica
tttttaaaaaaaaaatatatattctagattcactttatatataaaagtgatcaatggtaaactttatttgatttgtttttatgtatagtagtacaaaatactattagaaaatacagtaattaatgacaacgactttgaatatagtgatgactacaaataagatgatgtgatgacaacagttttgaaatcatatgataaatttttatagagtcgtcaataattataatttttttgtatttcaatttaattaatttaaaggaaatacatatattattaaaaaaataactgtataataatatctatctataattaattaaaataaataaaaaaaatttaagatctaccatattaattaggaaaatcaccccatatactaattttttttaattttttacggttttgggtttgctctggtaattactatgtgggttgctatgtggatttgactttgagttgcaatttaggttgtttctattggctgctaggtgggttggctatgtggatttctataaaaatacaaaaaaaaaaaagaactggtttgtattgtcaaaataaaaaatctctattaattattaagagtaaa

SEQ ID NO: 364872 - DNA, 1068 bp, Cannabis indica
cttttcacttctgtaaggtgagaattaagagagagtttagaggtgcttagttttctaagctgtgaaaccatgttcttgaagaggttaagaacaaagggtgtactcaggtaggagtttagaaactgagactgtttctctggtgtgtttctcgagtgttgcagagctgtgttgctcttaaattggtgcttgtatttctactctcttgctctccatgttaatgaaagaattggtgatgttttctcagctggaatatggcgagggatcgaattaatctctaggacaggaaccaagataaatcttattgtctccttctagttccattcagttttgttactttgtgttgttaactggtttatttgtgtcttattgctgttcaagttgttgatttaatgcaagttttagattaaattcttggtgttattgttgctaaatttcaacaaaatcagagcttcgggttcaagatccaataaagggaagaaaagaatcaagattcaatcaagactcatccacaaccaatcatgataggagcagcaagattcgaacttgagaagttcaatgagacaggggattttggcctgtggagataaagcttaaaaggaatacttgttcatcaaaaagttgccaaagctttgaaatccaaagaagaactgactgacaagttgaagaaggaagagcttgaagacatggaagaattgacatactacactatcataatgtacttgtcaaacactgtaagaaggaaggttcagaacatgaagacaattcgagaattgtggagtaaacttgaagagatctacatgaaaccttctctaactagtaagatcaatctgttagaatctttatatggttttaaaatgtcttctcatttgactctagatgataatcttgatgcttttaatcaaactattataggattttctaacttgaagtacaatgttgatgaagaaagccaagctgtcattcttctcagatcagccaagctgtcattcttctcagatcattgccagctgcatactaggaattgaaggttgtgatcaaatatggaagagatactctcacccttgatga

SEQ ID NO: 364873 - DNA, 855 bp, Cannabis indica
caaaatccatatttttttcctggtcagtttcaacaacaacccccgaacttctcgccacaacagtctccaaatgtttcccaacaacaacaatcttcgaatttaccacaacaacgacagacacgacaattcgtggagattttatctgctcagcaaccatattaaccatcaccaccagtatcgcaagctcaggacaatgcaccaaatcctgatattaacttaaacgctactggctcaaattttgaagatgatttgtttgatcaagacaatattaattaatttatcttaattttaatattgtgtggatttatttaagtttttaattatgtttgaatttatgttttaaattatgtatggatgacaattatttaatttttaagttttaaataatgtatggatgataattatgtgtggatttgttaattttaattttaatatttattaataatataaatttgaaaaaaaataattaaataaatataaaaaaaatatttattattattgttaatatttattttttttaaaaaaaaaacattattaccggcagacacccgtcggtaataatgtgtcagtggagttaattcgaggcgttattaccagcgggccccgctgctaatggtttgccggtattaatgattaatagcgacgggttattaccggcgggcaaataccggcggacctctgccgctaaagccatataccggcggattgagggattattaccagcggactcctccgccttcaataacgttaattgttgtagtgttgagatgaccctatctatataatactatatattcaagatataaatatatatatatatatatatatgatagtatatttttatatatatatata

SEQ ID NO: 364874 - DNA, 1036 bp, Cannabis indica
tctgacactgagaaatccctggcttgaccagccaaaacctcatctctgattttcactaactctggatcagtcatctgagcggctttaattctttccaacagatcagattgcagcgttaagttgtgaagctgacctaccacaaacagctgtaattaataattaaataaaaaataatataaggtaagttcctattaattaagaattgtatgaagcttttcaaaaaaaaaaaattaattgtgtacctgcctttacaaaaaaaaggtacctgccttttacgatttaaaaaatataaataataatataaaagaaatatacttattagggttacatgttagaaaccctattttatcacttagtaaaatgatcaaacacaatagccgttcctctctcttcatctccctctatcatgcaagcttctccttctccctctatggcttcttagattccgaggcataacgtcgacctcccaaggccaagcctgagccacgacgatggcctcccaagcccacaaccaccgctcagttgttcgccgcccaatagcccacaaccaccactcggttgttcgtcgccaaatagcccataaatccttttctctctcttgttcatctatagcaacccggccacccaaatcgacccaacccgatagctccggccaaccctagttccaaataaatcacaccccttcgcactctctgtctctctcacttctttttacatgaaatcaaatggagaccagcggagaacgcctcttgctttgcccagcgaggctagacttccatgcgatttcctggtttaattttttcttttcgaaatgtgttcttgcccttttttggttttgtacagttaattattatttttttggggttgtatatctgttgaaaaaaataagatatttgtgttaataaaaaaaatactaatgtatttgttaacactattagtttattgtatcttcttgtatgcaattttttttttttttttttgaaatgccttcttgtatggagttaatttttctcttttgttaaaatgaaatattaac

SEQ ID NO: 364875 - DNA, 632 bp, Cannabis indica
aaggtcaccgtttaggaatgccgtttttacatccatttggtgaacatacaagttgtgtaatgaagccaatgcaaacaacacccttatggtagttgttctagcaacaggagcataagtatcaaaataatcaataccctccttttgcctaaaacctttagctactaacctagctttaaaggtttgtatagagccatcagtgtgatatttctttctaaatatccacttacacccaattgctttgcatccttgcggaagatccacaacatcataggtgtcattggagagaattgagtccatctcatcatcaactgcttctctccaaaatgcactatctctagattgcatggcttctagaaaagtcttaggatcatcctcaataagaagtattaaaggaattttccttattacttcttctctagtcccttctaacacgtagaaagaaattagttgagaatctatttcatccttatttagacttttctcttttctcaccctttgacctctcctaggttcaatgggttgttctacaactttagtagtgttctcctcttgagatcctcttttagaagtagaagcttgagaattattttcatataaaatattctcacctagaggtgtggaactttgagagt

SEQ ID NO: 364876 - DNA, 633 bp, Cannabis indica
acaaattaatgataaaagtatatggaatgtctaatatagaaatggcatgggaagttgtaagttcatatgatagttatgaattaaggtatcctttactattttgatataaatcatccatgattgcttccattttttaagctttgcatatttattattatagtgaaattggcatttaatcatccatagattttacatatcctatttcttcgtactcctgaactgaggttgtgacaaaataacaattttactttttcactcattctgttaaagctatatcgtgacatcaacaactaagggaataacttcaaagcagcttcttattggtactattgtagatcaggttagctgttgttccctttaacagattctttgcctatcattccccaggtacatattgtcttttttccattatactctatttttagtgtgatttttcttcaagcttggtgcattaatatatctgcctaggatatatgcttaaacacacacacgtagtacacatacaacacacacaaaatccactatcattttattggaaaaatatgtccactactattgttttttgttttattattcttctttttagcatgaaatttcttcaaaagtattcataagattgctctgatttaaata

SEQ ID NO: 364877 - DNA, 515 bp, Cannabis indica
tatgtgctaaaatataattttttctttttaattgagtgtttttataggaaaatcgaaaaacattgaaaagctaaattaaaatgtaaaattagtaatgtcgaaaatttcaaaagtcaaattatttattatttttaaaataattattaggtgagggccctatcagttgtgaaatatcctaccgtttcgtaaaataaatgcatattccactcctgtccctattcgtttacaattacatgtacaatatgaaaaacgttgaccaaacattatcttaaatggtaattctagaagagaagaagagaagaagaagaggaaaatcgtagatgtaccacagcaaaaagtcaatcgtatttttttggatttaatgagatttattttattatatataaataaaaaatgacccatgaatttctcataaatcattttatttttaattataaataaaaagtgacccatgaatttctcataaatcattttatttttaattataaataaaaaatcacccatgaatttctcat

SEQ ID NO: 364878 - DNA, 525 bp, Cannabis indica
ttacttctgtttattgatatttgtagtgccaaaatgtacaacccacatcccaacacccatctagactatgcctttaggaatgaacttgaaggtatgaataagactcctggtcagagtaatacttcacacttgctcatgatgaacatgaaattccagaaagcagctaagctaggaattgttcaatctgaagagcaaagagttcatagctccgacaaacctactacttcaagattagtcaagaagaacagagaaagtgattacacttcctcggattatccttcacaacagattgaaccagcaataagaacaattcaaaaacgattaagcagtgatgctttagtttttgaatcatgtgttttagagaatgataaatccatctggattcttgattctggatctacaaaccatgtcagttgttcattgcaattgcttgaaaactggaattatttgaaatccggagagttgaaacttaaagttggtaatggtaaaatggtatcagttagagctagaggaaaagccaaactc

SEQ ID NO: 364879 - DNA, 746 bp, Cannabis indica
atcactctcattgcaatcaaggctaggactccacattcgaggtaaggaaattaaatagaaaaatataagtcatctgtatgtaataacattcataagaagagtaagaatagtaaaagagaagttaacttaggtcttctgcctaactctttattgtttgttatttaatgtactgtataatatatatttaaataatatatttacaagattcatcttatttatgtatgtttacagtattagagcatggccattgctaaaggtatatatttaaataatatgtttataagattcatgttatttaagtatgtatgtaaatagtgtgtttctaagattcacattatttagttatgattgttttgttatttaaataatgtatagtagttgtcattatttaaattagatagattataatttatgtgacatggtttgaccgagaagataatggttaaatacttgactgttgggtctatatggtagatagggggccatttagtagtgggtacgattttactgaacccagccctccgccatttagtccaatagctcggttttatttgccaaagtcggactcgggcgtaatcattattatgtgatttagcttagaatctagttattagttactagtgataaaattaagtttatgtattgctacttgtctaaatatgtgcatgtacgttttagttgtattttttttatttatgtgactaccagacacacatttccttactgagtttagtagctcaccctta

SEQ ID NO: 364880 - DNA, 1067 bp, Cannabis indica
taagtgtcacgttgatccatccatgtccatacaaaattataatttacaatcaacacgtacaaatctaattctctttggtatatatatttacttataatcacttactacttactttgatgttagaattggaaaagagaaaaggaaatggtcttttttttctcaatatttctactatcttgtttaaacacgtggaaaaggcaaaaagttgtgcttctagaaccaatcctgatcatgtaaaatgggtacattagagaaaatgattggtgattaaggagtctcaatcactgcttaacagattgattttggcatgctggggtggggcctgggtctctctatacctatatattatgtaggtattatgtcagcttaaagtcacgtctaattcaaaggaatagctacaaataattattgtaaaaatgaagggtgttcacacatttgttactttttattttatttaaatataaatttgatattctatatttttaataatatttatttattacatgtatattaaaattatacttatttgatattttaaatttaaattttatacttatttgatattttaaatttaaatttttttaataaaattttatcaatacaattatcagtgtaaaattttataaattcttaattttacatttaattatttgattgtatatcactgataactgtttggttaaaataataaaactgtaattgattaaatttcactttaggatatcaaatatgtataattaaaaaatataaggtactaattaagtattattaaaaatacaagataccgaatatatttttcacgaaaacacaacgtacgagtatatttcctaaaactacaatagatgcaccttagctgctgctgctctcatctcatttttggtatttcgtattaataagttttgtcactattttaattgaattaatcttacttgacattaatgctgtgaattttacataataacgcctcttacattctatttttatgataaaattatgtaatctttccttaaaaaataaataaaaatacatgtaatcttttttagtaatatctacatttatatataatg

SEQ ID NO: 364881 - DNA, 523 bp, Cannabis indica
tcaaactttgctcaacaatggcatgttttgattttttgtgtttttttggtttctgttgattggaatttattgtggaaggtcattataggtgttcttgaaagtttggtgggatttagacatgttttgagcaggtttagaattttttggggaaacctagtgcaaaccggctaaccggtttgcgaggacctgtaaaatcggttaaccgattttggcaaattccccaaacaattcattcctcgattcatgtccatttcagagccttggtttggtgattccctgtttcttagggtattgtagtttcaattagtaatagcagaaccttaagttggaggttcgggtttctcggattagggttttggggagttacttacctggttacgctgtgtgattagggcatccatccaacacgagactttcctatcaggtcagccaactcacttgaattcagaaatgaggaaagaatagtgtagaatatgtgagatatatatatatatgcgaatgtatgtatgtgtgaaatatatgt

SEQ ID NO: 364882 - DNA, 924 bp, Cannabis indica
gagcgttttttgatttaattttttttcacctaaatataatattttgttctattttatttttttaatatttttttctgtcaaaattcaacttccaaacatagtcttataatcttaaagtctaatttgatttattattaagcacttttgcgtttttttttttttatttatttatttaattaacataagcttgtaaagattacattattaacttaatcttagagtaagagggagaaaaatggaaccccattaaatttttgggttcctaattcttattctctcaaatcaaacttgattctcatcaatccatataaacaaaatctaaccaaatcttccagctttaaatttgtcaaaaatgaaaataatcttaacaaataaatgagataattttataaatacataaaaatgataaaaaaaaataacaaaatatagtcatgcaaaattttaaataattttttacggtttttttgattttatttacaaaaaatacagtattttgatgtatttttttattgtgctcttataattttattgttaattttttgttatttgtatattatctttttattgttttgatattatttttcgattacttttatacaatttttttttttttaatttgaatgaatatcataagtatatatataaaaactttaaatatataagggtagtttttttttttaccaaaaataatatgtaattaggatttttgccctcaaaatttagtattgtattttctaattttttttttgttaaaaattttctttaaactattgataatattgaatttaaagacttttttttttttttaatttttggtaaaaaaaagttcaacatgaataaaaattcaatggcttaattttctatatatcaaagttcaaaagatataatttggtagatattaaatttaaaaaacataatttagta

SEQ ID NO: 364883 - DNA, 594 bp, Cannabis indica
tttgatttagaattcaaattttaaattaattttggctatgtgcatatgcgaaaattttgacatattttgatgtcaaattttagtgaaaataattttaagaagaaaattaaagagaaactataaagacaaagtggtcttctatattttaaaatcaagatattatcttgatagtgaaatgtgagaaaatgtgggggtgatatctaatatttatcaagaaatttggtaaaagaatggatgatgtatgaaagttaggcatgcttggtgcctaagacttgagtataacttaaacatgtttggtgtctaaataagtgtttaattttaatatgtttgttatcaaaattagtgaaaaattaagtgtgaaaattaatcttctatgattaagttttcaaagcttaagtatacttaaggagaaaagtgaccatgtaataatggacactaattttggctagcaagattcgcttagaatcgaaaagtgtgtggttataacaaatagtttaatctccgtacaagattaaagcatgaaattttaagggaaaaggcctaaactcccttagagttttactcgttgatggtaacctatcttaacactagtaa

SEQ ID NO: 364884 - DNA, 1060 bp, Cannabis indica
acttttatattgtagtgttatggtcagaaaacatactcaatggatgagatcaacgaagtgcgtgaagaatgggtctcctacttaactgagtatatgccatgatttagattaaactttattaagtatatatgactaattatactcattgtcaaacttttgaactaattacaatatatattattatgtaatactttattatattaaaagatgaattacatacatctatttaaagtattgaaagattattttgcatattatttttgaattgtaaatttttgtatgcaatcaatgtaatggaagggggaattattttttttccaccagtacactatctcggcgggctctttagacagccaatattgaccaataacggggggccaggcccgtcgagataggtgtcaaaaaatagtaaattagaataaaaatatacctatctcgacgggcatagactgccgagattgcatcatatttaacggcgggctttgcccgccgagaatgaccccaataacgaagggctgggaccgccgagatagattcactaccaatctcggcattagaaattacggcgggccagacccgccgagatagatcaataacggggggttgggcccgccgacatagacctatttttttgtagtgatatataatatgccacattttaatctttattatatatttgttaaataacaaatatataacattcccccactatattaaaatttgtgacatctcattgtaacactttatttaatcaatcaaaatatctcatatatcccgcgccctccctccactttgattgaataaattaacaccatccatagagactttgctcaagtgcataaattaaagtgtctttcaacttgaactttactatagtgtaatcatcacaaattttattgaaaatttggttgacaaagtattgaaccaacttttctttataataaaatggtgatgacacatacacttttgctaggttcacccaagacctcatgtctcgctttgtaccgttaatggccttgtgcatattctattcgttgacctttttgagaaaatatactcc

SEQ ID NO: 364885 - DNA, 630 bp, Cannabis indica
atcagtgccctaacatggaagaccttttcttatcttttcttttttagctgagcctgtgagtgagaatgagaaactgagtatttgaaatcgactcgcacccacccagcgcgggcggaaactaatttggacaagactaggaaacttgatttgaggttgtggatccactctggaattgttgttagactatcacagcacaaaacatcaaggtcatgtaagcttgtaagatgttggatacccttaggaagaacactcactatatttggcaacttatacagtggtaatgattggagtgttccatttagggattgacacataaagtcataatcatcactaatcagcatgtcccctaacccctcgcattctacaatacatagacttcgaagtgatgagagatgtagaataccaggacacaaatccttcaatttaggacaaccatcaatatacaagtaattgagagaagtaaggctcttgaagaagtctggaagacattctagatcatcaatgtctcttagagttaggctttctaatttggagagaggtgagaaagaaggagttgttgggaatacaaatccaacgttattgctcatcatcatcctcattcttaatgtctcttctaatggcttccaacta

SEQ ID NO: 364886 - DNA, 555 bp, Cannabis indica
aacataattaattttgaaataaaggaaattaatttttcattggtttattttaaaattaatttagaataacacacttagtttaaggaaatattctagatagtaatatctagtaactaatttatattttctaatatttaattaagtagaaaaatatatttaagttaaaaattaattttagaccaacttaaattaggatatttttcttagaacttaaattagaattaataattaagtttttattaagatacttaattatttgtttctatttcaggaaatttaattaaattagaaaatatatttatgtttaacattaattttttaattaattttagaccaacttaaattagaatattttcttagatattaaactaataattaagttgaatttattctatctacttaattatttttattttaatgaatttaattaaatagaacgttatatttaagctggacatttttcaatttcaaatcgacttgatttagaatgaattttagaatatattttattttattttaagtatcatttccccatgctaatttcgaaatacattt

SEQ ID NO: 364887 - DNA, 661 bp, Cannabis indica
tatttagatcatatagaacatattcaaagcaactaaacagatccacaagctcagaatcaaaacttaccattaaagctccaagtttgagttctaaactcaaaacttggttaaactaatcaacaatcactaaaacatgctccaatcaacatatttaaacataaacaagcttctgaaaacaaacccaaacataaacagcagctacttaactcaattcctaaaaacatgcaacatcctaacttcaaactcaagaaaactatgagagagttactagaagcttacctaaagcttgaaaccaccaactccttgctgaattaagcttgaaatgaagaagaaattgacaaactctagctgcctctaggtggattcaaaagagagagagagttgagagtgaaaatgtgatcttttcccttattatttttttgtgaaataaatgagtaaaagcttgttttattaaaacaaatatcagccatcaaacctaattaatttaatgataaaatttacacaaaaggaaaaaatacaatatgggcaaaaagaccaaaatgcccttccacactaaaagtcataaaatggcactaagggggtattttgggaaactctaaaattccaaactattctcgacattcccaatgtctaactatatcgccccgctatactaaaaata

SEQ ID NO: 364888 - DNA, 581 bp, Cannabis indica
aattaataaaaaaataattaaatttttttcttgttacttggaatggtcattcctttctttttaaaatggaatagctattccactaaaatggtggaaagagcattcttccaatactttaaaatgcaaccaaacaaaggaatggaatgaaaattgtttcttttccattccattccatttcattacttccaaccaaacgccactttagtgtattgattgtctctgtctgtacgtcaggtatccattaataaaattgaacagaaaattatcttatatagtttggaatttttttttaaaacaatcttaatataacttgggtgcacaaattttaatcaacctataatataactataaatggtgatcagagtgtaatcatgaaaagattaggaaaaaaattagggttaagactaggaaatttacaaaatactgtgttttataaacaccggtagaacacaaacagaacaattcaaaacaacaagtagaaactaaaaaacatcaagtagaacaccagtgaaaacttaacaaagtatactgcaatatgaaacttataaaaaaacacaagtaaaaagtaaaaaaaataaccg

SEQ ID NO: 364889 - DNA, 748 bp, Cannabis indica
gtggtgccggcagtgtctcaaacttgctcaatcaatttgaaactgcatctggacaaaaggtgaacttttctaagtctactagtgttcttcagtcctaatacgtatcctgaaattcgtgtctaaatttgtgatattctccatatgcctgaagcctctgaaggaagcctctatcttggacttccaaacattattgggagaaaaaaaaatgctgtactaggatttctgaagaccaaggtaattgcaagaattaatagttgggatggaaaacttctttctcgtgccgacaaagaaattctcttgaaaactcttgttcaatcgctccccacatatgctatgagtgttttcctccttctacttggtacatgtaatgaaattgaaaaacttatggccctgctttggtggaagtcatcttctagtaaagggaaaggtattatttggaggtcttgggatcgtatggctgctcataactacgatggtggcatgggccatttttggcacttgcatgatttcaacatttccatgctcgctaaacaaggtttgtgtctactttgcaatccagatactcttgttggaaaagttcatcaagctagatactttccccactctgatttcttgtcagcagagctaggaagtaacctgtaatacccggaattaggaaatagattagcaaaaccctaactaaataattatgtataatggaggaattatattattatatagttcaatatatgtgattttatatgaattt

SEQ ID NO: 364890 - DNA, 829 bp, Cannabis indica
atggtcggccactagggattgattttgccatttattttttctattattttaatgctaattaaatctaacctaaaactcttggtagttacctataaatagatagtgatggctcacacttaacagattgatgaaatttcactttcagaaatttttcttgagctttctttctattaggccgaaaccacctttcctcttattctcttcatattattcagccttgagtgatcatattaggatgttaataaaaaatacttgttagtaaatctagatcctggtaaaatatttccaacaagaactccacggttaagcgtgcttgacctggggtaaatttaggatgggtgacctcctaggaagttttcctggaaagcatgcgggtgaggacaaagcaggctggaaacactcgtgttggtctgtagggccagtcgtaagtccatgaagcagccatagtgacgtactcgtgtataagagtcatcattccatggggatatggacccaatggaggcttgaaggggggacgctacaaatggtattagagccttgacccagtcagaagtgtggtcgacgaggacgtcggaccccataaggggggtgattgtgacagttggtagtctcgtgatccgtaaggggaaataccgagtaagctgtgcaatggccacactgcctggggaaggtcaagtgggatgattctgagactgtgtaggtataggaatacactgttgaagaggagttaaattgattgatttgtactacttatatcaacaaggtgtatcttatttttcggtagcccatcacgaaagaactccaccgttaagtgtaaagcccgcttagt

SEQ ID NO: 364891 - DNA, 672 bp, Cannabis indica
caaatgcaaagcatttcaatagttttgtttgtctaagttctatcaggattgctcacaaggttaaggaactaataagcaagtcattggtgaagctcaaaccagtgtcgaatttgtcaaattctcttgttcccaagtcaaaagaaaagcctgtcccaaaggagaatagactggtgcccactacacctgagaaattcagtattgggctaaatacaccaatgggttctgtcttcagtccaattccaccagttaccccaaagtagtcttgcatgtattgcagttcaacctgttccaaaaatcacttttatactcttgactgaagtcaagtaaaataactatgtcactaattacacgatttggatccaaagaaagatgacatttttagtaccttgccagaatggggtattacaagtccaataagggcacttagtccagggataatatcttgaactgtaacagtcacagaagccaaatcatattcaaacaaccaaatttgatttcaacaaacacatgagcaaaaaacaagtatacatgtaggggtaaatataactatgcgattgattcatgatgataaattacaacattgtcaaaggtgctcaaactactattgagagacattgcacattcatgttcatattcatggtgatgaaaaaagaaaattggaaagtaaacctg

SEQ ID NO: 364892 - DNA, 1490 bp, Cannabis indica
attatattattattattattattatatcttaatttttttaaaaaaaaaaaccaaaaacgtacacatttgaattattatttttatattattattattatcattttttttgaaaaaaaaaaaaaagccaaaaataagttaaggtgtatacattgattgatattttatgtatgtatattaacgaaatttacaattaattatatttgatttaagttttagtattttttttttttttggaatttattttttattttaaatattttaaatatacttttatagaaaaattattaaaataatagtaaaatatcagtttgtaatttatcttttttttttatataaaaaaaattattaaaatatcaatttgtagatttatgctatataataaatattaaaattaagagattcaatttgtagatttatatttttttatagaaaaattattaaaataatagtaaactatcaatttgtagatttatgctttaataaaatatttaaattgagagaaatttatgagagaagagaaaaataattttggagtaattttagaatgtcatctcaccgccttatacttttcatttatatatatactaggaaacaaactgcgctttgtgtgcggttaataaatattttcaattattcaaaaagtatgttagtaacattcctatcttaatttacaataataaaaataaaatactcaattgattttataaatatgctcccaactataataattgtactattgttaaattatttatgaatcgtgtctcttaatctgatcatatagactttttttagtacaatgagcatagactcttaatgtgtaaaataataataattataatataaaatgacaaaaataataaaaaaaatatgtaacaattagaataataaatagaatcttttttgctaaattatgtttttctgaattttttctttttttaaattttttttttaaactctaactatatttcaaatgctatctttatttatttttgttcattttcttaaataattgaaatttttacatcaaaaatataaaatgtaatctttattacactaatatcactacacggctatctcaacttttttactcctcttctttattttattactattttaccacatgcacactcattcaaagcatcggtacaggtgctgacctatgacccctatcaatcaaccatccatcatttctctctttcattcttttttttttttcttttttttccatttcttttcaacttttttttaaatagtaacctccatagctgaatatttccttctccacaatcccaactctattttccctcttttttttgttcttcaattttttttcaactcccattaactgaatctcataatcatttttcatcttttaatttttctcttaatccatatatagatatggctgtaacttgttcttcatcaactccttcccctattcaaacaaaaaattctaaaatggagttgaaatctttagctaataggaacaa

SEQ ID NO: 364893 - DNA, 509 bp, Cannabis indica
tttgggaaacaatcccataaaaattggatttttggggaaaaaacccaaaaatcgcaatttgcggggggctgccaggacaggccgcacgtgcagcccacgaaggctgcacgcagccttgggcgcgcgcggatctggagttgatgccaagtaaactcggctcccgcagcatgcctgaccgagaaaactcagtcaactacagggtgcttcacggggttgttgcaggatacacgcgcgcggatgggacgggcctgaccgagtgcctggtgctcacgagaacccactcgacagccttgaatcctgattttccaaaattcatatctttttcaatttttatcgaaatcgagttccgtaaaaaagaaaattgcttaatttttcacaaggaatccaaataaaatattttcaaaaatagaaaaaatatttttcatggaaaagtttcgtacaacacaaactttcatcacataatcacataaaccaacatgaaaccatccaaatcaacacaaaacatataa

SEQ ID NO: 364894 - DNA, 1278 bp, Cannabis indica
tgtgtgatattttgagtttcaaaaattatttttcaatgaaacaaaattcaaattttgttaaaattttgtgtagaatttaaattttcaaataaaaatataattatcaaaataaaattaatttgtattaattttttaattaattaaaattaattttagatattagtagcctttgaatttgaaaatttaatttttctacaaacttgcctttatggttatttctgaaatttgattattttttgtttgttttattaattttaattataagattagatatttacttattttattaataaaatttgaaatgatcttattttgacattaaaatattaataaaacttaaagataatctagatagaatttcaaatacctaactatatcaaattttcaaaatttgttatttttaaaatatattttattaatttaaattataagattagataaatgttagttttgacatttttatcttattagtgttgacctcgcttttagccaatgataatgagtcaattaataagcgataagaaatgtaattaagataaggtaagaaccaataaacagtaaagaacacaagattttaaagaagttcggcccctttagttcggtaatagcctactccccttagattgtattaactcaagaacaaagaaaatacagtatttcctctcttgaagctctcacaatgaaatctctgaatgtttacacttagatctctctgaagtaattctctcgaccctttttacagtgaggatggatcactatttatagggctaaatgcatgagggaaggtttcccttttgcttacaatatctacagttggtaagaacacacattacatattcagaatacatagattgagggattcggacagcttgccagatccctttgatacggtctctgaattgtagggattccttttatgcttcacgatgtgagtcttggaactgctaagtcttgatacattgttcggattatctacacttgccttgctcggtcagacagactctttccgtgcagatgtatactaagctctgttcgaaatatctctttagccagatgtaggaaataggagtcacgtgtcacgagtatgtgttgccacatcatagatcgaaaaatgggataacaattaaatatttatcttaattaaaaatttatatttttttattaaaataacatgaaatttttaaaagttgttaattttagtttgaatagatgttttagggttttctaaacataaaattttcaaacttatgatattttttattttaaataaaattgata

SEQ ID NO: 364895 - DNA, 825 bp, Cannabis indica
aagtatactttatcgctgattatcacatcagtgtaaatccagtgcactgatgaatcaagggacgttatctttcaaagcatataatcacaattaccttcaagtgtgttgacatcactgtaattgtgaataactatatgttctggacataacagattttgtacacattaaaccataaacataaaaactgcatgtataacataaatgacttctaatcttctattgataacgaatcagattagattgaaatggattttatttatgtcataaaatcccaacaaactccacttgcactaacataaaacaagtagtgcatctcaatcaatcgattgtcttgatatccaaatcaagtgtagtgtgtttgactaaacctaaattactggaattgtaagtttgtggtaagcaactgctttctccaccattacttcctttatgttcataaaacattgtgcaacatcatattctttatgcattactctactagggatactgaattctataattcttattaagtgcatctgaataaatagaagacaatgtctctaattctatcaaaattggaatagagattaacacatttaaaaactttcttcaattgaataactttccagtactttacaaaatcaacaaagttatgtatcttcactgatggagcttaaattactatagatgggtttttacatccttctagaataattcctccaccccaagagtaaccacaacctcgaataggttatgaattggtgtagatataaggattctaatatacaccactatcatctaacatataggtcactttcagagatttttcttgactgtctcctaatg

SEQ ID NO: 364896 - DNA, 553 bp, Cannabis indica
catttgatataactcaagaccataatgagcagtcagtgtcatgcttgtcctgaaatagtctttcaattaaaccaaaagaaagtctattcagaataaatatatgctttataagtaattccttacatacaagacataatgtgcatctctccacattgcaatttgcatccctcttgattataaatatttatttataaccaattagttttacaccttatagcaataggaaaaataccaaaactttattgtctcacatcaatttgtactctttatttatgatatcaatccagtttcgagagttagaaccttcatggcatgataaaagttgacttggatcatcgtctatcattccattatttccttatatatgtcctttctgatctcatggatttctttaatgacactgatctttgatgttgttgagtttgattatctaaaatatttaccatatcttgaatgagaagttgtttgatattgtcttatcaaggttttggattcacttattgatcaatgaaagtcatggaaacctaaaattgtcaaaagtgatagttagaat

SEQ ID NO: 364897 - DNA, 496 bp, Cannabis indica
ctcttctttcggcccccttagagcagctagggttcttgtttttgctccttcaattctgtgttttccagcagtttttagtgtaatctaagctaaggtaacattttgcatgctttgaagttttagctgttgttgttgtttaaagattgtttctgtagttattttatgtttgtttgaggtgattggaagtggttttaggagctgttattttgtttgagcaagctttggagttttgaactcaagcttggctcattaatggtggattttgattctgcgtatgggtggaagttttgttgccttgaaaacgttctctaggttgtatagaacaagtttggaaagtttggggttgatttggttgagttataaaatttttagtaattcccgcactgaaccggaaatccggttcacagaggcctgttggaactagaattccggttggcttctaggaatttttcccaaaaccggaattccggttggcgaactggtctaccggttgggg

SEQ ID NO: 364898 - DNA, 555 bp, Cannabis indica
tgtagataaagagattcttggggtaagagtgtgagagttcaaatactttgagagaatctaacagagaatctttctcgactgtattgtactgttcttgttcaatcgatgaagaagattttgtgatattccagaaactggagtagaactataaatcacatcgatctatcggacttgaactaatatatatacatattgatgttgattttattgttttactgctttagttagggatggcaattatacacgcgggttcgggtacccgagggtaaggggcgggtacgagggtagatttttgggggcgggggcgggtatgggtttaaagattcatacccgagttggaaacggggcgggggcgggggaatagatacccgccccgatatgatatatgtatatatttaaattttaaaatcataactactacaattaaaataacttcatgctttaggctttttattgattatacattttttttactatacacactattccacttaagtttattgttttactaagtttttttgattattttttttaattctctttaagacatcattt

SEQ ID NO: 364899 - DNA, 806 bp, Cannabis indica
aacaaaaataccatacaataagaaaaatatcagccacatttacaacaaaaataccatacataacaaaaatactatacaaatttacaacagtaaaataaatctatacagccaaaaaataaatctccaacaataaaataaaaagagtgcaaacatacatttcaatcaaaactaaaatctttaagtctttgaataaaataaatacaaaaattttgaacagctattcaataccaaactcaaacctacggcgtcgttcgaagctcacactgtcatctgagatgttgtggtgtgaagctcacgtaacaacgataagagaggcagtgggagaggtggagttgtggcccttttccgtcgaagagagagatgaaagttcgagatgagatggcgcggagctcgcgtaacagagatgagagaggttgagggactggcggacaggcaaaactgtcttgtggctcttttccgtcgaggagagagagagacgaaagtaatatacaggagatcaaggagagagaataggctcgagagggagatagagagagggagaggagatcgggcattttccgttggggtccgggttcctcgacagtcggaggtaaacaagcatggatttttctggttttctccatggatgccgcacaaacgagagagagataagggattcaataggtgtgttgaagaagactagggtttataaccttctttatatatcccaaatattttattaattttacacatttaattataattataaaaaaaaaaaaaaaaggaaaatcagctatactacatgcgcgtgaatggagaatttaatg

SEQ ID NO: 364900 - DNA, 717 bp, Cannabis indica
ccctatacttgtgtctatttatcgagagtggaactcgggtaagaagccttttcgatattacaacatgtggaaacttgctcctgactttaatgcaaaagttagtcaaaattggcaaggaggcataattggaacgaggatgttcaaaatggtagctaagctcaaacggctgaaaccggtgctcaagttgataaatcaagaaggtttctctgatattcaaaaggctgatatgattgcaaggaatgatctaatagcagcccaagctgcaatgaccaagaatccactctcacttcaattgatggcagctgagcaagaagccaataagaggtacaatgaagttcacaaagctttttctatgttcatgtcacagaaagcaaagctaaattgggcttcctatggagatgagaactcagctttcttccatgcttctctgagatcaagaagaattcaaaacaagatcttctcgattgaagacgagcatggaacatggtttgattctccggatgatgtccaaaatgcttttctgagttattatgagaagcttttgggaactagtatgcagaatagaagaaaggtactgagatctgtagttaatctgggccccaagatcactgagttgcataagactattcttctggcagattacacgaaacaagaagtaaaagaggctttgtttctattcctggtatcaaggctccaggtccagatgggtatggtagt

SEQ ID NO: 364901 - DNA, 811 bp, Cannabis indica
tgtttgactctgggggccactcattcctatgtggcagccagaatttttagtaaattggatagaccgcacgataggtatgaatcaggttttggaaccctaattacctggcggagagttagttatctaccaaaaggtggattgggtctatgcctattagaatcgaggatagggagttgagtgctaacttaataggaatgagcttagcagtattttgttattatactaggaatggatttcttgtccaagtattcagccagtattggctgtaagaggaagatggtaatcttccaaccagagggtgaagaacagtttgtttttgtcagttcggttcagggatctcggatcccgataatttcagttttcacaggtaaagaattgttttgtgatggttgtctagggtttctggtcgtggtattggatagtactcgacctgactctgttcgtccagaagacatcaaggtggttcgggaatttctaaacatttttcctgatgaacttctgggtttaccaccttagagagaaattgattttgttattgatttggtacctggagcagaaccggtttctaaagcaacttatagaatggctacagctgaacttaaagaattgaaaattcaactccagtggttgcttgagataggatttacacggtgtgtcaccctagggagctccaatactgtttgtcaaaaagaaagataggtctctacgaatgtgtatcgactatcgagagttgaataagctgacaatcaagaataaatatcctttacctaggatcgatgatcttttttatcaacttaaggggaagacggtc

SEQ ID NO: 364902 - DNA, 614 bp, Cannabis indica
gaacgcgaccgagacctagcatcggacctgaacccagatttggcccagcctagactctaactgagatcgaaactcggacctgaaccttgacccagaccaaaatagacctgaacccagactcagcccccaaaatcaacctgaacctgtactgtgacttgaaactagaaccgaaaccagaagcagatcaagacccaggaccaggacctagacctaaaactttaaccagaaacccaaacctgaatccaatcccaaaccgagactcacgacccgaacccagacctgaactaagacccgaacatggaacatgactcgggacccagaattgggatcgagacccagaactgcacccaagtctcggtctcgaagctagatcgagacccataccgagacttgcgacatgaactgaaacaagactgggacccgcgattgggatccagatcttgtccctggatctgggaacttaggcctggagaagacccatagtcggtgtcaaacctgggactcgaaacttaaacatgaaccagaacgtgaccaggaccctggaacaggaccgggatcgtgactaggacctggacctggaccgagacccggaactagaccagaaccaagccccg

SEQ ID NO: 364903 - DNA, 312 bp, Cannabis indica
ggcccgaacatgtacattcatcgcccagctcccacactcatggctgattgaaaacaaatttaccctttcctgtacagtagagcaccagtgagccaagcccagcaagacagtaaaatatagataatcataaatacacatcacatgaatattaatgccattttatttttgtctgtatgacacagacccgcttgttatgctcacacgccgatttattgtctatgtggcatagacctacgtgttacgctcacacgtctatttacattaaggccttagaacggttcgtctcggttcttgttaccgagtccaacccga

SEQ ID NO: 364904 - DNA, 801 bp, Cannabis indica
ggacagtactcgggggcatgccgatgtggaggccttgaggagggttttgcgggatgaaatgcaaaatacccttaacgatcagaactaccagaacccgtgggatctaaacttggaccccctgtcggactggttcaatcgtttcctcgggcccaccttggctccttttgccgcggagatgaccggtgagtttgtgtctcagctaacccggtgcgcgcccaagcgatccgctgcttgtgcatccttgaactccgtctttcaagttcaggatctcagccactctttgactgtggtaagtatttcgtagtttacttctttcctccttatttttcttaaggactttactcactcttgcatcttcttctagcttgctgcagaggccgaccgcctttccaagaacctaatcaatcacggcttcatcttatccgaatttgggggtatagacgaagtcatgaagaccctgcaggatctgtctgctgaaaggcgaacgttccaagaggatgctgagcggcgggaggcccttgccaaggccaagttcgaggaagaggccaggtggagggaagcccaagcggaggcgatgatccgggaggagacccttcggagggaaaagctagaggccaagcaccgggaggatctgagggcggagggcgaggctgttgctaaggccaaacgcgagctccggaaggctagggaagcgttagatgaaattactgttgggttttatgccctaaataaaactcatttcaatataatcatatttacttattaatatagatcagaaataacatttaatgttgcatggtt

SEQ ID NO: 364905 - DNA, 664 bp, Cannabis indica
aatcccatgtatttgttaggactatttatcccataagagttggattatttttttagtcaaaagatttttttttttcagtcaactattaccaccaaacataggattgagataatttaccctaatcctagtccctagttcttttttttttttggttatttttgtatttcttttttatttaagcaaaaaaacacgaaaaataacaaaaaaagagctaatagaaaaataacatccaaataatattaaattaacactaaaaaataacatacaaataacaaaaaattaacaacaaattaataatattacaatataaaaatatattaaaataccgtattttttgtaaataaaattataaaatatttaaaattttgtacaaccttaattttgtaatttttttaaaaaaaactccctaaatttaattactattatttatctaattactaaaagagtaatatatacgtttattttaatattttatgtatatgtatattatttatttaaaattttcttattaattcaataatttattaatctattaactaccatataaaagagtggtctgctattatgttttagtaaagttattttggaaattaatagtatggtattgattcccatacaattctctctattctctctcgcctgcgccattcttgaacgagtacca

SEQ ID NO: 364906 - DNA, 693 bp, Cannabis indica
tcgttaaacttagtccaaaagacgatcttagttctcaagtcccgagctccaattatatagtccaatcttagatattactctcacctataccagtaaatggctaaataattatcatcgttgcattctacattcaaaattgagtccaacaacatataatatgactatatttaaaatttggggttccgaagcctcacctaagcggtgcatattaactatcggtggcagtaaaaattagtgtatcggaaacgtcactaaaaataggagtagtgtatatcaaaatgaccacctcgatgagtagatcacactcatgccaaccgtttgtcaaaacagtgcacgatatcactagaaagtcgtagctacaaaatgtcaccagaaaaattatcgagttggttgagatagcttagtgtaggttgttctcctcgacgagttgagtctagtggtgaagacgactcgtcaaacggacaccggaggtggccaaaaatctgttcaaagtttgagccgccaaactttggcttgcgatcccgagctaacggcagtgaaagaagcgacattgcttgagggctgaggtcaccggcacccggggtttcgattggtctggcacgtggggccaggcggtggagaaatagctatttatattatattttatttatttatttttattttattttattatattatacatatatatatttt

SEQ ID NO: 364907 - DNA, 1054 bp, Cannabis indica
atggtcagcatccttacgaatgatcgaccaccccattcatatgcgagtagagatgcgaataagtcacgcatcctgggccaagcgatatacctccagaaacggctgggagaaactcagttactcaaggggcatgcgttctcaagcatgaccctgaaattactgagttactcccaccgttccgagactacctatcagccaaggagtacgctcatttgaatattaacgcatgtcgcaaatggctgggtgtatcacagtatctcaaggggcatataaccgcgtatatgaccattagaatactgtgacacacccaccatttggaaaagcgattaatactctcgcaattcaactcacagcatataaaatcctaaaagatctagccaataatcagaagtaaataagttctgtcagtgtgcgagtattcaaactgttcatccgaatacccgcgagtattcaaagtatgaaacagtgcctatttaaatatttcttacacagtatgcggttattccaatttacaggtcatttttcataagattacccagttttttacccaaaaaacgtaacctcatacatatcccttacaaacatacattcctaaagaacctcaaaataccaaaacccagaaaaacattctttctcaaacacagaaaacaaaaaatacaatgagactcgaaactaacctttagttttggcaagttgttcctgcgattgctctcgatcacttctgagattgaggatattttgaaaagaacggtagaaatctgggcaaaagatgaaaacggttttgaagtctctgtaagggagggaagaaggaagttaagaaacaagagggaaaaatggaggatttgattcgtatcaaagggtttaaatacccatatccctcattaattgggatcacgacacgtggcagccagaatgcctaaggtcgcccaatccaacggccaacgatggccacgcctacacgaaaaccgaggagttttgtgacgtggcaccataaatgcaataaaaagtaataattacagccgtcatttttcgaaaccctcgatgggacaaccaa

SEQ ID NO: 364908 - DNA, 705 bp, Cannabis indica
gtgtatattgtgtccacgtggacaagccaatctggcagttaacagctaaatttggacggaagtgttaaattgctaactgaatcgtagttttgggaattttaccgcccaaatttggattttggggttaagtaaaaccaaaataaaagttttgagagttttgccgccatttacccttttaatatttgtgattaccaccaaaaatttgttaatagttacacataaatatcaattaaatgcaggctcgactctggacagagacagggcccgtgcctagagcctagtagcgaatttatccctttttaaaattactcatttcttttactaattttgaaaaataccacattttttttaaataagacttaaaaaatttattttcctataatccactaaatttcaagacctgctctgatcaaattaggggtgttcatcaaatcgctcaaaccgcccgcaccgcaccacatcgcaaaaaaatgcagtttgaaattctttgcggtgcggtcgccgtttgaatttttcctaaaccgcgcggtgcggtgcggtgcgatttgcgattttgaattgttaacatgcggttcaaaccgcatcgcaccgcatattataaaaataccaattattgtattgttgaaacttgaaacttttttcatatttattttctaagccttatagtatttttgacaagtgttgctcaaactttattgtatttgt

SEQ ID NO: 364909 - DNA, 786 bp, Cannabis indica
ggattggatattgtctgcccctagtagaggaggtactctccttcgtagtttgggctacatgcgcctactaagaactatagatcacatcgtggatagtttggatggaacataagtgtgatccacggctgggctttgttgagttcgaatttgtttaaactatatttttttggaaacaaatatgtttaactttttaaattatgctttttgtttcatttctcaataatttcatcaatataatcctaactgttaggatttagcctttaaaattctgtaaagatatttctaattattaataaagagttgaacattttgatatatgcatgaatataaattatattaatatttattactgaataatttatatataaatatcaaaaaatttcttattcgtatatgaggttgtgacttgtaactgtacagataactaagatcacttagctatgcgtaaattagtcatcattaaagttatgaaatctttaatcagttacggttcactactgcctgttcttcagtacaagtaatctaggttcaaattacagatgtagtatgacatcaaagtgaaagtgctgtatataatagagattatatatgacatggaccgatatgaataaagttgtctttatctaacatgttgtttacaataaagacctaattcatatcataacgatgaccaatagtagatagacctaaatcttaagcaatcatgagctcatgttcaagttattagtttctttgtttcactcgttaaagtttctcagagaaaaagattcttacaacttctgtttt

SEQ ID NO: 364910 - DNA, 565 bp, Cannabis indica
gtggtgtgagcttcatcaagtatctctttcttaagctcaccaacactaggaacacacactagagctttatataacagcattccattattcgagactgaaaagtctttaggccgactagccaatacctcatctcgaatcttgactagctcgggatcttctagttgagcttttctgattctctctaacagatcagactgaagtgttaagttgtgcaactttccaaccagaaactcaatccatgcactaaccatttcagaagccagctatcaaaaccgtggtgcaaaccttcccgggacctctacaactgaaggcattagccacaacattggctttcccggggtgatacagaatctcacagtcgtagtctttaaccaattccagccacctcctctgcctcatgttcaaatctttctgggtaaaaaagtacttaagactcttatgatcagtataaatctcacatttttcaccataaagataatgccgtcacatctttagaccaaaaaccacagcggcaagctctaggtcatgagttgggtagcgctgctcataatccttcagttgacga

SEQ ID NO: 364911 - DNA, 906 bp, Cannabis indica
tttcatatgtgatttaagacgtgaagattgattaagaagttgtaatagaatattataattaatttttcttattatattagtaatatatatgtagagaattgtagaaatactgaactccatcaacgaccataaataatatgttttaggaaaattctacaatgcacccccttaaaatggatatattgatgcacccctatctgttttagcatccgaaataatttttagtcaaattttttctcatggtcatgtacgttatagttatttaagacatcctgcaaaattttaagaaatttggaaaagtttaacacgccgaaaattatgttcaaacagtgtgttgcacgcgtgactattttattttatacgcgtgtaaaatagactgtttgaacattgttttctatatgtaaattattccgaatttttcaaaattttgtaggatatcttaaatagctataacgtacatgaatatgaaaaaaaattagactaaaaaatttttctggatgccgaaacaagttaagggtgcatcagtacatcccttttaagggggtgcattgtagaatcaccctatattttattaatgaaataaaatgttttttttaatgatttttgttttttttttaaaaaaaaatagataaataaattagcttttgcttgaatattacaattccattagaaacctgttttactcttagcaaacctttaatttggaggaacaaaaatataagaataagaatagaataaaattaaatttaagaatgtataaaaaaattaataaaaaattataatttttttttaacttttgtattggaataatcattctttcaatatttcaaaatagaatatttactccaccaaaatgataaagggaaattctataatgcaccccttaaaagggatacaccgatatat

SEQ ID NO: 364912 - DNA, 544 bp, Cannabis indica
taacaaaatatataaataaaaaatgactagaatgtgtttcagtcagatgagcatgtatatgcatatatagcgtatcataactttgaaacattcgagatcggatataacaaatattctcgtgctgataacgtattataaaatattataatttagaaaaagaaacataaagaagatatgataatttttttagtattttatttctatgggtgatctcctatttatacacatatgagaattaaagattagaaaataataataaaaattaattataattaatggtaataaataatagatttagatatcaatatatttattaatatttataataatacaaatttaattgaaaaatttacatgaaaaatacaaaaacctaaaaatattacccctatacctttacaaggatactcctacatttttacatttgattttattttatttacactaatacctcttacacatgcatgatattattataccaccttcacacactatctattttccatccttttctatcatcttttttctttttcttttttcatttttt

SEQ ID NO: 364913 - DNA, 528 bp, Cannabis indica
ataccctagcatcatctcaacacaaaatttttgccgttattgattcataccttgtaatcctaagggtgctacagtagatcccacctatagtgatatcatagtatttccctcgatataaatacaactaaaaagggagtaggtcagtaccgactatcataacggggccgaacctctataacaaatcttgtgtttattgtttttagttcttatttgtgcaaacatgtggcaagcatcaaattcatacgaccccgctatcggttgatcacttttcaaggtcaatagagtgataagaattttatggatttactagctttcctagtagagttattaccagaaggtaatatggtgccttcgtctttatacgaggcaaagaagacactttcttccttaggcatgaaatatgaaaaaatacatgcctgtcctaatgattgcatcctataccaaaagttttttgtggatgcaatatcatgtcccacgtttggtgagtctaggtggcaaaagaaaagaattctgatgaggtaaaggttg

SEQ ID NO: 364914 - DNA, 529 bp, Cannabis indica
ctttatttctgatcagaaaataatcaaatatataaatgtcttaaacaaacattaaacaaagaaaatacaaactcccactaaatcgtgatatcctcaagcaatactacacccatatgagttgtgtgcccatgaaagaccttagctggtaatccttttgtgagcgaatccactatcatggagtttttccaatgtgctctatggatatctttccagtactccgcactctttctttcacaacaaagaactttatgtcaattatgctttgacttggatgagctcccattgttattggaatacaacactgctaatttattgtcacaaaatatcatgagtggtctttttatattctccaaattacacaacctagtgacaaagtttttaagccgcattccctgatttgatgcctcataacatgttacgaattctgcttccacagtggaggaagctataagtgtctgtttaacacttttataggatatagctcctccaactaatagaaaaatgtaacctgatgtagaccttctgctat

SEQ ID NO: 364915 - DNA, 1068 bp, Cannabis indica
aaatggcgtgggagtggtgcgtggcgaacagatgctggtacgagattgctatcacatagagttgcagcatagaaaggcctgtcatcagctgatggggatcttggcaagagaaaacgagaagaaagatgaagatcttgatccctgagttcaaatcaaagaaacctgctaaaaccaattgaagaattggaggaggttattctcgacccaggaaatcccacaaaatgtgtatacattgggaagaacctggacgagcagctcaaatagcaattagtgagctttttgaaggcgaaccaggatcaattcgcctggagtcttaattgttgatctaaactacccggcgaagagacaaaaaaggaggcccttggattttgagaggcaaggggcactaaaactggaagttgacaagttgttagtcatcgattttatacgcgaggtattttatccctcgtggatagccaatcccgttcttatcccgaaacctaacagaacttggagaacttgtattgacttctccgatctgaataaggcatgcccagaagactgttttccacttcccagaatcgaccaattagtggatgcaactgctgggcacaagcttatgtcttttatggatgcatattctggatataaacaaataaaattgtatgtcccagattaataacctacaagctttgtaacaaacatgggactctattgttataaagtcatgttatttggactgaagaacgctggtgcaacgtatcagcgactagtaaacaaaatgtttgcaaatcagatagggcgaaacatggaggtttacatgaacgatatgttggtgaaatcgataaagagtaaggatcatacctcagacctcacaaaatgctttaaaatattaaaaaagtataacatgaagctaaacccagaagaaaatgttccttaggagtctcttggggaaagtttttgggattcataattaacgtgaggggttttgagcccaatcccaaaaaactcaaggcattaatagacattccatccccaacaaagcctaaggaagtataagccctaagaggaacaaaaagtttgagtgga

SEQ ID NO: 364916 - DNA, 635 bp, Cannabis indica
aaagcatataacatatcatataatatcagacttgtatctaggcgcccatacacccatttacaaggctcaacagatgagtaagaacgttctatactagggtataaccactataccacatacactacgtacctctctgtacgagtgttggtagggtttatttcataccctgagtacctctgagtgatgtaccacacatactcagtacttctccgtacttatgctggtatcacagtactttcagacaacaatcactataccaatacactccataccttaaccgtataagtgttagtagtgcaactaacattttaagcatgcatatacacataacatatacatacacccagatattgatatcacacattatattcagttcttaccttcattccgaattcaagtgtgctggccgacctgaacagaaagtctcgcgctagatggatgccctaatcacattatgaaactgggtaagttacacgaacaaaactctaatcttgggaaacccaaaaccataaacctaggtttcgctacactttctaggggttacccaaactatggaattagtgaaacacccaaccatggcactgaaatggacaaaaattgagaaaatgaagtgttcgggaatcctgccaaaaccg

SEQ ID NO: 364917 - DNA, 734 bp, Cannabis indica
ggaggaacataatgtattattaaaggagacttaccaaaacccgaagtgctggcgtcgggagcaccagtattggggaccgtgaccccaggcttaggcctaagggtcctgcgctccggcggagcttccagacaaagggtcctcccggcagccgcctgggccttgatgtaggccagctcttgttccctcttaaagaggtacttctggtaccggtcctctgtcgtggcgataatgtcttcccggaacgccttttgtgcggctggaaccctcacgttcgggcagatgactttggacagattgaagtcatccaccgactggttacccgatatcagcttggccttccgacagttctctgttgtgaccaactccccaacatcgagggccttcttatcatacgtggagaaggtcttggcccgctgaagaaatacttgggtaggtgcggtctgcatgtaaggagggatcctaacccactccgtgagaagctccgggcggtccatggcctggaagcctgaggaaaagaagaagcggtgacggtactccttcacatgcttctgatgattgaaagggactgggccctcattcaaaggatgggcccgaaggccataaaaaccgtctttaaatttatcccctttcttggggatagaaacaagttcataaaaatacaatatctcagccagactgggcgagccccagctccgcgcagcataaaaaataaataagcctgaaagcgggcggta

SEQ ID NO: 364918 - DNA, 1027 bp, Cannabis indica
ttttgaattgtgtgagtaggtcatgtattttgctcaaatacgctatcatcttttctccccgagcctcgtattctccaaatacatgatttaccactagctgtgaatcgctgtagatttcaatgtgttcagctttcatctcccgggctagttttagacctgcaattagagcttcatattcgacttcattattagatgctttaaatccaaacttgactgcaccgtgcaggtgttgccccctaggcgtgacaagggcaattcctacatcagatagctgatttgtagcttacccgtctacatgtaatttccaggttggcttatcttcactgttacttggcttaggtgtttttaccggctaggggttgctttctggtaagatttcttccttgcttgtgcattctaccacaaagtctgctaaggcttggcctttgattgttgttcgggattagaaagtaatttcgtattggcccaactccaccgcccacttgagttgccgtccaaagcatctggcttttgcaatacttggcgtaatgattggtcagtgtacaccagaacaggatgagcttgaaaataaggccttaactttcttgttgctagaataaggcagtaagtgagtttttctataaatgggtatcggccttccgcttcaatgagtcttttactgatgtaatagactgggtgctttatgctgttctcttctctgattagcacggcactcatagcatgctctgtgacagctaagtatattcctagttcttctccatccagaggttttgagagtacggcgggtttcgcaagttgtgcttttagctcttggaaagctttttcacattcctccatccactcgaattgcttgtttcctcgcaggatattgacgaatgggacacacttgtctatagattttgaaataaatttgctgagtgcagcaatccgaccagtcaaactttgcacttccttggttttagttggcgacttcatatccaggagggctagaatcttctctggattggctttaattccccgggcattg

SEQ ID NO: 364919 - DNA, 638 bp, Cannabis indica
cctgacatcgttcatgtccccaaagtcggacagaacgaagccatggtttatgatgttcttggagaggcggccagcctcagcagcaagctgaacaataacacaagtgtaagaagaaaaatttcccaagaagaaaaataaagggaaaagcaaaattgcgaagtacttaccacggtgagggaatggctgaggtcctggacctggaagatggagttcagggaggcacaagtggcgaaccgcttaggcgcgcatcgggtaagctgagaagcgaactcgccggtcatctccgcggcaaagggagccaaggtgggcccaaggaagcgacggaaccagtccgatagggggtccaggttaaggtcccacggatcctggtactccgggttgttgatactcgcctctacctcaacccgcaaaaccctcctaagggcttccacctcggcatacccccgggagtactcgtccatggcatagttatgcttggctatccgaagctcttgcctcacctcatcccctgggaccggagtaagcacgatgttgggaggagcaggatcttccatgggggagaccccgccgtcaagaccatgggcaggagtgtcggctctccgaggcttcttgggctcgtcctgggcaatcatcttgcc

SEQ ID NO: 364920 - DNA, 797 bp, Cannabis indica
tttttttttttgaaatatttaataaatattataaagtattagaaaatttcaattcacttcctaaaaatgatacatcgatgcacttttatctattttggcaatcgagaaatttttttagtctaatttttttgtggtcatgtacattgtaattatttaagacatcctataaaattctgagaaaataaaaaaaaaattaacgcactgaaaataaggttcaaactgtctgttgcatgcatgatttttttttttatacgtgcgtgaaataaactatttaaacattctatattataaattatttcgaatttctcaaaatttcacaaaatgtcttaaacaattataataaacacgactatataaaaaaattaaagtaaaattttattctgaatgccaaaacagatacatgtgtatcgatatacccattttagggatgctaagtaccttagggcccgtttggtacgcatgactggattggattagacaggctaatttgtccaatctagtgtttcggcatgacagaagtctggataactaatccagctaatatcatttgtctgagattatttatcccatctagtagggtgagataaataatcccatacaaatgagattttttttatcgtttttttttttataaattttgattgtattgatatattttaaatttaataagaatttaaatgaaatttatttataatttttttttatcaaaaaattattcattaaaattagtgaaaatgtatacatttaaattattactaggtgattgttacgtgccaagccacgtagtgttagtttta

SEQ ID NO: 364921 - DNA, 883 bp, Cannabis indica
ccaagatgttactacgatgtcctagtaaaagttctaggaaatttttaatgcaaaataatataatgaagcagtcagaagtgggaaaagaaaggaatttgctcaactgactcagattgaaaatatgagtgttactgaatacacaaaacagttcgatcgattagctaggttggcctcaggaatagtgccaaccgatttcagtaagaaagagaaaaacctggatggattgaattcgaaaataagacatgacctaatgatgactactgatgacaacaccacctatgctgatatggtgggaaaggcactgcgagctgagggcgcggtggagtgcacccaggagtcccgagggacttaggttgctggtggggctcatactcctcttacctcaggctttagtatgggaggtagtggctcgaccactgaccaaaaaagaaaggcacctactgcatccggtggctcaagttaaaataagaggttccgagggaaccaggggcgaggcaatcattagggtagctttgaaacttgatacacttacacgaaatgccccagttgtaaaaagcagcatctaggtgagtgtagagggaaagggtgttttcagtgtggtatgctagggaactataaaagagattgtccacagcttaagcaagaagaacaaaagacttgagcaaaacccgctccagctagggtgtttgctctaactcaggctgatgcagaggctaacccctcagttgtaacaggtcagctctcggtcaacaactattacttctctgtattatttgattctggggccactcaaacttatgtggaagccaaaacttttagtaaattgagcagatcgcatgatagttaagaattagggtttggaactgttgggtttatgccctaa

SEQ ID NO: 364922 - DNA, 517 bp, Cannabis indica
gattatactctgctacagacatgaatcaagggttagagatctgagtggaaggagacacttaattctgctgccatcactctaagttattcttaacttttatgtgttttgtttatcgttttagaagttcatatttaggttgttaaatcaacatacttgtttgtagatctatgatcctggtaaaattaattccaacaagaggaactacacgtaaggagctcaaacggtacgcaggggccgtaaaacatgatgaggtttgggaggttattaaactcccagctcaaaggccacgactcatggaccagccctttggtcatagagactcccattgccaataagatcgtggccagagtcttgatcgacaacgggagttccgtaaatctattattcaaagaggccttcactacaataggcctaacggaccgagacatttcaccaagtggttcccaactcacagggttcaatgggacaacactgatccctatgggaaaagtgaggctcccagtcaccttgtgcccgg

SEQ ID NO: 364923 - DNA, 1197 bp, Cannabis indica
aacaaaataagaaatacattattgaataaactacaagtcgtttataaagatcaatttaaagcaagataactttttttaactttttggatattagcaccaaaacaattttaacagtacttaactatataaattcatttttttaacagcaaaacttactaaacttctattttggtttggtatttatatttctgtctacaaattttagttaagtaaatacagtgaactgctcaaatctacacaagtacacacataacaattttttagtgtccacataatattaattattaaaattttataaaaaaaaattatttaaaatttataaaaataaaataataataaaaatgtatatttttagaaaaatgtaaattgcggcataaatacctattgttttagattttatacacttaaatacctaatgctacaattctcttacaccgttactaccactttcgttaactcataaatatagacatgtggagggttcagatgcattatatttatttttattttattttaaaacttaatattcttaatatcagaaagtactaaatgctacttgtttaaaaaaaaacagttctcataacaattttcacatgatattggcacttcaattcgataaccatgttccatatactgcactgattaactcagctatggtaatttagtattgcatctctcttattttttttttataacaaatagcatttagtttttaatattaagaatattaaattttaaaataaaataaataaatgtaatgcatttggacccttctagatgcaagaggtggactttatcccaattgaattttgtaagagagaaccagcatccggttatattacgttaacgacagtgctcttgggaggtaccccaaataagttctctattttagtctttagggtcagttaaatttaggggttgaacttaaaaattttagttttaattttagttatttttgtgtttttatgtttattgcgtgttatgagtcaattttctaagtgtgagtcaatatgaaagtaagtagatagtatggtttgaaaattttatttattttcaaaaaaatctgtgtgcttggttagatcagagtcttgactaatttcaattttgtgctttaaaagaacatagaatcctaataggtgaatttctagcaaatgaattgctttatgtatgctaattttgatatgtgaaaaattctag

SEQ ID NO: 364924 - DNA, 754 bp, Cannabis indica
tccggtagtgcgtattttgcctagtagcgaaatacacacgctcctcggagtccgttagctccgtgtactgggtgtactgggggtatacccccttttctttcgcttatcctccgtccggttgctgtcctttgaggacctcttgctccgagagtcttgagaaggtcctgctaagctcgcgtaggagcggagtgagacaagacttgcgcgcttaacccagaaggatttccataatgagaagatgtaggggccaatccctgattctgattataccctggggtagaagaaaattgtatgccgctcatcggtggagcagctgctggtaaagttcccgggagctgagcttcgggtacataccctgctatcccggtagggtagtatcccccataggccactatttgggcctcttctaggttgatgtatttttggactcttttctggaaatcttgaaggttggaggctccttcttgctgtaactcgttccagaacggagtaccagaacggatccctgcttgaagaagagcaagatgctgtccgtcatcaactttcttggtctttgaggcttcttccttaaacctctttatgaaattcttcaatatttccgtaggtagctgcttgatgttagttaaggcgctgacctccagattaactttccttgcggcgacaaactgtctccggaagctggtttgcagcttattccagcagtccacggatcctggttctagtttcttgaaccattcttccgcagatcccctta

SEQ ID NO: 364925 - DNA, 679 bp, Cannabis indica
acaacacgctcaaggagaactcaacgtgggagtggctaggaatcttggggaagagggatgaagagcccaatcgtggaggtgccctgtctatgggagaaggtacttatgaaacggagaacctccaccagagatgtcgtctgggagaggcggaccgtcagaacgctgaattagaacgtgatgcagcctcggccagggcggcataggggacgaatgctcaaaatcaacctcaatctggagtgagaagaccacggggcagggctcatagctcacgaaccaagagacaggaaaatgcccaagaagaacaaccggggaaaatgagataccccctgaatatccaaatgaccaaccagaaccctcacacgaaaatgataatgggaggtaaccagaaattgatgaacgagaaattcctcatgaaaatgaggaaaatcttgggaatcagcctggagaacgaaggtcacctgcgaggaatcaccatcgttcttcccgaacccatagagcgaggactcgtgcagatcttaatgggagaaatacgacgaaccgcagtcagggggaaagaacagagcgtgaagaagcaagtgtgaccacgaggcagttaagaacccacagtcaatcaactcgaagaggagaaagtactcaacgagctaatgatcgagaagtatgggaaccagtaaatctgcga

SEQ ID NO: 364926 - DNA, 604 bp, Cannabis indica
tcaaatttatctcttgctattttttttattttcttacaagagaacttttcaacataatgtacttggatcataactctctatgcacatacaccctttccaaatatatttttttagaaaaatttctcttcccacttacattatatttttcatttagtacacaacaaccaatgtttatggtgcaaaataggatcaagataatttatttaagttcatggctcataatcaaggataaatatgcgttttgtttttaatagagaataaaaattggaaaaaaaatttaggctcaaaataggacaacaaaggataatgtattaagattagttttttggctcaaacgattcaaagaatatagccttaatcatctcttcacaacaaagatttaggatttcgcctcaataaattaatcacacaagttctagctatctcaatatcaaccaaatcaaaccaaatctacataagcacataaaatcacaatatatagaataagtagaacaacacataattcatatcgcaatatcaaaagcaagcataacaggttaagcacacaatccaaaagtttttcacacataccaaataatgtcaaagagtttagcataagttcatc

SEQ ID NO: 364927 - DNA, 682 bp, Cannabis indica
tatgccaaattcaagaagtgcgaattttggctgtctcaggtgtcttttcttagacacattgttagcaaagaggggattaaagtggatccaggaaagatagaatccgtcagggattggccaagaccgaaaacagtaaaagaagttagaagcttcttggttctggatggatattatcgttggttcgttgaaggattctctaaaatttcaacacccttaaccgagctcacaaaaaagaatcagcattttgtatggacggataagtgtgaatcaagttttcaggagctgaaacgaaggttaattacagctcaagtgttagctctgccttctgacaaagagaagtttgtagtttattgtgatgcattcacaaaaggtctggggtgtgttctgatgcaagtcgatcaggttattgcctatgcctcccctcagttgaaatattatcaacagcgataccctactcatgacctagaacttgtcgtagtagtgttttctttaaagatttggcggaattacctctatggagaaagatgtgaaatttacactgaccataaaagtctcaaatatttctttactcagaaagatttgaatatgagacagtgatgttggttagagttggttaaggattacaattgtgagattctttacaatcctggaaaagccaatgtagtggttgatgccctgagca

SEQ ID NO: 364928 - DNA, 569 bp, Cannabis indica
tttttttttttataaatatgcgtggatttgattggatcggttacttttacatgtcaaacaacatccaatccgcataaatgcggattttgaattttctaatccaatccaatccaatccgcacaagtgcagatatccgcactttgcggattgaattagattggatcgtgcggattagattagatcgactattttatgaacacccctagttgtagagaaatgactcttttatattattttttactataaaaaatatcaataattttctatatatatttttaagaattagaagtaaattacttaaagattatggtaaatctatagtagttttgttaaaattattgacctctgattcggtcaactaacagcggaaccttatttatgatcaacaatcaccacgtgtaaacaataaaagtaaataaaaaattagcacatcgatttataaaggttcgagcgtctagttttgtgggtaatgacctactctctttttaattgtattgattcgagagataacaccacacagattacatgcttttaccttgcaatttctagtatggctctctatgaatgtt

SEQ ID NO: 364929 - DNA, 882 bp, Cannabis indica
cttcttcacatcaatagatgaatcagggatgcgtttcttctttttctttgccagagatttgggtttgctctgtttgccctcgtctttgccatggcaccagctcaaagaggtgagagaaagctagagagagaaaactttcaccttgcttcaaagttgaaggtaatatataataaactttatcacttatgtagtatgttgaaacaaagaaaaaaaaaaaaaataaaagtggtacatgtaataaaaatcttgtgtgagttaaagtatttatatatctatactaagttattgttacgagcattgcatgtatatttagttatattttttagtttttatttttattatgtgtatttttaaaattttataaattaaaagaaactacttattaatttattaaaataaatatattaatattgtatattaaacaatatttattaatattgtatattgaacatactcctaatattaaaataacaataaaaataataatgctacaaataataaattaatatttatatatatttaacttatttaaaattagtataagttcaattaacctaaactaaataataattatatttatatgtttatttaaattgatctaaattaaataatattaatatttatatatttttataaaattaactctactaacaccgctaaatttaataaaatattcttatattcttaaaatattctgttaaactaacaaaaatagttagataactatattttatatataaagataattaagtaatgcaatcgcgcttcacacaattattataatactttgacaaaaaaaaaatgtataatttatgaaattctttaaagttttttgtcataataataatttttttttgtttgatttatgattttttttttttt

SEQ ID NO: 364930 - DNA, 513 bp, Cannabis indica
tatttttgaataataataataataaattattaaataattaataaataaaattaattagttagaaaataaataataaataattgaataagtaattaatttaaaaattaataaatccttataataaaaagaattaataaataattagataaataatttaatatttaattaaataaaactaatttaaataatttaatatccttacgatataaatattattaagttaatatttcaaataaaaattaaaaaagtttcataaaatgacataagattacctttagttcaactagtacataaaattataaaattcttgtcacactagtcaatttgattataatttattcaatgtaaattttttggtagatgacaatagataagacttgggtgaccatcagaaatcgtgaggatccagcttagtgggaaggtctccaagtctttatggcgcttacgtctaaacacaaagattgtgacagaagaattttttgtccttgtgttaaatgcaagaataccagattg

SEQ ID NO: 364931 - DNA, 605 bp, Cannabis indica
tgtaaccctaatcttctaagtcgcgagacccaaccctaacacctaacaccatccaacggccccaacctgtgaaccctaatcgcagctaccacctgcgagctccaaccccaaccaccatcgttgaattgcaagaagagagagtgacaaaaaatggtaagagatgtagatacagatttggagaaacaaaagaagaagatagcaataccttgatgtttatgggcaacaccaatatcgaacaacattagatcaaaggaaggatcatttatagatatgccattgacgggaagctatagaaataactcttcttgagaaagaaccccaagcccttcgaaggtaaggttggctctaacgttactttcatagtacacccttgtctcgaattttcagaggcaaggttgttcgaggtgcacctccaaaggacccaagttctaaagaccgcttagtttaatttagaaattagcagttaattatgtttaattatagaaaattatttatagatatttaaataattatttatgctgttattattgaattctaaaatgcattttatgtcatttagtgattttaataattttgcatttccgatgcccggtaacatggaactc

SEQ ID NO: 364932 - DNA, 586 bp, Cannabis indica
cttataaaaaagactcattgtcgttggctaaaagcgaagtcaacagtactcatccactgctcggccttgattatatcagtacctcccagaaaaagttggaggttgcagcttcacaaaccgctcaaacacagaatctctatgcgacattataaacccctggttacccaccactggcacaggtgctggtggtaacacttgctcaacaggggcagccggtgctggttgccttaatcggcgcaactcttcctcttgacaaagtatgatacctcgcatttcttgaaacatttgctgccagtcagcaggaggattagcattgtcaaccctcgcattatccccggatgctgcagaggtgcaggcggtgctggtgcattggtttggtcaaccccaggctctacttgctcgccctgtggtctagatgattgcggagggtttatttttcaagtacccctgtaatcaacaaccccagcgagttaagcaccaataccacacttatgcacttattgccttaaaccctaactcaactatttactccacataaataaacacttaacataaaacatttcaagcatggcatcacatatcacat

SEQ ID NO: 364933 - DNA, 587 bp, Cannabis indica
aaatggagttttttaggaattccttcggttatcttctccattttcagaaaatatagagactcatctatttttggggaccaaatggaatttctagaggggcaaaagggggacttagtgcccaggttgacatattgtcaacctgggctatttccgatcaagttcatcaaaaagtgttccaagaattttttccatcataaaaaataacaaatattcaaggaaacttggagagaaaaacaacaatcccaagtccttggaaacagggcccagcaccaggttgacctagggctgggcttagcacctaggttgacaatcaacatagagcgctgcgttcaattgctcaaattccaaatttgatacgaccattgaattcggaatggtcaaagaagggtatgaggcctcatccttaagttcaaaagccttggaagtatgaaaaatcataggagctcgggagtaagtacccattgcccaggttgacaaatggcctggtgcgctgggttctgcttatctaaatttgatgccatttcgaccgtccgtgtagtttttaacaatgacaaagatctatgaagttagagaagtcaaatttacaa

SEQ ID NO: 364934 - DNA, 620 bp, Cannabis indica
acataccccaacaacacaattatatagatatatagattgtgtaatgaaagggtaatagagagtttttcattacactatctaattctcatacacctataaaaattgagtgtaattatacgctgtaatttctaaaactttttattttaattattaagtactaaaagttattatattttttagcaattactagttattttactaaaaaagacattattaatatataaataattattacttcatatcgaaacacatcttgtaaattgtaatgtattttaggaacttaatttatacttataattttttttttaaaaaatcatattaaattaagaatagtgtaacattttaatttcactaatattaattaaagaatttattaatataaataagtatagtaagtttgtataaaattataatatgaatatttcattataattgtagaaattatatttaatatatagtaaaatgatatatgatattatatataaataaatttccaaaattgtcggggccacaactcctattagggtgcatgtcgctccgcccctggtcgtattgtattgtattacataatattgaattggaatatatatcatatttttatataatactatgttaaattt

SEQ ID NO: 364935 - DNA, 512 bp, Cannabis indica
ctattaaggtacaagtaattataaatcagtgacaaaaaaatactgacaaatagtttcttacatttacacattcacatttagtatttttaattataattaagttgcacgttagttgaataatggttttgctactacaatatcatagtattataaaaacatggctcagaattgtcaaatacgcgatctgaacagataaaaaatgattgttgtaatattcatttgtattaaatatgtagaattattagttgttttgtagtttaatgttagttggctcgcaacagatgtaactgttgcactacagtctaatcatagttgccttgaagttgacttcttctttcctttctggccgtcgaagttgaattttttttcaggcaaagacacctacgacttcttcttcactagacgacgaccacctttagccacaggaggagcaaaattagagtcatcattgtcgatgactaggtgtttccctttagccttgttaacatctgatttatgacccattttttgaa

SEQ ID NO: 364936 - DNA, 633 bp, Cannabis indica
ttatttgaaatacgtggatataatatgagttatttgtgaaataaaaatatttttaggttctacgatcctcgagacccaattggaggccaaaaatgtcacaacagttttagttagaaatattgatgggattattaagataggttgattttagaaatatcggggtattttagggtactcgaagttggccaaataccttaaaaatagagatttctttagtggctaaaaaataataagataactattaataatattattaatattatattattattattattattattattattattattatatctaacatcaatagaagaatggatccccacaaaatgagaaaaaagaaagacttgtttttgtgtttttacaattttttttgataaatttgttttacaattttgtttataatttcttttcacaattatttttatatttatttttaggaactttttttttggtcatttttataattttttttactaaatttgttttactaatccttttttataatttctttccacaatttttttttatatttttttgtactaaatttgtttccataatttttttttctacaattttttttaactaattatttttttacttaagttctttttttttttttagtttctt

SEQ ID NO: 364937 - DNA, 723 bp, Cannabis indica
attggctccagttgttccccccagagatgcccagcatgttctggcctgccacctagacccaacggaagagtgactatgatgacgggcggaccccacatcggaggaaccacccgcaaggagctcaaacggtacgcagggggcgtgaaacacgatgaggtttgggaagttactcaactcccaactcaaaggccctggctaatggatcaacccattacattcacgaaaaaagacgcaaaaacaatgcgttttcctcaccatgacccgttggtcatagagacccccatcgccaataagatcgtggccagagtcctgatcgataatgggagttccgtgaatctagtattcaaagaggccttcactgcaataggcctaacggaccgagacctttcaccaagtggttcccaactcacagggttcaatggaacaacacttatccctatgggaaaagtaaggcttctagtcaccttgtgcccggacacaccccagagcactttcaaatactgcacatttgtggtggtggactgcccgacagcctataacgcaatcctcggccgaccgaccttggtggactttggtgcagtcacgtcaatacgacacttgtgcatgaaattcccaacccaggaggctgggatagggaccgtgaggggaaatcaaggggaggctaggcagtgctataatgttgttgcctacctacctgtgttgatggtccgagaaattattgag

SEQ ID NO: 364938 - DNA, 632 bp, Cannabis indica
tcaagttttcttcccaaaatcaatttctaaaagaagagggttcgagagagaaagaggggtcgggtgagagggagacaaatccagaattttgatttccttcacctcaaaaatcaacttttaccaagtatagaaaataaaggtcaaatgaccattttgcccctagggctaatttccacttattcacacatacaagggcatttttgtcattccaagcataaataaatccctattaaattttagattatcacatatcaaagaaaattccaaataacaaatccaatttgcatttcgggcccgaaccccgttcggcccaaaatacccggttctgactataccgcaccaacctgtcaaaacacacctaaaaagacaacacaggcatactatacaataatatagtttcagtaagcacgtaattaaattaattttatcattttacccttctcggatcataattactaaaatgcccctggctcaccaatggagtcttaacatataataaatcatattaattcacacatatatcgaactatataataatataatttctcaattattcataattatctaattcgggttttgctaatccatttcttaattccagggtattaaaatcataacatagtaatctatca

SEQ ID NO: 364939 - DNA, 689 bp, Cannabis indica
taaaagcacttttcattaaaaagaactttttaagggcaattgttatacctaaaattcggctggtacttcagaggaggacacgtgtcaacctaggagaatacaaatcgacgaatataatgacaattatattagaatatattaaaatggaataaatcattaaatgcagagatgatagagtatatctataactcgttgactgtaaagtcttaagcgagacacggatgtacaaactattaattcacatattgatgagaaactatttcatatgtgaatacacgatcataagaacaacatcagtaatacaaagcgaggctccaatctcgctacatatgaagagatgtagacgagacatgttgactgttaaaacccttagcgtataatatacattatacaaactaagcataacagttgaatgaatctgaacaacgaataacgaggcgtccatctcgctataggaagacatactcatggtaccttcactaattagctcctgacatctttcaataagatccactgctctgtcaagtcagctctctcagatagaagcccacattcaaatgatgttgactgctgaagttcaccttatcaccaagaactgtgattgtcagatggagcgttacgtcgagctgttgggttttatgccctaaataaaactctattcaatgtaatctctatcatttaaatatcaa

SEQ ID NO: 364940 - DNA, 526 bp, Cannabis indica
caattacaggggatgatggatttaaaatttacaagacctagtacttgaccttggggtgcaccagttttgttcgtgaaaaagaaggatggaactttacgaatatgcattgattaccaggagttaaacaagttgacagtaaagaataagtatcttttgccaaggatagatgacttatatgatcagcttcaggggaagatcgtcttgtctaagattgatcttcgatctggttatcaccagttgaggatccgagaagaggatattcccaagacagctttccggacccggtatggccactatgaatttctggtaatgtccttcagattaacaaatgccccagttgcatttatggacttgatgaaccgagtgttcaaagactttctggatgattttgttattgtctttattgatgatattctaatctattcagactcagaacagactcacaaaagacagcttcggatggtgttacaacgtctcaggtgttagcccaagatatgtttccaagagggggggggtgaattggaaa

SEQ ID NO: 364941 - DNA, 1095 bp, Cannabis indica
ttcactccgagcagatactccaagtggattccacgtgtcaccattatgcgatgccacgtcagagtgcaaaaattgggataacaaaagataatttgatttgttccaataaaggtaaaggtaaaattgaaatcatcaattagaaaaggggaaagtcaagtttcccaacattagacaactttccataagagaatttttttctcttacaagaagtttcctaaaccaaaaagataccagctgagaaggaatctttccttagaagtaaagagtaattaaatgcacaaaatcaatgtaataaaaacaatttaaatgctcaataaaaatacacattaattaaaaaaaaaattttgacaactaaatttccaaaaaggacctaacaatctccagctttggcactttggataatcaaaatatttttaattaacaaacacctacaaaacaaagttagcgaaacaaacataaaaactccctctgaaaagcacaacattaaactaaaataaaaagctaactttgaccaaagatgaacacaaacataaagctcaactctccctggacagttgagtatacaatcaaaattaaaatcccaatactctccctttttgtttatctataaaggccaaagacaaaaagaaatcaagattttccaaaaattaagatctgaaaaacaatcatgatcaacaattaaacaaaatacaaagaataagaaatcaaatttgaagagaaaactcatcaaaaatttactaaataaagcatatgttgatacttaccaaaagaaaaacaaatgaccaatttttcttagcctataagaaagtcacacgactcctttttttaaatattttttttcgaaaaaaaaacaagaaactaaaatattttatacaaaaatcaagttattctaatgcaaacatctttccaagtttcataaaattgacaaataactatgttatgcttttaaagatgataattaattaatatctcaaatataaaccatacttaccagatgttgagagaaaataaacaagttacaaatcatgtgaaccatgatatttttattttagtagaggagacttacaaacttgtacacacttgtcagacattagt

SEQ ID NO: 364942 - DNA, 380 bp, Cannabis indica
atttgggaccctgccctggacccgaaccaaacccaaaagtggacccaaacccgtacccactgacccaaaattggaacatataccggaagttaaccgggactggaactaggagttggacttggaatcataactgaaattggatctagaaccgcaccctagtctcgatcacgaacccaaactcagaaaatgggacatgggacctaaacaagaactagaccgagacccgtgacagtgatcgagatcttcactccggattcgagtaacggggcctggaacaaaccagtagtcagtgtctagatgtgggactcagactaggactagaacacagacaaagaaccaaacccgaaccttgacctagacctgggacccaaaattagaac

SEQ ID NO: 364943 - DNA, 585 bp, Cannabis indica
actaagcgggctttacagcttagcctcatgtctaaagatgaatatattagacaaagttctaaccatataactcgtggtttcaacttaatgtaacaattataatggtcattatttatagaattttttcaccctcaatgaatatgaataattaccgtaaagtctttggttattaccaattataaagtgggcgcacgttagtattaattagttgatctagatttttgagctgttagaaaaactcctaacattcaaaaacacatacaattgatatgctcaaaagaaaaatagtaattggttatgagttaccagttttttcacctttggtcaattcttctctaaagtgttccaaatcactcccaatcaattttgaactatttatacactttgtaaatgaataaatcaattctacaacagctgcattatcaatagctatcattttttcactcataaacaactaataatatcctttactaatttaagagtgataatgtaaatagaaaaattagacaattttatgatcatttttcgagaaattgcaaattcttttttatgattgtactaaaatattataacatcatattgtat

SEQ ID NO: 364944 - DNA, 659 bp, Cannabis indica
catacacctatttacaaggcttttagatgatcaagaacgttcttaacaaaaagtatgatatttgtaccacatgcactaagtactcatcttgtactagtgttggtagggctgaaccgcatctcgagtaccactaagtgttgtactacatacactccgtacacatccccgtactagtgttggtagcactgtgtcatctttaaacatcatataatgtaccaatgcactccgtaccgcaactatactagtgttggtagtaggggtgttcaataaaatttacaaaccgcccaacccgaataaaccgcccaaatcaaactgaataaaccgacaaaaaatacagcccgaaataatacaatgaaaatccaaaccgcccaatgaatatattgggtggtttacaaattattctaaaccgcccaattaacccgaataaaccgaattaaaccgatttatatattttttaataaaagtgtatatcttatattatataaattacatttattagttaaactattttgtatttaaagtttggacattttaatttttaacttaaaacttagattttatagttaataagttttagtgtatttggatattgaagttaaagtttaaaatctataccatattatcattttttttttattattttattctaattaatttat

SEQ ID NO: 364945 - DNA, 953 bp, Cannabis indica
taaaacttaatttagccctaattaattcatgagaatcaaacaataagattaaagaattgcaaaagcatacaaaagtccattgaatcgcttgaagaagggtatgatcttccaattttgcatcaaaacccttgaaaccttattttcctgatgatgtggattcaggaactctgaaaaatgacgatacgatgcaaaatggggaccaatacctattatattaccaattgttaccaattgttacaacagttggtaatatttattaattatttctaatttggccccacatcaaatcagaaactatctaattggtatccacatattaaaatcatgacaattatgcccttaagtcataaaatttattccaaaatagaccacataaatttgacttatttatttgatgaccccaacacacatttttatatatacaattgtgatcctaattaattctaacaatctcccactgggtcacatatgtatacatataaatgtgttaaccttattgagctcataactttgtcctcataaccataggcatatgcaatctcgtccattaactatatcaacataggatcaaaccagtttttgttctatcaataacaactaaacccatcaatggtcacatatatcggcatagttaaatgacatagatcaatcatgataatgtggtatgaaaattacatgcatggtgatctattcatgtcaattttcaattggtcctactttactttatggagatcaaaactttagcttaaatgtacaaagtgaaataaactgaataacataatttctgatcagaaaaatatccaaatacacatgtttcatgaaataaataaaacacaaaggataataaagacaaactcccactgaatctagatatcctcataatctaaaacacccatacgagcagtgtgctcatgaaagaccttgggtggcaaacccttagtaagggggtctgc

SEQ ID NO: 364946 - DNA, 699 bp, Cannabis indica
agggaaacggttatgggattgctttagtgggagttgaaaaattttggaagaacaaaaatgaaagggaaaaaaccgtgaggaatcgtgggaagttatgcttcaacaatggaggttacttgatctttcaaaaaaaaaaactgaaaataaatcaaaaatcaaatgaaaacaaaaggaaaaaagagagggaagtgattggaagttgattgatggttgatagggaagccacacgtgtctgtgcatggaattgatgtgcaagtggtatatttgtaataaaagaaagaggaaaggtaaaaatgataatgtaagcgtgtaggggtttttttgtaataaattgtgtaaattgtatttttggtgtaaaaatttctattagtattgaggtaaaaaaataattttgaaattaataattaaataaagcacctcgagaattagaaaaaaaaaatagacctagagataaatatctctcccaaaaattattgaaacgaaaaaaagaaaaaaacccaatcacttccccgttataaaatagtgggcatttgatatgtacaattttaaaaattcgataactggaacattaacttaagtttgcgaatatgtgtaatttaataattttacaatttgtatagatataaaaaattcttaagataaaattaattggactagaaacaaaaatatgaaatatgtgtggatataagtttataaaaa

SEQ ID NO: 364947 - DNA, 683 bp, Cannabis indica
ggccttagggccattttcctaaacaacataaataaataaaaaacgaagcctacgtagtaggagacttggacggatcttcttcttctgctgcctcggcctcttcctcctccttcttggtcttctcgtagaaagcaagaatttcctcctcttcttcctccaagaaactcgtgtccatgtcaagatttgccatccaggctcgataaagggtacggaggccaacgttgttgcattgttcttgcgttttgttctctttcccatcaagtgtcaccttggtagctacaagttcccctttaagcttctcgcattcatcgcgttttgcctttgttgccttctcggcatcttcaaggttcttcttcatcctcttcgcttctttagtaaggcgagtaatttccagttgggcttcattccatttcttgaccacaacctcacgttggcctaatgaagttctctacctcgctctccaagtatttaatattttccaagctttgctgctgtgcggcgaaagagaggaaagaagcctggaaattcacaaacaaagatgtataaaaaaaaaaggaaggagaagagaaataagagaagtgagtagattgggacaaagaaagttaccaagaggttgtgaaataaactcctcataagtactccctccaaatccccatgattgattaaatcccaatcatgggagg

SEQ ID NO: 364948 - DNA, 657 bp, Cannabis indica
ttaaatttaaggacttttgtctaatttcattcaattttactgtttcagtgatttttatgtactaaaccatgctccccaaactttgatatgcactaaatcatgccccttgaactttcatccatgttagaatttttttacttaaaattagacaaaagtccttgaatttaacaatctcaatagttcggggggaattttcaatggccaaaaaagttcagggggcacgatttattagccaaaaaaaaataatacaaacatatattactaaacatttgttacttaagttagtaattcgattggaataataacttgaaagtctaggttcaaatcctaaaacctctattaaaagagctcaatattaatgggaaattaacaaaaatattagattttaggcaccaacgggaaaaattacttttatactgccttagactttttttttcttttatactgtagacaccgattatcaagatcaatgcctctatcttccacacccatacacatgacagaaccaccacagcaatacgaaaatacctgaaaaacaaccattaattccaacgaaattgaacaaaaacagtaaaatcgacgttaaataaataatcatagcaaaataactgtaaaacaacactaaaataaatcaaacaaaataaaaagaaaaaagga

SEQ ID NO: 364949 - DNA, 510 bp, Cannabis indica
atttttcatacaaaattatatgaaaaattaaattaaattcgatacaatttatcacttagtttccattaaataaaagttatgacttattttatatacataactagggaactaagtcgcgcttcgcgcggtgtttctaaacttttataatctttatatataaatatatattgtacttataataagtgatataatctaaaacataatattttcatgcatgtttatattattattaattactataaaagaattgattttaaatttattaatttaattatataattagattctattatatcattaattataatttattattttatataatttttttggtaagcatatcaaatattgaataaaaaatatggaaaaaataataataggttgctaactcacattttttggcttataaatatatagatatattatataaatatataaatttaatttgatgacataaaataataataaaaattaaattataattaactgagcaagatcaagttatcaatc

SEQ ID NO: 364950 - DNA, 635 bp, Cannabis indica
gatgaaggaagggaggctagggtttatgtgtatctgataccataacaagatgaagactcctttattattatgctattcccatacggcagaaatgccaaaagtgaaataggaaaatacaaagtacgtatttataatgagagagagagggtaaccctagaaagaatgggccgaaaataaggcccagtcggctaaaatctaatatcgtataagagttgtattgtattaaataacaaatacattatgtttggatgtaacattgtatcgtataaattattacaaccataaattttaatataatttgaatcgtagtatttaatacataataaatgatccatattaacttgtattgtagtatttacaaagggtctgtctggaccccagacccggactacgaacccagacgtaggaattggccgcatccctggatccgaacgccagacccgaaccctagacgttcgggcttggatcgttcccttagacatccgggttcggggtctgggaatgactgggtttggggtctgggaatgactgggtccgggccgaagtcggagttgggatcgagtttatagtaaagataatattagtttgcacaacctattaatcaagtcaataccaaacatagtattatattaaat

SEQ ID NO: 364951 - DNA, 395 bp, Cannabis indica
tttttttttctcttttcttaaattaatatgtgtgaatttactacaatgaacataagtagctaaacagttcactagggtctagacgaagattgtttgatattgatttgtggttttaatatgatttatttttttctcaatttccatgtattctatttcattcttacttaattacttttaattgtctgatcaccaattaactatctatgattttgatgcgagatctgagaagtgagtgtcgattatgctatagtgaaatagaaccgaatttcgatataggatgagagtatctatatggtttggatagcttatagaattattatgcactactaaaaaacctagaattcccgacattttttgtaacaccctaactagtataggcgtattacgtgattttt

SEQ ID NO: 364952 - DNA, 742 bp, Cannabis indica
gcataaaacccaacagttacctaaaggaaaaggcggagtcaaatacgccgtagtcgtggttgactacttcaccaagtgggccgaggcaaaggctcttgcagctattacagcagccaaattgtgcgagtttgtctataactccatcatctgtcgatttggcatcccttacaaactcatctcggacaacggaaagcaatttgattgtaaggaaatgagacaattgtgcgatgagttaggaattaaaaaggcgttttcaacagttgcctacccgcagagcaatgggcagacagaagtcgtcaacaagataatcaaacataccatcaaaggaaaactcgaagaatgtaagggggtatggccagaagaactatcgcaagttttatgatcatacaacacaaccccccaatccacgactggtgaaactcctttctcgctctcctatggatgcgaggccatggtaccagtggaggttggggcaggttccctgcgaagagatgttttcaacattgtccagaacgaagaaaaacagttgcttcacctcgaccgtttagaagaaaagcgcgatcaggctcacctgaaaaatgcggcttatcaacagcgaactgcgcggtatttcaactctaaagtcaaggagagaattctgcgagtaggggatttggttcttcgaaaattcatgccaaacacgaaaaacccggcgcatggggtttttggagacaattgggaggaccatacctcatcgctgaga

SEQ ID NO: 364953 - DNA, 186 bp, Cannabis indica
cttgaagctgtagctgactatgatctttggatacggcaggcatattttggtctaccagaatctaataatgatattaatgtgttggaggcatcccatctttttgctaatcttgctgaaggtatagctccacttgctaattatgtcattaaaagaaaatcgtacaagatgggctactatctagttgat

SEQ ID NO: 364954 - DNA, 1323 bp, Cannabis indica
aaaaagttattttttagtaaaaaagtattttttaaataattatagagggtattttatattgggctttgtgccctaaataaaactctatttcaatgtaatcttttttattcaattatcaaaaagaaacagatttaaattcattacttgtttaatgtgttatttggttcatgtgatcatttatttacttatttgattaataaattcatccaaatccttatcacactgatattcttgattattgtgtcgtcaacatagtagaaagtaattaagattgggtgattaaatgtattcctagatttatcagtacacaaggtttaactgatatgataatctacaacgtagtttacttgcaccttggataagctctatgtcctttccagggcattggtcaaagtaaacttgccctggatgtatggagtatgcatcggaagggactgatattgaacttggattagatatgatagacttaccataatatctatttaattaaatatcacctagctgatcctaggtcaaatgatctcaatcctgtggtggttaggttctagttcagttccattatttgtgttctttaatttattggttaaagtcaaccaaatggtttttcccgtgacgtatatgaacatggtagttcaattgagtgcgagcgctaaccatagatacgtaatctatagcttctatctagaaatagaagtgaaacgatgatttccctcgagcttagctaaatagagataaatgatagagcgctcattttagtgattacattagttcactgaaatatcatttataggttgctaagtgttttaaggataaaatacattgaatggtgtaatggtaattttgtccatactcattgtaaatcatttatagaggatcattaattattgggattataacaatggataactaatagcgtgtctatatcgtggaacatatagagcgttgtatataattgagagtgccattccaagttctatagtggtgcaatgaggaattaataagttagagaatttacttggtaaattctagatctgcttattggaagttcgattgtataggcccatgactcccatactagttgagataaactgcttgtaagactaagttaattgattttagttaatctattatgattctaaaattagactatgtctagtttgtgaattttcactatgttatggcttaattgtgaagaaatagaattttagggttaatttattaattaagagactttgtggagtctaattaataaatattataaatgataattttatttgataataattttaattattaaataaatagttttgcatttatagggtt

SEQ ID NO: 364955 - DNA, 926 bp, Cannabis indica
tggaactttgagagttgtcctcatacaacttattctcaaaaaattctacttctctagattcaattacaacattggattccacatccaatagcctatatgccttactattgttggcataaccaacaaatgcacattttatggcccttgaacccaacttggttctatttggttcggtcttcttacaataagcaagacacccccacactttgaagtaaccaatatttggttttcttcctctccataactcatatggagacatgtcatttttcttcataggtattctattaagaatatgacatgcggttaaaagtgcctccccccataagttgttgttcaacttagagtacactatcatagaattgaccatttcaagaaatgttctattcttcctttcggctacaccattttgttgtggtgtatgtggtgccgaactctcatgaattataccattttcctcacaaaaatgagtaaattcattagagaagtattcacctcctctatcacttctcaacacttttattttcatgttaagttgattttcaacctccgctttgaaaatcttaaaagcaccaaaggcctcatccttttgctttaacaaatatacataagtatatctactataatcatcaataaaagtaataaaataccttttaccacctctagttagaataccatttaattcacataaatcactatgaattaaatctaacaattttgaatttctcacaacatttggaaaaggttttttaatcatctttgcttttacacaagtttcacatttaccataattccttatatcacaatcaatcatgccacattttttaactcttttcatagtagaaaaaccaatatgagctaatctaagatgccacaaaaataaagaatcatgctcaatcatataagtggaactagaagctttattattg

SEQ ID NO: 364956 - DNA, 1149 bp, Cannabis indica
aataataatattaggtgtatcaatataaatttgacacatgtaaaaagtatacctataagcagtctatattgacagttaactctgtaaaaaatgggtgacaccttaaatttgcaagcagttcaatagagggtttttccatctaaatttgagcttagagaattaagtgcaagtgaagtgatagttgagagaatttagctgcaaaaaactattttttaaatttaacatgtttgttcaatggtatatttatacatcatataattagagacaattaacagattttgtttggtaaatttgatacgaaagtatacgtaatcaagataaataatataatgataaataaagtatcgtttcctcgaacattgattatcaattacaaatcaattaattattttattttatttgatgaattgtttgataaaagctaaatgaaacaaacaataattaaaatttaaataaataacaatgataaagacaagaattattatgatctccaatcatcctttattttatttcataatgtaattactctatttttgttcttcttattcaattaataagttgagttaagaaatttataatctggttaagacttataaacataagtgaaaacttcctctatttctatggtaagtttaataacaaatattgcattaagcataacaactaataaaatcatacaaacaacctaagtactttcatcttaaatcaatttgcatccatatcaactagagcatattcaaatctcaacttttagaattttgatttgaattcatatataacaattaaagttgaccagtcaataattgcaaaattagaacatattgtatggaattaaataaagagaagaagaaaaaaaattgtataatcacattaatttataaaataaactcaaatggttaacgtaataattcttaaaagaacttagctactaaaagacaatctaaaataaaagaaatttaactaaagacataaaagatagagataaaggagaaagaacattgtttggagtcctccaccggtgccttctgctccttgctctccttccacacttagaattcctctcaattttcgaatgctgctcatcacagtggcggagctactccttagattggagtggccatggtgttggaatttattttaccaggatct

SEQ ID NO: 364957 - DNA, 604 bp, Cannabis indica
acttgattccgataaaaattgaggaagttatgaattttggaagattggatgccatggctgtcgaatgggtgctcaatcgcacgcaccaggcttcggacaaggcagccatgcgcgcgcgcgtgcctaggacaaattttggtctgaagccgtgtcacgtcgtgcgttcagacatgatggcacgcacctagaggctaaacccgctgagatttctcggcgcctcaccctgcagcaggctccatccgcgcgcgcataaggttgtttgcagcctctcgaggttgcacatgcagcctactgggcagccaacaccaaaaagaaatttttgtgagatttttccccaaatttcaaaattttgcaattttcaaaccctaaaattaaaattaattattaattttaatatatttaaacttaaatatcaattttaaattaataatatttattttttaatagattattattaatctttgatattttgaggtttaaatttaaaaattgattattttattttttaaattatggtcagatttaaaaatttgttaatttctttaatatttatatattatttatttttaaggttagatattttaatattgaatatattttaaat

SEQ ID NO: 364958 - DNA, 614 bp, Cannabis indica
tcacttcctcttatcttagtcaaaagataaaccttgagaaacaatatagacacatgtgttttttagggggacgaaaacaaagccatcttaaggctagtctatactccctcggtttagaccaataatggaagtcgtaggttacattgatatgtactcctttttccactcactattttacgttaatttgtttgttttactaatttttagaattaatacacattaaccactttaataattatgttaaaattattcataatgaatcctcaaattatacataaatattctgtcataatcattaaatttgaattcataatttagaactctattaaattagggttttttttctattatacctttattacatctaaactttacttttttatctccaggtacaaaaataaacaaaaatagaaaagtaaactttcttttttcaaaaatacggtctctacatgagactttcccaaaatagtttctcccaaaagttttagatcttaaatcaacatgaacatgaatcaccaccaaaaaatcctatatcttctccacaatcgacgtattctccaaacaacaccactaaagatgtagaagtttttgtcgaacaccatgaacgccggcgg

SEQ ID NO: 364959 - DNA, 601 bp, Cannabis indica
caaccaccataccaccaccaccaccaaaaataaaagatctttttttttaggaaaccaaaaccaaaacagcaaacaagagtttcatgaggaatcacaccaagggaaagagaaggaaagagaaatggagctcagaacaagtcctggaacaccatcgacaatggctggccgagagctccaccagagcactttcgtgcatggtggttgttctcggtcgatgagttgtattagggagagaaccatgggatctgaaagttcttgagaagggaaacacaaaactgcaactcacttcgctcaaagaggctcgaacttggccagattgaagctgagaagccttggctccggcgagcacctgacagcggcgaaatggtgaagggggaacatggggttggggttttcgatgcctgataatccatttctggggtttgtgtgggctaaagaggaccgattgaggtggttcgttcggtcctcaacttcggcgagctcctatgtaaagaccgcatatgattaataccttggattattaaataattagggtttatgtatgagattttgttattatttataaaaaatacatattatgggaatttatttgagttcgtat

SEQ ID NO: 364960 - DNA, 502 bp, Cannabis indica
cgccaaatctttagcgcaaaaaccactactgcgagttctagatcgcaagtagggtgcctctgctcatactcctttaactgccgagaagcataggctattacctttccagcttgcataagcacacagccgagaccttgtctcgaggcaatcactgtaaaccacaaacttttccttatctgaaggaaaagttagtactggagcggtaatcaagtgttgctttaactctaggaaacttttctcacaccgatcagtccaaacaaacttcaagttctttcgggtcagctccgttaagggtacgacattctttgaaaaaccctcaacaaatcgacgataatacccagctcagcccagaaagcttctaactttagtagcccattttggtgttggccaatgccgaacagcttcaatctttgctggatccaccatgatccccatctatatctactatgtgcccccaagaaagagacacgagataacccagaattcacacttttttgaattt

SEQ ID NO: 364961 - DNA, 581 bp, Cannabis indica
ttttgtattttataattttttatacttgtataatagttgtcataagattatttttctagttattttttattatttttatagtttatttatatatgtcttgaggttgatttatgatttttttagttgtttttttttttaatgagaaaagtatatttttttttaattaaaactttacaagaatattgttgcaaataaaatatataaaaaatatatttttgaaaattttcctattatttattccaattaaatgaattttgcattgttaatttttactaatctattatattttattgtatatgtatataatttgcagacatatattcaaatggaaaccacaaaaaatgaggagaaaaagaagaaaatacatatcaaactacaattaatagaatcatgtctaaatgatcatcaaatctcaaaggaaaaaaaagcaagtgtcaaacgatatgtacaaagcataattaaagatgatgaaaagggattgaatcagaaacatctctcttatcttctccaactcctagatgaaaaaaaaatcagattatatatgaggtatttgtttataattttttttgttaatgtagtgg

SEQ ID NO: 364962 - DNA, 927 bp, Cannabis indica
cccaataagatatgcgagtaccacaatgacattgggcacaacaccaatgaatgcaaaaatctcaaagacgagatcgaaaacttgatccgattgggacatctctacgagtggatcaagaaccggttgccccatctcaacccgggtcaggcagctggagctttgccacaaggagcgccagggggtgtagcagcagcattagctccagttgctccccccagagacgcccagcatattcccagccttccaccaagacccaacatgagagtggctatgatctcgggaggaccccacatcggaggaactacccgcaaggagctcaaacggtacgcatgggccgtgaactacgatgaggtctgggaggttactcaactgccagctcaaaagccccggctaatggatcagcccattacattcatagaagaagacgctaaaacagtgcgttttcctcaccatgaccctttggtcatagagactcccattgccaataagatcgtggccagagtctttatcgacaacgggagttccgtgaacctttcaaagaagccttcaatgcaataggcctaacggaccgagatctttctccaagtggttcccaactcacaggatttaatggaacaacacttatcccgatgggaaaagtggctcccagtcacgttgtccccggacacaccccaaagcactttcaagtattgcacatttatggtggtggactgcccaacagcttataacgcaatcctcggccgaccggcctaggtagattttggcgcagtcacgtcaatacgccatttatgcgtgaaattccctacccaagaagttgggatagggattgtgaggggaaaccaaggggaagctaggcagtgttataatgttgctgcccacctacccgtcttgatggttcgagaaattattgagccagaaatggcgaaa

SEQ ID NO: 364963 - DNA, 414 bp, Cannabis indica
aaaatcacgtaatatgcctatgctagttagggtgttacagacatcacatattggattgacttacaagagagtttcaaaaaaagtaacattgaaaggatatgtggatgttgattatgcatcaaaaaatgatactagaaggtctactacctcttatgtgtttcaaactaatagagattgtattagttagaaatcacagctccaatccgtagtagcactttcaactacagaggcagaattcatggcgaccacaaaggcattcaaagaagcaatatgactacaaggaattctgaaggagttgaatcttctagtttgaaaggcaaaggtatagtctaacaaaaaacccttgattcatttgtgtaagaatctagtttatcacaagaagacaaaacacattgatattcggttgttttggat

SEQ ID NO: 364964 - DNA, 584 bp, Cannabis indica
aactgaaacaaagcaacaaacaaaataagagaaaaaaaatctaatttaaagcaaaaaaatttagtaataatattagcaataatttaagaattttcaatccccgaaaacggcgccaaaaatttgatacacaatttttactacaagcgtaaagtgttgttatagcaaagttttaatactaaaaaggttgtcgaacccacagagattgattattaaattttactaaatgtaatactttttaattttatactttaattagacaacgcaaagtaaattataaataataagataaatagaaaaataaaataaacaaacaacaatttttaatcaaaaagtaaaaacctagagcattgatttccctatttcaaactatgaaaatacatttatcgattatcccaatttatcctataatttgtagtttcaagaatcctaatgtaacctattaacctctctcgagcgatgatagatttaacttagaataactaacacgatatctctattcaatgttaatcaaataagcactcataaagcaatatgattctctttaaatgaaactcaagaattagtggaatctctcaatctcacac

SEQ ID NO: 364965 - DNA, 395 bp, Cannabis indica
tagaagtgaaacgataattttcttgagcttggcttgatagagataaatgattgagacctcatttcagtaataatattagtttactgaaatatcatttataggtagctaagtgttttaaggataaaatacattgaaaggtagaacggtaaatttgtccctattcgatgtagataatctatagatgatcttcgactgttaggattgtcacaatggataatcatagcatatgtatatcttggtacatattgaacgttctatataattgagagtgcaattctgaatctatagtgacgcgaggaggaattaataagttagagaattttctcggtgaattttagatctacttattggaagctcggcccatggtcccctcactagttgagacaatactgctt

SEQ ID NO: 364966 - DNA, 645 bp, Cannabis indica
acctgctcttcatcagcttcatcttcaggattcaagggctcttgagcatactgctttgcccttacacctcccttcaacttagcttcacgcttaagttgaatgagttcattcggcccgtctagcaccagatttcctcttcttccccctcacggacttacgaatgaagtccttgggatagagcccgtacttcacaaaattatcctcgaaggtgaactggataatattccggtcttcccccgatagtcaagcaagcttttgagctctatccctgagagcaagagtgaggggagggcggtgatatgtcagaatctgctggaaccgagtacgagtgtatgcccgtgccgtccaccacgaagtactcataagcaaaatgcccaatcttgctgatggccgaatcgtccgtgcccgtcaaccacttgaagcctggttgagagatattgaagtacccccgacctggcttggcttgggggtagactcaaatcgaagaaccaggaaacttgtgaggagaaggcataccccagtttctgggaagcgttggggacgagagggcagacagatatttgatgcccttaggagtgaactgggccgggcagaggccaaagaaatcctccacattcttgaagtattgatgcaaatgcatcaatg

SEQ ID NO: 364967 - DNA, 537 bp, Cannabis indica
atatatatatatatatatatataggtacatatcattttgtcttgtgactgtactttcacggaatgtattccgtgatgtacgacagccgattaatgagttatttaatttgaagatgcagatgtaccacagaatgtactctgacaatcatctaatgtatcatgagacccatctaatgtaccactgaatatatataagatgcagatgcagtcacgcagcgtgactggtcctgcaatctttctttcttttctttttttttactttggtatggtagaaagcaccgtaattcttcgttaaaatttatcggttataattttatattttacttttattaattatatgtaaataattgtcaaaaaaagttatgtttaaataacgacagatatagtgtgatataagttcacttattgaaactaaaattattagtagtcgtctaaatgtaagtctatgtaatttgttttactattatctattaataagcaaggtttagaagaaaaaaataaaataataattaacaaaaaatttatgaaaaaaaaaaaa

SEQ ID NO: 364968 - DNA, 584 bp, Cannabis indica
atctcattctccttttcatcaagaagtcggttgagattttttaggtgttctcatttcttgcattttatatatatatatatatatttaaacaatgaggatattgtctgattttagttgggggtggtgagcatatttcaagcgtttttcttaattttttgtcatattaatattttcatggtcaaaattttcaaaaattattcatttattcttgtaaaatattattttcaagccaatttttactatctttattgcttagaatttttctagagttatagaatgcacatgccaaactttgtggtaagatggttgttagcacatatttgcttagaaattttgccaagtttaagtgttcatattttttttttgagtggcgagatttggaaaacaacttttgaattttcattgattcttagaaatggttataattattttagacatggtactagggtttgattggatgttgctttaagggatgagttttctatagacaaatcttattagggagcctttttgtaattattttcttgttgaaagaaaaaaaaaaagaaaaaaaaatacaagagcaacatttccatcattatatc

SEQ ID NO: 364969 - DNA, 1025 bp, Cannabis indica
agtttaataataaatacatgtttattttttttattattgttctttttgtttttataaaattcaatcaaactcatagcattgatctaattaacgaaatcctatcacgtggttagaaattttcatggttttgtcatagaatttttctcgaattttcatgtggtttttccttttagtgtttgagttttgggattaacttgttgagatttgttatatattagattgtgaggaaaccagcacaccttttccttgacgagcttggtattgcatacgatgagcaagacacatacgtggtgatcaagcacgctgccttgttcacctccaccatcatgagcaagcttttggccaggccaaacgtcaagctcttcaacgcggtggcagccgaggacctcattgtcaagggtgacagagttgcgggagtagtgaccaactgggctttggtgtcaatgaaccacgacacacaatcctgcatggatcctaatgtcatggaggccaaggttgtggtcagctcttgcggccacgacggtccttttggcgccactggtgtcaagaggctgagaagtattggcatgatcaagagtgttcctggaatgaaggcactcgacatgaacgccgctgaggatgccattgttgatctcactagagagattgtccctggaatgattgtcactggaatggaagttgctgagattgatggatcacctaggatggtaagtaactaattcttgcccatatttttatttaatcatcaattaggaaagatttattgtctaattgtgaaataattctgtccattcattttgttgtgaccacttgatactttagtagaaaccaataatgatacaagcaactttagtggtagttttcctttacagctaggatttttcttttcactaagaaattttgtggcatatgcttagtgtggaccaaatatcccatttcatttatgaatggtacttttgctttttcttggggtcatttggattaaaatcctatgtctgtatatgctattataaagtgtgatacaa

SEQ ID NO: 364970 - DNA, 558 bp, Cannabis indica
ttttaagtttcatttatgttgtttttccatcttcctaaaattaaaagttaaatgtgctggcaatacaataacaacacaaatataactgaatgtgagaagaagatattgcaaatatgaagaaatttatatatactgatgcaataacaacattatagtagttgattttgagttgttttgtgtgtttgctataattatttattcatcaatcgatattattttagttgaaagcaacaaaaactacacaatatctaccaaagaataattaagttgttttcatattattgtgaagtttttgcaacatgaaaatattacataaaattaagttattttcgtgttattgtaaaatttgttatgaattactatacactacactagttgttcaacagtaaaaaaatagaattttacatgtcaaaacaaaaatgtatcttatctcttacattaagacatgtaaaataagatcacacattatactaattttgaataaagtgtgaggattgataagaagagattgtaaatatatataaaaaaaaattacttatatttagtaataatattgtt

SEQ ID NO: 364971 - DNA, 581 bp, Cannabis indica
ttttgagtcttcattgttggtctaacttaacttgttgtttcaatgggacaaatcccaaaggattgtcatgaattagacaaacataatagtgttagatctcaacagataagtatttgtaaatgcaacatctagttttacatctaaagatgacaacatagcttagtgtttacaatatgaaacaatgaagatatttataaaataagaataactttgactctcgcctactatcacattgttagattcttattctaatcaaaattatcctttatttttcctcttagcttttcatttagaattttcttagatagtatatcattggaggaatagtttataaatcatctacttatgatgtcattctattttcttctatgaaattgaatggcgcaaatgactatattcatgacatttgatctcgaaataatataaatcctcaatctagaaatctcctacttgtatatacttactaaagacaacctaaacttagagttagattattagtggaggtccaagctaggataattactcatgtatatttggtataaatttaagtttttgactttaaattttagattccaaataga

SEQ ID NO: 364972 - DNA, 476 bp, Cannabis indica
ttggggttatgcgtcaccctgtggatggtctgcatggaaagagtttgacgctggatatcttgattttgcgagagaccctagaaatgtacgtttaggattggctgccgatggatttaatccttttggatatttgagttaatcgtacagcatgtggcctgttgtgccagcaaactacaatctccccccatggctttctatcaaagataataatttcatgttgagtagtcttattcctggttcaagatcaccagataaggacatcgatgtatttcttaggccattggtagacgagttgaaagagttgtggagtaatggggttcaaacaagagatggcaatacaaatactatgttcagcatgagagctgcccttttgtggacagtgaacaatttccctgctcgtagtagtttatctggatggagtggtcaggggtataaagcttgtcctacgtgcaatgaagatactgttgggttttgtg

SEQ ID NO: 364973 - DNA, 445 bp, Cannabis indica
atcgaacctaaccatgtcaggttccccaactggaagaccggttctgtggagtttcctggggaccaactggaattttagttcctacaggtcccactgaaccggtcgaccggttcagtgtaggaaacaccaaaaactccacaaacacatcaatttgattccaaatgctaccaaaccttccagagtacctatttacactacaataaacagaatccaagcaataaaaccagccaacaacctcagtagcaaaaaccaccattgttaaaccaagtttgagttcataaactcaaacttggttaacaccacacaaaaaccttatatctaacaaaattaagcctaaattaactcaacttaccctcagaaaacatcagcaacacaaatcaagcctaaacaacaactaacacaataaaatgtatgcttgaaccaaactttaaccatgaaaaacaaa

SEQ ID NO: 364974 - DNA, 1078 bp, Cannabis indica
ttcatatttaggatgttaattcaacatacttgttagtaaatctagatcctaataaaatattcccaacatgaggttgactgatgtggtttggattcgctttgcaattcttatttttaaagttttttccattgggtttcagaataacagtggatcttttattagtgttgttgttgtttccaacaacaagcaccttttccttttggtcttattttcaagcttcctcctcaatttgaagacgagtgattagactttctaacgaaaactcttttgttttgtgtatgagagtatttttaaaatctttccatgaagggagaaatttatcaatcataacaacaacttgattcatcaatagttatacctttagacagaattttgtgagctattttttgaagctcgtgagactgggcctcggctgatttatcatcggtcatttaaagcttcaagtagcggctcacaatgtatttctttgttcctgtctcctctgtacatattttttctataatgcttcccatatctccttggcagatttgttgaaattataataatcatacaaatcatcacacagaccattcaaaataaaattcttacacagaaaatcattctccacccaagagtctcttttcttaacatgcgattcgtacttctcgacttcatccttcttctcggcaagaggtggagtctcagacacatctagtttcaaaacagccagcacaaacacaacttttttcatagtcaaaaaaaaaatcttttgtcttcaacatttaaaatgcaaaccctcgaaacgaaaaggcttgttaatgtcagcagtagaaccagaaaagttattggtagtagtcatagcagagggaacgtcttaaaattgttgactaaactgctagcaaaagtaaaagaggaacggtattactgaatgaaaattctaggttgagtcgtggactaggtccggcactgcccaggattgtacaaacagtcagaatttgtcgatcgtccccaagataaaacaacctagtcgtattgtatcgaaaccccactatactgtaaagaaccgtcgatacaccttaaaaattatgatatcgcagat

SEQ ID NO: 364975 - DNA, 729 bp, Cannabis indica
aacatttatttaatctctttgttaatctttgtattatattgtaatagaataataatatcttgattttattaaattataataaaatttctaacaatcaaaagtttaaccattttcaatgtaaatcaagattttgagaatgtaaaaataagaaattttgtgcaaaagccattcatgggtgagcatgatgatatattttgtgttttactatttgaataatagtaatttatgtattaccctattttgttgagataagaaagttttatatgttaatagttagagaattatatatgtatatgtgatatatatatgatcataaatttatatcatattaatatatatagtgatatataaaatgatatttgaatttataacatgtttatatatgtatatatgagatatataatatatatatattataaatatgagtatgtgtattatatatatgatgagcataatataaacataaatacacattgtgagattagatgtgtaaaagtaattattttctatgtattttatatgagacatatatataatatacattatgtgtatataatatatatcatatatgtgtattaaagtatatatatattatatatgtctgagatatatgtaacatatataattgtgtaaaaattatcacatatatattgtgtgttatatttaaatgggtaatacccattgatggaaactaaaaaaattaaataaggtaataatctaataaccttt

SEQ ID NO: 364976 - DNA, 512 bp, Cannabis indica
agtaagtaaattactagtataccataagccatagatttagataatcttaagcctactatactaggataggaagttttgtcaaggccattgaatagacttatttttaaaatttctcttcttgtgcttgtattagaaaacctttagttactccatatgaatggttttaactgtagttttctcagctttgcttcttagttccttattctgactatccattacttgtttaaattaacaatagattttatcaccggtgtcttccaagtcataatagggtgagttccttgaaaccctctcactacgacaaggaaacgtgataatctgtctaggaacattattggtattatcctcatgggttgtatcatgacaacagaggcagtgggaccatcttatatagaataagatgatagaacactttggaattgaaaatatctcctttactttgctactttcttttttagatttagtcattttcttagaaaagtagtatacgtttaaacaaatactttcttatc

SEQ ID NO: 364977 - DNA, 557 bp, Cannabis indica
aacaaaaacaaaaactaaactaaactaaaaaaacgaaaacataaactgaaaaacgaaaaaacgaaaacataaactgaaaaactcgaaaaaaattaaatctctcccccaaactaaagatgcacattgtccccaatgtgttaaaataaaattgtggttgagagacttacctgagccccatcagaaggggtttggtggacccttttcatccaaaagagccctcatactaaatgaagaaaattgaccaccaatagtgttgattttagagttttgcacaagagtaagctcaccttcagaactaccacacatcaatcttttccaacgacgccgaaacgttcgaagtccctctttaggctttgctctcttcttatcagttttaacaaaagaacccttcaccatctcaatcttgcaacaggtaggaatgtcggttggggaaaaaacattaaaattgacctcttcatcttgcactcacaactttaactcccccttttgcacatctattaatgctcgccccgtggctaagaatggtcttcccaaaataatgggaatagttgaatctt

SEQ ID NO: 364978 - DNA, 650 bp, Cannabis indica
ccgcagaaagggatgtgtgcttggtcaggcgctcatactaagcaaggggtaatgttgcctttgcactcgtacttcaagaaggtggcagatttttttcgcctttgtccgacccagtttactccgaagggcattaagtacttgtctgccctgttcgtcctctatgccattcaaggatggggtgtgtcgtctccgcacgaggtcaattggttctttgacctaaagtctacctccaagcaaagcaggttggggtacttctacatctctcagcaagatttcaagtggttgacaggcactgtggacaaggtcgttagcaggctcgggggttttatccatgagtattactttgtggaaggcatggacaccacctttactcagtttcaacatatcacaatatattatcgtccaccccttacactgactcttagggacagagctcagaggattctccaactgccagatgctgctcaaaatatcactttgttgacctcagaggtcaactttatggagtacgggctttatccagcagactttataccccagcctgtgaaggggagaaagaagaagttgttgggttttatgccctaaataaaactcatttcaacataatcagatttacttattaataaagatcagaaataacattttatgtt

SEQ ID NO: 364979 - DNA, 563 bp, Cannabis indica
tcagtgcaactaaggtggtgaagggttggcacctttaagagatacccttaggccaacccttaggggatacctaatgcgctaacccttcaccagtcaaagtgatacttaagtttttgtgaaagatcgtatagtatacaattgtcattcatataagaacacaatccagattcatcacttgataatatcctactacaagaagagaatcaagagttagagagatttaactgaaggaaccaatttatttaatcgttttgcataaagcatgttttaggttgttagattattatgtaaataattaatcatatatgatagcaaattagatcctgtactgttgcaaagtaaggctcttcaaaaaaattaacaaaccgtcaaacctgaataaatcgcccaaaccaaactgaaaccgataaaaaatacaacccggataactttacgaaaaattcaaactgcccaatcgatatacattgggcgggttaaatattattgtaacccgtccaaataacccgaataaaccaatttatatactttttactaaaattatttataacataatatataaatta

SEQ ID NO: 364980 - DNA, 716 bp, Cannabis indica
taacagttttaggtgattccatcttcctagactagactttgtacatttggttcaaccacacccatttttatattaaaatgttagaattttcgggctaagttcaccaaatctaagaaactttttaattttaaatacatgacataaattaaaaggacaaaagaggcatataaaataccatatcttgcccataattgaggttcaactcccctgcattccaagatcaagaatggaagcttgggcttcaatgctttcaaatcttggtagtttttctctacagatgctctgccaaataaaagagcacaaatcatttctgtaagtcattaacaaaagtccttattttgagttaattatgtgttattatttgttaatcttacttttttaataaaaataaacagtttcattatcttatatttttgagttatttgtgtgatattatttgtttttatttatttgttatggaaccggttctgtatatatttatgccttagtatttttggaattgatccccacattttcttcagaaaaacattataagcagttttatgaggtattatgtgctatttatttttgttcattttgttgtggaactaatttttttttaatttatatttcagtactttaggaattgatttcttctttgtcttttaattataaccggtttgaattattctgtgttatttatttttattcattatattatagaaccagttctattt

SEQ ID NO: 364981 - DNA, 620 bp, Cannabis indica
gtggagtggtgtgggaagtatattacaggtttttcagcaagttaatgggaggactggttagtggggggtctcggcagcagcaacatgggagtcgcctggtgttgggtcttttgtggttaatgtagatgctgggtttctttgcacaatgaaggtgcgtcttcgattgtggtggtgcgagatgatgtgggaggggtcaggtttgcttcggccactgttgtgcggtttgcacggtctccgttggtggctgaactgttggcgatacgggagggattgcgtgcaggtatacaacgtcgcctggcagtgtttcaggttcaaacagattgtatgcaggcagttcgtctacttcagggtgaggatatgggttgtcgagaggaggagggtcttattatggagattcaaaggttgcttcaacattgttctgtaagtggattgcggtttgtatttcgggaagctaatgtggtagctcatgtaatagccaattatgcttcgagaaacaaagttagtgctatgtggatcggggtttctcccccttgtgctggtcacgcaattgagcgtgacttgccatttccttgtaatcggtagtgttgtttaatgaaatccttattctcaaaaaaaaaaaa

SEQ ID NO: 364982 - DNA, 490 bp, Cannabis indica
cccagaaagtcagaagtccatcatcacctgacatcgactttatttcagacataacggccttcccttttccagcgaagggattggatggacgaacaggtgaaatgggctcccttatgcgaatggcatattcaacgggcctgggcgtggtcgggagtttcttcttcctcttcaaaggagtcacctgctcagcctcagcctcaacttcatcttcaagattcatacactcttgagcatactgctttgcccgagcacctcccttcaacttagcctctcgcttaagttgaatgagctcatcctccttatgagctccttcaggtcgagcaggagcagatttccccgtcttccccatcacggacttagaagaaaagtcctctgggagaagcccgtagtgcaccagatttgcatcataaaaaaaactggttgatatccctgttggaattattttaccaggatctagatttactaccaagtatgtttgattaacatccta

SEQ ID NO: 364983 - DNA, 666 bp, Cannabis indica
gtgtgggttcgcgtcctgggtcttggtctaggttgggtccgagtcttaagttccaatcccattttgagtgttgattcagttcagggtctatgtccttggttctaattctaggtgtgggtgtttgagttcgggtccgagtctgtgttcgggtttgtgtccaaggtctggactccgatctgggtctaggtttgggtccaggtctaagtttgggtcctgagtgcgggtccaagttagggtctaggtcaggatctcggtgcagatttaggtccagcatttccatccaagtctcggtcttggtctgtgtccaggttcgtattcgatccctatctaggtccaagtctgtgtttgggattgggtcccagatttaggtccaggttcgggtttcagttccgctatgggtacacgaccgtgtccgggcccgagtttcaatctcagtttgagtctaaggctaggtctgtgttcggttctaggtctgggtctgagtcttggtctaggtcctagtgttgttctatggtaatggttcgacaattcttgttcaggtttgaatttcgggtcccaggtctaagtctgggttcgggtttggttcttcgtatgggttctggtcctagtctgagccccagatctagacaccgactactggtctgttctaggccccgttacctaaat

SEQ ID NO: 364984 - DNA, 589 bp, Cannabis indica
cccccagtatcgcagacaactttttgtcctcgtttcctcgtttacccgtgaaaccttagtcgcctccgtcatgaatttgctaatgtaggcttggagaggctctcctggtctttgatttacttcgaccaaatctcctaggtgcaacggaagtaggcgagaggaggagaattgtgcatggaaatctgaggagaaagccttccatgagcatacatctcctcgtactccttgaagatccatttgcatctcgaaatacttgaggtgggataagggatcttcctttccatacatcttctaggttggcatcttgaatttgtggggcaactctaggatattaatctcggaggagaaagggattcaacgtgctcggtctaacttgagatcgttgttcctttgaccggctaggccttggaacatatttttttagttcatccaactgtgcgtgcacggctggactaatctgttcagcctcttgcccgatcagagtcacatcagcatctttttgagcgcgggttccaggttgcacgattggcgtgtcaagctgatcgtccactcctctcctccttttcagatcgtttatgagatcatgagt

SEQ ID NO: 364985 - DNA, 339 bp, Cannabis indica
ggttggtgttttaagagtaattgattgtggattgtgtgttattggattattgttgaatgtggagaaaaatattggccgttggattattgttggtgtgtcaattaagtttctgctaaaaataatttggggaaagagaaaaatacaggggaggtgctgcccacaattttttacactagaactagtattttcaactaattgattggtatggcaaccaaaagagtaaaaacacgagctaaccgctgcatgcaaggttcatcatcacatacccctaatcctcaagatgatcaaaatcaacaactcacaaggtttgtgaataacctagcagctaaacggtatgag

SEQ ID NO: 364986 - DNA, 696 bp, Cannabis indica
ggggaaatacgacaaatcactcttgggaggaaggaacaaagcatgaagaagcaagtgtaacttcgaggcgatccagaacccatagttgatcaactcgaagaggagaaagtactcaaggagctaatgattgagaaagtatgggaaccagtaaatctgcaagccactcaaagacaaaatctatgagtaggacgcgatctatgagtaagacaagatctgccagtaattactcccaattggatctgcgagagcacttgaatcagaagaaacctgaccttcgccaacagcttggtccaaagcaagaggatccattccaattacggataaacaagctagaggacaagttcaggagatatcaagtgggggaattagggaaactatctcgatacgactttgacgaggagcttgagccgtatcaccttatgaataccccttttcctctgggattcaaaaacccgcatgtctcatctgatgacggaaccacagatccaatattgaatttgaataactttaacacaataatgcgagccagtaatatgacgaagaatttacgctgtattttgtttcccacctcgctggttggagcagcgaatagctggtttaacaagtttactcaccattcaataacttcctgggagcagctgtccagggatttcaaaaagcaattttaggctgatagggatagggaacctgaagcag

SEQ ID NO: 364987 - DNA, 551 bp, Cannabis indica
tatttttggggaccaaatggaacatctaaagggccataactgggacccagcgctcaagttgaaacctggtgctgggcccagcacccaggttaacatatcctcagcctatatgtcaacctaggctgcttccaataaagttctcaaaaaagtgtttcgagcatttttttgttggggattattttaccaggatctagatttactaacaagcatgttcattaacaccctaaatatgaattctctaaaataataaaattaaacacatataaagttaagaaaccttacattgattgaagcagaattaaatgtctccttccacttaaatctctaacccttgttcctttctgtcgcagagtattatcaagatttgagcccgattctccttgtggtgttggattcttcacggtcttacacactatgattgagtactagacttgctatgggtgagcatgtactctttcactatgaggctcaaaaatatgaagaagaagaagggagaagggttcgaattctatagaaggaggttctcaggtttctagttgtctgacagagaa

SEQ ID NO: 364988 - DNA, 770 bp, Cannabis indica
ataatagtatttcatggctgtttgattagaaaaaacagaacttgaaaataagaagagttacttagaatttaaaggtcaaaaaataatcattttttattggttaaatgattgcctttgattaacagatcttaacttcattttttaaataataaaaatattatggagttgagaaaaggtcaatataggtgaaaaaagtatgagtaagtataatattcaaaagatttatagtgtgtgataattaaaatcataaagatttatagtatgaagattaatgttattgttaatttgttattcttttcttgttgttatttttaaaagtaatcttgtaattttgataatttttggttatttatatgttattttttgttattattttcttgttacttttatatagttttttttattctttttgtgttatttgaaaggtaatattgcaatattgtaattttattattttttttattatttgtattgtttattttttgttaattttttttttatttatttttttgtaacttttatatagtttttttattcttttcataaaacacctaaaaatatatttaaaaaaataactattttaattatttatttatttcgttctttttttaataagtctattatatattgtttctttttttgatttccttttttggttttcttatagtaaaaagagaaaaggaacaataatagatgatggctgccgatgcaaacaaagttgtttccataagtaagttgatttctagtttcttttatagttgtttccttac

SEQ ID NO: 364989 - DNA, 763 bp, Cannabis indica
tctcccttctgcatcagctccaagactctctacaccagaaattcaaactcaaagctcttggtcatctcaaatatttccttggatttgagattgcccgtgccaaacaaggtctttacatctctcaacgaaagtacacacttgaacttcttgaagacacgggatatatcgggagtaggcctaccaaaactcctatggatcccaaaatcaaattcgacaatgatcttggacaaccacttgacaacccgtcccactatcgtcaactaataggaaaactgctctatctcactctctcaagacccgacattacttttgctgtgaactgcctcagtcaatttatggcaacaccaaggacaccccattcacaagctgtccatcatctccttagatatctcaaaggcaatccggggcaaggtcttctttattcatcaacatctgctctcacacttcgtggtttctcagattccgactgggcttcttgccccattacacgacgttccacgacgggatattgtattttccttggtgacagcctcatatcttggaaaacaaagaagcagcctactatatcgaagagctctgctgaagcagagtatcatgctttagccgctgccaccagtgaagttacttggcttcagtatctacttcacgactttcaaatcccacaaccacatcctgcttttctttattgtgacaaccattcagcaattcatattgccaacaacccaacatttcacgaaagaacgaaacacatcgaattggactg

SEQ ID NO: 364990 - DNA, 733 bp, Cannabis indica
actggattgtccttttttttggtaaaaaaaaaatccatatataattcgttctttttctgatctctctcaacaaactaattgtatatggggtttaaggttcaatttattttatatatatatttttaatttctagagttatagttgtgattatatatagagttgaaatatgttaaatatcagttcaaatattaatatgatttgttttattattattttatgatatataaataatattttattattttattaaataaaaataataaagtcacccatgaatttctcataaaccaagaatttcagttatataggcacactttatatagaatatatatgatatcaggatacattaatacaggttaaatgcacagggccgatagctaagcttgtacttcaggccctgaatacttagggtctgaaattgtgaaaaaaaaaatgagtatatagataaaatatgaaattatatgaatatatatatatatatatatgtataatagtattgagtatagtagtgtggttgaaagagttattttaagactaaaaaaaatgttaaatgtgtaactatagatattgaaccttgaatttttaataattcttaaaatttttaatattatgccaaatgtaagtaaattatgtattttagaaataattaaactatttatatagggttctaaaatttaattttgtaattagactaccccatataccaaaggaccaacgtatatattatacatac

SEQ ID NO: 364991 - DNA, 507 bp, Cannabis indica
gtacactaaaaagattcatattaggatgcagaattgatagtcgttccagagattttcaagaggaaagaatgtgttaacaagtaaatatttacaaggtatcaagatgagttcaagttagtgggtagaaataagaaatgctctaattgaatacctattagaaatgaatacttaacttgttattaagctaagtcagtaggttatcttaggaggtcccatacaaggaatggaaagacataattataaattatgtattgtgggatcttatgatttcgaccgaatagtaataattggacatattgagttgatatgctatctatcagtatagataatttatacaataaatgaggatatggaattcaactgaatgaatagtctaatcttgtaaaatttcaagattgatatccttaactatgatgttaagaattaaagaaggttattgagaaccgtagagattaaagcaaaaatagtatgatgttttgttggattttatgccctaaataaagctca

SEQ ID NO: 364992 - DNA, 523 bp, Cannabis indica
taacatcctaaatataaattctctaaaacaatgaaataaacacacaagggattagaaaaccttgcattggttacaacagaatttagtgcctccttctgttcaagatctctagcccttgattcctttctatagcagagcattatcaagatgtgaacctagatctctttctctcctttgggtttggttacgactctcttactcactattattgagtacttgacttgctatgtgttgacttcgcttttaaccaacgacaatgagtccattttataagcgataaacgatatataataacagatatatgataaagcaataatcagacacagggattttatagaggttcagccccgagcagtttggtaatagcctaatcctcgttatttgtattgacttaagatcaaggagaaagattccttttcttatagctcttacaatagtatatctgaatatataattcttagataatagtatagtcttagctcaactgcttttcgacccctcctgcccagtgaacatacatcac

SEQ ID NO: 364993 - DNA, 794 bp, Cannabis indica
gaacatagcacttctccaaatagcaagtaaactactgttgtagatttatcatatcagtaaaaccctaatgtctgataaaaactaggaaaacttttattcacatagtcatgtttactttccaatgtgttgacggcaccataaacaggatcaagtatgtgaaaaaggtttcagatgaatttatacattatgtacatataatcatgaaataaatcatgtgaaccatgcaacattaaaatgttatttctgatctatattaataagtaaatctgattatattgaaatgagttttatttagggcataaaacccaacaacaacaccatggctggctagcctagccagcacaagggcctgactgggcaaggattgctttacaggcctcactggacactcttacacgtggccaggagtaatggactgcgaattgggctccaaaagcccaatagaatggctgattaatatctgaaatcaagggcattttggtcttttgtaaatatctaacaaactatacaattgttaagggatttgaattgtaaacctagggtttaaggcttcctatataaaggccttaacctctgattgaaaacctttgttgcctccaagctagaaattaacctgatctaaaactcttagtgtctcacaaattctctatctcttcctcattctctgcttctctactagaaaggcctccagctcaaaattggctttgtctttgcggcaagggatgcctccaagaccttcacacgctcctaaaaagcgtcttcttatatttctaattccaggatgcaatacagtt

SEQ ID NO: 364994 - DNA, 874 bp, Cannabis indica
aactaagcggtctttacactccagctgacctaggaaaaaaatcaatgaaaagcatggtgacttaaaagaccatcttgataagaagaaacacgcgctgccaatttctagagacactttgaatgagggaatcctggccgagttggcaatactacgcaaagacattgccagggtctcccggaaataaaaggggatgactcgaactttgattgtgaggaccgggagccatgcgctcgacctatactggatgcagagcttcccaagaactttagatgctcaaaatgacaacttacactggagatccagaccttattgaccatttgtctcagtttaattgtgtgatgactttcatgagtatcaacaatgccgcgaagtgtttatgctttccactaacgctgagcggttctgctgaagaatgtttaagaagttggaaccaggatcagtggactgctagagcaagctacaagtcagcttcaggagacagtttgtcgcggcgagaaacattaaccttgaagtctgcgccctgactaatataaaacaattgccttcatacactctaaagaactttataaaaagattcaaataagaggcttaaagaccaagaaggtagatgacaaacgacaactggccctcctccaggctgggatccgcacggggactcctttctggaatgaactacaacaagaaggagcagctaatttccaagatttccaaaatagggtccaaaagtacatcaacttggaagaagcccaaatagtggcttaacagagggaatactacccgaccggagtatcaggatatgcacttggagcacaactttcaggaaccctgcctctggcctgataagacccgagaactccaactcaagaattcaata

SEQ ID NO: 364995 - DNA, 886 bp, Cannabis indica
ctgtattgacaatactgtaattgtgaatgaatatatgttctggacttaactgattttgtgcatatatattaaaccataaacatgaaaaatacatgttaacataaaccacttcaaaaatctaaattgataacttatcagattgtaatgtgttttatttagggcacaaaacccaacagtttcatgaccaattagagacaaattcagtttttcggtttagaagactgatgaacattctcagaggctcaaagtagaaaaaaaaatggaggaagagggaattaaaagaaaatattagttttaattttatttattttaaatttaattttctaaatttatataattagttgtttatttaaatatattttaataatttttctaaattagactagttagagaattgatagatgtcattttagaaataattaacacaactattaaaagaagggacctagatagataagggaaattagattttgctaatgttttatttttaaatatatataataatattataaaattaataaagaatattttgttaagtaataatatattctgttaaaattaatgtaaaaaaattaaaaaaataaccgttaaatcaagaatttcgttacataatcacattttatgttagagatattattacaatggaagataaatcaagacatatacaactcaattgtaaaaataatacaataacaataaaagagattgattatgtgttacacaatacacatatatacactatatatatatatatttcatacatatatatatgtatataaaaggtagaatagattaatagattacacaatattatataacatatatataatatatatgaagaagaaaaaaaatcactcactcacccttaagtgtagaatagtgggga

SEQ ID NO: 364996 - DNA, 513 bp, Cannabis indica
tagaaatcgcaatgtatttacttattttttatttcgatctgcaattattttttctggaaagtagacaaaaaattaataaatttaggcttttacagaacctaattcagattttttatgaattagttatggttttttgaatttgaacgaaaatatcaagatttgaatgcacacacgcgcgagcacgagatttgaatgggccttggagccgctcggacacgcacgcccattcagacataaatgaccaagatttctcggacatgccttgtttgaacaggctgcatgtatcgagcgttctctgtcacgcagcctctgtctcggccattccttccccttccgcgcgcgcaggggtatgcattgcatacccctgtgcctcaaacttgttttcttcatatcttttgattcaaaattcgtttttcattgaaacgaatgccaattttttgtagaattttgtgtagaatctgaattttcaattaaaaatctaattgtcagaataaaattaattttttattaatt

SEQ ID NO: 364997 - DNA, 604 bp, Cannabis indica
tgttagtgtctaataataactgatgcataatataaatttattttataaaagaataattttttggcctcggttttcaaattaatgtcgaagtagccactgacgcaaaatattacctttttttgcattagttgatagctgaagtaaaagttctgcctttactttttgcatcggtcatggttgtcgacccgtagcgttgaccgacgcaaaaattacttttgtagtagtgtggtgcaaatcaaactaaactgcgcggtttagctaaaatgcaaacaacaattgtaacccaaaagatttcaaaccatatttttatgcagtgtggtgcatgtggtacgggcaatttgtatagtgtgtatggtttgatgaacaccccaatttattatgtataaatgttgattatttattataatatatataaataaaatatatttatttaaattaaatacaaaatacaagttataaataagtatatctttatatattaaaagtgtctataacgattccttttctttttttatttagccttacacgattaactacgttaaacgttaataaataattaagggaaatttttattaatatacgtataacatataaaaattacata

SEQ ID NO: 364998 - DNA, 609 bp, Cannabis indica
tttctagcccaaaacttggacaatatattttttttcatataataaatttgtctgaagtttaacatcgtcacagctcaaaatatgggttgagtttgatacatattttcttagcatagagacatgaaacacattatatattccaaacaacgcaggagttaaggctagctaataggctacctagcctatttaatttagtgaacatgtatataatatttctctcataccgcacttattaaggtacctaaccggtggtacatttaattatgacttttaaataaacacctcatcagggaagagattattctaagataatctaaccttcattaaatatgatcatagtatgtttctaatattccattgatcacctttcaagaataaaacattatactattttcgctttaacatccatggttctcaataacctttttttttaatccttaaattcatagccgaagatatcaacattagaatttcacaagattagactattctttcgtataaattccatatcctcatttattgcataaattgtctatactgatagacaacatattaactcggtatgtccaactgttactattcagtcgaaatcataatatcccacaatac

SEQ ID NO: 364999 - DNA, 590 bp, Cannabis indica
gaaagaaaaaaagagagtgaaatgatggattgattgataagaaaatagaaaaaagagagagaagagagtaggatttgattgatgatggatggaatgatgactaagtggtatatgtgtaataaaacaaactttgtaagtaaaaaagtaggtataagcgtgtatgagtaattttgtaataaattgtgtaaaatagatttttcatgtaaaaatttcaaaaatattctcaattaatgaattaatgtaatggatgttttatatttacaataataataataataataataattataacagaaagggtatttttttaaaaaactgttaactaatatgtggtttggtaatacgtttattttttaatttttaaatcacaaaataaaaataaaatttttatttttgaaaaataaaaatgtgtaataatttttgttttttaattttaaaaacagaaaataaaagtatgttctataatatttttatttttattttattattttatttaagtcgggtttaagtctggggttagatttgggttcaggttagagaggttcaacgccagggtcgtggggaaatttgggtccaagtttcgtcggagt

SEQ ID NO: 365000 - DNA, 735 bp, Cannabis indica
ccttacccagacctagacctgggacctaaaattaaaacctgaataagaatcgccgaaccaggagcctagaacaagactaggaccaagatcaggacgcggacgcggacccagacctagaaccgaacacagacctagcctaacacccaaactgagactggaactcgggctcggacacggtcgtgtacccagaccggaactgagacccggacatggacctaaatctgggacccgatcctaaacacagacttggacttagatagggatccggatacaaacctggactcggaccaagatccagaatgggatcgaaatgctggaccgagatctggaccgagatcctgacccacacccaaacttggacccgcactcgggaccctaacttggacatgtacccgaacctaaacccagattggggttcaggccttgagacaaacacggacaaaaactcggacccaaactcaaacacccacacatagaatcagacccaaagctagactcgaaccaagaccaaaactcaaacccagaccaggatcagaaccaaggacttagacccagaactaaatccagactaaaatcgggactggaacttgggactcggacccaacctagacaaagacccaagatgcgaatccacactcggagcctgatctggacctaaactgaaatcaggacgcgaacccaaactcagaccatgactcgaactccgaccccaactcaaacctaaactcgaactca

SEQ ID NO: 365001 - DNA, 670 bp, Cannabis indica
tcaaagggaaagaaagctagggtaaaataccttgggttgaagcttcacaaatcaactagaattacacaaaattgcttggagagagttggattctcagctggttccttggggttcgaaagagagggagagaaagacttagaaatttctaggttgcttttgactaaattcctttttcttgattttattttatcccttatattaattaaaattaaacataatactttactaaaaagatatatattcagccccccaaaagtcataaaatccaaataataaaagcaagaaaagacctatttacccctaactaaattaaaaaataaatattaattaccaagggtaaactagtcatttccaaatcccgaaaatcccataccgctaaagcctaagaaagataccccgaataaattctaaattatataaaatgcgactctctataggcccaacgtcgctttccacggcttccaaacacaatcacagaaattgagaatttacataaatagcataataaatatatacgaactcaaataaattcccataattgtattattatcaataataataaaatctcatacataaaccctaattatttaataatttaaggtattaatcatatgcggtctttacactttttcagtctaaggaaagttctatacatttgtggcagtgttcc

SEQ ID NO: 365002 - DNA, 799 bp, Cannabis indica
tgggagatctcggtcagtgtcgtgttgggttgaaggctgaaatggtggatagttgatttcatcttgttgtttgttattgattttgttcttttttgggtgagctgatataatgggatatactgttaattttgttataggtttgttttatattgattttgttctattttgtgccattatttatggctttggcgccttacaaggctttagcacctattatatggttgggcccctaattatttagggtagtttgtttaaattttcacgttttccggtattgaatgtataagaaaattttgacagaataatattttaaagttaaagttatgcactatacagatttattagtcggaataaaaggattattttggttaaggtatgattcagattctaatattataatcaattaaataaattgtagaataagaatcttgaggatcttgtaataaagggaggtggtaataccaatggtctaatgagaatatattgcttcagatatatttgggaggtcaaattattatggaattttggtttgttatcaatattataggaatgtatcaaaaattaacagataagtattaatctataatatttgaaatttagaaatattaagaaattaataaacaaaaatttagaaatattaaaaccaagtcttttttttgaaaccaagtctacttgatacactttttttaaaaattgtacggatgactatcaagaatgacttattgaatgtaaatattgtttttaattaactaatcaatcaattaatatttataaacttaatataaaaaattaaaaaaaa

SEQ ID NO: 365003 - DNA, 228 bp, Cannabis indica
gaaccaaatcaagtaaatgtggaagcaaaaactctcattgatcatttttctcccatttatgttaatcctccatcatgtgttatttttcctgaaataaatgctacacattttgtgttgaaaccttctataattcaattcttaccatcttttaatgggttagatagagagaattcatacgtgcatgtgaattttttttagaaatttgtctactttcagatttcaaaattt

SEQ ID NO: 365004 - DNA, 1309 bp, Cannabis indica
aattttttacatcaattacatcatttataaaatcatgcatgaactagtaaataatatacattcatagtatgcttattcttaaacttagtttaaggtagggttctaaaaaaagcccaaccagcagactggttcccaaccagaagaccggttcctggggatcaaccggtcgaccggttgttacaggctcccctgaaccggtcgaccggttcagtgcagggaaccccaaaaatgtcctccacaactcaattcgagcccaaactctaccatactctctagaacacttgcatatactatactaaatccatttcaagcaacagaacacatcaaatagctcagaaattaaaaacaccattagagagccaacttaagctctctaacttcaagtttgagtaatctgtagcacaactagctatctcagcacaaaatcaactaaaacaaacctatcttaaccccagaattcaaacccaaactagctgcacactacagaacctcaaatcactaaaatcatgcaattaacctatcttgagctaaagaaaaccataaagaagaaggctaagcattataccttgaattggacctcctatttctgattgaaaactctttaattgtagcaagggtagtttagtcatttaccactcccgacaaatccccgatatctccaatgcctaacaatagtaccccgctattgacattctaaatcatacaaaacgtgactctctaatggcccacgtcgctttccaccgttaccgaacacaagcacagaaaacgcgaaattcacatatatagcataattaatacattttgaatttaaataaatctccataaacatgtaaatcataattaataactcaatattgcaattaaccctaatcatttaataatccaaaatattgatcttaagcggtcattagagttatcatatactatctaatttgaatgagatcaacggtaatcgagatcatttagattttttttagtgcaaaactttttatctatttattatgcataatttgctttgacaaagagccataacttttcatttgaatattatttattaatgcatgtattattttattgttcactattataattacaaccttaaaatttttatagtgtattccatacatattgtttaaaacaaaaattttaaattattaaattaatttaaaagttaaattaataataaataataaaaaatcatgtctttacaagggtagcaattcgatcgtttatagtacgtttgaagcaccttataattaaagttgtcataaactataaaatttggatgagatcgacaataaatcgaaat

SEQ ID NO: 365005 - DNA, 500 bp, Cannabis indica
ttgaataaaatagattacattgaaacggagttttatttagggcataaaacctaacaggttactcaagtgggcgatggaattgggttagtacgaaatcaacttccaatcccgaacagctataaaaggccaagccttggccgactttgtggtagaatgcacaggcaaaaaagaaagcataccagaaagcggtcccgagccagtaccacagcaaagtaacaaacaagacaaactgacctagaaactacatgtggatgggtcagcaacagatcaactatctggcgcaagaattgccctcgtcacacctggggggcaacacctgcacgatgcagtcaagttctaatttaaggcctctaacaacgaagccgaatatgaggccctaatcgctgaacttaaactagccaaggagatgaaggccaaacacattgaaatctgcagtgattcacagttggtgataaatcatgtatctggcgaaaacgaggctcggggagaaaaaatgatag

SEQ ID NO: 365006 - DNA, 591 bp, Cannabis indica
ttttttttttcttgtaaattattacagtcaaagaaaaatgtccatccaacctacttgttgggcactctagggcacttaattaactagatttttaatccaacaacttacctttttctcctctaacaatactagtgaaattagacaatgggatgtcatgactcaatctagctgcacttatgaacctatctatcttgttatagtcactatttcattcagttatattaaatcttaattttttttttgatattgaaacgttcaattccaactcgataatggaaagcttgggggttttgcatcaagaaatggagttggttttctaaacactgagactagaaaaaatcatttcacggaaaggtatagataaatctattatctaaattaacatttttatctacttaactagttatttgttagtgctacataaggaaaatgttcactatctcaatgttgggcagactaagagaatgattcatggtttggaatacatacttttaattattatgatatttctttttggatacaatttttgacaactttttgctttcacataatactcctatgaatgccacaacttatgtaatcttaaaattt

SEQ ID NO: 365007 - DNA, 171 bp, Cannabis indica
ctctctctctctctctctctcttcgtaaccagcaagggcaaggataaagggctgctgaatcttggtgattttagcaaggaaccttgggagattcaagttaaggtaagccctagtgaacccctctttagttttttaagtttttgcttattttgaaatggtgaaattgtgtta

SEQ ID NO: 365008 - DNA, 1097 bp, Cannabis indica
agtatacatgaactcccatttatgttcattgagttttttgattcattcgttaaagtttctcagagaatgtgattcttacaacttctgttttgggagattaataacgtattggctggaatatgttatacaataataaaatccaagctttctgaaaggatcaatattagttccctatagtgttaattttgggagtgctaatagttcgatctaaatctataattgaactatagattaactgttcacattgaattaatggtacataagtaattaagagataattagaagggtaaaacgataattttgaccaactttaattatgaacaaataattagaaggtgaactacttacattaattatatcaatagactacaagaaagaattctgtaaatataattttgtattagcaaagagtgcaatttcatatttatagtggagtaataataaatttaataaattgaattattctattgaagagttcaataataatcaagtatttattggagcaaaatattggtccatgtcccaagatcacctctatatacaacattgtacatgggaatgtttgatttgatgaataaatagagaaacaattaatttctatgagaaataattcttatggacaaaataataattttgtataaattattattttgaataattatatcgatcatgaattgaataattaaagtgatatttaagttttatttgatgaaattatatttattagtcaaatatattattattcttaaataatattaaggagagagaatattattctaatgtaaaataatatttattttaatcttagtaaaataagagattaatgagaattaatcaattattattttttgtaaaatatataataaatcttatttgtggcaaaattaaaaaataaattttgagctttaaaatatggtccacacctgttgggctaagccacacacatgtatggtgacttataaaagcccaattaatttatttttgattattttatttaataagataaatcaaaaaaaatgataattatcttttaattattttgaaattaaatacattataggataatgtatttaaattaaaaataatataaaataaaa

SEQ ID NO: 365009 - DNA, 669 bp, Cannabis indica
aattctaatcctataaataccaaaattatttatttaataattaaattaattatcaaataaaattgtaattattttatttattaagtagactccacaaagtcttttaattaacaaataaaccctaaaatcttatttcttcacaatctagtcatatcttagtgattcataaactatacatattctaattttagaattataattgattaattaaaatcaattaaccgagtcacaagcagtttgtctcaaaaagtatgggaaccatgggcctatatagccgagcttccaataagcagatctagaatttaccaagtaatttctctaacttattaattcctccttgcaccactatagatttggaattgcagtctcaattatatagaacactctatatgttccatgatatagatacgcaatgagattatccatttattattgttgaccgaggttttcggaaactaataaaatattataaagttagagagctgtaagaaaattagagaaggatttttacgtggttggggcgttaatgagccttagtccacgagtctttgttatttatggatgtatttaatacagagaatgtatttggggagtgtttcactcttataaatacagagaatattcttggtgagtctttactctacttgctcatatgcagcccaagattct

SEQ ID NO: 365010 - DNA, 959 bp, Cannabis indica
tatttataaaaatacctccataaaatgtggataatatttatatattttatatgcttttatttaccaaaatacctcttatactatcacttacacacacaatcagacgaaggttgcattagacgaaggttccaattccaggaagcggggatagtgggttgaaggtatttgtttaattttttttatttcagttgtatattcgttatttatttggtcggctggaattttttttgtaatattgactccgattttgctcccccatggctaaaggtggtcgtcatccagtaaaaaagaagtggaaggtgtctttgcctaaaaaatttcaacttcgacggccagaagggaaagaaaaagtcaatttttaagacaattgtggtaaaactgtaatgcaaaagttatatctgttgcaagccaagtaacataaaaccacgaaacaactaataattcaacatatttaatacaagaaaatattacaacaatcgtgttttatctattcaggtcgcgtgcaactaatgtgcaacaaaaaaaagttaaatgtgaatgtgtatatgtaaaaaactatttgtctatattttttgtgtcactgatcgataattacttgtactttaatagtaatatgtggagaaataactgttcgcaaaatgtttatgcaactataatacaactattatgaagcattaaaaattagagtagtgtttccacgtgcgtaactctatatacacgcctcttcgtgaattaatatgaataaattcaccgtaagaattttgacaaacaataaaaatacaccaagataaatattttactatagtattgatgtaatttattttcgattatacttgagttggattgtttgggaagaccagcacaacattttgagatctacatttcatggatctgaaaatttgaagtcaggacattaattttatgcgaattaaactggatttatagttgaattttagttt

SEQ ID NO: 365011 - DNA, 594 bp, Cannabis indica
cgagacttggacccagactgagacttgtgtcctaggacccaaactaagaccgggacctggacccagaccgagacctggacctgaagccaaaaccaaacccaaaaactagggctgaacccaaaccaagaccatgacagggatcaggacttggacccatacccaaccctggactaggaccaacactcagacctcgacccagacccggacccaaacccgaacccagaaacggaatcgaaatcggaactagtagtaggacccaaacccaaaaatggacccggactggaacctaggacccgggtctcagaaccgagacccaaatcgaaaaccgagactcagacacggacttggatctcgacttgaacccgtgactagaacctagatttggacctggaccaggatcggaaacccgaactaagactaggacttgaaccccgacttggtcctacactcggaccgagacctgggggacctagaccagggactcgggcttcggaactagcaccgagacccaggacttgaccccgaaactggaccttgaactgggacccggaccaggacctgggaccagaagtggaactagactaggacccaaga

SEQ ID NO: 365012 - DNA, 487 bp, Cannabis indica
tatccatttcatgttggatcactcctttatatacaaagcaagtgtcctttgattataccgagattgaattcattatcaatccgtttgtacattgaattacaacaattaaattaattaaaaacgtaaatacagtaaatgaaggacagtttcagcttaattcactaaatacggcaacgtatgcgacttctatactgcgagttgcatgttcatattcttgcataagctcgtaggcttaagatgcatacaagactaatcgagtctaggatgtctgcgtcctgtttaagtcgcttatacagacatcttgtaataagttggcaacctaaggcatggaagtccttatcgggttaccgacatatggaccagttcgcagagtaaagaatcgatctttacaatttgcaggaggatctcaagtatatcatttatttaagatgatatttagtttctattttattatatataaatttttggtatgtattcataatttaat

SEQ ID NO: 365013 - DNA, 959 bp, Cannabis indica
aagagctcgaggccgacagtctccaaagcatcaaccttctccctcaagcggttcgcctcgactgtctgagcatcctgatcatccttcagctgaaggaggacctgccgcagagaagtcctctcatattgaagacgattaacctcagcagataaggactcgatggtttcctcaaagcgatcagcagcctcgaggtcctttgtcagcacggtgaccttcttctcagcggcaaaaagcttcttgttggcctcacccaactcatggcgaacagctgcagtctttgccctggcctcctctgcttccttcttggccaagtccgcctgcgccctcaaggtgtcagacagagccgtactcttggaagtagcagatttagcccgggagtaggtataagccaacttcaaaccggcctgcataaggaaaaagtcagtataagaagctgagtatgaaaagctaaaagggaagtgtcggaaagaaaaaactaaaccctggtaagctccttcaagactccgcccaccaacacatccagagatgagtggtccgcaccagccagctgattgccgacctcaggaaccagccgattcatatggtgaaccagcacctccctccccttttgacctcaggcaacacggacatgggtggagttggtgcttgctcctgttcaggaatccttttgaccagctcggacccagatgtttgtggcacagactccttagacttggcagatatgggagtggaaggatttgcagtagtcagctcctcagaaagatcaatgatctctccagaaggcttcttctctgaagacccctctccgaccttggacttcttggccagaggagaagcactggagcctccactcatcctcttccttaaggcgtctatcatctgccgagacatgtctgcacagagacaaaaacaacagtggttagacaaaaactaaaacaaaaaataacaaagtatgaaag

SEQ ID NO: 365014 - DNA, 643 bp, Cannabis indica
acgagagtataaagtttgcatgtgattgagttttatatatctgcgaagactataaattactttagtagacctgttatttcatagaaattgataatagagagataatcatattagtccataatcaatagaaataattgaagtcaaagccctagtttttattaactcataatttccttattagtttaattgtttactcttgcactgtttttattttctagttttaatcctttcttaattttttattcaaccaaatagaagtaaaagtttaatgttaacgtacttaactacaatccttatggatcgacctcactctttgtgagtttactacttgtcacgatacgtgcacgtgcgtgtttaaaatataacaacatattttaaatttaaactaaaattttcttatataaaatatctatatagtttttatctacataatttttatttttaaatatatataataatattataaaattaataaagaatattctgttaagtaataggatattctgttaaagttaacacagaataccaaaaataacgttaaactaagaattatgttacatagttacattttatatcgaatagatatagaattttaaattagttttatttttttaaaacacattttattataaaaataagtaaa

SEQ ID NO: 365015 - DNA, 1014 bp, Cannabis indica
  modified_base (962)..(962): a, c, t, g, unknown or other
acgtagtctgaattttgtattatagaagaacatcttaaatggagttttataaatgtgctgtatatatattttttagtttcatatttataaaattaaattttaataatagtatataatgtggtttaaatttaatatatgttaaaaattatactaaatatagcatggactaaattttactaagtcataatattacttttttttatttactttttgccactcattaatgtaattcataactttttatatttatatttattgttgattatggctacaagttttctcttccgagaagctatgttactctggaaaaaagttacaaaaaacttggtactcttccggaagttttgttagtaaagctatattagttgagacaatagttcttgtaagactcatttaattaattttaattaatcaatcataattctaaaattagactatgtcttatttatgaattttcactaagctagggcttaattgtgaagaaaagaggttttaggatttatttgttaattaagagactttattaagtctgattaataaatatattaaatgacatttttacttgataattaattttaattattaaataaatattttttaacatttaagtggttgaattgaaaaatatggcatttgtaaaagaaaaggataaatagttgagaaaaatggcaaaattgtaaatggtaggggccacaccctatggccgaccactaaagctttatttagccatttatttatcaattttttaatgccaaataattcaaacctaaacctagaaggattcttataaatagatagtgattcttataaataaatagtgatagactcagaactggcagttgacgcaacttaagccttcagtgaaatttgagccttctctcttctctctctattttgaatctttctctctttctttctcttcaaatttttcgtcccttatagtgatagagtacatgcccacncatgcaaagtatactcaactcatagtgtgtaagactgtgaaagaatctaaac

SEQ ID NO: 365016 - DNA, 683 bp, Cannabis indica
ttccttattagtttaattgtttattcttgtactgtttttattttctagttttaatccttaatttttattcaaccaaatagaagtaaaagtttaattttaatgtacttaactacaatccttgtggatcgacctcacttttggtgagtttactacttgtcacgatacgtgcacgtgcgtgtgtaaaatatcacaacataattttaaatttaaattaaaattttcttatataaaatatctatataatttttatctacataatttttatttttaaatatatataataatattataaaattaataaagaatattctgttaagtaataggatattttgttaaaattaacgcagaaaaccaaaaataacattaaactaagaattatgttatatagccacattttatatcgaatagatatagaattttaaattgttttatttttttaaaacaaattttattataaaaataagtaaatttgattgtgtagaaaaaaattagagtattttccaatgtattatttttatatcccgatactttaaagttattgtcattattaaatctcaaccattatcatcgttgtatctcacatattatctcaccgtatctcactcattgtcatcaatacattaatcttatgtctcagcttcccaaatctcaatattaatcttagattctattttgaattttaa

SEQ ID NO: 365017 - DNA, 1117 bp, Cannabis indica
tgttcttgacgacaaagtcaaggactttcttgcaggttatggatacaaggggctcggcctctgtccatttagtgaagaagtcgactactaccaccgcatacttagctcctcctcgcccagtgcgtaatgccccaattaggtcgatcccccatatagtaaataggtagggcgaggttatcattctaagtttggttggcggtacacgaggtatatgtgaaaatctctaacatttatcacatctcttgccaaactcatgtgtgtccttattgatcattggccagtaatatccttatctaatgatctttttagatagactttgccaacccgcatgatccccgcagaagccttcatgaatttctctaatgatttcatttacttctgcgggaagaacacacaaaagtaggggcattgaataccctcttctatatagtttgccttcgatcattgtgtagcaaggcactgtatacaaaagttttcgtgcctcattttgtcatttggaagtttcttgtcgagtaaataattaataatagaggtcatccatgttggagagctatctatcatcccgatgtcttttgtttcacttatacttggctcgctcaacatttctaccagaactagatttagttcgtccatatcattcagcgaggccagttttgctaaggcatttgcgttggagttctgttctttcagaatttgttcgattttatagtaatcgaatctttccaagttcttctgaagtttctctaaatacctcgccattttcaagcctttggcctagtattccctgagaacctggtttacgatcagttgcgaatcactatgacagctgagatttttgactttcaaggcttctactatctttaagttggcaatcaaggcttcatactaagcctcgtaattagatgcatcaaattggaatctcagagcatagtgaaacttaaagccttcccgtaatattaatatcacccctgcacccaaaccatgctcgttggatgcaccatccacatataacttccaggtttccgcatctcgctgatcagatgggatcttttctaaagttatacctgttggaaatattttcccaggatctagatttactaccatgtatatttcatta

SEQ ID NO: 365018 - DNA, 747 bp, Cannabis indica
taccctaatttttacaactaatattctaacactctcccttaagctggagcatagatgttaatcatgtctagcttgttacatagataatcaacctacaccccattcaaagcctttgtaaaaatatctcttaattgttcttcggtcttcacatatcttgtggagatcagaccttactgaattttctcacaaacaaaatgacaatcaatttcaatgtgcttagtttgctcgtggaacacgagatttgaggcaatatgaagagcaacttgattatcacattacaattttgttggaatagaaatcttaaactcaaattcagtcaaaagctgataaatccatattacctcacacacagactgtgtcatagctctatattctgattcagaactggatctagacacaatattttgtttcttactctttcaagaaatcaaattgcccccaacaaatacacaatatcctgaagtggatcgtctatctaccttggagctagccaatctacatcagaaaaatactcaatctgggtatgtccatgatccttgtaaattatacttcgtctcggtactcctttcaagttagggatgtaaacagggtggggcgggtgcagggattgctcccccaccccatacccgcttcttaaattcacccccatactcgccccaatacctatttaaattaaagcaggggtggggcggggattacccgacgggggaaggattcccatcgagtaaacattacatatatattttt

SEQ ID NO: 365019 - DNA, 1070 bp, Cannabis indica
atccaatccaattagacatcaaattctaatctaatccgatccaattatactaatggattggatcgattttttaatattaacttaaaaatatgaagataaatacgttaaatataaatatcaccattaatttttaagtttaatactccataaaaatataattgttgacaagacgtaatagtaaactaaactatttagaaataaattaaaacaataatattttcaagtaataaaatataacaaaacatcatgaaaataaatatatagaacaaccaagtgttacaaattttacaaaaaaattcactaaaaatataattaatatatttttttttatttttattagtttttattatataaatcaatataaatagttttttaatatatataaatgtaattggattggatcagttttttaattagattttgagattgacacctaataactgatccaatccaattagaatctaacttttagcatccaatccaatccaattatagctggatatcttaattttttgtaatttgattggattggatcgggttcggtttaattggattggattggatgttgccctaccccttttatagtttgtgggactaatcccctatattatataggatgatacttatttcattacatatatagattctattgaggaaattacattgtatacctactttactttatatgttttaatttttagctttatttttatatttttaaaattagacccacttttatagatgatgtcctaattataccccttaagttaatgtaaattatgttctagacttaagtagatggtgagggtatattgggtagcttactcacaaaagtaggtatattttaataaaatataatatgaaggtatttttgattaatagatacacaaaaaagatatttctcaacttattccattcttataagacataaattaataacagaccccgactctcgctggtgagagaacttatacaaaatatgttagttttcaattttttattatatatgagaatatacttatttagtatcatgatttttttcaaaaaacacatttagtatcttgtatttt

SEQ ID NO: 365020 - DNA, 665 bp, Cannabis indica
ggtaaagtcgccgctctaaattgttttatatcacgatcctctaataaatgcaaagagttttttcaaatcttaaaaggcaacaagaagttccaatggaccgagaaatgcgaagaagcttttcaagcactaaaaacgcatttggggcagcccccaatattgtcaaaacccatgtccggagaagtcttatccatttacctggaggtgtcagaatatgcgattggctcagtactaatacgcgaagaccaaggtcggcaatacccggtgtactatgtcagtaagcatttattagatgttgagactcgctatccataaatggaaaaactagcattttccctggtaatatcgtcaagaaaactgcaaccttattttcaggcccatagcattgaggttttaacaaactatcctttgaggcaagtcttagtaaagccagaggcatcgggaaggttgttgaaatggtcagtagagctaagccagttcgacatcaagtacaaaccaagatccgcgatcaaggggcatgccttggcagatttcattctcgagtttccaagcactgaggtggctctcgtagaagaaaaaattgatattgatgtgccaaatgatgaaggatggattttgtgttggattttatgccataaataaaactctttacaatctgattagttatc

SEQ ID NO: 365021 - DNA, 546 bp, Cannabis indica
cctagtgttttctagatgatcagagattaagggtgaaataatgccaaaaacaaaagactagaaaatgagttgggattgaataccgatctgtaagaaatggaaaacgcttccgtcgttggtgaagatgccgtcagcgacttagggaggagatggccgtcgtcgtcagcgagtaggggagaagatgtcgtcgtctctgccatcatcatatcgctgggcagcgagcgtcaccgtcgtcgtccattctctaggcagtgggcaggcggcttcaaagagggatgaggtgagagagaatacgatagagagagagggatctgatgagattctacaatgcacccccttaaaagggatgtactgatgcacccttaacttgtttcggcattcagaagaattttttagtctaattttttttcatattcatgtacgttatagctatttaagatatcctacaaaattttgaaaaaatcagagtaatttacaatatagaaaacaatgttcaaacagtttattttacacgcgtataaaataaaatagttacgcgtggaacac

SEQ ID NO: 365022 - DNA, 487 bp, Cannabis indica
agtcacgacagtagtcgagagttaataaccgagttggttcaaattgggatagacatagaatgctcagttgctacatgggtgtgtcaagagggacgcacatggagaccaaggggggcagatgccgcaatcgtaagaggatgattgcacttggaggtgttcgcatgtgacttttattcgatccatatgggaagcgtcgagacagttgagtggggtgtgttggctggtgaaagcgccagtgggtgtaagtcacacaaaggcatcggcaaagatgcggagttatggaatgaatacatcgaagaagccaacagggctaaaaagaccgagcgcaagtgttcagatggcgctagagtttgagtgaaggccagagggccgtgccagtgagacttagtagtcatgtgagcctgcgaaagtgaaaaagggtgctagagtttgcatgaaggccagatggatccatcattaaaacttagtactgttggaaattatttta

SEQ ID NO: 365023 - DNA, 542 bp, Cannabis indica
tttctagagtttttttttttttttatcatttttagtcattttttggctataaaagaagtggatttcaatagttttcaataagcaatgaaggaggatgaaaattggagataaaaattaattgcgatggctttttcaacagggtttttagcattcttttcttctcttttctaaaattatgtgtgaatttgctacaatgaacatgagtagctaaacagttaattagggtctagatggagattgtttgatattgatttatggttctaatatgatttattttccccttcatttctatgtattttatttcatttgtacttaattacttttaattgtctgaccatcaattaattgctctatgcttttgatgcgaaatctgagaaatgagtgtcaattattctatagtgaaatagaacttaatttcgatataggatgagagtacctgtatggtttggatagtttataggatttctgtgtgtttaatgtctgttgcctgtttaatttatcacgagagtagaaaatttacatgtaattgaggtttatatatc

SEQ ID NO: 365024 - DNA, 860 bp, Cannabis indica
ccttgtaatgctccaatgaattcggttatgcatcttacacatgatggaaaaccatttgaagatcttgagaaatatcgcaaattggttggaaagttgaattatttaactgtgactcgtccagatattgcattcccagttagtgtcattagacaatttatgtcttctctaacaattcatcattgggcagcattagaacaaattttatattacttgaaaggggcaccaaacgaggtatagtttacaagaatcatggacatgcccagattgagtgattctcttatgtagattaggcaagttccaaggtagatagacggtccacttcaagatattgtgtatttgttaggggcaatctgatttcttgaaagagtaagaaacaaaatgttgtgtctaggtccagtgctgaatcaatttatagagttatggtaccgtctgtgtgtgaggtaatatgaatttatcagcttttgattgaaatcgggtttaagacttctatttcagtaaaactgtggtgtgataatcaagatgctcttcatattgcctcaaatctcgtattctacgagcgaactaaacacattgagattgattgttatttattcgtgagaaaactcaacaaagtctgatctccacaaaatatgtaaagatcggggaataattaggagatatttttacaataactttgaataaggtgtacgttaattatctttgtaataagttggacatgattaacatctatgctctcttttaagagaaagtgttagaatattaattgtaaaaattaaaataaattatatttagggaaaaaacagaaaaatacaaaaaaagaaaaaaatttacaaaaatactatgggccggcccattaaaca

SEQ ID NO: 365025 - DNA, 662 bp, Cannabis indica
aattttacatttcaatgatgtttatgtactaaaccatgtttcccagactttgatatctaccaaatcacgcccttcgaactttgacatgtactaaattatgccccctgaactttcatccatgttaggcttttttactaaaattagaaaaaagtccttaaatccaacaatctcaatagttcagggggcatgatttggtacatgtcaaagttcagggggcaaaaatcttaattagccttatttatttaatttaaataacagtatgtcaaaaaaattaaataatagaataaaatattttgagtggctgagattgaagctcacttaattaaaacctaacttaaatcactttaaattcaattactttcctattatatatatcatataattaaataaatattattattaatattattaattacatattataattattatatatattgttattcaaaagttttatataataacattcagtgattcatttaaaaaagtttaaaataaaaactttatatttatatatattgttatactttatttttgcaaaaatttttgaaaaaagtgtaaaatcattactcgaaggttgataagaaaatatttttggaggccaaatattatactcaatttttacaaaaaaataaaatggctactctgttggaaattatttt

SEQ ID NO: 365026 - DNA, 722 bp, Cannabis indica
ataaatttatacacaatgcatatctataattgtgtaatataattatggaatgttgatgatttatttacataatatctaacattttaatttatataggtagaatgatgtgaatttctcttgaatattacattcttttttgttttgatttgtattattcaattgttgttgccggtgttgaacattggagatgagattgattatttatggagatgagattgtttgttgttatgagattgatttgtgcgaattgattggtggagaagaacttgatcgatggtcgcagagtttgatcgaagagcttgattgcagggtttgatcgcagagagagaagagttcagagtgagagacaaagaaagaagcgaatgcaagagagataaatcgaagggagagaaaaaaaaagtgtaaagagtggtcatatatatgtaaattattgtttatttttttacatttatgtaaatagccttaaacaaaatagtgcagattaaattggagaaacacttcctactaaatttaaattggtgaaatcaaaccctactttgaagtttaaacttgccatttaaaagtaaaaataaacaaaaattagcaaatatcttgaaatacaattaaggaatttagtttagacaaaaattcaaacaatgtcaaaaagataagaaataaaatagcaaaaacgaggaagagaaaaaaaggagagagagagagagagagagagagagagagagaga

SEQ ID NO: 365027 - DNA, 669 bp, Cannabis indica
gtgtttaagttattttgagagtaattttgtgtaaattaatatgttggtttttatggttgtgcaagctcattatttgggatttttgctctagttaaagcttgctgaattgatgattttgatgcatgttttggtgttattggagaatgaattaggtgtaattcttctctaattattttgtttatgctaggtaaaaatttattatggttgtgggttggtttagcatgaaaattcgtatttttggatgtttttttcgtggctgggaactgggtttcttgggtttttaaacccagtggtcgcggccattttgtggcagcttattgtgttattttcgagtttttgttttggccataacttttgacttgggactctgtttgggacgttctttatatcgttagaaagctcattccgagctctattttgatatctgtaatttaaatgccaattttataatttgtggaaatggatttagggattaaccctatacttgtgcatctcgggtttgtgactaggattaccggcacttggtcaggagcacccgaggatttagaatctccatatttgtgagacatcaggtaagactgtagttagcacgtagagttatgcgcaatggcgctgatatggaatatgatatatatgagaaactagaaatcgggattagagttattactc

SEQ ID NO: 365028 - DNA, 629 bp, Cannabis indica
attaatttaattattattcttttaatcaactaaaaatataagaaaatggaaaaaaggaaataaaattataaatgtttcgaaatttaaagtttttaactaattaattacaaaaataaaataaaattttattttattatgtattatgtaatttaaaatgaaaatatttcggtaatatatatcaaaaattctgtttaatgtaatttttgaaataatttggtaaggtatggatttattgattttgttagagattagagtttttttttttttttggtaaacgtaccatgttgttttatttatttttcttaattctattctataaaaaaataattttatagagatattggcggtaaaactaatataactatacaatttgtaacaaattgatttttttatagtaaaattctccaaatctcacttcactactacaaaattgggctttagaggaggtttttaaggggttttggcgtcggttttggcgaaattcgctaccgacgctgttccaggtgacgctataaggtttaaaacaaccgacgccatagggaccctttggcgtcggttcttatgaaatttcggcagcataacggttataattgaacatttccaaaaaattcaaacctattaataacaac

SEQ ID NO: 365029 - DNA, 507 bp, Cannabis indica
gcttggaagttgttgccgggtttttttcaagttgctgcaaatctgtctgtgctgagttgttgtcatatgatgccatcatcatattgttgcacaccattgtttggttaggtagtgttgtgttgctgattttgtttacacacaatgggtaccttatgaaatcaacctctttggctaatagctttatgtagaacaacagacttttgtcatccttgatttgtagtggttggcctccttctttcagttgtatttgtgttgtttcagggttgcattggagttcttccatcattattctcactagttcatcagaagtgcatttgctgaaaattaattctctcaacttgattcatattcaacataatttttgttgtcatcccaatgtccatttgtaacgccccaatattttgccttattttacaaaatactatttttgatgcattagttaaaaagattcaaagatgtttagaaatacacagtgggttttacaatgaatatgcaaaaaggtgaatg

SEQ ID NO: 365030 - DNA, 562 bp, Cannabis indica
atatcatacaactttcaacttgtaactaggtgcccatacacctatttacaaggcttatcaactgattaagaacgttcttaatggttggtgctattgaccatgatatcacccacaaccagcactatgatcgcactgcgggaccggcactatgttcgtgccgccatgatagcatcaatagcacccaagagtacaattggccatgatatcactcttaaccagtattgtgcccgtactgctgaaccgacacaattgttgtgccgctatgatagcgccaattaatactctctgggtgaatatcactcttaaccagtacgatgcatgtactgtcgaaccgacacaattgttgtgccgctatgatatcacccaaaacatatacaatcatacatacatcatgcatatatctcatataacacgctatatacagttcttacctatttttccgaattcaaatgtgctggccgacctgaacggaaattctcgtgctagatggatgccctaatcacattaattgtaacacagatgagtgactcgctaaatcactactcggggacttaaacttgaa

SEQ ID NO: 365031 - DNA, 827 bp, Cannabis indica
catattatataactattgtaattaattcgactaataagcccattattatcattatcattattattttgtaacgctctcattatcgccattatttgtaaccgattcctactacctatatgtaggggcttccccctccattcaaagagggctgatctaaataaagaaacagagtcagagtactcttttcaacaggggattaggcaggcagagcccgaagctcctgctaaaccactatatttttctgtgtccattttatactatttacaatactcgcatacattatacactatattcttcaaggactcgctattctaagtgagtgctcgcatatctattttttggtattcaagcaacccttgtatactcgcacaaatctggtgttctctaaattcctccgacaacaactcaagatagtgtggaagaatatgtagtatttctatcaactgaaggagaatccaggttcagatcttaattgatacgaaccacaccaacagttgtgatgaaacctgacaccaaatatggcatactctaagaattctcaaaatttggatgtggaaccgcgacctaatgcctagttaagcatgaaccttggtatgaaggaagatgccacaaacggtggtggaaatctgtttgataagtcaggttgaacgccacaaggaatactccttgataagttcgaatagttctctcaagaactcaagaagaaaacctctcaaaattttattccaaaatattctgatttttcaaagtgtttacaaggctttatatagccaacttacaaccaagaaaaaaggaaactaaaagaaagacaactttccaaataaaac

SEQ ID NO: 365032 - DNA, 755 bp, Cannabis indica
aaacatataggctcacgcacacagatttggatggaccctatcatgttactaggtcatacacagatgaaagaggaatgtaaaatttacctgttacaaattatttacttgacctattgacaattgaaccatgggttaaaatcagatcattggatctgtcaacaagttaaccatgacaatttagatcaagcaataataggttttagaaaaacttacaaacaatctaaaacacatactcctgcaacaagttagatttggatagttggatgtaggatttatttaattttaaaatattaaatatatttcaaaaataataaaataaaaaagttaagtttattttcttagtagtattaaggttgctcaactcaattgttaaaaaaggttgctcaattcaaatttgaaaacccatttctgtatattaataagtgattataattttcaccctaaagtacatttttggaagtgaaaaaggaaaagtgaaagaaaagctaagggtgatattatgtatattatatatacataaattatcattactcttatctatactattcacaattactcttattttgtactattcatttgtctttcttactataccatgtaaatagtgatagttttaaaataagttatgtaaaattgtaaatgggttgagtcagcccgatccgatttatctgagtctcctaaacggatacctggcccattcacatatagggcccgtttggtacacaggattggactagattggactgaaaatgatt

SEQ ID NO: 365033 - DNA, 637 bp, Cannabis indica
aaatgggtacattgtgtgcatataaaagatcaatcttggtgggaatacaaagccaaaagtaatgatagttggtattggagaaagattgtggaattgaaagagagagtaaaagagctctatgatttacccgaaaggaagaatatgtgcaacaagtatgtgattactcgaggctatctcaaaattattgctgcagaaaataaagagtattggccgagcattgtttagagtcggctaaacttcctgaagcatagttttgttatgtgaccatgcttaaccgacttaagataaagaacatgataactaaataccatcctgaaattgataaaacttgtctcttttgcaacagtgaaattgagacagtagaacacttattttttgaatgtcatgttgggcaggtatgtataaatcaagtgaaaagctggctgaactggagcatgagcaaaagaaccttgccagggtggcttggaaaggccaaattgagcaagttccatcgaggagttttggctgctgcactagcagccttggtgtacacagtgtggtactcccgaaactctatattttttgggaggaaaaagttgtaaaaagcgatacaattaatagcacaagtcaagaatattacaaagagtagaatttcttg

SEQ ID NO: 365034 - DNA, 648 bp, Cannabis indica
ttgattcaagatgtgttagaaagcgaaaaagaaatctaaaatttttaacgttttgactttttctaaaatctacgtttcataaaaacctatcacacacatacatatataaatttgatgttttttagggagaattattatagaactatatagaaggaaaatttgaagtaaagaagtagaggttgattgtattcaacaaagacggcattgtgcatattattaattacctctcgatcgagtagcccaagttgttgaaaaattcaattctatgtcaaaacgattaattaattgcaaaaccaaacaacccaatgtatataaatgaaatataatatcatatacttaccatatctatttatttgtagatcaattagtctttataattaaatgtaaaagaaaacataaataaaaaacttaccaagaaaataggggtattcattagatcacatccaacagattctgaccttaccaatccaatccaattatttattagatattaaattttgtcatccgatccaatccaatcaaaccaagtcattcgatctgatctatgtattgaattagatcagttctaaccattggatacattgactgattttatattaaattgaattggatccatccaacccatttaactaccatttaagttgattt

SEQ ID NO: 365035 - DNA, 662 bp, Cannabis indica
taaaaaaaaataaaaaaagtaaagtgtgtgaatgaagtgtatataatatatatccaagtttggaacttgggttgggggccctaatggatacccagatttgtgcgcatgggtgaggactcacacacgcgcgtgcgtgcactgcgtccgctgtccaatcgaccgtgccgagttggcgggtgtggtaaacagagacttcttattttttgatcccacactattccttttagtaatgtccttcttcgcgttattaccttctgagcattgttgatataatgggagaaaaacatatctttttctcattgaaaaacatatacgataaattcatacaattatactatatatattgagcagtagtatgggttttaggtgtagtattttaacagttctctatcgtgtaataaagttctgatacattatgttcaactgagatgttttatcttgagaacaacgagactgatagtctgcttacacagttctactaccgcaaatgtcttaaagaaagtgacatgtgactcaatccaaatttaattcgaaaatttctttccttttattttgaaaaaccgtgtttttgcaaatgtcagttatatataagaaaatataaaaactgtaagcgtttgcagcagcagaaagtacttctgctacagcaaaactgaacaggcaga

SEQ ID NO: 365036 - DNA, 541 bp, Cannabis indica
ttttttcttaaaaaaataaatttacatttttctatctcttacactatgtttggtatgaaggagtggagtggagaaagaaatatagaatgatggaaagagagataggggaagacattctccctccaaacctatgtttcatgggagggagagagagagtatgatggatggagaagttagaaaggatggggagtaggagtgagatgagaagaatggaagaaaaattgatggcgagttatatttgcaccccataaaattataagtacacctcattattaagaaaataaacttaaattaatttttaaaaattacttttcattattttactttaaaatttttcccacacatttatttttaatccaatacttaatttgtattttatttttatatatatatatttaaatcatgtataattttttttaaagaaaattccatataattttttattttgttttttttgtttcataatttttaattttattaattaatttttattttgtatagatattttttaagtaatataaattagtaaaaaaaagtaaaa

SEQ ID NO: 365037 - DNA, 941 bp, Cannabis indica
atttattattaataattattattaatgataaatttattaatcacttgttttaaaaataaataaatgaataaaggatattaattcctatcttatgaggagtccaatagcacactatttttatttgaagtgaattattattttttattattattatttcatttttatatattaaattaattttttttattttttacggaaattcatatagcaactcacatagcaattaatggagcaatctacataaaaatcacaaccaaaatctatattgtaattcacataaaaatcactggagtaacctaaattgtaattttttaaaaaaaaatattaaaaaataatatataaatatatggtaattattattatgacacataataacgaaacaaattatttaattaatcataattaattaaattgagacctatttttgtaagaaaagataaaaaaaaaataggtgcatattttaaatgcatttaatcattattattaatttgtttttgttatttataacattacatattatccatctcttttctatttttatttttttatatatatatataaaaatatagtttataagaattgaaagaggcaaatgacccacatactcctcttgcctctgcctcaggtataagggccaatttaaccgacttaagctagctagaacaccacttatattatatataaaaactttaaatattcaaacattaactctaacattataagagtaatttgcggcataaatacctaagttttatgccgagtagcagataaatacctaagtcgtatttttggcggtaaaaatactttccgtcactagtgtgaaacttctgtaagtacctcgtcgttaactgacaggtcgacatctacgtgtcagccactaataggtccatgtcttttaatttttatttattatttaaaaaattcattgaaatctgaaattt

SEQ ID NO: 365038 - DNA, 588 bp, Cannabis indica
tagtgtggaagattgtgaagaatccaacacctgaaagagatttaggctcaaatcttgttattactctacgacatatcagaacaagagtttgagatttgagtggaatgagtcatattattctgctgccactaatgtaaggctttctaaactttatatgtatttattttcattgttttaagaatttatattcagggtgttagattatagaattataatcaacatacatgttagtaaatctaaatcctggtataacaacttccaacaaatatttaaataatgaggtatataattgttattattacttttcttgttgaatccttgtgtttcacgggtgctatgtggtgcaggtaataggtagagatgtttagacaaccatgagtcaggaatcttttccagaaaatgtacataagcttatccggcaagtggtgttgagttgtgaggaactgcatttcaaatattctgaacttttaaatgtattttgtgataatattataatgacatgtcttataataatttaaataggggatccccaatcgtaaaaaaagactatgtcatagattttatgatttaaattagttggtaaaattt

SEQ ID NO: 365039 - DNA, 771 bp, Cannabis indica
tatctaaaaaaatataaaaatagagataaaaattaaaacaaataaagtaaagtgggtatacaatgtaatttcctcaataaaatattgtcatattttattagcatgggaaagaaatacttctctaatagaacaacttgagaatttttgcgtaaatgctattttgagtcttgttttcaaaagttattgattgaacattttattttgttatatgataatttaaatcttgtattttttaaaattgtacaaaataaatctttagttactttttgttaaattaaaacttaataataatatgacttaaatgtgttatgacaaaactgattatattttttgcatcggtctatgctagcaaggacggactcacttgtattaatatgggggctatagcccccactaacaaaaatatagccttttaaaagattaaatttaatttttttaatttgttaattatagactaaaatagtagaaaaactcccacaaaataaataaatctaataagaataattataatatatgtataaatatatatttttaataataaaaagcctccacaaagaaaaattatgagtccgtcactgtatactagaaattaacttcaggttgattatattataaaaaattgaattcatgatctattttgtactatatgaaaaaaatataaaatttgttatttaacaaaacaaagagtccaatcgactaattttgtaaaacaaaaaatccaaaatgatatttaccactataatattacatctttagatttttttttttttt

SEQ ID NO: 365040 - DNA, 700 bp, Cannabis indica
tgagttgtatttccatgtggcactgatgttggccatatagatatgccacgttaggtggacaaaaatcgggataacaaacttaatctttttttaaataatttattattttttttaaataatttttattaattttcttaaaactaataaaatattataattttttaaattatttttttttaattaaagggagtaaaattttgtattcatcaaagtttaggaggtaaaaatactaatgcttaatggtaaaataatcagaacctaacaaaaggggtataattatgtaacaattacattttagagagaatttttagcaagtcgtatattttaaggggtaagatcaagtagcgtcaaaagtttacaagacaaaaatgttaattattccaaaaaaatatgtatatcatatataatatattttttcatgcttttgtaaatatctaattttttcgggagggttttataaaaaataatattagataaaagtttataattttagtgtcgcgcgaatttttttacaaaaataatattttttttataaaataactgtaaaataataaaatagaataattaaaataacaacactaaaataataataaaagtttaacacaatatacactataaaaactactagcaaaaagtacgtgcgaggcacgtatactaaattttatgttagtttttttttctatattatttaaaagtgata

SEQ ID NO: 365041 - DNA, 849 bp, Cannabis indica
ggaaagcaaaggttgagcagccatgagttcgaggtcgtagcagcaatgtacatatcagcctcagtgtatcggcccagtaatcaggatgctctattttgaaagtattttgggagtaccaagtttatattgtaaaattactaataaactagtttgtaatattttgaaaacagggggtccccatagttctcattacttatcttctgctataaagaagtttttacatgcttgattttaattacaaaaaaattaattacccacacttttggtataattatatagcatctatatatgaattttataatagcacagatggggcgtccctgttggacagggcgttacaagaagtgtaaaaacctatctgaagtctctaagtctaccagagagactgaatattatagttgcaggaaatatgcttattcagtctaaggaaagttctatacatttttggcatttgttctgacatttattgactactagtgttacttcctgactaacgcaaaagtagttgccaaaaagtaaagaattcagtatccctaaaggagtagacatatagagaggaatttcacaatataaaaaattttgtgattaaggaaatgtaatggtggagggaaggttgtattcaacataacctgtcagatcctattacggagagtatactacatactacacttgatttggagaccaaggtgttgagattatttgaaatgcacttttagttttatattagtgcaaaagggagagtgtgggggtttgtgccctaaataaaaaccatttcaatataatcaaatttactaattaataaagatcagaaatcacattttatgttgcatggttcacattgatttattt

SEQ ID NO: 365042 - DNA, 746 bp, Cannabis indica
tcaagtgtagtgtgtttgactattcccaagtaataggaactttaaggttgtagtaagcaataactttctccatcattactttctttatgttcataacatattatgcaacatcatttttctatatgtattactcctttagggataatgaattgtttactgcttgataagtgtatttgaatgtacagaagacaactctaattctatccaaaatagaatagagataaaaacagttaagaactttcttctatttgaataacatttgagtgccttttaaaagcatataagttatttagcttcactagtggaactaaattattatagatgagttcttacacccttctagaataattcttcctccccagagtaaccaccatctcgggcataaaattgtgagttgatgtagatttaggtattctaaatacacccctatcatctaacatataggtcaattttagagattctttcttgattctctcccaatgttccttgtttgattacatcattgatgactcccactcaacagtaggagtccggtttaatgcatacacaagtgtacatttaacctcttactattggtatttaggaacatcttgttgtgacattttatcttaatctgaaacaataagttccttctggactaagtgtaacaccctatctagcataggcgtattatgtgattttgtaacatactgtgcagctcgatgctaatcaacgaggtttatggaaatcgtgattaattaaaattt

SEQ ID NO: 365043 - DNA, 506 bp, Cannabis indica
ataatccacccaactttttgtttcatcctcaagtccattgtaaaagaatagaataaaacaaccacttgagaaattggaataacatctctctctgagctccttaaatctctcccaagcataatagaatagctctttgtgttgttggaaaaaatttacaaggtatagtatttggatttaccttgcaagttaaacacattcagtaaaacaatagtaagattaaataaaaagaaacgaaattagaatagaattagcctatattgatattaactaaaatagtccccgacaatagtgtcaaaaacttgttgtgataaatctagcacgcaagtatacatatcgttttaacaagtaatactcaagtaagtgaaatttttcccacgaggactgtagttaagtaccaatcaattaaattcttgtctttattttgcaatcgaataaataaattttgaactaaataaactaagcaaaattaaataaaacaaaaaaataaaaagtttaacaatggatgt

SEQ ID NO: 365044 - DNA, 675 bp, Cannabis indica
tttgtttgtttttattttggttgttttactaactggtttctcacattccactgtttttttttttgttattcttttatggtttttattgcatttttgtctctttaattttctttttttttttttttctttgaatctaacaacatataatttatactaggatagaaaggtcattggactgatataataataataataatattagagaattcaccacaaggccttacctaaaatttagtttgaagtatctcaatcaacatggtccaagggcatagaattgagtagtaagaaaaagtgtttttatttttttcctcaagttttgaaaagaaaaatatatgggtttttgatcaatgtgagtaatatttattataggaaaaattatagagtgcttttttgaaaaggagtgtatcggtatatctctattaatatgtgaataattataatcttaatttttatatatgatagtgaatattatagttatttaaaatatcttacatattttgaaaaattcagaataatttacaagcgtttttttttgttattttataaatatgtgtgaaactgtttaaaccctattaactaaattataaattattctatcttaaatagttataacatacattactatatatataaataaactaaaactaatataatgcttttttttttaaaaaaaaa

SEQ ID NO: 365045 - DNA, 523 bp, Cannabis indica
ttttttttaattttctgtttagatccttggagttgttcttttccaatcaaaattcgcaggaatttatggttgttctacgctcgatctggtttcattctggttgcgtagcagactggatcgatggaggtttcttcatcgtctccgttcgtgacgtgcggctgaaggtataggccaggtggtatttttgtaatattttcaatgtgggctgtataaatgttgattgggccggcccatagtaatattgtaatattttaccctttttggaattttcctctttttttcccaaatatttatggtagttaaagatattttaacatttcaaaaaatatatatatctattgagtgacttttttaaaaaaaataacaattttttttattaagatatattttaatattaatttttaaataaattaatataaattagagagtatctaggcataaaagtaagtataatttattaatttgtttaaaacaaatctatttttgaaacgggaaatttcaatttttgaccctaataatacaa

SEQ ID NO: 365046 - DNA, 574 bp, Cannabis indica
caaaccttccagacctgttctatataccctaaagaacatttctaaagcatcaaaataacccagaacacagagatactaaaaatgccatatgagctccaagctttgagttcaaaactcaaacttggctaaagctcacctacaagcatttaaacttgatttaaactacataaacaagcatatagaaactgcagaaaccattctcaaactcatgcaacaaacacagcaaccaatttcacattttcactttgaaaaaaccatagcttttggatcaaaaattctcaaactagaacaagggtaactagcatgcatttcaacctatctaatctcatttaattcagcattttaatcacaaaaacaacaacaacaattaacagcagcaacaacaccaaaaactagcatgcgatctatccactttcctcaaaaattcaagaaaataacaagacaagtttcaagaaccataccaacaacttgatgatcaccaaatctagctaaaataagcttgaaatccaaggaaaatggtcagcttcttgctgctcccagagggccgaataaagagagagagagagaggaaaat

SEQ ID NO: 365047 - DNA, 759 bp, Cannabis indica
ttaaattacataaataaaatattatacattattttattattcaatatactaattattatacaaaacataacttcaaaaattattaaaaaaatactaatatactaaaaaaatacaaacacatatattataaaatattaataaaaagataaataatatataagtaggtccccgttggggcaaggagtgccgtgcccgccctatttaatattcggggataagaattcccatccttgcccggttcctcattaagacaagaaatatccctaccctattagggacgggttcattgttatggagaaaatatgcatccctaactagaggtatcaaattgaatttcaacaaatgatatatatgactttgctcacactgcaacatattgagcgttcttatattcatgcaccagtaatatctaatactactacgaagtggaattttgtaaataattaatatttttttgtataataatcttttaatttgaaatatgtagaatcaaatatttacttatatcaatactcatataacatattgtagtggtactaagtagtgctgtgaatatgagtcaaatttcttgacatgacacgaaactggcataagcttacgaggcatgtgcaacgtttcccctttaagcctccattggaccttctcccatgaaatcatgactcttatacactagtatatcactctgactgttttctgggctgatgactggccctacaaatcaacacaagtatttttagcgtgctttgtccttactctcac

SEQ ID NO: 365048 - DNA, 533 bp, Cannabis indica
tctaatgcttcggaattagttggacacacaatgtttagttgcaaacatgcaaaagctatttggcgttcatctaattacatatttgatttccaagctgtgagtaggatgaaagatggtgattatattatgtatttgtcaaaaatttacaccaaatctgatatggaaaagattctatgcactatgtggtccatttggtttgatagaaacaacattatacataataagttgcctcaaaaagctgctgcaatatatgcaaaatccattgcttatctttgcaatttccagcaggttacatctactatcttggcccccacctgaactcactagttgcacctcataaaccatggcaagctcctccccaaacacaattaaaaatgaatattgatgccgttgttgtgtaacaccctaactaatttatgcgtgttagcgtgatttttaacatactgtgcagctcattgctaatcagcgaaatgaaaaacgtgattaattaaaatttgcttatttaattagaaatataaagtaatacatttata

SEQ ID NO: 365049 - DNA, 674 bp, Cannabis indica
aacccaaaaaaccagattttaaggtctaaacatgcccactttaccatatattcgaacctcgaccaaatcacagagtaaaaacacaaatttcatgcttaaattcaccacagaatatgtatcccacaaattagattaacaacactcaagccaagctcaacacttgagcaaaattcaacctagaaatcaagtccataaccatgaacatcaaaaccccaaatacctcatgcttgaacacaacaaaaatcagaacttaaggttagatttcaaacacaatataaccttagaaatctcatctgaaattactagtaaacatactcctcaactcaacaatataatcaagctaaaacattaagattaacaccaaaatcacctccaattccactatcatgcatccataattttaagaaaatcaagaacaccttaattcattacataacatcagaaattaataaatcaaaaaggctaaagatcattaccacaagttcctcaagttcttcccaagcaagaacatccacaaagctacaccaaatcaagcccttttttctcaaaatcaagatttctaaaagaaagggttagagagagagagaggggtcgggtgtgagggatacaaaaaccagaaattcatttacttctctaaaaaaaatcagcttttaccaagtatagaaaataaaggt

SEQ ID NO: 365050 - DNA, 521 bp, Cannabis indica
aagtgattttttttttatttttaaaatttagattcttaatttaaaaaaattgaaaagtaaaaataattttatagaacatgattttgaaaaatgtatttacttttctaattttaaaaataaaaaattgattaaaaaagtgttaccaaacgtaccatatattaagggtaaatagcggcataagtcccaaaattttaaatttataagtgacataaatctaatatttatttttagcggtgtaagtattcaatatttataaaataattataattattataaaatattgctaatgtaaagtgcttattaggtaccgtttgtgcctttgagcttttaagctggatgaccctgtgggaaaactacttttgcttattatattaaccttgctataaagttattttaatttttaattttttttaagtagaattttaatttgcaccccataaaaatgataagtacattctgttattaaaaaaacttaaataatttttaaaaatttaactcttgatattttttttaaaattttt

SEQ ID NO: 365051 - DNA, 987 bp, Cannabis indica
gataaactttgccaacctgcatgaatctccacaaaaaccttcgttgaattttcttgattatctcgtttgcttttgttggcaatacacaccgtaagagagtcatggaatagcccctcctatataactttccctcaactactgtatatcaaggtatagaatacaagagtttgcgtgccgcattcttgtctggaggaagttctctgtttgagtagatgtttgagtattgttgtcatccatgtaggtgaggcatcaatcatctcaacttcttccttttcacatacacttgggtcgctcaaaacctccaccagtaccaggtttaagttatcaagttcattttgtgaggccaatttggccagtgcatcagcatttgagttgtgttctcttggaattagttcaatcttaaaataatcaaacttctccaagttcttctgaactttctccaaatatttttccttctttaaacctttcacctggtactcgcctggaatttgattcacaatcaattgtgagtcactatagcatataagatttttgacttttaatttttcggccattcttaaaccagccaacaaagcttcgtattcagcttcattgtttgaagtgtcaaattagaatcttaatgcgtagtgaaatttaaagttttctggcgagataattatcccttagacacccgagccattttcatttgatgctccatccacatataatttccaagtttctgtatcgtggttgactaatggatcttcttcggagactatcccttattaggaaattaaccaaagcctaatctttgattgatattcttgggtaataagttatattgaattgccccagctcgattgaccattttatcaatctttctaaagcatcaggttttgataaaacttgtcttaattgttgatacgtcaagacttttatgaaatgtgcttggaaatagtgctgggttttatgccctaaataaaactctttacaatctgattagttatc

SEQ ID NO: 365052 - DNA, 1423 bp, Cannabis indica
gtagtatatatctagtatcttaatgattcttaattaatagtcacatataatttttttactttttttaattatactaataattttttatttcttctagctaagatattcttgatccatatacactgatcaacatattatctaattgactttatataaatatatatatatatatatatatatatattagataaagagattagatacaattaattattgttaatagaaaattttaataaatgcagtgccaaatattatcgctatatcctcgagttgaatcgtacgccaaagagtatcaacttttgcaattggagcacaataagttgacacaccagatatctgtatacaaagatcaagatttactcggacagagtatatatacatatttataaaatacttaatcacttgcttaatattatatatctaataataatagtatttactctattaatattaatattattatacttttcagtggaaattgaaaagaacacaacagaagtgaacaggttaagggtactctataagcagcaacaacaacaattatatgaacaacaacaacaacaattccaagcatcatcaatggctcatcatgaagggaatttatcaatgaatcaaataatgtctaatttcaatacccaacctactgagatctttccacaccacccaaacccaggtatattatataaatttagagctattttattaatttataattattaatcaagataaatatttggcacaactttgctggtcattttaatttgctacatcatcacatctggtattattcataattttatagatatacaattacatatgtacatattacatagtacattagctagttgattactaagttcataaatttatagctgattatatgaatcaatgtatgcagatattgaatttgaaggcgaataatatcaatggtattactaggaattataatcccaaaatcaagatcaaagtacaagattctaatgtatggtgggtaacacaatagcactacaacatgatgatgatcatcatgttgaagaatctaaaacaagagtaactaatcatggatgtcgaaaaacaaccaattttcatcaaggaaaaccaaaacaacatgaccatcatgactattgaaactaatattcaattctataagtaaccattttagatcttacaccggtaatatgcatgactacatttacaagatatagatactgttattgctctccatgtttgtttgcatttttcatcgtttcaaaattttaatttgaaatatgaatatttatttttccttaatttaatttatcaattacttcattattaatttatttgtgttgttagttgtttccctcacaatttaattattatttattttataattaaattatcattacctcagtttgtttattttttttaattattttagtta

SEQ ID NO: 365053 - DNA, 423 bp, Cannabis indica
tatgcatagcaattaccatttataattttccattattttaatgccacacaattctaacctaaacctagagggcattctgtaaataaaaagtaatgacttcaggaaacaacacacaattgcatctcattgcttcggagcaaactttctacacgccattttctctctcttttcctctcttcaatttcgaaacccttgagtgatagagtagtgcccacacacatcaagtggtatctcaatcatagtgagtaagactatggaaaatcagcatcaaagaatgagagaaggagatcccgattcagatcttgaaatatgaattaaaacgatgatatgtgttgatttggatggtttcatgttgatctatgtgttatatgatgattgattgatgcttgtgaaattttatgaaaaataattgaattttcgttt

SEQ ID NO: 365054 - DNA, 719 bp, Cannabis indica
ttgattttttttttaattgtatccaaacttaccttcccagaaattcgatatacatattgatgaaagtataatgtctatgattagttactaacagtttcctaagtccttctagggaaacaccctagtgataggaaaatttcagaatgatggaatggttgtgtaaaccattactagaatcatggatgacctagttatgatcttaagaaaagctaaaactgttaaccaaggtttgcatgtttgatagctatcatgagtgattaggggtggacaatcccatagtcattagataagaaattgtttgtttcaacaaatactacttttctaagaatatgactaagtttgaaaacaaagtagcaaaatagaggagatattttttttcttgattccaaaagtgttctatcatcttattcgaaataagattgtcccactggctctattatcttgacacaaccgaagaggataattccacttatgttcttagacagaaagtcacggtaccttgtcgtagtgggagagtttcaaggaactcacctgttatgacttggaagacacttgtgataaattccattattagtttaaacaagtaatggattgtcagtataagaaactaagaagtaaagccaagagaactatagttaaaaccactcatatggagtaaccaaaagttttctattacaaggacaagaaaggaaatttcgttagtaagtctattcaatgga

SEQ ID NO: 365055 - DNA, 633 bp, Cannabis indica
ttatggagatttatatggcatatgtggatgtaatatgagttactggtgtaataaaaatattttcagttctggcgactttggagtctcgatcgggggccaaaaatgtcataataggcttaattaatagaattaatgggaatattgtgataagttgataatgtaagtattaagataattaagagtatatgagaacgaacaaaaccctcgttcatgttctttcgataaaactttctcttcctatatctattttctttgattttcaatttgaaacctagcgatctaagctccggtagtagcagaatagcgaattctcagagcatggaagcttaaggtagggtttaatattgttttaagtttaataacaattggtttcgtataggggttttgtaaattagaatagttatgaaggttctgaccttataggattgttcttgagtagccatgggattagttttgatgttttcttgctgaaattgaggtgattttgggttagaaatcgagtttggaactttttaaagcttagtccgagtgttaatgacgttttctgtttaaggggtcaattttaatttctgttacataagaatggtagtattcatggttgttgtatatcgtcttttggataaatcttttata

SEQ ID NO: 365056 - DNA, 585 bp, Cannabis indica
ttgataacagctccggtgttagcttttccatcagatcaagagaaatttgtagtttttgtgatgcatccagacaaggtctgggatgtgttctgatgcaagccaacagagttatagcttaagcttttcgtcaactgaaagattatgggcagcgctattcaactcatgagttaggttatgctgtggtggttttacttttaagatatggcgacatcatctttacggtaaaagtgtgagattttatatcaccccgggaaggccaatgttgtgactgctactttgagtagaaaagggtttcgggcaagtttgtactattgttctgttagcccttaactagcctttgaaatggttaacacagggattgaattcgtagttggaaagttacacagtttaacacttcaatctgatcgattagaaagaatcagaaaagcgcaattggaatatcctgagctagttgaggttcgagacgatgtaatggccggtcggcctaaagactttttagtctcgaatagtggaatgttgttatttaaagctcgagtttgtgttcataatgttgatgagcttaagaaagagatacttgatgaagct

SEQ ID NO: 365057 - DNA, 808 bp, Cannabis indica
aatttaactattacattggatttacaaacggaagctaagttaaggggttttgccaaccaaaaataaagaacaggagttaagtgtatactaattgaaacttaaaggggtttggccgcaaatttctctatttatatatcaaaacaatatattttttttatatatattttacataaattcacatagcaactcatataataatcaaaattcacatagcaactcaaattattggggccaactaatatgaacggagacatgaactagagatgcctcaggaaaaatggaaagtaatctagccaaattagctaagaaagtgtccaaatttttacatcaaacaaaacgcttcgaaaaagctgagatcaaaacttaataattagaccctaaaaatgaatagaaagctccaacaaataagagagaccaatctagcccttccatcaaaataactgttctctgcttgaatgactgaaaatttccctaaaataataacaaaacaaaaaatgagttcttacgaaatatcttataacatcaagtaaactaactataagaaacaatcataaaataagcaaaggaaaataaaacttatctcatgtaagtaactccaaaagtgaccttgaaaacctccataaataggcactaattgtaaaacaaacaaaacaaaataaaaagtaccatactataacataacatacacaaacataaaaaataatcttaataaacttaaattaccaatatatactataattaattaatttaacagtaataaaaacttttaaaaaatttgaaattcgtattaacaccataaaaaataact

SEQ ID NO: 365058 - DNA, 618 bp, Cannabis indica
gacctgggacctgaaccagaacaaaacaaagacccgtgacagtgatcgagatcttaactcgggattcgggtaacggggccttgaacagagcagtagtcggtgtctagatgtaggactcagactaggaccagaacccagacgaagaaccaaactcaaaccaagacctatacctgggacccaaaattcgaacctgaataagaatcgccgaactaggaccctagaacaagactataaccgtgatcaggacccggtcccagacctataaccgatcacagacctagcctcagcctcagacccaaactaagactggaacataggctaggacacagtcgtgtacccagaccgaaactgagactggaacttaggccaggacccgcagacaagacccaaacatggacatagacccgatcctagacccatatcggggtccagaccaggataaaacccagacaaagactcggacccgaactcaaacccacacctagaatctgacccaaagctacacccggacccggacccaaactcgaacctagacaaggatcagaatcaagaacttagacccaaaaaacgaatccagattcagattgagattggaacttgggactcggacccaaccta

SEQ ID NO: 365059 - DNA, 744 bp, Cannabis indica
tatgaatcttaatttattaattttcttaatttttcataatttgtagttttaggaaccctaatgtattctattatgataaaattaattcaattaactaacaagttatatttattcaataataattaatcaagcactagtaagacaatttgattctctctaagcaaaacttgtagaatctctcaatcccatactttttttatgtcatacaattctatataagtctgattttagattatctctctcaagtgtaaaacttaaaatcttaatactaattaatggtcatcaagcattaacaagattataattatataacacaaaaattacataaacaaataacaataacaaacatgggaataatctaaaatttttgattcataatctaaaatagtttctttcacattctagaaaagagtgtttacttcataatgacaaatataataacatcaataatcatgttcataattaaacaaataaacaaaagaataaataagaagaagaagcaaataactctaatgatgattggtgatgattacttggaatctcttctcttttgctcttcaatatgtttttctaatctgtaaaagtatttttgtctctcattcgtcgttggaagtcaaattacacaatttttactgcaaaggggttatttgatcatactccggcaatattgacagttcatccttcgcctccaagtggtaggaaaccgtttaaatattttcgaatgtggtctagttatcctctata

SEQ ID NO: 365060 - DNA, 800 bp, Cannabis indica
ttctgagatgttgttttgatacttccaaggttatagaacttaaggatgaggtctcctatcccattttttgacaattttagagacaatgctcgaaagaaaaattgacatttgaatgatgaaaaacaacgaaccaggttgattgtcaacctgggcgctgggccaagcaccaggtcaacctgggcgatgggctcagttttgatgcccttgtgattgtggttttatctccgagtttgcttgtattttcattatttttgatgatggagaaaaaatgctttgaacactttttcaggaaactaattcaaaatagcctaggttgataatttgtcaactagggcactgggcccagcaccaggtgtcaacttgggcgttgggtccaatttcaagccacctgaaaatttttcttggtccccaaaaatagttaaatcttaatctttagtgaaaatggagaatatgctaggaattatttttggaaaaaatcctcgaaattggttcgggttgaaaaaatgtcaacctgggtgttgggccagccttaggtgtcaacctaggcattggtcccttattctggcacccaggacgggctgcttcttccccaaaagtacttatttccccatttttgatgaagacaaagaagatgcacgagtcagatttttgatctgatgcttagaagtggtctgggttgatagattgtcaacttgggcgtaggggtgctcaggcaccgggtgtctggctgctcaaaaatgaaagttctctgaatctgattctaatgcctaaaatatgttcgtggtatgtctagtttatgt

SEQ ID NO: 365061 - DNA, 559 bp, Cannabis indica
gttcatccttcgcctccaagtggaaaccgtttaaatattttcgaatgtggtctagttatcctctatatcaagaacaacttgctgaagcatggtctaaaccagttattggttcgaaaatgtttcaagttgttaagagactacgaggtctgaaaccggtgctgaatgcgattaacaaacaggggttttctaatgtatatagtgatgaattgaaggctaaagattggatgcttaagtgtcaacagaagctggtgagtgatcctttgaatgctgaatggcaaaatcaagagagagaggctcgggaattatatgcagaaaaacataaagtgttatcatctttcttgcaacaaaaagctaagactaattggttaaaggaaggtgattctaacacttcattattccattcaagtattcgagaaaggagaaagcaaaacaggattctttctattgttaatgctagaggagaaagaattgaggatccagtccaaatcactgaagcttttattcagtactacactgatctgctaggacacaaaatgcagggaaggcagatagtgaagac

SEQ ID NO: 365062 - DNA, 876 bp, Cannabis indica
ttaattttctgcaattatttttatattctgtctgttatgttttatcgctgcaaaactggtttctacagtaacagaattacattatacttctgcagacgtatacagttttatattttgtatatattattgacatttgcaaaaactcaatttttcatactatgatgacatcactgtaattgtgaataacaatatgttctggatttgtcaaacattgtatattaaaccataatcatgaaaattacatgttaacttaaatgacttctaatcttctgttgctcacaaataagattatattaaaatgggttttatttaaggcataaaatctcaacaagaacatctcggtaagtactctcactagccaacatgtattgtggttccactaacgtttcaccatgcagggacccataaaagagctagtacccatcacccttaagcgatggcctcccatcacttttcagtgatggcctttgtatggtaagccctacaggggtaggcaaatattaaagagctagtacccattgcttttcagcatggcctcccatcactcttcagcgatgggagttgcgtggtaagtcgtacgggtagccacaacgtgatttcaaaagcggacactaagctgtaagcttttgttacacgtaagaccaactgtgtctaaaccacttgctaatatagataatttcttaaagttattctttgcagttccacatgcgtaaaactggtagcaccccaagaaaattcctaggcaaggtctatgaaacttggtgaattgaaagtgaccaagagaccgtaagtccgcatgctcatttggggggcacctactgttggaatttattttaccaggatcttagatctactcacaagtatgttgtttaaaca

SEQ ID NO: 365063 - DNA, 806 bp, Cannabis indica
attgggataattaggagtgtgtgcgatttgacttagcgctctaaaagtataaatttctttgtggctaagaaataataagataatttttaataataaagttttaccattggttatgtactttaataagtgtggtattaaaatagatgttgggcacttgttcactagaataacacaagtgataaaataacatgatggacctaaaaagttccaaggaacttataaaatcatagctacgttgtatactcgcttcattaagtgcacagaaaagctatgttgatttaaagctatagatattaaatttctagggggagacttagtatttctttgagtattacctatgagaggggtgcatagatttggaaagaatggaagattaagccttagaaacatcgatcctttttagatattggagcggataggccaggtggcctatcgattagttttaccacccgcattgtacgaggtgcataatatcatccacattctatgttgagaaagtatgtgtcggctctgacacgtattttgagttatgatgatattgaactgtaaacgaatttattttatgaggaagcgacttggcgattagagtcgcagatgcgggagttgtattccccaaattattcaggtaaatttcgaggacaaaattcttataaggaggggatggttgtaatatcctgataagcctaatggtaaataattagggtttataaatatattatgggttaattagataataagtgggattatgatcctactaatctagttcaacataaattttaaattcgttataagtggataaataagcg

SEQ ID NO: 365064 - DNA, 661 bp, Cannabis indica
acagaggtattggccgtttcatcgtctttttctcccttcctcactattttcttctttctgcagttgttgttgttgagggtgggcatcagagtttggtgtgggtgttcgccgatggctggagacgagaagactgacatcgacggtgccgactttgacggaatcggcaacgacaggattagggtttcgataggacctaatggctaagaagatcgaagccctaatttttttgttgaagcctagatcttcgtcttagtccagtaccaccgcttcttcatctcgtcgaaggctagatcttcgtgtcaatccaccggcaccttctttatttttttgtgatgtttttttttaacatgggactaatgtgtggggcttctcctatgtttttgacatgtacaacaaaaggtaatagattgagattgcatatataaataattagttacaatgtgaaaatctctgaatagtatataagagtgatatacttgagtttgtcaagtgggacagcacccaattcgactttgcatactggacaggaattgcacccttcctctgttatcttcttaacaatgcacacccgacaaattatttatataattctcaagagtttagattaaatcaaaagccatacaaccaatttttaagttttagtatatggatctaagtcaca

SEQ ID NO: 365065 - DNA, 690 bp, Cannabis indica
cacataataatgattacgcccgactctgactttgacaaataaacttaagctactgtttataggttcatggaccgtcatcaataccgtcacaaccaaccatagtgatttcaccatccaaaccataacaagatggttttgcagaaatcctcccactacgacaaggagccgtgattttctaaacaggaacattagtggtagttttctcggttgtatcaacttgtattggttcaaccaagggagtggaatcatcctctttttgagtagaagatgatggaacattagttggagttatttctgaaagtattttctccaatactactttgcttttcagcttgaagattttaatatagtcatcttcaaggaaagtggcgtttgtagaaacaaatactttatcatccttatgactataaaatagtccaccccgagtctcttaagaattctcaacaaacatgcaaacttcagttcacttttctagctttccatctttctttcttaagacatgagtagggtacctctagattctataatggcgtaaactagctatacaaccattccataattctaaaggtgtcttatggactgatttagatggaacaatattaaaaatgtcagttgtcatctgaattccgtatccctagaaggacatagacagagttgaagagctaagcatggacctaaccatttccaaaa

SEQ ID NO: 365066 - DNA, 514 bp, Cannabis indica
aattggggaaaccaataacggtggacttattaactaagggcagagataagctaaattatcccagagtactagttaaagtttcaataaatcaagagtttcaagatctcatttcatttgagaatgaatttggtcaagttgtttttgtggcagtcacttataaatagaaaccagagatttgtggacattgcaaaaggatgggccatgctacaagtgattgcaaaaagaaagaaggaaggaaaacaagagtagattgctaagaaaattttgaaacaacctgaacctgtgattgagcagggaaaactaaacaatgggaagagaataacggaaatttgaatgaagcagatgcgttaaactagccacaaagggttaaaacggaaaaggaaaggacgagtagtagggaagtatcagtgttacaaattcctttcaagctctaattggccaaacaaatactctagtaaatacaacagaaaaggaaatcacaagaggggaggggggagtaccacctcttcccaat

SEQ ID NO: 365067 - DNA, 887 bp, Cannabis indica
ctgtacactaatttttttttatgtaaatattgattcaggtggtaatccgaacccgaccggagctaacccgtgggacccgaccgcccgaaaatcgggtttggttacacattttaaacacccgaagtttgaaaacccgaacccgattatccgaaaacctaaaaatccgacccgtgtgcagccctacctgctggaatagttttggacagcctgtgctggttgattcatcttcatcgtttggctactggtttgagcagctgctgcacacttgcgacactgatttcatctgtcgtgcagcaactcttttttgggccttgtggaaaggccgaaatcaagttgtctggaaaaaacacaagcctactgttaaagaagttatggtcaattcttcaattactcttgaacattggaggaaagctcaagataaaagcgctcttttaacactatcgtttagtaatagtgatgaaggggctgagctatggacaccacctgcaacaaacaacctcaagataaatgtagatgcggccctttatcaacaagacaactcttatggctatggagtagtggcgagggatcacctaggtaggttcttagaggccaaaacatgccattgtaatggcacctaccctgccgaagtgattgaagctttggggatcaaggaagctctaagttggataaagaacaagtcttggaagaatgttgagcttgagaccgacagtcttttatctgtgcaagcaataagaagcaaccaaaaaatgtcttctacttttggtattgttatagatgattgtcgtttgttattatctcttttaaaggatgttaagttacgttttgtaaaacgatcagcaaatcgagttgcccatgttattgcaaggcactctcgatttatctct

SEQ ID NO: 365068 - DNA, 687 bp, Cannabis indica
aatacaaatatgttatttttttcctccaaatattatggttttttaaaatattttatgaaatgattgcctaaattggtgtaaagaaataaattataattttcaaaaacacaatattttacttttttaataaaacccccatttaaaattttgccatagcctaaagctatagagagcaaaaaattttctttatatattttttgaaaattttagatagaaatataaaaaaggtaaggttggtatttaatttcgttatatttataggagcttgagtgactaagaataattaatgactactttttattaataattttggagtggatttacattttttatttttatttttatttaaaatttaaataaatttataaatatatctttattttaatatttgatgttaagatatttatgagtatcctaataatactcaactaagtgatatgatttttatttgattaaaattttgaactgtttgaatttctaaattagtaattttgatttaatttaaatataaaattaaacaacctttattgtgtgttaatagattttttttaatatcttaagtttaaataattgaccaaaggttgtttaataaaaattataaattcttcaatctttatttctgttattgataaatattcacagaaacattacaatgataaaaaaatttattaattaactaaagaagaa

SEQ ID NO: 365069 - DNA, 689 bp, Cannabis indica
atagtttgggggttcaacctctgcctcttcctgcgcctcggaagaactgctaggacatacattgtcctactcctcaatctcctggacctcagcgtccccttcatgatccccctcctgctggacggctggatcctgttcggcactgggaaaagtggcgtgccgagccccttgaggatcagatggttcagccaaatgcgttgttttcttggtacgagccatcattctacggttgggtacaagatttgggggagaatgtccttcactagaagaaggtgggctagaacaaagacgaggatggtcctcgtgcaaaagttgaagcaggtcttggtctattcgatgtccgctttcacaaaactcacctgggttcatctacaaaagacaacacacaagatgagtgtttggtcggaatatctaacaaaaaacaagcaaatatgctgaccaggagtactcaacagattaaagaacaagaatgttcaaagaaaagtcaaaactcaagaagttcaaaattttctcgagttaaggcaaaaatttcatgaagcttagaataagcaagatgaaagacaagcataatgcagttcagaaagcaagcattatggattataaaatcgcatgaaaccatgacaaagaagaatcacagggtttatgaacctagggtttcctatgaatgttctacagcaaagtcgaaggtg

SEQ ID NO: 365070 - DNA, 531 bp, Cannabis indica
gaattttaaaacttaatttgtcacaaaaagtgataaaattctaaatccatacaaaatggtataaaattccaaatgagcttatcaaaattaattttgaaatattaaagaggtcgtccacctcacaaaattaattcaaagaggtcattaacctcacaaaaatctcaaaaagggtaagtttacttaaaaatttaaacgagcactaaaattcaatattaaggccataaaaaaatggcattctaaaaagaaatcattcatctcttaattatcaaaatacttttttggaactacgtttgacttgattcctataaaaggatatgtagaaaacttagttgctaagactaagtgcagttactgataccgcaaaatagtataaaacacacatctcaaaattttataaaaggtcatatatacctaggaatttttccaaattttcaaatagcaaaaaatttctgaaagtggtcatctaccggaattcttatattcaaattcaaaaatactgtaaagaactacaagtggcttgattcttcacaa

SEQ ID NO: 365071 - DNA, 767 bp, Cannabis indica
aacgtttaaaattagtttttttttttgtttttttttttggatttttgtctagaatttcacatagaaattcatatatacaactaacggagcaacataaatcgtaatcaaaatctacatagcaactcacatagaaaccactagagaaaccaccagagcaactcaaatacgtaaattttaaaaaaataataaaaaataatatatgaagtaattttctaatatttataatttaaatgtctctcaatcattataaaatataataatcattataaaatagttattattttttttatcgctattattattattattaataataaatattttcatgatatattattttttaatttttacatttttttgaaaaaatttcccctatgcttgtaatatttagtttctatatcatatgtaatatttttaattttttttaacaactagtttctcaatattaatgagtgtgtgatagtaattattattattattattattattattattattattattttgtaatatgtgtatttttttggtattgtttttcagttggtttttgaattagttatattttatgtaattggtttttgtgtgttattttttaatttaattgtttcacgtaattggtttctgagtgtcagattttttattagatagaaaacattattggtttttatgatttaattttggaagtcatttattaagagttcatatgtggcatgtcttatatgtaattctcatgtttttctattttattctttaaaatacttcaccaa

SEQ ID NO: 365072 - DNA, 697 bp, Cannabis indica
gtttcttaatcaccttgggtaacatgcctaattgttagggtgttatagtatggtagcaggttggagacacagtatttctccgagtatcgcctatgaaaggcattaagcgctttggtaagaaaggaaagcttagtctgaggtttattggaccttttgaaatccttgagaggatagggcaagtagcctacaagttggctatgcccccagcgctagcagctgtacatgatgtgttccttgtttcgatggttagatatatgtctcagattcatcccatatactgagttatgaagcattggaacttcagccagatttatcatacgaggaaaacctgacgcaagtacttgatagaagggagaaagtcttgagaaataagacaattcactggtaaaggtattatggaagaacagtaaggtggaaaaaagtaatctgggaactcgagacgcatatgtagcagaaatattcggagtggttcaggtaaatttcaggataaaatttctataaggaggaggtaattgtaataccctaaattaagagaatggattagcaaagcctaactagttaactgtgtataattaaggaataatatgtttatataatttattatatgtgaattataatgatttatgacatgttaaggctacgttggtgagctaggggcattttagtaattttgacccgagaagggtaaaattatgaa

SEQ ID NO: 365073 - DNA, 739 bp, Cannabis indica
taaccatcatagttacatttttattgtaaccgttgaatactcacccatatttatatatattatattttatcattcacaacattagacaagagcttttttccatagatgagtccgtgaatgagtaatgatagcacaaaacatcacaaataattcaagtaaataataatctatttaatatatattgattattttttttctaatgaattactacattatattatataaagaaagtaaactctttttttatttattttatttttgaaattttatgtgaatttcattaaatgccaatgagcagacattacttatcatagatagattagcacttcaaggccaccaagtcttagaatgatccattgtatttgtaattgtaagtttggacgaggaatgaaatatctgattttaagtgtgttgtgtaaattttttttttttatttcttttaattttttaaaataatatataaaatttttgtattcaaccaaacaatttatatatttttctataatcatattctccttcataatattctctattaatcaaattattttgaacacttatttcaaacctctcctaaaaaattattttgtgtatataaaatttaaaaaattataaaaatattaaaaatttcattcaatcagtattcttttaaaaaaaaaatttattgtttttgtgtattattttttgggaaaaaaacaagaaaatacaaaaaaaaggaaaaaaaattacaaaaatattatgg

SEQ ID NO: 365074 - DNA, 872 bp, Cannabis indica
gacacaagttctaacaccgatcttcatcttataccgccgtaatcattaacggaacacgccacttgactaccttaatattaagtagactttcgatacaaggcaccatgagatcttcaatcgcaaggtcatcacattgagagcttcttccacacatcgcaaatgcatctcactatcccagtgcttctaaacctttggctttgataccacttgttgagaaaaacgataaacttcaagcacggtgaaataacaaagaaacaaaataaaacaatttactcagtttgctgaaactaccaaacctacaaagagcgataaatttcacttatcacttcaaaattacatatactctctatctcaatctgtccacccaaatcccaatacaccatttgcttcttcctcactctcacccacaataaactcacatactcttctctttttagctattttttttttaaaagatctctaattttaaaggaccctattgtgagtgttctaatttgaaaaataaaattgagagaatttagataaagaaataaatctgttatattattgattaatgagcttagctcaacatatatacactgaggagccaatcacattaggcactaataactaactatgtcctaacatcctctttcaaacttataggagagtgaagctaaactctaagttggctcatgattagaagaaactgagtactagacagagcctttgtgaatatatctgcaattctatatgcaaatcaatcgtgtgagtgaacatgcttggcaacagtttggacctttgcacatcttatcccttacaaaatacaaattcaatataagataattttaatataatattttaaattaaaaagataatgttatcttttaatt

SEQ ID NO: 365075 - DNA, 633 bp, Cannabis indica
ataagtataattttagtgttctattgtacattgaaataaatatagtataaaactaaactattatatttagtattttagagtttgattagagataccttactctcttcttgtaaaagatcccatttcgcgcaaactttaaaaccaattgaattattaaaaggctacaactaatatatatgtgaataaagaataatatatattaattacttgatcaattgtttttatttgattttctataaataccgacgaagacgtacaatgtagagtataaaataagtggtaataaatagtgttgtgcgctgagagtcgtagcgtttcataacaagacaaattaataatcaaactccttttcactagctcattttgtttttatgttgactaagtgtcttaagtcctacaatttcatttgtccatcttttaaatcatacatagaagtttatctgtttctctctctgctaatactctttttttttctttgaattttcctctacaaaattaccgcaacaaaggaaaaagaaacgttttccattttattattttgataaagttgtgtgacgtatatattatttcctatatccataattttttacataaaagtttttacttttttttttttttattaaattaatttaa

SEQ ID NO: 365076 - DNA, 599 bp, Cannabis indica
gatactgctaagtaaatggataacactttgcttgtcatgggttttgataggatagggggttgccccaaatgtgtctttaaggcttgaaaagcctcctcgcatttttcggtccattggaacttcttattgccttttaaaatctgaaaaaactctttgcacttatcagaagatcgcgatataaagcgatttagagcggcgactttacctgtgaggctttggacttcttttggcttagttggtgatggcatctccaccaacgccctgatcttcgcggggtttgcttctattcctcgttgattaaccatgaatccaaggaatttcccggagctaactccaaagacgcactttagagggtttagtcgcattttatatcgacgcaatatatcaaacattgcctgtaaatgggcgatatgatccttcgcatgttgagattttacgagcatatcgtcgacatatacttccatggttttcctgagaagatctacgaacatcatatttacaagtctttgataagtcgcacctgcgtttatcaaacaaaaaggcattactttataacaatatagacctcgatcagtaatgaacgaggtatgctcctggtc

SEQ ID NO: 365077 - DNA, 594 bp, Cannabis indica
tgattttcttaggatttgcttcgatgcccctcgcgttgactatgaatcccagaaactttcctaaagaaactccaaaggaacactttttcgggttaagcttcatattgtatttccttaatatttcaaagcactctgcgaggtctgtggtatgacttccactttttactgatttcactaacatatcatcgacgtaaacctccatgttccatctaatctgattcgcaaacatttcattcaccgatcgttgatatgttgccccatcattcttcagcccaaatggcatgaccttgtagcagtaaagtcccatgttggttacaaagctcgtatgatcttgatctgggatgtgcatttttatctggttatatccagaatatgcatccataaatgacataagctcgtgctcagcagttgcatccaccaactggtcaatcctaggtagtaatcctttgggcacaccttgttcagatcagagaagtcaatacaagttctctaagttccattaggttttgggacaagaacaggattggctatccatgagggataaaacatctcgagtataaagtcgttgacgaacaacttattcacttcctgttt

SEQ ID NO: 365078 - DNA, 590 bp, Cannabis indica
tctgcctttggatggggacacgtgttgggcacgtcttttcgagactcgatgtgaggctgactaggcatcccttcagttttcggctaattaatgctctaacaattaatattttgaaatccaattttctctcaccacggttgacggctgcacttgattattttttatttcccatattcgcatttaagggaactgaggcgtctgaggtttctttgaaatgattacctctttttcgtgacttgcctataaataccaaagagcattggcgcataaactcattttcaccattcttctttgctaagtgagctcagagtgaaaagagaggttttttctggtctcaagttttctgaagtgccttcatcgaaactgctcgttggattgacgttgcttgaacccagatatctaactcttaagtaagttctcgatttcctttatgcttatttttgcatgtttagtttttgaatccaccttcgactttgctgtaaaacattcatagaaaaccctaggttcataaaccctcgtgattcttctttgttcatggtttctatgcgattttataatccataaatgcttgctttctgaactgcattatg

SEQ ID NO: 365079 - DNA, 551 bp, Cannabis indica
agcatctgatcacctcgcactacccccacatccactggtgtttgaaacttcaaggataagtgcttgatcgaagtaacagcctctagtcaaattaatgctggacgacccagcagtatattgtaagccaatggcaggtggacaaccaaaaagtcttgcataattgtggtggacaaaggtgcttcggccaaggtcaatgcgagctcgattattccttgactagcgacactatcgccagtaaatctgcaaagatttatcatgcaaggccttaatttagctttttcatgccctatcttcttcagaaaggatgttcactgaaatctcgttgtctaccaacatcctttttattctcttgttggcgagctggatggtgatcaccaatgggtcgacgtgagggtacctcacgttcttttcatcttcctccaaaaatataattggaggctcttcagtttttactttctcaaaaggttctggagaaaatgtagactgctcgttcttcacttccttcacgtacctcttttgggcgttgttgctctctcctgcaatatgtggcc

SEQ ID NO: 365080 - DNA, 857 bp, Cannabis indica
acataaatttctataaatgtaaacgttaagggggaattttttaacaagtcgtatatttttggagaacaaaattagtatttattgaaagtttcagaaggtaaaattagtaattattcatttgtatatatagtactatatactcgagcagagataaaaaaaaatattgcttggtgaaataaaggaaaaattatagaatctcctttttgcttgtcaagaaagctttttttcagttggtggcaaagagattatcctcaaagcagtagcacaatctatttcaacatatgcgatgagttgctttcggctttctaaatcttccattaatcaaattgagacaatgtgcaataaattttggtgggaaaatccggccaccatgcacacacagcagcataatgttaataaaatgggaaaatcccaaaagatattacaaaaacgaaaattacgcaatgtacattaataaaatgaatataaatcatatttataccttaatgaatgtataaatttaacgttttctcaactaaaattagtggtcggagttataccactacctttttttaatggggtcggttacggtgaaataggggaaaaacccaattttttagtgtatagatttaggtattgaaaatagaagattttaaaaaaaaaatggggtgaaatggtatagaaatgagggagatatatagattttataggtgggtggcgagggttttttgggttgtgggttctgctatcgtgttcttgctgaagaagaaggtgatgtgggaagatgaagattagggttttctatataaccctatgtcgttgattattagggtaagtaatcgactccataggtgcacacgtgtcaataaaggagtgca

SEQ ID NO: 365081 - DNA, 776 bp, Cannabis indica
gagaatgcagaaattactgatcaggtggatacacctgcaacacacagagaacctagttcagatgaagagcaaggacaagaacaagtgtcctctaagctacaagattatcaacctgtccgagacagagttaggagagatataagaccaccagaaagactaggctatgctgactgcattgcttttgcacttgcagcagctgaagaaattgaaaacagtgaacctaccacctatgctgaagctgttactggaaagaatagaaagaaatggcttggtgccattaatgatgaaatgggttcacttgaaagaaataagacatggattcgagtacctagacctagaggacaaagaatcataggctgcaaatggatttttagacacaaagaagggttgcctggtgaagaagtgagatacaaagcaagattagttgctaaggggttcaatcagagagaaggtattgactataatgatatcttctctccagtggtaaaacaaacttctattagaatcatgatggcaaaggtggctatgtttgatcttgaaatggatcaaatggatgtaaagacagcatttttacatggaaatctagaagagaaaatctacatggaagaacctgagggatttaagaacaaggaggctgatcaagtgtgtttacttcagaaatctctatatggcctgaaacgggcaccgaggcaatggaacctaagattccataaattcatgttgcaaattggatactcaagaagtgagtatgacccttgtgtttactacaacaagac

SEQ ID NO: 365082 - DNA, 707 bp, Cannabis indica
accccatatactatttttttttaacttttttttttttcaaatttacaattttaatttctaaagtggttgcagcgctagttagaatagaggtttctatacgattttttgttgcaattcaggttgcagcgctagttgcaataggggtttctatgtagaatttcgtaaaaataccaaaaaaaaaactagttttgaagtataaaaatgaaaaagccccttatttaaatgtaaattatttattaaatcatattaattaattatttgaataaaaaataataaccaaattagttatagatatttatttcctataaccaattgagggaatctcccaactacttgagagaatctctcaaccacttgagaggaaatctctcaactaccttgagagaatatttcaaccaacaaaagtatctataactactttttaaattgaaaatgaaataaatatttatcatttgaacttttagtatgtatagaattatatttactgagttttattacagtatttattaatataatcaattccaatgatgagcgctccttgtgtcggttcgtaattaattttggtcaaattactattttacgcttctaattacttctttatattttagtactattagttcactagtgaaagtataatttagatccaatctcaatttgtgcaaaacttttaagttccaaaattaacatttaaagggaacctacagtca

SEQ ID NO: 365083 - DNA, 765 bp, Cannabis indica
acctctggctgtgccaaaggacaaggaaaataatttaaagtcgttgtatgagcagtttagaaagcagaattctctagtgtttgagggtggtgcttacccacttaaggcggagcattagatgagcatgataacgttcatcttttactttatacgagttgagggtaatgatcgagttgggtgtgcaatattcatgctgcgagaaaatgcccacatttggtgggaaattgtgtctagggtcatgatctgaataacatgatatgggatgcctttcggaccttgttttatgaacagtagtacaataaatctatccatactgctaaagtagaagagttcatgctactgactctgggtagtatgacaatgatagagtttgccaccaaatttgatcaattggcaaagttttcctcagattaagtgaccactgaggctactagaaaggccaagtttatttgggggttagaatagcatattgctcgttatgtaattgtagctgctaagcaacccaggtttgtttgaacttatgctcaggtggttgagttaggcttactaatgagggtgcagaagattagatccaaaagaggagtagtatgagaagagattcatggaaacaatctcccaatgcctgtctaactaggggtgctgaccctaatgactgtaagaagagacctatttacccaccaaccatgggtcctaataagaaatttcaaggtaatcagggtttctgccgaggtggaaatgagacctagagaacctatcctaagtgcc

SEQ ID NO: 365084 - DNA, 953 bp, Cannabis indica
tttttagttcctctagaatttcagtcatccagtccgctgcatcgattgttacccctatctcgtactcaaaaagtcttgttctctcacaaattctaaccgaacctccatcttttgacaaggtgatcataaacgccttgtgtttggtacgaaaactccaatacttgtgaagtttctgatcacaatttggatcagagaaattttcccagccaacactagtggggtgaaggcctttttcttcccaaaaccagtggggttttggtgttttccatggctagaagggccatggaaacgcctagtatgcatgaaaacgttctcagaaagaggagagagaagagagcatatggaagtcagaggactggaagcattcttgaaagtgcaggaatttcttcaaaagaagaagccatttatgatattttctcctagctagtgtgtgttgtgcagaaaagataataagaatagcaaacacctattcaacaattatggctttttcttgaaatcacagtacaaactagtaaatgagttagggttgttttggggaatgcctgttgtttgtaaggaaattttgatgttccgcattatacaaataagttctttcggtcactgctgtgttggtttttctttggggtatatgatggttggaaaggaacaagtagattttttgaggaacaatgccgcaaattggttatgggaaaaaaaaataggctttggttaggcgtttgaggagatttcattatctgtcttatcaagagaatggaatgtcattttgtgattcttttttttctttctttcatgttgctagattttgtttacattgtttcttttgtatcacctatctgtgtaggtgatgccagtggatttttcacgtctttgtattttccttttaaatcaatacaagccagctttttttccacaactcctccttcccaccacacacatgcacacacacccccaaa

SEQ ID NO: 365085 - DNA, 900 bp, Cannabis indica
gaatatcctaaaaggataatctgatctccataacttccccaaaatatgtagtctcccttgataatgctgatcccaaggtctctcaagtacctgcaatggcaaagtagaatgctcataaaccttgtaagaactttagacaacattggccagcaatttgaaatcacactacaatgagcatatgctgcaaatcgtatcaatttgttcctcatctataagtaagtttccacacttgcatcttccacaacttggttcctttcatttaaagttagattttcatggttgataaagtgctcaatacagaataattaaaacaaaaaagaaaaaaaaacaaaaatcaagctttgcatttagaggaatatcataattgtaaattaccataacacccactaatacacacctaatgagtctctcattacagactgcaccaaaagacatacataacagtttaaagtattgatttaacatatagaaatcaatagtcagatcacttaaagtcagtggaaaagcagaaaaagtaaaatttaccattaaaacaaatttaattacgcaagcacaaaatctgactataacgaattatgttcttttactaaggctggcaaaagaaatgaaaagagaacctacaatgcagcctcattgccttcctttggatcattgaatgttgaagtgcatcacccgtcttttccactcctccctatcaatcccaatcccaattctttcttatcaaccaaatttaatatgctaacaaaacccctagctactttatgcctattccatcaagcaaaataagactaactagagatatccacgagtcaatgttaaaaagtaccaaaggatcatttaaggataaacgtaaatttaatgaaaaagaaaaatcagttctcatttcattctttgttatat

SEQ ID NO: 365086 - DNA, 858 bp, Cannabis indica
cgaactaggactaggaccagggctaggacctaaacctaaacccgaacccagattaaaacccaaacagagacctaaaccaaaactgagactaagacttgaactcgaacctagaccggcacccaaacccacacaataatcgggacctggacccagaatcacgatagggacctgggaaactgaactcgatccgggacatagtacccaacccatacacgaacttgaacataggacccagctcgtgacccgacaccaaaaatggaaccagactgggacctgagattgggatctagatctcaaccctgggcttggaaaaaacccgtagtcggtgtctggatttgggacacatccctggacttgaaccctgacaaggacccaaacccacacccggacctaaacctagtcccaaacccaaaagtggaacccaacccgtaccctgtgacccaaaatgtgaaccaaaacaagatgttgacatggactggaactaggacatggacttggaatcataactaaagttggacctagatccagaatcgtaatcggactaggaccgagctccaaatcagacctagaccggaattgggagccggaccagaatcccaacccacacctagactcaggacccgaacccaaacccgaacctgaactttgacccaaacatggaaccacactagggacacagaaccagggacgggacctagaaccgcacaccagtctcgatcacgaacccaaactcagaaatgggacgtaggacttgaaccagaaccagaccgagacccgtgacagtgatccagatcttgactcgagatttgggtaacgaggcctggaacagaccagtagtcggtgtctagatctgggact

SEQ ID NO: 365087 - DNA, 562 bp, Cannabis indica
ggtcccaaatccaaacaccgactacaggttttgtccaagctctgggtccagatccggatcccaatctcgggtccgagtctggttcaatttcaggtgccgggtcacgagctgggtcctaggttcaagttcgggtctttgtcgggtaataggtccatgtccttgttctgtttcccaggtccctatcctgattcttggtccaggtcccggttattctgtgggtttgggtccctatctaggttcgggttccagtagtctcggttcgggtttaggtctctgtctttgttttgatatgggctcgggtttgggtttagatccttgtcatggtccttggcctagtcctagtttggttctagttccatttgcgattaagagttcgagtttgggtttgagttcgggtcagagttcaagtcctggtctgagtttgggttcgggtcctgatttcagtctaggtccagatcaagctccgggtgtgggttcgcgtcctgggtcttgctctagggtgggtccgagtcccaagttccaataccgatctgagtctggattcagtttgggtctaagtcct

SEQ ID NO: 365088 - DNA, 605 bp, Cannabis indica
agggtacctaatatgggtataaacaataaattcccggcagtaattcacagaacaaaccaccaaaacccaagttgccattaaagctcaaaactttgaactcaaagctccaagttgcacaaaactcagaccaatcaacaataccagcttctaggaactaaaatcaactcaaataacctttaaaattcaaaccctaagcataagcaaacctaacaggccttgaaactcaatttcacattcttaacctaaactttaattcaagaactagggcaaggagttgctagagcttaccttgccttgatttcttcttgaatcccttgctgcaaacaccaaaaatccacaacaaaaccccctggttttggctgcttcgaagagagagagagaatggaaagagttgttcttcaatttttggtattttttcttaatttcactaaatgaagtaaaaggtagggaaaatcaatttcatttgttaagaactcagcttgctaggcgtcacctactcatggcagccacgtattccaccaattaaccaaatgtctaaaatgcccttaaccaaaaaactaaggtttttctaaagctaggggtaaaatggtcaaattccataatcc

SEQ ID NO: 365089 - DNA, 698 bp, Cannabis indica
gcttatgatcggtggagtgggctttcttcgagctatgatgagtaaaataggatttgacgtgtgtttcattgatcttgttattgctacggttagctctgtgaggtataaaataattcatggcggacatgagctgggtccgattgttcttgagaggggtattagacaaggtgatcctctatcaccttacttatttcttatttgtgttgagggcttctcatctttgatacggaagtttgagcgagatggtaagcttaaaggttgcaaggttgctaatggtgctccggttatatcccatatgctttttgaggatgatagttatgtctattgtcgtgaaaatgagagaggcttcgaatatattacatctgcttttgctatttgagattacttctggtcaacaagttaatttcagtaagtcctttgtctttttcagtactaatgtgcatattgctactcgagacagattgtgtgggatccttaagatgagaattgcagatgaacatagtacttatcttggcctcccttgtgtcatgggaagaaataaagatgccattttagggtttttgaaagacaaaatgcggaagcgcgttcaaagctgggagggtcatttcttatctaccgctgggcgtgaagttctataaaaaactgtagcacaagctttgccaagttttgctatgtctgtgttcttattgcctttgaaa

SEQ ID NO: 365090 - DNA, 590 bp, Cannabis indica
tatcagagcttgaaattttctaaaaaaattttttagatcctactcctgtatgattcttgatccttgattcttgattcaatcttaaagattgattctgtcgtcactaacctcctctgagttctctctcaaagaactacagaacatttgtgtgtctgttttccacttctttgtgcaggatggaaatgtttagagaaggaggctccagtgccacgattagaatccatacgcctacttctcatcattgcatgctttctgaagattaaactcttccaaatggacgtcaagagtgcgtttctcgatggggtaattcaagaggaagtctatgtcaaacaaccacagggatttgaagatccacatcatccacaacatctgtacaagctcaataaagccttatatggactgaaacaggctccacttgcgtggtatgataaacacacctcatttctcatctctcatggcttcactcgaggtactccagatagcactctattcattaaaacatgttgacaaagggaaatttttgttgtccccaaaatatatgttgatgacatcattttttggctcaactgtgatagtgaagtccatacatt

SEQ ID NO: 365091 - DNA, 1060 bp, Cannabis indica
ttttaaaaaaaaaaattataactttggccaatcaggaattgtcacgtggcaatttacttaatacttaacagtcgggtacttacaaaagttccagaattataacttaggtattattaccgccaaaaattaaacttaagtatttatttgcaactggcggttaaacttaggtatttatagcgcaaattactcaatattatattacataatacaatttaatataataataataataataataataataataataataataataataataatatataatcaatatatgatctcgggtcatgagttaagcatataattgattgctctttctttcaaggtggtgaatgccttactctagcttcgtaggggcatgcatgtttgtatgaatgaactaaaaccacttttgatgttggtttggtaattgggtagcaaataaattttagtttttagttctaaaaactcttttaacaaaatccaacttttagtaactttttccacacgcccaaaaaaaattactaaaagttagaaacataagctgaagcctaaccaaaagattctaaataaatgtactggtatgaagactgcgataggttctttgtggtgttgtgagttgccttgtccatatcgtagctatgcaattgggttgaaatcaaacatggcacacacacacacaacacaactctttgatctataggaagacttggactttgtttaatatatatctttatattctattaatcatattaattaagtcaacatatatatatacacgtacaaatatgctaataataatagtggtaggaccaagtagtactctctattaaatattgtcacgttgaataattaattgagagaattggacatccaatactattgatgagttttggggaatataagcaactagcctagccaccttaaccctctaagactctacaattatctcaccaattatacactctcggttaacttttacaaaaaaaaatattggatatttataaatgaatagtaaaatacaaaacagaataactaaaaataacagtaaaacaactgtaaaacaacattaaaa

SEQ ID NO: 365092 - DNA, 955 bp, Cannabis indica
aatatgagacagaggtgttggttagagttggttaaggattatgattttgagatcctttaccatcctgggaaagccaatgtagtagttgatgcccagagcaggaagagtcccgagcaagtaactaatatggttcagatttcacctcaattagcagaggacatggtcagatccagcatcgagtttgttgtaggaaaacttcataacttgacgctgcaatctgatctgttagaacgaattaaagctactcagctaactgatccagagttagtaaagaccagagaagaggttgcaactagtcaagccagagattttacactgtcggatagtgggatgctgttattcaagaccagggtttgtgttccaagtagtacggaacttaaaaatgaaattcttgaagaggctcataccactccatatttcctgcatccctgcaccaccaagatgtatcaagatcttaaacccttcttctagtggaacggaatgaagaagaatgtggtggaatttgtatcgcaatgcctaacctgccaacagattaaggctgaacatcagagactggcagggttgttgcagcctttaacactacctgagtggaagtgggaagatatcacgatgcactttgtggttggattacctagaaccacgggtttgtttgattctatttgggtggtagtagactgtttcacgaagtctgcacattttctacctgttaaaacaacatttttagtggatcagtatgcggacttgtatgttaaagagatagtaagattgcatggtgtaccaaagttcatagtctcggatagagatccgaagtttacctctaaattctggcaaagtttgcaacgggctatgggtaccaaactaaaattcagtacaactttccatcctcagactgatggacagtccgaaggacaatacagatactagaagatatattacgagcctgtgttatggattt

SEQ ID NO: 365093 - DNA, 871 bp, Cannabis indica
ttcaaagaagccttcacgacataggcctcacggaccgggatatttcaccaagcggttcccagctcacagggtttaatggaacaacacttatcccaatgggaaaagtgaggctcccagtcaccctgtgcccagacacaccccaaagcaccttcaaatactgcacatttgtggtggtggactgcccaacggcttacaacgcaatcctcggccggccagccctggtggatttcagcgcagtcacatcgattagacacttctgtctgaaattccctactcataaggttgggataggaaccgtaagaggaaaccagggagaggccagtcagtgctacaacgttgctgcccaccttcccgttctaattgtctgtgaagttattgagccagagatggcggaagaagatgagttggatccccgtgtgggatctgaaatgaacctatggaggatgtcgaggaagtattggtgtgtgacctcgatcccaccaaggtcctcgagctaggaaaaagtctagaaccagaggaaaatgaaaagataataaagacgctaaaggctgccacagatgttttcgcgtggtgtcaagagaacatgaccggcataagcccccacgtcataactcacgtccttaacatcaacccggacatgccatcggtccaactgaaaagacaccccctcgactcggtaaaggcagaagccctaaagaaagaggtggacaaattgttaaccagtggcatgatccgagacgtgtattacccagaatagctcgctaatccggtactggtaccaaaaccaaatgggacatggcgagtttgtatagattttaccgatctaaacaaagcctacccaaaagactattttcccttgccaagaatcgac

SEQ ID NO: 365094 - DNA, 904 bp, Cannabis indica
cttcttctcttgttaggacaacactcacaacttgttctatgactgctaagtacacacctagctcttcattgtctaggggttttgacaacacctggttaagccaattgttttttcagctacggaatgcttttttcacattcctcagtgcactcaaattttttgttgcctctgacaatgttgaagaagggtacacacttgtctgcagacttagacagaaatattcttagtgtagcaatgcgtcctatcaggctttgtacttccttaatggttttgggcgacttcatgtccaaaagggcttggatcttgtctgggtttgtttttattccccttgtattgactatgaagccaaggaactttcttgagcctactttgaaagaacatttgaggaggttgagcttcatgctgtagttgtagaggatcttgaagcatttgtctaggtcctcacatgccccaagcctatttggaattgacaagcatgtcatccacatacacctccatgttgcggccaataagatctttgaacattttgttcacaagcctccgatatgtggcctttgcatttttcagccctaagcgcatgactttgtagcaatacaagcctaagtctatcatgaagcttttatactccagatcttgcggatgcagctttatcttgttgtaacctaaatacgtgtccatgaaactcaagatatcatggccagctgtggcgtctacaagctagtcaattcttggaagcagaaaacattcctttggacatgctttgtttaggttggtgaattgttgggtttgggtaccagcacatggttggatactcatagtggagaaaattcttctgttatgaagtcatggactcacagcctctcaacttcacctttgagcgcttgggcgcattctttgtccaaca

SEQ ID NO: 365095 - DNA, 720 bp, Cannabis indica
attttatgctgaaataaattagtagaatcatatttccacttattatctaattaacccataatataaatataaaccctattatttaccattagtcttatcaggatattacaaccatcccctccttatagaaattttatcctcgaaatttatttaaaccaatcaagaaattacccctgtatttatgattctaactctcaaattgttgtttctatctgctatattttttttttctacagcactctcttaactagtggaattgtctcatttcatactacctcctctttctagtgcaaaactttgacaagatatttttttccatataataaatttgtctgaagtttaacatcgtcaaagctcaaaatatgggtcgagtttgatacatattttctcagcatggagacatgaaacacattatatattccaaacaacgcaggagataaggctagctaataggctgcctagcctatttaattcagtgaacatctatataatatttctctcataacacacttattaagctacctaaccggtggtacatttaattatgacttttaaataaacacctcatcagggaagagattattataagataatctaacctttatcaaatatgatcatagtatgtttctaatattccattgatcttctcaggttacccacctttcaagaataaaatattatactatttttgctttaacctccatggttctcaataacctt

SEQ ID NO: 365096 - DNA, 808 bp, Cannabis indica
acgttattttttttaacttttatttttcagtatttaattttttcttaatatcaataatttattttaattttatttttatatttttataaataagtataattttttaataaaattccatataattttaattttttttgtgtcaccatttaaaaatatttttatttttattttataggtatattttttttaagaatcactacaaaaatcttactttttagctacagtattgtgactaaatatatttttagtcacgttaattattgtgacaaaaactaaataaatgacaacttgtatttaaatattatgttttagtcacaagtaactttttgttgtgactaaaaattacttttagtaaaaaaacttatgttaagattaaaagattgtcacttaaagttatttttttttgtagttaatataagatatagaagaaaaaaatataaaaaaaaaaagtataaattaaatatatattgttttgaatggaattaaatatatattttatgtaaaataaaaatgattaaaattgaataattttgtaattcttttgggtgtacataaatctctccaatatttactatatatatggaatatttcttaacgggtattaactatcaatgagtaataaataaatttaactataaatattaattttaaaaatattaaaccattagattttggtcctatggcgaataataaaagagaaatttaaatttttatgctgaattttaaatacttaattagagaaaatatcaaaaaataccctctttttacaccatattaaaaatatgttcatataaaaaaatatttaagt

SEQ ID NO: 365097 - DNA, 1239 bp, Cannabis indica
ttaaaaaaattcaaacataaattacaaattataaaatattattagaaatataaagtaaaatactaaataggtccccagcggggcgaggagtgtgatccccgtccccgccatgtttacattttcggtgacaaaaataatattcgtccccgccccgttccccatttagaaggggaatccccaccccattaggggtaggaccccgcagtgccccatccctattgatgaaatgtgcattcctaataacaacaactttaaataatcaaaatatatatataaaaaaataaatacattatgggaaaaagtgtttacttaaataatgataatactttaatttttttttgcatcactctttattttttaaaaaatacaatttaaaactctattatacgttaatagtatatattttaaatttattaagaaataaataataaaacacactaattaatttttttaactttcttaataataatacttattaatatgatgaatagatctaaaattttatttttttttgagctttatatttttataaatgaatttattaataataatatgtaatttgataatataattttaatataataatatattagtattatatttttaagttctatttattatattattatagtaataaataattatattttttattataatattaaaaaaattaaaataagcgggcaaagttaactagttttttttagggaaacttacaaaaatactaacttttggcctaattttacaaaaatactgccatacggtagaaattacttttatactgtcttggccaaaaaaaaattcttttatactgtaaacagaaaaaaaaaaatgaggtctccatcttccacaccaacgaacagattcaccacaggaacactagaacaatcggaaaataaccattaattctggtgagattgagagaaaaaaataaaatcgaacgtcaaatatataataatggcaaaacaactgtaaaacaacattaaaacaaatcaaataaaagaaaggaaaacatgattataaaaagctagaaaatgttctgcacaacctcaatacccaatgcaatagcagttatatttgcaagcctaatcttaaaaaatcagaacaaaaaaactaccaaaacaacaaaaaaaataactgtaaaacaagaagtagatataactacttagaaaaacataaaagaaccacacacctcaaaactttttttctagtgagatcgtcaaatgtatttttaggaga

SEQ ID NO: 365098 - DNA, 685 bp, Cannabis indica
tttaatcatagtccaattgtcaataggtcaaataaataatttgtaaaaggtaaattttgtaatcttctttcatctgtgtataaatctagtaacatgataggatctatccaatcagtgtgtgtctgtgcctatatgtttgctttgggcctagatgcatatagggggcccatttaattttgataattaaaatggattaggttgctaaagtaaatatgctactttcatagtttttatttaggtccaattagtattgggcttattcaatgaataataattgtttaattaaggttaaattcttctcttttgggccttgtatgagagttagggggtcattagtagtgggtacagcatactgaactcagtcctcccttacatgaagaacccaaattgtgaaggctcatttgccttatttgaataattaatataggttaattacactaatttaacctaataaaattgatcagcaacataattaattctcaaaatacatgaaatttatttttcatcagattattttgaaattaatttaagaaaagtacacttagttcaatgaaattaattcaagataaattatatgtatatttctgtatttaattaaatgaacaagttataactaattagatttttctagatacttaattatttaaattttcttaaaaaatatatttaagttgtaaattaattt

SEQ ID NO: 365099 - DNA, 502 bp, Cannabis indica
aaataaaaatattttttttatttataatcaaatttttaaaaattatattttaataaaaaaatcaaattgcatattatcctattttttttttttacctatttactattagtggttttatttgaaattttattttaagttttttttattaaaacttattatttaatttaatctaaatggatatgtgcttaaaatttttgtttggattcaatgatccaaattaatcacagaaaattgatgatagacaaattaaataataatttgtagcaaatagataaatttgtaattttttctttcatatgcggcataacttaaaatatattaggtccatccaaatcttattgttatttgtgagcctatgtttgttattgggcttagagacatatagatcccattcaatttttgataattaaaaggaactaggtggctaattaaattggatcacattgatggattatttaggcccaattagaattgcagttattcaatgtataacaattattta

SEQ ID NO: 365100 - DNA, 392 bp, Cannabis indica
acatgaatggtaaatgaaacttacaatccttttcgcaaccttttgtgcagggccatcaagcttgcccttcttgttagtttgtaatttgatccacaagttacatctattgttgtagtaagttggtggcccaactctttttccatatcttctccactttcttaacaccacctcgtttcttgtggatgaatatccaagatattcaaactcttttaaataaatataagttttagtactttttccatctccaataatataacgttttgcaagttggatgtaaccacacaaaactctaattttcaaaatataatactaattaacaaagtaatcaatatacataaacttaaagggctcgtttagaacatcgtattgggtcgtattgtattgtattttat

SEQ ID NO: 365101 - DNA, 698 bp, Cannabis indica
ataaaaggtataaatattatccacaccttatggaggtattttaataaataaagtgtcaacttgtatttttcatttaataattccataaaattatatatcatatcaataaaagtacaagaaaaaatagaacttaaatattattttaaaaaaataataatatacaatataacaaaaaatatatatactaatcatcaaaaaatatatactaataataataataataataataaaaatattatgtataatatactaaccaaattatatactataattaaaatatatatacgatgacaacaaaattatatatcattattatatataataaaatagaaactaattaaatattatttaaaataaaaaatatatcatacaattaaaatatataaaaataaataattaattatatatagcatattaataaaatcatatacatatatattaaaatatttgtattatgctaataaaattatataatattattatacataacaaaatagaaaataaatatcatgtaagaataataatatactatacaacaatacagaaatatactgtacaacaaaatcgatataccaataatcctcaacaactcaattgatataccaataactcacaacaagtcataaaaaattaaaaaaatcgacataactttcaaataaaaaagattttaattagcgaaactaatatagatataccat

SEQ ID NO: 365102 - DNA, 586 bp, Cannabis indica
tttggtgtttcctgcactgaactagttgatcagttcagtggatgtaggaactagaattctgattggtccctaggaaatcccatagaactggtcttccggttggggaacagatctgttggttggggcagtttagggaaccctagttttccccctttttgcaatatttagggtattgccatgttatccatcgatatagaaacttttagtttcaattttaagtccccaaaaagtgatttagtgtgtcactcatctattttacgaatattgtgatttagggacctgtaaatcgccgagcagcagttttactcaagttgaccggcacacctgaattcaaaaatacggtaagattagtataatgatatgaatatgtgtttacatgtttagtgtacatgtttgttgagcctgttagattacattggtagtaatatcagtatacgtaaagttgtactggataccaatggatgtatgtttggctcaagtacgagatcgacgctatcacatcagtatgactaaagtatgactagagtaccgagtataggctgatattatggtcgatagtaatgtcatatgtgttggaaattatttt

SEQ ID NO: 365103 - DNA, 591 bp, Cannabis indica
cgtaaattttcttgggaattattgaggaagatatgccgagagacacatggttcgtggttgtgtgtgggggactttaatgaaattgttagtttggcggaaaaaagtggtggccgattgaggggtgcttcggctatggaggagtttaaaaaggtattggatcaatgttgtttgatagattttagttctgttaagacggactttacatggtgtaacgaacatgaatctaatactattatggaaaggttggataggggtctgtgtaaccaggaatggtttgatcaatttgagggagcagatattcagttattggattggtgggaatccgatcattgtcccttggtggtggacatgccgattgtggaggatggtacacagagtggaaaagctaaacggaatacgcgctttcattttgaggaagcatggtgtgaggaggatgaatgcaaggcaattgtggaaggtcattggaagagtggggagccgtgtgcaattgcgggttcttttcatggtaaaactcatcgggttgggaagatattacatgggtggaataagaagaggaagaaggaagtttatggaaggatcactaaggctaaa

SEQ ID NO: 365104 - DNA, 568 bp, Cannabis indica
gtaaaatatttccaacattttgttcattcttaattttagtagaaacatgattagtgtttcatgtttacaaacacaattttatcaatttaatttttcgagttctatttgcacaatttctcataaaggatttaaattatgtgttgctcacatggaacaagggctttatgtttttagaccagacataccaattgcgcttgataatgaactctttaacatagctaaacctagaaaccataaaaggacagagattgataataatgatgaaacatatctatggcatttatgactatgtcatataggatatgatagacttcgcaggttaaccaaagatggtccattaaaaaatgtcatcttaggtgaattaccagtttgtgaatcttgcctagaaggaaaaatgactgggcattctttctttgcaaagggagagcatgctaaagatcctccagggttagtgcattcagaagtctgtggacctctagatgtaaaagccagaggaggttatgagtactttgtcactttcattgataatttctctagatatagttttctttacttaatgcaaaagaaa

SEQ ID NO: 365105 - DNA, 528 bp, Cannabis indica
tcctcatttcatcaacttcttcagcaagtagaacttggaaaacccattagaaaccctcgccaaccaccgtgaaaaaccctccattcttcctcatttcttcacaatttcaccccatttttttaaaaaaatcttctattttcaatatctaatcctatactgtaaaaaaattttgttttttcacccattttttactgtacccctattaaaataaaaggtggtggtataactccgaccaccaattataacggagaaaacgttgaatctcaaggtccattaaagtataaatatgatttttattcattttattaatgtacactgctatattttcatttttgtaattttttttggggatttttctattttattaatattatgatgtgtgtgtgctataggtggctggatttttatcgcaatttatcgctgaatggcatttataaggtaaatatttattaacttgatatataatattatatatgtatacattttgggttttaatattgaatatgtgtttatatattgtgtgtatat

SEQ ID NO: 365106 - DNA, 503 bp, Cannabis indica
gattaaaagtaaaaaaattgtgattaattataaatcataattcttatgttgtgactaaaaaatttgtgattaaaagtattagttacaaaaattatattttgttgtaactaaatgtactattgtgactaaaactaaattaatgacagcttgcatctaaatactatgtatattttagtcgcatgtaaatttttattgtgactaaaagtcatatttagtcacaaaaaatttatattgtaactaaaagattgatactaaaaatagctatttttgttagaatttgggataaggtgaatgaggttttatctcaaaaccaattggcaataggaggagtagctcattcatcttatatattctattatttttccaaacattagcaatatcagactctctaacaatttttgtagtgcatcttcttaatattatatatatttttttaaaaaataaaattatgtttctttgaaaaaaaattggaaggagaggaaaaatatgtaacgtccccgctt

SEQ ID NO: 365107 - DNA, 593 bp, Cannabis indica
tctctctctctctctctcttatgattttgtgtgtattacttgtattttctttatttccatgtttatatacttgtataaagtcggttgatcaaagatttaggagttagttacaatatagttgtaactaactcctggtcctttgtttatttttgttgtaactgtgctgatgtggatatttgtatgtaagggactggttataagtggaatttactcaacaatttccacatgaattcctcttataaccagttctgatgtattgtttgttttatctctgagagtcttagcttgataggtcctactcttagtctcatgggtcgattcttaatgcatataaaaatgcagctttggctattcattagtccttttagccatatagcttcctttatagcttctgttgtggcaacataatcagcctctattgttgatagtgccacaacaggttgaagcttgactttccagctaacatagctccctcaaatcaaaagaaaataggcaaatgtagatctcctattatctctgtccccaacatagtatgaatcactgtaaccttcaattatagtgctagcattttgtttcttgtagactaatccaac

SEQ ID NO: 365108 - DNA, 805 bp, Cannabis indica
tcttaaacagggcacatataaggcctaaattttttatcatcgggtctagatagaaatatatagtatcagttacttctaaatgttcttttaataaattcaaaacacagtctgtattgacaaaattggaagaaaattacagttttacaaacattgggtacttatgccgctaaaaataaacattgggtttatgccgcttacaaacataaaactttaggtacttatgccgctatttaccttaataataatcatacattatacatatatcctatgtactcacagataagattttatatatccaacactatagtccaaatactcaagaaggaaatagatttattttcgattacttaagagtcgcttataattaagatgcaatgcatgcataatttttaatcaatttttccctttattttcgaaatgaaaagagtccacttttgacaagggctataattataatgatggaatattggataatgtattactggatgtctatgaagaaacgtcacatcttttcagccactatatatataatgacaattaattaagtgtaccaaaggcttgctgccgactgtgattatatgcgaaattgagattattatttagggcatgacatgacatttgcatttgaccaatattggttcactttccaaaagcataccatatattaatagggacatgtaaaaaaatatgcatatgaaacactttaatattttatccctaaactaatacatatcgcaattgaaaatatatgatcactttatctaaagcccaaaaatacccctctcacaattcaccctctctctct

SEQ ID NO: 365109 - DNA, 611 bp, Cannabis indica
attaatttccttgtatttgttggccttgcgccataccaacttatttcccaagcttaccgcctgctttcaggcttgtttattttttatgctgcccggagctggggctcgcccagtccggcaaaaattttgtattcttatgaactcgtttctatccccaaaaagggagataaacttaaggatagttttgatggccttccggcccatctgttgaatgaaggcccggtcccctacaaccagcggaagcatgtgaaggagtatcgtcaccgcttcttgttctcctccgatttccaggccatggatcgcgcggagcttctcacggagtgggttaggattcctccctatatgcggaccgagcctacccaaatatttcttgaacgggccaagacctttgccacgtacgacaagaaggccctggacgttgaggagttggtcacaacaaagcactgtcggaaggccaagttgatcttgaggcaccagtcggtggatgacttcaatctctccaaagtcatctgcccgaacgtgagggctccggccgcagagaaggtgttccgggacgacatcattgccatggcggaggacaagtaccagaagtacctcttcaagagggaaca

SEQ ID NO: 365110 - DNA, 545 bp, Cannabis indica
tgccttgtttgggtgattccctggttcctaggatatagcagttccttttagtaataacagaacctcaagtagtaggttcgggtttcccggattagggttttaacgtgagatttacccggttttattatgtgattagggcatccatccagcacgaggctttccgttcaggtcggccaactcacttgaattcggaaaggaggtaagaacaacgtataatgtgtgatatgaatatgcgaatgtatgtatgtgtttatgtatatgcatgcttatatagttagttcaccaccaatacttgtacgaaaaaatggtacagagtgcattggtatagtgtatgtgattttaagagtacattacggtgttactagcacaagtacggaaaagtacagggcgtgtgtggtataccatttagtggtacttagggtacgaaataaaccctaccaacactcgtgcaatgaggtactgttgggttttgtgccctaaataaaacccatttcaatataaccagatttacttattaataaagatcagaaataacattttatgtt

SEQ ID NO: 365111 - DNA, 498 bp, Cannabis indica
aaggtattagtcacaaaaattacaatttgttgtgactaaagactaaatgtgtttttagtcaaaatatttgttgtgactaaaactaaactagtgacaacttgtaactaaatgatatgttttagtcacaaatagcattttgttgtaactaaaagtcacatttagtcacaaaaaaattatgttgtgacttaaaaattgtcactaaaagtagctattttttatagtggcaactaatacgttcaaatatttcaccttaatatattttaataggatttaacggacttatgatgatgaaagtaacataaatgtaactttagatatttaatctgctagaaaaaatatatagtatataaatatatgaaatttaaaacattaggtatttatgtcccaaatactttatgtttgataggatttaacagaaaagtagtgacagaagtaatagaaacataacttaaaatgtttaatttgttgaaaaaaaaaatatgtggtatttaagtgtat

SEQ ID NO: 365112 - DNA, 653 bp, Cannabis indica
taataatcattctaaatgaaatagttaaaattttacatttctaatagtggtacccctttgtgaaatgtggcctgaacccatctcaaaatattttttcccactagtcacaatgaatttgtactactaacacgtgaatatgaagattggttaaagttaaattttgttaaaatcactcctattttaaaaattgaaatattcttttgtttaggatgaatttcaacaagttttttccttcctcttagagtcgttagtggtctttcaaaatctcaccctagacatcttaaaaaattgtgaaatttcataagcacgaagccaagaccgttgtcaataacttttctattggggtctgggtttggggtttggtgtttggggtttgggggtttacaatttggggttttggattcaagatttgatggttttgggtttaggatttggggtttgtggtttttggtttttgggtttgggggtttggggttaagttgttctacattaggtgtttggggtttgggtttgagtgtggggttttgagtttggggttttaagtttttaggtttgggatttagggttctggggtttggggttttgtgtttgaagtcaatggcttttgggtttttgggtttgaggtttagggtttggggttttatgactagggt

SEQ ID NO: 365113 - DNA, 759 bp, Cannabis indica
acactattatgtttgtctaacggatgacaatcctttgtgatttgtcccaattaaaaacaacaagttaagttagaacaacaatgaagattcaaaattgaaactacaacaattaataacagaaaacaacatgattcaatataaattcatatacattcagaaactatcacattcatctctgtgttgattgggggtagatcacacgagttgctgaagtttggtggatgtagatgcctgaagtgatcgatttcacttctcgaattttcatttttggtgtttccacccactctcgctcctcttcagtcaaagattgatctcattgcacctcgctccccttggagaggaagtgacgtaccttggccggccatgggtacttctgctgatggctggccagctagtggctatacaatgggggttcttgttgagccagagatccctggccagccccaagctactggttgttgggatctggctgttcttgtcgtttgacctttgaggaaaggtctgtcctgtaacaccctaactagcataggcgtgttaacgtgattttaaacatactgtgcagctcgttgctaatcaacgaggttaatgaaaatcgtgattaattaaaatttgcttatttaattaaatacatatagtataacatacaaaatatttcgggatcccatttacaaaacactttacaaaagtttgctattcatttacaaaatatttgtcacccagcgactaacagcaaaagccctgatgtcccgaggatcgtac

SEQ ID NO: 365114 - DNA, 536 bp, Cannabis indica
acaaaatactaaaatcaaatcataaacatatatttattattgttgttgactataccaatttctttttgatatcaagtaaatagttttgaaaacatatattattattattattattattattattattttgaataatgtaatcttgtgaagttttttttgagaatagtaatgttgtgaaatttgataaaatgaaaagctgtcatttttctaaaaatggctaggttgggattagagccgagccgaatattaaaaatagaaagccgttggccactcctaagaaaagaatggcgaaactgaaagagagagagagagagtggaagtagtacaacgaaacggttcacagacacagacccaccccaccccaaccccaactcaacaacgtaaagcaaccaacgacactttctctctctcttgctttgttttcacttctctgcttcacaaacacattatcatctacacattttagttgtttttagtatcaccaaactctctctctttctctctctctttctccctctgttttccttggacttcac

SEQ ID NO: 365115 - DNA, 916 bp, Cannabis indica
tatcaaagttggtagacaaaaaacttaataatagtagcttaagttaaaaacaatgataaaacaactaaaaaaaaaattaaaaaggaaaaagaaatattaccgagtcattgataatcaacacctaatctaaaccccaaggaaattttcttcgcaccatcctcgtaataattgtaaggcctaaatcaaaaaacaaacaaaaaaaaaataatattgaattcaaataattggaaaaataaaaacgaaaagcaaacaacaaataaaaaaaataaaaaacaagaataaagaaaataaatcaatctagcatatttagcaatcctttgccaatccaagcatcaaacttagccttaatttcaggagagacgggatcggaaaacgtatcgttaagagcgtaaaggcccttcacatacgtaaccatcttaaaatccctctcatctcatccagattgagaacctgaggacattacctccattggagtgttgctcacatcagccgacccaaaatcaacaaaaggcgatttcaatgtcgggacacgctttctcttatccaaaagaggagtataagtaatagtgtcatcagcttcttcatcacaagcaatggcatttgtcttttcaacaacaacatttggattggaatctagaacctgaaatagaaaatttgaaaataaaaaaattaaaagttacaaaacaaacataaaactgtcaagcaactaaaaaaaattgacatgctaacacaacctaacaaagaatataaactacacttacattgattttaacaacaacctctaaaccagccaacacaacttgctcatcatcaatttcaagctagcttaaaccattaaaaaaatcatctcccttcacactagactctttggccttaacattttcaacatccttggccctctctttattgcctgcaa

SEQ ID NO: 365116 - DNA, 508 bp, Cannabis indica
gctctcatctcatctaactctttaatctaccgaaatctagttttctacccctgtcaaaaaactagtagatgagagactccttctatagtgatttcacaccttattcattgttatgcaccaattcgagccatagtgatagagtaccattcccacacatagcaagtcaagtactcaatcatagtgcagaagacagtggtaacaaaacccgaaggagaaaaatagatttaggtttagatcttgttattactctgcgacagaaaggaacaaggattagagatctgagcagaatgaatcattaatattctgctgcatcaatgttaggtttcctaaaatcttatgtgtttaatttcattgtattagagagttcatatttagggtgttaatgaaacatacatgttagtaaatctagatcctggtaaaataaatcccaaaaattggcctgagagccatggtaaagatttactttcatgaaatatggatttaaaatgatgattgttgatttggatgt

SEQ ID NO: 365117 - DNA, 707 bp, Cannabis indica
cttatattatattctattattgtctttgcagagcccactagcacctttttcactctaaaagtgcatcacaaagggacaattgattacacacttaatattcctactagttacaatggtggggtagttgagtatgttcattggctagatttgaaatatatgtctatgtttgagttagagctaatagcaagggatttaggttatgtgaaagatagtagttcaattactttttatttcaagtggccacaatgtgtgacattggagtgtgtgaccacagactttgtgttaaccgagaaaattgcagctgctttgaaggattatgatcatgagattgagtgtttttttagtcatccacaattaaatgaaaatgtagcttatgaaagtgaagccacttttcctactgtggttgagttgggtgatgtgggtaaagatgctgggcctaatttggatgatgaaaatgtgaccccaataaaagaaggtggacctagttcgcagatatctcatctacaaagtgggctggaaaccggagagaattcacaagtcaagaggtgtgtaaattactatattttaatcttgtcatagtctgttacataattattatttgttatgatttttgtgactagagagaaaacaaagccttgtgagatatcattactacagtttttgattagttttagattaatcaacctgttgaaaatatcaattacaga

SEQ ID NO: 365118 - DNA, 758 bp, Cannabis indica
aaaataatttccaacaaacctaggcgcagggctagggtcccctcccaagtttactgctacgactcagttctactcaatttcgtgacgtatcctttatgccacgtgtcaaacattgatgtccacgtcactagagaaaatttttaagttaacataaaccgtcacatattatctttcataggcgacggttttaaaccgtcacatgtagtataataacccattttttcattattttaaaatttttattatataatcgtttatattataatcataatcgtcaaacaaatcaagtataaatataaatttattaataacacaaatataattacaatatatagtgtactagtttaggtttacaaaattttatacttaattccaattctattatcatcaactatgaagcaaaattttttttacaaaatgaaatacactctttaaatcttaagatttcaacttcaaatatcgtctagtattgctcgaaaggaagagctaacaatagacctgcatattctaaaaaataattgatgaacaagcacgttaaacttgtaaagaataatctaccatacacgttaacaaaaaaaattaaagcttttaactattccaatatcaataaactttgtaaaattaaaatttaaaattaaacattacctaaactatactaaagttataataaaatactagatttttttttctaaactattaaatttacactagctattttttttttaactaaactacattacatatattttttctagtaa

SEQ ID NO: 365119 - DNA, 711 bp, Cannabis indica
cttgctttaggccatataaagcccttttcaatttaagaactttatcttcttgtccttgcaccacgaaaccttgaggttgttccgcataaatttcttcttcaagataactatttaggaatgccgacttcacatcgagttgaaaaatcttccatttcttctgtgcggctagagctattaaagccctaatagtgtcaagccgtgcaactggagcaaatgtttcattgtagtcgactccgtattgttgtgagtatcctttcacaactaaccttgctttgtgcttttggatagagccatctgcgttgagctttgtcttgtagacccacttgactcctatagtatctttgtcttgtggaggatctgcaagctcccaagtctctttcttttcaatcatctttatctcttcattcatagctttcctccatacttcttgtttttgagctacttcaaagcaatctggctccataagcacaaagttgcatgtctcatagatttctgatagtggtcttgttcgccttactggtgagtctggcgaagattctatgacttgtgcaggttgattctccatggtaggttgaattggaacatcatttgcttcttgtctttgcaacagaggaatgttgattgtctttctttctaacttcttgtgtctcccagttgtatgtagcatcttcgtcaaattttacgtctcgactgattattagcttgtttgtt

SEQ ID NO: 365120 - DNA, 839 bp, Cannabis indica
tttttatataataaattaaaaaactaaataataaacttttcctatcaatatttttcaaagcagaggcggtcaagagctatataaaggtgttattgttgtattatttgcatcatacacataaaatgccttcttcaaatgcattatctgctatgtatcagcagctggaaaataatactaacactacaactaacggttcatctagtgatagcaatgactcatctaacaactctgagaaccaatctcatgcatcccgagttcgaagtcgaagtcttgaagttcataatcttccaaatggacaaagaagacatttcgaagtacctctaacttccccactgcctaaagacatgattaccattacccgatcaagtgtaaatggttggagatttagtattcgggctaacacctcaacaagaagtttacctccaacgcgtgcacaatggtatttcagcaatagagagtgcaatggaatacatccaactaaatggaattactacataatccataacttggttgttgattgtagtagagacgatgcctgaacagttgtgagatgcggtcagcattttctaccgtccaccctagtcttccttatctgttgagaaactattttggtataatagagtatgattttggatactggaatttattattttttgctaccaccgtagtcttataatcagcttataccaacagttaggtttgatatccttttgatatatatgtatgtaactatatatatagtttgtaatcttattttgtgttctatcttttctattaatgaaatttaaatttgttttgttaattgaaatctaatacaggaagtcatatactacaacaaa

SEQ ID NO: 365121 - DNA, 986 bp, Cannabis indica
caataaatatattgggcgggttgaatattattctaacccgcccaaataacccggataaactgatttatatattttttactaaaattattcataatataatatataaattacgtacgtttaatacttgaactattttacatttaaagtttgtattttatagtgttttttttgaaattagaatttgtagttgataattttgattatatttgaatattgaagttgaaatttagaatttacatatgagtatattttttaataaaaaaaatttaatactttaatgtttattcaattcatatttatattttaacattagtttaaactataactattttaattttgtaagactatatagtatacatttaatttttcaaatcaattatttgaacaccaaaaactaacaacaatgaaacaaaataaaaaaataaagataggtttaaacggattaacccgaccaaaccgacaaaaattattgggcgggttacacttcttttatttttttcattggacggattacaattagatatttgcaacctgacatttatattgggttgataaaaatacactaacccgaccaaaccgactgatgtacacccctagtttctttagtgtttctaaatttaattttctcttaaattttgacataactcaaatagaagtaaattaagatttaattttaaagtacttaactacaattcttgtaggatcgacctcctcctggtgagtctataacttgttacggtacgtacacttgcgtgttgaaattaccacagcaaaaggccaaaattttgccaaaattgacgccaaaagaccttaaaaaccgtctctaaagcccagatttagtgcatttcgtccactttaatctgttaagtgccaaagtagactgccacggtgtacataagtgtacccgtgataaatttttattaatccaccaaatgataaaatatttaaaaaataatttaaaatataaaaaaaattataataaaaaa

SEQ ID NO: 365122 - DNA, 577 bp, Cannabis indica
taaatcacttcaaaattctaaattgataactaatcggattgtaatgggttttatttagagcacaaaacccaacatatcacactttactgaagtcctaaaatgtgatttcgaccataatgtgggtgcctttttcatcaaccaattatatgttggttcaaaaatctcctttaagtcattcatttttctttttaactcttcaaaggtagtcaatctagcacatgcccatagcgcttgcttcaacagcaacccaggaaaatccttcttgaagttttcataaagatgtctcacacagaatcttatatcagaatcttcaaaaattaaacccaaagctttttcaaggcctttatgtctatcagatatgaaagtgaagcttcttgtgtctgccacatttaagtcctctttaaccagccccaaaaaccaagtccaactgtcagtattttctttctcaacaacagtatatgcaagaggaaacatactattatttgcatctattccaatagtagcaagtaacatacctttgcaataacctttcaagaagcatccatctaatcctattatgggtctacaatacttgaaa

SEQ ID NO: 365123 - DNA, 824 bp, Cannabis indica
atttatatatataattaggaaattataaataatttaacctagctaccgtaagcagaattcaaattgatttttaaggagtgcttatttcaatattttaaactctgcatgaatccttatttccagtattaaattttttagaattttttaaaattatttatgtgagaatattttgtatgaaaaatagagttacaacttatttatgtactgaaaatatcataatttaattaagctactatatatgctaattatattggcactattgattaaacatgtcatgagaacattaattataatttataaatatgttttatgtatatatataggtgattaaaatgtagttaattatatataaactttttgttacaggttccaagatcatcattaggtaataactaaagcggcgtctaccttatatcaatggaagcttcccttatataataatttcaatttcaattaatatttctttttctttaattatatattaatctcaccttccttttgtggttttcatattaagaatttcattatgtttggtcttatatataaaaatatatatatgtgtgataataggagagaaaaagagagagacgatatatatataaaaatatatgatcaagaagcctcatatataatcatgatcaagtatatatgcatgcttgatttgaaaatttataatattctttgcaatttgcatgcatgaaccaaatattgagtccttttttttatttctttaatttattgaatactttattattgtatggctttagtcttttctattacttatatttgagctataaataaaaaaaataaaaattaaataatat

SEQ ID NO: 365124 - DNA, 674 bp, Cannabis indica
cacaaaatgatcttggttatttgtcactaaaaaggataagtagaaatttacctatgtgccctacaacaactcacacacaaacacagtaccagtaagacaaagagtactcacatcagtttctttactctattttttacaatacatcatttagattcaactttctttattttacctcaaaattttctattacgccatacattaatttctttatttttttctttacattcatttaaatattatttttaatatatattaaatacacaataaaaaaatataaaaaagtaccgattaggtattattaaaatattgtttgaattgttaataataattttctatatctaaagaagtattataacattctttaaaagttgagctaaactaactcatttgatgaagctgatattttgtcatttttatacttttatcttctatattttgaaagaaaatgagtattatagctcatctaatgtgaaatctctaaggtgctcttagtaagtgaaaaatcgagttattgcaaatgacaaaaatatatatgaaaatataaaactgtatacggctgcagaagcagaatgtaattctgttactgcaaaacctaattttgcagggacaaaacagaacagacagaatataaaaataattgcagaaaattaaataacttgacacaagagatttgt

SEQ ID NO: 365125 - DNA, 531 bp, Cannabis indica
aaaggtgcaggatccgcgaaaggtccgctcagatttcccgaaagggaaaggtccgcagaggggcaaactccaaaaagggagtcttggccctcaggatcgagaggaccgaaagagcatttctgtgcaccaggaacccggagggagaggaagaaggggccaaaaatgccctcccgtcgatctgagacatcagattaacgggaaaaacggtgacctccgggatcacctagaccaaaagaaacacgtgcccgcggtctccacgggaacactaaacgaaggaatcatggctgagcttgccatacttcgaaaggacattgctcgagtctcccggagacaaaaaggtgatgactctgactctgactgtgaagaccgggagccttgtaccaggcacatcttggaagcggagctccccaaaaatttcaagatgcccgaaatggcagcttataccgggaactcggacccttgcgatcacctgtcacggttcaaccaagtcatgacagtcatgagagtcaacaatgacgccaagtgtttatg

SEQ ID NO: 365126 - DNA, 661 bp, Cannabis indica
tgccgttgtattttcttctcttggaatttgtttgaggctgtagcttttgaattgagtgagcagatcatgtattttgctcagatatgctatcattttttctccccgagcctcgtatttgctagatatatgatttaccactagttgtgaatcactacaaatctcgatgtattcggccttcatttcctccgctagtttaactccaacgattagggcttcgtattcggcttcgtattcggcttcgctattagaggctttgaatccaaatttgacagatgcgtgcaggtgttgccccctaggtgtgacaagggcaattcttgcaccagatagttgatctgttgcctacccatccacatgtagcttccaggtcgatttgtcttcaacattacttttctgtggtatttgctcgagatcgctttctggtgtgctttcttctttgcctgtgcattccaccacaaattcggccaaggcctggcctttgttagttattcgaggtttgaagttgatttcgtactgtcccaattctaccgcccacttgagtaatcgtccagaggcatctggcttttgcagtatttgtcgtagtggttggtcggtatacacccgaacacgatgagcttgaaagtaaggcctcagctttcttgttactagaatgaggcagtaagcg

SEQ ID NO: 365127 - DNA, 636 bp, Cannabis indica
tcaggaggaactccgtgctgcgatgaatcttgcatttgaagagcagaggcgcatgttcgttgaatggagagataaggagatagaaacattaagggctccgcaagcagtcattgacgaccgtagtcggtaggccactgtgttgataggaaaagcctatcagactaccagacaacagcctgtaatcgtcatccccaaggaggaaacagacaaagatccaacgatgaatacctctcagactataaatggtcagccgccaaaatccctggtcacaggttccacctgtgggccaagttgtaggcgggcagactttatctcataattcatcaggagaagtcatacccaataattccaacaaacttaatggtgtcggtcagcaaattagccaaaccaatcagtcgcttaggcagccaggcatttctgtatttaatagattggggacgactcaagatctcagcaatgatctaaataggaggaggggagtggacaatcaacttgacgtcccaatcgtgcaacctaaaaccagtgctcaaaatctcgctcaaagatatgctgatttgactctggtcggccaagaggccggacaggttagtccaaccgtgcaggcacagttggacgaactaaaaagtatgttccaag

SEQ ID NO: 365128 - DNA, 661 bp, Cannabis indica
aaaaagttttcaaaaaaaaatttctttttgaagtggtcgatttacattatattatgtatttccagataaatcccggttgatcatgcatatattcccctaaagtaattttaaagggttatgccttataattacttgttgaaggaaatgattacctcattcacaactaaagttcaaaatattacattagcaatgcaatctacaatcattaatctcataagaactttcccagttcatttgcttattttatcaatcttccaaaagcatctggttttgataaaacgagttctgatgttcagggttaatccctaacatattcccacaattatttcaatatccagagtcaatccctgccatatacccaggttttaggtgaattaattctggttttaattatttgtcttaactgctactggttgacgaccagctttctttcgtagcagctctatacggcagccattgcgagctagtatttgcttacttcgtaatacatttacgtattgctttaccagactaactgccccttgtcttcttgtaacatgttccctcccgagataactgaggtatcccttcctcctacagaggaaggttatgatccctagtcgcttgagttattgggtggatcgggctggtcatgagcatattgtcctgcccctttacatat

SEQ ID NO: 365129 - DNA, 913 bp, Cannabis indica
gctataaatcacttatcgcttattaaactagactcgttgttgttagctaaatgcaaggtcaacacattccatttgtatataaagtttaatttttgcactattttgttagtattcccgtttaggggattagggtttcctaagtatcttgggtaatgtgcctaattagttagggtgttatagggacccgggcccggacccaaacctagaccaggacctgaacccagacccagactcaaacccggtcccagacccaaacctggactcgaacccgtaccctgtgacccaaaattggaaccgaaactggaagtagactggtacccagaaacacgaccagaaccaggacttggacctggacctggaccgtagccggacctagacctagacttgaaactgtaaccggaccaggacccggaccccaaccaaaaactagacctgaattgggacctagactcggatgccaacccaagagcgattcttgattctgctctcaatgaaagcacctaaatgttcacctcgcttttagccaacgatagtgagtctaatttagtaagtaacaagtaatttataacgattgaaatataataaagcaatatgaagacacagtgagtctaatttagtaagcaacaagtagttcagccccgagcagttcggtaatagcctaatcctcgttatttgtattaattcaagaacaaggagaaaggttccttttcttatagctcttacaataatatctttgagtataaattcttagacaatatctctcaagtaaaatctttcgaccctttgcccagtgaacatgcatcactatttaaagggctatgggcttggacaggaagtatttcccttctcgttacaatggatataagcagaatgattgcatgtaaaataaaaaatacactgatcgtgggatttg

SEQ ID NO: 365130 - DNA, 659 bp, Cannabis indica
ttattatgttaatattattattattcataaaactaaagagtcagaatagtataggtttcattcaaccctaaaattatatcgttctattcttcccacctatctgagcaagactaaccctaaaattttcaagtcatctttccattacatccttagccaaatctataccactcttcactctcatctttgatcaccatcatcttatgtctatcgatccaagcagcttgatgtatttgaggtaagaaactctacatttacttatttattgatcacaataggagaatattcgtaggtctccttttcttatttttcagaatgaaacatgtctcagtaaaactgtcatatctctttaaatactcatccgattctcgcaatcttggtgcctatagaaagcttattgaatttcccataattcttatgaagaaaggttttactgaatcgaaatttatctatgtcaaaaattagtatttctacgctgtttgttgtaaatcgtttttttatattttctatataagttgtctcagtaaaattcaaatatctctctgaataatgatctgattctagcgatcttggtaccgttgaaaagataattcaattttctaaatgttttatgaagaaaccattcactaattattgattattctaagtcaaaattattgttt

SEQ ID NO: 365131 - DNA, 1301 bp, Cannabis indica
atgataagggcggagatacgatatctgtgattgaaaagtagtttttttgcctcctgatggcttcaagaaagttaagaccctacttccaagctcaccccatcaaggtattgacaaaccacccgcttcggcaagtcctgcagaagccggaagcgtccggaaggctcttcaagtgggctatggagttaagtcagttcgacatacactacatatcacgcacttctataaaaggacaagcactagctgacttcataacagagtgtaatgaagcagaagctagcgcaaacgtaccagtgccacaaaccccaacatggaaagtattcgtggacggagcgtccaacgaaaacgaatccggggctgggatagctatgataccgggcgactccaggcagctctacgcttcgaattctcggcttccaataatgaagctgagtatgaagccctaattgcagggctgaggttagctagagtcgtaggggccacaagagtagaagtcttcagcgattcacagttggtggtaaactaagtgtcaggagaatatcaaacgcgtggagaaaaaatggttgcgtatgtatcaattgtctgagatctactccatgagttcacagattataaagtggaaagaatccctagagaaaagaatgcccacgcagactgtttggctaagttagcatcagacagggaggttgaaaaactgggggtggtgcccgttgaacgcctcacgaaaccaagcattaaagccaaaaatattgtggcaacagttgagccagagcccaactggatgattcccatcattgaatacataaccaaaggcgagttgcctcaagaaagggcattgttcagaaggatacagtaccaagcgcaccgatatgtgatgatagataatattctttaccgaagaggacctagcatgccatatctaaggtgtgtatcggaccatgaagctaagtaaattatgctagaggtccatgaggggttatgcggagatcatacaggaggcccgagtctctcaaagaaaatattgagacaaggatacttctggccaacaatgaaaaaagattgcatagactatgtcctgaaatgtgatttgtgccaaagattcgcaaacatactaagagccccccctaacgagattaccctgatgactagcccctgacccttcgtagtttgggggatagatcttattgggtccctaccaacagggaagggaggggtaaagtatgccatagtagcagtagactacttcacaaagtggattgaggccgagccaatgaagactataactgctaaaaaagcactagact

SEQ ID NO: 365132 - DNA, 646 bp, Cannabis indica
tttttttttttttaagaaaagtgatatagtattagtgtatttgtaataaatttgatatttacaaaaaatatttaacataatatgatagttttcaaagctcacttaaaattgtggtgttttggaataaatttggtattttaaaaatattatttaacataatatgatagtttaaaaaaaaaaaacgataaaattatactgtatattcactttttattttgtattttaattttgaagttttgtttttttatttttacactttaaattttttttttttatttttacagaattctacatagaaatccttattgcgagtaacttaaatcgcaaccaaaatccatatagcaatccacatagaaatagaaaccactttagaaacccaaatcgtaaatttaaaaaaaaaagttaaaaaaactagtaaatgggataatttccttttaatttttactttttttaatttactctttaatttatacttaattttattatattcctattatgtgttaagaaccttaattttaataaattatatttgttactttgattataaaaaaaaatttattcaaaaaaaaaaaaaaagaaaaagtaaggaatacataaggtactatttttacatttaaagaatattttttttttttagtatttttac

SEQ ID NO: 365133 - DNA, 728 bp, Cannabis indica
aaacaagatgcgacttctaaggagaaaagagctcgaggaactccgtaaggccaaggagcaagtcgagctcgaggctaagaacgctcagacgaaaaacgaggagatgtctcgcgatttggaggtcaagaaggagaatgggaagaagctgtatgaccaggcggtctcggactacatatacaccactctctccaaaattctagactttgacttttcaatcctcggagcagaagccgctgaaatggctgaggcttttcgcgccatgtcgcccacacaaactcaaggcggtggagggaatcttcccgaggaggctgaggttgcggatgctgaagaagtcgagaatgaggccgtcagcaaagtcgcggatggatctgctcctactgctccaaatgcttgacttttcccttaatatttgcttgtgttaaactcgatcttttttttttttttttcttttgtttatgcggtacaagggtactcgcaccttgtagttagacgaatttacatttatgcttattttgaatgactatatatcctcgcggggatagctattcacagtattttcgccgtacacaggtactcccggttgttatctataatatttttactgcgactttaattacaacttggtgtaataagtagaaaatttcagaaacctgaaaatttacaaacttgaaaaacttagaaaaaaattacctttattataatcaatagtacatcatggtatatacccc

SEQ ID NO: 365134 - DNA, 713 bp, Cannabis indica
ttttaaatctaaaatacaaaagtgatgttccaatatattatctatgtaataaaaattggttgccgaaaacctcggtcaacattttagtgctttcattgagagctgtaggaagcattgtttgaaaaatgacaatcaaagatctaggctgcaatggtggaaactcgaaaccacacgcgccaacctcgtccccccaggatcctcaaaaccagaggacgaagaggcgacctcacgagtaaatgtgggctctaaaaaacgagacgaatcaaacgatgaggaatacaaagaaaaccttgaggggtacgatgcttacgacgacgatagttatatcgagttactggtcctaaggcaaaaagcggctactcacgagatcgaactagccgcccaaaaagaataaaatagaaggatgcaagaaataatggttgccatgcaaaaggccatggagacagttggaatccacgtgcatcccaaagccgtgcctacaggactagaggaaacacaagaagagtcctcgccaagcacccaaaggcccaaaagtagggagccaagtcccatacagtatccttccgaggggaaccctaagaaaaatcccacttcaatccttgggaagaatagaaaggcacaggatccacgaaaagtccgcagaggggcaggctccctcgggagagttttggccctcaagaccgaaaggaccgaaaaagcgtgtctgtgcacca

SEQ ID NO: 365135 - DNA, 622 bp, Cannabis indica
ttgggtcgccctacaggttgcttctcagtaggcactccaactgtcatattctttatgtcatcaagcaattcccaatcatcttcgtcaccaattggcataattgtaccttcatatgggctcctccaatattctgttgtgtaatatggcgagcgtagtgcgtacatactaatacttcattgttgagctgcaacacatgcatgaggacaaggaaacttagtgcactagaacaagctggaagtgcaagtctgttcctacaaatccattacgccaccagtctcaattgttcctccagggtgaacatgcaacgtgtaaggtccacatgtgtcaacgttcaaataccaagatttttcaaaatgtaatgccaagtcctcctccaatcctggtgctagggtcttcgtccacttatcagctttttcttttcgtgtagcaaaccactgttgaactttggacctcaggaatgctacaacagcagtgataggaaagtctcttgcatccttagttgtgttgttgaagctctcagcccagttactcgtcattacattgtaactattgcccctgattttgcccaatatatgtggaccaaccagacaaggacgcgtggatcaaacaacttagcattcaa

SEQ ID NO: 365136 - DNA, 643 bp, Cannabis indica
atatgttaaatatgtgagaagttgtcatttcgttatatatgttttaaaatgttatccttatcactcaaattggccactttcttcttaaatatatgtgtttcatgtgtattggctctttccctattatccgactccaatggatggacttaatatatataagtggttatatactatgtatatccaataatattcttatatatagatatataatagatatatatgtactcatatatataatctttataaggcaatgcgtatattgtataatcaatatagggaaaaagaaaaagaaaaaaaaataaccatagttgcgactgttgtctatagatattagtagtgttcttgatcggtgcaaagtcgtggttgaattttgactaattcattacatcacccttgtggtttgagtgttttttctaaataaaaaaccaatacaagtgtgttttatatatataggtagctatattatagttatattaaaaatgtaattaataggtgaaaatttaatttttaaacttaaactaagtataaataactatatacttataactactacaaaaacctcctttagaagcggtttttaagccctttcagcgtcggttttcgcgaattcgctaccgacgctgatcaggacgacgctaaaggg

SEQ ID NO: 365137 - DNA, 790 bp, Cannabis indica
atactagttttgcccgagaccctttctactaaggcatctgccaccacattggcctttccaggatggtaaaggattttatagtcataatccttaaccaactccaaccaacgtctctgtctcacattcaaatctttctgagtaaagaattaattttggctcttgtgatcggtgtaaatctcatacttatcatcgtagagataatgccaccaaaccttcaaataaaaaactactaagacaagttttaaatcatgagttggatatcgttgttcatattctattagctgacgggaggcataggcattgacctaatcggattgcatcaaaatacaccatagaccctgtctagaagcatcatagtaaaccatgaatttctctttatcagatggtagggctaacaccggagttgtgatcaatctttgttttaattcttagaagcttgcttcacacttgtctgtccacagaaaccgctgattctttttagtgagtttggttaaaggttttgagatcttacaaaatcccttaacaaactgacggtaataaccaaccaaaacttagaaaacttctaactctgtaactgtcttcggtctcagctaatcgctgccggattcaatcttccctggatccaccttaatcccatccttaccgacaatgtgtctaagaaatgatacctgagatagccaaaactcacattttttgaacatggcatacaatttatgctctcgtaaccattacagaaccatccggagatgttgctcatgttccgcttttgattgagagtacacaaggatgt

SEQ ID NO: 365138 - DNA, 578 bp, Cannabis indica
aacaaatctaattaatatcctaaattctaacttcaattcaaatatctaaccaattttcaaatttcaagtttacttaaaatttaaattaattaaatttctaataagatagtataatataatatcttgaattttgaaatttaaatattcctaatattatattcttaatcttataatttaataaattaaatattacaaaaataaacaatttgaaaaaaaaaagatattttatggttaggatattaccaattttattaaaaaaaaaatatcctaagtttgaaaattttatggttagaaaccttaaaatttctattcaaacctaaactaacaaattttcaaaaatttcatgttatttttcccaaaattaatttgaataaaaaatatctaatgagataaaatgtcaaaactaacattttttcaaatcttataatttaatttaataaaatatatttcaaaaataaaaattttgaaaatatgatatggttagcaaattttgaaatttaaactagattgtttcttaataaaaaaataatattttaatatcaaaataagatcatacaaattttaataataaaataagt

SEQ ID NO: 365139 - DNA, 527 bp, Cannabis indica
acccggtgtttccccttacggatcacgggactactgactattacacagtccatgagtagaatgaggtccgctagtaactttaaccaaccggatctgcaagagcacttgaaccagaaaaaacctgatcttcgcgaacaacttggtccaaagtaagaggatcctttccaattacgaatagatgagttgaaggataagttcaaaaggtatcaagtgggggagctaggaaaacaatctggatatgacttaaacgaggaactcgagccataccatccagatgtcatgaatactccttttccccaaggatttaaacaccttcacctctcgttgtatgatgggaccaccgatccggtctcgcatttgaataacttcaacaatataatgtgagctagcaatgttacaaacaatttacgttgtattttgtttcctacatcactagttggagtagtgagcagctggttcaataaatttactcatcattccattacttcttgggaacaactgtccaaggacttcaaaaagtagttcca

SEQ ID NO: 365140 - DNA, 1289 bp, Cannabis indica
tcggaattgacattattgccggaattggcataatatatatttttttcttttctttttataaatttatggcctttctagagttttcttcttcaaatatttttttttcgaaaaactacctaaattataataaatattaccaatatttttttttcccaattcatataaaagtgtcaaaatctttgacctccatcaattaatttacaaaaaaagccttttgatcatgtcgatgaagttagagtcttcctcacattattggcttacacatgttttaattcactctactcaattattattaaaaaaatcgagaaattatagtaaatgattcaaaattataaaactatattagtaaatgtcctcatttcaaaactgttagcaaaatgacccttctagattatttattatttatattgtcttttgacacataaaaaaattaataatttttttatatatattttttagaattagaagcaaattacttaaagattatggtatatttatattagttttgttaaaatcttttttatttgaaagttatgtccattttttataataaatttttttatgagttgttgtgggtttttaatatatagattttgttgcaaagtacatttatgttttgttgtatagtatattattattcttagtttatatacaatcgtggtatataattttgttgtcgtggtatttatattttaattgtgatgtatatatatattagtgttgcccctgatttttcccaatatacgtggaccaaccgaataaggacacgtggatcaagcaatgtacaatccaaaatatttgctaagtctttatgctgaaaggtagcttccaggacatagctcccggagaaggcatatggaaccccatatgctcccggaagctcgaagtaacgttaaggcatctccgtgacgtgtcaggtttctcctgagcaatcaagtcgcatttaatgccgcatgggaggaagcgtgttgggactgctacacgcaataaagtctgacggcacaacctccaaccagcagctacaaagtaatgatcatttaagtctagcgacggctacactgtgaagagtcacatcagtcaaaagacaataaggacattccacataaaaaccctacaacacctagggatttaaaatataaataaaaaaattatttataaatattaaattgctaaaaaggggtcttattaaatattaaattaatattttaagaaatagttaatatataataattctaaaaatgaatgtttacctattagtaacttgctattacaggtcaaagaaaaaatgt

SEQ ID NO: 365141 - DNA, 596 bp, Cannabis indica
ttcttccgagctggctctgcctttggatggggacacgtgtcgagtatgaccgttcgagactcaatgtgaagctgactgggcgtcccttcggatttcggctaataaatactttgacaattaatattttgaaatctgattttctctctccacgggtgacagttgcactcgattacttttgatttcccacattcgtttttgaggcgggaagctgaggcgtctgaggttcattttgatgcagttcctcttttcatgcttgcctataaatacccataacattagcacataaactcattttaccacccttcgctgttaagtaaactccagagcaaaaagagagttttctggcttcaaagttgccgaagtgctttcaaaagactgctggttggcttgacgttgctcgaacccagacactcgaatctttgagtaagtctctgattccctttatgcttttctttgcatgtttacactttgaatgcaactatgctgtagaaaaacgcttaggaaaccctagggttagaaacttctgcgactcttctttatcatgtcgtcatgaacgtttacagccatagagcttgtctctgaaccgcattgcatct

SEQ ID NO: 365142 - DNA, 681 bp, Cannabis indica
gttgtctcaggtgtccttcctagggcacattgttagcaaggatgggatcaaggtggatcaaggaaagataaaatctgttagggattggccaagaccaaaagcagcgacagaagtcagaagcttcttgggtttagtcggttattatcgtcggtttgtagaagggttttctaaaatctcaacacccttaaccgagcttactaaatagaatcagcgttttgtatggtcagacaagtttgaagctagttttcaggagctgaaggagaggttgattacagctccagtgctagctttgccttctaacaaagaaaagttcgtggttattgtgatgcatccagacaggggctgggatgcgtgctgatgcaagccgatcaggttatcgcttatgcctcccatcagttgaaagattatgagcagcgatacctgactcatgacctagaattggtcgcggtagtgtttgctttgaaaatttggcggcattatctttatggagaaaaatgtgaaatatataccgaccataaaagtctcaaatatttctttactcagaaagatttaaatatgagatagaagtgttggttggagttagtcaaagattacgattgttaaaaattctatcatcaggggaaggccaatgtagtggccgataccctgagtaggaagggtcccggacaggtagctagtatg

SEQ ID NO: 365143 - DNA, 537 bp, Cannabis indica
gggaagaccagttcagcagccgaccaaggcgttcatagcatagtcgttctgtctgccaccaatgtttaaacagacattagagatgacactgagatccagaacctccgtgctgctcttggactcatgcagggtcataccaacaccctacatcatgatcaggaggaactccgtgctacggtaaatctcgcatttgaagagcaaaggcgtatgtttgccaaatggagggacaaggagatgtaagcgttaagggctcatcatgcagtcattgacaattgtagtcggcaagccactgtgctgatacgaaaaccctatcaatctgtcgggcagcaacccccgaatgtcatccccctgggtgaaacagacgtagatccagtgatgaatacctcttagactataaatggtcagccaccaaatctccagtcacaggtttcgcttgtgggccaagtagtaggtgttgggttttatgcccaaaataaaactcatttcaatataatcaaatttacttattaatatagatcagaaataacatttaatgtt

SEQ ID NO: 365144 - DNA, 1148 bp, Cannabis indica
tcattttaaatttctaattgacattattaatttacaatcatactcatttgcactattatattaactttgcgtttttaggtcaatttaataattctagtttatttttttatatagttgtgttgtttatagttgtgtttgttaatttttcttagaccaaattgatctaaggatatttgatgtttttggttaattaaattctacctttacaatataaatatatgtgtatatctattctatataaagtgtggctatataacaaaattcttggtttatgagaaattcatgggtaatttttttttaatttttaaaatattttaaatttcaaatatctattctatataaaatatcttattatttaacaaaatattatttattaatgacctcttccattaccaatcccaattgagcaattgattggtggatgtccctgaagccactcgaaaaataatggccctctccaaactcattttgaagtcataccaaagaggagaattaagtcggtgacattattttaactcaatttatttgtgtcatgatttttcttactcaagtcttaaactggcatggtggcattatcatggttttggagcatctagccgtctcagtcattttttgtcaatagagatggagcatatatattcagggctccaaagaagtattttatacaattttatttgtatagctttatacaaactatctgtaattttatattaggattttttcaaccatattcatctatctatattggaaactgtaagatctaatgaaactgcaggtgcgaagccatatgctgtgtatttgcactcgtgctgaacatccgaactcagcttcttctcgtagttggccttctgtttcaacatgtctttctgaagcgagtgcatgagtctggcgaatgagtgcttcccccaaggaatccggaagaagaactcgaggtcttccacatatctaagtatgtgaggcgtgatcagcgcgttggcctcgcggcccagaagcactgactccacaaacaagcacaagccgagcttgtacaagtcttccgggttctggcagtttgtgaactgaagttggagtgcttctgtcttcacactatcagaccggttgaaatatttgttgatcaatcggtctgaccccgagcgcgcgacctgcgc

SEQ ID NO: 365145 - DNA, 805 bp, Cannabis indica
ggtgatgattccagatgagagtatcatgattatgaggatcaacaggcacagaaagaatggcgttacacatctcctcgtcaaaataaaaacggagtttagtaaggtcccaatgtcggtcttcagtaaggaaaaaagagacattgtgggaaggaggggagagaccaggcttgaacataaccttgccatggaaatgttaacaaaatttgaaaattaaattagtattcttttttttttttaaataatttttttttatatatataataaattaactaataaaaattataaatatatacatatatatactacacattattttttaaaatatatataataattaaattaagttatataatttttttagtattacatatcattatattataacaaaaacgaataaatatattaaatcattaaatatatacaataatatttaatatatatcgtctcgttcaaaattaatattccatattaataaaattatatacgaaattataataatactaaattgatactcaaaaaaataaatacatactaacaaaattatgagtattgttgtttggcacctttggtgctgggcacctccctaggtggctgcatacgtgtcatttcttttacattatttaattaatactttttaatttattaaatgttataagattccaccactttgtaactcacgcgcttttctctctccacactaactattgcaattctaaactccagccaaaaaaaaaaaaacgaactattgcaattctaaaaagtgactattgagttcgtctcttcctctattcttcttcttcttctt

SEQ ID NO: 365146 - DNA, 404 bp, Cannabis indica
ttaccgtttcacccctcaatatattttatccttaaaacacttaccttcctataatgatattgcagtaaactaatatataactgaaataagagttcttccatttatctctattaagccaataagctcgaaggaaatcattattttacttctatgtccaaacagaagctataggtttcatatctatgagtagcacttcaactcaattgtaatatcatgttctcaagttgtatgtgtgacctgaaccaaatgataggctttaacaaacaactctaagaacacaaataacactcttgaatcgaaattaaccatatcaggattacgatcttttgatctaaaatcaaccaatgatattaacttagaaagatataactgtaagattataatatctttaccaagatcaatat

SEQ ID NO: 365147 - DNA, 1083 bp, Cannabis indica
agtacaaagcatttaagataagaaaaaacctaagtcaggttacaaacttgtctttacaaaagtaccactatgggcaaaccattaaatcatcttcctaaacaaaggatgagaggagaagtcgataaactcgagaaagatcgtctgcacatagtttggacaaagaccgactacacatagctcgagaaagactggctacatgtagagagccttgatctctccacacacctcattctcctcatcatcataagatcccatttcctgcagctaagactctattcccggcctcaggaaattcctcgataccaaaaagaggttggcacaaaggtctactggcacaggctcagatcttggattggttggattctctgatagaaaccacaccaacttccctccctggttcatctgaaaccatgccaaccttcttgtgggattccttgacaaccagaggaggacctctaagattgctcacaagatctatgtctattcctgtggagatgaaaaaaaaaagggtcaatgagcaataaaaaacatacaaaattaatggtatttataaacagactcaaaccaccattcacaacagttgatactcaccttcaaaaaacacttatgaggatctcccatagcaggctacggggttcccctagtttggattggtcggaaactccttagccttggaatcaatcaattctggttccaattgaggcttaaagttcttgggaacgaatggaaaatggttggtgcattctggtattatgagtgttatcccaaatttggcactctgacgtggcatcacaagaatggtgacacgtggactccacttggagtatttgctcggaacgatatgccgagcaggatgcctcgatggcacatccagaatggaatccgtgtagaatgatcaacacttaccaaattcagcttgacgcatcatgagtcaccagctcaatccctacaactcagggatcaacttacgtggatgtggcatacacacgatcccactatcggtgtattcagcctcaatcccacgatccttgcattaagctttgatcacacgatctttctatttatgagcattgtaacgagaga

SEQ ID NO: 365148 - DNA, 611 bp, Cannabis indica
aattttaccagcgtacatttgcactagctaaaatctaacttttcccagcgcatttatgcgctgggaaaaattatttttgccagcactttttattttatgctggtaaaagttccaataccaacattgattagccaacccccttttgtgaacacatcacaagtaaattatgtacaccagcgcaatactaacttttgccagcacaaaaatatagagcaatactaacttttgccagcacaaaaatgtgctggcaaaggtgttttattttaatattcattaatgtaaaaatggtgaagagtatttcattccacttattaattattaacatttcctacttcacctattttataataaaattcaacagtatataactgaaaaattacgttattataaaagttatattttgaaaaatattatttacaagtcatatatcataaggggcacattaatagtgtaaaaggttaagagggcaaaaatgctgcaaacttttttatgtaattaatagtgctgtacaaacttatgtatattttatttatgtattatgtagtttaattttgaattattataatagtaatgaattttgtatttatgttggtgttaaaataaaatatttt

SEQ ID NO: 365149 - DNA, 616 bp, Cannabis indica
gggttgccaggacattataaaagagattgcccacagctcaagaaagaggaacagaagacagctgcaaaacccgatcaagcaagggtgtttgctctaacccagtcagatgcagaagctagcccctctactgtttcatgtcagctcttagtcaacaactcttacttttttgcattgtttgactctagggccactcactcttatgtggcaaccatgatttttagtaaattagatagatcacataactgttatgataaataatttggaaccctactgcctggggaagaattagttatctgtaaaaggtggattaggtctatgccgattagaattgaggatagtgagttgagtgctgacttaatagaaatgggtttagcagattttgataatatactcggaatggatttcttatctaaatactaagctagtattgactgtaaacggaagatggtgatcttccaacccgcgggcgaggaactatttatttttgtgggatcggtttagggatcccgaattccagtgatttcagtattaacgtctagggatttaatacaagatggatgtttaagatttctggcaatggtattggataccgcacgacctgagatagttcggccag

SEQ ID NO: 365150 - DNA, 785 bp, Cannabis indica
tggaaccaagatataatccctaattacaaaaaaaaaaaaacgatataatctcaaattagtaactatattaggcttcaaaattcaaaaattgagagtagtatgtatgaatgaacactgaagcacaatcatgaatcaacaaccttgatagttcttaaactcctcttttttttaacacaaaaaacaacaatgttgattaacattataaatgtgaaccaaacccaagaaaataaaacaaattactacttctaatgaattcaataaccatactttatttcaaatcatttcatactctaaaatcatgctcacttgtcaataaaaatccaaaaacctatacatatgcaactaaagggaaaagggttcttatgagctaaccttgtggcttgcccttgacaccagccactccgcaacagaaaagagaaagacaatggttgcagcttatatagtccctcatagcaattgttccaataactgtcaattatatatatatggagttctaattaagtaatatatttaacacttcaaatttaattattttacgatcaccttaattatatatttacttatctatatgtatatgtataggtaccttcaagaatagcaagaatattgatattgagcctaagattctaaaaggaaatgatagctttgagacaaatagggaaattttcaatggcaacagccccaaagatccacaacaaaaggaatatggccaaaatatagttcaatcagcccatttcttgtccttgctcttatttaaaaaaccataaccttccaatcatcaatct

SEQ ID NO: 365151 - DNA, 651 bp, Cannabis indica
tacacttcaaaactagtttttttttcgcatttttacggaattctacataaaaattcctatttcaattagcgctacaacttaaattacaacaaaaaatcgtatagaaacccttatttcaactagcgctgcaactactttagaaacccaaaccgtaaatttagaaaaaaaaagttaaaaaacaatatttaaagtaatttccctatatattaccacattttaatctacatattatattaataaattaaataatttaacacaatttccatacgagttaagatatatataattgtaataataaatatatatgttttagatatattgtaaatggattgctagtatataattaatattgtataatgtgtagaggggagggaccaaactaccatataggtcctttaaagcactgaatataataacagatacggaccacaatctgatagcagtgagatttgcatccaagaacaacttggcggagactacaaattaactaacatacttcacatcaaaaaaagaaactaacatacatttatattatatatataattacacactcatatatatttgatacaattagtgtaattatgtgtctattattaagcatatatatatatatagcttaataatatcactttctaacgtcccctttctatt

SEQ ID NO: 365152 - DNA, 714 bp, Cannabis indica
tttttttttcaaatctattttactttatttgttttaatttttacctttattttcatattttttaagatatactcattttaatagatgatgtccctattagaccttgtaggttaatctaaattatatgttacttaagtagagagtgaaggtatattaggcaactcactcataaaaatgagtatattataacatatgagtatttttgattagtggatacaaaaacaaggcatttctcaacttattctattatttttttaggctattaaggatttttgtgccaaactattatcattaccaaatttatgttatattatttgttataatataatatagattacaaaataaaatataatatattatatatatatatataagattaatatatataatacgtttagtaattaaattatataatatatagtttaatatatgtatatgagtggttataaaatttaaaaataattttataacctaaggatgacatttgattatatataattaaatgagttattatatatagaagttataaaattaatgagataagtttctagttattaaaaattgttacaatactcatttatatcatttaaatggatattgaaacattctaaaaactgttgttttatttgtggcttggtgaaggacgccgatcgaagaaagatccgtaagtgtttattttcagcatttttgttgtgtttttgtattttttgtttt

SEQ ID NO: 365153 - DNA, 695 bp, Cannabis indica
gttcgtggtgtggcggtgtcgtttaatgagcttctggttgggcgaggattaggtggcgacggaccgacggtgacgatggtggttaagagaagtcgaggatgaggaagagagaaagatttgggtaggtgaaaattaggggttgttgggttgagttttaagtagatgaagagattcggtggtggaggagagcatgttcggtggtggtggttggtgatctcgttgcttggatctaggtggtctcagtggtgcgaggaagaggaagagacagagaggagggaaaatgaaaaggaagttattttaagtagaaattaaattatataaattaattagggatttaagttttattatgatgtatttttttaagtacgtaaaataaaatttctcttgtaaaaattttcaaaaaaaataaaataaaataaataagactatttattagtgtggaaaaggaacatgaagtttccaacattttcttaaagggatttttactcaaatatacaaaaaagacctcatatttatatttatacggacacatgcatatttaaacttttatacaaaagaagattctttttttttcaaatatacaaacatcctgttaatcaagaggtgtgttaatcacaagaaataaagaagaaaaaaatagaatagcaatatataaccagcacttttttatttatatgaccaacacttttattatt

SEQ ID NO: 365154 - DNA, 1301 bp, Cannabis indica
aaagatgagcctataaggtacaaggctaggctagtcgctaaaggcttcacacaaaaggaaggtattgatttcaatgagattttctctccggtggtgaagtataaaacgattagagtgctcctaagcttagcaacacagtttgacatggagatagatcaaatggatgttaccacttcctttctccacagggaattggaagaaaaaatatacatgacccaaccagaagggtatgtagagaagggaaaaccaaaccatgtttgtaaactggttaagtccttgtatggactcaagcaatcccctaggcagtggaataaaaggtttgacacctttatgatgaaacaaggtttctcaaggagttactatgatgcatgtttctatcacaaaggaactgacatcaacacggtcatctacttgttactttatgtagatgacatgcttatcataagcaaggaaagatctcaagtggatgagatgaagaagcaactcaaggctgagtttgagatgaaagacttggggatagcatctaagatactgggtatcactataaagagggacagaaagttgggcaagttattcttgacacaagaggactacattcaaaagattatagagaagttttcaatgaaagattcaaagaaaacttctcagccaataactagccagtacactttaacaaaggaacaatgtcctaagactgaagcagagaaggaagcaatgagtaaagtgccttactcaagtgctgttgggactattatgtacttgatggtttgtacaaggccagatctggcctttgccataagtaccttgagcaaatacatggcaaacccaggaaagattcattggcttgcaatgaaatgggttttcaggtacctagtagggacacctaaggttggactcatctacaagcaacaaaagttcagcaccaacatagaaggatacagcgatgccgactatgccggggacagagacagcagaaagtctacttcatcttacatgtttctactaggaggaaactgtgtgagttggaaagcccaactccaacctgtggttgcactttcaacaacagaatcggagtacatatcaaccacagaagctattaaagaagccatatggatgaaaggactcttgacagagatcaagctacttaaagaggttcctagagtgtactcagacagtcaaagttgtgtacacttgtgtagaaaccctgtgttccatgaccggactaaacacatagagattaagtatcactttataagggacaaggtgacacaaggtgagatacaagtggaaaaagttcctac

SEQ ID NO: 365155 - DNA, 595 bp, Cannabis indica
aaaaataaaacttgtttatttatataaggtatatagatatatacctgtcccttcatatagtatgcttaatttaagagatcaacctgctatactacataaggtataatatatgctatactacataagatataagatatattatatacatgagtgaagtaagtttttggaaagataaaatcttatatatttcttgtacttcaaccaggtggaaattggcacttacaaactaataaaaatacaattaattattctctagtaaaaatattgataacttagaacatagaaactacgtatgatctgccgaattccaaatctaatttggagtttagaggaagaacatcacaatgagtctatccataatatgtatcatcaaacatgaactacgaattcaaaatttgaaaaattatctcacccaaaaaataacaaaaacaacaacaaagaatcgctaataaacaatctcacttattaaaattaatcgagattctaacagaaataatccaaaatattttcttagcaccttaaggcatctacatctttccaatatattgaagaacgaaaaaatacctcttacaatatatcaaagctctctaaacaa

SEQ ID NO: 365156 - DNA, 745 bp, Cannabis indica
actagatggtgagttcaggcgagatgggaaaaatgaaatggtggctattgttgtgtccatccataggtgggtgagaggaatgaaagagagcaagagagatgaggggatggctatgcgaatggctgggcatgatggcgttcaggcgagagaaagtggtggagatctggagagctaaacagagttgaagggaaaccgtgactcaggcgagatggggtggtggaggtgaagctcgtcggaaagtgggtcaagcgagatggaatggtaaggatggaagtttgggtggaaaaaaaggacaaaaggtggctggaatctgggcaaaattgaagtcgattggggcagctatggagattgggtgtggatttctttggatgtctctttttctttgatttgatttttgtcttcttgagattgaatgttttgtttcgggttaaatattatatatggttagaattagattcaaaatttttgatttggattgttttgattctgttatgcattattggattttgttctaggtttttggattttatataaatatggtggtgcatgagaaacttaaatctagaaaaaggaagctcaaatttctcgatgttgatgtttgtgtttcagatttgtgatatttgagtttgatcttcgtgaaaagtttagatttttttttttggttgtatatgattcagatggtggttttaatggtgattggtgatggggtagtatgaagaagatgaagaatgaagtaacataaaaa

SEQ ID NO: 365157 - DNA, 359 bp, Cannabis indica
ttataaatggtttgagttattttatgttacttatatttatttattatgttacagaaccggttatatttcaattataaccggtttgagttattagtttttattcatataaccggttacatttttagttatatatgagacatttactttggtgacttttccagcaacgttaactttttcggcgacgtttactttttcgttgactttccggtgacttttctggtgacttttccggcaaccgtgcttttccggcgacttttctggtgccggtgatttttccggtgccaacgaattttttgacaaaacttattattgttttacaaatatgggattattttttttacaaaaatatgacataaaaa

SEQ ID NO: 365158 - DNA, 565 bp, Cannabis indica
ttttattttttcaattaaaattaaattttttattaatggtttagaaaatttttttttgcccccactaaaatgttggactggctctaccactcatactccttaaaaattattatattggctaattagaatttttgtcccccgaactttgacatgtaccaaattatgtcccatgaacttttaaggtcgttaaaaatgcccctgaactattgagattattgaatttttagtaaaaaaaatctaacacggatgaaagttcaggagacatgatttagtacatgtcaaagttcgatggacatgatttagtagatatcaaagtttggggagcatgatttaatacataaataatcattgaaataaaaaattgaatgaaattagacaaaaattcttatatctaacaatgtcaatagttcagagggaatttttaacgactagaaaagttcaggggatatgatttggtatatattaaagtttaggaggtaaaaattctaattagcctattatattaaactatatgagacctgataattaattagaccaatagcgatattaacacgtagaaaaatat

SEQ ID NO: 365159 - DNA, 975 bp, Cannabis indica
tcacttatgaaatggagaaccacaaacttagacgccgcttgaaggaggcgcaacgacggtttgctgaattagagtgtgatgctgccgcaactagggcgaagcagtggaataacactcaaaatcaatctgaatgtggagtgagaagaccacgaggcagacctcgtggctcacgaactaggagataggaaaatactcaggaagaaaaacctggggaaaattaaattccccctgaaaatccaaatgatcggccagaaccctctcatagaaatgagaatgggaggcaaccagaaactaatgaacgaaaaattcctcatggaaatgaggaagaccctaggacactacctggagaacgtaggtcaccggcgaggaatcactagcgttattctcaaacccatagagagagggctcgtacaaaccccagtgggaaaaatacaacaaactacactcaggggagaaaacagggtgtgaataagcaagtgtgacctcagggcgctcaaggacctacagtcgatcaactcgaggaagagagagtgctcatcatgctaacgatcgagaaagcacgggaaccaataaatctgcaagtcattcgaggacaaggtcagtgagcaaaatgaggtccataaataggacacagtctatgagtagaacgaggactgttagcaattactcccaaccagaccttcgaaagcacttgaattagaaaaaacctaatcttcacctacaactcggtccaaagcaagaggatcctatccaattgcgaatagatgagttagaggaaaagttcaggagatatcaagtggggaaattagggagacaatctggatacgactcggacgaggagctcaagccgcaccatccaaatatcatgaatactccttttcccctgggctttaaaaacccttatttctcattgtatgatggaaccaccgttccagtctcgcatttgaataacttcaacacaataatgtgagctag

SEQ ID NO: 365160 - DNA, 1368 bp, Cannabis indica
cgaagaccagaatcgctagtccaattcttccctatggccgaacctcataagagaattgagaattctctagcagagttggaaaaaggcaaggataagcgtaaatcaccagtgccgcgatcaaggtctcgcagtccccgagggaaaaattccagaggtcgaagcccaagaagacgcagcccacggagacagcgaagtccgaagttggccaaatctcctccaaagaaggagtcctcgccgaaaaggaaaggtggaccgcgtttcgttaactataccgaactcgcggtgccacgagaccacatctatgcaattgaggaaaggaatggagtcttcaagaagccgccccctatcaggggaaaccgcgacaaaagagaccccaaaaagttctgtaagtaccataaagatattggtcacactactttggaatgttgggtcttgcaggatgaaatcgaggagctgattcgaagaggaaagttcgacaaatacaaaaagaacgaggaaggtcatccccgagcggatgacaaagaagaaaatcagaacgcgagtggttcgagaacacctcgcaatatattaacaatcattggagggccccatatcgcaggagactcccgcaaatctcaagagcgatatgccaaggaagctaaagagaagccgctcaccaatgtaaacaatctcagtgaacggccagagaaattgtttaaaagagaatgcgacgacatcacctttatggaaagtgatgcgagatgggtccatcacccgcattccgacgcactagtcattgtcgccaatattggcggagataatgtccaccgtatactcgtggacaacggaagttcagtgaatctcttgaatttccaagcttttaaacaaatggggttgcatgagaaggacctgcgacctgtgacgtcgagtatatacggttttaccggcgacatcatcgcactgaaagggatgattaaactcccaattaccttgggaaccgccccagtaacagccaagtcaatggctgactttgcagtaattgaccagtattcggcatacaatgccgtgattggtcgaccaatattgaaggagatgaagatcgtaacctcgatctatcatctcacaatgaagttccctactcccgctggagtaggctctgtgcgaggagtccagtcagactcgcgagaatgctacaatgcagcagtcaagctcgcggagaaaaagtcaataaatgttatctatttattggaggcaccacctcctcgccaggaggtccttaggatagaagaggtgccgcacacggatggaccagatctggatccaaggatcctcgatcatgccgcagcagcccaagccgcggaagacactatcgaggtacctatagacccc

SEQ ID NO: 365161 - DNA, 540 bp, Cannabis indica
tttttttgtcacactctacactatcattttttactgtcatttgatgcaaaaatgacactaatacttatacaagaaagacactaatattaaggcatataaaaatgatactaattataccgatcctaattatatatgatattaatagtacttcttttgaaaaaatatttacagtgaacaccgaaaagaaagacaatatgacggtaaaatatttcagaacactttttgctaaactggattgaaaacatctcatgttgacaaaatgatgtcaacttggcactcggccctttaaaccgagcacctgagattctgtttttgatacttccaaggcttctaaacttgaggaggggtttcgtcccatgtttttgaccatgtcagattcaaaggccgcataaaatttgacatttgagcaattgaaggcagcgtcctaggttgattgtcaacctgtgagttgggcccaacaccagatcaacttggcgctaggccatatttccaggaactcgggtttgtgattttctccccgagtttacttgaatcttcatt

SEQ ID NO: 365162 - DNA, 631 bp, Cannabis indica
ttttcaatttttgaattagagggctattttgacaaaatttaacgtgaaacaaattttcatattcatgtcttagtagtactaattcattgtgactagtaggggaaaatattctgagattggtctgggccacatttcacaaaggggtaccactatcaaaaatgtgagattttcactatttcgattaaaatgatcgtttgtgcttgaaaactactttttctctaactttttcaatataaaagtgatgcacaatggtcttggcttcattcctatgaaatttcaagattttttaagatgtgtagggtgagattttaagagaacactaatgagtgtaagagtaaggaaaaaatttgttaaaatttactctgaaaagaagaatattttcaatttttgcgttaggagctaattttaaccaaatttaatgcgacgccaatcttcatttggatcttagatgtatgaattcatgtcactagtgggaaaaaatattttgagatgggtccaggccacatttgacaaagggataccactaatagaaatgtgagatttttactatttttattaaaatgattattagtgcttgaaaactactttctctctcaatgtgcccaatagaaaagtgatgcacaacggtctt

SEQ ID NO: 365163 - DNA, 523 bp, Cannabis indica
gtatgtgttgtacagaaccttttaccacgaaaaatatttttctgtttttgaaaatattttatttggattccttgtgaaaaattaagcaattttataatttacggaactcgattccgataaaaattaaaaaagttatgaattttgaaaattttggattacatggctgtcgagtgggtgcatcaagtgcaccaggcactcggaaaagccaggcacacgcgcgcggacatcctgggacgctgcctatctgaaggtgacacgcccgtgtcttcagacacaggatgcttcacctcgcccgcacattcctctgcctgcgccgagacgagccgcacatgggaccctgctgtccctcacctccgcgcgcgcaaagggagtttttacagcctctggaggctgcacgtgcatcctcctgggcaggacactcccaaacccgattttgtgggattttttcccgaaaatcgttttttttttcaattttaaaaccctaaattaaataaaatattaattttaatatatttgaacttaa

SEQ ID NO: 365164 - DNA, 607 bp, Cannabis indica
cccctatgttgaacgagcttaattcgggtattgtgagacccgaaatccaaacacctcaatttaagctcaagcccgtcatgtttcaaatgctccaaacagttggtcaatttagtgggttgccaacgaaagatcttcacctccatattcgctcatttttagaggtgaatgactatttcaagctacaaggagtaagttaaaaggctttaaggttgaagttgttcccattttgcttgagggatcgggctagagcatggcttaatactctttctcctgattcggtgacaacatggaatgacttggttgaaaattttttgagaaagtattttcctccatcaagaaatgcaaagtttcgaagtgagatcatgttctttcaaaaatcggaagatgagaccactagtgaagcatgggaaagatttaaggagttgttgaggaagtgtccacaccatggtattccccattgtatccaactagagacattttataatggtctcaatgcagcctctcggatggtgttggacgcttcagctaattgagccattctttccaagtttacaatgaagcttttaagattttggaaaggatagctagcaacaactatcaatggtca

SEQ ID NO: 365165 - DNA, 543 bp, Cannabis indica
agaaaagtgatgcacaacggtcttggctttgtccctgtaatatttactgattttttgagatgagtaaggtgggattttaagagaacactaatgagtgtaagagttaggagataactttttaaaatttactatgaaatgaagagtatttcaatatttcaattagagggctattttgactaaattcaacgctaaacaaatctttttattcacgtcttagtactacgaattcattgtgactagtggtaaaacatatttcaaggcgggtctaggccacatttcacaaaggggtgtcactatcagaaatatcagattttcactattttgattaaaaagattcactactacaaactagacttttagtgacactatacagtgacacgcataaaagtgggtgtcactaaaaaattaaaaagtagttttttagttgacacacaacattagactctaaatgttcaagtgtttattacgcgaactgtgagtcactaaaaatatggagtgtcactaaatctaaaaactcaaaatttataattttataaaaataaa

SEQ ID NO: 365166 - DNA, 564 bp, Cannabis indica
acccacacaataaccgggacctggacccagaatcacgatagagacctgggaaacagaactaggatcggtacctactacccgacccgaacccgaacttgaacctaggacccagctcgtgacccgacactagaaatggaaccaaaattggactcgagattgggatacggatctggaccgagggcttggacaaaacatgtagtcggtgtctggatttatgacacagccttggacacgaaccctgaaaaggacccaaacccaaacccggacatgaacccagtcccaaacccaaaagtggacccgaacccgtaccctgtgactgaaaattggaaccaaaagcggaagttgaccgggactggaactaggagatggacttggaatcataattgaaattggaccttgatccagaaccgtaatcggaccaggacccaaactccaaatcagacctagaaccgaattgggagccggacccggatccccacccaaaccttgactcgggacccgaacccgaacctgaactcagacccaaacatggaaccagactagggacacagaaacagggtgggg

SEQ ID NO: 365167 - DNA, 551 bp, Cannabis indica
ttaataaacatagaaataatttctagtgtttatttaatataactctatgaagagttgtaaatattatagaatttgcatcaataataaaaacacttacacatacaaacatataaatataatgtggtaattgttgtttaagataaagtaaatgaagctcaatctcataaattgcaatttgtttgaaaataaaataaaataaaatttattaataataaaaaaatgtattgcaacaatatgagaaacagggataaaaatccctaactaaaattcgaaatccaaattgtctttaaactaaaacaattaattcaaaaatagataaatgagcttcatcttcatcttggacgatcttcaccctttgtccagctttccgatccaactcactaagatagcatctgagttcaagtagcttggcctacaagaagaagaaacaaataaacaaagttagtccagaatcaataatccaattggataataattcactaaaactcttaaagtttatagaaagaaataccttgtttctttgcaagaagtttaggacattggggtttcca

SEQ ID NO: 365168 - DNA, 643 bp, Cannabis indica
tccccaatctaaaaatctatatcacgacgctttggatcaggataacccttctgtctactctgagccgcgagccttcacactctaatcttctcaactgcttcactcgttctctgaacagcctcgggacccaagaactttctttcacccacttcatcccactgaacaagtgatctacattttcttccatacaaaagctcataaggggccatcccgattgttgcctgatagttgttgttataattgaactcgatcaggggtaagtactttacccatgatccttcaaagtcaagcacacatgcccgtagcatgtcttctaagatctgaatagtcctctcggattgcccatccgtctgaggatgaaatgcagtgctgaactttaactgagtacccatagcttgatctagactctcccagaatctcgatataaacttcagatctctatctgaaataatggactttgggacaccatgaagacgaagaatttttctgacatataactcagcatactggtcaatggagaaatttgtccgaataggtagaaagtgtgctgactttgtaaacctgtcaactatgacccacacagagtcaaagtgtcctgtggttctaggaaagcctaccacgaagtccatagcaatatcttccc

SEQ ID NO: 365169 - DNA, 1059 bp, Cannabis indica
aaataactcagttaaaaaaaatcgatctaacaaactaaatatataccgtaatattttatttataataaatgataatattattggtatttaaatttatttattaatttaaaaattatattcaaataaatataatagaaggtaataattcaagcccactattttttaaagaatcaacattaccctcctcaagggtagttataatactaagggggcgtttggtatgaggtgttcaaaataatttgattatagggaatattatgaaggagaatatgattatagggaaatgtgtaaactgtgtttggctgtgtagggtaatatgtaatcatattactgttaattaaattacactgtttggttgagtacaggaatcttatatatatattattttgaaaaattaaaataaaaatattttttattatatctatttaatgttaattacatataaaaataaaatagttatttattaaagaaatatatttattaattagtaaacattaaattttattgtattttttattaattaaaatgaacatttctatatattttatcactatgttatttatttttgttcgatatgttatttatgtacaccatccgcataaaatttttgtataatatatatgttattgctaataatataaaataactcagttaaaaaaaactgatctcacagactaaatatatatatcgtaatattttatttataataaatgataatattattggtatttaaatttatttattaattcaaaaatattattcaaattaatatgatggaaggtaataattcaatcctatcccttttttaaggtatgaacattaccctcctcaagggtagttatattactaggggaataacattccaaggctaaaccctacaaacaaacaaggtaatgtttcatattaccattcccttactaggattaatctattccaaacaacccctaagtgtttttctaaaattaactttaaaatattaaatgaaaaataaatttcatatattttaaaagttaattatgttgccaattcaattttaattaggttagactaatataatta

SEQ ID NO: 365170 - DNA, 585 bp, Cannabis indica
gttcagccttaatctgctgacaagtcaagcaccggaatactaattctaccacatctttcttcatcccgtatcacaagtagaagggttataaatcttgatacattttggtagtgctaggatgcaatgaataaggagtggtatgagcttcctcgaggatctcatttctaagctctatattgtttggtacacacactctggttttgaacaatagcatccctttacctgacactataaaatctttagcatgactagctaaaacctcttctcggatctttatcaattcggatctttagcttgattcaggccatgtggtatccaataccactgctagaaaccctaggcatccatcttgtaacaaaaccctagctttcaatatcaagattactggaatttgggatccttgaactaatcccacaaatacaaatggttcatcgcccttgggttggaagattaccattttctgcttacaatcaatactaatagaatacttggacaagaaatccattccaagtatgatatcaaaatcttcttagtccaattctactaaatcagcactcaactccctatcctcaattctgatcggca

SEQ ID NO: 365171 - DNA, 357 bp, Cannabis indica
ggtaaaataattccaacagatatatgtataattctgcataattgatgaatgtacataaatttatatacatacacgattcacacgaattaaaagatagattataatagtagaacaaaatatattattttgtattttattcttaataagatgtatggaatgtatataagtatatgttgttgtaactgttttcttgcatcgacttttgcatgtttatatttgtgtgttttacatatgttatttatgtttatatctacatgtaaaattgtaattcttatgaatcgtgcggtatattacatatatatatatatattagattttgtatttaaatatgtgtatcatattatatataataaaata

SEQ ID NO: 365172 - DNA, 582 bp, Cannabis indica
catgagtccaagagcgtcgcggagatttcgtaactcagtagcatatccgatggtcgtctgggtattagttccagggggtacagttgtgttatgaatgccctggtttggtgcacaactgttattcccagtctcttgcacaccaggcgatttcatctataggagttgttacacaattacccacgtttgccgactgtccaggattgacagctggcggaacccttgtgtttcctgggatctgcaatgcaggatccaccgtctgtgaatttgctggatcagttaggcctctacgagtctgcaccatcgtatttgtggttagattttgaataaagagcatttcttgattatgctctcaataaaagcaccaaaatgttgacctcgcttttagccaacaaaaacgagtctgatttactaagcgataagtgatttatagcaatcgatatataataaggcaacataaagacacaagaattttatagaggttcagccccgagtagtttggtaatagcctaatcttcgttacttgtattgacttaagaacaaggagaaaggttccttttcttatagctcttacaatagtatctc

SEQ ID NO: 365173 - DNA, 851 bp, Cannabis indica
agtttgtacgggacttccgaagttgcgtgtagacttcatccgagctgtctttgcgtttagatgggtgacacgtgtcaggtgcgtctgttcgcgactcgatgtgaggctaactgggcgtcccttcaattttctggtaataaatgctctgacgcaattaatgcttcgaaatctgattttctctcaccacgtttgacggttgcacttgattgtttttgatttcccatattcgcttttggggggaaccaaggcgtctgaggtttctaaaattattaccccttttcacttttttgcctataaataccctcgagcatttgtccacaaactcatttttcaccaaccttctttgctaagccagttcagagcgaaaagagaggtttttagcttcaagtttcctgaaattttttcacaaaaacccttcgtttagctttgcgtaaactgaatctagacgtctatccttgactaagttctcgatttcttttactttgcacatttattttctgtatgtgatcttaactttgctgtagaagatatcggctggagtcccaggctctggatttggttctttagagccgactggagcaggaggatctgttgtttgagcaggaaaagcatcagcagcctggtcaaaagttggctggaagttgaagcagcgacctctttcccaccataggcaacttgggtcgcgcagtacttgaggtacatttccttggcgttgcctaagtagtcgaagttggcctggggattagccttccaaaaatcaaagaagagcttgaggccgacagtctccaaagtatcaaccttctccctcaagcggttttcctcaaccgtctgagcgtccttatcttccttca

SEQ ID NO: 365174 - DNA, 820 bp, Cannabis indica
ttttgggaacatggtagtgtgattgagtgggagcgctaaacatagatagagaatctataacttctatcaagacataggagtgaaacgatgatttccttcgagcttggcttaatagacgtaaatggaagagctcttatttcagtgattatattttagttcactgaaatatcatttgtaagactcagataattaattttaattaatcaattataattttaaaattagactatgtctagtttatgaattttcacgaagcaagggcttaattgtgaagaaaagagattctaggtcttatttattaattaagagacttgattaagtctaattaataaatatattaaatgacaattttatttgataattaattttaattattaaataaatagtttttgcatttaaatggttagaattgaaaaaatggtatttttgagaaaataaggaaaattttgtcaaaagtggggcccattactatggccgtccacttggaaggatttttcacttaatttttctattattttaatgcctaataaatcctaacataaacctaggtggttgcctataaatagatagtgatggctcacacttaaaagatgatgaaatttcttgccttcaaaaattttttcctgagcaatcctccttctattttcgaaccagccacttctcttcctccttcataattttcataccttgagtgatagagtgagtgcccaaacacatcaagtggtatctaaatcatagtgtgtaaggctgtgaagaatccaaaatcaagagaaggacattcaggctcagatcttgctgataatctgctacagacaggata

SEQ ID NO: 365175 - DNA, 570 bp, Cannabis indica
caatcacaaactcaatattttccttagacatattcaggctaattgaggagaaatcatgactatattgaatatctgatcaggtccttttcggcttaaggcatctgccacaacatttgcctttccaagatgatacaggatttcacagtcatagtccttgactagctctaaccatctctgttgtctcatgttcaaatccttctgagtgaaaaagtacttgagacttttgtggtcagtataaatctcacaccttttaccatataagtagtgtcgccaaattttcacggcaaacaccactgctccaagttccaggtcgtgagttgggtaacgctgctcataatctttcaactgtcgtgaagcataagctatgactttatctgctttcattaatacatagcctaaaccctgtcttaatgcatcacaatacaccacaaatttctcttgttccgatggcaaagctaaaacaggagctgtaatgagtcgttgtttcaacacttggaaatttttctcacacttatctgaccatatgaaccgttggtttttcctagttaactcggataacggcattgcaat

SEQ ID NO: 365176 - DNA, 485 bp, Cannabis indica
atgacattgtccccaatgtatacaataaaatgcagagagaagagactaacctgagaccctctcagaaagggttgggcggtggcgactgatcatatgggtagaaccgaggaggttgcgccaaataattcgggtcatcaatctcaatgttcattctgttgatgagagagttaagttgctgaacttgtccctcatcatggatactcctctgcaccatgtagttttgcatgtggttgttctgctgaattatataactcagctgtgcatgagtgtattgcatcgttggatcgataggcccaagcaattgtggggcctgctcctcttcttcttcaacactaggctctcgttgccgcctacgtccttgcggtgcatcaggtggaggttggccataaggatgtggctctttcagcctgttgacaaatgtgatgtccatcttgcaaagtggcaacaccgtgttgtcatactccaattggggaacttcatatgcc

SEQ ID NO: 365177 - DNA, 717 bp, Cannabis indica
tcgcgacgtgacaggtgcagtcacaagggaaactatattcgagagacaggtgaaaggttggcacgaggaggtgactttggttgtcccttcgaggtttcgaaaaatgacggctataatcatttatttttattgcatttatggtgccacatcacaaaactcttcagtttctgtataggcgtggccatctctggccgttggattcggcgactctaggcattccaactgccacgtatcgtgatcccaattaatgtgggatttgggtatttaaaccccctgattcgaactaaaaatccccattttccctcattttccttcaactcccttaacttctttgttccttcactctcagagaaaccactaagaaaaatttccataaattgcctagatttttgcctttctctgtgggttcttcttgattctgcattgctgtcaagggcgattcgtgggaacagatttagcaaagaaaaaggttagtttccgaatcttcactgtgcttcgttttctgtttgagtggggactgtattttctgggtttttagtgtgcatgagggttgtttaaggatgaatgtttatagatggtatgcatgaggctatgttttttaggtaaaaacctgggtaacttcatagaatatgacctgtaagttggcataaccgcatacgaaatactcgaataggcactgtttcacactttgaatactcgcgggtattcagatgaaca

SEQ ID NO: 365178 - DNA, 611 bp, Cannabis indica
acaatacttgttgtgactaaaagtaaattagtgacaatttgtgtttaaattctatgttttagttacaaataattttttatgtattttttgttgtgactaaaaagtcacatttagtcacaaaaaacttatgttgtgactaaaaagttgtcactaaaagtagcagttttttgtagtgttttgtgctttcaatacgattaatcacctttactattcgtttttattgctcttttctatctaaggaaagattgttttttcagctgaatttttcttgtatgaaaacttcttgtaagagaagaaattctcttatggaaagtttttaaaggaaactttgactattattgttttccttaataagttcgattctgtcttgattatatcagatcatacacactgtttatggcaggtatcaagacccaatacaagatcggactcgtttttggcaagtttccttttctggtctaatttactgcgacagaagctgtttctgatgctgcaaatcaagcttttcttaagaaagttttgtacagctgtagattcgactttgtggctgtctctagggtttctatgttctataaatagaacctagagagcagctattcgaatcaactctt

SEQ ID NO: 365179 - DNA, 614 bp, Cannabis indica
tggtgctttcattgagagaagaatcatagatcgctcttttcaatactcgacacgatggtacaaactcgtagaggcctgtccgacccaggaaagtcacagacgctggatccgacattacaggacccagggagttcaagggttccacccgctgtcaatcctggacagacgggaagcgtggtgaatggtaggacaactcttgttactgaaacagttcctggggtgcaagagaccggaaacaacggtcccgcacacagccagggcgttcataacacgactgttccaccaggcatcaacgcccaaccaaccatcggagacgcaaccgaattgcaaaacctccgcgctgcgctcggactcatgcagggtcacaacaataccctgcatcacgatcaggaggaattacgtgccgcagtaaacctcgcgtttgacgaacagaggcgtatgttcgccaagtggagggacaaagagatggaggcattaagggctcaccatgtagaaatcgaagatcgtagtcggcaagccactgtgctgatacgaagagcctatcagacagtaggccagcaaacgccgagcgtcattcccctgggggaagcagaggatgactcgacggtgaatgc

SEQ ID NO: 365180 - DNA, 868 bp, Cannabis indica
accgagtctaatctggttatgccttcgcattacccattcatgatatacgtaatccttatattacgttctttcggtggtttatcatagtgatatatatcaggtctaacccaattatgtcttatacacataactcttaacataaatgcgtgcactcaatatatactataacatataaaatcttagggtaataaccttaacttgcatactaaataatcattcctacaacatattacaacatgctcaaaataacacctattgagagtaataaccctaactcatgtcttcacttgattaacaattttaccatacatcatcattttcttactttcataatattctagagtaataactctagaccgcatttaattatgcttaaggtactagtttaccgagtctagcttaattatgccttaggcgcataattctttattccaacatattaagcatggcataacactcaaaatcttttaattactagggtaataaccctagaccatataaccgctcattttagagtaataaccctaatcctggttctcaattaatcacaatcattatataaaacatgagcgccatcgcgcttaactctacgtgcaaactactgtcttaactgatgtactgcaaacgtggagattccaaatctccagttgctcctaaccaagtgccggtaatcctagtcacaatttttgggatttataagtatagggttaatccttaaatctacttccacataatatgaaattttcattcaaaatacatattaacatatagagcttagaatgcactttccaacgatataaagaacatcccgaacggagtctcgagtcaaaagttatgaacaaaacaagttcaacatgcaatctgtcca

SEQ ID NO: 365181 - DNA, 1024 bp, Cannabis indica
ccaaggtgtaagtatacttatcgatgattatcacatcagtgtaaatccagtgcactgatgaatcagggacattatattttgaagcatataatcacaattacattctactgtgttgacatcactgtaattgtgaataactatatgttttggacttaacagattttgtacacattaaaccataaacatgaaaactacatgtaaacataaatgacttctaatcttttattgataacaaatcagattagattgaaataggttttatttagggcataaaatcccaacactaacatcccttgctagccaaaagaggcctataggctggccagggcgagcatataggtcggccaggatctgggcacaagctggccggccaaagcatgatttctggaccaaagaagcttccgttcgaccaaggaaacttgacctctacaaggaaacggtatacaaaattttcctccacttgcaaaatgctagcctccacatccaaaggctagcatcctcttggtaaagctatagtgacctggaggatcctggcagacacatgacctgctaggtacaagcaggtgttggaatatattttactaggatcttagatctactcacaagtatgttatttaacatcctaaatatgaactttctaaaacgataataaacacatataaagttaaggaaaccttacattggttacagcggaataatatgtctccttccactcaaatctctaacccttgtatcctttcagtcgcagagtattatcaagatctgagttcgaatgtccttctctttaatttggattctacacgatcttccagactatgattgaggtacagcttgctgtgtgtgggcactactctatcactagggtatttcgaaattggaagaggaaaagagaaagagagaggtcggctacagagagaaagtgagtggctcaattttctgaaaggcagtttcctgaattactaaataactcttattttggtgtgagccatcactttctatttataggcaactactaggtttaggt

SEQ ID NO: 365182 - DNA, 975 bp, Cannabis indica
tgttgaaccacagtgcaggtgacaaggttgtgcaaggtggattcttcttcggtctgacacaacgggcagagaacacagctgactaccttcttgattcgaagctgaacaagagttggaagacactccgtacacgcacgccatagcaaattcgctatcttaggagggactttcaaactccacaatttattccagaaagaagcggtttgatcatcataccagtagcctttttctttttgcaaaaaactatatgcgctcttcaccgaataaatcccagaggtctccaaagtccagtacaatctgtccaaagccgtgggagcttgaagaggaatgctctttatcaactgctggtctcgggtttcaaagagatcttctataatttcattgtcccaacccccattgtccatggacataagacttgcaacagtggcactagcaagggtcgggtgagatgaagtaaccaatgggttatttgcgtctggtaaccaaggctcacccaagacagatatagactgtccattacccacacaccaccttatacctttacgaaccaattcttgagcctccaaaatgcttcgccacacaaagcttgggttggagccgagctgggcagtgagaaaagaaccatcattataatatctagctttgaacactcttgaagctagagagtccggtctagacactaatctccatccttgtttccctagcatcgccaaattaaagtcccgcaaatcgcgaaagccaaggccgcccctttcttgttcttgcttagtttgtcccaggccatccaatggatgcctttttgagagttcttagaggtttgccactagaatttggtcatcattctctcaatttctctgctaatctccaaaggaagtaggaaaacactcatagcgtaagtcggtaaggattgcaaaactgttttaacaaggatttctttttccgctctagaaaaaaacttgccttcccaaccttgta

SEQ ID NO: 365183 - DNA, 653 bp, Cannabis indica
gataaattcacaatcagaaaggagaaatagcaattatcattaactaaagataatttcaatcaacattcatcatctccccaaataggaatttagttcataaaatccataataacacccataatcaaaactaaaacagaaattaacatagaaattaagagtttaagaaagaactagttggtaattgcattctccaccattgcttcttctgcctccttctttcacttttgggtccaatttctgcctcccttcctaaaacacgagccccttaaatagaaattagggttgctacctctgaaaaagttaaaaactagccaaaaatcccgtgtttcgcccctagtcgcgactacatacagtctagttgcgaccataggcaaaatacgaaaaaaaattcgctgtctggcctcctagtcgcgaccatggaaagtggtggtcgcgactactgaagcaaaatttgacagcttcagcatctttcagtaaaatgtgcaactttcacatacgaactctgaatgaattgattcaagatgcattggaaagaagaaaaagaaatctaaaactttaatgttttgaatttttccaaaatatgatcagaacatagtcaaattaaggcttgaagtttcagctttattttcttgcagaattttctctattctata

SEQ ID NO: 365184 - DNA, 1015 bp, Cannabis indica
tggaaaacattaagcaattcagttttttttttttgaaaaattgaaaaaaaatcaagggtggtgacaccccatgcgcgcgcggacaccacgtgacacacgggtgtcacgcgtgttcggacaatccctgtctgaaggaacacgcacatgagcgtgtttgaaccctagtgcaggcacggaaattctacattccaggatgcctgtgcggcaaacctcggtcaggcagcccatcacgcgccgcggatggtatgcactgtataccatccgcacccaatgtacttttttcgttttttcgttttttcatgattttcatggaattaatttctaattttttgtgtaattttgtatcaaaatttttattttttaaatctcaaatctaattatcagaataaaattaattaattttattttaattaattttagatattagtagttttttaacctaaaaatagataaaatctaatattttgcttaattggtaaccttattttttaaattttgattattttatcttatttttaaatttgaggttaggtattttatattttacattatttaattaattttataaaatgaccttattaaaaatttaaaataagattattttaatctaaaaatttttaaaaatctaactagatattttgtcaactttccaatttttttttattttatttaaattcaattataaaattagataaatgatatttatttatcattttattttattagatatttaatttattttttttaaaataacataaagtttgaaaagtttgttggcatttttttttgaatagatatttaggtttgttaaaaacttaatttttcaaattttataggtttaattttaaaattaattatttaatttcatttaataattttcgaaattatttatttatttattttattttcaaaaattaattcaattatataattaatttaaattatataaatcctatatccatctattcagtttattacatgtgtgtatgttttatatattgtttattatcaaaac

SEQ ID NO: 365185 - DNA, 550 bp, Cannabis indica
ctaaggaatagttttaactattccagaaaaagataagggccaaagaatgaattccttaggtctcagatatgctttgctatgcattagaccagacaccttcttttgagtgggagtaatgagttggtatcaaattaatccaagaaaggaacattggaagacaatcaagtaaatcttaagattaagaagagaaactatatgttagtcgataagggtggaattttaatactcttagactatgccaaattaggattctagacttgcgttagtgctggaaagtctactggtgagatggtgattactctggggtggagtagtgattttggaaaactgtaaaaactgatctggaatctctaactctaccagtgagacagaatgttaaagttgtaggaaagatacttattcagtctatggaaagttctatacagtttttggcatagtaccaataatttattaactactagttttacttcctgactaacatagaagtagttgccaaaagtaaagaatccagtatccctagagaagttgacatatagagagaaatttaaca

SEQ ID NO: 365186 - DNA, 511 bp, Cannabis indica
atctatatgtgatatactatttgaattaagacaacaaaattttgaattgtcatttattattatcattgtatgtcataaatcattatttttttagcaataattgtgcaaagatgttcacaatatcatgatgaatttatttaattaaggcatgtgggtaatccactataaatatttatgcaaacattgattagaaatgcgcacctgaaaaattagaatacaatccatcaaaaataacaaatttaaagattctaagccattaaaaaatgaagaattcttttaaaagcttataaaatgcaacttttaaacaaaatatttgtgacagtaattccgtaatctgtaagggggaatatcggataagctgtgtaatctcacaccgcttgaagaatattgtgatgattccgaaactatgtggatatgggactacatagttgaagatggcttaaataaattgattggtactacttatattaacgaggtgcattttgttttttggtagcccatcatgaaagaa

SEQ ID NO: 365187 - DNA, 503 bp, Cannabis indica
atgggacccgatggggtccgatggttggcccatttttcagtccaacatggttttgggactttattttttgacggggtccgatatggggccgatggtggtccaatttgggagcgatggtgtacaaatttattgtattatcaagaatttggataactttccagtgagattttcgttctaaattgtaattgtaatttttcaatgtatgtgataggttcatctgttaatgcgtttgttatgtataagtgtttgggagcttgagggtagacattgggtttttaaccgaggaaaaaatttgacatttgacattgatttgaacataagctactcaggtttggttgatcttttgtatgaagaactggatgttgacaaagtgcagtatgactcaaaattagaagtaaattacaagaacatgaaaggcttaatgtatcaccctgaagttattataaatgataagcgtgcaaggtactttttgtctacacttgcgaagaagccagatgaattta

SEQ ID NO: 365188 - DNA, 810 bp, Cannabis indica
tataatagctaaaaaaaaaaaaaaaaaatagctaagagcttaaaattaagctccaacaaatgctttaaactcttagctattataattcgtccctaactccaagaaatttttctctacatttagctcatgaatagtgaagaggtaaaacatattttatactttttctttctctttttcattaaattaattaattttttattattctttttactcattttcatattttttttaattaataaaatatatgtaaaaatataatatttaaatgatatagagaaaaatatagagaagctaatgtatagtgtaatgtaaatgtgtgaggtaaaataaagaaaatggagttttgatgaggtattttaaaaaatagagtagagaagttgttgagagtgctcttacaaaactatctttaatttaattatctgtatatataatatattaagaaaattaattgtaagatttcccatcacaacaaaacaagtaaagagaagaaagtttcttaaagagtaattgaaggtgaaacttttttatatttaatttttattatttttaattttttttgttgataaaattctcttagtttattttttaatataaatttgaggcgtcggttaaatatcactgtgaaataccaattgaataactattgtgtacacatgtatatacgtgaaaataaaacttcaaagtcaatacagtaataattcaattggtatttaatgataatatccagctgatatttaaaaatacaaaaaaaaaaatatatatataaaaaatttagtccacataaaaaataaaaaaaattaaaataatata

SEQ ID NO: 365189 - DNA, 529 bp, Cannabis indica
tatgtaagtatagaaaattaaatttttcttgggaaattatataatttttaaaaatgagctttaataatttttatttatttttctctcacattattttataattttaaatgtggaggttgactaagaaagtataataggagattgtaattagggctaatttggcatagctatgctgtaggaaaaagtagctgtagctgctgtggggaaaaacagatgtagcagaattgtagaaaaaaactgaactgagtatttggtaaattataaatttcaaagagctgttgttaagattctattataataatgataatattttaatctagttcattataattacaaatatatataaaaaaatatgttatataaaatttttattttctatatatttttagttattttttctataagttaaatttatatgtatttgataaaaataatttttaataattttaaattatatttttatcacttgtaaaagaaaaaattgtagtttataagaaacttaggttggtattatttgttaataataaaa

SEQ ID NO: 365190 - DNA, 719 bp, Cannabis indica
atataatattactaaaataaaaaaatcccaaaaaaaatttacaaaaacgaaataataccaatgtacattaataaaatgaataaaattcatatttataccttaatggacgttgagattcaacgttttctttgctaaaatcggtggtcaaagttataccactacctttttttttgataataggttcaatttgatatatagaggggaaaaaaccaagcttttttacagtgtaggtttaggtattgaaaatagaacattttaagacaaaatttgggtaaaatggtgaagaaatgagggagattgaggatattttcttggtggttggcgagggtttttttgtgggtttggggctgcgatggtggttgttcttcatgctgaagaagatggtaaaatgaggaagacaaagcatagggttctgatatataaccctatggcgtcagttatttggtattaaccgacgccataggtgccacgtgtcgactacaggctgcacctatggcgttggttaatactaaataaccgacgctatagggttaatcaaaaacccttaatttcaccctaacccccaaccaacaacatagatataattaaattctatacctacagtttttaccaaaaaatcgcctttaaatattaattctaaaccaggcgtgtattttcacattttttatcttccctttttataaaatgggttggaaaaactgcctctaaagctcataatt

SEQ ID NO: 365191 - DNA, 760 bp, Cannabis indica
aacaacaaaaaataacatatatataacaaaaaattaataacaaattaacaagattacaatataaaaataccgcattttttgtaaataaaatcaaaaaaatcgtaaaaatgtttaaaattcggtttggtttgagcggtttattcgagttcgacgacttgttaatgttttttgaacaaccctaatataatacatataaaaagaggtatgtttcaattaaaaaaaaaattaaatttaattaattgataaataaaaaatatatttttcaacttatccctaagcctatttccactaaaaaatagttaatattagccatgaagacaaaaggcaaatatccttttgacagaatatggttaatgtttaatatgagtggttttcaatcaatcaccttattataaaatcgagatatatgattccttttcatgtacttcttaattatgaaatgaaactaagagcgtatattgaacataactgttttattggtttcaattcatgacatgatttcatgagaaactgatgttaatatatattcgaataagggtgactattcaatggttatatttttattatacccatatgattatatttttctttaacctgtaatagcaggttagtaataggtaaactttcctttttttaaatttaattaattataattaactattttcttaaaataattaattaaatagacattccttttttagatttatttaattataattaactattttcttaaattaattaattaaatatttaacaagac

SEQ ID NO: 365192 - DNA, 626 bp, Cannabis indica
tgtctgaaggcgagggacgcacgcgacttcaaacaggggactgtccctgtcacacgcgtggatgcccaccttgtccgagtgcctggtgcatgcgatgcaacccactcgacacccattcaacccaaaacttcaaaaattcataacttttttaatttttatcagaatcgagttccttagaaacaaaaatacttaatttttcacaagaaatccaaataaattattttcagaacgaaaataaaattattttcatggaaatattttgtaaatcacatacatttatcaaataacacataaatcaacatgaacacatccaaatcaatacaataaatatattcatcattttaaatccatattttatgaaagtaaatcattaccatggctctaaggccagttgttgggaatattttaccaggatctagatttactaacaagtatgttaattaacatcctaaatatgaatatctttaaaataatgaaattaaacacataagagtttaagaaaaccttacattgtttgcagcagaatataatgactccttctgctcagttctctaacccttgttcctttctatcacagagtattatcaagatctgagcatggatctctttctctccttcgggtttgg

SEQ ID NO: 365193 - DNA, 548 bp, Cannabis indica
aataagtaatttataattaaccacaattttttatttttttatttttagtcacaaattttattgtgactaaaaataaaaatatttatagtatattttgactaacaaaattaggtatatgttgactaacaaaattaggtatttatgtagtagtgaattcttcaacaatttccaagagtttttagaacgtttataggaaataattttagcaatgcttcctatagtataatgagattaaagagttgaaaggagcaagatactctttaaaggtatgtaatctaaggaaaaatactaaaaagtactattagtatatctaatacttttttcagtgtaatattactattagtgtaattaagtatcaagttctattattttatatagcttaagaaaatagtttttaaagaatatcgcaaatcaattgtaaggtgtcacttatagaaggtattcactacaaaaaattgctacttttagtgacaattttttagtcacaatattaatttttttatgactatatgtgacttttagtcacaacaaaatgttacttgtgacta

SEQ ID NO: 365194 - DNA, 558 bp, Cannabis indica
tgtgttgactgtcgagccatcaacaacataacggtaaaatatcgacatcccattcctcgtttagatgatatgttagatgagttgcatggttcttgtgtgttttctaagattgatcttaagagtgggtatcatcaaatacgtatgaaagaaggagatgagtggaaaactgcatttaaaactaaacatggattgtatgaatggttagtcatgccttttggactaactaatgcacctagcactttcatgcgattaatgaatcatgttttgcgtgctttcattggaaaatatgttgttgtgtattttgatgatattctaatttatagtaagagtttgcatgatcatgcttcacatttgcaatcaattttggatgtgcttcgaaaacataaactatatgctaaccttagtaaatgcactttttgcaccgataagattgttttcctaggatttgttgtgagtgctacaggtattgaggttgacgaagaaaagataaaatccatcaaagaattgccaaccccctcaactataggtcatgttcgaagttttcatggccttgctagt

SEQ ID NO: 365195 - DNA, 736 bp, Cannabis indica
gatctttcaaaggagctgactgctgaaagcccctctacccccaagtctaccaagtccaaggagtctagaccaccaacagttgggtctgaactagtcaggagtactcctgagcgggtgcaggcaccaactccacctttgcccgtgcttcaagaggccaaaaagggcaaggagatgctggcccactatatgaaccggctggttcccgaggtcagtgagcaactggctggtgctgatagtgactcatctctagatgtgttggtgggcggagtcctgaaggagttcaccagggtaagtcttttttgatacttccctttaactttcaacacttagcttcatctacagaattttttcctttgtgcaggccggtctgaagttagcctacacttactcccgggctaagtttgttgcttctaggagcgcggctctgtccgacaccttaaaggcggaggcagacttggccaaaaaggaagctgtggaggccagggcagaaactggagctgttcagttagagttgggcgaggccaacaagaagctgttcgttgccgagaataagatctctgtgatgaaaaaggatctcgaagctgctgatcgctttgaggagaccatcgagatcttatctgctgaactaaacagtcttcaggatgagaggacttctctacaagcagttcttcttcggatgaaggaggagaaggacgccaaggtgggggagtttacggccgaggtggacaggttgaag

SEQ ID NO: 365196 - DNA, 516 bp, Cannabis indica
attgaaaaagcactgtagcgtgccttagtattagggcgttacagtaaaatatttatcctagtgtattttcgttgttttctaaatttaatggtaaaatttgttcatattaaatcacgaagagacatacagatagagttacgtatgtggaaataatgttctcatttttagtgtttcataatgttaacggtcagaactcgttaacgatatagataactttttcaactaacaatattgacaaactttaatggagcttttactttgatgccaagaattaagaacttcagaatctctaaagtgtttgaaagtaaaatctcataaactctctttcaatgatagaagttttttccctctcgccaaaaaaaaaaaacatcccctacaatggatgggaagcccctttgccttacacattcagctttccccatgcaccctatgactagttacttatacctatcattacattgttccctaagcaacctgccatgtctagaatcctaattacactaaaaaagctccttt

SEQ ID NO: 365197 - DNA, 888 bp, Cannabis indica
agcagcaatgttggacctgtggaagaattagaagagatcgaggtcgatccagatgtcccggccaaaaagctgaaaatcggaaaagggtttgtcgctcgaagaaaattcagaattgataaaattctgagagcaaacctagacgtttttcgcctggtcacatgcgaatatggtcggaatcgatccttctattatttcgcacgtcctgaatatcgatcctaatatccggccagttcagcaaaaatgaagattgttggataaagaacgagcagtagccctgaaagacgaagttgaaaagctgtgcaacaacaacttcatcattaaagctttctacccggcttgggtcgtgaatctcgtactcgtgcctaaatcgaacaagaaatggcgagtctgtatcgactttacagacctcagcaaagcgtgccccaaagactgtttcccacttccaagaatcgatcagctcgtcgatgcaacagtcgggcgcgaaattcacggatgcttattcgggctacaatcaaatcaagatgcatccgccagaccaagaacatacaagttttcggacagatatgggtctctacttctacaaagtcatgccatttggtcttaaaatgccggagctacataccaaagactggtcaaaaaaatgtttaaagatcagatcggcagaaatatggaagtgtacgtggatgatatgctcgtcaaatccagaaaggttggggggcacatagacgacctggacgaatgtttcaaagtccttagaaaatacaacatgaaactgaatcccctaaaatgctccttcagagtcagctcgggaaagtttctaggcttcatcgtcaatgctcgaggaattgaagccaatccggaaaaaatccaagccctcctggatatgaa

SEQ ID NO: 365198 - DNA, 531 bp, Cannabis indica
atataataaagtaatataaagacacgaaaattttatagaggttcagtcccgaggagttcggtaatagcctaatcctcgttacttgtattgaattaagaataaggagaaagattccttttcttatagctcttacaccagtatctctgaatatataattattagataatatctttagggtatattctcaacttatctatttctgaccctttgcccagtgaacatgcatcactatttataggactaataagcttggagaggaagagtttcccctctcgttacaatgtgtataaacaaaaagatcgtgggatcaatgctgagtacaaagatcgtgggattgatgctgaatatactgatagtgggatcctatgtatgccatatccatgtagtctgctccctaagttatagggattacattcatgactcacgatgcgaaagcttaattcgctaagtgttggttgctctgtgcggattgatgacaacttctctcttggtaagctagcgagacatcctgctcggactatgcttcccaag

SEQ ID NO: 365199 - DNA, 529 bp, Cannabis indica
atttatttgatgacccaacacacattttatgtatacaattgtgaccctaataaatttctaacatacaaaacattaacttgtctttgagacactatatatatacacttagaggggtaagagctatataaagaataccaatagtttttattttttagtagaagaatataaatagttttaacaattaataataaaatattaatataacataaataataaatattaaatagtatgtcttttagattttcttattgaattgaattgaagataaagttaaattagttttaaattttttttagaaaaactacaaattagagaaagtaggaaattagaaggagatgaaaccacatcaactttttttagtagaagaatacaagtagttttaacaattaataataagatattaatataacataaataataaatactaaagagtatgtcttttgaatttttttaattgaatttgaattaaagatgaaattaaattagtaaaaataatttaaaaaattagaaaaactataaattagagaaa

SEQ ID NO: 365200 - DNA, 998 bp, Cannabis indica
gtatatgtgttttttgtatggtatataatttttgcagtctatagtatatcatttatttaagatgatatttaatttttattttattatatataaattttttggtatgtatacatattttaatagtagtatatatataattttgttagcatgatatatattttctgagtattaatttagtattgttataatttctttgaggtatataattttattactacgatatattaatttttagtgatacgagatatatcaaatactgttgtatatatttaatgatctaatatttttattcgtttttgttacaatataataatatgtgttgaccgagattttcggcaaccaattaaataatatatgaaaagaactgtaaaaagtttaatgcaggagatttttacgtggttggggcattaatgagccttagtccacgagtcttttgtatttatgacactgtttgttacagagagtgttcttggtagaattctctcctattttctctcttaaattccttgaatcaaattgatcgaccccctttcagtctgtttgtggggtatttatagtgtttttctggggggaatccctagaaatacatcgcttgtctttatgtgttagcttcataggggcacatattcctagcagacacaaaatagaaaatacatgacctataccgtaggtatcttatgagttaggtggatataatcttttatcccctcttgattgatgtgattcctcataatgtaaccgccactagactcattgattatagtgtaatcgtcgtaaaaggggagttacgccatctgtcatatcatttatagaggatttaatacgtcttcccccatgcgacattaaatgcgaagtgactgtacgagcaatctctttacctccgagacctgccttagcatgactctagcctccaagagcataaagatgggccttatgctctcttccgggaggaaccttccctgaagtgttcttttttcccgaagacttagttgattttc

SEQ ID NO: 365201 - DNA, 560 bp, Cannabis indica
acagttttactgagacatgtttcattttaaaaaaaaataagaaaaggagacctacgaatattctcctattgtgatcaataaatgagtaaatgtaaagtttcttacctcaaatactttaagctacttggatcaatagacacgagatgatggtgatcaaagatcagagtgaagagttctatacatttggctaaggatgtaatggaaagatgacttgaaaacttttagggttagtcttgcttagatgaatgggtaaaatagaacaatataattttagggtagaatgaaatatatactatcctcgtaattgtagggcttagttttgacctagaaaaattacgaattatgatgtagctatttctataaaatttatagatctttgaattatcttttcaacgccactggaatcacctcaatcggagttataaaactccagatatggtcattttagtaatacagtttctaaacctgggaatttctctcaacttacaaattttctaacattaattggataataatgttatttaataacacttatacaattaattaaatctaataaatat

SEQ ID NO: 365202 - DNA, 677 bp, Cannabis indica
aggcaataagtgagcttttctattagtggatattgtccttctgttttaacgagtcttttgctgatgtaatagaccggatgttgcatattgttctcttctctgatcattacggcacttacaacatgttctatgatagccagatatattcctaactcttctttgtctagaggttttaaaagtatagggggttttgtaagttgcctttctaactcttgaaaggcactcttgcattcctccatccattcaaattttttgtttcctcgcaagatgttgaagaatggaacacacttgtctgttgactttgaaaaaaatctactgtgtgcggcaatccgaccagttaaactttggacttctttgccttttgtaggcgatttcatatccaggagggcttgaattttttctggattagcctcaatacctcaggtgttaacaataaagccaacaaacttactcgagctgactccaaagtagcattttaagggattgagtttcatgttgtatttcttgaggactttgaagcattcgtccaggtcatctatatgccccctagcctttttggatttgacgagcatgtcatccacatatacttccatatttcgtctgatctggtctttgaacattttgtttactaatctttggtatgtagctccagcgttcttgagaccaaatggcataac

SEQ ID NO: 365203 - DNA, 897 bp, Cannabis indica
cttcaaaaagttattttttgattattacatttttatcacagctttttcaaaaagtagcttttagcttttttaaaaactgtgccaaactggcctagtcacacacaacaaattattctgcatcaaaattaacttcaaagcgagtcatttgtgaaggcaagcttaatcttcaattgttacgtttataatggagctgacactacaaaaaatcttacttttagccacaaccaaacttgtgactaaaattaaaaaaattgtgactaattataaattatcatttctatgttgtgactaaaaagtccatggctaaaggtattattcacaaaaattataatttgttctgactaaatgtatttttagtcacaatacttgttgtgacgaaaactaaattagtaactaaagactatattttagtggaagtgacattttgttgtgactaaaataacaattttttttttttgtagtgtgggacgatattattgaggaaaatgacaaaatttcaatttaaggtttgcaaccaccttccaacttaaaagagttgacttgagggtatggtttttcaagggtgtgacatttggaggttaggagttaagcaattgcaaagaatagagttggtcaagaatcttatgaagaagctcgttaagaagaagctaagctttttgggacacattctttgctttctaagatagataaatcgattgtgggaattcctgttttgtctcaaaaactcatgcaaattaaagctagaagtatatctcgaaacttacctgaaatagtgaaaaaaaatcaatgataattaagctgagtcataacattgttgagtttaaggctcttcctaggactttgacttctgtgggtgaagccatgagtgcttttatatgaagatcattggtggagtca

SEQ ID NO: 365204 - DNA, 454 bp, Cannabis indica
atactttgtcaagaagaagaattacgtcgattgaggcaaccaacaacagcacctcctgtagagcaagtgttaccaccagctcctgtgccagtggtgggtaaccatggattcatactgctgcatagagattctatatttaagcgctttgtaaagctacagcctccaacgtttcttggaggtactgaaataattaaagttgaacaatagatgagtactatcacccacatccttgataatatgggggcgacaggaatatagagagtgaattgtgctacctttatgtcataatgacttggaatgagtttaagagtctgtttaaggaaaagttctataacatcattgtgagaacgtcacatatggaagactttatgaaattgactcagggaaagatgactgtggccgagtacactttggagttcgatcggctatctaaatttgttggtgatctggtgcc

SEQ ID NO: 365205 - DNA, 633 bp, Cannabis indica
atatatatgtatacattaagaacatagagtattagtgaaactaaaggtttttttttttagatttttttgtctactattttatttattttttttttttaaaaaaaaacattttaaaatatcaatcgcaactatatatttacctttttttttgagaaatatattattaatattaaaaattaaaaatgtatattttttggattttttttaataaaatcctaatttttgaaatttttttttaaaattaaaactcataaatatcacatgttcattattaaaaaaatatgtttataagaaaataactaacttacaaaaaatatccataaactaaaaatatatgctataaaattataatttaaatctttttactaaaaaaaaactaaaaattataaaaaaaatataattattacttaaaacaaactaattaaacaacttatcgtgcaaaaactataatttaaaaatgttaacattattcaacaaaaaaaaactattacaaataaattgatgaagtaaaaaaaaaattaaaaaaaaaaaaaaaaaaaaagcttttcgataatatttgtaacgtccccgcttcaagcctccattgggtccttacacccacggaataaatggctcttatacacgagtacgtca

SEQ ID NO: 365206 - DNA, 386 bp, Cannabis indica
gaaaaacctaaggatggtgtcggtagtcggagttatgcataatgtgaaaattccgatttgtagggttgagaagtggttcatgtctttcaacaacacttttttcagtcttttgttttcttttaacaacttatgttttgcttcaagaaggggaaaaaaaaaaacccttatgttttcccaacattacttttctgcaagacgttttgttttctaattctattgtttgggattccaacttttgcattaaaggcaattttattttggtaaaattatctcttttcacctattacacttttaactcttaattcaaccattcaaaatttggagtgaaatttttatagggccaaaaaattaggacttttttcataaatgtacaacaaaaataaaat

SEQ ID NO: 365207 - DNA, 936 bp, Cannabis indica
ataggagcacccggattacatcgacacatggatggatgtccatctcaaaaaggataagcaatttgttaatgaatttgcaagacaagattatgtaagtctttgtcacttgatctttatattttcccaatattagtttcatattgttctaatttttttgatttcatataggagtggttgcaagcagttcgagcagctcgagaagctcgttctcagatagattctgattctgggtcatcaactgatcatgtcagcatcttcgaagaggcgttgggtcagaggcggggtcacgttcgtggaattggtcgcagagtgaagggtaaatcttcaagtagccgtgcccaatccacccaatcacaggcaccttcacaagatttggtaaatgacatgagtgtgatgtttaatctcttttcatctcaaatggacccatcaaatatggaccctgcaaagctagcaatgtttaatatgcttaagagtaagtattccactccagcgcctcaaccgtctcagacacacatggatcaaggttcccctgcacattctcaacattcagcggcatcatctgacatgcataaatcttcgacatcacagcctcagcatccactacaaccactctcgcagccttttccacaaccatcacaccctccaccaccttacccttacatgtatggaccaccgtatccatacatgtatggaggaatttcgcagcagcatccttctgctttctttccaggttcgactgataaggctggatcatcacaacaacctttgtcatcacagcaggctcagctagtttacccatatcaatggatgatgggggcaccgacatctcagccgctacaaccaccacatacatcacagccggtacaaccacctcagacatcacaaccgctacaacaacctcagacatcacactgccagccatcgagtcatccagag

SEQ ID NO: 365208 - DNA, 500 bp, Cannabis indica
atcatccaccttctgatttataacaaccatcataaattttgaaaaaccattaccttctcagcaattccctcaactccacctacattaccaccatcagaacccaaaacttcatcctctaccattgcaacagtctcagtttgtcctaataacgaattcattatgtcaaaatttggcatatcctaacaacaaaagcaaatcaaagcaaaaagcaaattagttactaacttaagagaaccaaaatacaataattacacaaaactgtcctgtagaaaaattaataaattaaattaaccttttccaaagaaaataaaccatcaaaatcttgactatcaacttctttcacagaaatctcagatatgtttttaataacctgcaaaatataatcagaaaagaaacaatcaagtagcaaatattataacagattatatcaaataataataaaaagaaacccgaccttataaacatcaccgtcactatcaacacaatcttcgccatccttc

SEQ ID NO: 365209 - DNA, 647 bp, Cannabis indica
gcatttggggcagcccccaattctgtcgaaacccatatccggcgaagtctaatccatttacctggcggtgttagagtatgcgattagctcggtgctaatttgcgaagaccaaggtcgacaatacccagtgtactatgtcagtaaacgtttgttggatgctgagactagctatcctcaaatgaaaaaactagcatttgccctggtaatatcgtcaagaaaactgcgaccttattttcaggcccatagcattgaagttttaacaaactaccctttgaggcaagtcttagcaaagccagaggcatcagaaagattgttgaaatggtcagtagagctaagccagttcgacatcaggtacaaactgagatctgcgatcaaggggcaggccttggcagatttcattcttgagttcccaagtactgaagtggcactcgtagaagaaaaaattgacactgctgtactgaatggagaaggatggacgttgtacgtcgatggggcttctaatagtgaaggttccggtggtggaatcatacttatcagtcctaacaattttaaggtacacgctgctttacgttttgagttttctgcatctaacaatgaagccgagtatgaggctttgatcgcaggattaaagctcgccctcgaaatga

SEQ ID NO: 365210 - DNA, 639 bp, Cannabis indica
aaaaatcgtagcaacaatttcctcaacagtaattaactaaacaataaaactaataatccagccaaaaggaaacccactcaaaaatccaagcattttgcaacatcaaccttaaaaccacccacacacccaatatcacagaatgcacaaataacacatatctagaacataaatcaaactccagaaactggtttttgacatgtttcaaaattaggtatctgaggatcccaaacaacacctgcatcatttctaacccatttttaaaactgtaatcatgatctagaaactggttttccatatgagatttattttgaaacctcaaacctcaaaaccacccatacacatcaaaaaccagtttctataaattaaacaaagattataactgctcaaacacaacaacaatttcttcatgcaaaataaaatccctacaagtttataactaatacaatattttcaacagaaactacatagcttttcagattacacaataaactcacaatttattacaacacattgactctaaaacccgaaattactaaaatcatcataaaaatcatacccaaaaaccagtttttaaaaaatgaaagaaaatttatcactaaaaccaacaaaaatcatacccaaaaaccaacaatttttttt

SEQ ID NO: 365211 - DNA, 683 bp, Cannabis indica
tatgttgctaccaagttttagggttcttttccaagttgagaaatctaattttttatcccaatttattattgtcggatgatagtgaagcatgtggggattttcaagttcttgaactgcatgtatgtgttaattgggttgttcttgatgttatgaacttgtggtgtcttaaactcttgatctttgctttgggtaagctttgggtgtgattaattcagttatattttgggtttatattatgatttatagctatgaatttattttgcttgaagcttgagattttgacttggatgagcaagtctttattgttggagttttatggatttaagctcttggtttggagcttagtttagatgttattaaatttgaactttgagaggtatatagtttgattttgatacttgttttatgtattttaatgccctattttagaacttgctagttagtggtgtatgacttggaattatgtgaaaatttgttttgaattggtttaattttggggctgaaatttgttgctggtttttggtattgttggagagtgaactaggtgtaattcctctctaattacttggtttatgctaggtgaaagtttggtttgattgtaggttgatatagcatgaaatttggtatttttggatgcattttcgtggctggaaactgggcttttaaacccagtagtcgcgacc

SEQ ID NO: 365212 - DNA, 875 bp, Cannabis indica
gaagaaacctcaatcaaattctcaacacaaatcaaactaaatggccgtcctaaaactacctaaatcggatggcccgaaactccttatccgagtttggaaatcccataactcatctaatctggatccaaacattaccaaattttttagagcacctaaaaacatcataatgaatatatttcatgaagaaaccttaacccagttcgcaacaaaattcaagttatcgcaaccaagttaagtttgagttctttgaactcaaagttgcataacttttgctacaacaacccaaaacaattcgaaccacttctaaacagtcctaaataaccttaataatcatttcataaccttcctaaacttattcaacatgttatattataaacagccactgaaaactaacaaaaaccctagaaaaccaataaatttcaggttaggttttaccttagaagtttggaggagctaggggttgaactccttgatgaattccaactaggaagaggcttgaaaatggtggaaaaatctgagttttggccctggttcagaagccacgaagtagagggagaaggagaaggtgatttggtgtttttttgacttttcttttgctcttgacttttcttttcttttttgttccttttaattttgcttttctttttttgtttgcttcctaagcagctggtcatcctcaaaaggatgagccacagccacctatcccttccaaaatagtgactaagctctaagggcgaaaagactaaaatgcccttatttccccgcaaagttatctcgtagccctaggggtaaaatggtctaattctgttatttcattaaaccttgatattctaagatatccaataatagtgccccataaaatacttgatacaaat

SEQ ID NO: 365213 - DNA, 621 bp, Cannabis indica
ggtgctctactgtgcaggaaagggtaagactattgttgatcatccatgagtgcaggagctgggcgaagaatgtacatgtccgggccatatcagactaagcgggttgagggtctactagtgttgtgcttttgagactctgttttgccgcttaggcaggctgaaagaaaaggacttgtaatattattttgtaaatgtttttgggatcccaactgctgtaacttttagtttataaagtttaaagtattacaagttcatttttattcctattgttataaaagtttaaattctgcgctaattctatttgtaatcccgtttaggggattagggttttataagtatcttgggtggcgtgcctaattatttagggcattacaattaagcttggacacatgggacaagatctaatcctgtgttaaaaaaagcataaccgtcactacgcgatctaagtttcgccaaacatagacgtccgcgacactcctaggcggtccacatccgcaataggcttttcgagtacccatccgggtattagctggttaggcttccatatttggaccactccaggtcggggagagacaatatgtcttctgcgtccgtgaacctaggataaggtagagtggactt

SEQ ID NO: 365214 - DNA, 644 bp, Cannabis indica
taaaaaagtgtattgataatatttgtatttcttatgcagatttgcatgcttccttacttcctagtcccactccagttttaaaggaagcttggttcccttctcttccggattggattaagctgaattgtgatgtcaaggtgggatttgatagtatgtgcattgctgttgttgtaaggaatcattttggcagagtgattagagttcagacggctcgggaagatttctcggatgttctctgtggagaagctgcggcctgctgcttggctgtgtcagtagccttagatatcagctccaagtttgttattgtggagaatgactcgatggtggttatcaatgctatcaatgggaaggactctcgttgggcccttgaaaactatatttcattttgtactaagtcttctccctcctttattagttgtaatttctcttatataagtagaacatgtaattttgccgctcataatgtggctagatgggcgtttgctcatcaggtgtttgggtctatcccaatttcttccttaccagacaggggcggacgtacatgtatatgtactgtggccttggccacccccaaactttcataattgttaattattacccttttatttatgtatagatttttttttctattatgtaaaacaata

SEQ ID NO: 365215 - DNA, 711 bp, Cannabis indica
aacaatagagaatttgccacccccggtttctgtgaaaggagtaaggagtttcttgggtcatgctggtttctatcgacgattcattaaggacttctcaaagatctctaaaccattgtccagtttacttgttaatggtgtacctttcgagtttggagatgaatgtttaaaggcgttccaagttcttaaagagaaactgatttcagcaccaatagttacttcaccgaattgggagttgcccttcgaattgatgtgtgatgcaagtgactatgcaattggagcggtcttgggtcaaagggttgacagggtgtttcacacaatctactatgctagtagaaccctgaatgatgctcaactgaattatgccacaacggagaaagagatgttggcaattgtgtttgcatgtgataagttccgcccctatctaattgggaataaggttgtagtctacacagatcattctgcaattaaataccttatgaccaaaaaggatgcaaagccaagattgattcgatgggtacttctactccaagaattcgacatagagataaaggacaagaagggcactaaaaatctggtagcagatcatctgtcaaggctagagttggaagagagccagaatgcaaaagaggtacagataaatgagcaatttcctgatgaacaactctttagtgtgagggaaaatctaatggtaccgtggtatgctgattatgt

SEQ ID NO: 365216 - DNA, 627 bp, Cannabis indica
ttatcattgtaagatacatttgagagctgattttactattagagtttctcactctaatgattttaaaattattatttgaagtgtttgtaagtttgttatccagattttcaagggtgttcttaatttgtgctacttatagattagtgctacgtactcttttggtgaattaacaacttgtattagctaaatgatttttcatatttttttaggatgtttgatgaacatgggacatataatatttatttgatgaacataagatatataatatctatagctatgggatatataatatttatttgatgaacataagatatataatatctatagctagtcttgtattacgttattatattttcaataaatttgttcattgctttacaaaaaaaaaaaaaaactagatagataccaatattttttttttgtacaaagagatagataccaatatttaattgtaccattaggacgtatgttggaaatccatgatataattggatatgagtgtaaattgagagtaattgaaaggaatctaattacactgtccaattctcttgactccctacaaaattgagtataattactaaaaacttttaattttaaacattaactaataaaaaatattattttccc

SEQ ID NO: 365217 - DNA, 781 bp, Cannabis indica
agggaatctaaaggagggaaggtcatcttaggcaacaaccaaacatgccatattgaaggctcaggtaatgtgagctttaaaatgtatgatggtattgtaagaactcttacaggtgtaagatttgtgcctaacttagctagaaatttaatttctataagtatgctagatgaccttggtgttgtgagtaagattgagacaggtacaatgaaactaagcaaaggttcaatgaccataatgaaaggctacaaggaagaaggtttatactacctaaagggagaaccaatttcacattgtcacaacacaacagaaactcttgaagattctaaggcaatcttatggcatagaagacttgggcacatgagtgagaaaggtttgcaaattatgagtgaacaaaatcttttatgcaaggataaagtaagtaaagttgatttttgtgagcattgcacattgggtaagcatcataggcttaaatttaaaattgggacacataattctaaagaaattttagaatatatacatgctgatttatggggtccagaaaatacagctactcatggggggagtagttattttctatccattgtggatgactactctaggaaagtatgggtttttcttttgaaaaataaaaatgatgcctttgcaaaatttcaagaatggaaaatttcaatagaaaatttaactaacaaaagagttaagactcttaggaccgataacggtctagagttctgcagcgatttgtttaacatgtattgcaggaataatggcattcaaaggcata

SEQ ID NO: 365218 - DNA, 557 bp, Cannabis indica
aaatatacattttttttaataatttttaaaaataccatttatctatatagtaagggcccaaaaaaaaaaaaattggcctatagcccatttcaactcagaaccgaccctgcaatacagtataatacggcgtaccaaacgaatcctaatagtaagagtattgccaacaacatttaagtgtcgtcaataataaaaatgtatttttttttttttaattttcttttaaaataatgaatcaatggcaatccctaaaaagtttcaataaaaattaatttataattaatgttaataattaactaattgaaatatatctagtaactaaataatgatacaactaagttaatatagtatctagcaagtactttcaataatgctcttgatgctttttaaaaatcaaaatgaaaatcactcaattgatacatttaagtttaaacaaacacaactaaaaatatttacagaattagtaggcaatagttacataattaaatttcacaatatcattacagcaaatcattttaaatactaattactcctttagataaaaaaaaaaaaaaccaaaa

SEQ ID NO: 365219 - DNA, 621 bp, Cannabis indica
gaacataatgtattgttaaagggacccaaaaaccgaagtgctggcatccggagctccagtattaggaaccgggaccacaggcttgggcctgggggtcctccgctccggcagagcttccaggcgaagagtcctcccggtggccgcctgggccttgatgtaggccagctcctgttccctcctgaagaggtacttctgatacttttcctccgccatggcaatgatgtcttcccgaaacaccttttctgctgtcggagtccttgcgttcgggcagatgactttggagagattaaagccatccaccgactggttccccaaaatcaacttggccttccgacagttctatgtcgtgaccaactccccgacatcgagggccttcttgtcgtacgtggcaaaggtcttggcccgttgaagaaatatttgagtaggctcggtccgcatataaggagggatcctaacccactccgtgagaagctccgggcggtccatggcttggaaatcggaggaaaagaagaagcggtgacgatactcattcacgtgcttttgctggttgaaagggactgggccctcattcaaaggatgggcccaaaggccataaaaatcgtccttaagtttatctccctt

SEQ ID NO: 365220 - DNA, 576 bp, Cannabis indica
actaagcggtctttacaatttcattcacttctgtagggagaacacaccgaagtagaggcattgaataccctcttctatacagtttgccttcaattattgtgtagcgaggcactgagtacaatagtttttgagcctcgtttttgtcatttggaagttgcccgtcgagtaagtaattgataataggagtcatccatgtaggagagctgtgtatcatctcaacatcttccatttcacatatgcttgactcgcttagcatctccaccggaaccaacttcaattcatccaagtcactctgcgaggccagtttttctaaggcatcagcgttggagttctgttctctcgaaatttgttcgattttaaaataatcaaatcttttcaagcgcttccgaaccatctctaaatacttctccatttttaagcctttggcttggtattccctgaggacctggttcacaatcagctgcgaatcactatggtagatgaggtttttggctttcaatgcctctgctatctttaagccagtgatcaaggcttcatactcagcctcgttatttgaagcatcaaattgaaatctca

SEQ ID NO: 365221 - DNA, 952 bp, Cannabis indica
aagattagaaatcatttatgtttacatgtattattcatgtttaaggtttaatatacaaattctattaaatccagaacatatagttattcacaattacagtgatgtcaacacagtggaaggtaattgtgattatatgcttcaaaaatttatgtcccatgattcatcagtgtactggatttacactcatgtgatagtcagcgataaagtgtacctacaccttgtatacgtgttatgttctttctaggacattggcaaagtatgctagaatcggatgtatggagtatacattggattgggaccgatattgatcttagtaaagatattataattttacctttgtatcttttaagttaatatccatcgttgatcttagatcaaaagatcttaatcatgatatggttaggttcgatctcaagagttgttcgttaaagctcgtacaggtgaacacatacatcttgggaagatgatagtacaattgagtgggagagctgatcatagatacggaatctatagcttctatttggacatagaagtgaaatgatgatttcttcgagcttggcttaatagagataaatggaagagctcttatttcagtaattatataagtttactgaaatattatttataggaagctaagtggtttaaggataaaatacattgagaggtgaaacggtaaatttatccctacttaatgtaaatcatctatagaggatctttgattattgggattagaacgatggataatttcatagcatatctatatcgtgaaacatatagagcgctctatataattaagagtgcaattctaaatctatagtggtgcaagaaataattaataagttagggaatttacttagtaaattctagatctgcttattggaagcttggttatataggcacacatggtcccccacactagttgagacaatgctgcttgtaagactcagttaat

SEQ ID NO: 365222 - DNA, 444 bp, Cannabis indica
attttaaattaaaaatctcaaccccatttaaaaattaaaaaaaaatacattatctaattaaaaaaaattaaacatacatgtattgcatctaatatcacctaattaaaaaaaaaaaactaattatatgtgtattgcacggaacatcaatctaggtatcttttacaatacgtttcattaaaagtatatatataaatatatatgcacaaatatgaaataatgtgtgtttctttttagacagaacatttaaaacattactacactagaataaacattttattacttggcaaacaacatattatatgcattagaagttacatttttataaagaatgacagaatattcttcatccgagaattaattatttacatgtatttaatatacataaaaataacttcacaaaataattatattattttttattgtcttaatcactttatattaaaa

SEQ ID NO: 365223 - DNA, 767 bp, Cannabis indica
atttaaatttacatacaataaatttaaaagtatttttacaatacacctctccaaataaaagagtcacgcgtgcaatagacagtttgaactttatttttggtattttacaggatgtcttaaataatataagaaaatagactaaaaaaatctctcgaataccgaaacaggtaggaatacatcaatgcaagggtacattatttttggcatgttgattttataaattttttaaaatttcacaaaatgtcttaaataactatataatatacacgactataaaaaaattagactaaaaagtgtatcggacgtcgaaacaaagtacatcaatacattattttttaaaagatatattgtagaatttttcaaaattaaattcttaatttcataaatatatctaataatatataaatattaattaaaaaataaaaagacaaatgacgtgtctacagtgcacgacatatatgtggtgcactatactactatagtattaacctcaaaatggtgtgtcgttggagaagaaattcactgcatatatataatttaccgtctccttagagttggccttataaagcctccttgcagtatatattataacaatttatttctatatttagttattagctagttatgacttttgttcccgaactttaatatgtaccaaattatattgtctgaacttttaaggttgttaaaatcctcctgaattattgtgattattgatttaaaattttttgtctaattttagtaaagaaagtctaacatggatgaaa

SEQ ID NO: 365224 - DNA, 572 bp, Cannabis indica
acacaaaacttatcaaaagccaattgaacgacttgaatggaatgcatattactttgccaaaaaataatcaagttggcactaataacttgcatgtacaacgtacaacaagaagtgtatattttttttgatagaacttatcgagttggcatgtttacttaaaagggaataggaatgaatggtatgatattgattcctaaacaattgtttactaaattttgaaaatgggaaaattagtgggacccaaacaaattagggagaaaacaaaggaaaggttctcccccatttttatagggaatgcctttccctttccttacttagccttattttaattttaattttattaattaaaaatgaaaaagacaaatatactccttaaaaaaatctataaacagaaaataattacatgttctaataaagacaattttgtcaaattaaagcattccgattacttttcttacttatgtaaacaaaataatatgattctgtttttatttccgaacagtttagtttacatcataataaaatattgtttccgattattttctattttaaaccgatacatttctcctatt

SEQ ID NO: 365225 - DNA, 738 bp, Cannabis indica
ctaaatttggaccccctatcggactggttcggtcgcctccttgggcccaccttagctccctttgctgcggagatgaccggcgagtttgcgtctcagcttacccggtgcgcgcctaagcggttcgctgcttgtgcatccttgaactccatcttccaagtccaggatctcagccactccctcactgtggtaagtgttttgtaattttgtttttccccttattcttttttggagattctttcttatacttgtattgtttttttctttattttttagcttgctgccgaagctggccgcctctccaagaacataatcaaccatggcttcgtcctgtctgattttggggacatgaacgaagtcaggaaggttcttcaggatcttactgctgagaggcagctttaccaagaggctgctgagcgccgggaggccgctgccaaagctaatgaggaagaggctaagcggagggaagcccaggcagagcgatgatccgggaggaggccctgcggagagacaggctggaggccaagcaccaagaggagctgagggcggaaggtgaggccactgcaaaggccaggcgggagcttcgggaggccagggaagccttggacgagatggttgccaaggtgagatccttagaggaaactcaccaggcaaacttagaatccagggccactctggccgcggagctgaaggagctcagggacttcaaggaacaagcctcaaagaaggcaaaaagggctg

SEQ ID NO: 365226 - DNA, 546 bp, Cannabis indica
atctatttttggtaagtttggtcaataccatttacgtgtaagtgttctcttatatctacaacttttaattttttttaaatttccacacttcatacacgggtaagatatcatagtaggatcctcttcattttgcatggcaaaattcatgaaataattaactccattttcatactcttttgacaatttattctttttcatccaatctgtattcatattaatctataattacttaaaataatttaatgctattacaagttaaaaattatatcaaagcaatttttaaacaagtgaaattattttagtacttataaatcttcattgttattaaaaattgagtagagtttcttctgtttctataattttttccgattttataagtaccaatatcaacaaacaaacacgataaacaacacacaataaacataattgaaaattggacagagttttcttggtttctataatattttctaattttataattaagtacatatatcaacaaataaaaaacacaataaacaacacacaataaatataattaaaaattgg

SEQ ID NO: 365227 - DNA, 632 bp, Cannabis indica
ttttagtcacaagtaacattttgctgtgactaaaagtcacatttagtcacaaaaaaattgtgttttaactaaacaattgtcaccaaaagtaacagttttttgtagtgatatactaaattagttgatatatagttggtttacagaggtctaatcgttgtttctccacatattactattaaggtacaattaattatcgatcagtgataaaaaaatactgacaaatagtttcttatatatacacgcccacatttaacaaatgtagttgcaattaaaatgcacgtcagtttaataatagttttgctgttacaatatcatagtattataagaacaatgctcgaaattatcaaatacatgacctgaatagataaaacacgattgttgtaatattcatttgtattaaatatgtaaaattattggtactggtcgtagcattaatactaccctcgtactgattttctaaatgctgaattgggtaataatcctagttttgtctggcgtagcatttggagtgcacagcatctggttcggctaggagctagaatcactattggtactggtctttcaacacatatcctcaagcaaccttggcttcctgactctgtcaacccctatgtctctactacaggaccggg

SEQ ID NO: 365228 - DNA, 531 bp, Cannabis indica
aaaaagagtaaaataaaaaagtttaaaccgaatcttaatactttaacaagtaaaataaaatataattcttcaagtctcaagcaaataaaagataaaaaatataaaataataactagttaaaaattatagtctatttctaatcaatattaattgttgtactgttaaaaattatagtctatttcttcatgagtgttttcttgttaactaaagaaatttgcacagaccttgaacgtatgatgtctaaattttggtggaaagctcaatccaagtcttctaccaaaggagttagcgccagtttggcagttggcacagctgtgctgtggggaaaagcagttgtagctgtgctgtgagaaaaaacagctgtaactgtgctgtgagaaaaaacaactgcagcagaactgtagaaaaaagctaagctgagtgtttggtaaattataaatttcaaaatactgtgagttgttaaaatttattataataataatgataatgttataatctaatttattataatcacaaatatataaaacttat

SEQ ID NO: 365229 - DNA, 816 bp, Cannabis indica
gtataggctttgaatcggtgacgagaaatgcattaggtattattattattacatgtttggttcctgggaaaatcgacgagtttttcagttcataaaatttgtccgaaaattgaaaaatatggtggagaagaaagaggaggagaatggaaagaggaagacgagaatgtcgagatggacatttgtgtgtgccctggcgattgtgttcgtagcttcagcattgagctctattacaactccttacctcaatttcccttttttcttcattaaggattccaaaccctgtcactgtcctcaggtaatctctaattattactttggttcttaatttattttcatatgttgtcttttgttgcggaagattcagacaatgttgcttaaggttttatttagtaatgcagtaatatttgaactctagagtcatcatttctagtagtacgcttaaaatgtagcacgttgtagtggtttcttaaagtctagaatgaatatgtgaatttgctaaattgttgcttctattatactcttgaattgttgtgttttagagccttttttttttcatttggattaattaactattaacatgattgaaactgatgacaacgttttgagtatgcaacaaagttagtcaaatagagatagtgtcgttttggaaagagtaaaaaaaacttgttgtctacgtaaacaaaacaggagaacttttctggacagtggagacaatgtgtggactgcttatgggaaagaataggcgtttggttgggaggaatgaaagtataggaataagaatgggaattggaatagtaataggaatggaatggaata

SEQ ID NO: 365230 - DNA, 1176 bp, Cannabis indica
aattcttcgtgggggatatggtcttaagaaggatattcctaaacactaaagacagtacgacaggtgtacttggacctaactgggaaggaccatatcaagtggtcgaagttctcgaatctggagcatacaaattaggtaagtatgatgaaaaaatacaacttgttctagtaccacagtattggaatggggaacatttaagaaaatactaccaataaagtaccaggtcggacgaccacactaagtactgaaagaacatttacttttaagtgaatggcatgctgggcggactacgctcaaaggtttcgacaaaagagaaaaagtacttagttcggatgaccaccattcaaagtacaatctcttatttctgtaatttgttttatttcattttaagctaaaagatcagattagatcaaatagctctgatgtaagttactacggtaacaaatacattttcgtttaataaatgaataaatatgtctatttcaaaattcaaattgagtcgaaattattaacatgttgctaatttaccatccagtgcgtagaaaaggtttggtcgaacccaagaccctgaacagataaaatcatacttttaagaaacaagtgacaaagagtcataagtctgctcggtcacttgggggcacctatacctatacaaatcatttggtaaagataaaacaaccacaattgcacgatgactataaacagaggatgaaattcattaaagataacaaaagcacgtaataccgagattaaaagctgcctggtcagcctgttttctctataaaatgaaaaataattccaagtttaacgaccgcttggccggtcatgatgtcttaaaaaaggccttatggccaaataagatataaaaaaagataagtagttaaacagctggagtcccaggctctcggttcggatcttttgttccggtaggagctggaggatctgttgtttgaactggaagtacatcaacattctggtcggaggtagaagcaactgcctcagtttcaccataagccacttgggaagcgcaaaactcgagatacatgtctttggcttcacctatgtaattaaagtttgcctgagggttagccttccaaaagtcataaaagagctcgagactggctgtctctaaggcatggactttttctcccaacctctccacctcagctgtaagct

SEQ ID NO: 365231 - DNA, 611 bp, Cannabis indica
aattagcattgagtacattataaagaagagatcgaagatctttcctccaaattagctcaccattcaccctaagtgcgtgcagagctaattcatgcgtagcgacattagccaaaagatttgcatgaataagggacgccttaaagaaaattggacattaaactaaaaaatacatacaaatagagagcctaaatcattacagaaataaaatctcttaagaaagggaaagatcaaaacgaaacaatcacgctcaaaagaaatgagaggaagtccaaatctaacaacaaatccaatgcaactattctaagagctacaatttctgcctgaagaactgtgagatttccttgagttcatcttaatccaaccaagaaagcaagaattgttgctaaaaaagttaatacctagaccaaaaccatcaaataaatttaataactttataaataaacgttaaaataacagtttttaaattatgtcatataaattagtaataaagtaaaattttgaagaaagagaattgtaataaaacttatcttttaaagttcttgcagcttgaccaagtgagtaaataaaaacatacctatataaaatatgtaaaatttaattagcacactact

SEQ ID NO: 365232 - DNA, 724 bp, Cannabis indica
tgaataggtgcatgttttattttcttaattaagcggtaattagcaatttagtcttgatcgtgatctgactaggctaacctatggttttgcaggctattctaatagaatggatgtcaggtaaaacacgagaagccaaggtaattcagtcgaatctagtggcagtcaaggagtgtagtttccccaaaatttttgcggctaaggcggaggcccaagaggtagggcacgcttttggggtgatgttaacccaccacagactacccaagactaagagaataggcttgttgcaatgcaagcaagaattaatgaataagatgaagatgtctggcatttgaggcagcagggtgctcttgcaatgcctactcctgaggtgcaagtgactcctgcccctgctatgcaagtggagctggttgtcgttgctaatcgaaccactttatgaaaggttccataagcatgcacctctagtttttctaagaggtccaaatgttatgaatgttgagcagtggctaactattattaaccgaattctgaactttatgggagttactggaaatgatagagtggcatgtgcaacgttccaattccaagaagatgccctggtttggtgaaacatggtagctcttacccgagacgtcaccactattaaatgggaataattccaagagttatttaatgcgaagtactataatgaagtagtttgtagtgcaaaaagaaaagaattcactca

SEQ ID NO: 365233 - DNA, 623 bp, Cannabis indica
ttcttccctcccacaataccaggatacagtgttaaaataccaggtgaatgatcaaaaatgccttcattaaggaatacagcttctgcaaactcatatctgctgatccaagcttgattagcaagaatcctatcaatcttggaataaattctatcctctccaggctgtttatttgaccatgtaaagaaattcccactcgacttgacatcctctaatccacaagagttgacacattgaagaaaatcagaatcggggtaggattttactctgaaaccgatcctttcttccttagccaagatgtcgttgaagtctcccatgagtagccaattttctgaagtagtaagatcattcaagtccttccataacactcttctgtccaatctattatttgcagcatagatcactgttaaaaaactattaaatccatcaatagttgatatttttaaatgcattagttgactagtgcatttaataatatcaactatgaatcttgaaggattccacgctattacaattttccctcccgaatgccaagctatgttggaagaaaaacaccatccttgaaacacatttgagtataaaactcctaagtttggagccttaactctcgtctcgagaagaccaac

SEQ ID NO: 365234 - DNA, 518 bp, Cannabis indica
tttcaaaaaaaaaaaaaacatgactcattaaaataactccaaataacatatttatttgttttaattttcttatttttaaatttttttattaattttataaatatttatttatttttctatattttatattttaaaaataatgaattttctattcatgtaacatattccaaaaattaatttattatttgaaaaaaattaattaattatttttcaaaaaatataatttgtcacgtgagttattttttttttctcttcttaattcttttatttttttaatttttttaatttgtattaaaattataaatattaattaattcattaattaagaataatataaaaaaatacctgatatgataatttattctatatctatacctaaattctaaaggttaattaagatttttgccccttaaattttagggaaaaaaacagaaaaatacaaaaagaaaaaaaaaattacaaaaatactttggaccggcccatttaaatatttatacagtccacatacaaatatttac

SEQ ID NO: 365235 - DNA, 657 bp, Cannabis indica
ttttaaattcttttaatattttaatgtaattttttttttacattttatttaaaatataatttaaaataaataatattcattagcgtttagcttactataaattagacaacaataaaataatagagctgtaaaatataaatacatactgcttttgaggtccaaaaaaccactcaaaagatgagtaaaccgcaaagggaaattgattttattattgatttggcacctggagcagatcggtttctaaaggcccttatagaatggctccaacagaacttaaagaactgaaaattcaacttcagggattgcttgacctagggtttcacggcctagtgtgtcaccctagggagctcatgtactgtttgttaagaagaaagatgggtccttacgtatgtgcattgacttccgagaattaaacaaactgacaatcaagaataagtatcctttacctaggatcgacgatctttttgatcaactttaggggaagacggtcttttcaaagattgatctccgatcgggttatcatcagttaagaatccgagaggaagacattccaaagatgtctttccgcactagatatgggcattatgaatttctggttatgtcttttggactaaccaatgctcccccagcttttatggacctgatgaatagggtatt

SEQ ID NO: 365236 - DNA, 824 bp, Cannabis indica
actctagcattaccgatgtgacacagtcggatggtacgaagccaacatacatatctaatgtaatctaacaggcttcctaacatgcaccctaaacatgtaatacatatgcatactgttatactaatcttacctcaattctgaatttaggtgtgccggtcaacctgagtggaatgaactgcacgacaatttacaagctcctaaaccataacaaccacaacactgataagtgatacgctaaatcacttcccgggacttaaactagaaactagaagtttccctatcgataaaaagcatggcaataccctaaacaacataaaaatgggaaaaactagggttcccaaaaatcccccaaccggcagaccggttctgcaaccggaattccggttctgggaatcctagaacaccatccagaattccggttgcacaatcggaattccgattctgagcaggaaatggataaaaattcataactcactcaaaacgatccgaaaccataccaaacctgttctaaataccgcaataaacaaaacccaagcaatagaaccaagctttaaacacagaaacacatttcaccatgtgagctccaagctttgagttcaaaactcaaacttggttaaaccccacaaacaagcaaccaaacctggcttaaactactcaattaagcatataataacagcagaaaacaacactaaacaagtcccacaagcacagcaagctaattgaacaatccaccattaaaatcaagatttagctcaaaacttcacacttgcttaaaatcaactaaacaccaacaaaaaattgcttgaatcaacatattaaatcat

SEQ ID NO: 365237 - DNA, 1058 bp, Cannabis indica
tttttggttttagataaaagtgtcatatattttttagtttgaaatgtattggtttaagaataaaatataaggttttttaagtatagaaaatcaaatttccctttacaaatcgcaagaaagacccatcactcatctcactactgctgcgatcatcgaacgttacagtcaattgctcccatataaccgttacgcccattgcaactccgttgatccttcggacaatcctcggaatctgtaggacagagagagaccgaaagagcaaaagaagccattattattggaaaataatttctataaaataattaaaaaaaattgagatatacttacagatatgttaaaaagaagaagtccttgattgactgatttcattagaaagccaatatacttggctagaatcggattgttcattttgttggaatttattttagcagaatctagatttattaccattatgttatttaacatcctaatatgaatttctaaaacaatgtaatttaaacacataaatgttatgagaaactgggtgtagcagaattaaatgactccttctactcagatctctaacccttgtatcctttttgtatcagagtatcaccaagatctgagcccgaaactccttccttgtgttaggattctttacaatcttacatactatgattgatgaccaactttatgtgtgtgggcacttactctatcactaatggctgaataatatttgtgaagagagacttagtgtttcgaattgaagaagaaagaagaaggaaaagatctcatcaaaaagctaggtttttagctttggaggcattagttggatgaagagaccatagtcttccttttatactatcttcaatagggttagggttgaattatttggaataaaaaaatgataaaaatagagtaaaataagcaccttatggtcggcctgggtcccacattggtttgggctttgtcatttttctcaactattttatctatttttcaaaaataccacttttttcactttcaaccctataaatgccaaaactacttatttaataattaaaataactatcaaataa

SEQ ID NO: 365238 - DNA, 908 bp, Cannabis indica
ttaataggaaaaaaatataggtatttaaaataaaaacttaacatatatgagattgaattaccgtgaaagatattaaaattctctttcattatattttttttaaaaaaataaattaaattgaaactatagtgatcgccggagttgtcaccggtactggaaaatgaaccggagtttgctgtcggcgccaaaaaagtcactggagttattgtcggcgctggaaaagtcatcaaaattggatcatcgcccgaaaaatcaccgaaaaaataccaagaaaagtcatcagaattggtattatcatcggagttcttgatgaagaaaccagtttcttggtgatttttctggtaatttttctggggataatgccaattccaacaaatttttcagagttttgctgtcagtactagaaaagtcgccggagtagctaccggtgtcgaaaaagtcgtcggagttgctactgaagtcataaaagtcatcagaattggcattgtcctcgaaaaatcattagaaaattaccaagactggttcttggtaatttttccagtgactatgtagattccgattacttttctgaagtttgttatcggtgccgaaaaagtcgctgaagtagctgccagtgttaaaaaagtcgtcagaattggcatcatcaccgaaaaaattactaaaaaagtagtttcttcatcaagaaaccgatttcttcatcaagaaatcggttttcgtttctggttttttcatcaagaaactagtttctttcttcatcaagaaacaaatttcttggtattttttagtgatttttccggcagcaatgccaattttgacaaattttctagtgtcggcagcaactctgacgaatttttcggtaccgacagctactccggtgatttttctagcaccagcagcaaactccagcg

SEQ ID NO: 365239 - DNA, 650 bp, Cannabis indica
acttgtttgtttaaatatcgagctactttttgttgatgggccatcaacttcaagtttgcagtggctcgtctctcttcgattgtatcaagtgattctgctaggagtatgtgattggtatcttgcttgtacatcaatcctctgtgggaaggtggctcgagttctaagggcagcatagcttcatatccatacgccattgcgaatggtgtctgtctggttgccattttcttagttatccgatatgaccataaaacttcagtttgctcttctggccaatttcctttggcatcaaggcccattacacaccatggccggccacttggataggttttccaaattgatattttcattattttaattccaactaattcctcacctaaacctaatagtttcctataaatagaaagtgatagctcagtcaaaacaactactttcagaaaatcaacttttcagaaaactgagccttccctctctctctatagtcgaaatcatctctctctcttttcttcttcataaatttcgaaccctagtgatagagtaagtgcccacacacagcaagtggtacctcaatcatagattggaagactgtgaaggatcacatacaaagagaaggacattcgggctcaaatcttgataatactctacgatagaaa

SEQ ID NO: 365240 - DNA, 822 bp, Cannabis indica
aaaattcactaaaagacaaaacatacaaatgggccaaaagaccattttgccctttccaccctaaaaggcataaaagggtacttaggggtattttgggaaaactctaaattcccgactaatcccgacattcccaatgtctaaataaaccgtcccactatactaaaatactaatttgtgattttgctgagccatacaccgagttccatgttgccggacacagaaaatgcaaaattatgaaaattcactatatgacataaaaatgcattctgaattcaaaaataacagcataaataattatttaaatatctataaataattttcataattaagcataattaactactaatttccaaattaaactaagcggtctttacagacatgtttctcgactactacatggctcaggcggcaaatgagaaccctgaggcaaccacgtccacttctcctattgtccagagtgttgaggctccttctgcccagaccgatctccgaccccttaaggcccagttgatcctccgaccccttcagacccagttgatccttaccaagagcctaggactcctgctgtctgattgccttctctttaccatcattttttttgtatgtatctgttcggccagtaggccttcttttgagacaaagtgaccgaccaagcgttctttaaacttggaatattattcttttttttttaataactgactgatcaggcagcctttaatctcgggtttaaatgctttgttgtccttaatgagttttgttccctatctatgatcgttatgcaaccgtgtttgttttatttttttaccaaatgctttgtatagg

SEQ ID NO: 365241 - DNA, 539 bp, Cannabis indica
ttctcggtgaattttccttcttcccgtatccttgcttgtggttgttacttgaatgcttgccacttgaattgctggaataattgggaagttgggcggatgttccagtggaagcagcctttgttttgcccggcttttgctcaccttctgctcgttgaatggcttcatcgagcttcttcagctcggtctaggaaatcactcattgagtcgaccggtgcattcttccttatatccttccatagttcaccaaggacttcaatgccccccagtatcgcggataactttccatcctcagttacccgcgatactttggtcgcttccgtcatgaatctactgatatatgcccgaagtggctcgtctggtcgatgctttacttcgaccaaatctcccagatgcaatgggagctgacgtgaggaagagaattgtgcatagaattccgaagagagggttttccatgaactaaacttaccaggagccaacttgaaataccattcctgtgcggcttccgacagagtggcggggaagattctacagcatacgtc

SEQ ID NO: 365242 - DNA, 1129 bp, Cannabis indica
tttatgaagtaccaggattgtgtctttgttgtgaaatggattaagcgtgacattatgtgatgagctgtaattgaatacatttttattatagtgtcactggatgaatgttatattgcttatgaaattactcactttccatgtagagcttctgtgactcatgagatgtaataatatgtgtttatagggatgtaagattagaatgctttatgaagccctgaaaatgtatggttatgtattcattagatattcatttagtgcaacgatgaagttgttgactgtaaggtgttgtgattttctcataacgcatagtatgtggaaatgtataaatgctaatactatatggttatggttaatggatatgtgagagtcacaaatatatatatatacttattttattgagatgcgaatatctgcgtttataatgcttttgatctaataacttttcttgctgagtcattgtgactcacgggtgcttcatggtgcaggtaagaggaataaagtgttggaattattttaccaggatcatagatctactcccaagtatgttgattaacaacctaaatatgaacttataaaacgaatataaataaagacatataaagtatgagaaaccttacattggctgcagcggaataatatgtctcctccaactcagatatctaacccttgtatcctttctgttgcagagtataatcaagatctgagcccgaatgtcattctttgttgaatctgaattcttcacagtcttcctcactctgattgaggtactactctcagtgtgtgggcactactctatcacttagaggtttcaaaacagagagaagaagaaagagagagagagtggcggctcaggaaaatttctgtgaaagaatgcaattgttgtttgtttgtttcctgaagcctttaccttctatttatagaataccatatagggttagggatgaattacttggcattaaaaaatgaaaaattaaatgataaagggaaactctagtggccggccatggcaatatggaaacaagattttcacttttgcaactttcctattttatcatttatgtttcccgttttctcaaaaactgtcaattttcacattcaaccatataaatgtcaattctaactatttaat

SEQ ID NO: 365243 - DNA, 812 bp, Cannabis indica
ataaagcatcatatacaataccgatattatagtatattcacaaatttatctcactacaatctatatttacagtgtaaaataaagcatcctaattaaatataatttgggatagaactacgttatgtacaaattgtgttctattgggtatgtctttctaactataaacttaaattttatttgaaatggaactatgttgaccaaatatgtgccattgagtttcactatttccaataagttatcaacaacaattgcaatgtaagattttataaaataattccctaataaaataagtgtatgtcatatcacctaactttgtacccttcattactcacaaaaataacttctatctttatagcgaaagtgattcctacaaattaattaccaaatataaatgatttctttattctaataacgtatttctacgtaagtcctcacattctcagtgtatttcaatatgtttaaagtttttaaaatacgtacgtcaaagtctatacacagtacgtcactttcaaatttcaataatgcgtgacctgtggagcatatttgggtttgatgagaacaaatgaaaaaatattttcaatttaaaaatcatattgggatatttttgcgtgttctactgtggttttaatatttgatatggtatgagctagggttttgaaagtagatcgtacaccctactgatgtgaccttatacggattgatggtaaactattattaaaataattacatataaatatcaaataattaggaatatgatggaaatgaacatgtttaattttttaatttttcatttcaaatttgaataatccgcc

SEQ ID NO: 365244 - DNA, 820 bp, Cannabis indica
agatgtaacatacttgatgcctccctaacgacatatgatttctcattaatatactaagcaacagtttgtatatcttttcctcgcataaaattttacagtcagcgaattgtgaatatattctgctacttacgcaattaaggagttattccattaaaagtgacattatcgatctttagtccctttatcttgacacgtgtcctccactgaggtggtagccaaattttagtaataacagttaccaaggttcaaaaatgttatacttgtagagggactaaaagctaatttacttagcattagtcagatttgtgatcaaggttataccatcaaatttgacaatgttcattgctttgttcttaatagtgtaaacaatgcattttacaagggtttagatctgttgataattgctatactttcacatctgtccttacttgtcattctgcatgtaaaaataatagtgctataaatatttccaaaaatcttgctcaacattctcgtacaaaatgcattgatataatacatcattttattagggaacttgttgacaactaaacattatagttggaatatgttgataccgaaaagcaattggctgatattttcactaaggccctagattcaagtcggtttgactcctgcagaaaatctttgggggttcgcattgtctaattcttttctttttgttctctattttttacaaaattttttaagtagttcttatcttgcatctatccttctttcattcttagttggcaaaacatgtttatacttttggatgataaattagcttagtgtcttgtacttttctatacttttgaggttg

SEQ ID NO: 365245 - DNA, 600 bp, Cannabis indica
atataaatatatatattttttgttgattgtcgactgctatgttttatgcggcttcggctatcattgaatcatattatatatataattgtacggctagaattgtgtgaactggtttgagttttatatatataatatgtttatttttcaaatttacgattgaatggttaatgttttgattatatatatttttaattttgttttatatgcatcaaaggatacatatatattcttcaatctaatctggcgatgtcagcgtgtgtgtatatatttatatatatatatacaattttgttttttattttgtataatgcttgagatttgatttaactttagtttatgctatcaatttatatattttgatatttcagatttacatatataattatacagttttatgaaattttggaaataataaaattcaaattttggtgttggtttatgactaatattttaagtaaattaattaaaacaatatgtcactaaagtgatctcttttgtgtagattaatttattaaatattaggttggttgtgtgtttgtaattgatgcatatattgactaacccaaagataagtgaatattttgctagatttcaaacata

SEQ ID NO: 365246 - DNA, 779 bp, Cannabis indica
gaggatcttgtccccgttgaagtctttcaaaaacgaattgagtgcgattgaaagtccaaggacttccttcgataaccctttcaagatcaatctcatggtagaattgaaacaaatacctatttggctcgagctccttgacgtacataccgcgtcctggttgaaacaaagatgccatcatatgtctcattgcatcaaaatcaatagccctctcagttaaaaacttccctacaatgcaccaccgatcttcaccactttggtctgaatcatcaaatatgtcatacacattattcccatcatcttctccttcaagcagtatattagcatattgctcttccacgtctttgagcgaagcacttgtggaagccataacacatacaaccccaatggactgaatacacaatagacgacaaacaaaaacagtactagagagaaaacaacattaccatgtcaaaagacaagactagcatgtggatagggccattttaaatcctcacactataaattttctattattttttatacgaaatagtgaagagatattttatagtgttaaacacttaatattagtataaatgaaaaaccatcacatataatttactttaatatatatatggaacatttcttaatgggtattaacatgaatagttactaaacaaatttaactataaatattaattttaaaaatatcaaactatcgaattttgatctaataacaaataatgaaatcacaaatttaaatttttatgcgtaatttaactacttaattaaaaaaatatcta

SEQ ID NO: 365247 - DNA, 609 bp, Cannabis indica
cacagctcggacccaaactcaaacccacaattagaatcagacccaaagctagactcgaacccatacccaaactcgaacctagaccaggatcaggaccaaggacttagactaagaactgaatccagacttagatcgagattcgaacttgggactcgatcgcaacctagaccagacccaggacgggaacccacactcggagcctgatctggaccaagactgtaatccggacggtaacccgaactcagaccaagactcgaactccgacctgaactcaaacccaaactcaaactcagaatggcaaatggaactagaatcgaactaggactaggttcaagaccaggacgtaaaccaaaacccaaacccatatcaaaacccagaaagagacctaaacccgaacccgaacctagaccgggacccaaacccacacaataaccgagacttggaccaagaatcaggatagggacctgtgtaacagaactaggacccggacctaatacgcgacccagacccgaacttgaacctaggacccaactcgtgacccggcagcagaaatggaacaagactgggacccgagattgggatccgaatctggaccaagggcttgtacaa

SEQ ID NO: 365248 - DNA, 527 bp, Cannabis indica
gtcctgagggaatttacaaaggtgagtctttcttgacagtttcctttaatccttctttacttggctcagactctacccccgagctaagtctgctgccttcaagaacgctgccatgtcgaacaccatgagggcggaagtggactcggccaggaaggatgctgatgacgccagggtggaactcggagctgtccgaatggagctgggtgaagtcaacaagaagctttttactgccgaggggaaagtaaccgagttgactaaggacctcaaggcttctgaccaacttaaagctaccatcgccaccttgtcagtagaagtgaatagtcttcaagaggaaaggggagttcttcggactgtcttccatcagctagaagcaaagaagaagtctaaggaggatgagtttacagctgagatcgagaagtacaaatcggaggttgaatagcagagagcggatgtgacgaggctggaagagaaagtagatgccctagagacagcgggtctcgagattttttatgacttctggaaagcta

SEQ ID NO: 365249 - DNA, 918 bp, Cannabis indica
ataatattgaaaataaaataatatgtgataaaatatattgacatatatatttttttttattttataaaattttatcattcttatatttaatattgaatttaaattcacatgttcaattaaaaaatgagtattttaagagaattattatagtgaaatttaatttaaattacatattctaaaaaaaaaaatcattgatcattttaaaaatatatataaactattatatataatttattatattaaacttataattgaaagttaaaatatatgaaaagtattttttttttctaaaaaaaaaggaaagaaggttgggactatgttaatccatttgtgagataaaatagtccctacctaaaggtataaaaataaataaaaggatagtattatccaatccatcttaaatctaaattttttccaaacatgaaaaaggctaatttaatccaatcccaagcatttataaaatgcatcaaacgtgcccatataaaatcaccattgaaaggaacaagcacaattattattaggctaattaagatttttgtcccctaaattttgatatgtactaaattatgctctatcaactttttagaccgttaaaaattctcactaaactattgaaattgttggatttaaagattttttgtccaatttcatttaattttaccactttgataattgtgtatttactaaattatgttcctcatattttgatatctactaaatcacgccccctcaaacttttatatgtacaaaatacataccacttgaactttcatctatgttagacgtttcttactataattggtacaaaaatacattcaatccaacaatctcattagttcaggagagatttttaactaaccttaaaaattacaaaataatatgatttggttacatgtcaaagttctaggaaacaaaaat

SEQ ID NO: 365250 - DNA, 703 bp, Cannabis indica
attgcttaatgctgatttcatgttgatttaattaagaagttaattagagaacatgagatttagaacctaaaagatctgaaaagagttaggttaattcataatctgtcattcacattaagataaggatagcaattaggtattaacattggtaacttaacaacaggattcacctccctaatctctcatcttgattaatcttcatatattctttttaattttctgaattattttctttaaattgcaaaaagtattgttttaccagatagaatcataagtatagtttagtagtacttaatccaattccctgtggttcgacctcacttgcgtgagatactacttgattgcgtatacttgcgtagtaatcataattttcgtaacaacgtaaataaatatttataaataaattaaatttaaaataacataaataaaatattttttttctttttttctactatttctttttttgagatttttttttcctctactattacctaccaatcataagtaataaatgtctaagaattttttaccattaattaagtaataaatgaatataatatacggtatatataataaaaataattaaaaagaatgtataaaatataaaaaggaaaaaggaaattattccatgtactgttttttaattttttttttaaatttacggtttgggtttttaaagtgatttctccggtagtttctatgt

SEQ ID NO: 365251 - DNA, 546 bp, Cannabis indica
gagtttggcttttcctctagctctaaccgataccatttcgccattaccaaccttaagtttcaactctccggatttcaaataattccatttttcaagcaattgcaatgaacaacttacatggtttgtagacccagaatcaagaatccaaatggatttatcattctctaaaacacatgattcgaagactaaagcatcactgcttattcgtttttgaattgttgttcttgctggttcattttgttgtgaagtataacttgaggaagtggaatcactttctcttatcttctcaactaagcttgaattagtaggatttatggagttatgaactatttgctcttcagagtgaacaattcccagcttatctgctttctggaatttcatgttcatcatgagcacatgtgaagtattactctgaccaggagttttattcatatcttcaagttcatttgctaagatattaactaggagtggatcggggtgagggttatccatattggcactacaatatatcaataaaacagaagtaaggttttggttctataaatt

SEQ ID NO: 365252 - DNA, 562 bp, Cannabis indica
aataaaataagagagagaaaaaaagggacaagtttaaggctaagtttggggtgtaccacccctaatcaaagaaaaaggttgttgttttttctctctttatctagtttatttgagctggaaaaaaaaaagaatacacatatatatagcacatacatatagcaagagagtgggaactagattgaatgaacattgtgggttgagaatgaaatcttgggtgagcgcttgagagagaaaaaaaaaagtccttgataaattgaggtaattaggtcatgagcctaaaaatgtcatcctttaacaaacccgagcctaaacctcacatttcaagtctatttaagtccttttgatctaagttgtaaagctaagctacattagttgagaggattgcactagctcagcttatggaagcaaacttttaaacttgaggatcgagggtacttgttacagaaattaattcaaggtgttggtgggaagtatttgcacactttagtgatttaattactcttggtaagcattaaagacatagatatcatgcaaaattctgttgaaacacacaagtcaaggc

SEQ ID NO: 365253 - DNA, 693 bp, Cannabis indica
aaaaaaaaataaaaaatttgagtgaattacgctaaatatgatatctttttcaaaaaaataaagggtaaataccattttaaatctctgactggaccctttattttcttaaatgataaattagaccttgtacatttcaaaatagtaccctaaactgattttttttgtcaaaataaaatttaataataatccgatctagagtttgtataacaaaactaggtacaacttttgtgtttgttcgtgctagaaattatcttcaaattggttatgttaaaaaaattatcgaaaattgatctcaatgtactattttgtactattacagggtctaatttatcattttatgaaacaaaggattcaattggtaactcttacaaaactggatctaaaatagtattaacccaaaaacaaacttataaatatgacattctttttcttcaatttttaagaaaccctgtaaaaatctaaacaattaaatatgccatgtagtaaacaaaattatagattttaataaacttgtggcagtgtattttcgtcaagttataatgagattattttataaaggaaaatttgcggcaaaagtccccaaaaggttcacgttgatgctgattagtccccaaagtccgaaaatagcggcaatagtcctcaaggtcacacttttatttgtccgttggtctccaagttaacagatctgttaaa

SEQ ID NO: 365254 - DNA, 565 bp, Cannabis indica
aaaaataataaagtaaagtgcattaacaatacactcatttttgtagcatcttataagtatttttttaacaataaattttcattgaatataatgagagtttaatacattataaaaaaaaaaaatagagaaaaatcatctataaactaactcgacatccactcagagtttatgtatgttaataaaaatatgattttagaaaaattaagtagaaaagtgaataatatgataatctatatttgtatatattaaataccaacaaactattttttttaataacgaaaaactaatttttaagaatttttatacaaagtaactaaaaggggtaagttgaaataaatcctttttttatccgttaataaaaaataaccttattttaaatttaattcaaatgtactccttttataagtccattaccgattgtaccctcacataagggtactattcaggaaggtaagaaagattttttccattatataaggatataattgggatataacaaataaaagagggtttaaattaaatatatagaaaaaaaaaagatagaaaatgaaatgggttaacaaaa

SEQ ID NO: 365255 - DNA, 540 bp, Cannabis indica
tgattttgtttatgaaatttagggtttttaaaaattatacaatcattttttttcgatcatatacgtaatggcaaattcatgtagatatatataattttgtcttatataccgtaagaattcaattcttcctcttgcgattgaatatgatataatggcttcagtgcctacctcttcgatcggctatacatatatgtattgattacttttttttttacctcttcgatcggcgatttgatattaattttttttaaaaaaaattatatgtattgattacttgtaattagcttcaattatgtaacaccctaactaccataggcgtattacgtgatttttaaacgtactgtgcagctcgttgctaatcagcgaggtttatggaaaaacgtgattaattaaaattttgctttttaatttcacttataaaacagtattacaaaagactcgggatcccgattataaaattatttacaaaaagttttaacggaataactgatacataaaataaaggtcgtctaacgaccagttacaaaaattcagccttgc

SEQ ID NO: 365256 - DNA, 494 bp, Cannabis indica
aactaattttctcttatcatcttcgcaaaggaattctgtctcttaatgataaaagacaggtcttgttaaggataatagaaaaggaaaaaggttttgctatgtaggattctgtgttaagtattcagattatgtttggtttgaaggcctatgaaaaggagaagagattaactaaaacgggatggaaaatgtgaattgaaatagtggaactagtagttagctttataaagaaaggcggaagaaataatgtccttggttattttttgagaaggataagaagtaataaatatggaaatactctgaaaaaaaaaaatcttgaaaaatgcttaggtaggaccatcaattctctaacaggcaattttgttatgtgcattaattataaaccaagggaaatttgatttttctatacttagaaactcaaaaaatttgatttctaaaccaataatttaaaccctaaaaaactatacctttttttcaaaaccctaaaactaccccaa

SEQ ID NO: 365257 - DNA, 770 bp, Cannabis indica
tcaagatcaataataataaaaaaattattctaatttcctaattaaactattacaattaatcaagacgatacacttaataattaaatatttttatcaaaaaataaattcattaaacatacaatctctataataaaaaatcattattttttaaggagataagataatttagatacaaatcaatcaaaaatataattcatttaaactatgttttatttttcatcacaatcaaataataccttcatcaacattactattaattgcaaattatcatgcttagaatcctaaactattaggtgaatagtaattctaagatgataatagaacaatgcaacaccttaattagttgtacatccaacaagaattcaatatattcatagtattataatggttacaagtttcgtcttctaggaagttagttcttactccagaaagaagttatggaaaagcttggtgttcatccaaaatctttgttcgtaaaattatggccagtctggatggttcttccagatagattgtctttcgtaagtagaatcttcaggatagcttgtcatatatttgaagacgtccttccagatagcttatgtcaactttgaatagagcatgtgattgttttttagattgtccgtacaaaagtgcgtttttgaagctgatggaatgacttggagaatttagacagtattaatataagtcacgataaaatcagagctaattttaacaacggtgaaaaatatatatatagctatcacctttgtaaattcatttgtgaaatt

SEQ ID NO: 365258 - DNA, 965 bp, Cannabis indica
tagtaaattgtactttactagttctagttctatattaaagattcttttactttaatacactaccgactagttttattcagatggtataatcttaattctcttgtatatccttacaagattatatcttctctatatgaataagaaatttttaaatatttattaattatacttctataattaatgtattcatttatcttataattgtgtttcatatactctgtaacatatcatctaacaattacttgcttttagggcataaatcttaacaaaaatatctaaattattttaataaattaaaataactaacaagataaatgacataatatctaggatatttctaacataattttataaattaataaattaaaataatgaaataaactaattttaaaattaaatatggttaagaaaatattattttataaataaaataataaattaatgataaatttcaaaattatatcaaattattctaaaatatctctactttaagccttttcaaatttctacaaaaatatttagtttattaaaatatatattttattatttataagtttctgataagtaaaatggtataatattatatctttaatattatttctcaaacttacgatttttaaataataaattatataataaaataatcaatttttaaatttaaaatattgtagctaagatatcgataaaatatctaagttagtttcaaattttattaatatttaattaacatataagatatttaagaatataatattttaaattaaaagataatgttatcttctaattaaaatatatctaattttaaaaatatttaatctcataaattaatgtgtcatttggtaatacttttgttttttaattttttaatcacaaaatgaagaaaaataaaaatgtgttctataactacttttattttttaattttaaaaacagaaaaataaaagtgtgttctgtaaagtttatttt

SEQ ID NO: 365259 - DNA, 1372 bp, Cannabis indica
tttattaaataagaaaattatattttatagtttgaaaattaatttatttaattaatttttagatcaacataaattagaataatttttttcaaaattattttatttaaaaaattaaaaatatatatttaaatacattggattttgaatttaattagaggtatgtatttatagaaaataaaattcgaagttgaaaattaattttggaccaacttaaattagtaatttttataatatttattgaaaattaatacaaagaatgaaaaataaaattttattttcagatcaagtatgtatataattttataaatattaaattaaaatttgtatttagaattatctaaattagtaattttaattaaataaatatatgaatattaaaataaatagattaaaataagtatcaaatgaaaatacctcttttaaaataatgagctttactttttaagatattcgatcttcattgtttgtcttacatggttaatatttcaatgggacctcgagaagctagacttcgttccacatagggatggtcttacattgaacatataacaccgcaaagatctcaaaagataataattttgtaagttttcttttttttattagactctgccctacggtgactacttagaaataaatttacaagtataaaacaatggtagaagctcataaaataagaataatcttgactctcgcctaccgggacaacattggattcttattttgatcgaataaaaggttgctaaaatggtgtccattttagatgagctgctgactactctattcaactgatggtatctttgactcttacctatcgagacattgtatatcagctagttggaaaccttagaaattatttaagatatgattattttgtattttcacatatctttgttacatattaaatgcttaataatttctgaatatgtatatgaatttatattgaaccttcattatattttctgttgttaattattgtagtagcaatttcaaatcttcattgttggtctaacttggcttgtaattttaacgggacatcttcatagattatcatccgttagacaacataatagtgttagatctcgacataagtgtttgtggatacaaaatctagttgactcatccatacgatgacaactaagactagtgtttacaataataaaataatgaagaagtttatgaattaagaataaccttgactctcgcctaccggaacatcgttggattcttattttcatcgaaattgttctttattttttcctcttagctttttcattaagaaatttcttagataggatatcattggacaaaatatttataaattatctgcttatgatgtcactctattttttttctataaaattgagtggcgcag

SEQ ID NO: 365260 - DNA, 559 bp, Cannabis indica
aataataatataataaaaaaaaaatgaagaacggtttggacgggttaacccgaccaaaccgacaaaatcattgggcgggttgaactttttctaaattttcattgggcgggttacgattaaattttgcaacccgatatttatattgggttaataaaaatatgctataacccgactaaaccgaccgacgtacacccctactttttggatatatatgaaacttatatataaaaatatataaatatagtgcataaaaaaattcaataaaataattaagataatgtaaggtacggaagcatttttcctcttcttcttttaatattttttaaaaacaaacattttttcaaaagtttctacgtgcgccattattatatatataattaagtctggtcatatattagttcatatatttaacgttctttgatagtggaagtggcggaaaacaaaaatgagtaatttatttaggaggcgtttggtaacacttttgttttttaattttaaaaacaaaaaacaaaaataaaatttatgtttttaaaatttgtttttaaaaataaaaatgtgt

SEQ ID NO: 365261 - DNA, 729 bp, Cannabis indica
gatcatcagatctcatccaggcccccgcccaccgccccatacttaccactcgccagacttaattttttttaatattaaatattttaacatttttgggtaaacaaacaaacgaagaaaaaggtcgagagataaaatacatggaaaatgtgattctacatgcatgtgatccattcttgtttatttcttcattttttttacttattttattgtttatgtcattttctttttaatgctataaaatatagtttgtgtttttagtctctcctactcctacatttaatttatactattagtagaagccatataattaatcttaaaatttgtttattgggtttgtgaaatttttacacaaaatacttaaaattatacttatttttttttacttttctaaggattttttttttttgcaaatgttatttttttacttacatttgcaactatagaacaaagttttggcttccaccttatgaggttggaaacaccgttaaagagcgcatagaaaatgcaacaacaattcgtccattggcatcacgaaccagaaccacaacccttatactcaaaagatttgtcgcgcgcaattatagaacatgatttttaactgtcggtaattagttcacattttttttttaaataacacgttttctctcgatctaatataacacgtttttagatttgaaaatttttaaatttatataatttcaaactctctctctctctctcatctctctc

SEQ ID NO: 365262 - DNA, 579 bp, Cannabis indica
ttttctctctttgattccttttaacccagaatcctcaactcctttctcagtgtgtttgtcgggtatttatagtatttttctggggtgatccctaggaatgaaacaacaagcctttgtggaagctttataggggcacatattcccagcagatacaaaataggaaatgcataacctataccgtaggtatcttaggagttaggtggatataatcttttatcccctctcgattgatgtgatttctcataaagtagccgtcactagccctattaatcatagcgcaatagctgaaaaagggggggttataccatctgtcatgtcgtttatggtgatttcaatacgtcttcccccatgcggcactaaatgtgaagtgattattcaatagattccagtacctcccggaactaccttagtatgtccctgacctcccagagcataaggatgcttctcatgtctcctccgggagacaccttcccaaagacactcctcttttgtataagacttagttgatttctgtaagagttggtcctctcagctccacgtgtcatccttatcgaggtctacgtattttgggcaaaatca

SEQ ID NO: 365263 - DNA, 1149 bp, Cannabis indica
ccccatatatcggtatgcacaatttcaagtggaactttagcacgataagcattgagttcgaaaggcaatcgatgggatttaccaagttgacaggcatcacaaaaacttttattcatgtggacaacttttacatttaatttcttttaaacaaaatctaagccacgtgtggatggatggcctaatcgcttatgccatgtatccttgattgaagaagataaactaccagttttagattggtttacattttgtttggtggaagtaactagaccagagaaatgactcgatttaaaacaagaagcagcagtatgggtttggtgttgtgtggaaggaagttcaagttgataaagcccatctttaagtctcccttgaagcaccacctgctttgtcaccttgtccttaacatagcacaaatcagaaaaaaaattcaacaaacacattattgtcagtggttaattttgagatgctaacaagattttttgcaatatttgggacatgcaacatttctttgagagataaaaccacaccagaatctgttgataaatgactagtgccaatatgttttatagttaactgatttccatcaccaaccatgagtgtttccttaccattatattcatctttttgctgtattttattcgggtcagctgtgaaatgacttgttgctccgctatcagcgtaccatgcttcatgatccaaggtatctagtgaagctacaaaggcttgaggtctgctgaacctttgttgttgttgctgttgttaccaggtgaggatcccataaaggtttcatcatatctattgtagtaataggctgttgaatgtccatatttgccacacacttggcaagtgggattgggaccagagttccttcctcctcttcctctagatctacctcctgagccacctcgatttccagggtaatttcctctattgtagttggaccctctgccgttactgttgttgtgattactgttgttgtttttgttgttgttgtttctgttggccaaattttgctagatggattacttggatttcctgagttatttccaagtttgtttgtggttgaaaaagccgtaagcctctccatcttgctatcgaaactgagaagcatatcttgcaactcttgccatgatgttgaaaggtcttgcttcg

SEQ ID NO: 365264 - DNA, 865 bp, Cannabis indica
aaatcacgtaatacgcctaagttagttagggtgttacatcaatggtatataaatttatttatatcgtatttattgaaaagaataacatcatttatatataaaaattcatatatactacactaataaaataagaaaatgatgatagaattttaatactgttttcttcaattgataaaaatcttttttatttttttaaggcttgaagatacccaattttaactacctaatgaattttagtaagttaattaagtgtgtttattataagataattaattttgtaatgtaacttaattttttaaacttgtctattttagtcatttcacaaaaagataaaatatatattataataaatattatttatgaataaaatcaccaaattaattatcaccattttctttattacattgatttagtttcccattcttttagttatatttttgtataaataggggttcaccccattgaaataaataactaagaatttctcattcactttatttttctctctttatcttcctcttcttttcttcttatctattttacattattctatattattttataacacgttattagcacgagtctctgctcaagtcctaaggtaagtattttgttaaagtttttgaattgttttaaagtcacgatacactaaatatatttatatatatatccatctgattgaaacaatttcaagaatctttttttttcttttccttttttctctatatatctatattatttatatatgtgtatatttttattctcatatagttatgcttaaattcatttttatatatatatatatatattatatactcttattatttatctataatataatagagaatatatataaattatgcat

SEQ ID NO: 365265 - DNA, 572 bp, Cannabis indica
ttgcagtagacaagataaattttcactccttccatataatgactattattattctataatttcaattattcaaattaatatttatttatattccttataattattttatttagtcatttactaatgttagtatgtttcattgatattttttcttcgtaggttactctacggtgattcaagcaaattgtgtagcacaatgataatgctggattgattctctctatgtgggtgaaacataatgtgtagcagttatatttgcttttctaagagtacattattttctttttcaataatcttgaattattgacaattattttgtaataagttggtcatctagattttcaagagtatccctaatttatgtttattggataggcatatggttacacatagattagcttggcatgctctttggatggatgaacaacttgtttagttaggaacttcttcatagtatctttgggatgttcagttcttatagttttttataagttgtatgacattggtttatcattttaataatatattcattgctttaaaaaatggcaaaactctaaagcccatatgggaat

SEQ ID NO: 365266 - DNA, 1277 bp, Cannabis indica
aaacgatgtttgtgttgatttggatggttttatgatggtttatgtgcctatttgatgattgtatggaaatcgcaatgtatgttgtaaaatattttttgtttcgctctagaaatatatttactggaaagtagacgaaaaattaatgaatttaggcttttacagaacctgattttttaagaattagttatgagtttttaaatttggatgaaaatatcagaaattgggttgcacgcgtgcgcgcgcggatagggagtcacactcggacaagaggccttcagacaaggccttgtccaaattttccccctcctgaccaaggtttgcccaccatacaggctggttgcagcctctccctcgcccatgtgcagcctcatgtgcgcacggggagtatgcaatacaaattttgatagatttttgtgtagaatctaaattttcatttaaaaatctaattatttgaatctaattatttgaataaaattaatttttattaatttttaattaattaaaattagttttatatattagtaccttttgtatttgaaattttggtttttccacaaaaatagccttaaggttaattttaaatttttgattattttatttattttagttataagatgagatattacttattttattattaaaatttgaaatgatcttattttgatattgaaatattaataaattttagaaataatctagtttaaatttcaaaatttgctaactgtatcatatttttaaaattttttatatttcaaaatatatttgattaaattaaattataagatttgaaaatttttagttttgaaattttatcttattagatattttttttaattaaaattaatttttggcaaaataacatgaaattttgaaaatttgttaatttaggtttgaatagaaattttagggtttctaaccataaaattttcaaacttatgatattttgttttatttaattattttatttaaataaattgataatatcctaaccatcaaatatcttatttttcaaattgtttatttttataatacttaatatattaaattataagattaagaatataatattatgattatctaaattttaaaattcaagatattatattatattatcttattagatatttcattaatttaatttatttaaattaaactgaaaatttgaaaattggtgagatctttgaatttaagttagaatttaggatacttaggagatttgttagattttaaatattttttgtaatattctctaataacctaaatttaaattctcgtta

SEQ ID NO: 365267 - DNA, 599 bp, Cannabis indica
ttaaaaataaagattacattgaaatagagttttatttaaggcataaaacccaacacttgtatggtcggccaggatctgggcacaagttggccggccaaaaggtgactttcagaccaaatgagcttccgtttgacaaagggaacctaatctctacaagaaaaaggtgtaaaaagctggcctccacttgcaaaaggcaggcctccacatccaaaggctggctcctcttggtaaagctgacaaacatgacttgccagatcctggtaggaacatgacctgctagaccctgacaggagcatggtcggccaggattgacctggaaaggtggatggttagccaggattgacttggcaggattctctgtacacccagatatgtggactgcaagctacctacgaattgggcccttaacaacctaacaaactggatggaaaatatctttaagggacaatttagtattttttttatttaatcaaattaatatgtaaatatctaagagttttagttttgaattagggtttaggctgtcctatataaatgccctaactctaacctagaaaacctaagtctaatcctagcctccttctctctctctctctctc

SEQ ID NO: 365268 - DNA, 621 bp, Cannabis indica
cttgagttttaaggagaaatatgttgatttgcatgcttggtttttgtttgttgttgctgttgttaattgttgatgttgtcttcagaagtttaatcatgtttaattgagtaaaatagagctggttgtgatgcatgctaattacctctgttcaaatttagagttttggctcaaaaactatgatattcaaagtgaaatgagaaattagttgttgtagtggttgtttgtgcgtgggtttgatttctgcagttatattatgcttgtttgagtaaattaaatcaagtttttatgtatgtttattagatttaaccaagtttgagttttgaactcaaagcttggagctttaatggtggattttaattttatgcatgaagctttgttttgttgccttagaaatatttattagggtctaattagcaggtctggagagtttggttgagtttggaaacgttttgattaggggtttgatttttgtgggatttctgggtaaaaccggctaaccggttttacactgcctgtaaaaccggttacctggattttgcagcaggggtgaaatccaatttttctcagcttttcgtttcatgctagtttcgggttttcaggcagtttgttccctactagttt

SEQ ID NO: 365269 - DNA, 565 bp, Cannabis indica
aaatttataaataagacatagtctaattttagaattataattgattaattataataaattgactgagtctgcaagtagtattatctcaactagtgagggcaccatgggcctatataactgagctttcaataagtagatatacacgaacaacttgaagaacataaataatacaattaagttgaacctaaccatattaggattaagattcatagacctaagaacaaccattgatattgacttagaaagatataacggtaagtttatgatattttatccaagatcaatatcggtcccttccaatgtatactccatacatccaatactggtaaactttaccaataccctgataaggacataacacttatccaatgtgtaagtataccttatcgtcgattatcatgtcagtctaaatcaagtgaactaacaaatcatgggaattaaacttttgaacatacaatcatgattatattccactatgctgatgataaataatcatgaacaaatatctatatttacatatgttctggacttaatagaatttatatattaagtataatcatgaaat

SEQ ID NO: 365270 - DNA, 504 bp, Cannabis indica
acatcttgcaaaattttaaaaattaaaaaagtttaacacgctgaaaattacgttcaagcagtgtgttacacgcgtgactattacgcgtgtaaaataggctgtttgaatattattttttatattgtaaattaatttaaaattcccaaaaatttgtaggatatcttaaatagctataatgtatatgaatatgaaaaaaaaatggacaaatttttctggataccgaaataagtagagggttcatcagtacatcctcttttaaagggtgcattatagaatcactctaatacatattagggtaaattgcggcataaatacctaatgttttagatgttatacaattaaatacctaatgtttatttttggagacaaaaatacctaatgtcacaattctcttacaccattactactatttccgttaacttataaatatagacacatggagagtccaaatgcattacatttattattattttattttaaaacttaatattcttaatatcagaa

SEQ ID NO: 365271 - DNA, 680 bp, Cannabis indica
gttcattgggccggcccacagtattgttgtaatatttttccctttttagatattcctgtttttttccctaaataattataaagtatgattagaatttatttaacaatttaaataatcatataaatagtaattaaagctattttctttatatgcttttttacaacaccttttctttttattattagtttaattcaaaacacgtatatatactacctttttttttgtttcaatgtaaaaaaaaaaatcaatataactatatgttggacactaaataaattagaaaattaaaaaaaaaaacaaaagaaaagaagaacatgaattgtttgtatttaaattttggtttgacaaaaaaattatttaattagataaagttaatagatataaatagaaaaacatgataattaaatatgttaaaaaaaattgatgaactaaatggataaattttttttaataataatattatgacaactattaaagagttaattggcaatcttttaaaacaaaattatgaaaaacaatataaatagaacacaataaataaattagaaaattacaaaatatagaaagtaagattaaaaaaaatataataatatttatgtgatatatatacatataaaaaagaatataataaaataaaactaatttataattttttctaaacaattgattggacaaattat

SEQ ID NO: 365272 - DNA, 539 bp, Cannabis indica
tcctggcagagttaacagattttaaaaaaaaaccagcaagctttttccaaaacttgcaataaaccattcacaatctcacaatgcattcctacatcagtttagatcacaaatagcctaataaagcatcaaatctttagttatgcatggtagcaaaatattcctatttcactactaattaatacctaaaagaaaaggtaaaaatcatgcatcaattagaggggttcaactaggtcttgcttttccaagtaagatctagcttggtaaatgttaaaaatggccaaaaattaacattcaatcaacatttcatcacaactaattgaactaagacaagattacttcatcattgcaaaatcaaaacactagtccatacaagggttcataaccacccaaatctcaaagagtttagttcatagctgaaattaaaaacaacaaaccagaaaataaattgttcatggagttaaagagaaaattagagagaagaaaatgatacaaaatgaagtggagagctgttgggttttatgccctaaataaaactcttt

SEQ ID NO: 365273 - DNA, 678 bp, Cannabis indica
attatatatatatatatatatatttaattttctaataagctatatggtaagtgcttataatttattaataatttttaagataatgaaaatattattaataaaaaaatacataaaatatcttaataaagacaacatagtgtacctaaaattaagtttttgtaatatatatatattattcacactttaaaaaatattgaaaagtttttttttttttgaaacaacaataatttgaagttaaagatagtagataaatatttttttaaaaaaaaataaataaataaaataagaataagaagtgcacaaaggaagcgagaaggagacaattttttcttttaaaaaaacatggaaacatggatgattacacgcaagaagagagagaataaaattacaaaaagaaattatagaaaagaattaaaaaaaaagaaacgattgtggactataagtaggggtatgtgcataaatcatcaaatctaatgacaaccgatcgattcatttacaactgaccgctaaatattagatatcaaattgtgatctgatcaaattgaatgttatttttgaatatccaattgaattggatcggatgttggatggggtgtccgaaaatccaatacatccaaatccaacatccaatcaaactaattagttttttatttagtttggatgagtaattagatttta

SEQ ID NO: 365274 - DNA, 501 bp, Cannabis indica
ttttaaaaaataattaaaaatacctcacgtgcgtagcacgagttctctcactaatactaataataaagttgattatatatagaaaatgtttaggccaaccagaaaataaatgtttcaacttgataaatagtaatattaccttaagatcaaaacaccatataacaaaacaacattaatacaagctagaaaaaaaaattattcactaaaactagagaatgactattaatttaaaacgacattgaaaattttaccgacgttgttttgcgttgaaatgtaacaaaataaaatggagtaagttacatgaattgagcatgatttagaaagccaacaccaaaactaagctcattaggcttaacaagcaaataatgtgttttagttctatatagagataagcaaagctgatggttccaatacatttaaatgtacttctgtgtcgttaaaacagaaaacgacttgtagtttagaaggacagtaaagaagatatatttacttaagtttcta

SEQ ID NO: 365275 - DNA, 311 bp, Cannabis indica
cataaaacccaacaatttttactacggggtccattgatataatcaattatagtgattagccctccatgtgttggttcgtaattagttttggtcaaattatcgttttaccattctaattacttttggtgaaattatcattttaccttctaattacttctttatcctttagtaccattaattcactagtgaaagtataatttagatcccatttaaatttgtacacaactttttagttctagaattaacacttaaagggatatagtgtaaagcccgcttagttaatttggaaattagcagttatttatgttaat

SEQ ID NO: 365276 - DNA, 597 bp, Cannabis indica
tatataaaaaatgtacaaaatccgtattaacataaatgacatatcacacaccacaatttgttacactttttattaaatcaacaaattaacaacagtaataatagtaataataatatgataataaaataattaaaaaaatattaatacctttttgttattatatttattatatcaataaaaactatctttgtttttattaaaaaactgcgcaacgcgcagttttattgcctagttaataataaatttgcacttttttatttgtttgttttaacctattttctattttaataaaaaaagtcatccccatgtttctctagaaattaattttttttgacgtattctctataacaaattgatataataatgtacttataatcatgtcttcaaatcatcaatttttttgggtaaatagcggcaaaacccctaatactttggttttggtttcgctaaacccccacaacccaaatttctgcgggtaaacccccaaaaccactattctgttatcaaaaacacacttccgtcgaaatttagctgttaactgccagattggactggaccgaggacacgtggcacaattttattggtccacgtataaaa

SEQ ID NO: 365277 - DNA, 688 bp, Cannabis indica
tctctctctctctctcaatcccgatctttgtcggtgttacactgtttgaaatcgaaacagagggcagaacaagggagaaagaatggagagccatttgacccaagcaccactagcctcctctctctctctgttgccacgtgtcaacgccagccacgggccccacacacaaagagcttgtcccccttcagcacgccgagcacgcgtgaggcacacgacctcaccttggtcgtgcatgagtctcaccaccagcctcgtgaatggggctctctctctctctgtgtctcccacttgcaccagccaccattttgtggcattctctccttgcgtcatgtggcaccgattcactgttgaaattattttatcaggatctagatttactaccatgtatgttgtttaacatcctaatatgaatttctaaaacaatgtaaataaacacaaataaagtttgagaaaccttacagtgggtgcagcggaattaaatgacttcttccactcatatctgtaacccttgtatcctctctatagcagagtatcaccaagatctgagcccgattctccttcttgttgattggattctttcacagtcttaaaaataatattctttaatattttgtatttacatttaattatttcatatttaatgcttagaagttataattttaaaatgaaggaaaatctattttttgtt

SEQ ID NO: 365278 - DNA, 600 bp, Cannabis indica
tctattaaaaaataaatattatcaattaaaaaaatgatatttaagtttaaatatattaaaaataaaattttatttagatattgggtttgaaaattggtaaaaatcgaaatttgggaaaaaatcccatgaaaatcggattttgggtgaaggatgcacgctgcccacgagaaaggctgcaaatgagccactacgcgcgtggaagtgaggggctgggcgagaatcctcgacaccagcaggatgtcactcggcggacgtgcagggtcttgcggcgaggtgcacggattcagacaaggatccatgtcccttgtccacacgcgtctggctttcttgtccgaacgtctgtgcgtgcgatgcacccatcttcgacccattcaaacctgaaatttcaaaaatttataactccttcaatatttatcggaatcgagttccgtaaaaaccaaaattgcttagtttttcacaagaaatccaaataaaatattttcaaaaacaattcaaatatttttatggaaataattttgttcagcacatacattcatcacataagcacaaaaaccaacatgaaacaattcaaattaacaaaaatcatcgttttaattcata

SEQ ID NO: 365279 - DNA, 585 bp, Cannabis indica
accagaaaaaaatatagaagctctagcacagttatgagctaccatatttgctgatcgtttaacaaataacacagaaatagttttcaattctaacaacagttttttacactcttggataacttggccaaacattgaaatcatattcacctcgcttcttatcgcttggaccactgttaaacaatctgtttcgagtgtaacatgttgccaattatgactcttaatccaacttaacgcttcacgaatgccaatagattcagctacctcgggtgcaaccgaaccagaaaagagcgccatcttcccctctattagcataccgtgatggtctcttgtcactaacccgcatccatatatgttaccaccatcaaagagagcagcgtcaacatttaccttgatataattaacatttggcacagtccaatgctcagcacccaattatggaatttttgtcccaccctatttgaagaataggaggaataggcagactgaatttaatgctcttataaatatatttaattagaattacaagtatataaatacatacaagagagtcatggtggtcatataattaagagagagagagagaga

SEQ ID NO: 365280 - DNA, 838 bp, Cannabis indica
cacgtgtcaagataaaaggaatacggatcgacgatgtcactttttatgaaataaatcattaattgcgtaaatagcagagtatattcacaactcgctgactgtaaaattttatgcgaggaaaaaatatacaaactgttgcttagtatattaacgagaaaccatatgtcgttagcgaggcatcaagtatgttacatctgggaagatgaaagcgacgcatatcgactgcggaaacacttagtgtataacgtacaaacaaagtataatagtcgggttggcatgagacccgataagtgaggtacctatctcgctatgggaaggttcattcctgtaactttccccagttaacttcagacatcttctcagtgaggctaacaatcctgacgagtcagaagctaacattcaaatgagcctcaaagaactctttgttaataagaattgcgatcgtcacaaatgaagcgttaaactttcaagcaaagaagcgacaagacgtacatcgtcaatctcaaaaggataaggaaaaaggctccagctggctactacggtcactggaaccaagatcttgtcgagacatcctcggacgtacacaattaatgacgtattaaaacacacgatcactttgacctagtaaaagcgggaaaatcacagctatatgattttcaaataataatcgtatttacattacgtgatatgtaatcaaaccccatgattttaggggataattgttataaatagattacagtcaactttgtaattaactgcctactatgtaattataaatagtggcaagtaagatccaaaaagggacgaaaaaatcatacaagaaaggccctgagaaaac

SEQ ID NO: 365281 - DNA, 576 bp, Cannabis indica
atagatcatcaatttgaggcaaagtgtacttgttcttaatggtaagcttgttcaactcccggtaatcaatacacattcgcaggagccattcggtacggtacttgttcttcttcccaaacaataccggagcaccccaaggtgagtagctcggtctgatgaatcccagattcaataactcttgcaactgtatctttaattccttcaactcagctggagccatttggtacggtgctttagatactggatccactcccggaatcaattcaataacaaattcaatttcccgggtaggtggcaatctcggcaagtcttctggaaagacatcgaggaacttgcttaccaatctcatattctcaggccctgatgtcacagattggctggtatccactgcggtaactatgaaacccagacaacctcttctcatcaggtccttagctttcaacaatgttattcttggtatatgtgccccctgaattttacccacgaacaccgccgggttagcactatcgggctcaaacaccaccatcttccgtttacagacaatcgtcgctccatatttagacagaaaatccattc

SEQ ID NO: 365282 - DNA, 1134 bp, Cannabis indica
agctccgctctcccgatggcatggccttttccaaattgctcccacccgctcctggatggactacttgcaacgctgatgttactatcaatgaacccggccctgggcataggtgggctaaacctgtgcctagggcccacccagcccaggggcccaaaaaattttttcctcgttaaaattatacaattttttttactgattttgaaaaataccacattgtttctatcataagggcccaaattttttttttccctatggcccactttgtttccgggccggccctgtcaatgatatgctatttgttggagatgctgtcttcaggaatgaagaaggggaagttacttacatctccactagacggctcacctattccgacccttttcgaggtgagattgcggcattgatctggggtgtggaatctgtcctcagtaggggcattaacaatgtaattttccagagtgattcggctggcgcggtggaggcggtgctctggaagcggaatgagatcaatgcattgcaccacaatgttcaggacttggtgaagacgtttcataactttgctaatcgaccttgcctttgggaggccacctggatccctagaaggcttaatggtgtggctcacgatgtggccaaatgggcatcagtgcaaaccaattcgggagcatcgatctgtccaattttgacagctcccttctcatcggatgagcagatggttgttttagttttcttagtcttcttagcgctttgttgtttgttcttttcttgtgttagtttgttggtttcttagctttggtttgtactctgttaaactttgggttgtgttggtgttttttttcttgtctctattgagtctaggaggtccctggccctagtgctgccttttgttcttttttgttgtttgggggtgctctctcggagcccagtaatataaaaaaaaaaaggtaattccataaatatagaaaaaataaagctagtttagataaatatggtaaggaaatttaataggaaaaaatatgttatttaaaataaaaatttaacatatatgggattgaattaccataaaagatataaaattcacttcatatttttttaataaaaaaataaaacaaatgaaactacagtgattgccgaagttgt

SEQ ID NO: 365283 - DNA, 530 bp, Cannabis indica
atatgacacaccatgaaaccatccaatcacaaacaaatcgttttaagtccaaatttaaatcaattaccatggctctgatgcctgttgttggaattaattttaccaggatcttagatctactcacaagtatgttgatttaacttctaaaactaaaattgaacttctaaaacgataattaaaacacataaaagttaagaataacttacagtgatggcaacggaattaagtgtctccttccactcagatctctaatccttgattcctgtctgtagcagagtataatcaagatctgagtctgattctccttcagttagatgtgatccttcacagtcttccaaactatgattgaggtactgagtgatgtgtgtgggcacttctctctcacaaggattttcgaaattctctcttcttttctctcttattttcgcaggttatcacgcatataaagacataccaagagtgaagagaggggcggctatatatagggagaagggagagcacaactttccaaataagcagtttcctctttt

SEQ ID NO: 365284 - DNA, 759 bp, Cannabis indica
aatcaactccatgtacctgctcgcaagaagaaatatgccgaacagggcaccacatacattcgctcggacggagccctcttaaccgggcagtgagcaatccgcgcaacatgccaacacttagcgaattcagctttcgcatcgtgagtcaccgaagaaattcctataactttgggatcagatcacaaagatatggcaagcttatagccctataaatagtgattcatgctcacttggtaaagggtcgaaaaacttatctaagaattcatattcagagatactattataagagctctatgaaaaggaaccattttccttattcttaagtcaatacaaactaagaggattaggccattaccgaactgcccagggctaaatctctataaaattcttgtgtctttattctatttattatatcacactcatattatactgtttattgtttacaatttagactcactgttattggttaaaagcgaggtcaacattttggtgctttcattgagagcagaatcaaagatcgctctttatctcaaatctaatcgcaaatacaatggtggtacagactcgtagaggcctggttgatccagcaaatccacaggcggtggatcctgcactgcagaacccaagaaacataagggttccaccaaccacgaatcccgaacaaccatcaactgtaggtcacggtgtgacgactcgtgtttgtgaaatcgcgcctggtgtgcaagagactgggaataccagttcagcagccaaccaggg

SEQ ID NO: 365285 - DNA, 536 bp, Cannabis indica
agtctcaatggctccattttttgttttgagtaaatgataaattgagtttttgactcactttggatgaaaaatttagtttgtttaattttattttatgtgagtttacgcttgttttgatgtgttttcatgtttgaatagattgcatcgagtacttcaagtgaaaacggtacaacaaaatgaaagattagccaaaaatattgaaaaacagaaaaatgatatacattatttaaattggtgtgaaatattcatcttactttaaggagacactaaataatacacattgatgcataactttttattttcattctaatctttcttttaatttgttttacaaataatcataaactaatttttgtcaatgagcataattatattataacatgattattaatggttattaatgtattaatataaaatataatattttacttggtatcatagttagtattaaattattatagttatagttatttttagaagttttaggtcaattaataaaaggaagtaaataaataaaggctaattagaatatttat

SEQ ID NO: 365286 - DNA, 521 bp, Cannabis indica
aaaataatttccaacagtatccacatgtcgactctctcgtcattacaatttagcttgccaacaaaagaataaaaagggtattagtggataatggaagctcagtgaatatactatacaaggatacactgaggaaaatgtcattgcaacatgcaaagttaaaaccttggatggtgaatttttgtagatttattggcgataatgtcgccaatcaaggcattattgaaatccattaaccgtaggagagccacctttatccacaacattaatgcaagattttctagttgttgacctaccgtcgacctataacatactattgggtcgccctgcactgattggacaagggatagttagttcaattaaactaggggtgggcatcatccaatccaattgaaccgaaccgatacaatccaatccaatccaattacaaattttgatatctaattacaattggattggattggatgctaaaatttggatcggttaatggatgtcaatcttaaatccaattaaaaactgatcca

SEQ ID NO: 365287 - DNA, 548 bp, Cannabis indica
ctttccctctttaagtttgttgaaaatgatgaaaaaatgagttatgcatgtatggtttttgatgttgttgctgctgttaattgttgttgttgtttcttggattataatgtttgaattgaatggattagataggttgaaatgcatgttgtttgctttgattcaagcttggtagtttttagctcaaaactatggtttttctaagtgaaaaggtgaaaatagctgctgtaaagtttgattgtgtttgagttctgtttctgtagttttaatatgcatgaatatgtgattttaatcaaggtttggtgcatgttagggttgtttgatcaagtttgagtttggaactcaaagcttgatgctttaatggtgattttggtttgtttgcttgaagctcagtttttatgctttagaaatgttccttagggtctatatagcaggtctggaagttttggtgtggtttggaattgatttgagcaaagtatgaatttttgaatttagtctgcgaggaaccggaattccggttgtgcatccgaaattccggatggggttttgaa

SEQ ID NO: 365288 - DNA, 575 bp, Cannabis indica
aattcttagataatatatttagggtatactcttagctcaactactttttcgaccgatctcttgcccagtgaatatgcatcactatttatagggctagtaagcttggggaggaagagtttcccctctcgttacaatgcgtataaacagaaagatcgtgggatcaatgctgaatgcaaggatcgtgggattgaggctgaatacactgatagcgggatcgtgtgtatgccatatccacgtaaattgatccctgagttatagggattgtgctgatgactcacgatgcgaaagttgaattcgctaagtgtttggccattctgtgcggattactgaatactttgatctgggcatgccagtgaggcatcctgctcggactgtgctttccgagcagatgttccaagtagactccacgtgccaccattcatgtgatcccacgtcagagtgcaaaaattgggataacacccttatccacatctccctcccaaaggagtgattcgtaatatatgtatgtatggtaatgaaatgttctggtttgctgtctttattggttttgtttctttttttgggatattttctta

SEQ ID NO: 365289 - DNA, 1251 bp, Cannabis indica
caaacaaaagaaagtccagctgaaaagtgcaactttcctaacaaggaaaagagcaactaaaaaccgaaatcacaaggtaagaattcggttaagtatgcaaaggaatcttaccataaatgaaaaaaatattttgtcaactaacttgccaaaaaaaaagactttacagtctccccctttggcactttagatgaacaaaattattttttaacacaaagtacctgcaaattaaagttagccataactaataactactccacatgagtaacacaatcgaaaaccaaaaataacgaaataaacatgctaacttttaaaccaaaatagttcacaagtaccaaacacaactccccctagaaaaagggtctagagttggtcaaaataaacagttaaaaatcaaaatattactccccctttttgtttatctaagggccaaagataacaaataagaaaatatagtaatatgtccaatcaaaagcaaagaggaaaaaaaaaaacttagtctcagtaaagcttgaccaaggtggacagctgctttgacatctcttgttgaacttcctccatggcagcaagacgattgttcaacagctgaacatcattcttgacctcctggatttctgcagaagcagaactcgagcttgcagcagcagcagcaccagccttagacctcttttgaaacactccatcaaaatactccgagggttggaatgttgttccagtcaatgaaggctcaagagtttcatgagattgggccacatttttctaagaggacaaaaccttaaagattaaagttggaaacacaagcttaaaggttggctttttacctcttcgaaatgagacaatttggttcaaaatgtgagaggccaagtcaatagatgctccagaggtgatacggtagaggaatgaggccacatcttgagacaccacagtctttttggagtttggaacccaattgctaagagcaaatctcatgagagatgcatgagcaaaggtgagatgagtcatgcgaagactctcccccgatttcagttcagcccgtgcaccagtgagttcagtgagcatcaattggctatccatagacattctggcatttgggacattctctggcagttgcaaggcttgagatatgtcttttttagaaaaggaaaaccaatgtcctctaacatacacttttcgataaagtcgagaactctcatcaagaaaattatcagataaattagcatagaaatctttgacaatatttgcaatgtacccttt

SEQ ID NO: 365290 - DNA, 550 bp, Cannabis indica
attcgactcttcaacccaaaaatgtaggagtttcaaagagattgtaactcacatagaaaagagggatttttatatttcaaatgttttaaatatacttccctatttccgataaattgtgaacatattcacaaaggaaagggacctaaaattattatctagactctaagagtaattctctgcacattattctctttaagaatccttatagttgtagccaaaatttactttcttctttagtgatatgcacaacattatctcaatatcaataaaagtaaaatgggagtaggtcattactttaccaaatgggccgaacctctataactcttggagttctttttatttgcttattatttcaaattttttcttggtgattgattagtgttactaagactccgagttagttagcaaatttcgtagtcgatacacctgttttaagccctgcatgggcgtcagtctgggccgtaacctttcgaaatataggctaggcctagcacgacccactatctgaaacaggcctcatccagtacacgaaaaaaaataagactttcat

SEQ ID NO: 365291 - DNA, 1115 bp, Cannabis indica
agtttatctgtatacataatgtgttttttcctcatatgtacacatgatgttattatacccaaaagtgtaaaaagataaataaaaaaaaatatatcgcttaactgttaactcttcttttcgttcttgcctgattcaatctatagaaagattaatgaaattaacaaattaaatatatatatatattttctattatctatatcctatttagtttttttttgtatttaaattatagagtaatttgcggcataaatacttaagtttaactccgagttgcaaataaatatttaaatttaatttttagcggtaataatacctaagttgtaattctggaacttttgtaggtacctgactattaattgttaagtaaattgccacatgataattcctaattagtccaactcattaaattttattcttttttaaaaaattaattaaaatatatcaataagaaaatgacacatggataatgacataatattttaagtgttaggtacctaccgagttctataaatataacttaagtattattaccgtcaaaaattaaacttaagttttatttgcaattgcgagttaaacttaaatatttataccgtaaattactctaaattatatatttattctacttgatgtggttaataattttttctttaattattaattggtttcaatcccaagtttaccaaactctacggattttcattcttttacaaataggttgaaatcaataaaattgataaaaaatcttttgtcaatttttttttggttgacaaaattcaatattacaactttgcaatggtttaatttattactgttataaatcataaaataaaaaaataaaataaatactactttagatttcttttaaataaaaataaacataatgaaaaagtgatatagacacaaaccaaacgagtgtatatatattttaatattactatagataattgggagatggatagttcaattaagaaaatttgaatttttatattaaatttttttatatatataaaaaaaaaaaaaaaaaaaagaacttagacttaaatatataagcataaacatatacattttttaaaaatataaacatatatatttttaatagaatatagatatagtgt

SEQ ID NO: 365292 - DNA, 502 bp, Cannabis indica
tctctctctctctctctctctctatgcaggtacacacccacggccggcgccgtcgccgatgaccacctgccaggcgcacgacgttgctgaagcttccccgaccactccggcatgcgtttcgactaagaaatcgagatctacgcccccaaaactcatatctacgcccctctctcgtctcttttgttttccctctctctctttctctctctttctcgctctctctctctgtatttttttctgcaggttggacggacgaggacgacgatggggttcgtggctcgaaggggatggggacagatttgtgggttgtggttcgacggggatggtttgggtttgtgggtttgttgtttgatgatggggacaatattcttggttcgacggggatggatgggttcgtgggttcgttgttacgctgatggtgggtgaatcaggtgatgggtgatgggtgatgggtgatggtgggttgtggagggtggtggtgggtactggtaatggtggtgat

SEQ ID NO: 365293 - DNA, 1034 bp, Cannabis indica
aaaattttttgattatttttgtttgttttatttattttaattataagatcagatttactcaatttattattgaaatttgaaatgatcttattttaataataaaatactaataaaacttaaaaataatctagttagaatttcaagtttgctaaccatatcagatatttaaaatttgttatttttgaaatatattttgttaatttaaattataagattagaaaaatattaattttgatatttttatcttattagatatttagcttaaatttttatatttctatcaaaataacatgaaattttaaaagttgttaaatttggttggatagatattttaggattttctaactataatattttcaaatttgggatattttattttatttatttattaattaaaattgtcaatattctaaccatcaaatatcttatttttaattttgtttatttttgttaaatttattttataaaaataataagattagaaatataatatcaaaaagatctcaattttaaaattaagttgttatattatattatcttaatagatatttaattaatttgaattatttaaataaactatataatttgaaaattaattggatatttaaatttcagtttgaattttagatatttaggagatttgttagaatttaaatattttcaaatattttctaacaacctaaatttaaattctagttaagatattttttaaatatctattttaaaatagaaatatcttaacatacttaacagatattttgttacatgtttgtttgcttgtttatttaattatttattcaaaaagaaattaaacaaacctattatttatttgatctaaattgctatgattaacttgttgacagatctaatgatttgattttaatcatagtccaattgccaatagatattataaataatttcaaacacgtaaaattttgtaattttactttaaatctatgataaaccctagtaacatgatagggtccatccaaatcatttgacctctgtagagcctatatgtttgctttttgggc

SEQ ID NO: 365294 - DNA, 601 bp, Cannabis indica
tttttttaaaaaaaatttgattatttattattttattttaattataaggtcagatattttatattttatttaattaattaatttatatgaaatgaccttatttgacgttaaaatattaatataatttaaaaataatctagatatatttaaaatctaaccatatatttattaattttttaaaaaatttggttattttatatattttattaaattaaattatgaaattagaaacatagtaattatttaccattttatcttgttagatatttattttattaaatattcttttaaaataacataaattttgaatagttggttgatttttttttttaaaaaaaatatttagagttgttataaccataatttttgaaatttgaggacttatttaatttaatataaaattaaattaaatcatataaccaactatcctaacttaatatatgtttgtttatttatttaattgtttatttaaatcttgtttaattaagaaatttttacatgaaaaatccattttgcacaatttattacctaaatacctctacacgcctatgtctttatttttacttacaaagttggttttattacacaaataccacttagt

SEQ ID NO: 365295 - DNA, 564 bp, Cannabis indica
gtattgggcctggatggcgaacaataatatggacactagcttcttagaggagaaggaagagaaaactttagctctttacgagaagaccaggatggaggaagaagatggcgaggtggaggaagaataagaagaagatctgtccaagtctctcagcatgtagacttggttatttatttatctcccttttctccttttttttttttaaaaaaaaatggccttttggccaagagaatggtgtgcccctggcgacacttttcgtaaagacagatttgtaaagttggattgccaactttgcttttcatacttttaagtttaaactttaatatgttgatgattgtttgcgtttcattcacaatttaaacaatcacatgcataaagtttattaggggttcccattgctttgcattttcctctgatgttaagcagttaatttcctactttacgcacgaacaacttatatgcccgaccctcaacccatcattgattccacgtcgcgatcatcagaaatgatcttattttaagcaaactcaaatatatttttaatgaacttgtcattttgtatat

SEQ ID NO: 365296 - DNA, 619 bp, Cannabis indica
ttcatttgatgacctgatcatttattggttgtttgaccacggtctagagggtttttaaagtgtataatatacacccttaagtcgctggtattggttagctctcttggtgtatcaattctatattactttttaaagttagagagtgttttttttgttgtatgaagaacatgagtccaacaagttcttagtattttattattgtgttactctatattgtttcttgttgaaattatgcaggttgaacaccttggatgttgttaatcaagctttgggagaagtcttgttcgtgagtcacctttttgggaggaaaaagtgcatgtgagtcactcttcgggaggaagattgcaagttagccactcttcgggaggaggattacaagttagtcactcttcgggaggaagattgcaagttagtcactcttcgggaagaagattgaaagtagacactcttcgggaggaagattgcacgtgagacactctttgggatgaagtgtgcaagtgctacgaattgaagggagttcaaggtctcggcacttcagaaatttgattagaagaattggttacaatagttgcaacaaattcaaagagggattctttatttgtataagtcaatttggttt

SEQ ID NO: 365297 - DNA, 539 bp, Cannabis indica
ttttaaataatgcatatttttttatttttattttcaataattatgtaaatttggatttcttttatttttaaaaataattatagaagattttttatttcattcagattttcataaatatgatgccaggaccataatatttgaaaggtacttataaccgttaacaaacagaaagaaaaatggataaaaatctcaaaataaaaaaattaataatcataatgaaacaaaagaaagaaaacactctattaaagaatgtatgtttatgtaatattattatgagtaaattgcaccaaaactccaatagtcacttcgctagcaattaatttctaaaatctaaattttgacggtaaaaactcctaaaccaaaatattgttagcaaaatccaacttctgtttatctcagtgccttattttcctatgaccaagtgctaggtcaactcctagtactatgtcactcaaaatgtaatcaaatggcatttccacgtgtgcattattgtacacgtggtctacctacattggtctacatactatattaatttaaaa

SEQ ID NO: 365298 - DNA, 629 bp, Cannabis indica
aaaatcgcatttgatagaatggtccgcattcttgcgaatactgaccaccccatcaatatgcgagcagagtgaatactaaatatgcgaatagaaaaacaacccaataaattgttaggagtgtactggtaacctcagcgacatgcgtctttcggcatgaccctgaggtgacgaggagacacccaccatttcaaggagtccaactaaagtcgcaacctgcgaataagtcacgcatcttgagctaagcgatatacctctagaaacggctgggagaaactcagtgactcaaggggcttgcgttctcaagcacgaccctgaagttactgaacttacagaaaatgagggaaaatggggatttttggttcgaatcagggggtttaaatacccaaatccatcattaattgggatcacgacacgtggcaattagaatgcctagagtcgcctaatccaacggccaaagatgcccacgcctacacagaaactgaagagttctgtgacgtggcaccagaaatgcaataaaagtaatgattatagccgtcatttttcgaaactctggaaaggacaaccaaaggtcacctcctcgtgacaacctttcacctgtctctcgagtatggtttcccttgtgactgcac

SEQ ID NO: 365299 - DNA, 787 bp, Cannabis indica
aaaacaataacataaaaataaaaacatgcagaaaacaacatataaacaacttatgaataatactaacacaacacaaaagaaatatgagaactacattagcaacaaaatctatgcataactcagtagaaaaataacttaaccagcttgtgagataaattgacatcaataagcattatattttgaagttgagatcatttaaaaaaagattgaaaaccaaatctaaaggagattgttgaataataaaattttaaatttgaatgttatatctttctaagtcaataccacttagttgatcttaggtcaatagatcttaaatctgagatggttaggttctagcttaattgcattatttgcgttctttgacttactcattaaagttgaccaaatggatcttttcaatacttacatctgggaacatggtagtacaattgagtgagagcgctaattatagatatagaatctatagcttctgtaactatatagaagtgaagtaatgattttctttgagcttggcttaatagagataaatggaagagctcttctttcagtaattatattagtttactgaaatatcatttataggaagctaagtgttttaaggataaaatacattgagggctagaatggtaaatttatccctactcgatgtaaatcatctatagatgatctttgattatttggattaaaacaatggataattcatagcgtatctatattggaacatatagagcgttctatgtaatcaggagtgcaattctaaatctatagtggaatcaagatgaattaa

SEQ ID NO: 365300 - DNA, 730 bp, Cannabis indica
atatataacataagtagctttttttttattaacattacttaagtcacgatgaacaataacttgatttaccttacttgttttacagtgaccatatggagctgttacaatcaatggttccaagaaatcaaaaaaataaacaaaaatgggttgcagaccaacatcttcaaactttcatcgtcaaacaaaaaataggcgtatgttctgttaggttatttttagtattaattttagattaattttagtatatttttaatttagttttaatcatgtttggagcatttttacgcttgttatcttttattttagcagatttaaaatagaagaagattagaaaaatatcagagaaaatgatagaaagaaaagatagaaatatctcacaaaaagatgatatttaaaatagagaaaatcatgcaagaaaataaagccgaaacttcaagcctgaattcgactgtcttttgattatattttggaaaaagtcaaaacatgaaagttctagatctatcttttatctttccggaacatcttgaatcatccaattccgagcaatatcaaaagagagttatgaccaaaatactatcagtcaacgcagtagaaaaaatatctcgtttgaggttttccaaaaatttaaattcgaattggaatttaaatatgtgcgtttttccatctttttaggcattcaatgcctatataaagggaagaagggagttgatttcagcaagcaattttagag

SEQ ID NO: 365301 - DNA, 685 bp, Cannabis indica
acgagtatgaaaaatgttctcacgttgtacctcttcttttgcttgcgagtttaatgctcgtcttgtgactagtgcaagcatgtcactgtattctggcccatactcttcatcttctatagaagcatcttccaatggtggtatatcagcaagctcttcttcatcttcagaatctacttcaccattttcccgaatcaccataactctcttatttggacattggctagctatgtatcctccctcttgacatttgaaacactttatctcactagaacgagatgaaagaggggctgcttttccttgaggggtagtagttgcggtggctggtttgggtgcagaggatgaactaggttgatcctctttctttgggaagtttgacctccaaggtgttgtatttggattgtgtggacttggccttggctttgagctcgaactacccttcgtgagttttctttcaactttgattgccatgtgcaccaaatcttccaattccacataatggtgtagttcaacgttattagcaatctctcgtagccttgacgaagaccttgcatcttgaggtacaagtctcgataatagtgagatggtacaaaacgcagcctcattaccctattcatagcctcccaagcgtcaatatctcgttctccattcctcctcctattgatgcacaactgatcccaccaaacaa

SEQ ID NO: 365302 - DNA, 669 bp, Cannabis indica
tttgaatggctacaataaggtttaaggtggacacgtttactggttcgaatgatttcagcctatggagaatcaaaatgaaggcttttataattcaccaagggatctatgaagtacttgatgatgaagccatggaattgattgaagacaggaagaggaaacttgaaattgaagccaaggcacatagtgtcatcctcctcagtcttagtgatgaggttttgagagaagtttcagatgaagacaagccctttggtctctggaacaagttggcttcaatctacattaagaaatatattgcaaacaacttgtatctcaaaaataagttgtgcacacttcgaatgggtgagtcaaaggaattgagaaagtatctagatgattataacagaatcaatcttgatctaaataatcttgggatgaaaattgatgatgaagaccaggctataatcatgttgagttcacttcccaagatgtatgagcactgtgttgatacaatcttgtatgaaaaagaaactctaaccatgatagaggttaaggttgcattgaattctaaagagaaattaagaagaaggaagatgagaaagaagagaccaatgggtaggggtgttcacaaaaactgataaaccgaaaccgaccagaccgtaaccaaattttcggttccacgtcatcaccgaa

SEQ ID NO: 365303 - DNA, 581 bp, Cannabis indica
atcctgtttgggtatacaccgaccaacgtctgcgccaagtattgcaaaagccagatgcttctggacaattactcaagtgggtgatagagttgggacagtatgaaataattttcaaaccccgtatagtggttaaagggtaggccttggcagaatttgtagttaagtgcacatgcaaagaagaaaataacataagggatgatccagagctagtacaaggatccctacctgaaaagaatgaagacagacctacctggaaactatatgtggacggattggctacagactagctttctggtgcaggaatttccctcatgacacatgggggcaatacctacacggagcaatcaaatttgggttgaaagcctccaataatgaagcagaatatgaagcactcatagctgggctaaaattggctcggaaggtacaattgtgtagtgattcacaattggtagtaaatcatgtctcaggggaatacgtggcttgaggagaaaaaatgatggcctatctaagcaagatacaagacctgctcgcacaatttaagggttacatcctcagacaaattcaaagagaagaaaatacaa

SEQ ID NO: 365304 - DNA, 498 bp, Cannabis indica
acaatcaaaagcttatcccttttcaatggaagaggtgataaatcaagattgtgagaatacaaggataagagattttatgtgaaagccattcatgggtgagcatgatggtgaatattatgtgatttactattttatatgatagtaatataatatatatatatgagttatatatatgtgacatatatgtgattatgtgtttgtatcatattaatatatatagtagtatataatatgatatttaaattttatatcatgctattatatgtatatatgtgagatatataatatataatatgtatgtatgagtaatatatattatatatatgtagagcatgtgatataatatatattagtgagattaaatatgtagaaataattacttctatgtatttatgtgagacatgcatatataatatatgttatatatgtgtatataatatatattcatgtatattaatgtgtatatatatgttatatatgtgtgaggtatgtaacata

SEQ ID NO: 365305 - DNA, 636 bp, Cannabis indica
ctataagggttcattaaaaaaattctcacctacttctcgccacatttcccacgtgcgcccacctacctttttcctatttcccacatgcccaccgaattcttctcacttatttcttctccattttccacaccctaaaacgaaaatcttaactctccaaaaccccatccacgcctccgcaccatcgccctcctctctcgtcgtcttcctccctctctcgatctccctttcttctcatctctctcgtccattgatctccacccacccctcctctcgtcggtctccctctactctccatcgcatacgtcggaccaccaccacctcctgtcggtgtctctctctcatcttcgtcttatacgtcggaccaccaccacatcccgcctgtctccctttctctttctctctctccgagctcggtataaatatatttatttatttatatactttttaatttattatatgtatttattttgttatttttaaaatttaatgtattttaaagttagttgttattgtaacaaaaataatttgttgttttattttaatttagataaaattataaaactaatacaggaaaaaaataggggaaaatacagatttttttgccattaatgggtataggcgacgttttaaaccgtc

SEQ ID NO: 365306 - DNA, 537 bp, Cannabis indica
ttataattatagaactattaggccaacatcataatctatttatagtgcttatgacagggctcgtttggaacgttgtattaagttgtgttgtattgtattatattgaattagattatatatcatatttttatataatacttgtatatttaactttattttatactaaaatattatatatttagaattgataaaaattaatacctcatataattttacataaaaatattgtatgaaatataatttaatataatactatataatacaatatggtgtaatacggcgtaccaaacgaacctcaaaagtaaataattgtgatatttatcattgcctaggaaaataatagagctaaaacacatttttattatcaagtcattgacgaggagattcacatttgtttagggaaacttacaaaaatactgtttttttcccaaattttacaataatactgccacacggcaattatttcttttttactgtccaagccttttttttttcttttatactgtccagacctaaaatatttacttttatactgtt

SEQ ID NO: 365307 - DNA, 639 bp, Cannabis indica
cccggatgggttccggacctccgatgcccgttctcttggatccttcggcctatctttcttctagctggttccgtctctcggacagctatctcggggatgatgcaaccagtattaagattcaaaactttgctagggccgaattagagagtcagggtaggactagcttgattgatttttaagtgtttactgctttcacagatattctaacacttaactcttttctcttgttgcagcagctaatcccatggaggtgatcttggccactctggtcggagcccacagtccggatgcttccctaactccaacttcgtcccagatggtcacccccacgaaagcttcttccagtgcccctccagacactattgacttagtggatgaggaggaggtacttcctgaggaagctaaagaaggtcaagaagagcaatgggctcttcctggggaagttgaagaaagtgaagaaaagcaagaggttgctctggtctgcaagcacaaaggcaagatggtggctgaggaaacacctaaacggccgcggagagtggacactccggccccgagccgtgattccggaatccctcccaaggtggaggagtttacagtgcctcctaacattgtgctgactccggttcccgtagatgaggc

SEQ ID NO: 365308 - DNA, 400 bp, Cannabis indica
taaaataatttccaacatatttgacttatatgtgaactatgttatttttgtaatttttgctcggcgacaacggaaaatgcgatggatggctagtttgatcacatgggtaagtttagaactttatttcttagtgggaaatagtttttgagaaaataaaatatcgggattgagcggggttatgggatttaaccattttacccctagctttagaaataccctagttttatgttcaaggggtattttagtaattttaaatagtgggataggtggttgattttgaggatgacacctagcaattatttgggcagcaaaggattaactaaaatcctttttccaattaaagaaatcaaaaagaaaattagaaggaaatatcatttcccttgaagttctctctctctct

SEQ ID NO: 365309 - DNA, 1008 bp, Cannabis indica
aaatacaaaattacacaaaaatccgaaattaattccatgaaaaagcatgaaaaaatgaagaaattgaaaattttgattcgatgcgtatggtatgcagtgcataccatccgcacgcacaggaaggagtgcacggccgagaaacctcttccagagaggcggcaagcagcctcgttcgctcgcggaagcccaaccttcagacaaaagaggggcttcagactgagaaaactcaaacaagcccttgtccaaggagcgtgtgagcaagttaacactcggatccccgcgcgcatgtggtgtcaccacccctatcttttttttcaaaacatcaaaaaatcataactaattcaaattaaattgaaattgagttctgtaaaaagtgaattggttaagttttaccaaactatccaacaaaaataatgttgggttttgtgccctaaataaaacccatttcaatataatcagatttactagttaataaagatcagaataacattttatgttgcatggttcacatgatttatttcatgattatatttaatgtataaattctattaagtccagaacatatgtatttgttaatgattatagtgttgtcagcacagtggaatataatcatgattatatgttcgaaagtttaattccctgatttgtcagttcactggatttagactggcatgataatcagcgataggtattcttacaccttggataagtgttatgtcctttccagggcattggcaaagtttaccagtatcggatgtatggagtatacattggaagggaccgatattgaactttgattagatatgttaaatttaccgtaatatctattcaattcaatatcacctagttgatcctagatcaaatgatcttaatcctgatatgattaggttcgatctcaagagtattatacatgttctttgatttgttagttaagcctattttgggtcagggtgatacgtacattttgggaacatgatagtataattgagtgggagcgctaaacataga

SEQ ID NO: 365310 - DNA, 786 bp, Cannabis indica
aagaaggactaacagtaacaaacgaagaagaactagagaaactgcaaagttgttaaaggtgttttctgggtctgagaatttttctctctgggaaatttgagcaaagttgacaagatatgggaagtaaccgaaatgaaggaaagatggtggctcttataggcaaagttgcatgaggaacaggcgtcatcacctaccaatcgaacggtgggggaagcgcacgattcgaattctcagaaatcaacgaataagattgatttgcaattaaggcggtggaaacgtttgagtatccgtctgacaccattaatgcgctgtatcaatcaatgggcgtgaaacgaatcgacctctgcaaaaagtgaatcgttgcattaaaggccatcattaaatacaccctcacgcgctcaaagctcatgtcaggaaaccgaggagtcaaccagaagcatttgagcaagcgttgttttattttttcaaataaacaaggcttgggggtaaatgttgcccctgatttttcccaatatacgtggaccaaccaaacaaggacacgtggatcaagcaatgtacaatccaaaatatttgctaagtctttatgctgtaaggtagcttccaggacgtagctcccggagaaagcatatggaaccccatatgctcccggaagctcgaagtaacgttaaggcatctccgcgacgtgtcaggtttctcctgagcaatcaagtcgcatttaatgccgcatgggaggaagcgtgttgggactgctacacgcaataaagtctgacggcacaacctccaacc

SEQ ID NO: 365311 - DNA, 701 bp, Cannabis indica
gccggccaggatctatgcacaagttggttgaccaagaagtgacttatggaccaaggaggcttctgttcgaccaagggaacctggtctctgcaaggaaatgttgtacaaagctatcctcaacttgcaaaaggctggcctcctcttggtggagctatagtgacctaccagaccatgcaggccttatcctgccaaatcctccaggtcttgtcctacgagatcctgtaggccttgtcctgctagatcttgcaggccttgtcctacctgaccctgactggaccatggccggccaggattgacatggaaaaattttctgtactactctacacgtggacaacacaattgggttgcaaattgggccatataagcccaagagaatggctaaataatatctagattcaagggcactttagtcttttgaagttatctaacaacctatgcaagtatctaggaatttaaactgtaatctagggtttaggccccctaaataaaggccttaaccctagcctagaaacctaagtcactaatcctccaaattgttctaagttaaaaccctagtctttctttctctttctctacaacatgcccccaagggcactccctctcttctcttcatccctttcagacgtctctaaggcagtctcactctcccattagagacctgcctattgattcatgttttgtatccatatagagagctatat

SEQ ID NO: 365312 - DNA, 534 bp, Cannabis indica
tagttactatattttatagtatccaaatcaatcatgttatgatcttctacatcctaggtattttcgttctttcatatggcttatgttcgtcatgtagcattaagactgaatgactataaaagtacgtcaatacttccacatattatgggtaacgtaggagacatctctatttttcccctggggaatccttaaaattaccactgcttagctttcagttctcctctgaccatcaaatgaaaagtgaataacccgtcctcctctctttaaaataaggggtgcttctagttggctatgtcagtgcttgaaacagttttgttagttttttgggggtgatagtggaaaagttgacagataagtcacccttactaccactctacagaaccgtacatgagattttcatctcatacgactccttgttcaatttcttttaattcattggatctttttcctcgttcgagaacctctcccttcttccacttcattccaaagagtaactagaactatttcagtcacgttttcattcattttgaatct

SEQ ID NO: 365313 - DNA, 544 bp, Cannabis indica
tcacaatctatgatattttcctaattaaatattagaaaatataattagtactagaaataactatctagaatatatatcaatttaattaagtatcttttcaaaatttagaaaatatctaatttaacttgttatagaaagaatctaaaataaccagcttaaaacaattttcaaataaaatttaattaaatatcaaaattaagtgctaactacataatttaagaatattctattttaagtttaacaacttataaaatatctctagaatcttcaataaccaactcctagaatttctcagctttattttaaattcaaaagatcaaatttatgttgataaaaaaatattagttagtaataactaatttataaactaaataggaatatttaatgaaataaataaaataagcttcagaaagaatctagttagttaaaattctttgtttcattaaatacaagaaaaatacaaatagtttatctagaaataatatcttaaactaagagtgtttttcttaaaattaactttaaaatattaaaatgaaaataaatt

SEQ ID NO: 365314 - DNA, 575 bp, Cannabis indica
ttcgattctcttgggcagcagctggggattgggattttgagatagaagcaaggaattttagtgattcttgggagctttggttaaggtaatcctttctatttgctttccttcttgaattttgtaatttaggttaggttttgtagtgagtttgtgtgtcttaatggctgtatgtattgggttagtataatatgcaattctggagttgggagttgattaattatgtctttttgagctaagttgaagcttgtgttgagaattgttcaagctaaggtttagagaaccttagttgggtctttaatggtgttttattaaattgagttgtttgttgtggtttgttgcctaaaatgagttgtttggagtataatcaggtgttctggaagtttttagaaggtttggacttgaattgatttgtggggatcagttttgaggtttccagcttagaaccggtcgaccggttctaggagacctcgagcaaccggtcgaccggttggtacccaggattcggggttccggttgggaaccggtctgccggttggggctttttctcgaaccctagttttccctgtttttgtgtt

SEQ ID NO: 365315 - DNA, 981 bp, Cannabis indica
aactttaaaaatagtaaagttaaaaaattgtattgttttacttatttagaactaaaaataattttcgtttttaaggtattttgtttaaaaaaaagcactagttgggtctttgtcgtttttttttttttttgacattaattgattttttttaatgatataaaaatatgaagaattttaaaaaaatacttttgtttatgattatgtaaaatattacagtctatagagttcatatttataaaaatatattcataaaattttaaaattacaaaaatatactttgtttaaaaagaataaaatcacaattaaaaaataatgagaaattaatctcacgataattataaattaagtataaataaactatgaaacaaccaaaaataattaaaaaaacaacatcttaataactataatacaattataaataaattataaaataattaaaaataatttattatttttattaaagtagttttataaataaaatatttaaagcataaaaataaaaagatttcgatattaaagatttttatttttttaaaaaaaaaattgatgtaaatttttctaaaagcaacctcttataaaaaatgatataaaaaaattaaaaaaaaaaagataaacgtaaataatatataacggtgaatgaaattcagacatttcaaaaaatttccttctccgtcgttttattcagcctgccaattttggtgctcacagtccgatcccaccaaacttgatttccatctcatccccgctttgcttttccctatctaaattgtttcttcctgctttatttctctattatctttatatattaaaagtgtctatctaacggtaattcttggtttaacgattcttagtttaacgattttttttttatttagccttacacgattaacttaacagactgttaacgttaaacattaacaaataaataaacccaataattaaatccaaaaaattaaacaatctttttcaaaattaaaaaaa

SEQ ID NO: 365316 - DNA, 520 bp, Cannabis indica
aaagacgcacggtggcaagtgttgtgtctgcaacttctcagtattttgtgcagtggaagaatgctcaagataagtcgaacatggctcattatccctcacatattgcaggtgatggggcaatttcttgggttaagcctattgagaatgtactcaaaatctcagttggtacaacaacttttgaccacagttcatcatatggtttcaggttggtggcaagggatcacaacgggtatttggtggaggccaaaacagtttatcgcaggagtacaatggcaccagacatggctgaagctttagccattaaaaaggcgttaagttggatcaaggatcatgaatgggataatgttgagctcgagtccgattgtttctcaattgtcaaaggtattcgaagtaacatcactatggtttcgcctcttcggggagtgatgatggattgtcgaaagtattttaaacaatatttctttgtttttttattaaacgatctgctaatatgactgcagctttgctagagtgtcatatt

SEQ ID NO: 365317 - DNA, 584 bp, Cannabis indica
gtacttttttttttcatgaattccacacaacccttgttttgatttatttcaatcgtcttcttaagtgaagtccccaaaagttatggtggttcttttcagggctggccttgagaatatatgggcctaataagaattagattttggggccctggaaaatataaataaaaaatatttaaaaagagtgttatgggattcgaacccatgacattgtataatatgttgtggatcttgcttttagccaacgacagtgagtcaattattaagcaattaagaatataatataaatagagaaaaaataagtaattaataaagaacaccagattttaaacaggttcggccccgtttgtgtggtaatagtctactccccttcgattgtattaatttgagacaaagaacaaagtttttttctctctcgaagctcttacaatgaaatctctaagtaattctcttacatctctctctagagaaattctttcgatccctttcacagttaggctaagtcactatttatagggccttaatgcatgagagaaagtttcccttttgcttgtaaaataggaaagaatattcattacataattatg

SEQ ID NO: 365318 - DNA, 542 bp, Cannabis indica
tgaagccattaatttattggaggagatggccaccaatagctataattggcctaatgaaagaaataactcacaaaaagttggctgggttacatgaagtagatcctatgacaaacatagcagctcaaatttctgctttatctaatcaagaggcagccttagttaatcataagaatacatcaactgtagaaaatgttgttgctgcatctacatcacaaggccctgagatgagcatagaacaagcacaatatatggcctataaaacttacaataacaactaccggggaaatccaatgcctaactactaccatccggggttgagaaaccatgagaatctttcttatggtaacactaaaaatgtcttgcaactaccttctgggtttaatacacaacaacaagaagacaagaagtatttagaagacattctgggcacttttatgatagaatcgaaaaagaggtttaacaagaatgaagcaaggttaaacaacatagaaactcatatttctaacatggatgcttccatgaagaacatagaggtgcaagtg

SEQ ID NO: 365319 - DNA, 815 bp, Cannabis indica
  modified_base (5)..(5): a, c, t, g, unknown or other
aaaancaggatgtttggcatcaaagtcccttccacgctcgcaccactccacacggggtgtcgcatcaccccgtcatcttttgattatcagtgtggtgccataccatgtattttttgccgtatgccttaaacatatagtctcttcaatcacaaaattaacggaaaataacgcatcaccttatgaggcaccttttttgctcctgaattttctgaatttatctatctactagtgccacaaattggacatgaatctttatttgcatgttcattgtaaaataaacagcaattatgcttgcacacatgaattgactcataccctaaccctaatttctttaatcttttcttggcatcatagtagtttgatagaattttattttcctttggaaaagctagttttaataacttcagtaatcatcaaatatgttgttaggaatctttcccctaactttcaaatacaataactttgccaaaaagttaagagaagatatccaatcacaatcaggatacaactcgacctcaatctcttcaaataactcgtcgtgttattgatttgtatcaggattatcatccatttcaaatgacagctaaaggaagtcatccactattggaatcatctcgtcaattttagggtcatcatcagcgtcatcatggtcattgactacattagtggggcttgattctacttcactatggtaagtccatttctcgtaaccagtaaaaaaaccccaatcgaatatgtgtgcttttacaacaggtaaagtttgaagcctattgttcacacatcttacataagggcacctaattctaccatcacaa

SEQ ID NO: 365320 - DNA, 618 bp, Cannabis indica
gttgccgggcaccgaaaatgcaaaattatgaaatttcactatatgacatataaaatgcattctgaattcaaataaatcaaaataaataattatttaaatatcaataaataattttcataattaaaccctaattatctgcttatttccaaatttaaactaagtggtttttacacttctgggtttcttggtagactcaacctccaccatcttgcccttgcgcttccaatctagaggggccagaatctcgccttcttcttcctctttagcctccccgtcctcatcaatcaagacgatttggcctaagggaacgctcgacgaagacctcctcggggttaccgtcaggtcaggtgcctgaggcaaggcgggttcgggactgtaagtctgggcaagggtcgccaaaagctcgtccattggcctagctgtttcaagaacaaacaacaagtgtcagaatgatcacgagaagttatgcgcacaggaaaaaagcagtaaaactaatcctacccagggaactctaattcagccctaacaaagtcctgcactacaatctagcttcgtcatccccaagaaagttgtccgaggggaaaccagctggaagacagataggctgaatgatccaga

SEQ ID NO: 365321 - DNA, 493 bp, Cannabis indica
ggacaggtgagatgcagcctcctgggcgaagcatctcgtgtccgaaggaggcgtgaccgaggaattcagacaaaaattgtctaaagcacgcgcgtggacaacaccttgtccgagactctgcgcgtggtgctcgagtgcttgacactcaatgcaccaaaattttcaaaacaccataactctcttattttttttatcggaattgagttccgtaaaaacaaaagttgcttaatttttcacaaggaatccaaataaaatattttcagaaagaaaaaaaatatttttatggaaaaattttgtaaaacacttacattcatcaaataatcacataaatcaacatgaaaccatcctaatcaccacaaatatcgttttaattcatatttcatgaaagtaaatcattaccatggctctgaggccagttgttggaattatttaactagaatctagatttactaacaagtatgtttcattaagatcctaatatgaatttctaaaa

SEQ ID NO: 365322 - DNA, 567 bp, Cannabis indica
gtaggagccccgccacttactggagtcctagctgactccgacatgcatccaactgcgccctcaactcacactgccttctccaccatctcaacataggtgatcttgtcgtcgctagtgatcataaggtcatacttgatcttcacattaactccatcaagatatttttctttcttactcaaatcggttggcacaattcccgaggccaacctcgccaaccgatcaaactgcgtagtgtattccgttacactcataaaatcctatattctcgtaattactgatagccactgctcggcttccatgacgtccggacctcccagaaaaacagggggtaacagttcgcggaacctttcatacaggggttccattctatttgccgctactactatctcggcctgagcagcaggggtgggtgccacaggcactgcaggagccccctgctgcctcaatctttgaatctcaagatcttgttcttcaattctggcttgcatttcagcaaacctagtctcccaattctgggcttcatgctcggcttgagcagcctgggcagcctgtggcgggttctcatca

SEQ ID NO: 365323 - DNA, 500 bp, Cannabis indica
atttttgtaaaaaaataataaaagttagtataccatgtaaatttctcatattatatacccactttattttgtatatttaaattttacttttatttttaaattctttaagttatacccacttttattctcattatgctatgagtgtcttccttcttccattggaaacttgtcaagagattgagaagcttatggctaacttttggtggaaaacttcaagtgctaaaggtcaaggaatcatatggatgtcttgggatcgtatggcaattcccaaacattctggtggtatgggcttccgccacttacatgattttaatcttgcgatgctggccaaacaagggtggcggtttcttgtctcccccacatcccttgccagccgtgtgttccaagccaagtactatcccaactctgattttctttctgcagagcttggcaacaacccaagttttgtttggcgtagcatttggagcgcacaaagcttggttaaattgggttgtcaacga

SEQ ID NO: 365324 - DNA, 617 bp, Cannabis indica
tcaaaaaatccttgtcacctgtcatatgtctagagcaaccactatcaaaataccacatttgagatgcagctcttttatcaaaaaaaccggctagacattttttcttaatccatttttgtttcatacatttatgtttctcttgagatttttctaaattaccaaaataatttgttgtgaacatatatttcataatgaaacatttaggtctgatatgtccttttttaccacagaaataacaagtaggaatgaatctttttacctcagatcttactctttttgcaaatcctggagactttgcgtcagtgaaaacagtttctgcaacgacaggttttgaatctgttgtagcagacttcaaatttgtagcattaggaaaattcgttggaatactagattttacaaaattcgtgattccagaactttccataccatttgatcaaatgccagcaaagcctctttgacctgcattttgagcttcttcaaaaatagaagactcgggattaagcatttggatatttttcttagaatttcaagttccttctttaaaagagtaattttttcatctttaacacaaaaatcggtctcatattcttctatttttaactcaaaagtttcaattt

SEQ ID NO: 365325 - DNA, 530 bp, Cannabis indica
tagatccttgagttggagtcccatctttcaataagcagttttgaacaagatgttggaagaggctctttcattgatcatggttctagtcaccatttcattggctatttggacttcaacgaccagcgggtcgttgtgcggaaatctaattttgacagcatcttcatcattgaaggttatggtcggctctcctgctcgtgaaactttaggcttcctttcttccacggctaggataacttcttcttgctcgtgctgcactgttcgggcatacctctcccgagctttgcccgaatctccagcaatgtgtgggcctccaacaatgacttgcagatgtccatctactggtggaggtagcaaatattggatgttgtcgttcttgtgaccttggtcggtcttaacatacttttccaggtgtggattatttttccttattaggaattcaatttcccgcttcaagttgtaacattcattagtgttgtggccgtagtctccgtggaaccgacaaaattttgtcatgtcccttttgttggcat

SEQ ID NO: 365326 - DNA, 535 bp, Cannabis indica
catacaacgtactatgcagtacaatatacttttcttacctttaatctaggttcatacatttcggccaacccaagtggagaactatccctgatgatctcggccctatgtcaaaacaacggtaaacaaataagtgtttaacccaaaacactacttaatattcacttaagacaatctagggttttctaccaaaccccacggtaaaattacactaaaataaaacttatattttagctctaaaacatacaccatattgtagagctcgttgcaagcttcaaaacggtatatagaatgtccaaaacggacacccgagtcaaaagttatgataaaaatacgatttctgatctcttaggaatttctaaaaactatgaaatacaaaaacctcaattttcgcactcaccaaaacactaccaaaacttatccaaatcactccaaacttcacagagcacatatatgccataaatattaccatccttatgtaacagaaattaaaatcgagccctgaaataaaaaacgccattaacgttcgtactaagct

SEQ ID NO: 365327 - DNA, 1063 bp, Cannabis indica
tggattagaaaaaagacgaggatggtcttcgtgcaagagttgaagcaaatcttcgggtcaattttggtgtttccgcttcctcaaaaactcatatcgggttcatctacaaaagacaacacacatgatgagtgtttggtcgaaatatcgaacgtttaaaacaagcaaatatgccgaccaggagtactcaacaaattaaagaatgagaatattcaacgaaaagtcaaaactcaggaagtttgaaatttttaacagttagggcaaaagatctcatgaagcttagaataagcaggatgaaagacaggcattatgcagttcaaaaagtaagcattacgaacgatgaaatcgcatgaatcgtgataaggaaaatcgcagagtttctaaacttagggtttcctacatatcttctacagcgaaatcaaaagtgcattccaaaagtaaatgtgcatagaaaacataaaagaaatcgagaacttactcaagaaatcaagcatttgggttcaagttgcgtcaagccaaacgagcagttttgatgaaagcacttcagcaagcttgaagccaactaaatctctcttttcgctttgaacttacttagcaaggaaggttggtgaaaatgagtttgtagacaaatgctcactggtatttataggcaaataacgaaaaggggtaatcatttcaaaagaacctcagacgcctcggttctcgcctaaaagcgaatatgggaaatgaaaagtaatcaagtgtagccgtcaaccgtggtgagagaaaatcaaattttgaaatattaattgtcagagcatttattagccaaaaaccgaaaagacgcccaatcagcctcacatcgagtcgcgaatagacgcgcttgccacgtgtcacccatccaaatgcagaagcagctcggatgaagtctacatgcaacgtggaagtcccgtacaaacttgggggaaaatataatcccaattttcacactatggtgtggcaacacatgatggtgacacgtggaatccactccgagtatctgcccgcaagatatagtccgagcaggatacctcatatgcatgctcga

SEQ ID NO: 365328 - DNA, 591 bp, Cannabis indica
ttataacccctcaagggcaaaatggtcaaatactaatccccgaaaattctaacgcctctactatttaacgataataccccgataataatctaaattataaaatgcaactctctaggcccaacgtcgctttccacagcttccgaacacaatcacagaaattaggtaattaaatataaaatagcataaaaacatatatgatatataaaatatatttctaaaatatgcattccataattattaatacataaaccttaaataattaataatacaaagtattattcataggcggtctttacagcgattatcatagtcgcatagaataaattaagtgaggttattttataaattttattattcatattattagtttgacaaattttactctatgtaaactagtcctacgtactatttatagcttgtaatctctttatttaattaagagtaatttgcggcataaatacttaagtttaactccatcagttgtaggtgaatattttagtttaatttttatggtaataatatctaagttatatttttaaaacttccgtaattataatcgtttactttaagtgtcaagtcaatgaccacgtg

SEQ ID NO: 365329 - DNA, 486 bp, Cannabis indica
aatttcaatttcgtacccatagcccgttgcaaactttgccaaaacttggaggtaaactttggatctctatccgaaactatagactttggtactacatgaagccttactatttctttaacataaaactctgctaactgatccacttaatagattgttttacctggtaggaaatgagcagacttcgtgaaacaatctaccacaacctaaatagaatctaataaacccatggttctaggtaacccaaatacaaagttcatcgtgatgtcctcccacttccactcaggtaaagttaaaggctgtaacaaccctgccgctctttgatgttcagccttgatctgctaacaggttaagcacctcgatacgaattcaaccacattcttcttcatttcgctccaccagaagtaaggtttaagatcctgatacatcttagtggtgccgggatgtaaagaattggagtggtatgagctgttgagttttatgccctaa

SEQ ID NO: 365330 - DNA, 531 bp, Cannabis indica
aaaagggatatgaatatcaaggcaagaaatgcatgtaattttggggttataataactacaattgcatgattattttcttcataatattagaagaaaataataataaacagtttattgtcatgacatcacaaaaatagtgatctcttctctctctcactctttctcatgcttggccccaaaagcattgttattgaggtgagtgagtgcatgatcttcttttcaaattaatttacagctatattatgattatgcactgatttcttcccatgcggggctttattaattatttaacgtttttttttaatgaaattatttaacttttaataaattaaggatgttacaaaaaatgtaaaataaataaataaataataattacacaattctatacaattttataaataatttttcatatttacattattgtaacgtccccgcttcaagcttccattgggtccttacacccatggaatgaatggctcttatacacgaatacgccactctgactccttcctggattgatgactgacccta

SEQ ID NO: 365331 - DNA, 859 bp, Cannabis indica
tgttaatgaaacatacttggtagtaaatctagatcctggtaaaatatttcaaacatcaataacttcctaggagcaactgtctagggatttcaagaaacaattccaggctgctagggataggcgacccaaagcagcctcgctaaccaatacaaagtagcaacctggcgagaaaatcaaggcgtacttaagtcattttagcacggccacgacaagagttaggaatttggatgacaacacgcaactcacaacccttcaggcgagaatctctactgatccattaactgtagggggttgagttatgggacttacaaggacgtcaagtgagaagcattactgagttcaacggaagggctcaggtgttcgttcggaaggaagaagcctaaaaggaaatgaatctattgaaaacaagctcaggaagcaaacgcagccatgtttcaataggtactgctttcacgagaattgataactcgggggcttctggtttaaagagaaaggacagagttaaggaaccgttgaaggataaaaaaaagtagaagaaggatgataagtatgtgccagtgtatactatttataccgagcttaataaaactcgggagaatatttacctcacacatgagcaaaaggttgccttcagcaagcccgagcccatgagaaattctaggagcaaaagagatcctaacaagtattgtgaattccataaggatattaggcatacgaccgacgaatgtcgccaattgaaagatgaaatataaagtctcatcgcacgaggccattttaaacagtacgtgaaaagacagggccatggatacaaccagcctagtctgcccaataacccaacaactaggggttacaacctctt

SEQ ID NO: 365332 - DNA, 793 bp, Cannabis indica
ttaattccaacatgaaaccctaggtgggtaaagggtatgccctttaccaatgtgtgcctataaatagtcctatttttcctaaagaagggggagaacggtttttcacttacaattactctacaaaaattataataaagctctctcttaagagaagcagagtagtctttgttgtaaccatcttataatctcataaacatttccccaaagaggtcaaacaatagactcgtggactaaggatctttaacgcctgaaccacgtaaaaatctatctatttattattctattatctctttatctttttttactcttctgatttatatttggttttccaaaaaagtacactacacaatcctgtttcttgcaccttgacgtggcaataagaatggatgacacatgtcccacatttttgatacctgggtagaggaaagtattcgcagctacccattaatggtacctaacatctgtaacactcggatatctgagcaagatgcaaacatacttatgccgaacgaagtgtgtaagatggaaactccaaagatcaatcttgtcatttccaagatacaaagacaatccctataattgtgggattgagtcagagaatagagacaacatactttagtctcctattctttacattgtaattatagaattaatgtagtttcttattttatttattatagacaaagggaaaccattcctcatgtatgaaccccctaaccttactatggagggggtcaaaaaaattaaatccagaaacacactcaagagagaatagtgatctaagagagaaaat

SEQ ID NO: 365333 - DNA, 829 bp, Cannabis indica
tgagctcgttcaggccggccagcactagacttcctcttcttccccgctacggacttaggagaaaagtcctcagggtaaagcccatacatcaccagattatcatcggaggtcaactgaatgatattcctgtcttcccccggcaaccgggcaagtttttgagctctatccctaagagcaagagtgaggggaggacggtgacatgtcagaatctgctaaaactgagtccgggtaatgctgggatccttcaccatgaagtactcatcaacaaaacgccctattttgctgatggccttggcatctgtgccggtcaaccacttgaagcctggctgagagaagtagaagtaccccgacctgccttgcttggggtatacttcagatcaaagaaccaagaaacctagtggggagaaggagtatcccatccttgggaagcgtagaggacgatgagagtggataaatacttgatgcccttaggagtgatctgggtcgggcagagaccaaataagtctgccacatccctgaagtacttgtgcaagggcatcatcgccccttgttggccgtgggcccccgactaggcacacatccccttatcagggtttgtggcacgattgtcgtgggcgggaatgtagcagtgcagctcacccaggttcccgtcctagtctagagttcgaaggcgcgcctccaaaatcttagacggaggacttacccacccggcgcccaaggcaccctgcctcctatgaggaaccgccgaagcaagctcctcactgacgtagtccacgccctcaaccaggacgtctccgtcagcatcaactggctgcccagcctcattgta

SEQ ID NO: 365334 - DNA, 548 bp, Cannabis indica
cgagagtttgaaggcgcgcctccaacatcttagacggaggacttaacccacccggcgcccaaggcaccctacctcctatgaggaactgccgaagcaagctcctcactaacgtagtccacgccctcaaccaggacatctccgtcagcatcgactggctgcccagcctcattgtactccccaaagtttgggggttcaacctcttcctctcccttcacctcggaaggactgcccgggcacgcatcgtccatctcctcaacctcctggacctcagcgtccccctcgcgatcctcctccatcgagacggccgaatcctatttgcccctgggcagagtggcaagccgagccacttgaggatcaaaagcgtcggccagacgcatggttttctttgtacgagccatcattctatggctgggtacaaggtcaggaaaatgtccttcgctagaaggaggactagcacaaagacgaggatgatcttcatgcaaaagttgaagcagatcttggtggatctcatggccgagttcccaagactcacctgggttcatctacaa

SEQ ID NO: 365335 - DNA, 543 bp, Cannabis indica
ttcattttgattatctaggagttcctcagtgttgaggtacgtcgcaattggtgtcatccattttcgggaagtatcaatcattttgatcgcttccgtgccattgatgctataggttcttcgaggaactggataggaaccaaattcactttatcacttacattactactcgcaagccgagctaatacttcagcagtcgtgttttcatcccttcgaatttgttttagagcgtagcttttgaactatgcgagcagattgtgtatttttctcaaatattctatcatcttttctccccgagcctcgtattttccaaacacgtgatttaccacctgctgtgaatcactatagatttcaatatattcggctttcatctcccgggctagttttagaccagcgatcaaagcttcatattcgtcctcgttattggatgctttaaatccaaacttgactgcagcttgcaattgttgcccccaaggtgtgacaagggtgattcctgcaccggatagttgatctgtagccgacccgtccacatgtagtttccaagtc

SEQ ID NO: 365336 - DNA, 712 bp, Cannabis indica
atagtgtaaatactacactgtgtaattaccaccctagcaattaccctacttagtaattacacagttacttccaaacgcacttgttgaccgaagttttcggcaaccaataaaaaaataatagtttagagagctataagaaattaagagagagaattttacgtggttggggcgttaatgagccttagtccacgagtctgtgtatttatgatagcatttaatacagagaatgttcttggtgagtttttactcttctagcatttatgcaacccagaattcttgacccctctttaatgagctttggggggtatttatagtgtttttgtggggtgatccccagaattaaggtacatgcatttctgtgactatcagtaaggttgtatattcccaatgaatataccatgggtcatgcatcatttaatccctaggtgacttagggattttatgagggtattctttaatcctttttgactgatgtgattcttcacagagtagccgtcactagactttattggtcatagctttgtaggtacagatcgggggttgtgtcgtcagactttattgcgtgtggcagtttcaatacgcctcctcccatgcggcattaaatgcgagatgactgctcagagaaaacctgacaccactcggaaatgctttgatgctatcttgctctccgggagcatatgagaccttgcatgccttctccgggagtcatatc

SEQ ID NO: 365337 - DNA, 635 bp, Cannabis indica
cttgagctgacacaactttaaaatttcccaatcacttaaagttaactaccattataaagtgaattaatgtaacctatacggtagatgcaacattgctcataccaggtacccataactaaactggaaatacacaattcccgaattctcaactaataacaattaatcaaagatcattccgtgatcttaaaatttcttttctgtgtttggtagagatcttaatgatcttttcaacacaccaagaaatatacatacctcaagtatattctctgttatattgataacccattggtacaaattaccataccaacttatagtgagtctcccgttgatgatgttgattcatcaacatctgagactgtcgtgttcttttttccatcagtaccactaaggtttcactccctggttcatacgctaccattcctttcttgaaatcataactatctctatatttagttaatcactctaaaactcattttaccctccattatgtagtccattatttaataaataacctactttgtgatccaacatccaccaatcactcgaatacatgtccattaaattgcatctcaattcataagcttttccccattctgggtaagtatgcctttctataatttcttaataaagtaatc

SEQ ID NO: 365338 - DNA, 561 bp, Cannabis indica
taagatttctgatctttattaattagtaaatctaattataatgaaattaggtttatttggggcacaaaacctaacacggccaggcccccaaacactcctatcatgttgaaccttgagactaagaagggcaagtggatgcttcagcactaccaggaccggttacttcctaaggtgaatgatcatctggtcagagttgaggagatgttcgtggagcttttgatgggcgggctcctgaaggaggcaactccagtaagtatttgttctttgtttttttcttgcctttctatctgttcaggtgttaactttttcttctgcaactcaacatggagatggcttatacctagtcccgagccaaatgtagtgctcttaaaatcatcaccaccacaacaaattttcaaaggaggtggatttggccaagaaagaggttgaggaggtaagggcctagctgggtgaggtgaccaaaaaacttctagccaccaacaattgagtcgaggagctgacgaaggagatctaggagatgccatctaccacctagcttgaggaggacgtcgaggctctgtc

SEQ ID NO: 365339 - DNA, 661 bp, Cannabis indica
  modified_base (8)..(8): a, c, t, g, unknown or other
gacgcgcncgctaatggtgttcaatgttgtagtgttatctattttatatttatacttaataataacaacaataataattcaattaccttttcactatttcataaccttcttcttattattattattattattattattattattattattgcatatttatcactaacataaataagtaaaaataaaaaaaaattagttacaactttttcacttccctacaactctttaattcttgcatattactcactatatatagaaatatatagatttgaagaagatgtataatagtaagtattaacaatatataactagaacaaaaattgaaatacaaaaatacatatctctatcatctttttaatgaattattatacgtaattcatgtatacatatataatcatatcataatgttgggattaaactcacttaatctctcaagtcagtatgtccatctatttgcctatcagatgaatctgaagaaagctgctgcaatttatgacagttgggtttaataccaacttaaaggggacccaccagcaactatatataggggttcctctattctaaaaagagaggtctgagttgagagttctgatctctaatctccaaagctcatactttagattaagtttagagagagagagtccaagatcatagtgagtgt

SEQ ID NO: 365340 - DNA, 801 bp, Cannabis indica
atttaataatatataagaaagctgtagaaagattaatgcacgagatttttacgttgttggggcattaatgagccttagtccacgagttctttttttatttatgagagtatttattacagagaatgttcttggtagctttttctcgctttggttcttatgaaacccaaaatctcgacccttgccttaatgagtttgggggtatttatagtgtttttgtgggatgatccctagaaccaagctacatgtctttctgtattttccagcaggggcacacattcccaacgagtgtaacataggaaatgcatggtctataccctaggtattttagggattaggtggatgtaatccattatcccttcttgaccgatgtgattgatgtgattgctcataaagtagtcgtcactaggcttattaatcatagcgtaatagctgcagaaggggagttacgccgtcagacttaatacttatggcagttccaatacgccttctcccatgcaacattaaatgcgaggtgactgatcagatgtggtttgatacctcgcggaggtgctttgctatagctttgccatccgggagtacgtggatccctcattctttctccaggaggtatgtttctttctgatcctcttgattaaaaagacttagccgaattatctcaaaaccttactcctccaatccacgtgtcgcagtcgcattggtccacgtaatttggacaaaattaagggcaacaataacaatttagatcaaatatataataggtttgtaaaaaaaaaaacttgaataaacaataaaattaaacaa

SEQ ID NO: 365341 - DNA, 659 bp, Cannabis indica
gagaacaaagttacaactcaaggtaaaatatacacataaatgtaaaagtaaaaagagaatatatatttatacataaaaagagatatatatagtagatatatagtgtatatatattagtgtatatagaaaagatataatatatgaatatataataaagaggagaagagagcagaaaacaaatagaaaatagaggatgaagaagaacataagtaagcaaagggggataaccaaaggcttgaacaaggtttaagcacctttgtccaaaaagcttatttctccctataaaaaacacttccgtttggttgatggtaatgggccagaaaggaatggaatggaatactaatgggcttgtttcttttgtttggttggaaaataacaattttggaaaaggattccatagtaatgctattcctccaaactaatggaattgcttttccatttttcatttggtggaattataattccattccactactttggcatatcaacaaattatctctcttctactctagccatgggccaagcccaacaaaccctaaccctagcaaactgaagattaatatgctgccattgttgtgactctcttcttcgatcatctctgcaagtgccgggttccttgattggtggtagcgttgccagaggtaattctctctctctct

SEQ ID NO: 365342 - DNA, 1189 bp, Cannabis indica
aataattatttatgttgttatatttgaattcaaaatgcatttttatgtcatatagttaaatttcataattttgcattttcgctgcccggcaacatggaacgcggtgtatggctccgtagaatcacaatttagtattttagtatgttggggaagtttatttagacattgggaatgtcgagattggtcgggaatttagaatttcccaaattaccccttagtacccttttatgttatttttgtgtggaggggaaaaatggtcatttttgccccataggctcttgccctttagtggacttagtgttatgaaattatgtgatttatttgatgtttgttggctgaaataagaaaggaattaggcaattacttcatttattcaaaagttagaaaattgaaaaaaaataaagaataagcaaacccaattttcctctcaaactctctccctctttcggccccttggagcagcaaggatttgtcatttttctttgtggattcaagcagattttgagtacaatccaagctctaggtatagctcttactctttctctctttagtttcttgaaaatcaagtaagaaaatggttgcatgcttagtttttggtgttgtgcttgttgttagttgttgttgttgttttcagaagttttgatgtgtttaattgagtgaattcaagctagttttgttgtgaattgatgggatttaaccttgtgtaaagctttaaactcaaaactatattttttatggtaaattgaggaattagttgttgtgattgttaattgtgcttgggttttttttctgagcttataatatggttgtttatggtgaattaaagcaggtttgatgcatgttagttagatttagccaagattgagttttgaactcaaagcttggagctttaatggtggtttttgattctgtgcatgctgagttgttttattgctttggaattgttatttggggtactaagaacaggtctggaaggtttgatatggtttgggatttaattgcatgagatataaatttttgaaaattcctgcactgaaccggaattccggttcagggaagccattagcaaccggtcgaccggttggggcttccaggaattttccctgaacctgaattccggttgtagaagcggtctgccggttggggaaaaattgggaaccctagttcttcccatttttgtgttgtttag

SEQ ID NO: 365343 - DNA, 778 bp, Cannabis indica
acacttttcaccatataaatagtgacaccaaaccttcagagcaaaaaccacagctggcaggtctagatcatgggtggggtaacattgttcaaaatcctttaattgcctagaggcatgagcaataaccttccctgattgcattaacacacaacccaaaccttgtctttgaggcatcacagtatatcacaaaattttcatcactgagtggcaggcttagaactggtgtagtaatcaatctcttctttaattcttgaaagttattctcgcatttatcagtccacataaacttataactgtttcaggtcagttcggtcaaaggagtagcgatcttggcaaaaccttctacaaatcttctatagtactcgaccaatcctaagaaacttctaacttcaattgttgtcttaggtcgtggccaatctcgaacagcttcaatcttcattggatctaccaaaatcccatccttacttaccacgtgtcctaagaaactcacttgggacaaccagaactcacacttcttaaactttgcataaagcttgtgttctcggagacgctgtaataccatacgaaggtgttgttcatgagcttcttccgattcagaatagactagaatgtcatcaataaacacaatcacaaaattagcgtggaagtccttaaatacccgattcattaagtccataaatgttgctggtgcattagtcaagccgaatgacatcactaaaaactcgtagtgcccatatcgagtacgaaaagcagttttgggaatatcctcttcacgaat

SEQ ID NO: 365344 - DNA, 668 bp, Cannabis indica
aaagtatggaaaattgtgggcgtttgtttgtatgttttgcttatggtataatagagcctaaataaccttttacctacctttcacctaagccatgatatttcaaccgagaaagaccttttgattccgagcaggggttctcaacattagtggagagaggtaggtcatgcaagcatattgaacatcggttggcggaacgttggaaagagtagaatgagtgtgatatgtttttccaattgaattattttgcatccatacataaatttctctaacttgtgcatccaagttaattcctagagtagttgaattgaaattctggttggtcaattgattgaagttgcacaggtggcagtggtagtttaattatttggaggctcagttatctgtcgcgtcgttgttgctttgtcttagtttttagttttactcgagggcgagtaaagatctagtttgggggaatttgttaggctaaaattagtctaagtttcgggtcgtatttttgggtagttttcactctttgtttctagttttagggctattttacgcttgattcttttatttcaggtcttcgggtatttaaagaaagtatttacaagaattgaggacaagcggtgaaagaattgagaagaaaaacaaacaagacatttttctgcctaatcccgtcgcgacgggga

SEQ ID NO: 365345 - DNA, 649 bp, Cannabis indica
gcataaaacccaacacatacttattagtaaatctagatcctggtaaaatatattctaatacttttgcacagtatgttggtcttgtttctcatggccagcatgttgacaatccaaccaagtatttcctggaaagtaatgcacctgaggaaatctaccttgctagagacatgcacggtgtgtggctgcccagaggtcccatctcatgacacgtgtctactggtttttcaaaatttagtacactttcaaacgaaaagatccagagaaaactatctaagcgctcagtgttagtataccgcttttcttaattaattttttaatgggtttttgagctctcttattattaagatggacgatgaaacctagtgtatttaattaaatatttattttgttttgattctcagtataatatatacttgtgcttatgattttttcttctttaaataaattatttcatctttaatatcatgtattttttatagttagaaattattaatgttatgttctacattttattaaaaataatattctttaattttctgtatttacattaaattatttcacacttaatggtaagaagttatatttttaaagcgaaggaaaatcttttttttgttaaaaaaataattagtttgattactaattaaattat

SEQ ID NO: 365346 - DNA, 843 bp, Cannabis indica
agcagctttttagcttaatttctggaaatgaagcttgaatttaaagtgtaattggtgtaggtaagccctagacactctttccttattgatttcataaggttttagttagtttgattatgtgattttctaaaataagagctattacggtttgattgttgtaaaatctgatttctaagttcattttatgttgattttaagctttggatactagtcttggtgtatggacatagatttgagcaagtttaagcttctaaactttgatctttaatggcattattttaattcagtgggtttttttgggattttctggttggattatattgtgtataccctaattaggtactctagaaggtttggttgcatttggtggagttttgagcaagaaatagaaatttttgggtgaactggtacaaactgggtaaccggttttactggtacctgtaaaatcggtaagcccgttttggcagggtaccccgaatgttctattttctcaattttcgtctatttcagtgccttagttgaatgtttccctatttcccgagttagagtaatccctagggagtataacaaaacctagagtggtgggttcgagtttcctggattaaggtttcaatcatgtgatttattcggtttcattatgtgattagggcatcaatttagcgcaagactatccattcagatcggccaacacacttgaatctggatagaaagtaagaattgtgtataatatgtgatatttatgcgaatgtatatatgtattatatatatgcatcctgtgtgtatgattgtatatgtttgggtgatatcatagcgacacaatcattttgtcggttcagcagtaca

SEQ ID NO: 365347 - DNA, 607 bp, Cannabis indica
ttgtagctaaagaaaataagttgtctaaatcattgccctaaaagtaaccttagaattcaagaaatatagaagattcttaatttacattggaatctaatatatgctcaagcatgtatatatttgtactaatacatattaagaatgttggatagatgtttaagtaaccataaaaggaacttttggtatgcatccaaatgggctataaggaatttaaggagaacaaaatactatatgttcacttatcaaaaatcagaaaacagaaaatattggagatcattaagatttttgattctgatcttataaagcttttaattatgagattttttgttgcatatggctgcaaaattagaaatggtattgaaagctattaaagatatatgttgtgacaacaaatcaatcacgttgtattttagtaacaacatgaactctataaggtcaaaggcacattgactttgagttaattgttattaaaataaagttcagagtaataaggtgtctatagaacataataaagacaaactccatattttgtgtgatctggatcattaaggatataccacttaagggctttcaggagcttgttgctcatatatggatgtggtattat

SEQ ID NO: 365348 - DNA, 538 bp, Cannabis indica
aaatatattaaaattaatattttgttttaatttcagggtttgaaaatttaaaaatttcaaaatttgcggaaaaatcccacaaaaatcgaaaatttggggttgctagcagcaaggctgcacgtgcagccatcgaaggttgcaaatggcccagacgcgggcgcagagaagggctgcagcagggtcccttgtgcgggaaacatcggggcctgcagcatctggacaggcgagatgcagcctcttgggtaaggcatctcctgtgcgaaggggcgcctaaaatactttcataaagaaaataaattattttcatggaatttcgtaattcacatacattcatcatataacacataaacaaacatgaacacatccaaatcaacacacaaaccatattcatcgttttaaatccatatttcatgaaagtcaatcattaccatggctctcacaccagttgttgggaatattttaccaagatctagatttactaacaagtatgttgaaataacatcctaaatatgaattctctaaaacaataaaataaaca

SEQ ID NO: 365349 - DNA, 1117 bp, Cannabis indica
ttatattaatataacatgtatttttatcaaaaatttatataatttggtatttaattatatatattttagttcatttatattttataatctgtatcgttattgatttaaacaatacctcttatagattatttacgctatcaatcaaatatataactacttttataattttgttaattagcacataacaatgaatactaatatcaaataagttaaataattaagttttagataataaattattttaaagtaaaaatttgtaagtgagagctgtaaagaaaaacaactatatcattaatcctcaaaataattaaaaaaattaagcttttaatttattttttttttattgagaatagtatatacggtagatgagtttttacaactttgttattattatttttatttaatatatatttttttattaaatgaaaatcgttcaatgactttaaaacatcattacaaggaaaaggtaagtcgagtcgtaaagtagggaagcaattcaggtcacgatactcaaatttgacacaaacacgacttgagattttacgagtttgacacaacgacacaaactttttacaacttctgttcatgttttatcaatttttcatgttacgggttgtgttcgtgtctgtcctctaaaataatttaaaaattcaacatgacatgaacatgacatgatgacattaaaatcaataatttagcttacaacctgtcaacacaacatgagattttatgggttcgatatgacacgaacttattcgagtcgttcgtgtccatgttttataaatttttcgtatgacgtgttgtgtttgtgtcagtaactttttagtaaatttacgacaatgacatgaacacgacacgccaacattaattgccactctaactgtaaagcatgacaaacacaagaaaattcaatccaaatccaaatagcacaaataatagtgtttgaaataaataattatatcttaaatttaataataaaaaaatttggaaaattagactaccctaacaagacagtacaagcacattgcatgcatcagtcactgtgttggcacggtctagtgaattttgaattttaattaatttaaatatttattttaaatttaaatttaaaatattg

SEQ ID NO: 365350 - DNA, 526 bp, Cannabis indica
ggccgtgaaaaccctaggtcaagcaacccctgaagctgaattttcaattctttaagttctactggagccattctgtaaggggccttaaaaactggttcttctccatgtgccaaatcaataataaaatcaatttctctctggggttgtaaaccggaagttcatcaggaaaaacatctaaaaattcctgaaccaccttgatgtcttgtgactgaattgactcaggccatgtggtaaccaataccacaactagaaaccctagacatccacttcgtaacaattctctagctgttagtactcaaattactatgatccgagatccctgaactgatccaacaaagacaaatagttcctcaccctctggttggaagattaccatcttccgtctacaatcaatactgcctaagtacttggataagaaatccattccaagtataatatcgaaatcctaaacccatttctattaactcaacactcaactccctatcctcaattctaatcagcatagacctaatccaccttttggaga

SEQ ID NO: 365351 - DNA, 778 bp, Cannabis indica
aggaagaccaaatcaaagaaaacttggacacttcaagagtagaagtcacatcagagattaccacaaaggaaaaagtcataacaatggaagatcaaaatcaaaagaaccacctgatcctacaggatactacaattgtggcaagccaggacattttaagtgagattgctattttctaaacaaaggcaaaccaaataagtataaaggacatggagaaaattctaactctagcctaagaataaccaagccaactatggtgatggttatgaaagtgttgatagtggtgaagtatatgttgctgcatcatcttttaaagatggtttgattttaaattcgagttgcacttttcatatgactaatgacaaaagttatatgtttgattacaaggaatctaaaggaggaaaagtggtcctagggaaaaatcaaacctgtgagattaaagggtcaggatcaattagattcaaaatgtatgatgggataataagaaccctaacattagtaaggtttgtgcctaatctctttagaaacctaatttctatttgtgtgcttgatgatttgggtgttgtgagtaaggtagaggcaaatcatatgaagcttagtagagaagcactacaatcatgaaaggcataaaaatggtggactatactacctacaaggctctcctatttctagttgtaacatcacaactcacaacgacaaagaagacaaaatagctactttatggcacagaagattagggcatataagtgagcgaggcttacaactcatgagtgagcaacaa

SEQ ID NO: 365352 - DNA, 969 bp, Cannabis indica
aataaattggatgtgacatataatgatccactaaatcgattagtaagatcatagaatcttttcaaaaagttgacaaatattcctgctttttcccagtctagattacttggcggaccagccattctttcttcatcaaagtaccttgtgtaattcgcatctccttctaaattgtcaaaagccttcttgaattttatagcagcttctaacatcatgtaggtggagttccatctagtaacaacatctaagcataacaaggcttttgattcaatatttgcatccatacaactttctttaaaccttttcagtctagctggagatgacctcacatatctcaccgcatttcgaatacttgaaattgcttcattcaactctttcaaaccatcacttactatcaaattcaagatatgagccgaacacctcatatgaaacatttcaccatttagtggaactgtattatccttttccaacaagttccccttcaattttcttagtgcaacatcatttgaagaagcattgtcaactgtcactgcaaatactttggagataccccactcattaagacaatttatcaactcttttcccacaaggtcccctttatggctaggaacctgaataaagttgataatcctcttctgcattttccagttatcatcaacccaatgtgcagtcaagcacaaataagaaatattttggattgatgtccaacaatcggttgtcagcgatactctatgttgtgccaacattgcctttagttctttttttcgatccaaaaacaattgataaatatctctcgccacagtgaaccttgatgggaattggaaatcgtcaaaaaaaagtctgataagcttttgaaatccttttccatcaacgtgccgaaaaggtaactcatccatgatgatatattcagctattgctttccgaactaggttttgattaaatcttaatggcagcccacttgaagcaacttct

SEQ ID NO: 365353 - DNA, 690 bp, Cannabis indica
tttggtatttttgcaaacatatttgttatacttgttattttctgaaattgtgtatgagtttattgaaccaaatgatttacttctgtttactgatatttgtagtgccaaaatgtacaacccacatcccaacactcatctagaatatgactttaggaatgaacttgaaggtgtgaataagactcatggtaagagtaatacttcacacttgctcatgatgaacatgaaattcgtgaacgcagctaagctgggaattgttcaatccgaagagcaaagagttcatagctccaacaatcctactacttcaagctcaattgagaagaatagagaaagtgatttcacttcctatcctttacaacagattgaactagcaataagaataattcaaaaacggttaagtagtgatgctttagtttttgaatcatgtgttttaaagaatgataaatccatctggattcttgattctggatctacaaaccatgtcaagtgttcattgaaattccttgaaaattggaattatttgaaattcggagagttaaaacttaaagttggtaatggagaaatggtatcggttagagctagaggaaaagccaaactcaagtttcaaaacagaattttggaattagacaatgtcttatacattccaaatttcagtagaaacttggtttctgtttcatgcttacaattgcaaca

SEQ ID NO: 365354 - DNA, 1019 bp, Cannabis indica
gctaaacgcatgccaagtgaggtggttccccaaagtaaaacaaggtaattgttaatatagtatattattatttcctttgccattactctttaaatgcaattcagtctctaaatgtgtttgttgttaatttttcagtggtgattgcggggtgtatgcccttgagtacatcgaacacctaatgctgaatcgatccttggacaacattacagatgataacatgagaatgttcagagatcggtggtgtgtagacttgttttatcaaaacttaacgtggtaaaataggtacaagggttgtaatttttttgtattttaagaactccattacaattgtacaaacatagttgcatagttgtttttaaatctgtacagtttttatatatcgaaaagtgttcaattttaaaatttttacttacatgtcgctacaaaatcgttaacatgtcgtttaatgtcgaaaaaatttagtttctgagtgtttggtttcatgtcgctaaagcaccgcgaacatgtcgttaaaatgtcgatagtaaaatcatgttttgactcttcagttgatgtcgttaacatgtcgcaaatatgtcgcgaaacgtcgatacaaaagacgtttccacattaaatggtaattaatgtgtgacatttattatcccgcctaaccaactacttcactatgtcgataacatgtcgcccggtgtcgcgacatgtcgcgaaaattgcccagattgctttgtgcatgacaaacatgtgtacaattgtgtaattcaatttttacatttattatcccaccttcccaactactagttttgtctataaaagccaattgtctatctcataagttacatattttcttaatttttacccctacaagataattctcttagcaatgtctactagaaggaacaagggcaaatacccgattcttactcctgaagagatcaagcaggagcctgattgtggggaaattacgcctcaaatgcaaaaagtgcttgacgacatgaaacgttttgaagatgaacggcttatga

SEQ ID NO: 365355 - DNA, 493 bp, Cannabis indica
ttttaatcactagtgtctttcaagtcatacatggtgagttctttgaaatccccccacaatgtcaaggtaccatgactttttgactaggaacataagtggtattatcctcatcggttgtgtcaagacaatataggcagtgtgaccatctaatataaaataagatgatagaacgatttgaaaaaaatgtctcctctactttgctactttatttctagatttagtcatattcttagaaaagtagtatttgttgaattattcactttcttatcttaatgaccaaatgatgatccacccctaatcacttaaaatagctatcaaacatccaaaccttagttaacagttttagcttttcttaagttcacgatcatgacattcatgaatctagtaatggtttacactatggatgtacgttggtcggtttggtcgggttatatgctatattttattcaactcaatgtaaagatcgggttcaaaaatctaagtgcgacccgcc

SEQ ID NO: 365356 - DNA, 946 bp, Cannabis indica
tgttaaaaaaaataaaataaatgaattaataaacaaacaaactgtggggtttatagcctagtgcaagttctgttattactgttttgacggtttgttataactgttagttttcagttatgttagttaagtcagttgtactcttcttttctcagcctatgtatataaaggctttaattcagtttttagagagctgtgagacagagagagaaactgtgagctgtgagcacattgtaaagagcatgagagttttaaactcatagctctcgagtgagaactaaagtgggagcaagactccattgtgtactgtgttctgtagtccaattctgttgtgttctctgagttatcttcatcaagaaataaaggcaaagcctcaaggcggttcctcccaaggattagatccaagtgttattcacttgtgattgaaccttgtaaaccttgtgttcttactgttttactgctgctttattaattcttgtttctggttttctgccaattgatttttctggtttgtgttaattgttcagctatctttattgatctgttttaatgttcttgaatggtgattgaatcaccacaaatggtatcagagcacaggttgcttttgaggattcaagaaccgtgaagatcaagcttgaagaacatcaatggctactgcaagattcgaaattgacaagttcactggtgtgaacgattttggcctatggcgcatcaaaatgaaggcacttcttgtgcagcagggtattgtcaatgccattcttgaacctgcttccaaagatggagaagatgtaaagaaagtgtctcaagaaatcgagatgaaggcacacagtgcaatattactcagtttgggtgatgaggtgcttcgagaagttgctgaagaggaatctgcccttggtctatggaacaaacttggtaccatttacatgaaaaagtctttggccaacaaact

SEQ ID NO: 365357 - DNA, 1155 bp, Cannabis indica
aatatgaccatatcgggaaaacatcaatgaaggtaatgaagtatttatagtcgcccatagcaggtggaacaaaggacccacaaatgccaatgtgaataagctccaatacatctgtgcactctttctaaccttagcagttaactttcattttatacaatcaacacaagcagtgaattcagagaaatcgagtgaagtacacaatctttcaccaatctctctattctatctctagaaatatgaccccaaatgtttatgccaaagcatggaagattttatttctagtcttgcacgtttggaaccaaaaacaacattaagaaggagaagaagggcaagagggaaaagtaacagagacaacatcatgtaaattaagcttatataaatttccacataaactcccattaccaaccaacatagagtcacgatacaaagtcagatttctaattccaaaaaaaagactataatctagtctatccaaaatagatacagaaatcaagttcctcctaatagagggcaagtaagcaacatcttgcaattccaaaaaaatgtcatgtatttaactgtagtctaacagtcccaaaaactctattctaactttagtattgtcttccatgcatgctaggttctcagacaaattaacaatatggaactcatacacacgtaagaacaatctattaaatattataatcaaatacattaattcactatcgaaacgatagataaattgtgattcataatatttaataattttcttcaccatattaagcatctttaataagaaaccatcatcgatatgataattaattacttataaagatcttaatgttatgtggaggaaaaaatacaatacttaaataaattaatatttaagtgttcctcattaccaaataattttccatgcttaatcttacgataggcaagaaaataagcactaattgttgaaataaatcacaaaatttatgccacagtactaaaattatcaaccaaatatgaataaaattcatgcaattagtattatacatatgaaaaaataatagagaattaaaaaacatgaaaatggtggaaaatggcccgaaaacacccctgcacgcgcccccacgcgcccattttcttcctctttttttttttaaacttgatcgtacgacatgtcgttttaga

SEQ ID NO: 365358 - DNA, 524 bp, Cannabis indica
aaataaattttttaaaaacaaaaattttactttcattttgtgattacaaaattaaaaaacataagtgttgccaaacggcacctaaataaataaataaaaaattagtttttcgtaatagataaaaaaacattttaaggaaacttaagggagcgtcatgtgaatctatctgtcttctaaagtagaggaatcacgccgttacggtcatttggagaaattaaagggaaatttgattttttatgcttacatttggttaaattttttttctaaacaaataataactaatatttgtaagatatgacaacttttatgatatccctaaaatacctccatttacatcaccccatttacaccatcggaccacccatcggaccacccatcgggccaccccatcgggctaccatcggaccacccatcaggccacccatcggacccattggaccacccatcggactaccatcggaccaaatctgctaccaattttttttttttatgtttttgtacatacaaaagtagcatcaggtgac

SEQ ID NO: 365359 - DNA, 883 bp, Cannabis indica
gatatgtgcccggagcccagctctcaggcactgtgccagcagcaactccaccaatgagcgtcatacagttttctactactcccggatatagccaaggccaggccttggcccccgcatcttcccattttggaaatccctcagggataaatggacaagccccctcgcactccgctccaaccgcaagtttagccggtccttcccagggctcaaggagtaaaaggtcctccaaaggcagcacccggacggaggataagcgacagaaaagggggtatactccccaatatactcagtacacggagttaacggactcccaggaacgtgtatattttgctactaggtaaaatacacactaccggagaccacctcctttgtacaaagacagctcccgaaggcatcccaataagagatgcgagtaccacaatgacattgggcacagcactaacgaatgcaaaaatctcaaggacgagtttgaaaacttgatccgattgggacacctttacgagtggatcaaaaaccgttttccccacctcaacccaggtcaggcggcaggagctttgccacaaggagcaccagggggtacagtaggagtattggctccagttgttcccttggagatgcccagcatgttcctgatttgccacctagacccaacgggagagtggctatgatctcgggaggaccccacatcggagaaactacccgcaaggagctgaaacggcacgcaggggccgtgaaacacgatgaggtttgggaagttactcaactcaaaggcctcgactaatggatcaacccattacattcacggaagaagacgctaaaacagtgcgttttcctcaccatgacccattggtcatagagacccccattgccaataagatcgtgg

SEQ ID NO: 365360 - DNA, 634 bp, Cannabis indica
acgtaggtaaagtgacattttcttgtagtgtcaactctgtaattaactgtctgactatgtgattataaatagaggcaagttagactgaaaaaatgacgaaaaaattcataagagaaaagccctagaactgtatcaaaaatctaataagattgactcgtggactatacagaattttaattgcaaaaccacgtaaaaaaactctcgtgttcatacttttttctttactgtttttaatctttctgtgcaagtttatcactgtttaggctcatatttggttaacaaaaatctgcgttaacaactacaattaatataaaacaaaaaatgtgtaatgaatttaaatttgaatatataaccacaatcatataacatattaaaaaaattccttaataaaaattgtttaattatattggtcgtattaattaataattttaagggttcatttggtacgacgtattatattgtatagtattatattaaattctatttttttgtaatatttttatgtaaaattatatgtagtattgaattttatgggctcctaactatgtaatattttggggtaagttgaaaaatgcctcttttattcatcaattaatcaaatttacctctaattttatatttatttgaaacatac

SEQ ID NO: 365361 - DNA, 503 bp, Cannabis indica
tagtagtgtggtggtggtagtgcggtggttctgatttttatctttttttatatatttttaaaaaaaattataacaaaaaaatcaattagcgttggtgccactactattttcttcaattatgttttgaagcaaaaacttttcttttctttttttggtgtcggttctaaactgaagcaaaaaatatgactatttacgtctacgactactgtatcgtttactctaatcgacacaaattatttatgtatcaccttaaaaccgaagcaaaaagctatttttgtaacagtgaatgctaattttagaagtttgtcattactcttgtatctctaacataataacaaaatatgtattttataatttgttcaacaattaaaatgtaaaattcaaattatataaattttgtcacaattattaatgaaatagaaaataaacaaataaaattataaattttaggttaattacttcctaaactttaacatgtactaaattatgccccctgaacattt

SEQ ID NO: 365362 - DNA, 596 bp, Cannabis indica
agtactccaatgagcaccactttgaaattaacaaaagagcatggagtgaaggtaaacactgctctttatcgtagtaggattggtagtttattgtagttatagtgtgggagtttgtgatcgatatcaaagtaatcctatggaatctcatgtatctgcactaaaaaggattattcgatatgttaatagtactcttgactttggaatctggtattctaaagacactaattctaacttggcttgttttaggtgatgctgattgggtaggcaatgctaatcatcgcaagagtacgagtggaggttgtttctttcttggaaacaatttagtttcttggcatagtaagaaacaaaattctatttccttgtctactactgaggctaagtacattgctgctggtagttgttgtactcaattgttatggttgaaacaaatgttgattgactatggttttgaattgggtgttttaactattttttgtgataacactagtgctataaatatttccaaaagtcatgttcaacattctcgaacaaaacacattgatataaggcatcactttattagggaacttgttaaaaaaaactttaaagttagaata

SEQ ID NO: 365363 - DNA, 784 bp, Cannabis indica
tagctatttaagaccgtttgtaattttcaaaaaatttcaaataatttagaagttgtttggctgtgttttcagtttttaattttcaaaattgtgtttttaaaagagtgaatagaaaatagttttttatcattttaaaaatttaatggtgtttgactcaggttttttgaaattagttttaatatttttttactaaaaaaatcaaaattctacaccataccatgatatgaacccatccaaccccagaccgaaccccgacccagaccgaaccccgacccagacccgaacccgatcccagaccccaaatccaaacccggacctggacctgggctcgctcgaacctggtccaagaaccagacctgggctggcgttcgagtttggtttcggggtccgagttagggacggagttcggggttcgagtcagggcggggtttggagtccaggtctggggtcgtggtttgacggtttggggttcgtgattcaagtctaggtctgagtctgtgtctgggtatgggtctgggttcgggtttgggtctaggtccggatccagtctagttttgggtacgggggttcaagtttggggtcgggtctgagatctgggttcgggttgggggtctaagggtctatggtctaagtttaggtccaagtcggggctcaggtccgtgtttggagtctgggctgagtcgggggttcggattcaagggctcataatttttaatatcatggtttgtaaattgtttaagcatactcttttgattagacaatgatttttttttttttttttagt

SEQ ID NO: 365364 - DNA, 520 bp, Cannabis indica
tgataaattattttaccaaatcagtaaattgttacggtctgatttatgaggagatttgcggtgtactctagatcttccttgtgaataatatctgtgataccatcattatttactatgagcacgctcacttgaactccatcattgctatggatgttgtctaaagagaagccccataatttggatttcatctcactgggtttgattcgactgacaccgtaatttgcctgaaaatcgtttatggatcttaatcaacgatagtattcataattgtttagacttctctctctaaaattgataaatttatatatgttatatttcgtttatggaatcaattttgcttcatcttcatcaatagtaataattttcactattagtgatttaagtttcacagtatgttaatatttgatgatgtttgatcactactacaatgttagtctttagaggcagttttttcatccccatttatagaaagggaagttaaagggtgtgaaaatacccgctatgttcgaaattgacattt

SEQ ID NO: 365365 - DNA, 974 bp, Cannabis indica
attttatcatttaaaataaataaaagtgtattttttaccactaatcacatggggttcttcacaatcattcgtagtactaaggtaaagtatctcagtagtttcttcctcaataaaagcatatacaagtctctcaatccttcctccatcaacatcccaacccatgtgggcacgacaagtttcaatttcaccagccacatcccaatcttcattctttctgtcatggtactcgatcattagttctccatgagtcttgataacagtagtcaatgcaacttgttcatcctctcaggcaaggtcgtctgccccttttttctcatcaatcaactctttctttaacttgtcaagctcacccttcaaagatttaatggttttttcaagttcacgctctttttctacatactttccattctctaatttcaggaaagcattatcagcagtcaactttttgtctttttctccaacacatgatagttttgccagatgaatagcatggcttcaagaatctacaaatattttaaccaagttttaattactaaagaaaaataatcacacagtttatattacaattaataatgaccttaccttgtaagtgtcagccactccattgttggcaaccccagttggaccaagcttaatcattcgtgcttgatcatcgtgatggagaattccatctacatgcctttcaatcgatgaagggttagattagaccgatgtagtgtgagggattcaaagaaccgtttcatcaacaacctttgggtcaagaaagttgacattcctcttaattgtagtgcacttaccgagagaagatggagtcaatggtgttgggctttatgccctaaataaaacactatttcaatgttatctttatcatttaattatcaataaagagacataagtattttcatcacttatttagtgtgtcatttggttcctattcaattcaatatcacttagttaatcctagatcaaatgat

SEQ ID NO: 365366 - DNA, 879 bp, Cannabis indica
gagatcgggatccagatctggacttggggcttggactgaacccgtagtcggtgttttggatctgggactcagccccgaactcgaacctagaccaggacccaaaactagacccagacgtgaacccagtcccaaatctcaaccttgacccgaacacgtaccttgtgagccgaagttagaaccgaaactggaagtagaccgggacccagaacgaggttagaaaccaagacttggacgtggacctggacctggaaacgtaatcagacctggacctagactcggaaccgtaaccggactaggacccgaactccaacccagacctagacccgaaccgaaacccggacctggatcccaacccagacataaactcgatgccgaacctggacctgaactcagacccaaacatggaagcagaatcgggacacacaattggggccaggacctagaaccgaaccccaatctcggtccgaaactagatttgggactcaaactaggacccaaacccgaccccttacccaaaactagaacctgaacaagaaccgcaacaccgggaccctcgaacaagactaggaccgtgagtaggacgtggacccaccctagaaccgaactcgaacatatccccagacccaaaccgtgacctgaagtcgggccctgacacatcgtgtacccagaccaagactgagacctggaccaaaacccggatccagaccaggatcgaaactcggaacatagatctggaacgagaccatgacctaaaaccggacctggacccagactcagactcaaactcggaccaggaatcaaaccacaacccagacccagacccaaactcgaacccagacactgaatcgaaattgaaactaggactgttgggttttatgc

SEQ ID NO: 365367 - DNA, 573 bp, Cannabis indica
ctatagttgagatcattttttattattttagtatttattttttaaaaaaagaaaaaataaataaaaagaaacacaaattttaagtttttatggcattactcaagactttttcccatatttgtaagttttttaaaaaaatgacatatttagtgtaattaagtttttatgccatatatatcaaaacttatctttattttcccatatttttgtaaatagccctattttttattatcagaaaaaaaaaatgtaactgcattgtaaataaaacttttaagtctcagttacaaaatagagtttttttttgcggctaaatcctttgaattattattccacttgcacttaattttctaagctcaaattttgatagtaagactctccaaactactgaactgtttgtaaatttaaagtgttatttattttttacaattaattttcaatataaattacttatgtgtacacttttgttcatgtatcaaatacatattggtacacttaatattattattttaaaaatataaaaattattacaaaatttatttttattttgttaaatattttattttattattattt

SEQ ID NO: 365368 - DNA, 564 bp, Cannabis indica
aaagtttgaattttatttttggcatgttaatttttttaaattttttaaaaattgacaggatgtcttaaataactataatgtacacgaccataaaaaagactaaataagtctctcaaataccgaaacaggtaggagtatatcagtgcaacacttttaaagaagtacattattttcggtgtattaaatttttctaatttattaaaattttacatgatgtcttaaataactataatatacacgattatataaaaaatagactaaaaaagtctgtcgagtattaaaataaataagagtatattcgtacattacttttaaaaatatacatgataaaattgtccaaaaaatatttcttaatttaataagtacaataatataaatatataaaatataattaaattatacataaaaaagataggcagtgactacagtgcacgacatatatgacgtacattgtaggcaaaactttaaaatgttgcatgaaatgcagtcttgttggaccaaatatgcacgacatatatgttggaaattattttaccaggatcttagatatactcacaagtatgt

SEQ ID NO: 365369 - DNA, 508 bp, Cannabis indica
tatcaacgctgcttcaactcctaaaaacttatttcgcatttttctgaccacacaaatctctgatttttcttagttaactcggttagtggcaaagagattttagaaaatccctcaacaaaatgtcgataatacccagctaaattgagaaaacttcgaatttttgttattgatttcagcctcggccaattcttcactgactcgatcttgcttagatcaaccataatcccattcttcccaaaaatatgccctagaaaagatacctcggacaataagaattcacacttcttgaatttcacatacaacttgtgatccctacgttgctgcaatacaattcgaagatgattctcatgctcctcttctgaccgagagtatacaaggatgtcatcgataaacactatgatgcagttatcgaggaaatccttgaataccctattcatgagatccataaaggtcgcaagagaattagtcaatctgaatgacattaccagaaactcatagtgcccatatc

SEQ ID NO: 365370 - DNA, 625 bp, Cannabis indica
aaatatgaatttataaaacaatattatttaaacacatataaggtttgagaaaccttacattgggtgcagcaaaattaaaatgactccttccactcaaatctctatctcttgtatcttgtctatagcacagtatcaccaagatctgagcccgaatctccttctcttcaattttgattcttcacagccttacacactataattgagtatcacttgatgtgtgtgggaacttactctatcactatagggtttgaaattatgaagagagaaagagagaagaggggttcgaatagcataggaaagaaggctcaaaatttgactgaaggcaagtgttctcatcatctttcaatttgaggccatcactatctatttataggcaaccacctaggtttaggtttgaattattttggcattaagaaaaataaaataaatggtataatagagcaatagtggtcgatcataggatgtggccccctacatttcaatttttccatttttccaactatttatcttatttcctcaaaatgccatttttaaaatttagccacttaaatgtcaaaactatttattttaataattaaaattaattataaaaaaaattgccatttaacatatttattaattagac

SEQ ID NO: 365371 - DNA, 1239 bp, Cannabis indica
aataattctaacctaaccctaagtggcatcctataaataggtagtgatggcttcaggaaaaagatgatgcctctgaattccttcagagaaaaactgagtgccttctcccttaacctagcccccaccctctcttcctcttcttcacttctgaaaccgaacccttgagtgatagagtgagtgcccacacacatcaagtggtacctcaatcatagtgtggaagatcgtgaagaatccagattcaacagaaggacattcgggctcagatcttggtgatactctgcgacagaaaggatacaagggttagagatctgagtggaaggagacattatattccgctgcaatcactctaagctttctcatactgtgtttatttcatatcattttagaagttcatatttaggatcttaaacaacatacttgttagtaaatctaagatcatggtaaaatatttccaacaccgatccaattcaaaaaatacaaggactaaaatattagatacatttgaaccattcaaataaatatacaagaaatacatccaatgaatagaatcgatccaatcccacatctaatcgatgttgggtcgatcaaattactaaaattaattagattagatcagatgataaactctaacatctaatatataattggattgaatctggataggcctataaatattagatgttgtccaataaatacccctagttacgagaaagtgactatgaatcctaaaaatttcattcgactttgcttatggatagattggtcgatctacttggacctagtgaatgagcccatgattcttaatgggattatttgattaaaataacacatgtagtaataaataataatcaagtaagttttcgtgactctcaatctattcatgaaatctctaaagacccaggttgttcacagcccagatgcaataacaaatccggatggcgattgcaagcctctttgactctctagcgccgaaggtggggggtaaattatctctatttctgggtaggtgacacatgtatatttaaataagcccattaagaatgacgacccattcactaggtccacgtagatcgaccagtctgcccataagcaaagctggatgaaatgttcggatttgatagtcactttctcgcaactaagccaaatatgtgattccgtaaggcaatcacatatttagttaaaaaagtttagctaattaaataattttaaatttctctaatacacaaaataaaaaaaaaa

SEQ ID NO: 365372 - DNA, 420 bp, Cannabis indica
ttagatagtcgccttttgtggacatcgcataacgagctgatcgaacctagacatgcaagtctatattggtttatcaaggctgctgggttcctaggaccaactcgcatttatagaaagtcggtctcctggtttacacacggacacggggaggatactcgcacatagttcgatatatgcgagctactctcttgtctcgaatgcgattagacttttgtcatgctcactgcctctcgctgattctattttaagcaaggtttagaacatcgaggagtccctcagggacatctcagctttctttggaaaatctgagtagacgtgtcctctaagtaggggtctggtctcgagtttctaagtgagagaaatctcactataacaataactaattttcaacttaaataggaatatttaatgaaaaattta

SEQ ID NO: 365373 - DNA, 854 bp, Cannabis indica
catgaattgataattgagaagtatatttggatttgactgtatgcgctgaagagcaatatcttttaagaaattttgcttttatacttcttaatttttttatctaattaacttcatatgtatcttgtatgagatattgaacattataatttctttttaatttgtttatattttttagtacattgagaaacaactattattatatttttaatttctacatcaagtattgcaattgttatattcttttttttttgaataatagttgttagtaatttttttttaaaaaaattgttagcaaccatttagtaacgatataaaaatataaaaacaattgtatgtttaatttaaggaatcaacaaaatttaaccactaaaattcattgtacaaacaatgtgaaagtaatatgctcaaaaaataacgaagttaaataacgtgtttataattataaaacaacaaacaatgatattactaaatataagtaatttttcttcatatttacaatctcttcctttccattcccacacttgatttaaaattaacataatgtgtgttctcttattattttctatttcttaatgtaagagataagataaatttttgttttaacatgtaaaactatattcttttacttgttgaacagctatagtgtaatgtataacaattaattcgtaataaactttagaacaacatgaaaacaacttgagtttatataatattttcacgttgaaataagatattacaaaaagaatacaaaataagcttcacaataatatgaaaataatttaattatccttttgtagatattgtgtagtttttgttgttttcaaccaaaggaatatcgattgatgaacaaataa

SEQ ID NO: 365374 - DNA, 794 bp, Cannabis indica
ttagatttctgatggtttttcagggcctcttgcctcttctcgtatgatttttttcgtccctttttttaatctaactttcctctatttataatcacatagtaggcagttaattacagagtacagatttgactgtgatctttacaacgtttatcccttgaaatcgtgggttttgattacatatcacgtagtataaatgcaattaatattcgaaaatcacacagctgtgattaattcgcttttactgggtcaaaatgatcgtgtatttaaatacgtttgaaatcatagcattctgggatgtcttgacaagaactcagtaccaatgaccttgatagcgagttggagctttttcccctatctttccgaggtcgacgatgtacgcctcgttgcttctttgtttgaaggcttaacacttcattttaacaatcgcaatttttattaacaaagagtactttaacagtcatttgaatgtcaacttctgacttgtcaagactattattctcactaaaagatgtcgaaaattgattggtgatagtaacaggagcgcgccttcctatagtgagataggtgcctcgcttattaggtcttgagtccaccccaactgttatacttagtttgtatataatacgctaagtattttcacagtcaatatgaatccctttcgtcttcgaagttgatgtctcgccttatgcatccaatgttgtatgatttctcgttaatacatgaggcaacagtttgtatatatttatctcgcataagaccttatagtcaacaagttgcaagtatactctgttact

SEQ ID NO: 365375 - DNA, 878 bp, Cannabis indica
tgtgacaatacacagtcacatcaacctttttaacaacttaaaatacaaataataataataataataataataataataataataataataataataataaacacatgcaaaactctaggcttacacgtgtaaacaaaaaagaataaaaaaacttttatcaaacaaaacaacattagaatacacaaaataaaaaggcaatatgaaaatagacaataaataaaaaaaaaactgccgtatcacagtataatcaaatggggtgtaaaattctcttctttaatgttgttgtgaaaacattgtaaaaataactgtctatatttttgtaaaaggaatattttatgtgtaaaaatatttttttaaaaaaagctaatattatttacttaaagactatttgtataattgaatttaaattaattttaaataaattcatgaaaatcgtaaataatatacgcttagtatcgatacacaaattcaaaaaattatatccttcaacaaaaaattaaaaaaaaaaaatccttccacccattagaaaaatttctcattttataccaattacttctgaataaaaaatatttataaaattacaatttttcacataaaaaacaaccttgcagattttctaatcttttgtcctaataaccatatagtagagtaaaagttttcaggattgtaattcactttagaataaattagtttgatttgaaaccatatggtttgtattttatgattgttgtaaaaaaatttagaaaacaatgttcctttgtttacttaattttgttacctttcaaagtttataatattcatacaataataataaatcaatatcaatattaataattactcccaaatgtcatttattaatatttttttaattatatata

SEQ ID NO: 365376 - DNA, 697 bp, Cannabis indica
gtcgagtaagtaattgataataggagtcaccatgtaggagaactgtctatcatcttgacatcttgcgtttcacatatgcttggttcgcttagtatcttcactagaactaagttcaattcatccaagtcgttatgtgaggctagttttgctaaggcatcgatgttggatttttgttctcttggaatctgttcgattttgaagtaatcgaatatttccaacttcttacgaactttctctaaatactttactatttttatgtctttggcctggtattccccgaggacctggttcacaatcaactgtgaatcactatggcagatgaggtttttgactttcaacgccttggctatctttgagccggcgatcaaggctttatactcagtctcgttatttgaatcatcaaattgaaatctcagagcatagtgaaacctaaagccttcaagtgatattaatattacccctacaccggaaccctgcttgttggatgcaccatccacgtataacgtccaggtttttgcatctcgttgaacaggtggaatttcttctagagttataccttctatcaagaagtcggccatggcttggcccttgaaggatgttcgaggatggtatgttatgtcaaacttccctagctcaattgaccattttatcaatcttccagaagcatctggttttgataaaacttgtctcaagggct

SEQ ID NO: 365377 - DNA, 640 bp, Cannabis indica
aatagaagaggattcgaaatcactaaggagactctcatttattagttgtctgacgaaaaatgaaaactagcttcagatagatggatgagaatgagagcatcttattccttttatagtattttttctagggtttaggatttaattatatgaattaaaaaagataaaataataggtaaaaatacactaagtggccgaccatagtagtgggcctcactagttacaaatttaccacttcatttcataatgcatcttttctttcactaatgtcatattttctaattttaatcctataaatatcaaaattatttatttaataaatatgattaattatcaaataaaattgtcatttaacttatttattaattagatcataaaaagtctctcaattaacaaatagatcctaaaacctctttcgtttagaattaagcccttacttagtgaatcatcaatacaacatagtctaattttagaattataattgattaattaaaaccaattaactgagtctaaaagtagtattatctcaactagtgtggggaccatgaccctatgtaatcaagcttacaataagtatatttacatttaccagtaaattcctaacttattaatcttcctactccactatagatttgaaattgaa

SEQ ID NO: 365378 - DNA, 603 bp, Cannabis indica
gaaggaaatggaacatgagccagcaacactataattatctgacagcatagttaaattgagtcttagtgttagtcttagtcttactcgagggcgagtaaggatctagtttggggaaattttgttagactgtttttagcctaagttctgggtcgatttcataagtgttttctcacatagtgtttcccttttggaatggttttacgcttgattttccttgtttcaggttcccaatgcattatagctcaaattgtatcaattggtgaaaagacggggcattctagagaaaaatctgctgaagctgttaaattagcattagtattcgtgaccaggcttgcccatggtcgtgacctgggtcgtgactaggaggcttggcagaaagggtgtattttccaattggtctatggtaagccctagtcgcgatcaggggcgaaacaccgaatttttggccagttttgaaattttgccattcaaaggtagcaaccctaattcctatataagggactcgagtttaatgatgaaaatcatcagagattagccctgaaaaagtgaatgaaggaggagaggaagctattgtgacgatccggagcgcaatcaccaactagt

SEQ ID NO: 365379 - DNA, 683 bp, Cannabis indica
taccacaagccataggtttagataatctcaaaactatgagactacgatcgagaagttttgttaagtcctttgaatagacttattatcgaaattttcttttttgtccttgtaatagaaaacgtttggttactccatgtgaatggctctttggctttgatacgtagttccttattaggactatccattgcttgtttaaactaaaatgaatttttatcacaagtgttttccaagtcatgagagagtgaattccttaaaacccatccactacgacgaggtaccatgaacttctgtctaagaacattattggtattaacatcatcagttgtgtcaatacaacagaggtagtgagaccatcttatatagaataagatgatagaacacgttggagctgaataaaaaatatctcctctactttgctactttattttcatatttagtcatgttcttagaaaaatagtatttattgaaacaaacacttgcttatcttaatgaccataggatggtccacccctaatcactttagaatatctatcaaacttgaaaacctcagttgatatttctagcttttcttaagttcatgatcagggcatccttgaatctagtaatggtgtacactaagtatatgaccattccatcattctgagattttcttgggatcaaacttagatgggacgacatagaat

SEQ ID NO: 365380 - DNA, 703 bp, Cannabis indica
tgctttaatcttgtacggagattaagcgatttgttataaccacacacttttcaattccaagcgaatcttggtagccaaaattagtgtccattattacatgaccacttttctctttaagtatacttaagctttgaaaacttaatcataaaagataaattttcatactttctctatttctcacaaattttgataccaagcatatcaaaatatatacactaactttcgacaccaaacatgtctaagttatactcatgtcttaggcaccaaacatgcctaaatttcacatatcatcaattcttttaccaaattgcttgataaatattggatatcaccctcacactttctcacatttcactattaagataatatcttgattttaaaatatagatgaacactttgtctttataatttctctttaatttctttcttgaaattattttcactaaaatttgacaccaaaacatgtcaaaacttttgcatatgcacatagccaaaattgatttagaatttaagttaaataactaatcaacaatatctcatcacattttgattaagttgtggctcacccccaattttccacttataaagtatatataaaatatcacttttacgtatatttctcttgaaatgactttttaagatcactttaaaaaataccatttgatacttttagttttctcaacaaaacttaaaatatcaaact

SEQ ID NO: 365381 - DNA, 605 bp, Cannabis indica
ctcagaaagaagctgacattcaaatgatgttggttgttgaagttcaccttgtcaccaagaactgcgattgtcaaatgagcgttatgtcttcacacacagaaatgacgggatttacataatcaacctcggtaagacatgggaaaagctccagctcgctgctagggttattgttgttattgtgttcatgtacctagcaagatgctcaaatgagattcactttgcagcatatctaaattcacgtcagcattgacccattaaaagcgattaaatcacagttgtatgattttcaaataataaccgtatttatttacgtggggcgtaattaaggcccataattttgggtaaatattgttgtgggattcgtatctgattgtaattaattgccaccgtatgtcactataaataggggcagaatgtacagaaaaagagacggaaaatcctttagaaaaaagaaccctagtttgtatcagaataatcttaataagactgactcgtggactatgcagagttatctacaaaatcacgtaagaacttggtgttttttttatttattattttttcttagatttcaactaatttctgtgttgatcctatcacgaaaatag

SEQ ID NO: 365382 - DNA, 522 bp, Cannabis indica
agtaggggttcacaaaagggcagcaatcatcatcacaaagggagatcaaattcaaagggctctaaagatcctaatgggtgttatcattgtggaaagctagggcgtttcaagagagaatgctacttttacaagagaagcaatgggaaatcaaattcagatcatcaagaagaatcaaacaagcaaaacaagagtaagaatgactatcaaaatgcaaacctaagtgatggttatgatagtggatgtctatgtaactgcatcatcttttaaagatgattggattattgattcgggttgtacatttaacatgactaacaacaagtcttatttgtttgattacagggaatctagagggggcaaagtcattcttgggaatgatcaaatatgtaacattgaaggttcatgttctataaatttttgaaatgtttgatggcattattagaatcttaactaatgttagatatgttactgatttatctagaaacttaatttctattagtgtacttgatgatcttggtgttgtta

SEQ ID NO: 365383 - DNA, 908 bp, Cannabis indica
gggtaattcaaggacttcaatcttttgggcgaagggtgatccgcttgctcggtccagctcgagatcagtgagttttgggttggacaggcattgtaccatgtttttcaattgatcgaattgcgcttgcacaaatggatgaactggttcagcttgttgactgacctgtgtcacgttggaatctcttggagttggatcttggatgcgaatgcttggttggacagctggtgggacgtactgttcgtccaggctccttcttctatttaggtcagtcttggggtcgtgtgcagcacccaacctattaaataccgaggtatcaaacagttttggtgtctgacttgtttggccggtaggttggccagagatttcagtctggatgaagttattaggtgtaactccactcacggggcaatcaggaaggatctggccatctaccgtttggcccacaggttagacctatggccgtggattggacggctgaccattgtgagtttgggcggtatgcccggtaacatactcttctgtaccgcgtagagagatactagacccggtagctggttgttgattagcaacttggtaggccctccttatcagtgcagtggcctgcctcgtgcgatcatcaatggctacttgctgagccttaaaagtttccatctccatgtccctccattttataaactggcatctttgctcgtcgaacacaaggtttatggcagcacaaagatcctcctgatcatgctgcaaagtgttattatggccttgcatgagtccaagggctgtacggaggttttggatctcagtatcatccccaacagtcctctgtgcattagtggtggacaggactttagtgttgggagtggattgatcggctacgaaactagtgttcccagtctcttgcacacctggtgtga

SEQ ID NO: 365384 - DNA, 607 bp, Cannabis indica
gtttttcagtatcaacatattctaattacaaagatttgttttcaacaagttccctgataaagtgatgccttatatcaatgtgttttgttctagaatgttgaacaggatttttggaaatatttatggcactagtgttatcacaaaagatagttaaaacacccaattcaaatccatagtcaatcaacatttgttttaaccataacaattgagtacaacaactaccagcagcaatgtacttagccttggctgtggacaaagaaatagaattttgtttcttattttgccaagatactaaattatttccaagaaagaaacaacctccacttgtactttttcgatcatcagcattgcctgcccaatctgcatcactaaaacaagctaacttagaattagtatctttaaaataccaaattcaataatcaagagtactattaacatatcgaataatcacttttacagtacatacatgagattccataggattactttgatatcaagcacaaactctcacactgtaacaaatattaggaggactagcagttaaatacaatagactaccaatcatactatgataaagagtagtgtctacctttactccattctcatc

SEQ ID NO: 365385 - DNA, 607 bp, Cannabis indica
tacctttatttacaaaaaaaaaagtagagagatagagaaattgaatgatagatcactattcatctatgaaataactaaattattttcaaattaattttttaataatttttttagagggtaattttctaattttgaacaaataagaatggagagtaccaatccttctataaatggaaggaatcaaaattgtacatttaagagtattcattatcctctcatctttcctttccttccaataatccttcttgccaaacaaggggattcgacctctcctccctctcattccctcctttcctttccatcctctcacttttccctctcaccaaacatagtataaaggaaaacaactactactatgtagtaaagttatcaaatgaaataaacagaaaatgcatatcttgaaaagtacaagactgttagaaagaatgaaagatccaccaactataagctacggcaaagtattacccagagaaatccaactgtttcccagattacgttacctaaagaatacagatagtgacgtagtaataccaaaaacatgctgattttctaatcggatagtgagagagagagagagagagagagagagagagagagagagtacgta

SEQ ID NO: 365386 - DNA, 1019 bp, Cannabis indica
tctctctcaaatttgtcgtcccttttaccctagattctgcccctatttataggtgtatagggtggcagttgttttctttaggatttaatcattcacaaatgctcatgaaacgtggacattcttcatgtttcatttctatgcacatgaaataatatttaataactacccaaccattcttttgtctttatccttaaacggttgtgttgactatgaaggttgtctctcgctaagtacgagttatccttcttaccgtccttgtaggaaaaaaggctaagtatagatatacttctcctcacaatactcttttactttgatggtattagcgaggtggttatttttacgtataaatggcgagatagatgaatgtagttattatctccatatacacatatgtggatcaattagttgcaggcttttattcccaagtatgtgggtcaatgatctgcaagctctttactatctcgtcttgaacacttctgttatgcacgctgtctttcccgagatggacttattatctcgccaatctttaacgggtaatagttattattcttatattgcatttacttatgtggcagtgagtttgaatatttctatcaaccataatttattgaagagaaatgctaaagggcaccagtggtgcctaacaccctcatatgtgtcaatatcgctattggtacaactaagtatcgggtcccatataatttaatataatagcttttaaggagtatcgctagccaatcgcaacgcgacatgtcgcaaaggtgctaggcaccactggtgcctaatatcaatgctctttattgaaatgagttatttaagtcacatttaataatgtaatttaatactacaatcattgagctgattcatattcctcctagggcccgtttggtacgcaggactggattggattagataggctaatttgtccaatccagtgtttgggcatgttagaagtctggataactaatccagttaacctcatctgtctgggattatttatcccatccagcagggtggga

SEQ ID NO: 365387 - DNA, 536 bp, Cannabis indica
gagtttactcccacgaatatagccatccctaccccctcaaatcaatctcacgagcctcttatccattctcatttgatcacggtgggggagcaagtaaaaataaaaaacctcacattgggtttagggataaaaacatgattcacataatttttcttgtcatattgaacatataaattaaaatgggttatgtttatgtaaaatatgcatgttatcatctaaattgctactctaataatgagtgatattggaaagtgtatttaattgctattatatttcattccatataattctataatgaataagacttagcttaattaaagtaataatataagaagcttttaaaagttattaatttaatatatataaaaaaattattaaatttaaattatgaattaattagtaaatttatatttattggtgatagtcttctgaaaaaatatctagataattaataaaattaaaaacaatatatctatgttaaattatatatatgaaaaagagaaaatgaaaaaaaatatatatatatataaaactta

SEQ ID NO: 365388 - DNA, 635 bp, Cannabis indica
ctagggaggaagacttagttgatagcattgcactatcaaattgcagtaattattatggatcaatcaggtacgcatatgcctaattattatatattgttatcgtatattatatacaaatagatcttggatttattgttaatttatctaacataatatttatatactttttattagggcagaacatttgtacctaaaaaatctatccatccggcaaaccggactaacacaacccaaaattcttgaaaaaaattggattcaggttcaacccaataccaaactgggccgagttgattcggttctagaaatttgacaaatccaaaacccgaacccacccgaaaatctcgattatataattaaaaaatatatatgtatttttttttaagtttttatttatctaaccctaaaatcaaaaaacctaaaataaaactaatatttgtaaattgatttgggattgtgtatgtgtgtgtgagaaattgttaatatgattattatatgataatattgtattattgtgtaaatcgattctttttgtgttgatatatacataagtttttttttttttgtaaaaaaaaaaaaaaagtgtaaaataatgtgagaatatgaatgtgactattatttagatgataatatataat

SEQ ID NO: 365389 - DNA, 406 bp, Cannabis indica
cttaattgtgaagaaaagtgattctatggtttatttgttaattaagagactttattaagtctaattaataaatatgttaaatggcaatttcatttgataattaattttaatcattaaataaatagttttgacatttaagtggttgaattaaaaaatatggcatttttgagaaaataagataaatagttaaaaaatggcaaaattgcaaagtggtgggcccacatccatggccggccacttacgctttattttgtcatttattttatcattttttaatgccaaataattcaaacttaaacctagttggattcctataaatagatagtgatggactcaaactagaaagttaatgatttgacttcagtcaaaattttgagccatcttttctatctcattcgaatccttc

SEQ ID NO: 365390 - DNA, 722 bp, Cannabis indica
tttcaaaatcaacagacaagccattcttcaacatcctgcaagaaaaaaagcaatttgagtggacggaggaatgtaaaaaacttttaaagagctaaaaacgcactcacaaaaccttccgtactccaaaaatctctggacagagaagaacatggaatatactaagcagtcacagagcacgttgtgagtgccgtgctaatcagagaagagaacaacatacaacaaccggtctattacatcagtaaaagactcattgaggccgaaggcgaatactcattgatagaaaagttaaggccctattttcaagcttatcttgtttgggtgtacactaaccaaccattacgccaaatattgcaaaaactggacacctctggacggctactcaagtggacggtggagctgggccagtacgaaattaccttccaaccacgaacaacaatcaaaggccaggccctagcagactttttggtagaatgcacaggcaaagaagaaagcgtactagaaagtaaccccgagccagtacaaaaacctcagccaagtaacagtgaagacaagccgatttggaaactacacgtggatggatcggctacagatcagctatcttgtaacgccctaaataattaggcacgctacccaagatacttatgaaaccctaatcccctaaacgggattactaacgaaattagggcagaatttaaactttaataacaataggaatggaaata

SEQ ID NO: 365391 - DNA, 609 bp, Cannabis indica
agatttatacaaataagttttggaggtaactaaaatgtatctcaaacacaaattatataatatataattgattttatgaaaaaaagtaacttattagttttttattagtatcataagtaatcgaaaagttacttttcaaagacagaaaaataaagaaaaacaagcagaatttcgaaattatttacatttgaggcatattagtttgtaattaaggcaaattttaatgatgtggcaaggtattattgtaaatgagattcattaaggtatttttgtaattattttataatttatgtatagttttgaaaaaatacccaaaaaaaaattagaaaaaatactattgtttcttaattttcaatcataatttatttctatctctatttatatataaatcaaatcaatatatatgtcaatatatttccactaatgtatatatatatttatattcattactaaaataaataagttagtatatatatttaagtttatgtggatgaatctatgttaataaaaatattttttcgggtattttaaattataaaacaaataaaatacatcaattcaatttattatttagaaagattaagaaattagaagtttgtatattttttt

SEQ ID NO: 365392 - DNA, 792 bp, Cannabis indica
aaatcaattcagggtcctatttgtactattttaaaaaatataggatccattttgtcatttaacaaaatacagggtccaattggtaacttttataaaacagaggatccaaaatgatatttaccccataattaacaacaacatcttcataagtgttatcatttatggaagtaccatgtgttagtaatacttatacattattgacgaaacatatttcaatttaatattgcaaaattaaggtataattaagtatcttatgtaatataaataataatttcattatttaagattccatcgacaaaagtcaaaatctgaatagtcaatattaggtttggttaatagaattgtaaaatatatgaaattttatctcaaaattactgggctataaaataattagtagctcatgaaatttatatatcacattttatttccacgctaatagtgttagactaactttaatatagtcaatttttttatttttataatcgcgtatgttgtagctatatatatataacataattttaaaaaaatttaaaaaaattgaataatttatcatgctgaaattaagattcaaacaattacttaccatgccatgtataaaaaaaatagtcgtgtgtgtaataaaatattttaacctaatttcggtattgtaatttatttaaatattttaaaaatttacggataattttaaatgactataacatacacatttatgaaaaaaagactaaaaaaattgttatgatgccaaaacgactagaacctctatttaagaatactctattcaagaataacctc

SEQ ID NO: 365393 - DNA, 570 bp, Cannabis indica
tttctcatcagaaaggtttgatctgatcccttcctcgtccgaaaggtttgatcgaaaacttttaaaaaaaatttaaagttatgggtttgcattatatcatgtatttctagatgaatcccagttaatcatacacaaatgccccttaagtaattttaaagagtaaagcattgcttccgagtcgaatgctagcgaggaggaagagtgtcccgttgtcgtcttctcggtagttttgtgagcccagagtacttgagatagctcgtcgacccacatgcctttggcagcatctaacttcttcttgatggtatccttcaaggttttattaaaaacttccacttgtccattagcctgaggcctggatactaacgagaagctcttaattattttgttcctctcgcagaattcagtgaacaagtcaccatcaaactgggttctgttatcagatactatcttcatgggaattccaaacatacagacaatgttcttggtgacaaagtcgaggacattcttgcaggttatggaaacaagaggttcagcctcagtccatttagtgaagaagtcaactgccactac

SEQ ID NO: 365394 - DNA, 946 bp, Cannabis indica
acaatcaaacacaatacaatataatataattcggcgtaccaaaccaacacttaatgtcataatttttttaattacaacactattaaataagtattagtttgtaaatatgtataagtactataacacataaaacaaaaaaaaaaacataaatatttaaattattattatcactttatatatatactcatcattattaatattctctagcagagatatagataattattcttgtttttttcaggagtgtttgtttgccttgccggtcgacctaatattattattattattattattttctttttataattatatgtaatattattttccaatatcaactatacaaattatttgcatttggtgtttgaaaaataaataataaatagtaataaaataaaaaagagtagtaatgaaactgacagattctgattctcgtgtagagggagtttataaaagtaaaaatccaaaactgtaaagacaaaataataccttacgatttcaacaatacatgtataatgcttatgaaaaagctgccacaccccccaaaaaaataaattaaaattaaaattattaaataaattactgatcatcagaaccaattcccttttacataacagtaacaccactttttttttttcttttttacttaaaccccataaaagagacaagtaagaataagaaagcatgctcaccaaaaaatccagaaccaagattttgttcttctatgactcaagaaaaaagactacaaaaatatatatataaatatagaaagaaaaatagtgaatatttgtttgtttacatagattttttcttttctaaagctcaaacatgcttctgcaaacaacagtagacaaaaagctgatcgagttgcacttttaagcagtacaactgctcttcttttttacatatgccctaattaattaatatataaaatatactgcaaaaaaat

SEQ ID NO: 365395 - DNA, 566 bp, Cannabis indica
accctggaggatggtttcctctgaattggatcagtgattggatttgaagaatgctcagattcttttgttgttgaagtttctgtagcaacagagtcttgcaatgtagcctcggcagttgcttctgtagctccttcaagttccttttcctcggcagcaggcttttccatcaagtcttcaatctgttcttctattgaaaactcaaacaaatcctttagatcatcaacaacaacattagcagattccataaaagtttgggttctcatgttatacacacgatatgccctactattgatggaatatcctaagaaaacaccttcatcactttttccatcaaagttttcagtgtaatcacgatcttgtaaaatataacaaacacacccaaacacataaaaatgacttacatttgatttcttaccttcccagaaatcatatggtattttgtgagtacctggacgtaagaacactctgttgatagtatagcaagcaatattgattgcttcggcccaaagacgccttctaagcttcttgctattcaaaattactctagccatttctgttagagtacg

SEQ ID NO: 365396 - DNA, 641 bp, Cannabis indica
aagattacagtcaactttgtaataaactgcctactatgtaattataaatagtggcaagtaagatcaaaaaggggacgaaaaaatcatacaaaagaggccctgagaaaactatcagaaatctaaataagattgactcgtggactatgcaaaattttaactgcaaaaccacgtgaagaatactgtgtgttcatactttttattctaatgcttttattttttctgtgtgagattgtcactgttaggctcaaatttggtgaacgaaaaatctacgttaacagtttggtgctttcattaagagcctctgtaaaaatgctcagaaaaaatccttctttcttttgaagaaaaaccacctccttcacggctgaaaacccagaaaatattaataccccacatgaggaaactcatcatcgtcttgggaaagggcccatgggctctacaaggtctaccaacccgtagtccaaacggaccaccccttccaagaggactcaacttgagggtggccccagcacacggatcacacgttcccggaggaccccacctgacgttcgtcctagtacgcgaacaacacactcgaggagaactcagcgtgggagtggccagaaccctagcatgagggatgaagagcccaatcgtggaggtac

SEQ ID NO: 365397 - DNA, 667 bp, Cannabis indica
ttgaagaaagagaaagagttatgtgttttttttttctaatttttgaataatagaaagtattagggtattatctaactaatataggatatattcagattatataaaagctaaataaaactcactaaagacaaatgatcaaatggccaaaaagatcattttacccctcactaaccaaaaagcttctaatttacttaggggtattttggtcaattctaaaatctcaactatttccaacattcccaatgtctaaatataatgccccgctatactaaatatactaaaatgtaattctaatagccaaacgccgcgttccgatgttgtcgggcacaaaacatacaaaaacataaatttccttatatggcatataaaatacattctgaattcagataaatctccataaaataataatttataattaatattctaatttcataattaaaccctaattatctgctaattttcaaattaaagttaatcggtctttacagttttgctaccaagcgagctttgaacctttctattgaaccatcaaggtaatatttgatgcgatacacctatttatttcctatgacatgttgacctgatggcagaggaactacaatccaggtatgatttttctctaatgcatcaattgttgggttttatgccctaaataaaactctgtttc

SEQ ID NO: 365398 - DNA, 599 bp, Cannabis indica
actggttcacttagctatggtaatttagtattgcatttctatttttttttaaacaagtagtatttagtttttgatattaagaatattaaattttaaataaaataaataaatgtaatgcatttgagtcctccacgtgtctatatttatgataagttaacgaaagttgtagtaatagtgtaagagtattgtaacattatttttgccttcaaaaataaaattagatatttaagtgtataaaatctgaaatattatgtatttatgacgcaatttaccttaaaaataattacatctcaataaaatataaagatatattttataaatttatttaggtataattaataattttattttaaattataatacatataaatattatatttactcaaaaataattctattataatatagtatcaagaattgtgtattgttatagttgttatattaatattttttagtgttttgatatttttaaattaaatttaaatatttaaaattaatttttcttatatatatctattctatataaagtgtgcctatataactgaattcttagtttatgagaaaatcatggtgactttttatttatatttaataaaata

SEQ ID NO: 365399 - DNA, 536 bp, Cannabis indica
aaatcaagacatattttgaacatcagaaaattatttatatatacatgtgaaccaataatttatctaattatgaacaatacttacaaaatatttctgctaccgaataatttttttgcacttcaaacaaatattatttctcatcaaatagttgatgtgcatgcaacaaaaaaaaaaaaactatatataagtcaataaaagtttttaaaattctctaattatttgttctaccattaaaggatgatcatttctcaaatatatgaaagaacttaatataaaatctatttatatctttagtaaaatattattttatagcagaaataatatatttttttttatataaactaccaagtaaattatattataatatttattgttaaattatacttaacgacgaactcataaatttttcataaatttttactagagtgttgatgtaaaatttaaattatatatatgaaaaaaaagtatattttaaatattttggtaaaaaattaaatattatatgaatcttaaaaaataaaaataaataaataaaa

SEQ ID NO: 365400 - DNA, 605 bp, Cannabis indica
gctcatgggatccctgtttgggaccatgcaatggacaccgagatagaggctcttgagaagaatcatacatggatcattgtctctttacccaaaggacatcaaatggttctaaatgggtttacaaaatcaaactcaatgcagatgggagtgtagaaatcggttggtagctaagggctacaatcagcaagaagggattgactacacatacacctttgcaccagtcactaagcttgttgctgtgaagttggttctatctcttcctgccataaaaggatggcatttacatcaattggatgtaaataatgcctttctacatggtgacctccatgaagatgtgtatatgtctatacctcaagggtatagacctaagggggagttaccaccaaatgtagtttgcaagttgcaaaaatcattctatggactgaagcaagcttcaaacatttccatggaaatttcatatttctattggtttatgttgatgatgtgatccttgctagcaacaatctagtggaacttgaagctctcaaagcaaggttacacacaagatttcagttaaaagacttaggaaatttgaggtatttccttggccttgaggttgctagatc

SEQ ID NO: 365401 - DNA, 1047 bp, Cannabis indica
aagaaaggaaagttgagtcccaagtttattggtctgttcgagattcttgagaaagtaggtcaggtagcttatcgattggctctacctcctgctttatttggggttcataacgtgtttcatgtctcaatgcttcggaaatatgtatcagatacaacttatgtcttaagttatgaagacattgagcttcagacagatctgtcatatgaagaacgaccagtacagattttagacaggaaggaaaaggtgttgcgaaacaagactattctgctagttaaagtactgtggtggaacagaaaggttgaagaagcgacttgggaattggagtcgcagatgcgagagctgtatcccgagcttttcaggtaaattttgaggacgaaattcctataaggaggagatagttgtaatatcccggaaaataaaatgatacttgttgcccttgatttttcccaaaatacgtggacatggatgaggctgacacatggatctgtaagaaccaacacttatggaaatcaactaagtcttagacgaaaaaggagtacctcagggaaggtgcctcccgaaggagagcataggatgtatccttactctctgggaggccagaagcatgctaaggtagttccgggaggtacagagatccctcgaacagtcacttcacatttaatgccgcatgcgggaagacgtattgaaatctccataaatgacatgacggatggcgtaaacccccttttttggctattacactataatcaataaggctggtgacggctactttatgagaaatcacatcagtcaaaaggggataaaagattatatccacctaactcctaagatacctacggtatgggtcatgtatttcctattttgtatattctaggaatatgtgcccctatgaagctaaaacagaaagacaagtgatccattcctagggatcaccccagataaacactataaataccctacaaacagactaaaaaggggtcgaacattttctagttttaaggaatcaaagagagaaaataggagagaaatccaccaagaacattctct

SEQ ID NO: 365402 - DNA, 566 bp, Cannabis indica
cacaaacccaccctgggattgggtcccaaacccaaatccaaacccgaaccaggatgtgggacaagaaccaagacctaaacttagacccgaacatggacgagggctcgcgacccagaattgggatcgagactaagaattgcatgcaagtctcagtctcagacctagactaagacccagatcgagacttgggacatgaaccgaaaccagactgtgacccgtgattgggattcagatcttgtcctgggatctgggaaccaggtcttggacaagacccatagtcggtgtcttgatttgggactcagcgaaggacccgaagctagactaggacatggacccaaaccttagcctgggacccaaaactgaaacttgaaccagaacgagaccaggaccctggaacaggaccgggatcgtgaccaggacttgcacctagactgggacccgaaacttaaccagaaccaagcctcggaactcaggctcggacccagtcccaaacctagactaggactgagactcgacctgaatccgaacccaaactcaagactcaatcctagacctagaccaagccc

SEQ ID NO: 365403 - DNA, 512 bp, Cannabis indica
gagagaaagagatggaaagagagagactacgtaggtgggagaggagacctacgacggtgagcaaaatcgccagaccttcaaaatcgcatccacgccctgttcgaaatgaaagtcgaccttcagaccttcgaaatcgctagagagaaagagagggaaagagagttgttcagagaaagagagggaaaagagagctcgaaaatgaaagtgtcatttgattgtttgggcgtaagtgaacaatatgagaatttgcgtcgttttctcacactcacaatcttttttagcgtcggttttaaaacgccacacaaagcttaagtgaggcttttaaaacgacgctaataatgaacgaatttttttaatttctttgacttttaccgtcggttgggtaattagtgacaaagatagaaccgacgctatttgtttattttttgtgacattttaaaaatgacgaatatattgttggaaattattttaccaggatctaaatttactaacaagtatgttggattaacaac

SEQ ID NO: 365404 - DNA, 526 bp, Cannabis indica
gtagtaaaatgaaagtaaaaatttaaatttgaaacaaaaagtgggtatagagtgtaattttctcaaaaaaaataatttacatcacatactcaaatttctaattttttttactgtggtagaattttttcaaaatactatatactttttataccgtgtactatactaattttcactattgttctacggttgttttttaattgtaccactattgttttaattgttctgttttattattttacggttattttataaaaaattccgtgtgacagtaaaattataaatttttattcaaaatctaatacttttgtaaaaactcaaaagaaaaaaaaaaatctaaaactgcataaattactaaatggaaaaaaaaaaataaaagacatgttacgatttgtaagtttcattaagatccatctccatataataaaagttaataatataaaatttaaaaaaatgtacagtttattcgtaaatatattaacttattatatctttatatattaaaagtgcctatctaacggcatttctt

SEQ ID NO: 365405 - DNA, 501 bp, Cannabis indica
ttatttttttttaaaaggattaataatttcttattaggtgtaaatgaatgaaatttgtacatgaaaaatataaattgacactttatttataaaaatacatttataagatgtagggaataattttattaatgagtttttatttattaaaatatcacttacacatatccattcatatcagtacaaatattaacttttacttttttttttcttttttctctctcattttttatttttgaatttagcatttttttcttttttttttctcagttttttatttaaaaaccactttccagctattatcctttcaaaacccacattcaaaacccatgaaaactatctcccagtcataaccttcgccatcttcttcttccaactacctcctttattaattttcttatatcttttatttcgtatatataataactattacctgaggctctgcttctccatctccattgccaaaaaaacttcaaaaatgagtcataaatcagttgctaacaa

SEQ ID NO: 365406 - DNA, 557 bp, Cannabis indica
atcgttgaatctcattatcctgtcattcgcgcttgcattgctgcaaacctattttcccaatttggggcatcctgagcatcttgggcagcttgggcaacctgtggcaggttaacatcaccccggctacgtgccctgcccctgagacctctacctcggccacgaacatttgggggattctgagctccctgaccaccattagatccaaccgaattgccctggctccgggtattttgcctagtgtccatactgatctaaacagcctacgtagccaagaggtagtctggtcagattttgatcaaagagaaacttactaatacagcttaattagaaattaaaacatgcgcctattctactatcaggctattaacatgcttcctaacaggcttttcttaaatcatacttattaaaataaactactaaagcaataaaatcttactgaactgtgaaacgagctaactgcagatgatgattgtgttgggttttatgccctaaataaaactcatttcaatataatcagatttccttattaatatagatcagaaataacatttaatgtt

SEQ ID NO: 365407 - DNA, 767 bp, Cannabis indica
taccaatcaattcatttaagccctcttcaactgtgtagtcccatacctacacagtctcagaatcatcccacttgaccttccccaggcggtgtgggattgcacagcttacccggtatttccccttacgaatcacgggactactgactgtcacacttagcctcaagctcgacttgttccttggccttgcgaagttcctcaagctctttatccttggaagtcgcatcttgcttcaacttcttaatgtcctcctaaagctgagcgttctgtctcttcacgagttcgacctccttagatctagtaaaaaaggccttcgagaacatggcaatgaacaatgaagctaactctgcggagcgaggaaacagctcctcagctggagtcttgtcgatcttcgattggaactcgtcacttacaaacttctcttgaaaagacagtatgttgcgggctcgaactgctggatcaatcacgaccttcttccctttctcttgaatgcccttagctggcctcttggaagaatctgcgacaggggtaaccaccacatcgctcttcctcttctaaggaacgacaagggaagttgccgctgttctagatttcagcttgcggttaagagtgggtgcggacttcaagaaagtcatttctgcaacaacaaaaaaaaataatgattaatgctaataagaatgaggttctaacgcactagtttatgtatgcgataagctacctgatgacggtcgagaagttttcttagagaggcgtttatcaattcgctcttg

SEQ ID NO: 365408 - DNA, 525 bp, Cannabis indica
tgggtctaagtccttggttctgatcttggtttgggttcgagttgggtctgggtccgggtctagcttttggtctgattctaggtgtgggtgtttgagttcgcgtccgagtctgtgtcccggtttgtttccaggtctagaccacgatcagggtctaggtgcgggtccaggtccaagttcgggtcctgagtgcaggtccaagtttgggtttgggtcaggatttcggtccagatctaggtccagcattacgatcacagtctaggtcttggtccgagtccaatttcgtatccggatccccatctaggtcgaagtctatacttgggatcgggtcggagatttaggtccaggtccgggtatcagttccggtctgggtacacaatcgtgtcctagcccgagttacagtctcagtttgggtctgaggctaggtctgtgttcggttctaggtctgggtccgggtcctggtcacatcctagtcttgtcctagggtcgtatttcggcgattcttgtgcaggttctaattttgggtcc

SEQ ID NO: 365409 - DNA, 508 bp, Cannabis indica
tagttccttgatgaagaaaccactttcttggggaagtaactggtttttgattgatgaaaaaaccactttcttggtgatttttctagtgattttgctggcgacaatgcaaattctgacgacttttttaacgccggcaaataactccggcaatttttctgacaccagcaactactccgatgacttttccggcaccgacatcaaactccagaatagtcgtcggaattggcattgtcactagaaaaatcaccaagaaaccggtttctaccagtttcttggtatttttcttgtgatttttccagcgacaatgctaattctgacgacttttttggtgccggcagcaactctggcgacttttccagcaccggcagctactccaacgactttttcggtgccggcagcaaactctggtgactttttcggcacgagtgacaactccggcgatcactatagttttataatttattttttgaaaaataatttgaagtgaattttaatatgttttatggta

SEQ ID NO: 365410 - DNA, 837 bp, Cannabis indica
aaactcgcagaggcgtggtcgatgagatagatccaccgtagtggattccacactgcaaaatccaagaaatgcaaggttcccaccagtcacaaatcctgaacaaccaatcacgcaaccaccaaccgtgggtcatggtgtgacgtctcctttgaatggaatcgtacccggtgtgcaagagactggaaataccagttcagcagctaatctgggtattcccattactagagttctgccagcaacaaatgtccgaacaaccgttggagacgacaccgagatccagaacctccgtgatgctcttggactcatgcaacgccatactaatactctgcatcatgatcaagttgtgccctaaataaaactctatttcatttctattcaattatcaataaagaaatagatttaatttcattatttgtttaaagtgttatttggttcatgtgatcatttatttacttatctgattaataaattcatccaaacccttatcacattgatattcttgtttattgtgttgtcaacacagtggaaagtaatcaagattgtgtgattaaatgtattcctatatttatcagtacatagggtttaactgatatgataatctacaacatagtttacttgcaccttggataagtgatatgtcctttccaaggcattacttgcaccttggatgtatggagtatgcattggaagggaccggtattgaatttggattagatatgatagttttaccgtaatatctattcaatcaatatcacctagttgtatcctagatcaaatgatctcaatcttgacatgattaggttcgatctcatgagagttatttgtgttctttgattt

SEQ ID NO: 365411 - DNA, 582 bp, Cannabis indica
ggagacctgatgaggcagaggttatagtcggagttctcctcgtgctaaccatgacgtttgatcagataaaatataaaagttgtatttaatgatgatgattgccacgtattacacaataagaacaataaagtaaatgaacataggtttttatagaggttcagcccccttagttagcggataatgacctactctcttttagttgtattgataccgagagataatactactcagatcactatagtgatgggatttggaattaggggtgagcaaaaaatcgaaaaaactgaccaaatcgaatacaccgatcgttcgaacaccgaaaaaactaaaaaccaaaaactgaaaaaatcgccttcggttaaaactgccttaacatggtcggttttagtgtcaatggcaaaccgaccgattaaactaagaaccgaccgaacatatattatatataatatatattatttttgtacatatttaatatacaattttattaaactagttttagttttacttatagcttttttatttaaagtctcaattattcattgttttattttattatagtttgatgtatttacatattatata

SEQ ID NO: 365412 - DNA, 656 bp, Cannabis indica
atttcatcacaaccatttcaaaaaaaaaaggtaagcttaaatatatactattgatttattttattattttgatatttctatcctaatagttgttaatttattttagtctaaaaagttagtaaaatatttgaattatttttctattcaagaattatgacatatatataaatattttcagggttctaaacaacctgacggtaaagtctgtggtttttacatcatgtgactaatgagagacctaactatgtcgaacgatccaagagattatttagagaagcatgtaagtgtttgagctatcgtatctttataatataatttaaattttgaatcataaagaaattagtatatatataaaatttgatgcacttttatattgtagtgtcatggtcagaaaacatactcaatggatgagatcaatgaagtgcgtgaagaatgagtctcctacttaattgagtatatgccatgatttagattaaactttattaagtatatatgactaattatacttattgtcaaacttttgaactaattacaatatatattattatgtaatactttattatattaaaagatggaattgcacacatctatttaaagtattgaaagattattttgcatattatacttgaattgtaaatttttgtatgcaattaatg

SEQ ID NO: 365413 - DNA, 452 bp, Cannabis indica
tacaaaaaaaatcggaacttaaatccatgaaaaagcatgaaaaaacgaagaaaaacgaaaaaaaatgtgatttgtacggacgatatgcagtgcatactcgttcgcgcgcgctcacaagggtgctggccgagaaaactccccgcatggagtgtcacgcaggatttccgcgcacagggaagggtgtcttcagacacccgtgcgtgttgctcggacaggatgctgtccgaacacgcgtgtgaccgaggtgcactcggttccgcgcgcgcgtgggtgatgcagcatccttatcttttttcgaatcttcaaaaaatcataactaattcaaattaaatcgaaattgagttctgtaaaaatgtaacttgcctaattttttcaatactatccaataaaaataattccagaaacaaaatttcaattattttctacaataattcacaaacatcaatcaatca

SEQ ID NO: 365414 - DNA, 493 bp, Cannabis indica
ggtgtagatgtttccccggcatgacggccaatagtttcagggaataggttgagaggtctcacattaccccgacctactccgccattgatgacatttacgggaggtgctctacctcctgacagcggaacgttcatcattccgatgttgatggattcgttgttaagacctccgtttgcttggtttccagctattatgattttctctctaaattagcaacaaagtacttcttcatattcccacagacggcgccaaatgttttcgagaaaatttcgcaacaccaaaaatgaataataataataataataataatagcaatataatgaacaagtgagattattcaacctagaacggcaagtactcaaactgggaacatgaatgcttaatgaaaactagaaatatcaagaaaacaaagggaatatagtggttcaatcagatcacggtctgcttagtccactgttgcaaggagttcataagtgtcatttcatggtggatc

SEQ ID NO: 365415 - DNA, 516 bp, Cannabis indica
cagatcaaaaatgcatccaccagaccaagaacatacaagtttctgaacagatatgggtctatattgttataaagtaatgtcgtttggtctaaaaaatgttggagcaacataccaaagattggtaaacaaaatgtttaaacaccagatcgggcaaaatatagaagtttatgttggtacgagccatcattctatggctggacgaaagacttaaggaaaaatgcctttccctcgaagaaggtgggctataacagagacgaggatggtcctcgtgcaagagttgaagcaagtcctggtcgattcgatgttcgctctcaaaaaactcacctaagttcatctacaaaagacagcacacaagatgaatgtttggtcggaatatcaaacgttaaaacaagcaaatatgtcgatcaggagtagtcaacagattaaagaaaaagaatattcaacaaaaagtcaaaactcaggaagtttgaaattttctcgagttagggcaaaaaaattcatgaagcttagaataag

SEQ ID NO: 365416 - DNA, 796 bp, Cannabis indica
gcaatataattgtattattatgtattagacttttaaattactattttctttatattaaaatgttatttgtatatataagttttttaattttgttataaatatgtgtggattggaatggaaccggtaactttaaaatgtcaatcaacattcaatccgcacaagtgcgtattttgaattttccaatccaatccaatctgcacaagtgcggatatccgcactttgcggattggattggattggatcgtgcggattggattggatcggctattttatgaacaccccataaactatgaataagatataagatatatttaattaataaaaaagtttataattacaatataatgtttatatatttattttaaaaaaacaatacttatatttatactttcaaaacatcaacgaattaaattttgtaaatttgtacatgaaaaatacaaaatcttacttttactataattttactttcacacgggtaggaaaacttttatactcttttgttatttaaatttctacacaagatggcgtgacatccactcgggtgacacatgatagattttatcacctagactgaagattctacccttgatgaacctgtcagatgttattttatcaagatctagatttattaacatgtatgtttgattataaaaactataatctaaacatcctaaatatgaaattccctaaaaacaatgaaataaacacataaaagtttatagaaaaccttacattaggttgcagcaaaattataatgactcatttcgtttagatctctaacccttgatccttctgt

SEQ ID NO: 365417 - DNA, 517 bp, Cannabis indica
tgtgtatttggtttaggatataatgcttttccttgtaaagtttcagttttagtggcatagatgttattgaagatataaagtacaagtacaagtccaacaacaacaacaaaactaataatcaattcaatacattgtaatatttatttacttattagttgtaacttgtaaggattctggcagaagcattaatagcattggttatgcttgtttttctctttttcctacttactgctttgtgtttggtttttgctttcagggtcttccttaaccaatagagaaacactagtggagaaacaactaactttattttcttctcaacattgagtttttagatagttgttattgcagccatgtgtttacatccacatattatatagcttattgtatttagcaactatattttcaagatttattagtttgattgtttaggtttgttatgtatttttgtagtgatgaataaacaaatctataattttatgtagaatgatagtaattttttttaattatattaataagt

SEQ ID NO: 365418 - DNA, 529 bp, Cannabis indica
aagactcgatgcacaagaagattgaaagggagttactcagaaggaggcaaaatattcgtcatacggctatactacaacgttgcagtattgggcctatgaggccatcttggagttgggcaatgaatatatagtgaggaaatcacatcgcttttcaagaatggttaattgggagagtaagcagaagaccacactagggaaggatgaagttataagattattttcgaaaaatgtaagtttttttttacgttatgcagcaatatatatattttttaaaattctatctaataagacattggtttttatttttagttgacagtgtactctatgttatgttcccagcaaaatgaagaggagttcgtgaggactatcacctgcggtgaggggccgatgtttattgacttggaagaactagtgttgggcaacgatgggcaaccaactcaagatgctctgcgcagtcaagcccagaagtttgcctcaacattagaagagcatgcagatgaagcccaaatatttagagacactacaccac

SEQ ID NO: 365419 - DNA, 542 bp, Cannabis indica
acaaggggtggttgcaatagacgtatggaaagaagtggcccgatcgacactaagaaagcatctagtgagaaatcaaagtggcgtaaaaagagaaaatcaataattggctggactaatactaggagcaaacagggtagtgacaaagtatcgccatatacaagtggtaatcatcattttgaaagtgagaatcttagaagcgatgtacaaggggtggttggaataagaggacgtatggaaagaaatggctcgattgatactatgaaagcatctagtgagaaatcaaagcgaggtaataagagaaaatcaataattggcctgactaatactaggagcaaacagggtagtgacaaagtatctccacgtgcaaatgttaatttgagaagtgatgtacaaggggtggttagaatagggagacgtatgaaaagaagtggtcgggttaatgataagagaaaagggtatgcttatgcaaacattgataagcattttgaaattgaaaatctcgaaggtgatgtagcagcggtggttggaataagaggttgtaa

SEQ ID NO: 365420 - DNA, 582 bp, Cannabis indica
acctgtggagtctaggcatttgtaacccttgtggttcaagctatagcctaagaaagtgcaaggggaagacctaaattggagtttgtgcttgttgtatggcctaatgttgggataacaagtgcatccaaaagtcctcaaagttgtgtaatctggtttcgtattgaacagaacctctatgggggatttatcataaagaacaggtgagggaagtctgttgtaaaggtagacagtagtcctgaatgcttcatcccaaaattttaagggcatggaagcttgagcaagcaatgcaagaccatgctcaacaatgtgtctatgttttctctcaatgagaccattttgttgatgtgtagttgggcaagggtgcctatggatgaccccaacttgttgaagaggggctgtgaaagatctaaattctccaccccaatcggtttggagaattttgagccttttggagagttgtaactcagcctcagccttgaattgcaaaaacatttttaaggcatccgatttagctttgagcatgtatatccaagtaaaacgagaataagcatccacaaagctaatgtagtagctatagccact

SEQ ID NO: 365421 - DNA, 514 bp, Cannabis indica
tatcaatgctgattttacttcgatcatcaaaccttttccaatttttagtttcctagtcaaaacatttgggtcgattcaaatctcttctagttcttccactggcccaacaattacatttggttccccaagtcggggatccatatcttcatccccgccttgggcgattccctatttggcaatgtcttttcccttgtccaaactctgactagaggatacatcctttttagccttggttagggtaaggttgtaacattcccgtgcaagttgttgatttcctctcaggcacccgaccctattcttcgttggaaacttaaggcacgaatgaaatatcgacgtaacagcctttaagtcatataaggctggtcagcctaacatgacattaaaggctaatggaacatccaatttcaaaaattatgccattacagttatgctcctcagagcttgcccaacaatgaggggtattgttaggttatttttagtagtaattttagattaagtttagtatatttttaat

SEQ ID NO: 365422 - DNA, 574 bp, Cannabis indica
agacgaagcctcacgccctccattatcttcgagcttcaacagacactcaagcataggtaatggcgtttcgaatgaatgcgaatttcgaaacgcagtttcagaggagtgttttctcttcttcctctatgcccttaaacctttactcctctcgtcctgaagttggggttttcgctgatgattttcccctccctcccgctacgtgtttttttgcaattgggccgtaatgggcccattgttcactggacctggtctgcattcggtccaaaacttggctgaaataacactttacataaattttaggataaatatgatatttatcaaaatgttacttcattagagccagggtcaaataccaggaggaacacctctcaataataaagccatctgagctaaattatattcaatggagttaatagaccaattacaataaaaaaaaaatatatatatataatcattaatggcatatggtgtgttagggcatctccaagaaacccgaatttagtgttaaattaacaccaaaaaactactatttcaacactattttttttttcaattccaaccacaacaccaaaaa

SEQ ID NO: 365423 - DNA, 503 bp, Cannabis indica
acaagtcacatttagtcacgaaaaaattatgttgtaactaaaaaattcacactaaaagtaacaattttttatagtgaatggtgcaccccttatgatcatatttagataattatagtttaaatacttttatatgatagtctttatatagttatagtagctattttaactactctttttttatttgaattatttgccgtgttaacaataaagtgtattttagttcaagagtgaaacaaacattttgaactcttatttaaaaattctaaaaattaacaaattatttattatagctacaatatacactatcatatatataataatataattatacaattactattgtaaatatgaaagaatatattaacaattgtttctcaaaaaaggtactattgtaaaaatgcattataatacattagaatataaaatataaatatatattttagttatttgattattagtaaaaaaaaaatttaacatacaaacaattacattattcatagttg

SEQ ID NO: 365424 - DNA, 645 bp, Cannabis indica
cgagcccgtaaattagtactccaactccaccaataccgccaaaacttttggcagtgtcgaaaaaataaaactgccattaacatttattttagtttcttaaaaaacttcaatgaaacaataaaactaattgagttaaaagttgtaccgaaaatccaatttgaattgagcccatgcaaacaataagtacatatattaaaaggaaaacccagcgttccatatgccttagttattatatgtgctcctaaaaatgtttaaatttgatgtgcagatttgaaatgtataatattgtaaactactatcctacatgtatatatatatgtagtgaaattcttacccatgatttttctatttttcctagactaactttttgcatgatccaagtagataacacacggaaattatatttcaattaatcatactttttttcatgggctgattatttactctccaaaaaataaccaagtgcaatatcgatgttaagtaataataaaactttatattttttaatataaaaatacaaaataacatttgtgacacaagcaaggcccgcacccaagtccaaaaaacccttttaacaaaaaggcccaaatttatttttgaaaaatagcatattttgtatttcaactattatttatcaaaaaattt

SEQ ID NO: 365425 - DNA, 563 bp, Cannabis indica
atacatgatcaacaattttaacttatccaacatagacaagctggaggctgaactgtgtgcttttgaatggactttgccacttgcaaggagggttccctccagtgttgcagataagggtaaaaggaaatctaaagatattgaggatgacacctcaagcaatgctgcttcttcaagtttaattttgagagctagaatcaaaattgaactagcaattgaaacaattaaagaacaattgagcacacatactcttctgtgttctcactgtggagagaagggacatttgaaatccagatatcctagacttctgaaccactggaacgaaggcaatgcttttgtttttgaatcatgtgttttagagaatgacaaatccatttgaattgttgattctgaatctactaaccatgtttgttcttacttgcagctgcttgaaacttgggattacttaaatcaaggggagttgaagctcaaagttaggaatggagaattagtatcggtccaagctaggggaaaagcttgcctcaagtttcagaaaaaaaaattcttttagacaatgttttgtttat

SEQ ID NO: 365426 - DNA, 518 bp, Cannabis indica
attaattcctattgataattatacattagccaataatcatctaacaaatcaatatataaataatcatataatacaatatacatatattataattatttaataataaacattaccattaattacaaaattagtagaatattctaatttttttatataattataataatatatttttaatcattataaataattattatattagctaataattatataataaatcaatataaataattatacttatatttttttgaataaataattatatttatattaattataaaaataatatacatatattataatttatgtataaatattattaacaattacaaaaaattagtaaaataatgatatttttgtataattattaaaataatataattatttataatacatagcttaataatataattatttataaaatatataatataaaaatattgtattttataatttttttttgggtgaatatcattttgtaccctctattttgcaaaagttatcaattgaaccct

SEQ ID NO: 365427 - DNA, 553 bp, Cannabis indica
gttttaaattatattttatatatatatatatatatttttaatgaaatcaacttaaatggtagttaaattaaattggatggatcaaatccaatctaatagaaaaccaattaaggcatccaatagttggaactgattcaatccaatatattggatcagatcgaattggatgactcaatttgattggattggatcggatgacaaaatctaacattaaataaatagattagatcggttgaatccaagtctattgaatgtgatctaatgaacacccctatatatattataaggtgcttctacaatgcacactcctaaaaaggtacaccaatccacattttatctattttggcatttagaagaattttagtttatttttttcatagtcgtatattttatagttattttacacgcgtataaaataaaagagttacacgtacgtaatagactatttgaacctttttgatgtgttaaatttctccgaaagtttcaaagttttattataagatctctgaaataactataacgtacacgattataaaaaaaaaataaaactaaa

SEQ ID NO: 365428 - DNA, 681 bp, Cannabis indica
gtaaaattcatgcaaacataaatcacttcaaatttcttattgttgcccttgatttttcccaatatacgtggaccaactagacagggacacgtggatcagagcgtcttaatgctataattatttgctaagtctttgtgatataagacagcatccaggacgtgcctcccggagaaggcaagccaagccccatacgctcctagatgcccagctaatattaaggcatctctgcgaggtgtcaggcttcccctgagcagtcaattcgcatttaatgctatgggaggaagcgtgttgggactgctacacgcaataaagtctgacggcacaaccccccgatctgcagctatgaagtaatgatcatttaagtctattgacgactacactgtgaagagtcacgtcagtcaaaagataataaggacattccacataaaagccctacagcacctagggatttgaccatgcattattcatggtatattcattgggaatgtccaactttatggatacttacagatacacatgtataataattttggagatcaccccaccaaaaacactataaataccccctcaaagctcattaaatggggtcgagaatcttgggttgcataagagcaagaagagtaaatactcaccaagaacattctctgtatttataagagtaaacactcaccaaagacattc

SEQ ID NO: 365429 - DNA, 577 bp, Cannabis indica
gattggaggttagtggagctgtaacagcaatggctccacactcctccaatcatatcagtcccttcaaatactatgggatcatggtgtctcatctgtttggctgctgcaataccactaactccagctcctattatcccaattttggtaaaaataggagaagtaggtgtaggacccatttttggagaatttatttagtaatgacttggttggggaattggggtgggattttgttgtgagagcattgtgatatatatataggagttgcatgagagttttgggcacgtgaaataaactttcatatatttgtgaaagtgttggaataatcaataatgtataagagaattaatgctaggttggtgcatttgaatatgaaaattaggctaattcggaattttttcttccgaattttgacatgtaccaaattatgctcctgaagtttttttgccattaaaaattccatctgaactattgagattgttaaatttaaggacttttgtctaattttagttaaaaaattctaacatggatgaaagttcagggtcatgatttagtacatatcaaagtttgagaggcatga

SEQ ID NO: 365430 - DNA, 855 bp, Cannabis indica
gggcataaaacccaacagttggatctagggttcacacagcctagtgtgtcaccttagggagctccaattctgtttgtaaagaaaaaggatgggactcttcggatgtgtatcgattatcgggaattgaataagttaaccattaaaaataaatatcctttgcctagaattgacgatctgtttgatcaacttcaggccaagacggtattccctaagattgacttgaggtctggatatcatcagttgagaatccaagaagaggatattccaaaaacaaccttccaaaccaggtatggtcattatgagttcttggttatgtcattcgagttaacaaatgcaccgacagcctttatggatctcatgaatagggtagtcaaggatttccttgataattttgtaattttatttatcgatgatatccttgcatactctcggtcagaaggagatacgagcagcatctctgaatggttctacagcggctcagagatcataaactttatgcgaagttcaaaaagtgtgagttttggctgtcacaagtgtccttcctggggcatattgttggaaaagacggaattatggttgatccaggaaagattgaagcagtgaagaattggcctagacccaaaaaagtcactgaagttcgaagtttcctcagtttagcgggttattatcggcgttttgtaaagggtttttctaagattgcaatgtcgttatctgagttaactaggaaaagccaacggttcatatcgtcagataagtgtgagaaaagttttcaagagctgaagcaacgactgattacagctcccgttttagccctgccatctgatcaagagaagtttgtggtgtattgtgatgcat

SEQ ID NO: 365431 - DNA, 436 bp, Cannabis indica
aatttaattaatttaaatttttaaataaacttgaaaattaaaaaatggttaaatatttgaatttaagttagaatttaggatatttagaagatttgttaggtttttgaattttttcaaatattctcttacaacctaaattttaaattctagttaagatatattttaaattttaaaatagagatatcttaacgtactttccagttatctgttatttttttagtttgtgatgttggattatttatttatttatttattcaatttttttttacaaacctattattcatttgatctaaattaatatgactaacttgttgagagatccaatgatctgattttaatcatagtctaattgtcaatagatcttataaataatttgtaacaagtaaattttgcaatttctttcatctatgtaaacctagtaacatgatagggccca

SEQ ID NO: 365432 - DNA, 528 bp, Cannabis indica
aaaaaataataaaaaaaaacccaaacttttaatagcaaatatcgttgaaaaagtcgtcggagaagacacagtcgccagaaagtcgccggagatcggcgtcgaaagtcaccgaaaaatcatcacctccaaaaaagtcacaagaaaagtcatcgacgccataagtcgtcagaaaatttatcaaaaattcaccgaagttgttatcattgtcagaaaagtcaccggagttacatgtctcaaatataaattaaaatagaaccggttctataacataataaataaaaacaaataacatagaataacttaaactgattataattaaaatacaactggtctaacataatgaataaaaataaattacataaaaataactcaaaccgattataataaaatagaaccagttttataatataatgagtaaaaataaataacacgtcataactcaaaccggttataattaaaaaatgaagaggagaccagttcctaaaacactgaaacataaattaaaaacaaaactagttccataacaaa

SEQ ID NO: 365433 - DNA, 595 bp, Cannabis indica
tccaaccatccgagtaataatggactcatttttcgcgcaaccgtgtgcctcgtgcacacttccgtccctcgaacaactcccgtcgagtcatgctcgcaagaatccatgagtgcatccattcgtcgaggctctctagccaagatactcgcactgtccataggttcccactatgataacgtgccaacgcttatatcatgccccattcgatactgtccgaatagtctccctcgtcacccaaggactcccatacgtccaatcctcaaggtggcatgcctccacgcatgttggcaggcccttgagacaagccaccaaactagttgcatacacgagacctctatccctttccagtatggtgcatccgtcccatgtgtgcatgcaagctagcccacgaatgactacccgtgtcatctcgtgttgagactcgtggccaaggtgcaccacgacgtctcttggaggatctaggccacgtcccgtgcaagtagcatatcggcaatccaagggaaacgtacaagtgaacctctggcggcattcctcgacgcgctaccgggtcgccccgactaatgtccatgagtactccaactcatggtgacatatg

SEQ ID NO: 365434 - DNA, 919 bp, Cannabis indica
ctgctatttctacaacaacaaatacaaaagcaagaaaggggggcgggttccagaaagatcaaatcaaaacaaacatcagaatgacaagcaacaagaagctaatttttcagatggctatgatagtggtgaagtctatgttgcatccacatctttcaaagaagattggttacttgactttgggtgtacctttcacatgacaaactcgaggaccattctaacagattacagagattctaaaggaggcaaagtaattctgggaaacaacaacacttgcaacatagaaggctcaggtaatgtaagtttcaaaatgtttgatggtgtggttagaaccctaacaggtgtaaggtatgttccaaatctcgctagaaacctaatttctataagtgttctagatgacatgggtattgttagcaaaattgaatcaggttctatgaagctaagcaagggagctatgaccattatcaaaggccataaacatgaaggactttactatctagatggagaatcagtgacacaatgcaacaatacaatcagtgacacaatgcaacaatacagtcaccagcaatccagaagacctaaaggcagttctatggcacagaagattaggacacatcactgagaaaagcttacagatcatgagtgatcagaagctactgggtaaggatagaggaagtaaggtagacttctgtgagtcttgtgtcctaggtaagcatcataggttaaaatttaaagctggcatacataaaactaaacatatattggaatatgttcactttgatctttggggaccagagaaaactccaacacatggtggtaatgtgtatttcatgtccattgtagatgattattctagaaaagtttgggtatttctactcaaacataaaaatgaggcattatctaaattcatacaatggaaaac

SEQ ID NO: 365435 - DNA, 695 bp, Cannabis indica
aatcaagggacattatcttttgaagcatataatcacaattatcttccactgtgttgatatcactgtaattgtgagcaactatatgttctggaattaaaaatttttgtacacattaaaccataaacatgaaaattacatgtaaacataaatgacttctaatcttctattgatgacaaattagattacattgaaatggattttatttagggaataaaatcccaacagggttatcaagctggagggtcgtatgcccctaataggcagtatcaacctgagaatccaccctaaaggggtagaggtgaccaagtaccacccccgattgatggaagggctgacagtcaaaatgcagaaggaaggccaacaactggttcagtatttgaatgtgtaggcccccgagggggtagagacctttgggataccctcaacagaaatagggaaaactacggttccaacatagtaaatccacctgagccagctcaaagagaccaagtgaatgctggagttaatgttgctcaaccccaaacagccacagatccagtgatccgggctcggttggacaatttaacccgattggtcaaggaccttactgcactagaattcaccgacttggagctagaaaggaggagagggtctgccttctcctaagtgatcaatgacctccccattccagcaaaattcaaaatgcccacttgcaa

SEQ ID NO: 365436 - DNA, 428 bp, Cannabis indica
tttaataataataataaacataagatattttacgtagttttatagttaaaatctacatattccacgagtccgtattataaggaatattttctgaaatacaaaatacaaatctcaatatataaaataatagaatttctctctatttttttatcatcccctttcccataaattttgcccctatttataggtatataggttggcatttatttttattgagattgattcatttacaactgctgatgaaacatggacattccccacgtttcatttttttacacatggaataatatctaataactacccaactgctccttctctttatcccttaaatggttatgctgactaggaaggttacattgttggaaatattttaacaggatcttagatttactaacaagtatgttgtttaacatcctaaacatgaactt

SEQ ID NO: 365437 - DNA, 736 bp, Cannabis indica
cccacaaatcttgattttttcttgcacatcagttacaccactttcatcccagctatctttgactatttggtaacacagaggctctcagagccacgcattctcaaaacgaaaacgagttactctcctttgtgtagcagtattaacgagttcaaacaatatgggagaatgatccgaagtcgaaatctcaaggttatataatttagcaaatgaaaaagcttacagccaagaaagatttaccaaacatctatctaatcgaacttcaacgcaatgagaagtgcctctgcctctttcccatgtgagaggataaccacaaagctccatatcatgcaaaccactgtcattcaaagcttgttgaaaaccttgaattaaaaatttaggatagcggttcccttcccttttatcttcgtgagagaaaacattgttcaaatctcccatgacacaccaaggcatgtttgaattagcaacgagcgaacgtaaaagattccaagtagcaatcctacgacttctatttggctccccatacataccagtaaacctccatacagccatgccttcaactgaaaccttcacgtcaatgcaattcctctgctcctcccctgaacaacgacaaccatcatcctatcgtatcccaacgaaacacgagccttttccatatgagaacgattactaagcgtttcacaaaggaatataattttgggttgcttttggatcacaatatccttaaggaattgaaaag

SEQ ID NO: 365438 - DNA, 592 bp, Cannabis indica
agtattatctcaactagtgaggggaccatgggcctatataaccgagctttcaataagtagatctagaattcaccaagtaaattctctaacttattaattccaccttgtgccactatagatttggaattgaataacactctcaattatatagaacgctctatatataccacgatatagatatgttatgattatccattgttacaatcctaatattcaaagatcctctatagatgatctacactgaatagggacaaatttaccgttctacccttcaatgtattttatctttaaaacacttagctacttataaatgatatttcagtaaactattataattattgaaataagatctcaattatttatctctattcagcgaggctcgaaggaaattgttaggttattttttggtattaatttagattaaatttagtatatttttaattagttttaaatcgtgtttagagtattttcacgcttgtaatcttttatttttacagatttaaaatagaagaagattagaaaatatcaaaggaataagatggaaaagaagataaaaaaaatctcacaaaaagatgatatataaaatagagaa

SEQ ID NO: 365439 - DNA, 394 bp, Cannabis indica
ttatgaaccagcatccacttctcaataccatgatgaggacactttctgattaagtccttgaacctctcccaagactcatagagagactcattctcttgttgacagaaattgttgatctctcctcgcagcttagcagactttgctgggggaaagaacttagacagaaatttagttgctaagtctgtccatgttgctatggaatttggtggcaaggagattaaccaactcttggctctttctctaagtgagaatggaaacagtctcaaacgaatggcatcatcactaactccattgactttaaaagtctcacaaagttccatgaagttcgagagatgcagattaggatcttcagaagggaggccaccaaactgaactgaagactgcaccatttgaa

SEQ ID NO: 365440 - DNA, 542 bp, Cannabis indica
gttttccttaatctataagaaattaatatgtaagttttcataattacaatagaagaattgggtcagtctaggctgatttttcttattctctgaaggtacgaatcaatccaataaaaatagggattacttcgtgtcatgcaagcttggatcgctgctgaaattgccaactcacatttcttggtcggtgcatgcgagttgatcacacgatcgagatggtcagatgtcccttgatgactctgtccgaacatcgtgctatgtatgtgcaacttgaaccttcatatcaatcctcatagcctgctaggaataaaaccatccacctaggttaaggaaagcaagacttgtgtcgtgcagctagatgccacatcatagtgcaaaaaacaagataacaaataattagtataataccttactttgcatgcatataaaaaaatttaaaacataataatttttttttttaaaaaaaaataatgtttctatgtattataattaaaattaatctcctccaaatgaacaaatgaaataaataataatataatcaaata

SEQ ID NO: 365441 - DNA, 549 bp, Cannabis indica
gctcaatattaccacaaaataaagggattttatcaaatatacgtaaaatacaaaataattacgaaaataacttaacaaatctcaattacaataatatcttgccacatcattaaaaaataccttaattctaaaataatatgcctgaaactaaactatcccgaaattcttttttttttcctgcatttcaaaagtaacattttgattgcttatgctagctgttgataataaaccaacaagtaactttttcataaaaaaatatcattttttatattatataatttgagatacattttggttacctttcaaacttacatgtatacattttaataataaactaattatttaggttataatattaatacatttgagtaactttcaagtttattttcaaaaataatgatttatcattcaataaactaccattttaataaactatattttaaaaaatatatatcataaatatttaagtcacttatattttttaaatgtaaattaatatatgcactttgattaattaaataaagaatgaagttacaaataacttttaaa

SEQ ID NO: 365442 - DNA, 418 bp, Cannabis indica
tttaaaatagaatctttgaatatatagaactcaaaaaaaaaaattccaattaaattatcgatgaattgataatttttgaaagcgagcaatgatcaattttattacttatttatgtgaaagttataatttaaaaaaaaaaaatcaaacatcaaagagataataaataaaagtattttgaaataattaaaaccgctttatccttcagtttaatataataataataataataataataataataataattctggatgctagaaaagaggaaatatttcgggttagtaagctttataactcttttcttaccccttatgccaaagttaattataaaatgatttggtgtagattacccgtaccaaaatatagatttattcgctggcaagcctcccatataataacttattaaccagagatcacc

SEQ ID NO: 365443 - DNA, 616 bp, Cannabis indica
aaataattcgttaagcttccttagcaagcatagcttggttaatctcttatggggttgttcgaaagaaagacccatagttgggagggaaaaataacaaaaccccatctaattcctgtccccaccaacaatattttagcacctaatttaaaatgtcaagtatacatttaacataccgtaacatattaacacgatttatatttcttttatttatttataaactagtaaataggtcgtgtttagatagattttttaaaaagaactatatataggaaaattattttgacaataaaattatatcaaatagtttttcaatttatttttatatataattttaaacaaaatattaaaaaatattataaacttgtatatttatatatatttatgtatacatttaatgggtattactcatgaatgggttattagaaaaatttaagtttttatgcttaatttttctgtctaatttgaaaaatctctaatttttacattatatgggctactgttgttccatcggttaaataaaaaaagattttttttttggcaaacaaatcgaaaaagttgagtttgagtttaatatttttcagataaaacatatttttgatatagtataaaaaataga

SEQ ID NO: 365444 - DNA, 758 bp, Cannabis indica
tatacattaaacataatcatgaaataaatcatgtgaaccatgcaacataaaagtgaattctgatcttttattaaattgtaaattttattatattgaaataagttttatttagggcacaaaatcgaacgatataatacggtattggcttacaagttaaagaaaatgtgaagctcaatttcataaaagtaattcataatgaaaaccttttaaagagaaattttattaatacactcaaaaatgtcataataaattatctgccataatataaaataggaaataaaatttttatactaataattgaaactaaatttttcagtaattaaaataattaatttgaagataacgagcttcatctttaatttggacaatcttcacccttcagtccaatgatctaactcaactcgctaggatagaaatccaagtttaagtagctggagttgaagtaagaagaaaataaacatagttagtagatctagaattaataacccaaaaggataatagttctctaaaatatatgaatttaaaacaaagttagaaacacctgttgggttttgtgtcctaaataaaacacatttcaatataatcagatttactaattaataaagatcagaaatcattttatgttgcatggttcacatgatttatttcatgattattaaatctattaggtccagaacatatgtatttgttcatgattatagtgtagtacagtgaaatataatcatgataatatgttcaaaagtttaattccctgattt

SEQ ID NO: 365445 - DNA, 65 bp, Cannabis indica
tctcaaggaggaagagagagagagagtggtcgaccaaagatagggagagagagaggctcagtttt

SEQ ID NO: 365446 - DNA, 715 bp, Cannabis indica
ttgaaattgttcgttcgtcaataaaagaccattattatttccaaaacaaataatactacgtatatatatatatatatattaaaaatttgaggataaatatcatcatccattcaactttgtatttttacaaaaattattaattagattctttattttcttaaataataaaatagactttttactttttaaaattatacaaatagaacaatgctttaattttttatcaaaataaaacttaataataatccaatctatagatgttatgataaaactggttacattttttgtatcaaaattatcctatagttggttatattaaaaaataaatttattaaaaattaagctcaagatcttatttttaccattttgaaaaatataaagtttattttgtcatttaataaaataaagggttcaattagtagtaggctcctcttatctgtttcagcatacgtaaaaagagtttcttagttaattttttttatgatcgtgtacgtaataataattatttaggaccacttattataaattttcaaaaaacttcaaataatttatcatgcagaaaatataattcatatattttgttacactcacgattattttttcttatacgcgtgctaaattaacttttttttttggaaatatatataacataatgataattagtatagcttttagagtatatactggcaatatttaattaattgtatatagtaaa

SEQ ID NO: 365447 - DNA, 828 bp, Cannabis indica
attaattttacataaataaattaacaaaatacatgtatatattttattaagatgtaattattcttatatagaggtatactttgttaatacgggacttagaaaatatataactaattacaatttcgaggttattcttatttgtaactgcccaaatcgggacttgatttttatataacaaattagaggttattcttaaatagagtattcttaaatagaggttctactgtataatcatttaataaatcctcactaattaatccaagtaagatcataatcttactttactaccaaaaataattatatatttaataaaatatgtccaattaaatatcattttattttttgggatattacatgaatggtcctcactgtagccgaagttgtcgctcgcccacctagacagaccccctacctagccaatcacaacctccccgttcattcccttgctggaccaagccgcaccaacccctccctggactcatccactacttggcggtaagtttccctcctctctctttctttttgaagctcaccctctctctcacacaaatctctctctaagtctcgatctttccctctctttcttattttttttttaggtacgtcgatggtacatatcgactcaggtggttatagtggatttagagatatattttgaaatatttttatatatttgttttagatctggttttgtaaataaaatgaatttctaatacttaggggtatttgttttaaataattggtattgtaaattaaaatggacattataatagggaaatttgattttctatacttttctcaaaatcccaaaaataccctcaaactctc

SEQ ID NO: 365448 - DNA, 603 bp, Cannabis indica
ttactaatgtcctggaaagaacataacacttactcaaagtgcaagtacacattgttatagtgagatttctctcacctagaaactcgagaccagactcctatttaaaggacacgtgtattcagatttccaatgaaagctgaaatgtccatgagagactcctcgatgtttaaacctcgcccaggataaagccagcgagatactgcgagtacgtaattcagatcgcataaccgtaattcgcattatgcagggtagaccccaactcgcatgtgtcaggacatatgcgagtatctcctctatacttatgcggaagcatagagaccaactctctatgatgcgatattggtcccaacgacccaatagccctgacaagccgatatagattcgcatgtctaggctctgccagctcgacacgcgatgtttaccagaggcaattacctaagggtgcagacgttccaaacgtactgatgaccttgcgagctcaacaacggaacatgaacagtcaactcgcagatgtggaagacgcatacgttgatggacttgataactgtcgttcatttattaatgttaacgttgcttgggtttaattattgcaattcaatatgt

SEQ ID NO: 365449 - DNA, 555 bp, Cannabis indica
atatttaaaaattagttggatatttaaatttcaaatttgaatttaagatattttaggatttgttagattttaatatttttcattatttttcataacctaattttaattaaaattaagatatttcctaataatattttattatttattaaaataaaatatcttaaccaacttttcagatctttattttattgtctaattcaaaacttttttaaacaaacttattatttatttgatctaaattactatgattaacttattgacagatccaatgacctaattttaatcatagtctaattgtcaatatatcaaataaataatttgtaacaggtaaattttgtaatttctttcatctgtgataaacctagtaacatgatagggctcatccaaatcagtttgcttgtgtgagcctatatgtttgctattaggcttagatgcatataagaagcccatttatttctagatatataaatatactaggtccctaaaataaagtatcacatgtaatagttttatttaggcctaattagtattggacttattcaattaataataatt

SEQ ID NO: 365450 - DNA, 769 bp, Cannabis indica
caacagtgaggggtaggcaaattagccctaaaggtgcaatactctggccgaagaaaccatatacgggctggaggcaggggatcagatctttgagttggagccccatttgttcatatggtgttttaaacaggatatttattgaggctccattgtctatcatagttcgggccagtgttttgttagctatctgtacttccacaactaatggatcattgtgcgggaaacgaaccttgacatcatcgtcttcattgaacgttatagtgggttctcctactcgtggtatttttggcttcctttcttttatggacaggaccacttcttttttgctagtgttgtaaggtttgggcatacctttcctgagctatgcccgaatctccagctatatgcgggcccccaatgatgacttgtaaatgcccgtctactggtggagatagtaacaaatcttagttattgtctgcctgggtggccctttgattctggtcggccttgacatatttttgcacatgcgggttattttttcttattaggaattcaatttcccgcttcaaattgttgcattcattgctgtcatggccataatctccatgaaaaaggcaaaatttggacatgtctcgcttacttatgtccttttttatgggagcaagtttcttgtacgaaactactgactgagtagccatgtagatggttccaagtcgtcagtcaggatagagaaagcagtgaatttggaaggattttctctagggttctgttcggctttgcctgcgaactt

SEQ ID NO: 365451 - DNA, 627 bp, Cannabis indica
ttctaaccatacatgagcacttttttactttttttttcgtaaacaaacatcattttatttaattatcatgtttagaatttgtttgtttaattatttccctttcttaaaacattaataataaattaaatatattattatagttcattttagacaagactccgccaactccgataaacccaaatcaaaggttcctaacacgaaaacacatttgggtgaaaatgaaatcttgtattaactgagataaaagatacagacactacaagaaaaatgagcattactgaggacaaatttcgttggtaaaaacccctgttttcgtcagtattgcgcatcaatgaggacatttcgttggtaaaaagtcgttgggaatacttcgttgggaaaaacggttattaacaacgactttttaagtcgttgggaataaaaattaatcccaacgacaatgtccttgggaataatatttgtttttttttttttttttaaaatttcttgagtgcatcaacaacgacattgtcgttattgataataatatcaataacgacaatgtcgttattgaagatcttctacgaaaaaaataaaaaattaatattaaattatttgtaattaattatttatatatattattatatt

SEQ ID NO: 365452 - DNA, 637 bp, Cannabis indica
tgaaatctcatttttttatttttctgaaaattattgtcttagtaaaatagtcatatctctctcaatattgatctgtttccagcgatttttgtactgttggaaagcttattcgatgatctaaattttttatgaagaaactattcaccaattcggtgttcttctatgtcaaaaattatcatctttctgctgttgttgtaattcgtttttttcatatttccagaaaaagtactttcacttaaaataccataactctctcaattctcatccatttttaatgatctatatatggtgtcaaagcttatttgattttgcataagtttcatgaataaatatttcgttaattcggaattatactatgtcgaaaagttattttccttctgtatcatttgcttcgtttcttgaataatgttcttgcaaatctgttttagtaaaattacaatatctctctgaatataattccaatttcaaagattttggtatcattggaaagggaatttaatttcctaaaactttcatgaagatattatcttctagttctgaacctttcaatgccaaaagtttgtattttcgctaagtcgtataattcgttactccatattccttctcagaaatagtttcagtaaaacaatcataactc

SEQ ID NO: 365453 - DNA, 481 bp, Cannabis indica
tttttttaaaaatatacgtaaaatataaaattattataacaataacttaacaaatctcaattataataatatcttgtcatctcattaaaaaataccttaattctaaactgatatgcttagagtcaaactaatctcaaaattcctattttttaattttttttgtatttcaaaagtaacattttaattatttaattatgatattgataagaaactaataactaactttatcataacaaaatattactttttatattatataatttgagatgtattttggttacctctaaaacttatatgtatacactttattaattaaataattatttgataatgcttaggtagaatcacaaaaaacgtctgttgttgtgataaatccaacacgcaagtatacgtatcgttttaacaagtaatactcaggtaagtgagatcgttctcacgaggactgcagttaagtaccaatcaattaaattcttgtttctat

SEQ ID NO: 365454 - DNA, 733 bp, Cannabis indica
agtaatcccgtttaggggattagggtttaataaatatcttgggtagcatgcctaattatttaggggtgttacattcctactcccgctggagtaggatctgtgcgaggagtctagtcggactcgcgagaatgctacaacacagcagtaaaactcacagaaaagaagtcagttaacgtcatttacttgctagaggcaccgcctcctcgtcaggaggtattcagaatagaagaagtatcgcataaagatgagccagatttggatcctaggatcctcgactacgccacaactgcccaggtcgcggacgacactatcgaggtacctattgatccaatagataataataaagttttgaaatttggttctaaactaacttttcaacagcgagaaaagcttgtcacttttctcaagaaaaacctggatgttttcgcctggaaacattcagacatggtcggaatatcttcacaggtcatgtgtcatcgattgaacattgaccccgaagtgcgaggtgtcggacagaagcgccgcaaaatggaacccgcgaggtaccaagcactggaggaagaactagaccgccttttggcatgcggcttcataagggagtcgttctacccaaactagttaacaaatcccgtactcgtgcccaagcctaacggctcatggcgcacatgcgttgatttcactgattttaataataagcttgtcccaaggcagtttcccacttcctagcattgac

SEQ ID NO: 365455 - DNA, 455 bp, Cannabis indica
tagggaagaagttaaatgaaccattaacaataaaagaaaaaatattgtatattgatattaatgcactcttgtacagctgtatttttctttctttaaaaaaaaaaaaaaaacctgctttatcaaatacaggcagcatgatgttgggtttgaggctttgagcattttaaaattttcataattcaattataagtttttagtgaatacaaattatatataatatatataatttttttgaattaagcgtttatatattataatacataatttgggactcgaatctaaaacctccaacacgcacgcactctccctataaccacttgaggccccaagcggtttaaatatataatatttcaataacaataatatatatcatgaaaaattaagattataactattaaagatctaaaaacacaaaaatataccaatacgaagtgtcaaattacatattttaaatt

SEQ ID NO: 365456 - DNA, 619 bp, Cannabis indica
ggtaaaagatttatttatttcatttgttattgtaaaaataaattattttttttagtttagtttaggtaaaataatattaattgttattagtataaatatataattgtattaatttaggtataaataaatattttagtatacgtttagaatagttagggaaaaaaagtattataagtttaattttaattaatttgatttaataatatttttaattgtgtattgtaaattttgagtaggtgtttatttatggtgatgccgtttgaaaaaatttgagacgctatattagacttggtaatctatatttaaatttttgtattcaatatatttaaaaatattagaaatattaaagtattttgcattgttagtttcaattatatttaggtattagtgtgatattattcgagtaagttttaaatttaatattttaaatattttatagtattggattcttcgtgttgattgaagaatgcacaagttgttatctttattagagaaagatataatcactaaaattttaaaattttttatttagtggagtttgaatatgttagatattcatttgtagtaggttctgtgattaattgtactgtggtcgaatgggtagaatatgcatgtgaga

SEQ ID NO: 365457 - DNA, 558 bp, Cannabis indica
ctagctttgggtctaattctaggtttgggtgtttgagttcgggtacgagtttgtgtccggttttgtgtccatgtctggaccctgatctaggttcaggttctggtccagttccaagtttgggtcccgagtgcgggtccaaatttgggtatgggtcaggatctcggtccagatctagctctagcatttccatcccagtctgggtctaggtccgagtccagattcgtatccgaatccctataaaggtccaagtctgtgtttgggatcgagtcctagatttaggtccaggtccgggtctcagttccggtctaggtacacgaccatgccctgacccaagttccaatctaagtttgtgtctaaggctatgtctgtgttcggttctaggtccgggtccgggtacttgtcacagtcctagttttgttctatggtcctggttcggcgattcttgttcagcttcgaattttaggtcccatgtctaggtcaggggttcgggttttgtttttcgtctgggttttggtcctagtctgagccccagatctagacaccgagtactggtctgtt

SEQ ID NO: 365458 - DNA, 1756 bp, Cannabis indica
cgccctaatgctaaggcacgctactgtgcttttccatctacagtgttatctttgctaatcaaagatttttctcgaacaacgtgtcaaattaaaactttttataataaataccaaactttataatttacataattatttacaaacaccgggatcccaatttaaaacttttatacaaaatatgtcatattataacatccaggtcgcacaacgactacaaaataaaatccctagatgtcttgagaccgaacactccaggtcatgcttcccatccaatccaggctcactcctcttcagcttttgcctttcatttacctacacatggaagcaaaactgtgagtcgacacactcagtaagaaaagcatatcatataataccaaccctaggcgcccatacacctatttacaaggcttaacaaatgagtaagaacgttccatactaaggtacaaccactataccacatacactacgtaccttgttgtacaagtgctggtagggtttgtttcttaccctgagtaccactgagtgatataacacagacaccctgtactttcctgtacacgtgctggtatcattgtaatgtacttttcaacgatattcactataccaatgcactctgtaccattctgtacaagtgttggtagtacaattaaaccataagcatgcgtatacacttaacagatatatacactcagatattcatattacacattatacagagttcttaccttctttccagattcaagtgtgctggctgacttgaacggaaagtctcgcgatagaaggatgccctaatcacataataaaaccgggtaaatcacatggtcaaaaccctaatccgagaaacctgaagccacaaccttaggttctgttatactctcaattactctaactcaggaaatagggaaacacccaactacggcactgaaatggacgagaattgagaaaactgattttttcggggaaccctggcaaaactggtttaccggtttgataggtactggtaaaactgataaaccggtttttgtaccagtctcccccaaaactcaccaatttgctcaaaacttgtcccattgcgaccaaactttctacactacctaaacaatgtatgcaaaacatattccaaccagaaaatcacagaaaaacccaatgaaactcaacttgccattaaagacaaaagctttgagttcaaaattcaaatttgcataaatccaaccccatacactaaaaccagctgcaagaagcttaaaccacttcaaatgaaccttaaaattctaaccctaaacatttctaaccctaacagccatcaattcataatcacttactcaaactaaagaaaaagcttcaaaacataagactatggttctagggttaccttagcttaatcctccttaaatcccttactgaaatcaccaaagatcaacaacaaaaccccctggttttggttggttcataaatatgcttttcatgatttttctttttaatttccctgaaatgaaataaaggttaattacattaaccttggctggagtattttactgctaggtgtcattcccaaaaatcagccacctaacccaccattaaaattactgaaatgccctccataaccttaactttgacattttcaaacctacgggaataatggtcaaataccataaccccgcacatttccggtattttattttttccaatatttatcccactaagaaataaggttctacacttacccatgtgatcaaactagccatccatcgcattt

SEQ ID NO: 365459 - DNA, 925 bp, Cannabis indica
tttttactgtactatattttaaaaaatattttgctaaagtttaaaaattaaaacaactaaaaaaattaaaaaaaataactctagagcaacttaacaaacaaaatgaaaaacaactataaaacaatataaaaacaactacagaacaacaaaaaaataataaaacattgaccatgcaatatgtaaaacaatatcagctcctcaacatatttttgtattacgaaattattattattttttacttagttttagtaattttttttttgttgtttggtattattacattatctttttttcataaaatttattgttacaatgtcatacttttaacttctttttctctctctctctctcttttactttttttttttttaaaaaaaattagtaactagttaaaatgacaatttattttaaaagtactaaataaataattacatttaataaataaaaatattaaatcttcagatttcaaaatagggtatataatatagggtgattctacaatgcacctctttaaaagggatctactgatgcaccctctacttgtttcggcatccagaagtattttttttaatcttattttttttttttcatattcatgtgtgcgttataactatttaagatatcctataaaattttgagaaattcggaataatttagaatatggaaaacaatgttcaaataatctatttcacacgcaaataaaataaaatattcacgcatgcaacacactgtttgaacacgattttcgacgtattaaactttttcgaatttcttaaatttttgcaggatatcttaaataactataatttacatgactacgagaaaaaaattgagtaaaaaattatttcggacactaaaatatatggagatgtatcaatgtatctcttttaagggagtgcattatagaagagatgtatcaatgcat

SEQ ID NO: 365460 - DNA, 943 bp, Cannabis indica
aatatatgcagttcaacgatctttgatatctattgaactctagactatattcagatctttataacacttaggggtggatgaagctattgacaatgtagtttattttgaactctaaactatactcaatacaccacagtatctatatgacacacatattttgattgaacatggatgtaatataatgaacaaattagaaaatttattagaatttattcttgatcttgtatttttgttccaattaatatattattgttgtaatagaaattgataccaataaagttcttagacatagtatcacatcaccttatttgagtgggagaatattaaaattctaagcccatctttatttggatgacactagtgatagattactatgttatgatcatgatagaaactttagaatataactgagaaagtaaatctaatcattcatatggatagaaataacttatcagaatttcgagaataaaataggagaattttgcatagtctattcgaatgacttaggcaaaatacctaatcctcaataaatttgttttatggtatctttaatgattacttaatcttaagcaagtatttaacttttgtgttaatactagattgctatgttgatgacctagtctagaaggaacttatagtttcagactaagataaagtgtcacaacaagatgtccctaagaaacaatagtaagaggttaaatgtacttctatgtatgaatttaaccagactcctactgttgagtgggagccatctaaggtgtaatcaaacaaggaacattaggagacaaccaaggaagatctctgaaagtgacctatatgttagatcatagggatgtatattagaatccttatatctacaccaactcataacgtattcgagatagtggttactctaggggtggaggaattattctagaaggatgtaagaacccatctataataa

SEQ ID NO: 365461 - DNA, 748 bp, Cannabis indica
attaaatatgtagaaataattattttttatgtatttatatgagacatgcatatatagtatatattatatatcatgcatgtatattaaagtgtatataaatgttatatatgtatgaagtatgcagggctcgccctgaggtgagacgaaggaggcggccgccttaggccccccaccgctcagggtcccatttcgaaaaaaaattaaaatgtagttcgtaataaaataaataataatacttttaatactaaatatgtgttgcagcctagtggtaatttgattagtttaacaactaagaagttgtgaattcaaatcccaacaatctcacttttacactgggccccaatttttacttttgcctaaggactaaattatcatagagcagactctggaagtatgtaacatatataattgtgtaattcatatatattatgtgtatatgatatatgatatatatatgtatatatgttgcatgtatatgtaatatatgaatttaatattgatatttgtgtatggttacatatgagatattgattagtaacatacatattatattagttggcatataattattatttgagggatataattcatgcatgggagttatatattaattttgtacattaatatacaaattatataatatataataataataatattgatagtaatataatcgtgtttagtactattgatgtggatattattatcatatatattgtgaataaagagaatttgaaattctttttca

SEQ ID NO: 365462 - DNA, 561 bp, Cannabis indica
actgtattatgggtttgtatttacatgttctgttctatggtggattggtgctttatactaatgttatttgcatgtaatagtgataaggcttttgactatttgtgtgagaatatcacttataggatatgttttctgctgcttgtgtgagcatagcactggcaggatatatttttggatacttgtatgggtttacttgcaggttatcctatcaggggtgagtacaacttgtgataagagattgccctattggatgccgagtgtgagaatagcacaaggtagggcaggttacacttcatgtctgatcaacttgagtgggagtagattatcgtatgtgaggataatgtgtgataagatattgtgtgttatgtgtgtgagtatagcattcattcaatttataatgtaatatgatgttatatctgttggaatttattttaccaggatcttagatctactcagaagtatgtttattaacaccctaaatatgaactttctaaaacgatgaattaaacacgtataaagtttaagaaacctcacattgagtgcaacggaattaaatgactc

SEQ ID NO: 365463 - DNA, 646 bp, Cannabis indica
ttaccaagcaatagatccacgaaatatacaatctatttaacctaggaaaagtattaatttctatgaagataaaggtaacaaatcaataaatataaagcatataattcatttaacctaggttctatttttcatcacaattaacaatactttgacattactattaatttcaatttatcacaactacttagaattctaaactattaagtgagtagtaattctaagatgattatagaacaatgcaaaaccttaattaagtaatttaataggaaacaaatcaagaacaacattcattaggactaatcaagaattcatattttaaggtttagaaataatccttaacttaagaagaaactactccataatagcaatcataataattatgtctcaagagtttctagggcactgtacaaacacagctagctctgacatgtgttataaggtataaatacgtactactacgtatacttgatgagtcttagctaattgtattaattaatactaaattagtattagacaccattagaggggtaaatacgtgtagggttgaacatttagaccaagtttgatctggacccaaccaacccacttaggcctgacccgtgaaacccgaaactaagtggggcccatcttatggtcggccacttaa

SEQ ID NO: 365464 - DNA, 1172 bp, Cannabis indica
gaatccaacgttgtccccgataggtgagagtcaaggtttattcttattttatgagcttccaccattgtttcatacttcgtaaatgtatctctaagtagtcaccgtaagggagagtctaatagagatgaaaaacttacaaaatacttatcataaaagattgttacagtgttaaatggttcaacgaataaccatccataaaggggacgaagtctagcgtctcaaggttatattgaaaacaaattaaccatgtaggaccaacaatggagatcaaatatccttataactaaaactcattattttgaagagttgtattttcatttgatacttattttaatctatttattttaatatatatttatttaattaaaattactaatttagataactctaaatataaattttaatttaatatttataaaattataccctaggaagatctgaaaaataaaaatttattttccatccttagtattaattttctaataaatattataaaaatgacttaatttaagttggtccaaaattaattaaataattaattttcaacttaaatttaattttctataaatatataactgaattcaaatacaatgtgaaaagatatattttcgaaattcatataaaataaaattagaaaaattattctaatttatgttggtctaaaattaaatacattaattttcaacacaaatataattttcctatttaattaaatatcataagaaaaatatcaaatatttaagtatctagaacaaatcaacttaaatattaattttctaatttaattaaaaatatctagaaaaataccaaaaagtctacctagaaaatatctatctagataatccataaagtaattacttattttataatataatatattttagtctttttattttaataaaatcattaaggaaaattacttgatttaagttgatttaaaattaattaatgaaattatttttcaactttaatctaattttcaaaattttaaattttttgaaatatctacatttaaaataaggtaaatcaaaattatgtgggaattgattatcaaaataaaatatattctaaatttttttctaatttaagttgatatgaaattaacagatttccgacttaaatataattttctattttaattaaattcattaaaatagaaataattaagtatc

SEQ ID NO: 365465 - DNA, 713 bp, Cannabis indica
acgccataggggatacgtgtcagccaatgcgtgcccctatagcgtcggttagtacaaaataaccaacgttgaatgtgttgttattaaaaatttaacaccatatggcgtcggttattttgtaataatcgacgctatagggtgtctttattaaaattttaattatccacactctatagcatcggttgtttattattaagttgaaaaaaaaaagtacctcttaagacttgttttgtagaccataaggtgtaaataaactacattgtagattatcatttcagtaaaattccgtgtactgataaatcatagaaatttatttaatcacacaatcttgattattttctactgtgtcgacatcacaatatcaagaatatcaatgtgatgaggatttagatgagtttataaatcaaacaaatgatcatgaaataaacatgtgaactatcacattaaacaagtaatgaaataaatctgtttctttattaataaaggaatattcaagattacattgaaatagaattttatttatggcgtaaaacccaacagtctcgtgggtcgcttgggtcgagtggttgagaaggttgccttgggtctcctgggtcgtcgtaggttgagtgggtttgaatggtcgattggtgggttcgtttcttaacggggtgggttcaagtaggcgtggattcaagcctcaagggggaaggggcgatggttcatctggtatg

SEQ ID NO: 365466 - DNA, 641 bp, Cannabis indica
tttttttaaaaaaaaagggtaatatacccaacggtttaaaaccgccaggtataagggtgtattaattttctcgttttacgtaaaaattgtcgccttctattatagtggttgttataaaccgtcgggaatacttgttttttccaaaagttttaaacagttgcttaattttttaagcggcggtccccccaaaaaattatttttaggactgtcacaaatactaataattgtagtagtgtcggaatgggctttcggtatcggacagttccttgaatggccataaagatggcctcgggcttctctgttaggagggtaaagtaagtgtacttctcctccatgttcttctgtggcgtgagagaattgttaaactttccctttttgccattgtttctcccaaagttgttcttgtttttagtgtttttactactagaagtctgggcagagtatctgttgtttgcttgtgcgcctggtgggttatgaggctgttgggtgcctcgtgactgcctattgttgacatgcctcacctcggcctgttgtatggcttcttcgagtttgataaagctgttagctctatcaaggaactccttcatgttgttggtggatatcctttagatatctgtttagaagtcgcttagtgggagtat

SEQ ID NO: 365467 - DNA, 640 bp, Cannabis indica
gggtttgaaaattgaaaaaatcctaaattgggaaaaaatcccacaaaaatcggaaattgggtgttggctggcagcaaggctacaagttcagcctaggaggctggaaaaaaagggcttacgcgcgcgcagggacgagagacgccgaggatactcggcatttgcagcctccctgcccgagaaacctcggtcaggtgcagcgtcctgggggtgtctgaatgcccactccgtgtctgaagacacgggcttgtccccttcattccgcgcgcgtgtcctggttgtccgaagcaagtggtgcgtgcgtgcaccaagctttggcagccatggcacctaattttcaaaaattcataaatttttcaatttttatcagaattgagttccgtaaaaaagaaaattgctttcacaaggaatcgaaataaagtattttcagtaataaaaaaaatatttttcatggaaaaaattttgtacaacacctacattcatcaaataagcacatataccacatgaagcgatcaaaattaacacacatcatcgttttaattcatattacatgaaagtaaatcattaccatggccctgaggccagttgttggaaatattttacgaggatctagatttactaacaagtatgtttcattaacatc

SEQ ID NO: 365468 - DNA, 606 bp, Cannabis indica
attaacaaactatacgatttaattgctgaactttttactaactgaaaccgactatttatatatccacaaaatagtccacctggcactaactaacacttaacagaacgctagtgcagatataacagactaaaaaactccagacacgactagacattgaacaaaactaaattgtcacaaagtaatgaaacttacagatacaatttctcattagaaccacgaaaggccaagttatgtttagcaagaaatttcactattaaaataattcttagtaaaacttttttccaatgatctttttctttttcaattagcctttgagtagttttatcaatcgtttgattctttttaagccttagacgcaattcataccaagtggtcatatatttaacatgttccatgctaatctcatgctctttaagtctttcaccaatatgcgcccaatcactaaagccttcatttgttaacatgcctctaccaatcccacttttaaaaactttgcaacaaaaacaaaatactctatctaactcttttgaataaacaagccaatctcgatcacacttctctccatttgataaaactctagtatacaaattagcagtgaatcgtcta

SEQ ID NO: 365469 - DNA, 543 bp, Cannabis indica
tttgcatatttattgtaaaacccactgtgtattttcaaacagctttgaatctttctaattaatgcatcaaaattagcactttgtaaaataagacaaaatattggggcgttacaccagctaaggctaggccttataggccaaatgaaaagaagctggaaccaaaaactgtaagcagttactttattggatattctgagcgatctaggagttttaagttttatgatcccaaagtaattaaagattatattggaaacgagaactgcaaagttttttgaagatattgagtttggggggaaaaatacggttaccaatagttgcttttgacaatgttcaggattccattcttaatattgatcaagttttagatcaagagcagccaaacatagtcaatcaaatcccagaggtacaaactcaacaacctcaagaacaagtgcctttgcgacgatccattagagtaagaagaaatgttattaatccagatgaatacacagtgtatcttcaagaacatgaggatgacattggaatgatggaagatgatccaat

SEQ ID NO: 365470 - DNA, 693 bp, Cannabis indica
ttttatatacaaagctaggagaagaaaagttagttacagtaggaatttagttacaacaagattcaaacaactcacaataacagaaaaataactaaagtaattaactaaactatcatctaatattttcttgttttacatcttgtgcattggagcacaattataaatagtaagccaaatataatacaaatttattttttgtactaaatttaacacaaattttagatcttccattagaaaagatctaagctattcaaattactatgaaacatctccatgctttaatgattaatgctctctacctacataatggtgacaatacttaaatcaaaaaaatttcgtccttaaaaattaaactaataattacattatttagataatgaaaagtctaattgggtaaataaataaaaaatatatttatataaaatgaataatatggaatatatttttttaatctcgggcttctctataattgtatagaaaacattaatcaatggagagggatgaaaaatagggtaaatattattttggattctgtgtttagtaaaagttactgattgaactttctgttttgttaaatgataaaatggaccctatatttttcaaaatggtaaaaataggacactgaacttaatttttgacaacttttttttttttaatataaccaacttgaagacaattcctaacacgaataga

SEQ ID NO: 365471 - DNA, 681 bp, Cannabis indica
attaattttagagcttaatatttgttgtgcttaacccatttattcaaaaaaaaaaaaaatcggattaataacacaaattttcggatttatatgttattaatggataatctgaaattaaaattttagaatgagttttttcttaaagttttggacggttattgcatgtttgtattgtaagattgcaattttttgttgagtttaataatggaggaaaacccatttcgggttcataataccttggctattattttgaattttttggattaaatgggtattggattgtgatagagggttaaaaatggaacaaaacccctcaagcggcgtcggatttggtggccggaggtggttttatccggccgggtcgagattcgggtcgcgccgatccgggttgcagacccgcggacccgctgtgggattttggggtgacagggacgacaccaaacgacatgtcgtttgcctctgtcgggcaaaaacgacatgtcgttcgcaccattctttgttcagtccccagccgagaaacgacgggtcgtttggaccctgcggcatgtcgtttttcttcaaacgacatgtcgtttatcaaaaacgacacgtcgtacgacgcagataaaaaaaaaggacagacgcgtggggcgcgtgcatagccttttttgggccatttttttcaccattttgttccatttt

SEQ ID NO: 365472 - DNA, 1343 bp, Cannabis indica
ctggcataccgcactggaaacacccctgccctctacactcccccacgatggtgccttttagtaactagggcactctgggtaagtgtatcgggtctcagaattaccctgccgattgcctcaaccctagttccctcggaacctcttgttctgacctgagtcactagatgcagtaggggcctttcttttctgatcagtggccgagccactacctcccctactaaaacctaatgtaggaagggtaggagccctgccaacaaccggagtctcacgagactcaactatgcaccccactgcgccctcagctcgcagtgccttatccaccatttcagcataggtagttttgtcgtcagtagtaatcattaagtcgtgtttgatttttgcatttagcccgtccaggtacttctcttttcttactaaaatcggttggcacaattcctgaggtcaaccttgccaagcgatcaaactgagtcgtgtattcagtaacactcatgttctctttccgagtcagctgagtaaattcttttcttttggcacttctgacagcctcgttataatacttggcattaaatagctcatggaacttttcccatgtcattgttgtaacattgtgaatcatggacaccatgtcccaccataccagagcgtcttcttgaaattagaaagtggcacaggccaccctatcattaccagtgacgcccataaagttcaagatcctggtgatcacagttagccattgatcagctttcataacatcgcgacctcctagaaaaactggagtgcctgcttacggaacctttcatacaggggttccatccggttcattgcgacaacaggttcggtctgcacagcaggggcaggagctacaattatttcaggagcaccctgctgtcttcgctgccgaatcacttcctcttgttcattcattctagcttacatttatgcaaacctgttttcccattcttgggtagcttgagcagcctgtggcgggttagcatcaccccggccacgtgccctgcccctgggacctctacctcgaccacggacatttgggggaatctgagctccctgaccttcatttgatccaaccgaattgccctggctcctggtgttttgcttggcgtccatactaatctgaacaacctgtgtaaccaagagctagtttggccagatcgtgatcaaagaaaaacttactaatgccgcttatttggaaattgaaaacatgcgcctattctactatcaggctactaacatgcttcctaataggtttttcttaaatcatactattaaaataaactactaaagcaataaaagctcattgaaccgtggaacgagctaactgctga

SEQ ID NO: 365473 - DNA, 885 bp, Cannabis indica
aaacaaatgttattcattgaataagcccaatactaattggacctaaataaaatctatcatatgtgacaattttattttagcaacctagtccattttaattacaaaaattaaatgggctccctatatgcatctaggcccaaaggaaacatataggcaaaaacacacactaatttggatagatcctatcattatactaggtttatacacagttgaaagaagattacaatatttacctgttacaaattatttatttgacctattgacaattgaatcattaattaaaatcagatcattagatctgtcaacaagttaaccatggaaatttagatcaaacaataatgggttttatataaaaaaaaaatttaataataaacaacacataaaacacagacatgcaacaaactggatagttagatataggttaatttaaattaattaaataattaaattaattttgaaaaacctaaatattaaaatattatttttcaaaaattaattaaattaaattaaattaaataattaatttaaaattaaacctataaatttaaaaaattaggtttttatcaaacctaaatatctattcaaaaatgccaactaacttttcaaaatttatgttatttttaaaagaaaataaaattaaatgtctaataaaataaaacgataaataagcatgatttatctaatttataatttaatttaaataaaataacaaaaatttgaaagttgacaaaatatctggttagatttttaaaattttctagaataaaataaatcttattttaaatttcaaataacgtcattttataaaattaattaaataacgtaaaatataaatatctgaccttaaatttaaaaataagataaaataatcaaattttaaaaaat

SEQ ID NO: 365474 - DNA, 585 bp, Cannabis indica
acttgttagtaaatctagaccttataaaataaatcccaacaattgcgtgttacttgtttgtattcattatgttatataaccggttctattttagtggtaatcagcttgagttatttcgtgttatttctttttattcattataacactatactagaaccaattctattttaattatatctggtttgagttattttgtgttatttatttttattcattatgttacagaactggttatattttaattataatcgatttgagctattttgtgttatttatttttattcattatgttatagaactagttctatttttatttatattggagacatctacttttggtgactttttcagtgactttttcggcgaagatgactttttcaacgacttttccactgactttctcaacgataataacttttttggtaacttttctagcacttgcgactttatcggcgccaataacttttacggtaaaacttattattacaagttttattaaatttatttattgcttttcttatattttaaactttaattatttttattctcatatttttttgtattatttatttatgccatataaaa

SEQ ID NO: 365475 - DNA, 1142 bp, Cannabis indica
ttagatttttaaaattttctagaataaaatatatcttattttaaatttcaaataacgtattttataaaattaattaaataacgtaaaatataaatatctgaccttaaatttaaaaattaaataaaataatcaaattttaaaaaataaggtaaacaattaagcaaaaaattagattttatccattttcaggttcaaaatctattaatatctattttattctaataattagatttgaaatttgaaaaataaaatctaaatataaaattacacaacaaaaaaattaattctatgaaaaacatgaaaaacatgaaaaaaaaaagaattggaaaaaatttcattttgtgcagatggtatgcaatcgcgcgtgctgtggggaggttggtcgagatttcacgcacaggaggctgttagcagcattcccgcacgtgcatggccccatttttcaaacaaaaattgtccccctgacctaaaaaactcagacatgttgcatgtccaaaccgcgtgaacccaagaaaccaacggtatccgcacgcctaaggaggtatcaaacctcctcattttttctgatttttcaaaaattcataactaactcaaataaaattgaaattaagctctacaaaaaaagtgaattgcttaattttttccatactatccaagaaaaataattccaaaacaatactctaattattttacgtaaaaaaatttgcaagcaccaatcaatcatcaataaacacatagatcaacatgaatcacatccaaatcacacacacatcgttttaaatccatatttattgaaagtaaatcaattatcatggctctgaggccaatttttggaatatattttacctggacctagatttactaaaaagtatgtttttaacaccctaaatatgaatttctaaaacgatgaaaataaacacatataaagtatgagaaaccttccattggttgtagcggaattaaattactccttcccctcaaatctctaacccttgttcctttctgtcgcaaagcataatcaagatctaagcccgaaactccttacgttgtttggattcttcacaatcttacacactatgattgaggactaacttgatatgggtgggcatgcactcaatcactaaggcttgaattttaatggt

SEQ ID NO: 365476 - DNA, 798 bp, Cannabis indica
tctaagctcgatttacccaaaagactaaaatacgatcaaactatggggatatatttttgggtatgaaaaatgcaagatttaaaaaataattggtaaaaacggatgaaaaatgaagaaatagggggaaaaatggggtggttgggtgagggtttcgtgggtttgaaaggaagaagggctactggttattttagggttttgaagaagacgatagcagagagggttatataaagacatatgacatccgttattttgtaataaccgacgccatatgagttttttttttattaaatctaaaaaatcacttacagagttggttattacaaaataacggcctctgtagggttttttcataaaaattaaaaaaattatcacctacggagtcggttattacaaaataaccaacttcgtaggtgttttttttttaaaattttatttatttgctgaaaaaaagggcttctaaaggcttgttttgtagtggtgcaatagcgattgatacaatgtagaagcacaaaactagaaaacagagtaaagaagaaaaatgttaattgagattagcttagcaaaagataatcaaacaattataccccatctttatttatatagagagattttggtacataacagaaacaaagaaatgaaacaacaacaactaccttacctaacaactattaactgaaaaaaacagaaaaagttagttgttagcacacgtgactttttaattttttacgtgtgtgaaataaatttttaagacatttacttttcgtattgtaaattattttaaatttctctaaaaaattc

SEQ ID NO: 365477 - DNA, 579 bp, Cannabis indica
ttgtgaaaatatatcgctcgtgatatatataaatatgtatgtttattacccattaattaaattaatgcttattacccattaaaaaatattccatatatttatatgtttcatttttacataatacattaataattagatttgttagggtgtattttcatttttacataattaataattagatttgttaggttataagttatagagatactatggtgaatattaatactatgattataatttataatatactaaaataattgtagcatatttttctcgaaactgtaaatttattactttgatgatgtttattgatgatgcatgtgtgtataaactataaatgtatatttggaaataattgatattacatctctacattaatatttttgagtttaaaaaaatatatataacaatattggtaattaattttttgttttaaaattgctttaaatatctttatctattctttccttaactcattccattgtagtcaactcataatgattgagacataaggtaatgacataatgttttttttctatagtagttaactcattattcattatttgatttattttatgt

SEQ ID NO: 365478 - DNA, 621 bp, Cannabis indica
cactcatttcattttgttgtgtgcttttttacttcttccactacacaatgatctatatcgttataaacctttttcatggcctataaagcatatgaatgaccgcaccacactcaagtaccattccaaaatataattttatatttgtatagacatctttcatggtataaatatattcttatatatgtgatacactaccccaacatcatttttattagtagtataaaaattaccacctcacacttaaatccatatatagggacaacctaaagctaattaaactaaacatagtacatgctctactacaagatagagcccatgccaatgaacaactcctttacaaaacaaatttgattgaatctattatgagtcatggagtggaaatacttcttcataccatgtatatacatatagccttttattacttgtccactctcatatactaaatttatactcaacatgtattgtccaatcacatcgatcgtaaacatcaaagaaaactctctatgtacaatatgaatatatatacatgtgattaaatttacaaagtatttaaaactaacattgattcacactcataaaatcacaagggacaaaatctcatatgaacctctcaatctattg

SEQ ID NO: 365479 - DNA, 624 bp, Cannabis indica
aaaaaaattgacttggatataaagccaacaaaataagactaccaaaaggcccacattgaaagggcccattagaataaatatacccaagcccaaaaatataaaagtaggcccaacccgatatgacctagccaccaatccagattgccaatccataagggggcactacggacaaaaagaaggaagacgacaaacaacagggaacgagtaaagggaatgccgacagaagtagaagaagaaacaggaaggaatgagacgctaacgaatcaaggactaactacaagtaagatagcataccaggaccagaagaggcacctggatacctttccgacggaggaaatacctgaaaacgccgacggaggaaatacctgaaaatgccgacggagaaagtaactagagcacaataaaaggggaccgaggtaatacaacttataaattaaaggcccccaacggatgagaacttggatccccgcagacaaggatctcgtcgggagtaggaggagaactaaagcgtaaaatatgaaattaataaactcaggaatgtgatgccgacggacacaacaccgcagttaggaagagtaatagctctaaaaaaccactaaaggcactaacacgtgtagcgagaga

SEQ ID NO: 365480 - DNA, 513 bp, Cannabis indica
tggaatgctactgttcaaagcacgagtgtgtgtccctgataacactgaacttaagaaagagattttggatgaagctcatactaccccttactcattgcatccaggaaccaccaagatgtatcaagatctgaagccatatttatggtggtatgggatgaagagggatgtggtagattatgttactaagtgcttaacctaccagcaaattaaagcagaacatcagcaacctgtaggattacttcagccattatcacttccggagtggaagtgggaagacattgcgatggattttatggttggtttgcccagaaccacaggaatgtacgactcagtttgggtcgtggtggatcgctttacaaagtcagcacatttcttacctgttaaggtaacctatatagtagataagtatgcagactggtacgtgaaagagattgttcgtctgcatggggtacctaagtctattattttagacagagaccctaaatttacctcaaagttctaggtgagtttgca

SEQ ID NO: 365481 - DNA, 592 bp, Cannabis indica
aaaatacaatatgaccggaaccctccaggttgcactaccgcgaaatgcacaattcttgccgagccccaactcactattcctccactttagctttacccttacctacacaaggtagaaaactgatgattcgacaaactcagtaagatatgcatataaaaaatcacatataattgactcgtatctaggcgtccatacacctattcacaagactaaccaaattattaagaacgttctgaatggttggtgttattgaccatgatatcacccactaccagcgctatgaccgcactacaagaccaacactatgttcgtaccgttatgatagcattaatagtacccgaaagtacaattggccatgatatcactcttactatgcccgtactgccaaattgacacaataattgtgctgctatgatagcgccaatttatactttctggggtgaacatcactcttaacatgtatggtacatgtactaccaaaccgacacaatagttgtgccactatgatatcacccaaaacatatacaatcacaaacacggaatgcatatataatatgttctatgctaatcttacctcgtttccgtgctcagg

SEQ ID NO: 365482 - DNA, 756 bp, Cannabis indica
aacgacttttttctttcattttgtgttgtttgattcgggagctatatgttcgtacatagttatgcgaataattaatctttttgagtaaggctttgtgatattttagaaatgggtttggaaccctaacgcctagtggggtattggctaactctaataggcgctttaggtctatgctggttaggattgaagataggaagttgagcgatgaccttataaaattggaattaattaaattttacattatactgggaatagattttctattcaagtgttcggccagtatagattgtaagcagagaatggtgacttttcagcctgaaggtgaagatccatttgtttgggatggatcagtccaggggtcttggatctcgattattttgtattaagggttagagattttctatgtagtgactgtgtagaacttctagcagtagtaattaatatcagcagacccaaaacatttgggcctgaggcagtcagggcagtgaaagattttcttgacgtattttccgagaagttgccggggttactgcgccgccacaacaagaaattaatttcgtaattgatatggcacctggagtcggacctgtttctaaaagctccatatagaatggctctagcgagactcaaggagtgtaagttacaacttcaggggatgcttgacactgggtttatctgacccagtgtatcgccctggggagctccggttctgtttgtgaaaaagaaggatggttccctttgaatgtgtattgatta

SEQ ID NO: 365483 - DNA, 208 bp, Cannabis indica
ggttatttcgggtttgtaaatttttgtcggttttttcggttcggtttgggcggtttacaaatttttttgtacagccctaatatccactagtacagtggtccccaattgtccagctactacgcgcacgagcacactctgccaatatttctctaagttttcttcttcttaaaagaaactaagagtacaaagttagtgttgggttttatgc

SEQ ID NO: 365484 - DNA, 626 bp, Cannabis indica
attaacatcctcaatatgaattctctaaaataatcaaattaaataaacacataagggtttaagaaaaccttacattgattgcaatggaatataatgactccttctgttcaagatctctagcccttgattcctttctgtagcagagcattatcaagatctgaacctggatctcttactctccttcgtgtttggttaccaccgtcttattgactataatagagtacttgacttgcaatgtgtgggcatgtcacttattcactataggtttgaatatgtaagaacaatgaaggaggtttaaaatcactaaggaaggaactctctcatctagtttggttgaatagtcaagttgacattagtttgttaagttgtcaagaggataagatgagagcatcatgttgcttttatagtgttttaactagggcttaggactaaattatatggattaaaaaagaataaaatattgggcaaaaatacttaatggtcgtacataataatggaccaacctctagttagatttttgccaatttttttaaccactttttcttcttttcaataataccatattttccaattcaatcttataaatgccaaactatttatttaataattataattaattactaaat

SEQ ID NO: 365485 - DNA, 560 bp, Cannabis indica
agattggttagattattatttgtatgaaaatatgtataaattaacttattcaatcacacttactactttgacacgaaaccataacatcttactgcctgttttcattttttaattaattactaccaattgtataggagcactttgaacatgaagccacaaaacaaattgcatgtttaattcaaacttagaacaggtagcaccacatactataatgatgatgataatatctatatcctacgaatattcactccacatatatgtttgtattttgaaaccgtttttcagtttatattaatcctataatatgaatcaagtaacatcactaacctaagacaaacaaacaacaagatgttgaactcaaaaatcaaatacacaaatttagctaagtataaaatggtgcaagaagaagacctcaaaacgaaaatagtatggatgttgtttttttagctgggtttttgcgtactgatttacacatttgttttgtgttagtttatttttctcactctccatatatcgatggctctctcttcttaatgattagatataatgaactttagtgt

SEQ ID NO: 365486 - DNA, 496 bp, Cannabis indica
ggacaaacaaaactatatatttgcggtctctttgtgccaaatacgatagtatttgaactaatatttgtgtatattggatgaccaagctgatccctgccaaacggattaagcaaaacttgtgttaaaaaaatttaaagaaaccatattaacttaaattaaaaaaccatacttaatcaccgtcacattctggtagagtcactacttacaaaaataacaacttcatgttaattataagatcaaatagcattttctgattgattaaaattttgtgaaaaagatactgtagaacaattacaatgattgctctaggtacatataaactagaatatgatatatataggtgtgttactatagttgatacacatacatacatgtgcttgtctattagtgcccttaattttgtgagtaaaaaactacacaaattatacactcagtggtacaacaaaatattaccactagatatcatcaaagacaacataaactataaaccaaacaa

SEQ ID NO: 365487 - DNA, 644 bp, Cannabis indica
atccgagttttgatttgggtccaagtccctgtccaggtctgagtctgggtcctagtcccctggtcttattcccatgtcccagttcgctttcggttccacttccagtttcaagtcatggggtacaggtccaggtttgggtttgagtccgggtctgtgtttgagttcgggtatggatcccgaatccaaacatagactacgggcgaggtccaagccctgggtccagattaggatcccagtcttgggtcctagtctagttccccttctggtcccaggccctcgtccgggtcccagttcaaggtcatgttccgggtgaagtcctgggtctcaatgctagttccgaagcccgagtctctggtccaggtcctccatccaggtctgggtcctaggtctcggtccgagtctaggacccggtcggggtataagtcctagtctgagtttggttttgggtttccgatccttgtccaagttccaaatctgggttctagtcacgggttgaagtccagatccaggtctgggtctgagtctcaggttccgatctgggtctgggttccgagacctgggtcctatgttcttgtctgggtccatgtttgggtttgggtcctactaccagttctgatttcgattctgtttctaggtttgggttt

SEQ ID NO: 365488 - DNA, 604 bp, Cannabis indica
ttcttatatattatttaatttgtcgaaaacctcagtcaacagtaatgtatggtaagtggttgaaaattttatgatgagaatcgttccttaataaagttaataaagaactatctcacaacattaaggatcttgatgagaaaaataaatattttgactctcaattgatttcaagaaattctaaaattttttcttcaacgaaggagcttgaaaaattgaaaaagaaatgttaaaattctaaatctaggttctaacatttttaaagaggttcaaaattcaggataaacgagtcatgctaatttgtgttttgttaagtctcaatctaaatcaaattgtaaatttttcaaatctaaatatttggtttttggatgttctaacattactttgcaagcttctaattctacagcaaagtgcaccgctgttacataaaagaagcagattggtaattgacaattctaaaagaaataggaattggttcattcctatatgccatttttgtagaataaaaggtcacattcgatctagatgtattaccatacaaaacatgtttcattctaaatattttagaaataaatatgtttctcaaaaacaaaaattagttgtcaaa

SEQ ID NO: 365489 - DNA, 608 bp, Cannabis indica
agatcattctgaagtaattaactcttgtaagtagctcgacccaatagacttcaacctggttggatgttctatctaccaccctgctcgggtaatcgataatttagatgctgatgaattatgcgcaggctgttagggatatttagctccgcccaggtattagaaatgtgagacacgtgtcgctcggtcctcttgccacgtcaatgtgcaaaaaataggataacaccaatcatttaaaataatagcatgcaattcaattgggatatctccttgttggagacacgatcatgattcgaattagaaaaacgagccaaataattagtcacataatcctagatcgtttgacaaaaaactaaaaaataaaatcaaatgaaaaagattgcaacatcacaattaactttaagaatacctatatttattttcatctaccattgagaagacagaacagtagaactattgcatcatattcattcaacctcgtaatttgaaccgtcaactattgtataaggtacgtaactgcactactaacaacctatttagtttcagacaactttgtttaggggttctagctaaacatttaattataaatatataataaataaataagtcag

SEQ ID NO: 365490 - DNA, 616 bp, Cannabis indica
tttctatatgcgtaaatatgtgtttgtatagacgttaaattatatatgcgcatactgaatatgtaatgaatcatgagtatgtatatttagttgtgatgtgaatacttgcattttcaatacttttgatctagtagcttttcttgttgagtctttgtgactcacgggtgcttcgtggtacaggtaaggaggatatgaactgtgttcggccatgagttagcggtctccaagcaatgtacatattagctatggtgtcttagcttccgggaaacaggatcaaccttttggctatgtttggaaatgtaactttacttttgtaatagtagttttgagacttattgtaaaaaaaattataaacagaggatcctcgtattataatggtattttgtacgagtgttttattttaatttaataaaaaagattttaatcaaaccatacatttcttcaattaataaattatagtagaacctctatttaagaatactctattcaagaataacctctaatttgttataaaaaaatcaagtcccaatttgggccagctataaataagaataacctcaaaattgtaattagttatacattttttaagtcccgtattaccaaagtatacctctat

SEQ ID NO: 365491 - DNA, 450 bp, Cannabis indica
aaataaatatcgaaaatgaaaacggaaaaattacagaccgaaaaataaaattttcatgtatatatatacttgtatacaatgtatatactgtataaaattatcattaatgtatggaagatagtattacatacaattttatgcaataatatacacaatatatgaatataaatatgaatgtgtatatatatatgaacatatagattatgaaatatgaatataaaagtgtatatatatacatatatacttacatatacacattaaaccatataaaatatcataaaaatatataaaagaatatgataatcaattatatggaaagaaatcaatgaaatgaatataatatgaaagtgtatatcgagaaatatatatattatatggtataaatgaatgtatataatatatataaatgtatttgtaaagatgaatatatatgtatatataaaaaataaa

SEQ ID NO: 365492 - DNA, 705 bp, Cannabis indica
tactagaactagccaaagggattaccattttgctagtagcaactgaattatagcactctacttcataagcttcttaaagtcactatcccttactaagaccatatcatctaaaatagattttagtatgtaatttagtaaaaagtaatgaagctaaatcctaccatatgtataatgaaactaccacttgatctaattctattaattatatcaatcatagaagttgactgccttgtttgataaagatcttttaaacacaaccttgaaaaaatctaaactttcttgattgacattaccaataggataaacactattatttgactctattggagttgagtgcattttaaataaattataatatactactgatagtattaagatagataaaaagtcaaaggaaaatagtaatgtatatcttaatatttttctaatactatatattgttattcctattagtatctttcaatacaataaaaataataaaaataaacttattaagttttattgtccattaatttcagcatcttataggttcaaaaccaacgctaatgtgggtttcccgacgatttaaaactgtcgcctataactgggtatcggcgaaggttttaaaacgtcgggaaagtaaaaaaagaaaaaaaatacagatttttctgccattatattttccccaatttttttcctccattagttttataattttacataaat

SEQ ID NO: 365493 - DNA, 559 bp, Cannabis indica
attagagagccaacttaagctctctaacttcaagtttgagtaatccgtagcacaactagctatctcagcacaaaatcaactaaaacaaacctatcttaaccccagaattcaaacccaaactagctgcacactacaaaacctcaaatcactaaaatcatgcaattaacctatcttgagctaaagaaaaccataaagaagaaggctaagcattataccttgaattggacctcctatttctgattgaaaactctttaattgtagcaagggtagtttagtcatttaccactcccgacaaatccccgatatctccaatgcctaacaatagtaccccgctattgacattctaaatcatacaaaacgtgactctctaatggcccacgtcgctttccaccgttaccgaacacaagcacagaaaacgcgaaattcacatatatagcataattaatacattttgaatttaaataaatctccataaacatgtaaatcataattaataactcaatattgcaattaaccctaatcatttaataatccaaaatattgatcttaagcggtcatt

SEQ ID NO: 365494 - DNA, 681 bp, Cannabis indica
ttattatcaattcgttaaattctagtaaaatagactaagttgacacctgtcaacatattagtgatccactaatatattcttaataaaaaattgttaaataattttaaaatttgttaaatggataaaatgttaagtattattcaataaaaaaagttattaaataattttaaagttgaaaaaataattaaataatatttatttaattaataaaaatataaaaaattctatttttattggtcactttcattccacctaaaaaataaagtagtaggtttaatattaaaaaaatagctatttctcctcttcgtttttttaaaaaagtttaatttttttttattacatcggtaattatttgagctcaaaaattatatcacctcaatctaattttttaggggatcattttaacatataggaagcatttgtttttttaccgtggtcagaaaaaataattaaaataaaaaataatcttttagttctagaaaattgaattttcaaatatcaactaatttctaaaataacttataagaaactaaatttttataaatgatatcttttctactgtataggatgtgttgatgttacttatttaaagtaaatttatttagatactagaaaatttttaagtatgaaatattataatatttattgtagtaactaataaaattagatgacgtgacacgt

SEQ ID NO: 365495 - DNA, 527 bp, Cannabis indica
taaactcattatctatataatttctttgaaataattttatacatatacaattatgagttccatgaaggttgatatagataagtttgatggttcaggtgattatcgtatttggaggaagaagattagggctctatttgctcaacacaaactgttgaatgttcttaaagatcctgtggaatggtcagctgatacaaccaaagaccatcaagaagagttgctggaaacagcaaccggattgatcattttcaacctatttgattctataatcagattggttgacaaggaagatacacctgccaaaatttggaacaagttggaagagcaatttcaaaagaaatcattgattaacaagatttacttgaaggagatttaagatgagtccatctaaatctcttgaacaaaacttggatgagttcttgagattgcacattgggttagcaaactcgagagaaaatgaggccttaagtgatgagaatcaagcaattatcattctcaattcattatcggaatcctacagggaggttaag

SEQ ID NO: 365496 - DNA, 721 bp, Cannabis indica
gactcatgcattgacgagaaacttttccgcattagaagacgcaatcataaggtaggcattagtaatacaaagcgaggcaccaacctcgctacgtataaaaaagtggtgataagatatgattgactgttagaacacttagcgtataatttacattatacaaactaagcataacagttggacaaatctgaacaacaaatagcgaggcatccatctcactataggaaggcatactcgtggtaccttcactaattaggtccagacatctttcaatgagatccacttctccgttgagtcaactctctaagatagaagctgacattcaaatgatgttgactgctgaagttcaccttgtcatcaagaactgcaattgttagatggagcgttatgtcttcaatatcagaaacgatgggatttacattgtccacctcggaagacatgggaaaagctccagctcgctatcaaggttattgtttctatcccagtgagatgccctagtgagatacaccttgcagcgtgattaaacccctgtcagcattgacccgttaaaagcgaataaatcaaagctatgtgggtttcaaatatagctgcatttattctagggggacgtaataaaatccctgttataggatatgaatctgattgtaattaagtgccaccctatgtaactataaatagggcagaatgtactgaaaaagggacgaaaaatctttgagagaaaaga

SEQ ID NO: 365497 - DNA, 161 bp, Cannabis indica
caatccctttgtatggccggccactatgcatgagaatttccattacaattctaacctaaacctagagggttttctataaatagaaagtgttggcttgaggaaacacacacatctttgaacatcagtttccttcaaaaaaggccacacgccaccttctctct

SEQ ID NO: 365498 - DNA, 1081 bp, Cannabis indica
agatagaagctgacattcaaaagagttgattgctaaagttcatcttgtcaccaagaactacgattgttagacggagcgttatgtcttcaatcgcagaaatgacgagacttacattatcaacctcagaaagacatgggaaaagcttcagcttgctgccagggttattgttgctatgttcccagtgagaggtcctaacacgatacactttgcaacgtatttaatccacgcacgtattgacccggtaaaagcggaccaatcacagctgtgcgattttcaaataataatcgcatttattttacgtgggacgtaatcaaatcccacaatttcagggaattattgttgtaggatatcagtctgatttgtaattaactgtcctcctatgtaactataaatagaagcaggatacactgaaaaagggacgaaaaatcctttagagaaaaagccctagttttgtatcaaaaatctaataagatagactcgtgaactatgttgcaaaaccacgtaaaaaagctgtgttattttttttccttttactactattatttctgcgcaataccatcacgaaataggctttaatttagttaacaaaaatatgcgttaacagtttggtgctttcattgagagcctttgtgaaaaaaggtcagaaaaaaacctttctccatggctgacaacgctgagaatgttaatactcatcctgaagagaccactcaccttcctggaaaagagccaatgggctcacggaggcctcccaactcgcaatctacgcgaaccactcgttccaggaggactcaacctgaaggtggcccaagtacacggtctactcgttccaggaggactcaacctgaaggtggccccagtacacggatcacacgttcaaggaggactcagcataaaaatggccagaatccaaaaacagggtatgaagagcctgaaatgaatgttggtggtgctcaatccaggccatgtgatgaggatggtgcctatgatcctacaagatacgtgccaattgttgagttggaaacatgccatctcaaacaccgcctggaggaggcaaactgacggaacgctgagttggaacgtg

SEQ ID NO: 365499 - DNA, 516 bp, Cannabis indica
agtgatcctagacttagccattgaaagcggttaagaaagtcatgcaatatctttagggtaccaaggatcatatgttgacttatcagcgagctgacactcttgatatatagttgggtttagtgacgccgattatgcaggatgtgtggatgataagaaatccacaccaagctacattttcatgatggttggaggagttgtttcgtgaaaaagtgtcaaacacacactcacatcatcctcaacaatggaggcagagtacatggcgtgttatgaggctatatgtcaagcaatatggttgcagaacttcatttcagcattgggtgttatggactctatctcgaggccgctgaaattgtattgtgataattccgcagcagtagctttctctaaaaaatgttagaagtgcttcctgctctaaacacattgacataaagtactattttattaaaaagaaatttacagagtctcttatttccattgaatacacgcctagcactggcatgttagcagacccactaa

SEQ ID NO: 365500 - DNA, 679 bp, Cannabis indica
ctccctatcagtgcgagaaggaccttaacggtgtctcggtggcaacccgcttgtcctaggttgagacccatgatttctctcgttaccacgatggatttcttattccctagtcctggattgtattctgctcatgtttctacgagaagactctaataaatcattgtgctcattcccctgggttgtgaatcccttgggccttcgatgcacttcttaacgaggtgcctagtcgtttggttactcatcttcaggaacatccccagtttcgcgaagttgtccctcctgggtgttttgggggttttcctgagccgtctcctacctcttggttctcgagccctgaggtctaccttgcgaccttctcgttctaggattaggttggttttgtgtgttgttttcttgtgttgccctggttgcggccgctgttgggttttatgccctaaataaaacttcatttcaatgtaatccagattattcaatatcaataaagtaacaaaagtatttttcattaatttgtgtatgtgttggttcactttatcaattgtttgtctacttgatttataaattcatccaaacccctttcacatacttgatcatgtttattgtgttgtcaacagtggaaagtaaacatgactatgtgaataaatgattcctagatttatcagaacactgggttttactgata

SEQ ID NO: 365501 - DNA, 1048 bp, Cannabis indica
ataaataagaatatcaatgtgataatggtttggatgaatttataaaatcaaataaacatataaatgataacatgaaccacatgacacactaaataagtgatgaaaattcttctctctctttattgataattaaatgataatgattacattgaaatagacttttgtttagggcacaaagcccaacataacagttgggtgggctcaaggaaggcacatttttgttactttctccagttaaattcagacatctttcaactagacttataatcatgacgcgcccgaaacttacgtttaaatttttggaattattttaccagatctagatttactaatcaagtatgttattaacatcctaaacatgaacttctaaaatgatatgaaataaacacatataaagtatcaggaaccttacagttgttgcagcggaatataatgtctccttccactcagatctctaacccttgtatcatttctgtagcagagtatcaccaagatctgagtctgaatctccttctcttgaaattggattcttcacagccttacacactatgattgagtaccacttgatgtgtgtgggcactcacacttttcactatgaggcttcggttttgaagagaggaagagagagtgagaggtttcagctagggtataggagaggaggctaaaattttacttaaggaatgatatgcatcatcttttccctttagccatcactacctatttataggaaaccacttagggttaggttagatttaattagcgtaaaaataattgaaaaataaagaggcaaaacccttgtgaagtggtcggccatggatagtgggccccattttgcaattttgccattctctcatttttcatcttattgtctcaaaaatgccatttttccaatttacccacttaaatgccaattttaattatttaacaactaaaaattaattatttattaatatttttatttaatatatttattaattagacttaacaaagtctcttaatgaacaaataaaccctaaaatctcttctcttcacaattaagcccttgctt

SEQ ID NO: 365502 - DNA, 877 bp, Cannabis indica
accattgatattgacttagaaagatataacgataagtttatgatatcttatccaagttcaatatcggtcaaatctaatgtatattccatatatctgatactggtaaactttgtcaatgccttgaaaaggacataacacttatccaaggtgtaagtataccttatcgctgattatcatgttagtctaaatccagtgaactggcaaatcgtgggacttaaacttttgaacatataatcatgattatattttactgtgctgacgatactataattatgaataaatatatatattctggacttaatagaatttatacattaaacatataatcatgaaataaatcatgtgaaccatgcaacatagaataatttctgatcttttattaattagtaaatgtgattatatttaaatgagttttatttagggcatacaacccaataaactcccacttgcactaatataaaactaaaagtgcatttcaaataatttaaccaccttgatatccaaatcaagcgtagtatgtagtattctctctgtattaggatctgatagattatatttaatacatcctttctccaccattaaatatctttagtcacaaaaaacttgatattttgaaattcctctctatatgtctactcctctagggatattagattctttactttttgccaactacttttatgctagtgaggaagtaatactagtagttaattcattattggtacaatgccaaaaactgtatagaacttaaaccttatgtttttcataaattgtttaaatctaccataatttacatataaatttaatcttattaaattaaaaatttagcccacatgtaatttttgtttaataaggtttcatatttaagcatgtttat

SEQ ID NO: 365503 - DNA, 569 bp, Cannabis indica
aataattaattactattagagcatctcgattgaatggagtagttaaaaaaacatatattactatatcttagtactaagttttttttttaaaaaaaaaaaaacattaccaatggtgttctaaaatatgtgtcatttgacctaaataaattttatattttttatttattataatgccactaattattatgatttattaaattttacataactttatattctttatttactacattactattatttaagctaaaaaaaaaaaataaatgatatttatatattttcaatataatattataaatgatgattaataataattatatttttttgtagtattgctattgagaactaacgatgtccaacaccttttataagtggtgtctcacaattggttgacaatattttctaaaagttattttcttaagttatatgagtcctgatacttgattatactaatagtggtatgacactgaggaaggtgctagacaccaatgatattttttagtaattttttattttttttaacatcttcacattagagcacaacagtaaatagtgagttaaatataaca

SEQ ID NO: 365504 - DNA, 714 bp, Cannabis indica
gaaaaataatagaatatataagaggaatgagctacttctctcattgccaattgattttgaaatgaaaccccattcaccttatctaaaattctaacattaataaagataaccaaagtccaaaatacaacattatatagaaaaaaacaaagcttcctcatctaagcttaaagcacatctagctaggcgatgagcgatttcatttgtccctcgaggtatatagctaacgaaagcattaggaaaagaagacagcaagctttgaatcttcgttgcaaacctgttaaggtggagatgatgagtagtattgttaaaaatatagtcaacaagaattttacaatctgactaaatgttgtgactcgacaccatgtgagagaatgctggaaggcgtgagcttccattatcaaaggtgcatggagtctttgcaatggagttgccaaagtcaaaagtatttcattgcgattgttgtaaatagccataccaaaatctattttattggttttttcaatttgaccagcatccacggtgagctttgatcggtaggatggagttttttgctcacgatatgatacttgtagcggtgagacactagtaacaaatatatgttgacgattgttgtgctgatactgttccaagtagtttgcaatcaactgtattactttggtgggtaccaaaactgagttgtgatgtaagtatacattccttcaatgccataacttc

SEQ ID NO: 365505 - DNA, 644 bp, Cannabis indica
atttgtgtgagaataattattttatttatttctactagtagtggatagagataattgcttagaatagtattgacaaatttctaaacatagttgaaattatattaagtgttaaggtgaaattatggtgttattacgaattaggataattacttaattaaagtccaataccaaagtctattagggtttataaattatttagtgcattaaataacaatataatggaataaatgttaaaaaaatttgtaggtttggataaattcacaggattaaaaataattttactaaaataaccatatctagagttctagagctttgattgaggtgattctagtggcgttgaaaagataattcaaagatctataaattttatagaaatagttatatcaaaaatcagaagttttctaggtcagatctgagccctaaggtttcgagatagagggcttgcaattaaaatataaaaattagatatttgctgatttaataatattttagcattattattattattattattatctaacctaaacctattacaatacgatatctcatactattcagtacatgattttttatcaaacccgaaactatcatagttttattttttctctgcaaactaattagtcaaagtctcattcttcttcatg

SEQ ID NO: 365506 - DNA, 730 bp, Cannabis indica
aaatcagggaattaaacttttgaacatataatcatgattatattccattgtgttgacaacactataatcatgaacaaatacatatgttctggacttatgagaatttatacattaaatataatcataaaaaaaatcatgtgtaccatgcaacataaaatacgatttctgatctttattaattagtaaatctgattatattgaagtggattttatttagggcacaaaacccaacaaagacttctaaagggatgggactgaaactccctatatcagttcacaattgagggtaacctatcttaatactagtaattttactagtgttaagttcaataggtcagaacaaatcaatgtatgaacaaatgtgataagtactatatgtcccatcctacaaagctgcgaagtacttatgagttaccaatttgagggttagacttttaaagatctttaatagaattcagtttagaaaacaagtattttggtaacaaatacggtaagaattctacctatattgactaagggtggtgccaccctaaatgaataatagggagtatattatctcaacaaggtcaatgaatagaatgtgcacaaggccattaacggtgcaaagcgagacataaggtcttgggtgaacctagcaaaggtgtgtgtgtcatcaccattttattatgaagaaaagttggttcaatgctttgtcaaccaaattttcaataaaatttgtgatgattacact

SEQ ID NO: 365507 - DNA, 561 bp, Cannabis indica
cctgaattcaaatctgaaccaagacatattcgtctcagtctgtctgcggatggagtaaatccatatagttctctaagtagtcgtcatagttcttggcatgtcttccttgttatgtacaatcttcctccctagttagtgatgaagaggaaatttaataggctttctttaattatatcaggcccgcaacatcccgcagataatatcgatgtatatttggaaccattgattgatgatttaataaaattgtatgagaatggtgttcaggcttgtgatagtttttaaaaagaattctttaatctgaaagcaatgttattgtggactgtcagtgattttccagcttacaataatttatcaggcttaagcacaaaaggttacgaaggttgtctgatttattgcactaacacatgggctcgtcgcttggcaaatggacacatgatgcgttatatggatcacaaacggtacttgcctacaaatcatcctgatagacgaaagaagaaagcattcgatggtactgaagatgaagatatggctcctttgtcactgtcaggggaacgaattctc

SEQ ID NO: 365508 - DNA, 537 bp, Cannabis indica
cctacacagtctcagaatcatcccactttgaccttccccaggcgatgtggcattgcacagcttacccggtgttttcccttacggatcactggactactgactgtcacagttagttttcacgttgttatttatttcaaagtcccactcaggaggaccttttccaatattttgatcaacaacttgagtcccttgaggctcttttccagggcgatgaacgatttcttcctgtttgataggaatatcttgagaagcattttccatgatagaaaaaatattttccttttaggtagggagatgtgttttttagagtttaattatcaaagactctcaatgaaatcaccaaactgttaactcgattttttttacataaatgagacttttgacaattaatgaatctgtaataaatactataaataaattaataataaacaaagacaagaaatttttacgtggttttgtagttaaaatcttcatactttacgagtcattcttatttttgagtttttgtttactaaatacaacttggcaaaatttctc

SEQ ID NO: 365509 - DNA, 702 bp, Cannabis indica
gagatggtaaatgtctgcttctatcacatggaatgagtgggtcctctgattggtccaacctctagctcaacagtcacataccccatagtttttacagacttggcagcaaatccagtgagtgtaatcggttgtgggatcaacccccctttgacctctttcatagcagaatacactccaattggcatgagatttaccgaagctccgttatctactaaagcacgtttcacttttaagccattgatttttgcctcgacatataatggtcggttgtgaaggaacggagaagtttgtatgtcagcattggtaaagacaatcgctccttcagattttttagcaatattatgcattgggcgccctaccatataacaagaagggccatgttgttgggaaattttaagcaaattttctgtagcctcagtccttgcatcttggccaaattctaagcaatcgaagaaattacgaaataatttagtttttaacaatggttctaccatgctgttttctcttggttgttcttgttcttctataatttcctcgatacgtatgctccgtgatatccctattgaaatgaggggaaactcttctgtgcatgtcatagcggctcctccattttgatgttggggaaacggcatttgctccacctcgttttgatccaaaatatctctcctttctctagtcgctcatgaaaaatcttccttagcg

SEQ ID NO: 365510 - DNA, 596 bp, Cannabis indica
agtggatcgtctatctaccttggatcctgcccaatctgcatcagagaaatgcttaatctgggtatgtccatgatccttgtaaattataccttatcccggtgctcctttcaagtaacataaaatttgctctagtgctgcccaatgatgaattgttggagaagacatgaattgactaatgacactaaccgagaacgcaatatctggacgagtcacaattagataattcaactttccaacaaatttgtgttatttcttaggatcttcaaatggttttccatcacgtgtaagatgcacaactagattcattggaacattacaaggttttgctcccagctttcctgtctcagttaccaaatcaagtacatacttcctttgagacaaaaaaatatctcgtttactccgagtaacttcaatacccaagaaatacttgagctcccctaaatctttcgtgtgaaactgggtatgaataaaagaattaagggaagagattccttcagtatcatttccagtaataactgtgttatcaacacacaccactagcaaaatgataccagcagttgatcttttataaaacacagaatgatctgccttacttt

SEQ ID NO: 365511 - DNA, 575 bp, Cannabis indica
ccccgtttaacattcggggacaaaaagtaatccccgtccccacggggcccattcccgtgggggaaatgtgcatccctaatgtcacatcatcaatcttaaactcttctttatataaatatatagattaggaataattgcggcataagtatacaaaattttgaatttgtaaccggtacaagtacccaatattagtaaaattataatttgcatccagttttattagtataagactctattagtactttaaataggacatatgtaacactcatattctatatcattagatctaaacgaaaacatatagtatcaattactatcaagtccttttttttttaataaatcacaactaagtaatttctgtaacgccccgatttcccgagacgtcacactagctagtccgtttaaaaccatttaagataaagacaataaaagacttctttaatgaaaaataactaagcatgagatctcattatttttaaaacaaaacatttatttattcataaccttaaaatataaagctttacaaaaactatttgaatcataatctttaatgaaatatttttaaaccaaaacat

SEQ ID NO: 365512 - DNA, 716 bp, Cannabis indica
ataattttaattaaataaatataaatattaaaatcaacagattaaaataatattaaatgaaaatacacttttaataatgaggtttattataaggatattcgatctccattgttggttctacatagttcttgttttagtgagtaatcatccctaatggatgaacattcattagcaatttaacgtcgtagaatctcgaaagataagtattatttgtaagtattttattaatgtccaccctaatggtggctgctaagaataagacttacaaaagtatgaagtaatggtgaaagctcataagataaaatgaccttgactctcgcctaaacgggatgacgtcggactctcatcttgatcaaataaaaggttgctaggatgtttgtcattttagatgagctgattactctattcaatggatgatatctttgactctcgcctaaacggaacattgatataagtttgttggaaaccttggaaattatttaggattatttgttttagtattttcactaatcattcctacttgctaaatgctaataatttcttattgtgtatgattttgtattaaaccttacttgatttctatttattcatatttgtagtacctaatatgactatgaacaaccccatgttgtcactgttgactgacaacaagctctttggagctaactttgtcaaatggagaacattggtgaaaatgccctatttgtgttgactga

SEQ ID NO: 365513 - DNA, 911 bp, Cannabis indica
attatccggagctggaatgccgcctgtggacgtcgttaatggcggagtagggaggagcaatatcagacctctcaacctgttcccagaaacaactgaccctcaagtcggggatacatccacaccaccagcaaccatgcattttccccccgtcactccggcagtggtatccgagggaatcatccagctcaccactgatcaatatactgcgattcaggaccaactgcgtgcactacaggccgaagtggatggacaaaaccgggcccgacgcccccctcgagtccctactactcgcacggacaaccctcaggtaacaaattctagacgtcatactaaccgtgtacgcagggaacgaagaaccaaccctgaaggtttggacctgaaccatccaacatcgagggaccaatccgtaaggtatccaaaccagggcacacaggttgatgaagaccctgaacgacgcaatcctcgcagtcgaccatcaagagacaacgacgcagaatcagcctcttcatcattgcatggtcgtacaccgagtagatatacaaggtccggctctgtagaaacgcagcagggaggacgttatcaggtacatcgaggtgatctgagtgatcacctcaacgcagtttttagagcgcgttctcgcgcccctcataacgcaaagacactctgtgatccccatgcgggcaatcagggtgtgaacactcacaataatccgcctaccgcgctgatcgcgaccactgggatcactgtcccagcgaacctcgccgcagtagttgcgactctcgcactgcgactggagggattgaccaaagaatgcttctgcaggctttgaaaatgctggagcagtaacgaaagcccatatacaagttgcatgggacctcacctttcactacggaagtgcgacaagcccaact

SEQ ID NO: 365514 - DNA, 736 bp, Cannabis indica
ttttcccgtttttgcgtaatttaggatattagcatctaaattatcgatagggttaatcttagtttcaattttaaatccccgataagtgttttagcgtgtctctcatcgaattctatacattatggtttagggccttgtaaagcgttgagctgtgtttccactcaggctgaccggcacccttgagcacggaacgaggtaagagagcataagaatatatatatgaatgtatgcttgttttggatgttttgcactactagcgctaaaatgaatgtgatttaagagtgttagtatagtgtgacatatttgtatggctacagtgttaccaacacgagtaccaaggggtacgttgtgcctgtggtacaacacttagcagattttgggaatacaattaaggctctaccaacacgagtacagggttggtactttagtgcattggtacagtagtcgtacttcccttaagaacgttcttatccatttgatgagcttaattatgaagctcagggcagcttaattataaagtcggcatcgcatagtccatatatatatttatcttgcgtatcttactgagtctgttgactcatcagtttgctactgtaacgccctaatgctaaggcacgccacagtgctttttcaattacagtgcaatcttcgctaatcgaagagttttcttgaaaaacgtgtcaaattaaactttatattaattaataaactttataatatatttaaatatttacaa

SEQ ID NO: 365515 - DNA, 774 bp, Cannabis indica
gatctcatccatgggatcggctgctgcaacaacaaaaagagtcaagtgttagaatatctgtgaaagcagtgtacacttaaaaagcaatcaagctagccctaccctgactctctaattcggccctagcaaagtcccaaatcttaacactggctgcatcatccccgagatagctatccgagggacggaaccagctagaagacagataggctgaagtgtccaagggaacggacactggaggtccagaacccatccgggaccggcctaaataatctcctaagtgagagaagtaatactcctttacatgatccctccaccgagtggagggcatcctaaacctatggagacgttcatcgaaccctataggcctaaggctagcatactcacggacaggagggacgtaatgtatcattaaaggggacttaccaaaaccagaagtgctggcatcgagagcccccgtattcggcacctggaccgcaggccttggtctgggggtcctctccatcgggctcccgatacaaaggggtcttccggcagccacctgggccttattgtaagcctgcttctgggccttctggaaaagatacttctggtacttatcttccgccgtggcgataatgtcctcccggagtaccttctccgcggccggaaccctcacgtttgggcagatgactttagaaaggttagagtcatccaccgactaataaccctggatcagcttggccttccggtagttctccgtcgtgaccaactcccgacgtcaagggccttcttgtc

SEQ ID NO: 365516 - DNA, 542 bp, Cannabis indica
atctaaattagtaattttaattaaataaatatatgttaaaataaatagattaaaataagtatcaaataaaaatacaactctttaaaataatgagctttagttataagaatattcgatctcctttgttggttctacacagttcttattttagtgagtaatcatccctaatggatgaacgttcatcagtaatttaacgccgtaaaatctcgaaagataagtattatttgtaagtattttattcttagtaacatcaccctaaagtggttgctaggggtaagacttacaaggtatgaaacaatggtggaagctcataagatagaatgaccttgactctcacctaaacgggacaacgccagattctagtcttgatcgattaaaaggttgctataatggtatccattttagatgagttgactactttattcaatgaataatatcttcgactctcacttaaatgggacacctatcagtttgttggaaaccttggaaatcattaaagatgtttttgtttttgtattttcacaagtctttcttacttgcta

SEQ ID NO: 365517 - DNA, 747 bp, Cannabis indica
ggtttgtttgttaattaaaagactttattaagtctaattaataaatatattaaatggcaatttcatttaataatttattttaattattaaataaatagttttggtatttaagttgttagaattggaaaagtgccatttttgagaaaatagggaaaaattgtcaaaagtagaaaaattccaagtggggcccacatatccttggtcagccacttgaagagtattttccatttaatttttctattacttattgcctaataaatcctaacttaaatctaagtagttgcctataaatagacagtgatgactcacacttaaagatgatgaaaattcaccttcagtaaaaaatttcctcggccttcttcgtctattgaattcgaaccagcccctctctttccttcttcatattttcataccttgagtgatacagtgagtgcccacacacatcaagtggtacgaacagtatctaaaattacactaatatctaaaattaattttaaaaaatctaaattaatttattcctgataattaaatttgaaatatgaaaattaaaaatcaaaaaacaaaactacacaaaaaatcggaagttaattccatgaaatagcatgaaaaatcgaagaaaatgaaaaaaaaaaatagcaggtggtacggacagtatgcaaagcgcgcagatggaggagatcagcggaggtttctcggggcatgccttccctggcatgatttccgcgcgtgtgggaagggtgatcacca

SEQ ID NO: 365518 - DNA, 546 bp, Cannabis indica
cccattatttttattattctttttaatgcatataattcaatcctaaaccttagttggaatactataaaaggaacatgatgctctcatctcatccaactattcacttcaaccaaactaaacctagttttcattctccgacaacaagtagatgagagacaccttctgtagtgatttcgaacctccattattgttcttcattaatcgagccatagtgatatagtgccatgcccacacatagcaagtcaagtactcaatcatagtgcggaagatggtcgtggtaaccaacccgaaggggagaaagagatccaggctcagatattgataatactctgcgatagaaaggaacaagggtaagagatctgagcggaaggagtcatattattttactgcaatgaatgtaaggttttctaaactcttatgtgtttaatttcatcgtattagagaattcatatttaggatgttaatgaaatatacttgttagtaaatctagatcctggtataataaatcccaacagatagcccattaagatgctacgaaaatatcta

SEQ ID NO: 365519 - DNA, 600 bp, Cannabis indica
acacacatgagacatcctcacttcgaatggcagcatctggctgaatattattagagttcccaaggctacaaattcttacaaaatattcgtcagtggaagcctatttgagctgtgaaagtcgttattgcatctactttaaagaacccccgccacttttctacttgttggagctcttgtgttggaccattggtagttgttacttgtaatggtctccaaaatctcaaatgcttcgttgtaagacttggaaaaaatagcgccattggccgatgcatctaacaccattcgagaagctgcatttaagccattataaaaggtctccatctatatacaatgtggaatgccatgatgtggacactttcgcaaaagtgccttaaacctttcccacgcatcacttgtagattgatcttcaagttgctaaaaagacattatctcacttctgaatttttcatttctagtaggaggaaagtattttcacagaaacttttcagcaagatcattccaattagtgacagaatcaggatgcaaagtgttgtgccatgatctagcttagtctcgtagtgagaatgggaataacttcagccttagcacctcttcactcac

SEQ ID NO: 365520 - DNA, 544 bp, Cannabis indica
aaatagatcaaatggatgtgaggacagctttcttacatggcaccttggatgagaaaatctacatgaagcaacctgagggatttgacaatggtaatcctaaccaggtatgcttgctgcacaaatccctctatggcctaaagcaagcacctagacaatggaatatcagatttgacaaattcatgtcaagaataaaattcacaaagagtagatatgacccatgtgtttattttgacaaggaaacttacctgctattgtatgttgatgacatgctaatagtaggcaaggataaggacaaaatcagtgagttgaagtgccaactcaaaggtgaattcgagatgaaggatatgggagaagccaagaaaattcttagaatcgaaatcagaagaaaaagacctggtctcatcatgttaactcagcagggatacttgaagaaagttctaatgaagttcaacatgaatgatgccaaaccagtgatgagaccattagctcaacactttaaactcactaaagagcaggcccctcaaactgaagaagaaagaagaaa

SEQ ID NO: 365521 - DNA, 911 bp, Cannabis indica
taatgaaaccaggtaaatcacaagatcgaaaccttaatccgggaaactcgaacccacaaccctaggttctgttatattctctagggattacactaactcaggaaatagggaaacacccaactacgacactgaatatggacgagaattgagaaaatggagcatttggggaccctatcggttttgcaggtactggtaaaaccggctagctggtttacaccagttcaccccaaaattttaatttcttgctcaatcctccaccaaatgcaaccaaaccttccagagtacctaattagggtataagcaacatactccaaccagtaattcacagaaaaacacactaactcaatttatgccattaagaatcaaagctttgagttcaaagctcaaacttgcataaatatatcacaacacaaccaaaccagctactagaggctaaaattaactcaaattaagcttagaattcgaaccctaagcatttctaaccctaacagccactaacactaaaaatcactacttgaaaccaaatttaaagcttaaaaacacaaagagcaaagagctagggattacctcaacctcaagaacacttggtaatcagcttgatttcagaatttgagaagaatttggatggtttcctctggtttttgggttggccgaacaaagaaagagagagaaaatgataaactctttaatttaggttttttcttggtttttctcaaaatgcaaaaaggattttcctaattatttccttgctgaaataaaacttgctaggtgtcagcaacctaggcagccacctaacccctcattaacaaattactaaaataccctttaggttataacttaggcatttttcaaaactatgggtaaaatggtcaaattctataaccacgcctaacctcggtattttattttct

SEQ ID NO: 365522 - DNA, 644 bp, Cannabis indica
aaaaatacacaaataatctataaaaaaaatttaaaaagaactacataacacgtgtacaccaacttaaaaatatatttacacattaaaaaaataaatatatatactcatttctctctttgttaaataacctaatagcaacaaataaacaacacaataaaaattttattttaatatgaaaatcaattgtacatcaattaatagtgtagaaaatatgaaagaaactaacaaacaacaaaaagtatgaaccatgaaaaactaaaacataaactatttttctcttaattgaacaattaaatataaagaaataaaataactagataacaacttcatattatgtaacgccctgtccaacagggacgccacgtgtgtgcaatttaataaaatactgatatttatataatatgtaattatactaaaaagtgtgggtaattaaattttgataattaaaattcaacttttaaactgtttaacaaaagataagtaatatgtactacggggtccaatcaagagaagagtagaaaatcataccttcacttagctagcttctagggcttagattagctcaagagtggatgaaataggatgagtttcacctggttcccagctgctcctagggttcggcagaaggagaagaagaagagaag

SEQ ID NO: 365523 - DNA, 619 bp, Cannabis indica
aaataatctcgaaagatagaaggaaggtttttttgtgcattatcactgcagtggtttattttgtttaaaaaaagtaagaatacagttttgtaggagcaaaaacttccaacaattcatgtaattgtgaaaaatattattcattcaatttttgtttttttttttctatgttctagctagacaatctggaataatagaaattatttttttaagcacattatcctgtcaaagatattgtttagttgggtgcttttcaatacattaatggtacgtgcccaagatttttcgttgttgtgttacctggatttctcccatggagaggagaagataggtacgtggaaactagattaccaagatcatgtatgcttgttatatattgtcctatatcttttactgcctgattaatatgatcattttgttggattatattttaccaggacttagatttactaataagtatgtttttaacatcataaatatgaacttttaaaacgataaaaattaaacatatataaagtataagaaaccttacattggttgcagcataattaaatgactcattccgctcagatctctaatttttgttccttttgtcacagtgtataatcaagatttgagcccg

SEQ ID NO: 365524 - DNA, 581 bp, Cannabis indica
cagggatagctcccagagggattccaataaaagatgcgagtatcacaacgacattgggcatagcaccaatgaatgcaaaaacctcaaggacgagatcgaaaacttgatccgattgggacatctttacgaatgaatcaagaacccgttgcctcacctcaatccggttcaggcaacaggacctttgccccaaggagcaccagggggtgtagccggagcattagccccagttgctccccccggagaagcccagcaaattcctggcttaccgccaagacccaacggaacagtagccatgatctcaggaggacctcacatcggaggaactacccgaaaggaactgaaacgttacgcaggggtcataaagcacagtgaggtttgggagattactcaactcccagctcaaaggccccgaccaatggatcagcccatcacatgcacagaagaggacgctaagacagtgtgcttccctcatcatgaccccctggtcatagagactcccatagccaacaagattgtggctagaatcctaattgacaacgggagttctgtgaatttatattcaaagaagccttcacagcaat

SEQ ID NO: 365525 - DNA, 584 bp, Cannabis indica
ataaattcatctaaatcctatcacattgatattcttgtttattgtgatgtcaacacagtaggaaattaatcaagattgtgtgattaaatgtattcctatgatttattagtacacaaggtttaactgataggataatctacaatgtagtttacttgcaccttggataagtgttatgtcctttccagggcattagtttaggtaagcttgggattagatgtatggagtatgcatcgaaagggaccgatattaaacttggataagatataataaacttaaagtaatatctattcaattcaatatcacctagttgatcttagatcatatgatctcaatcctgagatggttaggttctagttcagttgtattatttatgttcttcaatatgttcgttaaagtcgaccaatggatcttcttgtgacatatagattaaggacatggtagttcaattaagtgggagcactaatcatagatacagaatctatagcttctatctgaacatagaagtgaaatgatgattttattcgagcttggcttaatagaaataaatagttgggtactcatttaagtaattatattagtttact

SEQ ID NO: 365526 - DNA, 1258 bp, Cannabis indica
gataactaatcagattgtaaagagttttatttagggcataaaacccaacactgacttgagccaccggttgcaatggatgctttccttttctgatccatggccgaaccactacctcccctgctaaagcctgatgcaggaggggtaggagccctgccaacctctggagtcctaacagactctatcatgcatccaactgcgccctcagcacgcagtgccttttccaccatttcagcataggtggttgtatcgtctgtagtaatcatcaaatcatgtcgaatcttcgcattcaacccatccaggtatttttcctttttactaaaatcggttggcacaattcatgaggccaacctcgccaaccggtcaaactgcgttgtgtactcagtaacactcatattttctttctgggttaggtgggtgaactcttttctcttggcacttctgacggcctcattatagtacttggcattgaacagttcctggaacttttcccaggtcatcgtagtaacatcatgtatcatggacaccatgtcccaccacactaatgcatcttcttgaaactgaaaagtggcacaaaccaccctatcattttcggtgacgcccatgaaattcaaaatttttgtaatcactattagccactgctcatctttcataacatccggacctcccagaaaaactggaggtgcttgcttgcggaacctttcatagagaggttccatctgattcaccgcaaccactagttcggcctcgatagcaggggcaggtgccactggaatttctggaacaggcattgcaggagcacgctgctgtctcaattgcaggatttcattatcttgttcctcaattctggcttacatttccgcaaacctgttttcccaattgtgggcttcttgagtagcttgggcagcctcggcagcttgtggcgggttagcatcaccccgaacacgtgccgtgccctttggacctctacctcggccgcgatcatttgggggaaactgagctccttgaccttcatttgactcgaccgagttgccctgactcctgctatttcgcctggcgtccatctagtctgaacagcgtgcgtaaccaagagctagcatggtcagatcatgatcaacaagaacttactaatgccgattattcagaaattaaaaacatgcgcctattctactatcagtctactaacatgcttcctaataggcttttcttaaatcatactattaaaataaactaataaagcaataaaagcttactgaaccgt

SEQ ID NO: 365527 - DNA, 643 bp, Cannabis indica
attagtttttgaacaattaatttatatgtttgtagttgtaaaatgtaaaataatgtatttatagaataaattagattattttttaaaaaaaaaaagttcggtttgggcggtttaaactgaccaaaccgaggttcaaaacggtcgattttaaaatatgttctggattggtcggtcggttttcggattgcaccaatccaaactgaaaactgaattttggatttttatatagaaaaaaatcgaccaaaccgaccgatgctcagccctaatctctagctaactgatagctgctgagttcctattgatcttcattgtcttctccttttgttacctcagttccatcagcaacaacattagctgatgttgtaggagcaacttgctccacctcaatctagacattctcatctgatatagcttcactatcattggaagtgctcttggttttctggccatttcatcttccttgaaaacaacatctctacaaatcaagtatttattgaatccaagttctaagcaccacactttatatcccttaaccccttcaaggtagccaagaaacatacatcttaaagctctaagctgcaacttatcttgtctaacatgcacaaatgtagtacatccaaacactttcaagtgatctaagttt

SEQ ID NO: 365528 - DNA, 727 bp, Cannabis indica
gtatatatattgtatattatgttgttgtaacatttatttaatctctttgttggtcattgtattgtattacaatagagttgtaatattttaattttcttacattgtaataatatctctaacaatgtattgacaaaatttattattagtcctataggagtttttatttaaatagatacttattcgagatttttaaatacttttatagtaattgatttatttgattaataataatcgttcattttttttaaaaaatatatataaaatatatatatatatatatatttgagatcaaataaaatacatttcaattgaaagattgtaagtacagatgaattatcaaaaaaaaaaaattcaaaacatcgaaaaaattcaaaacgtcgaaatgtataatatataacgacaataacaaaaaattctaatgcataattctatatagtttgtttgacacattaatttactctttacaattgagtaaataaaatataggcatatattatacataattacgtggaataaaattctttgttatatataaataaatgtataatataatagatatttgattaaaatgtaattatttttttatagaaatatatttttttaatataaaattttataaaaatgtataactaattataatttataaattttttattcataattagtttaaatcatgatttaattttttttatataataaattaaagattatttttaaatagagtttt

SEQ ID NO: 365529 - DNA, 626 bp, Cannabis indica
atatatttatatatgggtgcacttttaatgggtattacccatgaatgggtaaaattagaaaattttgagcttttatgcttaattttttcgatctaattaaaaaaaatctctcttttttatatcatataggctgagattgttccatcggtaaaaaaaaaattaaaaaaaattttaaagcaagaaaaataagaaaaaaaaaaagttagagtttagagttaaatatttttgtatgcacatatttttgatatagtgtaaaagagatatttttttatattttttttgattaagtagttaaattacgcatagaaattcaaatttgtgatttcattattcgttattagatcaaaattcaatggtttgatatttttaaaattaatatttatagttaaatttgtttagtaaccattaatgggtaatacccatttaagaagtgttccatatatatatatatatatatatatatattatatattaaggattgtgcctaatttgttattgcaatttaaacacagcctattttggaagcaaaggtgacagcagtttggttggatagaagtatcgccctagccctatacccatggagatcgtaacatctttacttgataaatttatgatataattacatc

SEQ ID NO: 365530 - DNA, 645 bp, Cannabis indica
tcatgcaagacaacttgaaagttattattgtaattgccttcaagcttggcatgcgatgagtttgaaccaaaagcagcccaataacacaagactttggatgatgagctgggaagaagcctttcatagttcgtagaggacataatatggtgggaatggtgttgatgaaaaatatggatctattggtggtgtataagtcaatatcattgataaatttgaatcaatgatgacacgtgcttcctcatcctctaatgtcacattatctacactttcatttaacaacacttctttttgttgcttattatccacttggctatccataaccttgcttttgatttcatattcaatgatttcatgatcatggatgaattcattctcttccatgatatactacacgacatttattatttatcaagtaagaatctgatttagccaaattttgagttaataccacttcaaaaggatcttgatcttcaattgtaggctcattctcttttatgtattcaactaatgacacttcttcatcattcaaacaactcttataacttttattattagagttattacattctgaatcatgagccatcaaattatcacataaggaccttaccatgtccgtcaagcaattaatctctcctagaagtgatt

SEQ ID NO: 365531 - DNA, 589 bp, Cannabis indica
aacgataaatttatccttactcgatgtaaatcatctataaatgatctttaattatttagattgaaacaatgaataatttatagcgtatctattcttggtgaatagagcgttctatgtaatcaagagattctgaatctatagtggagtaatgaggaattaataagatagagcatttactcaataaattctagaactacttattgggagcttaattacataggcacatggtccacactagttgagataatattatcttgtagactcaattaaattattttagttaatcaattagaattctaaagaagactatgtcttgtttgtgaattttcactaaacaagggcttatttgagaagaaaagagaatttatggtttgtttattaactaagagactttgtaaggcgtaataaataagttaaatggtaattttatttgataattaattataattattaaatagatagatttgatatttatagagttataattaaaagatatttgtgaaaagaaaaaaagataagttttaaataaaataacaaaattgaaattctatagggcccactagggtttggtccataagggttcaattaa

SEQ ID NO: 365532 - DNA, 546 bp, Cannabis indica
ttgagttcttctctttgaatcaacaaggtattctttagatctatggttatacacttaaaattatatgtaatatatttattgatggagttgaatattgttattgcatattttatgagtgataaagaattttatatatattctttttataaattatatgctaccaaaatttattggttgagtatatattacattttctttgaaggattaaatggtccatatataagttttggttagctgttatttttttttttggacttttccgtttagtgcatcaatgtgctatgaatttatatacatcttcaatattcagataaagtcattgattcatacagtatatgctttaatttttggactttgatatttatgatactctctcttttatgatactattggaagaagctatgttataaaataatatgtattttttaatttatttgatttatatatattgaagcttttggataaatatagatgtgctatgaaaatttaaccatcgttataatctcaataatcaaagatcatttatagatgatttatatcgagtag

SEQ ID NO: 365533 - DNA, 820 bp, Cannabis indica
atttatttttagctaggccatttcatatagttggttcttaataccatgtcttaatgaggtttacaattaagatataattggattatctttgaatatatatataaaaccaaaaataataaataagaaaaatatgatagaactttttcttctatttatttttctctattaaattaatatttgttaattcgatcccaacgttttctaattataactaaaatattatgttatgatcaccgacattcaacattaattaaaatattagtagtagtgagttgagattatactatatgaaagatcaagattaggaaaataattaagcacatttgttttggtaaatataaattgcaagtgtgccacatttaatatatacattttggaatattggacgtaattgtcaaagttctgtccttatcataaattaatattgtatataaaatatgttattttataatttagggttgcctctcccacaattccccgtgttgttctcctctttctgtgctcaaattactcaaaattcaagccaaacaaactccatcgattacattgtttgaggcgcatatataaagttagagaaatgctaaaaggtgctgcctaccatctcgttgtcatattactattaaaaaaaataattttagtaataaatttttaaggctaattagtaatttactttctgaattttaacatgtaataaatcatacctcttgaattttttttgccgttaaaaatttcccctaaactattaagattgatagatttaaggactttgttctattttaattaaaaaattaactaacatggatgaaagttcatgaagcat

SEQ ID NO: 365534 - DNA, 810 bp, Cannabis indica
taagaatataaaaatattttattaaatttaacggtgttagtaaagttaattttatataaatattgatattatttgttttaaattaatttaaatagtattatttaattattaaatttttttttttagaaaaaaatagtgtggtctacggtatcctactaaatttagtgggacactattaaacaaagctatttataagtataattttagtgttctaatagagtaaatatagtgtgaaactacattatatttagtgttttgaaggccggttgaagatgccttacaaaatattagcttaaacttgtgcctatttttattctacttttttcgactaaattatttggattggagtttcttatatcaagcttaaccatctcaatttcagagttgacaactctgtttcatataaacggagaatgttaatatcttaatatacatatgatttctagtatttatacaaagaaatataataaaagccttgagacaactttgtaagaaagattttaaactatatcaatatcaaaattaaaattcttaaccaatatgactaattaatgaattttagacatattcatattttataagttatgtcatattttgactttacatgctttctcttgttgctgttgggagttgaattctggaggtggttgaagtacatttttattattagcataaatgaaattttcatggttgcacaatactaaatgataataattagacaagttgatgtctctgtagttattggtgaatgtgagatttgccataaattggacttgttgcattgcagcacctgctgccacactccataac

SEQ ID NO: 365535 - DNA, 799 bp, Cannabis indica
atgccatagatatataattgatgtggttgtagtcttttgaggcctaggtctagttactataaagagttcttagaatattccaagtgaatcctgatcacagaatactaaactcaaatccatacattaacatgtagtttgaatccattgatagaaaatggatattaataacttgtgaaagtcatactgttgtctaatgcattcttggaaattgaaatttaaaaatttctatttggaatctaaaattaaagtcaaagacttaaatctataccaaatatacaatgagtaatgattgtttcttggaccaccactactagtctaactctaagtttaaattgccttacgtaaacatatacaagtaggagatttctaagatcgaagatttatatcctttcgagatagaatgtcaggactatagtaatttgagccactcaattttataagagaaattaaaatgacatcacaagtatatgatttataaaccattcatccaatgatataacattaagcaaattctaaataaaaaaactaagaggaaaactaaatgaaaattttgattaaaataagaatccaacgatgtcccgtgtaggcgagagtcaaagttattcttattttatgaatctcttcattgtttcatattgtaaacgctagtctaagttgtcatctttggatgtacaactagatgtcgcatttacaaatatttatctattgagatctaatattattatgtttgtctaacggatggtaatcctttgagatttgtcccattaaaaacacaagctaagttagaccacaatgaaga

SEQ ID NO: 365536 - DNA, 569 bp, Cannabis indica
tcgacatgtaatcgatattccaataaaatcaacgcaacacatcatcacacaatattatcgacattgtgtcgacatcatgtcgacatggggtcgatacatcacacagaacataacagtataacgtgtcgacaacatatcgacataccatcgatatgcaatcaacattccaataaaatcaacacaacacatcatcacacaatattatcgacattgcgtcgacatcatgtcgacatggggtcgatatatcacacagaaaataacagcataaagtgtcgacaacatatcgacatacaatcgacatgctgtcgacaacgaaataatatcaatgaatttacattgtgtcgacaatatatcgacatacaatcgacatgtggtcgacaaataaatttaaacactaaattcagttcaaaatattttcactcaacatatgtctacattctatcgacacacaatcgacatcctatcgatatactttatcacacagacatttctaatggtcattttgtcgatattatatcgatatcctatcgatatcgcatcgataaaattgtttcaacaaatagacacaa

SEQ ID NO: 365537 - DNA, 1050 bp, Cannabis indica
gtccaagtctgtgtttgggatcgggtcgcaaatttaggtccaggtccgggtctcagttccggtctgggtagacgaccacgttcggtcccgagttctagtctaagtttgagtctgaggctatgtctgtgttcggttctatgtcttgttccgggtcctgatcacggtcctagtcttgctttagggtcctagttcggcgactcttgttcaggttctaatttttggtcccaggtctaggtctgggtttgggtttggttcttcgtctgtgctcaggtcctagtctgagtccaagatctagacaccgactactggtttgatcgaggccccgttacccaaatccagagtcaagatttgggtcacattcacgggtctcggtcttgttctggttcaggtcccaggtcccatttctgagtttgggttcgggatcgagactgggttgctggtctaggtcccaactctgcttctgtgtccctactctggttccatgtttgggtctgagttcaagttaggttcgggtcccgagtctaggtttgggttgggatggtcctgctcccaattcgggtctaggtctgatttggagtccgagtcctagtccagttacggttctagatctatgtctaatttcagttatgattccaagtccaagtcctagttacactcccggtcaacttccggttttggttccaattttgggtcacagggtacgagttcaggtccacttttgggtttgggactgggttcaagtccgggtgtgagttcgggtccttgtcagggttcaggtccagggcagggtcccaaatccaaacaccaactacgggttttgtccgagccctgggtctagatccggatcccaatctcgggtccctgtctggttccatttctggtgcagggtcacgagctgggtcctattttcaagtttgggtctgggtcgggtactaggtcccggtcctagttatgtttcccacgtccctattcttattttgggtccaggttccggttattgtgtgggtttgggtcccattctaggttcgggttcgagtcctagtctcagtt

SEQ ID NO: 365538 - DNA, 529 bp, Cannabis indica
gatttagcgtgtcacttattagtgttgtgattaatgtgatttaggagcctataattcgccgagcagatagttccactcaggttgaccggcacacctgaattcagaattgaggtaagtatgcatatgtatttgcatgtttagcgtgcatgttaggaagcctgttagattacattagatatgtatgttggctacgtaccatctgatagtatcacatcggtacgggtagagtatgactagcgtactgattataggcttatattatggtcgatggtactgtactatttgaccgtatcacatcggtgtgctcagagtatcactgacatattgagtatatgttgatacagtaacacatcggtacggctagagtatgactaacgtgccgagtataggctgttactatgttaaaagtaccgtcgtatgaacgttcgagactcgataccgtgtgggacacggggattagggttgtggttaggggtatgggcgtctgatcataacctgggatttatgtatgttttatgatttatgcttt

SEQ ID NO: 365539 - DNA, 528 bp, Cannabis indica
aatggggcccacagataattaaattcataaataattataaaattgtcagaaattagtgctaattgtctttactaatcccaattactaaagcggtcattacaattatccccccgttaaaaggatttcatcctcaaaatctaacctgaatagctctgtatgttgagtcctcatatgagactacaactcccaagtggcttcctccaccttactgtttctccagagcactttaaccaaagcaatggtcttgttccgaagaaccttttcttttctgtcaagaatttgaacaggttgctcttcataggataagtctggttgcattttaagggtttcataactcaagatatgtgtaataccctaagatttaaataaatggattagaaaaccctaactagttaaatgtgtattattgaggaattatattattatatagtttaatatataagaatttatatgatttatgctatgttaagaccccgttggtgagccatgggcattttagtaattttggcccgagaagggtaaaacagt

SEQ ID NO: 365540 - DNA, 844 bp, Cannabis indica
cataattatctaattagggttttgctaatccatttcttaattctagggtattacagtttgcttaggatgtgctactgcggagaaactttttatgtttccatggtttgtatagaaatcagtgaacaattgactatcaaattatgtgtcattgtttgagactattttgtacggtaatccgaaccggcatattatattttttaccacaaagtcaagtacttttttagatgtgattgttgccaatggctcgacttctgtccatttagtaaagtagtccactgcaaccagagcgtattgtactccccctttacctttaggcaattgtcttattagatcgattctccaaatagcaaaaggccaaggactttgcatcttagttagttcattgggcggtgcacgaggtatcttcgaaaatctttggcatttgtcacatttcttgacgtaggcctttgaatcttcaatcatggttggctagaaatatccttgccttagaattttctttgatatactttgcccggctgcgtagttaccacagaatctgtcatgtacttcagacaaaagttgtgtagcttcttcttgtgtaacacatataagtaacgacatggagaatccccttctattcatgactccatctacgatgatgtaccgtgcagcctttctcctcattttccgagcttcgtttctgttacttgggagttctctagtgttgaggtaggctgctattggtgtcatccagttcggagatgtgtcaatcatctcaatttcttccgtacaggtgatgctgggtttttcaagaaattgaattgggattagattagcctcatcagttatattgttgcttgtaagt

SEQ ID NO: 365541 - DNA, 634 bp, Cannabis indica
aaaaggaaaaaagagagggaagtgattgaaagttgattgatcgtcgatagggaagccacacgtgtctgtgcatcgaattgatgtgcaagtggtatatgtgtaataaaagaaagaggaaaggtaaaaatgatgatgtaaccgtgtgtaggtttttttgtaataaagtatgtaaattgtattttttgtgtaaaaatttctttttaatgacaattttatttgataattattttaattattgaataaatagttttggcaattatagtattaaaattgcaaaaagtggtatttgtgaaaaatagataaatggtgatggacccactaagggtcgaccacttagtccattttttgccattattttatcattttttattccaaataaatcaatcataatcctaagtgaattagtataaaaagaaaagaaaggtctcattatccaactaatgctacgaatgactcttgacctagttttcttcttgtcaaactactagagattttgagacttcttcttcttcttcttttctctaattcgaaatccttattgttcttcataaaataatttcaagcctttagtgattgagtgctgcccacccatagcaagttagtgataaatcatagtgtgtaagactgtgaggaa

SEQ ID NO: 365542 - DNA, 689 bp, Cannabis indica
aaaagcttacaactcatttttatttccatcttgcatccacttttgagttaatttacttattttcttgttcatttagttgattcattaatcatttcattttggttcttaggcattttgcttggtaattaacttttgcaatagaaattttatttttacagtccttgcggagacgatactcgttacgtatcattgtattacttgtttatgactacgtgcacttgcgtatatctaaatttttcacaacaagcattcatagtcttcgggatagtttaggctcacctttttgatagtcgtaagaagacaacttttgtaatgcaagtattttgcaaacttatgtagattttaacgggatcctgaacttatataaaatatgtttattattaacgtttaagttatttaagaaagttttaattatctctattttttaataaaccctttgattagcaaatgcatgcacaataattatagaaaacaccgtaacacgtctaatctagtagagtgttacaaaatgtcactcaatagggtgtttgttatgtgagtttgagttagagagagtagagttagaaggagtgctttaagggaatatgggaatatgaaactcatatatttaaaagaattaacattattaccattgagtgagctattaccaagttctggtggaggtcaaacaagaataaaggcatacactg

SEQ ID NO: 365543 - DNA, 559 bp, Cannabis indica
tagctaagcaagggtggaggcttttgacttgtgggaatagcttgatggggcacatttacaaggctaaatacttttcgtcagggtcttttctcacatcgacgttggggtgtaatccgagttatatttggagaagtgtgtttgaggccaaggagttagttcgggctagggttcggcgattggtgggtgatggttctaccgttaatatcttgtctgagccttggcttcctgatgagatgaacccttacaatgaatctgtccatccggggcttgtgggaaagtcggtggactctttaatgaaagtcgggctggttgaatgggatggggaagttttagctgatgtgctcactgctagagatcaagctttggtgtggaaaattccgctaagtagtcatatgagttctgatttgtggtactggttacatgatgcgtcaggggttttcactgttaagagtgcatattcgctacttcaatcaatgaaatccatcagagatatccccagatagctctaggttctggcagctcttgtggcagttacagctccctccaaaggttctaattt

SEQ ID NO: 365544 - DNA, 530 bp, Cannabis indica
ggtggagcagttgtttggagaagtgctaaacaaaccacaacgtcagactctaccatggaggctgagtacatatatagctgccactgaggctgctaaggaacttgtcttgcttacaaagtacttcacaagtcttggtgttgttcctggaatggaaaaccacttgttttactttgtgataacactggagccatagcaaccagtaaaaaacctcgaagccataagagaagccaacacataaagaggaaatatcacatcatcagagagtatgtggcgagaggggatgtactggatgtactggtggagaaagtggatactaaagataacttagctcatccattcactaaagttttgactgcaaatacatttgaaaagtacagattgtaatttaggattaattgaaatatagtgtattgttttatgttagtgcaagtgggagttcgttgggcttggtaacataaataaatctctattttaatgtaatatcttctattcaattatcaataaaaaaacagatttattttcattattta

SEQ ID NO: 365545 - DNA, 646 bp, Cannabis indica
gcattcttatcaaaatgggggtggaatattttaaacggaagccaatctttatgctgcaaagtgctggaggctaagtacctcaggggcaaagattttctctcgtgcaagtacaaaaattctgactcctggttctggaagaatgttgtgaaagctaactctattttaaggaaaggggcttgtagactagtggctaatggagagactacaagaatatggcaggacccctggattcctcacctaaaaggtttctgtccgaaaccaagaggggacgcctcccccaacctcaacaatgtggctgatcttgttcttggcagtggccaatgggataaccaaaagctgaactattcttttgacaatgagacggtcaatgccatcctcaaaggagggcaaccctctggtgtcggggttgatagatggatctggactctggagagaaatggtcaattctcgaccaagtcggcttaccttgctcaagccttggaaagagctccccaatgtgttgtcgccccaagctgtggaacaagctatggaatagcaaagttctagagagacataaggtcttatggtggtgtatcctgtctgcgcccttccggtaagagctgtgctaggcactagattccatttggaagatcaaagctgtcccctc

SEQ ID NO: 365546 - DNA, 621 bp, Cannabis indica
aataatagaacaaaccacttaaaatgaatggtaaggaatgtggtttggtttccttccaactatagggttgactttatttgctcgccatgggatatttaatcctccttggtcattttgttatgttgggattatgagtcgtagcattctaaattttatgaattcaaattgcgattgagtagttaagttgaagcacactagtgttggttaatttttattgagttctacctaaattacaaaaagtggtccccaaatagaaaataacaaaaaaaaaaaaacgaccaatgataaagactgcttactcatcctaatcttttgtattatatcaatcaaataagaatcataggtgatttggcagctacattgttttctcctccatttcatatgtaaaattgaccattggattgtgttctattagtctctagggtctatgcccttccatttcatccctactcttgtcctgctcttcactacaatattttgatgggaatggatgattacaaatttttcttgcaaatacctagaagcttttggtgaaaaaagaaaaaataattaaaaaattaataaaagttaggtatttgaaaagtaggcctcatttccacctgtaataataataataataat

SEQ ID NO: 365547 - DNA, 674 bp, Cannabis indica
ttgttgggatttgtgccctaaataaaacccatttcaatataataagatttactagttaataaagatcagaaataacatttttttatgttgcatggttcacatgacttatttcatgattgtttaatgtataaattctattaagtccagaacatatgtattttttaatgattatagtgttttcagcacagtggaatataatcttgagtatatgttcgaaagtttaattccttgatttgacagttcactagatttagattggcatgataatcagcgacaggtatgcttacaccttggacaagtgttatgtcctttccaggatattggcaaagttttccagtatcggatgtatggagtatacattggaagggaccgatattgaactttgattagatatgataaagttactgtaatatctattaaatttcatatcatttataggtggcaagtgttttaaggtgtaacgctaattttatccctatgcaatgtacatcatctatagatgatcattgattattgggattataacaatggataattaatagtgtatctatatcgtggaacatatagagcgttctatatgactgagagtgtaattccaagttctatgcatggatgcaacaaggaattaacaagatagtgaagttaccttgaaagttcttggtctgcttattgga

SEQ ID NO: 365548 - DNA, 565 bp, Cannabis indica
gctaaaattacttatctatcatctttgctaagctttttttattaatgccaattgttctgtctctaatttcatttttataaacgaaaatttacatgtagatacatcatagtacaattaattactaatgtatcatataaaagttaatatgaccattttgattgtttaataatttatatacccatttttattataccaaattttttcatatcacaatcattttttaagcattttgttttttttttttttcttttggttttttctttgtttaatctttccttttataaaaatggcaattataagaaatggaaaaaaaaaaatgtctttaagaaaatgattgaggtgtttaaattcaattatttttttcttccaattaaaaaaatttaaaacttgttgttgtcatttgggtgttcaatctaagagatcgaaagataatttaaaaaaaaaagattgagtgttcaaactaaatatttattcggaaggatttgagtgttcaatcatagagattgttctctgtaatattcagtttatatacatatattagtatttggtatattaagtgtgatac

SEQ ID NO: 365549 - DNA, 582 bp, Cannabis indica
atatatctgattaataagaggtagaaaaaatttagttaaaccgaatttcgatttctactaaaataaattaaattatattattgtagtttaagaaattagaataacaaccttatgtaatattttttaataattaaacattttatctaaagaaatagaacttaaacttaggtaatatgtaatatgatattttatgtaaatatacacaataaaacttataaataatatttatattattatatcaaatattaaatagaaaaaatacattcacaattgagatgcatctatttagtacaagaatatatactcaaataaatgacaaaaatactatatatactcaaataaatgacaaaaatactaacttttgtaatttatttctcaagaaaagactaaatatattaaaagtatttataatgaattgttaacaaagtgttagataatataaagtaaaaattacacttattatgggattttaagggttcttatgatatatatggcacttttaagtttgaccaatttatatggtatttttttgtttttaggtctttttatgatatttgatatgccatatatatgtaattaggt

SEQ ID NO: 365550 - DNA, 569 bp, Cannabis indica
tctctctctctctctctctaccccttgcacacgccactctcacctttgagtgtggtgtgagtttttttcaatctcaaccacagtgtctcataagttgtgaacacactatattatcaaaaaatttgttcatcctgttaaatcaataagcctactcttattttgagtactgaggttagtttggaagatgtggtgtgattcttcaacaagcccatcgttggattggatgttcgaatttttatacgataagttgtaagaaaatcttgataggtagcaagaggtaattttctattctaattagttagatttagattatataatattgttttgagatttggggtttaaggttcatatcagatttaacaaaataatttttaaacctaaatccaatttgtactttcgctgtgactctgatatgaatcctaaaaacaaaccgttgcttcatgggctctttataaactgatttttctcacaaaaactaaggttggttgagtttctttttatcttatgatatcattctaagtgttttaagctaaagaattatcatcttttcataaacacactaaccacac

SEQ ID NO: 365551 - DNA, 1254 bp, Cannabis indica
cttacaaaagaaaaaaaaatgggaagaaaaacattctccaggttggagggaattaatgaagtgagctttagagtgaccctgatgagtgcacatttgtatactcattttaagcaaatttttagatggattagtatttatttttgtattagatttgatgtgttttctccaagtgtgtaggtttgtgctgaaaagacattttgtgatggactgagatctttaaacccatttctgacaataatttcataattttctcgaagagcatatgaaatctaaaataatagagctcgttcccagctttccaaaatatgttaaatcatctcatttggagtccggacgcaaaaattatgcatgatttactgagcaaggtcgaagtagaaaatttttgtattgtgcgctatagcgcaggggtctgcgctatagcccccggctctaaaaaaatgatttttttgcgaaagaaaagacaatttcagcacgggtttgggattttttctcttaggcgctatagcgcggggtataggtgctatagtgcaacacgtatcattttttttaaaagactcctaattctaagaggattgatctatttttgttggcctatataaagaaggatgtaaatcaaattaagagagatgactagagagagagaaacaagcaactttgagattagaaaacacattgaagagcaagagagaagagacttcaagcaatcatcatcaactatcaacattagagttcttttcttcttcttcttcttcttcttcttcttcttcttctttattcttttgctttcgttatttaattatgaacatgatttatttttgttattatgtttgtgattatgaactaaacaatcattctagagtgttgatgaaactattttagattatgaatttaagtttttagattattctcattattttttcttgtttatttgtttatgcaattgtgtgctaattatcatcttctaaatgcttgatcacctattaattagtatagagaatttagattttacacttgagagaggtaatctaaaatcagacttagaattacatgacattggaaaagtgtgagattgagagattccactaattctatgagtttcatttaaagagaaccatattgctttacaagtgcttatttgattaacattgaataaagatatcgtgttagttattctaagttaaatctatcattgctcgagagaggttaataggttacattaggattctaaaaacgtcaaaaattatagaataaatt

SEQ ID NO: 365552 - DNA, 626 bp, Cannabis indica
tactctagccatattgatgtgacagcatcaatcagtatatcagccaacatacatttatcagttttcaatacaaccctagatatactattactgctatcaatgtattctaacaagcataaactgttagaatctgttttaccaggatcaagatttactaccatgtatgttatttaacatcctaaatatgaatctctaaaacaatgtaaataaaaacatataaagtttcaaaaaccttacagtggctgcagcgcaattataatggttccttccactcagatctcttacccttgtatcttgtctgtagcagagtatcaccaagatctgagtccgaatctccttctcttgagtctggattcttcacagccttacatactatgattgagtaccagttgatgtgtgtgggcacttactctatcactatagggtttgaaaatatgaagagatgaagagagaagagtggttcgaaaaagggtagaagagatggctcaaaaatttgactgaaggcaagtgttcatcctcatttcatttgaggctattactatctatttataagcaatcacctaggtttaggttagaattatttggcattaagatattaaaaaaaatggtaaaatagggttaagtgg

SEQ ID NO: 365553 - DNA, 785 bp, Cannabis indica
aattatcagaattaaattaataaatattttttaaattaatttcagatattagtgaaatttgaagcttgaaaataggtaaaaatctatccttttgcttagtttgttatcttatttttaaaatttatatattttatcttatttttaaattgaaggtcagatatttaatattttaaattttttaataaaatgaccttatttgaaatttaaaataagattattttaataatgaaattttaaattgaaataatatattttgctaacttttaaattttgttgttttatttaattaaattgtaaaattagaaaaatgatatttatttattattttattttattgaatatttaattttattttaaaataacattaaatttgaaaagttgttagcattttttgaatagatatttaggttagttgaaaacctaatttttcaaatttataagtttaattttgaaattaattatttaatataatttgaattttttgaaaaataacattttattatttaaatatttttgaaattaattaataatttaataaatttcaattaaataaatcatatatccaactatccaatgtgttgcatgtgtgtgttttatattgtttattattaaaacaagttttataaaacctattattgtttgatctaaattgtcgtggctaacttgttgatagatccaatgatctaattttaaccaatggttcaattatcaataggtcaaataaataatttgtaacatgtaaattttgcaatctttttttcatctatgtataaacctagtaacat

SEQ ID NO: 365554 - DNA, 830 bp, Cannabis indica
tctctctattatccatattaattgtgttaaaaaaaatagataatttacgtgacaatctcctttaaaatattataatggtggacaccttaatagatgacacataagttttatggaactgaatagttttgtactattctattttgtgattattttttttacaagattttataattttttgtattctttctttctttctttatcatattttatcattgtttatagtttatcactgatagcaatgtactcatgctcttctatcaatatacactactacaaaagtcagaattcgcgacggtcctaaaaatgttttttttaggggaccgtctctaaaaaaattaagtaactatttaaaatcgtcggaaaaaattagtattcacgacggtttataacagtaattacaggaatagatgaaaattttaattggaattcataaatttattgggcttttatacccgacgatttacaactatcgactatagtaaaggcgatggttatactataggcgacgattttaaactgtcgggtataagggcccaataaaaaatcgttacctacttcttgccacatttcccacatgcccacctacttcttttctatttctcacatgcccacatatttcttctcacctatttcttcttcatttcccacaccctaaaataaaaatcttaactctataaaacctcacccacgcctctgcaccatcgctctcctctctcgctgtcttcctccctctctcgatctccttttcttctcgtctctctcgtccatcgatctccacccacttctcctcccgtcgatctccctctcctctccgttgcatatgtcagacc

SEQ ID NO: 365555 - DNA, 980 bp, Cannabis indica
gccaatgtagtggctgatgccctgagcaggaagcgtcccgggcaggtagctaacatggttcaagtttcacctcagttagtagaagatatggtcagatcaagcatcgagtttgttgtaggcaaacttcataacttgacactgcaatctgatttattagaatgtattaaagttgttcagctaactgatccagagctagtaaagatcagagaagaggtttcagttggtcaagccaaaaactttacactgtcagatagtgggatgttgttgtttgagaccagggtttgtgttccttgtagtgcgaaacttagaaatgaaattctcgaagaggctcataccactccatattctctgcatcccggcaccaccaagatgtatcaagatcttaatccctacttttggtggagcagaatgaagaggaatgtggtagaattcgtatcgagatgcctaacctgtcagcagatcaaggttgaacatcagagaccagcagggttttcgcagcctttaaccctacctgagtggaagtgggaagatatcgtgatggacttcgtggttgggttacctagaaccatgggtttatttgattcaatttgggttctggtggatcgatttaggaaatctgctcattttctacctgttaaaacaaccttttcagtggatctgtatgcagatttatatgtagaagaaattgtaagattgcatggtgtgccaaagtccatagtttcggatagggattcgaagttcacttcaaaattttggtagagtttacaacgggctatgggtaccaaactaacgttcagtatagctttccatcctccaaccgatggacagtctgaaaggacgattcagatattggaagatatgttacaagcctgtgttatgtatttcgagggctcctggagtatgtacctaccgttgatagaatttttgtacaataacagataccaaagtacgatagggatggctctctatgaactgttata

SEQ ID NO: 365556 - DNA, 454 bp, Cannabis indica
ttggtctataggatgagcacttttgaatttccactcatgtggaaggttagaattcatatcttggctttcatttactgtttccacgagtggttactctttgggagtttgtgaaggagcattggaagtctctccgattttaagattttgaacctcatctcccaaacctacaacatcatcatctaaacttttacttgtaggcgggttagtctcatcaaaagcaacatggatagattcttcaacaatattagttcttatgttataaattttataagctttactatgtgttgaatagcctataaaaattccaacatcggattttgcatcaaattttccaaagttgtccttggtgtttaaaataaagcatttgcatccaaaaactctaaaatagccaatgttgggttttctccctttccaaagctcataaggagttttattcatgttgggcctaatgaaa

SEQ ID NO: 365557 - DNA, 845 bp, Cannabis indica
aataaactgtgaattaattgcttaatattcattttaggaagtttctccatttattctgatatgatgccctgttgaaatttggcaatcaattattccttaattgttgcaggaataaaaaagaaaactagaagagtcttttgggaacacgctgtctcacccctcccgatctcatggtaccaaacttttgggaacacttcgccaatagcggaaggctctatggtcacagatacgttcctggaaggacttgtctaaatggacttgacccactttaccttcattgagggactcactgatgggccttgaatgctaatttggattccacgtgtccactgtcaaaaacgaggataccattagtttataataatatatatcatatatataatgttataaaacaaaaccttttaattaatcctttaaaataaaagaaaatatctaatttaatttaaattcaaatataatttttttataattgattaacagaaaccagttaaatccttttattttactattattttttaattaaataatttatccaataatatatttacttcaacatttaaaagataattaattaatttaatttaaattattttaacctataaaaaataatcaaacaaaattaacatggacctttatatgtcatcctacacgtgtgggccagacccacacgtgtggcctatattttaagaaatcaattttaacataaataaaatttattatttattctatcaataaataatagttgattatttattatttattgaaaaaattaaataataattgattaactctcattaatctcttatttcacaagaattaaagtaaatattattttctctaaaata

SEQ ID NO: 365558 - DNA, 805 bp, Cannabis indica
tgttccaaactagggtatagccactataccacatacactacgtacttcgctgtacgagtgttggtagggtttgtttcatgctctgagtaccactaagtgatatactactcacacccaatacttccagtactggtgctggtatcactgtaatgtactctcaaataacatccactataccaatgcaccctataccttaactataaaagtgttggtagtgcaacaaccacttttagcatgcatatagacataacgtatacatacactcagacattgatatcacacattatacccagtttgtaccttctttccagattcaagtgtgttggccgacctgaacagaaagtcccgtgctagatggatgccctaatcacattatgaaaccgggtaagttacatgactaaaaccctaatcccgggaaacgcaaacccacaaccctaggttctcttatactttctaggggttaatctaactattgaaatagggaaacacccaaccacgacacagaatggacgagaattgaggaaatgaaatgcccggggaaccctgccaaaaccagctagccggtctacacgtacgtgtgaaactggttacccagtttgcaccagttcacccaagaaatttcatttcttgctcaaagtccaccaaacataaccaaaccttccagagtacctaattagggtatacacaacatattccagccaataaaccacagaaaaaccctttgaatcaaaacatgccattagagatcaaagttaaggtttctatgctcaaacttgcacaaaacctaaatcaaacatcaaaacca

SEQ ID NO: 365559 - DNA, 587 bp, Cannabis indica
ttttagtattgtggttagaattgaaaaaaaatttacggttgaaatagtagttttttggtgttgatttaacaccaaatttaagtttctccattggagatgccgtaagaaaaaatatgtaatttatcagctataaataatatcttacaaatatatattattatattatttgataatataataaatagattgaataataaaattatatattattatatgaataatatatagtaagtatttagtaaatacattatgtaatatgtgacttatttaacttatacattataatatatagagtttttgcggctaattaaactctcccaattattactttatttgcatttaatctttaaggtttaaattttagcagtaaaaccttttaaattattaaactgttaacaaatttaaggtgtcatccagttaactaccaccatggactatttatgtgtatactcttgtacatgtgccacgttatattaatacatctaatattattatttaaaaattaaataaaaaataaaatattttaaaaaataaaaaagtaatatacatttaaaaataattttgtttaattttgatatttattttag

SEQ ID NO: 365560 - DNA, 577 bp, Cannabis indica
caaaagaggggttacgctgtcagacatattacttatggcaattacaatacgttttctcccatgcggcattaaatgcgaggtgagtgctcaaatagagtctagtacctcccggaggtgccttagcatggccctggcctccgggagtacgtggatccttctcacatcttctccgggagttatcttctcatcgacactgctgttgccaaagacttaatcgatttctttaagagttgaggctctcagctccacgtgtcagtgttacactgtccacctattttgggcaaagtagaggtcaacaattataattttgccactttatttcaaccatttatccttctttcaataaaaccatattttcaaatttgaatcctataaatgtcaaaactatttatttaacaattacaattaattatcaaataaaattgccatttattttatttattaattagacttaacaagtctttttaattaacaaagaaaccccaaaacctcttttcttcacaattaagccttacttagtgaaaattcataaataagacacagtctaattttagaatataatttattaatcaaaacc

SEQ ID NO: 365561 - DNA, 511 bp, Cannabis indica
ttttgtttcatttattaatttactattagtagtttaattccaattagtgtttttatggggttagaattataaggagtacattccttaattaattttaatgctgtgatcatgtttatgtgttgaaactaatttagtttttcccattagtcttgtcttttgatatggttctttagtctttccctttagctttttttggttcgattcttgttggttcttgttttctttttttgctttcgagattttgctggttgtggtacgattatggaagatggtacaggggtgcatattcctattgaggaggaggaggaggttatcttgtcttatgatgctagtggtacggatggtaatgattatgatgacaggtggtatatcgttggaaggttcttgactgaaagataaattgattttgaagctatgcaacatatgatggcttcattgtggcagccggggaaggggatgttgtcaaggagttggatactaatcactatctctttcaattttatcatgagat

SEQ ID NO: 365562 - DNA, 707 bp, Cannabis indica
atacaatttgttaaaaaaaaattcataaaatatataacagtttcatatgcaccttctattagttttcgtttcttttaccgtaaagaattagtatttttacaccctacactttaaccaatataaaaaaattctccttttattaaaaaaattaattttaaaaattttaatatcctattaattctcaaaaaaattaataaaaagtattaaaaaccctgataaaactattaaatttattgcaaaatattaattttacttaaaaaactttaattatttctaaaaaaaaatattttcaaactttattaatttatttataaacacgtctcttaaaaaattaaacctaaaatattgagaatttaataaataatttaaataatcaaagatatttttaaaaaaaaatcaaacttatttatatttataaactcatatcttaacaaataaagaaaaataattaaaattcaataaaaatataaattattttgaaaagttaaaaattaaactaaaagaatcttatatttacttaaataaatctacatttttttttaacaaaaataaacacaagcttgtgcgcgtaaaatttagtttttagaaaaatttaatttttaatatataccactactacaaaaataagattcagtgactcattttgagtgactctaaaaatatttaatgacacttcattgtgtgtcactaatgtgggtaactggaaa

SEQ ID NO: 365563 - DNA, 980 bp, Cannabis indica
cgaaaacccaaccccccaaaaaattttgattggcaaagtgaagaccaagacttccaatgagctttagaacgattcccaaaagaaccccaccaaaactgagccataagtttctcaattttatgacaaatagaggcaggaagtttataacaggacatggcataggagggtatagcttgaataacagcttttaaaagaacttcttttccagctttagaaaaaaaacttgtgactccaaaccctgagattagaactgacacgatcaagaataaagctaaagctgttttcttagacctttcaaaacactgaggaaccccaagatatttagacataaaaggtctattagaaatcccaagagtatggtaaaagatccgaacatgagagggggtatttggggagaataagatggaagatttattaaagttaacacattggccagtggcttgattataaagttgaagagctgcttgaagagcattgcaagaagaatgagtagctttggcaaaaatgagggtatcatcagcaaagagtaagtgcgaaactgcaggggcagatctggctatagatataccatcaaagctcctaagctactcttgaatgcgaagagcagcagccagaccttcagaacacaaaaggaaaagatagggagaaaggggatctccttgtcttaaacctcgagagggaaagatttccttagaaatactcccattaacactaaacttagtagaaacagaagaaaggcattgatgaataagggtgacaattttgttgggaaagttgagatgattaaggatagctaaaagaaaactccactcaacacgatcaaaggctttctccatatccagcttaaggcccacccacccaatctttccagtttttttatgattaatggcatggatcatttcttgagcaatgagaatattatcaaaaataagccgatcagataggaacgcactttgagtgggagaaatgacatcctccat

SEQ ID NO: 365564 - DNA, 697 bp, Cannabis indica
attaaaacttgtgaaagtcatatgtattgtctaatgtattctaggaaactgaaattgaaatttcaatttagaatctaaaatttaaagtcaaagacttaaatttataccaaatatacaatgagtgattattctagcttggaccaccactactaatctaactctaagtctgctttgcctaaagtaaacatatacaagtaggagattctataagatcgagaatttatatcatttcgggatagaatgtcgggaatctagtcatctgcgtcattcaatatcttaagaaaaattagagtgacatcataagcagatgatttataaaccattcatccaatgatataccaattaagcaaattcgaaatgaaaaagctaaaaggaataattaaaagataattttgattaaaataaagaatccaacgatgtcccgtttaggggagagtcaaagttgttctcattttaataatctcttcattattttatattgtaaacactagtctaagttgtcatctttggatgtacaactagatgttacatttacaaatatttatctattgagatctaacactattatgtttgtctaatggatgacaaccctttgggatttgtcccattaaaaacaacaggctaagttacaccaacaatgaagatttgaaattatactacaacattaataacagaaataacatggttcaatataaat

SEQ ID NO: 365565 - DNA, 634 bp, Cannabis indica
tttagctcgacgacgatggaaaaggcaatagaggatatcttagtcacttgaggatatatagaatttggtaatgttagaaaatatatcatgtaagtttaattggttttagtgggattgtggttgtggaccattttaccctaagccgattattgaactaggtttagtattgggactatttaagtaattcaccatttttgttttattattattgagtgtctttgccaattagggatagctgccatatatttagataaaggttagttaattaaccttttattaagcaatttagaggatttagaaaataaaagaaaaagggctccttcattttccttcttcctctttgttcggccagcaagaacgaccaactgtaaagaccgcttagtttaatttggaaattagcagttaattatgattcattataaaaattatttatagatatttaaataattatttatgctgttattttagaattccgaatgcatttttatgtcatatagtgaattttataattttgcatttccggtgcccggcaacatggaatacggtgtttggctcagtagaatcacaacttagcatgttagtattgtgggacagtttattagacattgggaatgtcgagagtggtcgggaattt

SEQ ID NO: 365566 - DNA, 603 bp, Cannabis indica
gcttaaataatgtcaaggaccatgtgctagttataaggatattatacatctttctttttttaattggatcattggtatgcacttcaaaagttcacattctactaaggatgataccgccacaataagctagtctcccaaaaaggtcaaatataatctcacctatgactgggctatggtaggattcaaactcttaacctaagccattaaagacatccctaccactacaccacacaatacgtgataaaagatagtcattttagtttaaatttgatgtttgtaaaacgattcgttaatcgtattgctcatcttttagcttcgtgtggctatgttgattgtatctcctagcttcgtgtggtagcttcgtgtggctatgttgattttatcttttctttgatagtcattttaatttaaatttgatgttttttaaaatataaaaaatctctaatgctatatttaaagtaaaaaaagtgattgaacataaattaactataaaaaaaatgaaaaccaaacctaacgttttagaaagagtaatttgcgacataaatatctaagtttaactctcaattgcaaataaatacccaagtttaatttttggcagtaata

SEQ ID NO: 365567 - DNA, 511 bp, Cannabis indica
agggacttagtcttttgaatcatataatcacaatcacattccactgtattgataatactgtaattgtgaatgaatatatgttctggacttaactgattttgtgtatatatatatattaaaccataaacatgaaaaatacatgttaacataaacaacttcaaaaatctaaattgataactaatcagattgtaatgggttttatttagggcacaaaaacccaacagctgtttggtgtcctccccatcaagactgaatcaagttaaattgcgatgttagagttggaagggagtacatgtgtattgcatttgttgctagagactcccggagaaaggtggtttgggtgcattcggcaaactgttgtgatattttacacacgaaagtgtacgtatcgttaacaagtagtaaactcaccaagagtgaggtcgatcccacgaggattgtagttaagtacgttaaaattaaatttttacttctgtttggttgaataaaaattaagcaaagattaaaacta

SEQ ID NO: 365568 - DNA, 902 bp, Cannabis indica
cattcattttgttctatcattctttgcggttctttgatattctaattaacattctctataggtatgcttttatttgtttgttgatatattttgcttatttttaggagctttctcaaatttgtaatttttgaaataattgtgcaattaatatattcaaaattctataatatttaacaatccttattttaaactaaaaaaaatccccatttttttgacattttttttgttatttatataataaaaaagttatatacacctaacaaatctttaacttaatcgtaatcgtatatactcatactctaatttttttaaaaaaattttgtattatttatataatatagaaaccataaacagctaaccattatatttttttttcattaaaactgaaaaataaacccaataatgaaaacaaaaaaaatctatctcttttttagtatcaactaaattatagcataccacacttatggtttatcaggcattgtttcacaactcattcgattgatagtgaacaattctccattgggtgtgatatatatcaggtatatatctcctctatttattaaaattatatttatttaaatgtcttttttataaaagtattatatatcctcaatatataacaaattctttaagaaattttatataagaaaagagtgaatcaaatccaaaacattagatagtattgagattaatacattgaattcatctattttcttttatttctccatttcatctatttctatgtaggtttaagaatgaaattcaagcgaaatagatgaatagtttatttatgtgtatagggttatttatgttgggttttgggccctaaataaaatccatttcaatataatcaaatttactaattaataaagttcagaaatcattttatgttgcatgattca

SEQ ID NO: 365569 - DNA, 1429 bp, Cannabis indica
ttttagaaacgagcgcgttattttcatcttcatggttcgctctgtacagctgaaggcttagtgcatgtggttattttgtaaatatttgtacgtggactgtataaattgtttaagtcgggccggacctaaagttatttttgttaattttttttcctttttgttatttttcttcgtttttttccctttttttttcattgttttttcctacaaggaaaaaaagaaactaaacaaatttctgaaatggatgacattaacacaaaataaatggaaataatataataaaattttagaagaaaaaaaagtcaaattattacataatttttttatatcatttatttatttgtagcatgaagtttgaccaattgtttaattgttatattgtacttgtaggtcaaattttaaattggagtttggtgttaaattgaatatatgatgtaaattttggtgaaaaaaataatatatgatgtatattttgtattttaaaaatcatttttgtatcaaaaaataataatggtgagttgaggtataggatagggaatcttggatcttgatgtgtagaatcaatatataaatcatgaatgagaaaggtttgtttgcaacttaacatcaaataaacctactattatagatagcataactcttttttatttatttaaagtgagtctatcactattagtgtttgtaaattatttgaattatgaaggtgtttgatatatatatatatatttatatatataaaaattttagaacatctctaatagagtaaatattagtgaagtgctatattttaacactttttaaaaaaattagttttccaatagtgtgctaaatttggccaatattaaaaataaaagatatgttaaatttggcacaagatataatattgtacaaaatttaatacacaataaatataattttttatattaaagttttgttattgatcattaatgataagttttaatatacattttttaattacaatattatcattaattattttttaaaaaatatttatttattaatggttattaatgatattttacttttgttttcatttgtatcttaaaatgttattatgccttggcgcacaataataaatgttgtacttaatataacatttatttatttttatatcaaatttaacacaatgttaataaattgaagatgatctaagataatttagtatatttgtatcttttaatttttaaaaaatatatatatacttgtattaatgtatatagaagtacaattttttgagctgtggtttcttaaattttataaattgaaaaatccttaagatatgttctgtaataattatttaaatatatttttttattttttttaattataaaagttaaaatattattaaaatatatatttggtagaattatttccatttttattatttaaaataagaattaaaattctg

SEQ ID NO: 365570 - DNA, 595 bp, Cannabis indica
gaacatttctcgtcttcatcttcaatgcgatatcttcattacgtgtggttacaataaccttgcttccttttgcaccaaattgaaaagagtttttcaaaagatcccacaaatcgtatttttcattccatacatcatcgaggacaaaaagaaatttcttcccagccaaagcatctttcaagtctttctgaagttgatgtagctcatttgctttacattctttttgggtgatcttctccaaaataagttttgttattctaagaacatcaaaatcatcagatacagttgcccatactttcaaggcaaagtgatcttggacagtgacattgtaatatacgttttgagcaagagtggtttttccaataccacccatcccaaatataggaatcactgagatccttgggctatcatcatcaccatcacacaccaataacttaagaataacctctttatcatcctctcttccataaacttgtgaatcatctagcaaaggagcttgtggtctatgtaatgttgttttatggtcaacttttttcaaaccaagatactctgtctgttccaaaagatcctttaggctatcaaggatctcttctaattc

SEQ ID NO: 365571 - DNA, 668 bp, Cannabis indica
tagtaataaccaaatcatgtctaatatttgcactcaaacccgctaaatatttctctttcttactgaagtcggttggcataattcccgctgcaagcttggccagacggtcaaactttgccgtgtactcagtaaccgacattccctcagtctgaatcaattcagtgaactcctttcgctttgcactgcggacttcttcgttgtaatatttggaggtaaacaactccttgaattcttcccaggtcatcactgtgacgtcccgagtgagggttatcaactcccaccacacgagagcgtcttcctcaaactggaaagtggcacatgtcacccggtcattaccaactactcccatgaaattaaggatacactcgatcaccatgagccactgctcagccttcatcacatcaggacctccgagaaacactggaggtgcctgcttccggaacctttcgtacaacggctccatacggttgccaacaacaggttgttctactggcaccgctggaacggccacggcctgaaccacttgaggaggcacggcaggaggaccctgctgcctcaatctatgaatctcttcatcttgttggcggatccgatcttgcatctctgcaaatctttgctcccaatccggaggagcttgtggtggatttacagggcgaccaccctgagct

SEQ ID NO: 365572 - DNA, 529 bp, Cannabis indica
ctaggatttcgcttcaaagagatgcactaacaaattctagatgctaaaagtatatatgcagcaatggtatgaaaaaatgcaaagcatggtgggaaaataaaagtatgcactattgaggagagactaatgagaaacatccatgatatccaacaatttcaacatgcaaatgcaacatataaaattaggcagcacctaaatggaatgagcggaaaatatcatcatcgagcagaacactaggccacataaaaactcttaaatcactcaatgtcaaactaacaaccacagaaatgacatgacaataaagttttaaaacacaaaagacaacacacaattagcaaaagaaagactaagacgataaataacagaaaaataaaaattagcttaggtattaggaaaatccctctactcggagtcctcgtggggctcctccgtattcaaagctgatggcccagcccacaggtcgagaacttgctgagggaatggcaggaacttgggctcaaattgtcgcgtcaccctcttgaatgttagg

SEQ ID NO: 365573 - DNA, 585 bp, Cannabis indica
tcaaatatattaaaaataatattttattttaaatttggggtttgaaaattggaaaaatccaaaattgggaaaaaatcccataaaattcagaaatttgggtgaagctggcagtaggctgcatgctgcagccccaggaggctgcaaatagggacttacgtgcgcgcaggaaggggacacgccgagaaacctcgacagatgcagggtcacgcacgggcgtgtgcagcctccatcgtgtctgaagcaggtggacgccgagccttcaaacagggattgtctgagcatccgcgcgcgtgtatcgagttgttcgagtgcctagtgcactcgatgcacccactcaacacacaattttcaaaaactcatatctttttcaatttttattggaattgagttccgttaaaaaagaaaattgcttaatttttcacaaggaatccaaataaaatattttctgaaacagagaaaatatttttcatggacaaatttcgtacaacacatacattcatcaaataagcacataaaccaacatgaaaccatccaaatcaacacaaatcatcgttttaattcaaattacatgaaagtaaatcatta

SEQ ID NO: 365574 - DNA, 556 bp, Cannabis indica
gactgcaggaaaaagtgactttcacatcttgtttaaaaacctgagcctttcactctaacctagccaccatcttcctctctttcttcttcattgtaaatttcgaacctcttaggatcctggtaaaataatatcaaacaacaattaagccccttactaagaccctaagacctaaaaaagattttgatatgtaatctaataacaacaattaagccctgcaatgctcccataacttaggatatcaaaaaattcctttagaaataaacaaaataatgaaataagcaacaaataatatttttaatgtacccacaataactaacttttgaggagtttgctctacgcaacgtggctcttctgacaatataacagcacctaatccaactaagctcgtggtgctcaacaccgcaaaaatttccgttgaaaacttttatttctcattaaaatatggaacaattaatcatattaccctaaataattaggggcaagctataaaaataagcgcaaaagccttgaaaggcataaaagccaacaaaattgtggcgcaacaaatcttcacaat

SEQ ID NO: 365575 - DNA, 971 bp, Cannabis indica
cacacttttttaccgagtgacagacaacgtatacagtggatcagtatgctgatttatacatcaaggaaatagttcagtttcatggtgcctcgaagtcgatagtttcagatcaagatccaaagtttacatccaaagttttgggaaagtttgtagcgagcaacggatactaagttaaagttcagtacagcttttcatcctcaaactgatgctcaatttaataggacaattcagatacttgagcatatactgagagcgtgtgtaatagattttgaaggttcttggaacaagtatcttcctctgatcaagttttcttacaacaatagttatcagagtactattggcatggctccatagagatgctttatgggaggaagtgccgttcacccattcagtgggatgaagccggtgaacgcatgtatcttggacctgaagctgtcaaaagaacgagtgaggctattgaaaagattcgagcttgtaggcttgcttcacaaagtagacagaaaaactacggagaaccaaagcgtagagatattgaattccagattggggattttattttccttcgggtatccccaatgaagggaattcaaaggttcgggaagaggggaaagttgagtcccaagtttattggcccatttgagattcttgagagagtaggtaaggtagcttattggctggctttacctcctgctctatctagggttcataatgtgttcaacgtctcgatgcttcgaaaatatgtatttgatacaactcatatattaagttatgaagatatcgagcttcaaacttacctgtcatatgaagaacaaccagcacagattctggacagggaggaaaaattgttgcataacaagactactctgctagttaaagtgtgtggcaaaacagcaaggttgaagaagcgacttgggagttagagtcgcagatgcgggagcagtatctcgagcttttcaggtaaatttcgagga

SEQ ID NO: 365576 - DNA, 1048 bp, Cannabis indica
tttgttgaccctgatgaactgagtaaggagtcgtatgggactcattcatgatctctcatttaatgtcatcatccataggcacacaaacacgattcataaatcgtaggattcctgtattatccactgtaaagtcaccagtcttcctagtcgaaaccctatctcgggattttgctaactcgggatcctacaattgtgcttctctgattcgctccaaaagagtagattgtagggtaatattagctaatttccccacaaccaactcaattttagctcggatcatttcatttgctaactactgggagatttgcttcactatatttatatgactctggcattttctactcaaggcatcgacaacaacgttggccttcccggtgtgataaaggatctcacaatcataatccttcaccaactctagccagcgtctttgtctcatgttcaggtccctctaggtaaagaagtatttcagactttaatgatcagtgtatatctcccttttcttaccatataagtaatgccgccaaatatttagtgcaaatactactactgcgagttctaagtcgtgagtatggtacctctgcccgtactccttttattgccgaaaagcataggctattacctttccaccttgcataagaacacaacccagaccctgtgtcgaggcatcacaataaataataaacttatccttatcaaaaggaacagttaacactggagaaaaaatcaagccctactttaactctagaaaatttttctcacaccgatcggtccaaacaaacttcaaattattttgggtcagctttgttaaggctacaacaatcttctagaaaccctcaacgaaccgacaataacacccagataagcctagaaaacttctaacttcagtagctaattttggtgttggccaatcccgaacagcttctatcttggctggatcaatcatgatcccatctttatctactatgtgtgttgtcgagtgaatttcgcaacaccaaaacgtattatttaattgatataaaagagaatttttagggaaatgacaagtgcg

SEQ ID NO: 365577 - DNA, 789 bp, Cannabis indica
gaagggcaaaatggtcagtttgcccatttatgttttgtcttttgtggtttttaatttaagcttataatcagatttttataactatccttagctgattttaattcaaataaaaccatttattttattcattttacaaaaataagaaaaaggcaaaattttcacaacatcctctccttcaactctctctctctctctctcaaaaattcctagagcagctagggttgatattttcttcagcatttcgagtagaattcagcaagatctaagtgatttcaaactcttggtaagctcccaacactttgtcttttaatttcttgaattttaagttagagattgttgcagttattgaggttgtcgttgtagttgtttgatgttgttttctgaggttaaaatatgttaagttatgttgatttgagcatattttggtaggtaatttgtggtttgagcaagctttgagttttagaactcaagcttggctctttaatggtatttttcaattatgagtatgggtagttgttttatcaattggaaaatgtttattggggtgtattatgcaggtctggaaagtttggttgggtttggaaacgatttggctagggtttggagctttttgatttttcagggtaaaaccgactaaacggtataacaatgcttgtaaaaccggttacccggattttgtagcagggaaactcgacaattcagcttgtcgtttcgcgttagttttaggtttctagtattggttgattccctgctagtttagggtattgccatattaagttgcagtagata

SEQ ID NO: 365578 - DNA, 570 bp, Cannabis indica
gtttttagttcgtattgtgctaatggtttttatttcagattctttatttaagggtcagtagatttgtgaattttatgtttgcttggggtaatatttgattattcgcttttattcacttccattcttttttattttttacatatgatttatctccctcagtttcgttttttgttattcttttctgtttttattgtatttttgtctctctaattttctctattttttttctctctgattttagttttttattctctttgttatatttactccataatgtatggttaaatcaactttagttcttgagtaagcaaataaaaaaattaaatatcataataaacgaagttagaagtttggttattaggtatttatataaaatttatattttcaaaactaatttttaaagttaatatcgtttttaaagtttggttattaggcattgtttatttttcattatgttgatgatgaaactagttttttttgcttcctttaatgaaataaatagtttcttttaatgttaatgaaactagtttttaaagttaatattgtttttagattataattttttttttc

SEQ ID NO: 365579 - DNA, 1011 bp, Cannabis indica
tttaatctagataacgaataataaattaaaatttaattttattcttaatttaattattaattaaagaaaattaaaaaaaaaaaaaaattacactacattaaaaatatgcttatataaaaatattgtagtcactcgtagttttttttttatcagttttttttaccaaattttttttttgattttttttcagctgatggaacaatctcaggccttataatgtaaaaatgagagattttttctaattaaatagaaaaattaatcataaatttcaaaactttctaatattattcattcataagtaatactcattaaaaatacactcatatataaatactatttttagaattaaaaaaatcttttctaagagttttacataaaaataaaaatattattttttcgaagaagttaggattagagacaaaaatacactcattttaatatcttgtttaattaatttattattatataagaacttaatatcatatgttggttagttatgtttgtgacttatttatcttttataatttatagaatatgaagtaaaaataatatttttgataaaatgcttattttgaatcaataactctttggagacataaatgagagtgacatgatttgaggtctattcttatccactaaatttctattaatcttaattaagatttctagcttcttctcaaacaatttttaagaaactatttttaaaattaaaataattttcataaatcattctaatttcattatatcccactaaaacgtacgtagttcacttcatgatgaaataatttgaatatagctcgatcgattattgggaaaaactaacagtatttgaacatatattagccattcaaataaagaatatatatatatatatatttaacatcatgaatcatgatcatgaagatcttgaaaatggccattatatttaaatatatatatatttatgtattttttttttaaaaaaaatggatatatcactactaaaaaaccccaaattcccgtcggttttac

SEQ ID NO: 365580 - DNA, 548 bp, Cannabis indica
atcgtgagttgaaggtgtgtgtaagaggtattatttttattttttttttatttgggctgtatgtttatttatttggccggatagaagtttttttgtaatattgacttcgatttcgctcctccgtggctaaatgtggccgttgtctagtgaagaagaagtcgaaggtgtatttgcctgaaataaattttaacttcaacggccagaagggaaagaagaagtcaacttttaaagcaactgtgatgaaactgtaatgcaacagttatatatgttgcgagccagctaacataaaaccacaaaacaactaataattctacatatttaatacaaataaatattacaacaatcatgttttatctgttcaggttgtgtatttgacaatttcgaaccttgtttttatgatactatgatattgtagtagcaaaactattattcaactaacgtgcaacttaattgtaactaaaaatgttaaatgtcaatgtgtatatgtaagaaactatttgtcagtattttttttgttcctgatcaataattacttataccttaatagt

SEQ ID NO: 365581 - DNA, 748 bp, Cannabis indica
agtaggtgtgtgctgttcaattgtcgttgcaacagggaatgaaaattccattatgtggcactggggacttgggcacatgagtgagaaagggatgaaacttgtgcattcaaagggaaaactcccagatcttcgatcaattgacatagacatgtgcgaagaatgcatacttggaaagaaaaagagggtaagtgaagtgggggttgttagcaggtttatgtcaaatctaggaaaatctcactgggaagcagtgaagtggattttgagatttctaagaggcaccacagataagtgtttgtacttatgaaaaggtgaattaaaagtacaaggctttgtaggtgtagacttcggaggcaaagtcgatcacgggaaaagcaccataggttatatattcaatcttggaaatacagctgttagttggatgtctcaattgcaaaaattgtagctttatccactacacaggcttagtatgtagcagtgactgaagccagcaaagatatgatatggcttcaaggtttgttaactgagctaggattcaaggacgagaataatgtttcgcatagtgatagttaaagtgcaatccacttgcaaagaatttaacattttattctagaaccaagcatattggacttcgttatcatttcattagatctctaatggaagatgaagtgttaatactggagaagatcgaaggatgtaagaatccagcagatatgttgacaaagacagtgacgattgagaaactgaagtt

SEQ ID NO: 365582 - DNA, 830 bp, Cannabis indica
tttcatacataaataataaattttggatttctcgtataaaagtaaatgccaattaaacatcccaaaattgtatttcagccccgaaacccgattttgcccgaaatacctggttgtgactataccgcgccaacttgtcagaacacacctgaaaaaggacaaaacatgcacactatataataatatagtccataagcacataattaaattaaattcatagtattacccttctcaggtcaaaattactaaaatacccttggctcaccaacacggtcttaagatgtcataaatcataataattcacatataataaattatataattatataattccataattatacacagttaactagttagggttggctaatccattctcttaatcttagggcattacaattaccccctccttatagaaatgttgtcccgaaatttacctgaaccactccgaatatttctgctgcatattcgtctcgatttcctaggttacttttttccactttactttttttccataatacctttactagtgcaattgtcttgtttctcaatactttctcccttctatcaagtacttgcaccgattgttcctcgtatgataaatctggctgaagttctaatgcttcataactcagtatatgggacgaatatgagacatatatctaaagcatcgaaacaaggaaaacatcatgtacagttgccagcgctgggggcatagcgaacctgtacgctacttgccctatcctctcaaggattttaaaaggtcaataaacctcgggctaagcttccttcttaccaacgcttaatgcctttcataggcaatactcagagaa

SEQ ID NO: 365583 - DNA, 592 bp, Cannabis indica
aattcatgtttcgggttttgaaaaaacccataactaaaagaaaactactcagaactagacattataacaaaaatcataatatttaataaaagtagaaggagaagaatagaactagaatgaagaacacttcaaagctgatctccgtctcttccttgctctctctctctctgagtttctctctctaacttgtagcaattgaatgattaaattcgtaggctaagaagtcctatttatagtgcttgaaaagatagatgaatccacttagaattaggatttaatttttttaaaaaaatgataaatcaacgctatagcgtaggaattgggcgctatagtgccaaacacaattaatgttctgtatctgattagtactttggccataacttcttcaatacaactcgaaattggacgactcaagatggtctgaaaagctaagaacgagatctaaagcttttatgttaagctccgccataacttctgccttgtaaaattgagcttgtggcttctactattttccaccaaattatgctaacatccctccaaatgactccaaatgcatgattagtcttcaaaaataacctaataaattataatt

SEQ ID NO: 365584 - DNA, 642 bp, Cannabis indica
aaaaaaaaaaaacttataaagaaaccaaatgatatcttaaatatcataaaaaacaaaaagaaattccatatatattacaaaaatttatgcatattttgctaattttttccttgtaatttattgtagctccgtatattcaaaagtaatataaaagtttctataaaaataaaaaataaaatattatgtatatgttaggctaattttagtctaagtttcgggtcgtatttttgggtagttttcactctttatttttaattttagggctattttacacttgattcttttgtttcaggtccccggatgtttaaaaaaagtatttacaagagttgaggccaagtggtgaaagaattaagaagaaaaacaaacaagacactttgctgcctagtcctgccgacggggaaaaaccttcgtcgcgacaggaattggcagagagttttgcaaaattgtggaaattctttcgctgggacgggcaattccttcaccgcggcgaagtctcaatgatgggatttttgggcaattttgtcatttcacgaattttaaagagaaggcttggtttaattagaaaggagttcgtgaaaagtgagattcattcagatttggagtcctagaaacaaaggaagagacttcaagagcggcttgtgg

SEQ ID NO: 365585 - DNA, 574 bp, Cannabis indica
tcgcatttaaataatttcaataccataatacgagctagcaatgttacaaacaatctatgttatattttgtttcctacttcactagttggagcagcaagcagctggctcaataaatttactcatccttccatcactttgtgggaacagttgtcttagtactttaaaaggaagttccaggctgcaaaggataggcaacccgaagtgtcctcactcaccaacataaagcaatagcctggcgagacgcttaaggcatactttagtcgttttcatattgttgcagaccattcctttaattttggagaattttataataaagttttctattttagaaataaatttcatttatgaattgagcttcatttactttatcttgtgtatgtcaataccaattatatttatatgttttaatgattgtatgtgtatctgtttttattattgatacaaattctatagtattttcaactcttcaaaaagttaatactacataaacacttagaatttcttttctatgtttatgaataattgttaattctaaaaacaattattaagaatttatttaatagaaagatctttt

SEQ ID NO: 365586 - DNA, 585 bp, Cannabis indica
taatttgcagggtagtcaaactaattatagagttatagagaatataacatagttttttttttttttttttgaacatttagtacaacttaaaagcaccaataccaaaaaagaaacgtcttaaatccctcctctatatatgtatataaagatttacaaagagttaaaccatctcttatctttttgattgatctttttttgggtaaaccgatacaattctttgcctaacagtttctttgactcttcctgttagaaaaacctattgcaaatttgcaattaattacaatattttttctttttgtaagtcaaaaataggatacttatcaaacaccacaatatgcaatattaaatatcaaccaaagcaccacaaacaatataaacatacaaattaagcataaaagtgaaacaccaagatttttacatggaaacccaatgcggaaaaaaattatgagaccgtagtccgctcaaatcatccactatcaccaaagttcaataataggattacaaagttcttccctagtaaaactagaggctcacaacaacatcaaaattaaacaatcttggataactaatacaatcatcatcatc

SEQ ID NO: 365587 - DNA, 574 bp, Cannabis indica
cctttgatccaaacagcttccttgaatgcctcggttgttgccatgaactctgcttctgtagtggagagagctacaacaggttgcaattgagacttccaacttatgcaacatgagtttaactaaaaacagtaactcgttagagattttcttgtatctctatttgatgcataatcaacatcgacaaaaccttcaagttccaccttgatccctaccttctcaaacttcagatcatagtgagtagttgttttcagatatctcagtaaccatttgacttctttccaatgttcttcactagggttagacatgtatctactaagtgtactagcaacatatgctatgtcaggtctagtactaatcatagcatacatcacacttccaattgcttcagcatatggtattttgtaaagcccgcttagttaatttgaaaattatcagttaattatgattatttatgaaattatttatagctatttcaataatttattatactgttatttatggaattcagaaatgcatggttatgttattcagtagtttttatattttgcatttccagtgcccggtattttggaac

SEQ ID NO: 365588 - DNA, 939 bp, Cannabis indica
  modified_base (84)..(84): a, c, t, g, unknown or other
gaaaaagctcaagtctttatcaatatcatggtcagatctacatgcgcatcccttcactcagggtttgcttagaggcttagcacncacagaatacgcaaggcagcttgagaaaatcatcccctgctgaagcttcgactatccccacaaaagtggggaagttggatctccattacttccccgattctaagatatccgagtggttttcacttggggaacagaaggacttgaggaaactttatatcaggggaggagaagtttctaatctgaatgacccaaaattttgctgcgacactgttagatatttgcgcctcaaatttttgtctaaactggagatggattggcgagaaatgaaacaagtgtttccgaatttgacttacgtggagaaaagcgagtgtcctcaactcagtttgttcccttgcgatgagaatggaatctggaaaaatgaatcagctcaagttacgtaattaatcattatcaatttcatttttttcaagttttggtctaagtctctgtttgtcgtaatgtattcgtgatttatgtgttcaaaatttttcttttatggtgtaactttaattatccatgtaatgttttagaatcagcgttgtaactttaatttatgcatctaaatccgaccctatacttgttatatcaaataataccattaaccccaatgcagtgttcaaatgatattattatataatgtaatatttaaattaaataattatgttaagaacaataattaagtgtgacaaattaataattttgtcaaattataacatgtattgtggagttacaaatgtgttgataatgattataaaaagaagagttgcaaattaagaatgatgatcataaattgtgtaactctcctcttaatattattactcttaaattattaaaaattgttactaattatttatgaatgtgaatgaatgatagtta

SEQ ID NO: 365589 - DNA, 594 bp, Cannabis indica
ggatatattgttatgaataacattgtaattaaattataaaatatttccaaatattcaatcaaacaaaataataatttcatatctttcattttcaattattacatttgaaatccaaactgttactttatgatttcccaaaatgtaataacaattaaacattcttattttaataagatataacataatatatatttctaacattattaattccttttttacaatccaaatttttaaaatactcagatttaaactttatatattcttgcataacacacattaatatatttataagatatttaacaacgaaaaaaaaacaaaaaattgtttcaaaagaccaaactcaagcaaacaaaataatacagataatacactgttatatgaaatcatcaaaaagtaaaataaataaaacaatactatcttaacgatacaatcagatttaaatctaaaaccatagaaaattaaaataaaataatatattacatgactaaaaagagaaaataaatataaagtgacaaaactatgaactagaaaaatcaaatcaaagatatgaaatacctttcctatcgtgcgtgagcatgttggtggcttgtattg

SEQ ID NO: 365590 - DNA, 551 bp, Cannabis indica
aagtttcatctaccacagcattcaagtcattagacttctcttcttcatccctgtgtttctttttcttatttttgatttcccaacagtttttgattagatgaccaacttttccacggtgatgacattttcttgtctctttagatcttgactttgatcttgagttacctctgaactttgagttacgccttcttggatttcttcctctggtaaaagactttcatcttgtcttgaatcttgtctagcagctttttgccaattcagttcagcatctctggatctaagagtgctcatgacatcttccaaagttagagtgtccctactgtacattatcacagtcctcatctccttgaattggtctagaaggccatttaataagatcacagcttgatcttcttccttaattgtctcacccatattagtaagagacaacacgattttatttaactcatcaagattttgttctaaagagttaacagggttcattttaaagccatagaacttccctttcaagaagattttgttgcagtcgacttggccatgtagagatgatt

SEQ ID NO: 365591 - DNA, 573 bp, Cannabis indica
gtatttggtctaagtttattgtctagatttctaagtgtattcctaattcatcttcgtcgaacagaccaatgtggctgcgcatggattagcagtgcatgccattcagatggaataaactaacttgtatggttagactaactttccttagttggctcgtgggtaattagtaagtttctttttgtttttgtaatacaaactattttggttttgtccaatgacatattcatttgttcaaaaaaaaaaaaaaaaaaagatgtattttttttttttttttttttgagaagaaggatgtattgaaatttgaatttgtttaaaaaaggattaaatttgaatggaaataccaaataaccataagaaataaataaatataactaatttaaataaataagagttatttgcggcaaaacctccttaagtggtcaggtttttacaactaacccctaattctaaattttttgcggtaaactccttaaactcaagttctgttagcacttagccctttccgtccatttttagctgttaaatgccatggtggaatgtccacgtgtacacagtgtacacgtggcacaattt

SEQ ID NO: 365592 - DNA, 514 bp, Cannabis indica
ttaatgggtattacccttgaatgattactaaacaaatttaactataaatattaattttaaaaatattaaatcatcaatttttgatctaataacggaataataaaagagaaatttgaatttctatgcttagttaactacttaattaaaaaaaaattcaaaatactatataaaaatatatgttcatataaaaatatttaatatttaagtgaaactcaatttttaattatcttttttttttttgctaaaaactttgttttaaaattttttttttcaaccaatggaacaatctcagcccatatgatgtaaaagtgagagatttttctaaatagatagaaatattaagcataaaaattcaattttttctaattttacccattcatgagtaatgatattttttatatggtttaatatgtatatgcgagtatatatgtataaatatgaagtttagttttcggtccgtttgttccgatttaagtttttatttttttatgtttattttcatatatatatatat

SEQ ID NO: 365593 - DNA, 439 bp, Cannabis indica
aaagcctgataggacgcatagctgcactcaatcgtttcctgtccaagtccaccgataggtgtttaccattcttcaacttattgcgaggaagcattaagattgaatggacagaagagtgtgaacaagcatttcaatcattgaagaaacaccaggctaaaccccctatcttgtcaaaactaatcatgggggaggtgttgtacctatacttggctgtaactgagcatgcattgagcgcggcattggtgcgtgaagaggagaagattcagaaaccagtgtattacatcaacaaatgatttgcgggagcgtagtcacgttatcccaccatggaaaagctggccttttgcctagtccatttgtcaaggaagctacgaccttacttccaagcacatcccatccatgtcctaactaatcagcccttacgacaagtattaatgaaacc

SEQ ID NO: 365594 - DNA, 661 bp, Cannabis indica
tttttgtaatttaatttataagtcatttgttaagacttttattgtggtatggttttttttttttttttttattttaagtttagtttttgtattttattttttgtaggtgtcttatgtctttattttagtttttttagtttggtgtattaggtagctagtttctatgtttaatttttgattttgttgtatatattacgtaactaatttcttagtttcacattatgacttagttgttttaggtaattagtttctatgtgttaatttttaatttaactgctttacgtaattgagttttaagtttcagttattacaagaaactggtttttatctgctagtttataagaaactagttttcgtgtgtcacgtaactaaatagtttttaaccagactcctactgttgagtgggagccatctgagatgtaatcaaacaaggaacataaggagaaagtcaagaaagatttatgaaagtgacctatatgttagataatagggatgtatattagaagtccttatatctacaccaactcataaagaatccgagatggtggttactctggggtggaggagttattctagaagagtgtaaaaactcatctataataattcaagctccatcagtgaagatatataactttgtaaattcgaaattaccagaaagtta

SEQ ID NO: 365595 - DNA, 982 bp, Cannabis indica
taaaataatttccaacaaatagcactaataagtgccctctttatctgtagtttatctggtagtgttttttcggattcggttcatagtttgattcatattttgatcctttatttttgtgtgttgaaagaagagtaagagaacccctcaagaatcacaaaaattcaagaaagatgtggaggaagaaagaagcacaatgattgcaccattaaaaatcaaaataggaatgaagctcatggtaaattccagactcatgctactgttattagtgtacattaaattcaagtatgctaactttcaagacttgttattctaacatatatattattcttctaatagcactaatatagtgccttgttaaactccatatttagtgctcaattaaattggatgtggccactataccaataaagacatatgaaaagtctcttaaatatcattatctatataattttcttagaaattttaacaattaatatatgtatagagacaacagttgaacattgaaccatgacatacatattcatttatattttgagatgagttattgttgtgttgcatatagtatcaagagtacagtagtaaacaacgaaacaatcatatcctagatttattttattttacatacaaaggttttgatcatgatatttaaatatgatataggttttggtaatatgatacaatattgtctctgtttttattatgtatgctagtttatatatactagacttgagttcatgaagaggaaaaacacatccttcgaaatctagttccatttaataacttacttgattatttgtggtactttctttttgttgcttgggggcatctttttgatctactatatttttagaaattagtttgtaacatttcttattttaatttaggattattgtgtacttacttttttttttgacagtttattacatattatttaagatttgtaaataatatatttatttaggtatagaactttattaatggt

SEQ ID NO: 365596 - DNA, 469 bp, Cannabis indica
ggaggacagtataaatgttaattctgccgtgtggcagtaaaattgaaaagtattaccccaaatccagtatttttgtaaaatatgcttcaatcagaaagaaaaaagctttaaaatattaaatatgagatctagaaagacatttataataaagaaatttacacctattaacgaaattgttaaaagaatatcacaactaacgttgatgtttttaattgtgtaatatacctttggttttgcaatttttttggcaggtatatgtgtaggtgtgctgctcctttttttttttattattatttttattttatgtttgtatgtatacgccagttttttcttttgcctaaacattcatctatgtcctctatattatttttctttatcaaaggcatatatgttgaagtcacaacaaaggcatacatgttgaagtcacaattttttttttctttttataatgacaatctaattcttttaa

SEQ ID NO: 365597 - DNA, 806 bp, Cannabis indica
gcgattttttcataatatgaaatcactaccacaaaaatgggttttttcgacctttttaaatagttgtttaaagtattcccgttggtttctataaccgccgcctatacgaccgtcgtaaaacaggcataataggcgacagttcaaaaccgtcgctaatgtgagtttcccgacggtttaaaattgtcacctataactgggtataggcgacggtttataaccgtgccctatactatatcctgttataggcgacggttttaaaccgttaggaatgtaaaaaaaaaaaatacagatttttctaccattaatggcagaaaaatctatatttttccccattttttcctccattagctttataattttacctattaaaataaaacaactaattaattttgttacaataacaactaactttaaaacacattaaatttatacaataacaaaataaatatatataataaataaaaaagtatataaataaataaatgtatttataccgagcttggagagagagaaagagagagagggagacggacgggaggtggtggtggtccgacgtatgagacgaagatgagagggacaccgacgggaggtggtggtggtctgacgtatgcgacgaagagtagagggagaccgacaggaggaggggtgggtggagatcgatggacgagagagacaagaagaaatggagatcgagagagggaggaagacgacgaaagaggagggcgatggtgcggaggcgtgggtggggtttggagagtaaagattttgttttagggtgttggaaatagagaagaaataggtgagaa

SEQ ID NO: 365598 - DNA, 592 bp, Cannabis indica
atggttaaatacttgactgttgggtctatatgtagatagggggccatctagtagtgggtacgattttactgaacccagccctccgccatttagtctaatagttcgagtttatttgccaaagtcgaactccggcataaccattattatgtgacttagcttagaaactagtgattagttaatagtgataagattaagcttatatgtattgctatttgtctaaatatgtgcatctaagttttagttatatgtttttcttttattttatgtgactacgtgacaagcatttccttactgagtttagtagctcacccttatcaaacttaccatgtgcagattaaggttctaaaacttagagagccggtggcaagtgagaccttggaggcttgtgtgtgtactcgctgaggaccatataactgagggtggtctagggcacgctccatttattttatttagtgttattaaattaatgtcgcagttatttttatttattaattattatgtcttttaagtccaaactgagctcaaatatgaaatattttatgtttataaataaaagcgacattatagtttttccgcattttaacgcttgtaa

SEQ ID NO: 365599 - DNA, 636 bp, Cannabis indica
gaatgatcttgtcaaaaccactatgaacaagatgcaaatgccatagatatctaagaatgtggttgtggtcttttgatgacttaggtctagttacaacaaagagttcttagaatagtccaagtggatcctggtcatagaatactaaactcatattccatacattaacatacagtttgaatccattgacagaaaatggatattagtaacttgtgaaattcatactgtattgtccaatgtattctaggaaactaaaattaataaaatctcaatttggaatctaaaatgtaaagtcaaaggcttaaatttataccaaatatttcttgagtaatattctagcctggaccaccactactattctagctctaagtctaagttgcttaaagtaaacatatacaagtaggagatttctaagatcgaggatttatatcatatcgggatagaatgttaagaatatattcatctgtgccattcaatatcataagagaaataagagtgacatcataagcaaattatttataaactattaatccaatgatatactaattaagcaaattcaaaaagaaaaagctaagagaaaacattaaaggataatttcgattaaaataagaatccgacgatgtcccggtaggtgagagt

SEQ ID NO: 365600 - DNA, 350 bp, Cannabis indica
catacttgtgagtagatctagatcctggtaaaataatttccaacatgaagatcatacaggggtgccttacgcagcgtctgcttagtggttttcccgaagtacgaggttaatagaaaacttgcatagttttcacctttccaattcaacacccgatactacgtgcatggaagaaacaagggaaggtgagcaacctgacaaagctacaaatatattcaagtcaatgatacccaagggtaccttccaagtaaaataaaggatacaaggtcgaccaacgaccaatttctatcttaggcacaattactaagacatacagtaagtcctaagttgtataattgactataatggactca

SEQ ID NO: 365601 - DNA, 551 bp, Cannabis indica
ctggccgcagccctggcatcttttacgccgcggaatgaaccccatgttgacatcgagggaattgaccccgagatggatcaactgcgagacgagataggcaagatgcaaggccaatttcaaactgtgcaccaagagcaaaataaagctcgagaggccctgactgaaagtcttgctaatcaaaggagagaattccaatcttggctggaagatcatgctcgtgagatgaggaggcaccaagaccaccaagatcgtcgcacccaagaggccaccgacttaatacgaagctacttcaaccaaaacactcaacggatgagtactgatgccaacaatcaacagatacctcaaacctaccctcgagaggtccctaccccaaggaaccagagggagagggtggtctatggacctgaagaaaacccaaggaactaagaaaagactaggagtcacccctccaacagggttccccgcaataataatcgactacccttggctgatgagaaagtcctacccggtcatcatatgggacgcgatgactcccacaatgtccgccaaag

SEQ ID NO: 365602 - DNA, 522 bp, Cannabis indica
aatgttctgacaattaatatttccaaatttgattttctctcacaatggctgacggctgcacttgattattttttatttcccatattcgcttttaaggagtgaaactgaggcgtctgaggttcctttagaatgattacctcttttcgtgacttgcctataaatatccaccagcattggcacataaactcattttcaacatccttccttgctaagtgagttcagagcgaaaagagaggttcttggcttcaagtttgctgaagtgccttcatcaaaactgcttgttggattgacgttgctcaaacccaaatatccgaatcttcagtaagttttcgatttcctttatgcttatgtttgcatgtttacatttcgaatgtacctttgactttgctgtagaaaatatccaggaaacccaaggttcagaaacttctgcgagtcttctttgtcatggcttcatgcgattttacagccataatgcttattttttgaactacgtaatgtttgtcttacatcttgcttattcta

SEQ ID NO: 365603 - DNA, 523 bp, Cannabis indica
ggtgttaatcaacatacttgtgagtagatctaagatcctggtaaaataatttccaacagagtagcacatcatcgatctgaccatgtctaacaaggtccaaattcttctctctgcaacaccgttctgctgaagtgttccaggtgctgtgatttgggacaacatcccttctttcaacaaatagtctttgaattcaaaatctaaatactcgccaccatgatctaatcgaagtgtctttaatgattcacctaattgcttttcagccatagcatcaaattcttttaacattcccaaagtttcagacttattggccattaggtaagtatgattgtatctagaatattcatcaatgaaagtgatgaagtattcataacctcctcgagcttgaatgtgaataggttcgcacacattagtgtttacaagctcaagttgtactttggctttattgccttttgcaaaaaaaggtctttttgccatcttaccttcaagaaaagattcgcatcccaaaagagttctaacttttagt

SEQ ID NO: 365604 - DNA, 772 bp, Cannabis indica
aatgtgtttttactcacaattacagtttgtagttgtgattaaaactaaattagtgacaagttgtagctacatactatgttttagtcacaaataactttttgttgtaattaaaaatcacatttagtcacaaaaaatttatgttgtgactaaaaaattgtcactaaaagtagctgtattttgtagcgacattacaagcctagaaagaccttttgattcttggttgtgcattgatttatactagtggataatagtaagtatagcaggcatatggaatatttttgggatagtggattgatggttgtaattggcatgcataaattgtttcaactgttagttaagtgctaattatggtttcatgaattgaataaaataattgagtgaataagggtgtgattgaagtaaaattctggattattataggtgaaatttttgttcatattcatgttatatttatctaacttgaaaattgctcatgtttcaattgattgacttgttttatttaggttgtgttgtttttagttgttagtcttactcgacggcgagtaaggatttttaccatattatttatgtcatttttagagttaattttcttctttattgtcactttttagaatagaattatgcttgttttgtaacttttaggtttcgatacttaaaatgtataaattggtcaaatttcaaaaaagatgatttataaaatagagaaaattgtgcaagaaaataaagctgaaacttcaagcctaaagtcaactatgttatgatcagattttgg

SEQ ID NO: 365605 - DNA, 792 bp, Cannabis indica
atcaatatcaatcaatcaatatatatatataggagagtataaacatgataaattgacactatatttgagttctctttccttttcttcatttgcataatttttaattttctctcaaattagtaataatagaatttttgaaatattagtaatcatacatactgatatatgtagtccaaataaggactcacatgataaaaaatatttcatctccttcatagatgattacgcacactacatgtttctttatttagttcataacaaaagtgaagcattatgtagctgaagtggagaaacaatacaacaagcaaatcaagatagtgagatcagatagaggtggagagaattatagttgatacacaaaagatggacaagcactcggtccatttgcgaagtttcttaaagaaaatgggattgttgcccattaaaccatgcctagtacaaccaagaaaaatggtgttgcagaaagaaaaaataaaatattaatggacatgtacggagtatgcttaacaacaactctaatctttctaaatcattatggactaaagctctaaggacatcaatgtacatattaaattgagttacaacaaaggcactctcaaaaactctttttgaattatggaaaggttggaaaacaagtttaaaccatgtacacatttggggatgtccatatgaagttagacaatataatccacaagagaagaaattagactaaaggaccataagcagattctttatagggtatgctaaaaagtctaaaggttacaaggtttattgtccatctcatagcacaag

SEQ ID NO: 365606 - DNA, 690 bp, Cannabis indica
caagaattttttggtgaatatcagaccaatgcaatgtggtgaggtcacatttggcaatggtttagcacgttatgtcattgatttgggaactctcaattttgaaggattaccaaggttaaaatttatgcttgttgagggactaaaagctaatttacttagcattagttggatttgtgatcaatggtatactgtcaatttcgacaatcatcattattttattagtaacagtgataaagaatacattttacaaggttttagacgtgtcgataattattataatctcacttgtcaaactgcatgtgataataccagtgttatacatatttccaaaaatcatattcaacattctcatacaaaacacattgatataagtcattgtattagggaacttgttgacaacaaaacattactgttcgaatatgtggatattgtaaagtaattggctaacattttcactaaagccctagattcaagtcggtttggctccctcagaaattccttagggcactactacaatttggacttttagtgacattatttagtgactcgcacttttgtgcgtgtcactaaagaattaagattaatttttagtgtcttataatgtgtgtcaataaaagtatgaggtgtcactaaagaataataccaataattttttaattttttttttaaaaatattaatctatagtgaca

SEQ ID NO: 365607 - DNA, 600 bp, Cannabis indica
gcgaaggaaaagaagcaagtaatatatggtgtctgaaatttttcctctctgtggaagctctgagaaaatttggtgaaatggtgaaagtaaccaaatgaaaaggaaaggctggcttttataggccaaaacgagtgtgagacagctgtgatcgaccatcatcgtacggtcagaatagaaatcgattcgcattctatagatccgacggttgggacgagcgttcatcaaggcagttggaaaagtttgagtactcgacttgcacccatttaatgtgccgtatcattaaatggataggaaaagaatcgttgcctgcaaaaagcgaataactgcagtaatgatggtcataaatgcatccccacgcgcccgaggcacgtgccaggaagttaataagacaactggaggcacctaagcaagcctcgtttactttctaccaaacaaggcttgggagtaaatgttgccccccattttgtccaaaatacgtggaccaacctgattgtgacacgtggattgcagaagcaagactttgggataattcgactaagtctccttgatcaaaaggatcagcatttaacatgcctcccggagaaggcatgagggtttcac

SEQ ID NO: 365608 - DNA, 825 bp, Cannabis indica
atattttaatagttgccgaaaacctcggtcaacaatacttattgagttgatattaatgaataaaatattttaaaaattaaaataaaaaataaaaacataaatttaaaattttcaaatagcaaaattattaaaaatatttaaaattaggtacaacattatttatactataagtaataaaaaaataaatagattagtaatttaaatttaaatttatattagatgtatataagtgtttaaaatatttttagaagatatttattatgaatttcatattatatatcataaatatttttaattaatatctattaaatctagttaactcaaataatttttattttctatatattaattataaaaaatggaaaataattcatttaattgattaatgacaaaattaatttatgttacgtgattaaaattattacaatataaggcaaaaactatattttagctatgtagattgaaaaataataaaaaaaaatgtttaaagtcattattactgtatctcacttgtagttgtcactatgttcaaagtcgtttttataactatatctcacttgtagtcgtcactacattcaaatatatatcatcagtatcgcatctcatttatagttgccactatcaaacctgttgtaattaccgtatttcacttgtagttgccaatatgttcaaagtcgttatcatcacaacatttcactagtagtcgccactacattcaaagtcacaattcttagtaccacttctcacttatagtcactactatatttaatatcgatgtcattagcaaaaaaacattattaaaatcaatagaagaaagaaattaat

SEQ ID NO: 365609 - DNA, 1738 bp, Cannabis indica
tccatcgtgtacttcagacaaagtcgtgcagcttcttcttgtgtaacacatctaagtaatggcatggaaaatccccttctatacatgactccttctacgatgacgtaccatgtagcctttctcctcatctttcgaggtttctttctgttacttaggagttccccagtgttgaggtaagctgctattggtgtcatccagtttggagatgtgtcaaccatctcaatttcttccttacaggtgatgttgggttctttaagaaattgaattgggattagattagccttatcagttatattggtgcttgcaagtcgggttagggcatcaaaagttgtactttcttctcttagaatttgcttgaggacatagctcttgaattgtgcaagtaggtcatgtattttacttagatgtgctataatttttccccctgagcctcatactccccaaacacatgatttactaccaactgtgagtcactgcaaatctcaatgtgttctacatgtggttcttgagcaagttttagaccggcaatgagggcttcatattttgcttcattgtttgatgctctgaaccaaagtttgactgccccgtgtaagtgtttccccccatgtgtgacaagggcaatccctgcaccagatagttgatctgtagcaaacccatctacatgtaatttccaggtaggtttgtcttcattgttgctcggctgaggttcttgtattgattcctggttgttttttgaaatgctttcttcattgcccatacactcaactacaaaatccgctaagtcctgtcctttgattgttgttcggggttggaagattattttgtattgacccaattccattgcccatttgagtaaccgtccaaaggcatcaagtttttgtaatactaggcgatatggttggtcagtgtatacccgaacaggatgagcttgaaagtaaggccttagcttccttgttgctaagattaggcagtaagtgagcctttctattagcagatattttctttcatcttcaacgagtcttttgctgatgtagtagagtggatgtcggatattgttctcttccctgatcagcacgacacttacagcatgttctataacagctaggtatatccctagttcttctccgtcaagtggttttgagagtacaagaggtttcacaagttgtcttttagctctagaaaggcattcttgcattcctccgtccattcaaatttcttatttcctcgcaggatgttgaagaaaagcacacttgtctgttgactttgaaacaaatctactaagtgcagctatctgacagttaagctttggacttctttggattttctaggcgatttccaaggagggcttgaattttttctagattggcttcagttcctcgggcattgacaataaaactaaggaacttacccgagctaactctgaaggagcactttaagggattgagtttcatgttgtatcttctgaggactttgaagcatttgtccaggtcatctatattgttggaatatcttttaccaggacctagatttactaacaagtatgtttttaacacccaaaatatgaatatctaaaactatgaaaattaacacataaagtatgagaaaccttacattggttgcagcagaattaaatgactcatttcgcttagatctctaacccttgtatcctttctattttagagtattaccaagatctgagcccgaaactccttcagttgtttggattcttcacagtctt

SEQ ID NO: 365610 - DNA, 633 bp, Cannabis indica
cataatatttttaaatgcatgaattggttattttgtgaaatattttattctttataaattataagttagaaaaattatattttatattatttttcttatcaaaagtttataaatggtattttaaatatttaaataatttatatatttttgtagaaatttaaaaaaggcttaatttaagatattttgacatataatttagaaaattatcatttaattattattttattcttaaaataataattatctaaccatatctattttaaaatttatttacttttgtttattttgattttattaaattataagattagaaaatgatatgaaaaatatccatttggttattttcaaatcatttatcttattagatatttaatttaatttgataaaataattcaaataaaacctagatattttaaaattagtttcaattttaaattttaaaaagatatttaaggtaaaacaaccctaaattttcaaaatttagttggttcgttaaatgataattgaattatataattaataactatttctattttctacatattgttactatgggtattgtttgtttattttaaattatttattcaattcttttttcaacaaacctattatttatttgatctaaattactat

SEQ ID NO: 365611 - DNA, 724 bp, Cannabis indica
gataggccacatgggtaaaagaactaggaccgggacctagtacccgatcgaaacctggacatgaacctaggacccagctcgtgacccggcaacagaaatggaaccagactgggacccgagattgggatctggatctggaccttgggcttggacaaaactcgtattcggtgttttgatttgggacccagccctggacccaaaccctgacaatgacccaacaaacacccagacctaaacccactccaaatcccgaaagtgggcccgaacccgtaccctatgaaccaaaattggaaccaaagccggaagttgaccggtattggaactaggacttggacttggaatcgtaactaaaattgggcccagacctataaccgaattgggaagcggacccggatccccacccaaacctggactcgagacccgaatccgaacctaaactcagacccaaacatggacctgactagggacacaaaacaagggtctggacctagaactgcaccccaatctcgatcccgaacccaaactcagaaatgggacctgggacctgaaccaaaaccagaccgagaaccgtgacagtgatccagatcttgactcgggattcaggtaatagggcctggaacagaccagtagtcggtggctagatctgggactcatacaaggaccagaaccaagacgaagaaccaaacctgaaccgagacctagacctgggacccaaaattagaac

SEQ ID NO: 365612 - DNA, 534 bp, Cannabis indica
aaattcaaatttcttttttattattcgttattagatcaaaatttgatgatttaatatttttaaaattatatttatagttaaatttatttagtaattatttaggataatactaattgaaaagtattctatagagaaagtaataagactaaacaataaaaatgtaaaaaaaaaaaaaagtggagtgaacaaaaggaagtgagaaaaaactataagacaaaaagtaatgtaaaaacaaaattatgaaagaaagtgataaaataaattaattttatttttcttttcaaaaaacacgtaaatgtttttttacataaaacatttttagatgaaaatcacatttgagaacaatatgctctaaagaaagaggttggggaaaataaatttatttttgggttactttaaaatatggaaaaacttattaaggttataataaatatgtcataaaaagtaatatcactaaatataatattatcttgccaatcaaattaaaatatggttttttttttttttaacgaaaaaaccatataaaatattaaa

SEQ ID NO: 365613 - DNA, 795 bp, Cannabis indica
tcaaactgagtcgtatactctgtaacacttcatgttttccttctgggtcaagtgagtgaactctttctcttggcacttctgactgcctcattataatacttcgcattgaaaagttcatggtagtaacgtcatgtatcatggacaccatgtcccaccaaactaaggcatcttcttggaattgaaaagtggcacagaccactctatcattccttgtgacgcccatgaaattcaatatcctggtgatcacagttagcctttgctcggctttcataacatcccgacgtcccaaaaaaactggaggtgctagcttacggaacctttcatacagaggttccatccgattcattacaaccactggttcggcctggacagcaggggcaggtgccactggaatttcaggagcaggcactgcaggagcaccctgctgtcttaactgtctaatcacttcttcttattcgtttattttagtttgcatttctgcaaaccggttttcccaattttgggcttcctgagtagcttgggcagcctgtggcgggttagcatcaccctgaccacgtgccctgcccttgggtcctctacctcgaccccaagcatttgggggaaactaagctccctgaccttcatttgacctgaccgagttgccctgactcctggtatttcgcctggcgtccatctagtctgaacagcctgtctaaccaagagctagcatggtcagataatgatcaacgagaacttactaatgccgcttatttggaaattaaaaacatgcacttattctactattaggctactaac

SEQ ID NO: 365614 - DNA, 519 bp, Cannabis indica
gtaatagaagttgataccaataaaagttctttgacattgtatcacaataccttatttgagtgagagaattttaaaattctaaacccatcttcatttggttgacacttgtgataggaactttagagcaaacctgagaaagtaaatctaactattcatatagatagaaataacttatcagaattttgagaataagatagtagcattcttgcatagtctattcgaatgacttaggcaaaaattcctaatcctcatgaaaagttttatggtatctctaatgattacttaatattaagcaagtattttacattaatgtgctgatgacttagtctagaaggaacttaaagtttaagattaaaataatatgtcacaacaagatatccctgaaaacaatagtaagaggttaaatgtacttctatgtatgaatttaaccaggctcctactgttgagtgggagccatctaagatgtaatcaaacaaggaacataaggagaaagtcaagaaagatttatgaaagtgacct

SEQ ID NO: 365615 - DNA, 589 bp, Cannabis indica
cctcaccactgcctacgacccgatgatctacaccgcgtatgacagaataaaaaaaaaaaaacccttcaggtccaatgggtccgattggcccaatatggtagccatcgaaccctatcggacctcaacgaatcggaccatcagacccaacccaacgtgaccatcggacccaacccatcgcaccatcggacccaacccgtcggacccatcggaccctttcttccccaatggtttctcagattcaaatccatgaaattttacaagagaaatttaataaattaccttagacatggtgcggttctcctgggtgggtctcctcctccgtgcggcggtgatgacggtcggatagtgggtgggtctcggtcggagtcgactgggcgtggttgtgtgaggtggctggagttcgggcgaagtcggagtcgactgggcttgtgtgaggcggctgggatcgggcgaaggaaagagggaccgagagagagtttgagtggaagagagagaaaaggattgagattttgacaaggctattttggaggtttttgaaaattggtcctattttaaaaattacctacactaagtgttctccaaaccaatt

SEQ ID NO: 365616 - DNA, 627 bp, Cannabis indica
atactagttgagaccatactgcttgtaccactcatataattgactttaattaatcaattataattctaaaattagactatgtctagtttgtgaattttcactaagggctaaattgtgaagaaaagagattctaggttttatttattaattagaagactttattatgtctaattaataaatatattaaatggtaattttatttaataattaattttaattattaaataattagttttggcatttaaattgttagaataggaaaattggcgtttttgagaaagtataaggaaaaattggaaaaatacccaagtggggcccactaaccatggccggccacttaaagggattttcaacctaatattttctattattttaacgcctaataattcctaacctaaacctagtaattacctataaatagataatgatggctcacacttaagagagagtgatgtgaatgaaattttcttgtcttcagataaaattgagcctcctattctatagtcatagccgaaccacaattaccctcttttcttcttcaaattttcgaacccttgcgtgatagagtgagtgcccacacacattaagtggtatctcaatcatagtgtggaagattgtgaagaatcc

SEQ ID NO: 365617 - DNA, 664 bp, Cannabis indica
cctacacagtctcagaatcatcccacttgaccttccccaggcggtgtgggattgcacaacttacccgatatttccccttacggataacgggactactgactgtcacaaaagctattgctttctacaaccttacagttcttaatatttgggtgtagtcaaacacactacacttgatataaatatcaagataatagattgattgaaatgcacttctagttttatgttagtgcaagtgagagtttgttgggatttaatggcctaaataatatctatttcaatataatcttacttgttgtcaatagaagattaaaggtcatttaaatttacatattatttcatgtttatggtttaatatacaatttctattaagtctacaacatatagttattcacaattatagtattgtcattacagtggaaagtaattatgattatatgcttcaaagacttttatcccatgatttatcagtgtatcgaatttacactaacgtgataatcagtaataaaatttacttacacttagtataagtggtatgtcctttctagggcattagtaaagtatactagtattagatgtatggagtatccatcaaactggatcgatattgacaatgcaaaagatatcataaactaccgttatatcttctaagtcaatatcacttagt

SEQ ID NO: 365618 - DNA, 541 bp, Cannabis indica
ttagcaactttatttaatgatttgagagtttaagtatgttttggggtgaattggatgtgtttagttgctgaattttcgtgagtttgcaggctggtttctgggtttggaacccagatgccgctgcatggtctttggcatgccacaaaccgcctcttttctggacctgggaatcggtcccaggtgccgcggcatggcttttgcatgccgcggcccaccctcaagtttttgggcagatttgagtgtaactttgaaaatgcataattttatgatccgaactccgatttgggagttctatatactgttggaaagctcatttcgagctctatgtgattatctaaattttaaatgccatgaatatatattatgaatgtgaaatgaggggttaaccctatttgtgaaaatcccggtatttgtgactaggattaccggcacctggggatttggaatctctactattgtgggacctcaggtaagatagtagttagcgcatagagttatgcacggtggcacttatattggaaatggtatatgtgagtaatta

SEQ ID NO: 365619 - DNA, 934 bp, Cannabis indica
catgactattccaccaagcatcaacgcccagacaaccatcggagacgcaaccaaattgcaaaaactcagcactgcgcttggactcatgcagggtcacaacaataccctgcatcacgatcaggaggaattacgtgccgcagtaaacctcgcgttcgacgaacagaggcgtatgttcgccgagtggagggacaaagagatggaggcattaagggctcaccatgcagaaatcgaagatcgtagtcggcaagccactgtgctgatacgaagagcctatcagactgtatgccagcaaacgtcgagcgtcattcccctaggagaaaccgaggatgacccaacggtcagtcgtctaatccctggtcacgagttccactcgtgggccaagaggtaagtggacagaccttgtccgggaattcatcaggaggagtcatgctcgacagatccacgcaaaataatggagccattccacctgccaaccaagcgaaccaatcgctaaggcagccaggttcttctgtgtttgataagttgggaacaacccatgacctaagggacgacctaaatagaagaagggcaacagacgagcaaaatactacaacaaacgtgcagtccggagcccatacttaaatccccgctcaaaaagacgctgacgtaatccaacccgaccagaatgccaatcaagtcagcccaggcgtacaggcaaacctcgacgaactgaagaatatgtttcagggcatggtcgggcagcgtaacaacgatcttgagttagaccatgcacgcggaactccattctcaccagagatcaatctcctgccactacctcagaagttcaagatgccaacgcggagcatgtacagtgggagagaagatcgtctctcccatctcaagtactttgagatgcaaatggatttacaaggggtacgaggagacgtatgttgca

SEQ ID NO: 365620 - DNA, 1314 bp, Cannabis indica
ctaatgctataacacattgtcaatagttgccaagaatacctcctctattgtaaagctgaggagatgatgaaagccttctctattgcaaagtcgaggagatgatgaaagcctcctacgctgcaaagcctatgggatgatgaaggcctcctccactgcaaagtcgtggagatgatgaagacctcctctactacaaagccaaggggatgatgaaggcctcctccattgtaaagctgaggagatgatgaaggcctcctatgctttactatcaaattaaggagatgaataagaccaccttcactgaaacccagctgagggaatgctaaagaacttcgaggctgaaacctaagagaagacaaagactacacctatattcacataaacacatagtgtgagaagggagtcaatgataagacaacaaccaatgattagagtaaatgttgacattcaaatgttagcatgatgtcacagtatctcaaacaaaggaaatcactcgaggagtcatctaaattttaagttgaaaagaaaaaggtaaatgataagaaaagaagattatcttttctcttctccttttatacttagaattttgaattctacttttcaatagtgaatggggattcaaactcctactatcagtgagaatgcttgaacaaaaaaaattgtccaagattgtcaaaattgatgcccacttggtagttttgaaagaaactggctcagttcacttcattaagtcaacctcacacaagggtaaagttgacttggggggaaatatttacactaaaagtagccttgatggcagggacatcaatatttgagatgtggcaagaaagatgacatctcggagttgagtagtccccaaccataggaagtcggcatgggagtggtccctagccctatgcccaagttgactttaagaactctaggatgaaagtttggactttaataactcgtttccaactcactatctttcattattctataccattaatacatggagaaatcaaattcagaccccaagagctacaattacatgaacatgaaccccgatagttaacctgcgcacctagggtttcatctagcgcccaagttgacatcctcaactagagtttcagttttcaggaccgtcttagtgaaaatgggtcaaaattttcatttgaacatgaactagacataccaaggcaattgtaactctatggtatagagttattttttatgctttaaactgaaattattgtgagaagagtagtgaaagtatgtttgtttgcttaattttaattagttttatttttattttttatttagtaagctaacttttaa

SEQ ID NO: 365621 - DNA, 602 bp, Cannabis indica
agagagagagagagcaataaagtattaaactaaagattagatgagatgaaaatattttaatttgatgtagatgtttttgtttctactttttcttcttcaaaatagtgattagttttagggttttttttgttttttacttttaactaataaaataataaataaaaaaatattagaatatatattataaatgggttacatacagttctgggttcaacccgacctatgtattcataaaagtactaacatgtgaactaggggtgagcaaaaaaatctaagaaacttaccaaaccaagtacactgaccgtccaaacaccaaaaaaaccgccttcggttaaaattgcctttgcacggccggttttagtgttaatggcaaaccgaccaattaaaccgagaaccgaccgaatatatatattatacactatatatataatataattatttttgtacatatttaatatacaattttattaaactaattttacttctaatttttttatttgaaatctcaattattcattgctttattttattataatttaatgtattcacgtattatatacacagattcataaaataatacgagtttttaatataactcatta

SEQ ID NO: 365622 - DNA, 637 bp, Cannabis indica
ttatgtataataaatatatatatcttactgctaatagtataaaataactcagttaaaaaaaactgatctcacggactaaatatttatatcgtaatattttatttataataaatgataatcttattggtatttaaatttatttattaattcaaaaatgttattcaaattaatataatagaaggtaataaatcaatcctatccttttttaaggtatgaacattactctcctcaagggtagttatattactataggggaataacattccaaggctaaaccctccaaacaaactaggtaatgtttcaaattaccactcccttactagcatagcattaacttattccaaacaatagcgtagtgtcacctatttattgacaatgtaagttactagaggttctaggggtagagcttgaattagatgtaaaggacgtgttcaaaacaatttgattatagggaatattagaatgagaatattattatagggaaatgtgtaaaagtttggctgtgtaggataatatgtaatcatatttctgttaattaaattacattgtttggttgagtacaataatcttatatattattttaaaaaattaaataaaaataatttttttattatatctatttaatgttaattatata

SEQ ID NO: 365623 - DNA, 689 bp, Cannabis indica
aatgagaaattctatctcgtcccacaactgattacacttattagtgtcatgaccataattattgtggtagcgacagaatttcttcatgtccctcttccctgaatctttgaagggaagaggtttgtgatacgacactattgattgtgtagccatatagatctcctatcttggggctaagaagatagagtaggtggtgaagcgaggctcatactctcgtaagggcttgcccttagtcttgaacttctttccaccgatggagtaacttggattaccacccgttgttggctctctttcctctgtttgatcctcttttcttcccattgccctactccttagtagcaagggcttcggagtccagtgacttcttcttgccacctttcaagcccttggcccaggtgacaacttcttctagtttgattgtaaagattgcttagctttaatttggaaattagcagataattatggcttaattatgaaaattatttattagtattgaattatttatttatgatgatttatttgaattcagaatgcatttttatgtcatatatagaaattccataatttttgcatgttttgtgcccggcaacattagaacgcggtgtttggctattagaatcacatcctagtatttttagtatagcgggacaatatagttagacattgggaatgtcaggaatagtcgggat

SEQ ID NO: 365624 - DNA, 578 bp, Cannabis indica
tttttttaatcataattatatatgttttgataatgaaacaatagctactcaatactagtactcatgatgttacaaacattatctactcccaaactaatatttcaataagtatccttattaaatattttaaggtgtccaataaattaaaaggtatctttcatattttctaatgtgatattgatataatatatatacatattattgttgttttatggaaatatatatggcaattttattatatagaatcagccattacaatgttcatcaacttggaaggtgagttggttacatcaaaaatacatactgacgagtaataagtgctaaaattaggccagagaataaaaaaaaatgaaataaaaaaatgtctcataattaactaaatatatatatatatataataaaaaaaagtaaggacaaaataaaaaaaactaaacaaataaaaaaaagtactttttacatcaattttatattattgttgttaattatcataatttgtccttattaagcaaataaaaaaaaagttaggacagttaagctagaggctctgctcgtaaatacttaagtttaacttagttata

SEQ ID NO: 365625 - DNA, 548 bp, Cannabis indica
ctgcttggcagactacgctacaaaggtttcgacaaaaatgaaaaagtactcaggttggatgacaaccatttaaagaacaatttctaatttcttcaatttgttttataccatgttaagccaatagatcagattagatcaaatagctctgatgtaagttactacggtaacaaacacattttatatcaaaaaatgaataaagatgtttatttcaaaattcaaattgagtcgaaattactaacatgttgctaatttaccatccagtgcatcctaaaggtctggtcaaacccaagacccaaacagataaaaaagtatacttgtaaaaaaaaagagaccaagaatcataagtttgctgggtcacttgggaggcacctatacctgtacaaagcacttggtaaagataaaacaaacacaattgcaaaatgattataaacagagaatgaaattcattaaagataacaaaagcatgtaatactgggattaaaagctgcccggtcagcctgttgtctgtaaaatgaaaaataattgcaagtttaaagaccgcttcaccg

SEQ ID NO: 365626 - DNA, 598 bp, Cannabis indica
aaatttttagcaagctcagatgaatctccaagctaatccttctgattgctctttacacatggatgaatagcaagctcatgagactttcagatttcataatgatatgtatgagaaattcttgaggcggaaaagtaagattacttggattcggtttgggacgagagcacaacctatttctacgcttcaatgaaacagaggaaggccatgaaatggattgtttctttcctttctaatcaagttattctggtcgatgactataacctggtggtgaagaattttgtggtgttagttttatggtactaaatcaagtacggaactaaagaatttataacgattatcattgtaccacaacctaagatctccatgttgggttttatgccctaaataaaactccatttcaatgtaatctttattatttaaatatcaataaagaaacagaagtattttcatcacttgttgtgtcatttggttcatgttatcatttatttgtttatttgatttataaattcatccaaatccttacacatttatattcttgtttattgtatcgtcagaaaagtggaaagtaatcaagattatgtgattaaatatatattcc

SEQ ID NO: 365627 - DNA, 554 bp, Cannabis indica
tttctctccctcgaacctctcgccgagtttctttattgagaacaagatcctaaatccaataatacaataacacttaaaatatattcaagcataacctaagattaacaatgaaattttacatcaaactacacacacgtaggtcaatttcacttgcatgacacaccaaacacaatcatttatcactatgattcacaccaacacatatgatgaactcaaacgaatattttaacgtaaaacatgaactcatacaaacattttttacgtaaaatttcactaaaataccatttattaacaaaatatacaaatatgtaattatttattaaaatcagaagctagcatatttcttaatcatttatacagatcacaaaacatattcaatctgcttggaaatatgtgtgaaatactatccatgattatgtataaatttattgttaaaaataaataaaaccctaaataattacccaaaaatagcaaaacctctcaacatagtctcaaattaattccagacactataattatatcttagcattatattgaaggtccccagacagtaa

SEQ ID NO: 365628 - DNA, 757 bp, Cannabis indica
aaaaatagtgtcttatataattataaattttaaaaatttcatatttttgataaaaaaattgtatttttttaatatgtaaaattaatatcttgaaaactttatattactcatcggggcgtgtgttctctcttttttctctctccatgggtcgaaagaagaaggagaaagcgaagcttgcttcaatcattaccagtgtgattcttgattctactttgaaggttgatgaagagtttcccccaaaaattgagctcccttcgaaccaaaatcgtaagcatctagtcaatgcgacaattttcaagattctcattctgatttgggtaatgatgtaactgaggtggagaagatagaattgcaacctttgggtgttcgatcgtgggtaaaagaagtggagactactgatttttaaagctctgtgaaggattcatggagtaagttcaagaataataaggtgagttctccttcgaccaaacttaaatttacggaacctattaaatatggagattagcttgttgctaaaatagacttggaagaggtagcagtggagacctcattttggcaatactatgttatttgcattgctctaggagctaatcccccttttagagttttcgaaggattcattaatcatatttgggggaatttgggtgtataacctatagtgaggatgcattcgaggttcaccttggtgagtttcagggatgaagctgttgggttttgtgccttaaataaaacttattccaatataatcatatttact

SEQ ID NO: 365629 - DNA, 644 bp, Cannabis indica
tatttttaacaagtgttactcaaactttgtttgtatttgtgatagtttaattattggtgataattcaaaccgcataaccgcaccgcaccgcaccattttttgtggtgcagtttctgcgattttttagtttcacaagtgttactcaaactttgtttgtatttgtgatagtttaattattggtgataatccaaaccgcataaccgcaccgcaccgcaccattttttgtggtgcagtttctgcgattttttagtttcacaatgcgggtgcagtttggaaaattgaaaacagtacatgtgctaattagtttaaaaaaaatagttaaaaactacactaccagcccagcgaacagtacatactaatttgtacacataaaaatgcataaaatactgttatatataaattctaaaggtatcaagtaacataaaaaaatagtggtgcacttgaatatgagatatgttgtacactgttgcccctgattttgcctaatatacgtggaccaaccaaacaaggacacgtagatcaagcaatgtacaatccaaaatatttgctaagtttttatgctgtaaggtggcttccaggacgtagctcccggagaaggcacatggaaccccatgtgctcccggaagctcgaagtaacgttaagg

SEQ ID NO: 365630 - DNA, 513 bp, Cannabis indica
aaaaataaaaaaacaaataaaaatcattttatatctttgaacacaaaatttaatgaaaaataaatttctaacaaaaagttataattaactcaattagtaatatttctagagctcacttttcccccatactacgagtgaaagagaaaatataaaaactaaacagggcaagcgagactttatgaaaatctaataatagataagcgcgacacgattttgtcccgtgatgtactttcacggaatgtattccgtgatgtacgacaaccgttagatgagggagttatttgatacgagctggggttgatcttggggtaattagggtcaaaaaatggtaacgtgccctgagatccatctaatgtaccctgagacccatctaatgtaccacagaatacattccgtgaaagtacatcacgtgaaaaaatcgtgtcccatagataagtattgctatttagcatgtgtgcttaatattcagcgccagggtcgtgggaggatttgggtccgagtctgatcgaagtc

SEQ ID NO: 365631 - DNA, 647 bp, Cannabis indica
atacattatatatataatcatgaaataaatcatgttaaccatgcaacataatatgttatttctgatctttattaataagtaaatctgattatattgaaatgagttttatttagggcacaaaatccaacatggttcagggtgttagctctcggacaagtgcaaaggaacgactttttctctaggagttaagatattttaaggcatctttgggacgaaagggatctactcgaacagtcacctcgcatttaatgcagcatggggaaagcgtctgggaacacccataagaggacgtgtcaaacatcgtaagtttgatttagggcaattacacgataatcaaaggagttggtgacaactccattataaagaatcacatcaatcaaggaaggatgaaggttaatctcacctaacctctacgatacctactctgtaggtaatgcatgccctattttgtatcttttgggaacttgtgcttatccatagctggctttaaaagacaagttaccccttttcaactattcccaccaatctctataaatacccctgagaaaatgagaaaggggatcaaaaaaaaggaagagagaaaaaatacacaaagaacattctctgtaagaaaaaactactcattaataacagaggctcgtggacta

SEQ ID NO: 365632 - DNA, 720 bp, Cannabis indica
tatgtggattatttgtaggtttggaatcataaccttctcaactaaatttggagcaaaaacccatagcatatatttgtcatggactcatgcttctgaattacgtgagtgttatggctgcagctattatttggccacaggtatataaatggaccaccctttcatttcatctaatatttggagaatttttatttttatggtttttaaggtaaagtttgcaaaaatgtggcatttttcaaattaaaattatttatagaagtgtttatgatttattttctttaagaaaaaaaaaaaatagtataacataattggttacctgttacttttaactgtattctccatatatttctaactttttcttttattttttgaagtttaatttcgcataaattaaattttgtgaagaaaaaaactatattgcacacagattctattaaaacaaataacactttatcttgcacgggacccttattttatagatgattgtattattagtagggattatatctctactcttacattgtccttgctattgggactttttgaatgatgttgataatttttcaaaaaaaaaaaaaactaataaattacaaattttacgtgtctttattcaatttgtacaaaaatatagttttttttttttttaacttaaaaataagttattttattgagaaatttttttaaaaaaaagttttaaaataaataatagggaaaacgaagaat

SEQ ID NO: 365633 - DNA, 603 bp, Cannabis indica
ttataataccgaaagtgaaacttagaagtaactataaaattacttttctacacaacttaaaaaatgattcgttcttttattaatatgtattttttttattgataaaaataatatttttagttgtttacgatgtcaataaaaaatattgtgatgtcagggtttttggtggttactaaagatattttaattggtaaattaacataatactaatcggttacttgtttataaaaattttaattttataattataattcagtgaaatgtaaataataagtatataattaatatggtaagcaactaaatagtgactttgattttgataaaggtgaaaaatatatactttttacacatttttaaaatgatcacattaaaaataggtggcaatgataatatttttgaaattaataatgtaatcaaaaattatttttaaaattagaaaagaaagagaaattaataaaaatggagaaagagaaaaagacaagtgaaaagataaataaaaaaataaataaaaattaataggaatgcaacaggtatgcgtatgctacagtaaagtcaaaccaacagtaaaaaaagtttttttttaaaaaaaaacaagctcatgat

SEQ ID NO: 365634 - DNA, 846 bp, Cannabis indica
aagtgactattggtgctgaaataaatttttcctttagaaccttgaatgcctttaagcaatcttctccaaactcaaatggaatgccattaacaagtaaactggacaaaggtttggagatctttgagaagtccttaataaatcgacggtagaaaccagcatgtcctaagaaactccttactccttttacagaaactggaggtggcaaattctctattgttgacactttagccttatccacctcaattcctacttttgaaattttgtgtcccagaacaattccttctgttaccatgaagtggcacttctcccagttcagcaccaagttagacttcacaatctaattagcaccttttctaaattttccaaagactgaaaaatcatccataaagatttcaatacatgattcaattaagtttcaaaagatatccatcatacacctttgaaaagtagcaggggcgttgcacaatccgaatggcattcttctgaaagcaaaggtaccgtaggggcatgtgaaagtagtattttcctaatcttcaggtgctatagctatttggtggtatccagagtagccatcaagaaaatagtaatattcttgccccaccaatctatctagcatttgataaatgaagggcaagggaaagtgacctttttgggttgctttgtttagtttcctataatcgatacaaatcctccaaccaatgactattcttgtgggaattaactcattcttttcattcttgatcacagtcattctacctttctttggaaccacttgcaccgggctaacccacttactatctgagatgggataggccactccagcatccaaccacttgactactcttt

SEQ ID NO: 365635 - DNA, 902 bp, Cannabis indica
cttaaaagcatcgtgacaagttagaatttaagataagatgaatgaggttccatctcaaaataaattggttatgggatgataacccattcatctctttaacatccctcctcaagatggtagctattttatttgctcaccatcttcgacaattcgatcataagcgtctttttctcggctttttattttggctcactgtcctgaatcacaagtgactttttttactttggctcttggatcaattacttttgaatttttggtagcttttttttagcactatttcgtatcggtttttttttttttttgtctagatagtcgttagtagagttttttttttctctcatactatgttagaatttgggataagatgaatgaatttttatctcaaaaccaattgactataggaggagtagccccattcatcttatatattctattatatttctacacattaataatgtggaactctctaacatatcctaaacgcttacacattataatcgtgacttatattttatcttgtaaataaatgttacttttacttttttcttaaaaaaaaagtacaagtttataaaagtagtaccattacataaacaatatataattataatttcaaataatagtactgcttcattatatagtaagactattatatttaagaataaattataatttattctatataaatatattttttagataaaaatgatttcaaataacctctaaattgtaatatttatacatttaatgctttaaaattgtaaagaatgtgctaaaagaatcgtacatgagcttctttgcttacaaatatttttatagcaactagtactacattaacttaaaacaagtagcttctccgaacatattttacttaggggtgttcatccgatccaatccgcactttt

SEQ ID NO: 365636 - DNA, 636 bp, Cannabis indica
tgttattactaaacacaagtctttattagtagaggttgaaaagataaattttaaaaataaaaatgttctctagttagcatttgaacccttgagcattattatatatgtaaagtagcttaattattataccaaaattaacaagatgtatataaatatcatattttattataaatgtatgctttaactaactaacatgcatacagaggtggacccacatagaggcgagatggggcagtcgcccaccctgaaaaaaaaaatcgaaaaaaaaatatatatgcatttagttagttacaacatatatttataaataaaagtgatatctatacacataaaataagctttggtataatggcaaagtcatttcatacatgtaaaggaggtcatggattctaatcctaataaaagcatgtttactttaatagttttattttactttttgaacctctaccaataatacttatatttaatgtcttaattattgaaccaaatatattttattgttaactttttttttactttatactatatttaatactaaaatataaatttacattaatttttaacatgttatgcaatgtagaaaagaaaaaaagatgtaccccacttataaaaaaaaaagtgtcgccccacctcaac

SEQ ID NO: 365637 - DNA, 677 bp, Cannabis indica
agatttttgatagtttctcagggtcttttttgtatgattgttcgtcccttttttgatcttacttgcaactatttataatcatatagtaggtagttaattacaaagttgactgtaatctttttacaacgaatatcccctgaaatcatggggttcgatttcatatcatctagtgtaaacacaattattatttgaaaatcatatagctgtgattttcccgcttttactgggtcaaaatgatcgtgtatttaaacacatctttaattgtagcgttctgggatgtctcgacaggagcttggttccagtgaccgtgatagcgagctggagcccttttttttttcttatccttctaaggtcaacaaagtacgccttgtcgcttctttgtgacaatcacggttcttattaacaaagagttctttgaggcttattggaatgttagcttctgactcgtcaggattgtaagcctcacttagaagatgttagaagtttactggggggaagttacaggaatgaaccttcccatagcgagataggcacctcgcttatcgagccaatctgattgttatacttagcttgtacgttatacagtaagtgtttctgcagtcgatatgcatcgctttcgtctttccagatgtaacgtacttgatgccttgctaacgacatatggtttcttgttaata

SEQ ID NO: 365638 - DNA, 536 bp, Cannabis indica
actaattgagataaggggtgaaatatctatattctcctcgccactcactttgtagagcttttatcttttttgctagttgaagctcagctttagctttgaaaatttgaaaggtttttaaggcatcttatttgtttttgaggagttagatccatgtgaacctagtgtatgcatctaggaaatgaatgtagtatttgtacccattagtggaggtaatgtgagagggaccccacagatctatgacaacaagttgtagaggttctgtgtacacagttttagataatctgggaaagggtagtttatgaatttttcctggacaacaagcattgcatggagaaaattgaactttattgctaacaataatattacaagagtttattacatcttttacaattttctcactaggatagcctgttgggttttgtgcccaaataaaactcattttaatataatcagatttactaattaatataagatcagaaattactttaatattgtatggttcacatgatttatttcatgattatgtttaatgtata

SEQ ID NO: 365639 - DNA, 1157 bp, Cannabis indica
ggaatgaaattgtcattctgtagtagattttctgcatcagtcctccttccttcaaacttgagtttaatgggtccagttggaacctgtctcttctcagatgagtcagattcgttaatggtggttgaggtgtcaggtaactcatcttccttctttgttgaatcgacattagagggcagagaatgctcaacagacagatcattcccttgtttatacagcatcttatatcctaaggaagttcgatcaccatagggcttctgaagctgtagggtttgattgatagctgcagtgcctgggggaatgaattgtaaagcttgcttggttcgaattagatcagctgtgagtttatagatctcattctccttttcatcaagaagtctgttgaggtttttgacagtgtcttctaactttcctttttcagtctccacttgctctagtgagttctttagagcacggatctgtttagtcatgtactcccattgtgcaaacatttcttcataagcattttgtcgacctgtgctatcagcttctgatgaggtggagactgcatcatcttcagactcaactggattacagctttgcgccatgaatgccagtacctgcttatcctcatctgatccttcactggctgtggaattctttttctcatcactgtcactccaggttgctgcaagggcctttttcttttttagtgtgttggcgcactcagcctgaatgtggccatatccatcacattctctgcacttaattcctcgacctttttgatcagtagaggcttgtcctggtttgaaatttacacctttgtttctcttgagaagattttctttgtcagctggtgaattttttctgtagttctttttcaagaattttgcatagtttctcgttaacagggcaaccgtttcatcagtaatgccattcaaatcttccagaactggtttcttgttttcttggtgtataagtgcaatgctggcatctgacttttctttcaccacctccttttgtttcttggttttcttccacctggacagagatagctcataattttgcaaagacccgatgagttcgtcaaaatcgagttcctcaatgtttctcatttcttcgattgaggtaactttggacatgaatcttctggggagaacaccaagcacctttcgaaccaa

SEQ ID NO: 365640 - DNA, 458 bp, Cannabis indica
ggaggacattaattacaataagtttaatatcccacaacaatatttttcctaaaattagaagatttgattacatctcacataaaataaatgcggttattatttgaaaatcacacagatgtgatttatccacttttactgggttaaggctgacgtgggtttagatacgctgcaaagtgtatcttgttggggcatctcgctgagaacttagcaacaataaccctggcaaagcttttcccatgtctttctaaggttattaatgtaaatctcgtcgattctgctattgaagacataacactccatctaacaatcgcagttgttggtgataaggtgaacttcagcagtcaacatcttttgaatgtcggcttctttctgagagagctgactagacggagcagtggatctcattgaaagatgtctgaagctaattagtgaaggtacaatgagtatgccttcctata

SEQ ID NO: 365641 - DNA, 1319 bp, Cannabis indica
ataagtttgtggtggcattcattgatgatatcttggtgtattctaagacacgtgaggatcatgctgaacacttgacaatagtattacagacattgagagatcatcaattatacgctaagaaagagaagtgtgaattttggatgactgaagtcaagttcttgggccatgtaatttctcaagatggtatcaccgttgatcctgcaaagatagactctattctacagtgggaaagaccaaagaatgtcactgaagttcgaagttttcttgggttggcaggctactaccgtcgctttgtagagaatttctcacgaattgctatgcctttgacaaagttaacaagaaaagaagtaaagtttatatgggatgatagttgtgaagaagcttttagagaattgaaggaaagattaacttcggcgcctattctcattgttcctaatagcgaggaaccatatgtggtattcactgatgcttcaggtactggattaggcagtgtactcatgcaaaaaggcaaggtagttgcctatgcttctcgacaattgaaaccacatgagaagaattaccctacgcatgacctagaacttgctgcgataatctttgtcttgaaaaattagagatgttatttatatggcgtaaagtttgagttatactctgatcataagagcttgaagtatctttttactcaaagggacttgaacttgaggtaaagaagttgggttgagtatatggaagactatgatttcactttgaagtatcaccccgggaaagctaatgtagtagcggatgcactaagtagaaagcctcatggtactttggcgtgtttggcttttgaggactggaaaaggacaatcacaatgggtgattatgacttgcaatactacgaaggggaaggagtagcttgtatgtctaacatagtgggtacaccattgctacttcaaaaagttaagcaacgttagtggcaagatgaaaagctaagatttatttggaaccgaatccaggatggtgagcaactagatgggtggacagttaacagtgaagggtatctataccatatgggaagactagttgttgcagatatctctgatcttagggagaccatttttattgaggcccatagatccaaatttgctgaaaagagatgtggccagctttgtagctaagtgtatagtttgtcagcaagtaaaggctgagcatcagagaccctcaggtttacttcaaccttttcctataccagaatggaagtggacaagattaccatggactttgttactgggttgccattgacacctttgaagcatgacgttgtttgggtgattgttgat

SEQ ID NO: 365642 - DNA, 902 bp, Cannabis indica
ttgttgctgtgtttgttgggatcaagttcctatgtttcagaagttattacatgcatgtttaggtagatttgagctggtttgaatgcatgttagtgatgtttaaccaagtttgagttttgaactcaaagcttggagctttaatggtgatttttgattctgtggtttctggatggttttgttgctttagaattgttctttggggtatttagaacaggtctggaaggtttggtttgatttggatttgatttggttgagttttggaatttttcatgattcctgcgaggaaccggaatttcagttgtgcaaccagaattccacatggggttcaggaattcccagaaccggaattccggttgcagaattggtctgccggttgggggattttcaggaaccctagtttttctcgtttttataatatttgggctattgccatgcttttcatcgatagggaaacttttagtttctagtttaattccccgggaagtgatttagcatatcacttaatagtgttatgattgttatggtttatgagcctgtaaaccgctgtccagtttgttccactcaggttgaccggcacacctgaatttggaattgaggtaagattagtagaccagtatgcatatgtattacatgtttagcgagcatgttaggaagcctgttagattacattagatatgtatgttggcttcgtaccatccaaccatatcacatcggttaggctagagtatgactagcagctggagtatggccagtggaccgagtataggctgatactagagttggttgtactgtactgtttcaccgtatcacatcggttaggctagagtatgactagcagctggagtatgaccagtgaaccgagtataggctgatactgtaacacatcggtacaggctagagta

SEQ ID NO: 365643 - DNA, 650 bp, Cannabis indica
gaaagaaccacctatgctgaaatggtggataaggcactgcgagttgagggcacagtgggatgcatagcagagtcacgttggactccagttcttggcggggctcctaccccttctgcatcaggctttagcaggggaggtagtggctcggccactgatcagaaaagaaaggcatctactgcaaacagtggctctggtcagaacatgaggatccgagggaaccaggattgaggcaatcggcagggtaattctgagactcgatacacttacccagagtgccccagttgtagaaagcaccatctgggggagtgtaaagggtaggggtgctttcagtgtggcatgccatggcattacaagagggattatccccaactcataaccgaagcacagaagactacagcgaaacccactccagcaagggtgttcgccataactcaggctgatgcagaagccagtccttcagtggtaacaggtcaactcttggtcaacaactcttatttctttgtgttgtttgactcgggggccactcattcctatgtggcagccaaaatttttagtaagctagatagaccgcatgatagttatgaatcagggtttggaaccctattatctggcggagagttagttatctccaaaaggtggattaggtctat

SEQ ID NO: 365644 - DNA, 567 bp, Cannabis indica
agagagagagagagagagtttggttgaattttgggctaatgtttatgttatgttgtgagttgtgactgtgagtctccaacagtaaccaatcaaagagagagaaaacacaacagaaatagacaggacaaacaaaagagtacttacacacacacacacatagtgtattaatagtacttctgtctcctaatactcacttaatgctctttccttttaaatattatcaatttcagtaatttttggctttaattctatacacaaattcttaaatttaattttagttttgggtaaatattattgaaaaattttataatgtgctatcttaaaaaatgatcacttatacatctttatttgttttagtatctgaaataattttttagtcaaattttttttcatggtcatgtaaattagttatttaagatatcctgcaaaattttaaaaaattcaaaaaaatttaacatgccgaaaattgcgtttaaatagtatgttgcacgcgtgattattttattttatacacgtgtaaaatagactatttgaatatgttttctatatggtaaattattttaaatt

SEQ ID NO: 365645 - DNA, 605 bp, Cannabis indica
tagtcggagctacctgctatacaaaaagcctatcaaactgtcgctcagcagccgctgaatgccattcccttgggttgaacaggcgaagatccaacgatgaattctttccaaactacaaatggtcagtcgcccaatccccggtcacgagttccgctcgtgggcccagcagtaggcgagcagaccttgtttggtaattcatcaggagaagtcatacctgatggttccacccagattaatggtgccattccacccgtcaaccaagcgaatcagtcgctaaggtaaccaggcacttctgtgttcgaaaggttgggagacacccatgacctaaggaatgatatgatcagaaggaggggagtagaagaatagaatattacgacgatcgtgtagcctggagcccgtactcaaattctcgctcagaaagattctaacgtaattcaaattgaccagaatgccaagcaagttagcccaaccgtacatgctcagcttgacgaactgaaaaatatgctccacgacatggctggacaaagaaataatgatcttgagttagaccaagcacgcagaactcctttctcgccggtagatcaatctcctgccactgcccacaa

SEQ ID NO: 365646 - DNA, 1370 bp, Cannabis indica
taataaaataacacatagacttaaaaattaataaataaaatcataattttaaagttatctgattaaaataagtaactaaacgtatatgagaagaaaattatcttgaaactaatttttttaaataaatagtaactaattgatatattatttacatcaaaagcaaccaaaaagttattctttttaaaacttgcaaaacactgaaatttctggaaacagaatttttccaatttttcctattttcggtaataattttaaattttggtatttatgctgacgtgggaatcagtatttgtgcaaataaatttattgaatgtatttttataaataaaattaattttaggtataatattagaaaaaacccctataatttaagtatcaacttgttaattgtaaaaaaaaaaagataattaagtaaaacactatttttttgtaaaaaatttatattttacgtttaaagattttttcttatatttttacggtgttctataaaaataatacgaatacaactaaaaaactacataaaagtaaaaggagaataacatccaaacaacattaaaataataataaaaaacaatatatacaaatcaacaacaaactaacatgagtacaacataatattgcatgacattaaacaacccatatcttgttataagtcagtacgatatgatctataatattgcaagcttcttataatataagtcagactaacccaacaagtacgtatttatagttataccaactaacgaatcttcctacacatatgttaatatggtagttcattttgatactattgcaacaacactaagttaaagttaccatttagtgataatactttagtaataagaacatctctttgtgacttaaattacacagtatttaaatatcatcattactccttacagaagaaataataaatattaacatcattactaatttaattttaatcgtattatgactaaaaaatgtatctaacaacatttattattttttgtaattaagttataacatgtgactaaaattacagctactataaatttttttttttttattcacaataaaatttgtaattaaaagtaaaaagtttgtaactaattataaatcattattattatgttgtgactaaaaggttcgtgattaaatgtattacactacaaaaaactgctacttttagtgacaaccttttagttacaacataattttattcatgacataaatgtgacttttagtcacaacaaaatgttacttgtgactaaaatatagcctttagttacaagttgtcactaatttagttttagttcacaataagtattgtgactaaaaatatacatttagtctacaacaaattagtaatttttagttgtacttaatac

SEQ ID NO: 365647 - DNA, 568 bp, Cannabis indica
agatgattaataaaatattgattgtagaaaaaactaatgttactaaagataagttatataagaattaagggtgataaaataaaaataataagccgggcaacatccaatctaatccgattgaatcgaaccgatctaatctaatctaattacaaaatattaaatatccgattggattagatgctaaaagttagattctaaatggattggatcggttattaaatatcaatctcaaaatttaattaaaaaccgatccaattcaattatatttatatatgttaaaaaattattttatataataaaaaattaagaaattaattacctcatatactatttttttttttaaaaaaaaaatttaacggttttagagtatctcaagtgatttctccagtggtttccatgtgagttgttatacggattttggttgcgatttaggttgctccgtaatttgcaagagaggtttctatatagtaattaccgtaaaaatagtaaaaaaaaaaaaaaagttttagaaagtagtaaaaataaaaacaatattaaaaaaatacaatatatattaattatattttta

SEQ ID NO: 365648 - DNA, 718 bp, Cannabis indica
ctgcttcaaagttcttttaaactcggaattcagcggtgtgaatggtgtagcacttcgatttcttcgcataaactgaaccacaaagcaacaaacaaaataaaatctaatttaaagtaaaaacttttagtaataatattaccaataatttaagaatttttaatccccagcaacagtgcaaaaaaattgttacacattgttgttatagcaaagttttaatactaaaaaagttatcgaacccacagggattgattattaaattttactaactattatactttttaattttatattttaattagacaacacaaagtaaattataattaagaaacaaataataagataaataaaaaaataaatagacaaataacgtttttcaaatagaaagtaaaaacctgattgattttcctatttcaagctttgaatctaaatttgttgattatctcaatttatcctataatttgtagtttcaagaatcctaatgtaacctattaacctctctcgagcgatgatagatttaactaaaattaacaaacacgatatctctattcaatgttaatcttataagcactcataaagcaatatgattctctttaaatgaaactcatagaattagtgaaatctctaaatctcacacttttcctatgtcatgcaattctaagtccgattttagattacctctctcaagtgtaaacctcaaatctctatactaattaatggt

SEQ ID NO: 365649 - DNA, 674 bp, Cannabis indica
agtacagatcttagacaggaaagataaagttcttcggaacaagaccatagttttggttaaggtgctctagagaaacagtaaggtggaagaagccacctaggagttagagtctaacatgagggctcaatacccagagctattcaagttagatttcgaggacgaaatccttttaacgggagaataattataatgaccgcttagctttattttagaaattagcatataattagggtttaattatgaaactagattattaattatgatttgtcattttatggagatttatttgaatttagggtgtattgtttatgccatatatagaatattatgtttttgcatgttttgtgcccggcaacatcggaacacggtgtttggtcattggcatcgcattttagtatttctgtagtagcggggaaacttagttagacattaggaatgttaggaattattcgaagtagtagaatgaccaaaatacccctaagtgagttagaagctttttggttttgtgaggggtaaaatggtctttttggccatttaatcccttgtcttttagtgaactttattgaagtgttataatctaaagatattctttaatttatttagctatacattagtttataccttttagcctaaaattagaaaattggaaagaaaatagccttctctctctctct

SEQ ID NO: 365650 - DNA, 412 bp, Cannabis indica
tgctcgacgtcacaggtcgcaggtccttctcctacaaccccatttattttaaggcttggaagttcaaaagattcagtgaacttccattgtcaacgagtatgcggtggacgttatctccgccaatattggcgatgatacctagtgcatcggaatgtgggtgatggacccatctcgcatcactctccattaaggtgatgtcgtcgcattccttcttaaacagtttctctggccgctcactaagattgtttacattggcgagcagcttctccttggcttctctggcatatcgctcttgcgacttgcgggagtctcctgcgatatggggccctccaatgatagttataatattacgaggcattctcgaaccactcgcattttggttttcttccttgtcatccgctcggggatgacc

SEQ ID NO: 365651 - DNA, 661 bp, Cannabis indica
attaataatcacaaaaattacaatttattgtaactaaatgtgtttttagtcataatatttgttgtgactaaaattaaattagtgacaacttgtaactaaatactatttttagtcacacgtaacttttctgttgtgactaaaagtcatatttagtcacaaaaaaatttatgttgtgatgaaaatattgtcactaaaagtagcagtttttttatagtgagaggtggaactttacaattgttagagattattttttaagaattattttattaatttatataaaacctgatatttatttagactaatagtaatataatacttaagatggtgctagataccactaatatttttcagtattaatcaatttaatttgaagtttgtcggtagctatatggagatagttttcttaagggcttttttcataaatgtacaacaaaaataacataattacaaaaaatgtacaaaaaaaatttattttaaaagcttatatattttgaaaacttattacatgaaaccatacattttaatcattaaataataaactatgtttatttaaactcaaaataaacaatttcgtaaaattaattaaacagttttataaaaataaacaagttaatttttttattaaaagataaatgtttattatctattttagtatgaatta

SEQ ID NO: 365652 - DNA, 1617 bp, Cannabis indica
catgccagagagtgtatgttgattttggcttccctaataatcttggaccatgccactcaagcaaagtgatgaagatgcttagagtgctaatgttattctgtctcaaactgtgacagaagaagttgttggaacttattttaccaagatctagatttactagcatgtatttttgattatattctataatctaacatcataaacaagaaaaccttacattgatggcaggagaatattatggctcattccgttcagatctctaatccttgttcctttctgttgaatagtatgccaagatctgaacttgaatctcctttagtgatggaattcttcacaatcctccacactatgactgaatactgacttgaattgtgttggcaaggtactcttcactatagattcaaaattatgaagagaaggagagagaaattcgaattctataagagaggctctcaatttttcagttgtttaacaaagtagaaaactaggttatgataacgagagccatcttattcattatataggatttaaattaaaaagataaaaaaaatagcttaaaataaacttaagtgaccggcttatatgttccaaatatagatacgctattaattatctattgtttcaatccaaacaatcaatgatcctctataaatgatctatatcgagtaaggacaaatttaccgttatacctttcaatgtattttatctttaaaatacttagctctttgtaaatgatatttcagtaactaatataattattgaaatgagtactccaccatttaatctcacttagccatgctcgaaatcatcgtttcacttctatgcatttgtaaaagctataaattctgtatctatgattagcgttttcacttagttgtactaccatgttcccaaggtgttagtattggaaagatccaattggtcaacttgaataaacaagtcaaagaacataaataatacaattgaatcataacctaaccatctcaagattaagatcattgatctaagattaactaagtgatattcacttagaagataatatggtaagtttaagatatcttttctatgtgagtatcggtcaagtccgatgtatagcaatatatccaatacaagcttactttactaatgcattggaaaagatataccactatctaagtgtaagtaaaccacattgttgattatcatatcagtggaaatcatgtgcattgataaatcatgggactaaagtttaatcacataattttgattactttccactgtgtagaaaatgcagtaatcatgaataataatgtgataaggatttaaatgaatttataaattaaataaatgatcatgaagcaaacatgtgaactaagcaatgtattaaacaagtaataaaataattatgttcctttattgataaatgaatattcaagataacattgaaatagagttttagttacggcacaaaacccaacaaactcccacttgaactaacataaaacaatcagtacatttcagttaatcttagattttctctgtgcttttcaaatgcagtctctgtcaaagtctggtgaatgggtcggctaggttatcttcagtatcaacttttcctgatagcacgtctcttcttgccacata

SEQ ID NO: 365653 - DNA, 590 bp, Cannabis indica
agcaggctccagtgctcaatcgctagcccaaaactggaacggtgaaaacttctcctatcgttcctcaaaagaggaagagtgacgttgtcgcgactcctgttgctgactcgtccaagaagcaggttaagccttctcaggacaagggaaagaatgtcatgattgatccagttgtccgagctcgcgaagtcttagctcttcaagagaagtttgtgggggaggaattcatgtcaaaggttgaaggaactccttctgaggaattaatgccacgttctgcaaaattggcttcgcagttcatcaccatgttctcgaaggcgtttgtcgctgtctccaaggaagttgaccttttgaaaaagtagatcacccagcttcaggagagcaacaagaagctaaagtaggatgcgaattctaaggacaaagatctcgagaacctccagaagtccaaaaagcatgtggaacttcaagccaagctctctcagtcgaaggtcgaggaattttcttgcgacttggagaccgagaaggaaaatgggaagaagcagtatgtgttgggttttatgctctaaataaaactctttacaatctgattagttatc

SEQ ID NO: 365654 - DNA, 550 bp, Cannabis indica
ggactcacttgtcagcaagatttttaaagctaggtactaccgtaatggtacctttttaaatgctgagttggggagcaatccaagtttcgtgtggtgaaatatttatgaaactcaagagattgttcaaaaaggggcgagatgcagagttggtgatggttctcgaattaatatagtgttggatccgtggctgccgaatgaagataatccaagagtaacttcgaataatcctactctttttgatcaaaatgttaaagcatttatggaaacggatacgttggcttgggatgtggacttggtgcatgatatgtttaatgaaagggatcctaacttaattcttagtatttccttgatcttcaagtcgtttatgtgatgtttggtattggagtagggagagctcgtgccatttctcggtaaaatcaatttataagttcttagagttgggtgcacaggatgataattccgtcttttggaatactctttggaagctatgtgctcctccgaaagtgaaagacttgttatggcgtcctgctactaactgtctacctacgaa

SEQ ID NO: 365655 - DNA, 958 bp, Cannabis indica
atgcactttggcctataaaagccaccattctcccttcatttggttactttcaggctttcaccaaatttcttcaaattttccagagagaaagaaaccctcgaaccagaaaacccttaaacaccataggcttcttactgaccttccttcgctattgtcagtcaacgtttcaccgtcgattaacaacaacgcctagttctaaagctttatgtaagttttttgcatcctgtactttattgtttgcgttcattgcatgcttcactgttcatctgctttttctgggtttgatgtggaattttctgggaattttcgtcttgagtttctgtgtaatgcgttagattccccttttctggtgtttgagttacttttattatgcgtattatattttttccaaaggcccatcttttctttacgcaatgaccttcaagggttcagagaggactttgtctttctcgatttttaccctttttctctttcttttcttggcttattcgtaatgtcaccatctgtgggattcttgcacccgacttttgtccaggaaaaccttctagggctttcttattgacaaccatccggagggggcctctttccagcggttaggggacccccattcccttttttgacttagggtttggtttggggcctgactgctggaattttcaatatttttcagaaccaaaatgtctgcatccggttccaagtcttcctagaaaggagggaaactcctggccaccctggaggaggtgatgaagggtcccgtggcccaggaagggtataagcctcgtgccacggggtgggaagcggccgagcttcactctaccatcacttgcccccaccatcttgagcacattgtcctggtggcaggcatcaagcccgcgacttccgggacttacgaccggccgccccgggacgcggagacgcccaaccacaattgtaacgccctaatgctaaggcacgctac

SEQ ID NO: 365656 - DNA, 645 bp, Cannabis indica
gttatttttcaagtttatatatctattatatataaagtataactatataacaaaattcttaaagtgtagctatgtaacagaatttttggtttaatagaatttttttggatctcaattacttagcagaatattctttattaattttataatattattatatgtatttaaaataaaaattatttatattttagatgaaaaaatttaatagtttaacggagttttttaatttctactttaactttaacagaatatcttaattacttaatagaatattctttattaattttataatattattatatgtatttaaaataaaaattatttagttattttataaaaaaaaattaaattatatatatttaaaaataaatattatatctatatataatcacaactatacataaatatatatatatattcactttaatttcatttacaatttattataaccacgctctcttattgtatctatcactattattatttatttaaaatatatatttaaatataatatataaaatatgttttaaaagtaataaaatattttttaatataatacttatacatagagagattaatataaaatacacataacaatgaaattcattcttttattatatactaggtgattgttacgtgtcaagc

SEQ ID NO: 365657 - DNA, 946 bp, Cannabis indica
atgaaattaggttgaatttgattaaattattgtttattattggattattaggctttaaattatgtttttttattatttttttttcttttgaatgaaatcatggctaaaatggattggattcatccattggatccattggatggatccaatccaatccaataaaaaccagttaaagcatccaatggatggaaccgatccaatccaatacatccattggatcggatcggatcggatgactcaattcaattggattggatcggatggcaaaatccaatatccaataaataattggattggatcggatgggtccaaatccattggatgtgatccaatgaacacccctacttttggtctacgtgtaatacgtgatcgggaccatgtattttgggaaaaacccagggtaacacaactgtatgaaacattaaaaatcagaacagtatttccatgtacgtaactctatctacatgtctcttcatgatttaatatgaataaattcaccattagaaatttggaaaacaatgaaaatacaccaggataaatattttactataatattgaagtaattttgtttggattatacttgagtttgattgtttggggactccagttcaactttttgacatctgcattttatggatgtgaaaattaaagtcagaacattagttttttgtgaattaaactagatttttggctgaattttagttttgtagtagtttttctgcacttttgttatgaattcaaaacaatccctattttgattgattctggtcgtcttctcaggtgaagttaccggaattaatggtagttctctttctggttggatttttatttcggttgcattgggttgctgcatggttgcccgatggttgtccaggaagcatggatcctgggttgaaggtgtatgtaaaatgtatttatgtaattattttttatttgggctgtatat

SEQ ID NO: 365658 - DNA, 643 bp, Cannabis indica
aattaataatttttacaaaacaccgagtccaaagtacatataacgtaggaaattaaatataattgcataaatatattatttttgctcatagtgtcaacatcacataatgaaaattatattttttgaacatttttttctttctatatgcctacttaaattgaatgtgattgatgaccgagatttatttgaactaccaaatctcacgcataggtattagttttaattaatgtttatataattaaattaagattttaaattgattttatagattgtttttagtttttttcttttctttttacttatttgtattttattatttaatatgcattactaaaagctattttttttttgggtgcaacttaatctatctatctatatatttattctatataaaatgtgactatataacataatttttagtttatgagaaattattaggtgattttattttttaaaaaaatttattaaaaaataatagtttttttggctgatattttaacactttaactttaaaaaaaaaattaaaatatatatataaaaaaaaataaaactttacgattgtaagctatttctcccgaaattgtaacgatgatgaaactaagtgtatgtttgacatcataactaaaaaattatttttttgttt

SEQ ID NO: 365659 - DNA, 580 bp, Cannabis indica
aaaattcatataaagtaagaaaacaaaaaaagaaaatacaaaaaagaaaaaaattacaaatatattatgggtcggcgctttaaacatttatacaacccacatacaaatatttacaaaaataccacatgctctaaaccttcagtcgcacggaacagaacgatcaagaagaacagacctcgatcgttcaaaccagcaacacaaccaacatgaaactaaaatgatagaaataccaccattaattccggcgaaatcaactggaaaagaagacatttaatgatctaaacagaaaatgacgaaaagaaatcagaaaaactgtgaagatactgaaattacacatttgttttcggtttaatttgatcagaacaacttcccctaatatcgaaatcaagatttatgaaatgtagatctgtaacaaatagatctggagctccgcccgaaaccaaaataaggtatgatgtgaaaaaattaaaaaaacctcatgaataatagatctacgttatatacagttgtattttggttgattattggtttccaatgtggaatatatttattttggttgccttatagttgcattatcgtt

SEQ ID NO: 365660 - DNA, 629 bp, Cannabis indica
cataaatactaccatccttacgtaacagaaataaaaatcgaccccttaaatgaaaaacgccattaacgttcggactaagctttaaaaagttccaaactcgatttctaactcaaaatcacttcaaattcaacaagaaaatatcggaactagtcccatgactacccgagaacaattctataaggtcagaaccttcataactattctaattcacaaaacccctatacgaaaccaattgtttttaaacttaaaacgaaattaaaccataccttaagctttcccttttcaaggatttgctatcctgctactaccagagcttagatcgctaagttttggattgaaaattaagaaaaatggatatagaaggagaaaattttatcgaagggagagaacgagggtttcgttcattcgttcgttctttctacagttataacttaaaacttaatatatatatatttaaaacgaaaggaaatgtctgtttcgtttttataaatatataataataataataatataataataatatattattaataatataatataaataataatattaataaaaactttattattaatagtcatcttattatttcttaaccactaagaaatctctatttctagggtatttg

SEQ ID NO: 365661 - DNA, 808 bp, Cannabis indica
ggctactaacatgctttctatcacgattttcttatcaaatactaattaacaactattaagcaaaggcttactaaaccgtgagttgagcctatctttgatgatgattgttacatatcgtgatgatccttagaagacaaccttgcagctctaataccaaattgtaacaccctactaggttaggcatgttattgtgatttaaagctaactgtgcaatctgttgctaatcaacgagtttgttggaaaatgtatttaattaaaactttactcaattaaactttaattgaaataaattaaactttacataaattgggattctgtatttaaaaatttacaaccatattacaaaatattaattccaaaaattgtcgcctagcgactattcaaaatacagcctacttttacgaagattgaatactccatgtctaaccgacttgatatgtacaatcttcatgtgctcgcactcactgctgctcaactttagctttgtctttacctacacatgtaaacaataactgtgtgttgacagactcaataagaaaagcataataattaataacataaacttaaatcgaattataactgggcacccatacacccaatcataaccctattctgcgtcctatgtgtactgagtctagaacgtttgtagggcagtactattgaccataataccagcctacactcggtactctagttgtactaatgtgatgacatcaatcagtacttaagctaaatgtacaatcatcggtaactaatatagctctatgtatattgataccgctatttcaatatattatctaacaagcat

SEQ ID NO: 365662 - DNA, 1188 bp, Cannabis indica
aagaaggggaaatctgctgctgctcggcctgaacgagctcataaggaggatgagctcattcaacttaagcaagaggctaagttgaagggaggtgctcgggcaaagcagtatgcttaggagtctaaaaatcctgaagatgaggctgaggctgaggctgaggctgaggctgagcaggtggctcctttgaggaggaagaagaaactcccgaccacgcccaggcccgttgaacatgccattcgcataagggagcccatttcacctgttcggccatcccatccctatgctggaaaagggaaggccgttatggctgagataaagtcgatgtcaggtgatgatggacttctgactttctgggcgggcagtcactctgcgctttacttcttttttcagcttcttgactttcatactttgtattttttgctggtttttgctaaccacgctgtttttgctctgtgcagacatgtctcggcagatgatggacgccttaaggaagaggatgagcggaagctctagcgcctcccctccggccaagaagtctaagggcggagaggggtcttcagagaagaggccttctggagaggtcattgacctttctgaggagctgactactgcaaatccttccactcccaagtctgccaagtctaaggagtctgggccaccaacatctgggtccgaactggtcaggaggattcctgagcgggtgctggcaccaactccacccatgcccgtgctgcctgaggtcaagaagggcaaggaggtgatggctcactacatgaaccggctggttcctgaggtcggtgagcagctggctggtgctgacgactcatctctggatgtgttggtgggcggagtcttgaaggagcttaccagggttagtcttttcttttcgacatttcccttttggcttttcatacttagctccatatgctgactttttccttaatgcaggccggtttgaagttggcttatacctattcccgggctaaatctgctacttccaagagtacggctctgttcgacaccttgagggcggaggcggacttggccaagaaggaagctgaggaggccagggcggagactgcaactattcgccatgagttgggtgaggccaacaagaagctgtttgccgctgagaagaaggtcaccgtgctgacaaaggacctcaaggttgctgatcgctttgaggaa

SEQ ID NO: 365663 - DNA, 498 bp, Cannabis indica
gttgcaacctaaattgcaataaaaaaatcgtatagcaacccctattgcaactagcgctgcaaccactttagaaacccaaaccgtaaattttagaaaaaaagctaaaaaacagtatatggagtaattcccctaaatattattattattaaatttaaatttaaatatttatctacaatcaagaattaaatgtaactatttatattgcaaattactcgggtacacaatctattgttgcaccacttttttttttttttttgaacaataatctcagatagttcgtgtctgagtgatggtctggactttaaacggataagcccatttacctctcaaatagaaacccgtgttcattttgggcctacattgggcacagaaattctgaacaaaaaaaaaaaacccattttattcaagggattattttaataatatacataatcaacaatttatttacaaaaataacattatgcaaataattagtaaataataacgttccatgtcagc

SEQ ID NO: 365664 - DNA, 759 bp, Cannabis indica
tttttaaaaaaatgctaactacctttcaaatttcatgttattttaaaaaaaataaatattcaataaaataaaatgataatttaatatcatttttatgattttacaatttaatttaaataaaaaaaataacaaaatttaaaagtcatcataatatcctatttctattaaaaatattatgattaaaataatcttattttaaatttaaataaggtcaattgattaatttaaaaaatatatattaaatatcagaccttaaattaaaaataagataaaatgatcaaatttttaaaaataaggtaattaattaagcaaaaaagataaatttttacctattttcaaattcaaatttcactaatatcttaaattaatttttttaaaaaaataataattcaattctgacaattagatttgaaatttgaaaagtaaaattcaaaatacaaactacacaaaaaaatctgaaattaattccatgaaaaagcatgaaaaattgaagaaaaatgaaaaaattgcaagttgtacggatggtatgcgtagagacgcagccgagaaaacttggccagtgaggctgcacgcagccgcgtccgcacgtggtgcctggcattcagaaaaaactaaggcacctgaccgagaaaattcggacatatgcttgtctaaagcgcgcgtgaccgagtaaacactcggattcgcgcgcgtatggggtttctccaccctaatcttttttcaaaacttcaaaaaatcataaccaattcaaataaaatc

SEQ ID NO: 365665 - DNA, 700 bp, Cannabis indica
gagtcattatatttcgctgcactcagtgtaagctttcttaaactttatatgtttttatttcattattttagaaattcatattaggatgtgaatgaaacacacttgttagtaaatctagatcctggtaaaatattttcaacaacctcagtgctaggagtggtttgatcggctaccgaactggtgtttcaagtctcttgtatgcctagtgtgatcccagccaaaaggaagtcactccatggcctacattaggaggttgtgtattagtctgctcggggtttgtccctgatggtcctctcgtgttccaggagtttgcacattgggatctgtcaccattgggtcgccttgatcagcaaggcctccccttcgagtttgtacaaccatcctatttacctgtcaaaactaagataaagtgtaaagaccgcttagctttaatttagaaattagcagataattacagtttaataatggaaattatttattaattttaaattattaatttatggggatttatttgaattcataatgcatttctatgtcacatatagaaatttcatatttttgcttattcagtgcccggtagcattggaacgcggtgtttggctattagaatcacatcctagtatttttttttagtatagcggggcgatatagtttagacattgggaatgtcgggaattgttgggattttagaatttcctaa

SEQ ID NO: 365666 - DNA, 630 bp, Cannabis indica
gcgccttaccgtattggcagccagcacatacagtctctgttctgacctcgagttgaggaagacccttcagcatagacttcttcatcatcaccttgagtttatgataactgacatgtcctagccttgcatgccacaaatctgttgtttcattcttccgagtcttgtctacataagcggactctgctgacattacatagacagactctaagcgtcgtcctttcatcatcggtgttccagagatttcaagatcttggtagatcttgacatcttgaggaccgaatacgacatggtggcctgtcgccgtaagttgcgccactgatagtaagtttttcttcatcccaggtacatggtagacatcctggagtgaaacttcttttgggctgaatctcggcgtgattgttgttttaccgatgtgcgcgatcggtaatcttgagttgttggctgtcaccacaacgcgaccacctttatattctgtcatatcttgcagcttctcttcatctcctgtcatatgatttgagcagccagagtcgactatccaatcattattgtagtcgatcttcctggaacagaagctgtcaaagctaattcttcttcctccactgcgaatgatgcttctgcgtcccattcttc

SEQ ID NO: 365667 - DNA, 783 bp, Cannabis indica
atcatttgatataaattatttttgagaaaaatagtctataaataaattattatttttgaaataataaattgagaaaataaaatatagtgatattttataaaaagttaattttgaaaaaattaattatctatacaatttatttttgagaaaaataaaaaatagtataaataaaatgagagaataatatgtaatattagactacatagaagagaaatcctaccagagtctatggattgtagtgggtagcgccccaagcacagtccaagcaagaagatgagaagtaattgtcttatatgctctccattccattggtttatataaatacggcctatgggagacacttttagggtagtaatctttgagaaccatactgagaggctctcaaattggctagtacacttgcatgtttactaataagtaattgggaattaatagtaaggtaattattctcttacatttgtttacttacattattaaaattaggaaagagagaactttaaataaaggagaaaagaaagggagaacttcccccaccaattttataaggaataccattaaggggtaatgaattttaattatttttattttattttttaatattaaatatataatgacaattttgtcctttaaaatatgtcttacaaaataactaccatataatatagtttaactcaaaagggtaatttagtcaatttaagcattctgattacgtttcttaataaagtaaacaacataaatcactactattccatttctaaaaaaattttagtaaacaacatatta

SEQ ID NO: 365668 - DNA, 921 bp, Cannabis indica
caaaagaaaaaaaaaaaaaaaaaaaaaaaaaacaaatctctaggcagcagctagggtgaaatagcttcggaaaaaaacatagggatgatacacgtcctttttttccctaagaagctattagtaacctaagtactactatttcttacttttatatacacacaaaaaattttacttttagtcacaacaaaatttgtatttaaaaatgaaaaaattatgactaattataaaatatataattcctatattgtaattaattaaaaagtccgtggctaaaggtattagttacaaaaattacaacttgtggtgactaaatgtgtttttagtcaaatacttattgtgactaaaactaaattagtaacaacttgtattattagttacaagtaaatttttgttgggactaaaagtcacatttaactataaaaaaatttatgttgtgactaaaaaaatttcactaaagatagttttttttagtgagatacttttttcatcgatcatatactaattaaactctcatcttaaaacctaattaataataaaagtgacttatgctcttataaatacaataatttcacatacattttctggacctatatttatttgttttagttttatagaaaaagctcttattttcaaaggaaaaataatgacaagtaccactaagcactcaactataatcaagagctagagaaatacatatactttaagagaattcgtgccaagaggactttagaactgatgctcaaatattgagggtccatatatcgatcgatatgttcttagctggattctaatgcatgatggttactatactaaaggtttatatataatatatatatatatatatattcctagctatatatatatagtataggatatactctaggaatatctacaaaaaaaaaaacgaaaaagaaaaggaaa

SEQ ID NO: 365669 - DNA, 533 bp, Cannabis indica
tctccttgctaggactaaagatagggagagcaatggttccaccagcaccaggagcctctcatgtttcatacagaatctttactgctccctcatctcgaagagccttgtcaaccatttcagcataggttgtggtgtctttggtagtaataactagattgtgcttgatcttggcattcaaccccgccaagtacttttcctttttactaaagcctgtcggcacaatccctgaggctaacttggccaagcgatcaaacttggtcgtatacttagtcattgacatattctcaccatgtaccagttagggatgcacattttccccgcagggattccccgcctaaatagggaacggagcggggacggggatcacagtccccgcaccgacggggacccgtttagtattttatcttatatttctagtaatattttataatttataatttatatttgcaattttttaatatattagtatcttttttatgaattttaagttgtgttttggataataattagtttattgaataataattaatgtg

SEQ ID NO: 365670 - DNA, 873 bp, Cannabis indica
ttggttttctattccaaaacttcttcaatgcttgctggaaaccttgaaattatgtcaaattcttgtctggttttggttcaagagaggtcatgagagagagagactttgactgattttctttatttaattctaacttaaccttattttttataatatttgattttatatttagttaataatcagcaataaacttaggaaattccactaaaatccaaagctaaccacttaggcaaaattactattttacccctttacttcaagcttaagtagccataaggctcaggggtagaatggtcaaacaccataatcccgcctaatcttgatattccaaatatcaaacatattttccccagcaaataaaaggctctaaactaaagtcacgtgactctaatagccaaaccgtcgtatttctatcgttatcgagcgaaaatcataaaaatataaattttcacattcatcatatatagtacacctaaagtttaaaaaaatcttcaaaaatgaaaaattataactctaatgcccatttcataaaaataggaatcatattataaaataatcacatttaatcatataatatagttaattaatgttaatttccttcctaaacccatattctaagtagaataattatcttttttacccctgtacttatgacactatactattatgccccttaatctattcagcttgttacaaatagtccttgtataattttatatgcatacatttagtccttctgtttattttgtttaaaaatactgtttgtattgatgatgtggtattataacaaaggatagagtagtaatttcatctctttttagagggaaaattgactatgaggtggcataataactgacaatgaaagatgattaa

SEQ ID NO: 365671 - DNA, 1036 bp, Cannabis indica
tttttcacaaatcttgttttttttaacaacaaaaaatatcactaattttacaaaatatataaaatacaaataaaactaacacatatataatttattagaaaaaaaatcatacaacaaaaatagcatagtacttttcacaaatgaaattttttgatgacttcttattcaaacctactaatttttctaaatgtacatttccccaaatctagaaaaaattaattttcaaaaattatttactgatttaaataaataaatgtgtaagaaaaaactaaattaatatatattatattacaaaacataaaatattactaaaatctataaatatatattatatattataaatcattacataagagagtttagatataagaaattaatttaataaaataatatatatatatatatatagatattatattataggggctattacagtagagattgggtattttacctattaatagggatagtaatttatagtctttggtttaatctaagctcaaattaatccttgaaaactacacaataattaatatattttttaatttataattaaacttgaatattattaattatacgttcaactaacaaactccaaacttaactcaaaaccaattcttttttttttactttttattttatgtctatctaaaatttagttctaattacatttttctttttaattttgaatttacatagaaaaatattttatttaaatttattttaaaacaataattatacttataaaaaattataatatattcaacttataataatattataataatcactcttaaaataattaaaatgtcatgtgttcaatactttagaaaagatatttttttacttatatttaatcgaagattttaattaatttaataagggtgaataccattttggaccttctgttttacaaaagttaccaattggaccttgtgttttgttaaatgacaaaatggaccctgtattttctaaaatattacaaataggaccctgaattaattttttgtcaaaataaagtttaattataatccga

SEQ ID NO: 365672 - DNA, 590 bp, Cannabis indica
gtgtaagtataccttatcactgattatcatgccagtctaaatccagtgaattgacaaatcatgggaattaaacttttgaatatataatcatgattatatttcactgtgttgacgacactataatcatgaacaaatatagacatatttatatatgttctggacttaatagaatttatacattaaacataatcatgaaataaatcatgtgaaccaggcacataaaagcaatttctgatatttattaattagtaaatctgattatattgaagtgagttttatttagggcacaaaacccaacacattacagtttgaatattgtaagtcaacttcaagacatttgtaatgcaacagttatatctgttgcaagccaactaacataaaacctcaaaacaactaataataccccatatgtaatacaaacaaaacttaccacaatcgtgttttatctgttcaagtcgcgtattgccaattttgagccatattcttatcatactataattttaatctagcacaactattattcaactagtagaacctctatccaagaatacacttgggaccaagaaaataatattctaattgagaggtta

SEQ ID NO: 365673 - DNA, 1070 bp, Cannabis indica
acccctcactattggacaagctccgatgagcatgactatcatggcacaattcttggtattagatgttccttcagcttaaacgtaatgctaggccgaccagccttgtacgacttaaaggctgtcacattgattttccattcgtgcctgaagtttccgacaaagaatggggtaggatgtctaagaagaaaccaacagactgctcgggaatgttataaccttgcagtagccaaggctaagaaggaagtatcctctagcagagcacagacaagggaaaaaacatttccaagtagggaacttcccaaggcagggatgaagatgtggatcctcgacttggggacccaaacagcaatgttagacctgtggaggagttagaagagattgagatcaatcttagatatccccgccagaaagctaaagatcggaaagggtttgttgctcgaagtaaaatcagaattgataaaatttctgagagcaaacatagacatttttgcctggtcacatgctgatatggtcggaattgatctttctattattttgcacgttctgaatattgatcccaatttcgggccagttcaacaaaagcgaagcctattggacaaagagcaagcactcgccctaaaggaagaagtagaaaagctacgcaacaaaaatttcataattgaagctttctacccagcttgggtcacaaatcccgtattgctgcccaagccgaacaagaaatggcgagtgtgtactgatttcacagacctcaacaaagcatgccccaaggactgttttccacttccaagaatcgatcagctcgtggatgcaacaacagggcatgaaaattaagcttcatggatgcttatttggggtacaatcaaatcaaaatgcatccacccgaccaagaacatacaagtttccgaatagatatgggtctatattgttacaaagtaatgccatttggtcttaaaaacactagagcaacataccaaagatgttgggttttatgccctaaataaaactcatttcaatataatcagatttgtttattaatatagatcagaaataacatttaatgttgcatggtt

SEQ ID NO: 365674 - DNA, 192 bp, Cannabis indica
aataattatttatgttgatttatttgaattcagaatgtattttgtatgtcatatagtgaaatttcataattttgcatattcggtgcccgacaacatggaacgcggtgtatggctcagtagaatcacaatctaatattttagtatagcagagcggtattgttagacattgggaatgtcgggagtggtcgggaa

SEQ ID NO: 365675 - DNA, 1046 bp, Cannabis indica
ataatattcaaataattattactaaatatatcctaactaattaaatccttaaacatcgtcaattcattgtaaataatatacatcgtcaattcattataaatatcgattaaaaaaaatttaccatttgattattcttgtgcctcttatattacaatttcacacaatatttttggaaggatagataaggtgggagagggagaaggtgtgagcactgagcaaatatttatatttggtgatcaggtctcctctaggttttttagctatatatctatccgatttcttagaatatatatatatattattttaattatttttgaaagaaaagtcttaaaatatattttggtattttagttgtttagttgtttatttatttatttttttaaaaaataaaatagtaattgtacaagtaattatagctaatatgttttgatgcacaataaattttgacaatttttttcttctaaaatattttagaaaaatttattatatgatacattaaaaattttaaaaaattaataaaaatatatcaatacgaaaaaaaatttatttttactttttgaaactgttttatttataatttgacacaaaataattttgtgatatatttgcatcaatttttaattttgtactccaatgcacaattgcaaaaatctagatgtaaaatttaatatttaaatcaatacttttattaaaaataacttattattaattttattgttattttattatataaagcaataaaaaataaatgcaaaaaaaaatatttttgatgtaataacttaatttaataataaaatattaaaaatgacataaaaataaatataaaatttgtgcatttattgtgatacaaatttttgtttcatggtgtattgtaatttaaatttggatcaatttttttctacgtgacaaatttcgcataagctattgaacactattggagcaaactttttacattaataaactatattttagcaatagttaatctaaattaaaatctacaatataacatgatataaaattcacattacattaaatacacgtgcatg

SEQ ID NO: 365676 - DNA, 500 bp, Cannabis indica
gaagagaacaatcacttacggagatttcgaaacgtgttgtaccgatgggagaaagaccagatgtccagaagaagttcttaaaggatactttatttggaaagtctacaataattttaggttcgctagaatgaaaatcgagatagaaaaaaccccctacgacattcttcctcgatggaacggccttaactgagtaaatgtactcaatctctactggtgtgggacacccccaattcagaattttgtacaagactttccgactagagagaatcttgtaggagatgggagtcagctggaatggggcaactccaatgtgatttatgccttgtttgaaatagtcccgaagaggaagtgtggcccctgcgctgatatgctcaaggctccaggcgcccatactagtcgaaccactggtactagtctcaccactggtccttagattactgcttacaaaacgcgcaggggggtaacaactgatcttgccctcccgtactgatctaacttgg

SEQ ID NO: 365677 - DNA, 652 bp, Cannabis indica
ctctaatagcacaatatttaaatttatgtactggggatttatataatacgtaaatcgttcaagtaatattaattaattaggaaataataattcgcgctttgctcgcgtgcagttgtatttaatttattgataattaatgataaaataatcaaatttaaattttaatatttttaatataatattttttttagtaatatgagtaattatattactaaattttcattatttttacttagaaaaataaaattaatattgtaaaaaaatttattataaacaaacattatatatttaaaattgttgttattactgtatcttatttgtattcacactataatcaaaatggatgtatctcaactgtagtggcaactataattaaaatcactatcattcacgtatcttacttgtaatatataatcaatataatatgatattaataataaataaaattaaattttttctttcaataatattttcaaatcctatgttgtatatagggttttcaaatcttgaagatatatttttttttcttaaatataactatagtacagaataaataatttgtatatattaataataaataaaactaaaaaatttcttttttaaaatagaattcttagtggtatagtttcaaattttcttttttcaataatat

SEQ ID NO: 365678 - DNA, 787 bp, Cannabis indica
aaattcaacatggctctcacatgcatgatgtttttcatgcaataaagatcacagggaaggattgcttgaagtctattttatcaccgtgatgctttccctttgatcttttcaaacaaagtctaagcttgaatttttaagcaacttcaaccttcctttacagaagctgaagcttgcttcataaaaattcaacatggctcttgcatgctcgatgttttcatgcaagaaagatcattgggggtacgacacgccttcaaccctctttcatggaagggaaggattgctctaagtctattttactcaccctgatgctttccctttgatcttttcaagagaattctaagcttgaacttttatgcaacttcagccttcctttgcggaagccgaagcttgcttcataaaaattcaaaatggttctcgcatgtaggatgtttttctttgtaaagaaagatcactgggtgtacgatacgtcttcaaccctctttctcggaaaggattgattgcttgaagtctatcttactgcctgtgatgctttccctttgatcttttcaagaaaagtctaagattgaatttttatgcaacttcagccttacctcgcggaagccgaagcttgcttcataaaaaattcaacatgacactcgcatgcacattatttttcgtgcaagaaagatcaccggcggtacgatacatcttaaacccaccttcctaaaatggaaagactgatttaagtctttcttactccccgtgatgctttccctcttatcttttcaatcgaactctaagcttgaat

SEQ ID NO: 365679 - DNA, 549 bp, Cannabis indica
ttatattatttatattaataactcaaaatagttaatttatgctataattataatttaataaaataaaatattattaaatcaattaaatattgctaacttttcttttttttttttaaaaaaaaaaaaaaaaaaactttatttagaaggatttaaaattttatagttgatttattgtacacgattattttcaaaatgagcaaataaagattatgcaaaaaagagctcaccaacaatatcaaacatctcaagaatatctagattctcataatatttcaaatccatatagccataggctaaaatcctcaagtgatcaagttgattataaatgttatttacttaatagtaaacctcaagagtaaacccgggaaaaacctaaagaggaaaaagagtgtcagacaataatattaattataagagtctgtcagcaaagtgattaaggctcaaattcgtatattttaaatctttatttatgcatattaaattaatataaattaaatattttatattattaatggtaagtttagtttagttgaaaatatttaatttatt

SEQ ID NO: 365680 - DNA, 601 bp, Cannabis indica
tactcgacgggcaacttccatctgacaaaaacgaggcgcaaaaactcttgtattcagtgcctcaatacacaataattgaagccaaactatacataagaggttattcaatgcctttacttcggtgtgttcttcctacagaagcaaacgagatcattagaaaaattcatgaagactttgatgaagatcatgcaggctggcagagcctatctaaaaagatcattagacaaggatattactggccaacgatcaataaggacacacatgagtttgtcaaaaagtgtgataagtgtcaaaggttttcatatatacctcgcataccgccaatagaactaaggatgatgacctcgccttacccatttgctatatgggggattgatctaattagggcattacccacagggcgaggaggagccaagtatgcagtgctagcagttgatttcttcactaaatggactgaggtcgaccctcttgtttccataacctgcaagaaagtccttaactttgttgtcaagaacattgtctgtaggtttggaattcccatgaagatagtatctgacaacggaacctagtttaatggcgacttgttcactgagctctgcga

SEQ ID NO: 365681 - DNA, 540 bp, Cannabis indica
ttgatcctggtttgcctttaaaaagctcactaattgctatttgaggtgctggtcaaggctcttcccaatgtataaacatttggtggggtttcctgggttgagaataacctcctccaattcttcaattggttttagcaggtttctttcatcttgaactcggggatcatgatcttcatctttcttctcgttttctcctgccaagatcgtcattagctgatgaccgacctttctctactgcaactctatgcgataacaattacaagccaacatctggtcgccacgcaccactccaacaccatctggtgtttggaacattaaagacaggtgcttaattgaacttagtgcccttagtccgatcagtgctggacgacccaattgtatgttgtaagccaaaggcaggtcgacaaccaagaagtcttgcatagcagtagcagttaaaggtgcctctcctacagttaatgcaagctcgattatgtcaaggctagcaatgctatccccggtgagtctgcaaagattcaccatacaagtccttaacttggc

SEQ ID NO: 365682 - DNA, 605 bp, Cannabis indica
agtaatgtagataatgatttagggctagtttagtatgaaaaaaaaaaacagctatagtagaattgtaaaaaaaaactgaggtgagtgtttggcaaattataaattttaaaatattgcgagttattaagattctattataataaaaataatattttaatctagttcattataactataaatatcatatataaagatatgttacataaaatttttattttttatgtatttttacttatttttttcataatataaatttatatgcatttgataaaaataatttttaatatttttaaattatatttttatcactggtaaaagaaaaaaaatgtagtttataagaaatttaggttgatattgttatttaataaaaaaaaattataaataataaaatattttttaaaacaaaataaaaagttagaaatttaaatattatttattttaagtatttttcttttagtaaaaaaattgtaatagataataaataatttaaataaatttttgttaaaaagtaatttattatagagtttttaatcaaaacagtttttctaaaagttagattttaccagctttagttttagtctctagcatttctataaatttttcaa

SEQ ID NO: 365683 - DNA, 670 bp, Cannabis indica
agaattttaacagcaaaatcacgtaaaaaacctttgttcatacttttatttttacagcctttatttttctgtgtgaaatcattactgtgaaatcattactgaataagatcgactcgtggactatgtagaattatattataagatatgtgaaatacaatttttttaaagttttaagaaattagaatccttagaattatatattattttaaattaaaatatattaaaacaatctgaaaagaagatattaaaataaaaaataaattatacataattagaaattaaaaaaccacaatataataataagagttctttttaaataaaaagaaagatttaatagtagactttaataagtaaaaagaacaaatacttagcaatggacataataacaaagagttctttcattcaagacttagggtcagtttggcacagctgtgctgtgggaaaaaacagttgtagctgtgctgtgagaaaaagcagctgtagcaaaactgtggaaaaaagctgagctgagtgtttggtaaattataaattttaaagtactgtgagtacttgttgagatctattataatgataatgataatgttataatctaatttattataatcacaaatatgtaaaaacttattttatataatattttatttttatatatttttaattttttttcaaa

SEQ ID NO: 365684 - DNA, 656 bp, Cannabis indica
atttcctttagcactcctgttttaaacagttatattttctggtttaataattcaattaatcacattttgaactcctcataatctcttaagatagtgggaatatatttttgaaatgttaaagggcaccagtggtgtctaacactattctatatgttaatatcgctactggtccaattaaatatcgggtcccatatagtttaatataataacttttagggagtatcactaacgcgatatgtcgagaaggtgatagacactggtgtctaatagcaatgctcttttgaataaattagatagaatgaattaatatacaataatattatgtatatattcttttattaaataatatgttcattctataacagttaaacttccgatagaaactatataatatatgtatatagtgattaattagaaaagattctaattacaaaattaggtgagtttaaattgaaagtgagacagtacatacataatgttataaatgttatatgcatcagctttgaaaagataaaccacgtgataaactcaaaaaaagcggttaaaaattatatgaggcctagttttctgaattatacattattattttaatctcatttatgatcttatctctttcttcttggaatcttcagtcggttatatatatatatatatat

SEQ ID NO: 365685 - DNA, 591 bp, Cannabis indica
tcccaggggcagggctcgtggcctgggtgatgttaaccggccacacgctgcccaggctgcccaagctactcaggaagcccaaaattgggaaaataggtttgcagaaatgcaagcgagaattgaggaacaagacagtgaaatctagggactaagacagcagggtgctcctgcagtgcctattccagagtttctagtggcatctgcccctgttgtcaaggccgaacctacagttgcagtgaaacggatagagcctctgtacgaaaggttccgcaagcaggcacctcctgtttttctaggaggtctagacatcatgaaagtcgagcagtagctaacagtgattactaagattttgaatttcatgggcgtcatcgggaatgatagagtggtctgtgccacttttcagtttcaagaagaggcattagtatggtgggacatggtgtccatgatacacgatgtcacaacaatgacctgggaaaagttccaggaacttttcaatgcgtagtactataatgaggccgtcagaagtgccaagataaaagagtttactaacctgacccagaaagaaaacatgagcgttactgagtacacaac

SEQ ID NO: 365686 - DNA, 579 bp, Cannabis indica
tgttcctatttcgggtcccgagtccgagtttggatttgggtcctggtgtagaaatggttccaggtttgggtcttggtacgattccaggatcgagctgattttgggtccaggtccaattccagttccaaggtcctcattctgattcttgttcctatttcgggtccgagttcgagtttggatttgggtcctggtgtagaaatggttccaggtttgggtcttggtacgattccaggatcgagaaactaactacgggttgggtccaatccccgagtcgtgggtcaagattcggatcccaatcttgggtcccggtctcgtttcgatttggatactgggtcctagtccgtgtctgtgtccgtgttagtgtccgggtctgggtccgggtcgaggactgaaactgaggtcgggtcttgggtcccaatcccactcctgggtcacgattttggctctaatttcaagtttggttccccaatctaggtctgggacttaggtccaagtctgagtgtccaatcccggcccggggttgtgcatctgggtttgggtccaagtccgtgtctgggttcgggttcgtgtcctgagtcc

SEQ ID NO: 365687 - DNA, 547 bp, Cannabis indica
ttgagtgctacatatctgaagaggctatggaatttgttcagagtacatggccagagttgaggcaataggaattagcaaactaagaactgacccaaatgaggttgatagaggatttagggagaaagggacaatggtgacagtgtctaagcttgaactagatcaagctcaattagtcgtgatgaagaataatgcagaggttcagccatatataaaataagtaacttttcctttgattaacatttcttaagtcacgatgaacaataacttgatttaccttacttgttttatagtgaccatatagagctgttacaatcaaatgttccaagaaatcataaaaataaataaaaatgggttgtagaccaacatcgtcaaacttttattagtggtttaggaataccattatagcaaagttgaacgaatgaaatcatggagtatctgatgtgttgagtcgtattgcccttggatcaacttttgcggtagcaaagcatgacgtgtacactgtaaggggtaaacgtttccatacaaagtcaagagatgatgctcgaaa

SEQ ID NO: 365688 - DNA, 630 bp, Cannabis indica
ccatcacccgcattccgacgcattagttatcatcgccaatattggcggagataatgtccaccgtatactcgtggacaatggaagtttagtaaatcttttgaatttccaagctttcaaacaaatggggttgcaagagaaggacatgcgacccatgacgtcgagcatatacgattttacgggcgacgtcatcacattaaaaggaatgatcaaactctcgatcaccttgggaaccgcccaagtaacagccaagtcaatggctgatttcgcagtgatcgaccagtattcggcatacaatgccgtgattggtcaaccaatcttgaaggagatgaagatcataacctcgatctatcatctcacaataaaattccctactcccgtcggagtaggttctgtgcgaggagtccagtcagactcacgagaatgctacaatgcagcagtcaagctcagggagaaaaagtaagtgaacgtcatctacttattggaggcaccacatcgaggaggtaccacacatggatgaaccagatttggatccaaggatccttgtgttgagttttatgccctaaataaaactcatttcatataatcagatttactcattaataaagatcagaaataacattttatgttgca

SEQ ID NO: 365689 - DNA, 570 bp, Cannabis indica
agttgtaaagtcactttgtgggatttgctttttcccaatcctagccttttgaagatagacaagggcattagattaatgcttgcccccagatcacatagagctttagtttccaccgaacccccaatagagcatggaataatgaaactacccagatctttaagcttgggcagtagtttcttctacaaaattgcactgcactcctcagtgagtgccactgtcttgaattcttccaacttccttttcttagctaaaatttctttcatgaactttaggtaagttggcatgtgctccaaggcctccgcaaatggaattaatgtgcagcttcctaaacatttcaagaaattttgaaaactgctagtccaggttattctttcgaagtcttcaagggtaaggaattttaatatggtgatctatgctgatcgcaggcgaagtttctttcagtgcaagaccctcagtagtcttcttttcctttggtgtctgtgtctgcccgttgatcttgaatcccatcttcaattggttgcttgtaactaggttcctcataactctttccactcctcaaggaaattactt

SEQ ID NO: 365690 - DNA, 523 bp, Cannabis indica
gattctcctggggagcctgctcggttttgctggggaaacttcccttcttcccattcccttgtctgtagttgttgttagaatgtttaccatttgagctcgaattattagggtaatgagggagttaggcggacattccagtgggaggagcttttgacttgccaggcttttgttcaccttttgctcgctgaatagcttctttgagtttaatgaagccttcagcacggtcgagaaaatcacacattgagtctaacaggctgttcttccttatgtccttccaaagttcacagaggacttcaataacccccagtatcacggacagctttccatcttcaggtacccgtgaaactttggtcgcctccatcatgaatctgctgatgtatgctccgagaggctcgcctggtctttgcttgactttgaccaggtctcttaaatgcaatggaagttggcgagaggaggagaatggtgcatggaattttgaggagaaggctttctatgagttgaactttccaggggccagcttgaa

SEQ ID NO: 365691 - DNA, 653 bp, Cannabis indica
aaaaaagaaaaaaaagaaaaggaaaaagtaaaaaaaagttaaaaaaaaattatttttaatttttttttatttttttaattttttttaatatttataattattttttaaaactaatattacgtggaccactaaaaatttgccacgtgtacaagtgtgtacacgtggacagtccactgtggcacttaacggtgatttttggacggaggtgtgcagagcaaaacggaatcagggtttaggtagtttagccgccaaaaattcgatttttgtggttaagtgttacaaaccgtaaagttcaggtggtttagccgccaatatccataatttggtacaatattaaaatttagaggacaaaagtcctaattagtttttttttaatctatttttggtttgcttatgcggttgttttagagatactagtggcaaaatcacacccgaattttatgttttttaacatttaatcacaaaaattaaaattttgaaggcaaaactacttaaacctcacttttgttatgtttttcacccctctgttcaaaaatttcaatttaagtgctacagtggacgactaaggtgtatactaaagtacatgtggcaaaatttgagtgctctacataatatcaaaataatacaataatttaaaataataaaaataataa

SEQ ID NO: 365692 - DNA, 678 bp, Cannabis indica
aggagacacttaattccgctgccatcactgtaagttaatcttaacttttatgtgttttgtttattgttttagaagtttatatttaggttgttaaatcaacatacttgtgagtagatctaagatcctggtaaaattatttccaacaacatcgtaacctgcctttatatatattattatattattgtccatgagcttaagcatatgtatctctgtatttttattttccacgagctttgtttaacttatgtattgaaattgttgaacttggcaggaaaaaaggcaacaaaatagacaatagaatgaccacaaaatttttatggcctaccctaattcagtatatctgaatcctgacccctgtgggtgataaataaaagacttgcttggtaaaaggaaaaaataaataaaaacattgattaggttcgtgatcttctaaaatgttaaagaaaacatccactttgcaaagaaaaaaaatgaaagaatgaacttaccaagcaaatcctaataatgcctgcaaaatacgtatttatgattgaaggccatgtaattcaacttctgtatcaaaaagagaatcttctaataaagttacttaccgatacctagccatcaggatgtttaatagaataaaatttaaaagtaatattaatttatttaaaaattaataaaaaaactgttattttt

SEQ ID NO: 365693 - DNA, 505 bp, Cannabis indica
atttaattttgtagttttttttatttattgttatttttttttaaaattacaaatagttttataaatatgtttaaggtttcttttctatcgatgagggatatgaaaataaatatcagtttagataaaataaagagataagtggtgtacatgaatataaaaaaattaaactaaaaaaaattttgaataataaaataggtagaaggtacatcagtacatctatttttaggtggtgcaaccacccaaagtttatttaaaaagtactttatctttagaagtatagacatgatactctttttaataatatttatatgatattttttaatctaaaattatacatatatggtatactgggtttcaaatttgaccattaaaaaatgaatttgaaattaaaaaaaacaaaaaaaagacagtttgatcttagttaaagatgtttacagtgtgcacttggtttggtgtatcccaatctcatgcacctctatctaattctgtatctaaaaatatttag

SEQ ID NO: 365694 - DNA, 587 bp, Cannabis indica
ttcatcaataacataatgaaaaatacgcaatgcctaataattttacttctacaaatgatactaaatttaaaaaccagtttcaaacatatagattttaattttatttcttacacattattttgtattaattttaatacttatttttatattttttaactcagatataatttttattttttaaaagagtttgttcatttttatattttaaatcagtttttttacatttttatggaattctatatagaatcccctattacaactagcggagcaacctaaatcgcaaccaaaaatcgtataacaacccacatagaaaccaccagagaaactactttagaaactcaaaccgtaaatttgaaaaaaaaaattaaaaaaaataagtatatagggtaattttctctttttgaaataatatttaagttttattttcttttgtacttttgttgacatgatatataatttgattagtatcctatacattttttatttttatttgttattatgatatatattttcgatcataaggtatattatatttttttatattggcatataagtttttattgtatagtatattattttattttaga

SEQ ID NO: 365695 - DNA, 802 bp, Cannabis indica
gatcaaaattcgatggtttgatatttttaaaattaatatttatagttagatttttttagtaaccattcatgggtaatacccattaagaagtgttccatacatttacatatatatacatatacacacatacataaattaatatacacatatatatacatttacatatatatacatttcaattttatacacatatacatatatatttacatttacaaatacatatataacatttacatatatatacatatacacatatataaacgcatatacacatatatatacatttacatataaatacatatacgggtatgctcttaatgggtattacccatgtatgagtattttattcttgaccattggatcaaatatctaatgattgatatttatagtcattaattaaatattaaaaaattaatatttcctattttgttattctctatattcctaaaatacacaaaactattaatagaaataaaaaatttatacatagaattgttatttaaaaaataaaacacactaaaaaaaactaccaaactattttttttaataaaaattttttaaagattaaaaagaaaaaaagtgtatatttatctttttataaaatttcttcaaactaaaattctaaatttcattactcagaacaaaaaaaaaataattttaagctttaagctttaatacatataaaatgtataagattttttctaaacctaaaatctttaatttcataataattaacaatcatttatatgtttttattttttttttaaattacttgagcttaccaaaacctataagaacaaaa

SEQ ID NO: 365696 - DNA, 619 bp, Cannabis indica
caacagaccttgaaggatacacaaagaaaagactcgaagatgccaaaggaaattggctggaagaacttcctgaagttttatggtcatatccaacaactgagaaaaagccaaccggacagacgccgtttgccatggcattggatatgaagctatgctgcctgtagaactcgagccaccatcccacaggagattggcatacaaccaagataccaatcacgtactcctggccgaatcacttgatgaaatcgaagagaagcaaaccacaacaaacttaaagttgatagcccatcaacaaaaagtagctcagtatttcaataaacaagtgaaggctcggaaattctttgtgggagatatggtcctaagaagggtattcctaaacaccaaagacagtgcggcaggtgtactcgaacctaattgggaaggaccatatcaggtggtcgaagtcctcgaatccggagcatacaaatgaggtaagtatgatgaaaaaatgcaacttgttctggaccacggtattggcatagagaacatttaagaaaatactaccaataaagtaccaggtcggacgaccatactaagtactgaaagaacatttacttttaagtgaatggcctgctgggcg

SEQ ID NO: 365697 - DNA, 1087 bp, Cannabis indica
aatcacaaccacatgagtggtgtccctcacttagggtataattcttatgttataaatcttgtgattaatcaatatctgagtcttaaggtgaggagttttcaagggaagtgatggaaatgtcaaacaaacaaacgagtataacattttcaattacaaaagaaaagatctcctattttgttatgttctgtttttttgcttatagttgacaatagcaagtggtctccaccatccccacgccccgattcgtgcagagccgttattttgatttatttaccttatgcaatcaattctagcatacgtacaaaattgaatcgaaattacggctagcaattaaattgtagtgcatgtttgtcatcataattaaaaaattgttttttgtttttaaaaatagaaaactattttttgaaaataatttgacttgtttggcattgtttttttaaaacagttttcaaaaaataaagtttacaaaaaaacaaaaattttgaaaacaacaaaatattattttctgttttaaaaaccaattcacttttggttaatattgtatttaaaaaatattaatcaaatgattttgtttttaaaaaactttcaaaaaacttatttttgttcttcaattttaaaaaataattttttgaaaaactaaaaaacagaaaacaataccaaacatgctccaagatttgctttatttctagatcactagaggttctaatatataaaacattgtggagttgaaaataagcaaagcctttgcttttcttctcaccgttcttccaaaaactcagcaaacttaatttatttcctgcttcaattttgacactggaagttgtatctacatcttcccgatgtttgaggtcacacttacttgagtccttatgttttaaacttattgaagaataaaacacatttgatctaataacctcttatttctatgttgtgattttattgaactatataaatgacttatcaacattattttcaatctaagtagttccaaaactaatataatataatgctagacctacttcttaaactttcttaatttcaattagagaagagcagaaaaaaggtcaatagttaatcaattaaatag

SEQ ID NO: 365698 - DNA, 641 bp, Cannabis indica
gtaaaatatatccaacagaaagagcatagtagagaataggatcatgtagttttagtttggtaccatggcgctctttattcctctctgtccaaatactccataggatatttgcaaactgttcaaacctgactaaagaccatgaagaggacatatgaagtaaaaattcttttagattcatattgtctgtgagaaattcttgaataccaaagttagaggcagaccacacttttttagctcttttgcagaaggaaagagcatgactaactgtttcaggccttctgctacataaagagcacgtagccgagtctgcaatatgctgagtgtggagggagttagcaactgggaggcaatcgtggatagcacgccacaagaagatacgaactttggatgggattttcaaagcccagaattttttccaccactattgtgattgtcaatcactggcagtggcctggttttcttcaagagcagtagccaaattataacctgatttaactgatttaactgaataaagaccattcgattcatgatgccatatcaaacttgtattgttgttcaaagagagttaaaggtaagctttgaatcttaatgacatccaaatctaaaaacttctatattaagactttatttaataatttttt

SEQ ID NO: 365699 - DNA, 448 bp, Cannabis indica
caaaccctaagtcaaaaagggattgggggtcccctaaccgttggaaagaggccccctccagtcgtttgtcagcaagaaagccttagaaggctttcttggacaaaattcgggtgcaagaatctcacatatggtgacattacgaataagcaaagaaaagaaaagaaaaaaaaagggtaaaaaatcgagaaagacaaagtcctctctgaacccttgagggtcatacacgtaaagaaaagatgggccttggaaaaaatatacagcacgcaaaataaaataactcaaaaactagaaaagaggaatctaacgtatcacacagaaactcaaggcaaaaaattcccagaaacttcaaacatcaaacctagaaaaagtagatgaatagtgaagcatgcaacaaacacgagcaataaagtacgggatgcgaaaacttacataaagttttggaactggg

SEQ ID NO: 365700 - DNA, 834 bp, Cannabis indica
atattttactattaaaaaaattaaattttactatgaataaataaaagaatgatattattttcactaagtaaaaatttataccattattaatatataactcattttaaaaagaatttatattaataatttttaattattataaataactttatgccagatgtacttttatttttattgtattaattttatgtaaattatatataaaagagattttatatttatataaatatattattataagaaattaaaaagtattaggtttaaatttagtttttaatatataatttaagaaattattaaaaccgtgcaaaatacaaatctattctgcagttgttatataagttattattctcctctgcacatgagttggcttgaaacttagattaatgttaatactattttcaattattggttttactgctaacccttccgtaaggaaaatgtatattattatttaactttttgatgaatagattctgtatttaatgattctttagtttataataattaaatgaagtgtgtaaaaataaaatgaaatataatatctataattctattataatttagaaacgttttgaggttgtcggtgtttcaattttcaaccataaaacaaaagcaaagtagcactgttgagtcggtcaagtagagaagtgagctaaagaaaaggttattgtactttgttattccaatcaaaattatttttacacttttaattgtctaccataagttccaattttccaaccaaaattttgatgattgcaatttcattatttgaaaaaaagaacaaaaccctctccaaataggattaaaagtgtaaggttttttttttttttt

SEQ ID NO: 365701 - DNA, 516 bp, Cannabis indica
ctgatgactcacgatgcgaaagtggaattcgctaagtattttgtcattctgtgcggattactgaatactttgctctgggcatgctagtgaggcatcctactcgaactgtgcttcccgaggagatgttccaagtagactccacgtgtcaccattcaagtgatgccacgtaggagtgcaaaaattgggataacagtaacaacctaggtttaggttagatttaattagcattaaaataatagaaaaataaattgtaaaatccatgcatagcggctggccatgggttggataatgggcccactttgccattttgtcattttcccatcttattttctcaaaaatgccaattttccaatttaaccacttaaatgccaattctaattatttaataactaaaaattaattattaaataatatcttcatttaatatatttattaattagacttatcaaactctattaattaacaaataaaccctagaaactcatttcttcacatttaagcccttgcttagtgaaa

SEQ ID NO: 365702 - DNA, 564 bp, Cannabis indica
agaataacaaaattcaaacccaggattaaaggatgcctggtcagccagttgttcaaaaaatgaaaagtaatatttcaagtttcctgtaggccgcttgagtagtgtagtagtcaagaaacatgtcttggaagtgtcaagagattcaaagtttgccttgggattttccttccaaaagtaataaaaaatcttgagaccagctatctctaaggcattcaccttttcgccgagcttcttcacctcagatttctggctcttaacctcagcctcaagttcctcctccctagtcttcttgtccttggcctcatcctccaacctgcggagaagagtttgaaaaccctctctttcgtcttgaagagtggcaacatcccgagataaagaagcattatctacctcgagctgctcggttgatggcatctcctgcagttccctggtcagctcggcaactctggtctcagtagctagaagtttcttgttgacttctccaagttccatccacagagtctcaaactgagtccgcgcatcttcagcttcctttttggccaagtctgcatccctttgcagtgt

SEQ ID NO: 365703 - DNA, 420 bp, Cannabis indica
aaatgacatgtggataatgatttaaaatttaaagaccagttacctatggagttttaaaaatataatttaagtattattaccgccaaaaattaaacttaaatatgagttaaacttaatatttatgtcgcaaattactcattcagaaaatatgaattttcaccacggccatcacgcataatacatagaccattgcttgtaaaaccaccgctaactgttgatgacgaaatgaagccaccatatgagccggccgatctcaagagactaaatcaaaacaaaagaccgaatcaataaaagtagcctctaattatagaaacgtcttgggagaagacggagaaaatgggcaacgagagtatgggatgggaaattatagtaaatggctccaaattataggattatattagtaaatgtcctcattttaaa

SEQ ID NO: 365704 - DNA, 868 bp, Cannabis indica
atggcagattttgattacgattggcattgggatccatcacttcagggttggagtcaccaataccatccttattgtccaaactcacctcaaccaattgaagaagaggagaatatactatcacttccagaagagattaatcgcttggcagacatggtaagagctttatgtgataatttaatggcgcatgattcagagagttttaaggataataactcaaataacgaaagttatgaaagttgtttgaatatagtagaagcaccagtagatgaatatatagaagaggatagcctataattgaagagaaagaatcctttgaagaggctaaaaatttaggtacactggatgcttgctcaacaaatgataatatcaattgggtgaatgaagaaacatccatcctcaattatgaagttattgaagatcaagttagagtcaaagatgtggatggtcacgagaaaactgaacaaccaattgagaggttatttgagaaaagtgagaaagaggtgtcactggtggatgaagaatcacatgtagttgttgatttgaggtcaccaacgtcactatattatgaacaaccaatggacccttatttaccactaataccgtattcgccatattgtattctctacgagctaccaatagtttcttccaagctcatcatctaaagtcttgtgttgttggtgcggcttttggttcaaactcattgcatgccaagcttgagggcattttcaaaaataacttttaagtggtcctacatgacgcttattatgagcgtcaaccacttgttgatgtggcatggacctaaggtaagttttcttctctttaaatttttgtttcacattagggacaatatgaaattttaagtttgggg

SEQ ID NO: 365705 - DNA, 548 bp, Cannabis indica
ttattctaagctttatgaacttttttgccctaactcaagaaaactttctgacttttctttagacatagacgttctttaatctgttgagtactcctggacgacatatttgcttgtttttcatttgatactccgtccaacactcatcttgtgtgttttcttttgtagatgaacccaggtgagtcttgggaactcgggcatcagattgacgaagatctgcttcaacttatgcatgaagatcatcctcgtcttcgtgctagtccttcttctagcgaaggacattctcctgaccttgtacccagccatagaatgatggcttatacaaagaaaaccatgcgtctggccgacgctactgatcctcaagtggctcggcttgccactctgcctagcgccgaacaggattcggcgtcccgatggaggaggatcgcgagggggacgctgaggtccaggaggttgaggagatggacgatgctcgtccgggcagttcttccaaggcgaagggagaggaataggttgaacccccgaaactttggggagtacaatgaggctgg

SEQ ID NO: 365706 - DNA, 508 bp, Cannabis indica
attcaaaccaaagatggagtcaccatccttgtggtgatcatgcaatggccagcgacatggaaacccaatgaagatgtaaaaagtctgactaaacaagacaactggatgacgctaataatgcggtacctagaggatggaacccttccacatgacaagaatgagttaagaaaattaggagctaaagcggccagatttacactatacaatgggaaactctacaggcgatcattctaagggccattactcagatgtctcttaccagctaaatctaattatattctccaagagctacatcaaggtgaatgtggaaaccactcaggccatcagagtttatgcaataaagctctaacaataggctactattagccaaccatgcgagcagactcctataattttgttcaacaatgtgacaagtgccaaaggtttgctcaaatatctcatctaccaccagagaagctccactcttcacttaaaccttggccatttatgagatgggggatggacattg

SEQ ID NO: 365707 - DNA, 511 bp, Cannabis indica
tatgccgctatttacccaaataaatatatgttgcttaaaaaacctcatattttatattatttacattaacaactaataataactaatttattatataatatatatacatattgtcaacaaataattcatggttatattttaaaataaattaaaagaagggttaccataataaaaaaagaaattatctaccaatttagagtaaattaaaaattctatcaccatagtatgaaatttaattggcatttttataaaaatattaaattttggcaaaattttaaaattttattgtcacacagaattttttacaaaaatactgtctttttataaaacaatagtaaaataacaaaacagaacaattaaaacaataatagaacaactgaaaaacaatcgtagaacaacagtgaaaacttaacacaatacacactataaaaaatacacagtattttaaaaaaaaaattccgccccataataaaaaagaaaaaaaagttagaaatttcaatatatggtgtaa

SEQ ID NO: 365708 - DNA, 741 bp, Cannabis indica
ttgatatggacatgatccttagttcactataatgttattcaactagttttaggcattttgtttgtgccggaatctttttcttatttgttgtataatgccttcaacttagaaagtagaaaagctctgttgtttgtgtgttggatgtgataatagttcgagtttctgtatttcaacaattaggtcgtgtttggaatgttggattggattgaataatttcaattcagtggtaaaactcattcattcttctatgtttgtttgttttttcccatctaacaattatttaaaacattcattatattgtaggtcatatcattagaagtagaacaaaaatcttgaggcttagttgttgaaacttgaaaccacatcaatttaattgcttatggagtaatactgacatgattgtgtgtctatatagatgtatatgtattatttttaaatatattcttaaaacatgctcttccatcaaaagctttatccaaaataagtaattgtaaaagtagcattactggccatgccaatgctatattccttgtcaacattttggtgcttctataacatagtgatgatgacatttttgagtttattgaaatttaataatctgtggattgttcagaaaaataccttagggaaaaggaggaagcaatgcgctccgggtcgggaatagagtggtcggagcatggtggcgaagttagcaattttacttgttttaaagcttttgtatcaaattaataacatagagat

SEQ ID NO: 365709 - DNA, 508 bp, Cannabis indica
ttttaaaagttagttgttattttaataaaattaattagttgttttatcttaatttaagtaaaattataaaactaatgcaggaaaaaaataggggaaaatacagatttttttgctattaattttttttttcacatttctgacggtttaaaatcgtcgcctataatagggtataggtgacgtttttaaaccgtgccctcaccgtcgcctataccaccctgttataaaaccgtcacctattttgcccgttttgcgacggtcgtataagcgacggttatagaaaacgacaggaatattttaaacgaatatttaaaaacatcgagaaaaactatttttatagtagtgcataattaactaacggtctatttagtgtccttagtgctctctttatgatagcataaagtagcgctttataagagtaactgttatattattttataatataataagtataaattaaaatgtgataaatatattattatgtgaataatatatattatgtgtatggtaa

SEQ ID NO: 365710 - DNA, 1255 bp, Cannabis indica
gaatggttgggaatatgaactactggaatttctttaagtgtcaatcctgagactagaaagttgtgcacaaatttagatgggatctaaattatacttcaactagttaattaatggtactaaaggataaagaagtaattagaaaggtaaaacgctaatttgactaaaactaattacaaaccaacacatggaaggctaatcagtggaattaattatatcaatggacatttcactaaaactcactaaatataattctataattactaagagttcaattctatatttatagtggagtaatcatgtaattaataaacaaagattatttggttgttgagactcaaaaaataatctagtttattggaacttagaattataggttcatggtccccgaattgcctccttgaaatactgtcaagagaagggataaagagttttataatgttgttcgaaaaaatatattttgaattggaaaaatatatgaaaagtcacaaaccacgcagtcaagtggttatcgaggaaataaaaaatgggcaaatttgtgacccaacaattctagcaccattagttgaatgactgacaacggttaccacgattcctgaaaaggaaacccatgtacatcatcatagtgggaggattgtgagacaacttgttcgctatgaacatgaagcacatgttcttgtctttgacacagacaagaacaatccatcaacttacaaagaagcaatagaagagcctgactcagacaagtggaataatgccatggatcaagaaatgaattctgtgcgcaccaacaaattctgggaatatgaaactccacccaagaatattacacccatagggtgtaagtgaattttcaaaaagaatagaaattttgaagggaaggtagagacttttaaagctaggcttgtagctaaaggttgcacacagcgagaaggcgttgactatgatgaaaccttttttcatgtggcaatgcttaaactcattcacattattctttatataactgctacttatgactatgagatatggaaaatagacgtcaaaactgcttttctaaatggtgatcttgataaaattatttatatgaaacaaccagaagggtatgtgctacaagggaaagatcgaaaggtgtgcaagtttcttaaatccatttatggattgaagcaaaatgaagatgaagcctatgtatacaaatacatcaaaggtagtgtagtgatttatgttgatgacattctacttattagaaacaatgtagaaa

SEQ ID NO: 365711 - DNA, 513 bp, Cannabis indica
gaagcggtatgcggggccgtgaagcacaatgaggtttgggaggttacccaactcccagctcaaaggccccggctgatggatcaacccatcacattcacggaagaagacgccaagacggtgcgttttccccaccatgatccgttggtcatcgagacccccatcgccaataaagtagtggccagggtcttgatcgacaacggaagctccgtgaatctactcttcaaagaggccttcactgcaataggcctgacggaccgagacctttcacccagtggttcccaactcacggggcttaacagaacgatacttatcccaatggggaaagtgagacttcccgtcaccttgtgcccggacaccccccaaagcacgttcaaatactgcactttcgtggtggtagactgcccgaccgcttacaacgcgatcctcggccgaccggccctggtagatttcagtgcagtcacgttcatacgacacttgtgcttaaagttcccaacccaggaagctggaataggg

SEQ ID NO: 365712 - DNA, 516 bp, Cannabis indica
cattttgtagctggtaggttctacaaaggtatgggcagcgagagctgctactcgaaagtgctgtgtcaacctattggaagacaaatatttattaatagggtgagcagtagaagaagcagcagcggtattgcaaatataatcagaaagacgttttggtctagataaaagtcttcccattgttgaagtgataggagaagtagttgatatgttcttggatgtgaatggtacttcatcaggagtaatgttggtgataggcaaactgttagagtatgaagttccatcagatttgggaacatgtgaagtgtcctcagagagagtatgtgaatgtcctgtagaaggaagcaaagagagtgagaagaattcatttatggatgtgggagatgtagtttcagaaagtgaaaaaatatcttcatgaaagtaaacatctctagattgaatgatttcttgagtttcaatacttaaaagattataagctttcataccagggggtaacctataaaaatgtaaggtcgagat

SEQ ID NO: 365713 - DNA, 542 bp, Cannabis indica
tggaaccagactagggacacagaactagggtcgggacctagagccgcaccgcagtctcgatcccaaacccaaactcagaaatgggacctaggacctgaactagaacaagaccgagacccgtgacagtgatctagaacttgactcgagattcaggaaagggggctggaacagaccagtagttggtgtctaggtctgggactcagacttggaccataacccaaacgaagaaacaaacccgaacccaggccaagacatgggacccaaaattcgaacctgaaaaagaatcttcgaactaggaccctagaactagacaaggaccttgaccaggacccaaacccagacctagaaccgagcacagacctagcctcagacccaaaccgagactggaactttggcccgtacacggtcgtgtgcccagaccaaaactgagacctggacctggacctaaatctgggagacgatcccaaacacagacttggacctcgatagggatctggatacgaacctggactcgagccaagaccatgattgggatcgaaatg

SEQ ID NO: 365714 - DNA, 535 bp, Cannabis indica
agctgtatgctaaattcaaaaagtgtgaattctggttgtctcgtgtctctttcttggtgcacatagtagataaggatggaatcatggtggatccggccaagattgaagttgttcgggattggccaacacaaaaaccagccactgaagttagaagctttatgggtttagctcggtattatcgtcggttcgttgagggtttttcaaagattgatgtacccttgacgaagctgacccgaaagaacttgaagtttgtttggactgatcgatgtgagaaaagttttctggagttaaagtagtgcttgattatcgctccagtgctaactcttccatcggataaggaaaagtttattgcttattgtgatgcctcgagacagggtctcggctgtgttcttatgaaaactggaaatgtaatagcctttgcttctcgacagttaaaggagtacgaacagaggtaccctactcacgacttagaactcacggcagtagtatttgcgctaaagatttggcggcattacttatatggcgagaaatgtga

SEQ ID NO: 365715 - DNA, 504 bp, Cannabis indica
gtcaagattccattattgtgatcatattccattattgttatctacattattagattttcaaaataaagttgtaagaatcatcttctctaataaactttaacgagtaaatcaaaaaaaatctaataacgtgaacaagagttcacaattactcaggattttaaccaatccactattgattatctttataatgtgaattaggtctttataataaatggtaagtttaatagagacaactttattcatatcagttattgtcatataatctttattatatacaacatcttcacttagatatcatgctacaacagtaatccaaatcgagattacttgcaccgaataacattcatcagtaaaccatactagcaaccattgattaaaaattcataaactttaatatgttgctaactgttttattcatggttacgtgattttaattctctgtacaactataagttacaacctcatatataaataagtaatttttcgatatttatatataaatta

SEQ ID NO: 365716 - DNA, 565 bp, Cannabis indica
atttttaaatctctccccccaaactaaatatgacattgtccccaatgtatacaataaaatgcagagagaagagacttacgtgagaccctctcagaaagggttaggtggcggcggctgatcatatggatagaaccgaggaggtggcgccaagtaattcgggtcatcaatctcgatgttcattctattgatgagagagttgagttggtgaacttgtccctcatcatggatactcctctgcaccatatagttttgcatgtggttgttttgttgaattatataactcagctgtgcatgagtgtattgcatcgttggatcgatgggcccaagcgggttgctcctcctcttcttcaacactaggctctctttgctgccttcggccttgcggtgcatcaggtggaggctggccataaggatgtggctcttttagcctgttgacaaacgtgatatccatctttcgaagtggcaccaccgtgttatcatattccagttgtggcacgtcatatgccccgcagagttctgttatgacacctgccaaaccaagaccacctcctgtggatccttgtac

SEQ ID NO: 365717 - DNA, 822 bp, Cannabis indica
tctatttccccaaaactttctattacccccaatgctttggaagctttagccttccatttttgatcagggttgccactgtcggtccccttacttacattaccactagtaggagggttcgatgtcgtgacagtatcctttgcagtctgctcgtttactacatgttgctcaaccttgtcagctatcaaggctagctctaccactttcttgtacaaagagtaacgtaaagtgttaattttcaagtcccgactgatcgtggcattcagtcctcgcacatacttttgtttcctggtaaaatctgtgggcaccagatcaccatcaaaattggacagccgatcaaactccagagtatactcggtcactgacattttcccttgagtaagcttcacaaagtcttctatgtgtgaagtcctcacagcaatgttataaaacttcccttcaaacagacttttaaattcttccaagtcattgaactgacgtcttgggtctaacccacaatatcccaccagatgcgggcatggtcttgccacatgaagactgcacagttcactctcattgttcccgtcaccgccatattattgaggatatgggtaatagtaatcatccactgctcgaccttaattatgtcagtacctcccagaaaattcagaggttgcagcttcacaaattgctcaaatacagaacctttatgcggcattataaacccctggttacccaccactgtcagaggtgctggtggtaagacttgatcaacaggggcagccggtgccggttgccttaatcgacacaactcttcctcttgacaaagtataatacctcgcattt

SEQ ID NO: 365718 - DNA, 1176 bp, Cannabis indica
ttttttttaaaagctaaattagctaatatacttaaattaattttatgattagctaatatatttaaattaattttatgattagctaatacatttaaattaatttaatataagtaattaaaaaaaaattacaattatatattacacaatattgtaaaattagtccaagtgttaacaagttaataaatctaattacaagttaacctaaaaaaataagctaggaaagaaaaattcttaaaaatttcagcatcaatcgtccaagccttcgtgaatcactaccaacaatcgttctatccattatccctgtaatggtaacaattcaatttttagattgtatgtctgcttttctccaaactgtaaaaagaaataaaaatttatattagtttatatatagaaatatttgcaccaataactattattattaaattatttaagaatttacccttacctattttaatactcacaatttaggcatttcttttttataggtataccaatgtatatttattgcttctctctcttaaactctgcctacatgctagctttttttttttttctttttttttagacagttagcttttttttttttttaataaaaattcttattttttcaaaataacagtaaactaggttgattcaaattattttttttttttttacatttctattcttttttttttttttattattttttacatttcttttttgttttttaatctaattagtagttttagaaaaaaataattatatgtatcaacgtgaattgtatttatgaaattttcttagaccattttattgttttcaataccgctacacgcctactaaaattaaaaattaaccatatgtttttcttttacattttattgactctcctagttgatatacaatcagatttttttttaaaaaaaaaaaattatgtgaataaacgacacaaattgttattattctcactttctttatttttttttatttcaaaagttttttcagccacgcaatttattatttggacacaaaaattacactattataatctattttttaaagtgatcattttgacatgttagaagcatatatttttctgctacaaaaaaaaatagactaaaattaaaagttagactaaggtttcttaaacaacaaaataacacactataatttaaaatctaaacaagaaattataag

SEQ ID NO: 365719 - DNA, 734 bp, Cannabis indica
ttttattattgtttggtgcaagtttattaatctttgttttttaatttttttttgtttcatgtttatgtttttcagttgaagattaagaacattcgtctgactgatgaggagaggcagaagttgcaattggaaggcttatttttagattaagaacattcgtctgactgtaattaaggatatttaagaaaaagttaatgtcattcatcgtcgaccttctgatgaggtattaatttacacagttattgtttcatatttttactgctgttattattagtttttttcctgttttatttcaattgcaatactgtttttgaaccaaattaagtcatctgatgaatttgtcacccaagattctgatgatgatgaggatgatgacaagggattacctgatccagagaatattgattctaatttcgatgaaggtgatgagtcgggttaagatggtggtgatgctgctggagttgataaggttgtttgtgatttcctgctgatgatgtgattcaaattgagactgttgcaggcagtgaagagagggccaagaatgttgagaatgttaaggccaaagagtttagtgtaaagggagatgattttttgatggtttaagctagcttaaaattgatgatgagcaagttgtgttggctgttttagaggttgttgataaatcaatgtaagtgtagtttatattctttgttaggttgtgttagcatgtcagttttattttagtttcttgacag

SEQ ID NO: 365720 - DNA, 660 bp, Cannabis indica
tcctagctagaattcatcaaggaattcataccctagctcctctaaacttctaaggtaaaatttaacctgaaatttattggctttctagggtttttgttagttttcagtggttgtttatagtagaacatgtttaataattttaggaaggttatgagatgataattaaaattattcaggactgtttagaagtggtttgaatttttttgggtggttgtacaaaaagttatgcaagtttgagttcaaagaactcaaacttaacttggttatgataatttgaattctgttgcgaactggattgaggtttcttcatgaaatatgttaattaccatgtttttagatgcatgacgaaatttggttatgtttggatctgtattggatgagttataggatttccaaactcggacagggaggtttcggaccatccaatgtaggcagtttctggacggccatttattttaattttttttttgagaatttgattgaggtgtcgtcataaaaagtgttcattttgatgtttttagataacctgcaaaattttataaagtttgtcttagaatttcacgagttatgcaagttttaaaatgggatagtggagtttctgttgggttttatgccataaataaaactctttacaatctaattagttatcaatataagaaa

SEQ ID NO: 365721 - DNA, 208 bp, Cannabis indica
cgtgaatgagaaaagaggaatgggttgcttggttatgtatatatatatatatgcttagattatcaattaaaagagcggaaggcgtgaattgacaagaagagaattagaagaaaaggcggctgggtttttgctgcttgctcctgacgccgaagaaaagaagaaaaatgaagaaaaagaaaaaaaaaaaaaaaaaaaaaacaagagaaaa

SEQ ID NO: 365722 - DNA, 643 bp, Cannabis indica
aacacttcatcccaagataaaccatccatggtcattaaactggacacaaacacaacaataagtgcaggatgatctgattccaccatgggattgttgtcattatttaaacacggctcaccaagggctggaatagaacagccactccctacacaccatctaatgcccctcttcaatagatcctgagcttcaataatgcttcgccacacgaagctcaggttagcgccaatttaggcagataaaaacgaaccatgtggaaagtatcgagctttgaacaccttcgaaacaagtgagtttggctttgtcaaaattctccaaccttgcttccctagtaatgcaagattaaagtcgtgcaagtcacgaaagcccattccaccaccacttttgtgtttacaaagcttatcccatgacatcaatgaactccttttcgatcccccttagtttgccaccagaatttattcataagcttctcaatatcccgagtgatatcaagaggtaggaggaacacactcatggcataacttggtagtgattgaaccacagccttcacagcactcttccctgcacgtgcagaacctgcctccacttgagcgctctcacttttgttttagtagcccaatcagctatttgttgcaacttcatagtg

SEQ ID NO: 365723 - DNA, 816 bp, Cannabis indica
ccgagaagaggaaagcaccaacaacatgtttactatgtcagtaaaaggtggcagagtcgagatacccacctcttataaaacttgcaatatgcttcattcatgcatcttgcaaattacggtcatatttccaggcacatccaatcaaagtcttaacaaataagccattaaggcaagttttatcaaaacctgatacttcaggaagattgataaaatggtcaattgagttgggacaatttgacgcaacttaccaccagagagtatcaatcaaaggacaagctctggctgactttctaattgaaggagtaaactcaaaagaagacccagatgttgagcgtgaggcagaaacatggaagttacatgttgatggggcttcaaatgagaatggctcggggtaggagttataatgatgtctcctgataacttcaaattctactgcacattgagattccaatttgatacctcgaacaacgaggcagaatatgaggccttgttggcgggtttgagaatagcttaggcactaaaggtcaaaaatcttacatgctatagtgactcccaactaattgtaaatcaagtcttgggagaataccaagcgaaaggcctaaaaatggctaaatatagacaaagttttgaagaacttggaaaagtttaattattttaaaatcgaacaaatatcaagagaacaaaactctaatgcagatgcactagcggagctagcatctcaatccgatcttgataagttcaactttgtacctgtggaagtcttaaacgacctaagtagatatgaagaggaagaaatcgagatgatagatacttcac

SEQ ID NO: 365724 - DNA, 501 bp, Cannabis indica
ataaccgaagttagttgagttagttggtttaaatgagttggataataagttggtttagaggatcaatttccacaccaaaattgataatattcacacttcattgatggatcataatccacttcggcaagatttggcagaggagacagagttttctgggttgggttgctatggtagagaatcaggagtgtttacattaaggactaatatgctagcatatgtaagtaagggtatattggataatgtccttataaaagtgggtataatttaattgaatctaatatgtaggtatttttggttaactcaattaaaaaatgcgtatatatcattttctccccacaaaatagtactataacttaaaatctaaaaaataaattataagtcccctccaatatttatctttttacttttttttcctttttgtttaccttttcttttttttgatattattatcttcttcatttattttatttttttttacctttttctcttaatttattattt

SEQ ID NO: 365725 - DNA, 646 bp, Cannabis indica
tgggtctgggaggcctgagttcgggttcgggttcaggttcgagtctcagtcctagtctgggtttgggactgggtccgagcttgagtttcgaggttgggttctggtttagtgtcggatcccggtctaggtctaggtcctggtcacggtcccggtcctgttccagggtcctggcacgttctgtttcaagtctcagttttgggtcccaggtctgggtttgggtccatgtcctggtccagcttcgggtccttctctgagtcccaaatcaagacaccgactatgggtcttgtccaagccctggttcccggatcccaggataagatctgaatccctatcacgggtcacagtctggtttcggttcatgttcaggtctcgatctaggtcttagtctaggtctgagatcgagaattgcatccaattcttggtctcgatcccaattttgggtctcaagtactgttccatgttcgggtctaagtttaggtcttggttctggacccgcatcgcggttcgggtttggaacccaatcctagggtgggtttgtgtctgagtgtgggtcctggtccggttatagtttaaggtatgggtccaggtcttggtcttgttcctaagtcctgatccgcttctttttttggttctagtttcaagtcac

SEQ ID NO: 365726 - DNA, 587 bp, Cannabis indica
agagagagagagagtagggctttcggacttagagctatttggaggcttagtgacttagaggcaactttgtttctaggctagggttaaagcctttatatagaaggcctaaaccctagattacaaatttaaattctagatatttacatagtttgttagaaaattacaaaagactaaagtgcccataaatttggatattattcagacattctgttgggcatttagggcccaatttgtagcctattccttatgtccatgtgtagagttggagtcatgcaaattcaatcctggctgcccatagacctacagggaagtttggtcggccacggttctgccaggtcaatcctagtcgaccatggtcctgtcaggacctagcaggtcactatagctccaccaagaggaggctagcctttgagtgtggaggctagccttttgtaagttgaggaaaactttgtacattgttcccttgaagtggttgttggaatttattttaccagcatcttagatctactcacaagtatgttgattaacaccctatatatgaactttctaaaacgatgaaataaagacatataaagtttaggaaacct

SEQ ID NO: 365727 - DNA, 481 bp, Cannabis indica
tttcaagtgtaactctatttagttataacctctcaattaaaatattattttcttggtcccaagtatattcttgaatagaggttctactgtatatgtaatatgttgctatctttcatacaaaaatacaattcaaacattggttattgtgtaatgctaatttttttttcttattattatatattgttatttgtaattgttgaacaaatatgtaagttatatgttggattgtattgtgtatttataaaaaaaagtatgaagagaagacgatgatacactcatatttattatttttcgaaatcagattgtagttttttaatcattcatacctcttattcaaagaaaatgaaaacaaaaaattacattttacattaatttaatatttataacaaccgcacgaagggcagatgtgttgactagagttatttttcttttttctccttaattctctcaattttttaatattttattaaagcataaattt

SEQ ID NO: 365728 - DNA, 727 bp, Cannabis indica
tcgaaaaagacccgataattaatagagagaaaaataatagcagacagtgtatgcttgattagcagtgtgagtggtccatgtaaaatcaggttttgatatatatagaaaatttatgtttcatattttaaagtattgttgtggtagatttttaatatatattatatattattatatattatataatatatataaaatagaaaaaaagtgaaaatcaggttaaatcaggttgggcagtttaattgggcggtttgggtcaattttcaacccacccaattaactgattgggcggtttagaattttgtcgagttatgtcggtttgtattttttatcggttttgtcggtttggtttaggcggattattcgggttgggcggtttacgaaaatttatgtacagccctaattcagagcagcattttatgccttcaaaatttgtttttgtagcttcaaatcaaggcggtttcatccaagggagattcatcgctcataatatcatgatctgtcaagacctcataaggcgctatggaaggaaatcaaacaaagccaattgtatgattaaattggatcttcaaaaggcatatgataccaccaaagtatgattaaattggatcttccataaggcactatggaaggaaatcaaacaaagccaattgtatgattaagttggatcgaaaaaagtttgacagcattcaacttcccaccaaagtttatagctactgtcatgacttgt

SEQ ID NO: 365729 - DNA, 1064 bp, Cannabis indica
gggtctaccagtgatgtattttaagactctattttgtcgcttaggtcagccaaaggaaaagaacttgtaatagtgttttgtaaatacttttgggatcccaacttttgtaacttttaaattataaggtttaaattattacaagctattttcattccgtttattaataaagtttaatttccgcgcttattttttctagtaatcccaattaggggattagggtttcataagtttattgggaaacgggcctaattatttagggcattacaataatcttaccttgttttcaaattcaggtgtgccgaccagcctgagtggaacagctactcggtgaattacaggcctctaattcacattattcgtaacacaggtgagtgacacgctaaatcacttcccagggacctaagttttaaaccaaaaagttttcctactgaaagttaaatggcaataccctaaactatcaaggaattaaccaaccaaagctctgaaactaacccgaatcgacaacacaaaaagttcaagaaaccagtttctaatttagttagcaggggcctgtaaaaccggttaatcgattttacaccaggtaacccaaacaattttgaaacttgaccaattcgtacccaaatcaaaccaaaccttccagacctgcttaatataccccaataaacatattccaagcaaataaaataactaaacaagctcagaatcaagagtcaccattaaagagccaagcttgagttcttaaactcaaaagctagatcaaaccttaccacagccatcacaaccagcttaattcaacataattaaccataacttaactccataaaacaacaacaaacatcaacagcaactacagtacccaatcctaagaaaaacatgcttgatttcaactaaaaacatacaataaacacaaaggagggtcaaggaaagttataccttggattgaatcactagaaacttgttaaagacctctgagtttttgaagaacaagatcaaaccatagctgctctagggagtgagagagagagagagagagagagagagagagagagagagagtagtaagaa

SEQ ID NO: 365730 - DNA, 659 bp, Cannabis indica
acattagggagagaaaagaaaaatccacattaatatattacatggtgtgaaccatcattattgtatcctgatccttacataaggaaatgtgaatcagaagttcaaaacattgtacataatcaattacttgatgcatttgttgacactaaaggagtaactaaatcatatatactggctgcaaatgctccttctagaattgaaataccaaaaggaaaacttgaagatttagtcgcaaatgagtctaagtcacgcctgaagcatgggagaccaattggttccaaagataaaaatcctcgaaaaaaaaggggcagataagcatgatgactcaaatatggatgaaaataaccatataaaaattcaagatgagggaaacactctagaagagaaagcaagtgaagtgagtcaagagatttcagttgattatgtcaggactaaatactcatcaaataaaaatgatacaaagttattgatgagacattttcttataatgtggcatgcaatatagtcaatgaaatagatgatcaagaaccaaattctgtctttgaatgtcaaaatagacatgattgggataaatggaaagatgctatgcaagttgagttagagtcattaaacaaaagaaatgtttttgttaactttggtataattttgggctaatctca

SEQ ID NO: 365731 - DNA, 923 bp, Cannabis indica
ctcattctgttcataacagcaaattccatctaaagagagttgagagagcgaggaagcccaattacccaaatcaatcagttccttttacagatcaagcttatgtgggactaaaaattcaatggctcgaggtatttcgatcctatattcatatagtgtatatgtttatttattccgcatgttatatacacatacatatgtttgagtttatacataataaatgtctaacagttggtatcagagcaattttatctctgccttgattttatttgagattcatatatatatatacttcattttttatatcaaccgagtattttttataatgacatgtcatttttggtagagagtttttgaggccactccatacgacgtgtcgtttttcccttatgtgaaaaaatgacatgtcgtttttcagtataaatttttgaacccaaggttgtacgacgtgtcgttttctcttatgagaagaacaacatgtcgttttccatcatgaattttttgagttcgactccgaacgacgtgtcgtttttaagggtagatttttcaaaaaaaaaaagaaaattgagaaaaattttaggaaattatgaaattttattattttgatatatttttggaattttattttatttccttatttttgttgatttagtcaattaaattacatttgtttaaactttccattcttatttaacatatatcttcatatattatatgttatttagtaataaattattatggaaattttttaatttggtaaattaattacatgctttatttttacatgtaattacaataattgtgatattttaagaatgtgaatatttaattattctacaattaagtgcgcaattattatatttatttaccaattaagtaatttactgattgaattaattgataacctgccattaagtacattcttt

SEQ ID NO: 365732 - DNA, 1192 bp, Cannabis indica
catttcgatcccagtctttgtctgggtccgagtcttggttcatatccggatccttatcttaagtctgtgtttgggatcgggttgcagatttaggtccaggtccgcgtctaagttccggtctgggtacacgaccgtgtccaggcccgagttccgttctcagtttgggtctaaggctaggttagtgtttgattctaggtctgggtccgggtcctagtcacggacctactcttgaactagggtcctggttttcgattcttgttgaagtcctaattttggttcccagctctaggtcttggttcgggtttggttctttgtctgggttctggtcatagtctgagtccccgatatagacaccgactacttgtctgctccaggccccgttactcgaaacccgagttaagatctggatcactgtcacgggtctcagtcaagttctagtttaagtccaaagtcccatttctgagtttgggttcgagatcgagaccggggtgcggttctaaatccagaccctagttctgtttccctagtgtgactccatgtttagctctgagctcaagttcgggttcgggtcccatttctaggttatggttgggatccaggtccggctcccaattcgggtctaggacttatttggagtccgggtccttgtccagttacggttcttgatctaggtccaatttcagttttgactccaagtccaagtcctagttctagtcccggtcaactttcggttttggttccaattttgggtcacagggtacgggttcgggttcacttttgcatttgggactgggttcaggtccgggtgtgggttcgggtccttgtaagggttcgggtccagggctgggtccctaatctacacatcgactacgggttttgtccaagccctgggtccagatccggatcccaatctcgggtcacagtctggttccatttctggtgccaggtcacgagctgggtcgtaggttcaagttcgggtctgggtcgggtactaggtcccagtcctagttctgtttctcagtaccctatcctgattcttggtcaaggtcccctttattgtgtgggtttgcgtcccggtctgtgttcgagtttgagtcctagtccttgttcgggtttaggtctatgtctgggttttgatctgggttcaggtttgggtttaggtccttgtcctagttcggttctagttccattt

SEQ ID NO: 365733 - DNA, 545 bp, Cannabis indica
aaattagttaaatttaaatgcgaaaataattagttagtttgtcacaaccaataaacacgaaaatatagtgaatcttaagtattaattgacgaaaaaaaataattggttaactttgatttggtaggtgaaggcctgtgaccatatgtgaggccagaaaataaaggggtatggtttcgggaatcatcccaccaaacacgaaaagaaagctttgattttttattttttttattggaaaatactattttagattatatgttttctaaaagttactaattagattttttattttgttaaataataaaatagatcctctattttttaaaatagtacaataggatctgaactgattttttgtcaaaataaaatttaataataatgtgatcttatgacaaaaatgttaacatttttttgtatttgttcgtgttaggaattttcttcaaattggttatattaaaaaaaaattatcaaaaattaagttgagggtcctatttgtctattttgtcatttaacaaaatagagagtacaatcaataacttttacaaaat

SEQ ID NO: 365734 - DNA, 871 bp, Cannabis indica
atatgtcaccctacacgtgtggggctaagccttaagcgtgtgggacatattttaaatctttttttttttaaattttaccataagattggttatttattttacaataaatataattgattaatttttattaatctcttatttcactataattaaaataaatattattttacactaaaataatatttatctctcttcaaatattatttaagaataatattatatttagctagttaatatagttctatcaaataacactaaatagttaaatattatttaaattattcaattcataattgatataattattccaaataattatttatacgaaattagttttttgcccataagaattatttctcaattcattcgtcgaattaaaccttcctctgtacaatgttgtatagaggtaatttgggaccatggacctatatttcgaatctctaataaacacttgactattattgaactcttcaatagaatgatctagtttattaacttcattattactccactataaatatagaattgtactatttgacgatatagaattatatttacagaattctaacttgtagtctattgatataatcaatataagtagttcaccctctaattgttagttcataattagagttggtcaaaattactattttacctttctaattgtctcttgaagtacttatgtaccattaatttaatgcgaacagttaatctataatccattatagatttggatccaactgctaacactcttataattagcactataaggaaattaatattcaatcctctcggaaatcttagatttcattattgtataacatatttctagttactcatgtatcaagctcccaaaacagaagttgtaaga

SEQ ID NO: 365735 - DNA, 926 bp, Cannabis indica
agcagtcattgacgaccgtactcagcaggccactgtgttgatacgaaaagcctatcaggctaccagacaatagcctgtaaccgtcatccccttgggccagacagacgaagatccagatatgaacacctctcagactataaatggttagccgcccaatccccgtcacaggttccacctgtgggccaagtggtaggcgggcataccttgtctagcaattcatcaggagaagtcatacccaatatttccaactaagttaatggtgctggccagcaaattggccaaaccaaccagtcaccgaggtagccaggtgtttctatattttataaattggggacaactcatgatctcagaattaatcttaacaggaggagaggattggacgaccaacatgacgcgccaatcgtacagaccgaaaactgcgctcaaaatcccactcaaagagatgcttacatgactcaggtcacccaagaggctgaataagttagtccagctgtccaggcacagttggatgaactaaaatatatgttccaaggcctggccggtcagagaaacaacgatctcgagtaggaccaagcacgtggaagccctttctcccccgagattaatatcttagaattgtcccacaagtttaagatgccaacctgaaagatgtatactaggaaggaagatcccttatcccacctcaagtattttgagatgcaaatggacctgcaaggagtacgaggagatgtatgctgcagagtttttcctgccaccctcttagaagccgcccaacaatggtatttcaagttggcgcctgaaaagttcaactcatggaaggatttctcctcagagttccatgcacaattctcctcctctcgccaacttccattgcacttaggagatcttgtcgaagtgaagcaaagaccaggagagcctctccgagc

SEQ ID NO: 365736 - DNA, 636 bp, Cannabis indica
aataatttcataaataatcataattaaccgataatttccaaattaactaagcgggctttacaacagtgcttttgtagttagtagctgggtgacaaatattttgtaaggaactagtaaacttttgtaatgttttttgtaaatgggatcccaaagtattttgtatactatgttatacatattttattaaataagaaaatttttaattaatcatgtttttcattaacctcgttgattagcaacgagctgcacagtacgttaaaaatcacgtcaacaccctatgctagttagggtgttacaacaatattattagattaaagcatcaacttgcctgattaggcaacatgatgttttgaagatggcttatatgattaaattgatatgaattccattatttgtatagttgtttggtactaccaaatatgtgtatactgatgtttattcgtggcagatgccagtagtgatttggatttcatcttatgaaaaatgtgtgatggtttgattcttattgtgtatgaatgacaatattcaaatactaaactatatgattgttattattacttttcttcctgagtccttgtgacttacgggtgctatgtaatgcaggtaaaggcaaagaaaaactagatcaaccatgag

SEQ ID NO: 365737 - DNA, 527 bp, Cannabis indica
agtaatgggcgtttctcttgtaagtcgacatatctggctcaggctttggagagagctccccaatgtaatgtcaccccagctctttggaataaactttggaataacaacattatggagcgtcataaggttctttggtggtgcatcctctctcaagctctccccgttcgtgcagtgattaaaagaagaattcagattgaggacattagctatccgttttgtggtttgggtgaggaaactatggaacatctgtttcttacctgtgatgtggcgatgcacttgtggcgttcgtcaccgtggggaatctttcttgtgagtgatactggtatccgagtttgggattgggtgaagttcatttggagccttaataggaggggcatccgggttgaagatgtctttctttatgcttcttttgttgttgacaatatatggagaatgcgtaatgaggcggtacataataatagttctcctgatattgtaaaatgtattgactaaatttgttcttcttttgcagagtcacatacttctct

SEQ ID NO: 365738 - DNA, 594 bp, Cannabis indica
tttatttagggcttaaaacccaacacccataacaacttatctcaacaatagagaacttccaagcaaccaaaatgaggctcaaaaaatgatgagtaaagctacatgatacatcatagtagaaggtgtaatgtatagaagaggtttctccatgccactgttaatgtgtgtaacaaaagaacaagctgcacgacttctgtctaaggtgcacaaaggattttatggaaatcatgctgggggaaaagtttatctaagaaaatactaatgcaagggtatttttggcctaccatgattgaagattcaaaggcccatgagaagaagtgtgacaaacgccaaagattttcaaagatcccccgagcaccaccaaatgaactaatacagatgcaaagtccctgaccctttgctatatggggaatagacttgattggacagttgcccaaaggcaaaggtggagtacaatatatagtggtcacagtggttacttcaccaagtggataaaagccaagcctttggcaacaataacatccaagaaggtattgggttatgtagtaaaaaacatcatatgccaatacagacttccatgaaaaattgtttcag

SEQ ID NO: 365739 - DNA, 782 bp, Cannabis indica
accatttgaaagacttaaccaatattcccccaacaaaatatacagagaatataaaaaccttaagttctaaacaacgaggaaaaatgataaagtctctagaaatcctaagggaagcagatatgcgagtattcgagatgctcatccaaatacccacgaatattcaagagataggcagtcaaaaagatgcgaatattcaaagtattcttcctgaattgacggttatgccaattacaggtccgttttctcctggggatcatccatttctaacaaaggagtaaaactctatgtgtattccctacaactaaacatgcattttcaaacttctcaaagtgtcaaaaacccagaaatgcaatttttcaaaatcagaaaccaaatgcgcaagtagtttcgaaactaacctttagttttaacgattctccctgtgattggtttcgatcacttctgaaacttaagagattcaagaagaaaaggcagaaatctggatgaaggatgtaagtctaaaaattcagagaaaaaggagaagaggaaggtggaaatgagagggaaaataagaaaatcatttcgtatcagagggcttaaataccaatacccctcataaattgggattgtgacacatggcaacaagaatgcctaaggtcattcaatccaacggtcacccatgggcacgcctacacaaaaattgaagagtttcgtgacgtggcaccataaataggacaaaatgaaataattacagccgtcatttttcgaaaccctcgatgcgacaaccaaaggtcaccacctcg

SEQ ID NO: 365740 - DNA, 465 bp, Cannabis indica
cataaaacccaacagttttaaccgccaaggcatcaatgaataaatcattatgatcccgagcaatccaacccaaaccaagactattgtcatcctcaaagacagcagcatcacaattaacatttatctcaccaaaacgaggtttagcccattgctcacactcgttttgtattcagactagaaactggcgaaacaactctattttctaattgagcattcatccaagaatcaaggtaagtaattgcagcattcaccaccctctctaacgacaaagccttattactccacaccaagtcattacgagctccccaaactccccaaagaagcatagcaagcctctcaaaacgatccataggctgaaacttacaaacattatcaaaccccctgtcaagacaactcttaataaaagaagcagctaaccattatatgataaattgtctcatcctcctgattacactgttgggtttt

SEQ ID NO: 365741 - DNA, 616 bp, Cannabis indica
gctgaaaaattaaggacattttaaaaataattactgaaaagaaaaaaaaagcacttatgttaaaaataattttagggttttaaattaatagccttttcatctctgcgcctcctctctctttctttcatctctttgcctactcctccttcctctctttgtccttctacctagatccaaccttaactacagcaacccattgtacaaaaaaacaaacgaagggctgttcatggacgatgaagcttcagagcttcaaggttctcagtcgacgaaggtttgtgtcgatgaagcttcgagtttgtgttcttcgtcccagtgcagatctctctttctctatttcctcaggtcgatgaaggtttgtgtcgatgaagcttcgagtttgaaggcggttcgttgaagatggggcttcgaagcatcaagtttcagggttgttcacggacgatgaagcatcagagcttcaagattctcggctgttagaactcgaccgagattttgggttcatggtggttcattatcgatggaggatttgggttcgtcgtggtcattgaaagaaactgattgtgaatttttttttattgttttaaaattggtctgtaattttttaggttcaattcatggt

SEQ ID NO: 365742 - DNA, 723 bp, Cannabis indica
tttattatttttttatttctaataattcaaccctaaccctattgaagaatagtataaaaggaaggttatggtctcttcattcaaactaatgcctccaaagctaaaaatctagctttttgatgagacctcttccttcctcttccttcttcaattcgaaaatatttagcctttcttcacaagcccaggaccctgcaccccgcccgtgtcacatgctgcaaatgccgcgaaagctcggctaggaggctgtagcttccctacgttcgcgcgcgtccgaggcattttgcagcctctcatggctgcacgtgcagccttcctgcgcagcaacaccccaaatgcgattgttgtgggatttttccccaaatttcgatttttttaccattttcaaacaccaaaattaaaataaaatattatttttaatatatttaaacttaaatatcaattttaaattaataatatttatttattaatagattattattaatctctgatattttgaggtttaaatttaaaaattgattatttcattttttaaattatgaccacattaaaaaatttgttaatttctttaatgtttatatattatttaattataaggttagatattttaatattgggtatattttaaattaaagatagcattatccttttaatttaaaatattatattaaaaattaccttatatgataaattaaataattaataaattttaaaattaacctagat

SEQ ID NO: 365743 - DNA, 691 bp, Cannabis indica
tagaaattagagttatttttcacatttttttaactaaaattggcttagttcttaagtttttaattaattgagtaagtttttaattatttttggatttattagccttatatttattttatagtttattatatgtttttataattattttatgataatatgttatgtgttatttatttaaaattttattttagtttctaatttattttatgtatttttaggtgtaattggtggtgaagattaggaataaattggagaaatattgaagaaatggggctaaaatacaatttcaaaaagaaaatctgatgagcctttatgcaaatcccactctcggtcaaagtcaacagcccatctggaccgtccgtctaccaatcgtgcggctgaggatggcgagtgtaactcaccccagacaggcgcaagtgaagcctgcagcatggtcctcagcagcatcagctccctcttctccttccttccacgcgggtcccagccatcagcgtcccctccaaccgcgcggcctgccacgcgtctctctggtctccagcttgtcagcatttccagcgaaccagcttgcgccacgcaagcgtccgcagccttccgcctaccagcgcccaccacttggccatgctgagaagaaaaaaaaagaagaagaaaaaaaagtgaagtgttaattgatttactcatccgaaaatcacat

SEQ ID NO: 365744 - DNA, 609 bp, Cannabis indica
tcaaccgttctatccactgtcgcgcgttgtattggtgacaattcagttttaagattgtattggcgttatctccaaactattaaaaaaaagtaaaattttttattagtttatacacatgtatattatttgttattataataaatattataatcaataattaaaacttacaactttttgatctatgtaatggttggagttggcacatgcgacgatctcagtcatgtatatttcaaaatataaaaactacattcttgatttttaggttgtcttagacaatttacaagtgaattccttgccacagggcaagatactcatgtgttgcccctatatatctgtatgcactatttgaaaaatgatattagcatttcaattcattagttaattaaaatttgttacataaatagtcattaaattattaccttcccaacatttgagtaatttgttcgagaacttggtggtcacgtataaggtctaaatgaacaattttctttggtgtaacgacctctagcatccaatgcgcactagaaaattatatttggatataagtaagatagtataaaaataatttgaagtcataatatagaaatgaacaattagcactaaagaatt

SEQ ID NO: 365745 - DNA, 532 bp, Cannabis indica
ttttgtaccctaaataaaactcattttaatataatcagatttactaattaataaaacattagaaatcattttatactgcatggttcacatgatttctttcatgattataagtttaatgtataaattctattaaatccaaaacatacaatgatcatgattatatgtttcaaagtttaagtcccataatttgtcagtacactggatttacactaacatgataattagcgatagagcttacttacatcttgaataagtgttatgtcatttctaggacattggcacagtatgctaggatcagatatatagagtatacatcggattagaccgatattgaacttggataagatatcataaacttactgttatatctatctaagtcaatatcagttagttgatcttaggtcaatagatcttaatcctaatatggttaggttagatctcaattgtattatttatgctcttagagttgttcgtaaaagataaacaatggttcgagcaaatacttacatcttaggaacatggtagtataatt

SEQ ID NO: 365746 - DNA, 501 bp, Cannabis indica
tagagttattcagacaaacaaaatcaaaattacctaaaaataacaaaacagtgcagatagggaaacattaatcaaggaaaagaattacgagtacagaaaagagaaatcagtaagaagagaaagtgtatcacttaatgtcttggctaaaattactggagaaaatagaacttcgcgattgaaatctcaaaaaattgagaagctgggtcctgaggttttctagaactagaaacgtgatctgatgtaatacacaagaagaaggtaaaggacaatgagaacatgcaagttgaaaaggaaaaatcagaatttttgcaaaaaagcttgaaggtttgaaaagcaaaaatggcaaaataagatgctcaatctagaatttatactcataaattatcatcgtttgatcaaagaaagtctgatctaatggatgggaactttgtaaaatgggaacaatcagggcattaaatgctcaatgatgtgcttcgaagttctaaaccgccaaaactcaaa

SEQ ID NO: 365747 - DNA, 1118 bp, Cannabis indica
aggttcctatcacatcaatcataacataggtaagtgacacgctagatcactttccggggacttaaacttgaaactgaaagtttccctatcgataaataacatggcaataacctaaatatcacaaaaatgggaaaaactagggttcccaaaactgccccaaccagtagaccggttcccaaccagaattccagttctgcagggtttctggggaccaaccgaaattctggttcctacaggtccccctgaaccggaattttggttcagtgcaggaaagacataaaaatacataactccctcaaatcaaccccaattcaaaccaaaccttccagatatgttctatacatcccaaagaacatattcaaggaaataaaacacaactacatgcacggaatccaaaaccaccatgtgagagcaaagtttgggctcttaagctcaaaccttgaataaaccacatattacagccaccaaaacactacaatctaacttagttaaccttaaattcaattcaaaaaacaaaccaaaatgccaacagcaaccaatgaaccctaaactccatttcatgcaaaatctccattcttgaagcttaagaaaacaaaggtgattaggtctaagaacttaccttggattgaatccctaagaatcaactacaatccacaaaaacaagctaaggagattccaattcttgctagttctccaaggactgagagagagagagagagagaaaggaaagctatttctctttaattttctaattttttgttaaatgacataaaacctaatgtttatttacttaatctaacataatattcagattataatataaataaaattccactagaagacaaaactacatagggtaaaagaccattttgccctccactaagccaaaagtcataaaaatacttaggggtattttagtcaattctaaaatctcaactattcctgacatttccaatgtctaattaatcttgttacgaaaattgtaaacaatacgcaagtgcacgcaatcaagtagtaaactcacgcaagtgaggtcgaaccacagggaattggattaattaccactaaattatacttatgattctatttggaaaatcgataattttcaagattaaaac

SEQ ID NO: 365748 - DNA, 858 bp, Cannabis indica
gtccaacctgattatgccttgaacgcataacccttaatctcaacatatatatatatatatttatcacataattaatggtgcactatttgtctatttgctatagacctgcgtgtcacgctcacacgcctatatatgtctatgtggcatagacctacgtgttgctctcacacgtctatatatgtctatgtggcatagacctacgtgttacactcacacggatatttacaataaggccttagtaaggtttatctcggtcataattaccgagtctagcctggttatgccttgctcgcataaccctattcatatatatatttacgtaatccatacattacgttctttcagtggtttatcctgataatatatatcaggtctaaccaagttatgtcttatacacataactctggatatatatacatacattccatatacactataagctataaaatcttagggtaagaaccctaatttgcataccaaattgtctctcatataacatattattgcatgatttgaatggcaatgtttcttatattatatgatgagcatattaatgatatgttttatactgtcttgctgggcttggctcacgtttgctctattgtgcaggaaagggtaagactattgctgatcagccatgagtgcaggagctggacgaagaatgtacatgtccgggccatatcagaccaagcgggttagggtctaccagtgttgtgtttttaaaactctgttttgccgcttaggctggctgaaagaaaatgacttgtaataatattttttaaatgtttttgggatcccaacatgtgtaacttttagtttataaagtttaaagtagtacaggtttattttcattcctat

SEQ ID NO: 365749 - DNA, 925 bp, Cannabis indica
caattataatataatttgcttaatcccaagtgtattcttgaatagagattctactgtagctgtttacgaaaacaaaagttgataaaaaaaagagagtagtaatagtttaaaaaagaaatgagttgtaatagttttgttcgttgtttttttttttttttaattgatgaatagttcgttccttgttggttgttgtgcatgtgcagtgtgagaaatcttagtcaatggtcttaactgaaaggacttaacaagacagctcttcttcttcttatctctgttctctatcaatatgtgattaaagaaaaaatagttctttattataggctcttattcagtgttatttgggtgtaatcaattgttcttatgctaatacaattcctgattcatcaaaaaataaaaaataaaaaataacggtgacatgccattaattttttagccgaaatgccaaaaacaaaattacctttctttcaaaaaaaaaaaaccaaaattaatttcaacaaatacgaaaaaacaaattataaaattagagtcttttatattgtacacttattaatatttttatgattttcttatcttatttataaaatatacagtttttttatatcgtacccttattaatttgttgttaattttttattatcggtatgttattttttattattgttttgctgttatttttatgtaatttttttattgttttcgttttgtttttgagcatcctatttaattgttgatcgtgttatcagaagtagtgatattactctaaattttaatcatgtaatcactataaattgtaattaataaaaaataatgaattttttcaaaaataaaatattaaaggaatacattctattaaaaaaaattgagaatattatttttcagataaaaaaaacacatgtaaaaaaaggtaaaattaaaattaataatg

SEQ ID NO: 365750 - DNA, 449 bp, Cannabis indica
aataaaaaaattaatgacatggagcaatgaataagtgacacgtagatactgacttcatacttaacgatcacgtacctacggaagttccacactagggaggagaggtatttttaccacaaaaaaaatgaatgaagtaagtatcttatactcgacataaaacataaatacttataacacaaatgacacaaatatatatatatatatatatacacacacgacatatataaagaatcactcatttctaatttttttaattaaaggaaccactattttctttaaccagaaaaattatcagaagtgtacatacactcaatcgtttaattttattagtcaaaaaagttatattatgagatacaaactaagattttttcaataaaattatctaggctaattagtaattttcccctctgaattttgacatgtacgatatcatgccccctgaatttttt

SEQ ID NO: 365751 - DNA, 667 bp, Cannabis indica
ccgcaaccgcgaaactaaaaaaccgcaaaaactgcaccgcaaaaaatagtgcggtgcagtgcggtttatgcagtttttgtggtttggactatcactaaataattaaactattacaaatataacaaagcttgagcaacacttgtcaaaaataccataaagcttgaaaataaatatgaaaaaaaagtttcaagtttcaacaatacaataattagtgggcttaggttgggccttcacatattggacctaaataaatataaaaacttgtatttttataatatatggtgcggtgcggtttgaaccgcatattaactattaaaaaccgcaaaccacaccgcgcggtttaggaaaaattcaaactgcgaccgcaccgcaaataatttcaaaccgtattttttgcggtgtggtacggcgcgggcggtttgagcggtttgataaacaccccctagatgtagggatgagcaacagtcggttttttacacaaaaaaaatctaaaattcggttttcagttttcatggttataatccgaaaactgacggactattatacaaatgtaaaaaaaccggccgttttaatctactgtttggttgatttaaaccgaccaaatcgaacttcattttttttttaaataagtttttaattttttataattatttgaaactaaaaatta

SEQ ID NO: 365752 - DNA, 741 bp, Cannabis indica
actgagtctacaagcagtattatctcaactagtgaggagaccatgagcctatataaccgagcttccaataagtagatctagaatttacaaagtaaattccctaacatattaattctgccttaagccactatagagttggaactgcactctcaattatatagaacactttatatgtaccaagatatagatacgttatgattatccattgttacaatcctaatagtcaaagatcttatatagatgatctatactgaatagggacaaatttaccgttctacccttcaatgtattttatccttaaaacacttagctacctataaatgatatttcagtacaataatataattactgaaataagatctcaatcatttatctctattcagccaagctcgaaggaaatcatcgcttcacttctaaaaagctatagattctatgttttatgatcgcgcttccactcaattgaactactatatttccaagatgtaaatttctgccagaactattgattatcttccacgaacaacttgaaaaacataaataatacaactaatttgaacctaaccatataaggattaagatccataggcctaagatcaactggtgatattgacttagaaagatataacggtaagtttaagttatcttatccaaaatcaatattggtccaatcaaatgtatactctatacatccgatgttggtaaactttgccaatgtcctggaaagaacataacacttatcta

SEQ ID NO: 365753 - DNA, 484 bp, Cannabis indica
gacttcgtgaggagaaggcataccccacttctaggaagcgtagaggacgaagagggcagacagatatttaatgctcttaggagtgatctgggctgggcaaaggccaaaaaagtccgccacattcttaaaatattgatgcaaaggtatcaatgccccttgttgggcatgggcacccgaccaggcgtgcatcgccctttcagggtttgtggcacgattgttgtggccaggaatgttgcagtctaatttgtcgaggtatctgccctggtcgagagtcttaaggcgagcctcagtaacccttgacgaaggggttacccacctggcgcctaaggcaccttgccttctatgaggaaccgcaacagtaagctcctcactaacatagtccacgccctcaactaggacgtctccgtcagcatcgactggctccccagcctcattgtactccccgtagtttgggggttcaattcctgttcggcgctgggcaaag

SEQ ID NO: 365754 - DNA, 768 bp, Cannabis indica
catcgtactctcatttcatgcgcgtttgcacactcatattggaccaagttgggttcaatcttgttttggagatgctgttaacttttggcagttggtttgataatctttttaatactcttgacgatgaacaggtgtgttgtgttgccatggtgtgttggggctttatgataagcccaaaatgccacgttttaaaagaaaatttttccactaagtgaggttcttgcatcagctaaggtaactcttgattattggcgtaaggctcagtataacaccagtttgtcatttatgttttttgaaaacaaggagacggaattgagcgtgtgattcaccgagccactggacgctataatcaatcgaaaacaaaaagacaacaaaataaaacgtgaaacaaacaaaaaacaccctaatcagagcaacaaaactctaacactcaaaagagagcaacgttagtattatttttaaaagtgtgctaaaaatataaacaacacgccatcataaatatatataaattacaactaccacaactacaatatatattggatgaaactgaaaatgtcaatatcttatacttaacctctctcaccattttcttgaatttgtaagactggattcaagaccctcaaagcttgctcaactctgctagtattttttcatgtcaaatggtaacatgtagtgacagatccaaatttttactttgtgagggcttatttattattaaaaaatattatacttatattataatcatttttattagatttatttaatttt

SEQ ID NO: 365755 - DNA, 1009 bp, Cannabis indica
aggaaaaattcaaaccgcgaccgcaccacaaagaatttcaaactgtatttttttttgcgggcggtttgatgaacacccctattctgtatgttatagttatttaagatattttacaaaattttaagaaattcaaaataatttatgatatagaaagtaatgttcaaataatttatttcacacacatatataataaaataattacgtgtacaacatattgtatgagtgttaaattttcctgaattttttaaaattttacagaatgtcttaaataactataacgtacatgatcattataaaaaatttaattaaaaaatattttggatacaaaaacacataagggtgcattgtaaaatgtttctaaattatttaataaagagtttttggcaattaaacccactcaattatcgtttcacttgtacttaaccttcgaagttcaaattttgacagtaaaatcttctaaaatactaaattgttagcatattttaaggtgtcatccaggtaactgccaccatagattgtttatgtgtacacttttatacacgtgatacgtttatatcggtacacctaatattatatttaaaaattcattttaaaattataaaataaaaaataaaaaattttgaaataaattttttaataaaaaagtaaccaattaatatcttattcatatcaaaagcaactaaatagttgctttttcaaaactcccaaaaaacgaaaaatttctggaaacgagatttttccaattttttccattttcggtaattgttttgaatttcggtatgtatgttgacgtggcacaacggtatttgtataaataattttcttaaaggtatttttataaataaaatctattttaagtataatattaaacaaaacccttatttttatgtcaattaacatctaatctgcataagtgtaaattttaaatattccaatttaatctgaaaagtgcagaatccaccacagccacaaagctacacatagcagcatcaaataagtaatatatgtt

SEQ ID NO: 365756 - DNA, 935 bp, Cannabis indica
atattataatataatatgtctgtatatatgtacatatctcttgcacgtgcgaagcatgcaaaagcatggtcttggccattattaatatagatattgaagatcacaaaattttgtttagtaattaaattaattttgattcttaatttaattatatttacaacatataaaattactattatataattttgttattgataaaataatatgtttgttttgatgagtttattactcacctaatcaattatatataaatccaagttaattatatataacacttattatgatatttatgtaatatatacatatatagattatttttcatcgattcatattggatattgaaatgaattaaattttacaaaacaccctaattaaattagttcaatttcatttataaaactaatttaaaatacatatatatatagtaattttttttatttgattatcttttgctaattatgcaaataaattaaataaaatattaatttaaattattttatattttaaattcatttgtttcttacttacattttattctaatcccatgattttttttttaaagaaaaaggttttttttaatttatttattaatagggaataattaagaatgtgtaggttataaattatgtatatttattcatcgacattcctctaataaatttataacgtgtgcatgggcttaattataattaccatgtacgtataaatataatctatatatatctactagctattatatatattattaatttataaattatatttcataattttgctttctatacaagtaaaaactatatgatcatatatcattgtgggttcataatgatagtgtcttaaaaataccaaagactactcatttataccataggttaacctatatatcatgaatttcttttcttgtttttttatgtaaatatatttatatatatata

SEQ ID NO: 365757 - DNA, 854 bp, Cannabis indica
ggtgtttcgtattgtgtatttcgagcttctatttagtattggcgttccactaccttctaactataaagcataaaggtcatgtgcactccttactttgattccttcattgaagattgttttggtgaatattattgcgatatttgtgaaactcaaagaaatccacaaattcgcgtatactgttgtggagagtgcaaatatattgctcatgtgcattgcgtgatttctgaggtatgccatagtatatatttgtttaaatcttgttgtgaccatttaattattaatatagtgataagttactcttttataacttgtttaaagtcttaaaacaataaataattatctttcaaaataacaaaaagatatataaaaaaaatttatatattaaaattgtagcttgttatattacatgataattcattagtttctgaaataatttttcagcttatttaaatgtattttaattaataagttatcataatataattcaaaaataattaattaagtactaagatgtatacaaataagttttaaaagtaaacaaaaaaatatataaaaaattatatgatataaaataaattttttacgtaaaaataattaattggtttgttacttctaatattattatactattaccctcaaacatattaaatcataattataacattttttttgttttcttgacaaataactttttttgttttcttagatacaaataaactaagaatatgttatatgtgatttcttttttaaaactttaaacatagaaattaaaataccttatttttttaatttttaaaaaaataaaagaaatatgtcttgtaattgatttatttatttatttaaaaaaaaacaaa

SEQ ID NO: 365758 - DNA, 745 bp, Cannabis indica
attatgatgactacacaatgacggggattctaattcaaccaattcatcactagcaaacttgatggagctataaaaacagagatcaactgcagcagaagcaacatagacatatcctaccagatatcaccggggacaacaccaatgaagctactgagtgacaattctctcaagttctacattgagctgagaaaatcacaagctggagtaactgattctccactatgcatcacaactacagaagaaacggctatacaaacagtggaaaatcaatcttcagaccaaccaatacaagagcaaacgaagacagttgaggaactggttctacaaatacatgacgaaccattcaaccaacaatctgatattgaaggacaagattcaaatcacaattactgccagtatacaattgcccccaacatgtttgccatggctgaacaagttgcagactttataatagagcaatcgaattcagcaacaaaaaagagaagggatgaggaaatggagataatcacagattacatggtgcttgaaatcgaagaaggacaaatatacagtgacaagaacgtactgaaaacgacaatcggattctatgtgttgacttcgcttttagccaacgacaataagtcttttaataagcgataaacgatatgtcgtaataagaatacgtaataaagcaaataataataagaagaagacacaaaaattttataaaggttcagccccgggcagttcggtaatagcctaatcc

SEQ ID NO: 365759 - DNA, 459 bp, Cannabis indica
ccacggatagttagcctgctcatcacccgcagcttcccaccgagcaataactcctgctgggaatatacacggcattatgacacatatattcgggtaggactcgggataaaagtgttctcgcctcctcatcaaatggaatgccgcatccaaatgctaaaacatgaaaattaaatatgtgagagattaaataaaaaagagttagataaagtctttaaaagcaaaagcagtaaaaaagtcttaaaaacttacatcgttcccaagccaaaacttcggagtatgcagttcgaggaaccaagacgaatggtatcgaccggtgaagcactctctcgggtaattgttcccaatctggccaagtacccaattgtgaaaagtcttgagcagcttccgatcaaccactctaagtgttaggaattattttaccaggatcttagatctactcacaagtatgttgtttaaaca

SEQ ID NO: 365760 - DNA, 645 bp, Cannabis indica
tgctacacgcccccaagggctcttcctctcttctattcatctctctctcacacgcctctaaggcaatctcactctctcattagtgatctgcctacttattcattattttaatccttatagagagctatatcaaatcccacctatagtgatctaaatagtattatctcaaggtatcaatacaacccaaaggggactagatcattacccgctatcataaggtggtcgaacctatttaaaaaatctctgtatatattgctttttcattctgtttgtgtaacacgtggcaagcatcagatctatatgacccagctgtcagttgatcattttatgaggtcaacagtttggtgctttcattgagagcgtggatatcgtatctgatcaaatgccatggctaacacaagaagaactcttgtcgcaccatttgcatctttgggtctccctcaagacccacagactgtaggtccagataatcaggttctagtcacaactagaatcctgatgaacactacaaatgtggtgaatcctgtcaccataatcggcgccacaagtctggcctcctctagacagagctatagtgtaacaccctattccgtagggacgccacgtgtgtgattttataaactagattaatactaatatattaat

SEQ ID NO: 365761 - DNA, 698 bp, Cannabis indica
tagtgatgaagaggaaatttaacatgctttctttaatgatatcaggcccgcaacaacccgaacataatatcgatgtatatttggaaccattgattaacgatttaatagaattgtatgagaatggtgttcaggcctatggtggttttaaaaaagaattctttaatctgaaagctgtgttattgtggactgtcagtgatttccctacttatagcttactttatattgtgtttgtttatgctgaatacttaacaatttgtttatgcatttaatatttcgtatagattacttgttatgtatagctaactttaaattttatttgttaatggtgtagatatggccaaatcgggttcaggaaccgaatgagacccagaggcagagtgtccaacaataatacctacacgagggcctacgcaaatgaatgaaatatccaaactaatggatctacgcaaaagattggccctcgaggttaatgataaaggataatactgcggcaaaagctatgcgaagctcgtatcaactttaggtgtcagatgccgtcagacgatagggttgtcctataaaaactggaaagaagtcaaccctactctaaaagataaagtttggaaagatatacaagtaagcagaaattattgttagaattttgatttattttttattaattcaaatgttcagtctaaccgtgtttgttttccttcaaa

SEQ ID NO: 365762 - DNA, 579 bp, Cannabis indica
tctcgctctgcctcctctcttggtgagacccaaaccgccggtccctgtagtagcacgatcgttcatgcaaagtcattaaccaccgtcggccaccacacacggtgctagggtgagtttgaacaatagcagtcttcgagggttattttgaactcatttctctaatctgagttgtgggtataatttcttaaaccttatgtttaattatttaataaatataaattatattagaagttaatagatgtttatatgataatgttatttagatgtgtgtagaaagttatccaatccaattacaaccgaccgatccaatctcaatcgatccaatagaatcagatatccaatcataattggatcggatcggatgtaaattttgaaatccaatctgatcggatcggttgttggataggacatttgatcttatggataaccgaccaaaccgatccaattatcatcgagtaatttgcggcataacctccttaagtggttagatttttacaactaactcccaatactaaaatttggtggtaaaaccccctaaactcgtgttctattagcagtttaacatttccatccattttt

SEQ ID NO: 365763 - DNA, 886 bp, Cannabis indica
ctatatgtatatatatatatatcgtaattttggaagaaaaaaatatgaaaaattataaatcttagagttacattttaattgaaatatcaataaaaaaatcgtatgaaatatatcattgatacactattttgaatatatggagttttattgtcaagttcttattacaactctccgtgaccgaaaatttatgccagaatatttttttaaatttttttatggcagtgtttgttatatttacaatatccctgtaaatttttgaatagtttacagtgtcaaaaataagaatttgaggaactctatcttcgacattgtatactattcaaaaaaatttcaaaaatttataggcatgatactgtaactaaaatgaataccgctataaaaaattaaaaaaatatttcggcatgtgatttcgggcgtggaggttgagtagtttagcacaactgcgctgtggggaaaagcagttgtagttgtgctgtaaaaaaaagcagctgtagcagaactgtagaaaaaaaagttgagttgagtgtttggtaaattataaattttaaagtactctgagttgttaagattctattataataataataacaataataatagtaataataataatattttaatctatttcattaaaatcacaaatatatatatatatatataaaatatgtaatataaaatttttatcttctatatatttttaattattttatttcgattagtataaatttttagtcatttgataaaaataatttttaatattattaaattatatttatgtcaattgtaaaaaaaaattgtagtttataaaaaacttaggttagataatatttgttaataataaaaatataaatataaatataaaatatttttaataaaaaataaaaaa

SEQ ID NO: 365764 - DNA, 548 bp, Cannabis indica
cggatgacaaaggagaaaccaaatgcgagtggttccagaacgcatcacaacatcctaaccatcattggaggaccccatatcgcaggagactctcgcaagtcacaagagcggtatgctagagaagctaaagaaaagccgttcaccaatgtcaacaatcttagtgagcgagatgggttcatcatccgcattccgatgcactagctataatcgcaaatattggcggggataatgtccaccgcatactcgtcaacaatgggagttcagtgaatcttttgaacttccaagcattcaaataaatgggattgcaggagaaggacctgcggcctgtgacgtcgagcatttatggttttacaggcgacgtcataacattaaaaggaatgatcaaactcccaatcactttgggaactgccccggtgatagccaagtcaatggctgacttcgcggtaatcgaccagtactctgcatataacgccatgattggtcgaccgatcctgaaggagatgaagatcataacctcgatctatcatctgacaatgaagttccctact

SEQ ID NO: 365765 - DNA, 631 bp, Cannabis indica
tgttgatggttgtgatcgttggctggaactagttgggattggtttaaagataaatattgatacaactttgttttcaaaagctgctacttatagtttcatgtgtggctcgaaatgttgttagcgctttggttgaggcaattacttgttgtcgtgtaggccaaataattcctgaaatggctgaggttatgggagttagaagctttgagttggataaagaagaaattttggcagggtcaccgttgaaacagatagtgtaacaccccaactattaggcacgctacgctaaccgattatgaaaccctagtcccttaattcgggattactagaaggataaacgcataaaatttaaactttatttgaaacaaatgaaaattaagcttgtaataactttaaactttacaaaccacaagatacatattcgaggatcccgtaaatattttcataaaatattacaagttcatttcacgagccgacctaagcggcaaaatcagagttacaaaatacatcactggtagaccccaacctgcttggtctagtgtagcccaaacatgtacaagtattgccaatccctcgcactcatggcttattagtgatcaatttaccttttcctacatagtagagcacctgtgag

SEQ ID NO: 365766 - DNA, 438 bp, Cannabis indica
tctcaatagtttaaggggaatttttaactgcaaaaaaagtttagggacatgatttggtacatgtcaaaattcgggagaaaaaatcataattagccttttttttatccgataatagggcatctatttatgatctgtgtattatttagtataagatattaaaactttaatgaatgtctagtttttaagagtatctttgcatttaataaaataaattttgttggtaattaataagaaatacctattccagtttgtagaattatatatcatcttcatttcttaatgataatataataagaggttatttattttatttttttatgaaaatgttcgttatacttacatgttattcttgtaaatttttgaaaaattacttgttacgaaaaatataaacaatacacaagtgcacgtaatcaagtagtttactcacacaggtgagat

SEQ ID NO: 365767 - DNA, 513 bp, Cannabis indica
aaccatatggttacaataaaatagtaaccatatatatatatatatgtgattttttttttgtcacgaagaaaattagacaacatcaaagtagtgtgcaataaaaataggatcgatttccttggctaaattttattttttgcctttttcaatttgattccgcaactggatgttgtcacaccatattgaaggtagtcattttctatggtagtgcatcatcttcataactcttaattacaaagttccagcttattcaaaagatgttttttcacaccttagtatggatagctctattccaacaagggcctgacaagaaactgaaacaaaaatcgctcaactctatacattaatactttaatttatccagatcacacatatacaagtaacttgaatcttttaacctaacctcaaaagtatgaagagtacaagacactaagttaattatcacccaaaagcataaacatatgttgtcaaccaagaataaaagaaagacagatgcaagacaataactactca

SEQ ID NO: 365768 - DNA, 668 bp, Cannabis indica
tataaactttgtgttctctctctttacttttctctcagtaatgtgtgtgtttgttgatctatgtgtttgtgtgtttatggtgattgtttgaacatggattctgggtaagatcgatctgttgatcgagtaagatctctggttctagggtttgagaaccagagagaaaggaaaggaagagagagagtttgagaaactctcgaaggttcgatctgagaaatgagctagggttagctcggtttggctttggttttgttcaaagcagaacgacaaatcgttttgattaaacgatttgtcgtgtggagagaaacgaccggagttccttgtcgtttggtgcatttgtttaattgaatttttctgggacatttttgtccctgtcgtttttgacatattgcttgagtggtgtagggcaattttggaatttaaccaagaaaattcctacagattagatgttggatgtattagattgttagacactctatccaagtccaatccaattcaatattaaaaaataacatccaatccatcacaactaaatatttaatgtttaatggtttgtaattaaatccgccggctctcattaaattagacgcatttttatttaagcattgctattaggcaccagtagtgtctagcacctttgcgacatgtcttgcgattggctagtgata

SEQ ID NO: 365769 - DNA, 464 bp, Cannabis indica
caaagtagggcccattatccatcatatggccggccactatgtatggattttatcatttattttttcattattttaatgacaaataaatctaacctaactctaggtggtttcctataaataggtagtgatggttttagggaaaagatgatgcatctcattccttcaaataaagatcctggtaaaataattttaactttatggactatgcaaacaacatcaaagactagtggagaagtattttgaatagtatttggagaagtattttaagtagtattttgagtactatgaatgtcataccaaagcatcaacctacaatatttcgagatgtaattggtgtttatatggcagaaattaacgaaatttcatgtcaaataactttctttgtaaagtcaaaagttacatcttttatgaaatgtaactggacttgtaatgttgttctactagacaggttattttagttatgg

SEQ ID NO: 365770 - DNA, 583 bp, Cannabis indica
gtgacgttggagatatttgaatcttatccaacttagagcttctttcactcctaacgcctcagcataaccaggatcaacccttccttgccaagagccggttctagcatggatgaaacaaccggtagtgtcacgaagcacccacccaaaaccaaatcggttcttctcctcaaacgtagcagcatccacattaatcttgaaataaccaacatgaggggcacaccagtgctcatctccttctccaatttcaatcgatgaagagaagggtgaaaaagtttttccttgagcacaaaaccattgttcaagatcattttttgctaacgccacaacattcttgaccgaaccagacttgccattccataccttgttgtttctttcttgccaaattgcccaacatagcatggcacccaaccgtttatcgttgtcattccatcggtgaaattgttgctgaaaccagtccccaaaagacctgtcaccgatgctgccattgtaaagagcagcatacctccagcaagcagccgcaaacgaacagccaacaatgcaatgggctgttgactccggcatacgctcacacttggggcaaagg

SEQ ID NO: 365771 - DNA, 646 bp, Cannabis indica
actagctgtgaatcactgcagatttcaatgtgttcgaccttcatctcctgggctagtcttagcccagcaattagagcttcgtactcagcttcgttgttagatgctttgaatccgaacttgactgcagcgtgcaggtgttgccccctaggcgtgacaagggcaattcctgtaccagatagttgatctatagctgacccatctacatgtaatttccatgtcggcttatcttcattgttactttgctgtggtgtttgtaccggctcggggttgctttccggtatgctttctttcttgcttgtgcattctaccacaaagtctaccaaggcttggcctttgattgctgttcggggttggaaagtgatttcatactgacccaactctaccacccacttgagtagccgttcagaagcatctggcttttacagtatttggtgtagtggctggtcagtgtatacccgaacaggatgggcttggaaatagggattcaacttccttgttgctaggataaggtagtaggcgagtttttctattaatgggcatgaccctcgacctcaatgagtcttttactgatgtaatagactgggtgctatatgctgttctcttctctgatcagcacgacacttacggcatgttccgtgacagctaa

SEQ ID NO: 365772 - DNA, 523 bp, Cannabis indica
ctataagaaaaggaaacttcttccttgttcttaagtcaatacaataacgaggattaggctattaccgaactgctcggggctgaacctctataaaattcctgtctcttattattgctttcttatatacattctcattacgacatatcgtttatcgcttattaaaaagactcattgtcgttggctaaaagcgaagtcaacactcccaatattaaaaataacataaaaattaataatgttacaaatattatattattgtttatatatatatatatatattaatctaaaataaatattaataattatatatatttataaaactaaccttactaatgccgataaatttaacagaatattcttatatttttaaaatattctgttaaaccaataaaattgttaaataactacattttatatataataatatatgtttatatatatgaaaagataaaagtcattaatgtaaataataataaaataaatcatgttgcccttaattttgcccaatatacgtggaccaatcaga

SEQ ID NO: 365773 - DNA, 762 bp, Cannabis indica
gtcaacttttcatttacaatttttttagtcaatctctgtgccagaaaacacatactgaaaatatttttttaatctttttcatagcggtgtttgttatactcatagcacattcatataaatttttaaaaaattcgaataaagtgccaaaaatagatttgaaagtttttgaacacgcgtggtaaattggaatatcaagaactctgtttccaatactgtaaactattcataatttttcaaaaatttaggaatgatattatcactataacgaataacgttatgaaaaaaaatattcaaacatataatttaagacgtgaatgttaaccaaggccgaccttgagaatatatgagtctaaggcgaattaaatttttggaccttcactcttaaaaatatatacataaaaaattaaaaattgagtgtcatatttcaaattttgaacccataacattggataatatattatacacataaaccaactaagctatgtatatttattgtttataatacatttaattttacttaaataaaaacatgatgaaattttttattttttattttgagcctacaaaaggtgtggactctaagcacatacctagcctatttatgcctaaagccgaccctaatattaattaaaaaaaaggggaaaattgataattacctctttttattacacattcaccaaaagtagctgtaaaataaatttaattgaaatataccctattttataattgatctgcccaatatatccttacattataagttct

SEQ ID NO: 365774 - DNA, 580 bp, Cannabis indica
aaaataccctcataatttctaactctttctctctccttctcatacaaactctctctacccacttcgcctgaaccgaaccgcgcgacccccacctcccaccacgaagacgacccccacctccgaccgagacgactgccacctccgaccgagacgactcggacggagacccacagaaccactccgatcgagacccgcacggtaccgactctacattggccggatccaagaacaacatacacgagacaagaccatcggacccccaatcccatcggacccaagaacaacatacatgagacaagaccatcggaccccatcggtccgagcatcggaccaatcagtccttggctattaaaatcgatttttgggggaccatcggaccccatcggttcgatgctactaaaaacgatttttgggaccatcggaccccatcggtccgagcatcgaacccatcggaacttcttcttcctcaagcaaaaattaacccatcgtggatccggccaatagtagagtcggtaccgtgcgggtctcgatcggagtgattctgtgggtctccgtcgaagtcgtctcggtcggaggtggc

SEQ ID NO: 365775 - DNA, 583 bp, Cannabis indica
agtactatttgggtatggagggtcgttacatgccatgttggaaggatcaaggctacttatacttcatcctgcacttcgaaagacaaaaatattaggtggttgttgaggtagatattgataattggcagattcgggtgtacgataacgatatgtcgtgtaccagcaacgaagaatttgaagccattatgttagcttcaactgagttgtttccacatctgctgaggtcaactggctattgcgatgtcaataattacattctcaatgtagtgtaaggggagagtattcaactcagatcaatgcatgctaaacgcatgccaagtgaggtggttccccaaagtaaagcaaggtaatttttattaatatagtatattaatatttcccttgccattagtctctaaacatattgttttatatttttcagtggtgattgcggggtatatgtcattgagtacatcgaacacctcatgataaatcggtcattggagaagattattgataataacatgaggatgttcagagatcggtggtctgtagacttattttaccaaaacttgactttgtaaataattacaattatagtagg

SEQ ID NO: 365776 - DNA, 943 bp, Cannabis indica
ggactgaaccgatattgacattagttaatattataaacttactattaaatctttataagtcaatatcatttagttgatcttatgtaaatagatcttaatccttagatggttagattctggcttaaatgtatcattcatattctttgacttgttcgttaaagttgaccaagtggattttcgtaatacttacatctttggaacatggtagtataattaagtgagatcgctaattataaatatggaatctatagcttctataacttctagaagtgaaatgatgatttccttcaagcttggcttaacgcgatgaatgattgagcgctcatttcagtacttatatttgtttactgaaatatcatttacaagtagctaagtattttaaggataaaatacattgaagggtagaatggtaaatttatccctactcgatgtagatcatctatatatgatctttgactatttggattgaaacaatgagtaatttaaattgcacctatttttggtaatagagcgttctatgtaatcaggagtgcagttctaaatctatagtggactccggaggaattaataagttaagaaatttacttggtaaattttgaatctacttattggaagcttgattatatagggtcatagtccccacactaactgggataatattgttttgtagtctcaattaattggttttaattagtcaattagaattttaaataagactatgttatttgtgaatttttcactaagcaatggctgatttgaaaagaaaaaaggatttagagtttatttattaattaagagactttgtaaggtcttaataataaataagttaaataataattttatttaataattaattataattattaaatagattgaattgacatttatagagttagaattaaaatatagcgtttgtgaaagaaaagataagttgataaataaa

SEQ ID NO: 365777 - DNA, 492 bp, Cannabis indica
gtttctttttgtatacatatataggacttctaaatatatatatatatacaattataataaaaaaatgataagaaatacgtatggttaataattgtgctttgtattacagaaaatactctaagttaagtttttcatgcaccatcctatttatttatttttataataacaatttttttttataaagcaatttaaaattttttagtataaattttaaacttcataaataaataacatttaaatagtaataattaataatataaaattaggtaatataatttaattattattatatatctgaattattattttaaataattattatcatattaataaaaaatttaaattagttataaaaaaagtgaaaaaaaggttgaatcttttctaatttttaattaggttgcttacaattaaatatttacaagctaatatgagttagtaaaaatatactataaccaactaaaaaaaaaaaaaaaaaaataaaactaagactaa

SEQ ID NO: 365778 - DNA, 591 bp, Cannabis indica
attattattatttaggaaagtcttatataaataaatattaataaagatatccatttattcctgttatagtcttgtaactgataatataatgtaataaaaatggccaaaaaagatagtatttcatcctattagatatagggtttggattttcttctatttgtggataattaaaaattccattgtacactttaattttatttggttatttatatttaactctttttctttttttggttctccaaaatttccatttatttttttatatttattatgtaacgttacacaaatatttcttattattcttcttttaaaaaaaaaattaaccattaatgtcttattttattatccttttttgagtttggactcttgattgatgattacaatgttattttattatcttttcagtaatgttattattcagtttattgaacgatttacaaacaaagttgtccactatttgacacgtaactcttgttttttcataggtcgtatttgtcaggagcatactttgcctcctgaattacgtgttattgtaataaatgatgtttcggtttaataaaagttttaccttttattcaaaaaaaaaaacta

SEQ ID NO: 365779 - DNA, 698 bp, Cannabis indica
tgtaatttatatatataatcacaaaatcaaggatgttgattatttggattcgaaattaaaacacacggccaccactaatatacatatatgagcattaaatattctaaccccaccccataacgtgctatataataaatatgatacatttttaataactgataatttattagcttatgatgatctgattgaaccagcaatattattattggtcatatatagctaaaaaaaaacataccattttgagtttttgtattttagtttcgattctacgatggaccgttttgttaaataattaaaatttattctgatttttttaaaaaaatttaaacatataaaaattatttttaaaaaattgattcttattgaatatctaccaatttaacaatttttatatgtttatacgaagttatgtttactttaattcaatttaggaaaccgttttttttttacgtcggtgatccaaatcacacatgattaacaaagcagcaatctacaatcggcggcggtacctcctcgaaccaggataactcattgtctaaacgaagagcatgtatgtactgcagaattcgcatcccgagccacttgggacaaaactgctcccggggagtttaaacaataaagctatgacatcctcaagtagcacacccagctcgttgaaaaacgacccgttcctttgtttatagctgtgactagagaca

SEQ ID NO: 365780 - DNA, 972 bp, Cannabis indica
gactaagtttgtggatgtcactgagtgcaacaaccaaaccttagctttagaattcttggccaattggccagaaagagaggatgataaggtcaaagttaggggggttagagtgccagtttccacagccaccatccacgcagtctatgacttaccgaccttcaccccagaagaacaaccactcaaacagcaaattcgagcaaagagcttgaattatgaggacatagctgaaaccctaggttatccaggccttaggtttcatgagtatgatggagaaccgtatcagctgtttcggtgtgaactcaacccggtagccaaggcatggctatactttgttagtgcaaggttggtcccaaacaagcattattctgatgctcagatcgacaggcttagatttgtgtatgccattatgaagggttacaacctgaatgtgggggacatagttagagtgacttttgatatgatggtagagggggcttgtggaggtggacttgggcttgcagatattatcaccaccttgtgtgaggcacatggagtaccacagtactcctctgacacgaaagcagcaccacaacgtagtatcaccatgtccacggtgcttcgattcaaaccaccacacccgcatggtcaaccgccagctcagagagatactcctatggaagaacaagaagagcatgaggacattgtaccgccacgtattgctgggcctctcgacccagccatgcaatatacacatgatcagctgaattatctaattcagcagaacatgcacatgcagaactacatggcccaaaggagtgtttttgatgagcagcaggtggcccagttgaacacgctaatcacgaggatgaatgttggtgtggacgaacacaactattttgccatgccaccccgcttcaacccctatgatcagccacctccgccaaaccccttctgatggggctcaagtaagtctctcaaccacagttttatttt

SEQ ID NO: 365781 - DNA, 565 bp, Cannabis indica
agataagtggtatgatttgatcatatcataaattgttttcttataatttattattggaaagttagtcaattcattcattggtgacttataaattattgtaatgtatgattttgattcattaagttcaccaatatgaattctgtttgctctgataattattcaacttcatattcatattccaactattacaattaaaacgaagagaaaaggacttaggaattttaatgcaaattgtaccattgactcactacttgtatttattaaacctatttgatttatataaatatcagtatgtatagatatgttttaaagaaacctaactgatattgacaatgggtgatagtgtgtttgtttgtgccctctaggttgtgagtgggattatagtgaaggcctttgagacaaatgtttatttcatggctatgtcctaacatgaagggtattctatttttccaaactaataaacaatattttctagaaggtctttagcctaaacacaaggccatttggttgaaaaaaaagggcaagaatttataaatgcatccgaattttcaaaaatttgacttaa

SEQ ID NO: 365782 - DNA, 627 bp, Cannabis indica
agggcataaaacctaacatgtttacgattgttttctaactttgctattttcttttgcagatatgtcttcggtctcactgggggaccttcagatgagcccgcaggtcgagtgagggccaaggtggcccaaacttcttgtggcgaagatgatgttgggtcttctctgcctcctcttccaccagggcctgcactagctgggtagcctgtgatacggcctatgggacagggtgctcggaggcctgaccgaggagcaagctcagctatagggcagagagctatggaggtcgcccatagacgcaaagagagagcttttcctttcatggatgaggagctcaaggagattggtgatggcgagccagacaggctctactccaccagccttcgggattattctttggtaagttgtatttttagctttattcatcattctggcacggtgtaccggtcaagggatttgttgcatgggtctggccagccatggatgaatctgtgaggggctgtccggctgtagtagtttcaaatagagggtggtcggccaggtatgtgactacacagtttaagagagcttaaatggattgattggtactacctatatcaataaggtgcatcttatttttcggtagcccat

SEQ ID NO: 365783 - DNA, 705 bp, Cannabis indica
aaatagaaaacaaaagtttcatttacaaaaatactagcttaacaagaaacacggaggaaactcctccttcttcgtgagccagccgaaacatcccaatccaccatatctccactattttctttcaaaaactaggtaaattagctcaaatcaaggtgtagatctcaaggaaaaagcaataaaatcccaaaaaatccaaatacaaaaaagggaaaaagaaaaaaatagagatatcgacctccattgactgtaaaaaaaatacaaaaataacatacaaacaaaaactgaaagcgtacagaggagaggatttgaagaaggagatcaaaaaaacattgaatcttacccataatcgaattagagaaaaaaatttaaggtacaaaaatatgaaaaaacaaacatcatctaagcttccagaaaaaaactagaacgcaaccaaaataatattttaaaatcacccatacataaacaacctaaaagatgaacaactgggaaaaaacatattaacaacaatttgaaaaacaaaaattactaaaaaaattgctaactgggaaataaaattaaacagcactaaaactattaaacataaacattaaaacaactgttcagaaaaagtcaatagaacactaaaagaacaatcaaaccacgaattaaaaataagaaaaaaaatgttatgaaaacacaaaaccttcctacaaaaaaatgagtaat

SEQ ID NO: 365784 - DNA, 504 bp, Cannabis indica
tctggacttaacagattttgtgtgtatatatatatatataaattaaaccataaacatgaatacaacatgtaagcataaatgatttctaatcttttattgttgacaaaccagattagactgtaaaggttttatttagggcataaaatcccaacagaaaattctaaggcaaggttacttctggccaaacgatgattgaagattcaaaagcctatgttaagaagtgtgacaaaatgccagagattttcaaagataccatgagctccacccaacgagttaacacagatggaaagtacgtttccctttgccatttgggattgacctgatcggacaattacccaagggtaaaggaggagtgtagtatgtagtggtagcggttgattaccttactaagtggactgaagcctgaccactcgcaaccattacatcaatgaaagttcaagactttattatgaagcacataatctgccggttcggactatcgtacaagatagtttcagataatgg

SEQ ID NO: 365785 - DNA, 1004 bp, Cannabis indica
tagtgacactctttagtgacccacgtaaaagtgcgtgtcactaaagagctaggagtgatttttagtgacacacataatgagaatctaaacattcggtgttagtgtctcataatgtgtgtcactataaatatgtagagtcactaaagagtaatacccattactttatgatttttttttaaaaaaaaattatttacctatagagtcatgccatgagagactgcaaaagtgtgtcccgacttacgtagcgcgtcactatatcatagtcttatatttaattatttttaaataaaattaatattatgatatagtgacgcgctaaacgagttgggacatgtgtatccagtcatgcattgcgcgtcactatatgttaataaaaaaatattttttaaattattaatttctttaatttttttatttaagtaaataaatcaaatttgttttttttttaaaaaaaaagtaaataaattaaatgaggtataaaatggacattatgaatatgaaaccctaaagccccaaactcaacattttccctcatattcaacaatctctctctgcgtcctttcaaaaaaaaaaccaatctctctgcgctccactagaccgacggcaacccttcaccagtccaagatttggttactgagaacgaaaaagagtctccccctccaccctcaaatccatggcgacttctctaatctcatccctctcgactccctcctcttcacctcgctatgtggctccaaccattttcagagctgccgaagttggtgccagagctgccgaagatgctgaaaaacggttcctttctctctaattctactcctatcttaattagtcctttctttattaatcaaaattttttaatctgatatcagttttttaaaaccattaaattcagaactcttttatatagtctcaccgtttgtgttagggattttaatatttataatatacatatacaattatacatatacgtgtatgtatgtatgtactgctgatatatgagtttt

SEQ ID NO: 365786 - DNA, 698 bp, Cannabis indica
ccagacactattgacttagtggatgaggaggaggcgcttcctgaggaagctaaagaaggtcaagaagagcaatgggctcttcctgaggaagttgaagaaggtgaagaagagcaagaagttgctctgattcgcaagcgcaagggcaagatggttgccgaggaggtgcccaaacggcagcggagagctgatactccggcccctggccctgattccgggatctctcccgaggcggaggaatacacagtgcctcccaacatagtgctgactccggttcctggagatgaggcgaggcaggaactccggatagccaaacacaactacgccatggacgagtactcccgggggcatgctgacgtggaggctttgaggagggttttgcgaattgaaatgcaaaatacccttaacgatcagaactatcaaaatccgtgggatctaaatttggaccccctgtcggattggttcaatcgtttcctcgggcctaccttggctccctttgccgcggagatgaccggcgagttcgtgtctcagctcacccggtgtgcacccaagcggttcgctgcttgtgcatccttgaactccatctttcaagtccaggatctcagccactccctgactgtggtaagtatttcgtagtttacttttttcctcattattttctcttaaggacttttactcatacttgtatcctttcccagctt

SEQ ID NO: 365787 - DNA, 555 bp, Cannabis indica
ttaacctaaaaaaataagctagggaagaaaattttttaagcctttcagcatcattcgtgcaagccttcgtgaatcaccgccatcaaccgttttgtccactgtcgctgtaatggtaataatttggtttttgaatcgtatgtctgcatttctccaaacggtaaaaagaagtaaaactttatattagtttatatatatatatattattatttcttaatataataaatactataattaataattaaaacttacaggtttttgatcttgtatataacggttggggtttgcacgtgcaacgatgttagtcatgtatttcaaaacataaaaactagattcttgggttttaggttgtcttggacaattcgctagtgcaatttctggccacggcccaagatacgcatttgttgtccctataatctggtatgctctgttttaaaaaattatataaatatttcaattcattagttaattaaaacttcattgttgtaaaactttccattattgattaattttaattttttacaaccattcgaaatggggtttatctagcatcactta

SEQ ID NO: 365788 - DNA, 584 bp, Cannabis indica
tatatgtatattacaaacctgaatggaataggttctttacccttttagaaatggactgacaaggtggagtaggacacattttcaactttaatttaaatttgtgtgttttcatattgtgtagcaatatggtgagcgacagaagctggatgacttcaaacagatgatttgtagagttttgtaggggtgtggatgagcgacaagctgccacaaggtcaaaaattgaaatttagatttcatatggcgactggggcccctgtagatgactatggcaacaagtttaacaattacataaagtttcttgttcgcaatactattcctatgaacaagtttgagttcgaggacgttgagactacactcattcagactatatgggatagaatagcagtaatattttaatttttttaataatacatcaaacgaaatcattatataaaaaatacaatatatatgactttggtatttttttttcagaccaagtttgagttgccaactaataatcctatgttcgtggattacgtcaccaaatctatgtcaaaaggattacgtgactggagatcagacacgaagaaggcatggaaggagaa

SEQ ID NO: 365789 - DNA, 526 bp, Cannabis indica
ccttatttatatcctacactcttaagaaaccatcaatatataataactaatattagacacataattatataattatgcaaaactcacttgtttgagcgacccagattaatatgcaacattcttaaaaaaaataaataaaaaataaaataaaactatcaacataattatataagaattaatattaaaaatatcaataatttgtatctaaagttaaatatgtatatatatatatattatagtttggttttattttaaaacatataaggaatgtacataaacgtttgtaaatcgcccaacccgaataattcgctcaaatcaaactgagataacccgacgaaaaatacaaactgaaaaaccaaacaaaaatataacctgctcaatctttatattgggctggttgaaaataataacaactcgtccaatcaacccgaactaacccgaacaactcaattaagagggtttttatatatttatgtatcatataatttatatgactatttaaaaaatataaagttcaaactaatat

SEQ ID NO: 365790 - DNA, 694 bp, Cannabis indica
aagaaaaaaagagtaaaattttaatgttaatttttatgtatacacatatattttacgtataacattataaaatctaattactcatccaaactaaatgaaaatactaattagtttaattggatgttggatgtattggatttttagactctccatccaacatccgatccgatccaattggatattcaaaaataacatccaatccgatccgatcacaattggatgtccaatgtttggcagtcggttgtcattggattagatcgatttatgcacacccctacttgtggttgatgttcataatgatgtggtggtagcatgcaccgtggtgtgtattagggaacacagtctccaaagtatgaaaagatgcctatccgacacaaaggctaagttctcaacatcagcaatcgtttctttcaattttctcataaaacaagtccaaaaattatggttttcgctgtcaactacagcgaaaactatcggaaaaatatagatgtcggcatccagtgccactgcacacaacatttgcttcccatacctagtcttcaagaaagacccatcaacgcatacaacaggtcgacaaaacttaaacccgcgcttacaaggacccagagagaagaaacaatacttaaagcgaccatcctctaccacaaaattcgtgatggtacctggatttctcaattgtagcatgtgcaagtaa

SEQ ID NO: 365791 - DNA, 1275 bp, Cannabis indica
atgtgaccaggaaaaaacatttttccgatctttagctttctggtcgggatatctggatcgatttcgatctcttctaattcttctacaggtccaacattgctgcttgggtccccaagtcgaggatccacctcttcatccccgccttgggaagttccctacttgggaatgttttttcccttatctgtgctctggctggaggatacttccttcttagccatggcaactggaaggttataagattctcgtgcagactgctggttttctctcaaacaccctaccccattctttgttgggaacttcaagcacgagtgaaatattgatgtgacaacctttaagtcatacaaggccggtcggccaagcattacgttaaaagctaaagaacatccaatattaggaactgtgccataatagtcatgctcgttggagcttgtccaacagtgaagggtagccggatttgtccaagaggtgcaactccttgaccagagaaaccatagacaggctggaggcatggggttagatcctcgagttggagtcccatttttcgtaagcagttttgaacaagatgttggaaggggctccattatcgatcatggttctggccaccattttattggctatctggacctccacgaacagcgggtcttgtgcgaaaatttaattttgacagcgtcttaatcatggaaggatatggtcggttctcctgctcgtggaacttagggcttcctttcttccacggccaggataactccttcttgttcgtgctgcactgttcgggcatacctctcccgagctttgcacgactctccaacaatgtgagggcctccaataattacttgcaagtgtccatctactggtggaggtagcaaatcttgattgttctaaccctggtcggtcttgacatactcttgcaggtgtggattgtttttccttatcagaaattcaatttctcgcttaaagttgtagcattcgttagtgtcgttgccgtagtctccgtggaactgacaaaactttgtaatgtcccttttgttggcgtctttcttcatgggcccgattttcttgtacgtgggccagcgactgagttgccatgtatacactttctatatcttcagtcaaaatagtgaatgtagtgtacttggcatgattctcccgaggagtctgtttggaatttccggtgaactttccattcttccgttcccttgcttgtggttgttgttggaaagcttgccacttgagctttgaatatttgggtagttgggaagttgggcggatgttcca

SEQ ID NO: 365792 - DNA, 940 bp, Cannabis indica
agggcactcataacacaactgttccgtctgaaaccaacatccagacgaccatcggagatgccactaagttacaaaatctctgtgacgctctcggactcatgcagggtcataacaataccctacatcatgatgaggacgaactctgcactgcggtaaatctcatgttcgacgaacaaaggcgtatgttagtcgaatggagggatagagagatggaggcattaagggctcaccatgcagagatagaaaatcatagtcggtaggctaccgtgctgatacgaaaagcctactaaactgtaggtcagcaactgtcgaacgtcattcccctgggtgagacggacgaagatccagcgatgaatacttctaatacggcaaatggtcagtcgcccaatccccggtcatgagttccacttgtgggccaagcggtaggcgggcagaccttgtctagtaattcattaggagaagtcacacctgatggttccaaccagataaatggtggaattccacccgtcaaccaagcgaatcaattgttgaggcagccaggcacttctgtattcgaaaggttgggagcaacccatgacctaaggaatgatctaaacagaaggaggggagtatacgatcagaatgttacgacaatcttgtagcccaggacccgtaatcaatttctcgctcagaaagatgctgatgtaattcaaattgactagaattccgagcaggttagccaagccgtacaggctcagctagacgaactgaaaaatatgcttcacggcatggctggacaaagaaacaatgatcttgagctggaccgagcacgcggaactcctttctcacctgagattaatctcttgccgttgccccacaagtttagaatgccaacgtggaagatgtacatcgggagagaagatcccatttcccatcttaagtacttcgagatgcaaatgga

SEQ ID NO: 365793 - DNA, 503 bp, Cannabis indica
cttgattatccttgagttggtaaacacaagtttcatcttcattttggtgaaagccgtaggttttgattatttcatcaaaccttttgttctaagagcgagaagcaagtccataaatgaacctattgagcttgcaaactttctcttcctattctggaagcttataaccttctggttgctccatatagattgtatcgtcaagaattttattaaggaaagctatcttgacatccatttgctaaatttcataatcgaaagtagtagctttggagaaaagtattctgatagatttgagcatggcgggcgaactaaaagtatctgcatagtccacaccttctcttcgggcataaccctttgcaacaagtctagctttgaaagttttgacttctccacaagcacctcttttcttcttgtggacccatttacatccaattagatgataatcatcaagtgcatctacatattcccagactttgtttcttttcatggaatccatttctgaatcc

SEQ ID NO: 365794 - DNA, 1022 bp, Cannabis indica
gtcacattttttttaaaaatgtcacaaattaaaatgttatttattcttactaaagtgacattttttaccaaatgtcattaaattactattattaaaacatttattaaaaatgtgactaattgaaatgttactaaatgtcattaaaatcaagttatactcacatttatttaaaatgttacaaaactttatttctagtaacatttcaaaaacgttattaaaaattaagtttaggaattagaatacatttagttacatttttttactaaatgtcattaaattattatttttgtaacattttctagtaaatgtacacaaaatcaaatgttacctatatgcaatattgctgtagtgtttttaatgatatatttcaaaattatacatatttcatatcataaatttaactttagtagattaataatttttattatattaaagagtttaatagtgttttaaatactttttacttctatttctttaagtagaatatttctattatgatatttatgaatatagtgatggtattatattttatttgttttattattattatgttatgttaccgtataaattttattttattctataggtatagagaatctttataccacatcttgaattattggtaagcagataaagttttttcttttaaattttaaatattattattgttgatattacttcaatgtatattactattttaatatgctaatttacttttatttattttattaggaaagctcgcaattacccaagtttgctatgacgatagtgttggattggtctttgacgcatggttttccttcacacctttttttttttaaggtttgacagtttatgtcaaaaaagattgacggttggatttagttctttgtattttctatgagatcctttatttgtattgaattaattaagatctttaatagagatttttactagattatttactaattttactaaggcgtccctaattcatgttcatattcatgtaattaacagtgcatgtactctgggtggataataaa

SEQ ID NO: 365795 - DNA, 622 bp, Cannabis indica
gatgcaaataagtccttaatcttgaaaaaatagcgataatagtccttaagcttgagattcttgtaagttcgttagtcttcattttaagagatccattagttgctcaaaaaatatcacgtgttgatattaaattatagtataagtcctcaaaaagtttactttcatgcaaataagtttttaatctttaaaaattgtagtaatagcctcaagatcaagattttcgttagtttgtatgtacccaatttaattgttctgtttgttactcccaaaaatgacacgtgttgatattttattggcccaaattataattttaatttaaaataaataaataaataaatgaataattaattccaaaactaattaattaactttacttcttttttttcttttttttttttttatcttttctatttttttttctttcttcttctcgttcactctcagcccaacctacccaaccatgatctgctctactaaaactctctaatttccattagcaagaggggtcactctaaaaaaattattaatgtaaattttgaaccagaaaagtcgaggtcaatgaatcggccaccaaaacccaccacccatatccttttttctctatcgcatactccatccatat

SEQ ID NO: 365796 - DNA, 737 bp, Cannabis indica
tttgttattttttttaaattaaattataaaatcagataaatgatattaatttatatttcctttattggatatttaattttattttttaaataatataaattttgaaaagtagttcgcattatttttaaatagatatttaggtttgttaaaacctaatttttcaaatttataggtttaattttaaaattaattatttatttatttaattttttcgaaaattaatttaattatttagttaatttaaattaaataaatcctatatccatatatccagtttgttacatgtgtgttttatatattgtttattatcaaaacttgttttataaaacctattattatttgatctaaatttctatggttaacttgttgacagatccaatgatctgattttaaccaatagttcaattgtcaataggtcaaataaataatttgtaacatgtaaattttgcaatcttctttcatctgtataaacctagtaacatgataggatccatccaaatcagtgtgtgcttatgcctatatgttttctttgggcttagatacatatcagaagcccatttaattttttttgtaataaaaattgactaggttgctaaataaaactgtcacatttgacacattttatttaatccaactagtattgggcatattcaatgaataacagctgtttaaattaaggttaaattcctctcctttgggccttgtgtgagagttatggggccattagtagtgggtac

SEQ ID NO: 365797 - DNA, 526 bp, Cannabis indica
atggtcgttttagtgcaaaaattggactttttcccactccctggatttaggttaaacgatttcaaagaggttaaatggttcaaccggttaactggttttcccagtgggagtctcgcttttcgtgtccaacaactataaacgactatttttcacccccacactatataaactcgattttcactcaaaaaatcaagttggctgagcatttatgtcatacacctaacctatctaagtgagattaatgagcttccaagtttaaaatccaacaaacacttttcacacactttgagccaaaatttgtgtttattcatcttgaatgtgcttgcttatcactttaggtttccattgtattatcatatttctagagtaattttgcttgtaatttcaaacacattttctattgtgattgaggtgaggttggcaccggtattgtaaataacccggttatagtgatattggcacttcaacaattcgagaaagaggttaatagtcctcggtggtgcgaaactattgtaagaggtttgga

SEQ ID NO: 365798 - DNA, 569 bp, Cannabis indica
aaaaataaaaaaattaattaagaaagtattagatttttagttttatctgccgcaatttttttgattgagggaaccaatgagtgaatgagggattatgtgacgtgattgcgttttcgacacttgacctttgaaagagaggagaggatatgtgaaatgtcaattatatcttaccaaaattaaaccaaatcacacccaatccaaataagccaaaactacgcctacgctaagctgagctgagctgagctgagctgtaggaagagttggaattattaggacttggcgcgttttctatttcattttccaaaaaaaaaacaaatatattatatatttatttatttatttgccgatttaaacaaattgtaaacaagtatatatataattcccaatggacttgtattttttttttttttaaatgagtaaacttgtatatgatatatatgaaaaagataaagagtttttttttttcttttttgaacaaatgaaaaagatagagtttgaatttcaaggacatgccgtttcaaaaaaaaaagaaggagatgagtttcccaaaaggttgggtgctatactcg

SEQ ID NO: 365799 - DNA, 632 bp, Cannabis indica
gcaattttgtgtataaagtaattcccagaatcatagcccaaagattgagattggttcttgatcacatcattgcccccatacaatcggcgttccaacctggaagatggattacggagtcatccattctcactcaagagattgtgaatgttatggagcggttcgggttctgcccacattttgtcaaaatgatactgaattgtgtttctactggctcctactctatcctcctcaatggaagacctttgaagaaatttcagcctggtagaggtattcgccaaggcgatcctatgtccccgtacctatttcttctgtgcaatgaagtgttttctcgtttattatcccatgagcaaagtaggggcctgtttcatggtatttgagtggctcggaatgtgcttgaaatttcccatctcatgtttgcggatgacaccatcatattctctagagcgaatctcaaggatgtggaaattctgaatggtaaatgttgcccctgattttgcccaatatacgtggaccaaccggacagggacacgtggatcaaaacgtcttaatgcttgaattatttgctaagtctttgtcatataaggcagcatccgggacatgcctcccggagaaggcatgctgagccccatacg

SEQ ID NO: 365800 - DNA, 1139 bp, Cannabis indica
atattaaattaatttattttttttttgaatcagttaattatttatttaattacactatctacataaaacatgcatgaactaattaatagtacacattttgaacatattaattacactaagtgcagatttcatatttttgaattcaatgtataaaaaatattattgatgtcttataacacgtcttattttattgtatacaacaattacattttttttttaaaaaaaaaatctataagaattgtaccataataacaagtttaattaatatactgttcatggagataaccgacaagtacggaacataataacggttctaattcatagtcattactttttctggttgtcccatgtggatcaaacgaaataccacaagcttggttactcctagtcatcacaagtttggttactcctagttgctaatatttgttataagaagttttccctttaatcttgatacgatactctattgtgatctaacaactgtagtttctttatttgcgtgttggaatataaagggaaattggaagggccttctgagaacgcacgattttatctctccggtctcgttgtaccaaacatgtcttcaaggtacaaattactgaaggcggaaggcttcacgactgcgacactaagatatgttcatggaaggacatatccaggtgggattggcccacttctcctttgctgagggtcccactgataggtctgcggtactgacctagagtccacgtgttcaataccaaaaatgcgaataacagtcacaatttggttcgcacgtcatcaaggccgaaatttgggataacaattatattgtgcaattgttatattttattgtgtacaaaaattataaaatttttaaaaaataaagtgtataaaagttttccataataataagtttaattaatatactatcataaacatttaaaaataatttacttctctgtacaaccttaatgtatcgacgaggtataattttatgatgacttgtcttgctacatgttacaattttgattgcatgtcatacaacccaaaatttgggataataattatattgtgcaattgttgatcttaaaatataagggtagcaattcgatcattctatacatctgaaaaatcttatagttattcaaagttatcat

SEQ ID NO: 365801 - DNA, 493 bp, Cannabis indica
taaagttatacataattaatgtttgaatttaagctaaatacattatttattgaagaatatatatatgataacaaataattatactattaaaaaaactatatactatatttaatttaaatcaaagtacatttattttacaattaatataaaatgattatataaatataaatctacaattaggacacttattaagtctactgattaatatatcatgcatacattctaggtgatacatatgaccgaggcatattggacatttttctccttcgaatgttatgttttcttcacacaaaattgtcttcgggatattcatctatgtacattttcttcgatcagttgcattatgcacaagtaaatgcataggtacattatctttaggagcattttagactcacacctaaagctaattaattaggtataattagttcgtggacgtaggcctaattaggcctgaaaggcgactgttatttttgtaatacttgcaatgaatgca

SEQ ID NO: 365802 - DNA, 407 bp, Cannabis indica
tcctctattatttacatacatgtttatctccactaattataaacatactatctctgtctatctcttcccattatttaaatatatatctatctcctctcattattcatagacaaatatttatttcctctcaatatttatctacacgtccatctccttacaccacagatatatgtatgtctatcttcttacacaatgtatatatataaatgggtgcactcttaatgggcattctctattcatgggtaatattatgaaaatttaagtttttatgcttagtttttctatctaattaaaaaatctctcatttttatattaaatgagttgggattgttattggaaattattttaccatgactccttccgttcagatatatagcccttcattcctttctgtagcagagcattat

SEQ ID NO: 365803 - DNA, 541 bp, Cannabis indica
atcattgcatttatcatttaattttttaattttttaatgccaagtaattcaaccctaaccctgtgtggtattctataaatagaaggtaaaggcttcaggaaacacagacaacacaattgcattcttttcctttcagagaaattttcctgagccgccactaggagacatattattctactgcacccaatgtaaggtttctcatactttatatgtgtttacttatattcgttttagaagttcatatttaggttgttaatcaacatacttgtgagtagatctaagatcctggtaacataattccaacagactctgcatgtgctggtgcggtgctcttttgctcaaagttgctggagcaaggttccaattactgttgtggcgcctgatgcaatgttgttctcgagttggttcgaagcaggtttggtatcgtggaactcgaccgaggctcttgaggctagtatggtctgttggtcagtttggactcatcggaacgagttggtttggaactctaagcaccggatgcgagtgaggtagtggcaatggc

SEQ ID NO: 365804 - DNA, 648 bp, Cannabis indica
tagaaccgaacacagacctagcctcagacccaaactgagacttgaactcgggcacggacacggtcgaactaaacctagaactaaatcatggacacgaacctggacacgaaccaggacacgaactaagaccctgactgggatcgaaataatggacctagatcttgaccgacgtgacccagaccaaaacttcgacctgcactcgagggccaaaattggactaggacccgaacctagaccttaatcggagtccagaccaggataaaaaccaaggacttagaccaagaactgaatccatactcagatcgggattggaacttgggactcggatccaacctagaccaagacccaagacacgaaccaacacccggggcctgatctggacccagactaaaattcagacccgacccaaactcagacaaggactaaaactccgacccgaactcacacccaaactcgaactcagaattgcaaatggtactagaaccgaactaggactaggaccaggacaaggacctaaacccaaaccctaacccaaatcaaaacctagacaaagcctaaagtcgaaccgagacaaggactcgaaccagaacctagaccgggacccaaacccacacaataaccgggacctggacccagaatcaggatagg

SEQ ID NO: 365805 - DNA, 544 bp, Cannabis indica
acagttgtctactgttacaagggcctaattctcttttatacgttggttaaatgtcggttagctattcagtatataaaccattataatttattttctaattcaattagtaagaacataacagaggaataacagagtattaactctgcctctctcttcttcttctccaatctctccgtttctcatatggtatcagcagaaccctagccaactcttcaatggcaaggccctccactcgctctcaggatggtgttcctccacctacaattgagcacaatccatcggaatccattcccgattccacttcctcaccagcaactgttaagtagtcaaaaatgcatatttattagtgttaaaatacaaaataaaattaattctatataatatttttatgaaattaatgtaatatatttttatttgaaaatattgtagtgttgagttaattttgtaaggaaataacattttatgacacaaataagagaaagaaataaataaaaaaagaaattaagaaaatgcattatttttatttaaagaaatacaaattaat

SEQ ID NO: 365806 - DNA, 516 bp, Cannabis indica
acattcattaatttccatttttaatttaatacatatatttagaattaatatgttatttagtataaactgaaaatggaaatttgttttaatatggtaattaattacatgatttatttaggcatgtaataattgtgcaatttgtataattgtgcatttaattatttattaccaaatttatgtaatttattgtttaaattaataaaatttgaaaaatctgccattaagtatagtctttaattttgcatttaattcattccatataattaattgtactaatttgtataattaccttatttatacaaattaattattagtataaatatttaagatattatatggtcataaatgcataattaattatatattatggaattaagcatttaatttattatcatacaataattgtattaatttgtatttatttggcaaatttatgtttaatgcaattaatttagatttgtatgatttaaatgctatacataaattccttttatagtgctagatatatttagaaat

SEQ ID NO: 365807 - DNA, 633 bp, Cannabis indica
catagtcttcatcaagctctaaaacatggttagctaaatcatgaccggctttattaatatttctccgaacataaaagacaacaactctagaaaaaatgaataagaaactaataacatctataataatatctatgaatgaggatagagcagatttagggtcattcacttgtggcaactcgaagagtatatatttctacatccaaaataggttgagaagcccaaagtaaactatgaaatagagatatagtctacatttcatgagatttgaagtatcctgtagtggctttgaaagtgcatcaaggacttggcgtgatgtatctcggataatcagtattataagcagatattactaattatccgagatacatcacgccaaagtccttaagcagatagcagtaatatcttgtgaggcatagtggtcttgaacatcacaaatggaaactagcgcgtcaaaggttatgttgatttaggattgtgatttgagttacaatttaggttgtaacttgaatttttatttggaaaatcatttgtagtgagaccagggggagtggacttgaatgtcgtggatggagactatgttggaatattttaccaagatctagatttactaacaagtatgttgaattaacatcc

SEQ ID NO: 365808 - DNA, 689 bp, Cannabis indica
aaaactagggttcccaaaaaacccccaaccggcagaccagttctacaaccggaattccgcttcaggaaattcctgaacaccatccaaaattccggttgcgcaaccgaaattccagttcctagcaggaaacaaacaaaattccataactcactcaaatcaaacccaattcataccaaaccttccagacctgttctaaatatcccaataaacatttcaaagcaagaaaaccaagcttcatgcacaaaatcaaaaaccaccatgtgagctccaagctttgagttcaaaactcaaacttggctaaagctcacctacaagcttcaaaaccagcttaaatctactcaatcatgcatataaaaactgcagaaatcattcccaaactcatacagcaaacacagcaacaaattcttcaatttgccatagaaattatagttttttgaactaaaaagacccaaacttggttaatccatctaggatgcatcaaacctactcaaattcaatcaattcaaacatataaaatcacagaaaatcacatataactacagcagcaacaacatctcaaaaactaaacatgcaactatcatcttttcttaattttcaagaaatttaaagagaggaagagtaagagctaacctagcttggattgaacacaaacaaatcttgaattcacaaagaataaggggcaaatccct

SEQ ID NO: 365809 - DNA, 647 bp, Cannabis indica
gatgttaatgaaacatacatggtagtaaatctagatcctggtaaaataaatccaacatttattacatcatgacctctctttaacaaaggctctccggtaacatctgctccataatcaacctagcttcttgtttcatcatcaagtccgttataaaagaaccaagtaaaacacccacttaagatattaggataacatctctctccgagctctttaaatctcccctagcaaaatagaatggctcattgtgttgttggacaaaatccataaggtatagcatctgaatttaccttacaggtcaaacacattagtaaaacacatgtaaaattaattaaaaagaaaccaaattggaatagaattcaactatattgatattaactaaaacagtccccaataactgcgccaaaaacttattgtggtattttaacacgctagtatacgtatcgtattaacaagtaatacataggtaagtgagatcgtttccacatggactgtagctaagtaccaatcaattgaattcttatttttatatgacaatcgaatagataaattttgaaaacaaaaaaaaaaaaacaaaaataaataaaacaaataaataagaggtttaacaatagatgtgaaaatagggatatgatttcaattgtatctat

SEQ ID NO: 365810 - DNA, 507 bp, Cannabis indica
attatcaaaattcaatcatcatttaaaattattaatttactataaaaacacaaaaaaagtaaatataaaattaatataaatattaaaaaataaataaaatttaaaccgacacttttgaggtgggtaggggagggccatcctcaccctatgctccatattctatttaacattttagatatgaaaagttatccaatcagggaatatgagaatattgacatcttcaccatgtcattataattattaattagagtatttttataaaacatcagtggtgcttagtataccattacgagcttgcggatggttaaagatatttgtaataattattaaataaaatcaggtaaaatttaatatttaactacacaaataactacagggaaatttgtaatttccatacttacaataccctataattttttttttctctaaatgcatagttattaaaattggtcatatattaaccacattactaatttctcaaaaatacccctcacatttaaaatccct

SEQ ID NO: 365811 - DNA, 340 bp, Cannabis indica
aattttataaatacacaaaaacagtaccataaaaaaagttacatttaatgacaattttttaattacaacataaattttttgtgacttttagtaacaataaaagatagttgtgactgaaaatatagtgtttagatacaaattgtcggtaatatagttttagtcacaacaagtattgagactaatacgtcacaataaattgtaatttttgtgactaatacatttagttagggatattttaatcacaataaaaaaaaataattatttgtaattaatcacaattttttgatttttagtcacaagttttgttgtgaacaaaagtaaaaaaaaaaaaattagtagt

SEQ ID NO: 365812 - DNA, 627 bp, Cannabis indica
ttgctgaaaaaatggtagaaaaacttgaaaacaccagtaaaaaactagatccagaaatcgacatcaacaacgcgaagttaataacagacaagcatcacccagaagtagaaaaaggacaggcatacaaggacaaggaaactctgaagaatgtcctcagctactacgcaatcaaaaacaacttctagtacaaagtgtggaagtcgtgctctcaagagtacagtctgaaatgtgtttacgaaagctgcaattggtctctacgagcatccagaaatggcccaacaaacacattcataatcaggaggttctcaaaaatccacacatgccccataaatattaggcatgaagaccaaaggcaagcaacatcgaaactgaatagagaatgcataaaactgaagtttccgaacataaagacaaaagcaacaccaatggacataaaaggagagttgaaatacaggtatgggatcaagatgaactacatgaaagcttggagaagtaagaaacctacagtaaatgacttaagaggaaacgctaatgactcgtacagtctagtaccaagttcttacagcagaatgtctcaactagaatggggaccatggatctatatgctgagcttccaataagtgaacc

SEQ ID NO: 365813 - DNA, 815 bp, Cannabis indica
actctatacatccgatagtggtatactttgccaatgacccaaaaaaggacataacacaatccaaggtgtcagtatactgtaataactacactttagaatattgattagtaaaggcaattagcattgattattggtatttttatagttatttatgaattaatttaattgtgggtcccattattagaaatgggcattagagttataatttctcaattctaaagattttatttaactctaggagtattatttatattatatatgaattatgtaatttttatgattttgctcggtagtgacgaaaaatacaatggatggccatttgaattacttgcataagtttagaacctttctcttagtgagataaatatttaagatagattgaataccggatttgagcggattgtggtttttgaccattttaccccttgactttaaattgcttaagtttaagcaccatgggcattttggtaatttggcaagtgagggataggtggctgttttagaccttgacacccagccaatatttattcaacatgtaattaatgtaatagaccttttacacttaggaaaaaagacaacaaagtaaaggaagaataaaaaagcaagagaaattccatttccctttctctctctttgttcggccaacccaaaccagagggaaaccagttccaactcctgtattttttgtctattgagcttagattcaagtgattttaaagcaaaggtaaccctagaactcttaattcttgtttttgaagttttagttttggtttgaatgtgtaggtaaaggaaaggcgaaggctgaacaggagtga

SEQ ID NO: 365814 - DNA, 560 bp, Cannabis indica
acttgataaatattggatgtcactcccacactttaacacatttcatagatatgactctattttatttccttcttgaaataattttctttacactattattgacaccaagcatgtcaaaatttataatctttgtactcataatcaatcaaaaaaatttgattaactgtttgagtcttacccccacattttcactagtattactatcatatacactaaatatgatatgttacacatacattattattatacaacaataatgtctataactttctttcgaaaaattctaactcccacaactttatgctaataatgtatgttactatcatctcatatataacatacataatattaatatttatcataactatatatgttacatatctcatatacatgtaacatatacactttaatatacatatcaatatttcataatctatatcatctccacatgatgtatatatttattgtatgcatcttatgatatatatatatattttcataaataaatattctcctcacaaatatatatcatgtattacatgctcaacatatataatata

SEQ ID NO: 365815 - DNA, 588 bp, Cannabis indica
ggtaatttattagttatttttagtaaatttttagattaatgtaaccattggaacattttccatattatttatatatatatatatatatatatattgctaaagaatttttcttattttttttttgtctcgatcaggttataattgtttgcctccacatctgaaactgaatatataaaatgtggctatataaacgaattcttggtttatgagaaattattgagtgactttttttaaaaatattttccttttttatataaaatgtggctatgtaacagaattcttaatgttattatttatttttctgtcaaaatgttaacagaatattctaatatttgacagaatattctgattagaaaacgttaattataattgattaattttagctaaataattgtcaaaaaaattttttatctaaataatcctaccaaaatttaatctaacaaatttatctctctagagcaaaaaccctagcctccaacacaacctttaccagtttataacgttagttataatttcataagctatattttataattataattttattttaaaatttaaaaaataactaatgaagacaacatgctacat

SEQ ID NO: 365816 - DNA, 525 bp, Cannabis indica
attcgtcgctataatttttcatatacaaaaaattacctatatcaactcccttacgccattcaaaaatgttaatgaattactgccatttgtttgcaccaaaaggcagtacaaactaaactttttacatgtgtatatatgcgtcaaaaaaagttttggttgaacaatttgggacttgattttttaatcttttgctggaaacttttgttggggtattttgttaaatgcactgacaaaagttacatttcctatagtattttaatgttttattgataaaatttatatataaagtagactattatagtataaaatgtttatttttttttctttcttatttctcaattatataattgaatttatatgatctataaattataatatattcttttttttttttttttttttgtataaatggtagggtgcctcagcacccaaatcattgaacaaccaacacgtacaaaaaaagtctaaaacaaaccaaataacaagaacaacaacaacaaagaaaacgaaagaaaacaaagcaag

SEQ ID NO: 365817 - DNA, 504 bp, Cannabis indica
tgacttccttagcttcctttttcaatattgtgaatattgtggtaagaaatcttatattaagataacatccttattattctggcacgataaatcgggtcatatttctaaagaaagaattgatcgattacttctagctaaaattctttctcctgttgatgtttctggttgtgatacttgtgctgattgtacttgtgaaaaattgactaaaataagaaagcagactgctcactatagtcactctttataagagattatccacactaacatcagtaaaccttattccaacacgttgtgcagaaacaagtattttataacttttatcgatgttttttcttcttatggcctcacctacctgattcaagacaatccaacgctcttgataaagtcaaaatcttttcaaatgttcttgagaaacaattagaaggagtcatcaaagttattcagaatatggactacacatgaggcctttatagaatattttcaatatgtcattacaatatgtca

SEQ ID NO: 365818 - DNA, 829 bp, Cannabis indica
catgagtgggttgctcaaaattcttgggagcacttcatccttttgtcagattgcaaagtagttattgaagctctgggtaatagactatgccctcctcattggagaattttacacctttcgcttgcagatttagatgttattaaagtcttttcgcattgtaagcttgtttacattaatcgtcgttttaacttagttgctgatggactggaaaaaagagctagagattctagtcatttggctgatattttccaaggggagggacccccctgtggttcccatcttttccttctataaatgaaattgtgtctttttttttttttaaaaaaaaaacttaagaattttagtagaatcatgtaggcttggtgaaaggaagttactggaatgaatgaattacttaaatttaattaaattgaaaaatttagtacataaagttttatgttcaattattagcattaatttttattttattttcttctataaaacaaataatattttatccatcagtttcatatattgatgcttcttatcaatttttgagtcggtgaagatttcttatttcttttttttttaaatttttcttttcataataaaattagatatcattattattattattattattatttacaaagttcaatttttttttggttaaatactctcaattcatatatatatatatatactagattgaagttacgtgcaatgcacgtatatttaatttatttttataacatattatattttttatttgagttttaaatttgctcatttcatgttaatatcaaacgagttccttttttcagttttaaccaaaaaaaataaaaatatt

SEQ ID NO: 365819 - DNA, 840 bp, Cannabis indica
atattaattaataaactttataacataataaaaatatttataagtaccgggatcccgttttcaaactttttaaagttaacattccaaaatacatatattacaggtcgcacagcgacaacaaaatacaatccccagatgtcccgagaccgaacactccaggtcgcgctgctttgacatgtacaacttcatccgagctcaggttcactcctgttcagcctttgcctttcttttacctacccatagaagcagaactgtgagtcgacagactcagtaagaaaagcatataacatatcatataataccgacttgtaactaggcgcccatacacatatttacaaggcttaacagatgagtaagaacgttctactagttgtgctattgaccatgatatcacccattacaagtactaagatcgtactgcaggaccggcactatgcttgtgctgctatgatagcatcaataacatctgagagtataattggccatgatatcattcttaaccagtacgatgcatgtactgctgaaccgacacaatgttttgtcgctgtgatagtaccaattcatactctctggggtgaatatcactcttatctagtacaatgcatgtactgctgaactggcacaatgattgtgtcgctatcatatcacccaaacataatcaatcatgcacacagcatatataataccatacatatatacattcatataaatatcacatattatacacaattcttgccttatttccgaattcaagtgtgctggccgacctgagcggaagttttgtgctagatggatgccctaatcacattttaaaactgggtaagttacatgattaaaacc

SEQ ID NO: 365820 - DNA, 527 bp, Cannabis indica
ataattgaacagaatagacatttgatcattttaagtattttatattttaggatgttagattactatgtggtaattaaacatacatgtttagtaaattaagatcctgtttaaaataagttctaacagaaagaaagtcatttttcttaatcgtgcactaaaaacatcttattattaaataaagtaataattttataaataagttttctccaaaaaagaaagtgaacaccacaatagctaccctttgtgttatcccatttttttgcgtaacgacttggtagaatacacaagtgacacgtgtcttgcattcctcacatttggtagagatgaatgtcccgagcagacttcatattatacatctgcatgtataacttctaattacttgagcagggtgaagggcagattatctgagcagacataggtctggtttttgaagctacttatcaggacttaattactttagaatgatctcgtgaagtctagacacgaaaaaaaatccctacgatcgtgggattgagtcaaaggaatat

SEQ ID NO: 365821 - DNA, 672 bp, Cannabis indica
tttaggcgtcggtttttttagaaataaccgacgccataggggggacaccctatggcgtcggttatttccaaaaaaccgacgccatagatggtgtcaaaatcccttccaaaaaattccaaccctatgacgtcggttctttaatatttgctgaaaaaaagtgcctctaaaagcttggtttgtagtagtgttattgtatataaaaatatggattaattacaacatgtcttcttacatatattaatctatctaatttggtcaaaatcaagtaataagaacttttttatacttatctagatatttttactagacttaatatagactatatataaattataataataaggagctagggtgaatctagtgtcatctctcaactttttttcttttttattattttattcgtgcatttattttaaatcaatattaatttactccttatatatatagggatatgattttgttctattagtgtacttttacggattgtccgtggtgtacggcagccgtcagatgagagagttatttgatctgacggttgagattgatctagggataattagagttaaaaagtagaaacgtacactcatttaatgtactttgagacccatctaatgtactacggaatacatttcgtgaaagtacatcacgggacaaaatcatatccatatatat

SEQ ID NO: 365822 - DNA, 911 bp, Cannabis indica
cacccaaaccccctccacccaatcactctgcaaaaaatataataatttttgaaaaaataaatgaaatgtattggagtgaaaagagtgatttaattttttttttattttatttatttatttattttttagtttgcatgattaaataatacaatgactagtaaaaggataaatatacaagatgtaaaatttctttatggtgtcgtattttgggttaggtataatttaatatagaatcaatcctatacataataattttttatttttataattcgattttacatattttaattaaataattactctaaaaaaattattaaccactcaaaggtgaaaccatatgcccttctgttaaaacttaaactatttctaatttaaagagtttcctgattgatatctttattataattagtggtgtaaatataggttagattttttgacatattacgaatccaacactgagcataactagacacaaaaaatatggatttagacacgataaaatacagtattataaattggcaaaatacgatacgagaagcacgaaaaacacaacatataagtactattaaactagcctgaaaaacacggcacacaacaagcccgaaacacgatataaaacattaaacaaatcctataatttaataatatttataataatatatatttacttattaattataaataagataaaataataataaaatttaaatataacactgaatattacaattttataattaaaattattataaaatataaaattaaaatgatatattaatttatttataaagtatgacataaaatttgagtatttataagtaaatatttaaattataataatattaataattttttaatataattatctgtaaaatattattaaaaaattatataaatataattaaagctat

SEQ ID NO: 365823 - DNA, 490 bp, Cannabis indica
cacgtggtaatttatttaaccaggtacctataaaagtttcaaagttataacttaagtattattactgccaaaaattatacttaggtatttatttgtaactgaaagttaaacttaagtatttatgccgcaaattactaaaaaaaaaaaaaatagtagtaggataagaaattctaaattagaatttaactggtcacatttttataattacaaaaatctttaataatattgacaacaaaaattatgtgacttctaacttctaagatatttatattttttatacgttgtactaattttatagtttttttttttttgatgcaacactaattttatagtttgtttgacaaaaatttttgaaaaaaattaaaggctaattttatagagaagttaattaccgttaatattaaaattggtaaaaccccattttgaaaaagattattttaattaatagactccataaaatattattttgcactaaaaatatatttaatta

SEQ ID NO: 365824 - DNA, 746 bp, Cannabis indica
gatgttaatgaaacatacatggtagtaaatctagatcctggtaaaatatttccacatgttatgcatatgcttatacatgtttagcgtacatgtcggttgccatcagattaacatattagatatatgttaggcaaattttatatagccgtcagattagcacatcagggcaacagtgaggtgtacatagagttgcaccgacatgccaacagatatatgctaggctatcagttagtatggattaactgctaccacatcggtacgactagagtactgagtataggcttgattcgcagttaatcatacattgtcgtggatgttcctgattcagttagggttatggtcaggtgtatgggcgcttgatcataacccaggattgagtatgtttattatattatgcttttcttactgagtctgtcgactcacagtgctatgtttatgtgtaggtaagggcaaggtcaaagctgaggaaccgtgaggacgaagcaaatgaagattgtacatgtcggggcggttaggcctggagcgtacgatccttgggacaacagtgcttttgtagttagtcgctaggcgacaaatattttgtattgaatagtaaacttttgtaaagtattttgtaaacgggtatcccgaaatattttgtatgtaatattataagtttaattaaatagcaaaatttaattaatcacgatttcgttaacctcgttgattggcaacgagctgcacagtcgttaaaaatcacgtcaaca

SEQ ID NO: 365825 - DNA, 516 bp, Cannabis indica
attaaaaattcagattctacacaaaattctaccaaaaattggcttttgtttcaatgaaaaatgatttttgaatcaaaagatatgaagaaaacaagtttgagccacacggtctgcatttcatacccctgcgcgcggaagcaagagaacggccgagaaaagaggctgcaagcagcctatcgtgaccgagaaaactccgcgcatgcatccgttcagacaaggtgtgtccgagagttctcggtcatttctgtctgaacaggcgtgcgtgtctgagcggctccaagccctgcgcgcgcgtatgtgcattcaaacccagatatgttcgttcaaattcaaaaaatcataactaattcataaaaaatccaaattaggttctgtaaaagccaaaatttattaatttatcgtctactttccagtaaaaataattacagatcaaaataaaaaataattctataacatacagtgcgatttctaaactatcatcaaataagcacataaaccacatgaaaccatccaaat

SEQ ID NO: 365826 - DNA, 533 bp, Cannabis indica
tgtgttcttgactttgaaggatcatgggtaaagtacttacccctgatcgagttgaactataacaacagctatcaggcaacaatcgggatggccccttacgagcttttgtatggaagaaaatgtagatcacctgttcactgggatgaagtaggtgaaagaaagttcttgggtcccgaggctgttcagagaacgagtgaagcagatgacaatatcagagcgcgaatgctcgcggctcagagtagatagaagagttatgctgatccaaagcgtcgggatatagatttttagattggggacatggtatttctctaaatatctccgatgaatggcataaaacgctttggtaagaaaggaaatcttagcccgaggttcattggaccttttaaaatcattgaaaggatagggcaagtagcgtacatgttggctatgcccccagcgttggcagctgtacatgatgtgttccatgtttcagtgcttcgaaagtatgtctcagactcatcccatattctgagttatgaagcattggaacttca

SEQ ID NO: 365827 - DNA, 533 bp, Cannabis indica
aattttgggaaaaataattgattatctgtatgtgaaattatttttattagatagtttggaaaattctaagcaaattatttttttacagaactcgatttcgattttatttgaattagtcttgaatttttgaaaatcggggtggtgatcacctcacccacgcgcgcggaaatcctgccaagggatgcttgcaccgagttttctcggctgtctcccttcactacacgcgcggacaccatttttcttcgttttcttcgatttttcatgctatttcatggaattgacttccgattttttgtgtagttttgtattttgatttttgtttttcaattttcaaatctaattatcagaaataaattaattttattttaaaattaattttagatattagtgtaatttgaatttgaaaataggttaaaatcaagtattgcttacctcttttcttatttcttttaaattttgattattttatcttatttttaaatataaggtcagaaataatgttttttttataaaaatattttttttgttaattt

SEQ ID NO: 365828 - DNA, 380 bp, Cannabis indica
gttgttgagtgggagtaatgagtaggtatcagattaatccaagagaggaaagaggaactatatgttagtcgtttagggagaatcttaatactcttagactacaccaaatcaggtttctagacttacgttagtgctagaaagtctagtgatgagatggtgattactctgggggtggaccagtgattttggagaagtgtaaaaaccgatctgagtctctaactctaccagtgagactgaatgttaaagttgcaggaaatatactttttcaacctatggaaagttcttagggcacaaaatctaacaaactcccacttgcactaaaaaaaaaaaaaaagtgcatttcaaataatcttaacaccttaatatccagatcaagtgta

SEQ ID NO: 365829 - DNA, 713 bp, Cannabis indica
caatacaccttctcccatgcggcattaaatgcgaggtgactattcagataggatctgacacctcccggagatgcttagttgtagctttgatctccgggagtatgtgagactcacgtgccctctccgggaggcatgtctaaggctgatttctttggctaaagagacttagctgaattatctaaacgttaaaccctttcagtctacgtgtcatcatccggttggtccacgtattttggacaaaatcagggacaacacggcatatatgagtataagcatatctaattttaagatattttgtctaatcatcatctttttattttttgaatgattttatcaaaagtaactaactggtatctaatcgaaatcaaaactaattgatccaaaaaaatgtgtcttattagtaatgatttaaaaattatttgtaatttcattctttatttaactaatcaaaatgcatatattaatttatatttaaaaactatgagcactaacatttatgatatatattttttaaaaatataacttactaaaatagtagcttactgaataacaactcattattttcaaaaataaatttgaaagttactcaaatgtattaatataacctaactaattaatgattattaaagtgtatacatgtaagttttagaggtaacaaaatatgtctcaaattatataatataaaaataatacttttttatgaaaaagttact

SEQ ID NO: 365830 - DNA, 548 bp, Cannabis indica
accaaatcatgctccctgaacttttttggccgttaaaaattccccttgaactattgagattgttagatttaaggacttttgtctaattttagtaaaaaacttctaacatggatgaaagttcaaggggcatgatttagtacatatcaaagtttgagggcttgatttggtagatatcaaagtctggggagcatagtttagtacataaacaatcactgaaacagtaaaattgaatgaaattagataaaagtccttaaatttaacaatcttaataattcaggggaaattttaacggctaaaagagtttaagaggcacgatttagtacatggaaaaaaaattactaattaaccttaaaaaaaatagtagcacagccatgattatatatccatatatagtcattgaatatatatacatatatatatgagtaattttttttgagatacaaattacttttgagtcatatatatataattctgttataaatattatttattatgtggaatgtttaaatcttttaccattaatgtaatcaacattccttttttttttt

SEQ ID NO: 365831 - DNA, 1089 bp, Cannabis indica
gggcgtggccgggattttcttcttcctcctcaaaggagccacctgctcagcctcagcctcagcctcagcttcatcttcaggattcatagactcctgagcgtactgctttgcccgaacaccacccttcaacttagcctcccgcttaagttgaatcaactcatcctccgaatgagctcgttcaggccgagcagtagcagacttcctcttcttccccgtcacagacttagaagaaaagtcctcagggtagagctcgtactgcaccagatttgcatcgaaggtcaactggataatatccctgtctttcgccggcaaccgggaaagcttctgagccctatccctaagggtaagagtgaggggaagacggtgatatgtcggaatctaataaaactgagttcgggtgatgttcggatccttcacaatgaagtactcatcaataaaatgccctattttgctaatggccttgttgtccgtcccgctcaacaacttgaagcctagctgagtgaagtaaaaataccccgacctgcaatgcttgggagtagacttcaagtcgaaaaaccaagcgacctcgtggggagagggaacaccccattcttgggaagcatagaggacgaagagggcggacaaatacttaatgcccttgggagtgatctgggccgggcagaggccgaagaagtccgccacatctcggaagtacttgtgcaagggcatcagcgccccttgcgagccgtgagcccccgaccaggtgcacatcccctcgctagggtttgaagcacgattgtcgtgggcgggaatgaagcagtccagctcgcctaggtatccgtcctggtcgagagtgcggaggcgtgcttccgaaatcttggacagaggactcacccatctggcgcccaaggcaccctgcctcctatgaggaactgcctcagcaagctcctcggtgacgtagtcgacgcctgcaaccaggacgtccccgtcagcatcaactggttgcccagcctcattgtactccccatagttagggggttcaatctcctcctctccctcagcagcgggagggctgcctgggcgcgcctcgtctagttcctcaacctcctg

SEQ ID NO: 365832 - DNA, 333 bp, Cannabis indica
acccaatgtaaggtttactaaattttatatgtgtttattttgttgttttagaattcatattaggatgttaatgaaacatccatggtagtaaatctagatcctggtaaaatatttccaacacacacgtgttgcacaaagatcatgctcggcagataatggtgttaggggatccatcaaacaaaaggggtgtatgcaatggtggtgcgcgcactaccatgatctgacataggggacaatatctaatcccgtgttagaaaaagctaacaagtgggcgaagatcctagcaccagaaatggaggaggacttgtcagtgtagtttgagaaatgtcggta

SEQ ID NO: 365833 - DNA, 566 bp, Cannabis indica
aaggtgaaccaaaacatacacaaatgaatgaaaaatacttttgtgactttattgatattgaataatctggattacattgaaatggagttttatttagggcataaaacccaacaatactaccacttgattatctttgagtttgtaaacacaaggttcatcttcattttggtgaaagccataggttttgattatttcatcaaaccttttgttcctggagcgagaagcttgcttaagtccataaatggacctattaagcttgcaaacattctcttttggccttggaaacttataaccttctggttgctccatatagattgtctcatcaagaattccgttaaggaaagctgtcttgacattcatttgccaaattttataatcgaaagcgacaactatggagagaagtattctgatggatttgagcatggtgattgaactaaaagtatcctgatagtccacaccatctttttaggtatgaccctatgcgacaagtccatctttaaaagttttgacttcttcaccatcaccatttttcttttagtagacccagttacatccaattggatgat

SEQ ID NO: 365834 - DNA, 554 bp, Cannabis indica
aagagattgttcgtcttcatggggtaccaaagcctatcgtttctgatagagaccctaaatttacctcaaagttctgggtgagtttgcagaaggccatgggaactagtctaaagttcagcacgacctttcatcctcaaacagatgggcaatctgagcgaactattcagatacttgaagacctgttacgagcttgtgttatggattttagaggatcttggagcaactatttgcctctgattgagttctcctacaataataactatcaaagtactataggaatggctccttatgagctgctctatggtagaaagtgtcgttctccaattaattgggacgaaacaggagaacagaaatatctaggccctgagttggtccagaagacaaatgaggcaatagacaaaattaaagctcggatgcttgcttctcagagcaggccgaggagttatgcagaccccaagcgccgggatattacatttcagccgggagatcatgtcttcctgcgtgtcaccaatgaaaggaatcaggcgttttggaaagaaaggcaagctaagtcc

SEQ ID NO: 365835 - DNA, 653 bp, Cannabis indica
attaaaattttactcattttttcttggattagatgatccagtcaaattcaatacatactggacctaaaatattggatgtatccgatcctatccaaaaaatacttggtctaaaatattagataaatctaaattaaacaaataaatatatatgaaatacatccaatggatagaaccgatccaatccaacattcaatggatgttagatcgattggatgatggaaaattaattgaatcgaatcagatggtaaaatctaacatccaatatataattggattggatctggataagcctaaaaatataagatgtgatccaatgaacacccctacccacaagtatggatattcgtattttgtgaattgaattggattgagtattttatgaacacttctttgtgctaattaaactcttcatattgcactcttttctaggagtgtttataaagtagttgatctaattcaatcagcacgatccaattcattctaatccgcaaagtgcggatatctgcacttgtgcagattgaattggattgaaaaattcaaaattcgcacttgtgcggattggatgttgattgatatgtaaaagtaactgatacaatccaatctacacatatttataaaaaattaaaaaattaaatatacaaataacattttaa

SEQ ID NO: 365836 - DNA, 573 bp, Cannabis indica
tgattagcaacgagctgcacaacatgtttaaaaatcacgtaatacgcctatgttagttagggtgttagaaaacatctccaattatactctttaaatacactctttagctaaaataaggagtgaaacttgaaaaattgaactccaaccataaaaaaaaataactctttataatatagaatcgataaaaaaactttctaaatatagagagctccttattattttactaaattttcttaataatattttaatcaacaacactattacatttttattattttacaaaattaatttatatttgaaaaattaaaattataaaatattattaaaataatcaaatactaactatagtagagagcatggttagagcaacaacaataaaaataactctctattttaatttttgtagatattttagctaaacaaataaagaataatatcgatggtaatcaaacaatcaaataactttctaaaaaatattataaaatgagtgattattaactttggtaagacgactcacaagctgtaaaactttaaagaaccatactaaaaatacactacagtagatgctctaaa

SEQ ID NO: 365837 - DNA, 773 bp, Cannabis indica
caagatcaacccaagaaaagaggcccaagatggtagattggggtcgtctccttcgttggcggtgtaccgtctttaatggagtcaaaatcgcgttctttcgttttggacgttaaagctttgttttcttatgtcaaaaaaaattccttagggtcccatgcactcatatataacctcccttgacccaagaacaagcttaaacacgttcgaattcgtgtccgtttcaagtcgcaccttcaaagcttcaacaatggcgaaactcgaaacagagaccttcgacccttataccacgttaaaaagcttccttatgtcgtacataagtgatctcaagcccccactttcacccaggttgcaatccacttgaagaacgaaaaagttttggtatgtcgtatacaccgtatatgtactctctctctcgttcgttctctgttttggcgtgcgaatttagaactcaaaacctaatttctatcatgtttaaacctaattaaaaagatcgctttgaactaaaatggaacgattctcattccacaaaaataggttgttatcggtacggttatacacatatatgtgcatatatacattacatgccagcaacaacaacgataataacaacaacaacaacaacaacaacaacaacaacaacaacaacaacaataataataagtgtgttaaatataccctttaacactataataatatttaccaatattattatactaaaaataattatcacaatattattatactattattagttaacatatatcattattatt

SEQ ID NO: 365838 - DNA, 650 bp, Cannabis indica
ttcggtattcacttttaattgacaacaatataaactataatattcagatacacataataataatctcatctaataactaataacattttttctttaatttttaattgtatcactttcaaataacatagaaaaaactagcataaaatttaatatacgtgcttcgcacgtagttttttgctagtatatagatacatataaatgtgtaatcaactattttaaactcaacttttttatgaatagtctaaaatctttattaatcaagaacttctgctaccaaacaagataacaaatcagttggaacatgctccaaactgaaacgacgatcaggaaataaaatagcagccttaacaaagttgtgagccactaaattagcagatcgtttaaaaaagaaagagaaacatttgaaagagaagcaagcaaactaattatcatttctctaagatctcaaaacagacaataccttagcaaagcccaataatttcgcattaaacttacatgttgacctctttttgaattttatcgtataattaaccattttgtgttgaatattttccaaaacatcactaattgaaagaatcttttttacacaaaataattaaaatataaaaaccactgccgacaaaaaaaaaataaaagtaaaaataaaaata

SEQ ID NO: 365839 - DNA, 821 bp, Cannabis indica
agtggatcagttcgcagagttgtatgttaaagaaatagtaaggcttcatggggtacaaaaatccatagtttcggatagagatcagaagtttacctccaagttttggcaaagtttacaacgggctatgggtacaaaactgaaatttagtacagcattccatccttagacagatggacagtctaaaaggacgattcagatattggaagatatgttacgagcctatgttatggacttcgaaggctcttggagtaagtatctaccgttagtagagttctcgtacaacaacagttatcagagtcctatagggatggctccctatgaactgttgtatggaagaaagtgtagatctcccatccactgggatgaaataggggagaagaaatacctaggtctagaatcagtacagcggaccaacgaggcaattgagaaaattaaagctagaagcctgccctctcagagtaggcaaaagagttatgcagatccgaaacacagagatgttgagttccaagtaggggatcataagtttttacgatatctccaatgaaggggatcaaatgtttcaggaaaggaggcaagatatgctctaggtttacaagacctttcgagattctcgagaaggttggaaaagtggcatattgattagctttgcctcctgctctttcagcagttcacaacgtattccatgtctctatgttgagaaaatacgtttcagaccctgctcatatacgtagttatgagaaccttgagttgcagccagacatgtcatatgaagaacagccggtacaaatcgttgacgaaaaggataaagtccttcgaaataa

SEQ ID NO: 365840 - DNA, 1097 bp, Cannabis indica
tacttttcaaactcaatttttgtttgtgtgtgtgtgtgcaatcaaatcatcatactactaacattcaaattaattcatgcatgccaacaatcaatgtttgcctcaaaataaatgtgtatttcaaagaaaaatccactccataagcttaattatcaaaccattctctactaatgtaattacacacaatctaaatatcaataggactttataggcttataatgtaaggctagggtgaaaggtagataaagaaggttaatttgggctcaaatcacaccataacatacatatacaacattctctcaaataatttctatttgtattccccaatcacttccctcaacaattcaatcttatatcttttttatcataaaacttactattccctcacacttaaatcgttgcaagtattctctttttttatctatttatttttcattgatgtttttttgaaatacttacaacttgcaaacattcattcgaaggaaataatatttttttttttctcatcatcacttatacacaaccatgcatattttctcatcaacaaaattctcacacctttactaataaataaaacatcaatatactatggtgtgaaaaaggatgaataaggatttttttaggctcaaaggttattgcgtagggttaaacaaaatgttaacatttaggctcaaattaggtaaaactagggatttaacaaatagggtaggcttgaaaagctcaatcgatccaaaaaaaaattgcctatatcatatctcaaaatcatgtgcaatttatcaatttcgcctcaaatgattatcaaacaagttctagagtagttgagacttcaaattaaaaatcaaacatgcattcatctttccaaacattagcaaatatgataattcaattgatgtgcaaaaagttttaaaaaaaaaatcaagtttgagcagtaattaatcatgagttaagcacacaaatcatgagaatctatcattttcctagaattataactagaatttcatcatcaacaaaattattttccctaagaccatgcataagacatcaaagtaaaaacacatatcaaacacgagcaatcattgtcaacagaatttcattca

SEQ ID NO: 365841 - DNA, 789 bp, Cannabis indica
aattaattgttagagtttttggagttgaaaatctagtttaactaattcatcattgttttcttagttaatgttgccttttggaatggttttacgcttgattttccttgtttcaggtcttcgaggcattagagttcaaattgtatcaattgttcaaaagacggggcattatggagaaaaatctgctgaaactgccaaagtagcttcagtagtcgcgactggactcacccatggtcgtgacccttttctatggtcgcgacctgggtcgcgactaagaggccaggctgagagcattgattttccaatttgtctttgatcgcaactaggctttatatagtcgcgatgaggagcaaaacacgggatttttggctagttttgaaatttcgccattcagaggtagcaaccctaatttctatttaagggactcgcattttatgacgaagatcatcagagattagctctgaaaagtgaaagaagaaggagaggaagctattgtgacgatccggagcaaaatcaccatctagttctttcttaagtcttgattttttatgttaatttatgttctagatttgattatggatgttaatatgtgttttagaaactaaactgccgattggggaagacgatgaatgttgattgacttttttcttagttaatgataattgctcttcattttgtcttgtttgtgaaattatccatatttgtgtgtatttccatgtttaagattgatcaccttctacatattctatgatctcaattcaaaatctgaaaaatgagaattgagaatgctaa

SEQ ID NO: 365842 - DNA, 863 bp, Cannabis indica
gaaaaaatgacagcaagaatacgtacttggagctcgaggaatctgtcgtttgctgcccgaactgtcttgattaactcagtactattggctattcatgcctactggtcacaggttagatcctcccaaaaaagatagtcaatgatattgaggcaatatgcaggaatttcttgtggaaggggcatgctattgcagctggtccggggttaattgcgtgggattcactatgtcatcctaaagctaatggaggacttggttttaagaaggttcatgagtggaacaaggcagctatgggaaagtacatatgggccatctcaaacaaggaagatagcctttggttgaaatggattcattgtgtctatatccaaaatgaagattggtggcaataccagccgcctactcaaggaagctggtattggaggagactggtcacactcaaaaaccagtttaaagagcttgctgaggttaaaaatatatccccttacagtgttgctgcaggttataaaattcttcgcacacaacgggataaggtgaattggagtaaacaagtttgggggcgcttaaacacaccaaaacacagttttatctcttggattgctgttcaagatagattaaaaacaagagataggctgaagcgaatgggaattgtaaatgaagatacttgtactctttgcggtcaagttactgaaacctgcgcacatttattttttgactgcacagttgcaaaatcttgcttgcaagctctgaaaaatggctgcaatggcatgctgctgctgtagctttgccccgactgcttaggtggattgggagggccaaaataagtgatttaggaagcaagtgttggctgcctctgttgctggtttagt

SEQ ID NO: 365843 - DNA, 1082 bp, Cannabis indica
aattgctgggctaagactagcctaggagatgaaggtcgaacacattgaaatctgcagtgattcacagctagtggtaaatcatgtattcggagaataaaagactcggggagaaaaaatgatagcatatttgagaaaaatacatgatctgctcacacaattcaaaagctacgatctaagacaaaatccaagggaagaaaatataactgcagacgcgttacatccccaaattggatgacactaatagctcttcggaaagatcgatgacctccccaacaagcctcttttccttagaagaggacccctcaccgcctttagacttcttggccggaggagatgccctagtgcttctgcccattctcttctttagagcgtcaagcatctgccgagacatgtctgtacagaatgaaaaacaatatggttagagaaaatagacatcagaaacatgaggcataaaaataaagaagctcaaaaacaagacaaagtagtatgcaaggtgactgcccaaacaagactcaaaagtccataatcacctgacatcgctcttatttcagacataacagctttccttttccgaacacggaggggatggccgaacaggtgaaatgggcgtccctactgtgaatcacatgttcaacaggcctggcggggccgaaagttcttcttcctcttcagcgtcacctgctcttcctcggcttcatcttcaggactcaagggctcctaagcatactacgtggcccttgcacctcccttcaacttagcttcacgctttagttgaatgagttcattctcttgatgagctcattcggtccgtccagcaccagatttcctcttcttgcccatcacggacttaggaatgaagtccttgggatagagcccatacctcacaaaattatctttagaggtcaactggataatattgcggtcttccctcgccactcgagcaagcctttgagctctatccctaagagcaagagtgtggggaggacggtgatatgtcggaatctgctagaaccgagtgcgagtgatgcccgtgccatccaccatgaagtactcatcaacaaaatgcccaatcttgctgatgg

SEQ ID NO: 365844 - DNA, 833 bp, Cannabis indica
ggcatcaacgccccttgttgaccatgcgcacccggccaggcgcacatccccttttcagggtttgttgcacgattgttgtgggcgagaatgtagcaatccagttcgcctaggtatccgccctggtcgagagtttgaaggcgcgcctaagtaaccctggacagaaggcttaccccacagtagtaagttcctcactgacatagtccacgccctcaaccaggacatctccgtcagcattgactggctccccagcctcgttgtactccccgtagtttgggggtttaacctctgcctcttcctccaccttggaagaactgccaggacgtacatcatcctactcctcgatctcctggacctcagcgtcccttcatgatccccctccaccttgatggctggatcctgttcggcgctgggaaaagtggcgtgccgagccacttagggatcagatgcgtcagccagacgcgttgttttctttgtacgagccatcattgtatggcttggtacagggtttggagaatgtccttcactagaggaaggtggctagaacgaagacgaagatgatcctcgtgcaaaagttgaagtaggtcatggtcgatccgatgtccgttctcccaaaactcacccgagttcatctacaaaagacaacacacaagatgagtgtttggtcggaatattgaacgatgagcaagcaaatatgctgaccaggagtactcaacagattcaagaacaagaatgtttaaagagaattcaaaacttaaaaagtttgaaattttctcgagttaggcgaaaaagttcatgaagcttagataagcaagatgaaagacagacgttacaca

SEQ ID NO: 365845 - DNA, 878 bp, Cannabis indica
cgaggatcgtacgctccacggccctaaccccctcgacatgtacaatcttcatctgctcgctctcacggctcctcaaccgtagccttgcccttacctacacatagcaataacactgtgagtcgacagactcagtaagaaaagcataacaataaaaacatactaatatcctgggttataatcaggcgcccatacacctaatcataaccctaattgaatcagtatcgatcttgacaaagtatgattaatcgcgtagccagcctacagtcaatactctaatcgcactgatgtggtagcagttaattcatactatctgatagcctagcatatatctgttggcatctcggtcaatctctatgtacacctcaccgatgccctaatattagtgatatgctaatatgagggctatagattgcctattgtaacggaaactaacatgtacactaaacatgtataaacatatgcataatattatactaatcttaccttgattccgaattcagatgtgccggccaacctaagtggaacaactgcttgacgaattacaggatcctaaatcacatcaatcataacatagataagtgacacgctcaatcactttcctgggacttaaacttgaaactaaaagttttcctatcgatgaatagcatggcaataccctaaacatcgcaaaaatgggaaaaactaaggttcccaaaattgccccaaccggtagaccggttcccaactggcattctggttctgcggggtttcatggggaccaaccagaattccggttcctacaggtccccctgaaccgaaattctggttcagtgcaggaaagattcaaaattcatatctcacttaaaacaaccccaaatcataccaaacttttcagacct

SEQ ID NO: 365846 - DNA, 477 bp, Cannabis indica
aatacggtttattcttagtgaatcattttaggtccttaatttttttttttaagtgtttaggtctttaacttttattttttttttctcattgtagtctccaaatgttatattttatctaaattcaattaaaaactcactaattaattatgtcattttgaatgctactttaaaaaagcaactggcttcttaatcatccatctcatccaatgtaaccctgttcaaggcaatctctctattattgttgttaattcttttattaactttcataatctaccttattcccatgttgtttgtctctctaccaaaaagatcatcgctgacatttgttatttctattctaaatagttatgttttagtaggggtgttcatcaaactgcccaaaccgctcgcaccgcgctacaccgcaaaaaaaatgttgtttaaaattctttgcggtgcggtcgcggtttgaattttttctaaaccgcgcggtgcggt

SEQ ID NO: 365847 - DNA, 517 bp, Cannabis indica
gatccaccacgaaatggcacctacgaatcccttgctacagtggactaagcagatcataatctgactgaaccactataattatctgtcttattgttattttccagcttttgttgattgtttttcccattcccaatcgagtactcgccattctaggttgaatactcgcacttgtcattacacataaaattttctttgatattaacaaaataatataatttggtgttgcgaaattcactcgacaacagtactagcctatcaaatataaaaataaaataaagtgaaagattaaaaatattttgatattgctgagatatttggttatcattataaaaagtttgtgaagtagggggtgttcaggggaccatatatagtatttttaagtctatctagatccaatctaataatatattggatgttaaattttaccatccaatctgatctaattaatttcagtcattcaatcgatctaacatatattggatgttagattggaacagttttatccattggatgtatt

SEQ ID NO: 365848 - DNA, 1139 bp, Cannabis indica
caccgtcttactcactatgattgagtacttgacttgctatgtgtggacacgtcattcactcactataagctcgaatttgatagtgaagaaaactataggaattcaaaattacaagaagaagggaagaagatgaagtctcataaacctagttgccaaagagaaaaaactaggtttttaactttagaagcattagttggataatgagaccaaagctttccttttatactaatttcacctagggttagggttaatttatttggaataaacaaatgataaaaatagagaaaaaaaatgataaaaatagagaaaaaatacccttaagtggccggccatgaagtgggccctacactagttagattttgccatttttctcaaccattttgtctatatttcacaaataccacttttttcactttcaaccctataaatgccaaaactatttatttaataataaaaataattatcaaataaaaatgttatttataatatttattaactagactccataaagtatcttaattaacaaataaatcctaaaatcccatttcttcacaatcaagccatatcttagtgaaaatgcataaactagacatagtctaattttagaattataattgattaattaaaaatcaattaactgagtctgcaagcagtattatctcaactagtgaggggaccatgggcctatataaccgagctttcaataagtagatctagaattcaccaagtaaattctcaacttattaattccgccttgctccactatagatttggaattgaatacactctcagttatatagaacgctctatatgtaccacgatatagatacgttatgattatccattgttacaatcctaatagtcaaggatcctctatagatgatctacactgaatagggacaaatttaccgttctacccttcaatgtattttatccttaaaacacttagctacctataaatgatacttcagtaaactaatataattactgaaatgaggcctcaatcatttatctctattcagccaagctcgaaggaaatcatcgtttcacttctaaatacctatagaagctatagattccatatctatgattagcgctcccactcaattgtactatcatgttcccaaaatgtacgtatc

SEQ ID NO: 365849 - DNA, 1064 bp, Cannabis indica
ctctctctctctctctctctctctctctctctctctctctctctctctctctctctctctctctctctctctctctctctctctctccatggagcagaggaagaaggatgttcagaagctagatattaagataatcggtcatgtttcttctaagcaagagctccctccaatccagagcactgagctaatccaagtggagattttccatgatacccaatcggagttaatggctgatttgggtcttgcaaatgaaatggatgaagggttcaggcattagatcctgggctgatgaggcggcggcgatggaccaaataacatgcatctgtgaaccgcactagcaactattaattaaaaattcattatctataatatgttgctgactgtttattcatggcaacatgatcttaattctccgtacaactacaaatcacaacctcatgtatgaataagaaatttttcgatatttatatttaaattattcaacattaaaaattgttagaattttagctatattagttgtaaaaattagggtaacttgtatttagcagtttcctatttgtgttaatatacaattttattcaccctttaccacatggtattagagccatacttagaattgtgattcaaaattcaaaatttgaaattggagttcattagaaaaaagagagattagggtttgagtttagggtttttttttggaaatcctatttggagtgctagtttattctcaccgcccactcaggaggattgcccagctcccgatctgccaaatcctaaagtccggtcaccagactactcgtgcttggggctcacgcgttgcctgaagtttctgcgcatatctccacgcactggcatgtggaagcgcgtgtgatggtgtctttgacgacgttctttttctagttctttactcgattcttctaagcccacttacatctgtctcaggttaaaatttggtattttttgctttcttcgtgtttggctgttcattctttggtattcttttttgtccttttctctttcaattatttttgtttcgagattatgccagagataaaatcagattc

SEQ ID NO: 365850 - DNA, 507 bp, Cannabis indica
taccatatttttacctcaatttctataaataggaaagctagacaactttccttctaagtttggatacacaaaatatggtaaccaataataacacaccagccgaattatacattaaataataaaatatttttgttcattaaatatgccaaaaatagaattaacaaaaataaaagtggaaactgcataagaataaatatttatgaaaaagaagaatgaagaactcaccactttttgaaccatattaactttttttttatgcaatattcgtgtgaccatgactttttatataaaaaaaaaatcaaacaattaatatataataaatttaaatatgagatgaagatgatggagagtatatcatataagaataagaaagaaaaagagattatatataataaatataatgtaacaccctaactatcttaggcgtttacaaacgtattaactgttcaacttttacatcaaaataaagtcgtctaacgacagttacaaaaatctcagccctgctgt

SEQ ID NO: 365851 - DNA, 832 bp, Cannabis indica
ccattgagttatagtccaccatcaattagtccttattaacccaataagctatataaccctttagggttagatgggtatgtgagaaatatatatatatatattaaggatggataatttgtgttaaggatgatggttagacataagtgggtttgctccacaattgtctcttgattactcttcactctctagcatattttttgtgtgttttggacttggatattgatcaatggctcaatatgatgggatgagcaatatgggaggtatgttttcttaaccattaatgctctaaataaatgcttggatcttggatagttgtaagagcatcattggattaatatttgattatagtgattataatgctcttgcttgaatattcctttaacaattggtatctagagccaaagctattaattttagagcttaatatttgttgtgcttaacccatttattcaaaaacaaattttcagatttatatgttattaatgggtaatctgagattataatttaagaatgagtttttttttcaagttttggaagttattgcatgtttgtattgtaagattgcatttttttgttgagttcattaatggaggaaaacccatttcgcgttcatagtaccttggcaattattttgaattttttggatgaaatgggtattggattgtgatagagggttgaaaatggaacaaaacccctcaaacggcgtcagatttggtggccggaggtggtttatccggccgggtcacaaaccgggtcgcgctgatccgagttgcagacccgcgaaccagttacagaattttttgggtgacaggggtggtaaaaacgacatgtc

SEQ ID NO: 365852 - DNA, 1002 bp, Cannabis indica
ctcttcaaaggaaaagagacctaacggagaggttattggtctttccgaggagctgagtgctgcaaacccctctacccccaaagctgccaagttcaaggagtctggagcaccaacgactgggtctgaactggtcaggagtgatactgaacgagtgcaggcaccaactccacctttgccagtacttccagaggccaaaaagggcaaggagatgctggcccactacatgaaccagctggttcctgaggtcagtgagcaactggctggtgctgacaatgactcgtctttggatgtgctggtgggcggagtcttaaaggagttcaccagggtaagtcttttttgatacttccctttaattttccacacttagctcaatatgctaaagtttttcctctgtgcaggccggtctgaagttggcctacacttactcccaggctaagtctgttgcttccaagaacgtggctctgtctgataccttgaaggcagaggcaaacttggccaagaaggaagctgaagaagccagggcagaagccgaagctattcagttggagttgggcgagccaataagaagttgtttgctgctgagaagaaaatcaccgtactgactaaggatcttgaggttgctgaccattttgaggagaccatcgacatcttatctgctgaggtaaacagtctctaagatgagaggacttctctagagcagttcttcatcggatgaaggaggagaaggatgccaagaatagcgagctttcggccgaggaggaaaggttgaaggagaaggtcaatgccttggagacagtcggtctcgagctcttctttgatttttggaaggctaatccctgggctgacttcgactacgtgggcgatgataatgacatgtatcttgagtactgcgcggcccaagtggcttatggtggaaacgaggcagctgcctcaacctccggtgaggctgctgatgctcctctcgttgaaacaacagatcctcctgctccagttggcccagaa

SEQ ID NO: 365853 - DNA, 522 bp, Cannabis indica
cttcttcttcttcttccatttgctctggccaatccaagttctatacaaactgaaccaagaatcaagaaatctttatggtcatactccacaaattctatacaaattgaaccaagaatcaagaaatctttatggtcagagaaaaaaaaattgctaattaacccataaaagagtcagcatgatgaaattttcaagaagacttactcaatgatggctggacctgatccggaggattgaatgttggcccaggactaacaatgatggttggaggcggtggcgattgtgatggcggcggctgagttaggtcggggctaggcagcgacggagactgtgaaacggggttagcgttgggcggaggtgggactaggtttgagtcctgcagtggaggagggggagtttgggtttgagtttgaggtggggttggttggcctgagctgggatctggggttgttcgctgttccatttgctcgtttatttttgtttggggcaaaatgaaaataggaatgggatttcggaggtggaaga

SEQ ID NO: 365854 - DNA, 433 bp, Cannabis indica
tataactgaaatttttggtttatgagaaattcatgggtgactttttatttttatttaataaaataatatttatagataataaaataataataaaacaaatctcattaatatttgaattgatattaaatattcgagaatcacaacccatttaaaaagaaaacaaccggagatttgatacggagaggagatttgagcaaacaatcttgtgcatgctcatggcgttggcagtgtactcaagttaatgaacgatacattttagtcttgtcattgactcattgacatggtccattctcttttcatgttcatctgcagatttttggcacttttgtaattccacgatgaactcaactaatttagagaataagaattcctctttcattgcacccgcgctgcgctcctctttcattgcaaccttctgttggaaattatttta

SEQ ID NO: 365855 - DNA, 792 bp, Cannabis indica
atggctaggatgaagagaagtataagattgcttgatgaatatgatctccatgtaactcagttgattagagctaagttaattgtgcccaaatctaagaacttagacaaggcgcatggtgggaaggtaatgccaaatgaactccttaaagttaccatcgaaagtgatgacctgagagattaggctttcaaattaagacctctcgtgtttagcactcttactaaacatcaaacacaattaatctgggatggttattgtcttcctgaaattgtcgtccagaagccacgatatggtggtcccaatggctcccagaacactaatgtagtgcttggtcgaggttccatacgaatgtgggtgcttacttgcccttgcatccatgcttcatatcaattatagattccttcggactctttccctactaaataaacccaaatgactatagaatccttgcaacctttttcaccttttactggcttatccctactccccacgaaaaaaacttcctatgtgacttgaaaagaagtcctactcaaaaagatgaaggcttctattgttggatatttattttaccaggatcttagatctactcacaaatgtttattaacatcctaaatatgaactttctaaaacgatgaaataaacacgtataaagtttaagaaaacttacattgggtgcagcggaattaaatgactccttctgttcaaatctctaacccttgtatcctttctgtagcagagtattatcaagatctgaacctggatttctttctctgaatccttgatgctgaaactcct

SEQ ID NO: 365856 - DNA, 1169 bp, Cannabis indica
gtcaacctgggcgctgggccctgctttttgtacccaaaaattattgtttttccaccaaaaggacttatttccccatttttgatgaagacagactcaatgcaaaagtcgaatcttcgatcggacacttggaaggcacccagattaataaattgtcaacctgggcgctgggtgcttaaaagtaaacttgctccaagttcttaataggttatgttgcttgattttaggtttagggttctgtgattgtaggagttgtttgttttttgtgttctgatgatatattgaggttatttgagctgttctaagttgtttttgatggttgttgtggtgattgagtaaggtttgagtttatgaactcaagctttgctctctaatggtggattttgattttgggtatgttgagatgttttattgcttggtttaggttctttatgtgttgagatgttttattgcttggtttaggttctttatggtatttatagcaggtttagaagtttgtatgaagtttggggtcgaattgagttgtttgggaagtttttttgtgtttcttgcactgatccgatcgaccggttcagtgggacctataggaaccggtcgaccagttggtccccaagaaacccttctgaaccgaaattctggttggggaaccagtctaccgattggggtattttagagaaccctagtttttctcgtttttgcaatatttagggtatttccatgttatttattgatagaaaaacttttagtttcgagtttaagtcaccgaaaagtgatttaccgtatcactcattagttgtgaaaataatatgatttaggggcctctaaatcatcgagcagctgttccactcaggttggccggcacacctgaattcggaaacgaggtaagattagtataatgatatgcatatgtgtttacatgcttagcgtacatgctagttaagcctaatagattatattacaatagcggtattagtgtatttagtattatattagatatcgataaatgtatgttgccttatgtactactcgacagtatcacatcggtacgactagcgtactaagtataggctgatattatggtcgatagtaatgtactacttgagagtatcacatcgatacgactagagtatgactagtgtatcgagtatagaccgatattatggtcaatagtg

SEQ ID NO: 365857 - DNA, 631 bp, Cannabis indica
agacatgcgtcctttcaaagcgttggaaactcttgtggtattcagtccccaaactcttattctgcgattatagtcacaaaaatggtagctgcaaatttgtggacaattgtttgagattacgcaagaaaggtatgaaatctatccccgattcagtcataactaattttaagcttcggatgcatttttatgaaaggaaaatggcttgccgcctagatagatggttagcttttgcagttaagaataaaatcaacagcatagaacttgatatgagatgtcagtacacaaggaagcgtggccctaataaattctactgcttacctaaaactctaatagccgatggaagttatttgactgatttgaatttgtgtcgggtagagtttgattcttcttgtcagtcatttagttttccatccttgaaatcattgtctttgtctgctgtttgttttgctgatagtgatatgctagataatctgctgttagtcgattgatgattgtaattggcatgcataaagtgattcaattgttagttaattgcattctatggtttcatgagctaaatgaaaataaattgaaatctgtcaagggtgcaattgaactgaaattttggattatatgcataagtgaatttttt

SEQ ID NO: 365858 - DNA, 596 bp, Cannabis indica
ataaaaatttaaataaaataatatatataatatataatatatatgtaaactgataaatttatatattttatatataaataaaaatatatatattatatttaagtaaatctaaaaaccttaaaaataatatatatttcagattaaaattacaactacactatatttaaaatatttactatgatttataaaaaataaaaacataccttagacagacgaaaatttgtgatcttattcaatccgaagtttaaactcccactttttaaatctgaaaataaattaaaaaattttataattatatattagcacacacatatttacatatataaatataaaaaaaattaaatattaaattaatttatttaaaacagagaataatatacccaaaaaaactaaccgatttgaagagaaacggtggaacaatagcttcatctagaagagaaatggtggtgaaatggtggtaaaatgaaagagaggagaaagagaagaaaaaatttgaatcttaaaaaaaattggaaaatgaaaaaattggggaaaccggttcgtggggatatatatatatagaattctattaccagcgggatccgccggtaataaaa

SEQ ID NO: 365859 - DNA, 692 bp, Cannabis indica
tcagtttttagcaattttttttatttttttgaaaaaaaaaaaggtaaaatgggaagttcatgtaatcaatggactaaatttgtacaaattaagggagggtataaattttgatatgacttgtattattaaggacaaaatgtgaaatttccctttacaaaagtaatgtccaaaaatttctcatcagttatcgcagttatattttctaaatatttttcaaatatctaaatgagtcacctactactccgagtgctatacatatgtatagagtttgtttagaacgccgtattaaatcgtatggtattatattatgttatattatattgaattgtattttatgtaatatttttatataaaactatacgtggtattaacttttatagacacctaaatatataatattttagtataaattagagtttaacatagtattatataaaaatatgatatataatctaattcaatataatacaatacaatacaatacgaatatactaacatatctttatatattaaaagtgcctatctaacggtatttcttggtttaacagaacataccttaaaagaatattctgttaaatttaacgatgttaatagtttgatctcccgttaacaaataaacccaataattaaatccaaaaaattaaacaatctttttttaaattaaaaaaaatatcttagccacatatctctct

SEQ ID NO: 365860 - DNA, 740 bp, Cannabis indica
caaaaaggctgacaagcaatcatcacttccctcgacacctgaatcctcagaccccactggaaaattccatgttccatctggacctaccaaggtgaagttagaaggaagaagaattgcctcggagaatatatctcagatggagagattcatcccagtgtgtcacttctgtaacaggaggggtcatattcgacccagatgctataagctgcagaactacttgaaagctatgatcaatcgacctaagagttttcaaaaacccaataaaactcgaaaggaaggatctcaaagtgagtggagattgaggggtgatcgtgaatcgaatgttgggttggtggctcaagtttcgctgtctgcatttctggaaggacagtggtacttggatagtggttgctctcgacacatgactggcaacaagaaattgttagtcaattacaaagaagcaaaggagggagctgtcacttttggtgatggaaataagggccagattattgggaaaggagacttggtgatgagtagagctgcacctcttactgaagtactgtatgtgaaagggctcaaggcaaatctgataagcatcagtcaactttgtgatgcaaattacactgtaagtttttctaaaactcattgtttagtttcatctgatgggtgctcagtcttaacagggaagagatctagtgatggtagttatttgttggacaatgttgtcatatgtaatagtgcatcattggataaatcagata

SEQ ID NO: 365861 - DNA, 857 bp, Cannabis indica
gaatggcaatgggaatgtgaatggagatggggatgggaatgggaatttgaatgggaataagaatgggaattggaatgggaatgggagtgggaatgcgtcgaggaatgggaatgggaatgggaattggggtttggggtttagggtttggggtttagggtttggggtttaggtttagggtttagggtttagggtttagggttgttattggggttggggtttgggggttagaggttagggtttggggtagggttgggggtaggggtacggtaggggtttgggatcaggggttcaagggttcaggggttagggttctgggttctgggtttagggtttaggggaatgggaatgagtattgaataaaataaaatttaaaatgcataaaaaagttgataaaaatcattaaattttttctcatgttacatgataattgttgtttcttccattatgaaatagaattcattctaccaaattggtggaacgggcattctattgggatgagtttctaatactttaaaaagaaactaaacaaaagaatagaatgaaaattatttcttttccattctatttcatcacctgtaacaaaatgtgatctaagggtctgtgttcaggggttagggttcagggtgttggggttagggtttagtgtatgggttttagcgtttaggatttagggtttagtgttttacggtttaagtgtttgagggtttaggggttttgggtttaggtttcacgattcagggaatgggaataggaatgaaaataatataaaatttaaaattcataaattattgataaaaatcattaaattttttttcatgttggaatggaatggtattccttctattatacctgaaatc

SEQ ID NO: 365862 - DNA, 999 bp, Cannabis indica
ttcttcccggattctgagttggttaaaccagatcgtaggtcaatcttcaaaaacactatttttccgtgaagctgatcgaacaaatcgtctattcttagtaacgggtatttattcttgatcgtcaacttgtttagctctcgataatcaatacacattctgggaaccatctttctttttcacgaacaataatgtaggagctccccagggcgatacactgggttgggtaaacccaatatcaagcatcccctgaagctgtaacataagctctttgagttctgccggagccatcctatatggagctttagaaacaggttcggctcaaggtgtcaggtcaatcacaaaatcaattctcgttgcgacggcaatcccaaaaactcctcgggaaacacgtcgagaaagtcttttaccactctgactacgtcaggcccaaatgttttgagtctactggactcaatcaccactgctcagaatcctacacatccactctgtagtagatccctagcccttaatacagaaataaccgagctccgagacccctgaaccgatccaacatagacaaatggatcttcacatactggccgaatacttggacagaaaatccatcccaagtatgatgtcaaactcagttaattccagctctataaggtcatcactcaactccctatcctcgatcctaaccggaatagacctagtgcacctattggagataaccaactgcccgctaggcataagggttccaaacactctttctaaaatatcccaaggcctaccaaaaacatatattattctcgtagccacatatgagcatgtagctcttgaatcaaataatactgtaaataatgagttgttgacgagaagctgacttgtcacaacagaacgactggctgcggcatcagcttgtgtgatagcaaacattcgagcaggtgtcggttttacctcaactttcaactctttctttgcctgagggcaatctttcttgaaatgccccaccatgccaca

SEQ ID NO: 365863 - DNA, 503 bp, Cannabis indica
cttaaaaaaatgtaaccatgatggttacaataaaaatgtaaccattgaaacatcttccatatcttttatactattttttatttttgttaagcttaaaaaatgggataaaaggtcccatttcttatcgtgcaagtctaaaataatatttatcttaaatttttttaaaattatttatcttattgttcattttataacattaaaaaaattaaaattacaattataaggaaaattgaaattacacgcacacatacttacacaattgcttgttgtatactagtatatatatatctattctatataaagtgtacctatataactaaaattcttggtttatgagaaatttatggatgactttttatttttatttaataaaataataaaatattatttatatataataaaataataataaaacaaatcccattaatatttgaattgatatttgaactgatattaaatattcgagaatcacaacccatttaaaaagaaaacaaccggagatt

SEQ ID NO: 365864 - DNA, 498 bp, Cannabis indica
tctcttataggcgacggttttaaacagtcgggtataatagcccaataaaaaatcgttacctacttcacgccatattttccacatgcccacctacttcttttctatttcccacatgtccatctatttattctccatttcccacaccctaaaacaaaaatcttaactctctaaaactccacccacgcatccccaccattgcctttctctctcgacgtctttctccctctctcgatctccctttcttctcgtctctctcattcatcaatctccacccacccctcctcccgttggtctctctcttctcttcgtcacatacgtcagtccaccaccacctcccgtcggtgtccctctcatctccgtctcatacgtcggaccaccaccacctcccgtccatctccctctctctctttctctctctccaagctcggtataaatacatttatttatttatatacttttttatttattatatatatttattttgttattgtataaatt

SEQ ID NO: 365865 - DNA, 665 bp, Cannabis indica
tagactatgtcttatttaagaatttcactaagcaagggcttaatgtgaagaaagaggtttgggtcaatttgttaattaagagactttgtatgctctaattaataaattacataaatgaaaattttatttgataattaattataattattaaataaatagttttggcatttataggattgaattggaaaatatagtattattgaaagaagaataagtggttaaaaaaatgacgaaattgtaactagagaatgatccttttcatgtatggatattatgttatttttgcccaatattttattcttttttaatccatataattcagctcttagccctagttgaagcagtataaaagaaaaatgatactctcactcatccacttgatgccttcaaccaaatcaaacctagttttctatgtcagacaactagtagatgagagagttacttccttagtgatttcaacctccttcattgttcttccatattcgaacccttgagtgaaagagtatcatgtccacacatagcaagtcaagtactcaatcatagtgagtaagatagtggtaaccgaacccgaatgagagaaagagatccaggttcagatcttgataatgctctgctataaaaaggaatcaagggctagagatcttgaaaggaaggagtcattatat

SEQ ID NO: 365866 - DNA, 563 bp, Cannabis indica
atctaacttgttgtaaatatggtttaaaacgaatgtccaagctgtcaagctcgctcatatggtattcaaatttcctctctatgtatgtttttgctgctggaaagaatggtatatcaagcttgcttgcatttttcttgaaggttgctttcaggttgcttaacaggtggtatacacaatagccatgcgttatttctagaaatacatgagcagctgcgttaattatgctctcatgtttgtctgagctcaagcattgttcttctctaatcccatatgtttctcttaattttgtgaaaaaccattgccatgagttgttgttttctgaatccacaacaaaaaaagctaggggataaatatgttcatttgtatcttgtgtacaagtagagagcaatgtccctccatatgttgatttaaggaaagtttcatcaacaactattatgggtttgcacttcttccatccttttgaagcatttaatgccacaaacaagtacttgaagttgttatcttcttctgtttgcatgtgtacaattgtttcaggattagttttctgcaacatatgcaaaaaa

SEQ ID NO: 365867 - DNA, 1551 bp, Cannabis indica
atgattgtagtaagatgcatggtggacgacaaagcctcttccaacattcttttcaaatcaacttatgaaaagatggggctctagctcattgacctagaaccatgcaatcaagtgatgtatggcttctttggccatggcatcgcccctgtcgggtatatcagattacccctcacagttggagaaactccaaccaccagaaccctgatggcgtagtttgtcatgatcgatgttcccttggccttcaatggcatgataggccgaccaaccctcaatgacctaaaggtggtaacttccatctaccacctatgccttgattttccaacaaggcatggggtggcgtgtgtgaggggagaccaagagtttgcccatcactattacaacttggctctgttcaaagctaagaaagagaagatgcccaccaagggcccataagacaagcccaacaaaaggcaatgaattctagcctaaagcgaggacacatacatagatcctcgctttggggatcctacaagaagcttcatgcctatagaagagttggaagaagtggaggtccatcccacttttccaacaagaagattgaagattgggaaaggtttagcgctagaaattaaatcaatactgttaaatttattagggaaaaccttcaccttttttgcatggtcacacgaagacatcgtcagaattgacccctcaatgatgacccacacactcaacattgatcccagtatctggcctattcaataaaaagttggttgttggacaaagaatgcgcccaagcgctcaaagatgaaattgaggggctataagcccatgacttcataaaagaggcattctatccactatgggtgtccaatccggtactgtgcccaaccccaacaagaagtggagagtgtgcatcaacttcaccaaagcatgtccaaaggactgcttcaaacttcccataattgataagcttgtagacgccacaaccagggccggtcctaaaaaaaatgggcccaagacggttttagtaaattaaaaaaaatgggcccttttgtatatgtattttttaaaattaaactaatatttagtaatataaatacattccaaaccaataaatcatcacataaacttttcaatgtattacttaaatattatgcgtcttgcatttttagatgcaaaagtattaattaaatttgcataatcaagttttgcaactaaatcattttcaatggataacatagctaaaccgcttaatctttcttgagacatggttgaacggagataagatttgatcaaggtcaatttggaaaaactccgttctgcatgggcaacggtgaccggaatagttagaaaatcctataagcaatccaagcatttggataactaccatccacttcttttatatagctcaacacatcgatagctcttttggtttcttttggtagactttgacgcaacatatataactcttggtataggtcatcattgtcaaggtctgaaatctcaccatgcttcattaagtttgtaagattgatacaaaaattcctcaaagtgtcatcatctgcagac

SEQ ID NO: 365868 - DNA, 663 bp, Cannabis indica
ctctgttataatatttaagagtacgatattaaaattgttaaaatatattttacaggatctaaatttactaacaaatatgtttttaacatcctaatatgaatttctaaaacgaacaaaataaacatataaaaggtatgagaaaccttacagtagttgcagcagaataaaatgactcattccgctcagatttctaacccttgtatcctttctgtagcagagtatcaccaagatctgagcccgaaactccttccttgtgtttggattcttcatagtcttacacactatgattgatgatcaacttgttatgtgtgggtatgctgcactcaatcactaaatgactaaattttggtttgtgaagaatgactatggtatttcaaaaattcaagagaaagaagaagaaggaataggtctcatcaaacctagagataaaaactaggttttttagctttggaggcattagttggataatgagacaatagttatccttttatactaatttccatagggttagggttgatttattttgaattaaaaaatgacaaaaatagagtgaaaaaacccctttgatggccgaccacttaatgtgccgcacaatagttttgatttgttatttttctcaactattttatctatttttcacaaataccactttttacaatttca

SEQ ID NO: 365869 - DNA, 616 bp, Cannabis indica
attataaatttcacacctttacatataaatatttgacctattatttatttattagttatgtgttgcgattgctaccacacacacagttgtagtttattggtacttttttaaaggataaaatagtataggaattttttttatatttacgtttcaaaataatttttagtgaagcaaacttaaatcgtaaatcaaaaatcgtatagcaactcacatagaatttaccggatagaccactttagaaactcaaactgtaaaattttaaaaaaataaataaataaaataaaagttaaaaaaatagtatataaggtaattttccataattaaggctttgttggtacttcaaaaaaataattagagtactcccattagttctttattttactatttaaaatatattatcaaaataaaatttatattattattaaaaaaatcacttttttctattattttaaacttttacattatgccataaaattttaaaacacattactaaaattaattttttttctcaaattataatatattttaggggctttttcatttttatacttcaaaatagttttttttttttcacttttatgaaattccacataaacatctcatagcaactaacgga

SEQ ID NO: 365870 - DNA, 796 bp, Cannabis indica
tgggctaatgtaaactatctataccactcttaatattataacaaatatttggtaatttcaacttttcacccttaattatttaaatgaattttcgtgttatccttgtaatgggcttgggttggtggtttaatcaaggcccgtataggtgtgtatagatttgggcttgcctgttagaatttcaactttgaggaataaggagtctgttagatacgggcttgcctgagttcatcatccataaagactacaaagatacaatagaaaattatagaaaattacattgtatacttttcttttttttaatgaaaataatctttattagatagaaatattcgctaatacaaaggactgaagagcaaggggaatatcactctcagaaaaaagacgacctgaccaataacaagcactacgtgccatacagtgcgcggctttgttagcagaccgtttaacatgaccaataaaaacattacttaaagaagataaaataacttgacaatctttaacaaataaaccaaaaatagaaggcatagataccgaactaagaatagcttgaacaactaaaaggcagtctgtctctaaaatgacatttgacctattattcctctttatccaactaagtgcttctttgatactgagaacttctgcaatttcgggtcggcagctgacagaagaaatagttgaaaacgcctccatcactcggccatcgcagtcgcgtgctacaaaacccgtgcctatctcatttgtggcttcaaaaaccgccccatccacattaattttaactgaccagcagccggtttgg

SEQ ID NO: 365871 - DNA, 1445 bp, Cannabis indica
aaaacccgtagtaggacctcctcgtcctccatctaaggtttctattccttccccaaccagtgaaagagttcaagcaaaacgaaagtcctcacgtgataccacgtatcaaccacctgaaaagaaatccaagaccaaacccattccagtcccatctacatattcatctcccaaacagtcgtctaaaggctctaaaaaatccaaacttcccaaagcacctatatcaactgtcaacccagcctctgtacaatgctttgttgatgcctctaaagcctctatttatcaacgatggtttggtagtcgtgagatttggttcgaacaagtggttatattagatgattttccttaactgcatgagttcttaaaactcaggaaatgggtaaacacggtcactaacttgtttgctcctcatcccatcttagttcaagaattctatgccaacttagataggactgttattgctgagggtcatccagggtgtgtgagtgcatttgttaggggtcatagagttccatttggtccatccactatagcatgcttgttgaaagttgagtccatcaggaaaccaacatatgggaaacaattcaatccagataaaactttgatgggtacagtgctaactggcaaggatgcctaaatttgggacaaacaggaaatcctagtcactcacttgactcccttctatagggttcttcatcgggtagccttgtacaattggttccctaattctcatttgtcatcagttacactttagattggcaagtttctgtatgctataggtactcatgtgtccattgatctgccatcgctcatatttgaaaggatacttgaagcttcagaaactactggcactcgtaacaagctaccatttccaagccttgttcaacgagttcttatgctcacccacctcttacaacgcatgactatcaagttcaaaatcctattctcagtaagagctttctctctatggtcaataggcagccctcatcaaccactccttctgcatcaaaggtgactaaaggcaagtctactatgttcaaagggctttcggattccagctggcaggtacaaatgttttctgagtttcaatcttttgccaaacgttataagaaggatcaatagtgtcagcttgcctttgaggcctccatgtatcaaatggttcactctatcaagttgactcttttgcaccgttttcctggggattctctacctgacatttctctgcctgagtttcatcgagattcgtttggcacatcctctgatacgtctggaagtaacgcacatgtgtagggggagccttcagcatttgcccctgtcacaagctcaacccaacctgatctgcatcctcctgctgactagcctctagtaatcactgcaacacccttggtgtcgactgggccaccttcccagggggagtctggcactgaacaggatcaagcagctcatat

SEQ ID NO: 365872 - DNA, 709 bp, Cannabis indica
aggaatttaaatcatagcatcaagcattaaaatccagcaacaaaccctcaagaattcatgtagcaaaaacacctcaaaatcatgcacaatcatggctatactaagctcttgaacaagagcttcatcaacaataaccaaaccttttccagcagtaaaaaccataagcaccaattggattaagcatgaaaaacaaccttgagttataccctaagctcaaaccaacacaacacaagagattaacaagcttaaacatccaattcactaagcatgcaacctatcatcaaattcatgtttttcaaccataagattcaacaactaacacaggattaagatcaccacaaaacaagaacaaagatctttcctccaaactcaggcttcaaacaagccaaaaccaagctcttcttcgacaattcaagctttgacaatcaagagggtaagagagggagagagttcgggtgagatagagaaaagaccagaaattttttgtcctttatccctcaaaatcaatttaattcaagtaaatcaaatatggtcaaatgaccattttgcccccatggcttaaatccacacatactcacccacacaagggtaattttgccatttcatgcattaataattcacaaataaaaatgccaaataatcaatccaatttgcatttcgagcccgaacccggttcggtccaaaattcccggttgtgactataccgcgc

SEQ ID NO: 365873 - DNA, 549 bp, Cannabis indica
tgaaccatgcaacattaaatgatatttctgatctatattaatatgtaaatctgattatattgaaatgagttttatttagagcataaaacccaacagattacactatggttaagttaagttgaaaaatacttaactttatgcacttaagcaaggactctatagagagtgttgatttattcaatcaaagtgggagatatatgagatatttgattgattaaataaagtgttgcaatgaggtatcacttattttaatctagtgggagaatgttatattatttattaaataatataatgtttaagattaaaattgtgatatattatatatattattatgaatataatatataatataattgggaattatatacatgtaataatcacaatataatgtgattgagagttacatatatgtaatagttataacataagaggtggagttactcatattttgtaacttccacatgatcactaattaagtgtgtaaagagtagttacacaacttaatttttgaaattaaaaaactataattcaaatatagttgttggggat

SEQ ID NO: 365874 - DNA, 829 bp, Cannabis indica
aatataagtgacaaggcaaacctggtccctatccagttccttgaagagcctagcatcactggcacggaagaaattgaaatgatcgacacatctccaaactggatgacgccaatagcagcctatctcaactctggggaactcccagataaccgaaatgaagctcggaaaatgagaagaaaggcagcacggtacatcatagtagaaggggtcatgtacagaagaggattctcgatgccattactcagatgtgtcacaccagatgaagctgcacggcttctatttgaagttcacgacggattttgtggaaatcatgcagccggacagagcttatcaaagaaaattctaaggcaaggctacttctggccaacgatgattgaagattcgagagcctatgtcaagaagtgcgacaaatgccagagattttcaaagataccaagagctccgcccaacgagctgacacagatgcaaagtccgtggccctttgccatctggggaattgacctaatcggacagttacctaaaggtaaaggcggggtgcagtacgcagtggtagcagtcgactactttactaagtggactgaagccgaaccactcgcaaccatcacatcaaagaaggttcaagactttatagtgaagaacatcatatgccggttcggactaccgtacaaaatagtctcggacaacggcaagcagttcgacagccaatctttcactgatttctgtgcgaaccatggtatcatcaaaagtttctccgcagtggcacatcctcaagcaaacggtcaagttgaagcagtcaacaaaaccttgaaggatacactaaaaaagaaac

SEQ ID NO: 365875 - DNA, 1072 bp, Cannabis indica
agtctctgattcatctatcttccttggacgccctgaattctttatttaagccatggaattctgaaagtaagaatgaaaacaaagagagaaaaaaaataaagaagagagagatcgggtagatagagagaatttgtgagatttaaatgaaatacaaattggtatatataaggataaaaaagaagaataaaagagaaaccaatttgaaaaataaaaaaggaaacaaaaactaccttacccttttacaaagaaaaactgccccttccttctttttttattattataagaacacacaaagaaaaagtaaaaaaaaaaaatagaaaaagaaaactaacaattgcccttacccttttacccccaaaaaaaaaaatgtccctttcgcatttttttttaaacaaatacaattaaaatttaaaaaatcaatcaagatcaacaattaaataaaatacaatatataagaaatcaaattttaataggaaactcatcaaaaaaatttaattggagcacatgttgatacttatcacaagaaaacaaatgaccaaattttcttagcccacaagtcaagccacacgaatttttttttatatattcgaaaaaaaaatacaaaatattgaaatgataactagtctttatttatttatttttcaaagtcttagagcatctccaatatgggcaatttttaaaattgtcataaaatttcacagcatctcaaaatataatattttattttatctctcattcacattatttttgactactttactactaaaaatgctctaatattatttaatattaacttatatttttattattagtttgtttcaaatattatatttttcatttttttttttgaaaaaacacataaatcgttactcttgtgcaactaccccagctgccataaaatttatctctaatgcataagctactttagagagtgagaaatgctaaagggcaccagtggtgcctagcaccctcttacgtgttaatatcgctattggtccaactaagtatcgggtcccatataatttaatataatagcttttagggagtatcgctagccaatcgcaacgcgaca

SEQ ID NO: 365876 - DNA, 542 bp, Cannabis indica
atgaagaattccaattgtgtactcttatgtacatttgaacacgtggcttcattcttattaatattaacttaaagtttttttacgcgaattatgactatgtattctaccctttaattttttaatttgttacaaataatatttctattatttttagtgttgtaaattaattattcttttaagttttaaaaataagatattggcagctaaactaattgaattttaaattttttaatatttaaccacgaaaattgatttttggaggcaaaactacctaaactctcattccgttttgttctgtacccctccgtctaaaaatcacaattaaataccatagtagactgctcaggtgtacacacttgtacacgtgacaaatttttattgggtacataatttaattattttaaatattagaaaattaattaaattttaaaaataatttatcttttagaaagaaaaataatttaaaaaataaaaaaaaaattaatttttacttttttttttcttttgtaaccatcgacatctcttcttcttcttctaccaat

SEQ ID NO: 365877 - DNA, 886 bp, Cannabis indica
tacatattttatcatccatctcataaaactgaatcgtggaattaagaattgacttgatcagtgagagcgatcgatctagctaggaacctaatttctagaaaagatcatttattagatcaattatgattcacaagaacttttaattttaatggttattgagaatccataattaataatccacaagtcattgataaaattttaataagtcatgttattagtaattacttacaatttataaacaacatacatgttgaacaatttgctctttaaagagtattttggttcatccttaagaagacttattagaacaataaaatcaatattttctactgattacattttgtacagtaagagctcaactataatattaatttgagacgcaaattaaactgtggaatgcacagaattgaaattgtggtataatatgccatgaatgaataaatgaatatcctaaagagcaatgaagtatatctttagtaaagttgcctaatgggtggagaacattcattaagcataagttttttcaccgataaatactcattaagcaacatggagaaatataaagatataaaaccaaattcattgctaagaagtttattttgaactaagaatcaataacaaatgagatttacattctcacttgtctttataaaagattctattatagaccttggtatttgttgctcgtttcaatttattaatcaattccaaacagtgaactaaaggagaaagtacacagactgccataaagattttcctctaatagtggtgaacatatgcaagctttaaaagtctacctatagattaaaacaaacatctcgcaaattggtattttcattatatcatcttttcctttatgtttgaaaagagaattatggaaataatt

SEQ ID NO: 365878 - DNA, 890 bp, Cannabis indica
aattgaaataacgaaaagatcaggagctcccaatcaatccaaatcaagtataaccaatacaaacaagttatattcagttgcatagtcgttttgttatgatttcaaaataaaatcaagcaacaactatgttaattggagttaagtaccatgttttttcaagttgatttacagttgcatcatcatttcataatagtttaattcaatttttgcaggaatttattttggacagaagaaaaagagaaaacacttggacaaatggttagtttgcgaaataaatttaagcgtttcttaatagtttcatttcagttttattatagtttaataacagcaataaaacaaaaaatgacaaaaacagggttcagaactggaaatacaagacttgaacagaggaaaggaaatagaagtaagtttctattctatttcataaatatttttttttttgttataaaaatcagtgtcaaaaatgttcgtctacaatactaacattagcaataacagaatcaaaacagtttcaaaatcgttgccttgcgctaataataatttcaaaatcacaggaaaaagaagacattccattcctagtcttttgcaatggacaatttgatgagcgaatgaattatgaaaattatgaagctagtggacattacatttcagtcaattgtaagtatgaagaattacaacggaagctgaaagaggtcctggaatgcaaccaagaaaacactgttttgcaactgaaatatcaagtcaaagaaggataccaaccgttgaggataaaggaagatcaaagcctgcatttctacatacaactaaaactaaaggaacccgacttcacaacatacccattgtgtgtgaatgtcatcaacaacccaccataataaaactataaaaaaaaa

SEQ ID NO: 365879 - DNA, 770 bp, Cannabis indica
atcgtcatcgttgggtcgaccccccgagacccaacttggaggggtggcaatcatcatcgtaccccttgtccgttatcagtagttggtgtaatgtggatatccccatatacctttgagaatatcattatgtctatggtaaaatgaatgacttgtaccttgagggtgtagggggtaggggtaaacccctagactaaaccccatatagataattgtagaggtaggggtagtagtatataccccctagactagtttaactcccgtaggtgtctggtgattgttcattccgcttacgaaggcgttactccatcatttttcattctttgagatgtccaccttactcaagctaggggtaagggtgaccgtttgatttttattataacggtcatgatcacctttcatgattaacggtcatgaccaccctcatggttggtagtcatcccaatggtcatgactttacatattcttcattaatttagtctcgatatttttgtgccacatcttgctactcttgacacgtcattgtcgttaaaatttgggtaaacatttacccttcaagtttctaactgtatgtccatacaataggaactttcttgtgtagtctgggtctcacttttattgttgacgacctggcacagcggtaccaaaaatattacgcctatactaaaattacattccaaaaacccaaaaatatttttcctaaccattacttttttcacattttacaatatatcccactgataattttttcctttacaagcaaaattaaatta

SEQ ID NO: 365880 - DNA, 521 bp, Cannabis indica
ccaaccctcgaagtattttgatgacgtttttaaaagatgcctaaagctggtgctgctactgctgctgcaagctcgagttctgcttctacagaaatccaggagctcaagaatgaggttcagctggtgaacaatcgtcttgctgccatggaggaggttcagcaagagatgtccaagcagttgtcctctttgatcaagctttatagggaataagtttttctttcttttattacttttgttggacatattactatattttcttgtttgttatctttggcccttagataaacaaaaatggggagtaatattttatttttaactgtttgtttttatcaactctagacccttttttcagggggagttgtgtttggtacttgtgaactattttgctttaaaagttagcatgttattttgttgtttttgattttcgagtgtgctactcagggggagcagttatttgttcttgctaactttattttgcaggtactttgtgttaaaaaaaatattttgttcatctaaagtgc

SEQ ID NO: 365881 - DNA, 431 bp, Cannabis indica
agagattttagaaaatcccccgaacaaaacatcgataataccctgctaaactgagaaaacttcaaacttttgtcactatttttgcctcagctaattcttcacagactcaatcttgcttggatcaaccataatcccattccttccaacaatatgtcctagaaaagatacctccgacaaccagaatttgcacttttttgaacttttctatataacttttgtatccctaacgtacgctgcaataccattcgaagatgatgctcgtgctcctcttctgactgagagtatacaaggatgtcatcgataaacactataacaacgttatcgaggaaatccttgaataacattaccagaaactcataatgcccatatctggttctaaatgcagtcttcggtatgtcctcctcccgaattctaagttgatgataaccaga

SEQ ID NO: 365882 - DNA, 857 bp, Cannabis indica
gtatagagcatcagccacagagagagagagagagagagagaggaccatacgatcgagtacaaaccatataatgcaatgaaaaggtgagtcttatcgaaagctctctctatataaaaataaagaaaaatattgaatgacttccactatataatgttgggctaaagccaggtctaagagaatggtatttatataaaggaaatatgctgttcaaatcacaagacattaaggcaaacatgggatctagttggtgggcttcatgtttgccacctaaatgtggagaactatcctctttatttagaggggtcctctttcctttctttatgtcgatttactctactttgaacttttcccgtatgttttcttcttcttttggtgatacttctatgttatatgtttcagttttgtaacctggccatttgatctcctaaaaacagctcaagtttctgcatggaatctagtatttgttctctaacatatataatatatagtctctctctgtggctgatagctctatacagatattgtcaaattagtcatctcaaagacttatttaaacttcatttgacatatcgtggaatgagttgaagatgttacactattgtcaagataataattatgatttacaaataaacaatgttagaaaaataaataacataaataacttagcattaggttagaatttgggaataaggtgaatggggttttatctcaaaagtaattgactatgagaggagtagcccatttctcttatatatattttattatctttccacatattagcaaagtggtactttctaacaactccctaaagatggtggctattttatatgctcaccatcttggacaactcgatcata

SEQ ID NO: 365883 - DNA, 472 bp, Cannabis indica
gtaaaataattccaacagaaagacggatccctacgtatatgtattaactaccgggaagtaaataaactgactatcaagaacaaataccctttacctaggatcgatgatcttttcgatctgcttcaggggaagacgatcttctcaaagattgaacttcgatcgggttatcattagttgagaatctgagaggaggatattctaaagactgctttctacactaggtatagaccctatgaatttctggttatgtcttttggactaaccaacgctcccgcagcttttatggatctgatgaatagggtattcaaggatttcctcgatatttgtgttattatatttatcgacgatatccttgtgtactctcaatcaaaagaggagcatgagctacatctttggatggttctacagcggctacgggaacataaattgtatgccaaatttaagaaggcaagttttggctatcttaggtgtc

SEQ ID NO: 365884 - DNA, 677 bp, Cannabis indica
actaattaatatagttttatcatataaaactaaatagttaaatatcattttaattgatataattattcaaaatactaatttatacaaaattactattttttcgttaagaattctttctcatagaaattaattctttctcaatttatttatcaattcaaacctttccatgtacagtatcgtatagaggtgatctagggactatagacctatatttcgaagctccaataaacacttgattattattgaactctttaatagaataatctggtttattaattccattattactccactataaatatagatttgcactctttgacgatataaaattatatttatagaattcttacttatagtccattgatataattagggctaagcatcggttggtttggtcgatttttttctatataaaaatttagaattcagcttttggtatggattggtgcaatctaaaaaccgagcgaccaatccagtacctatcttaaaaccaactattttgaacctcgatttggtcgtttaaaccttccaaactgaacttttattttttttaaaatatgatctaatttattctataagcataatattttacattctacaactataactttacaaattaattgttcaaaaactaattgtcttattcttttaactttaatattaataaaataattata

SEQ ID NO: 365885 - DNA, 365 bp, Cannabis indica
catccaaatcctcatcacatttatattcttgtttattgtgtcgtcagcacaggggaaagtaatcgaagattaggtgattaaatatatattacctcgtagggactgccttgaccgagaagaggtagacaatttccaagggagtggggcactcccatcttagaatactgaacccttagacttgcaaggattctatagaaaattggtaccaactggaatggagctattccaagatgcttgatgaactctttaaaataatctctcagggggagaattactctacccatgatatgctcgaggctctaagcggctatcccagccaagccattgttacatactttgccactggtttctgttggaaattattt

SEQ ID NO: 365886 - DNA, 853 bp, Cannabis indica
ttctagcaatgtgctctcttgatagaaacttcttcactcccaaagtaaactcaagacctctatttatagtgttttgaggatcacatttgaaaatcaaatcctttcaccacatggctgttaccaacactttaattggtgttcaatgggataaaaacgttggacaagagagctgaaaacatgctcaattaatttatgtacgtttatgaacgtttcaaaaacttgttccaggtgttcgtaaaacaaccatgaaacaacattaaaacaattattaaacaattgtttccagagaactcaaaatgtaactcctctccgagttaaatcttttcccaacgtcccaatacccatttaaatgatataattgagtattgtaacagtttataacagctaaaaactcatcccattaatttcataactctcatatgtaacaactcacataattacatatttatcaattgtgatccttaagttacaacctattttcaaatttgtaactcatcatatgttacaattttatgtgtattattatattatatatgatataatataacctccaacacataatatatattaatctcctattaatatataatttgtcacatttaaatattttaatctatattatattatatcaaataatataacagtaaatacaatagcctgtagtggatatttggtcatccagatcggaagcccaatcgatatcacaaaaggctttgatataaatttgagaagctttaccgatgtgaatgccagaatttaaggtgcttgcaaggtaccttaaaaatatgcttaaacaacaaaactaatgtgacttaagaggcatatattggttgacgcaatttttcttcaactt

SEQ ID NO: 365887 - DNA, 788 bp, Cannabis indica
ttttttttttttaaagagaattgctaaaaagcaccattggtgcctatcatccttctcggtgtcatattattattggtataattaaatagaaggtctcaaataatttaagaaaataatttttaggaatatcgttaactaattataacacaccatttataaaaagtatttggcactactattgcatagtaataatatttttttgtttgtaaaagaagatgacaaattttatgtggatgagataaaataaaaaaaaaaaatattttagaataatatatatatatatttcaataactataaatattgcacagctctaaagataaaataacacttgattttctttgaagtatcttgtgattgtcccaataccaatactgttagggcccgtttggtacgcaggattggactggattggactgaaaaggattggactggactggacaagattggattatgctgaaagtaatcctgtgtttggtttaagaatggactggactattttatttatttccttttagaaaaaaaaaaacttaaattaaataaaaatatataataataaattaaaattaaaatatataataataaataaataattcgtagcaaaaaaaaataatatatcatatataattaagaatatatcataaatatataataaaatattttgtcatattttttatttaataaataattaaaatagtaaaataaaaatacttgaataatataaaattgtttatcttaaacactaatttaatataaatattaattttttaagtaatttaaaaataatatat

SEQ ID NO: 365888 - DNA, 1033 bp, Cannabis indica
aattaatcataattaactgataatttccaaattaactaagcgggctttacagaaatccttttaaggggggtaattgtaaagaccgcttatctttaatttcgaaattagcagataactagggtttaattatgaaacttgtttattagttttgaattattttattgtgatgttttatttgaatacaaaattcattttatatctcgtatacaaaatttcataattttgcatattttgtgctcggcaacattggaacgcggtgtttggctattagaatcacatcctagtattttagtatagcggggtagcatagttagacattggaaatgttgggaatggttggattttaaagttgacaaaaatacccttaagtgatttatgattgtttagtgtgggcaagggcactttggtctttttaccctattttggatttgtcatttagtgtacttggttggactttattaatctgaattttaagtttaataagctgagcttattttaataaaacgaaaccttttattcatttattttaaaaattggaaaattatttaaaaagaaagcatcttctctctcaactctctctcttttgaacccacctagaagcagctacatttggtgtgtaccctgcaattcaagctaagttcagcaagtttttagtggtctcaagctataggtaagctcttagtaacctccaccttagtttcttgaattgtaagaaattgtattttgcataaaattgtgattttagttgctattgatgctgttgttgtttgaagtatgtttttgaagttcaaatatgtttagatatgttgatttaagcttgttttgatggctggttttttgtttgagcaagctttgagttttagaactcaagcttggctctttaatggtgttttttgattttgagcttgggtagttattttattgcttagaatatgtctattggggtataatatttaagtctggaatgtttggtaaattttggaatcgatttggttaggttttggagttttttgggttttctggtataaaccgg

SEQ ID NO: 365889 - DNA, 525 bp, Cannabis indica
gatgttaatgaaacatacttgttagtaaatctagatcctggtaaaatatatccaataactggcctcagagccatggtaatgatgtaattaaaacgatgttttgtgttgatttggatggtttcatgtggtttatgtgcttatttgatgatagtttagaaatcgcaatatatgttactgcaatattctttatttcaatctggaagtatttttttctggaatgtagacgaaaaattaataaatttaggcttttacaaaacctaatttggatttatgaattagttatgattttttgaatttgaagaaaatatcgggatttgaatgtcacacgcgcgcgcacgagcctcggatccgctcggacacgctgctgtctgaagggcagctcgcgcccaagatcctcggtcaaatggggctacttgcagcctctatcctcggccacacccttgcttccgcgcgcacaggagtatgcaatgcatacccctgtgcctcaaacttgttttcgtcataacttttgattcaaaaatcgtt

SEQ ID NO: 365890 - DNA, 953 bp, Cannabis indica
gtagttatttagaaaaaattaacacaacaagtagatagtatataattgatttatatactaatataataataataccaacaagtaattattaaaatttatatactagaatactaaaaagtagtaataaaggatttagggtgaaatatataccaagaagtagttaagaaataataattttgaatgcattatattaaattatttatatactaaaaggtatatacatatttagtataataataaaaatatgatgttgacttctagtatccaatcataaattaagatactccattatagtattattgttaagtttggtattatataaaaatatgttttatgtataattattattattttaaatcatttatctaaacaatttgcatttattataatttataacacaattaggttataaataaaataaaatataaaaatcggtacataaataataataacataaaaatataagttaaaattgaaaaaaaatcaattattaagagattaatgtaataaagttatattatatgtactaacatcaaatttttccataaaatattggcccatgattcaatttaacgtgtggacaacttctttaatcaattaatgggcctaggtttatgatgttctcaccagcaaccaaagtccaactgaagaagggatcatgtctttctgtgaagttagaaccacgttagttggtctgacacgcccaacatcccaactctccagttttgacacacgtctcccatgtttccaaattgctcagaaatagaagccattcttctgaatattttgtgtcatttcacccactacatggtacacaaaaataccaagtattgagagcatttgatcattataaatagacctcaaagcaaatgtaaaggcatcagatattagtgtagaaaaatacactttctcatcttgttctctcttattactattttattttacttatttta

SEQ ID NO: 365891 - DNA, 569 bp, Cannabis indica
gttgatcggttaacacctttatgtgatatgcttggaagtagggctttagtttgcaagatgcatggattaggcatagggcaagtttttcaagagggcgatatctcgactctgcccctagtaatcttttacttacatagtaaatgtaaagaccacttagctttaatttggaaattagcagattattagggtttaattatgaaacttgattattagttttaaattattaatttatgataatttatttgaattcagaatgtattttatatgtcatatgtagaaattttataattttgtatattcagtgcccagcaacattggaacgtggtgtttggctattagaatcacatcttagtatttttagtatagcgggacaatatagttagacaatgggaatctcgggaatagttgagattttagaagttaccaaaatacccctaagtaatttttatggtggttttgtgtgggcaagggtattatggtctttttgcctaaagggattttgtcttttagtgaaactttaattgatttttaattaaatcttttatggctgatattagaataccaaaacc

SEQ ID NO: 365892 - DNA, 760 bp, Cannabis indica
acaattatggagtcctgactttcttaatggacttaatgttggttctctttaagtgtcaattctggaactggaatattgtgtacacattcatataggatcttgaattatactttcactattgaattaatggaactaaaggtaaagaagtaattagaaaaggtaaaatagtattttgactaaaactaacatagagggctaatcactggaattgattatatcaataaacattgtagtaaaactcttttaatataattctataattactacgagtgcaattccatatttatagttgagtaatcatgaaattaataaaaaaaaattatttgattgatcagactcaataaataatctaggttattggaacttagaattataggtcaatgatcccgaatcactaccttgaaatattgtcaagggtagggataaagagttcgaagaaaatttcttttgaattggcaaaatagcaattattttcgtaataaataaataatttttttcaaattcattaaatgagaattagggagtctattttcttaaaaaggtcaatacatggaatgtgcacaagaccattaagggtgcaaagcgagacgtgtggtcttgggtgaacctagcaaaggtgtgtgtgtcattaccgttttattataaagaaaattttgttcaatactttgtcaacaaaatttttaataaaatttgtgatgattacactatgataaagttcaagttgaaagacactttatcttatgcacttgagcaaagtctc

SEQ ID NO: 365893 - DNA, 667 bp, Cannabis indica
tctcggtgctagtttgggtctggtcaaggtcctaagtcacgggtcctaggtcgcaggtcctagcccaagtctaggttcaggtttaggtctgggtcttggaaatggttctaggttcgggtcttggtacgattccaagatctagacaacgactacaagttagtttgtagtgttgggtcgtggtcaagatctgaatcctgggtccctacccatgtctgtgtctgggtctgggtccgggaccaagaccggggtttaatcttagatcccagtcccagtcctgggtcctaatttttgttctaatttagagtttgggcccctaatctaggtcttggtactgggtccaggtctgagtctccaatcctggtctgggtcctgggtccgggtctgggtccaagtccgcgtcagggtttgggtttgtgtcccgagtcccgatctgagtttttattcgagtccgtgtcccggtgcgggtttgggtctgggtcctattcaaattctagttcccggactcaaacctagactcggactgggacttaggtctgggtacatgcctgggtttgggtttgattcgaggtccgagtctgggtctgggtttaagtccgggtatgggtcccaaattcaaacactgactatgagtcaggtccaagccccgggtcccagtctagttccactt

SEQ ID NO: 365894 - DNA, 569 bp, Cannabis indica
ctaccatgatttgtccggggacgccaagttgtggtggaggacgaagtatgaagacattcagagtggtaaatgcaccattaacacttgggaagacctcaagaaagaattgaatgcccaatttctggcagaaaatgtcgcctacctagctcgacgccaactaagagagttaaagcaagttggaacagtccgagactatgtaaagaagttctccggattgatgctcgacatcaaggacatgaacgaagtcgacagactattctacttccttgaaggactcaagtcgtgggctaaacaagagttgcaaaggcagtgggtgtcagatctcgccactgcttaagctgcagccgagcggctgactgattacacctctgagaattcgcagccgaagaagacgaatccccagacgagcaccaacaatgatgcgagtaagaagttaggaaagcaatggccgagtaaaagtgagggaggggacaagaagactcctgaatctagctcctcttaaagtgacgctgcaacggggaagaagccccttaagtgttggctttgccaaggcccacatagagcggctg

SEQ ID NO: 365895 - DNA, 1058 bp, Cannabis indica
aattcccttcattgatggttttttttgatggtccaaaccctgaatgttatgttgagggcaatgatgacgtaagacaaccaaggtacagaggtccctgctgctgtagctttgaacttgactccactatcgtaccaaataccaccaaagccaccgacacggaaaagaatgccccgtagagaaaattgtcaaacacttggtactagtagtagtcgtccaggcaaaaccagtaatgctagaggaaccactgacagtacagatcctaataatgctagaaagaccaatgatgctagtggtcctactgttgctcgagggaccaatgtgactggatttagagatccattttattctttgacaagttatggtaaattcaaggagaaaatacatacaaaagaagataccgaggatcatagtcattatatatctagtggtcactatctgccacataatgaaacaatatttagcaaggctaagcctacaccaaacaacctgcttgtagttgcaaatccctggcttcagaaggctactatacaaaatagcagatcgaagcttactatttctaacagcagcaaggatattttgtttactaaatctatctctcaaatggcatagtttcctccagtaccagctagaatcagcaactaacatatactcccagaagtcatcccctttcaaatgaacatagttgatccacttgacccaaagcaggttgtgtttccccatcactgcccaaacatacttaggaaggacggccctattccaatttgctccatccaaactcaccatgggacttaagcaaacaaactttgtcccgagacgccatatggatattgctcctactttctttaacatcccaaagaaatccacgatagagcttttctacctcttttataatgctttgaggaagaataaagatgttcatctagttacggagacccaacaattaagtgtgcatttaactatttgtgttataaaattatatagaataaaataagaagaagatgaagagagaaagagaaactgaatgagaatttcttagttgtttattccaatggggtgaa

SEQ ID NO: 365896 - DNA, 525 bp, Cannabis indica
atttaaacctcaaaatatcaaaattaataataatctattgaaaattaaatattattaatttaaaatatgatatttaagttcaaatataattaaaataatattttattttaattttgtgtttgaaaattgggtaaatcccatgaaaatcggattgttggggtgagctggcagctaggctgcacgagcagccccaagaggctgcaaaatcccattacgcgcgcgcagaaggagtgccagccgaggaaccttggcggatgcagcatgtcctcgggcggatgtgcagggtgcataggggtctgaagcagcatcttgtgtctgaagacacgggttatcttaatcgtgcgcgcgcgtgatgtgccttgtccgaagctcctggtgcatgcgtgcaccaagcttcggcagtatgacaccctaatttccaaaattcataactttttcaatttttatcggaattgagttccgtaaaaacaaaaattgcttaatttttcacaaggaatccaatataaaatattttcaaaaatagaa

SEQ ID NO: 365897 - DNA, 560 bp, Cannabis indica
cgaaatgcttgtatacatggtggctttgtaccacagccggcagagatggtggaatggtgttataagctgctgggggattttcagggagggggatgtcgtcctcaagaggccatgcgcagggaggaaggagtttggaaggtgccgcgacatggggaggtgaagattaatgtcgatactggtgtgaagaaaggggctgggtactcgggactggggtgtgtcatccgtggtgagcaaggggatgtgctctttgcttcctcgactgctataccacgggaatactcgccgttacaattggagctgatggccattttgaaagggatacaagctgggctacagagacatataatgcattttagcatagaatcggactgtttggaagccattcaattaatccaaaaaaaggaagatggctgccgtgatgttgattgtttgctagaacagattagattgttgttgtctcatgatagtgtgattggtatctcttttgtatttcgtgagaccaataaagttgctcatgttttagccaattatgctttggttcacaaagttagtgccatgtg

SEQ ID NO: 365898 - DNA, 526 bp, Cannabis indica
gtcgggcaccgaaaatgcaaattatgaaatttcactatatgacataaaaatgcattcagaattcaaatataacatgataaataattatttaaatatctataaataattttcataattaaaacttaattaactactaatttccaaattaaactaagcggtctttacaactatccccccttaaaaggatttcgtccctgaaatctaacctgaacaactccggatattgagctctcatgtctgactctagctcccaggtggcttcctccacctcgttgtttctcaagagtaccttgaccaatgctatggtcttattccgaaggactttatcctttctatccaggatctgcactggctgttcttcataagtcatgtctggctgcagctcaaggctctcataactgagtatatgagagggatctgaaacgtattttctcaacatagagacatggaatacgttgtgaactgctgaaagagctggaggcaatgctaaccgatatgccacttgaccaaccttctcgagaatctc

SEQ ID NO: 365899 - DNA, 762 bp, Cannabis indica
acttgcaagtgtccatctattggcggaggcatcagatcctggttattctgaccttggttggccttgacatacttctgtaggtgcgggttgttcttcttgatcagaagttctatctcccgcttcaggttgtagcattcgttggtgtcgtggccgtagtctccatggaaccgacaaaattttgtcatgtccctcttgctggtatctttcttcatgggcccgggcttcttgtacggaattagcgactgagttgctatatacacactttctatatcctcagttaggatagtgaatgcagtgtgtttggcgcgatcacggggagtctgtccgggtttttcggtgaactttcccttcttcccgttcccttgcttgtggttgttgcctgaacgcttgccacttgagttgctggaatattggggaagctgggcggacgttccagtagaaggagccttcgttttgttcggcttttgctcaccttctgctcgctgaatggcttcttcgagcttgatgaaaccttcggcccggtcgaggaaatcactcattgagtcgaccggtccgttcttccttatgtccttccatagttcgccaaggacttcaatgcccccagtatcgcggataactttccatcctcggttacccgtgacaccttggtcgcttccgtcatgaatctgctgatgtatgcccggagtggctcgcctggtcgctgttttacttgaccaaatctcccagatgcaatgggagttggcgtgaggaagagaattgtgc

SEQ ID NO: 365900 - DNA, 689 bp, Cannabis indica
gtgtttttgttcatagattaatatataattttgggaaattctaccgtgcacccccttaaaattgatatattgatgcacccttatctgttttagcacctaaaataattttttagtctaatttttttttcatggtcatgtacgttatagttatttaagacctcctgcaaaattttaagaaatttggaaaagtttaacatgctgaacgcgtaactattttattttatacgtataaaatagacagtttgaacattgtttttatattgtgaattattctgaatttctcaaaattttgtaggttatcttaaaatagctataacgtacatgaatatataaaaaaaaatagactaaaaaattcttctggatgcagaaacaagtacaaaggtgaattattacatcccttttaaggggtgcattgtagaatcatcatataattttattggtacagttaggatttttaattattttttgcatcaagtatgaaattttaatttttattatttgcttgatcattgagttttgaagaaattaattgcatagtttgtttgattattgcatcaagttgaagtgttttgaataaatttttggtagagagagaaggggatcgagaggagagaggagacaggcaagatgatggtttattattattattattatattatataattttattagtttaaatattgaattaa

SEQ ID NO: 365901 - DNA, 1221 bp, Cannabis indica
ttaaaaagcactttttactaaaaaataacttcttaaggggcaattgttatacccaaaattcggctatcgtctcagtggaagacacgtgtcaagataaaaggaatatggatcgatgcaatcgcgttttatggaataactcattaattacgtaagtattaaagtacattcgcaacctgctaattgtaaaggcttatgcgagggaaaaaaaatatacaaattgttgcttagtagattagcgagaaatcatatgtcgctgatagtgaataacgaggcatcaagtactttatatctaggaagacgaaagtgacacatattgactgcgaaagcccttagtgtataatgtacaaactaagtgtgacagtctggtttgttcgagacctagtaagcgaggtgcctatctcgctatgggaaggcttcatgtaacttcacctagtaaacttcaaacatttttttcagtgaggctcacaatcctaacgagtcagaagttaacattctaatgagcctcaaagaactctttgtgaataagaaccccgatcatcagaagatgtgcatcgtcgacctcagaaggaaaaatggccccagctcgctattatgataactggaaccaagtttctatcgagacatccttggatacaaaaattaaagacgttttcaaatacacaagcattttgacctggtaaaagcgtgaaaatcacagctatatgattttcaaatcataaccgcatttacactacgtgatatgtaatcaaaccccatgatttaaggggaaaattgttgtaaaaagattacactaaactttgtaattaactgctcactatatgattataaatagtagcaagtaagatcgaaaaagggatagaaaaaatcatacaaaaaaggcactgagaaaaccattagaaatctgaataagattgagtcgtggactatgcagaattttaactgcaaaaccacgtaaaagatcctgtgtgttcatactttttattttacaacctttatttttctgtgcgagattgtcactgttaggctcaaatttggttaacaaaaatctgtgttaacatcttgtgatgatcgcggttcttatttacaaagagttctttgaaactcgttggaatgttaacttttgactcgtcaggattgtgagcctcactgagaaaatgtctgaagttaactgggtgaagttataggaagccttcccatagcgagataggcacctcgcttact

SEQ ID NO: 365902 - DNA, 851 bp, Cannabis indica
attatcaagatctgaacttgaattttctcttctttagtttggttggattcttcacaattgatgatgaagaagaagacgggatttcaaaatacaaagaaggaggctctcaattttctagttgtctgacaaagaatgaaaacttggttattagagttggatgagaatgagagtcatcttattccttttatagtattcaaccaggatttagaatttaaattatatggattaaaaaagataaaataatggctaaaaattacttaagtgaccggccatatatagtgggcctcactagttacaattttgttattttattcaacaatttatattttctttcattaataccatattttccaatttcaatcttataaatgtcaaaattatttatttaataattataattatttattaaataaaattattatttaacttatttattaattagatcttacaaagtctcttaattaacaaataaaccataaaacttcttttcttcataattaagccattccttagtgaaaattcataaaatcttatttagaattataattgattaattaaaatcaattaactgagtctacaagcagtattatctcaactagtgtggagaccatgagcctatatattcaaacttctaataagtatatctagaatttaccaagtaaattctctaatttattaatttctcttgactccctatagattcagaatgacactcttaattatatagaacgctttatatattttaagatatatatacgctattaattattcattggtataattcaaataattaaagatcctctaaagatgatctacatcaagtagggataaatttactgttctacccttca

SEQ ID NO: 365903 - DNA, 521 bp, Cannabis indica
ctgtggtgggcggatccatcattatcactcttcaatataaatcatttgtatccttagccttaaacgtattttatagtacgatatctaggttgattgtttttttaatctataaatcaatatttcagccctttaaggagaaaataaataaattaataaaattagagatctcaagttcaaaattcgagtataaaaaaaatgataaaaaattattttatataataaagtagataaaagattatgcaatcgaaaaaaaccactctaaatttatttcttgagagaattggatacatgatatgtgaaatttatgattgtatttttgcaaaactgcaaccttcaagacagatagcacacgttatcggttttttttttttataagtaaactgaatttattgaaagcttaaaccaagggcattttacaaaaatactgcatttggggtaattgttttcaattttactgccatacggcagaattaacatttatactgtcctcccctttttttttttcttttatactgtcaaca

SEQ ID NO: 365904 - DNA, 866 bp, Cannabis indica
acaatgctatgttaaaaaaagaactaaatagaataatctactactccaataataaatttatttacaattttataattacactaatgttatttttaatacattattaaataatatttcaaatataaatatttaattttttcaaacaaaaaatttgaaatctttaaaaataaaatatatttaaaatcttaaaaagactaaaattttaaataaaactatcaaaatacgtggctcggcacgtacattcacctagtatatatatatgtatatatatattctttagtttgtacagaaagaataagaaactatagattacaaattggaagaatgaattcttcattttcttcttctctcttccactgattatatttttctatatcttgatacatatcatgacttaatttctattttcgtggaccaagaaaatttataactaaaagaattactattatatatatataatgccacagctcatatatagctaggcgttttattttatctctctagcttttttatttttaatattaataataaaaataaaaaaaaaagttaaatagtatatgtatgactggaacccattttcttttgtgtggttcaattaatttatattaagcatgtgtttttattttgtgaagcatatacatataaggacacatataagcacaggatgcattttgttggcacttgcatgcaaatatatatatatatatatattgtatataaatatatatatactgtggcatgatttaaattatatatgtataacgtctatgtatatatatacattaatactgtgtatttgtgatttttttttttagagaaaaatgataattattgtatacgtgtacatactttcttttgctatatat

SEQ ID NO: 365905 - DNA, 680 bp, Cannabis indica
acatcactaaaaactcgagtacccatatcgagtacaaaagaagttttgggaatatccttgtcctgaaacctcaattggtgataactagatcgaaggtcaatctgggagaagatggtctttccctctaactgatcaaacaaatcatctatccttggcaaaggatatttgttctttattttcaatttgctcaattctcgataatcaatgcacatatgtaatgacccgtccttcttcttaacaaacaaaagtagtgcacccaaggagaggtacttggcctcgtgaatcgtagattaagtaggttctgtaattggactttcaattccttcaattttgttagcgccattttatacggggcctttgaaactagctaagcccctagtactaattcaatttcgaggagaatctctctctttggtggtaatcctggtaactcttctaggaatacatctggaaattcacatactactcgaaccttttctggtccctcaagtatatctttcgtggtatccaacacactagcccggtatcccatacatccttctcgcaattattccctggtcttaagtgccgatatcaatggaacacgagatccctgctttcttataaaagcaaattagatctcatcctctggttcaaaagtcattatctttctcttacaatctatagtagcattgtactta

SEQ ID NO: 365906 - DNA, 1117 bp, Cannabis indica
tgcttcattgagagctgaagaaagcttctgcaaatatactttacatcacaacaatgttggagactaaaagcacttgtcaacctcgccctctagaagatgctcaagatccaaatgaggaagacgttacctcaagagcagctgagggctccgaggaagaagaaggaattcttaatgatgactatgagggaaacctcgatgagtatgcctacgatgaaggtagctacttagagtttgtgcttctgaggcaaaaagctatcgatcacgaagctgagatcgaagcccaaaaagcacaaaaccaaaaaatgcaagaggcaatgctagccatgcaaaaagccatggaggcagctggcatccacgtgcatcccaaggcaatgactgctggacttggcaaggagccagaagaatcctcgcctagtacccaacagcaaaagtctagggaacctagccccataaggtatcccgctgaagggaaccaaaagaaaaatcctacctctacccctgggagaaagaaaaaggcgcaggatccgcgaaaggtccgctcagatttcccgtaaagggaaaggtccgcagaggggcaaactccaaaaagggagtcttggccctcaggatcgagaggatcgaaagagcgtttccgtgcaccaggagcccggaggtagagggagaagaggacagagatgtcctcccgtcgatttgagaaatcaaatcaatgggaatcaaggtgacctccgggatcaccttgaccaaaagaaatacggacctgcggtctccacgggaacgttaaatgaagggatcatggcggaactcgccatactccgaaaagatatcgcccgagtctcccggagacagaaaggggacgactccgactcagactgtgaggaccgggagccgtgtgctaagcacatcctggaagcagagctccccaagaactttaagatgcccgaaatggcagcttatactgggaactccgatccaagcgaccacttgtcacggtttaaccgtgtcatgacggtcatgagagtcagcaatgacgcaaaatgtctgtgcttcccgcttactctaagtgggtccgcggaggaatggttcaagaagctggaaccaggatccgtgggctgttgga

SEQ ID NO: 365907 - DNA, 492 bp, Cannabis indica
aaagctatggccaagatacatggaaccgttaaacatcaatatgctattctgcatgattattgtgcacaattagtgaaacttaatcttggtagcacaactttcatcagaacaagtttagtggatgatgtaaggtatttcgaaagggtttacatgaaccttgcagcatgtaaatctggttccaagttctgtaggcccatcatcgggttagatgggtgctttttgaaagggtattgcaggggtatgttgcttgtagccattggtatagatgcaaacaacaacatgtttcctcttgcatatgctgttgttgaaaaggaaaacactgatagttggacttggtttgtgcaactactgaaagaggacctagatgtacaagacacaagattgttcactttcatttcagacaggcagaaggggctggaaagggctgtagcagaaatttatgaaggttctgaaatacgtttttgtgttaggcatcttatgccaacttcaaga

SEQ ID NO: 365908 - DNA, 527 bp, Cannabis indica
tcaaaatggtctccctaagatcagggatatctgcaacaactagtcttcccatatggtataaatactattcactattaactgtccacccatctagttgctcaccatcctggatatggttccaaataagtcttagcttttcatcttgccactgacgttgcataacttgttgaagtagcactggtgtagccactatgttagagatacaagctactccttccccttcatagtattgcaagttattatcacccattgtgattgtccttttccagtcctcaagagcaaaatatgccaaagtgccatgaggctttctacttagtgaatcagctactacattagctttcccaggatgatacagcaaagtgaaatcatagtcctccatatactcaatccatcttctttgcctcaagttcaagtccctttgagtaaaaagatactccaagctcttatgatctaagtataactcaaactttacgccatataaatacatctctaaatttcaagcgaagattaccgcagcaagttctagg

SEQ ID NO: 365909 - DNA, 810 bp, Cannabis indica
aatatttgcattagttggataataagatctttcttttctttttatactaattcacttggggttaggattgaattatttagaataaaaaaatgataaaaatagcaaaaatgacacctaatggccggccatgaagagggcccatcactagttagattttcgccacttttctcaactatttatctatttttacaaataccactttttgtaatttcaatcctatgaatgccaaaactatttatttaataattaaaatagttatcaaataaaatcatcatttataatatttattaattagacttcacaaagtctcttataataaataaaccctaaaatcttatttcttcacaatcacgccatatcttagtaaaaattcataaactagacatagtctaattttagaattataatggattaattaaaatcaattaattgattcttacaagcagtttgtctcagctagtatggggacaatgggcctatataatcgagcttcaaataagaagatctagaatttaccaagtaaattctctaacttattacttcgttcttgcacgactatatatttggaattacactctcaattatatagaacgctcatgttccatgatatagatacgctataagttatctatttgttataatcctaataatcaatgatcctctatagatgattttgttagtttttgtgccctaaataaaacccattttaatataatcagatttattagttaataaagatcagaaatatcattttatgttgcatcgttcacataatttatttaatgattatatttaatatataaattctat

SEQ ID NO: 365910 - DNA, 1108 bp, Cannabis indica
atcaccactattcctaccatatccaggagtatgaagagcgggggttccacaaacacttggagtctcttgggactcctaaagaaatgtcactgcaccttcggctcgtagagccttgtcaaccattttagcataagttgttgtttcactcgtagtaattaccaaatcgtgtctaatatttgcatttagacccgccagctacttctctttcttactgaagtttgtgggcactatacccaaagccaacttggctagacgatttaacttcattgtgtactccattactgacataccattactctgaaccagattagtaaattctttccgctttacactacagaccacctcattataatacatggcattgaacagatcccaaaattcttcccagatcatgatagtgatgcctcaggtgacagacactaactccaaccacacgagcgcatcctcctaaaactgaaaagtggcacaagttactcgatcattcttgacaactcccatgaaattcaagattctttcaatcaccgtgagccactactcgaccttcataacattcgggcctcccaaaaaaactagaggtgcttacttacaaaatatttcaaatagtagctcgatatggtttccagtaacaggttgttctgctggtaccgctggaaccacaacggcctaaacttgtgggggtggcgctataggaggaccctactatctcagcatcaaaatctcttcgtcttgttggcgaatttgagcttgcatttccacaaatatctgctcctaatctgcaggagcttgaggtggcttttcatgtctaccaccctgaaaccttccacggcctatgccgcgtccacaaggatttaagggaattcaatttccctgaccacccccagtctcgaccttgttacctcgactccttgtatttgttgtggcatccatttaataggacttagcttgcaaacccataagtcaagtggatcaagcagcgatcacataaactctatataccgtacttatggattttaagtgtaaagtccgcttagttaatttggaaattatcagctaattgtgattaattatgaaattatttatagctatttaaataatttatgatactgtt

SEQ ID NO: 365911 - DNA, 1517 bp, Cannabis indica
tgtttatttattttgcttaattttaattagttttagtgttattttctatttagtaatctaacctttaagttttgtaaatattgatattgttgggtgtgtttttccaattaactgtgcttattttgttgaaaaaggaggaattaaattgataggtaaaagaaaaagaagcaaggaagaaaaggagcacaagctgaaactgggctgattgctgaagcaatgctaaagcaatgctgaagtgaattcagcatcctggcagtgacgtggaaacacgaatttcacttatccacctcagcaacttcggtccagtcactcaaattgcaccagccagctgacgtggaagaaaggggtctaaccctagtgggccaaagtggaaaagtttgggcttctattttggggtatgaagtttgtaccctaaaaacccaacaacaaaaagaaaagaaaaaggaagtacaccattatcatcttcatcatctcgtacttgagcagctgcatttttctgtggaggagctttaattgcagcaggaagtacaacaaagaagaaagaagaggggaccaagcctagtgtttgacttttcttttaccctttcttaatagtcttctttattttcctcttttattgttgtttgtacttagtattaaaaacttcttgagattgtaaatttgggcagcagccatggatgaattgtttttagcttggattttatcttcttacttgaatatgagctaaacttttgaggcttgaatgactatgaacttctaagttgggtatgattaaattttaagcttactttagcatttgtttgcctttgttcattcaagtgagtttcattttaattgattgttgtttcttggccatgaataacaatttgctaagctagatcttgtaccggaagggctagatctagtagttcaacttgaatgaagcaagtgaaaacctagatttaggcttttctttgtaagtgggataggaatatttcatttaccttgcataacttaccaaattaatgtttgaatagtgttctgcttgctggtttgatataggaatatattgagctaaatggtagaattaaagttgtgagtgttggaaaattctcacaagcctagaggaatttgttgttatctctgtgcagaatgctagagtaatgctgaaccaatgctgtactgactgaaaaaaaacctgactagaaggaattagttattcaagccatttttgccatattaaaatttttatcttgcaaccaatttttcttagcagcagtagtttaattctagcaagtttaattcttgtcatttttaattttgaatcattactcaaccatttgcatattatttctttttattttaagttgtaattagttggtttttaaatatatttttgtttgcaatccctgtggagacgatcttacttatcactttattacttgtgtgactgcgtatacttgcgtatataattttcacaacaaaatgtgtttttttttatttggtatttattaagataacaatgtaactggtttttt

SEQ ID NO: 365912 - DNA, 1248 bp, Cannabis indica
ggcaccctcacatttggacagataaccttagaaaggttagagtcctccactgattggtgcggcaggatgagcttggccttccggcaattctccgtcgtgaccaggcccccgacgtcaaggtccgcccggtcataagttgcaaagacctgggccctccggagaaagacctgagtaggcgcggtccgctcataggggggaatcctgacccactctgtgagaagctccgggtgctccactgctcggaacccggaggagaagaagaaacggtggcgatactccttaacatgagtttgcctattataagggaccaccccatcattggaagggtgggcccggaatccgtaaaaaccatctttaaatttgtcccccttcttggggacagaaacaagttcataaaaatacaaaatctccgccggactgggagagccccatccccgggcggagtaaaaaataaataagcctgagagcaggcggtatgcttgaggaatcagttggtatggcgcaaggccgacaaaaactaaaaaattaataaagtagtcttgaagaggaagcatggccccggccatcaggtgcgtctggctccaagccccgaagccgccatagttgtggttgggcgtctccgcatctcggggcggccggtgatacgtcccggatgttgagggtttgattccagccacctccacgatgttctccagctggtgggggcaggttagggtggaatgaagctcagccgcctcccatcctgtggcccgagacttatacccctcctgggcaacgggacccagtgagacgtcttcaagggtagccagacgcttaccactcttcttggacgactttgaaccggacgcagacatgttttgattctgaaaaaagagttaagattccagcagttaggccccataccaaaccctaaaccaagaaaaagggaatgggggtcccctaaccgctggcaagaggccccctccggacatctgtcaatcagaaaaccctagaaggatttcctggacaaaaatcgggtgcaaagaactcacagaagacaatatcgcgcataaaagaaaaagaaagggcagaaaatcgagaaaaacaaagtcttctccatgccctagaaaggccaatacacaaaaagtgtatggtcctttgtaaaaataacaacaaacacgtgacaagagtaaccctaacaccagaaatggtgaatttagacctgttacgtgaaaaacccaaaagaatgcattcccagaaacttcaaat

SEQ ID NO: 365913 - DNA, 540 bp, Cannabis indica
ttacacttggagtaagtgttatgttttttccaggacattagtaaagtatattagtttcgaatgtatggagtatacattggaatggacaagttgtctttcaacaactagctcaacctcccatcctatcaaaacctctatacaatgaagaactagaatatacctagcagttatagaatttattgtaagtgtagtccttatttgagaagtagatggagttcaacatctagtatactatgttagcaagaggcttatcgatcccaaaaagtcgatactctctacttaaaaagttaacatattgcctgctactagcttcaagaaaattaaggccctactttcaagctcaccccatcaaattatttttttaaataatatttaagttctattttctattgtatttttattgacatgatatataattttattagcctcctatatatttttatttgttgttattatatatatttcgattgtaaggtatacattttttgttatatggtatataatatatcattttattttaaatcatgcatgtttaatttt

SEQ ID NO: 365914 - DNA, 524 bp, Cannabis indica
tcatttgcggcgatagagctcagccatacgactcaatcctgtggacggaaatggtgtgtgggagtcgtcggtggttgtggttgcagttgaggtaaaagtctttcgcatgatcaatttatccttaaaggtcagcatttacatttaaattaaaaagaaatccccaaaattatcaacaaagagaaaatgttgagactttttacactttcgtgaaaatacaagtgtaccaaatgaaatttaaaagagaaaaatagatcatattgaccatggaaagaggcagtgaggttaataatagttttagcaaccggaatgatttctggagcgataccatctccatggagcaaagtgatgggaggagactgcggagtcaaagcacataatcctacttgacggcttgggagagtagtcgtcttgcgttagaacgtcgtattaggtcgtattgtattgtaaagtattatattgaattgaattatatatcatagttttatataatactatgttaaactttaatttatactaaaatatta

SEQ ID NO: 365915 - DNA, 554 bp, Cannabis indica
gtttgcagaaatgcaagccagaaaagaggagcaagataatgaaattaagagattgagatagcaaggtgcttctgctgtggttgtgccagaatttccagtggcacctgcccctgttgctcaggccgaattagtagtagcggggaatagaatggaactcctatatgaaaggttccggaagcaggcccctccggtttttccgcgaggtccgaacgtcatgaaagccgagtagtggctaacagtgattatgagaatattgaattttatggatgtcaccgggaatgaaagggtggtgtgtgccacctttcagtttcaagaggatgtgttggtctggtgggacatggtgtcccagatacatgatgtcaccacaatgacctgggaaaagttcgaggaacttttcaacgcgaagtactacaatgaggttgttagaagtgccaagaggaaagagttttcccacctgacccagaaggaaaatatgagtgtgacaaagtacactacgcagtttgatctgttggcgaggttggcctcgagaattgtgccaaccgatttcagtaaga

SEQ ID NO: 365916 - DNA, 572 bp, Cannabis indica
tggaaaagatatcataaacttatatcattttctaagtcaatgtcacttagttgatcatagatcatttgatctccatcttgagatgattgagctcttgcttaattgtatctcatgggttctttgacttattcgttaccaacttacgtgtaggactagcccatgcttacatcttgggaactcagtagtggaattgagtggagtgttaatcatagatatggacatcttagcctctatgtttattagaagtgaaacgatagttttctttgagtttggataaaggcgttaaatggttgaacgttcatttcaataactatattagtttcgcaaaatatcatttacaagtagctaagtgttgccatacaagttatagaatataaagctcaatttcataaaagcaactcataatgaaatccttttaaagagaaaaatttaaattaatactttcaaaaatgtcacaatgaattatctacaataatatgaaatagggaataaaattctcaaactaaaattgaaactgaattgttcgagaaataaaacaactaattcaaaaataataaatcaagcttcatctt

SEQ ID NO: 365917 - DNA, 864 bp, Cannabis indica
taattttttaaacatgcaaagcttgaaagtgtgtattaaagttgaaaaagatgcgttaaacgtggattactaaagttaaaacacaagttaataaattcagattatctacataataaataataaataaataaataaatggttttttgagtttttaattatatatactacatatattagggacatatacatcaaatataatttttataattttttacaattttacgtttaattttttatatttttacggtgttttataataataatacgaaaataacaagaaaataacatcaaaacaataacaaaaaattaacaacaaattaacaagagtacaacacaaaaatatcatactttttgtaaataaaattataaaaatcgtaaaaatatttaaaattgagtacaactgtatttttgttattatttttatgtatttgtgaaataattcgataaattgataattacctctttttattatacattcaccaaaaatagatgtaaaataaatttaattgaaatataacatgttttataattgaacggctcactataccctcactataagacatgttgtttacctaataaagcatgtcgtttatctaataaaatatgttatttattgtattttaggcatgctgtttacctaataagacgtgtcgtttatcttattttagggtagtaatttttgttggccttatttaagactgtcgtttacattattttaggcacattatttaccttattttaagacatgtttaccgaatattgcatgtcgtttacttaaattaatgcatgttttacctaataaagcatgttggttactttattatagggtagtatttttgtttaccttatttaaggcacgtcgtt

SEQ ID NO: 365918 - DNA, 996 bp, Cannabis indica
tggatgtaatccattatccttttttgaccgatgtgatttatcataaagtagccgtcactaggctcattaatcataacgtagtagctgcagaagggggcttacgccgtcagactttaatacttacggcagttctaatacgcctcctcccatgcggcattaaatgtgaggtgactgtttagataggatttgacgtctcccggaggtgcttcgttatagccttgctctccggagtgtgtgaaaccttcatgccttctccgagaggcatgttaagtgctgatccttttaattaaggggacttagtcgaatcatctcaaagtcttgcttcttcaatccacgtgtcacaacccggttggtccacgtatttggacaaaataaggggcaacaattgtatatcgtcttcttcttccaccatcatcagcccttcttcttcctttttcaatatgcagcagaaaataaaaaacaataacccatagaaatcacattaataaataatacccagaaaacaaaaactcacaaactaaattctaacattactcaaatccatacctagtcgttcatgttcataatgcaacacaaatagaaattggacacactgccaaataaatccaaaaaattagttcatatggagtttcgattgttggtacactttcagctcatatcccgaccgccgttggatctccaaagaagtttcaggtactctcttcgtagcaccagatctgattaagcggacgagtttaagtgcgacataaagctgcgaaagataagaaatataatttagatattaaagcaattagatctgacaaaaacaataagaaaactcattcaaaatattttgcaaaaatgcataaccaaatctgaagcacccagattccggtgatctcctctctcccgtctttcgccagcacaaaccatcatcgagccctcgcgagccctcgtgagcccaaccttagaagtcctcattgccgcactctaggatgattaaaatgagatgtattt

SEQ ID NO: 365919 - DNA, 579 bp, Cannabis indica
gaaaaatgtcagaaaagacttactcgtgaaagctctttcaagactcttcccataaccatctccaatgataagccattatctgccccagccaactactcattcacctctgggaccgaccggctcacgtagtgattgagcatgtctctgcctcttttggtctccatgttcagtattaagggtggggcagagctttaactaaattaaaccagcttatgattagctcgggtccacctttcgcctgctcagatccatccgaactccctcctcgagaacccttcgacttagtaacttttgaggcaggagggtccacggtaggttgttcttcacagagatcaaacacctcttcagctaatgccttctctttggatggagtctcaccgcccttacactacttggctagagaggacaaccccgagcttccccccactctcttctttaatgcctcaatcaattttcgagacatttatgcacggaataaaaacaatacaatcagaagaaggtataaaatatatgcaggcatgaaaatcaagaaaaataaatgcacgatgaagtattttgcacgctagcaggagcatttgc

SEQ ID NO: 365920 - DNA, 1099 bp, Cannabis indica
aaacttgacatgcacagtatgagttgatgaacagagttagaaaataaaggattacccttgaactgaagatgagagtgaattaaccaatttaggaagagattctagaagtgcaccctgttacaagttaaacagatagggaataagacaaagcttctaagctttttagctggtctgtttgttaggatttggaataagattaatgaagttccatctcaaaaccaattggctatggaaggagtagctcattcatcttatatatggtaatttatttccacacattaacaatgtgggactaactctaatacactctcctcacgtttgggcctggaaagtatgggtataatgaacaacctttaagagaccacagggccaaacgtgacatttgaaagaatcccacaaggccaaatattgagaaatttgtgagtgtacacgttgggaaatttgtgaacttttgaaacaagtcaaagatcccaacactaggaactggcacacattggccgaaaggtcccaaatagagattaaaggggagacagcgaaagttttaaggtttagctcgtcttattggaccagcgacactttgggcacacaacgaatcacaaacgactcttttatggctcacctttttggaccggcaacactttaggctcacaacggatcacaaacagctctgataccatgttagaatttgagataagatcaatgaggttccatctaaacaccacttggcaatgagagtatagcccattcatcttatatatagtaatttatttccacacattaataatgtgagacttaggggtgtgcataaattgatccaatccaatgagaaccgaccgccaaacattggatatccaattgtgattggatataattggatgttatttttaaatatccaattggatcggatcagatgatggatagcgtgtctaaaaatccaatacatccaacatctaatcgaactaattagtattttcatttagtttggatgagtaattacattttatattgttatacataaaatcaatatgtatatatgaaaattagcattaaaattttactttttttttcttggattgaatggatctagtccgatccaata

SEQ ID NO: 365921 - DNA, 740 bp, Cannabis indica
ttttcttccaggattcaaaagataaaattgccctcactttgtacggaacctcgccgcagccatgggttccctcgttgcggcgagtgctgacttggccgcggcggtggagcagctagccgcggctactgaatccgtctcgagagtacctctctaccaaatcttggccgcggccgtaaataaatctactgcggccagaagtgaaccaaatcctgatttttgcatttttcttggctcaacttgtcttttgttgcacttttgaagccttgaacgtccaacagctacgagaaacctgaaaacatagaaaacaagcgtaattctgtcctaaaacatcgaaaaacgactctaattgtgacatgaaacataggctaaaaatagcctaacatttggtcgactgtcccctgaccagtagtagtttgggtagtggcatgagtagtggttgcaccaccattacaggacgtatgggtcgttctccattatttttagcaagattgcttgctgatggaacttgctgggaattatccatctcctcatcgggtcgttcttgagatcttttggtaagcaccatttttcccagtgaataacttcaagattttggtttaaactctcaatgaaagtaccaaaatattgattggatttttaaccaaccggcgcggagttgtaataaatgagatttaaaccaaaaaacaaactataaatgaaaataatgacaccaaaatttaaagaggttcgaccccagatgt

SEQ ID NO: 365922 - DNA, 1243 bp, Cannabis indica
gaccaactgagaagaagtaggaggaggggaagcaccaggactatgggctccagcaagagtggccaagatttcgtccatggatacggctgctgcaacaagagaaaaggttaagtgttagaacacctgtgaaaacagcatacacttaacaaaaaggcaagcaagctagtcctaccctgactccctaattcagccctagcaaagtcccgaatcttaacactggctgcatcatccccgtgatagctgtccgagggacagaaccagctagaagatagataggctgaagagtccaagggaacgggcactggaggtccaaaatccatccgggaccgacctaaataatcgcctaagtgggagaaataaaacttcttggcatgattaccccactgagtggaaggcatcctaaacctatggagacgttcatcgaaccctataggcctaaggctagcatactcacggacggaagggacataatgtatcattaaaggagacttaccagaacccgaagtgctggcatcagcagcccccgtattcggtaccgggaccacgggctttggtctgggggtcctctgctccaccggagccccaatgcgaagggcccttccggcggtcacctgggccttattataagcctgctcctcttctctcttgaagaggtacttctggtacttatcctctgccgtggcaatgatgtcatcccggaataccttctctgcggccggagccctcgcattaggacaaacgactttagaaaggttggagtcgtccatcgattgattccccaagatcagcttggccttccgacagtgctctgtcgtgaccaactccccgatgtcgagggccttcttgtcatatgtggcgaaggtcttagcccgttggagaaaaagctgagtaggttcagtccgcgcataaggagggatcctaacccactccgtgagaagctctggatgctccacaacctggaacccggaggagaagaagaagcggtgacggtattccttcacatgcttctggtggttaaaagggaccgggccctcattcaaaggatgggcccggagaccataaaaactgtccttaaacttatctccctttttagggatggaaacgagttcataaaaatacagaatctctgccggactgggagagccctagctccgggcagagtagaaaataaataagcctgaggaatgagttggtttggcgcaaggccgacaaatacaaggaaatttataaagtaatcttgaag

SEQ ID NO: 365923 - DNA, 535 bp, Cannabis indica
ttttttttaaatatgatagtttttatattttcacaattctttgttatttgctaaatgctgaataatttttgaattgcgtatgaatttatattgaaccttcatgctgtaatttgttattgattattgtagtataaattttgagtcttcattgttggtctaacttaattttttgttttaacgagacaaatcatttaaagattgtcatccattacaaacaaaatagttttagatctcaacaaataaatatttgcaaatgcgacatctagttgtacatccaaagatgacaacttagactagtgtttacaatatgaaacaatgaaaaaatttataaaataagaataactttgattctcacctaaacaggacatcgctggattcttattttaatcgaaattatcttttatttttcctcttcgctttttcattacaaaattgcttcgatagtatatcattggataagaaggattataaatcatttgcttatgatgtcatcctatttttttttctatgaaattgaatggcgtagatgactata

SEQ ID NO: 365924 - DNA, 179 bp, Cannabis indica
atgacacataggatcgagtagcacccgaatcaaataaaaaaccgttgattagaagctgacttgaaactactgaagggctggcagcagcatcagcctgagttatagcgtgcaggtgcaggtttggcctcagactttggttcctctttcttcaactgaggacagtctttcttgagaggtcc

SEQ ID NO: 365925 - DNA, 1153 bp, Cannabis indica
agtgacttttccggtgactgtgattttttcagcgactgtgattttttcagcgacttttccgacgacactaatttttggtgacttttccggcaaaacttattgttgttttacaaatatgagatttccactttttttttttaacacaaatatgacataaaaaatccatataaatagtaaaaaaaaaaaaaaccccataaccttatagtgttatttatttatgtcataaaaaaaaaaaactatactctcaattcacatatttataaaatttttccaaaataaaatcaagcttacggatttcggtaggaaattacactctataccctttttatattgtcctcttttatttttaccctctttcttaaagtctatcatttttacctattttttaaatattgtaccaattttgtccctgtcacttcaagatactttccatgtgactcttatgtcagggtattttgcgtacaatacatataaaaagaagtatgtttcaattaaatataaaattagaggtaagtttgattaattgattaataaaagtggtatttttcataaagggtgcgtttgggatagcttttaagaaagctagaagcacttttttaaaaagctatcattcaaaatgtgtttggtaaaattagaaaactagcttttttaagaatttaagaaaaaatttcagctttttgcaaaagttggccaacaccaactttgagaaattagcttatacgggaagctattttgttggtttaatgaatatttcacttgacaaaattaccctcattctaattataaaattcttttttaccattttattttaagattctcttctccccaatatatctttctctatcatttttatgtaatagatgatatttatgtaatttattttattattattattattagtacaagtctaactaattattttattatatatattttttaaaaaatattataaaaaaaattattgtaatttgtaataaaataaaaataattataaatatatcaatatgtatgaatttatttaaacaaattagataacaaatatcatacttatttgtaattgtatattaaatagctattcaatcatctagcttatcaaatactttatatacaattttttcaacttcatagttattttaaaattatatttactaaa

SEQ ID NO: 365926 - DNA, 584 bp, Cannabis indica
atcagattgtaatgagttttatttagggcataaaacccaacaggaacagttcatgatctcagagatgatctgaacagaaggagagggctagacgagcagcatgtcgcgccagtcgttcatcccagagcccgtgctcaaaatctcgctcaaagagatgtcgacgtgactctggtcggccaagaggctgaacaagttaatgtgcaggcacatttggatgaactaaaaaatatgttccaaggcctgaccgatcagaagaacaatgacctcgagttggaccgagcacgtggatcccctttctctccagagatcaatatcctaaagttgcctcacaagtttaagatgccaacctggaagatgtatattggaaaggaagatcccctatcccatctcaagtattttgaaatacaaatggaactacaaggagcacgaggagatgtatgttgtagagtttctcctgccaccctctcaaaagccgcccagcagtggtatttcaagttgacacccagaaggttcaactcatggaaggctttctcctcagaatttcatacacaattctcttcttcacgccaactcccgttgcactt

SEQ ID NO: 365927 - DNA, 655 bp, Cannabis indica
gggggtaaaaaggagctccctcccttaagcactcttccatccgcctctcgttagctaaacgctccctctccaagtcctcatcccaggcccgccggttccgagcttgcatccgacggttatcccggcgtcgctcagcacgcaggcgaagggcatggaattcagcaggcaccctttgtggcagcagatatattacgtccctcattctcaaagaaattctgcaaccactcttcatcagaagatgaagacgcatcgttgcgcctagccctgtaagccctcatcatcctaccaacaatagcttcgccactgggccggtagtaacgtgaaaaaatcgagggacttgggggggatcgatccccgacgtcagagtggaactcatctccgcttcaagattcaggaagaggagaacctgggggatttgacatttctaaggtaggaaaaaggataaaaaaacgtattcgtataaaaaagaaacttggaagctacgctaaaaagacaccatgaacaaagggaagtgttggtttaaatagaacacaaaaggtggccaaggaagggtaagaggaaggcggaaaggtaaatctacctgcatataaggcattaaatggcaataaatgcacattcccaggtgtcaaaacgtttcaaaaaaaaaataaataaa

SEQ ID NO: 365928 - DNA, 742 bp, Cannabis indica
  modified_base (46)..(46): a, c, t, g, unknown or other
atatataaaaaaaaaaaattaacataaacatgtaaaaaaaaaattntaaaaaattgatattttacgaattgtcactaaatttttatttcagttttattgtaaataagcatgaaaaagagattaatatagtacaaatagaataatcatctgataaatgagaacggactcaatggcatatggttcctctctgaagtggtgttggaattttggttaaaattagagacaaaaagaaatggcataaaaaaagtatgttgaaaatgtgagttggtggggttgtaagaaatgtaataatgtcatgttatgcattattctaaagctaactttattcttttcttggcgtatgtatatccatatagtacttaaacataacccctttgactgtgtattatattggagaggagtatttaccaaatttgatccctactattttgtttatggtgcatttgatctcattaaatgtggatattaatttttaaattcaatcaaattcacacaatagcttaaatttaatctagtccaatctataaaagtgtaaattagatcggttactttaaattagttattttttaatattaagttatttaatattcattaaaaaatattttttttacataattaataataaaataaaataaattattattgtttgatatctccgataaaaaattaaaataaataaaataatagataacgaagttaaaaaaaaattatatgtagaaaaaatatttaattttgttttaaa

SEQ ID NO: 365929 - DNA, 269 bp, Cannabis indica
ttcttcacagtcttacacactatgattgagtaccgcttgatgtgtgtgggcacttactctatcactatagggttcgaaatattttagagagaaagagagatgaaggattcgaatggcatagagaagatggctaaaatttttgactgaaggcaagtgtttttatcatcttttaagttgtggccatcactatctatttataggaatctaactagttccaataagcagatctagaatttaccaagtaaattctctaactattaattcctcgt

SEQ ID NO: 365930 - DNA, 658 bp, Cannabis indica
gttattattatttatttatttaagaacggccattctttcaagatagtgaaggaaatttcttcaaaaaaatattgtgaaggaaactattctatgctgaatactaattgaaggaatcagaaaaatatatttttttctatggggaataaatatctaacggttaattttaaactgcttaaacacataagagagggaagaaaaactgcataaataaatagattaatttaataattatattcctatttgaaatataaaattaagaaaaaaaaactacaataacaaaatttaaaattaaatatgtttcaaaataaatattaaaattaaacatttaacccatacaaaaaaaaaatgcaaattgacataataaaaagaaattatcattaatgataatcaataaattaattaaatatgctttttaaaaaagaatgacaatgttgtgattaaaaaagtgtattaaagtaagtcattaatgctaaatggtaataatgtaaataaaaggtgtatttattgtatataaaatttgacaaaatactatatctttttttaaattgtctaacttttagaccatatttaatggaagacataaatgtgttaaatttagcacaaaaaataagtttgtattatatttgaccaactgtttataattgttctccaatacaca

SEQ ID NO: 365931 - DNA, 649 bp, Cannabis indica
ctatagtgatttgagtagtattacctctcagtattaatacaactaaaaggggagtaggtcattactcgctaactaagggggccaaacctctataaaatcatgtgttcatttactttgttgttattattatgtaacacgtggcaagcattagtgttaaatacgaatccactgtcagttggccaaatctgtggtcaacaatttagtgctttcattaagagcgagttaatattgtatctgatcaaatgccatggttaacatgaggagaactccaggtagagcctctacctcattgggtctcccttaagatcctttgactacaaatcctgatgttcatgttctattcacgattggaatttccatgaaccctgcagatgtggtcaatctcgtcatcttagcaagtaccacgaatctggccattacagctggccaggtcggcataaacatctcagtggatctgaacaatcagcccttgcctcccaagaaagaccctccacaagcatctcccactgaaggaaggacccacatggagcagcccaaggaacaacaactagacctcgtccctaaaactatgctggagaaatagggctaggaattggcaagcctgctattggcgagccccatgtagacttgggagaagatctcgagttag

SEQ ID NO: 365932 - DNA, 1117 bp, Cannabis indica
aaaggggttggcaaatcaacgttggtattagaacttttgccagcacaaaatgaaaagcgctggcaaaaatgacttttcctagcgcataaatgcgctggtgaaagttagattttagccactgtaaatgtgcgctggtaaaactttgacctttttgcccgcacagtttgcgaaatgtgctggtaaaattacttttaccagcgcagtagcgaactgtgctggtaaaagtgacatttcttgtagtgaactctaataatttttttattgtagtgatattatctagggttggagtggctttaataagggctttgttatgataaatccaacacgcaagtatacgtatcgttttaacaagtaatactcaggtaagtgagatcgttcccaagaggactgtagttaagtaccaatcaattgaattcttgtttctatttggtagaatcaataataaggttgaataattaaataactaaaaattgaaaagcaggaaaataataataaaaagtgtaattaattagggatgagtatttaggaatatgaatcctgttagtttagtttctcaattgttaatattaattattaattctatcccttttggtgatgacagattatcaaattaaccataactcttctcagatcaatataatgtcctaaatcatatattatctacttgccactactactataaacaaaggcttttaatcccaatttttaaggccttttatccctggttttcgctaaaataaaaatcaggatatatgtcagtgggataaaaagtttttaaaaaccgagataaaatggggactttttatcccggtcatttcataaaaactgggataaaaggggaactttttatcccggtttttatgaaataaccgggattaaaagtaaaaaataaaataaaaaaataaacccaaaaaaattatattagttccttgaaacaatttttacaattagattccaaatatttacatcaaaatatacaaattaatacaccatcaagggtcaacacaaaaaaaaaaaaaaaaaaaacaaaaaaaaaaaaacctaaacaatacaaggaccaccaatgacaagactcgtgcaccacgaaacgccatgaacctagaagcaccgtgaccga

SEQ ID NO: 365933 - DNA, 1213 bp, Cannabis indica
ggttactctaaattctaaagttttaactttattaatatccaaaaacaataaaaatcaacaactataaaatttaaatcaaccaccattaatttgtaaagtctaaagtttaaataaaataatttaaacattaaacataatttatataatatatattatatatattaaaagttataaattagtttatttgagttatattggaggttgaaataatatcaaaaaatatacataaagtgctatttttttttaacatttttatagtgttctataaaaacaataaaaaattacatgatcggaaaacaacatctaaataatataaaataacaaaaattaacaataaaataacaagaatacaatatataaaatatcatgaaaccatgtaaaaatacgatatttttaaattaaataatgtaaaaatatttaaaaaatccgtacaactataaattataattttttttagttatttaaatgtatttctaaaataattccaattccaaataatcaactttaaattttcgttaggttattactagttatattttgagctagtcatctcaatttgcttgtttgaagggatttgtaatttcttttttaacatttctataatttaaaaaattatttttattttgtaattgtactgagctgttattgataactgcaccaagttagaacccaaatatatatatttttattaataaaatagacattatatacaagtattcctattgtattgtaatgtcattgttattaaaagaaaaagtcatcatcttattagttaagacacataccaaattaaaaaggcaatcgtattggactttttgggggtccctattcaaaccaccattatcttgaagaagacgattaatgtagttcttttgaaaatgatagtatatatatatatatatattaattatttgtgattctactctacactaatgtgaaatcactatatgtagggacaaatttttactttgtttctttaaagatgaaaattggattaaaaaattcatttgcagatcataaaagaaagaaaatgtacaagaaatttattgggatgagtaaaatcttgacgaatgactatttgcaatgaaattatcactttcaaggtagtcaaattgttgcaataaatctaactcaattaatgtattatatatattatttgcagtgtaaatagttaaatttaaattttaaatttcgattgtagataaatatttaa

SEQ ID NO: 365934 - DNA, 979 bp, Cannabis indica
tctggatcatttccaattccaatataggattataataaatacacaacatagcctttgtaaatctttggtttaacaagtctagtagatcttcttaagacttcaccaacaggctcttgaggagcagcagctggttcaacatgttcagcaagttgttcaacagttgcaggcaactcttgaacatcttgatctactggattatcattaccaacttgtggatcttcagtgattggtaatggttgttcaacattcgtttgaactacaggagtgttaaccattatcaatcttgcttttgaagtggaaggttctgaaggatctttctcaggacctaagtcctttgattgatcactcccactgatcaaggcattctcaagaaattttgcattccttgattccacaattcttgtgctatgagatggacaataaaacttgtaacctttagacttttcagcgtaccctataaagaatccgcttatggtccttgggtccaatttcttctcttgtggattatatattctgacttcagatggacatccccaaatgcgtacatgattcaaacttggtttccaacctttccataattcaaaaggagtttttgagactgcctttgttggaactcggtttaatatgtacacggatgtctttaatgcttcagtccacaaggatttaggaaggttagagttgctactaagcatactccgcaccatgtccattaatgttcggtttcttctttctgcaacaccattttgctcgggtgtaccgggcaaggtgtaatgggcaacaatcccattttcttcaagaaacttcgcaaatgcaccaggtgcttgtccatcttctgtgtatctaccataatactcacctcctctatctgatctcactatcttaatttgcttgttgcattgtttctctacttcagctttaaatatcttaaagacatctaatgcttcactttattatgaagtaagtagatatacatgtagcg

SEQ ID NO: 365935 - DNA, 656 bp, Cannabis indica
gcgcgcgagctctagatcaaggccgagtttttctttatctcgttgggtgtgatccctctacatatctctcggtccacagggacctcgtgtgggagtttctaaggcatcaagccatgtctgcgtgctgagaaggtcaccaggggcctttcggacaaggtaactagttacctgccccctcgttaccaaacagtgcaaaatttgaatattatgggatttttttttttgtattttgattaaaaattcattatttaattaaatagttacctaaaaattctaaaaatttgtgattttgtttttaagtttgaacctaaatctaagttataaattgataatatattttttaaattgataatttttttatttaaatatttaaggggtttaaaattaaattttgttatttttaattagttttaaattatgattttaatttaaaattgattaatatattaattttatttatgagttaatttataagattagatattaccaaatatgatttattttttaattaaaatatgataagcctattaaatattaataaagtttaaaattagtctagatattttacagatatccgaagcataattattcaaattcaaaattgacttgtttagttattatttttattatttaaattataagttaagaaaaatgat

SEQ ID NO: 365936 - DNA, 661 bp, Cannabis indica
tacagtttggatccattgacagataattgatattaaacaacttgtgaaaagtcatactgtattgtccaatgtcttctaggaaactgaaattaaaattaatttggaatctaaaatttgaagtctaagacttaaatttataccaaatatttcttgagttttattcaatcttggaccaacactactaatctaactctaagtttagattgcctatagtaagcatatacaagtagaagatttctgagatcgaggtttatatcatttcaagataaaatgtcgggaatataaacttctacgccatccatttcataagagaaattagagtgacatcataagcaaataatttaaaaaccattcatccaattgatatactatttaagcgaattctaaatgaaaaagctaaaaggaaccattaaagaataatctcgattaaaataagaatccaacgttatcccggtaggtgagagtcaaagttattcttattttataaacttcttcattgtttcatattgtaaatactagtctaatttgtcatctttggatgtacaactagattttgcatctacaaatacttatctcttgagatctaacactattatgttgtctaatggatgacaatccattgagatttgtcccattaaaacaacaaggtaagttagaccaa

SEQ ID NO: 365937 - DNA, 668 bp, Cannabis indica
cacaagcacaactacacaccaataactagtctaaaaagcatgtggcatggcggcgactattattaataaaagttaaatataatactaaataatataattttataaactattaaaaatattaaaacgactaaaattattttaatttatttgtagtgttaattaaaattttgaagaattacttagattttaacaattataataattttttatatcatttgtcaatacaataatatgaaaataattgaagatataaaattttgaagaattacttagattttaagctataacaacttaacaaaacacacttattagagaatgattgctttcatcttattaagtgtattaagtatatatgatcattgatcatcttgtaaaaatttactactttgtgataaatttataccaaattttaattttaatgcacaattgtcaaattttgatataaaatttaatattttattaaaaataatatttaataactttataattaattttattattattttaatatggaagataataaaaaaaataaatgttttataatttaatatgatagttaaatatactaataaaataataaaaattacataaatgtaaataaaaagtagtgtatttattgtggtgtaaattttacatcataataaatgttgaactaaatttagcacaaa

SEQ ID NO: 365938 - DNA, 788 bp, Cannabis indica
gagttgagtgctggcgtaatagaaatgggtttaacggatttcgatattatacttggaatggatttcttatccaagtactcaaccagtattgattgtaaacgaaagatggtaatcttccaaccagagggtgaggaaccgtttgtctttgttggatcggttcagggatctcagatcccagtgatttcagtactaacagccagagaatttggccatggtattggatactacacggtctgagtcaattcggccagaagacatcaaggtggttcgggaattttcagatgtttttcctaatgaaaccgcagagagaaattgatttaatattgatttggaacctggagcagaaccggtttctaaagccccatccagaatgggtccagcagaacttaaagaactgaatattcagctttaggggttacttgacctagggttttcacggactagtgtgtcaccctagggagctattgtattatttgtcaagaagaaagatgggtctttgcgtatgtgcattgactaccgggaattgactaacttgatagtaaagaacaagtatcctttacctaggattgatgatctttttgatcaactttaggggaagacgttcttctcaaagattgatctccgattgggctatcattagttgagaatttaagaggaggacattccaaatatgactttccgcactaggtatgggcactatgaatttctagttatgtcttttggactaaccaatgctcccgcaacttttatggacctgatgaatagggtattcaaggatttcctagata

SEQ ID NO: 365939 - DNA, 557 bp, Cannabis indica
tatttaagaagccttcacggcaataggcctcacgaatcgagatctttcaccaagctgttcctagctcatagggttcaatggaacaacatttatcccaatgggaaaagtgaggctcccagtcaccttctgcccgtacacaccccaaagcacctttaaatacttcacatttgtggtggtggactgcccaatggcttacaatgcaatcctcagccgcccggccctggtggatttcggtgcagtcacatcgattgggcacttgtgtctgaaattccctactcaagaggctgggatagaaaccataagaggaaaccagggagaggccaggcagtgttacaacgttgctgcccacctacccgttctaatggtccatgaagttattgagccaggaatggcgaaagaagatgagttggatcccctggtgggatccgaaaaaattgtagaacccatggaggatgtcgaggaagtatcggtgtgtgacttcgacctcaccaaggtcctgttggaaatattttaccaggatctagatttactaccaagtatgtttgattaacatccta

SEQ ID NO: 365940 - DNA, 691 bp, Cannabis indica
ttgttggtttaacagaatatactttaaaaataataaaaataaaaatattctgttaaatttaatggtattagtaaggttagttttataaatatataaatgtaaatattatttattttaaattaatttaaatatatataaatattaatatgtagcattattatttttttcatttttatttttaatattaggagtatgttgaattttaatatttttaaactttatatttattttcttcaaaacttaaaacattaaatatgttttaaaaaaattaataaataattttcttttaataatttataaaattttaaaagataaacaacaaaaaatataaattaaaaatataactaagtataaattcaaatataggtaacaataacctattaaaatacataaacataaaatgtgagttactcaatttaaacactcacgttaatatttaaaattatgcaaatttttttgaaggaaaaattatacaaattaaaatgtaaaagatgtatttaaaagtattattacaagctggataatttcaaaatttaaaaattaaaatgtaaaaatataagtatagatagtattacatatttgaaaatagattaggggctcgtttggaacgccgtattaggtcgtattgtattgtattgtattatattgaattgtattttatacaatatttttatgtaaaactatatgtggt

SEQ ID NO: 365941 - DNA, 819 bp, Cannabis indica
taaaaaattaaatttctaataaagtcaacaaattagttaacatattaatataaattaaattagttgatgtgtcaaactttgataggtttaacacagtatgggacaccaatttttaacaagtgatcttgattcctatttcgagagaccctccaccccctcaatgagacccccgaattcttgctcataaggaaggcatgatagaactttgaaatagagaatgaagatgtatggagacaagggatatcttgttaaggtttatgcctttaaaaatctattctgattattaataaagagttgaacattttaagatatgtttaaatattaaattattaatatttattaggtagctaagcaggaggagacaatacgccaagaaagggaagatcttggttgtcattgttcgctagtgattgtctcaatttttttttttcataaatagtggtaagtactcgctaaaatgtaactagacaaaggttttttttttttttggggaattatttcacaaatacacaaaataataaaaaaatttataaaactacagttgtacgaaattttaaatattttacgatttttatgattttatttacaaaaaatacagtctgtactcttgttaatttgttgttgatttttggctctatgtatattattttttattgttttgatgttattttcctgttatttttatataatttttttgttatcttcgtgttctttttatagaaaattttaagaataaaaaaaaaaatcttgaaacgtataaatgaaaaagttttataaaaattagtaatttatatgattatcttttttttttttttttag

SEQ ID NO: 365942 - DNA, 590 bp, Cannabis indica
gattaaagtcatccaccgactggttccccgatatcagcttggccttctgaaaattctctgtcgtgaccaactccccaacatcgagggccttcttatcgtatgtggagaaagtcttggaccgctgaagaaatacttgggtaggcacggttcgcatgtaaggagggatcctaacccactccgtgagaagctctgggcggtccatggcctgaaagacagaggagaagaagaagctgtagcaaaactccttcacatgcttctgatggttgaagggactgggccctcattcaaaggaagggcccgaaggccataaaaactgtctttaaatttatcccccttcttggggatagaaacgagttcataaatatacaatatctcagctagactgggcgagccccaactccgggcagcataaaaaatgaataagcctaaaagcaggcggtaggcttgagggatcaggtatggcgcaaggccaacaaaaacaagaaagtttataaaatagtcttggagagggagcatagccctagacatcaggtgggtctggctccaaggtccgaagcccccgtaattgtggttgggtgtctcctcgtccc

SEQ ID NO: 365943 - DNA, 882 bp, Cannabis indica
cactataaattaagaaaaaatcatatattaatataaataagcataacataaaattttaattttttaactaaataaaaaatgattacactaaatttaaaaataacttttaatataacaaaattataattaaataattataatattgaattgtaagaaaaagaatgcgtgaaaatatataaaaaatcattggtgtgagaaatgaatgatcgttcgtgagtatttataataaaaaaatataaaaattaataatattttaacatcagagaattaaattatgtatataaatatatatgtgttaccgtttattaaattcaaaaaaaaaagaaaaaaaacaaataataatatataaataattttcttttattcaattaattatatacatgttgcactttaatttttatttaaaaaattaaaaataaaaaataatagtattaatgttattgtgtgacatcatgtaaattttttaaaaaatcattattattttttctccaataatataatatctttatattttgtcacctaagttctcttactcatcaggcattatttaaagagaattgctaaaggagctagcactctccttagtctcataccgttattggtgtaattaaatagcgagtctcatataacttaagaaaataaatcttaagaaatatcgctaaccaattatagggtgacacatatggaaggtgctgggcaccactggtgtccaatagcaatgctcttattaagaagaaattacaatctatacccactttttgtttcatattttaatttttactttcattttactactctttattttatcccaactttgattatagaagagggtatttatcaattaaaattattttagaagttatatttagttaatgtgtaata

SEQ ID NO: 365944 - DNA, 1031 bp, Cannabis indica
taataaaattagatttctagtctattattttttagggtactttttttatttttactagttctaaaatttagttttttttttttttttttttttactattttttacggaattctacataaaaactcatattgcaactagcactgcaacctaaattagcaaaaaaaaatcgtaatagaaactcctcttgcaactagcgctacaaccactttagtaacccaaaccgtaaatttagaaaaaaaaaaaaagttaaaaaaatacttatatgaggtaattctcctattttttaaaatagtataaataaaatcttaaattaatgttttattaaaataaaacttaataataatataatctaaagattgttataataaaattagttatatttttatatatctgttcgtgttgaagaaatatcttcatattttgttttttgaaaataagcatactcatcattaataaataaagaagttaaacctcgatcgcaatcattacaaaatataggttctccggtaaggaggaaatcgaaatagagccatacaactggtgggtgaaaacccacttagccacattatgggcaacataattacaagtgctactaacattagaaaaattacagctaataaaagaaggaagagacttaatacaaaatgagaaatatcttcatgtttgatatattaaaaaaaaaacttctccaaaattgaatttaaaattctatttttactattttagaaaaaataaagtctattttattatttaataaacagtagagtttaataaataacttttacaaaatataaaatttaaaatattatttatccaaaataataaatatataaaatctgtaatttttttattaattgattttgtgataaaatcccacaacttattttaaattctaacaatatatggtcaaaagaatagtattggcgtgatatagctcgtgatgtttatatattaattttattttattttacttttgtgttgtcgacttgatttttagccaaccgacgcggagtcgtaataaatgagattta

SEQ ID NO: 365945 - DNA, 812 bp, Cannabis indica
ttttaattgtatgatatattaatattttaaatatatttttatttctattttattatatacaatggtggaatatatttttattatcatggtaaatatattttaattgtagtatataatttagttagcataatatatatatatatggatgatttcttaatgggtaatacccattaatgggtactaaaaaaattgatgaggtggcaatttagtgacttgctagagtaggttaccaacaatttttttttttttttaaaaaaaaagtatatttccttttttaattatagagaatgatgattttgagaaattatttttagaaattaatttattttacttaataaaaaataaaaatatttaatcacaaattataaaattataaaattattattacaacaaaaaatcatacttttagtcacaacaaaacttgtgactaaaagtaaaaaaattgtaactaattataaattgtcatttctacgttgtgactaaaaagttcatggctaaaagtattagtcacaaaaatcacaatttgttgtgactaaatgtatttttagtcacaatacttgttgtgactaaaactaaattagtgacaacttataattaaatactatgtttagtcacaagtaacttttttgttgcgactaaaagtcacatttagtcacaattttttttattgtgactaaaaagttgtcactaaagatggtcttttttgtagtgatattgtatttgtgatttcgttgttggctaaaaattgagtcagcaaacatcatattttatgagagagaaaaaaagttagctactaatgtcaaactctatga

SEQ ID NO: 365946 - DNA, 573 bp, Cannabis indica
atgagagcccagtatccggagttgttcaggttagatttcgaggacgaaatccttttaagggggagatagttgtaaagaccacttagtttaaattttggaaattagcagataattagggtttaattatgaaaattatttattgatatttaaataattatttatgttgctatatttgaattcagaatgcatttttatgtcatatagtgaaatttcataattttgcattttcggtgcccggcaacatggaacgcggtgtatggctcagtagaatcgcaatttaatattttagtatagtgggacggtttatttagacattgggaattttgggaatgatcaggaatttagaatttcccaaaatacccttagaacccttttttatgccaacttagtgtgtgagggcaaaaaggtcattttgcccatttgtaatttgtcttttatggacttttaattatgttaatctaattttttcaaaactgggtttggctgaatcaaataaggaaaatcaattttatatttcatactattaaaaaaaaaaattggtaaaaaggtaagaaaaaatactcaattttcact

SEQ ID NO: 365947 - DNA, 682 bp, Cannabis indica
gtcccacggatcctggtactccgggttgttgatggtttcctgcacctcaacccgcaaaaccctcctaagggcttccacctcggcatacccccgggagtattcgtccatggcatagttatgcttggctatccggagctcttgcctcacctcatctccaggaactggagtcagcacaatgttgggaggagcaggatgctcttccatgggggagaccccaccgtcaagaccatgggcaggagtgtcagctctccgaggccgcttaggctcgtcctgggcaatcattttgcccttgcgcttgcgaatcagagcaatttcaggctcttcttcaccttcttcagcttcctcaggaagagcccggagctctcctgcaccttctgcaacttcctcagaaaagccccattgcttttcttgaccttctcccggcagcacctcctcgtcatccactaaatcaatagtgtcggggagagcgctggaagaaatctttagagcatgggctattggggaagaaatcaataattttgcccaatatacgtggaccaaccggacagggacacgtggatctagcgattcataatatttgctaagtcttttatgccacaaggtaacatcccggacataggtcccggagaaggcacacggagtttaaggtgctcccggaggctcacacaacgctaaggcatct

SEQ ID NO: 365948 - DNA, 519 bp, Cannabis indica
tgatgattaatggtggaatgaggatgggggggctgagaaaaggaagaggggtcgggtggaatttgaatttttaggttttatgagggtttgggcgaaatgggaaattgatagtgctgaaggagggtcccgtcgcgactggctatgtgccccgtcgcgacgggagttggcaaaaacttttcaattttttcgtgggcttctcagtcgcgacgggcaatgccccagtcgcgactactgtagcgtggtcccttttttttcgtaagaagcctagtcgcgacgggcattactcccgtcacgactactgtagcaggggaccctttttgttccatttttctatacatatatatatatatatttttcacgattttcacggttttaatttacaactaaacaaatgcaaatctaacctaaatgcaatgaaacaaattaaactgatacaaagcacctgaattgtcttctaaaaattcaaaagaaaaaataaagtaaaatttaaattaaataaaagattaggttgcctcccaa

SEQ ID NO: 365949 - DNA, 495 bp, Cannabis indica
tgattaagaaaattaaaaaaaaagaaaaattaaaaccaattaagcaatttaataaattatttattttttgttcaaaaattcatttagatataaaaattatattaaaattcaatttttgtaaaaattaaattttatgggaacaagtttgagtctattttttttcttcaaaaatttagatttgcttaagtaaacataacatttttttagtttaatttctaactttttttttaaaaaaaaaaaattattgaattttaaattatgtttctttatttttttagttatgagtttataaatataagtgagcttgattttttcttcaaaaaaatcttactttgtttaaattatttattgaattttcaataactttaatttgatttttcaagatataattatcaataaaataaagtttaaaatattttttaaggaataatttaggttttttaagtaaatttaatatttttatcaggttttataacaatttttattatttttttt

SEQ ID NO: 365950 - DNA, 708 bp, Cannabis indica
cacctggtgtagacatactacatatacaacacatattgtttatttaaaataaactaacatattgcaaacatattaaagaagaagggttgtaattttattttatttaaaacactatttcaattacaattcatcatcctcatcatcagttacatatacagcattatcatcactgtcactctctaattctaaggagttgtcttcttcggtatttagaccctcgttgtcatcatcgacaatgaaatcatctaattgttgaggctgtgaattcacacgatggatgtttgcaacttcagttgggtcgacatcatggcgaacatagtcaacatcatccaactgtggaagttgaacaacgaactcggtttcagctgaattgttttcctgtacaaagggtgtctccccatccgtgtccgggaagtcccaaacatttcgcggtatgtactcatttacaatcagccagtctttaccgttcttcaaatcaggaatgtaatagatcaattttgcttgagatgcaagtatgaacggttcattttggtaccactgtcggttgacgcaaatgctagtaataacaccgtcactatccattctactcccgttagtgtcaaaccacttacaaaaaaataagagaacactgcagtcttttaaataagtgaactccataattttttcaagtgtgccgtaaaaattttgtccatcttcaccggggaccat

SEQ ID NO: 365951 - DNA, 711 bp, Cannabis indica
tcagcaaaaggttacctttcacaatggaaaaatgctcattcttctggtttagagctcttgtctgctggtttgaaccaaggcgacggagccgagcattgggtgcctccaatggaaaataatgtgaaggttaacattgacgcagcgatctttgaagcatctagacagtttggtgttggttgggtcgccagggatactcgggggcttctcatcaatagccatacaaagttattcaatgtacaagctacaccaaagttggccgaggctgtaggaattcgggaggcgttaagctggataaaatctagcggattgcagcaggtggtactcgaaacggactgcttatcagttgtccaagccttaagaagttcaattgttatgatttccacgtttggtcaagtggttaatgagtgtaaggctttgcttaatgatttaagaaatgtttctatttattttattcgtcgatcagcaaatacggtggctcatgagttagctcgagcctctgtatcctttcctgattgtaatttcagtttggattctgttccaactgttttgttacctgttttggtgactgatatggttatctaataaaagttgaatttccattcaaaaaaaaatgtaaccattgaaacctcctccaaaactaatattatttagtaattaacatttaaaataaaaaatttaagtaacaacacaaataattacaataattttttt

SEQ ID NO: 365952 - DNA, 638 bp, Cannabis indica
aaacagagattaagactcaaaagttctctaacagtgaaatcaaagaacaatgcaaaaaaagtttttgtatatctgtctcctctcaaatcatatccaccaaaaaaagtttttgcatttttctttgactttgccatttgagaatttttgagcctctatttttgtttttgttttaaaaaaaaaatatcaagccttataattttgggtattttgaggagcaactttaaaaaaattttgagagagagagagaggagaagagagaagtgatagaagaatatagtagttttgacaaaaattatacataaaataaataaataaaaaaataacattaaatataaacatataaaaaaaataatcacacataaaataaaaaataattctactataaatttgttttaaattatttttatttaagtattatcctattgtataatctaaacaatattatttcatactcattgcaatattgaaaggtgatttcaattaaaattttcatttccattttgatctctaggtgatcaaaatcatttgtgatgtacaaaatcttactcaattttaagcactaaaatatagatattctaatcctaacactctcattagctcttttataatagctaaaagaataaaagaaaaaaaaataa

SEQ ID NO: 365953 - DNA, 458 bp, Cannabis indica
ttcatatttaggatgttaaatgacatacatggtagtaaatatagatcctggaaaaatataatccaacaactcatatatatatatatatacacaagttgatagtagttgtaaaatttaaaatttaatcaatattaatgtttttattattttttaggtatcgggttctctgtgttgatttaaaagcggaaaagtagctagttttattggagaaaagtataatccctaaaactttaaatttttttattcagtgaagtttgaatatttttgacattgatttgtagtgaagtaggttctgtgattaattgtactacgatcggtggggtggataattttgtattattaatgtcatattttatttgttttgtattgttttgtgtacatttttttcttcttattttttgaatgtttgaaatttttgaaaatgtccgattacagtttgttaattccatttttgacat

SEQ ID NO: 365954 - DNA, 621 bp, Cannabis indica
attaatctaagaagtataatagagaaaatatcatttataaaagtgggtatatttcttaccgaatatgaaaatatatatatatattaaaacaaataaactatgatggatatgcaagatcatttcttcaaatatatatacgtacacacttatatatgtttctagtatcttatttccttgtcaagttttgtcttcattttcgaaaactaactcaacttccattgttggtattattagacaactttcatcatatatatatatatatatatatataaatatatacatatactattaatttaatgaaataattacatatgacacaatttttttgtaaaatatttacatttttatgttcaaagaatatttttttttacacttttaagatttttcaaaaaataacacgaaaacaacataaaattaacaagaaaactacataaaagtaatataaaaataacatcaaaataataacaaaaaataacatacagataacaaaaaatcaacaacaaattacaagattacaacataaaaagaccgtattttctgtaaataaaataaaaaaattgtaaaaatattttaaattccctgaaaccgtatttttgtaatttttttgttgtttttattttt

SEQ ID NO: 365955 - DNA, 686 bp, Cannabis indica
aaattctttttccagtagttcaagaatgttaaatttgaggtgtacaaacttacggaattgaaaaatattgaaaattgagcaagtttggtgaaaaacactcctttagggcttaaaaagtcaaaattatgcaagatagtaccaaaatcaagatttgagtattatttttgaaaaaatctttttgagacagtttatatatgaatatttaggcatgtaaaatctttcaaaacaacaatttttctcaaaagtatgaaattttgacaaatttcacccattatggccttaaaaagttgaaaataagcaaataatatactaaaattttgttcaaatcatatttcaattaagaaaaacctttaggcatgttaaatacactcatttagacatgttcaaacatataaacacatatactagccaaacatgcaaaaatttacatatacactagttcaaaagtatgtccaaagttcaccaaaaaatttaacataatgacctataatctggatttttcagcatgtatagttcaagaatgtcaaaactcaactaatcaaaactttcattcatagaaataatatgtaacataccaattaagacatgtatgcataagagaatgaacaagaaggaatcaaaccaaagtcaattaacaaacaactttaaattctatttcttttccatctaggcatcttagtcacatc

SEQ ID NO: 365956 - DNA, 798 bp, Cannabis indica
gtttggagtctccttcttatatgtacaatcagatatttttcttaggttagagcaaggtatattcttttatctgaagtactgtgtcatgcttagaaaaattaggttcttgtgtcttttaaactttttgcatcatctttgtgaaaatgacacttgtaatcaggaaaggtaaaagttgcaatcttttattagaagtttttagtcaatttttacgttcgaattcacattttgaaatattttttttattttttttaatagtggtattcgttatagttatagtatcattcttgtaaatttttgaaaaattctgaataatttacaatactgaaaacaaacttctagatattctagtttactacgcgcatttaaaaaactcaaacgtattttcgtgacactgtaaactatttaaaaatttacaggaatgatgatgtcaacataatgaacatcgccataaagaaatttgaaaaaaaaaatcatcacatgtttttaggcagagatttaactaaaaaattataataggaaattgacagtaacactcctcttaaaattttacaatttaattgaatactatagctaaactagaagtagtaaaaagttctaatttaccaagtaataaaacaagatgtttattttaaatatatatttttcgttgctataaagtagaaaataattatataagaaaaatattgtaatttaaatttaaatttattatatatatttatattgttatttttttaaaatttatttaagtgtattatataaaaaatatatccttatattactttttcatatatatttttt

SEQ ID NO: 365957 - DNA, 565 bp, Cannabis indica
acaacatgaaactaaatcccttaaaatgctcatttagagtcagctcaggaaagtttctaggcttcatcgtcaatgcccgaggaattgaagccaatccagaaaaaattcaagccgtcctggatatgaactcgccaacaaaaccaaagaagtgcaaagcttaactggtcgaattgctgcactcagcagattcgtgtcaaaatcaacggacaaatgtgttccattcttcaatatcttgcgaggaaacaaaaagttcgagtggacagaagaatgtgaaagagcttttcaagagctaaaggcacaacttgcaaaacctcccgtacttttctaaacctctcgacggtgaggaggtgggaatatacctagctatcacggaacatgccgtgagtgccgtgctgatcagagaagagaacagcgtacaacacccagtctattacattagtaagagactcatcgaggccgagggccgatatccgttgatagaaaaactcgcctactgcctcattctagcaacaaggaagtttaggccttatttccaagctcatcctattcgggtatataccgacca

SEQ ID NO: 365958 - DNA, 621 bp, Cannabis indica
gctgcagtaaatctcacattcgatgaacaaaggcgtatgttcgccaaatggagacatagagagatggaggcattaagggctcaccatgcagagattgaaaatcgtagtcggtaggctaccgtgctgatacaaaaagcctaccaaactgtaggtcagcagccgccaaacgtcattcccctgggtgaaacagacaaagatccagcaatgaatgcttctcagactgcaaaatggtcagccgcccaatctctagtcacgagttccacacgtgggccaagcagtaggcgggcagagcttgtctagtaattcatcgggagaagtcatacctaatggttccaaccagataaatggtgctattccacccatcaaccaagcaaatcaatcgttgaggtagccaggcacttctgtgttccaaaaggttaggcgaaacccatgacctaaggaatgatttgaacagaagaaggggagtaaacgatcagaatgttacgacaatctcgcagcgcggaacccgtgctcaaattcccgctcagaaagatgctgacataattcaaattgaccagaatgccgagcagatcagcccagccgtacaggctcacctagacgaactaaaaaatatgtttcacg

SEQ ID NO: 365959 - DNA, 543 bp, Cannabis indica
aaaataaatgataataaagaaagacataatatttaaaataattaagaaaccaattttttttgattggtttatggaagtgttggcagtaggcaatatggggtgagttgaagaagttgttatggctggttgggcaatttgaaaggctcagaatgatatgctttggaatggtaaacgttgtagtcctgctgatgttgtttggatggctcgtaccactcttcgacaatggacgtgtgctcagtctaagaggctggactcgatttccctggcctctaatcgcactgacacaagagaacactagtccaaaacgactgctggaaagttaaaaattaatgtggatggggcggtttttgaagacacaaatgaggtcgggactggttttgtcgcacgtggctgtgatggccgattaattgaggtgttttcaactatttcttctgtcagttgccgatccgaaattccagaggttctaagtgtcaaagaggcacttagttggataaagaagaataacaagtcaaatgtcattttagagacggattgcatcttagt

SEQ ID NO: 365960 - DNA, 1100 bp, Cannabis indica
cctcatagctaggttattaatttcaagcatttctaatttagcccttcaataaattagaaatattgcttagggtatctatacatttagcttatgatactttaatatccaatgacccataattactaaaataatcactttatttgggttaaattttaattagcaatacactaatatatataggagcccatattgaggattttaatctaacaatctcccacttgggctatatatattttctgatagtatataaccttataagtgcttaacttgtgctatcataattataggtatttcaaaaacaatctcatccatcgattatactagcataagatcaaagcgaacttcgcaacatttatcgtagctaaacccatcaatggtcacatatatcaatataaccaaatgacatagatcaatcacggatgcatagcatggaaattacatgcaaatatgatcttagcatgcctatctccactggtccttcttaattgagatcaattctttattttttctaacctaatacaaagaatacattcaaagtactcaaaaattaaatccatactttatttgcagaatcaaaccataaatatgtgtcagctttatagaacatctcaaatacaaactcccacttaaccagcataatcttaaataataccatatccatatatgagcaacaaactcttgaaaagtcttaagtggtatatccttaataatccagatcacacaaaatatagagtttgtccttattatgttttacagacaccttattactccaaagttaattttaataacaattagctcaaagtcaatgtgcctttgaccttgtagagcacatgttgttactaaaatacaaccagattgatttattgtcacaacatatatctttcatagttttcaaataccatttctaattttacagccatatgtgacaaaaaatctcacaaaaaaaaaaaactttataagatcagaatcagaaatcttaatgatcttcaaaaaattttgttttctgatatttgataagtgaacatatagtattttctccttaaatttcctatagctaatttggctgcataccaaaagttccttatatggttacttaaata

SEQ ID NO: 365961 - DNA, 1657 bp, Cannabis indica
taatagtcaattagtgtaaaaaatttaaacaactctaataatacatactaaatatcacacaaaaaatttacactaaataaatatattttacataaaaatctcacataatattaacttaaaatagctaatttataatataatcatatcctatcatgataactaataagaatttataattttaaattgatttagtaaaataaaatattattaaatcaactaaaaattacacatttttttaaaaataaaaacttaaataaaaaaaaaccaaaaaaattaaataattaaaattattatagtgttttcacatataatcaattaatgcattttgaaagatatagtgagcattcatattcttaatttgtttatgtcggccaagaaaatattaaattattttaatattcttcaagactaagatacttaagtaattaatttaactattaaattattattttacttaatgtttatttttatttatgttgttctttttaattttataacttagtgttgtgttatttttattttattaatattagtatttttattattattattttgtattttccaatatgttagtttaaatcaattactacttttataataattttttatttgaggactataatataaaattattttatataataaattaaaatacgggtataattgcaagaaaaaatatatatttacactaaattgaagtagattcaaaattcagcactattaatggtgtcaaattttgtgtattattagagtagaataatatgaaaattctaccctaatttggtaaaatggtacaccattggagatgtccttagagcatctccaaagacatgacatattgtatatatgcagtgggtaaactctcaaaggacacaccatattcaacatcattttgaggttaatactacaatgtaaggcatatataccgtgcattgtagacaccaaaataattttttttaatatatatatatttaattaatatttatatatattttatattattagatgtatttatgaattaagaatttaattttggaaaattttataatgtacttatttaaaagtgatgtaccgatgtattcttatcttttttggcacatgatagacttttttagtctaatttttttacagtcgtgttatttaagatattctgtaaaattttaagaaattcagaaaaatttaacacgccaaaaataatatacctctttaaaagtggttcactgatgtattcttacacgtttcaacattcgagagacttttctagtctatttttttttcatggtcgtatacattatagttgtttaagacatcttgtaaaattttaaaaaatttgaaaaaatgtaatacgtcaaaaataaaattcaaattgtttgttgcacgtgtgactcttttatttagaagagtgcattgttaaatcaatttattgtatgtaaatttaaatatgaataccataaattatttatatttttaattatgatttaagtaaaattttattacatttattgcaaattaacattattttactgattttacaatttaattacctttaaactaatcagtaaatttatttaaattattatttagatataattattgtggtaattttagttaattaatataatattaatttttttattttattaaataattaatataa

SEQ ID NO: 365962 - DNA, 710 bp, Cannabis indica
atcttttcgtctccattgaagaaaagcagtgttggtatcgccattgagtagtttttctggaggagtaacattagagaacagaatttcatcgagatcgtgccctataacagtagggacaacttgcgatttccaagaaaagtaatttgctcgatcgagctttattgtgagcgaagatgtaagtgaatgagagaagggattccattgttgttgttgagtaactgaaagtgtaggccgaggatcggttacatccacaggagacgagttgtcaccggaggacgccatggacgtgagtcagaggagctcggataccatgaagaattacagcagagagagaaatcaaaagagcctttaggagtagtgcttagaaaacattagcattctcctttagcatcagaactttatttatagccagtgttttacaaaaggaaagattcagttaaagaatctgttacaagaaaacagagtacagaccaactaacaaacagtgttaactaactaattacctaactaacagctaagtaattaactaattattattagttatcactgatggacaaaagaagagtgtagagagtgaaggtcgtgaaggatttattggctaagctattgatgataggtttgtagtagaaaaagagagcgtaggagatgaagaacatgtttggtattattttttgttttttgttttcaaaaaagtgtttttagaaatgaga

SEQ ID NO: 365963 - DNA, 760 bp, Cannabis indica
cttaagtaatttttaaagaacaaaactttgtaattacttaatatgaatgattctctttattcataattgaagtttaaagtttgcatcagtaatccgagttacatcatttattaattagtagtaaggtcgcaaatgttctactttccaatagctctttattagcgagccatcgactcgagccaatttatgaactctgactccaactactgcttcgatgacatatggaccctcccaattcgggttgaacactgctgcagatgcatctctcatatttgcaaagactcgccttagcaccaagtatccaaaattgagtagtcttttcttgacttttttgttgaagtattttgtaactcggtgctagtatgctgcgttggtgattcgtgactcagtttgtttttcttcaagtagatccaaggaaaattttaaaagttcctagttttcttcttgattataaaactctcttctattagtcgatatgttcacttcaacaggcagcattacttccgagccaaatgctagcgagaaaggagtgtatcccataactgtcttctcggtagttctgtggacccagagtacctgaggtagctcgtcaacccatctgccttttgcagcatctagcttcctcttgctaatatccattagggttttattaacgccttccagttgtccattttcctgaggcctggttactgacgagaagctttcgataattttattcctctcgcagattcagtgacaagtcaccatcaaattgggttcc

SEQ ID NO: 365964 - DNA, 449 bp, Cannabis indica
agctaactgttgtagatccttctactccaaaagttgctaagtccaaagattctcgaggaggaagctcggacaggcctgagtaatcaaagggtggatccgagatggccaagagcagatctaagcagatacaggctcctactccacctttgccaatgcttccagaggccaagaaaggcaaagagatgctcgctcattacatgaactgattggttcctgaggtaagtgagcagctggctggtggtgacaacgagtcttccctggagctgttgatgggaggagtcttgaggaaattcaccagggtaagtctttgttgacagtttcctttaacccttctttacttggttcactctttaaagttttttctctatgtaggctggtctaaagtttgcttacacctattcacgagctaaatctgctgcctccaaaaatgctaccatgtccaacaccat

SEQ ID NO: 365965 - DNA, 718 bp, Cannabis indica
tcttctccttatccaaaacaactatatcaatgtgttttgtcttctcatgataaactggattcttgcacagatgaatcgaggattggctgtcagaatgtacccttgcctttcccactagaagcttcaactccttcaaaattctttgtagccatattgcttctttgaatgcctctgtggtcaccatgaattctacctttgtagttgaaagtgctactacggattggagctgtgatttccaactaatacaatctccattagtttgaaacacataagatgtagtagacctcctagtatccttgcttgatgcataataagcatccacatgtcgtttcaatgttactttttctgaaattatcttgtaagtcaatctaatattcgatgtccctctcaaatatctcaacagccatttgagttccctccaatgctttatccaaagaatttcacatgaacatactcaatatgcttaaagcatgagtaatgtcaggtcttgtgctaaccatgacatacatgagacaccccagagccattgcatatggaatttcttccatcttttcttttcttctgctgtcatagggatttcttccttggttaattcaaactgtcctccatgaggtattgaagtgctcttagaatcttgcatcttgaactttgttaggatctctcaatgtagttcttttgctttaggtgcatgactccatcactcttggatctataaact

SEQ ID NO: 365966 - DNA, 654 bp, Cannabis indica
attattttagttttttttaatccatataatttaatcctaaatctcagttaaaatactataaaaggaacatgatgctctcattctcatccagcactttcaaccaactaaatctagtttttaactctgtcagacaactagtagatgagagacactttctattgtgattttgagcctccttcattgttcttcatcaatcaagtcatagtgatagagtgtcatacccacacatagcaagtcaagtatttaatcatagtgcagaagacggtaaccaacctgaacaagagaaagaaatctagactcaggtcttgataatactctgcgagagaaaggaacaagagttagagatctgagcggaaggagtcattattattctactgcgatcaatgtaagattttctaaactcttattattcgttgtattagagatattcagatttaaaatattaatgaaacatacttattagtaaatctagatcctcgtaaaataaattccaacaaaaagtacaataacattagcaatttaaagtttccatccaaatttagttattaagtgtcatgttggattgtccatgtggacacaatgtacacgtgacacaattttattgttccacataaatatgtattttaaaataaataaataaataaatcattaaaa

SEQ ID NO: 365967 - DNA, 598 bp, Cannabis indica
aagatctgaaaagagttaggttaatttttataatctatcattcacattaagaaagataatagtaattagcattaacaattgggtaattaaatcaacagaattctttttcctaatttcccatccttgattaaacacctttatttctttctttaattttcttgtttttctttatttcaaaatctatcaaaattatttatctaccaaatagaatcataagtctaatttagtggtattcagttcaattccctgtggttcgacctcacttgcgtgagtttactacttgattatgtgcacttgcgtattgttcatagttttcataataagaagtactataatgagtctattcgggcagcaaaggctgaagagtttatacgattgactcaggacaggatggcagtaacataatatgccactaaatttgatcgactgggaaaatttacttcgaatgaagtggctactgaagctgctagaattggtcaacatatcgcacgggatgtgatagtttctgcttgtttggacttatgctcagatagttgagttggccctagctgctgagggtgcagaagaccagatacgaaagaaaaatattgccagaaga

SEQ ID NO: 365968 - DNA, 572 bp, Cannabis indica
ttcatgcacttctatcataagtcattcagcttcaactttggtgacgcaccttatgagaggcatagagaaactctgtctgtacattatcccatctaggatgtagctttcttgagtaattaattttttttttttaattttagtttattttgtttgtcaatgaggataatttactattttgaatatttatgagtttagtgaagtatgatttttttttaagtgacaataaaatttattattttttattttaagggtatgtataatgctagataaataattaaattattggatataatttaatattttattatttgtgaatattattaaaggtatataaataataaaaatataagtaaatatattatagcatattgcttaatttattatggttaatattattattattattaatagtattattagtattattactgctattattattattaatattattaatactattattattattattattattatcatcatcatcattattattattattaaattagtaaatatatatataccgtgtacatgttttatatgtatatatattattatttttagtt

SEQ ID NO: 365969 - DNA, 761 bp, Cannabis indica
catttacacagagcaggagcattgagaccggctggtggaagagaattcacataaaattggagtgcatattctccttgttgtggaggaatgtcatactgtgcttgataaggagcctccctctgtgagtgccccctgttcaagtggtctctcaagtcaggttgtcgccttcggttcagatggtcacgaaggtccgagctccttgcatcacatggggggtatcgaggatgctcctcataatatggaggaggtgtattgtcttgaacgctcacagatcgactccttgagtcagaatagtaactctcccccatgaagctcatcgtcctctgttgttgcggcccccgaggtgcaggccgttgttgggcatacgactgtgttgcagcagtttgagatcttgataagtaactatcgtctccggttgagtgaggttgtgcacgctgtactctagtctccctgggtgctggtctcagacggacatagttatcacgggagatggtgcgtcgtctttcccgtccatgtcccctagggtgaggtacctgtcgagcatggttgtctcggtagtcctcttgcccgttttgagggggtcgaggcaagtcttgacttggaaggcgactaggaggtgcttccctctgtcatgacctctcctttggggctggttgatgtggtgctggtgcattagtacgtgaaggctcaagatgccttattggtgatgggggaaacctgattggtgaaggagggttccgaacatgatctcttcccctctc

SEQ ID NO: 365970 - DNA, 1002 bp, Cannabis indica
gctggcaaccgtatggagccactttatgagaggtttcgttaggaagcacctctagtgttcttcggaggtcctgatgtgatgaaggctgagcagtggctcattgtaatagagcgaatttttaatttcattggggtagttggaaatgatcgggtaacctgcgctacatttcaattgtaggaagacgcccttatgtggtgggaattggtgtccctcacccaggacgtcactgtaatgacttaggaggagttctgagagttattcaacgccaagtattataattaggcagtccgcagtactaagcagaaagagttcactgagttggtacagactgagggtatgtgagtaactaaggacacaacaaagtttgaccgtctggccaagctcgcctcgggtattgagcctacagacttcaccaagaaagaaaaatatctgtccactttgaattttaaaattagacatgacttggtgattactataaatgaggtgacatcttatgcggagatggttgaaaaggctctgggagtcgagggtgtggtaaagtttctttaggagccccaagtgactccgagtgttggtgggacccccactcttcctactcctacttatggtatggatggtggtgatttcaccattgaccataagagaaaagttaccccggcatctggtggctcggggcagagcaagcggtttcgtgggaaccaaggcagaggtggacgccagggttattcttaccctgagttatcacgttgtaagaaacatcatcctggagagtgcaagtagaagacatgctttcagtgcggcatgttggggctattcaagaaagattgccctcaggtaaagaaaaaagagcagaagccagaggcaaaacccgtacttgctcgggtgtttgtcatcactcaagttggtgctgcagcaagtccttctgtggtgataggttagtttcctatcaacaactcctttttatactgtattatttgattcgggagctacacactcatatgt

SEQ ID NO: 365971 - DNA, 511 bp, Cannabis indica
tacagtattagagcatgaccatttctaaaagtagatatttaaataatgtatttataagattcatgttatttaagtatgtatgtaaatagtgtgtttataagattcacattatttaaactgattatatggtttggataatggacggtacaatggattcgcattatttaaactagttatgttgtttagataatggacggtgcagtagattcgcattatttaaacaataatatgattatggtatgaatatgatatgattatgatattgttatgatatgattattatgtatttatgatataattatgatatggttatggtatgattataatatgattatgatataattatgatacgctatttaaataatgtatagtagttaaacattatttaaattagatttattgtagattatgtgacatggtttgaccgagaagataatggttaaatacttgactgttgggtgtatatggtagatagggggccatctagtagtgggtacaattttactgaacc

SEQ ID NO: 365972 - DNA, 384 bp, Cannabis indica
atcagtggtggaatcaccacaatccctaacataagcaggagtaggaagggtgggggtcccgccaacactcagactcactcggggctcctgaaggaattttacagtaccctcggctcggagggttttctcaaccatttctacataagtggttgcttcatttgtagtgatcaccatatcatgcctaatctttacattcaaaccggccaggtactttctttcttactgaagtcagttggcacgatacccacgacgattttggccaaacgatcgaactttgtattatactcaataaccgacatcccctcggtttgcaccaattcggtgaactcttttcgcttagcactgcgggcagcttcattataatatttggcgttgaataattcc

SEQ ID NO: 365973 - DNA, 778 bp, Cannabis indica
agcccacatgaagacatgggaaaaagagtcacagaagttttttaaccctagggtttcctaagcattcttcctacagcacagttgcattcaaagtttaaacatgcatagaaaagcataaaggagatcagaaacttactcaaagattcgaatgtctgagttcgagcgacgtcaagcaaactagcaatcgtctgaaggcactttggcaactttgaagaccaaaaaactctcttttcgctctggagtttacttaacaaagaagggtgataaaatgggttatgtgccagtacgatgagtatttatagacaaaggggtctacatcaaaaggaaccttagacgccttgacttcccgcctcaaaagcgaatatgggaaatcaaaagtaatctagtgcaaccgtcgaccgtggagagagaaaatcggattttcaaaatattaattgtcagagcattaattagccaaaaaccgaagggacgcccagttagcttcacatcgagtctcgaacggtcatgctcgacatgtgtccccatccaaaggcagagccaactcagaataagtctacacgcaacctcagaggtcccgtacagacttggggggccaatgttatcccaaatttttcactctgacgtggcatcacgagaatggtgacacgtggagtcaacttggagcatctgctcaaaaagatagaccgagtaggatgcctcgctggcacatccagaatgaaatatttaacgagccgtgcaaggcgatcaacacttattgaattcagctttcgcatcatca

SEQ ID NO: 365974 - DNA, 740 bp, Cannabis indica
tagtcatactcgaaagttaggtcttccaatgtcaaagataggataccacatgtgtaggatttgtaaataaagagtatcaagtaatcatttttagaaacataaggtactaaacttgtattttgataaaacacaatatatatatttattgtttgtagacaaataaatttaaaatataaattaaaaatattaaaacaataaaaaatttaattaattaaaaaataaacaaatatataaacaataaaaaaatattttcatttgagaaaaaaaaaataaaataaaaaaataaaaaaaaaaaacggcttaaagttagtgagtgagtgtatacatatatttatatatatagtgatcctactcactcacaactttaagtgtaaaataagtggggaatcactatgacttgaacaaggtattacatctttgtccaaaagcttatttcccctactctctaagcactaagggcactctcatagaaataactttgggtaagttatcaagcctttagggttttcgttagcaaagtgctttcttgatagaaaacttactcttccaaactgagcacattagactcctttactatagtgtttaggttgatcacacttagaattcaaacacaccatctcatttctctctatgtaatgagcattaatataattgtaacaactatatttctacatattgtaatcctatctttcaacttttgttgttaacgatctcttatgtttacactaaaacagttgatc

SEQ ID NO: 365975 - DNA, 521 bp, Cannabis indica
tcaatgaaagtgacaaaatactcataaccacctcgggcttttacattcaaaggtccgcacacatctgaatgcactaaccctagaggttttttttggcacgctctccctttgcagagaaataatgctttgtcattttttattctaagcaagattcacaaactgccattcacctaaagtgacatttttcactggaccacctttagttagcctaagaaatctatcatagcctatatgacctagacgtaaatgccataaatatgtttcatcattattatcaagctttttctttttatggtttctaggattagcaactttaaaaagtttgttattaagcacaattggttcatcaggtcttagaacataaaacccttgttccatagtagcaaaacttaattgaagttctttacgagaaatttttaaattaaaactcaaaaaagtaaatttaaattattgcaactgtaaacatgaaataaaaatcaagtttctactaaaattttgaacaaacaaaacattgtctaaaa

SEQ ID NO: 365976 - DNA, 796 bp, Cannabis indica
tgacatttcttgtagtgtgactgatatctctacaacgtttatcccgtgaaattgtgggtttgattacatatcatgaaaaaaaatgcagttactatttgaatatcacacagctgtaattagtctgcttttactggtcaaagtaaacgtgtactaaacacgttataaatcataatattctgggatgtctcgataggaactcagtaccaataaccttgatagtgacctgtagcttttcccatttctttctgaggttgataatgtaaatctcgtcaattttgctctgaagacataaaattctatctaagagaaccggctcgacggagctgttaatctcattgaaagatgtcaggagttgattagtgaagataccgcgagcatgccttcctatagcgagatgaataccttgctattaattgtatgtgcttatacgactatcttaccgtgtattatacgttaagtgtctcattagttgttatatttcgcccgtgtaacgaggttagtgcctcgtcttgtacacctaaagcttcgtggtctctcatttattgtacaaggcaaaagtctgtatatctttatctcgcataagactattcagtcaaccgagttgtaaatatactctttcaattttacttttaacgagttattcctcctcaaatgtaattataattacgtgtcttggttcatattgttcccagcttgacaagtgtcgtcatctgatgtgttagctcaatttcgggtataacaattgccccttaaaaagctctttttaataaaaagtgctttttaatgattacaaagg

SEQ ID NO: 365977 - DNA, 595 bp, Cannabis indica
gagaaaaatagaagtatcccaacctgtcttgcttgggagtagacttcaaatcaataaaccagctaatctcatgaagagaagccatatcccacttctaggtggcatagagaacgaacagggcaaacaagcacttgatgcccttgggagtgaattgggtcggacagaggtggaagaagtttgccaccttcctaaagtatgggtgcaaatgcagcagttccccttgtttggaatgagcactcgaccaggcgcacatccccttcttcgggttggaggctcgtttgttcgaggcaagaacataacattccagcttgcccagatagctgccttggtcgagatcccattagcgtgcctcagtgaccttggacggaggacttacccacctggcaccaaaggcactttatctcctttgagggaatgcaacagtttgctcctcagtgacgtagtccactccttaaaccagggcatcaccgtccgcgtcaaccggctccctagcctagttgtatcccctaaaatttggaggtgcagcctcctcctcttcctccgcctcagaagaactgccagggcagacatcgccctgctcctctatctcctggac

SEQ ID NO: 365978 - DNA, 565 bp, Cannabis indica
acttgtaagactcagttaattgattttagttaatcaattataattctaacattacactatgtctagtttatgaattttcactaagatatggcttgattgtgaagaaatgggattttagggttaatttattaattaagagactttgtggagtctaatatataaataatataaatgacaattttatttgataattaatttaattattaaataaatagttttggcatttgtagggttgaaagtgtaaaaagtggtatttgtgaaaaatagataaatggttaagaaaaatggcaaaaatctaactagtgttgggcccacttcatggccggccactagtgcctatttttgctctatttttttttcatcattttctattccaaatatatcaaccctaaccctatgtgaattagtataaaaagaaaagaaagtctcattatccaactaacgaaaatattaactcttgacctagtttgcttcttgtgagacaactaatgagtttgaaacttcttcttcttcttttttcttcttctaattcgaattctatagccttcttcacaaaacaaattca

SEQ ID NO: 365979 - DNA, 636 bp, Cannabis indica
atatttttaataatattttaatctaaatcattattactttatcattatatcataaaattaatttatatttaataaattcaaattataatatattatgcaaataattaagaactaactaaagtagtagacaacctaattaaagcaacactaataaaaatagctctatattttagtttttaactattttagcaaaaaaaaaaatagagagtgtcattagaaatgctctaaaaataatacattacacacatatataggaaaattatatatatatatataaatatatatatatatattgttaagcttgcaaatggtggagtgaagtagacattaatatgaaaaataccaaaaggcaccttacgatgttaagtaccataagatgacgaactcctattggtacaatttaatattgagtttcaaactttttgaattaataataaataataataaaaatagctaactacttataatatgtaacatcagtataatattagtacaaattgcctaatagtaatgctcggtatataaacactgctctaacaatctacagcagcagaatgtaattctgtcactgcagaatacagttttacagaaacaaaccagaaataaatagtgtaagaatttaaaaacatgacacaa

SEQ ID NO: 365980 - DNA, 390 bp, Cannabis indica
agaaaggaatcaaggggtagatatctgaacggaaggagacatttaattccgctgcacccaatgtaaggttcctaaatcaacatacttgtgagttgatctaagatcctggtaaaataatttcctacaccaacactattccttctttaaccatgaagtggcatttttcccagttcagcaccaaattagaatcttcacaccttgttaataccaattccaagttgtttaggcattgatcaatcgatgaaccgaacaccaaaaaatcatccataaaaacctcgatgcacttctctattagatctaaaaatatggccatcatacaccactggaatgtttctagagcattacacagcccaaatggcattcgtcgaaaagcaaaagtaccatatggac

SEQ ID NO: 365981 - DNA, 503 bp, Cannabis indica
cccaacaccgggtccaggtccaggtccgagttccggttccgggtccgggtcctagtccctggtccgggtctcgggtcttggtcctgggttcgagtcctgaccggggtctgggtttgggtccgagtccaagttcggggtccgggtcccgggtctaggtccgagtcccgggtctaggtccgggtcccgagtctgggtccaggtccgggtctgggccctaggtcggggtcttgggtctcggtccgggtccaggtccgagatccgagtccgggtttgggttagggtccaagtctgggtcctgggtctcgggtctaggtctgggtcctggtccgggtctgggtctaagtctgggtccaagtcccgagttccgatccgggtctgagtttgggtccgggtcccgggtcccgatctgggtctgggtccgagtccaggtcccaaaggttctgagtcttaacttaaagtttttttttttaaaataaatgtaaattgggtcggatcagatccga

SEQ ID NO: 365982 - DNA, 611 bp, Cannabis indica
ctagaagagtaaaaactcaccaagaacattctctgtattaaatactatcataaatatacagactcgtggactaaggctcattaacgccccaaccacgtaaaaatctctccctcttaatttcttacagctctctaaattattattattttattggttgccaaaaacctcggtcaacattttggtgctttcattgagagctgaagaaagcgtctgtaagtagacactgcattacaacaaaacaataatggtggagactcgaagcacacgtcaacctcgccctcttcaagatgctcaagatccaaatgacgaggacgtggcctcaagggcaactgtgggttccaaggaagaggaaggaatccctgatgacgactacgaaggaaacctcgatgagtacgcctacgacgaaggcagctactcagaattgatactcttaaggcaaaaggctgtccatcatgaagctgagatcgcagcccagaaagagcaaacccaaaggatgcaagaggcgatgctgaccatgcaaaaagctctggaggcagcaggaatccacgtgcaccctaaagccatctctgctgggctcggaaaggaaccagaggaatcctcgccaagtaccc

SEQ ID NO: 365983 - DNA, 525 bp, Cannabis indica
aatatgtgttataatatgaaagttcttagaaagcctaataaaagccacaaattaaagtctaatattatgacattactgcatgaattccaacaatataaatatacaaatattacacaaattatgatgctttaaaaaaaaaataaaagaagaagaagtggaagctacaatacttaattaaaggacaaattaaaaatatatatatatatatatatatatatattccaattggacctaaatataataaagtgagaaattatataaaatatatatatgggaggcgcagccacataaagaggtaatcttaaagtcaaattgtcttatagtcattcaagctatttgttattttgtttctatgtattttttattttggtttgattattcaagattgcaaatcttcgttaacaatattaatcttagagttgattatattcaggcctgacttggtacaagtgagttaggtttgtgcttaggacctacttagtctaggacccaagaaaaaattctcctttaaattatacttttttt

SEQ ID NO: 365984 - DNA, 818 bp, Cannabis indica
tcatgtggttattatgatataaggtgtatactcttacgataagactgcttagtatacaatagaaaattttatacattataataatatttaatgatatattattttagaaaaataaataatattaataatttaataaaaaaaattattttaatttaaattattattatttttttaaaaattagtttaattttttatataaatatttattttaaaaaaaaaaaaattaattaccaactttgctatcaatataatattaatcaatataaaatatcaaatgtgaaaaaaaatattttttataaatattaaataatttaatattaaaaagtaaccaattcaaaataactgattcaatctgcatttttactgattgaactggattgaatttaagctattgtccgaaatggattagatccaaaatatgaaattcgcacttagtgcgaatcggatgcactatgagcaaaatagtgtagattagattggatgaacacaacaacactccgtatttagaaaaagaaaattaaaatctgcaaaaatataaaaataattataaatttgtagaaatataatttttttgttattattggatgtttataaaataattcatttttcatttggaaaatattaacaacattaacttgacatttaatggttaggtatttatagatcgaaattttaaaaatataatttaagtattattatattgttaaaaagtaaacttaaatatttatgtcacaaattatttattgaggaattaccccatatactatttttttaactatttttttttttaaatttacgatttgggtttctaaagtggt

SEQ ID NO: 365985 - DNA, 616 bp, Cannabis indica
tagtctgaaactgtaagttccttctagactaagtcatcaacatagcaatctagcattatcatcaataatatacttgcttaagattaagtaatcattagagataccataaaacttttcatgacgattaggaatttttgcctgtcattctaatagattatgcaagaattctactatcttattctcagaattctgataagttatttctatccatatgaatggttagattaactttctcagttgtgttctaaagttcctatcacaagtatcaaccaaatgaagatgggtttagaattttaaaattctcccactcaaataaggtactgtgatataatttcaaagaactttattggtgtcaatttctattacaacaatattaattggaacataaactaagatcaaggatatacaattcagataattggctaatttattatattacatccatgtttaaaaaaatatgtgtgccatagagtactatggtgtattgagtattgtctagagttcaaaatgaactacatatttcaatagtttaatccacccccaagtatatagagatcatgtggagttatgaatataatccagagttcaatagatataaaagatcgttgaactgcat

SEQ ID NO: 365986 - DNA, 891 bp, Cannabis indica
tctatggtcctggttcagcgattctggttcaggttctaattttgtgtccaaggtctaggtctcggttcgggtttggttcccatatttagacactgactactggtctgttccaagccccgtgaccctaatcccgagtcaagatctagatcactgtcacgcgtctcggtctagttgttgttcaggtcccacgtcccatttctgagtttgggtttgggatcgagactggggtctagttcttgttaaggtccctagtctggttccatgtttgggtctagttcaggttcgagttggggtcccgagtccaggtttgggaggggatccgggtccggctcccaattcgggtctacatctgatttggagtccgggtcctggtccggttacggttctggatgtaggtccaatttcagttatgattccaagtccaagtctggttcagatccgtatcccaatctcgggtcccagtctggttccatttctggtgctaggtcacaagctgggtcctaggttcaagttaaggtctgggtcgggcactaggtcccgttcctagttcagtttcccaggtccctatcctgattctgggtccaggtcccggatattgtgtgggtttaggtcccggtctaggttcgggttttagtcctagtatcggttcgggtttaggtctctgtttgggttttgatctgggttctagtttgggtttaggtcccggtcctagtcctagtcctagttgggttctagatccatttgcgattctgagttcgagtttgggtttgagttcgggtcggagttcgagtcatggtctgtgtttggttacaggtctggatttcagtctaggtccagatcaggctcagggtgtgggtttgcgtcctgggtcttggtcttggttgggtccga

SEQ ID NO: 365987 - DNA, 485 bp, Cannabis indica
aataaaaaaaaaataaaaaaaaaaaaaaaacaaacacaaagagtaaggtagaagaccttatgcaaacttcttttaattattctcattctttcgtcgaatgttattacagtctgaaatcttactctctcttttttttttccaccataaagctacggtgtcattcttgcagtttcatagttgttactcactcatcgatagatactttttccatggcacttggaaataaacatggaatctctttaaaaggtcttctatgtataaatatttaactatctatccgactacctttttgtctaacgttcacttcttaatttcctttatccatgcattcgttgcacttgtcatgacttcccattttccaagataatagtctttggttccttttgttgtctgatttttgtatcactctattgtattttctttgctaatctctcttatggtgcttggtcctccattacccccttcaatcaagttgacttgattat

SEQ ID NO: 365988 - DNA, 657 bp, Cannabis indica
aaaaaaaactccaaaaaataaaaagatgtgacatgtaaatactaacaaatatatatttatattttttaatagaatactaataactattaattgtaaaagtaattatattttttttttcttaaattccggttggttgcctttcattttgactactacaaaagaaaaataatattaaaaggagaaactatatattagattataaaaaaaaatatccaacttatttgaaaagttaaacataattaatccatatgagaatatataaaaattctatatgtaaaaatattattatactatctttatttttatttcaacacatttgtttaataatttttttaacaaataattaaataattatatgaattacttttggaatgatatttataaatattactttattatataataatgagtaaatgatacacttcttctactgaaaaaaaaaacaaaaaaataaaaataaataataataaattatattaaaataacaaaactcttatttcaatatatcatttgttgctcctgattttgcctaatatatgtggaccaaccagacaaggtgttgctataatttataaacactacgcaagtatacgcaatcaagtagtaaaactcacacaggtgaggtcgatcccacagggaattggattaaataccact

SEQ ID NO: 365989 - DNA, 322 bp, Cannabis indica
aaataatttccaacactaagatcctggtaaaataaattctaacaggttcagcttttacccatttagtgaagtagtcaagaactacgatggtgaatttgactcctccttttctagttggaagtgatcccactaagtctattcccaaaacagcaaagggccaaggattatttatgagggttatctctgttggtggagctcttggaactttggaataacgctggcatagttcacatttgtggacatatttagtgcaatccttcttcatggtcggccaaaaataacattggcggatgattttcttagaaagactgggtctggatgt

SEQ ID NO: 365990 - DNA, 639 bp, Cannabis indica
caagagtggccaagatttcgtccatgggtctagctgctgcacaagaaaataagtcaagtgttagaacattcgcgagagcagcatacacttagcaaaaaaggcaataaagccaatcctaccctgactctgtaactcggccctagcaaaatcccaaatcatagcactggcttcatcatccccgagaaagcttcccgagggaaggaaccaactagaggacaaataggctgaatggtccaagggaatgggcaccggaggtccagaacccattcgggaccgacctaaataattgcctaagtgggaaaaataatactccttgggatgattcccccatcgagtggaaggcatcctaaacctatggagacgttcatcgaaccctatatgcctaaggctagtatactcacggacggaaggaacataatgtatcgttataggggacttaccggaacccgaagtggtggcatcgagagcccccgtattcggtattgggaccacaggctttggtctgggggtccttcgctccacgaagcccagtacgaagggcccttctgacggtcgcctggccttaatgtaagccagctcctgttccctcttgaagaggtacttctggtacttgtcctcctccatggcgataatttcacc

SEQ ID NO: 365991 - DNA, 721 bp, Cannabis indica
aaaaaaattatagaataatttacgaaatagaaaacaaagttcaatcaatctatttcacatgtgtatacgtataaaataaaagtagcacgtatataagatatagattgtttgaatattcttttcggtatattaaatatttatgaacttactaaaaaaaattacaaaacgtcttaaataactaaaattgtatactgttatacaaagaaatttaaaagtaaaattatttggatgccaaaaagatattataatgggtttgacaaaaaattcctatcgatataggacacatttttattgatgtattttatgatgatgttttttgcaattatatatagtaaatctttttaatttttcttagaaattttgaatagtttattgtgctcaatcagtattagaatgaacttttattggtatacaaaatttttaaaaatattaaagaggacttactataacactttcatatattgtttttgaacaaaataatatcttaattatctcaattaccaaaggttttgtccctatatattgattttagtagtattttttgtatgcttttagtaggttttatatgatgatgtatattttataccttattttatcatatcgtaaattatttaaaaaattacaggatgcttgcaacataatattactacaaaaaacaattatttttaagagataattttttaattacaacataaattttttgtaactaaatgtaactttt

SEQ ID NO: 365992 - DNA, 578 bp, Cannabis indica
catgtggacatttagatacttcatggtactaatagatgcatctagaagatggtcacatgtatgtttattgtcaagtcgcaatatggcatttgcaagatttttggctcaaataatcaaattgcgagcgcaatttcctgattatacaatcaagagagttaggcttgacaatgctggtgaatttacatctcaagcattcaatgattattgcatgtcaattggtgtttctattgagcattttgttgctcatgtacatactcaaaatggtttggctgaatcattgataaaacacctacaacttattgctagaccgctaataatgaggaaaaaacttcctgtagaagtatggggttatgcaatcttacatgctgcaatgttaattcgcataagaccaagtgcatatcataagtattccccattacaacttgcacttgatcaagaacctaacatttctcacataagaatctttagttgtgttgtatatgttcccattactctgccacaatgcacaaagatgggcctgttagaaatattttaccaggatctagatttactaccatgtatgtttcattaacatccta

SEQ ID NO: 365993 - DNA, 496 bp, Cannabis indica
aattttatttgataattataaataaatagttttgacatttataggattgagattgaaaattattgtattattgaaagaagaataagagattgaagtaaagtggaaaaattgtaactagtgaggcccacgtagtgtggccgaccacttagttgttttttgcgcattattttattattttttaatccatataattaatcctaaaccctagttgaaatactataaaaggaacataatgctctcattcccatccaacactttcaacctactaaacctagttttcattatctgacaactagtagatgagggactccttttcttagtgatttcacaccttatcattgtttttcaccaatcgagccatagtgatagagtaccatgcccacacatagcaattcaagtactcaattatagtgcggaagatagttgtaaccaacccaaaagagagaaagagatccaagctcaaatcttgttattactctgcgacataaatgaacaa

SEQ ID NO: 365994 - DNA, 589 bp, Cannabis indica
attgtcatattttaccaatataaatattttaggtttaaggaaaaaaatttcccttaatgtaaggataaaaaatcaaattttcctattattattgttttatattttttaataaattattaaatgatattaagtattgcataagatttacaattatacaatagaacacaataataaaagttaatataaaaatattatataactcaattttaaatattatagaacacaataatagaagttttaatggtaagttggtctatttggaaagcccgcaacaacattgtttggaacaataaaattaccacggctgctgaagttgttactacggcacatcaagttcttggtcaatggaaacatgctcaaagttgtcgctttgagccgctgcatctcagctctaacattagtagcagcagcgattattggacaaaacctgtagaaggaacgatcaagattaatgtcgatggtgcaacgtttgaagccaacaattcctacgggactggttttattgctcgggacccaaatggagctgtcatttttgcaacttcttcgcattcgacgggactttcaagtgcaccctttgctgaaatgataa

SEQ ID NO: 365995 - DNA, 459 bp, Cannabis indica
gatttcgtggttgggttacctagaaccacaggaatgtatgattctatttgggatgtggtagatcgatttacaaaatctacacattttttaccggtgaaaatacatttacagtgaaccagtatgcagagctatacgtgaaagaaatagtaagattacatggggctccgaagtccattatatcgaatagagatctgaagttcaccttaaaatttttgcagagtctccagcgggccatgggtaccaaactgaagttcaatacatctttccatcctcagattgatacacagtctgaaaggacaatccagatactaaaagatatgctacgtgccagtgtgttagactttgaaggctcttagagcaagtacctattgggtttagtgccctaaataaaactcatttcaatataatcaaatttactaattaataaatatcagaaattacattttatgttgcatggtt

SEQ ID NO: 365996 - DNA, 737 bp, Cannabis indica
tatagtttttgaatttcaaaaattaagttgtgtaaccactctttacacacttaattagtgatcatgtggaagttacaaaatattaactccacctcttatatgttacaactatatgtaactcctaatcacataatattgtgattattacatgcatataattcccaattatattatatgtaataatatatataacatatcacaattttaatcttaaacattatattatataataaataatataacaggtataagagccaggttcgatcatggcgtaatgttttctgctcatcaacacgagtttggagtccaatcgctcttttctacctcttccagtttttcatggagaaaactataatttttggtccatcaaaatgaggacctattttcaatcacaaaatctttggaaagttattgaagaaggaatcactattctggaagatattacatctttttcagaagatcaaaagaaggcactagaggataatcaacaaaaagattctcatgcattatattgcttgcagtaagctatggcagacaatctttttccacgaattatgggtgcagcaacagcaaaagaagcatgggacacgctgcaggaggagttccaaggagcaattaaagtacgcactattagactacaaaagcttagaagagattttaagaatcttaaaatgaaggataatgagactgcaaaagattactattctagaattaaaaaaatagtaaatcaaatggga

SEQ ID NO: 365997 - DNA, 543 bp, Cannabis indica
aaaataatttccaacagttaagtgctgacctaatagagatgagcttagtagattttgatatcatactggggatggatttcctatctaagtattcatccagtattgactgtaagaggaagatggtaatcttccaaccagagggtgaggaaccgtttgtttttgtcggttcggttcaagaatctcggatcccggtgattacggccctgtcagctagagaattattgagtgatggatacctagggtttctggccatggtgttagacaccactcggccagactctgttcggcaagaagacatcaaggtggttcgagaatttctagatgtttttcccgaagaacttctgggtttaccacctcagcgagaaattgattttgttattgatttggcaccccgagtaaggctccttatagaatggctccagctgagcttaaagaattaaaaatttaacttcaagggttacttgacatagggtttagccggcctagtgtgtcaccatggggagctccggtattatttgtcaagaaaaaggatgggtctatgag

SEQ ID NO: 365998 - DNA, 695 bp, Cannabis indica
attgtacaatacaatttagtttaacacaacacaatataatataatacaatatattatataactaacataagagctagcacaagagaagaaaaaaagaagatagtaataatttattatatataagtgaagataaagatcaataaaaatagatatatgatgatgacaatgtatagcatttgtataatagtaggtaaaaatatagtgctatatgaaatgtgtcacaactcagaagcacgtacgtaatttattttaactttaaaatagtatacaaacgtggaagagaaagagaaaaacattatcaacttttcatgatttgattcatactttttcattatggttaatttggctttttgcccagttcagatcatttgggttggcagtgatgaataatgctttttttttttttttctttttccttttatgatcagataattatgatatatacataaacaacaacaatattctaatattttgaaaatttatgccgaaatatatgaccaagtcactgatgtagtagtgattatcatatatttttatatattgatatatataataatcagcactagtatatatatatatatatatatatagtctatgatgtaaataaaagtggtagtacccgattgacttgatgatatatataagtccttcgaatattaatttgatgactcactgttctcttttttttttttttt

SEQ ID NO: 365999 - DNA, 636 bp, Cannabis indica
gttgtttattgtgatgcatctagacagggtctgggatgtgttctgatacaagatgacagagtcatagcttatgcatctcgtcgattgaaggattatgagcagcgctaccgaactcatgacctagagcttgctgctgtggtttttgctctaaagatatggcgagactatctttatggtgaaaagtgcgagatttatactgatcataagagtctcaaatactttttcacccagaaagatttaaatatgagacagaggaggtggctagaacttgttaaggactacaattgcgagattttgtatcatcctaggaaagccaatgttatggatgatgcattgagtagaagaggtcccgggcagatctccaccactgttatgatagcccctcaactagcttctgaaatggttagtgcagggattgagtttgtggttggaaagttgcacaacttgatacttcaatctgatctgctggagagaattagaaaagcacaattagaagatcctgagatagtcaaggttcgagatgaggtgatggctggtcggcctaaacacttttcagtctcaaataatggaatgttgttgtataaagctcgagtgtgtgttcctagtgtcgatgagcttaaaaaagagatacttgat

SEQ ID NO: 366000 - DNA, 655 bp, Cannabis indica
aaaactataaacttagtaaaaaaaccgaacttagaaaatattatatacataaattattgttaatataattaaaaaatactaattaactgtcaataatattataaagaaatttttaaagaaataattaataaaatataaaaggtaagattgatttaaaattatttaagattttgaaaatgtgaatgaaattaatacaattacaaagacataattgacgcacaaattaacctatcaattactaaaataaaaatctaattgatagcgaaattggataatttaatgtaaaataatttgaaatgaatacaaattttaaaaaattaaaatatagaaggtaattacttagcttaattttctccaccattcaattctatcacgtgcatggacttcgttcagctaatcaaccgcgtacaaccatcgtcctcctatgctctgccacttccacctccaccgaaaaaggacatcaaaactaataagaccgatagcatctccgatactctagattacgaaccaactaccactatatcatcgagtacgaacaaccatgaactgtatattgccatgaataactatcgatctgtagatttcacgttgcggtctcagatctgggtcgtgaaatcccattgaagacgctcgcatttgccgcctgaataccaaa

SEQ ID NO: 366001 - DNA, 684 bp, Cannabis indica
aacccctggttatttgggttattgggcatactgggatggttgtatccctagccctgtcttttcacgtactggttaaaatggcctcgagcgatgagactttctatctcgtctttcaattgatgacattcgtcggtcgtatgcccaatatccttatggaattgacaataattgttaggatctcttttgctcagcgaattcctcataggctcgggtttgccgaaggctaccttctgctcatgtgcgaggtaagtattttctcgagtttcattaagctcggtataaatagtatacactgatacgtatttgtcatgcttcttttgtttctttctatccttcgacggttccttaattctgtcttttctattcagaccagaagcccccgagttatcaattctcgtggaagcagtacctcatcaggcaaaatcattatcttgttcagtctaaccagtaccttgtccaggcccaccaggcccaagttgcttattacaactcatatcttcagcagcaacatcattttgctcaaaggcaagtccaagagttgaattctgccttctcattgtgtacaatggaccccgatgctcccgaccatttctcgcagcccccaccgtggcagccataccagccaccaccacctccacaaccatactgacgtggcgctcaggtaagttcccttttctctttctt

SEQ ID NO: 366002 - DNA, 849 bp, Cannabis indica
aattttaaaaaattagaaaataaataataaatactaaaaaaaaaaaattaaatttaaatcaaatataattaattgtaaattttgtttatatagtatacataaaatgttgatcaatatataaatctatatttatatatctatagatatagtagagacataaagcggtgacatggtactttaaaattttttaaagctattttttttttctcataattaaaatataatatttatatatatttttttaattaagatatttaaaaataataatcactttttcaaaacatattaattaataataataaaagaataaactaatgaattttttctaatatcttaaaaaatatttaaaaattcgagataaaatataagataaaaatatagatttagaaaatacgatagtgatgactacaagtgaactatggtaatgacaagggatgcaatacagtgataacaacggatgagatacggtgatgaaaataaataagatacaatgagacaataagtgagacaataataacaatagttttaaatgatagggatatgaaaataatgcattatggaaaatacagtaattttttctataccatcttatttatttatttatagaaaaataatttcttttaacaaaacaatgtaaaatactacatataataaattttaaatttcttaataaataattttaaataataattaataaaattgtgcatttagtttttaataaataaattatttataataatatgaaataaaataatatatttataattttactatacattagaattatatttttaagtaactatttattataatactaaaaaaaattacattagccgcacgaagagcgcc

SEQ ID NO: 366003 - DNA, 885 bp, Cannabis indica
taaatataaggaggagctccctatttttttgctaataatttttaatagtattttaataaaaaaacactattacttttttattatttgataaagttaatttacatttgacaaatttaaattacaaaatattattaaaataattaaatacaaactaaaatagggaacatgactagagcaacaataataaaaaaatactctatttaagctttgtagctattttagctaaaaaataaagaataccattagagatgctaattggtaaatcttattacatattattgttatagctagagaaatgttaaaaggtactaatggtacctaacaccctcccatatgtaaataccgctattagtccaactaagtaataagttctatataggttaatgaaataatgtataagaaatttactagctaatatatctaaagaggctagacacaataacaataatctactattataacataggaaaaatctaaaagtgaattatgagcattgctctaatatttaattaattatccaccaatcctaaaatgcgatagacacaatacttctttttagcatttttcattaattatctactaaatcctagacatattttataatttgaagtctgttactatgattttcctcaatgtcaatgtggataagacttcactttacttttttgtcaataccaaaaaaagcttcagtatacttacttttttgttccttaaatcatgcatgataaattatgtatgccaccttctatttttcttcatctttctcttgtatattgacaagtgacaacgaagagtttggacaatttttttttgggttaatttcacaaatgcacaaaaacaacaaaaaaataacaaaaatacggtttcacggaattttaaacattt

SEQ ID NO: 366004 - DNA, 805 bp, Cannabis indica
aaaataactaagatatttttaatatcattttctaatcttataatttaataaaattaaaataacaaaataatccaattttaaaataaatatgtttaggaattattaatttaagagtaaaataataaacaaataataattatctaaattatatgacaaaatatatcaaattaagccttttttaaatttctagaaaaaaaaatatctaggttatttaaatattcataacattattaataaatttctaataagtaaaatgatataaaatatcatttttctaacttataatttataaataattaaatatttcacaaaatcaactaatttttaagttgaaaatattatggttagaatatctacaaaaatatctaggttaatttcaaatttattaattatttaatttatcttataagattatttttgttatacccaaatttggctggaggacacgtgtcaagataaagggaatgtgaatcgatgcaattgcttcttatagattaactaattaattatgtaagtatcagagtatatttgtaacccgatgactgtaaggtcttaggcggggagtcaatatacaaactggcacttagtgtattagggagaaaccatatgtcgttaaatatgaataggaggcaccaaagaaagtgacacgtatcaatcgtgaaagtcctcagcatacaatgaaagtctaaaagtcagatcgggtaaagaataagtaagcgaggtgaccgtgtcgttatgggaagacttcatataacttcatcccgttagcgtcagcaaggcttacaatcctggcgagccaaaagat

SEQ ID NO: 366005 - DNA, 535 bp, Cannabis indica
attgtggtataatataaatattgaatattttgaatttgttatgattgaatacttttattttggtagcataaatacttattgttgacaaaagagtgcttctgttagtacttagtcgaactaaaaagtggtgttaatatatatttaatatatcaattaatttaatttacattaaatatattaattatttttttcactcaattagaagtttaattttttaaaaaataaaaaattaattaacgtgtcaaacttaaattaatttaacataatatgagacactactttttaataggggtgttcattcgatccaatttttatttttttaatcaaacaacattcaatctgcactaagtgcggatttcatattttggatccaatccgatccgcataacagtttaaatccaatccaatccgcaatagtgcggattagatcggttatttgggatcaactgttttttttaattgataaattatttaatatttcatagaaaaaaaattaaaaaaagaactatagtttcttaatctccaataataatct

SEQ ID NO: 366006 - DNA, 546 bp, Cannabis indica
gaatataaaaatattatgataaatttaataatattagtagagttacttttataaatatatataaatataaatattatttattttaaattaatttaaacatatataaatattaatattatttattttagattaatcgaacttatactaattttaaattaattgaaatatataaatattaatatattatttgtaattttattattagtttttaatattgagagtatgttcaattttaatattcttaactattatatttatttttttcaaaatttttaaaactttaaatattacttttaaaaaaattaaaaaattaataagtaattttctttaatttataaaattcaatttgttatttgaaaataattttttttatatattgtaactaattattttaaattttattttttttactaatgtcaaaaaaaaataattttccattactataaattattaaaaaaaataaaaaaatataatatgcatgttataattacaatatacaatattactacaaaagtttagattataatttatctaagcatcaaaaat

SEQ ID NO: 366007 - DNA, 1399 bp, Cannabis indica
cttaacaatttttgaaaattcccaagtacaagagtaagagaattcaaggtcataattctattaggaatgcttgaagaaaagaaataattgtctaagattgtcaaaattgatgtccatctggtagtttcaagagaaataagctccgttcacgtcgacaagtcaactccacacaagtgtaaagttgacttggggggcaaatattaacccgaaaacttttcctggtaaaatggacctaaatgtttggcacatggaaagaaagatgacatctctaagtttagtattcttgagtcatagtagtcgatctgggaggggtccctagccctgcgcctaggttgactttgagaactccaaaatggaagtttagactttgataaatcatttctaactcactatttttaagtattttgtaacatgaagacatagagaaatcaaatctaggccttaagagctgaagatacacgaactagcatctcaaaagtcaacttgggcacctagggtttcaccgagcgtccaagttgaaatccttaactagggttttagttttaggtccgtcttagtgaaaatgggtcaaaattttcattgggacatgaactagacataccacgaacatatttgaggtatcagaatcagattcggagaactttcatttttgagcactcgagcaccctagcgcccaagttgacaatatgtcaatctgggccacttccaagcatcagatcgaaaaaaaatttgactcgtgtattttcttcatcttcatcaaaaataggaaaatatgtgcttttttggaagaaacaacacataaattcaaatatttccatggaccaaacagaatttccagatgaccttaagctggacccagcgcccaggttgacacatagcattgggccatttctagtaagtttctcaaaaaagtattcagggcatttttagtcatcagaaataacgaagatacaagaaaactcggggagaaaaccacaatattgcaagagcatgaaaactgagcccagagctcaagttgacaatgaaccttgtgtagtggtttcaatcattaaaatgccaattctactctgagcattctctctggaatagtaaaaaatagggttaaaaacctcatcctcaagttctaaaaccttggaagtatcaaaacgacattcgagaagctccgaaataagcacttagtgcctaggttgacaaatagcatggtgcgcttctgcttgtctgattctgattccatctcgaccgtttgtctaatttttcactaataattgagagtcatgaagccagaacagtcaaattcacaacttcatatttttatttttgaaaaggtgattcacttgaaaactaggcaattttgagtctcacgttttcgctgaataacaacatctctgagaactaatga

SEQ ID NO: 366008 - DNA, 793 bp, Cannabis indica
attaaggtacaaccagttacgtataagtctgtttattttttgttttggttgccttatagttgcattatcgttttatgatagtttatatattatgcaggaatttaatttgacggggactaagaaatagtagttatacatagtaagttttgtgcaaatagttgcatattagttttataatgaaataacatatgcaagtagcaaaactataataaaactacaaaacaactgtatacaaactaaaatacaggaaaaactctttgaacatcaacatccatgataaatctcattgttacccattgatgatataaaaatggacaggaaacaactagaaaaaaacaaaactgagaaaaatgtaaaatacaacaaaatctagaaaaaggggaaaactaaaaagaaacggtaaaaaaacctcagttcgaagaccgccaccaatattatcgttttttttttcagcaacatcttgagccattttttcttgggcacccaccttcgatttcttcttaggaggagttcgaccacgcttagataatggaggagcaaaattagagtcatctccctccataacaggtcatttacccttgttcttattagctaaggattttaaacccattttagagcttttcttttgaacgggggaaggagatgatgaagaacaggtaatagccatatatatacggattgagaaagaaataaaaagagaaaaaacgattatgggattcggttactgggatttaaaaaaaaattgaagaacacaaagaggagggaaaatggtgggatcatggagagggaatgt

SEQ ID NO: 366009 - DNA, 687 bp, Cannabis indica
aataactcattaaatgcggaggtaacaaagtatatttacaccatgttgactataaggtcttacaagagataaagatatacaaactgttgtcttgcgttaacgggaaaccatacgacattggatgtgcaaggcgaggtatcaacctcgttacacatgaagagacataggcgagatataatgattgctaagacgcttagcgtataatacacaatatacaaactaagtataacagtctgataaacccaaacaactgataactaggtgtccatcttgttataggaaggcacgctcgtggtaccttcactaatcaactccaaacgtcatgcaatgagattcatagctctgtcgagtaagttctctcagatagaagttgacattcaaatgatgttggctgttgaagttcaccttgtcgccaagaactgtggttgtcagatggagcattatgtcttcaagcgtagaagcacaagatttgcattgttaacctcgaaaagatgtgggaaaaattctagtttgctatcagggttattgtttctatgttccaagcgagatgtcccagaatgatatgatttgcaacgtatttaatacacgtttacattgactcagtaaaagcggaccaatcatagctgtttaattttcatatttaaaccacacttattttacgtgggatgtaatcaaatcccacaattt

SEQ ID NO: 366010 - DNA, 619 bp, Cannabis indica
gtcctagtcgatccgatgtccgttttcccaagactcacatgagttcatctacaaaagacaacgcacaagatgagtgtttggttggaatatcgaacgataaacaagcaaatatgccgaccagaagtactcaaaagattaaagaacgattacgtttaaagaaaagtcagacctcaagaagtcaaaaattttctcgagttagggcaaaaaaattcatgaagcttagaataaacaagatgaaagatagacgttacgcagttcaaaaacaagcattatgactgtaaaatcgcccgaagacatgataaagaagaatcgcagaggtttctgaacctagggtttcctaaacatttttctacaacaaagtggaagttgcatttgacatataaacatgcaaatataagcataaaggaaaccagaaacttactcgagagtcagatgtctgggtttgagcaacgtcaatccaacaagcagtttgtatgaaggcgtttcggcaactttgaagccaagaatctctgttttcgctctgaagcttacttagcaaagaagggtgatgaaaatgagtttatatgccaatgttgtttgatatttataggcaagtcacgaaaagaggtaatcatctcaa

SEQ ID NO: 366011 - DNA, 716 bp, Cannabis indica
gaggtgttgttttttttattgtcattaattgttttttgttatttttttagtagtgtttttatgttgttttatacatttcattaattttttatgttttttttttcagtcatcccatggtggtcatactcacaatggatctcagtctgaagatgctcttcgttcttctgaaaatgaggatgatgaagattctatttcagaggaagacgaggatgctaaaaatgaggatgacaaaggagatgaacatcatgaggatgatactgatgatgatgatgatgatgatgatctagatggagctggagttggtgctgggcaggatgaggctcatactggggatgatcgtaatgatgagggtgttgttgtccccgaggttgtttcgaaggatgatgatactggcaaggtggatgatgccaagaagtctgaccctgtggaacctgtttcagaggtcaaacaggtgtatttcttgtttgcccatccttttctgtgctctttttgtggattttgtgttttgagtttgttttaatagtttcttaatgttgtttttgttgtcagtctgaacagtctcaagttgtggaagagaacattgatgttgatgcaacaattgcatctgctgttaaagctgtggagaatttggtttgtgtttcttttcttttttctttataatttgtgtttatataatattctattgttgttttactagtgttttgattgtacttttt

SEQ ID NO: 366012 - DNA, 499 bp, Cannabis indica
tatttaattaaaatttgaaaaataatttaagttgaaaattttgttattttagaataacctaaataaaatatttttcaagtaattattttgttatattttaataattttcgaaattttatatatattatataatagatttttgaaaattaattacaaaattatattaaagttgaaaattaatttttaaataattttggatcaacttaaactaagtaattttcactattaaaatatatagagtaaagtaagtgattaaataaaaatacattttaaataatgagatttaatcaaaggacattcgatctccatttattgttctacatagttcttggtttagtgagtaatcatccttaatggatgaacgttcattagcaatttaacgccgtggaatctcgaaagataagtattatttgtaagtgttttattcttagtaacgaccaccctaatggtggctgctaagagtaatacttacaaaagtatgaaagaatggtggaagctc

SEQ ID NO: 366013 - DNA, 727 bp, Cannabis indica
acaaatgttgctggtgaaggctttgaaagtgactctgatgttctctctgtcatagctgatgaaaacttttctgactcttggattttggattctggttgttcgttccacatgtgcccgtataaggagtgctttgacacttataaggcatatgatggatgtactgttttgatgggtaatgattctagctctaaagttgttggaataggaactgttaaggtgaagatgtttgatggtgttgtgagaacactgactgctgtgagacatgttccaacattaaggaggagcttaatctctttgggagctttggatactcgaggttatgtctattccgcaaaagatggtgaaataactatcaagaaaggaggcttggtagtggtgaagggtaagaaagagcgaaatttgtataaattagtcgggaagactattttaggtggagttgtgaaggtggagtcacgtcacaaaagacatttagttagtgcgaaggaatgtgacaaggtggagaagactccaatttcagttaaaagttgtttgaagaaagaagacatcagtgaaagattgaagaatgtgaagacaagtgctcaagtgaagttcaatgagagtgaattcggtgcatatatactcttattgatggtttgagttgtgagtttagagaatttgagtcaaggtggagattgttagagtttgactaaattatttatttctttctttatttatctatatttgtaaa

SEQ ID NO: 366014 - DNA, 682 bp, Cannabis indica
gtaggttttttgagaagacataaatgagtcacaacaagtgttagaatataaagtagtatgatgtaagtttaaaaaatgtattttttttaactttttatttaattatttttttaaaaatcctaattttttttaaaaaatatagtaaaaaaaatactagtattatttttatttatcaattcaaaaaactattattaaatagcccacaaagtattaattacattaatattttcgagatctgcatttaatggaaaaaaaaataaatatggaatgaattgataaaaaatggaaggggaatgaaaaagaatctaagaatgaatctttattagtttaatttttaatttattaaataaattttaaatagaagtccatatcagcaagtcaccatcaggttgctcttctaaaagtttaaaaagtcaaaaaagtaaacttagcctagtcagcaattatcaaccattagattaagatctaagggttaaaaataagggttccatcagtgggtatatttttttgggtttcattaaaatcgaatccttatattgttatagggatattggcggctaaactacctgaactttacggtttgtaacacttaaccacaaaaactgaatttttggcggctaaactacctaaaccctggttcccgttttgctctgcacacctccgtccaaaaatcacagttaag

SEQ ID NO: 366015 - DNA, 612 bp, Cannabis indica
aagaaagttagtgagagaaatcaaaagcaagagagaaataaacacagaaaaacaaaagagagaaaacattagaaataccagtcgatctgtgacttggatttcttacctgttgtaatattcattcatcatagtgcaagatctgaggtcgatcttcaaggcgagctcatcagaggatgtacccctaatttctagggcgaacctctatatttctggtgtttgtattttctctctaactctactatttgttgctttaactttgtgtatgtgttgtgtggtgtttctgggtgattttctgggttagatcgatcaagagatcgagaaggatctctggttctagggtttgagaaccagagagaaggcagagagaaagagagagagttctgagactctcgaaggttcgaagagaggaaatgagctagggtttgctctgattcctcttgttttattcaaagaagaacgacagatcgttttggatcaaacgatctgtcgtgtaggtgagaacgacaagttccattgtcgtgcaagtgaaaacgactgagttttctttgtcgtgtgaattgattgttctaattgattttctaggacaattttgtccttgtcgttttaactgtg

SEQ ID NO: 366016 - DNA, 824 bp, Cannabis indica
gaggtcatcattcttatttttgttggcggcaggtgaggtatatgtgaaaacctttgacacttatcacattacttgacaaactcgtggatatccatattgatcgttggccagtaatatccttatctaatgatatttttagacagactttgccaacccgcatgatccccacaaaagccttcatgaatctctttgatgatttcagtcacttctacagggagaacacaccgaagtagggggcatcgagtaccctcttttatatagtttgccttcaattattgtatagcgaggcactgaatataatagtttttgcacctcatttttgtcatttggaagttgtccatcgagtaagtaatttataataagagtcatccatgtaggagagtcgtctatcattttaacgtcttccgtttcacatatacttggctcgctcagcatctccaccggaactaagtttaggtcatccaagtcattctgcaaggccagttttgttaaggcatcaccgttggatttttgttctctcggaatttgttcgattttaaagtaatcaaatctttccaagttcttccgaacattttgtaaatactttgccattttcatgtctttggcctggtattccccgaggacttggttcacaatcagctgcgaatcactacggcagatgaggtttttgactttcaacgcctcaactatctttaagtcggcaatcaaggcttcagactcagcctcgttatttgatgcgtcaaattggaacctcagagcatagtgaaacttaaagccttctggaaatattaatattacccttgcacccaaaccctgttcgttgg

SEQ ID NO: 366017 - DNA, 672 bp, Cannabis indica
ataatataaaatctatgatagtagataataaaaaacaattaagatttaaaaaaacagaaaagatatctcattagtatatcaaaatgcaccaaactcctaaatttttctttaatttgcaacttgtagaaaaaactaatgtatcttagtttgatataaatataaaagaattaataattttttaaaaaataatttaaaaaaaaagaccaaaacgtaaatttaaaaagctaataaataaaatattattgatttagagttattattttttaaaaaataaaattaaaaaattaaaaatgaatgaattaaagagtgaataattttttttatatattaattaatattatgaaactaataagaattaaagaaaatagagaattaaagagagaacatataatacttgatcttaaagtgctacatcaccgactcatacttttttttttatatatagatactagtaaacatcccgcgcttcgcgatggatatataaattatatataaaaaaaataaattgtacattttaattaataataattacttaataaaattatattaaaattttaactttacttttaagaaagttgtgacataaatacttaaaatattaaatttattgctaataaacactgaaattcgaaatatagtaacataaatcctcatttatggtttaatttttat

SEQ ID NO: 366018 - DNA, 850 bp, Cannabis indica
cgctggtaagccgcattttttaagtacgcctgatcgcgtttttcttccagaagatcaaggtagagtgactgtttttcttcattttgcgagatgttgaaaacatctcttcgtagggaacctgccccaatctcgactggtaccatggcctcgcacccataggaaagcgagaagggtgtttcaccagtcgtggatcgaggagttgtattgtaagaccaaagaacttgtgagagctcgtctggccaggtccccttacgttcttctagtttccctttgatggtgtgctttattattttgttaacagcttcagtctgtccgttgctttgtgggtaagcaactgcggagaatgctttcttaattcccagatcgtcacataattgtcgcatctctttacaatcgaactgctttccattgtctgagatgagtttgtaagggataccaaatcgacaaattatggagttgtagacaaactcgcgcaacttagtcgctgtaatggttgcgagtgctttggcttcggcccattttgtaaaatagtctactgcgactactgcatatttgactccgccttttcctttgggtagctcgcctattaagtcgatcccccatactgcgaaaggccatggacttgtgatagaatgtaggttactcggaggttggtgggtatatgtggctattcgctgacacttgtcgcatttcttcgcaaaagcgaaagcatcctgtcgcaaggttggccagtaatacccttgtcgcatgatttttaatgcaagggagttacccctgtatgattgccacaaattcccccatgtacctcacgtagtatgtagtcgcaatcttcaccgtcgatgcatttgag

SEQ ID NO: 366019 - DNA, 505 bp, Cannabis indica
atgtccaaatcttttatttattaccattaattgtaatcaacattctttttacaataataatgtaaaaaaaatatttattaagcgtaccaataaataccacgatgtatttaaaaataacaacctaaaaataataataataaataaaagaaaccacaaaatattaaccattaaaatatttattattttaatattactttttattttacatttatttacaggaagttttgttattaatggtgattttatcattaatgatgtggtatgttatcatgttattgtaattttaatagtctaataataaattagataacttgttagaaagatacaaggaaaaatgaatgagatattataattatatctatttgaccattataataacatgatgaagttatcatgtaaattatgcacatcattaaattgacgatagtgattcctgaagaaatataaagtttgatgaacataatgataactcctgaagagtaataatataattatattattcgtg

SEQ ID NO: 366020 - DNA, 498 bp, Cannabis indica
gaggaagcccgccgaactccaataccgaagctatcgcagggattgaagctcaaagatcaatggctggaggtacatcgatcctttcattgcatatattattgatatgattacattttattttccgcatttcatatcatttgtatatgctatattacatacactatatatatagtctaacaattaaaatatatgaaagctgttattgaattataccaataatagtatgttatcttttgtggtgcttgacatttaaggtgcttcttaatatttctctatacaataaaatcaacattagatatttaagtgtataaaatctaaaacattaagtatttatgccgcaatttatccttttaaatataatctgtttgttatcgacttttagcaattttaatcagggtgttagcttgttattactagccaaagggtaatacctttggctagttattcttgaaattttgttggttttttagtttttagtaattttgagctagtgatttg

SEQ ID NO: 366021 - DNA, 660 bp, Cannabis indica
aataaatcaaataattgcaagaaatggcaggtttcgatgcgtattttcgattggaaaatgttcccaaggatcccagaacctcaaagaagccaaatactactgatatttcatctcaaaatggtcgattttggattgtcttctccaaacacggtacaccggcaaaaatggtgtccaaactaaaatttcgcattctggactacttcgaactgtttctctacgtccaatctactccttagggtctcttaaactcaaatatgacctttcaagaactcacaacacgaagaaaccttgtcaaatccgaaatcattcaagaacaaaaaacttgaacatgaataatgatggatttcgaaacctacaatcttagcgtgtttggtcacgaccattagcttccttagatagtgcagaagctatttaaattgatcaaacaaacccagaaactctctaagtgtttcaaaatcaaaatctctctttctctctctaagtttcacatgagactatcggtccctctctctctgcacacagcctcctctcttcaacttctttatgcgtttttaaaccctaaaaatatctcataagcaccctatatatactcccaaactctaatcttaaccctagatcaacaacttaaaaaaataataataataataatctaaataatat

SEQ ID NO: 366022 - DNA, 299 bp, Cannabis indica
tgcagcggaataatatgtctccttccactcagatctctaacccttgtatcctttctgtcacagagtattatcaagatctgagtccgaatgtccttcttattgaatctagattcttcacgatcttccacactatgattgaggtaccacttgatgtgtgtgggcactactcattcactcaaggggttcaaatcaataatgaagaataaagaaagataagtggcgactaggttaggtagaaggcactcaggtttttctctgaaaggaataagatgcatcatctttttctgaagccatcacta

SEQ ID NO: 366023 - DNA, 727 bp, Cannabis indica
gtttgggtcccggtctaggttcgggttcgagtgctagtcttagttcagctttaggtctctgtctgggttttgatctgggttcgcgtttgggtttaggtccttctcctgctcctagtcctagttcgggtctagttccaattttgcaattctgagttcgagtttgagtttttgttcgggcttgagttcgagtcctggtctgagtttgggttcgggtccagatttaagtttaggtccaggtcatgctccaggtgcgggtttgcgtcatgggtcttggtctaggttgggtccgagtaccaagttccaatcccgatctgagtctgggttcaattccgggtctaagtcgttggttcttatccaagtcttggttcgagtttgggtccgggtccaggtgtagctttggttttgattctaggtgtgggtgtttgagttcgagtccgagtctgtgtttgggtttgtggccaggtctggaccccgatctgggtctaggttcgggtctaggtccaagttcggttcgcgagtgcgggtcaaagtttcagtctgggtcgggatctcgctccagatcttggttctgatcctggtctaggttcgagtttgggtcctggtccgggtcttgctttgggtccgattctaggtgtgggtgtttgagttggggtctgaatctgtcttcgggtttgtgtccaggtctggaccctgatttgggtctcggttcgggtccatgtccaagttc

SEQ ID NO: 366024 - DNA, 1045 bp, Cannabis indica
tcaccaaattttctcagagttctcagagagaaaagaaattttagacaccatagattacttgcttctcttccttcgctgttaccagtcttcactctaccgtcgatcagcaccaacccccagcctccaaacttcatgtaagttcttcgtatacgttatacttgcttaccgttcgtttatatggcatgttttatgatttttgggttggatgttgagcttctgggaatgagtttgcctgagtttattgtatgatgtgttaaatttcccttttttgcgtcttgattgctccttttttttactacgtttctgttgaggaatcgtctttatcttacgtaataacacctttatggcttagagtagatcttgctttctcgtctttgccctttttttccctcttttttttttttgttgcaatgtcactgcctttgggatttttgcacccgattcttgtcaaaggaaagcctcttggggttttcttatttggcgagcgtccggagggggcatctttccagcggttaggggacccccattcccttttttgaacaatagggtttggtttggggcctaactgctagattttctcaacttccaaaatgtctgcttccgcgtcagttccaagtcttccaagaagggggtggttcggctggccacctggacgaggttatgcagggtcccatggcccaggagaatttcaagtctcgtgcaaatggctgggaggcggatgagctccactccacattgacttgtgcccaccagctcgaaaaaatcgtggtggtggcaggcattaaaccgtcagcctccaggaccttccaccggctccctcgggacgaggagacacccaatcacaattatgggggcttcggcgcttggagccagacccatttgatgtccggggctatgctccctctcaggactatttgtaaatttttagtttttgttggcctcgcgccgtaccaactaatccctcaagcataccgcctgctttcaggcttatttattttgtatgctgcctggagctgggtttcgcccagtccggctgaaattttat

SEQ ID NO: 366025 - DNA, 545 bp, Cannabis indica
gaaatacttgaggtgggataagggatcttccttcccaatatacgtcttccaggttggcatcttaaacatgtagggcaattccaggatattaatcttgggggagaaaagggttccacgtgctcggtccaactcgagatcgttgttcctctgaccggccaggccttggaacatattttttagttcgtccaactgtgcctgcacggctagactaatatgttcggcctcttggcctaccagagtcacattagcatctctttgagcgggattttgagcgcgggttccgagctgaacgattggcacgtcaagctggtcgtccaatcctctcctcctgtttagattgtttctgagatcatgagttgtccaaaatctatcaaatacaaaaacacctggctgcctcagtgactggttggtttggccaatttgctggccagcaccattaacttggttggaatgattgagtatgacttctcttgatgaattactagacaaggtctgcccgcctaccacttggcccacaggtggaacctgtgaccggggattgggcg

SEQ ID NO: 366026 - DNA, 518 bp, Cannabis indica
attcactttctctttctctcttcttcttcttctttcttctcatctattttatattattttataacataaaccattatttggttgtctaatagtttatttatagttgtattatagttgttatgaggttgttcatctagctattttaagttgtttatagtttaattatagttgatttatagttgttgtgagatgatttcttattgttttttagttgtttttttacattttattgagaaaagtgtacttttataattttaaaacattaaaaatgtatttttgttaataaaaattttagatcgtaaaattataaataaaatataaaaaataatatttttgaaaattcctcaatataatatattgtagcaacaataatattcttccttaatatttatatatggtcatgaatattttgttccatatgcgtagcacgcgtaattttactagcattatactaaaatgaacgttaaaaaacatatgttgaaataggaaaaaaaacccaaattcaatattgaattaaa

SEQ ID NO: 366027 - DNA, 479 bp, Cannabis indica
aaagtttatttataacctacatagataacacctttagtgtttcttaaccatgtgggactttaagtttctatttgtagtagtatttctaaaccatgtgggactttaagtttctatttatagtagtttatttctaaacaaaatatgaaaaatatcacaaaattttaaaaatacgatgaaaaaaatctaggatgtcacctagactcttttgtgttttcctttatatttatatatagatatatagattaatacacctagaatttaaatatatctccaaaatttcaaaaataataattaaaagcctacttctactaataagccctaattatctactaattcttaaaataaagctaagcagtcattaaaattatcccccctttaaaaggattttgtcatcaaaatctaacatgaataactctagatactgagccctcatatcggaatccaattcctaggtggcttctgttggaaatttattttac

SEQ ID NO: 366028 - DNA, 458 bp, Cannabis indica
ggccctgctaacagggcaactaaaatctacataacaaacccacgtaaaaaccatcaaagtaactattgaagcaacccaaactataaattttttaaaaaaaaagttgaaaaatagtatgtggtatatacaattttttttttaataatattatattattttcttttattttttattaggtatatatgttttgttgtatatggtatataatttttattgtgtgtataatatatcatttattttaagatattttgtttctattttattatatataaaatttttggtatggtatatatacaaattttaaaagtgtatatataattttgttagcatgatatatatatatatatattttgagtattagtaatgttgccccctgatttcgcccaaaatacgtggaccagttaaacagggacacgtggatcagataacttgtaaatatttgataagtttttgtatgc

SEQ ID NO: 366029 - DNA, 722 bp, Cannabis indica
ctttagatcttttgggcggaggatactgacctgagttatctcgaactctcttcttcaaggcttggagtaccttttgagacatttttgcacaaacaaaacgacgcaaagcaaatataatgtatgtaaaagcatagtataaaagaagtaagtgcgagttaaaaataccctacacgcgggcaggagcattttaccgaacaagcacagacgggacatcatcgtctaaagtgtcttcctcctggtccaccaggacgaccttcacttttccctccacaggggcggatggccgagcaggcatattaggttccctaatgctgatagcgtgttctactggagcttggtaagttaggggagcttgctttttctttttgctcggcttctcccgtttagaatattcttgatcatactgcttggctctgttgtctcccttcagcttagcatcacacttgagttgaatgagctctttctcctgctcggtctcaccagcctggcttggctttgccttgccttttttttctcttcttcttcttctccttcacaggcctcaacacaaagtcctatgggaagagcttgtacttaacataattggcctcagtggccagccgagtgatgtttcaagcatcttctggcagttggagaattttctgtgccctctccctgagtcccaatgtgaaaggagggcagtagtacgagggaatctattgggaaccgagtgtggacggtat

SEQ ID NO: 366030 - DNA, 535 bp, Cannabis indica
ccttcatgatggcgtacacatatttgagtccatccatttggacatcgaagaaatgtttactcggtaccaaccgagcactcacaaagtacagccaagttttcgccgccgggtttatttcacatctgtgcagaatgttgggcgacccgtcttgcccatcattgtcatggaatctcaatcccggaaatcccatagcttccgccacatcgaccatatcgaactgttcttcctcctcaataattcagaggcgctgttcttctcttgagtagtctagaatagcgaacatatcattaaaagaatcagctgtagcgggaaccttcttaccccgcacctttacctctccattcctgcactcgggccaattggcgagaaattcacattccatggtaacgttggcccggcccctagcatccacaaaactgttcaacttcattctttctatttgggcacgaattgtttcgaaccttggttgcgccgcaaggattcttgggaatcaataccccgatcatcaatgtaaggcctaactttgagcctcata

SEQ ID NO: 366031 - DNA, 619 bp, Cannabis indica
aggttaattataacctaacaggtgcctaagaggaaaccagcaagctgctcgggaatattataaccttgccataaccaaggctaaaaaggaagtatcctctagccagagttcggacaagggaaaaaaattgctaaatacggaacctcccaaggcggggatgaagatgtggatcctcgacttggggacccaagcaacaatgttggaccagtggaagaactagaagagattggtatcgatccgaatattccgaccaggaagcttaagattgaaaaaggtttgttgcccgaagtaaaataagcattgacaaaatttctaagagcagacttagacatttttgcctggtcgcatgaggatatggtcgggattgatctttctataatttcacatgtcctaaatatggatccaaacttctggccagttcaacaaaagagaagactgttggacaaggaacgagccctaagtctgaaagaagaggtagagaggctacgcaacaataatttcataattgaagctttctacccggcttgggttgctaatcccgtactggtacccaagctgaacaagaaatggcgagtttttatttgatttccaccgatctcaacaaggcatgccccaaaga

SEQ ID NO: 366032 - DNA, 542 bp, Cannabis indica
aaaactataactaaaattaataaataataataagaagaagaaaaaaaaaataagaaaatgttagaaaatgaagaattgaaaagaaagtccatatgtcatgccacatcaccaaccctaataatataattatatcgatatatagatacacatttaattatagttagtttttaaaagttttcatttacccattgaaaaataatctatatatattttattgaaagtcttttaatggatgctttcaatttttttatcaagttagtttgtagctatgtatgcaataatttctctctagaacttttgtcattcataatatttttttggtatgtttaaagtaaatttggttttagaaaaaaatcttttacatatttttacaaataattatagttgtaatatagacattaatataataataattcaattaaggcttattaggttattttgcctcttgaactttgacatgtaccaaatcatgtcccttgaacttttaaggtcgttaaaaatgcccctgaactattgagattgttggatttaagaatttttgt

SEQ ID NO: 366033 - DNA, 639 bp, Cannabis indica
atattgatcttagtaaagatattataatcttatcgttgtatctttctaagtcaatatcacaggttgatcttagatcaaaagatcttaatcctgacatggttttttgttctttaagttgttagtcaaagcctttcatttggttcgagtcacacgtacagcttgggaacatgatagtacaattgagtgggagcgctaatcatagatatagaatatatagcttctatctggacatagaagtgaaatgatgattttcttcgagcttggcttaatagagataaatggaagagctcttatttcaatgattatattagtttactgaaatattatttataggaagctaagtgttttaagggtaaaatacattaagggatgaaatggtaaagttgtccctacttggtgtaaatcatctatagagatttttttattattgtgattagaatgatggttagcgtacctatattgtggaacatatagagcattctatataattgagagtgcaactccaaatcgatagtggtgcaaggaggaattaataagttaaggattttacttggtaaattctagatctgcttattggaagcttagttatataggctcatggtccccatactagttcagacaatactgcttgtaagactc

SEQ ID NO: 366034 - DNA, 460 bp, Cannabis indica
aaaaagagtaaaactttaatgttaattgtcatatatacatatagatttgacgtataacaatataaaatctaattactcatccaaactaaataaaaatactaattagttcgattggatgttagatgtattggatttttaaacaccccatccaccatccgatctgatccaattggatatttaaaaataacatccaatccgacccgatcacaattggatatccaatgtttggtggtcgattgtaattggatcggttggttctcattggattggatcgatttatgcacacccctacatatgattctcgaaagcacctttacttatggtggcgtagagatctcactcaaatgagagttggttaagttggtcattacctaactaacttaacaatctcgcttcttacagccaccgattttaggatcttgatcttaagcctataaatatcaccaacacttatcatttt

SEQ ID NO: 366035 - DNA, 521 bp, Cannabis indica
gaccatttctcaatttgtgcgtgtcatccttgaaattattttaacattattagagtaaatttctacatacatataagtagagtaaaaaacgtgtccaattgccaaaatgtatttattgaagagaagaagaatatgagtttgcaaataaaaataaagtacaatggcacaaaatttctattattatattgcctttaccttttggttaacattatgggtgttcgcggtgcgggtggtgcggtttttgactattttttcaaaccaacccgcacatgtggttttttcaatattccaaactgcacccgcaccgcgaaactaaaaaaccgcaaaaatcgcaccgcataaaatggtgcggtgcggtttatgcggtttggactatcactaaataattaaattatcacaaatacaacaaattttgagcaacacttgtcaaaaataccacaagtcttgaaaataaatatgaaaaaaaagtttcaagttttaacaatacaataattagtgggcttaggttgggtcttcacata

SEQ ID NO: 366036 - DNA, 604 bp, Cannabis indica
aagactaagttaattgagtttagttaatcaattataattctaaaattagactatgtccattttatgaattttcactaagcaagggcaaaattgtgaagaaaatagattctagggtttattttttaattaagagactttgattagtctaattaataaatatattaaaatattatttaataattaattttagttattaaataattagaattggcatttaagtggttaaactggaaaattggtgtttttgaggaaataagatgataaaatgacaaaatggaaaaattgcaaagtgggcccattatccgacccatggctggccactaagcatggattttacaatttatttttctattattttaatgctaattaattaaatctaccctaaacctaggtggttacctataaatagatagtgatggctcacatttaatagattgatgaaatttcttgtcttcagaaaaattgagcctcctattctatagtcatagccgaaccctctaccctctcttttcttcttcaaattttcataccttgagtgatagagtgagtgcccacacatatcaagtggtatctcaatcatagtgtgtaagactgtgaagaatcc

SEQ ID NO: 366037 - DNA, 686 bp, Cannabis indica
cttttaggtttattttcctcttgattttgttctttactttgatttgtattgatcataagagatgcgttttccaaagagtcaaaggaatctgtaattgaagctctgtttttcccatcatgcttgtgtaacgtttcctgaaacaattaacaattattatttgtactaataatgaagaacaaacaaatcaaaatgtcaatgattatcttatattgataaataacaaaagaatcaatttgtagatcattgacaaagattggaaagaatgacataagatgtgtaccggaagccagaaactcataatcagtaccacaactgcaataagtgatatacaaaagcatggcatgaagtatggaaacctgtatgtaacattaattgaagattaatttcattagtgagtatagttacaaaattaatgtatcatatatatttgaaaaatatgactgtaatttaccttccaaagaatgaatcttttgaaaaaatatgtggatacttctctgctggctgttgaaacaaaagtttttattgacacattgatcacataacaagtcacaaaaaatatatatatttacactttgattgggtattttcaaatctaacttagagaagaaggaaaggaagtacctgagcaaagaagcctcccgagagcagggccaataactaatcctatgccccatgctgtactaacc

SEQ ID NO: 366038 - DNA, 801 bp, Cannabis indica
ataactcctataacattaagaatttaaaattaagatgtgtaacacttttttacacacttaatattggtaataattgttgaagttacaaaatgtaagtaactccacctcttatgttatatttatgtgaatattacatgtatgtaactctcaattacattatatacattaatctcatattaatatataatgtgtcacattttaatattttaatatatcttatattataacaaatataatataacattctcccactagattaaaacttgtgacacaccattgtaacattatttaatcaatcaaatattacatatattccccactttgattgaataaatcaaacacttttatagagatcttgcttagatgcataaagtaaaatgtctttcgacttgaattttactttagtgtatttaccacaaagttagttgaaattttgattgccgtagcattgaactattattccattaatacaaaccgttgataacatgcatattttttctagagttcacttgagatctcattgtatctcgcttgtgtatcgttaatggccatgtgcaacatccatttcatgggctctctagacaataactcccaattttcataagaggtagcaccagctttagtccatagaggtagaatttagtgtctcacagcttatctttagacacatctttccattaaaaatcatttcgattttaaccctccaaattttattactagtactcgtacatagatgtgacatgtcgagtactacttttcactctatattgacttgttattacctattgaacttaagactag

SEQ ID NO: 366039 - DNA, 543 bp, Cannabis indica
ctcaacgaaataacgagtgggactgaaacgacctctttctctgagaagcagagatgatatggaattgggtttggatttggatttggcgtcgtccaggcctggtcctacgtctaaaatggcctccaagtagctattcacccaatcgttccccgccatttcttcttaattattagtagttagttaatttggtttgatcgatcaacaacctcagtctcagtgttgagttcaaggtgaggtctttatagtttcaaacaaaggagagagagacatgcacacagttagtagtacaatgctattatgctattataatattctgtctactgtttatatcaacttttctctttcaacacacgatttctttacacctatatatattctttagtgaaaaataattataataatccaaatctctatatctattttatataaagtatgtaaggtagtttttaagttaactttaaaataatattctttactaattttataatgttattatatatatttaaaaataaaaattatgtagatattttatgtaaagaaatt

SEQ ID NO: 366040 - DNA, 839 bp, Cannabis indica
tgtgagattatgaatcaaattttatgagattatgtagaagaaaaatgtgagattatgaatcaaattttttcataatctattatttttatattcaaatcatataaagttgatgtcattattgtagttcatattgatatcctcaaatttctaattagccaaactgataattcttttaaaaaaaataattttaaaaaaacaaaaattaaataaaaataaattcatattattcacaaaaaaaaatatcatatacatattaaatgaaagaaaaattaatttttccattttctttaagccatattatcttgacagattaataataaacttttttttgttaggagattaacaataaattttgattctcgattcaaatgctattttctaattctaatttcatatattcaaaattcccattccataaactttctactaatatttttaattaatgaaataaaaaggtaaactttaactcccataatcaatggaaacaaagtcaaatttcaagttctcaaaatctataaaataaataaataaatagattttataaatacaaactcaaacattagaaccccagtaaaacactaaaactaaaaacactcacaataaaatttgaactcaaaatttaacacacacatcagaataaaaattaaaccataaatgaagatttatgctactatttttcgaatttcggtatttattagcaaaaaatttaatattttaagtatttatgtcacaaatttattaatagtaaaattaaaattttaatataattttactaagtaattattattaattatattacacaatttattttttatatataatttaaaatattttatata

SEQ ID NO: 366041 - DNA, 607 bp, Cannabis indica
caaggaccttatgaatcaggtgttcaaagattaccttgatagatgggtgatcatgttcattgctaacattttggtctattatgaatcagaagaggaacatgagttacatctctgattagtactgcaacggttatgagatcacaagttgtatgctaagttcaaaaagtgtgaatttcggttatctcgcgtgtctttcatagggcacatagtggataaagatgggatcatggttgatccggccaagatcgaagctgttcgggattggccaacaccaaaatgggctacaatagttagaaattttttgggtttagctgggtattattgtcagtttgttgagggtttttcaaagattgttgtacccttaacgaagctggcccgaaataatttaaagtttttctggactgatcggtgtgagaaaagttttctagagttaaagtagtgcttgattgccactttactgttaactcttccttcagataaggagaagtttgttgtttattgtgaggcctcaagatagggtctgggttgtgttcttgtgcaagctggaaaggtaatagcctatgcttcttggcaattaaaggagtacaagtagaggtaccctactcac

SEQ ID NO: 366042 - DNA, 948 bp, Cannabis indica
ggaggctatggcagatggatgtaaagaatgcctttctacatggagaactggatagagagatatacatggtgcaaccaagaggattcaaggatagagcacatcctgactatgttcgcaaactgaaaaaagcgctctatgaattaaagcaagatccacgagcatggtatggaaagattgctgagtttttagtagaaagcggatattacacggcacatgcagattcaagcttattcgtcaaagtaaagaagcaaagatcgcaattgttctggtatatgtcgatgatctcattatcattgaagatgatgatgcagaaatttgtcaaacaaaagagaacctatcagtacgctttcaaatgaaggagcttggagaattgaaacacttccttggattagaagttgaccgaactaaggaaggcttatttctctgtcagcaaaagtatgctaaagatttgctgcaaagatttggaatgctcgagtgcaagcccatctcaacacctatggaagctaatgttaagctatgtgctcatgctggaaaggacttgcaagatggagcaatgtatcgacaactggtgggaagtctaatctaccttacattgactcgaccagatatttcttatgtagttggagtagtaagtcgatatatgcagcaaccaaagaagccacatttggaagtagtacgacgaatactgaggtatgtcaaagataccattaactatggtctcttctataagaaaggtgatgaggttaagatcgttggctattgcgatgctgattatgctggagatcatgatacccaacgatcaactactgggtatgtattcaagattggatctggagtagtgtcttggtgtagcaaaaggcaaccaacagtgtctttgtcaaccacagaagcagagtatagagcagcagcaatggcagctcaagaaagtacgaggttgatgcaactaat

SEQ ID NO: 366043 - DNA, 945 bp, Cannabis indica
tagcaagagcaaaagatactactccccctgagtaacacaatcgaatatcacaaaaaaaccaaaaacatgctaactttaaacgatatgttcacaagtactaaccaaccacaactccccctggaaaaagggtccagagttgggcaacaaacaaacaaattaaaaataaatatctctccccctttttgtttatcggagtgccaaagtaaacaaagaaagaaaaatagatataagttcaatcaaaaaacaaaggagaaacaacttaatctcggtagagtttaatcaaagaagacagttgcctggacatctcatgctggacttcttccattgctccaaggcgagtatacacattctgaagttcagacttgacttccaggagttctgctgcagcagaacctgaacttgcagcagcagaagcagcagcagcaccagccttgggtcgtttttggaacacaccatcaaagtattcagagggctggaatgtagggccactgatgggaggctcaagtgtttcatgtgattgagccacattcttctgagaagataaaaccttataaattagattaggaaacacaagtttaaaggttggctttttacctcttcggaaggagacaatttggttcagaatgtgtgaggccaaatcaatggaagttccagaagtgattcggtaaaggagtgaagccacatcttgagataccacggttttgttagaatttggaacccaattgcttaaggcaaaccgcataagagaagcatgagcaaaagtgaggtgagtgattcgaagactctcccctggtttcaattctgaacgagcccctgtgagttcagagtgcatcaactcacgatccatggacatcacagcattggatacattctcgggcaattgcaaagcttgagcaatatccttttcagaaaaagagaaccaatgacccctaacataaactcttc

SEQ ID NO: 366044 - DNA, 1191 bp, Cannabis indica
atcataaattatatttattagtcaaactattttgtatttaaagtttagacattatagtgtttaacttaataatttttattgtatttgaatattgaagttgaagtttaaaatctatacaatattactacttttctttattattttattcaaatattactcaattacatttatcttagggaaattctataatgcaccttcttaaaagggatacatcgatacatctctatctattatagtatccaaaataattttttagtcaatttttttctcatattcatgtaagttatagttatttaagatatcctgcaaaattttaaaaaaattagaaaagtttaacatgtcgaaaattacgttcaagtaatgtgttgcacgcgcaactattttattttatacgcgtgtaaaacagactattcgaacattattttttatattgtaaattattctgaatttctcaaaattttgtaaaatatattaaataactttaacgtacatgaatatgaaaaaaataattagactaaaaaaaatttctgaatgccaaaacaagtagagggtgtatcaatacatctcttctaaggttctaagggggtgcattgtagaatcacatttatcttatattaaagtttttaaaattaaattagactatagcattttttttaacttgaaatataaataatgtatttttttattttttaaaatctaattttttgaattaaaagctaagaataataattaataaaaaaaaaaaaaaaaaagaataacggtttggacgggttaacccgaccaaaccgacgaaatcaggattgattttttttttaatttttaattggacgggttacaattgaatatttgcaaattgtggttggtaaaaatatactataacccaactaaaccaatcaacctacaccctacttctttgtcagccgcaaaaaccccaagacaaaaaaacccaaccttcagacgtgaagccacaatgttagacaccaaagaaggcaccgatattgaagtttgagggagttagatcatgaggttgagggtaagaatggcgaggacgcgggtgtcactaggggtgggcatcatccaatccaatccaattgaaccgaatcgatccaatccaatccaattacaaaaagttggatatccaattacaattggattggattggatgctaaagttggattctaattggattgg

SEQ ID NO: 366045 - DNA, 618 bp, Cannabis indica
atatatatatatatatatgaatttgatatatctagtagtactactttcaatatagatgatggcttagaggactgattttacaaatggcttggtcaatcaaatatagatgagtagtactacattttatattatacgattttttttatcatataattgtttattaacattactttttttaaaaaaataggtggcgtttggtaacacttttttaattagttttttgtttttaaaagtagaaaagtgaaaaatatttttcaaaaacatgttctataaaactgtttttacttttcaattttataattagaaatcaaaattttaaaaacaaaaaaaatcactttcaatatttttttaaacagttttttttcttaatcaatcttttagattacgaccagacccggacccaaatcccctccctacggccctggcgctaaacccgacttttgacttgaacccgaatccgactccggacctagacccgacttaaataaaatcaaaaaataaaaataaaaatgaactttacagaatacacttttgttttctgtttttaaaattgaaaaataaaagtggttatagaacgcatttttatttttaaaaaataaaattttcaaaaacaaaaat

SEQ ID NO: 366046 - DNA, 778 bp, Cannabis indica
ctactaaccatgtttgtttttcttcttatttcagctccagctgcttgaacttggattgctatcctaacgagttgagtcggatggtttgacgaatgggtggagatagtccaagatttaagatgaagctcagaatcatatatttattatagtttttgaattaattgtttaaatttacgaacaatttgaatttcaattattggtttgggatttttattccctatttctcatattattgcagacaattcgttttatttttgagaatattataataaaattttctctttttgaaatgaattgcatttatcaattgagcttcatttactttatcttgtgtatgccagtaccaattatatttatatatttatagtgtttgtatgtgtttgtgttttattattgagacaaattctatggtcttttaaactctgcaaagaaagaatgccacataaacacttagaatttcaattctatgtttatgaataattgttaattctaaaacaattattaagaatttgtttaataaaaagatcttttgatttgataggggtggaaaaagttaagaataatatgtagttcaacgatcttttatatctattgaactctggattatattcataactccacatgatctctatatcacttaggggtggattaaactattgagatatgtagttcattttgaactctagactatactcaatacaccatagtactctatggcacacatatttttgattaaacatggatgtaatataatgaataaaattagcaaattatttag

SEQ ID NO: 366047 - DNA, 1035 bp, Cannabis indica
aaatttttatttttataaaataataagaagagaaaaataggagaaaatagaaaatatagaagaaacttcatgtgtgatgccacatcaacctccttaaaaccttcctttatatatatatatatattgatattgatatattgattgaaggcatagtatgaaatttattgttaaattgaattcatagtatgaaataataaacaaacacattcgttttgcctctagatgtgtggaatatttttattttgggaaaacacttctagatgtgtggatttcacaaaatacttccatagaagtacttgctaaaaacgtagactcactttcaaaatgataataatgcaaattcttgtccactagaaaattaatttatagagttagagttaaaatatagtatttgagaaagaaagataaattatttaataaagtggtaaaattgaaactcatagggcccacaaggggttcggccacaagggttcaattttaatgccattttatcttttttttaatctatatttaaatcctaacctaaccataacatgcatagtataaatagataattataggctcttatttggtagatgttgataacctactttcactttgttaaacaaataagagaggctcctataatttttgaaatcccttctcttctcccctcttgaattcaaactttatagtgaagagagtgcatgcccacacatttcaagttaatactcaatcatagtgtagaagattgtgaagaattaatccatcatctgaaggagatctaggttcagatcttggcaatactctatgatagaaaggaacaagagttagagatctgaaccagaggagccattatattctgctgccaccactataaggttttctacaactttatgtgtgtttattttattcttttaagaaattcatatttaggatgttagaatctagtcctataatcaacagagatattagtaaatctagattctggtaaaataagttctaacaccacattaattcttggccaattggttaagagagcactgccatcttttt

SEQ ID NO: 366048 - DNA, 810 bp, Cannabis indica
actacaacatcctctggctcccagtgataagtccacttctacatatcatttcataaaacctcgatcaatatgtgtgctctcacattattcaattttttcaaagctagtatttatacatctcacataaaggcatctaattcttctattggaatccttatattctgacgccgtcgctaaaaaagattgtagtccattctaaaattcaggacaaccaagactcctaattttggtccaagacttattgattgcgaccattacagtgaaggcgacaaatgaaatgttaaaagttttaatcatttgtaatgttttatgaatgttttataaaattgttttgatttcttagttttgatcactttggggtccataacgcaaggtaaatctatagttttgttattggaaataaagtgtagaacacgtttcttttagattttatttgtaagtatactaaagctatgacatattggtaagtatactaaagcaatggtatactcttttcaactattttttttattaactatatttgtaaaataatatgaatattttatgaaagatgataatattatttattattttatgtaagaccataattttaaagtttgattattatttgatgatatttaatattaattacatttaatttatttatacttaatttgaaaaaatttaagttatcttttattaatattactaagtaaatgaaatcaatcttactaattttattaatttgaataagtaaaaaaattaatttttcatttctaatataattttttttatttaactaaaaatattgttaattttttttttaaaaaa

SEQ ID NO: 366049 - DNA, 604 bp, Cannabis indica
cgtgtcagaatcaattaatgttgtaactgcagagtaagcattttagaaatactttgatcagaaatacaatagagaacgccgataatcaatactcaaatgcaacctttgcgctctgaatgacttaaagaagatgttttactactaaaagaacagatgctgaaagaaattgtggcaagaattggagatgaaagaattacaaaatggatcgttgacgagccaaagccaaaagactttactatgtcaacttttgtattattcaatggcaaaggagatccattggaatatgtgctccaatttgagcaatggatggcattggagaaaagtaatccaacaattagatgcaaagcattctttacaactttaacaagatcaattttgttatggttcaaacaattaaaagaaggatccattgattcattcgatggattggcacaactccttgccatacaatacggaggaagagctaaaagaagaaaagagagaaaggattgggaaacttacaaaaatactgacttttggcctaatctttacaaaaatactgccacacggcagaaattacctttatactgtcttggccaatttttttcttttatattgtaaacac

SEQ ID NO: 366050 - DNA, 1033 bp, Cannabis indica
aattctggagattttattaaactctaggggtattatttgattaatttaagaaatatgtaatttttgctcgacgataacagaaactgcggtggatggctagtttgatcacatgggtaagtttagaaccttatttcttagtaagaaatattttagagaaaataaaatatcgggattgagcggggttatcgaatttgaccattttacccctagcttttgaaaaaccttagtttttggttcaagggcaatttagtctttcgattaaatgatgttttgagtggctgcctattagagtgacacctagctttagatttttcagcaaggttatgaattaattttcatttcatttggaggaaaataaaggaaaaaggaaaatcaaaagaaaagtcaaaatagagagtttcctctctttctctctttcggctgaagcaaccagaggagatcacccctttttaccatttttttttactggaattcttctaaggattcaagtgttcttgaagctaaggtaaccctagttcttttctagttgtgttttctcaagttttcattggtttcaagttgtgtttttgctaggaaggggctgttagtgttatgtatgcttagggtttgaattctaagtttattttgagttgattttgagttctggatattagttttggtgtatggagatggaattgagtatgcttgagctttgaagctcaagtttagggctttaatggcatcctttgatttagtgattttttctgggaatttctggttggattatgttgtatatgcattgtacaggtatactggaaagtttgatagagtttggcttgattttgaagtcatgggggacatttttcgggttcccagcacagaactggaattccggttctgggggacctgtagcaaccggtcgaccggttggtgtcctagaaccggacttccggttgggaaccggtctgccggttggggcagtttttggaaccctaagttttttcccatttttgagatattttagagtatttccatcgatagggaacttttaggt

SEQ ID NO: 366051 - DNA, 757 bp, Cannabis indica
taatttcttctgactccactatatattcgcaattgtactcttgattatatagaacgctctattcaccaagaacagagatgctataaattatctattgtttcaatctaaataatcaaagatcctctatagatgatttacattgagtaggcacaaatataccgttctacccttcaatgtattttatccttaaaatacttagcttcttataaatgatatttcagtaaactaatataattactgaaataatagttcttccatttatgtatgttaagccaaactctaaggaaatcattgtttcatttccaaatagttatagaagctatagttttcatatttatgattagcgctcccactcaattacactacaaggttctcaagatgtaagtattgagccgatccatttggtcatctttaatgaacaagtcaaagaataaatgtaatacatttaagccagaatctaatcatctcaggattaagatcttttgatctaagatcaactaagtgatattgacttagagaagacataagggtaagttgatgatattttttccactgttagtattggtctagcccgatgtacagccaatacatccgatactagtatactttgctaatgccctggaaaggacattctaccattgtgtaagtaaacttcatccttgattatcacatcagtagtgcactgataaatcatgggactaaaaactttaaagcatataattatgaatatcttccactgtgtagaaaatactataat

SEQ ID NO: 366052 - DNA, 894 bp, Cannabis indica
tccaaggtgcaagtaaactacgttgtaaattatcatatcaattaaaccctgtgtactgataaatctaggaatacatttaatcacacaatcttgattatttttcactgtgttgacaacacaataaataagaatatcaatgtgataagtgttatactcaaaattcagtgagcacatcagaggaagacacgtgtcaagatgggaaaacaaagggctcaaacacgcaatcgtaagtacacttggcatggaacaactcgttagaaacataatttgcagagtatgtttataactcggttggctgaatggtcttttgcgaggcagaaacgtacaaactgctaacttatgtatcgacgagaaaccatgtgagtgcaagtgtgcatgatgaggcgtcaacctcactgcgtgaaagagaaactataacgataaaaatacttagcgtatattacatggtatacaaactaagtataaacagtatggtgaatcaagatgacagatagcgaggtgtctatctcactgtaagatggcatacatttgaggaagattatcccgacaccaaaaaatatagttatcaaagttaagaaaaaatattaatctcgggaagtctgatgacaagcaactgcttgccatcaaaattaacccgattcctagtgaggcatccccacgagataaggcttaccatatatccttaaatgtgtgttcatctcggccccataaaagcgggatacttacagctgtgtgaattataaattaaaacctcatttactaggcgtgatttgtaattaaatcccaagatttgagggaataattgatgtaacgattaaagtcaacttttgtaattcactgcccactatgtaattataaatagtgacagacaagatcaaaaaaggggacaaaaaa

SEQ ID NO: 366053 - DNA, 1212 bp, Cannabis indica
aataataataatattttttttatatataataatcaattatttaatttgtttgagttgtctctctggggtttggggggagaatgctataaacctagttgctcaaccattttatgactcggatttttcctactttgtggaatctattctattcatatctctcaacctttttcctttatatttaatattattatatattacacctgacatgcagcctcccctttctctctctctctgcaataatattccttattgtttctgattatatatacgagaccaagctactagctggggtcgaccttatgtataacgtatgtgtgtggttatatatatataatacttacactcgcaaattttcaaaattatattctactatacatatacttcaagtactactactactactgattcttcttcttgctgattctttctattgtataaatgttatatatattaattatataatgtgcactcaaagcaaagcaaagcaaaataagaaaatggaagagaggtaggggagagaatgagtgagggtatgttttggttggtgtgtgggcgggtttcccaaatcattccctgtggtgtggtatggtgtggtgttagcaatgacaagtgcaccaaagggaacataccctagtggactcatcgggcgtgcccctcgctaatgctgcttattctgaccacaccactcttttatattaatttaatttaaacatacatatatattttaacctttacttttctttttctaattaatatatccttaatatataattattatgttatgccctagctaattataacactaacatgtgtttgtgtattggactatgttatatcctatgcactacttgctttggtttactacgccttcatcattataacatatgctttccaaacccaatgccaaatccaatctatttacacctgtcatcctcctaccgatacaattatgcaaattttttaaaggaggttttactaaaatactagattttgaataaaagtttataattttactattacacagaaattttaacaaaaatattgtttttttttatttttttttttatagaaaaccataaaacactaaatagaataattaaaaacaacagtgaaacaacatatgaaatgtaacaccgtacacagtatagaaaataataatattttttaaaaaaaattccaccccacagtctaaaagaaaaaaaattaaaaatt

SEQ ID NO: 366054 - DNA, 633 bp, Cannabis indica
gcatgtcatccacgtacacttcatattttgcccaatctggtctttaaacattttgtttgccaatctttggtacgtagctctagcgtttcttagaccaaacggcatgactttgtagcaatagagacccatatctgttcggacacttgtatgttcgtggtctggtggatgcattttgatttgattgtagcctgaataagcgtccatgaagcttaatatttcgtgccctgctgttacgtctatgagctgatcgattcgtggaagtggaaaacagtcatgagggcatgctttgttgaggtctattaaattaataccgactcgccatttcttgttcggcttgggcactagtacgggattcacgacccaagccgtgtaaaaagcttcaattatgatgttgttgttgcacagcttttcaacatcatctttcagggctactggtcgttctttgtccaacagcctttgtttttgttaaactggcaggaagtaaggatcgatattcagaacatgtgaaataatagaacggtcgattccgaccatatctgcatgtgaccaggaaaaaacatttaggtttgctcttagaaattttatcaactctgattttacttcgagcaacaaaccctttccaatttttagctt

SEQ ID NO: 366055 - DNA, 725 bp, Cannabis indica
aagtattaatttttgtcaaatttgtaatacacattatggagttacaaaatgtgcagaatgatcacaaaataggagttgcaaatcctttaaatttgatgatccctggaatatataactctcttctctttttcactctttaattagtaaaagatgttactaattgttatgaatgtgaatgaatgatagctattaaaaataaagctgctggagacttgatttattcatttataaggtgtataaagagttcaaaatcaagtggaagtgatttggaacactttggaaaagaattagctaaagctgaaaaaaaaatagtaaatagtaactagttacttttttttcagcatacaagcacaaacgtttttaagtctttctaacatcccaaaactcctccaaatcacccaattaatactataaatgcccaatttataattggtaacatccaagggctttatggtagtcattcatgttcatatgggagtgcaaaaattctataaatagaggccatattgttcacttgaaagagaagtagttgaaaccattttgttgtggttagaaccttgtgaggatatgatcatcccttagacactaggctgagcatatgaggcttgataaatcattaagagcatttttagagtttccctaagtgtccatatgagggaggaaatgacttttaggacaaaggtccttgagccttggtcaagctttgtgtgtataattattcttct

SEQ ID NO: 366056 - DNA, 631 bp, Cannabis indica
tcagcatttcacaaaatttcctcatttttccagagagaaaagaaacctcaaacaccatagatttcctgcttttgttccttcgtcgttgccaatcaaccttttaccggcgatcaacaccaacacccagtttccatacttcatgtaagttcctcgtatctcgtatactagtttctcgtttgtttgcatagcatgctttattgttcatttacttttctggcttggatgttgaatttctgggaatttttgtttgagtttctgcacaacgcggtagattcttcttcttttgcgtttagaatacttcttttcaccacattttggtcgaggacccatcttcgtcccacgtaatgacacttaagggtttagagtagacttcgtcttctcgattttaccctttttttttttttttctttttcccttacttttttttgtaatgtcactatctgtgggattcttgcacccgactcttgtcaaggaaaacccttcgaggctttcttttttggcaagtgtccggagggggcctttttccagcagttagggaacccccattccctttctgaattagggtttggtttggggcctgactgctggattttttcaatctttttcagaaccaaaaatgtcttcttctgca

SEQ ID NO: 366057 - DNA, 546 bp, Cannabis indica
tttttcttcatttatttattttgctttcttataatttttttcctccattccatacagtattcaattttaattttagcaaccctaaaactcatttccctttcccattttactcacagccgcgatcctcctattatctctctctcgttcccccgatccgatcactcgctcaagctccgattccgactgtcttcctcaggccctccgcccccggctccgaccgcctcctttaattcccccggccgtacgaatcccacagttcccttaccccatccctgttctctcggcctccaagtctaactcacaggcacgaacaaacaaccactcacggtcatacccacacaccgtagactacgatctctaccctccctttgtcaaactctctcagcttctatgtggtgattgaggttagtcatgctaaattgatttttcctaattatatatatatattttgcatctggatctggttccatttttttatctgtttctttttttgttggtattttttgattttcttatttgctaacattaacaaaaattgacaaccaa

SEQ ID NO: 366058 - DNA, 792 bp, Cannabis indica
attaataacaaagactcgtggactatggctcattaatgcccgaaccacgtaaaaatcacctgcattaattatcccaaagctctcatcattatgtcatttaattggttgccaaaaacctcggtcaacaataattatgagttgatgactgatattttgttattttttttaataattttttatttctattttatgtgagaattttttaatttctaaccttttatttaatataaaatttaaaggtatctttttgattaaacgattataaaaaaattagaattaaataagttaattaaaaatatctaaaccataccatttgaatttaaatttgatcagatacaattttatttattttcacattattaattaatgaattttatttggtatatgtctttttaaaaaaaactatatggattcacttatgtataaaagtaagtagtgaattcattttttgatttgttttatacacaaagcaaacctattaagaaatacggtaatgacaacaactttaaatatagtgacaactgcaagtgagatacaattattacatacaatagttttgaaatcataagccttatacatttatcaattattttatttattattccaatttaatttatccaaacaaaatatattttaaaaactaatcgtacaatattaatattttttttggattatcaaaagtaaaaaaataaaaatttagaagaatttacttatgttattaaaaaaaaaatataaaacatataaaaaatcaaataataatattcggtatactaatataaacgtgctacgtgt

SEQ ID NO: 366059 - DNA, 694 bp, Cannabis indica
atgttttttataacaaagtctagtgcttttttagaagttatggtcttcattggctcggcctccgtccactttgtgaagtagtctactgctactatagcatactttacccctccctttcccattggtagggacccaataagatctaccccacaaaccgtgaaaggccaggggctagtcatcaaggtaatctcgttgggggggctcttggtatgttcgcgaatctttgggacgaatcatatttttggacatagtctatacagtcttttttcgtggttggccagaagtatccttgtctcagtatcttcttttagagacttgggcgtcctgtatgatctctgcagaacccatcatggacctctagcataatttgcttagcttcagggtccgatacacaccttaggtacgggatgttgagtcctcttcggtagagaatgttatccatcatcacataacgatgcgcatgatactatatccttctagacagtgtcctttcttggggtaactcgcctttggttatgtatttgatgatgagatcatctagttgagctcttgctcaactgttgcacaaaaaatattggggccaaatgcttggttctgtgaggcgttcaacgggtaccacctccagtttctcaatctctctatctgatgctaacttagccaaacaagtctgtgtgggcattcttttctctgggga

SEQ ID NO: 366060 - DNA, 558 bp, Cannabis indica
aatcacgtaatacgcctatgttagttagggtgttacacttacattgatggcagtagaatataatgactcatttcattcagatctctagcccgtgattcctttctgtagcagagcattatcaagatctgaacttggatcttctctctttcagtttggttaaccaaagtcttccacattttgattgagtacttgacttgttatgcgtggccatgatactctatcactaaaggcttaaatttaattgagtacattctcatcatcattattatcaggagtcttttttttttatatattttctttttcaaagaaggctaccagtgaaagtttttaatctccacatttcatcaaatttattctcttatttgatatatgctaatgtctatgcaaatttattttttaatataaattattatatttattagattttatataaaaatacaaatataaattaattttcacaaaatagtttttttaaaaagaatattctcaaccaaaaagtgaaaaagtaattattaattttgtttaaaaaaacttgttgaatttaccgttaaaaaaatc

SEQ ID NO: 366061 - DNA, 537 bp, Cannabis indica
cattagggttccaaaccctctttcaagaatatcacaaggcctacccaaaagatcaattaccctcgtagccacatatgaatatgtagctctagaatcaaataatacagtatacaaggagttgttgacaataagctgacctgtcaccacggaaggactggctacagcatcagctggggtgatagcaaacaccggagcaggtacaggttttacctgtgctttcgattcttccttctttgcctgagggcaatctttcttgaaatgccccaccatgccgcatagaaaacatgtcttccggttgtactctcccggatgatgtttcttacaatgtgggcactcagggtaagaataaccctggtgtccacctctgccttagttcccacggaaccgcttactctgccctgaaccaccagatgctgtggtaactttcctcttttgattagtggtggaatcacaaccatccctagcataaacaggagtaggaagggtgggggtcccaccaacactcggagtcactcggggctcctgaaggaatttcac

SEQ ID NO: 366062 - DNA, 728 bp, Cannabis indica
ataaaataatataatataatattattaaaaaaattatatatactatattaacaaaattatataccacttctatatataataaaataaaaactaaatatgcatgatctaaaataaaatgatatactatacaataaaacttatataccatatagcaaaaaatatataccttacaataaaaatatataataacaaataaaaataaaatatataggatgctaataaaattatatatcatgttaacaaaagtacaatagaaaatataacttaaatattattttaaaaaaaataatatatcgtataacaaaaaatacatagacaaaataatataccatgacaataaaattatataccaccattgtatataataatatagaaactaattaaatattatttaaaataaataatgtatcatacaattaaaatatataaaaataataattaaatatatgtaacatgccaataaaattatatacatacattaaaatatttatattatgctaacaaaattatataccactattatacatagtataataaaaaataaatatcatctagaataataatatatcatacaataaaacagaaatatattgtacaactaaatttatgtaccaacaacccacaacaactcacgaaaaatgaaaaaaaaaaaaaacgacataactttcaaataaaaaatattttaacaaaactaatatagatataccataatctttaagtaatttgct

SEQ ID NO: 366063 - DNA, 629 bp, Cannabis indica
ttttcttgaattcaaatcacttctcttttgcccccgttttccctttagcttttgccttcgtcttctttggagatttaggtgggctttctggctcactttcaacattgtgaatctgtttcataagtccaaacttgtatagcaacacagaaagcctaaggcgatactcctcaacatcgaagtcagctgaaatattctttccttcaatgaaatactcagcaaaagcagcaacaaacacaccacaatcactagaaacaacaacaacaaacaaaaaatcaatgttagatatgttaaattaacataaaaacaacaaaaatataacattcgtacttatacacttgttcaggaagtacgtcagcattgacaattgggaaaggtgcaacaggattcacagatgctggtaaggtataaggaagctcatcataaacacccagcatagagaaaaacaatggcaacatgacagaataaggttccaaagcaagcaaagaagaagccgcatacttcggtgtccttagagaattatacaaatatataattctagacttcatgtcaaccctacccataacccaatgactaacaatctttatgtgcaccaacaacaacacatggtcagcctgactccaacgtgtacc

SEQ ID NO: 366064 - DNA, 644 bp, Cannabis indica
gttacacaatagctactactcattcaacttgagaccacctaacaccagacaaaggtacaaggtgcaagaccaccacttataacctgtagcttgcaggtcatggatgtcaccatgttccttgggaccactattgtacccaaagtcattagagcctataaataccattctttcagatgtgagaaggggtaaaaaaatcattgtaacacttaacctagagaaatatacactttaatctttctccatagctgtaatacccggttaaaatatacatatattttaaattttatttgttatacaatttgtgtgagaataaatatttatttatttctactaatagtgaatagagactattgcttagaatagtattgatagatttctaaacatagttgaaattatagtaagtgtcaaggtaaaattatggtgtttttacgaattaggataattactcaattaaagcccaatatgaaagtctattagagttttatagattatttagtgggtttaatttattgtatgagtgcattaaataacattataatggaattaatgtcacaaaaattcgtaggttttgataaattcgcaggattaaaaactgttttactaaaatgatcatatctagagttttagagctccgattgaggtga

SEQ ID NO: 366065 - DNA, 599 bp, Cannabis indica
gaaaaaaaaaatgaaaaaaatgaagagaaagagagaaaaagaggttgggtagtggaaatggggttttgggatgtgaaaatggtgtttggagggggataataagggctgccggcggtgaagtgcgaaggttgcaaagagagagaaagagaaagaggaaaatgggggagaagggttcgtccctgcctttattcagcatcgacttttgccagcgcaattaggtgcgccggaaaaagtcaatgctgaataaaaacgcacaaaacgcagggtttcatttaagttttaccttttgcccgcgcatataattgtgctgggaaaagtttcccacaaaatttccacacacgtttttcatttgggcgggaagttgaccgccaaaattttcaggccttttgccggcgcagtaatgcgctggcaaaagcctactcccgatgcaacgtgtccaatggtgaaacggttcccacttttaccggcgcactgtgatgcgccggcaaaaccccctacctacttttgcgcaagtaactgcgccggcaaaagtggaaaccgtacagccaacaattcccaccttttggcagtttggctccaacttttgccggcgcaattag

SEQ ID NO: 366066 - DNA, 605 bp, Cannabis indica
taaggataactgaataaacaaaactacataaataattaaatgaaattaagctagaataaaactaaaaattactaattactactaataataatagacaagtggaataagttattaagaacataaaataaaatagaaaaaatacggaagggcaaactcccttcagtttataataactgatcataaaactacctaaaaaaaaaataagttttaagaatgtaattttttcatgttgaggaaattatttgtaattaatcacaatattttttctctttatatttaaaaataagatacttatcaaatacaaaaaaaaagtaatattaaatattaactaaagcaccacaagcaatataaaagtacacaaatcaagcataaaagtgacacactaaaattttacgtagaaactcaatacgagaaaaaatcacgggaccgtagttcgctcaaatcatcaactatcactaaagtttaagaggaaattacacttagtatgagattttaaaagttcttatgataaatatggcacatttaagtttggccaatttatatggtatttttttgtttttaggtttttgtatggcatttgatatgccatatatatgtaattaggt

SEQ ID NO: 366067 - DNA, 803 bp, Cannabis indica
agaaaggattcaagggttagagatctgagtggaaggagacatattattccgctgcaatcaatgtaagattttcttaactttatatgtgttttctttttatcgttttagaagttcatatttaggttgttaatcaacatacttgtgagtagatctaagatcctggtaaaataattccaacaatcaataggagcaagttcaaagtcttcttcttgctcgttcatgcactagattacacctaaaatagaaaaaaaaaaatacagcacaacaaagtgaggttagaacctcaaaccaaaaaataaattgcaaaatacttaataatacacaatttttagtttcaatccccagcaacgacgccaaaaacttgttgtgaaaattatgcatacgcagtcaaacaagtaataaagtgataagtaaaatcgtctccacatggatcgcaaacaaaatatgatgtaaagccaacaaattacaacttaaagcaaaaataaaaatatgagaatggttaagcaatgattctaaattaaaatgactgtaattatttagtatttttgtaaatttcccaaataataccctaaaaatagaagcccaaattattccaatctggcccactaggtattgtttcctccttccacaacaaccagctggcgtactttgagtggctggtacataattgatgatgtggataagttaaattcatttttttaaacttctttcgtgtcactgaccaaactgcctagaatgctatagcattctggcagcatttccttccagttttcaacttttgttccaacttttcctttgcatca

SEQ ID NO: 366068 - DNA, 612 bp, Cannabis indica
acccgaacctagaccgggacccaaacccacccaataatcgggaccaggagggtcctaggaaacagaactaggaccgggacctagttcccgacccagacccaaacttgaacctaggatccagctcgtgacccgacaccagaaatcgaaccagactgggacccgagattgggatccggatctagacccagggcttagacaaaacccatagtcggtgtctagatttgggacccagcccaggacccgaatcatgacaacgacccgaacccacacctagacctgaacccagacccaaacccaaaagtggaacccaacccataccctatgacccgaaattggaaccaaagtcggaagttaatcggggctggaattaggacttggacttggaatcataactgaaataggacctagatccagaaccgtaatcggaccaggactcggactctaaatacgacctaaacctgaatttggaactggacccggatcccaacacaaacctggactctggacccgaacctgaacctgaattcagacccaaacaaggaaccaaactagggacacagaagcagggtcgggacctagaaccgcaccccagtctcgatcccgaacccaaac

SEQ ID NO: 366069 - DNA, 530 bp, Cannabis indica
ttactctgggggtggaaatgtaatttttggagaagtgtaaaaaccgatctagaatctctaatctaccagtaagagtgaatgttaaagttgcaagaaagatatttattcagtctaaggaaagttctatgtagttcttggaattgtaccaacaatttatcaactactagtgttactgcttgactaacacagaagtagttgccaaaaaagtaaagaatccagtatccctagaggagtagacatatacaaaggaatatcacaatatcaaggattttgtgattaaggaaatgtaatggtggaggaaaggatgtattgaatacaacttgtcagatcctattacggagagaatactacatactacacttgatctgtatgtcaaggtgttgagattaatcgaaatgcactttttattttatattagtgcaagtaagagtttgttggattttgtgcccaaaacaaaacccatttcaatataatcaaatttactaattaataaaagatcaaatatcactttgatgttgcatggttcacat

SEQ ID NO: 366070 - DNA, 511 bp, Cannabis indica
gactatattattatatattatgcctgtattgtcttttcaaggtgtattctgacaggttggcgcggtatagtcacaatcgggtatttcgggtcgaacggggttcgggcccgaaatgcaacttagattgaaatattaggcattttaattattggtgaataatctgaatatttatttggattcatgtgtgtgtgaattgacatttatgcacttgtacgcatttggaggtgttatttggccctaggggcaagatggtcattttgacccttaatttacaaataataaaagaaaggatttttaaggaaaaggaattgattttctggtttctactccctctaactcgttcctctctctctttatctctctaaacctatttttcaactttgattttggaaagaaattgcttgatttggggcttgaaatttgtgggtttttgagcttggtattgaagggagttctagctatatttgaggcagttttatagcttttaattttgattgttgttgctgaattt

SEQ ID NO: 366071 - DNA, 856 bp, Cannabis indica
ttgtcccctaaactttaatatgtgccaaatgatgtccttaaatttttttggttattaaaaatgcccattgaactattgcgattgttgattttaagaaattttctctaattttattcaattttactaattcagtgattgtttatgtactaaatcatgttctctagactttaatatctaccaaatcatgctcctaaactttaacatataccaaattatgtcccagaaacttttatcaatgttaaaccttccttactaaaattggacaaaagtcctcaaatctaataatctcaatacttcagagaggattttcaacaaccttaaaagtttagggaaatgattccccgctacttgtgcaacttgtggtatcatgggacttaatgtgagctcatgtgcaaaggatacggggatggtttgggttaggaaatccaaaactagtcaggggaaagataaaaatgttgagatgactgcaacaaatctcaaaaccagagattgaaacctctgcgattgatcaagtagaagttaatggtgttaatcagcttttgttgatgcaaccggtggtgactcgactgagattcaggaatcaaaaaagcttgactattgcgacttcaatcaaggaccagcagcatcaggatggagattggattactggttgggttttatgccctaaaataaaactcatttcaatataatcagatttacttattaatatagatcagaaataacatttaatgttgcatggttcacatgatttatttcatgattatatgtacataatgtataaattcatttgaaacccttttcacatacttgatcctgtttattgtgccgtcaaccacattggaaagtaaacatgact

SEQ ID NO: 366072 - DNA, 1192 bp, Cannabis indica
acaaggctggtcggcctagcattacgttaaaggctgaaggaacatccaatatcaggaattgtgccatgatagttatgcttgttggagcttgtccaactgtgaggggtaggcggatttgccctaagggcgcaactccttgaccggagaaaccatagacgggctgaaggcatggagttaaatccttgagctggagccccatcttctcgtaggcagtcttgaacaaaatatttgaagaagccccattatcaatcatggttctggacaccattttgtttgctatctggacttccacgaccagcgggtcgttgtgcagaaatcttatctagacaacatcttcgtcgttgaatgttatggttggctctcctgctcgtggaactttgggattcctttcttccacggccaggatgacttcttcttgctcgtactgagttgtgcgggcatatcgttcccgagctttgcccgtgtctccagcgatgtgcgggcctccaatgatgacttgcaagtgtccatctattggtggaggcatcagatcctggttgttctgaccttggttggccttgacatacttctgtaggtgcgggttgttcttcttgatcagaagttatatttcccgcttcaggttgtagcattcgttggtgtcgtggccgtagtctccatggaaccgacaaaattttgccatgtcccttttgctggtatctttcttcatgggccccggcttcttgtacggaattagcgattgagtcgctatatatacactttctatatcctcagttaggatagtgaatgcagtgtctttggcgcgatcacggggagtctgtccggttttttcggcgaactttcccttctcgttcccttgcttgtggttgttgcctgaacgcttgccacttgaattgctggaatattggggaagctgggcggacgttccattagaaggagccttcgttttgctcggcttttgctcaccttctgctcgctgagtggcttcttcgagcttgatgaaaccttcggcccgatcaaggaaatcactcattgagtcgaccggtccgtttttccttatgtcctttcatagctcgccaaggacttcaatgcccccagtatcgcggataactttccatcctcggttacccgtgataccttggtcgctttcgtcatgaatctgctgatggaatgcccggagtggctcgcctggtcg

SEQ ID NO: 366073 - DNA, 428 bp, Cannabis indica
gcccagaagaaaataactgagctgactaaggatctcgatgcttatgaccgactggaagagaccatcgagactttatttgccgaagtgaacaaccttcaagatgaaaggacatctcttcgagcggtccttcatcgcgtggaggaggagaagaagtgtaaggaggaggagcttacggatgaggtgacgaggctgggagagaaagttcatgccttggagacagctggtcttgagatcttctatgacttttggaaggctaatcctcaggcaaactttgactacttgggtgaagccatggacatgtacctcgagttttgtgcttcccaaagggcttatggtgaaactgaggcagctgcctcgacctccgaccaaaatgctgatatacctcccgttcaaacaacagatcctccagctcctaccggccaagaaga

SEQ ID NO: 366074 - DNA, 698 bp, Cannabis indica
ggaatttcatattaagacacatatgatttccttttacaatccttcaatactccctcaaccatctaaataactaggaaataaatcgtgcttcaagtcgttcgttgtactttgttcagtaataattaaatcataaaattatataaaaatttatattttgatattctatataaatatatacatatttataaaatgaattattattttactaaattttcaccttttactcttaataatataagaaaaataaattaataatgtacaaactattttaaacttaatatataataatttttaattaattaatttattataaatatatattattataaggttagcttttaaaatattacattgtttgaataaattgaattagaattaaaaaaaaatgcaacaaatgatatattttataaaaaaaattatcatgtatatgatttataaaaactgttgtcatcaccgaatcttacttgtagtctcatcactgtctttcacttgtcatcgtcattaatattcccaataggtttattctgtacataaagcacatcaaacaataagttaattactcatttttataaataactgaatttgtaaaatatttaaaaaaaaacaattcatcaaattaataatgagaaaatagatagagttgtattttgaatatttttaatttcttataatcatttactctaagagatatcttcaaa

SEQ ID NO: 366075 - DNA, 1093 bp, Cannabis indica
aaatatggtatgtgtgtaattatttggtgggttggagcatagttgaatggatatttttgtttgagttattttatttaactgattttttttgtgtgagtttttatcttagttgctttacggaaccagttttttatctcaaatttttaactagttaataaatataaaccagtttctttatattaaatttgagttattgtatgttattctttgtgtttatttattttgttatggaaccgattcttttcatatttataccttaatattttttagaattgatccccattattattttttaaaaaattataatcggttttatgaggcattatatgttataagatattttgttgtggatctagttttatttttaatttatgtttaagtattttaggaactaattttctctttgtttttaaattgtaatcggtttgagttattgtgtattacttatttgtattcataatgttatattttagttataactagtttgagtaatttcgtgttatttatttttattcattataacactgttatagatcaggttctattttaatcataactggtttgagttattttgtgttatttttttattcattatgctacagaatcggatatattttaattacaatcggtttgagttatttgttttattcattatgttatagaactggttctatttttagttatatctgagacatctacttaaggtgacttttttggcgatagtgacttttctagcgactatgacttttcggcaacttttccagcgacactaactttttcagcaccgacaatttttccaacagaacttattaatacaagttttattaaatttattttattatttttttctcatattttaatctttaattatttttaatcccatattttttgtattaattatttatatcataaaaaaagtaaactataccctcaattttcatatttatgaaaatttccctatgaattgctatatagatttgagttacgatttaaattactcaattagttattatgtgggttacaagatagatttccataaaaatatatatataaaaaaaactaatttaaagtataaaaataaaaaacttttttc

SEQ ID NO: 366076 - DNA, 523 bp, Cannabis indica
tcttctatgagacggtggcactacctctacaggcaacagtgcctcgtagccataaactagatcgaatggagtttgtccagtggctgtcttcttggttgtcctatgtgaccatagaacctctgtgagcagttcaggctagttgccttttgcttcctcaaggtgcttcttctgggtgtccttgagggttttactgacagcttccacctacccattttcttgatatggtgttgttgtggttgtgatttttgggattgcagcagatgttgtgttgttgttctgttagttaacgcataatggatatgtggttaaatctgtttcttcgatcttcaattgcaagtaaaagaagagactggtatcgttgaatatttttatcggtggtattccttcttttgcttggtactgtatttgaagtgttattcttgtgttttcgcaccccaatgaagtaactagtatctgtaatagctcttcatacttgcaatcttttggtatgaattctccactagcctcatatttgacataatta

SEQ ID NO: 366077 - DNA, 411 bp, Cannabis indica
aaaatcagtggtttttccattccaggaacaacaccaagtcttgagaagaactttcttagtcaaacaagttccttagcagcctcagcggaagctatgtacttggcctccatgatagagtctgatattgcggttcacttagcgcttctccaaacaattgctccacccccaagagtaaaaaccatccgagatgtcgactttctatcataaagacaagcctggaaatctgagtcggtatagcctacgggatttaaagcaccacccttgtagactaatacataatgcctagtacttttcaaatattttagaatatgcttaactgcagtccaatgttcctctcctgggattgtctgatacctgctcacaattcctaatgcatagcatatgtcaagtctagtgcataacattgcatac

SEQ ID NO: 366078 - DNA, 586 bp, Cannabis indica
atatttttgtcaattaaatatgccaaaaatggaattaacatagtatgtccttccagggcattagtaaagtatactagtattggatgtataaaatatacatgtgactggattgatattgacagtagattagatatcataaacttattgttatatctttctaagtcaatatcacttagttaatcttaggtcaatagatcttaatcctgagatggttaggttttagcttaactgtataattgtggtcttttacttgtttgttaaagttgaccaaatggatctaaccaatacttacatcttgggaatatggtagtacaattgagtgggagtgttactcgtagatatggaatatatagcttctatatttatatagaagcgaaatgatgattttttttagtttagcttaatagacttaaatggaagagctcttatttcagtaattatattagtttactgaaatatcatttatatgaagctaagtattttcaggataaaatacattgaggggtagaatggtaattttattcctactcgatgtaaattatttatagaggatctttgattatttagattgaaataatagataatt

SEQ ID NO: 366079 - DNA, 765 bp, Cannabis indica
aaaatcaaagttgataaaatttttgagagcaaacctagatgtttttgcctggtcacatgcgaatatggtcagaatcgacccttctattatttcacacgtcttgaatatcaatcctaacatctggccagttcagcaaaaatgaagactgcttggataaaaaatgagcagtagccctgaaagatgaagttgaaaagctgcgcaacaacaacttcataattgaagctttttaccctacttggattgcgaatctcgtacttgtagagaggtgtgactcttgctttttttaacagaggcagtaattttttatttttttcaaacgctgcgaccttcaagtgaagattgcaacttttggctttcttctaaaataagctttcggtaaaacatttagttgcgactcttgtgagaagatcgcggcaatgacatttccttcttgtttcgaataacaatggaatagtcattattaatttataacattctaatactttaattaaaagggtaaccaaaccaaattatattaaatgaagggatttttacactagatgtcaaatttggcatcttttttacatttttatttatgtttgatcttttaaacttttttataaaatctggttttcaattttatttttcaaaaagttctttaattacaaaaatacctttattgtttatgtcatctttcccccattttttttagtctcttttacatgttaactccctctttttctctttttttttttcattttctgtttcttctcttcatttctctct

SEQ ID NO: 366080 - DNA, 851 bp, Cannabis indica
ttaggagctggacagacatcatacttaaaatgtaaactgaatagtactttggagggttttcccaacaaaatatgaggttggatggtttttgcaagtaaattgatagttaagggggttttgccgcaaattactcatttttatttcattaaaaataaaattggctccccggtctgcatatcttagctccggtcacttgtcatcgaactattattctaaaatagaactataataactaaaaaattacaaatataaaaattaataattagcaaaaactagtgttcgtgtggtcatcgagaagataaatgaaaaattgcaaatatatagtgtcatcgagaatggggtactattggtattatttgaatatttagtcagtggggtcatgcattcgtttcataacaagatggagtattgttttttggttttggtaacataacaagacaagaggggtattattggtatgatttggatttttatttcatcatactgttgtcacaatacaaaatcataatcgtatgttactttatcatgacagagaatatcatcgttacaaaaagaaaacacgcaggataagcattaattgtcttttatcacagaatagcattacaaattttccaaatatctttaattatatatagacaaataggactcttagaagttgtttgctattatttcagtttttgtttttttaaaaataatttttaagagttagaacagaaaataattttttgttattttaaaaattaaatagtgtttggttaatatttttaaaaataagttttaaacaataaaaacggaaaacatgttcggatagtaaaaacaacatgtttttaaaaattattatttaaaaaaaa

SEQ ID NO: 366081 - DNA, 842 bp, Cannabis indica
ttaatgatctgagaagagttatgattattttataatgtgttagcacttaaagaaagaagattagtaaattacattaataattgggtaattgattcatattcctaatctctcatccctatttgaataactttattcaatttcttttaattttctgtcaattattattatttcattccaagattattttgattaaccaaatagaaatataagtctaatttagtagtattcaatttcaattcacggtagttcgacctcacctgtgtgagtactacttgatatgtacacttgcgtaagctttacaattttgtgttacaatcttctctctctattggtatttttgataaactggggtatgttgtcaaagttgaggaaggtgtaatgaaaattgcacaaagcactaaaattgtgatgagaggaaggttggataatggactgtatttcctggatggaaagacaatagcaggtagtgcagcacctgctattaactcaaataagcacattcaagtaaggctatgacacctcaaattggggcatgtaagtcagagaggacttgagcaaatgaacaagcaagaattttttaagagaagctaacagaaagacttgaattttgtgatgaatgtgttttggggaaggcttgtagattgaaattcaacaaggcagagcacaccaccatagaacggctagcttatgtccattatgacctttgggggccatctaggattccaaccaaaggtggagcacactatttcatgagtataattgattattacagcaggaaagtctgggtttatttgttgaaaagcaaagatgagtctctaggaacctttgacacatggaagagg

SEQ ID NO: 366082 - DNA, 796 bp, Cannabis indica
cgcaggctgttcagactagatggacgccaggacaaaataccaggagtcgagggcgaattcggtcgggtacaaatgaaggtcagggagctcagtttccccaaatgctcagggtcgaggtacaggtcccaggggcagggctcgtggttggggtgatgctaattcgccacaggctgcccaagctactcaagaagcccagaattgggaaaataggtttgcagaaatgcaagccagaattgaggagcaagataatgaaattcagcgattaagacagcagggtgctcctacagtgcctgttccagaagttccagtggcacctgcccctattgtccaggccgaaccagtgttagcggtaaatagaatggaacctctgtatgaaaggttccgcaagcaggcacctccgatttttctgggaggtccggaagtcatgaaagtcgagcagtggctaactgtgatcaccaagatattgaattttatgggtgttgccgggaatgacagagtggtgtgtgccacatttcagtttcaagaggacgcattcgtatggtgggacattttgtctatgatacatgatatcaccacgatgacctgggaaaagttttaggaacttttcaatgcgaagtactataatgaggccgtcagaagttccaagagaaaagagtttactcacctgacccagaaagagaacatgaccgttactgagtacacaatgcagtttgatcggttggcgaagtttgcctcgggaatcgtgccaaccgatttcagtaaaaaggaaaagtatttggatggacttaatgcgaag

SEQ ID NO: 366083 - DNA, 727 bp, Cannabis indica
tcttgacttctatctataaaccagctcaagtcattttaatttgcggaaaaaaatgagacaaagaaaaagaaatgagatgagggaaatgtgaaaaaaatcaaagaactaataagttttgaatgtattagagttagtgtgtggagataatttgttatatataagtgtctctgttttaatttctatttgggacctttcggccaatgtatgcctgtttttagtgttggatcttttacctgtttcaaaaatccacaaattttccaacgtctacacctacaaacgtgaggagggtgtataagagttagtaaattgttatatatataagatgaatggactacgcttaccattgtcaattggttttgagatgaaaactcattcatcttattttaaattctaacaatgttcgataatttgtgagatttacttgtgagttttagagtttttctaagataattgagtgaactctccatgtaaattgagtttctcttgagagttaagtgtttttgcatgagagttttgataggatttgatgttctgttgagagctaataagttctaagaatctttgtgtaatcttgattatttgtaactcgatccatttgaaagcagtaaagcctagtgtttgttccccaatagactcaaaccacttaatctgcgtttttgtttctaaatgcttatgtggaattcataatttcatctatcaatattaacattgttcttatttttgttca

SEQ ID NO: 366084 - DNA, 752 bp, Cannabis indica
aagaactggctagtcatcgccgaggcaaacgaagctaaggtgggcccaacgaagcggttgaaccagtccgtcaatggaaccatgttcaagtcccacggattccggaaggcttcctcctagagagtattctgctgctcctctcgaaggatctagacttcaaggcctccacctcagaatgcccccgagtgtactcgtcaagggcgtaaattgtgtttggccactcggagattctgtctctcctcatcagcaggaaccggtagttcaacactatgaccgtgaggcacagtgtattcctccgcctcggaaggaatcccggagtcatggctcgaggccagagtgtctaccctgcgggtctgcttagaaggttccacctccaccatcttgcccttttgcttacgctcaagggcggccgggtcctccacttcaccttcttcaacttcctcctcctcaggggcattggaggaggacctcctgggagtgaccaactgggaggcagccagaagtggagaagcgtcaggactgtaggctttagcgagagttgccaagagtttatccatggcctggctgcagcaacaaagaaaataagtaaagtgtcaggacattcatgagacggcatacacttagcagaaaagcaataaaactagtcctaccctgactctctagttcggccctagcaaagtctcggatcacgacggtggattcatcatccccgagaaagctgtccgagggaaggaaccaactagaggataaat

SEQ ID NO: 366085 - DNA, 659 bp, Cannabis indica
atttttatccacgatatcataagctacacaagttagtttggggagcaaaaatattagtgagagaaaacattagagagagaagaacttgcaagattgagaaaaagaaaaaatgtgtaattcgatgtcactgaaagaaaaaaaaaagaaaaaaacacacaataaaaagtaagatgtgtttggaaaaagtttattcaagaaagaaaaaataatttcagtgatgttcgagaaaaataaatatatcttttctcaatcttggtaaatgtgggaacactatggggttttgaaaaagtaagaagcttgtgggttctgtttgtgtgcttatgatatcttgagccaaaaccgtttttttgtcgatttctgaatatctgagccataatttctaaacctcaaaaagacctaatgattccaaaggatattgtcaacattagtggagagaggtaagcatgcaagcttatgagctatcgggctgtggaacagttggaaagagtaaaacttttataacaatgtttcatgtgtgaataaattttgtggttatgcatagtgttatgaattgagcatctgaattaattgttagagttagtaggattgaaattctagtttgtgcaaggaagaaagcagagcatgagtcagcagtgtaacgattatctgatagcgtagtt

SEQ ID NO: 366086 - DNA, 451 bp, Cannabis indica
gatatgatttttttttttgaaaatttagaatttggctactacttatgctagggctgaaaccctagcacgcgtacgtggatgggacatgaggccacatctcattggctgatgcttggacaaacacgccatttagacaaggcgtgtttaagaaatgccctccatgatccctgccagcagccccaagcctcagtctagcttcccctttgtgcgtgcggatagtatgcattgtatattgtccaattttgccattttttttttcaagttttaaaaataattttaaaatgaaataaaattcgaattttggtagatttttatgttgattcttattttcaaaattttaaacctaattattaaattaaaattaattttattattaattaagaataattttagatattaggagactttaaatttgaaaattaatttttttctaaaattttctattatggtt

SEQ ID NO: 366087 - DNA, 1216 bp, Cannabis indica
ctcatactcaataacatgtgacagatctggagtatacttcctcaacatagacacatggaacacattatgaacatgtgccaattatcctggtaagttttatcggtaagcgacctccccaatcctcttcataacctcaaaaggtccaatataccttggggctagcttacccttcactccaaatctcgttacaccacgcataggagtaactttcaagaagacataattaccaacatcaaactcaacttcctgtcgatggagatcggcatagcttttctgacgactttgaacaaccttaagtctttcttggattcccttaatcttttcagtggtactagtgataatctttggtccaatagtgacatgctcatctggttttgcccaacacaatggtgatctgcatggtctctcatataaggcctcctaaggagccatgcctatactggcttggtagctgttgttgtatgtgaattccactagtgacaagtgttctccccaactacctctaaaatctgaaacacaagagcgaagcatgtcttccaaagtctgaatggtcctctcagactgtccatatgtctgtggatgatgggcagtactcaagtgaagttcagtccctaaggccttttgtaagaccttccaaaacctggatgtaaatcgaggatcactatcagaaacaatgcttaacggcactccatgtagtcgaactatattgtctacataaagccgagctagcttggtaagcttgtaatccttcctgattagaataaaatgagcagacttagttaaacggtcaacaatcaccctaatagcgtcatgttttaagggtgtcaatggcaacccagtaacaaagtccattgtaatcttgtcccacttccattctggtataggcaaaggttgaagtaaacctgagggtctctgatgctcagcctttacttgctaacaaactatacccttagctacaaagctggccacatctcttttcgtaccttcccaccaatattgtctctttaaatcttggtacatctttgtgcttccaggatgtacagcaaatttggatctatgggcctcaatcaaaatggtctccctaagatcagggatatctgcaacaaatagtcttcccatatggtatatatacccttcactgttaactgtccacaatctagttgctcaccatctttgattcggttccaaataaatcttagcttttcatcttgccact

SEQ ID NO: 366088 - DNA, 270 bp, Cannabis indica
aacaaactctcacttgcactaatataaaactaaaagtgcatttcaaataatctcaacaccttgatatccagatcaagtgtagtatgtagtattatctctgtaataggatctgatagattgtgtttaatacaaactttctccaccattacatatccttaatcacaaaatccttgatattgtgagattcctagattccacaaaatctaggaaggccttggcaattggatcggcgagtccaacatgacgacttcaccaataagtactcattca

SEQ ID NO: 366089 - DNA, 762 bp, Cannabis indica
atggtacgtgttgttttgaactcaccatataatttttaatctaaaaaatagtttaatacaaaacctatcttatattatcattaccttattcatataaaaaagagagaattataaaataaagattaaaaattaaaaattaatatatgtatacattataccaaattgtgatttaaaattataaaaataaacatatatataggattttttttattatggagcctccaaatttatttatggggtgggggtgtctcagagtcaatatcaagaagacattaagtgaaagtgattttagaagagtgtgacacactggaacataatctcttttttcctattttttttaaatttttttttattcttatttttttttcttagtaaatttatagcaagcctctttctttactctctcttctaatttctttcaaatctgagatgcaaaaattatccagatatgaaaatctcgtaccggcttggtggcaacgacattgcaatgagagagggggagatctcggtgcgctgatggcgacgaccatgctagcagatttgggaaaaatcaaccttgtgaacgaatctgggcaatgataacggaaatttaagcagtgacgacaaagtatcaatccttgttatactattaattttctaaagattgattagttttttttttttttttctagattagttgtttttaagtaaagatttattgtagttagaattctaaaatatttatattatttcatctaatatttcataattattatttgtgtg

SEQ ID NO: 366090 - DNA, 596 bp, Cannabis indica
gactaaattacatgtctcatagatctctaatagttgtcttgttcgccttattggtgagtctgatggggattctatgacttgtgcatgttgattcttcatggtaggttgaactagaacatcattttgttgatgcattggaggtctccttaattgttggttacacaatttagaatcattgatgataattttccaccccttacactttttggttaaaattagttcttctagattcttcttttactaaaaaaaattggtatccatatacgtctaaatatttttagagtccacatagctactattctagattcaatcttatctagaaattatttaaggttcttaaagaattttttcttaaaatgtgtagaaatttttagactaaagtgttgtaaacatatgtagtatattctaataccctagttttatattttaggtaatgaaatggaaataaaaaagaaaggaaacaattctttatttcattcctttatttggttgcatattaaagtgttagaatgtcattccaatgcaatggtctttccaccttttagtggaatgactattccattttgaaatagaaagaaaaaccattccaatgtatg

SEQ ID NO: 366091 - DNA, 861 bp, Cannabis indica
gtgaaagcaggaagaccaaaaaagaaaagaacaagaccaaaatgcgagataaagatacaaaacaagtacatcaaatgtggaagaaaaggacacaacaggaggacatgcaagaatctagctctagactgaatcaacaccagcaacaaaacactacaacaacaaaaaagaaacatgaatacaacattcttggagaggtaaagagcaaacaacaaaaacaatgaattgtaaagagtgattgctattgaattgattaactgtgaatttagttgctattaaattgattaactctgaatttcattttatatgaattgatttgatatttagtggtttaactatgaatttcattaaatggcttgattaatgttgcaaaaacatgaaaatttggtgttaatgttgtttactttaaaaatattttatatgaaattgatttttttcttttctggtaataaaaataatttttaaaaactttaagaacaaaatcttaagacaactcgaaattgatgtttaggtactgtgtgcttgagaaaaacttcaagcttaatttagctataatcatattacaaagtattaggaaacagagaacatgttgatttttgttggaattattttaccaggatctagatttactaacaagtatgtttttgacatcctaaacatgaacttctaaaacgatatgaaataaacacatataaagtttcagaaaccttacagtgggtgcagcagaattataatggctccttccgctcagatctctaacccttgtatcctttctgtagcagagtatcaccaagatctaagcccgaatgcccttctcttcaaactggattcttcacagccttatgttggaattttattttacca

SEQ ID NO: 366092 - DNA, 876 bp, Cannabis indica
ccatctaccaaaatattaaattataagtggctgagtaataattttataataaacacatttaaaaaaattagaatttattgactatctttacacatgaacatatatgaaaatattattatttagaaactaattaaagaagtagggaacaaaaaaaaaaaaaaaacaaaataacacaaataaacatcaaaaatggtttcacaataacaaataaaacaaagagaaaagctagataattaattggcaataaaattttaagacttacaaatataacataagaatcaaggagagagagggagagtgataaatgatgtaaattaaaattacagaaatttgaaagacaatgaattctatagtaacaatgcttcaatatatagcaaagtatgaattaatattatttgtcattaattttttatttattagttaactattaccattgttaacttggtatgaaacatgagttcattattataaattattattcttatgtcatcatttttttattgaattagttaactgttactatttttaatttattattatgaaaaattgaagataataaataaaaagtaataattaaaaattaaaacttgaagataataaaaaacggaagacaatactataaaaattaaaaataaataaatagttgtagaagaatttaagatgccattgccatattatactcatattcatatacaaatatacattatttatatttttatacatttttatatatctaaatcaaaatgtgtaattactcattattaatcagtcataatttcttttagaaaaaaatttggtcataataattgatagaacataaatatttcattcttaataaatgaaacagtaggaatgagaaagggttagtcatttaac

SEQ ID NO: 366093 - DNA, 430 bp, Cannabis indica
gtcttgctttgtatctcagaacttcatttttctcatttcttttacgtaaacatatccatttgtatccaacgggtttcacaccttcaggtgtttggactataggtccaaatactttgcgtttagtaagtgaattcaattctgcttgaattgcttctttccattttggccaattttttcttttttgacattctttgatagatttaggttaaagattctcattttcatttacaatttctaacgctacattataagcaaaaatattttcgacaattacttcgagtaggttccattctattcttgtattgacataatttattgagatctcattattgctaatattttcaggcacctgaatctctgcaagagatttgtttatgtcaacatcttcctcaaaaaaattagcctcttcattagggccatcttgattatt

SEQ ID NO: 366094 - DNA, 757 bp, Cannabis indica
ttatttttaccaaatgctttgtaaaggtataggtgccccccaagtgactgagtagacgtatgactcttggtgacttgtctttcgcaaatatattgcttatcgtttcggtgttttgggttcgactaaaccttttgtacatactttaggtaaattataatcatgctgattttttcgactcaatagaattagaaatactatctttattcatttatcgatcaaggctagtgatctaatctgatcttttagcttaacatgatataaaacacataagaaattgtactttaaagttgtcttgccgacctgagtacttttgtttctgaaacccttgcgcgtagtccgcctacaaggccattcacttataagcgaatgttcatttagtactttaaagtggtctagcggacctaagtactttgaagtggtctaggcgacctgagtactttgaagtggtctagctgacctgagtactttattggtagtatttccttaaatgttctccattccagtaccgttgtactagaaagagttgtattttttcgtcatacttacccaatttgtatgctccggagtcgagaacttcgaccacctagtatggtccttcccagttacgtcctagtacacctgacgtgctgtctttggtgtttaggaatacccttcttaggaccatatctcccacaaagaatttccgagcttttacttgtttgttgaaataccaagctactttttttttattgagctactgttgtcgagtgaatttcgc

SEQ ID NO: 366095 - DNA, 467 bp, Cannabis indica
gttcggcccgaaattcccggttgtgactataccgcgctaacctgtcagaacacacctgaaaagacaacacaggcatactatataataatatagttctattaagcacgtaattaaattaatttcatcattttacccttctcgggtcataattaccaaaatgcccctggctcaccaacggggtctttaatatattaaaattcatgtaaaatcacatatattgaactatataataatataattcctcaattatacataattatctagttagggttttgctaatccatttcttaattccgggtattacatgaaagttcagggactataatttagtaaatatcaaagttcaagtggcataatttggtagatatcaaaatctagggagcattgtttaatacagaagcaatcactgaaatagtaaaattgaataaattagacaaaagtccttaaatccaataatcttaatagtt

SEQ ID NO: 366096 - DNA, 504 bp, Cannabis indica
gagcaaatcttatccacagacaagatgagttctcacaattaacaatatagtagtgactttgttttataattagcaaaggcctttatgttccaagcttctattgaaacttgatttagacacatatttgaaggtctttactataaaatgatgtcactcgtaaagatatgcaagttcaatctaacaataagaaatgtgttgttaataagaattcttctacattatagcaccaaacattatggaacatatctccataaatagaataaatattagtaaatggtggggatattcattacactttactaactttatttagaacttgtgtgaatttcattaagaatatgtattccaacaagtcaaaatcggtgcatattagaattctatcatattagaaatcatacaagtcaattaattttgaagacatggactcaaattttgcatctcatttttaacgattactcacataaattatatttctacaaaagtatagatttatatgtttcaaag

SEQ ID NO: 366097 - DNA, 524 bp, Cannabis indica
tttttgttatctgtatgtttattttttgttgttatttagattgttattttcatgttacttttatgttagttttcttattattttcgtgctttttctatagaaaacagtaaaaatgtaaaaaaaaattctttaaatgttaaaaataaactttttttaacaaaaatattgtcttatctaattatctctatcaaaggatgaaattttaaaataaatttaaaaaatgaccttacctattttattataatagaattagcgtttattttctagttttatttcggccagtgtataccaatcaaaacttatacttatctgagatttttagaatgtttgaaaaagttttttttctccttttatctctaatagtgtatatgtcagcttcctctttctttcaatttttttttgtccttttattttttttttcttttctgttttgtccttttattcagcataagcacatttttcttttaatttagagtaatttacggcaaaaccctcccaactatcaatttacttgcaaaaaacac

SEQ ID NO: 366098 - DNA, 452 bp, Cannabis indica
ttagtgcaaatactcgagctgggacaagtttgtcatccttgagttgatcacctttttgtggacagtccttcttatagtggcctggttgcccacacttgtaacaagtcttgcctttcagtcgacattctcccacatatggcttcttccctttgtagttattggaccccatcttgtttctcttgtcggcttcattgtgttggttacttgggagtttccttttgttatcaccacctcgattactggcctttctagcctccaacctagctgtattgtcattctgtatacgactttcacacaactcagcttctagggctttttctagtacctcagcatacgtggttgcccttactcctgacatcgctatgtcccgacttattcgagagtcgagcccttcagtaaagcaatgaatcctcagaaactcagtaggaaccatatctgtggcaaactttgct

SEQ ID NO: 366099 - DNA, 614 bp, Cannabis indica
taactttgaataaaaataagagacatttctactcaatcggtcacacaacgattcaccacaatatctcatttgggttttattgtacatataaaatatatatacatataatcacatccaaaattcaaaccaatgtagtcgcaatacctaaaagaaattttcaaagatcaaaatctcaaatcccatttgaataataataaaaaaaatacattatctaattaaaaaaattaaacatacttgtattgcacttatcatcactaaattaaacctaatttaaaaaaactaattatacaagagaacactggtccaaaccgactgctgaacagataaaacttaatgtggatggagcagtttttgaagacacaaatgagatcggtactggttttgtagcacgcggctgtgatggtagaataattgaggcattttcaactatttcttctgttagatgctgatccgaaattgcagatattctaagcgtcgatgaggcacttagttggataaagaggaataacaagtcaaatgttcttttagagacagattgcattttagttgttcaagctattcttagttctgtctctatgccttctatttttggtttatttgttcaggattgtcaa

SEQ ID NO: 366100 - DNA, 562 bp, Cannabis indica
taattattgggtttatttgttaacgtgagatcaaactaatcgttaaatttaacagaatattcttttacttttaagtatattctgttaaaccaagaaatgccgttagataggcacttttaatatataaagatatagaataccatcaattaatgtcaatttgaatagatgtaataaaaataagaaaaacgtcaaaaaataatttctatagattgtgtgaaaggaagagaagagagattgaatgaatgataaaaagtaattatgtttattgagattatgtggtggtatatatagatagtttacttaactattatagacctaatcatgattttttttaattaattgattaattattatttaataatacttaaaaatagtgaaaaaataagaaaaagaataaggtaagaataaagcaattttaaagtcgctatatcaccgtcttatacttttcctttatatatatatatatagatatatagatagattgataatatgaaataagataatatattcgtagttttactatatattcgaattatatttttaaataattatttattataat

SEQ ID NO: 366101 - DNA, 630 bp, Cannabis indica
ttctgcaagaaaagaaactaatttcttaagcaatataaaaatccattcattcacattataacaaagatatatccagttacaaatcatcacataataacatgcttaagtcatttcacaacttcgtaatcacacaatactggtactttataaagtacccttaccactcgttaaccacgagctacttatgtcactatcgttgcccgatacagcaaacgataagtaagaaacctatccgcggtttcaggagtaattactcataacggtaatgaccgtatcttttactcgatcataatcgagtcacaacgataataatcggttcatatcattaccctcgattataatcgagtctcaacgatgataatcgtttcctattatttccctcgatcataatcgagtcacaaccaatacataacgttaacctcgattaagattaaatcacaacaacatataccaagatttcaatcttaattgatattgtaacaatcataatattaaccttatacagtatttaatacttttcttaccttagttcagaactcaagcgtacgggccgacttgagtggaaaataagctaggcaatcccggtcctatgtcacaacaaccaaaactcaataaaaaccttaatcaaat

SEQ ID NO: 366102 - DNA, 1245 bp, Cannabis indica
tgaactttcctttcttcccgttccttgcttgtggttgttgctggaacgcttgccacttgagcttgaattatttgagtagttgggaagttgggcggatgttccagtggaaggagccttttacttgcccgactttttttcaccttccgctcgttgaatggcttcttcaagcttgaggaagccttcggctaggtcaaggaaatcactcattgagtctacaggcccattcttttttatatccttttaaagttcaccgaggagtttgatggcccccagtatcgcagataactttccatcctcggttactcgtgaaactttggtcgcttccgtcaggaatctgctaatgtacgcccggtgtggctcgcctggtcgttgcttaacttcgaccaagtctcccaaatgcaatgggagttggcgcgaggagtagagttgcgcatggaattctgaagagaaggttttccttgagttaaactttccaggagccaacctgaaataccattgatgagcggcttgtgactgagtggcaggaaagattctgtagcatacatctcctcgtaccccttgcaaatccatctgcattttgaaatacttgagatgggaaaggggatcttctctccccgtgtacatcttccatgtcggcattttgaacttgtggggtagtggtaggagattgatctccggtgagaaaggagtttcgcgtgctcggtctaactcaagatcattattgctttgtccagccatgccgtgaaacatatttttctgtttgtcaagctgagcctgtacgactgggctgacttgctcggcattctagacaacttggattacgtcagcatctttcttagcggggatttgaatacgggctcccgactacacgattgccataacattttgatcatctgttcccctccttctgtttagatcattccttaggtcataggttgttcctaacctttcgaacacagaaacccctggttgccttagcgattgattcgcttggttgacgggtggaatggcaccattgatctggttggagccatcaggtatgactcatcctgatgaattacaagacaaggtctgctcgcctaccgctaggcccacaagcggaactcgtgaccggggatcgggcggctgaccattagtaatctgggaagtattcatcgttggatcctctttcgtttctcccaggggaatgacgttcggcaattgctgacctacagtttggcaagctcttcgtatcagcacggtggc

SEQ ID NO: 366103 - DNA, 577 bp, Cannabis indica
gtttcaaaagctccatatagaatggctccagtagaactcaaggagcttaagttgcaacttcaagggatgcttgatattgggtttacccgacctagtgtatcgccttggggagccccggttctgtttgtgaaaaagaaagatggttccctcagaatgtgcattgattatcgagatttaaacaagttgacaatcaagaataagtatccgttacacagaatcgacgatttgttcgatcaacttcaaggaaagacagtattttcgaagaccgacctacgatccgtctatcatcaacttagaatccgagaagaagatataccaaagaccgcgttccgaaccagatatgggcactacgagtttctggtaatgtcattcggattgactaatgctcctgcagcctttatggatctcatgaatagggtattcaaggatttcctcgataattgcgtcatagtgtttatcgatgacatccttgtatactctcagtcagaagaggagcacgagcatcatcttcgaatggtattgtagcaacttagggatctcaagttgtatgcaaagttcaaaaagtgcgaattctggt

SEQ ID NO: 366104 - DNA, 732 bp, Cannabis indica
actaggttaaaccaaaagttctaagttctcactcttaagtctgagttcaagcactcgaaccatatcatttctctcctatacgccacgtacagtgtgtgagagactagtcttccttatctcacttacttgagatctactctatattctccctattgtaatttagagaaagccactctagaacttgtaacacttgtgatttgagttgtatagtctctcatatcaatacaactaaaaagggagtatgtcattacccgttaaacaagggggccaaacctctacaaaattattgtatctattttgtttgcttgttctaattgtttacacgtggtgattttgatcgtgaataagactctgctcttagttgagcaaatctatggtgtaaagaccgcttagtttaatttagaaattagcagttaattaagattttaattatgaaaattatttataaatatttaaataattatttatgttgctatatttgaattcagactgcatttttatgtcatatagtgaaatttcataattttacattttcggtgcccgacaacatggaacgcggtgtatggctcagtagaatcacagtttagtattttagtatgttggggcagtttatttagacattgggaatgtcgggattagtcgagaatttagaatttcccaaaataccccttagtacccttttatgttattttagtgtggagggcaaaatggtcattttgccccatttgtatt

SEQ ID NO: 366105 - DNA, 538 bp, Cannabis indica
tgtttaaacaacatacttgtgagtagatttaagatcctggtaaaataaattccaacaggaactactaccaatatcctgtctgatccctggatccctaaccaacgtttcatccccacccaaatcccaccttccctggctcatgtttctcatctccttatttccaatggggattggaatatacccttgctgcaaacacatttcccgcaggacatcataaatgacattctgtccctccctccccctgataactcctagtcggattcctacttctggcagcacaccccttcaggccactattctgttaagaccggataccatgtggcaaaacaatccataaacttgacacaaccttcctcttcagacatgggaacccttacccgttggtggaaatctctttggagtcttccaataccctctaagattaggtattttatttttaggcttgctcaaaactccattcctactgctgaaaatctttatcataggcactgtcttagctctcctatttttcctagatgtcatctctgtaatgagtcgg

SEQ ID NO: 366106 - DNA, 563 bp, Cannabis indica
aaatatggccacgtaggataattttttagtgacctgtcattgccacgtgggtaaaattaagacttaacgaggctggacagacaacaccttaaaaatgtaaacagaacagtactttggagggttttcccaccaaaatatgaggttggatggttttttgcaagtaaattaatagttggaggtttttgccgcaaattactcaaaactagctgatatcattaataaatatcctactcttttttgcactctctttaatcttttaaatttgatgacaaatgtcatatttttagccagagttttttttacttaataattaattatgatattctaatgttattacaatagtgccattactacttctaatataattattctactaactttttgtttataaaagaattaaccacattaagaataaaaataaaaaaaaaaacatttacagatattttaaaataaaacaaagtaacaattaatatttatataaaaaaatatatatttttttctttttaaaaaattatgaataataaaattaggctaattagcaattttcccccccaaactttgac

SEQ ID NO: 366107 - DNA, 631 bp, Cannabis indica
ttgctcttacagtaaccaatcttgctcatgattcatcaaatttcaagttccattgtctaggagcttgcttaagaccatatagagatttcttcaagagacagacttggtctttgtctttgctttcaaatccttcaggtaattgcatataaatttcttcttctagatttccatgtagaaaggctgttctcacatccatttgatccacctcaagatcaaatttagcagcctttgacagtatcattcttattgaggcttgcttgacaactggtgagaagatttcattgaaatctacaccctcttgttgagtgaaacccttagctaccaaccttgccttaaatttctttgtaccatcattagaatcaccttccttttctctgaaaatccatttgcaaccaacaactctctttccagcaggtttcttaaccacaatccaagttctattctttctgagtgaagtcatttcttcttgaattgcttgtaaccaggccttcccattcttaccatttacagcttcatagaagtttgaaggaactgaactgtcaatttcatcagcaacagtaagtgcaaatgcaataaactcagcatatccaagtctatcaggtggctttatctctcttctctctctgtctct

SEQ ID NO: 366108 - DNA, 550 bp, Cannabis indica
agcatcagtgttaatataactccactattggctggccaatttttgaggtcaacagtttggtgctttcattgagagcaagtcgagctcaagtagtctaatcaaacgccatggttaacacaaggagaaccccgactacaacttcaacctcatcaggtattcctcaagacttgatggagactgatcctaatgttcaagttccaaccacaactggaatctccatgaacccaacggaagtggtcacaccagccaccttggcagacaccacgaacatggccaccacatctggccaggttgacaccaccaattcagttggtctcaatggccaacctctgccacacagggaggaccctccactggcatctgcatataaggaatggctaatatggagcaacccctagacaccacaactggatctatttcccgatatcatgttggagagatgagatcaagaattggcaagccaaccattagcaagcgtcatgtatacttgggaggagatccgagttagctagacttagagagggcgtctgtcaagttggccaaactgaag

SEQ ID NO: 366109 - DNA, 625 bp, Cannabis indica
ttatagttatttaagacatcctagtaaaattttaggaaaaattaaaaaaaaattaacacgccagaaacaagattcaaattctctgttgcacatatgactctttatcttatacacatgtaaaatagattgtttaatattgcattctatattatctaattattttgaatttctacaaaattttacaaatgtttaaacaactataacgtatacaactataaaaagatgcttttaattgtggtgattttactaaattaatataatactaaaaatatattttattttacataaaattaatataataataagaaatatttttttagtgtaaattttggtgttatcgttgaagttgaaataatttttcacaccaaatttggtgatagtgtaacaccaaatttgatgtatacgttggagatgctcttactattttcaccaataatttaaaataagcttatgttaatagctaaaattataacttatgtattgttgtgttatctaatttttttagtcagttaaaaagaagttcttaaactattactaatgttttaaagtagttttttaataaattttaacacgtgacaaataatatgttaatgtgaatattttgattattgtcaataataaaagt

SEQ ID NO: 366110 - DNA, 723 bp, Cannabis indica
catattattccgctgcactcaatgtaagatttcttatctttatatgtgtttaatttattatcgtttaagaagttcatatttaggttgttaaatcaacatatttgtgagtagatctaagatcctggtaaaataattccaacagtcttatcaatcttgaaagagattacccttgctttctcttcctctacaccggttgcttgtaagcgtcaaagcataacaacatgcttgtatacaaactccattgaatcttttatcttaaattcttcagaaaaataaatttcaaacaagtgtatttatatgcacactctttgtttattttatcttgtctttttttcttcatctaatttctctctacacaattaaaatttacgttaataccacttctattcactaaaatacccatttatacacaattgagaccattgttaagaataattttttaaaatctatagatctctattttattaataaaatctaattatagcttaaatgctatcgtagaggtaggcaaatgatattctgtcaaactacttaaatttgtgtattacatattctatatatatatatttatatgtatacgtgtatttaacaatatatacatatagtttcacttataattcacactactacaaaatatacttttggtgtcggttttaaactgacacttatacttttagtgtcggttcacaaaaccgacacatattccatagtcacaaaaagtca

SEQ ID NO: 366111 - DNA, 651 bp, Cannabis indica
taattttaaaaataaatttgaaagttactcaaatatattttatttactcaataggtcaaatttatatttgaaattgaattaactaaattatgttatgtataaaaataattttgtagttattattattattattattattattattattattattattattattattattattattattattattattattattgttattttacaaaaaaaatatgtgttatttgtttgaattaaaagtaatttgtcgaccctagctatacttgttaaaattttgcctgccattggccctaatgggcatagatatttggactagcacactgcgactgctatcaaaaatttgatcatatcattaatatattgcaacttgattacaaccaacattcgtctgagagtggttcgattcggctcaacgacatcctccgtttcagatttttattttcatttatttatttactattattagtttaattacaatgaatgtttttatggggttagaattgtaaggagttcatttcttaattaattttaatgttgtgatcatgtttttatgttggaactaatttagtttttcccattagtcttgtcttttgacatggttctttagtctttttcttttaattttttcaattagtcttgtcttttgatatggtt

SEQ ID NO: 366112 - DNA, 792 bp, Cannabis indica
acttatactaattttaaattaatttaaatatatatactaatatattatttgtaatatttttatttttaatattaaaattatgcttaattttaatatattttaattttatatttattttcctcaaatttttaaaactttaaatattgctttttaaaaaaattaaaatattaataagtgatttcttttaatttataaaatttaaaaaatatacataaaaaaataaaaataaaaacgtacaaatacacgtaacaataacctaatatctttatatataaaaattagctatttaactatttttgttggcttaaaagaatatattttaaaaataaagaatattctgtcaaaattaaggttagttttataaagaggaaattatattgtatacccactttactttaattacttgttttaatttttacctccatattttgtttttttaaatatacatacttttatagatgatgtccccattagaccccttagattatgtaaattatatgctagacttaagtagatagtgagggtatattaggcaattcactcaaaaaagtggttatattttaattaaaaaataatatgagagtatttttgattaattgatacaaaaaaatatgtatttttcaacttttattttagtttaatttaagtatatataaatattaatatattatttgtaatattgttattttttattgttatttttaatattgagagtatgtttaattttaatatttttaaattttatatttttttcttcaaatttttaactttaaatattttttttgaaaaaaa

SEQ ID NO: 366113 - DNA, 577 bp, Cannabis indica
gagctaggcgtgtacctagcagtaacaaaagctgctatgagtgttatcctcacaagagaagaaggcagtgtacaacaccctgtatactacatcagtaggagactaattgacactgaaagtcagtacccactcatggagaagctgacctacatcttgctcttgacttcaagaatctaaggtcatacttccaggtacaccccataaaggtgtacaccgatcaaccgttgcggcgggctttacagaaacttgaagcatcaggctgaccattcaagtgaaccactaagactcggccaatataaggcggcttgtcaaccaagcatgaccagtaaaggccaagctctcaccagcttcatggataatcataaaagcagatctccccaaatctctccaagttcaggagaaaagcagtagccagagaagaagcaagagcaggagcaaaataactaaacccaagaggtgcattgaccacctgcccgatccaggcatggcttccagggcacctggcgcaatggatgcacgaggaaacaatgtcagtttcaaagcttctaaacacgaggctgaacatgaagctctaaat

SEQ ID NO: 366114 - DNA, 567 bp, Cannabis indica
actattagaaatctagaaaataacgaagaatgcatcggaataaatatttaattatagtattgatgtaatttttttagattatacttgagtcgaattgtttgagaactctagttcaattttttgagatctgcatttcatggatctaaaagttgaagttaagagattagttttatgggagttaaattggatttttggttaaactttagttttgtagtagtttttctacatttttttttcatgaattcgaaataacccctattttgattgattctagtcgtcttttcaaatgaagtcaccagaattaatgatggttatcttctggttggatttcgtttcgattgtgttgagttgttaggttagtcgatcgaaagttccatgcgtgagattgtttgtttcatttcatgcagctgaagtagtagaaaaagtagtattttggtaatatttaattacttttatatctttatatattaaaagtgcctatctaacgacatttcttggtttaacagaatatacttaaaaataaaagaatattctgttaaatttaacgattaggtttgatctcccgtt

SEQ ID NO: 366115 - DNA, 466 bp, Cannabis indica
attgatcaaataattatcagtcctagtttgttgtctcaaatgtgttttgtttgctatttgcagaaactagacattggaggattggctgaattcctcaaatcattgatcgaagaaatcttgaaagcaaataaattagcagaagggaggcgatataatttttgtaattatattatattattattattttaggggttttgtgtaattaatttgtatatatttttggtatatttggatatgtaatttttttttttaattttaaaattttgtagtttgttctgtatatgtttttttaagtgataatattgtgttttgatttactaagtatactttgctgtaattttagatttattcatagatattataatttttgtgcttataatatcccaaaataaaacctcgttaatcacttgagttgaacagttttatttccactaaataataataataaaaataataaaaataataa

SEQ ID NO: 366116 - DNA, 567 bp, Cannabis indica
tattaaattataaattaggttaaattattatttaccataaataattttccattatttaagtattttaattttactatttttcaattttaattatttattaaattaaaatataataaattatttattataaatttatgtatattatcatatctatatttaattatatataataggttacttacaaaaatatattttttttttacaaaaaaggtattattttatattctaatttaatttattattatctattaattattatataaatttattttaatttaagtattttttttaaaaaaaaaataaaataaaattaaaaatagtccataaaaccaaacacaggattctttgagcataattcaagccaacttagtccaattcaatccaatttaatcttttttagtctaatttcgagtttcaaacaggctctaagggtttggttcttgttgaccgagattttcggcaactaataaaatatgattataatattgagctgtaagaaagtgagagaatgatttttacgtggttggggcgtcaatgagccttagtccacgagtctttgttattaat

SEQ ID NO: 366117 - DNA, 713 bp, Cannabis indica
tttttcctttccaatttttataagctttattttcacaattttagatgcactttgatcacttttactcttgctatgacaagaaaaaacacaaaaaagtgtaactcacatagtttcactttttcttatctcattaaatgagatgcttatcaccaaaatgaaacttcatttccaagtaattatctttaatcacaatatagtctcatagtaataataatagaatgaatatatttttcttatcattatctccattatcataccatgtagtacatatattaatatgataatttatatacatatattaatacacaaaattaatatataactcccataaaattataactcttaaataattttatgttaataatgttgcatatatgttaccatagataacatacacaaaaatcgatattaatttcacaattaaatatatatatattaaaattattatttttacatatctattctcacaaatatatataaatatatcttatgctcatcatataatgtacatataactcacatatatcacatgttatatgatatatatatctcacatatatgcatataataatatgttataatcgcaattataatattatatctaactatatataataatataatatacataaatatatcatatatattaacatgtacaaaatctctaccaaaatatcatatattatcatatgaatatatgaatatgttaatat

SEQ ID NO: 366118 - DNA, 509 bp, Cannabis indica
aagcagggataccggaaagtaatcttccaaagcgactgctgcaattcagtttcggctctgaaggctaagatgcaggacattggatcactcaacttcaacatccaggagctggtgcaaaatttcaatcgtttaaagggcagcttcactctttcggaagtctcttggatccccaggaacttcaatggtgtggccgattcggtggccaaatgggcaaatcacaacaactcttttgggcgatttgatttgtccctcgagaatagtcccttacgctcggttctctctgagcttgatgacttgaattctccctatccttattctaattgttagctgaactgctttctgtttttatcttttgcttttgtagcctactgctgtttattgctggttttttattttcttttagtttggtcctggtttttgtcttggttgttgccgtcctggcagtttgtatggcctttgtgcctcgttttgttgttcgcgccccctggcgcttccaggggtcctctaat

SEQ ID NO: 366119 - DNA, 485 bp, Cannabis indica
aaaatagaataaaaaaaatagagaatgccacctaaatcttttgatgctttcctttatatatatatattgattatattttatatccacataaaatattaattaacactactatatgccttaatatctaagcacttactattcttatcattcattttatttaagtctgttaataaaaaataaatgactgtttaaaaccgacgactgtaatatactatatttttgacaattttaaatagtgtggtttaatacttttgacaattttaaatagtcatttaatgagaattaccgacgattttgaaatgtccagtatagtggggttataataatatgaaagcccaatttctcatttctcatttcagatttcatatttaatttctgtcatccgtgctctatcctctttggcgatttttgagacccatcacgaaccatcgaacccaatgaccacccaccacgttatcccttcccccccccctcctctctctctc

SEQ ID NO: 366120 - DNA, 603 bp, Cannabis indica
actctacgacaaaaaacaagagttagagatctgagcggaaggagccataatattccgctgccaccaatgtaatgtttttttataactttatatgtgtgttaattcattgttttagaaaattcatgtttaaggtgttagattatagaatataatcaacatacttgttagtaaatctagatcctggtaaaataacttccaacaattgatagtttatcgatgatttttatttgtgcataaaatagtggtgcacaaacaaaatcatcgataacccatcgataacccatcaataacctcgttttgactagaaaactctacccaccaccatctaaggtctcaaacaaacacaaattttaaaaaacacacaaaaatccaagaaaaatagtattaaaaaatatataatgatcaaattaaactaaagccactaaacaaattcttaactcgtaatttctttttcaaaaaacaacaaaaatctaagttttcgctgagagggtggatcgacagtgagcgaatgacgatggttgggagctctgggtcattgaatggtgaaatgggtcatcggtggatcgagggtgggtggaagaggtggagagagagagagagaga

SEQ ID NO: 366121 - DNA, 613 bp, Cannabis indica
atttttttatgactaaattcaaacgcaaagtaaataataatagatatatatagtttaattttcaattcaaaatttctagcaacaatgatgtagctttgaaatttggtatatatatatatatagttgctaagttggatgcaaaaatttcatttctatgtattcattagtctctttggctaaatgttgacttcttttataatattaaaattatgtatggaggaattcttatactaccacaaattaattaagaaatgttaatgagtattcatagtgtttattgttataggtataatttaatatcgagtctcatttattttttttattaataattataaaaaactgttaactatttaaaaaatattacctgtaagcgaggtattatgttaattagattgattataattaggagaattttctttaatattctttcaatgaaatagtaattaatgattacctaataattaagatagatagatgtgtgaaaatcacaaaatttacatgtatgattcatttcacatgtgagaatagaatagcttagagattaggtaacctcaagtttttatattacatatatttatatatctttatatattaaaagtgcctatctaacggc

SEQ ID NO: 366122 - DNA, 781 bp, Cannabis indica
aaatccaaatttgcaaataactttttgtttcttgagtgccaaatagcccataaagttgtaagcaataggattaattgatctttatgcaactgttcgaaaccatttatcatgaaatctttgacatcaacatgcctgtttgataaataaaaacttcggagaggcgaggccttccaaatttttgaagctctgggaaaatctagcagggcatgtgtaacagtttcagtagggtttgtacagaaagagcaagagggttgaggaatggttttcctaacaaacaaattaaggccaacggggagaatgtggtggaaaactctccaggagaaatttttaatcttaggttgaatatttaaattccaaagagttttccaccatgcattagaaagagaagaattagaagaggatggaggaagggatgcattattggcaatatgataggctgaccttacagagaaaatacctgaattttcttggttccagatgatagaatcggccttatgaaggcccccaattggtactttgagaatagacaacacagagtaatcatcaaagtactgatgcaatttatatctatcccaaaacccattattatctatgaaaaaacttaccttatcagcaggaggcagatcattacttcttaaacatggaaattttatacctagaatccaaggatcctggaaagttctgatagagcaaccattgccaaccttccatagcaaacccctgataagaaggtctcttcccaaacggagacagaccaagtatatgagggagagtgacctaa

SEQ ID NO: 366123 - DNA, 627 bp, Cannabis indica
ttttagtaacattacaaacatagatagatagagagagggagagagagccatgtatggtgaggaaagaagacttgttttaaaggggaaaattaatggagctatgaagaactaaagggtgagaaatcaagagaagcaaggatcaagcttcagggtatttccaaggttcaagcttcaagtttaggataaaacaaggggagtacttcatcatcattgtgttctaagatttgtacaactaaatagattgtaatcttgccatttttgtcataataaagactaatcctaagggagtttaaaagggactaggctcttcactttagtgaagaaagttcgaacctctataatctttttgtgttcttaattttctatcattttttatttctgcaaattatagctgtttgatttttgtttttttttttattattgtttgttatgcttggtgaggttgttaatctcaacaaccttatcctaaattataacatggtatcagagacctttcgaccaatgtgtgccagtttccagttttggggtctttgacctgttttaaaatccacaaatttcctgatatttggccttgtgagattctttcaaatgtcacgttcggtcctgtggtctcttaaaagtcattcg

SEQ ID NO: 366124 - DNA, 522 bp, Cannabis indica
gtggattgaatctgttttggtgcatgtttgattggctttaacctagtttagagtttgtggatcaaaagctttagttttcaaagagaaaattcgaaattagttgctgtgtttgttgcatgagtttgagattagtttctgcagcttgattatgcatgaatttgtagttttattcaggttttgatgcttgtaggtgcgctttagccaagtttgagtttgaaactcaaagcttggagctcacatggcatttttagtatctgtgtgttctgggctgttttgatgctttgattttgttctttggggtatttagaacaggtctggaaggtttggggtgaattggatttcattcaagtgagttatgaatttttggtagtttcctgcgaggaaccggaattccggttgtgcatcaggaattccggatggggttcaggaattcccagaaccggaattccagttgcagaaccggtctgccggttgggggattttcaggaaccctagattttctcgtttttatgttatttgggg

SEQ ID NO: 366125 - DNA, 956 bp, Cannabis indica
taattagctaaaaaataattaatagaaaataataatataaattttttttttgacgtggtgaacagagtcacacatgattaacaaagctgcaaaccacaatcggcctcctcgaaccaggatagctcattatctaaccgaagaacatgttttgccaaccatgagctgtagaaatcaaatcgcgagccacatgggacaaaactgctcccggaaatatagacaataaagctataacgtcttcaaacaacaaacaccttctcataattataagttgtcactagagctagcaaatctgaaaaaacatcgcaacaccaaaccaaaaatcacagttatattagaataataatcttcaaaataaaattaaaaaataaaaatagaataaacacacaacccatgtcactagttcaaaaaattaaaacaccaacaaaatttctatagacaactagccaaagggtaatccaaaggtattaccctttggctagtaacaacatactagcaccctaatttaaaactactgaaatcaatgtcgaacagattatatttaaaaataaatttatcggtaaatgctctttaagtgtagcccttcacaaaataacctacaaaataacaaaaataaactctattaccacacaatataaagaaaataaggtaatgtgaaagaacgatggtaaataaatctctcttaaatataaagagttaaaaagatttggaatacttatctgttataagtgaaaggtcgttgaagtagaaatcatgagcacaaaatgtatcacttctcttgcccattaaccataacacaaaactaccctaaacaaatagggacaagccataataaatgacacaaaatgccataaaaggcacataaactgtaaaaggcatccaaactattaaaaaatagttcaaaaaacatgtgtggtctcacaaatactttaaacatataataataaaaatactatcat

SEQ ID NO: 366126 - DNA, 664 bp, Cannabis indica
aggagattggctccagttgttccccccggagatgcccagcatatccccggcctgccacccagacctaacgggagagtggccatgacctcgggaggaccccatatcggaggaactacacgcaaggagctgaagcagtacgcgggggtcgtgaaacacgatgaggtttgggaagttactcaactcccggctcaaaggccccgactaatggatcagcccatcacattcacggaagaagacgcaaaaacagtgcgttttccccaccatgacccgttggtcatcgagacccccattgccaataaggtggtggccagagtcctaatcgacaacgggagctccgtgaatctgctgttcaaagaggccttcaatgcaataggcctgacggaccgagacctctcaccaagtggttcccaactcacggggttcaatggaacaacacttatcccgatgggaaaagtgaggcttccagtcaccttgtgcccggacacacccagagcactttcaagtactgcacgttcgtggtggtggactgcccgacagcctacaacgcaatcctcggtcgaccagccttagtaaactttggcgaagtcacgtcaatacgacacttgtgcgtgaaattcccaacccaggaagctgggatagggactgtgaggggaaatcaagggga

SEQ ID NO: 366127 - DNA, 699 bp, Cannabis indica
aaaaccttcaatgactaacaatcaaaagagaattcaattatgagaatgtgaatgttttggacatattcaatctgaatatgcaaatacattgaaaaataataaaaaaaagtttcaatgtcacatggagtgacgataaaattgatagtgatgaagatatttctaacaatgttgcactaacatcagtttcttctaagtttgtttgtgactcacaaatgaaagaaagatcgttgtgcttgaataattccattaaggaggaatctgattctgataaatctgaaatctgtgaggagtccttggctaagtcttatgtatgaaaagtggatataagttacttctaaaaatagaacattatcaaaataaataaacaattgtcttatcaaactgaatctcttgaattgaaaattaaataatatgagattgatttttgtttaaaaggtgaagacattattttattaaagaaagaacttgaaaatttcttgaaaaatgttcaaatatgtttaaccctggatcttctatttttgaggaaattcataatgcaggtcaaagaggcttcgctggtcttggatcaaatggtactaaaagttacgtaaaaataaaatttgtaaaatctagtgttccagcaatttatctcttctagtctcatattttcatatctttttttgtgagaagagtgtttcatttgtaaaaatctagagtgtt

SEQ ID NO: 366128 - DNA, 1621 bp, Cannabis indica
tttaatattttattattcgttgttaacctaccttaactccagaattcaaacccaaactagctgcccactacaaaatctcaaatcactaaaatcatgcaattaacttatcttgagctaaagaaaaccataaagaagaaggctaagcattataccttgaattggacctcctatttcttattgaaaactctttaattgcaacaagggtagtttagtcatttaccactcccaacaaattcccgatatctccaatgtctaacaatagtaccccgctattgacattctaaatcatacaagacgtgactctttaatggcccacgtcgctttccactgaccgaacacaagcaacaaaaaacgcaaaaattcacatatatagcataattaatacattttgaatttaaataaatcttcataaacatgtaaatcataattaataactcaatattgcaattaaccctaataatttaataatccaaaatattaatcttaagcggtcaggggcggacccacatataaccgaggcggggcagtcccccccttgaaaaaaaaatatatatgcaatttaattagtcacaacatatatttgtaataaaagatgatattcaaccataatattaactttggtgtaatggttaagcaactgagggtataggttagaggacaagggttctaatcctactaaatgcattttttttctttttaagtttacttttttgtcccccctcatgtacaaaaaaaaaaattacgcccccgctcactttgaatcctaggtccgccactgtaagcggtcattacagttatcatatactatctaatttgaatgagatcaacgacaaatgagatcatttagattttttttttagtgcaaaactttttatctatttattatgtataattttctttgacaaagagccataacttttcatttgaatattatttattaatgcatgtattatttaattgttcactattataattacaaccttaaattttttatagtgtattccatacattattgtttaaaataaaattttaaattattaaattaatttaaaagttaaattaataataaataataaaaaatcatgtttttacaagggtagcaattcgatcgtttatagtacgtttgaagcaccttataattgaagttgtcataactataaaatttgaatgagatcgacgataaattaaaatcgttcagatatttttttagtacgaaatttttcatctatttataatgtatttttttaattgacaaaatttattattcaatttttatttgacaaattttttatttgattattattattattattattattatttttattattattattattattgcatgtgttattttattgttcactattatactttatgtaatacaaccatcaacatatattaacaaataaaaatttaaatacattgaacatttaccttaaactaagttgaagaataagcatactatgaatgtatattatttactagttcatgcatgattttataaatgatgtaattgatgtaaataattaattttatatctaaaaattttaaatacattgaacattataatcttgaaaaataaaattaattaacataatatgatagaattttaaaacta

SEQ ID NO: 366129 - DNA, 520 bp, Cannabis indica
actttgttatcaaaaacattgtgtgtcgttatggcttgcctcacaagatagtcttagataatggaaagaagtttgactgtgaggaattcacaaacttctgcaaccaactcggagtcgtcaaaagcttctccgcggttgcaaggccgcaaacaaatggataggcagaggccgtcaacaaaatactaaaggtcaccttaaagaaaaagttactggcctacaaaaaaaacctgacctgaagaactgccacgagtattatgggcctaccagaccactccaagaaccacaaccggacactccccattctcaatggtgtatggatgtgaagctatggtaccagtagaaaccttgctcccatcccgtagaagggcaacgtacgaaccggcaatccggcaacgaacaaagctctattacaagaagcgctggatcaaatagacgagctccgggatgagtctcagatatggatggcagcttaccaaagaaaggtggcaaaatacttcaacaccaaggttaaagatagaaa

SEQ ID NO: 366130 - DNA, 530 bp, Cannabis indica
tatatatgagtaactagaaaccgggatcaggtttgtcatattaaagtgagcggtttattggcctagggttattactctagtgaattattaatgagtattgatatgctatgatatatgtatgtatattgagattatggcttatgcgtttaaggcataaataagctagactcggtaaactagtaccttgagtttaattaaatgcagtcgagagttattaccctagaatattatgaaggtaagaaagcgatgatatatggtaatattatgaatccagtgaagacatgagttagggttaatacacttaatagatgttatttgagcatattgtaatgtgttatatgagtaattacttagtatgcaagttagggttattaccctaagattttatatgttatggtatatattgaatgcacgcatgtatgttaagatgtgtataggacataattgggatagacctgatatatatcaccaggatataccactgaaagaacgtaatgaatggactacgtatatatgaatagggttatgcg

SEQ ID NO: 366131 - DNA, 1025 bp, Cannabis indica
tgaaaccttggtcgcctccgtcatgaatgtgctgatgatgctcaaagagagtcgcctggtcttggcttgactccgactaggtctcctaaatgcaacggaagttggcgagaggaggagaattgcgcatggaattttgaggagaaagctttccatgagttgcactttccaggggccagcttgaaataccattcctgggcggcttccgagagggtagcaggaaaaattctgcaacatacgtcacctcgtaccccctgcagatccatttgcatctcgaaatacttgaggtgggaaagaggatcttctcttccagtgtacagttccaagttggcatttttaacttgtgtggcaacgccaggagattgatctagggagaaaaagggattccacatgcgcggcccaactcgagatcattgtttctctgcccgaccatgctttggaacatacttttagttcgtctacctgtgcttgcacagctggactaacctgttcagcattttggccaatttgagtcacgccagtatctttctgagcaggaatttgagcacgggttccgagttgtacgattgtcgtgccaagttaatcgtctactcatctccttctgttcagatcgtttctgagatcatgagtcatccctaacctttcgaatacagaaatgcctggctgtctcagtgattgattgacttggttgacaggtggaatggcactgttagcctggttagaaccgtcgggtatgacttctcctgatgaattactagacaaggtctgcccacctactgcttggcccataggcgaaaactgtgactagagattcggcggctgaccacttatagtctaggaagtattcatcgctggatcttcgcctgttacacccagggggatgacattcgggggttgctgcccgatagtttggtaggcttttcgtatcagcacagtagcttgccaactacgattgtcaatctctgcatgataagaccttaatgctcttatctctttatctcttcattcggcaaacttgcatctttgtt

SEQ ID NO: 366132 - DNA, 661 bp, Cannabis indica
tttttacctgtatgatttttcacattctatctttgtcaggtaccttatgccaacttttgtagttaattggagcattttttccatctcgtactaatgtcccaataaaatttgtaagcttacttgcgtttttatcatgtggttgtccaaattcattacatgtgatttgcatctttgtaccattatgattaccccaaatgtcacgcatttgtgttggacttctaccattctttttaccattattatttgtcaacaaatctgtaagcctagaaattatagtaatccaaatccagatagagaaaggctgcctattttccaaacgacgggtcgaaatttggaaaaaatagtttctgagactttagacgaggataccaaaactaaggcacatcgatatgtattatttaattgtaatgtcgtagactcatttattgagtaagtattatttattatatctctaataataaaaaatattgaagcattaagtaagcatgtctaatgcttattaattttgtagggatcatcgcaatatcattgcacaacaaaatcctcgtcaaagagtaatgaccttagatcggattcatagcgagacatttccttcctggtttgcacaaaaggtaagcttattttcaattcttaattttttgtattaacttaaggagttcac

SEQ ID NO: 366133 - DNA, 708 bp, Cannabis indica
ccataactactctaaatcacaaaatcactatataaaaccaattattttaacttaaaacaaaaccaatccttacctcaagctttctctcttcaaggattttccatcctgctactaccgaagcttgaatcactagaattcggattgacaaattaaaaaaaaatggataaagggggataagagtttcgacgaacagagaactaaagagggtttatttttcgctcgtactgttttaatttataaacttaaaatatatatataaacatatctgataagttttataataataataataatacaataatgaaaaaatgttatcatttcttagacactaaaaaatctttacttttagggctgtaggccaaatttcacatactcttaattatcccaatacttacactatgaacttatcataatatttctgccaaatctattaattaaacccattatgatatttttggcctcgatcgagtctccaaggttgccaagtctaaaaatatttttattccacaaatagctcatattacattcatatatgctatataaatctccgtaattaataaattactcttatttatccacttataacatatttaaaatttatgatgaaatagattagtgatcataatttcacttattacttgattaacccataatataaatataaaccctaattatttaccattaggcttattgggatattataaccat

SEQ ID NO: 366134 - DNA, 1030 bp, Cannabis indica
atcaatggactacaagtaagaattctgtaaatataattctatattgtcaaagagtgtaattcaatttttatagtgaagtaataatataattaataaaccagattattctattgatgcgattgatagtaatcaagtatttattggagcttcgaaatataggtccatggtccccgagtcacctctatacaacattgtacaatggaagattttatttgatgaatgaagttcgagtgagaattaaattctatgggaaataaattcttaagggtaaaataataatttgtgaaactattattttaattaattatggcaattagatgaaactatattatctagttaaatataatattatattaaagagagaaatatattattttaatccttgtgaaataatagattaatgaaaattaattaattataatttattggtgaaataaataataaatcttatttgtggcaaaattaaaaaatcaattttgaaccttaaaatatgacccatacgtgtaggtaataattaaaataaaagatctgactgatatttgttattcagatattagatatttatattttgaatttggattgtaattcaaatcaaattaaatattttcttttattttaaattaaagaattttgatataacactatatataggatatataatatcataaattaatgacagagaaaaagcctattaacagacggaagtaacaactagaaaaagaaaaagaaaaataaaaattgatttttttaaatactattctctctcacacacagccacacacacacacatacacccatacaaggtgtgtgtgaaattgaacaaccctgtcttagttacagtatctcatgaattaagtacgcaatgtaatacataaattaattcatccaaataagatataatagtatactctattcatgagtgttgagactgacttggaagataaatgtgtggattcttcaataaaagttcttgaattggatgatcattaattttacgaaaagaaataagaataccctgatagacttcaag

SEQ ID NO: 366135 - DNA, 504 bp, Cannabis indica
ccttttgcctataaatactcatcgtagtggcacataactcattttatcacccttcgttgttaagtaaactccagagcgaaaaaagagagttttctggcttcaaagttgccgaagtgcctacagacgattgttggtttgcttgaacttcagagattcgaatctttgagtaagttttggattccctttatgctttgctttgcatgtttacgcgttgaatgtaactattctgtagaaagaatgcttaggaaaccctagggctagaaacttttgggactcttctattccatgtcttcatgaacttttttgccctaactcaagaaaactttctcacttcttaagttttgacatttctttaaacataatcgttctttcaatctgttgagtactcctggtcaccacatttgcttgtttttcgtttgatactccgtccaacactcatcttgtgtgttgtcttttgtagatgaacccaggtgagtcttgagaactcgggcatcagaccgacca

SEQ ID NO: 366136 - DNA, 523 bp, Cannabis indica
tcacgggtcaaaattactaaaataaccttggctcacctacggggtcttaacatgtcacatctcatattaattcacatataataaattatataataatataattccacaataatactcaattaactagttagagttttgctaatccattttcttaattccagggtattacaattttctacttgacacgaattttgataaaaaaaaatatggacaacattaataagagcatcttcaatggttaaattttggaggatgtttgcttaagtgaaatgcttatttagaaaaatacaaggatgctataccattggagataaattggtgtaatcatagaaaattatgttgatgctactatatggcattgatgctatcttttctttaaaaaataaaaaattaaaggtaaataaatagtgtgacaataattataagatcataattataatatttttaaagggtgctatacactagagtatttttagaagtaagagtataaaaataatttctgtttaccgagttttttggcaac

SEQ ID NO: 366137 - DNA, 779 bp, Cannabis indica
actattactgctatcaatgtaatctaacaggcaatacaacatgtacgctaaacatgtaatagcatatgcatgatattatactaatgttacctcaatttcgaattcaggtgtgccggtcaacctgagcggaacaactgctcggcgaattataggctcctaaatcacatcgatatcaacacacataagtgactcgctaaatcacatctgggactaaggtttaaaaccagaaacctatctactgcaacttaataaaataatttcccaaactagcagggaatcaactaactagaaacctaaaactgacacgaaacgacaagctgaaaaattgattttgccccctgctgtaaaatccgggtaaccgattttacaagcagtgtaaaactgattaaccggttttacccagaaaaccaacaaaatttgaacccctaaccaaaacgtttccaaactcaaccaaactttccagacctgcatattatacctcaataaaccatttcaaagcaataaaacagttacccaagcccaaaattcaaattcaccattaatgagccaagcttgagttcaaaaactcaaagcttgctcaaacaacaaactacctatcaaaacctgctttaatcaacctttaccaacataatttaactactaaaaacataactcaacaccagcagcaagaacagcaaccaaaaatcacaaaaacatgcatgatctattttcttaaaaatcaagaaactaaaggaagttgtttaaaatcttaccttggcttggagattacaaacactagc

SEQ ID NO: 366138 - DNA, 828 bp, Cannabis indica
ataatgtcacctttagtgttcttacactgtaagtctttacttatttattttgatttttttcaattttttttgtttcaaatgattataatattaataatatgattttgttttttgtaccttttgtttagtaatttatcaagtttgaatcttgatggagaaatttcaccagctattggtaatctaaagagtgtgcaaaatatgtaacttttctttacccttttattaaagttttgtatttttttttttttttgggttctttttctaagatttggaaaaaatggtttttgattatttgatggtttcattcagtgagttgaaaggaaacagattatcaggtcagatcccagatgagattggtgattgttcatctttaataaacttgtaagtgttgcttaaatttaccaaaataacaatatttaagtgtttaatttgcaaatttaccacattgaagttacactttgcgacgtacagtgtaaatttatagtgaaatttttttcgtaaagaccctttttaccactcactctttgttatgcgaaatttgtcaaaataacaacatgaaagtgtttaattagcaaaataaccacattcattatggtaatgaacgtggttattttgctaatgaaatttttcatgatgaccattttgacaaagcactttgccaaaataaccacattaaaattacactttgcgaccataatgactataatagctgttttaaatggtcgcatagtgtaatttttgattctcttttacgaccaaaaaatgattattttgctaaatataaaaattttgttaattgactttttttttttttgaaattagggattt

SEQ ID NO: 366139 - DNA, 783 bp, Cannabis indica
acattatgaaactgggtaagttatatgatcaaaaccctaatccataaccctaggttttgttatactccctagaggttactcaaactctggaattagggaaacacccaaccacgacactaaaatggacgaaaattgagaaaatgaagtgtttggggatcctgccaaaacggactagccggttttaggggtctggtaaaacggactagccggtttgcaccagtccaccccaaacatttcattctttgctcaattttccaccaaataccaccaaactttccagagtacctaatcaatgcataaacaacatattccagccagtaattcataaaataactcaataaaacaaattatgccattagagatcaaaccattgaactcaaagctcaaacttgcaaaaaacctaatccaaccatcaaaaccagctacaaaaagctaataccaactcaaatgaaccctataattcgaattacacaaaagttaatccctaacagctcctaatccctaaaaaatcataaactcaacctaaacttaaattcaagaactaaggtaaagagatgctagggcttaccttggcttgatttccccttgaattccttgctgaaagcactaagaatcagcaaccaattcccgttgctttggcttgttcgaagagagagaggaagggaagagaggtttccttcaatcttttgatttttagcttattttcaatttttctttctaaatgaaataaaggtttattcatttaaaccttggctgaaacttattttgctaggtgtcacaaga

SEQ ID NO: 366140 - DNA, 327 bp, Cannabis indica
aagtgaggcccaaatccactagccatggccggccacttatgtaggctttatcatttaatattttcattattttaatgccaaataattcaaacctaaccctatgtggcatgctataaatagatagtgatggcttcaggaaaaagtaaactttcacatcttgtttccttcagaagaaaacctgagcctcctctctatacctaccgccaccttcttctccttcttcttctttggacttaaaatgatttgtttgtgatttagatggtatcatgttgttttgtgtgttgtattgatgattgattgatgtttgtgaattttcgtgaaaaataa

SEQ ID NO: 366141 - DNA, 504 bp, Cannabis indica
atataattctataattactaagagtgtaattccatattcatagtggagttatcaagaaattaataaacaagagattatttggttgatgagactcaataaagaatctagtttattgaagcttagaattataggttcatggtccctgaatcgccaccttaaaatactgtcaatggtatagggataaagagttgtataaagagttagagaaaaaaaatctattttgaattggcaaaatagtaattatttatttttaaaatagataaataattttatcaaattaattaaatagggaaaaaaacaaaaatcgttaaaataaaatttatcaagacaagatttgtcaggacaaatgttttcaggataaaagacaccaaccacaccaaccttgtcctaaatgcacactggtaggtgcctagctaatgttcatgttcctattggattcgtccttttggattcattaattcaattaggtaaatatctaatgtaaaaagtagttatagatatttc

SEQ ID NO: 366142 - DNA, 511 bp, Cannabis indica
atatatatatatatatccaaattcaaaccattgaccatggcaacaaaataaaagatataattggaacttaataactttaataaagtacaaaattatggattcatgtgcacacaatttgcaacagtacgaaaacactccaaaactatataaattgtgttagggtttgaatgtatatgaaactagaagaatataacaaataacctaaatctcatatgtgattttataataataaacccgaccgttacgaaataatattttcaaactccacataacatataatttaggctactcacttgaagaatatacatgttgtatacatagattcaaaatagagcataatcgatgcactacagcttgcccatgaaatatgtagaaagaaactaaatgaaaaaaaaattaaaccgtagtgaacagagtaaaattttctattatatcaattaacttcaataattttagaagataaataccaaataaataatcacaaaattataaccccaaatcataaatggaa

SEQ ID NO: 366143 - DNA, 1326 bp, Cannabis indica
gaacccagttttgtatcggttagtgggtgaccctattacactacacctaacttgcttacagcttttatgtcacggtacccctaaacacctatagtgatagtgtcattactgcgagtgtacatcgacaccactaaagtgaacacatttcgatatcggttagtgactcgttacgaaactcggtgactccatatctacacctaacttgattacatactttgtgtcacgggacacctaaacgtcaacagtgatagtgtccctaatgcgagtgtacatcgacaccactatgtagaaccctatttcggtatcggttagttatttcgttacgaaactcgtaactcagatacactacacctaacttgattaaatactttgtgtgacgggacccctaaacatctatagtgatagtgtcactactgcgagtgtacatcggcaccactaagtagaacactatttcagtatcggttagtgattttgttacgaaattggtgactccgattcaatacacctaactttattacagactgtacacctaacgagtgtacatcggtaccactaagtagaaccctaattcggtatcggttagtgggtgactctaatacactaaacctaacttgattacagatttttgtatcacgggacccttaaacacctatagtgaatagtctaaatacggcgagtgtacatcgacacaactaagtagaaccctattttgatatcggttagtgatttcattacgaaactggtgactacaataccctacacctaacttgattacatactttgtgtcatgggacccctaaacatctacagtgatagtgtcactacgacgagtgtacatcgacaacgctaagtggaaccctatttcggtatcggttagttatttcgttacgaaactagtgactccgatacactacaccttacatgattacatactttgtgtcacgggacccctaaacatatactgtgatagtgtcactacaccgagtgtacatcggcaccactaagtatcaacctgtttaagtttcagtttgtgatttcgttacgaaattggtgagtctgatacactagacctaacttgtttacatactttgtgtcacgggacccctaatcatctatagtgatagtgtccgtgttgcgagtgtacatcagcaccgctatgccgaaccctatttctttatcaattagtgtttgttttacgaaactggtgactcttatacactacagctaacttgattacatactttgtgttatgggacccctaaacatctacattgatagtgtcactactgcgagtgtacatcgacaacgctaagtggaaccctattt

SEQ ID NO: 366144 - DNA, 758 bp, Cannabis indica
tttgatgcctaagtgatattttagtatcacttagtccattttatgttctggcaaagctagtcaccagttcttaaagatgttgttgttctacgaaaatggaagactcgaaactccccatttccgagttttttaccatgttagaaataagaaatgcgaagttatgaatttgaatttttttgaattcatggctttcgattattgtgaaaattagacgaacggtcgagacaaaatcagaatcggataagaaaaacccaacgcaccaggacatttgtcaacttgggctttgggtgcttattttggagcttccatgatgtctttttgatacttccaaggttctagagcttgaggacgaggtctcctaccctatttttgaccattccggagagaatgcccaaagcagaattgacatttgagtgatcaaaactagcgcaccaggttgattgtcaacttgggcgctgggcccaacaccaggtcaacctggatgctgggctaagtttccaagccctctagtttgtggttttcttctcgagtttcttgtatcttcgttatttctggtgatggaaaaaatatctaaacagttttttgaaaaattggttgttaaggactcaagttgacaatatgtcaacttgggcgctaggtccagttttaggccatctaaaagttctgtttggtccccaaaaatagatgaaccttaatctttgttgaaacgaagaatatgcccagaaaacttctcgaaaaaaatcctcagaattggccca

SEQ ID NO: 366145 - DNA, 876 bp, Cannabis indica
catttcatagaagcaattaaatataaactacaattaaatattacacaaatattgtaaaattagtcaaagtatttacaagttaacctaaaaaaataagttagggaaaaaaattcttaggcctttcagcatcaatcgtccaagccttcatgaatcacatccatcaaccgttctatccactgtcgctgtattggtaataatttaatttttggattgtattattgcttatatccaaactgtaaaaaaaataaaaatttatattagtttatatatacatattattatttgttattataataaatactataatcaataattaaaacttacatctttttgagcttgtatgtaacggttggggtttgcacgtgcgacgatgtcagtcatgtatttcaaaacataaaaatcacattcttggcttttaagttgtcttggacaatttgctagtgaaatttttggccacgggccaagatacacatttgatgcccctatatattcgtatgctctgtttgaaaaattatattaacatatcaattcatagttaattaaataatttattacataaatagtcattaaattattatcttttcaacatttcagtaatttgcccagaaacttgatggtcacgtatagggtctaaatggataattttccttagcgcaacgacctctagcatccaatgtgcactagaaaattatattcaaatattagtaagatagtataataataatttcaagttataatataaaaatgaacaattaacacgaaatagcgtttaccgatattctagggaataaagaacatttggtggttgttattcatcaatgataaccaagcagccaattattttgccgcattatcaaaagattgactcttctcttc

SEQ ID NO: 366146 - DNA, 651 bp, Cannabis indica
tttattccatttacgtttttcttaatttaatgctaatattcattgtaaaacagtttgataatcaattaagttctatataatccaaaggacacttgctttgtatataaaggagtgatccaacataaatgaaagggacagaaaattcttgcaacagtagactaagcaggcaataaactgactgaaccactataattctcttgtgttcattatatgtattacttttttcaatttgtctgtgtgccttctatttgaatactcgctattctaagttaagtactagcatattttcattaaataattatatttttattaaataattatattttcattttcattcggtgttatcaaaattcctccaacaataaagcataattgcactaaaaactttatgcaagggaatgctacaccctaccacaactttattgtttttattttttattagtgcaccaaaacctgttttcttgggcacaatgtaatatcccagaagataaataatatttaaatggacatattttattaaatatgtaattacttgggaaatgaagtaggattatgatcttacttaggtaaattgttgggaaattatttaatgaaatgcgttattttgggcccggtaattgtgaaattttagctatgtggttagcaatgtca

SEQ ID NO: 366147 - DNA, 645 bp, Cannabis indica
gggggattgagaactatgtgcgtcattgctagctcctctctactttttatgactaattgtaatttcttcttgtgtagctagaaaactgtaactacgcggcccataatgtggccaaatgggcgtttgccaacaatgttacgggcatggtagagatatttactatacctgttaatatcttttagtaatgaccagagaggtctaacttcaattttatttataaacgtactttttcaaaaaaaaaaaaaagtttactagtttgtaaatatcccaactcattatatttgtgaacttgtttagaagattcagcgtaataaggtgtactgaaacgcctggttcgaatagctggaccaatacattgattaagtatttgggcctgcaaacaacaataggcccatttactttaggttcctaaaagccacaatagaaaacgttttatccttataaacatgagataatattaaaaaaaaattacaagaatacaatttctacgaattttcaatatttttacgattttacagtttttaaattttatttatataaatagtttttggtatatttttatgttatatttttattgttaattttttattatttgtatattattttttaaactactttactattttcttattacttttatgttgt

SEQ ID NO: 366148 - DNA, 504 bp, Cannabis indica
gaaatttataaaaataagaataaatttgactctcgccaatcggaacatcataggattcttattttaaattcgaaattatcctttaattttttctcttagcttattcatttcgaatagcttaaataatatatcattgaatgaatggttaataaatcattttcttatgatgtcattcagttttctcttaagaaattgaatggcgcatatgattatattcccgacattctatcccgaaatgatacaaatcctcgatcttgaatctcttaatgtatatatgtttactataggcaatttaaatttacagttagattagtagtggtggtccaagagaaaataattactcatgtatatttggttaaatttaagtctttgattttaaaatatagactccaaatagaaatttcatatttctatttctcacaacacattacacattacagtatgactttcacaagtttttttaatatccattttctgtcaatggattcaaactgtatgtttatg

SEQ ID NO: 366149 - DNA, 610 bp, Cannabis indica
gggttcggagtcgccggttctggttggtcggggttgagcgtcgacggcgtgggtgggtcggggttgagcgtcgacggagcacggtggggacggggttgagcttcggtcgagttcgtccgactgtgtgggttttttcttttgggtttggtgttcggctgagagagacgaagagagaggaagagagaggctgatttcaaatgagaggggtagttcaggaaaattggtaaaatggtcatatattaccaattttaataattttgcatttaagggaaaaaattttgggtaatgtaagtatagaaattcaaatttcccttctaatttcatgtaagacattggtgaaaattgaatgaatacaatacattacattataaaaaaaacgcgtacaaagttcaaaggtgactgaccgtccaaagttttttcgaatgtgaccagctataaattagagtctatttctcaatcacctgaactagttactctttagtttcttagtaacttttcctttaaccagaaaattagatatcttcaccactgaacgcagtaattctctaccataaaatttaagtactttataaatttaattactattttttaacttttgtttcttttcact

SEQ ID NO: 366150 - DNA, 790 bp, Cannabis indica
atttggtaagaaaaaaattgtaatattaaattgtagaaaaaaaatatgtgaaattaaatatatagaatgagaattggtgtgaaaaatgaatgattattatagtgaatatttataaaaaaattctaagcttccaactcaaaaaattaatattatatatttatgattttatgttactgtttattgaaggataaataatattttagactttgtgttttacaaaagttactaattggaccatttgttttgttaaataacaaaatagaccctgtattttttaaaaaatatacaaatataggatcttaaactgattttttgtcaaaataaaacttaataataatatgatcatctagagatgttatgacaaaactggttacatttttttatatctgttcgtattaaaaattatcttaaagttggttatattaaaaaataaaattattaaaaattgagcttaaggacttatttttaccattttggaaaatataatattcaatttattatttaacaaaacagaaaatctaattggtaacttttgtaaaatacagaattcaaaatagtattttctttttattaaattaaataaaaaaagacatatatatatataatatataaactttttattttatttaacatactcaagctagattgttttgtgcgtagtgtattaatttttatattggacttttgaactattatttcctaatatcgaaacactttaatttcttcccagtcataattattggcatttctggggtaatgtatgcatggaaaattattatatatatattta

SEQ ID NO: 366151 - DNA, 546 bp, Cannabis indica
agttttgatacaattacaaatagtaaaagaaatcctttatttatatcttacataacatcacaatagtttctaaaaaaaatacaaaagtgtgaaaaaaataatatagaaagaaacgtttttaacgtgacacctcaccttaatatatagatagatttttataaatggacttttcaaatgcatcttaacaaatgtgtataagatctttatttttcttggtaaggtgaaatcttatcctaagatgcaacttgcaccaaatttagtgagactcttacttgttcttggagtggattaatgctctaaaaaattaggagatttgacaaatttgtggtgaagattttgattttaatataatttgatattctgcgactgctattactacaagtgttaatgttgtgaagtcaaattaaataataaatactatgagatttatccaaaaataaaaaacttgtatgcatacatttcgttgatttgtgagatttatattacacttaaaaattataattgtcaagtcataatttcacaaagttactaaattttagtaaataa

SEQ ID NO: 366152 - DNA, 512 bp, Cannabis indica
attgtgaaggctcatttgcctgatttaaataactgtgataggttaattaaactagtttaacctaataaaattgattagcaacataattaatttcaaaatatataaaattaatttttcatgagactattttgaaatcaagttaagaaaaacacacttagtttaatgaaacttttttcaagattaaccagatgcatttttctgtatttaattaaataaaagaagttataactaattagattcttatggatacttaattatttgaattttcatagaaaatatatttaagttgaaaattagtttttcaaattaattttggatcaacttaaggctaattagcaattttttccccaaactttgacatataccaaatcatgccccctgaacttttttaccgttaaaaattctccctaaactaatgagattgttagatttaaggacttttgtctaatttcattcaattttaatgtttcagtgattgtttatgtactaaaccatgctcacagactttgata

SEQ ID NO: 366153 - DNA, 644 bp, Cannabis indica
ctctaattctatccaaaaatggaatagagatattacagtaagaactttcttcaattgaataaattccagtgctttcgaaacaacaaagttatttatcttcacttatggagcttaaattatcatagatgggtttttacatccttccagaataattcctccaccccagagtaaccaccatctcgaataggttatgagttggtgtagatataaggattctaatgtacacccctatcatcttacatataggccactttcagagattcttccttgattatctcctaatgttccttgtttgattacatcttagatggctcccactcaatagtaagagtctggtagcctcttactattggttcttagggacatcttgttgtgacatattatcttagtctgaaactatcagtttctcctagactaagtcatcaacatagcaatctagtattaactttaatgtataatacttacttatgattaagtaatcattagagataccacaaaacatttcatgaggactaagaattttgctaagtcattcgaatagacttttcaaatttctcctatcttatccttaaaattttgataacttatttctatccatatgaatggttagatttactttctcagttgaattctaaagttcctat

SEQ ID NO: 366154 - DNA, 722 bp, Cannabis indica
gcataaaacccaacacctagttgggtcctaggcgccatcctcggcaacctggttaggaagtgatcaaccgtcgtttatcctagagccagtggcctgttcaggtgatgaatcaaaagatccttgaggattcagaggctcttttccaggacaatgactgattccttcatgaggattatcttcattgttgtcatccattacttttatgtcaggaggctttttcagagcttttttcacgaaagctcttaatgaaagcaccaaactgttaatgcagaatttcattaatcaaaatttgagcctcacagtgataatctcactcagaaaaagttaaagcagtaaaataaaaaatatgaacaaaagggagtttttacgtgattttgcagttaaaattcttcatagtccacgagtcaatcttattagatttctgtatagttttctcagggtcttttttgtgtgatttttttcgtcccctttgatcttacttggtactatttataattacatagtaggcagttaattacgaagttgactgtaatctttgcaacaattatccccttaaataatgggatctgattacatatcacattaagtaaatgcggttttcatttaaatttcacagagctgtgaatattccgcatttatttgggtctaaaatgtagcgtgtattaaagatatatggtaagccttatcgtattggaatgcctcgctgggaatggagtcgagtt

SEQ ID NO: 366155 - DNA, 1293 bp, Cannabis indica
cgatttgaatatggcatgcccaaaagactgttttctacttcccaagatcgatcagttagtggatgcaactgctgagcacgagcttatgttgtttatggacgcatattctagatataaccagataaaaatgtacgtcccatatcaagaacatacaagcttcgtaaccaacatgggactctattgttataaaaagtcatgtcgtttggactgaagaacgctggggcaacatatcagcgactagtgaacaaaatgttcgcaagccaaaaaaggcgaagcatggaggtttacgtcgatgatatgttggtgaaatcagtaaagagtaagaatcatacctcagacctcatggaatgctttaaaatattaaaaaggtataacatgaagctaaaccaaaaaaaatgttcctttggagtctcatcgggaaattttttggcattcattgttaacacgaggggtattgaggaaaatcctgaaaaaaaatcaaagcattaatagacatgccatcgctaacaaaacctaaggaagtacaagccctgacaggaagaatggaggcacttaacatattcatttcgaagtcaactgataaatgtgtgtcgttcttcaacatattgcgaggcaacaaaaagttcgagtgaacaaaagagtgcaaagcaacctttcaaaacataaaaaggaatctagcaaaacctccagttttggcgaaaccaataaccggagaaacgttttttccctatttagccctctcgaaagatgcaattagtgcagttatagtgcgcgaagagggcaagcaccagcaacctatttattatgtaagtaaaaggttactaggggcagaatccacatatccccctctagaaaaactcacgttgtgcctagtccatgcgtctcgtaaactacggccatacttccaggtgcaccccataaaagtgttaaccgatcaacccttgagacaagttttatcaaaaccagatgcttctggaagattgataaaatggtcgattgaactggggcagttcgacataacagaccatcctcgaacatacatcaagggccaagctttggatgacttcttaatagaaggtaaaactccaaaagaaattccaccagttcagcgagacgcggaaacctggacgttatacgtggatggtgcatccaacgaacagggttcgggtgcaggggtaatattaatatcgccagaaggctttaagtttcactatgctctgaggtttcaatttgatgcatcaaataacgaggctgaggcattgaaggtcaaaaacctcatctgccatagtgatt

SEQ ID NO: 366156 - DNA, 693 bp, Cannabis indica
ttgaagctttctaccctgcttggtcgcaatcccgtactagtatccaagccgaacaagaaatggcgagtctgtattgatttcaaagacttcaacaagcatgctctaatgactgttttccacttccaaggaatcgatcatctcgtagatgcaacagcagggcatgaaatactaagcctcatggacacttactcaggctacaatcaaatcaaaatgcatccaccagaccaagaacatacaagtttctgaacagatatgggtctatattgctacaaagtaatgtcgtttggtctggaaaacgctggagctacataccaaagattggtaaacaaaatgtttaaagatcaaatcgggtgaaatatggatgatatgctcatcaaatccaagagaagaaaatacaactgcaaatgcgttagctcgattggcaagcagcaatgtaagtgacaaagcaaacttggttcctatccaattccttgaagagcctagcatcaccggcacagaagaaatcgaaatcattgatacatccccaaactggatgacaccaatagcagcctacctcgaatctaggaaactcccagataaccaatatgaagctcggaaaatgaggaggaaagctgcacagtatatcatagtagagggaattatgtacaaaagaggattctcgatgccattcctcaaatgtgtcactcaagacga

SEQ ID NO: 366157 - DNA, 1198 bp, Cannabis indica
cagaaaaattaatacaagttctccaagttccgttaggctttgggacgagaacaggattagctatctacgagggataaaacacctcgcgtataaagtcattgactaacagcttgtccacttcctattttagtgccccttgtctctcggaatccaagggtccccttttctgcctcttcgctgggtagtttggatcaacatttaaatgatggcatataatgttagggtcgatccctatcatatccccatggctccaggcaaattaatcctggttcgcctttaaaaaacttattagctgctattttagctgctcttccaggttattcccaatgtaaacacactttgtgggtttccttgggtcgaggataacttcttccaattcttcgattggttttaataagtttctctcatcttgaactcgggggtcaagatcttcgtccttcctttcactttcttttgccaagatttccattaactggtgatcggttttcctatgctgcagctctatgcaatagcaatcgcgagccaacatcttatcaccccgcaccacccccacaccttctagtgtttggaacttcaaggatatgtgtttgatcaaactaactgcctctagtccgatcaatgctggacgacccaaaaatatgttgtaagtcgatggcaagtcgacaactaggaagtcttgcataacagtggcggataagggtgcctcgcccaaggttaatgcgagctcgattataccaagactggcaatgctgtctctagtgaagctgtaaagatttaccatacaaggcctcaatttagctttttcgagccccatcttcctcgacgtttccttataaaggatatttactgagctcccattgtctattaacaccctctttatccttttattggcaagttgaatggtaatcaccaatggatcaaatgctggctgctcgttctttatttctttcacatatcttttttgggcgttattgctcttccttgcgataccaggatgtcctccccttaaccaagaagaggttgtaacccctggttacttgggttattgagcaaactgggctggttgtatcaatggtcctgtctcttcacgtaatgtttaaagtggcctcgagcgatgtgactttctatctcatctttcaattggcgacattggtcgattgcgtacccaatatccttatggaatttacaatacctgtta

SEQ ID NO: 366158 - DNA, 531 bp, Cannabis indica
tggtcttttttattttttatttttatttatttaagaaaatggccctttggccaagataatggttgcccttagtggcattattttttgtaaggaattttgcatagctgaatggccaactttgctttttcatgcgtttgtctttactttaaatgcctcgtatcttatgtttgaattgaatatgtctatttattgcgttttatttcacaatctaaacatttatattctgatccaacttattgatacttttggaagcattcccattgttcctatttttcatttgatatgcttaagtagttattaatctactatgtatatgctaagcagttataatctacgtttagttttaatccgcgagcaattcaattctgccctgttatatgccaccagtgtacaatctgccatatgcaaacttaaaaaatactttgaataatcacctctgtctagaactattttgcatgtctttaatttgattgctcatatgaatagttatatcatctattcatattttagctttagtattatttttcaacg

SEQ ID NO: 366159 - DNA, 574 bp, Cannabis indica
atcattgtcttgtctctaacaaaataaaaatctgcacaataattttctcaatataagaatcatttatcaataaaatgggcatgtgtaatttcaaggaagcaaagaatgaggacaaacttaagcactaaaataatactgctcatctaccctttgtgatgaaaagcgttctgtattcatgttcatcttatttctaagttggaagctgatgataaagctataatgtacatacatatcattaggttaagccaagcaaatgcaagtaataatttccagttaaaaagataggtagatagatagaaatgtaatgaagtatagtctttatcgaagttgagaaaactaacttaataaatgcagactatctctcctttcaaacactgttatcaaaaggctgaaacaaattaaagtttcggtgtagtcaaattaataagttttcccatgtgaaaggacagaacccattttaatgcaacttgtgtacaattattataatacggaccaaccaacccccactaagtatatttagacaacttgttgttggaagttattttaccaggaacttagatctactcacaagtat

SEQ ID NO: 366160 - DNA, 626 bp, Cannabis indica
aagggtttggagaatatatctaatgtgaaatagtaataattaatgacattatatatatatatatgtaataatatatataagtctatgttcatgttagaataaacattctaatgtactgtgcctgtaaaatcgatcatgaatattgaataagatatttataacttctagctctatatatgatttttgaagttcaatatatatatatatatatatatatatatttatatatttataatatgtgtgtgataattttttaaaaaatcaaaaattcaatttcattaactagcatcacttattaacaatggtatcaaatagaaataagctcacacttatttgttcaacgtttaacaaaaaaactaataacgaaacaacttccctaatgtaatgatcagcatagctagacacagatcaaataaaaaccaaaattaaagttaaaagaaaacaaagagatgtataagctagataagaattgaatcacaagatgattaaattaagaactttagggctagtttggtacattatatatattagatcgtattgtattatattatattaaattcgattatatattatatttttatataattttactatgttaaattttttaataggtttttttttttttt

SEQ ID NO: 366161 - DNA, 462 bp, Cannabis indica
tttatttcattgttttagaattcctattaggttgttaataaaacatacatgtagtaaatctagatcttggtaaaatatttccaacagtctgtaaatgcgactatacaagaacgcagacatcttagactcaactaagtgttaggtgtattctaagaccacgcgcttatgcaagaatatgaacagccaactcgcacattagaagtcacatacgttactgtatttagtgaatataaactgttcttcatttattaatgtttacatttttagcttaattattgtaaatcaatgtacgaacggattgacaatgactgcaatccttgtgtaaataatcggacacttgctttgtatataaaggagtggtccaccgtgaaatgggacacctacagaatttttgtaacagttgactaagcagaccgtgatctgactaaaccactatattcccttgtgttctttgtatttcca

SEQ ID NO: 366162 - DNA, 547 bp, Cannabis indica
tccttttaaggggggatagttgtgatgaccgcttagcttaaatttagaaattatcagatcattagggtttgattatggaatttatttattaattctaaattattaatttatgatgatttatttgaattcagaatgcattttatatgtcatatataaaaatttcataattttgcatattcggtgcccgacaacattggaacgcggtgtttggctattaagaatcacatcctagtattttaagtatagcagggcagtttagttagacattgggaatgtcgagaataatcggaattttagaatttctcaaaataccctatgtgacttcttatgattttatggtgttaaggggcaaaaagggtctttttagaaagatgtgttttgtcttttgtgggttatattaatctaattttaaagtttaattaaaattattttagttgaataaagcttatggagttatctcatttttaaaagtttatcaaaaaaaatcatttttgtctctcaactctctctcattttcgaacccatagaaccagctagggtttgggtt

SEQ ID NO: 366163 - DNA, 722 bp, Cannabis indica
gaattggcatttaagtggttaaattagaaatttggcgtttttaaaaaaatgggatggaaaaatgacaaaatggcaaaattgcaaagtggggcccaatccaatatacaaggccgcccacttagtgtagaatttaccatttatttttcattattttaatgccaaatatatctaacctaaacctaggtggttacatataaatagatagtgatggctcacactaaaaattgatgatgatacatcacattccttcagtaaaattttaagcctccttcctatagcacaactgaaaccacttcctctcatttcttcttcatattattcagccttgagtgatagagtgagtgcccacacacatcaagtggtatcacaatcatagtgtggaagattgtgaagaatccaatcaacaagaaggagacactactagaaaaataggttttagtgacacacatccagtaactctaaaactatttagtgacacttcaacgcgcgtcactaatgaaggtgactggaaatacagtttttagtgacactccacacatgtcactaaacccttttacattcactctctgcgcgtcactataggcgtataaagtcaggttttgtcagactgaaaagtaagagcagcacacatagagtatcactatatccctttattcttttttttttatattttttattaatattttttaaaaaaataatattttattttttaatttaaattt

SEQ ID NO: 366164 - DNA, 682 bp, Cannabis indica
ttcgtgaggaaatgactaacagtatgttttccgtcttcaccacaaacttcgacccttacaagtaatgtctccacgtccgtaaacaatgaataactgccatgagctctttcttcttgcgcagtgtactgcctttttgcttcagaaatcttgcggctctcaaatgccacggggtggccttcctacatgagtacccttcctaaaagcataatccggacgcatcagtctgtacttcaaagggcttgcatacatcaggcagggctaacacaagatacttcgatcatggcttcttttagacttcagaaagttcttcgcacttcgcagaccacgtccatgtaacacccttcttcaacaactctgttaagggtgccgctcttctcgaatacacccccccacaaatcttctatagtaattggctaggtcgagaaacgagtgtagttatttcacattggctggggtcgtccactcttggatcgcccgcaccttttccatatccatacagatcttcccgtgctccacaacatgacccaggaacttgatacttttctgagcaaaagagcacttctcccgctttacataaaactgttctttcctcaacttccgaagcaccgttgccaagtgttcctaatgctcttctggagtggcgctgtagaccacgatatcatccaggtacaccaccacgaac

SEQ ID NO: 366165 - DNA, 741 bp, Cannabis indica
aaacttaatactgctcttatggaattaaaggcaacacacttaaattaaataattataatctaatatgattcctatcatgctttaataatcatttaaaatactaaacaagtacaggcttactcaaccgtgaatcgaggtttctctgaagaagattgtacatgtcttggcaagcttcggtagacaaacctggctgctctgataccaaaattgtaacgtcctaataccaaggcacgccacagtgctttttcaattatagtgttatccttgcaaatcaaagatatttcttgaaaaatgtgtcaaataaaatttttttataataaatatcaagctttataatttacataattatttacaaactccgagatcctgaatcaaaactttttatacaaaatatgcaaaaatataatatccaggttgcacagcgactataaaataaaatccccaaatgtcccgagaccgaacagttcagatcacgctgccacgacatgtacaatcccacccaagccaggctcactcctgttcatctttcgccttccctttacctacacatggtagtaaaactgtatgagtcgacaaactcagtaagaaaagcatacagcatattatataataccgacttgtatcaaggtgcccatacacctatttataaggctcaacagatgagtaggaacgttccatactacatacactacgtaccttgttgtacgagtgttggtagggtttgtttttgtaccaccgagt

SEQ ID NO: 366166 - DNA, 655 bp, Cannabis indica
tagggtcagtcatcaatccaggaaatagccagagtggcgtactcgtgtataagagccattcattctgtgggtgtaagggcccaatggaggcttgaagcggggatgttacaaatggtatcagagccttgacccagccggaagtgtggtcgacgaggatttcgaaggctcctggagtaagtacctaccgttgatagaatttgcgtacaataacagtttccagagtacgttagggatggctccctatgaactgttgtatggcaagaaatgtagatctctcatccactgggatgagacaggaaagtggaaatatcttggtccggaatcagtgcaacggactaataaagcgattgagaagattaaaatcagaatgcttgctgctcaaaataggcaaaagagttatgttgattcaaaacgcagagatatagaatttcaagtaggagatcatgtgttcttacgggtgtctcctatgaaagggatcaagtgttttcggaagagaggcaagttatgccctagatttataggacctttcgagattctcgagaaggttggaaaagtggcatactgattagctttgcctctagtttttttcagcagttcacaacgtatttcatgtctctatgttgagaaaatatgtttcaaaccctgctcatgtact

SEQ ID NO: 366167 - DNA, 535 bp, Cannabis indica
atggtcccactgcctctattgtattgacacaaccgatgaagatactaccattaatgttcctagacagaaagtcacggtaccttgttgtagtgggagggttacaaggaactcacttgtatattatgctatttaatatgttatctcttggtcctaaagtgagacgaaggaggcggccagcttaggccccccaccgctcagggtcccatttcgaaaaaaaatattaaatatagttagcaataaaataaataataatactcaaaatacaaaaatatttattatatcttagtggtaatttgattagtttaataactaagaggtttagagtttaaatcccaataacttcacattttctttggggtcctaatttttatttttgcctaaggtccaaattaacataaggtcagtcttaatcatctttgagattatatacaagtgtataatgatatttattgctattaattttatataattaattataaatttgtgctcgttcagagagagagagagagagagagagagagagagagagagagag

SEQ ID NO: 366168 - DNA, 883 bp, Cannabis indica
atattatgcactatgagacttttgtaaatattttgtaaacagatcctggttttatataagtatgttaatttgatatttataaataattaaataaagttttaattattcacgattttcaataaactcgttaattagcaacgagctgcacaattaagttaaaaatcacattaacacgcctaaactagtagggtgtttcatgtctgttctttggtgcaagtaatctcggtttagattatggatgtagtatgacatcgaagtgaaggtgttgtatataatagagattatatatgacaagaaccgatatgaataaagttgtctttatctaacatgccctttactataaatacctaattcatatcataacgatgatcaataatagatcggcctaaatcctgagtaatcatgaactcctattcatgttattagttgctttgattcactcgtaaatatttctctaagaaaatgattcttaaaacttctattttgggaagctaataatgtggatggctgagaacatgatttacaattatggaatccttactttcctaacgaattaaatgtttgttccctttcagagttaattctcgaactagaatgttctgcacaaatttagatgagatctaaattatactttctctagtgaataaatggtactaaaggataaaaaagtaattagaagggtaaaacaataatttaaccaaaactaattacaaaccaacacatggagggctaatcactacaattgattatattaatggacactatagtaaaatttagtaaatataattctataattactaagagttcaattccatatttttagtagagtaatcataaaattaataaaaaaaaattatttagttgatgaggttcaataaataat

SEQ ID NO: 366169 - DNA, 306 bp, Cannabis indica
ttccgggtttaccacctcagcgggaaattgatttcataattgatttggcacctggagcaaaaccggtctctaaagccccatacaggatggctccagcagaacttaaagagttaaaaattaaactttaggggttgcttaacatagggtttaccggacccagtgtgtcaccctggggagctccggtactgtttgttaagaagaaagatggatctttgcggatgtgcattgactactgggaattgaataagctgttggaaattatttttactctaatcactaagaggttttgaaatttcaaggaagaag

SEQ ID NO: 366170 - DNA, 970 bp, Cannabis indica
ctacgccaactataaatatagcatcatttaatttattataattatcattttggtattttgtttataaatcaattgaggtttttgtgtgaaattccgtaaaaataaccaaaaaaaaaaaatctattttgaagtgtaaaaataaaaaatcacttattattttggtattagatttacaatttaaataaaaaaaaagtcttaaaatttttaattattatgattatttttatggtattagatttaaaaaattgaaaatgtcgttaaaaatttaattattaaataaaattcttattttaatattatatttacaatttcaataccaaaaaatattatatatgcaagatttattataactctatgcaaattataaatatagcatcactattgtattataattatcatttgatattagattaaaaatttaaaacgtcttttatcttatttatttatttttataatttatttaccaaattataaaatctttattttttttaattattggtatactggacgaaataaatgtaattttatttttttaaaatttaataaataaaatgtatataacattaaataatagaattattgtttggtaaatttagatactttcatctcaaaagataataaactaggtacaagtagataaaaatagtgacagtataacatagcctgtacaaactccataaattatattagtaataacttaaaatatttaaagaaatgttagaagctctccacttcccacatgaattcatacaatcggttatgctttgcataagaactccaaaatttagcttatcatttaatggctcgctacatggattttttgaagttaaaaggggtttgcatcaatgtgatccaatgtctccattaatctttgtgctagctatggaatatcctaactaggatggggaaaaaggttgattttaaattccatgataggtactacctatatcaacaaggtgcatcttgtttt

SEQ ID NO: 366171 - DNA, 512 bp, Cannabis indica
ttattttttagaataattaacatttttgtcctgtcaactttcggcactacctgattttatcccctaaaatatacaacttgttacataattatgtcccttttgttaggttttgtttattttaccattaaaaatgagcatttttacccctgaactttgaccaatgcaaaattttactcatttttttttttaaaaaaattaattttaaaaattattatatttcattttttaaagcaattataatattctattcattatggaaaaaaagaatttttttttaaaactaataaaaatattaattaatcaaaaaaatattaattttatttaaaaaaacttaaattattccttaaaaaactattttcaaactttattttatttttaaccatgtgtctcaaaaaatcaaatcaaaattattgagaatctaataaataatttaaataaactataattttttttgaagaaaaaatcaaatttatttatatttataaactcgtatcttaacaaataaagataaa

SEQ ID NO: 366172 - DNA, 1022 bp, Cannabis indica
tttcgcgatcacgattcttactttgacagactgaccatatgttattttggcgcatccacaagtcagcaaactttgaggataccccaccctgcctctccttacatgggagttggaacaagttatgcgaacgttttgaaacttgaagagaacctaacaaacatgattttgatgccttttctagactccctgccttacgatcatgaggaacatgttggtcaaatccaaattgtctagccacacgatcaggacgatatgaaataaaagaccaagaaagagattttgagttatcttgaaggcacaacaaccaccgaggaagacaaatagcaaaccaaaatcctataccgccacgagaaatattcagattcgatcgaacctcgctcgttaatggtaccacacttccatcatacatgtccagggtgaaataagcatctatgttagtaagatacgggcggaagttgaattctgaaatatagtcaacgatatcagtcaactgtactgagccctttaaacgagaacgaaaccgtgaccaagcacgagggcttccatccttcaaacatttgcggggtggggcaagcttatgaaaacgctcccaaataaacagttggaggaaagaagcatccacggcactaattgtcttcatacttccggaatttatatcacgaactatggagtctaagttatgatacaaagttcctaggtaaaaagctcctattgggagttgcttcccgcgggcaagtttacatgctaaggggtataaagcacgacgtaccgacctggattgttttgagggaaaaacgtacctacttaaccataaagtgatacaagcagccaattccacaagactatagccgttacctctatggaaatgggttatccattcgtgcatatcacacgtggcatcatttttttaaaatcattggatgcttccgtcaaggctgaacaggtctttctcatctttcgacaaaggttcaatcgcggaagtaataccacatataggcggtaaaaggagagcatagacatct

SEQ ID NO: 366173 - DNA, 454 bp, Cannabis indica
tttagaaaaaataattaaatcacttgaactaatcttggactggcacacttatttagcacttaaagtattgatgataagattgagtatagaattacatttaattagaagttatttttactattttttattaattaaggttatatgtgtaatattttaaattataaggggttttattataaatattttaatattttaagtccaaaaaagttaatttctaaaagattcttatttagtaacaaattgtaaaatattttaatggaaaccgaaatatatacccactgatggaaccctcatttttaacccttagatcttaatctaatggttgataattgctgactaggctaagttcacttattgacttttcaaacatttggaagggcaacctgatggtgacctgctgacatggacctataattaaaaatttattaaataaattaaaaattaaactaataaa

SEQ ID NO: 366174 - DNA, 517 bp, Cannabis indica
ttttggcagtaatattgatttgttatttgttttttcagatggctcccagactcataattccagcacccgagcattttactggccgcgtgacatatagaggcaccagaacttttgcaaaaatcaagactcggtttgaggagtacaacttgaataacacggcgaaggaaagccgtttcggcaacttttggaatgtcgtacccctgacattctcctcggtgttatttcaccagctgatgctccacaaaatgaaggttgatgcttaggaggagttgaagatgcagttttacattggtcggaaggagctcagattcggagtgcttgagttcgccctcattacaggcctggacttctcctcggggccaacagaagaggagaaggctgcgcaggttgctcgctcaaggtcagaccgattgatcaacaaatatttcaaccggtctggtggtgtgaagacagaagcactccaagataggttcacaaactgtcaaaacccggaagacttgtacaagcttggcttgtg

SEQ ID NO: 366175 - DNA, 1027 bp, Cannabis indica
aatattcaaacctaaacctagaaagaattctataaatagatagtgatagactcaaaactgacagttgatgacagcctaagttacactagccttcagtcaaattttgagccttctctttctctctctatttcgaatccttctttctctctttctcttcaatatttattcccttataatgatagagtacatgcgcacacatagcacctaggtactcaatcatagtgtataagactgtgaagaatccaataaaatgaaggagaatcgggctcaaatcttcgtgatactctgctacggaaaggatacaagggttagagatctgagtggaatgagtcatttaattccgctgaaaccaatgtaaggtttcttgaactttatatgtgtttaaattccattttttagaaattcatatttagaatgttaaacaacatacatggtagtaaatctagatcctggtaaaataatccccaacaaaaacaatattatcgcagttagagcggggaccatgggcctatgtaactaagatctcaataagtagatccaaaatttaccaagtaaatttgctaacttattaattcctactgactccactataaattatgaattacactcatgattacatagagcgctctatatactaaatatagatacgctataaattatctattgtttcaatgcaaataataaaaaatcctctataaatgatctacatcaagtagggataaatttactattctaccctttaatttattttattcataaaacacttagcatacttgtaaatgatattttagtaaattaatataattactaaaatgagctctctatcattaatctcattaagccaagctcgaaggaaatcattgtttcacttctaatagttatagaagatatagattctatatctatatttagtgctaccacgcaattgtactaccatgttctcaagatataagtattgggccaatccatttggccagctttaacaaaacaagtcaaagaacacaaataatacatttaagccagaacc

SEQ ID NO: 366176 - DNA, 527 bp, Cannabis indica
gatgttaatgaaacatacttgttagtatatctagatcctggtaaaatatttccagcatgaaattaatttttcatttgattatttagaaattaatttagaaaaacacacttagtttaatgaatttcaaattcaatataaactagatgttttttttctacatttaattaaataaagaagttataactaattagattcttctcgatacttaattatttaatatttcataaaatatatttaagttaaaaatcaattatttataactaattttggatcaacttgaatttgaatattttttaaattcataattaagttgagatattggaggaaattagttagtgaaatattctttaaatattgtttttagtcaaaaatttgttaattttggatcaacttaaaatggaatatttttcaaattaaggtcaattagttcaagatacttaatttgttatttaattaaatttttaaaaaacaatttaagttgaaaattttattattttagaacaatttaaattaaatatttttcaaat

SEQ ID NO: 366177 - DNA, 515 bp, Cannabis indica
aacaaggtaatgtttaatattactattcccttgctaacattaacctattccaaacaccctctaaaagtaaagttggaaggagggtaaagttaggaaggatggaaggggtgttgactgagaaggatggaaggggtgttcactaattgatttggtcctactttttatattttgttgaattagatcagtataaagatttttgaatattgaaaactaaacaagagtaatgaatttattaaaccaaatcattagggggtgtttggaatgggttaatgctaacaagggaaaggtaatgtgaaatattatcttgtttgttttgagtctttagccttggaatgttattcccttagtattataactaccattgaggagggtaatgttgatactttaaaaaagggtaggattgaatcattaccttttattatattaatttgaatagaatttttgaattaattaataaatttaaataccataatattatcatttattataaataaaatattacagtatatattaag

SEQ ID NO: 366178 - DNA, 628 bp, Cannabis indica
gataactaatcagattgtaaagagttttatttagggcataaaacccaacaattacatccaaaagagacctaattattgggccccttggaaacaattgtgctcatgtttgcaacagctggacaattggggaccattgtatatcatggacgcgtgttacaaaaaggttaaacatttaaaagtagatgtcttgaataaccgtttggcaaaaaggtggatgaggtgcgtgcactaccatgtctggacacaggggacaagatcgaattctgtgtaagaaaatacaactatcaagtgggcgatctagattgcaccaaaggtagacgtttgcgatactcttgggcggtcagtgtccacgataagtccttcgagtacccatctaagtatcagttgggtagagtatgagtttggaccactccaggtcttggagagatagtggatcttccatgtccgggaacctaggataaggtgtgggtagacttcttcttatctcttagccttgacttgttcccagttttgtgaggcttctccataatatgattttagtgtgggattttaattagtgggattatgagctttgttgaccttcgctttttagccaacgacaaacgagtctgatttagtaagcgataag

SEQ ID NO: 366179 - DNA, 536 bp, Cannabis indica
atatatatatatatactatcatataaaatagtaaatcacataatatacactaccatgctcacctatgaatggttttcacataaaatctcttatccttgtattctcaaaatcttgatttatcacatcttccattaaaaaagggataagcttttgattgttagagattttattacaatggaagaaaaaccaagatgtattacaattctattgcaatataatacaaggatcaacaaagagattaaataaatgttacaactcataaaatacaatatatgtatacactatatatattatatataagaaaggtagaagaaaatatatatacatataaatgtatgtatacaattataattctaaaattagactatgtctagtttatgaattttcactaagcaagggtaaaatagtgaagaaaagagattataggttttatttattaattaagagactttatatgtctaattaataaatatattaaatgacaatattatttcataattaattttagttattaaataattggaattgacatttaa

SEQ ID NO: 366180 - DNA, 1098 bp, Cannabis indica
cgcctaagatagttagggtgttacactttaattatgtgtttttgaagctttgagttagtttgagtatgtgattttatgatataggggttgttagggttacaatagattttatgttaattttaggttgattctaagttctggttattggttttgctaagttatgatgaaattgcataagtttgagcttagaaatctatgctttgatctttaatggtataatttgatccagtgattttttctatgaattactggttggaatatattgtgtataccctaattaggtactctggaaggtttggttgcatttggtggagttttgagcaaaatatagaatttttaggtgaactagtataaaccgggtaactgattttaccagtacctgtaaaaccggttagccggttttggcagggatccccgaatattctattttctcaattctcgtccatttcagtgccatagttgggtgtttccctatttcctgagttggagtaatccctagagagtataacagaacctagagttgtgggttctggtttcccggattagggtttcgatcatgtgatttacttggttttaatatgtgattagggcatccatccagcacgaaactttccgttcaggtcggcaagcacacttgaatctggaaagaaggtaagaactgtgtataatatgtaatatgaatatctgagtgtatatatatatatgtcaagtgtatatgcatgcttatatgttagttgctctaccaacacttgtacggttatggtacagagtgcattggtgtagtgaatattgtttaagagtacattacagtgatactagcacaagtacgggaaagtacatggtgtttgtggtatatcactcagtggtactcggggtatgagacaaatcctactaatactcgtacagtgaggtacgtagtgtatgtggtatagttgttgtaccctagtatggaacgttcttactcatctgttaagccttgtaaataggtgtatgggcgcctaggtacaagtcggtattatatgatatgtgcttttcttactgagtctgtcgactcacagttttgcttccatgtgtaggtaagggaaaggcgaaagctga

SEQ ID NO: 366181 - DNA, 549 bp, Cannabis indica
cccttcccctagataatttttggaacgactgctgattctgcatcctaatacgaatctttctagcgtactttgtcctcactcgtacgctttttgagatgactccctggaagatttcccatcttgagactactccaagctaagttatggccaaaatacaaaatttgatgtttcccaaaaactgaccaaacagaatttcggttggtaccatccagaatccggttctgaacatccagaacacaattttcctcaaccttaaaaccctccaaacctaaccaaatgattctaaacttcacagaacacatatatatcatccatacaactttttctacgtaataaaaatcaaaaccatgctctcaatcaaaatctgccatgagagctcaagctttaagcttgaaagcttaaacttgactctcacctcccacaacaagcaaaacaacaaataagcattcaaaacactcctaatccaacctagaaacacaaccataatgtaacacactaactaatttaggcatgttagcgtgatttttaacgtactgtgcagctcgttgc

SEQ ID NO: 366182 - DNA, 543 bp, Cannabis indica
aagctaaaaagattggacggaaccattgtgtcaagggcttggaacgctgatcatctccggaagtattaccaatagtccaaatatgttaacttaggcttggttaaaagaatttgtaccataaagtgtatgcaacctctaaatttcaaataaaactgggtgccttaaaaataaagttttaatgccactcaggggggtactaaggcataccacacggacagatgtaaaacaggccaaaagtaaaattatgatcaaacggaatatatatcaaagtgaacatatatatttaaaatatcctgacccgaagggcaggtccaaaaaatataacatactaagggcctggggacgggccgtaataattgtctccccttagaagataataattaaatttaaaatttttctgaaagggaagaaaagagactgtaaaaaaaaaaggtagttgtaataatgaaattagttggacaccacggcctattcaattcgagaaggaaggcgagggccccgacgctcttcaagtaaagcatcaagccttttcttcttctcccg

SEQ ID NO: 366183 - DNA, 849 bp, Cannabis indica
ctagtccctagcaattcaagcggagaagagaattatcaagctgaataatcaagtcaaaccaatcaaaactagcccagcataaaaaaaaatatcatcaagaaatccgaaattgctatgcaaactactcagttgtaaaccatatccatttcttaccacaagccataacacaaatagtattgaaaaacttcaaaagcttaaaggtctcaactccaattttctcaccgattgaaagtatttttttttttttgggagagatgacactcttggagttggaattgtaacaattaacactcaaatgagagaagacaaactttttaggacaaacaatttgaacaaatgttgatcacaagataggcaaatcatataattagaatttaaataacaaacaacctttgggatttacacaagagacttgaagaataaagagccaactaaaagaaaattataaatatagaaaagaaaaacattttttttttaagaaacacatgaagtgatgtttctttcattcattttattcttttttttttatatggaacaatttttttttttggacaataaaataaaaaggaaacacaataacgaaatgttgctcttgttcttttttttttattaatatttttcttattttttatttttgattttttttttacaagaggcaacataaaaaatacacgaacaaaaaaaaaaacattacaacaaaggctcttttaacaaatgaaattatccctccggtatatgtcatgtgtttaaattccaaaaatctaatttgaccaactcaaatgatcaataaaagttcacaaagtcgttttctcaactctcacaactcccaaaaaaaatggaaaactttaa

SEQ ID NO: 366184 - DNA, 606 bp, Cannabis indica
cttcttggaactggaaggtggcacacaccactctgtcatttctggtgacacccataaaattcagtatctatgtaatcaccgttagccactgttcagctttcatgacatctgggcctcccagaaaaaacggaggtgcttgcttttggaacctttcaacaaggtttccattctgtttgtcgctaccactatctcggcctgagcagtaggggcgggtgccacttgaacttctggcacaggcactgtaggagcccccagctgcctcaatctctgaatctcaagatcttgttcctctatcctagtttcccaactttgggcttcctgatcggcttggccagcgtgggcagcctgtggcaggttctcatcacctcaaccacgagccctgcccctgggacctctaccacggcccctagcttgcgggggaaactgggctccctgaccctgatttgaccctactgagttgccctggctcctggtattccgcctggcgtccatctagtctgaacagcctgcgaaaccaagagttggcacatcaggtcatgatcacagagagcttactaatgccgcttaatttggaaattaaaacaaaacatgcgcctattctactat

SEQ ID NO: 366185 - DNA, 736 bp, Cannabis indica
tgagagaccacatccatctcatcaagaccgcagaccatgcaaggccctacatttgaaccaaaatggaagcaactttgcatccaaaagggagagcattctggccaagtctccacaaaaaaacctttaaccgctcgtgaatgtgactcttccaaagactcttaaaaaccacatcaatacaatcaaactgattttggttcaaccgccaataagcacttttaagagagaagcaacccgaaggatcgtctttccaatgcagccgagtctccacattaggaaaaggaagggtgatctttaaaattgcagcagccgcatctggacgaaaccagaattcaccaagttcacattccaactcctgccatcttccataatcaagtctcccacacacatcccttcctcaatcataggatttaaatcacccaaagtcattacctccccatcagtccccatccattgttggctaccaatcttgacattagcatcgatacccaaaagccaaacactgttatcaacgatgaacctcctagtcgcccaaatacttttagcaaccggagacgcattagacggtaaaatagagtctccaaaattcgatccagagcaatacttgtccatcaaaatcgatttccataaacacaccttatcagaggccaaaacccaacccaacttagccaataagcaaaagttaatatcttcagctcttctcaaccccaaaccaccacactgttggaaattattttac

SEQ ID NO: 366186 - DNA, 1276 bp, Cannabis indica
ttgctagctcggtgtgccagcaagtgccgcacgttccacctacttgggggtgtccaaataggcggcccgtgacagttggtatcagagccaagagaaaagggaagcttggtaacacgacataatggtgagcaacacccaaaggattcaagagcttgagaggcgcataggggaattagatggcctggacgagagggtcagggatctagcccctaacaatcagaactcagggccaacagtgacacaacaacaagttgcctcgttggctcaagactatgctaacttgttggccagggtagctgcgatcgagagaagagatgctgctaccggaacatcaggtgcacctcagatggaggatcgcatcaaggcattagaacaagcaacagcagacatgcaggctgctatcactgtactacaaaatgggcaggctgcattacaagactccctcaatgatacgatcgaggattgtaacgtgtctgtcacagccatccgggaagaattagcagggatgtcaaccaagctaaatcttaccatgatagcggcagagcgtgcaaataccggggggcacggaggtatggagtatggccgaccgagagcacccgagcccaaatgctatggaggggcgagggatgccaaggagctccaaaactttctgtttgacatggagcagtactttagggtcgtgcggaccgactctgaagaagctaaggtagcaacagctaccatgtatttgtccggggacgccaagttgtggtggaggacgaaatatgaagacattcagaatggtaaatgcaccattgacacttgggaagacctcaagaaagaattgaatgcccaatttctgccagagaatgtcgcctacctcgctcgacgtcagcttagagagttaaagcaagtcgggacagtccgagactatgtaaagaagttctccggattgatgctcgacatcaaagatatgaatgaagtcgacagacttttctacttccttgaaggactcaagccgtgggctaaacaagagctgcaaaggcagcgggtgtcagatctcgccactgctcaagctgcagccgagcgactgactgactacacctctgggaattcgcagccaaagaagacgaatcctcagaccagcaccaacaatgccgcgagtaagaagtcaggaaagcagtggccgagtaaaagtgggggaggagacaagaggactcctgaatctagctcctcctctaaaagtgatgctgcaacggggaagaagccccttaagtgttggctttgccaaggccca

SEQ ID NO: 366187 - DNA, 552 bp, Cannabis indica
tatataaataaataatatatattgggtgatgatgatgaaatcaagtgtaactaagcacaaacaattagttggttacagcttgacaatgaaaataaagctccacgcgacaatgccctaataaacacgtacgaaatcatttattggaataatattcaaagccatgtcaaaatttgatatgtacacaaacttttatttatatatatatataaatatatatatatatatatttatatttatgtttatatgcgattaacgttgttacagacttaatataatattttatttttatagtgaaaacgactaagaaggaaaagcagttattgtaatatttgttttagtatttaaaagtaaatttttttttttttatgtatatcgtaattatttaagatattttataaaattttaaaaattttaaaataatttaactgaaaaataattttttaattttatatgcttgtgaaataacactattttttatattgtaaattattttaattttattaaattattataatatacatgattgtgagaaactaaaatttttgtccgaat

SEQ ID NO: 366188 - DNA, 456 bp, Cannabis indica
ataataaaattttaagctctcgcaattccaggctcttcgaattgcagtaccatcgagttctaggagtcagtatgttgcgttgccaaccttttctgcgataagatatggtccttcccaattgtctccgaagaccccatgtgctgggttcctcgtgtttggcattatttttcgaagaaccaagtctcctactcgcagaactctttccttgaccttagagttgaagtatcttgcagttcgccgctgataagccgcatttttcaggtgagcctgatcgcgcttttcttctagaaggtcaagataaagcgactgcttttcttcgttctgttcaatgttgaaaacatctcttcgtagggaacctgccccaatctcaactggtatcatagcctcgcatccataagagagcaagaaaggagtctcaccagtcgtggatcggggggtcgtgttatatgaccataa

SEQ ID NO: 366189 - DNA, 691 bp, Cannabis indica
tgatgtggaagatatactgggagagaagatcctctttccgatctcaagtactttgaaatgcaaatggatttgcaaggggtacgaggagatgtatgctaaagaatctttgctgccactctatcggaagccgctcagcaatggtatttcaagttggctcctggaaagtttagttcatggaaagccttctcttcagaattccatgcacaattctcctcttcacgctagcttccattgcatttgggagacttggtcgaagttaagcaatgaccaggcgagccactccaggcatacatcagcagattcatgatggaggcgaccaaagtttcacaagtaactgaggatggaaagttattggcgatctggggggcatcgaagtcctcggagaactttggaatgatataaggaagaacgagttggtagactcaataagtgatttccttgaccgagtcgaaggcttcatcaagctcgaagaagccattcaatgagcggaaggtgaacaaaagccgggcaagtcaaaggctccttccactacaacatccacccaacttccaaacttcccaaataattcaagctcaagtggcaagcgttccaacaacaaccacaagcaagggaacaggaagaaagaaaagttcaccggaaaatccaaacagactcctcgggagaatcaggccaaatacactgcattcactat

SEQ ID NO: 366190 - DNA, 938 bp, Cannabis indica
taaaatatttccaacagattatatgttcaaaagtttaagtcccatgatttgtcagtacactgaatttagactgacatgataatcggggataaggtatacttacaccttagataagtgttatgtccttctaggaccttgacaaagtatactagtatcggatgtatggagtatacattggattggagtgatattgaacttggataagatattataaacttatcgttatatctttctaagtcaatatcattggttgatcttaggcctatagatcgtaatcttgagatggttaggttcgatcttaattgtattatttatgttcttcaatttgtttgttaaagtcgaccaattggatcttctactgacatacagattaagaacatgatagagcaaataagtgggagcgttaatcatagatatggaatctatagcttctataagtatttaaaagtaaaacgataattttattcaagcttggcttaatagagataaatgattgaggcctcatttcagtaattatattagtttactgaaatatcatttataagtagctaagtgttttaatgataaaatacattgaagggtaaaatggtaaatttgtctgcgctcccactcaattgaagggtaaaatggtaaaccatagttctattggctttcactaaacattgagttttagtgaaacttacagagagattgtcgtcacacaattggccgatgctgatgagatttgctttgagtcctctcacatataggacattagtcagctgagctgctccattcacattcacatcacctctcccagcaatctgccctttgttaccatccccaaaagtgacagatccccctttttcatctttgaagttaacaagcaatttcttatttccagtcatgtgacgcgaacatccactgtcgaagtaccactgaccttcaacaaaggcaga

SEQ ID NO: 366191 - DNA, 795 bp, Cannabis indica
aaactttattttccatcattagtattactttacaataaatattttaaaaattacttaatttaagttggtccaaaatttattaagaaattaattttcaacttaaatttaattttccacaaatatattaatttattttcaaaaattatatatataaacatatatatttcgaaaatcatttattaaaataaattaaaataaaattctaaaaatttctaatttatgtttatctaaaattaattaaaaaaaaatcaatataaatctcattttctcatttaattaaatttctcaacagttatctaatatttaagtatctttagtttaaaaaattcaactcagaaataaattttttatttaattaaatacttaagccaatacgaactaatttactaagaatttaattatctagaattaatttttaaactaagtgtgtacttctacaaaattaattacaaaaataaatctataagaaaaatcttcaaaatttattatagtaaaaaaaaaaactaaacttatatgtgaaaacctataagagcctttgaggttggatccatgagcaactgagccaacaatacctctcaaaactagccaaataaaatagcacaaactagccaaaataatatgaaaagtttgcaataatatatatttttgcatctaattttcaataataacattactcattttactgatgtgccacgtcagctaaatttgatagtttctgatgcttttgatatttttcattttttatttccttctattttttaaaagtaatgttttagtaactagtaatgttgataa

SEQ ID NO: 366192 - DNA, 903 bp, Cannabis indica
atttaagctctcttcaactgtgtagtcctatacctacacagtctcagaatcatcctacttgaccttccccaagcgatgtgggattgcacagcttccccgatatttccccttacggatcacgggactactgactgtcacaccaatgaacctcttctcctccaccaccgaacctcctcatctacccaaaacttaatccaacaacccccaaatctcacctacccaaatctttctctcttcttcctcctcggcttctctcaaccaccatcgccattcgccatcgcccaccgaaccctcccccaaccagaagctcattgaattcgtatttgtttgacatattagatggtggtggaaggtatgattttctggccaaaatgggattatcgatactttatcgatggttttgtctgcgcactgctttttttgtgtgcaaacagaaatcatcgataacctatcgataacctatcgacaacctattgataaatgtcatcgatatactatcgataacctatcgataaatgccatcgataaactatcgataacttatagataacctatcgataatgtgacagtcagtagtcccgtgatccgtaaggggaaacaccgggtaagctgtgcaatcccacaccgcctggggaaggtcaactgggatgattctgagactgtgtaggtatgggactacacagttgaagagagcttaaatggattgattggtactacctatgtcaacaaggtgcatcttgtttttcggtagcccatcacgaaagaactccacagttaagcgagcttgacctgggagtaattttaggatgggtgacctcctgggaagttttcccaggaagcgtgcgagtgaggacaaagcatgctggaaacactcgtgttggtctgtagggtcagtcatcagtc

SEQ ID NO: 366193 - DNA, 1172 bp, Cannabis indica
tgatgatggacttctgactttctaggcgggcatcactctgcacttttacttctttttcagcttcttgacttttcatgctttgtattttctgcaggtttgtgctaaccacgctatttttgttctgtgcagacatgtctcggcagatgatcgatgctttaaggaagaggatgagcggaagctctagcgcctcccctccggccaagaagtctaagggcggagaggggtcttcagagaagaggccttctggagagattattgacctttctaaggagctgactactgcaaatccttccactcccaaatctgccaagtctaaggagtctgggccaccaacatctgaaccgaactggtcaggaggatccctaagcgggtgcaggcaccaactccacccatgcccgtgctgcctgaggccaagaagggcaaggaggtgatggctcactacatgaaccggctggttcctgaggtcggtgagcaactggctggtgctgacgactcatctctggatgtgttggtgggcggagtcttgaaggagcttaccagggttagtcttttcttttcgacacttcccttttagcttttcatacttagctccatatgctgactttttcctttatgcaggccggtttgaagttggcttacacctactcccgggctaaatctgttacttccaagagtgcggctctgtccgacaccttgagggcagaggcggacttggccaagaaggaagctgaggaggccagggtggagactgcagttgttcgtcatgagttgggtgaggccaacaagaagctatttgccgccgagaagaagatcaccgtgctaacgaaggacctcgaggctattgatcgctttgaggaaaccatcgagaccttatctactgaagttgatcgtcttcatgatgagaggagttctctgcggcaggtccttcttcggcaaaaggaagataaggacgctcaggcggccgaggtgggtcgtttgaaggagaaggccaatgctttggagactgccggcctcgagctcttctttgatttttggaaggctaatccccaggccaacttcgactacttaggcgacgccaaggacatgtacctcgagtactgcgcggcccaagttgcctatggtgggaaagaggtggctgcttcaacctccggccaagcttctggccaggctgc

SEQ ID NO: 366194 - DNA, 737 bp, Cannabis indica
ataattataaatattaaattcaaaaaaaaaattaaaaatatttttttacttttttttctttctatcctttccttttcttttttttttgttccttcttctttcttcttcggttttctacagatttcccagccctctccgaccccctaacacgaccctccatcttcgcccagccccatatcaacaaacccctagccaccataacgaaccaccttcaccagcagctaccaaacccccattcgcccaaatcgtacccagcgacccccttcctcaagcccataaaccatagcgatccccttcctcacagcgacccccttcctcatagtggaccccctttctaacagcgacccccgacctcagagccaagctccacgaccccccacatcacagtggtgacctcagaccttcagaccacatagagagagaaagactaaaagaggtacctccaatgagagatagcgaatgcgggtgagagatctcaccgtcgagagcacgcccccggttaggttttaaggctccggtggtgagacgagagagagcaagagagagaaaggggttataattatttttttttaggtcgggtttttgggctgtgaggaagggggttgctggggttggggttcaaggccggtggtcacagggggtttatggttgaggctgtgaggtcccagggatggagggtttctgtagaaaaaagaagatgaaagaagaagaaagaagatgaagacgaagaagaagaa

SEQ ID NO: 366195 - DNA, 1641 bp, Cannabis indica
ggagcttgctgaggcggttcctcacaggaggcatggtgccttgggcaccaagtgggtaagtcctccgtccaagatttcggaggcacgcctccacactctcgaccaggacggatacctgggcgagctggactactacattcccacccacgacaatcgtgccacaaaccctgataaggggatgtgtgcctggtcggggctcacggccagcaaggggcactgatgcccttgcttaagtacttccgggatgtggcggacttcttcggcctctgcccggcccagattactcccaagggcattaagtatttgtccactctcttcatcctctacgcttctcagggatgggatcctccctctccccacgaggtcgcttggttcttcgacctgaagtctacccaaagcaaggcaggtcggggtatttttacttctctcagccaggcttcaagtggttgagcgggacgaaccacaaggccatcagcaaaatagggcattttgttgatgagtacttcatggtgaaggacccgagcatcacccagactcggtttcagcagatcccgacatatcaccatcctcccctcactcttgctcttagggatagagctcaaaaacttgcccggttaccggaggaagaccggaacatcatccagttgacctccgatgagaatctggtgcagtacgggctttacccagaggacttttctcctaagtccgtgacggggaagaaggggaaatctgatgctgcccggcccgaacgagctaataaggaggatgagctcattcaacttaagcgtgaagctaagttgaagggaggtacccgggcaaagcagtatgctcaggagcttatgaatcctgaagatgaagtcgaggctgaggctgaggctcagcaggtgactcctttgaagaggaagaagaaactcccggccacgcccaggcctgttgaacatgccattcacataagggagcccatttcacctgttcggccctctcatccctatgctggaaaaaggaaggttgttatgtgtgagatataaggttatgatagacttctgactttctaggcgggcaatcactctgcgctttacttctttttcagcttcttgactttcatgctttgtattttctgttggtttgtgctaaccacgccgtttttgttctgtgcatacatgtctcggcagatgattgacactctgaggaagaggatgggcagaagttccagcgcctcccctgcggccaagaagtctaagggcggagaggggtctttagagaagagaccttctggagaggttattgacctttccgaggagctgactgctgcgaatccttccactcccaaatctgccaagtctaaggagtctgggccaccaacaactgggtccgaactggtcaggaggatccctgagcgggtgcaggcaccaactccacccgtacccgtgctgcctgaggccaagaagggcaaggagctgctggctcactacatgaaccggctggttcccgaggtcactgagcaactagctggtgctgacaacgactcatctctggatgtgttggtgggcggagtcttgaaggagctcaccaaggttagtctttttttgatacttaccttttaacttttcacacttagctccatatgctgactttttcctt

SEQ ID NO: 366196 - DNA, 791 bp, Cannabis indica
tctcatcatcatcctcaacttctcttcacatgaaccatggcctcatcaccatcttcgcatgagcccagttgcaccagtaccatcagattttaaattaaaagttttaaaatgtccttatatgtgagagcaaaagtgatgttgtacacctactaaaaatcttattttaaatggctaactagaatttttgccccctgaatttttaagatcgttaaaaatgcctcttgaactattgagattgttggatttaaggattttttttccaattttagtaaaaaagtctaacatggatgaaagtttagtggccataatttagtacatgtcaaagttagagagacatgatttggtagatatcaaagtctggggagcatgatttagtacatgacatatcactgaaatagtaaaattgaatgaaattagacaaaagtccttaaatctaacaatctcaacattttagggggcatttttaacgatcttaaaagttcaaggagcatgatttggtacatgttaaagttcaatgtcaaaaattttaattagcctttttaaaattccccatttttttggctaattagcaattcccccccgaccgaactttgacatgtactaaatcatgccacttaaacttttttggccgttaaaaattcccctgaactattaagattgttaaatttaaggatttttgtctaattttagtaaaaaattttaacacggatgaaagtttagggggcatgatttaatacatataaaaagtttgagggacatgatttggtagatatcaaagtctgagaagcatg

SEQ ID NO: 366197 - DNA, 598 bp, Cannabis indica
aatttaagtaatgtttgtttttagcttttattaagcggtcagcaaataaagtcgctcatcatgaatttgcaagagcgtctctattttatcctgattgtacttcagtatggaaatgttccaactaatttgttacctatgttggtgactgagtttgaaggttaataaacttgattttcctttcaaaaaaaaaaaacttaatttataatataaattaggagattataggctcctaatcatacattaatataaaattttattttgtgtatctatgtgtgaaataaatttatcattaaaaaataaaaggaagatagtagttttattaaaaattatatacatatacatatatgttttttttttttagataagtatatacatatatatatgttttagttttattgttatttgagtgttttgcttagaaaagcttaagcattggttgggatggagaacccgagcttcaaccttacttcagctactaattaaggtgtgggtgtctaaaagaaaatgactaattagtaattttttttctcgaactttgacatatagcaaatcatattttttgaacttttttggcagttaaatattctccctgaactat

SEQ ID NO: 366198 - DNA, 531 bp, Cannabis indica
tcgtctcgtggtgggaggtgggggtcgcgcggttcggttcaggcaaagtgggtagagagagtttgtttgagaaggagagagaaagggttagaaattatgagggcattttaggggtttttgtaaaagtatcctatttttaaaattaccctaattattggttctcctaaccaattatcccttataaaatgcataaaaattcaaatttgccttctgtttttcctgaaaatgaatatatctatgtagatttttttgtggttaaattctctcaattatcattctacttgcacttaattctctaagctcaaattcttcaaactgcactgcttgaaaatttaaggtgtcagtcatttttttttttttaccgttaattgccaatatagacagtttacatttacacttttgtacatgtgtcaaatttatattagtgaagctaatattattattttaaaaatataaaaataatttcaaaatttataatatgttttttatattttatttaattttaaaataaatttaataatattaaatgta

SEQ ID NO: 366199 - DNA, 769 bp, Cannabis indica
gacgttggaaatgagatgattaatttatgttggagatcatttttccaagaggggaaagatcagtatgatggaagcatcaggcatgtcaagatgcatgatttatttcatgatctagctcaatctataatgggtgaaaaatgtcataatgtgttggttaatgatgatactcacactactgtcaacttgtcaaaaagagttcgtcacttgatctgtatgtttgatggaccaggtccatttttgaacataccaagtactgaatccttaaggacattcatgacagtatcaaatggttcattctcttgtgataatgattggaaatttcgctcattacgcgctttcaataacaatggccttttatttaagttatccatgtcaagtagagctatatcatcattggtcagtaatttgaaacatgtacgttatttgaatctctcaagtagtagtattgaagtcctccccgattccatttgtttgctacaccatttgttgactttagacctaagccattgctatgatcttcgtaagctacccaaacatatgattcgcctgaaaggtctccgccatctttacattaattattgtcacaaattatcacacctacctcaaaatattgggaagctaagttgcttaaagactttgacaaatttcattgttgataagagaaaaggttgtcaattgaatgaattgaaagaccttaacataggaggtgatcttgacatcagcaacttagaaaatgtgatcatgactccaattgaagctagatttgcta

SEQ ID NO: 366200 - DNA, 772 bp, Cannabis indica
tctgccattttctaccagtacgcatgacttactccatggaccattttgctgaactttatgtgaatgagattgtgagattacatggggcaccgtattctattgtttgtgatcgagatgctcggttcacttcatctttttgggaaagcttacagagagcaatgggaactcgattgaagttcagcactgcatatcatccagagacagatggtcagactgagagaacaaatcagatcttggaagatatgttgagggcatgtgtgatagatttccaaggatcatggagcaaatacctgcctttgattgaattttcttacaacaacagctatcagtctactatcggggtagcaccctatgagatgttgtatggaagaaaatgcaggtctccactgcattgggatgagttgggagagaacaaactcctagggccagatgcagttcagcacaccaacgaagctattcagaagatcagggctagaatgatcacagctcagagcagacagaaatcttatgcagacctgaagcggagggacattgagttcgaagtgggtgatcatgtgtttcttcgagtgacaccacgaaaaggactctcggtgaagagatttggcaagagagggaaactaagtcccagatatgttggtccatttcagatattggatagagtgggcagtgtagcttatagaatagctttaccgccatcattatctggggtgcacaatgtatttcatgtatctcaactccggaaatatgtgtcagacccatcgcatgttttgag

SEQ ID NO: 366201 - DNA, 833 bp, Cannabis indica
agactataaattaccttagtaaacctgctattgcatagaaattgttaataggaagataatcatattaggccataaccaagagatacaattaaaatcgaaagccctaacttttattcattgttaatttgcctattaatttacttgcttcctgatttttattgttcttattgtttcctaatttaaattttctcttaaattttatttagtcaaatataagtaagagtttaattttaacgtacttaactacaatccttgtggaatcaacctcactctttgcgagtaatacttgttcaaacgagacgtatacttgcgtgttgcaaaataccacaacatgctggtttggggtaggtttaatctacctaaacatagtgtcatactatggactgctatgcataaaaaattgagaacaaaagaacgattgcataagtttggcattattgataatgctgattgtgttttctgctcaagtggaatcaaaagagcatttatttttcaattgtagctggacattacagtgttgtacaggtgtggcacactggctgcaatggaggtgttcaacccttgacttagcaggtataactaggtggattcagagggtgcgaatgagtagattcaaaaggagagtgatggcagctgcccttgctagcctagtttacaatgtttggagaagtagaaatgaattgatatggcaaaacaaaatccccaatgctgaacaggtggtgaatcagattaaaagaaatgttaaacaaagactacttcttatttggccaagaaaaataagcaaggaagatgtaatgtggtttaataatttgtaaatttgtatagatacacac

SEQ ID NO: 366202 - DNA, 885 bp, Cannabis indica
aagtacttgagatgggaaaggggatcttctctcccggtgtacatcttccatgtcggcattttgtacttgtggggcagtggccggagattgatctccggtgagaaaggagtttcgcatgctcggcccagctcatgatcattgtttctttgtccagccatgccgtgaacatatttttttagttcgtctagctgagcttgtacgactgggctgacctgctcggcatcttggtcaatttgaattacatcagcatctttctgagcgagaatttgagtacgggttccgggctgcaagattatcgtaacattctgatcgtctactccccttcttcagtttagatcattccttaggtcatgggttgcgcccaacctttcaaacacagaagtgcctggctgccttagcgatttattcgcttggttgacgggtggaatggcaccatttatctggttggaaccatctggtatgacttctccccatgaattactagacaaggtttgcccgccgacggcttggcccacgagtggaactcgtgaccgaggattgggcggctgaccatttgcggtctgagaagaattcattgctggatcttcgtctgtttcacccaggggaatgacattcggcggctgctaacctacagtttggtaggattttcgtatcagcacggtagcctgccaactacgattttcaatctctgcattgtgagcccttaatgcctccatctctttatctctccattcagcgaacatatgtctttgttcgtcgaacgcgagatttactgcagcgcgcagttcgtcctgatcatgatgtagagtattgttatgaccctgcatgagtctgagagcgtcacggagattttgtaatttagtggcatctccaatggtcgtctgg

SEQ ID NO: 366203 - DNA, 527 bp, Cannabis indica
atccaagtgagccccaataacacacatggccggccacttgtatgtgtatttcccaattattatttttaattttaatgccaaattaattactaacttaaacctagcagttatctataaatggaaattgatggctcacatcaaataaggcaattaagcaattactcagtaattcaggaaactgcctctttcagaaagttgagcttcctttttctctatatatagccgcccatctcttcttcttctttgaacaacacaacacacaacaaagagagatacaatttcgaaatcctagtgagagagtagtgcccacacacagcaaacagtacctcaatcattgattggaagactgtgaaggatcaaatccaagaaaaggacattcagactcagatcttgattatactctgcaacaaaaaggaatcaagggctagagatctgagtggaaggagacatattattccgctgcacccactgtaaggtttcttttactttatatgcgtttatttattatagttttagaagttcatatt

SEQ ID NO: 366204 - DNA, 500 bp, Cannabis indica
aatggaaaatggaaaaagaaaaaaaatagaaaatgaaaaagaaaatggaaaatgaagaagagtgttttgccctagcagagacgaaaatagaaaatagaaggagaaaatgaaaaataaaaaacaaaaagaaagtgaagaaggaaatggaagagtggaggacgacagttgatgtgattgattgatgtcagttttaacttttccaaatttaataaatttaaaatttaaaaacttaaccagttgctattttttaaccctaaatacccctagatcaatcctaacccttagattaaattaattatcccatccaacggttgtcgtacatcaaagattataatccatgaaagtaataattaaaaaataaatatacggttttagttttaatatgtattgggtgggtggtcccacttttgttaggaagtgagaaagaaagagctgcagtagcatagggagccgagtgctcattaattttagggaaaaaaacaaaaaaatacaaaaaagga

SEQ ID NO: 366205 - DNA, 506 bp, Cannabis indica
tttttaattttttttaattgacacaatgtgcagtagttgatattgacatattaattatatattactcattatattatatcatctatttcaaaattataagattttatttttctattattaatataattatttatttaacttttttttaaaaaaaaaacttatcattttaaccgccattaacgcaaaaaaaacaaaaaagtgaaaagaagaaattgaaagtatataagtaataacaacaaattccataaaagaaaataatgtagtaatacaaaaagataaattaaattgccaaaattataagtaaaaataaagattgtaaatacaaaaacatgttgagtagttgatattatttggtttcttcaaaaaaaaaaatagttgatattatttgggaaacttacaaaaataatagaatttgggttaacttttacaaaaatactgtcacgtgatttttttttttttcaaaataagtgtattttataaaacaacagtggaacacaaacagaaca

SEQ ID NO: 366206 - DNA, 603 bp, Cannabis indica
tatgaatttcttaaacgatgaaataaatacataataggtatgagaaaccttacatttgttgcagcggaattaaatggactcttttcgctcagatctctaacccttgtatcctttttgtcgcagagtatcactaagatctgagcccgaaactccttcagttgtttggattcttcaaagtcttacacactatgattgaggactaacttcctatgggtgggcatgcactcaatcattaaaggctgaattttattttgtgaagagcactaaggattcgaaatcagagaagaaaaagaagaataagaagtctcaaaaaccgagagagaaagaaaactaggtttattgcctttgaagcattagttggataatgagactttcttttctttttatactacttctcttagggttatggttgatttatttggaataaaaaaataataaaaatggagcaaaaataacactaagtggccggccattagtgggcccaacactagttagatttttgtcatttttctcaactatttatctattttttcacaaataccactttttgcactttcaaccctataaatgccaaaactatttatttaataattatcaaataaa

SEQ ID NO: 366207 - DNA, 656 bp, Cannabis indica
taagagccattcattccgtgggtgtaagggcccaatggaggcttgaagcggggacgttacaggtggcattcagattctagtagtggaaaggctataaactggatgaggtgggataggttgtgtcgtcataagaatgcagggggattgggtttttgatgtttgagaggctttaatttggctcttcttgggaagaaattctggcgacatttggtgaatgaaagttcgttggttagtaggatttacaaggcaaagtactatgcacatggtagtttattctcaactgagttaggagataacctaagctttatttggcgaagcatcatggaagccaaaagcctgatatactcaagagctcgaataactatttctaatggggtgaatgtctcattacttgatgatccttggctccctcataacactaatggctttgttgaaacaaggcatcctacccttgttaataaaatggttagttgtcttcttccaatggattctcgagcctgggatgaagatgggtaagagatctctttgtggctcattactaagatctgatatttagcattcagcttagcgaatcgactgtcacagatggatggagttggaactttgagacttgtggtcagtattcagtcaaaagtgcctataagttcttgtaggaa

SEQ ID NO: 366208 - DNA, 520 bp, Cannabis indica
agctcgcattaactttaggcgagccacctttatttgctacggtcatgcaagacttcttagtcgttgacctgccctcggcttacaacatattgttgggtcgtccaacactgatcagactaggggcagtcagttcgatcaagcacctatatctgaaatttcaaatgtcagatggcatgggagtggtgcgtggtgaccagatgctggctcgcaattgctatcacatagagttacagcataggaaagccggtcatcaattgatggcgatcttggtggaagaaaataagaagaaagacaaagatcttgatcctcgagttcaagatgaaagaaacttgctaaaaccaatcgaagaattggaagaggttattctcgacccaagaaatcccacaaaatgtgtatacattgggaagaacctagacgagcagctaataagctttttgaaggagaaccaggatcaatttgcctggagccatggagatatgatagggatcgaccctaatattatctgccatcacttaaatgt

SEQ ID NO: 366209 - DNA, 656 bp, Cannabis indica
attaagagactttattaagtctaattaataaataaattaaatggtaattttatttaataattaattctaattattaaataaatagttttgacatttaaaggaatgaaataggacaatatggcatttgtgaaagaaaagaataaatagttgtataaaatagcaaaattgtaattggtgggcccacatcctatggtcggccacttaagctctatttagccatttttttatcaattttttaatgccatataattcaaatataaacctagaaggattcctataaatagatagtgatagactcaaaattgacaagtgatagacagatgatgcaaattagccttttagtgaaatttgagagttctctcttctctctctattttgaatccttctctctctctttctcttcaatttttcgtcataaatagtgatagtgtacatgcccacacatagcaagtctagtactcaatcattgtgtgtaagactctgaagaatccaacacctaaaggagaatcgggctcagatcttgataatactctgcgacataaaggaacaagggttagagatctgagtggaaggagtcatttaattttgttgcaaccaatgtaaggtttcttgaactttaaatgtatttaaattctattgttttagaaattcatgtt

SEQ ID NO: 366210 - DNA, 720 bp, Cannabis indica
tgcacggaaacgctttttcggtcctctcgatcttgagggcaaggactcccttttttgagtttgcccctctgcggacctttccctttccgtaaatctgagcggacctttcacggatcttgcaccattttctttttcccagttgtagaagtagggtttttcttttggttcccttcagcgggataccttatagggcttggttctctagatttcagcttttgggtacttggcgaggattccttcggttcctttccaagcccagcagagatggctttaggatgcacgtggattcctgctgcctccatggcttttttcatggccatcatcacctcttgcatcttttggttttgcgctttttgggctgcgatttcagcttcatgatcaacagccttttgccttaagagtaccaattctgagtagctgccttcgtcgtaggcgtacgcattgaggtttccttcgtagtcgtcatcatggattccttcttcttcctcagaacccacggttgcccttgaggccacgtcctcgtcatttggatcttcagcatcttgaagagggcgaggttgacgtgtgcttcgagtctccaccattgttgtgttgttgtaacgcagtgtgtgcttacagatgctttcttcagctctctatgaaagcaccaaaatattgaccgaggtttttcggcaaccaataaaataataataatttggagagctgtaagaaattaagaga

SEQ ID NO: 366211 - DNA, 622 bp, Cannabis indica
attatttggcattaaaataatgtaaataataattggaaaaagctgacacaagtggccggccatggtgttaatgggcctcacttggaactttgcagttttcacaattttcatttccattttctcaaaaacaccaattttcaaattctaaccatttaaatgtcaaaactaattatttaataactaaaatagattattaaataatattgtcatttaacataattattaattacacatatagagtctcttaataaataaataaacctagaatctctttgaatttgaatttgatccttcacagtcttccaattgattgagttactgcttgttgtttgtgggcacttactccttcactagcgtcgaaatttatgaatagaaaacagaagagggatttcggccaaggtatagaaaatagggaaggctcagtttttctgaagagagaaatttctgtcagataactaatgaatgtgttgttttgactgagctatcactttctatttataggcaaatactaggtttaggttaggaattatttggcattaaaataatgataatatcaatttgaatttcaataaatagtggtcgacaatggtgtgattatggaccccacttgattttgcagttt

SEQ ID NO: 366212 - DNA, 910 bp, Cannabis indica
atttatatattttttataaaattatataaattacgtttaatagttaaactattttacatttaaagtttgtattttatagtgtttattttgaaatttaaaatttatagctgataattttgattgtaattaaatattgaagttgaaatttagaatttacatatcagtatatttttttattttattttttgaaaaatattgtttaatactttaatgtttattcaattcatattttttttaatattaatttaaactataactattttaattttaaaaggcatatattatatgtatatttttttttcaaattaattattttaacaccaaaattaacaataatgaaaaaaataaaaaataaagatccgtttaaataggttaattctaccaaatcgacaaaattcattgggcggcttacactttttttatctttttgttggatgggttataattagatatttgcaacccgatatttatattgagttggtaaaaatacactataacccgaccaaaccgagctagcatttttttgtgccaatcctatctagttggtgatgaagtcttataaatgaaacttatttataatgaagtttgctgtccaaagtggtattttgatgtaccatttacaaatagtgagaagactagagtggtgtcattgagtgggagagtggagacagatgaagggacacgtgtcacatggatgcattatgctatcagcataagttgagaaatggtagggaaaactgatgagaagacaaggctcttcatcaagaatcacttgaatttttacttgggcttggtcttgatttggcccacttcaaatacaatgttgagactcatgttgagaaaatgggataagttgaaaaatgggaaatttacaaaaatactgtaatttgagttaattattacaaaaata

SEQ ID NO: 366213 - DNA, 600 bp, Cannabis indica
aggttattttgtaacttttgcttctcccatctcaaatttttcctatttatgactatggcattgaaacacatgaatattcattctttgtgtatctatggtcagaatgcatgcaaaagttacaaaattgggctggtattgcttcaaaacaattaatacaactatgtcgggatcttgaattggattcacaggtgtaaggagagtcggatgagaaaccgaagttgtctagtataaagaggtacaaataattgttaatagtttagtcaattaatttgtgaaatttgttgtaaagagagtttgtatagtacatttaatatgaacggtttgaaaaataagccacatacttaaaatataaagatagtttatagtttgattgaatgttaagtaaagtgtaataaaagatataagagggtgaatgtgcaaatattttcaacagtagaatatactgatcaataattcaaaaattattattagatatatgttaatgtagaaaacaacaagctaaggtttagagttaaatagttaatgcataaagcaacaatatataaaatatatatatatactaggtgattgttacgtgctaagccacgtagtgttagtttt

SEQ ID NO: 366214 - DNA, 938 bp, Cannabis indica
aacatccaatattaggaactgtgccatgatagttatgctcgtcgaagcttgtccaacagtgaggggtagccggatttgtcctagaggcgcgactacttgatcggagaaaccatagacaggctggaggcatggagttagatccttgagttggagccccatcttctcgtaagcagtcttaaacaagatgtttgaagaagctccattatcaatcatggttctagccaccattttattttctatctggacttccacgaccagcgggtcattgtgcagaaatctaatcttgacagcatcttcatcgttgaaagttatggttggctctcctgctcgtggaactttgggcttcttttcttccacgaccaggatgacttcttcttgctcgtactgagctattcaggcatacctctcccgagctttgcccaaatcttcagcgatgtgcggacctccaataatgacttgcaagtgtccatctatgggtggaggtagcagatcctagctgttttgaccttggttcgtcttgacatacttctgcaggtgcaggttgtttttcttaatcagaaattctatttcttgcttaagattataacattcgttggtgtcgtggtcgtagtctccatggaaccgataaaattttgtcatgtcgcttttgttggtatctttcttcatgggcccgggctttctgtacgtgatcagggggagtctgtccgaatttatcgatgaactttcctttcttcccatttccttgcttgtggttgttgcttgaacacttgccgcttgaattgttggaatagttgggaagttgggcggatgttccagtgaaaggagccttcgttttgcccagcttttgctcaccttctactcgttgaatggcttcttcgagcttgatgaagccttcgactcgatcaaggaaatcattcattgagtctaccggcccgttc

SEQ ID NO: 366215 - DNA, 573 bp, Cannabis indica
tcgcttcctctattcatttcacgtgtcaccatctcaggcggtctgacctctccctcgtcacgatgtcttcacgcaaccagcaactttcttggagactcatcgtctttggttcggtactccaatagcaaaacagagacccatgactcgtccctctcccaaatctacgaccacaactcggcctatttcaacgatcaacatcaagatcttaaagtcgttactacatttcaagctgtctctactaactcgggctcagaagtagacgactcagcctcaatcccaagagctcatctgactttcagcgagttcacgggtactcattctattgagtcctccgcaaatgagttcgcattctcaagttgtcctatgggttctttatctcttgttgttactactcagatctctgagaaggccattgttcccgctgctactgattccataaaaaggatttctgatacattttggcaccaaaaaaaaggtttggcctatttgggcgggttaatccgaccaaaccgcgaccgttaatcgatttacagattttttttttttaaactgggcaggttgcacttaaatttt

SEQ ID NO: 366216 - DNA, 604 bp, Cannabis indica
ttgcgtctcagcttacccggtgtgcacccaagcggttcgctgcttgtgcatccttgaactccatcttccaagtccaggatctcagccactccctcaccgtggtaagtatttcgtagtttacttttttcctcatcattttctcataaggacttttactcatacttgtgtccttttccagcttgctgccgaggccggccgcctttccaagaacttaatcaaccatggcttcgtcctgtccgactttgggggcatggacgaagtcatgaagatccttcaggatttgactgctgaaagacggctttaccaggaggatgccgagcgccgggaggcccttgtcaaggccagtgaggaagaggccaggcggagggaggcacaagcggaggcgataatccgggaggagacccttcggagggataggctggaggccaggcatcaggaggagctgagggcggagagcgaggctgctgctaaagccaagcgtgagcttcgggaggctagggaagccttggatgaaatggctgccaaggtgaagtccttagaggaagttcaccaggcagacttggagtctagggccaacttggccgtggagttgaaggagctcaag

SEQ ID NO: 366217 - DNA, 771 bp, Cannabis indica
atctatttacagtattttcgcagtacacgggtactcgcgtttgttatcaataatattttaatcgcgactttaattacaacttggtgtaataagtagaaaatttcagaaacttgaaaaatttcaaacttcaaaaaatttcctttatataatcaatagtacatcatggtatataccccctatacttaggattttttataaaaaatgactaagtataaatacaaggcgagtacaaactagaaaatgcgagtactattgataatagaattttaggctctcgccattccaagcccgttgaatcgcagtaccatcgagttttgcgagtcggtacgtggcgtcaccaatcttttctgcgatgagatacggtccctcccaattatccccgaagaccccatgtgctaggttcttggtatttggcatactcttcgaaggaccaagtctcctactcgcaggactcttgtcttgaccttggaattgaagtatcttgcggttcgtcgctggtaagtcgcgtttttcaggtgagcctgattgcgcttttcttccaaaaggtcgaggtacaacgactgtttttcttcgttttgtgaaatgttgaaaacgtctcttcgtaaggaacctgccccaatctcgactggcaccatggcctcgcatccataagagagcgagaaaggagtctccccagtcgtggatcgaggagtcgtgttgtatgaccatgaaaacttgcgaaaagctcgtctggccatacccacttactctcttcgagttttcctttgatgg

SEQ ID NO: 366218 - DNA, 705 bp, Cannabis indica
gttcatttcatataacggatataagatcataagttatttaattacaataacaattatacatttataattaataaaacacctttttaaaggtctcaataatgtctcgtatcatatcatacacaaaatataaatgtataatatcttttcgactcactgtaccaactaactaattggtacgttttttttttttctttttgaaactgctaattggacttagttatggttgtttatcttatattctcctaaccttttattaatttgacccgaagagaggtcagctagaggtgcatcatgatgatacatcctaaggatgctatttttttttttatttttcttaaatgggaataagtaagaggaccaatgattcttacttgttgcgaataatttatgtattataattaagacataattatatgtttttagagggctttttcatttatacttctagaactgattttttatttgtttataaaaataaaaagcataacatcaaaataaaaacaacataaccttaattaaaatagaaataatttttataaaaataaaaacctaaaaataaaaaaaataaataaaaaaaaaaataagaaaatacaatataaatggtaattctcggcctatttttaaatgtcatttttatataataaaaaaatataaaaattaatagtatcggtgcaagaatagggtaattctcctatttttaaatgt

SEQ ID NO: 366219 - DNA, 521 bp, Cannabis indica
aaactatcgttttacttctaatagacataaaagttatagatgtctatatctatgattaacactcccactcattgcactatcgagttcctaagatgtaagtattgggctagttctacagtaagctgaaaacaaacaattcaaagaactcgtgcaatatatttaagctaaagtttaaccatcttagaattgagatcaaattatctatgatcaactaagtgatattgacttaaaaagatataacggtaagttcataatatattttctactattaatataggtcaagtccgatatatagccgatacatccattcctagtttactttactaatcccttgaataagacattgtacttatccaagtgtaagtaaaccttatcattgattatcacgtcattgtaaatctagtgcgctgataaatcataggacataataatttgaagcatataatcacaattattttctactgtgatgacatcactttaattatgaataactatatgttcgaaatttaatagaacatata

SEQ ID NO: 366220 - DNA, 531 bp, Cannabis indica
tgccccataagcttttgtcctttagtggacttagtatttggtgatttttggatttatgttatgttatatttggctgaagtattaaaaatcattttatcactcattttacaaaattggaaaaattaagaaaagaaaagcaaaattttattttctctctagcactctctctttcggccccctttgagcagcaagggtttgatattttccttgtggattcaagctgattttgagggaaatccaagctctaggtatagctcttgcaccctctctttagtttcttgtaatttaaggaagaaaatggttgcatgcttggtgattttgatgattgtagttgctgtgtgtttgttgctgttttctgaagtttagatatgtttaattgagttaattcaagttggttttgttgttagttagttggttttaaccatgtgtaaagctttaaactcaaaactttgaattttaatggtaaaatggtgtttttgctgctgtgacttttgtttgtgtttgagtttggtttctggatgttattcatgt

SEQ ID NO: 366221 - DNA, 841 bp, Cannabis indica
attgcctcgcctccccttgatttcctctcaccgtccctatcccagcttcctgggttgggaacttcaagcacaagtgtcgtattgatgtgactgcgccaaagtctaccaaggccggtcggccgaggattgcgttgtatgctgtcgggcagtccaccaccacgaaagtacagtacttgaacgtgctctggggggtgtccgggcacaaggtgactggaagtctcaccttccccattgggataagtgttgttccattaaaccctgtgagttgggaaccacttggtgagaggtctcggtccgtcaggcctattgcagtaaaggcctctttgaaaagtaaattcacggaactcccgttgtcgatcaggactctggccaccactttattggcgatgggggtctctatgaccaacgggtcatggtggggaaaacgcaccgtcttagcgtcttcttccgtgaatgtgatgggttgatccatcagccggggcctttgagctgggagttgagtaacttcccaaacctcattgtgtttcacggcccctgcataccgcttcagctctttgcgggtagttcctccgatatggggtcctcccgagatcatggccactctcccgttaggtctgggtggcagaccggggatatgctgggcatctccggggggaacaactggagccaatactcctgtcgcaccccctggtgttccctgtggcaaagctccagccgcctgacccgggttgagatgaggcaaccgatttttgatccactcgtagaggtgtcccaatcggattaagttttcgatctcgtctttgagatttttgcattcattggtgttgtgcccaatgtcgtt

SEQ ID NO: 366222 - DNA, 917 bp, Cannabis indica
accaggagacaggaaaatgctcaggagaacaacctggggaaaatgaggtccccctgaaagtctgaatgaccagccagaactctctcatagaaaatgagaatgggtggcaaccagaaaccaacaaacaggaaattcctcgtggaaatgaggaagaccctgggatgcaacccggggaacataggtcactgggaaggaatcaccagcgttcttcccgaacccatagagagagggctcgtataaaccctagtgggggaaatacaacaaaccatgctcagggggaagaacagagtgtgaagaagcaagtatgacctcaggatgctcaaggacccatagtcgatcaactcgaggaagagaaaatgctcgtcgcgctaatgatcgagaaagcataggaaccagtaaattcgcaagtcactcaaggacaaagtccatgagcaagacaagatctgtaagtaggacacaatttgtgagtagaacgaggtctgctagtacttattccctaccaaatttgcgagaacacttgaattagaaaaaacttgatcttcgccaaaaactcgatccaaagtaagaggatcctatccaattgcgaatagacgagttggagataagttcaggagatatcaagtgggggaattaggaagaaaatctagatatgagtcagacgaggagctcgaaccgtgccatccagatatcatgaatactctttttccccagggatttaaaaaccctcacgtcttatcgtatgatgggatcaccaatttggtctcgcatttgaataacttcaacacaataatgcgagctagcaatgtgacaaacaatttacgttgtattttgtttcccccctcgttagttggaacagcaagcagctggttcaacaaatttacccatcattccgttacttcttgggaacagctgtctaa

SEQ ID NO: 366223 - DNA, 672 bp, Cannabis indica
ctctctccattagcggctctcagccatcatgaagtcccttagccaacttggtctcttgcgttgcctctgcacatgctccctgttatagtgagatttctctcacctagaaactcgagaccagacccctacttagaggacacatatacttagattttccaaagaaagctgagatgtccctgagggactcctcgaagttttaaacctcgcttaagatagaatcagcgagagacagcgagcatgaccaaagtttgatcgcatccgagacaagagagtagctcgcatatatcgaattatatgcgagtatcctccccgtgtgtaaaccaggagaccgacctcctgtaaatgcgaggtggtcctaagaaccctgcagccttgataaaccaatatagacttgcataattaggtcctatcagctcgtcatgcgatgtccacaaaaggcgactatctaagggcgcagacaccctaaacataatgataaacctgcgagtttaacattagaatatgaacagtcaactcgcagactcagaagatgcatacgttgatgaacttagtaactgccattcatttattaatgttaacgttgtttagtttaattattgtaattcaatgtgtaaaaacggattgacaatgaatgcaatccttgtataaatgatcggacacctgctttgtata

SEQ ID NO: 366224 - DNA, 441 bp, Cannabis indica
aactaagcggtctttacagacatgtacactaaacatgtataagcatatccaagacattatactaatcttacctcgattcctaattcaggtgtgtcggtcaacttaagtggaactacctgctcggcgaattacaggcccctaaatcacattaaccacgacactaataagtgacacgctaaatcacttcttggggacttaaactagaagctaaatgtttccctatccataaaaagcatggcaataccctaaacatcacaaaaatgggaagaactagggttcccgaatttgccccaaccggtagactagtttcccaaccggaatttcgattctgggaaaaattactggaagccaaccggtcgaccggttcctacaggcctccttgaaccggaattccggtttagtgcaagaattttttaaaaaattcataactcatgcaattca

SEQ ID NO: 366225 - DNA, 414 bp, Cannabis indica
attacacagtaaaagaggaaactgtttacttggaaagttgagctcttcccttttcctatatatagctgccccctctctactcttggtatgtctttgaatgctttgatattcatgctatcattatacacgaaattaagagagaaaagagagagaaatttcgagatcctttgtgagagagaagtgcccacacacatcatacaatacctcaatcatagtttagaagactgtgaaggatcacatccaactgaaggacattcgggctcagatcttgattatactctgctacatacaggaatcaagggttagagatctgagtggaaggagacacttaattctgctcccatcactgtaagacgatggagtcttcgtggcatggcagaccaatggccagaatctaaagcttgatttctaccc

SEQ ID NO: 366226 - DNA, 730 bp, Cannabis indica
aaaaattttgaataaaaaataaaattaacaaacacaatatccatgtaacaaatatgtgaaataagatattaatataattaaattattattttaaactaaccaactaaattttaaaaatttagggttgttaaaatgaaccttaaatatctcttcaaaatttaaaattcaaaaaatgaaaaataattttaaaatatctaggtttatttgaattattttatcaaattaaattaaatatcaaataagataaatgatttgaaaaaaaaaatattatcaatatcattttcaaatcttataatttaataaaattaaaataataaaataaaccaattttaaaatagatgtatttagacaattattattttaataataaaataataaataaataataattatcctaattatatgtcaaaatttctcaaattaagcattattcaaaaatctacaaaaatatctaggttatttaaatatttaaaatacaatttataaatttctaataagtaaaatgatataaaaataacataaatatcatttttctaactaataatttataaacaattaaatatttataaaataaccaacttttgaatttgaaaatattatggttggtatatcaattaaaaaaatatctaggttaattttaaatttattaattatttaatttatcatataaggtaattttaatataatatttcaaattaaaaagataaatttatcttttaatttaaaatat

SEQ ID NO: 366227 - DNA, 559 bp, Cannabis indica
atcggttaacacttttatgggatgtgcctggaagtacggccgtagcttacgagatgtgtggactaggcacaaagcgagtttttctagagggggatatctagattctgcccctagcaaccttttacttacgtagtaaattggttactggtgcttaccctcttctcgtactatagttgcactaatcgcatcttctgagatagcaaaatagagaaatagcgtctctctagtgattggtgttgccaaaactagaggcgtcgctagatgcctttttatgttctaaaaggcatcttcaaactcttttgtccactcgaacttcttgttgcctcgcaatacattgaaaaacggcacacacctatcagtttacctcgaaatgaatctgttaagtgcaaccattcttcctatcagggcttgtacttccttaggctttgtcggtgattgcatgtctattaatgccataattttcttgggattcgctttgatacccctcgcgttgactatgaatcccaaaaactattctgaggagactaggactgcacatttagacccacaaacccgaaaa

SEQ ID NO: 366228 - DNA, 561 bp, Cannabis indica
caactgaaagattatgagcagcgctatccaactcatgacctagaacttactgctgtggtgtttgctctaaagatatggcgacattatctttacggtgagaagtgcgagatttatactgatcataagagtctcaaatactttttcacccagaaggatttgaatatgaggcagagaaggtggttggaattggttaaggactacgactgtgaaattctatatcaccccaggaaggccaatgttgtggccgatgctttgagtagaaagggtcccgggcaagtttgcaccacgatgatgatatcccctcaactagcctatgaaatggttagtgcagggattgaatttgtagttggaaagttgcataatttgacacttcaatctgatctattagagagggtcagaagagctcaacttggggatcctgagctagttaaagtttgagatgagattatggctggtcggcctagagacttttcagtctcaaacagtggaatgttgttatacaaagctcgagtttgtgttcctagtgttgatgagcttaagaaagagatacttgacgaagct

SEQ ID NO: 366229 - DNA, 842 bp, Cannabis indica
atatataagatacatgagctattttttttattgtcaattgattttgagatggaatctcgtacatcttactatacaacacctcactctattacatattgtaggagctaataaaggagataaatgtcccagcagttttttccgactactgcgaagaagcctgcaatctcggagctaaatacataaccaacacaaccgggagacccctctcgtttccggtaagtttgaatgaattaccattattgatttgttcatgttagttgtaaccgttagtacagttaatcaacagttaagagtagttagctcattccttttcgggattatgtacagtttcaagtggtgaattctattggactaattgtctattgattgattcattcaaacacattgaatctggttatggttgtggggcatttgagttagaaactttacagttgaattcaaccaaaatcatcaaaatcataataattctgtgcatattgttttgtagattcttttaaatccattccggcagccaatggtggtggaggatagcgctttgtttcttccttgctattccaattgcttcctctttggaatgtgatcgtctatgtttgatatttagagaaattataattcaaatttttcatacaacgatgtatattacaatgatagtatcactttcattgtattaatttttataaaattttaaaaagattatattgaagtacttagaacattttcaatactattttactgaaagtggtgtagaatcttcattaagttataatagtaagtagggatgtgcataaatcgatccaatccaatgagaaccgaccgccatacattggatatccaattgtgat

SEQ ID NO: 366230 - DNA, 986 bp, Cannabis indica
tttcttcagcgggcccaggtcttcgcaacttatgacagggcggacctcaatgtcggcggcttggtcacgacggagaactgccggaaggccaagctaatcctgccgcaccagtcaatggaggactctaacctttctaaggttatctgcccgaacgtgagggttccggccgcagagaagaccttccgggatgagcttatgccactgcggagaagaagtactaggagtatctctaccggaaggcccaggagaaggcttataccaaggcccaggcggcttccgggaggcccctttgcattgggagcccggtcgagaggagaagccaaatggttgccgggagatcccttcgccttgggagcccggttgagaggagggctcccaggccaaagccttcggttcaagtcccgaaaataggggctcctgacgccagtactttcggctccggtaagtcacctttagcaatacattacgtcccttctgttagcgaatatgctagccttaggcctgtagggttcgatgaacgtctccttaggtttaggatgccctcgacccggtggggagatcatgccaaggattattatttttcaaacttaggagatttcctaggtcggtcccggatgggttctggacctccggagcccgttcccttggaccctttggcctatctttcttctagctggttccggccctcggacaactatctcggggatgatccagccagcattaagattcaaaattttgctagggccaaattagagagtcagggtaggactagctcggttgcttttttaagtgtttactgctttcacagatattctaacacttgactcttttcttttgttgtagcagctaattccatggatgccattttggccgcccttgccggagctcacactcctgatgctccccttcctctaacttcttcccaaatggccactcccatgaaagcttcttccagtgcccctccagacactattgacttagtggat

SEQ ID NO: 366231 - DNA, 552 bp, Cannabis indica
catggtctttcttctcgagtcacactttgggaaagccaaaccatgttattgttttttcttacagttgaggcttttgccttgtaaaaaattgagaggatctcaatagtggagagtgatatcccagttactgattgtgcttggaatggttactgtcaaaagattttgtatcaagaagatatgcttggagtgaatatataaaatgtggctatataaacgaattcttggtttatgagaaattattgagtgactttttttaaaatatttttttttatatatatataaaatgtggctatgtaacagaattcttggtttaatgttattatttatttttctgtcaaaatgttaacagaatattctaatatttgacagaatattctgattagaaaacgttaattataattaattaattttaggtaaataatcctaccaagctatattttataattttaattttcattttaaaatttgaaaaatactaatgaagacaacatgctacatattatacaaaagtattgcatttatatatcccacgatgttacaaaaatactttgg

SEQ ID NO: 366232 - DNA, 564 bp, Cannabis indica
aattaaaataaataattttcaacttaaatatatttttctaattaaataaatattagaaaatataattagttactagaaataactattgttatacccgaagtttgacaagcacatcagaagataacacgtgtcgagctgggaaagacttaaacacgcaaacgacaagtatgcctagcatggaacaactcgttggaaatataattcgccgagtatgtttataactctgttggatgaatagtcttctgcgagaaagaaacatacgaaatgctaatttatgtattgacaaaaaaccatgtgggtgcacacgttcatgacgaggccttaacctcgatgcgtgaaagagaaagctgttggatatattttaccatgatctagattgactaacaagtatgtttcattaacatcctaatatgaattctaaaacaatgacataaacacatataaagtttagtaaaccttacattgggtgcagcagaatataatgactccttccgttcagatatctagcggttgattcctttctgtagcagagcattatcaatatcttaacctggatctctttct

SEQ ID NO: 366233 - DNA, 645 bp, Cannabis indica
aataatatgaacgttattcgtaattgcatcctctttcattaaacaaacttttgataagaataattagacacatgcattaaggttaaatttaattaagatgaataaatatataaaataagaatgagaataattggaataaaatagtataaatttaaatttataacagaaaaattattaatttttattggaatgattttttcttctatttcaaaagaaaaaagttacttcatgcactaaaattataaaaaagtcattccattgaaatgactcttctagtattttaaaatgtaacattaaataaatggaatgtattaaaaattgattcatttccattgtatttctttatattacctccaattaaacacattacacatcctcaattttagagcatgcccaacagaaagagttaaactaacttatttgctaaagttttaaagaattgtgttaaaatttatatccataagtaaggtaaatcaagatctaaaatagcttacgactatctcttgagttttacgtagctcaataaataatggagaattaaacatattttatataggataaataggggcataagtactcaaaattttgagtttgtaagtggcataaacccaatgattttttttagtggcataagtacccaatgtt

SEQ ID NO: 366234 - DNA, 610 bp, Cannabis indica
ttaatttttgcattaaatttcatgccgttggtttcttaagaagattgtatcaaaagattacccaaattgatctgccgggaacaatcgttatggtggtaccgttcaaccagttgtgaaacttcgtcctccgtaagtgggtcaccgagaacccaactccgctccttcgctagcttatccaggttagcgacctttcgggccggagcagcagttccagtccatttacggtcgagccggccggggccgaaaggtgagaatttaggggattctcagaatccgatgggttcgacggagggattagacttcgaatacgagtaaatgaaaatcaaagggaagatccgacttgagaggttgttgagtcggggctttcttgggtttggggtcattgtttcgaggttgggttttcttgggtttagagagaagagaaaagggcgggtcgtaagcgtcttgggttaggaaacgagagataacaaaaatggcttggcatttcaggggtgaagacccaagaaaggaacaagaagattggtaacagagaaaagccattacaaacaggggagaagaagaaagaagaagaagaaaaaaaaataaaaataaaattaatttttaatttttt

SEQ ID NO: 366235 - DNA, 521 bp, Cannabis indica
aaaataatgcaatctcttactatcttctttgggatgaaaaatggataagtgtgggtgtttgtttggtataattgtgcttatggtataatagagcttaaatgacttctcatctacccgtttacctaagccaagctattataaccgaaaaagaccttttgattccgagcaagaattgtcaacattagtggagagaggtatgtcactcaagcttattgaacatgggttagcggaatgttggagagtgtagaatggttgtgatacgaatgtcaaaagaggtgttttgtatctgtatgaattgcttacttctgaattgtgcatctaagttagttcttagagttatcgagttgaaattctagttattgattgcttgaagttgtgcaggtggtagtagcagttcaatcatttgaaggtttagttgtctgttgcattgtttaattttagtttgagtcttagctttactcgagggcgagtaaagattcagtttgggggaatttgttaggctatttttagcctatattttg

SEQ ID NO: 366236 - DNA, 593 bp, Cannabis indica
attgtaataacaatattacacacatcaataaaagtagatcgtacactaaaattaattaatacttgaactacgtacaaatattattctttacttataattaatttttttaaaataaaattaaataattgtcaaaaatctcaatcaacaaatctataacaatattgttaatacatttttcaaaaaaaaaaaaaagatagaaaaactattataaatttcaatttaccaaaagagtgtcaaaatattaaacattagaagtaaacttcaaaaaaaaaaaaaatgctttaagaagaaaaatctcattgaaaaacaattaatatgcattggatcgattctaagtactaagtagatataatacatattaaaaattatttatattccattattatttggagaagtgccactttaattttttttttaatttttttgtccaaaaacatatgctaaaataatttttcattattagttaaacctgtaattttttttttaattaatttacaatatcaataacaaatttctaacattctaatttaataagcatatttaaaaatacttcaaactcatttttaaaaaacataaattattcaaaaaaaaaa

SEQ ID NO: 366237 - DNA, 791 bp, Cannabis indica
gtcacaccgtgacctacgatcgagggttgttcgggatttgtggttgacggaaccctcgtgttccccgggttctgcagtgcaggatccaccgcctgtggatttgccggatcaaccacgcctctacgagtctgtaccaccatcgtacttgtgattagatttgagaacgatctttggttcagctctcaatgaaagcaccaaaatgttgacctcgcttttagccaacgatagtgagtctaatttgtaagtgacaagtagtataatgtgtatgtaatataataaatcaaataaagacacgagaattttatagaggttcagcctcgaacaattaggtaatagcctaatcctattagcttgtattgacttaagaaaaggaaaatcatcacctttcttagagctcttacaataatatctctgaatatgaattcttacatagttttttctatcccttgcccagtgagtatgaatcactatttatagggctataagcttgggagggaagaatttcccttctaattatagttgatataagtggaaagattgcatattaaatacagaatacactaataaagggattcagacagcttgccatatctctgtgatctgatcccaaagctaaagggatttctttggtgactcacgatgcgaaagctgaatttgctaagtgttggcatgctgtgcagattgctcattgcccggttaagagggcttcgttcgagcgaatatatgtggtcccttgttcagcatattttttgcgtgcagatacataaagtgttgggttttgtgccgtaaat

SEQ ID NO: 366238 - DNA, 514 bp, Cannabis indica
atttttcttttttgaaatcggatatgtatgaaaaatattaattttgttggataaaaattttataaatttcatagagataaaaatttataaatttatagagataaaaatatatataactgaaaatgtatattttatgaggataaacataaaaaataaaaattaaaaagtaataaattcatagggacaaaaataaggagaaaattaaaattattaaaaaaattctctaacaaaattgacaatttagtataacttgatacctaatatattattattaaaatatgtaagatttaataataaattatattaataacaatatgatattttagatgttgtttggtactatctgtagtatttctcttttagcctaatataaaacttttaggtatgtttggaagtaactgtgtaattaataagtagggtaattactagggtagtaattacacactttagtaattacactataatttaaggggctgattggtttaagatttaaatcctatttatcattttgaaa

SEQ ID NO: 366239 - DNA, 801 bp, Cannabis indica
aaataaaaataatattataataatttgtttattttttttaaatggtttagagaaagattagtgtattgacaaaaatatttatttatctttaaatttttttaatatagcaacggtataaaggttattttatttttatataaatattgtaaaataattgttaatttatatataaatagtgtaatggtgattgcattgtgaaagtattacaaaactttcaaaattaaaccaaacaatagatatatatatacctgccaactccattcactgaggccatgaggatcagaattatcttctagatcaaaacacgtggcagttccactgtagttatagtagatgttcgctgcaccatacactttctcgaatgtgttgctatttctaccactctttggattatcaatagctttgcacatctgaacatccaaaaaaatcaagtacaaataaaatcttattattattttcaatatatatatctttatataaattaattaattacctgtttcactgggtaagctggcaatggattcagaaaatttgagggggttggataatcagtcatggctgtgtaaacaaatgcagttgatagccaactttcaagataatctcctatatactcatagttcctgaaattaaactaaaattcagatatactatttatgtattagataacatatatattagcatacacacagaatataaaatattcaaacaaatttaaatttgtcttaataattaacttgcacaatttgaatgacttcttagtaattggatccttttgtaagtctttgcagtgtctttaatctg

SEQ ID NO: 366240 - DNA, 630 bp, Cannabis indica
ggtagattgagagcttcagccacctccttcacagtaaaggaatacatgtgtcccctgacaaagacatttccaaacataaaagagtcctcatcgaggaactcatcaatgatatcagtataaaactccttgacaattcaatccatatagccatcaaaaccgatcaatgtctccacccattgtctttctttcaacaaattatataacctagaagtccccacagtaaaatttttattctcataaaatttcatatctctaccattatcattgtaaaaaaaataatgagaatggggcttgaagttttcaagagtaataccatagggcatcttccttttctgagacaaaataggtcttggagtaaccatggctctttttcctttgtccttctttggaactgtagcagggacagtaacttgttttgcactgataggataatcttcaagcacttcactttcagacccagaatcatcaacagatggttgttctttgggaacaaattcttcaccggaatcagactcagcctctgattcttgatcaacatcctcagtcacttcttctagtttagaattcaatgatgaaacggaaggaggattttctttgagacttattccctttgaggatgaagtcaccact

SEQ ID NO: 366241 - DNA, 534 bp, Cannabis indica
aaaaggcctagtgtagaggcagagccacagccagaccccgtctctccaagagatgagttcattcttcccaatgattacagacctaatgatgtggaagatgtactccatacacctcacaacatgtcgatcacatccattggagatacccaagattcagaggtacaggttttagagaccgttccaacaccggtggagaagagaccgaagaaaaggccaaggtggtatgacgagtacaccgaaataaagaagaagatgaagccatcgatagctaatgtgaatgttgacccgcttcggcccgttgatgagaagctactacatagttttcgaaattggttagtgggaaccattggaaacaagtatctgagggacgtcttcactggtgtatatggcgtggcttggttccagaagctacttacgaataaagaatagctttctgatgatgtaagtttattaactaagtattatatgttattatttactgctatttaccattgttatttgtttttttttaaatgttgtaatgtggttgtgctg

SEQ ID NO: 366242 - DNA, 680 bp, Cannabis indica
taaaatatgtggttgtggtctttcgatgacttaagactagttacatcaaagagttcttagagtagtccaagtggatcctgatcacagaatactaaactcatattccatacattaacatacagtttgaatccattgatagaaaatggatattaataacttgtgaaagttgttctattgtattcttgaaactgaaagaaaaatttctatttgaaatctaaaatttaaactcaaagactaagtctgtccaagaagatcatacatccagactaagtctgtccaagaagatcatacggcaaggatatttttcaccacctatgaagaaggattgaattgattatgtccaaaaatatgaacagtgtcatgttaggttttatgccctaaataaaactctacattaatgtaatcttttatattcatttatcaatcaagaaatagatttatttcattacttatttaatgtgttatttggttcatgtgatcacttatttgatttataaattcatccaaattctatcacattgatattcttatttattgtaacgccctaagtaattaggcacgttacccaatatacttaagaaaccttaatcccctaaacgggattactaataaaattagcgcagaaattaaactttaataacaaacagaatgaaaataaacttagtaataatttaaacttt

SEQ ID NO: 366243 - DNA, 510 bp, Cannabis indica
taagcctgtacttgtttagtattttcaatgactattaaagcatgctaggaagcatattagattttaattatttatttattttaagtgtcttgcctttaagtcctaaagagcggtattaagtttaatgatcgctatctaacctgcctggcttatgggttcgcaggctaagtcctataaaatggatgccccgcggaatacaagaagtcagggtaacatggttgagaccagaggcggtcggggaatccaaattccccagaatccccatggtcgcggtcgtggccgtggcagagctcaaggtggtcaccctgtaaatccaccacaagctcctccaaattgggagcagagattggcggaaattcaagaacgaatccgccagcacgaagaagaaattcagaggttgaggcagtagggtcctcctgctgtgcctcctcagtatgttgctcaggccattgtagttccagcggtgcgagtagaacaacctgttgttggcaaccgtatggagccgttgta

SEQ ID NO: 366244 - DNA, 523 bp, Cannabis indica
caattgccatctcgggtgaccctctgagacccctttgacgttgtgggtagtcatggtatcatgaggatgtactcatatcaaccatgtcttacgtagctggaattgcataacttgtaccatgagggtgtagggggtaggggtagtacccttagactaaccctttaggggtttaaggggttggtaaccctagaacaaacccttaggggttaaggggtgtacccctagactaacccttcagaggtataagggtatatctctagactaaccctttagggtttaaggggtgtattcctagactaaccctttaggagtttaaggggtgtacccctagactaaccctttagggatttacgatgtgtacccctatactaaccctatagggattgaggggtatacccttagattaaccccatgtagatcattgcatttcaggtaggggaagtagtatatatcccctagactagtttgaatcttgtatgtgtgtggtcatcgtttatcctgtttatgagggtgctagtccacc

SEQ ID NO: 366245 - DNA, 519 bp, Cannabis indica
aatcgtgtccctatttttataattggaggattatttacctttagtaatagactgttgcatttcattttcattgatcaatatacagtacttttcccaaaataaataaaaaaatgagtaaataaacaaactaagagtttatatttctattaacagaaaattataaaattggtaacgattcagtttattttataaagtttaagaacttgtaatttagtcagaaatttataacaacgtctgtttgacatagtttttaaaaaagttaaaaattattttttaaagaaagctacaattaaaagatagaaatttttacaccaaaaatatgttttgcacattttattactgttttactcctacacgcctacatcaacatttttacttaccatctttattttattacaataataccacttacacaccattctcatgcacagacacatgtgtcatccccatcacacatcaatcaacttccactctcttctttctctttttttcttttctatcacacatcaatcaacttcc

SEQ ID NO: 366246 - DNA, 624 bp, Cannabis indica
tatatatatatataaaaaggtaagtttacagtacacttatatatttgtaggtcatgattaaacattcaagagaggtttttagtttatttttttttatgattgcgtacgttgtagttatttaggtctagtagaaaattttcaaaatgccaaaatgtaacgcccgtacttttataaaaatattaattttgtttacaagcgttaaacgcggaaaaacataatgtcgcatttttatttaatacttgaaaatgttcacaactggccagttttcgtacaaaagacataataattaataactaaaataattgcgacataagtttaataacgtaaataaatagagcgccctagaccgcccgcagttatatggccctcagcgagttcacacacacaagcatccaaagttccactcgccaccggctttctaactttcagttaccttggtctgcatatggtaatttgataagggtgagctactaaactcagtaaggaaatgtgtgtcaggtagtcaataaataaaaacaaaacttaattaaaatgcacatgcaaatatttaggcagatagcaaaacattaggttctaagctaaatcacataataatgattacgcccgagtccaattttggcaaat

SEQ ID NO: 366247 - DNA, 714 bp, Cannabis indica
ttgtgtgttgtcttttgtagatgaaccttggtgagtcttgggagcctaaacatcaaatcgaccaggaactgcttcaacttctacacgaagtccaccctcatcttcgtgctaatccttcttctgattccgtacccagccatagaatgatggctcgtacgaagaaaactacgcgtctggctgacgcttctgatcctcaggtggctcggcttgccaccctgcccgacgccgaacaggatttggcagtccaaatggaggaggaccgtgagggggacgttgaagttcaggaggttgaggaactggacgaggcacgtaccggcagccctcccgctgctgagggagaggaggagattgaacccccaaactatggggagtacgatgaggctgggcaaccagttgatgctgacggggacgtcctggttgcaggcgtcgactacgtcaccgaggagcttgctgaggcggttcctgatcagagcagggtgccttgggcgtcagatgggtgagtcctccgtccaagatttcggaggcacgcctccgcactctcgaccatgacggatacctgggcgagctggactgctccgcactctcgaccatgacggatacctgggcgagctggactgcttcattcccacccacgacaatcgcgcttcaaactctagtgaggggatatgcaccttgtcaggggctcatggccagcaaggggcgttgatgcccttg

SEQ ID NO: 366248 - DNA, 753 bp, Cannabis indica
ttttcaagcgtatcgtgcatgacacttattatggacatcaaccacttagtcgagtgtgaaaaatatatcttgaggtgcttgacctttttttggccccaccacagtggccgtccgtaccaaccacccacctcctacactgtcatactaatgtggcactcaagtaagttctctttcctagtccttagtgtcactttggggataatgtgccattcaagtttggggtgaacttaatttttaagttttttagtgcgtttgtttgtctatattatattattttgagtgaagctgttgaatattgaatatgagcctatgttaaattgaggatgtagcatggtttgaggaaaattttgattaatttttttttaaaatctgtgtgcttagtgagattgcattcttaattagcttcaattttttgctttaatgaacgtataatcataattggtaaatttctagcaattgaagtgatttatgcatgattaatgtggattgtagaaagttagttgagaaaatttttagaacttgtttgcttactatgtgaggtgaaatgatagaagatgcatgattaagaaagtaatttaggcaatatttggaccgatgtgcctttcaagccgaccttgtttaaatctcacctttgttatcttttttgagcctaaagatatactttttattgttacactaattttgagctcaattgaacactttattattttttcatttacctatattagtatcatgagcatataaaagaaaaaa

SEQ ID NO: 366249 - DNA, 643 bp, Cannabis indica
gttccaggttgagtttggggcctaggtcccccatgtaggtccggatcctaggtcacggtctatgtccatgtttaaggtcagctttggatcccgagtttcggtccgagtcgaggtcctagtatgggttcaggttttagtctgggtctcggtcccggtctgagtcctaggcccttttcaatatcgggtctagatcctgatctgggtcctaatgaaagtctaggtcccagaccaggttctggtctgggtttaggtcctgagtctaggtctaggttcgagtctgtatctggatctgggtttggggcctgggatccaatctctgtatgggtatgggtctatacccgtgtcaaggttagggtttaggatttatggttttgggtttagtgtttagggatttagggtttagggtttagtggtacgtgtaaattttttttgatttagggtttaaggtttagggtttagggtttaagggaccgcttcaagtctcggcttcaatttcgggtcacatggtatgatttaaggttcgggagtgggtttgggtccgagtccttatctgggtctaggtctgtgtttgggttcaggtccgagtcttggtcactaatccaaacacccacctcatgtttagtctagtttgagttctggtacg

SEQ ID NO: 366250 - DNA, 501 bp, Cannabis indica
aaatttaaaagcaaatataaaaaaaatacacatatagaaacacacacacatattaggataacatatatatataaatatacaaatattcatataccttctacagatttaatattggagtaattttcaatcttatgagctgcaaataattaagaaaaattgtgagataaaagaaaagaaagagaaaatttaactaatcttaactatacatatatacctaaacaatgatgaagatgagtccggcagtggcggtgggaatatcgacaacggtgaaggcggtgggaatgtcgttgtgtggtcgaaacggtgggctagttgacgatgaacaaggggaggtgaataaaggttttgatattgaggatgaagaaggagagatggatgtttgtggtcaaaaatattagggatgaagagggagaggaagagggagacaaagagggagatagacaaataagaatactgatatatatataaaaaactattagaggcggaggtccgctggtaata

SEQ ID NO: 366251 - DNA, 707 bp, Cannabis indica
aattatgattaattatggaaaattatttatagatatttaaataattatttatgctgttattattgaattctgaaatgcattttatgtcatatagtgaatttcataattttgcatttccggtgctggtaacatggaactcggtgtttggctcagtaaaatcacaacttagtatgttagtattgtgggacgattatttagacattgggaatgtcggaatcggtcgggaattttgaatttcccaaaatacccccttagtgccctttatgttattttagtatggaggggcaaattggtcattttgccccaatgatattttgtcctttagtggactttatgtggtgaaattatgtgaatttaattggtaattgatggctgaatatatgttgagttatgcatgttttcttttatttcaaacttagaaaattagaaagaaaagcaaaaaacctcttttttctgtttctttctctctttcggttttgagcagctgggattggggggaattctttgtgtgttttcttgctggatttatcaaagttcttgtggtctcaactcttggtaagtctcttgcttttgttcttgaagatttttaaggaaaattgttggttgcatgcttagtttggtttgttgttgttgctgtgattttatgttgttttcagaggtttaaagcatgcttaattgagtggaatgaaactgttttgatgcatgtt

SEQ ID NO: 366252 - DNA, 559 bp, Cannabis indica
tcacctcacttttgctcatgcttctcttatgcggtttgccttaagcaattgggttccaaattctaacaaaaccgtggtatctcaagatgtggcttcactcctttaccgaatcacttctggaacttccattgatttggcctcacacattctgaaccaaattgtctccttccaaagaggtaaaaagtcaacctttaaacttgtctttcctaatctaatttataaggttttatcttctcagaagaatgtggctcaatcacatgaaacacttgagcctcccatcagtggccctacattccagtcctctgaatactttgatggtgtgttccaaaaatgacccaaggctggtgctgctgctgcttctgctgctgcaagttcaggttctgctgcagcagaactcctggaagtcaagtctgaactacagaatgtgtatactcgccttggagcaatggaagaagtccagcatgcgatgtccaggcaattgtcctttttgattaaactctaccgagattaagttaaatctcctttgttttttttttattgaacttatatctatttttct

SEQ ID NO: 366253 - DNA, 527 bp, Cannabis indica
taaaatcaacaaaaatttgttttcaaaatttattaagtttcgttttttaattttaaaaataaaaagcaaaatcttcctaccgaacgcacttttaagttttgttttcacttttttaattaaaaaaaccaaaatccaattttaaaatcattaccgaacaaccccataatattttagacgaaaaaaaattatttttgaaaattgaaaacaacattttaatgttttctgttttctagttttttaaagctcaatttttaaaaaactgtttttaaaaatttttgccaaacgactcatattagtttttaaaaactgttttcagttttaaaaaacagaaaataatttttaagttgtgaagccaaacagtctcttgttttcaattttcagaaccaatttttttgtctaacatattatattttatatttttgctcacatactcggatcctagacccagatccgaataggttcatattatggtatggtattaaaatattaatttttttagtaagaaaaaatttaaaaatagttttaaa

SEQ ID NO: 366254 - DNA, 774 bp, Cannabis indica
gctggttttggtgtatgggttgggtttatgcatgtttgattttaaaaacctaagctttgatctttaatggcataatttgattcactaagtttttttgtgattttctggttggaatatgttgtatatgcattgtataggtgttctggaaagtatggctgcttttggtggatttttgagcaagaaatggggttttggggtgaactgatgtaaaccggctagcttgttttggtagggtccctaaatgcttcactttctcaattctcgtttatttcactgtcgtagttaggtatttccctatttcttgagttagtgtaatccctagaggatacagcagaacctagagttgtaggttcgagtttcccgggattagggttttgatcatgtgatttacccattatgttattagggtatccatttcgcacaagactttccgttcaggtcagccagcacacttgaatctggaaagaaggtaagaactgtatataatatgtgatatggatatgtgaatgtatgtatatgtttattgtatatgcatgcttatatgttgtgattcatatgctaccaacacttatacggttgcggtacaaagtgtattggtaaggtgtatgatgtctgaaagtacatcgtggtgttaccagcacttgtacgggaagatacaaggtgtctgtggtagaacacttaatagtactcaaggtgcagtccataccctacctacactagtacggaggtatactgagttcatgtggtacatggtacatggtcgtatcctagtta

SEQ ID NO: 366255 - DNA, 709 bp, Cannabis indica
acttaaaataaggaaaagagggaatcaatgttatgcaacaatgaaacttgatatgagtaaggctttttatagggtggaatgtcatttttttggaacatgtgatgttaaaaatgggttttggtattcaattggtagagttgattcttcgctgtctacgctcagtttcctattcttttttgttgaatggttctattcaagggtcggttactcctcaatgtggcatcaggcagggtgatccattatcaccctatctgtttctaattcgctctgaaggcttttctaggctgctgcaatatgaagaatctactagtgcacttcaaggtctaaaagtctcaagatcagcccccccgatttcacatctactttttgctgatgataatgttcttttttgtcgtgcttctcggtcttctgctagagctactcatcgatgtcttaatctttatagccgtgcctctgggcaagtgattaatcctgacaaaagtgtgctctctttttcaccaaacacaagagtttcagatcaacaattctttcagcaacttctcaatatgcctattcagccatgccatgaacaatacttagggctaccttcattctcaggcagggataagactcaattgtttagtggaattactaataaaatttggaaattgcttaactcttggagagaacaactcttttctattggagggaaagaagttcttctaaaagc

SEQ ID NO: 366256 - DNA, 582 bp, Cannabis indica
tgtatactccatacatccgatattggcaaactttgccaattgtattacaaggtgattcatcactgaaccatatatttacgaggtaggattcatcactaggatatggtatttacgagggttattatcactggctgtgtattacgatgtgattcatcactgctgtgtattacaagatatcactgattgtgtattacgaagtgattcgtcaatgtctgtgtattacgaggtaattcatcaatgtctgtgtattacgaggtgattcatcactattatgtattacaaggtgattcatcactagttgtgtattacgaggtgattcataactcttgtgtattacgaggtgatgcatcactgactgtgtatacgaggtgatagatcactgttgtgtaatatgagaagatgctagatctttgtattacgagatgttgaatgttttacaaaaataacatcccaaataacatcccaacaacgctgaaatacctcatttcacaaaccttgtgattcttatttaaatgaggtcatctcacaggttgagtcctgagtttttttcgacctgtctcacaatgtatttgttacgagaat

SEQ ID NO: 366257 - DNA, 614 bp, Cannabis indica
caaaaacccacacctacaatcagacccaaataaagacacggacccgaacctaaactcgaacccagacaaggatcagaaccaaggtcttagaccaagaactgaatccagactcagatcgggaattgaacttgggactcgaacccaacctagaccaagacccaggacgcgaacccgcacccggagcctgatctggaccaggactcaaactccgacccgaactcaaaccaaaactcaaactcagcatcgccaatagaactagaaccgaactaggactaggacatggacaaggacctaaaccaaaaccagaacccagatctgaacctagaccgagacccaaacccacacaataattgggacttggacccagaatcgggatagggacctgggaaacagaactaagaccgggacctagtacccgacccagacccgaacttgaacctaggacccagctcgtaaaccggcaccagaaatggaaccagactgggaccagagattgggatccggatcttgacccagggcttggacaaaacccgtagtcgatgtctggattgacaaaacccgtagttggtgtctggattggggaccaagccctggagccgaacccacacccggac

SEQ ID NO: 366258 - DNA, 844 bp, Cannabis indica
ctcaccaccttttacgagattaaatttgctgcgacttgcctccttgcgtcctcgtcctacccagagagcgcacctttcctttactaaccctgcgatcatacccacagaggatgtggtagtttctatccccattcttcgatgtggagtatcaatccctttccatccattcatctccgctattctgaagcggtatgatgtatctccttttcaactaaccccaaatagctatcgcatagctttaggtttttatgcgatgtatatggagtatgtgcatagggagccttcaatggaggagtttagctatttttatgacataaagaacgtgggtctccacaacggcttctactgtttcagcaagtgggccacttctgaaatcaacggggtggaaggcatggtttccaatatgggggattggaaatctaaatggttttatgtttttaaggtcccaggaattaggactgactttaatcgtcgacctagtacgtcgcatatttcttcacttaatcaattttcaagttaccttgtgactttgagctaacccgttcttccttattttcgcagatagaccggctcgacctgcactagacgcgactcgcagagaaaccgctgaaattctcggaagcctccctgttcaagatcgtgactggcgacttctgtgcacgaccttaaagctgcgggaacacaagctaattccagagaacgcgagccttcaaagggagccagtgtacaaggagccgtctgagaagcaaaaagagcggatagacaaacgcctttccaagcagacttctcggccaacatcaggtatataaactagtgcattaaaacttatcgttatttgtactta

SEQ ID NO: 366259 - DNA, 724 bp, Cannabis indica
tcattcaatctagagatgtttactttcatgaagatatttttccactttccaaaactacatctcccacatctataaatgaattattctcactttctttaattccttctataggacattcacatactccctctgaggatacttcacatgtttccaactctgatggaacttcatcctctaacagtttgcctgtcaccaacattactcctgatgaagtaccatccacacctaagaacatatccactacttctcctatcacttcaactatgggaagacttttatctaaaccaaaatgtctatctgattatatttgcaatactacttctgcttcttctactgctcaccctattaataaatatttgtcttacaataggttgacacagcactttcgagcaacagctctcgctgcccatacctttgtagaacctaccagctacaaaatgacagcaaaggatcctatatggaaaaaagctatgcataccgaaactgatgcccttgaagccaatgacacttggattgttgtcactcttcatgatggtcaccatgccattggctgcaaatgggtataccgaattaaatacaatgctgatggctccgttgatcgatgtaaagcttgattggttgccaaaggcttcaaccaaaaacaaggtattgattatcttcacacttttggccatattgcaaagtttaataccttaaaacttatgctcgccattgcggccattaa

SEQ ID NO: 366260 - DNA, 1042 bp, Cannabis indica
taacaataataattaataaaaaaaaatgaagaatggtttggacgggttaacctaaccaaatcgacgaaattattagacggtttgaatttttttctaatttttaattggacgggttacaattaatatttgcaacctgatatttatatcaggttagtaaaaatatgctataacctgaccaaaccgaccgacgtacacctctagtgtctaatggtccttacattgccaaatatattataaatggtatagaagttgttaagacttatgaggcatatgataagaatgataagaaaatactttctaagagcgcaagagctaaatatgtacttatatgtggtttggtagagatgtgtttaaaaatattgaacaagcctcgactgtttgatatgtgaaaactgcttgacactacaaaaaatattatttttagtcacaccaaaatttgtgattaaaagtaaaaaagttgtaactaattattaattatcattcctattttgtgactaaaaggtccgtggctaaaagtattagtcacaaaaattacaatttgttgtgactaaatgtggttttagtcacaataaatattgtaactaaaagtaaattagtgacaacttgtgtctaaatactatgttttagtcataagtagttttttgttgtgaccaaaagtcacatttagtcacaaaaagtttatgttgtgactaaaaaattatcactaaaagtagctgttttttgtagtgtgaagttactcatcaaaaaactagtgctatgaaagagactaaaattcaaatttattccactcaatatgagaactttaagataaaagcagatgaaaccattgctaacatatatgctcattttactacaattactaatagtttgaactctcttggcaaggtacttactcaaaaagatatggtgacaaagatattgagaagtctcaccaaattatcaaggaaaactagttgccatccaagaagatacgaatcttattgtacccaatgatgcatacatgcaatgtcacaaatatcacaaaagaacacaaataatctca

SEQ ID NO: 366261 - DNA, 447 bp, Cannabis indica
agagcccctcttgctaagagaatgggttttgaggaggtttcctgccctatttgtggggatgctgaggagaccacagagcacttgttcctgtactacaactttgccttccacctttggcggtcttctccttaggggttatgcctgttcttgactcaagagcccgcatgtgggactgggttacttttctatggaatcttaaattcagaggagttgatactgataagtctattcctccatgcctcgattgtggtagataccatttggagggcccgcaacaacaaggtacataataaatcaatgtgtaacattaaacactatatcgactctatttcttcttgttacacagactatggctcctgccttctttcttcccctccacagtctgttgggctcaggcttggtctccgccccggaagattgggttaaaatcaactgcgatgtcaaagt

SEQ ID NO: 366262 - DNA, 666 bp, Cannabis indica
aaaacttattttacactcaattatatagttcattgtttaataaacaacgtctttgtgatccaacattcaccaatcacccaaatacatgtccaatgaattgcatctcaattcataagctttttcccattttgggtgagtatgactttctataattgcttaataaagtaatcttttaccaaaatttaaatggtctccttatatatcatattgactatccagtcaattataaagtactctccatcattattgtattaccttaaataatttaggtaatcttctataccttagtgataccactactcatcctgacattcttttatacgtcaccccaataacgtccccgcttcatctccattgggcctttacttctacagaatgatggctcttatacacgagtgcatcagtctagctgcttcctgcactgatggctggccccacgaaccaatccaagtatttctaacatgttttgctctaactcgcacgcttcatggggaaatttcctaaatgaaatcaccccaagtcaaggaccctcaaccatggagtcccttcatagtgggctaccaaacaagatgcttcttgctaacataggtagtcccacgcctacataatctcaaaattactacacaatcccgccctttaattcacctaggattctagacaatactc

SEQ ID NO: 366263 - DNA, 672 bp, Cannabis indica
taagcgcggaaattaaactttaaatataaatggaataaaaataaaattgtaataattttaactttacaaacaaaagttacttgcactgggatccaaaaattattttacaacatacctttacaagtccgtttccactagccgacctaagcggcaaaacagagttacgaaattcatcactggtagaccccaacccgcttggtctagtgtggcccgaacatgtacatacaccgtccaactcccatactcatggctgatcagaaacatatttaccctttcctacacagtagaccacccgtgagcgaagcccatcacgacagtacaaaatattgataaacataattatcacgctatacaaatattaatgccattctcatatgcatgtatgacacagacccgcatgttacgctcaaatgcctatttatgtctatgtaacatagacttacgtgttgcgctcacgcgtctaaatacaataaggccttagaatggttcatctaggttctagttaccgagtccaacctgattatgccttgaacacataaccctgaatctcaatatactcatatatttaacatggcatagcatttacacaacatatatcactagggtaataaccctaggctattaaaccgctcatgttagggtataaccctaatcccggttactaattactca

SEQ ID NO: 366264 - DNA, 503 bp, Cannabis indica
acttaagtaaagagtgagggtattattagtggtgtaagatattaagtggagtaagatatttaaattggtgaagtaaaggtttgaagagatataacgctgatctacatagtcagaatcaaactcaagattttccttaacgctggcctttcctcttagcctctgaaggatatggtcttgagattgacacctactatatagactttgctattatatatcttctgggtgatagtttcggagctactgataatattcttataatctaccctagcggagaaatagcccagagaggagatttagaaagacatatttagaaagatagctaagatttttattattttcaaactgatacccttaacagaaatgagaggccatatatataggccctcaacacacaaactgaaattacaacatacagaaaacgataaacactcgagttacatctttccctaggtagggaatctctggtattccagacttttttttttattattattaactacaaa

SEQ ID NO: 366265 - DNA, 632 bp, Cannabis indica
gagtttcctctctcgttacaatgcgcataaacagaaagatcgtgtgatcaatgctgaatgcaaggatcgtgggattgaggctgagtacactgatagtgggatcgtgtatatgccatatccacgtaagttgatccctgagttatagggattgagctaatgactcatgatgcgaaagctgaattcgctaagtgttgagtgctctgcacggattgctaaatatcttactcgggatatgtcagcgaggcatcctgctcggtctatcactcccaaacagatgctccaagtggactccacgtgtcactattctcgtgatgccacgtcggagtgcaaaatttgggataacaactaccatgcaacctatcatcatcttcaataaactcatgcttttcaacaataaattcagcaaggattacaacactaaatctcaaatatactaagcaagaaatcacctcattcccaagcttaaaattctcccaaatcaagctccaaaatcaagcaacaccaagaaattcacaccaataagctagaattttcaagagagggttagggtgagagagagagaggtcgggtgagagagagaaaagcagctagaaatttcatttacttctcaaaaatcaattttgtcaaacata

SEQ ID NO: 366266 - DNA, 774 bp, Cannabis indica
gagtcattatatttcgctgcaatcaatgtaaggtttcttaaactttatatgtgtctattttattgttttagaaattcatatttggatgttaaacaacatacatggtagtaaatctagatcctagtaaaataattccaacaactggcctcagagccgtggtaatgatttactttcatgaaatatgaattaaaacgatgtttgtgttgatttggatggtttcatgatagtttatgtgcttatgtgatgagtgtatgtgatttacgaaatttttccatgaaaatattttttattttgtttctaaaaatattttattttgattccttgtgaaaaattaagcaacttttgtttttacggaacttaatttcgataaaaaatgagagagttatggaggttaaaaaactcgagtccattgggtgtcgaaggagtgcaccacgcgcaccaggccttcggccaaggaggtgctcgcgcgcggatttttctgacatcccttgtctgaaactcgtcgtgctgctccttcaaacacgcccacgctgcagctcgcgcacgaagatgctgcacctgctgagaaaactcggcttaagaccctgcattttccctcattcgcgcgcgtttgttgttgcgtgcaaccttcctggctacaggtgcagccctcctgggcagccaacacctaaatgcgatttttgtgggatttttccccaaatttcaattttttcaattttcaaaccctaaaatcaaaataaaatattattttttaaaatatttaaacttaaatat

SEQ ID NO: 366267 - DNA, 980 bp, Cannabis indica
tctcaaagtgatctgacctccttatatgtgagcatgtaatctcttgttctcttcaaatatcttataatctttttggctgcttttccagtgattaattcctagattgctttaagtattagcctaacactccaacaatgtatgctaaatctggacgcatacaaacttgagcatacattagactcccaacagctgaagcgtagggaattttttgcatttttttaattttaaggcttcctttagggcattgtttaagacaaaatttgtctcctttaacgatatggatatcacctggtctacaatcttacataccaaaccgtttaagtactttatcgatagaactcttttgtgataatctaagaatactccaagagcgatctcgatatataactcaaatattcacattaatatttaattgaattaattagggttacaaatccatattttattttcaagatattacacacaagaacgtgtgtggccatgaacaaattcatagatttgattttagaactcttaatatactcaacccatgagatcaagagtgattagaaaaattaaagctggaatagtttttaagttgactgaaatctaccgtaatcattagattaataggtcatccacctcaacttaatattttttctataataaagattttttaatgaaaatattattaattaattattgattttatcatttaaataaatagtatttaaatgatgttaagatatatagagaatattgaaaaatttgaagtaaaatatattttggtaatgcattttaaaaaaatagattttagagaaaaattattgggagtgctttaacaccaaatcatcatatagtcgagacttgtccttacaagaatcatgaaatttcaactacacataaataatttatacctctttgggctatattttaaaagttaacttttgtaacgtccccgcttcaagtctccattgagtctttacacccacggaataaat

SEQ ID NO: 366268 - DNA, 710 bp, Cannabis indica
ctaaaacaggagctgtaatcagtcgttacttcagctcttggaaacttttctcacacttatctgaccatataaattgctggttctttctagttaactcagataacaacattgcaatcttagaaaaaccttccacataacgctgatagtaacccgctaaaccaagagagcttcgaacttcagtgactgtttttggtctaggccagttcttcactacttaaatcttccctgggtctaccataatcccgtctttacgaacaatttgccccagaaaagatacctgcgacagccgaaactcacactttttgaactctgcataaagtttatgatctctgagtcgttgcagaaccatacgaagatgttgctcgtgttctgcttctgaccgagagtacacaagaatatcatcgataaatacaattataaaattatcgagaaaattcttgaataccctattcataagatccataaaggctgtcagagcattctttaacccgaatgacataaccaaaaactcataatgaccatacctggtttggaaggctgtcttcgggatatcctcttctcggaatcccagttgatgatatgcagatctcaagtcaatcttagagaatacagtcttgccctgaagttgatcgaacaaataatcaattctaggcaaagggtatttgttttagtggttaacttgttcagctcccagtaatcaatacacatcc

SEQ ID NO: 366269 - DNA, 701 bp, Cannabis indica
gcatgtgaagtaaggtaatttcgagtacgaatcttcaggtgtaccccgagctaggtgtagtgccttctctctgcacctccatgccttttcataactcatttggatcccgtaatccttgtgcataggccaagtgatctgagccgtcagttgttaacttatccttaattagatgggtaataatcaaaggtgatgcttgacggttatcttttcctcgaagattaagagaacgtgtatgtacattacgaaatgtactcacctcaaacatgttagaaagtacgtacttcttcgctcttaatctccacccacaatctgtatccttacatgtgacgtaccaaatatcagtaccggacttcctaacgttgtagtcaaacctttttttcattgcatacaagccaataaccatctttcaatgctctttgtctctaaaaaattttcctacatgtaactccccgcctggtgtgccacccgtagatatataatgactatgatcctcgatgtcttctcttgtatacattttctccttgaatttaccgtaacttgttgaagaagaaaatggatcgctcaatccagtcacattggtccctcgagcatcagtaagaccactaatatcgttagtctctctactattattaggacctgtactgtcagtagttcctttagcattattggttttgcctggatgactactactagtaccaggt

SEQ ID NO: 366270 - DNA, 566 bp, Cannabis indica
gtaaacatctatttgagcaataaaaatataaggaactttaactatattttaaaacaaaatgagataggtatccgttagatgagcttttcggtgccacataggcgcatgatcttacacgtgtacaagatgatattcaacattcatttatattctttatatacataatatatatattatcaaggaccacctgaagtaaagtagtctctatcttcattgtatttctaacacgtgtaaccaattaggatgttccatcaacattttatacaacatgacaaactctccagtgagagccacaattacatgaagttgtagtttgaacttttgcttcacatggataaggatattggtccctcacttcagtgccaaacgggcttgcaaacatctaagggtattattacaatagaattgaagtaatagactgactttctcttcttcttcttccatttctttcaatatttgaacatagtacttgaaaatgaagagtagcaaactctccagtgatatttactataaccagaagttactactctagaatggtagtattctgattgggtgtacttagattc

SEQ ID NO: 366271 - DNA, 1095 bp, Cannabis indica
aatcacgtaatacgcctatgctagttagggtgttacataacggtaacaaggcttacaaccctagcgagtcagaagaagtctttgcaagtaagaaccgcgatcgacaccagatatacatcgtcgacctcagaagaaagaatggccccagctcactattgggatcgttgtaaccaagtttctgtcaagacatctccagatacaataataaaagacgtgtttaatacacgattgttttgacccaataaaagcgggaaaatcacagctatacaattcttaaactataaaccgcatttacactacgtaatatgtaatcaaatcccataattttatggataattattgtaaacatgttctggtcaactttgtaatttacagacctctatgtaattataaatagtgacagacaagattaaaaaagggacgaaaaatctcataaaagagaggccctaaaaaagaacacaatcagaaatctgaataaaattgactcgtgaactatgcagaattttaactacaaaccacgtaaaaaatcctgtgttcatatattattttttatagctttaattttttttgtgtgacatcattaccgtgaggcttaaatttagttaacgaaaatctgtgttaacacttgccttcctttgttttgttttgctgtgttttgaataagaagttcctctttcgttcaaaaaaaaaaaaaaatattccatttaaaaaaaaaaaaacaatttttatttttacatatgtgaaaaactattggtgacacgtgcaccgacttatttagctggggctacaagaactaaccaaatatattccgtaaaaaaatcagagtaattaaacaacttcatatgtttatttatttaaataattatataataactatgtaatattgtaattagagtttataaataaataaaaaaaaattataatttgaatttggagctgaataatatgccttaatataaggcaggatacactgatacatctctatctgttttagtattcgaaaaaaaaatttagtcaaatttgttctcatggtcatgtaaattatagttatttaagactattttacaaaattttaaaaaattcggtaaaagttta

SEQ ID NO: 366272 - DNA, 1056 bp, Cannabis indica
tgggcttattcaatgaataacaattatttaattaaagttaaattcctcttctttgggccttgtgtgagagttaggggtcattagtagtgggtacgacatactgaactcaaccctccctcgcatgaataatccaattgtgaaggcccatttactttatttaaatagttgtaataggttaattgtactagtttaacctagtaaaattgattagcaacataattaatttttaaaatatatgaaattaatttaagaaaaatacactagtttaatgaaattaatttaagatgaactatgtgtatttttctgcatttaattaaataaagaagttataactaattagattttttagatacttaattatttgaattttattagaaaatatatttaaattaaaaattaattttttgaaattgatattggattaacttaaattagaatattttttgaaattaataattaagtagatcattctaggaaattagttattcagatatcctttaaaaatatatttaagttgaaaatttgttaattttagatgaacttaaattgattttttttttaaaaaaaattaaggtaattagttcaagataattaatttattatttaattaaattttgaaaattatttaagttgaaaatttagttattttagaacatcttaaattagatattttcagaaatttgttttattatatttttttttgtataattttgaaattatatatattatatatatagattttttgaaattaaattaaagttaaaaattaattttaattaatttttgtatcaatttaaattaagtaattttcattattaaaatatatagtgtaaaataaatgattaattaaacatacattattttaaataatgagtattaatcaaaaaggacatttgtctccattgttggtcttacatggttaattgtttgaatgtatcctcgagatgctagacttcatcccccttatagatgattatccattgaagcattgacactgcaagatctcgtatgataagtatttttgtaaagttttttattttctatttagactctccc

SEQ ID NO: 366273 - DNA, 711 bp, Cannabis indica
ggcggcaatcccggcaactcctcgggaaacacgtcgaggaagtctcttaccaccctgactgcctcaggcccaaatggtttaggtctgctggagtcaattaccactgctagaaatcctacacagccattgtatagtaaatctctagccttcaatacagaaatgactgggatccgagacccctgaacagatccaacataaacaaacggatcttcaccttctggttgaaaaatcaccatcttctgcttacaatctatactggtcgaatatctagatagaaaatccatccccagtataatgtcaaactcagttaattccaattctataaggtcagtgctcaactctctatcttcgatcctaaccggcatagacctaatgcgcctgttagagataatcaattccacgttaggcattagggttccaaactctctttctaaaatatcacaaggcctacccaaaagatcaattacccttgtagctacatatgagcgtttagctcctaaatcaaataaaattgtaaataaggagttgttgacgggaacctgacctgtcacaatagaaggactggctgcagcatcggctttggtgatggcgaacactcgagcaggaaccagtttcacctcagctttcggctcctctctctttgcctgagggcaatatttcttgaaatgccccaccatgccgcacaggaagcatgtcttccggttacactct

SEQ ID NO: 366274 - DNA, 722 bp, Cannabis indica
ttgattaatttacagtgtatgcaggaaattctaactctttttcttcaattttccactttttctaagaagaagaaaaaagaagatcaaggatgattttagcaaagtttttgctatgtgctttttgcttgacccctttgcatgaaaatgaaggggggtatttatagggttaagcgatgggtgtgggtccgccccacaacccgcctaaggtctctgtttcgtcccactttggggtaaattacataaaatgtagagttgactggttggtcccatggaattttatgaacacccccaagtattagtgtgtaatgtcttggatttcatttaaatatgtattttactcacatttttcatgtgactattccatggttacattaaaaatgtaactgtgatgattacattttttataacctgctataacaggttactaacatgtaaaactttatttttagatttaaattaattataattaactatttacttaaaataaattaatttcttaattaaagtatttaataaatttttacaattaatgtttataaatatttgaggaattgccctaaatactattttttttttaacttttttttttcaaatttacattttgggtcgctctagtggtttctatgtggttgctatgtgaattatgtgaattttggttgcgatttaggttgctccgttggttgttatgtgaatttttataaaaatacataaaaaaaaaataa

SEQ ID NO: 366275 - DNA, 613 bp, Cannabis indica
tatggatagccaagtggagagtgagcaacaagaagaagggttgttagatgaaagtgtagatactgtgacattggaggatgaggaagaacatggcatcattgattcgacttcatcaatgatattgacaaataaaccaccaatggatccatatatgtcatcaacaccatattatatcctctacaagctacaaaaggcttctccccaagctcatcatccaaagtcttatgttgttggtactgactttgattcaaactcatcgcttgccaagcttgaaggcaagtacaacaacaattttcaagttgtcttgcatgacgcttattatgggcgtcaaccgcttattgatgtggcacccaggtaagtttcctttccttttctttaatgtcacattggggacaatgtgtcactttagtttggggggtgaacttaaatttttatttctaaaattaattttttgtgtgagttaatttgcttaatatgagtcaatttgaaagtaggtagatagcatgatttgaaaagttcatttattttttgaaaaatctgtgtgcttggtgatatcacattcttgactaattttaattttatacttaaaagaacatagaatcatattaggtaa

SEQ ID NO: 366276 - DNA, 723 bp, Cannabis indica
gtggtaaccaaacccgaaggagagaaagagatccagactcaaatcttgataatactctacgacagaaaggaacaagggttagagatctaagcggaaagagtcataatattttgctgtaactaatgtaaggttttctaaaatcttatgtgtttaatttcataattttagagtattcatatttaagatgttaatttaacatacttgttagtaaatctaaatcctgatagaatattcccaacaatttcaacaaagaagaataatctatgggtcaagtgggtcaacaatatatatattaaagagcaaaatttgtgggactatagtgctctttctcaatataggttgtactaggtactgaaaaaaggtggttagagtgaaggaggagtttaaaagtctggtaagtgagctacagttttcaataataaaatacaagattcaggaggggtataagctcatttgactagagactgagaaactacatgtaataaagtagtttggggtagatttaatcttcccaaatattgttttgttttttggttggctatccaaaactgctttaagacactacaaaaattgttaattttagtgacaacataatttttttgtgactaaatatgacttttagtcacaacaaaatattacttgtatttaaaacattgtatttagttacaaattgtcactaatttagttttagtcacaataagtattgtgactaaaaatacattt

SEQ ID NO: 366277 - DNA, 269 bp, Cannabis indica
atgaaaatgaaggtaaaaattaaaacaagtaaagtaaaatgggtatacaatgtaattttctcgagaaaaatacctaacggcttggacaatggtttcaaaagttataattgatgacatggaatggagtgatcaagttaggattttggattattgcttcctttttacaaaaataccaaaattaggtttacttgatatgtgtgggcatgcactcaatcactaaggcttgaaattatttgtgaagagagggtataatgtttcgaaaattgaag

SEQ ID NO: 366278 - DNA, 615 bp, Cannabis indica
ggttcaggacctggtctcgggtaatgcgtcctgggttacgcaatctgggtcgcaggtcctggcgcaagtctgggcttgggttcgcgtctcttgggttcgagtcattattcggttctacgcctagatctggttttgggcccatgtccaattcctgttccacggtccttataccagttctgattccgatttcgggtctcggatccgagtttgggtttgggtcctagtctagaaatgtttccaggttcgggtcttggtacgattcccatatctagacccccactaggggttgggtccaagccccatgtcgtgggtcaagatctggatcccaatattcggtccgattcggatcttgggtccctgtccgtgtccatgtccgggtccaggtttgggaacgagaccggggttggggcttgggtcactgtcccagtcctgggtctcaattcttgttctaatttttagtttgggaccccaatctaggtctgggtcctgggtccaggtctgagtctccaatccaagtccaggtcctgggtccgggtcttggtccaagcccatgtctaggtttgggttcgtgtcccgagtcctgattcaagttgtaattcggatccgcatctcgtc

SEQ ID NO: 366279 - DNA, 644 bp, Cannabis indica
ttgatttttattggcatgtgcataatgcctaataaatacatatctggatattattaaatgaatatgcaatttggtttgattttggtacatattattattagtggaaataataataatactgattgtgattattatttttagtataataatatttgtaaatattattatagtgttaaagggtatatttaacacaattattattattattgttattgttatgattattacaattattattattattgcgtactgttattaatttttattatagttgttgttactgttgtgtatatacgaatgtatatacgcacgtccgaaccgaaccgagatttttatggagtgagaatcgttgcacttcagttaaagcgatctttttgctagggtttaaacacgatagatattaggtttttgagttctattttcgtatacgataccgaaaaattttgttcttcaagtggactgcaacctgggtgaaagtgggggttcgggatcacttatatacgaccgaaggaagcttttttaacgttgtataaggggcggaggtcctcgtttcgagtttcgccattgttgaagcttcgaaggtgctgcttaaacggactcgaattcgaatgtgtttaagcttgttcttgggtcaagggaggtta

SEQ ID NO: 366280 - DNA, 547 bp, Cannabis indica
gagcagttttacgcttgattttcattgtttcaggttcccgcggtgtcaaagttcaaattcagtcaattagtgaaaagacagaacaaactagcaaaaaattggaaaaatctgctcaagaggcgtcaatagtcgcgaccatcattcagccaggtcgcgagtctggtcgcgactttgtggaattggcagaaactcgttttttcgagttttgtctatagtcacgaccaacttataggctagtcgcgactaggtacggaaatcgtggttttgacctaattctgatttttctctcaattggaggcacacctttcatccctatataaggaatacgactcagaaggtcaaattaagcagaaatagacctgaatagtggatgaaagtggagaggaagctatcttgaagacccggagcgatatcaccttctagtttctttcttttgccctttattctttcttttatgtctaatgttgtttcagatttaatcatggatgtttttattgtttttatgagctaaatttcccattaagggaggataatgaatgttgtttaa

SEQ ID NO: 366281 - DNA, 528 bp, Cannabis indica
atagacctaatccaccttttggagataactaactctccgccatgtaaaaaggttccaaaccctgattcatatctatcatgcggtctatccaatttactaaagatattggttgccacataagaatgtgtggccccaaaatcaaataacatggagtaaaaagagttattaactgagagctggcctgtcaccactgaagggctgggttctgcatcacctgagtaatggcgaacaccctagctggagtgggtctcgccggagcctttggtgcttctgttctaagttgagggcaatccctcttgcagtgtccgagcatgccacactgaaagcacccctgccctctacactcacccagatggtgccttttacaactggggcactctgggtacgaaaaacgggtctttgaaccaccctgacgactgcctcggttctggttccctcggaacctcttgttctgacccgagccactggttgcagtggatattttccttttctggtccacggccgaaccactacctcccctgctaaagc

SEQ ID NO: 366282 - DNA, 516 bp, Cannabis indica
acagtgcccgagagagagctgggctccgggcacatatcccgctattccggtgggataatatcctccatatgccactatttgggcctcttcgaggttaatgtatttttggactctcttctggaaggcctgaagctttgcagctccttcctgttgtagttcgttccagaatggagtccctgtacggatgcttgcctggagaagggcaagctgttattcgtcatcaactttcttggtttttgaagattcctcctggaacctctttaggtaattctttagtgtctccgtaggcagctgcttgatgttagtcaaggcgctgacctccaggttgacgttccttgcggcgacaaactgtctccgaaaggttgtttgtaacttattccagcagcccacggatccttgttccaatttcttgaaccactcttccgcagacccgcttagagtaagcgggaagcacaaacacttagcgtcattgctgactttcatgaccgtcatgactcggttgaactgcgacaagtg

SEQ ID NO: 366283 - DNA, 651 bp, Cannabis indica
gttatcttgtaacatggtgcgaccttctcaattttggctgaacatgcttcttgtaggatatttgctgccaaggagtattcttcagggagtaattctcttacaaagaatttctttccttgatctgtttgttcaagggcctggtaactctttgtgggcagccatgctactttgagttggcttggtctcttcttctttcccttttgttaagggatcctgctagcaagatgtttttttttaccttttggtcactgtagacaagaagtatgagagcagactgctgatggattgagctggccagggcaaggccaggtggccagccacatcgatgcattacttggccatttggaggaggctatggcttgccaagtcattgattctatggctgggcaacttgtggaggtagtggccggtcaggttgatgactctatggtcggccaccttgttgaggccagggtcagctagcctttcaaaggctgagttacagtttgatcccatctacactcagttggctttaccctacggcatgattgtcttagagcctttgtgcacttctatcaataactattcagcttctttcttggtaacgcttcttagaagtggcattgggataccatgtttgtgcgttatgttgtgcaggatcttccagctatc

SEQ ID NO: 366284 - DNA, 620 bp, Cannabis indica
gaggtatgctgttgtaggtgtatcccatgttggttgtccaacatgtctattccttttgaaacagagatgcttatttctttaaggaactgagtgggtaccaagtttgccttaattgttaaggcacacctgggtagtcgagcgagtgcatcagctgctgtgtcatctttggggacttgccttttagtacgccctttgagctgacttaatagctcaagtatgccatcatcttcttatattgaattgtatattcacgtaggacataacctatgactagttgagagtcgtggtgtatgtctagatggtcagcccgcgctttgtgtgctagcttgaggctagcactcggagcttcatgttcagcctcattgttagaagctttgaaactgactttgttgcctcgtgcatcaattacttccaggtgccctgggggccgtgcgtggattaggcaggtggtcaatgcacctcttgggttgagttgttttgctcttgctctcgcttcttttctagcttttgattttatcctaagattctttccgctataattcttgaagaaaactttgaactttatcaatggtgagattcgaattggagaaatttgatggaactaaggactttgcgctatg

SEQ ID NO: 366285 - DNA, 587 bp, Cannabis indica
agtctctggtttctctcctttaacttctactgcgccatatgggaatactttaacaactgtgaacggtccagaccaccttgatttcaattttccaagaaaaagcttcaacctggaattgcataatagaacttgttggccgggttgtaactcttttctgactaagtttctatcatgccatctttttgttttctctttatagatcttggcattttcataagcctcgttacgaaactcatccatctcattaagttgtaacagcctcttctctcctgctgccgccaagtccatattcaatgttttcatggcccagaacgccttgtgttctaattcgactggaagatgacacgccttaccatagaccaaccgatagggagacattcctattggtgttttgaacgctgttctataagcccatagtgcatcatccagattcttagcccaatcttttcttgattgaactgtcttctccagaattaatttaatctccctattggaaacttctgcttgcccattactctgaggatggataagggggagcagttctatggcgaactccatatcttgcaagtagagcttcaaactatttg

SEQ ID NO: 366286 - DNA, 658 bp, Cannabis indica
gagctggaccattcttctttccaaggtcgacaagatttgtcctacgtcgatcgcgggtatacagaaatgttctgacttgtcagggttaggagcctcgatcctgttagttggatgaaactataggaagtttcctcgtagcgagatggtcatcctgcattcttgttctttgagtcgatctgacttttatacttagtttgcttattgcaagctaaggtatgtgttacttttcttcggtgcctcgctattctccttcagcttcagcgacatatggtttcttgttaatacactaagtaccagttagtacattgatcccttgcctaagaccttttagtcagcgggttacaaatatactctgatacttacgcaattaatgagttattccataaaaagatattgcaccgattcacatttcctttaccttggcacgtgtcctccaaccgaattttcgggtataacatatatatatgacagatttcgaaatctaatgttggcctaaaattaaataaatcaattttcaacataaatataatttttctatttaattaaatctcttaagaaaaatatcaaatatttaagtttctacaacaaatcaacttaaatattaattttctaatttaattaaatatatctagcgaaataccaaaagtctacctagaaa

SEQ ID NO: 366287 - DNA, 1379 bp, Cannabis indica
tttttaacgctcgtagtaggatgctctaatcaacaccccttgtcatgacaatgttgttctgagctgtcactagtgcggccgcaatcgcagctatgttagctgggatcactacctcggtagtcgcagctggtgcgttaggctggttgacaacatttgctaggttattgccattgtttgtgccttgatcgcccacttggggatcacaaggctcatcgcagtttcggggtgtttgatatggtgccctaaagactacattgaggtgatcacgaagatcacccttgtgaacatggtatctccctcctcgaggtgtctccacggagccagacctgatataaacactgggagaacggctttgtgaggatgaagaataagattcagcattgtttatctcattttgcagctgggctcgccttcgaggattgcgtcgctcgggatcttccttttgtggcacctcgcagttagtgtttcatgcgacttgttccctttgtgtaggctggttcaagtcgagtccctcctgtccagtctggtgttctctgcgagagcgattattagttcgtcgcctagtgtttgttacctaagggttatccgaacgcatgtttggtactcaaggaggacgtcgagtcctgacccttctgttgacctcagcctgcagagcctgcatttgctcttgtagggtcgtatattgggtcgtggtcagctgaacgattccctcagacaccacagctggtgtgataggtgggaattgtcccatagtggctgccggtgtcgatgtttctccaacatgaccggtcaagaaataagttgaggggggtaatggtggtacgccccactcctccattgatggtgttgacaagtgctgttccattacctgggagtggaacatttattgttctgacattaaaagatcccgtgttgttactccattcgtctgatttccagccattatgattttcctccgaaatcaacagaaaaattctttctcacagacggcaccaaatgttgttggaggaatttagacagcaccaagtaaaatagtaaatttaaaatatgaacaggattatgagattactctacctagaatggcgagtatccaaactatagacacatagacgtactggaaatataaatgacacaaagagagtatagtagttcagtcagatcacggtctgcttagtccactgttgcaacggttttatctcttgtccatttcatgttggatcactcctttatatacaaagtaagtgtcttttgattacacagagattgatttaattatcaatttatttgtacattgaatataaacatttaaaccatttgaaacgtaaatacaataaataaagaacagtttcggcccaattcactaactacagcaacgtatg

SEQ ID NO: 366288 - DNA, 570 bp, Cannabis indica
tttgatatgtaatctagtaacaagaaataagtcctgcaatgctcccatacctaggatatcaaaagttcctttggaaattatcacaataatgaaataagcaacgaataatatttttaatgtacctactatgactaacctttgaggggtttgctcaacgcagcgtggactatattatcttctgacaatataacagcacctaatccaactaagctcgtggtgctcaataccactgcatccaccataagtttagagttgtaaactctcttcttgggaacctctagaatttctagccaaagctcctctatttccttccattagttttggagactttttttttggggccaatccttcattgaaatgatcaaatcataataactaattatccactcaaccacattttgtggttgtcttatctgttggccaagagtaatcttattcctttctgtccatattgctcaggaacacataattaattttccaaaggcatctctttccaccacttcagaagtataaagtaaaacattctttaaattaatctcttctttacttcatgtagaaaagagaattcca

SEQ ID NO: 366289 - DNA, 519 bp, Cannabis indica
ttttcttctctcgttgaggtcgaacattgatctcttccacataatcgttcaacactgataaggtgtgatcgacgcatcttccaccaacaccatcgatgccgcctccttctcctttgtcgcagtcgctgctgtaaccaactccttcatcgttgacttcaatcaaagacatatttaaccctacaaaatcaaaatcaaaatcaaaaagggtatgttaaatttctatcattttaccttttaatttgcccatttgttctctattctctcttgttaactttttcgatattgaaagcccaaatgctatggcagattctatgttttgggttattacatatgtttgtttttataatttcagatttgaagagaggggtttttatttgggattatttcacaaatacacaagaataataaaaaaaaattacaaacctacggtttcacagaaattgaaatatgtttacgaatcttttttttattttatttacagaaaataatggtcattttatgttgtattgttaaattgtt

SEQ ID NO: 366290 - DNA, 584 bp, Cannabis indica
ggagggatatcactggggacttcagaaaacgtattgacaaatgcaagaaacagattagaaacaccaaatggggaagagatcagagttcaattcatcaacacaatgaagcgaaagtcaatctttctgaggtgttggctcagcgagaagtcttttggaaacaaagatcaaagcaatattggctaaattctggtgacagaaatacaaaatatttccactctgttgcaagtgctaggaagaggaatagtggaattgggcaacttaaagatgaaagtggcagttgggtgacttggggatcggggttagaggcagttatcacacgctactttagtgatctctttcgttcatcaaacattgacttgggcaatatcttaaatggtgttcggccgactgtttcaagtgatcaaaatgcccaactcttgctgcctattacggaggatgaagtccgaaatgcattattccaaatgcatccggacaaatctccggggcctgacggtatgactccgacattcttccaaaaacattggagcatagtaggttcggatgtggtcaattttgttcgggatttcttcaatgaaggcagcttt

SEQ ID NO: 366291 - DNA, 75 bp, Cannabis indica
gactagcagctggagtacgaccagtgaaccgagtataggctgatactgtaacacatcggtagagtctagagtatg

SEQ ID NO: 366292 - DNA, 653 bp, Cannabis indica
cccgaatcatgccactggctagcattttgtccacctctttttctaaggtttcggccttcaccgagtcgaggggacgtcgtttttgttgaactggtggcatgtccgggttgacattaaggacgtgggttatgacgtaggggcttatgttggtcatgtcttcttgacaccacgtgaaaacatctgtggcgcccctcagtgtcttcattattttttctttttcctccggttttaggctctttcctagccagaggactttggtggagtcgaggtcgcacactgacacttcctcgacgtcctccatgggttctacaattttttcgaatcccacacggggatccaactcatcttctttcgccatttctggctcagtaatttcacggaccattaggacgggtagatgggcagcaacgttgtaacactgcctggcctccccttggtttcctcttacggttcctatcccagcctcttgagtggggaatttcaggcacaagtgctgtattgacgtgattgcaccaaaatccaccagggccggtcggccgaggattgaattataagctgttgggcagtctgttgggttttgtgccctaaataaaacccatttcaatataatcagattgacttattaataaagatcagaaataacattttatgtt

SEQ ID NO: 366293 - DNA, 524 bp, Cannabis indica
gcaatctttgctaatcaaagaaattttcttaaaaatcgtgtcaaattaaaaatttatatttaattactaaactttataaacttttacacatttatatacaaaagttgggatcccttatttacttttacaaaatattaaaaaaaaaattaaataggtcgcacagcaactacaaaataaaaccccaaatgtcctgagaccgaacactccaggtcgcgccgccatgacatgtacaacatcatcctagctcgaagctcactcctattcacccttcgcctttcctttacctacacatgaaagtagaactgtgagtcgacagactcattaggaaaaccatataacaaataatataatactgacttgtatccaaccgcccatacacctatttacaaggcttaacaaatgagcaagaacgttctttactagggtacaaccaatataccacatacacttcgtaccgacattgtacgagcgttggtaggttttgtttcgtaccctgagtaccactaagtgttataccacacaca

SEQ ID NO: 366294 - DNA, 655 bp, Cannabis indica
gccaatgtgggactttggatgtacacccaacaatcctcccctcaaactaaggaccaatttacctcccctcagatgattacagatctaaacatgaatccctcgattccaacactcaagatctccttgagtaagctagatgaatcccttcaccagctagattcgaaatcccttcgaatacaagaatccctcgattcaaccactcaagatccccttgagtaagctagatgaatcccttcaccagcaagatttgaaatcccttcgaagcagatctaaacctctgacggctctagcagcaagcttcaccttcttttttatttggcaatccggggatacattcacatggctaattttgagatttggctctgataccacctgtaagtcattgtgttctttactgcttactcttcaatccgattcttgaatgtttaagttgaaattaatcaatctaatcttgaacaactcggtaacttgaatcatgaaatttggataagttgttctttcatttggtatcagagctaacacaatagtttgtgcttatttgagggagtggtctagaagatcttttctcttcctaaaccacatgaggacactttacacacacttatggacaaggtcttgtgttgtttggtttgtcattggagtttggtgtgcttat

SEQ ID NO: 366295 - DNA, 872 bp, Cannabis indica
ttacttttcctcaatattgtataagtatatgttacaaatttattagtaaaaaatattacacatttattttgaccctaaaatctgtttgtgatttcttccatttataattagaaaaacatgtagaaaaaaaaaccatttttcctcaaaattgtacattgagcgacaattatataatcttttttgagaaattttaaaaaaagcacaaaaaattttaaaaacaaagataaatgcaaatcttacaaaaaaatattatttttatttacaaaacttttatatattttcgtaaacagctattacatgtttgtatatattggttattgtatgcaaataaaattaacaaaatcaagtataatatattgggtgatctgcaaaaaaattgagaaagtagtacttaaatagtgtatttcacatgcgtataaaataaaatagtcacgtgtgcaacacactatttgaatcatatttttgacgtgttagatttttccgaatcacttaaaattttataaaatgtcttaaataactgtaacgtacttaacaatgaaaaaaattaactaaaaaattatttcgaataccaaaacagataatacatttttttatgggattgcattatagaattttctaatatatttgcaatcaaatttttacatgaaaaatccattttacacaatttattacaaaattactcatacacgcttatacctacttttttacttacaaagtttgttttattacacatataccacttagtcatcattccatccatcatcaatcaaatcctactctcttccctctcttttttcattttctatcaatcaatccatcatttcactctctttttttcttcttttctttttatttttaattttatttcagtt

SEQ ID NO: 366296 - DNA, 509 bp, Cannabis indica
aaggccaatccccaagcaaacttcgactaccttggaacttccaaagacatgtttctcgattactgcatggcacaagcggccaatgagaaccctgaggcaaccacttccacttctcctaccgaccaaaatattgaggctccttctgcgcagaccgataatcctctggcccctttagacctagttgatccttacgaagagcctgagactcctgccgtttgattgccttctctttaccatcaccattttttttgtatgcgtcagtttggccagtaggcctttttttgagataaagtgaccggccaagaggtctttaaacttggaatatttttcatttttcaaacagctagctaactgggcagcctttaatcccgggttgaaattatttgttatccttaatgaattttgttccttatttatgatcattttgcaactatgttcgttttatttttaccaaatgctttgtacaggtataggtgccccccaagtgaccgagcagacttttgactctt

SEQ ID NO: 366297 - DNA, 1118 bp, Cannabis indica
ctttcaagtttcccatgtaagaatgctgtcttcacatccatttgatccatttctagattaaacatggccactttagtcatcattatccttattgatgtttgtctaaccacaggagagaaaatgtcattgaaatcaacaccttctctttgattgaatccctttgcaactagcctagccttaaatctgatttcttcacctggtagtccttccttttccctaaaaatccatttgcagcctatcaatttctgccctggtggtcttgtcacagttttccaagtcttgttcttgtgtagagaacttatttcttcattaattgcagcaagcctatttccttttattccttgagttgatggcttcttgatatgtactagggactgtagtgtcaatctcttctgctgatgcaagagcaaaggctgtgcaatcagcaaagccaaatctctctggtggtttgatttgtcttctttctctgtctctaaccagtaggtattcttgtgaatcatatggtaagttctcttcctcagttgcatgctcatcaatctctgaatgtgaatgttcttgagtatccacctgatctgtagtatctgcattttccctgctgctttgaatttctaaacctgttgtttctctgtcagtttgcttgtgatttgcagcaccagttttcatagccatttcatgttctttgaaaactacatctctgctaataatgcattttctgtgaccttcttctaaacaccacagtttgtatccttttaccccttcagggtaaccaaggaacaaacacttgagagcccttggctctagtttatcttgtctggtatgtgcaaaagctgtacaaccaaacactttgagatggtcaacagttggaacatgtccagtccagacttcttgtggtgttttgaactttagggctgtggatggacacctgtttattagatagcatgcagtcttcaatgcttctccccaaaatttcttgtcaagtgcagcaccttttagcatgcacctcactctttccaatagagttctattcatcctttcagcaagtccattttgttgtggattcttcacaacagttttgtgtctatcaattccttctaattgacagaacctattgaactcat

SEQ ID NO: 366298 - DNA, 746 bp, Cannabis indica
ttcttcacagtcttacacactatgattgagtactagacttgctatgggtgggcatgcactcaatcactaaggctcgaaaattttatgtagaacactcaagaattttgaaattagaaggaaaaagaagaagaagtctcaagaactctctagttgtctgacaagttgtaaactaggctatgagtcattagttggattatgtcaccatcctattctatatactaattcacttagggttaggattgaattatatagaataaaaaatgataaaataatagcaaaattagggacctagtggccgaccatgtatgtgagccacactaattatattttttccatttttaaactatttatctattatttcacaaattccatattttctaattttaatcttataagtgtcaaaactatttatttaataattataattaataatcaaataaaatttttatttatcttatttaataattagactctacaaattccattaattaacaaataaaccctaaaatccatttccttcataattaagccataacttagtgaaaattcataaataagacatagtctaattttagaattataattgatttattaaaattaattaatagagtcttacaagcagtattgtctcacctagtatggggactatggtttatataaacgagcttccaataagtagctctaaaatttatcaagtaaattttgtaacttattaattcctccttgcaccactatagattcgaaat

SEQ ID NO: 366299 - DNA, 352 bp, Cannabis indica
gggctgatttttttctttaattttgtggcctatctcggcaagcccaaataggaccgccgacattgggtacacaatcttgacagtcttagttcagccagtcgagattgggtccaacttttatatttttttttaaaaaaaatactttggtcaccattcttgacggtttagaatgggcctgccgttatagagaccaatcttgacggacacacgcgggcccgccgagattggtgtgccgagtttgcctatttttcttgtagtgctctatatagatgatttacactgtaaaaggattaaattaccgtaacaccctacaatgtattttatccttataacacttaaccctgtataaatg

SEQ ID NO: 366300 - DNA, 786 bp, Cannabis indica
tgtattctttatgattagagcttttgttgaatttgtaatattttctattttcttgacataatattttgttaaattttagattggaataataagaaattaaattgttatattttcttaaaatttacacctaacggtatcgtatttataaaaattttgaaaaaaattaaaacttaaatatttatgtcgtaaattattttaaaataataaaataaattaccgatctgataattacgcaaaataagaaatagagttattttttttctataaaaaaaaagaaaaaaaaaccaaaggtggttactagagggagcacgcttgagagaaatcatcatgcatataaaatagtggtcccatatttatatgtatttttttccttcttatattatatgtataatataatgtatgcacatgcatgacatatatatataaaccatgatataagcacatagtttatttcaacaaatctataataaatcatatcacttttacttttacagtaacagctctaaattgtagttacaacatttcattagttcttaagtagttctaaattaataatttaagatatcaaaaataaaatattaatttttggaaccctgaattttcctttaatggtaaacctatatatacaataatatatataatgatgcattttcttatataattgtgttgtgttgtgttgtgttggacagatagaatgaaagcagaagattttgggcttagtagtgacatacatttttttcaaattcctaccgactgtagtctaaagcaaacacccccaacgagtta

SEQ ID NO: 366301 - DNA, 1132 bp, Cannabis indica
gcatagtttaccctttgacccgaagcagcttcaaacaaattaagcaaacgaaggacattttgagcctcttcctcagtagcacgacagtaaatgtagctatcatcagcgaatagcatatgtgagatagttggagctccattagctactttacagcccttcaattcaccatttctttcgaattgcttgatcaaagaagaaaaaccttcagcacaaagaaggaataggtaaggtgacagggggtcaccttgtctaataccgcgagtcggagtaataggacccatactccgaccaccatggacaaccgtatacttcacattcatcactgttgccatcataagatcaacccaccgagggtggaagcccatacgaagcatcatagctttcaaaaaaccccattcaatgcgatcataagctttgcttaagtccaactttagagccataaatcccgtcttccctttacgcttgcgtttgaggtaatgcataacctcaaaagcaatcataatgttgtcagagataagacgccccgctatgaaagcagattgattttcagaaataacacaaggcaataaaggcttgagtcgattcgcgagtactttagacacaactttgtaagccacattacacaacgagataggccttaattcactcatagtggtaacatgctttttcttaggaatgagaacaatgttggtttgattcaaatcagcaggaaaagaacaagtctcaaagaagtcgacaacttgagatataacatccacaccaacaacatcccaatacttttgataaaacccaggtgtcattccatcaggtccaggcgacttatcaggatgcatttggaacaaagcttttctaatctcctcaggtgtaacttgttgtaacaaagagtcattctgagcattagtaatagtcggccgaataccacttaccacaggatcaaaattagagctagtggaagtaaatatatcagagaaataatcaacaataacatctgaaagacccccttcccaatcaacccacacgcctgaattatttaaaagaaagctaatggagttgtttttcttacgagcaatagcctttgaatggaagaatttgctattttgatcaccctcacgaagccaaagttgtttagacc

SEQ ID NO: 366302 - DNA, 756 bp, Cannabis indica
catactttttcataaattactaatttagttacaattgttaaaatgtggaaaaactgtaatgtcgcttttatttataaacataaaatatttcatatttgagctcagtttggacttaaaagacataataattaataaataaaaacaaccgcgacattaatttaataacacttaatataataaatggagcttgccctagaccaccctcaattatatggtcctcaacgagtacacacacaagcctctaaggtctcacttgccagtggctttttaatttttacaaccttaatctgcacatggtaagtttgatgagggtgagctactaaactcagtaagaaaatacttgtcaatcacataaaataaaagaaaacatataattaaaacttagatgcacatatttagacaaatagcaatatatataagcttaatcttgtcactagtaattaatcactagtttctaagttaagtcacataataatgattacgcccaagtccgactttggcaaataaacccgagctattggactaaattgcgcagggctgagttcagtaaaatcgtacccactactaaatggccccctatctaacatatagacccaaacagtcaagtatttaaccattatcttctcggtcaaaccatgtcacataaactataatctatctaatttaaataatgtcaaaaaactatacattatttaaataacacaacaatcataactaaataatgtgaatcttaaaaacacactatttacatacata

SEQ ID NO: 366303 - DNA, 786 bp, Cannabis indica
attagggcgttacaactcctctcatcctgaagactgttaacttcagcagataagatctcgatggtctcctcaaagcgatcagcagctttgaggtcctttgttagcacagagatcttcttctcggtagcaaacagcttcttgttggcttcgcccaactccagccgaacagctccagtttccgccctggcctcctcagcttcctttttggccaagtccgcctctgccctcaaggtgtcggacagagccgcactcttggaagtagtagatttagcccgggagtaatgtaagccaacttcaaactcgcctgcacaaaggaaaatgtcagcatatggagctaagtgtagaaagctaaaagggaagtatcaaaaaagacttaccctggtgagctccttcaggactccgcccaccaacacatctagagatgagtcactatcagcaccagccagttgctcactgacctcaggaaccagccggttcatatagtgggccagcatctccttgccctttttggcctctggtagcacgggcaaaggtggagttggtgcctgcacccgcccaggaataatcctgaccagctcagacccagtcgttggtggtccagactctttggacttggtagatttgggggtagaaggatttgcagcagtcagctcctcggaaaggtcaataacctctccacaaggtctcttctccaggacccttcaccgcccctagactttttggccagaggcttccgccctgttgcaaaaattattaattactacgcaagtgcacgcaatcaagtag

SEQ ID NO: 366304 - DNA, 619 bp, Cannabis indica
acaagattgtgggacaagtgggagcccctttacaagtcgatcctgtaaccaaggaaaggaacaagctgaactatcctagagtattgatagaagtgtcgataaaacaggagtttcccggtctaattcaatttgaagatgagcatggttttgtagttactacagcagtcacttatgagtggaaaccggttcaatgcaatcattgcaaaggacttggtcatgaaatgattgaatgtcgcaagaaggatgggaataagcaacaatgggtagtaaaggagagtaaaccagcagcaccagcacggatgataggtggatacagatggatttcaggcagtaaaaaagggagcaaaggcaagaatattgcagaaacagatgggccaaaagtgactaatgcctttgttgtgttatctgacagattctcgagtttggatatgccaggaacttcacaagtacattcagtaccagtagcagaatatggggatggacatattggaaagaatagaggagggggagtgcctccgtgtgggaaatgggataaaataggtaagttggaacgtccgagggatcgaatgtcaagataagcagaatcaagtaagagtatgattagtactcataaagctgg

SEQ ID NO: 366305 - DNA, 743 bp, Cannabis indica
gaaaaaagttgaccatataacaacaatacatagaccacatgctcctttgctagatgattcacaagtttatggaagagaaaatgataaagaggctattcttaagttattgttgtgtgatggtgatgatgatagctcaaggatctcagtgattcctataattgggatgggtggaattggcaaaaccactcttactcaaaacgtatattacgatgtcgctgtccaagatcactttgccttgaaagtatggataactgtgtctgatgattttgatgttcttacaataacaaaacttattttggagaagatcaccgaaaaagaatgtaaatcaaatgagctacaccaacttcagaaagacttgaaagatgctttggcaaggaagaaatttctttttgtcctcgatgatgtatggaatgaaaaatacgatttgtgggatcttttgaaaagctcttttcaatctggtgcaaaaggaagcaaggttattgtaaccacacgtaatgaagacattgcattgaagatgaagacgagaaatgttcaaatttatgagcttaaaaccatgtctgatgatggatgttggcagttatttgaagagcatgcctttgataatgttgaccgtaacaagaagctattgttggagcagttgcaagatattggaagaaaaattgtcaagaagtgcaagggccttcctttagctgtaaaatcaatggctggtcttttacgatctatgcgaacttgtgaagattgga

SEQ ID NO: 366306 - DNA, 923 bp, Cannabis indica
aaaaaaaaaaaaactgaaaaacgggttagtcggtttgggcgggttcattgggcggtttgggtcaaaattcaacccgcccaatttacagattgggcggtttagaattttgtcaagttatgtcggtttgtattttttttcggttttgtcggtttggtttagtcgggttattcgggttgggcggtttacgaaaatttctgtacagccctactaaaaaccaatatcaacatcattctgattttagtagttgctaattattttatttttttgttttttttattaattttgtcatctaaattgttctcacttggagcaatattaggaaaagccaaatacaatcatgatgggttatgtactagaaaatgttgcagtttaatgtgtatgtgatagaaacatttcataattagtgtcttccaataataaattaatgagaaaatataatgcaagaataatgaataatcaaaattaatatttgtaacatcttgtttactaaaattatctagaaatagaataataataataataataataataatattaataataataataataataatttatcttgtttattttattaggaaattagtataaaacttgcgtttcgtagcagttgttttaaaaatttataaattatatatatgaaataaattatgtattttatttgatgataactaagtaataaaattagagcaattagcggcataagtacttaaaatttcaaatttgtaagtgtcataaactcaatgtttatttttagcggcataagtacctaatgtttgtaaactgtaatttttctataatttcgccagtacaaactctgttattttcttaaacagaccatatataagttccagattctagatcattgggtctagacagaaaatatgtagtatcagttacttccaaatgttcctttaataaat

SEQ ID NO: 366307 - DNA, 715 bp, Cannabis indica
ctctcaagctctctcttcctctctctcgaaatcctagggggctgctagggtgaattgtcttcttcaattcagcaagatttcaacaagttttggtgttattctagttgaggtaattgttgatcaagctcctatttgctttcttggaactttaagatttgagagtttttgcatgttagtgaattttggggctgtgattattttttgtgttcgcttttgatttctgaagtttagttatgttttaaaatgatgattcaagcaagtttttatggttgttagttggatttaatctattatggagttttagactcaaaacttggtttttatggtaaaataaggaattttgttgctgtgtttgtggtggttgttttctgttgtttgcagaagcttagttatgcatatttaagtagatttaagcaggttgtgatgcatgtttattagatttaaccaagcttgagttttgaactcaaagcttggagctcacatggtggtttttgttttagtgcatgaagctttgttttaatgctttggaatcgttatttggggtatttagaacaggtctggaaggtttgatagggtttgggtttgatttgaatgagatatgaatttttgaaaattcctgtactaaactggaatttcggttccgggaagccattagcaaccggtcgaccggttggggcttcaaggaaatttccagaaccggaatttcggttgtaga

SEQ ID NO: 366308 - DNA, 542 bp, Cannabis indica
atactttataaagcatccttaacacttgttaattaccaacgagtttctaatgtcactgtcatttcctgatgaaccagctgataagtaagaagtctagcagcggtttcaaatgagaataataactctttcttaataacggtaattaccgtaacaattgacttttcttaccgtagtctaaagtcaggtgtgcgggccgaactgagtggaatggtgctcgacgatcttgggcactatgtcacgacaacagaaacttgatgaataacttaatcaaacttgaaataggccctaaacttaaaaaattgatcaaacccctatcgataatagcttggaataacctaaatatagataaaacacagaaacctaggtactggaaaaacaccccaaacagcgtaccattttcaaaaaattgggtttcccgctgggtcaaatggttaaacgtttccacagtattctatagagacagttaaccatttcccactacaaaaacaaccaaaccttggtttttgtgtcaaaactaacccaaaactcctctaaacctaatc

SEQ ID NO: 366309 - DNA, 421 bp, Cannabis indica
ttaaacccgtgagctgtgaactgcttggtgaaagatctcggtctgttaggcctattgcagtgaaggcctttttggataatagattcacagaactcccgttgtcgatcaagactctggccacgatcttattggcaatgggagtctctatgaccaaggggtcttggtgaggaaaacgcactgtcttagcgtcctcttctgtgaatgtaatgggctagtccattagccgaggcctttgagctgggagttgagtaacctcccaaacctcatcgtgtttcacggcccatgcgtaccgtttgagctccttacaggtagttcctccgatgtggggtcctcccgagatcatggccactctcccgttgggtcttggcggcaggcttagaatatgctgggcatctccggggggagcaactgtggccaaagc

SEQ ID NO: 366310 - DNA, 523 bp, Cannabis indica
atcctgacccatactcaaactttgacccgcactcgggtccccaacatggacctggacctgaatctagacccagatcggggtttagacttggacacaaacccagacatagactgaaacccaaactcaaacccacacatagaatcagacccaaagctagacccggacacggttccaaatttgaacccacaccaggattagaacaagggacttagaccctgatctgaagccagactaagatcaggattggaactttagactcggaccgaacctagacgaagacccaggacgcgaatccacacccggaggctgatattgacctagattgccatccggacccgagctcaaacccagaccaggaccaggaccaggatctaaacccaaacccaaagtcaggtcaaaacccaaacagatacctaaacccgaacagagactaggactcgaacccgatcctataccgggacccaaactcacacaataatcaggacctggacctagaatcaggatagggacctgggaaacagaa

SEQ ID NO: 366311 - DNA, 850 bp, Cannabis indica
actagaaccaaactaggaccaggaccaggaccaggacctaaacccaaacccgaacccagatcaaaacccagacagagacctaaacccgaaccgagactaggactcgaacccgaacctagaccgggacccaaactcacacaataatcaggacctggacctagaatcaggatagggacctgggaaacagaactacgaccgggacctagtacttgaaccaaacctgaacttgaatcttggacccagctcgtgacccgacactagaaatggtgccagactgggactcgagatcgggatccggatctggacacatagattgcacaaaagacgaaccctgacaaggaccagaacccacacctggacatgaacccagccccaagcccaaaagttgacctgaacccctaccctgtgatctaaaattggaacaaaaatcggaagttgatcgggactggaactaggacttagacttggaatcataactgaaattggagctagatcaagaaccgtaaccggaccagcacccggactcaaaattagaccaacacacgaattaggagccggacccggatcccaacccaaaaatggactcgagaccggaacccgaacctaaactcagacccaaacatggaaccagactagggacacaaaaccagtgtcgggacctagaaccgcacactagtgacagtgatccagatcttcactagggattcaggtaacgagtcctggaacagaccagtagacgttgtctagatctgggactcagactaggaccagaacccagacgaagaactaaacccgaacccagacctagacttgggacgcaaaattagaacctgaacaagaatcgccgaac

SEQ ID NO: 366312 - DNA, 654 bp, Cannabis indica
cgaatgcttgcttctcagagcaaggagaaaaatgttatgctgatcccaaatgctgggacattacatttcaatcagaaaataatgtcttcttgcgagtttcaccaacgaaaggaatcaagtgctttagaaagaaaggcaagttaagtcctaagtttattggaccttttgaaatacttgagaaggttggacaggttgcttaccggttagccttacctccaacattgtcagatgtacacaatgtatttcatgtttcaatgttaaggaagtatgtatctgatccaatgcatatcctgagttatgaagcattgaagttacaactagacctttcttatgaagaacatctagtactaattctgaataggaaagagaaagtccttcgaagcaaacccataatattggttaaagtacactggagaaatagtaaagtggaagaagccacttgggaattggagtctgacttgaggactcagcatccagagttgttcaggttagatttcaaggatgaaatctttttaacagggggatgattgtaaagaccgcttaaaatcaatatcaaggattattgaataattagggttaattacaatattgagtttttaattatgatttgcatgtttgtggagatttatttaaatttagaatgtattaattatg

SEQ ID NO: 366313 - DNA, 539 bp, Cannabis indica
cgatcaaggtgctaaccaaccacccgctccagcaagtcctccaaaaacctgaagcatccggaaggctcctcaagtgggcaatggagttaagtcaatttgacttgcactacattcacttaatctccataaaaggccaggccttggcagacttcattactgaatgcaacgaagccgaggcaaccgcaaatatgccagtaccaccgatccccacatggagagtgtttgtggacggagcctccaatgaaaatgggtccggagcaggagtggcaatgatatctccgaccggactgcgactccaggcggccctacggttcgacctcccagctttgaacaatgaagccgaatatgaagccctaatagcaaggctgaaattagcaaaagtcgtaggagccaaaagagtggaagtctacagtgattcccaactggtcgtgaatcagatatcgggagagtaccaaacacgcggcgagcgaatggccgcatatgtaacaatagtctgggagctactccacgagttcacggactacaaaaaagaaagaatc

SEQ ID NO: 366314 - DNA, 477 bp, Cannabis indica
tggagggcccgtatccttcgcggaagcataaggtcccatcttctataatggaaagagttgttggctcgcgggcatctctctcgtggcctgggaagatttctctcgtggaggttagctccgtgaaattggggcctctctcctccgggagcatggagcaaggcactttggcagcttaatgactccttgacctttcccgattgattcccacgtgtcatgtttgcgaagatgcagataacatgtatatcttggcaaatataaatagaggattgctaaaagatatcactggtgcctaacacttagggatgcatatttcttctatggagatgggtcccgcggggacccgctcctaatggggcggggattctctgtttaaatgagaaacgaggcggggatgaagattactttttgtccccgaatgttaaatggggcgggaacagggatcacactccctactccgacagagacccgtttagtatt

SEQ ID NO: 366315 - DNA, 830 bp, Cannabis indica
ttgtatccgatagaggttcgatcaccataagagtttttgaagttgaagagtttgattgatggcagccgttcctggagggataaactctaaagcctgtttagctcttatgagttcagctgaaagcttgtagatctcattgtccttctcatcaagaagtttgttgagattcttaacagtgtcctccagcttgactttttcagactctatctgctccttggcactattcagacctctaatctgcttggtcatatattcccattgagcaaacatctcttcatatgcattttgtcttccattactgtcgacttcagacacagtggagactccatcatcctcagattcaacagactgatgactttgagccatgaaagccactacctgtttatcctcattagaacttttgcttgcaatagagtctttttcttcgtcactatcgctccaggtggcaacaagggctttcttctttttgagagtgttggcacactcggcctgaatgtgtccgaacccatcacattctctacactgaatgcccatgctcttattgtcactgggttgctgaccatgccagaagttcccaagaggatttcttttggaagcattttccttaccctcagaacacagtttcttgtacttctttttcaagaattttgcatagttcttggtcagcaaatctacagcttcatctgagaaaccagcagacaaatctgggatagacttcttttcttctttgtgaatgaacgcaatattgttgtcccctttttctttgttcacatccttcttctttttttctttcttccaccttgttaatgacatttcataattctgcaagg

SEQ ID NO: 366316 - DNA, 636 bp, Cannabis indica
ttaatggtgtgtttctttactctcttttttcataccttttggattaatagggagctacgatcctcaattttgtcaactcatttgtactacgatctccaacaatcaaacagcaattacatgttttgttatgtgaatgtttttatttcgaagtttgtcgattggttgttaatttaatacctgtttcaatttgaatttgaattcagtagggagctcgatccgatcaacaatgtctcgtatatttattgaatgctctgcaacattcaaattacaattttagaagaaggtttgttgatacctcagttatttatgagattatagtatagaatcgttgatacctctgtgtaagcagttttgatcaatgagtaattgctcttgatgaattcacctctgttgatgtttttttgttgtttctgtgggtctgattgttagagtagaaaggttctttgttgatttttcattgaaatgttgttgaatctttgtttcagcaagctttgtcgagcatcaatggatgctctattttttttttcagtcggactatcaatggtgttgaagaagctaataccgtgttttatgtaatttagattacacttaccgtatataaagttgtaatttggggtgtaaccgtatatttgttaa

SEQ ID NO: 366317 - DNA, 752 bp, Cannabis indica
tgtgatcatatcccaatttaatccaaaattcacactccaaaaaaccttcagaatcaagttgtcctcaatttcaagccttagtttataaacctgaaaccatacttgaaattaatgatgcaaaaatcgggaaccacctcattaggtctaacaagaaggaaattttgaaccaccataggcgattcttacaagaattcattgagggtatgcactgttacttgcgagaagcagtgtggcttgaatcatctagtttagttaatattacaaaagcaaggccaatgtcttatagccagtcaatgttgctttttcaccaggtgacttggaatttgaattaatggctcataaagctcgcaaatccaagactctgcagaacccttctgtcacttttgagacacaattgattgaatctagggtcatatctatttccccttatgttggggatgtcttaaagtcttgtggtataaggaatgagaaaggatgttgttgtcgagtgaatttcgcaacaccaattttatatgatattattaatagcagaaagaaatctatatgaagaacaagtgcgagtattcaacctagagtggcgagtactcaaactgggaatgagaaatgattaacagaaagctggaaataacaatgagacaaagaattatagtagttcagtcagatcacggtctgcttagtccactgtagcaagagtttcgtaggttccatttcacggtgcatcacccctttatatacaaagcaggtgtccgatc

SEQ ID NO: 366318 - DNA, 788 bp, Cannabis indica
atagtgattacatgattaaaatctggagtaatatcactactcctgataacacgatcaacaactaaataggatgctcgagctaagaaatgagcaacactatttgcagattgtctaataaaattgacataaacatctcgcaagtcatttaacatcacttacaatcagaaataatactcccaaagtatgaaaccataggaatagagctacgtagcgcttgcaccatagtaagactatcagtttcaatgacaaccttcctccaatctttccgtttaacccaactcggtgcctcctaacacccaaagcttccaccatttcgggttgcaacacccctgactgacaacaggtaaaagcttccactaatgcgtcattttcatccctaatcacccctgcaaagctataaattgcagttcttgaaaaaatgacaacatctacattaatgttcaatgtgttttcagttggtttggcccaagtttcagcaccatcgacatcagtaaggaatgcagccgtaggagtaaatgttgaatcttgagcccgagtccaatctgcgagtaaagcttgagctaagtgagcaacactcgcaatagtaggggacttatcagaccatactagctcatttcgatgtttccgaattgcccaacatgtcattgcgatcaacctccttttctcctcattcgcctgctgtagaaccatagcaaaccaattggcaaaagaaccaattgtcgtcaaattaacaccagcagccaactgttgccaacacgctttggcaaaagagcaatccaccaagcaat

SEQ ID NO: 366319 - DNA, 804 bp, Cannabis indica
tcgggtcataattaccaaaatgcccctggctcaccaacggggtcttaacatgttaaaatttcatataatttcacatatattgaactatataataatataattcctcaattaactcataattatctagttagggttttgctaatccttttcttaatcccgggtattacaatatgatgcaaaatggagactcactaactgcattatgtttctttctgagttccaagtagaacaacagtgagttgtcacttattattttcattggtggtgagcctgggcataactggtaatgcatttctattggagtgtttcatttgatttcattctttactaatttcaacaaactgtttagctgacaattggttggtattagtagtccagtcattatgtagttcatattttttctcctcttttcattgccctttatattggaccacacacattattgagtctattcatgtataatatttgaaaacaaatagttaaaaattatgatttattaagaaattaatttctttttttttattattttttaaattatatgtcttcattttaccatttagttaagaaatcggtttctaataagttttttctttgtttatgtttaatagataaattataataatcggttattgatttatattattcagtaacttttttgattatgagtgtatatgtctaaaattaaatgtttcatttttagtgtaaatggtagttagtttgtgaatttttatagtctcaatcaatatttatttagaataattatcttttttaccccctgtacttatgacactatactattatgcc

SEQ ID NO: 366320 - DNA, 737 bp, Cannabis indica
actttcgagcagcagctctagcgctaccttggagaacctaccagctacaaaatggcagcaaaggatcctatatggcaaaaaacctatggatactgaaactgatgctcttgaagccaatgacacttggatcgttgtcactcttcctgatggtcaccatgccattggctgaaaatgggtatacagaataaaatacaatgctgatggctccgttgatcgatgtaaagctcgattggttgccaaaggtttcaaccaaaaacaaggtattgattatcttcacacttttgcccctgttgcaaagtttaataccttaaaactcatgctcgctattgcggccattaacaatcggtctctgtaccaacttgatataaacaataccttccttcatggcgatttaaatgaaactgtctatatgacactcccaaaagggtataaacccaagggacaaattcccccaaatgttgtttgtaagttaaccaaaagtctttatggcttgaaacaagcctctagacaatggtacacaaaactcagcaattatcttctatctactggtttcacccagtctctttctgatcacacactgttcatcaaaaataataaaggcctttttctcgccctattaatctatgttgatgacattgtaattacctctaataatgatgatgttgtttctagattttaaactagcaacttaactctgtgtttcaacttaaagacctgggtcctttacattttttctt

SEQ ID NO: 366321 - DNA, 499 bp, Cannabis indica
gtttggtgttgtgatgttttttcagttttactagctctaacgacaatttatattgggaaggtatctttcaatgtgatgggatattgtttgacttcgttatagctgtattgtctaaatttctgggggcagttttgtcccatgcggctcggaataagaattttgcagtgcttggtttgacaaagcatgcccttcggttagacaatgagctatcatggttcaaggaggtgtcgtcgccaattgaggattgctgctttgttaatcatgtgtgattttattcaccgcgtcaaaaaaaaaatgttgtttttgattttgaatatattatatgatgatggtaaaaaattatgggtttcacataataaaatgaccatcttaaaaataaatagaagttttgaacttaaagaattaacaatgtagctgttattttttaattttaaaattgtaatgaaaagagataaaaaaatatatataaaaaaatatttgagtttaaaatttagttatt

SEQ ID NO: 366322 - DNA, 820 bp, Cannabis indica
aggtaattgtttttaagttgattataattaaaaaaaagttgtacaaaaattaagctcaaggttcttatttttactattttagaaaaatacagggtccattttgtcatttaacaaaacacagggaccagttagtaacttttgcaaaacacaggatccaaaatggtatttaccctaatttattttatttcaaattatatcctttttatttgaaataacaaattctatggctaatctatatgcaaccatacatatatttttaagaaaaatactaaagggctattaaagtgtcaacgatcggtcctaaggtatataatttagaacccctatatataatttaactattatgaaaatgatatttctagtattttagtgtaatgataaaacttttaaaaactcttaaaaactcttaagaactcttcataactacattaaatattttttaaaaaaataaaaaagtagaagttggaaattgatccattctctttttttaaagtaaaactttttaccactacactaaacaatttttgctatagtttttttttatttaatattttatctatatattaatattttttttttttacaattttagggtcttaagcattcatagaccggaaacgcactcctaacttatctacccttagagctagcccgagtgtcaagcatgacatatatcttattgctgctacattacaatatcggtcgggttttatatgttaatttaataaatactataaagaactaggttcgtttgaaacgtcgtgtgtattgtattgtattatattgaattagattatataatactatgttaaactttaatt

SEQ ID NO: 366323 - DNA, 550 bp, Cannabis indica
tggtggaaaattgagcaagaaatggagggtttggggtgaattggtacaaaccggctagccggtttgccagacctgtaaaactggctagccggctttggtaggatccccaaacgctttgttttctcaattttcgtccatttcaatgccgtggttaggtgttttcctaattccaaagtttgtataatcccttgagagtgtaacagaacctagtgttatggttttgggtttccctgggattaggattttaatcatgtaagcttatccggtttcataatgtgattagggcatcaatctagcacgagactttccgttcaggtcggccagcacacttgaattcgggaagaaagtaagaactgtatataatgtgtgatatggatatgcgaatgtatgtatatttttagtgtatatgcatgcttatatgttgtgattcatacaccaccaacacttgtacagttgcggtacagagtgcattggtaaagtgtatgatgtctgaaagtacatcgtggtgttaccagcacttgtacggaaaggtgcaaggtgtctgtggtac

SEQ ID NO: 366324 - DNA, 539 bp, Cannabis indica
aagtgatcactggggtcggagttcccagtatatgccgccatttcgggcattttgaagtttttagggagctccgcctccaggatatgtttggcacaaggctcccgatcctcactgtccgagtcggagtcatctcccttctgcctccgggagactcgggcaatatcttttcgaagtatggcaagctctgccataatcccttcgtttacagtacccgaggagactacgggtctgtatcttttttggtcaaggtgatcccggaggtcaccttgattcccattgatttgatttctcagatcaatgggtggacatctctgtcctcctcttcctctaccccctggttcctggtgcacggaaacgcttttccggtcccctcgatcctgagggccaagactccctctttggggcttgcccctctgcggacctttccctttagggaaatccgagcggacctttcgcggatcctgcgcctttttctttcgaccaggggcagaagtagggttttttgtttggttttcctcagcagggtgccttatagggct

SEQ ID NO: 366325 - DNA, 834 bp, Cannabis indica
cttgggaacagctgtctaagaacttaaaaaacagttccaggccacaagggataggtgacccgaggcatcctcgctaactaatattaagcaacagccaggtgagacacttaaagcatatttaagagttagaaatctggatgatagtacgcaactcactgcccttcaggcagggatcactaccgatctatccaccgctggaggtgaattgtgggaagacctacagggtcgtccagtgaagaacatcactgagttcaacgagaaggctcaggtgttcatccggaaagaggaagctcgaaaggagatgaacttgttaaaaactggctcgggaggcaaacctagtaatgtttcaacaagtactgtctcaactagagttgataactcaggggcctctagctcaaagagaaaagatgattctaaggggtcgtcaaaggacaaaaagaaacaaaagaagaacgataagtacgtgccggtttatactatttataccaagcttaatgaaactcaggaaaatatttacctcgcacatgagcacaaggttaccttcagcaagcctgagcccatgaggcatgcgaggaataaaagagatcctaccaggtattgtataaaccataaggacgttgggcacacaacagacgagtgccgtcagttgaaagatgagatataaagtctcaccgctcggggccacttcaagcagtatgtaaagagacatggcaatggacataacaagcccaatcagcccaaaagcctaacaaccaggggtacaacgtcctcctgtgaaggagaggacatcttggtatttcgggagggctgcatattgcaggagagagcaacaac

SEQ ID NO: 366326 - DNA, 857 bp, Cannabis indica
ttatgctctaaatgagagtttatgtttctttttattttatgctagaattgagtaactgatcaacatagaaattttaagaaatttggtattaaacaagttaaatttagaattgaacgtaccacgtagcatcaaaaccattgtcaacaagttgaaggtgattgagactctaaatgtcttgcgcaagatttgttgattgcttccacttcgataacgtctcttacttattccctagtttgagtgtccgtgacgaagcatgtcatagtcaaactctcacacaggaactaggaaccattgggaggtgtagcctcgtgatcgtcaaattgttgacttgataagttgtacctgggaaggtagtcgacggcagagctgtcgactctccaatgcttaagtcattagagtgattaagataaaagaaagtgaaaaagcgtaaagtgttgaatacattacagattctttatcgtgacctagcttcctcatgatttgatttgcgtctgatagtatactgaacccatagattgattagtgctcataacttgtgcgcttatgattaggaatgaccgctagtttgtcaattatagatttcgaaggatttcctcatctatgtgattgggctggagtcgacgtccgatgcttaagtcagtatattattcatagaaaatattaggggtgttcatcaaaccgctcaaactgtccgcaccgaaccacatcgcaaaaaaaaatgagatttgaaattcatcgcggtggggtcgcagtttgaatttttcctaaaccgcgcggtgtggtgcagtttgcgattttgaattgataatatgcggttcaaactgttggaaattgttttaccatgatcttagatctac

SEQ ID NO: 366327 - DNA, 769 bp, Cannabis indica
ctagtagcccatcacgaaagaactggacagttaagcgtgcttgacctggggtaatttcagaatcggtgacctcttaggaaattttctcaaaaagcgtgcgagtgaggacaaagcacgataaaaatactcgtgttggtctgtaaggccagttatcaatccatgaaggagctagagtagcgtacccatttataagagcatgagtctatgagagaaggcccaatggaggcttgaagcagggacattacacttatcaattttctattctttttagtattgagagactcaaattcggtaagaaaagatcactccatcatgagtaaaaaatagaaaaataaaattaagaaaagttaagtagtaaattcaattataaaattaagagaaatagtttaggatagatatagtgtatgatatatactatttttaaaatatacttaattttttaaaaataatttttttaatgtgatatatagttttaaaatgtaatatttgagatttgggttgcgtttttttttcttttcaaattaacttaaatatttaatattacttaaaaaaatgtgaaaaaaaaaagagagaaaggattatagtagaatgaagccaatttaaagtgtcatgtcaccgcataatactttaactttttttaaatgcagtgattagaatactcatgaatttacgatctagatatccacaaattgcgtgagaacctcctcgaactgttggaaattatttttaccaggatcttagatctactcacaagtatgttgtttaaaca

SEQ ID NO: 366328 - DNA, 675 bp, Cannabis indica
tggatcttcgtctgtttcacccaagggatgacattcgggggttgctgcacaacagattgataggcctttcgtatcagcacagtggcttgccgactacgattgtcaatctccgcatgatgagcccttaacgcttccatctctttttccctccattcaacaaacatgcacctctgctcttcggatgcgagatttatcacagcgcggagttcctcctgatcatgatgtagggtgttggtatgaccctgcatgagtccaagagcagcacggaggttctggatcggggtgtcatctccaatggttgtttaaacattggtggcggatggaatggctgtgctatgaatgccttggtcggctgctgaactggtattcccagtctcttgcacaccaggcgcaatctcaaccacaggagtcgtcaaaccacgacctgcagttgatggctgtaaaggattaacagctggcagaacccttgtgttccctgggttttgcagtgcaggatccaccgtctgtggatttgccgaatcaaccatgcccctacgagtttgtactaccatcatacttgtgattaaatttagaatgaagagcgatcattaattctgctctcaatgacagcaccaaaatgttgaccttgcttttagccaacgacagtgagtcaatttttgaaagcgacaagtagtt

SEQ ID NO: 366329 - DNA, 564 bp, Cannabis indica
agtttctacagcttgttaatcacaattttgtatggagctttcaaaattgaagcattcttggagctaacttgatgatgaactccacgtcattatctaaggttatcccgggtagatctcttaaaagaccttttggaattcacagattatgtgcgtgtttttcattgttagttgtgtctccagtgctttgtgcactacattggccaacaacgcttgacaccatactttccttatctagctaatctttaaggatgagattaaagaaattcataaggctagcttaacttctttgaaagtaatctggtcttcggcctttgttcccaaaagcgaccaaatactttcagcaatagatgaatggatagccaatccatatcaagtgcagcgtcatgattcttcatttccagctctatcaagtcattcgtcagttgtcttttattgagttccgtatatcctaatatgggtgctacgatccttcgtcgttccttcccctctaatggattagagcctccttcaaatgtcgatgtttttttttattaatcctttcatatgatggctcaaagcagtgtg

SEQ ID NO: 366330 - DNA, 865 bp, Cannabis indica
aagaatggtttatccagcttgcttgcattctttttgaaggttgctttcaggttgcttaacaggtggtatacacaatagccatgcattatttctagaaatacatgagcagctgcctttattatgctctcatgtctgtctgagatcaagcactattcttctctgatcccatatgtttcccttaattttgtgaaaaactattgccatgagttgttgttttttgaatccaccacagaaaaagctaggggaaaaatatgtctatttgcatcctgtgtacaagtagagagcaatgtccctccatatgttaatttaaggaaagttccatcaataactattatgggtttgtacttctttcatccttttattgaattgaagctgttatcttcttctgtttgtatgtgtataattgttcctggattagttttctgcagcatgtgcaaaaaacttggcagtagcttgtatgatttgtttgctttttctcgtaattcttcttgcgtgtactctttgcttcttcatgctttcatgtagttcattcttacgccatacttatgtttcattctcctctgatgtcttatggcgtttgagttgtttttatgttagtaaaccttggcttgatgtaaaaacaatcaactttgttgtaggatgtctttgtctgcaaatcttatgtttataccacaagtgtgaatcacctttctgtcatatttacgaattatgaatgacttggttggtctgtttctagatgccgtgagtgcccacttgcattttggatccaagcaacaaattttgtatgttcttgcgcaagactttttgaccttgaattggaagttgtttctaattgcatgaaactaagcacactttgtagtgtttc

SEQ ID NO: 366331 - DNA, 874 bp, Cannabis indica
tttagttaaaaaaaattaaattatttaaatttttaatttggaaaaacattttattttttcaattttgaaaaaatataaataaaaatacagcgattaaatcctatgcgtacacgtgtaccgttactcatactaacggatgtagtatgaacggacaaacacgagagtccagcttaggtactattgccgctattattggagcttggggattaatctgcatcaacatgaactatttggggacttttaccgcaaatatccctattaattaaattaaaataaacataaaatgctataacacacaggctgttctacaagccaggccctgaaaatatatgggcctaagacgaattaaattttgagaccctaaaaaatatatataaaaaaatataaaagaaaagtgctatgggatttgaaccatgaccttatacattattccatcgacataggtttgataacttttcatacaaaaattacttcaaataattaacaattccaaaagttacccaacataatctcacatgccaccatttaaatgattaaatactataaaataatatgataaagtaatttttttgaaaaaacaaaagaaaaggataaaataatttcacatgacttgttgctaaatataggcaatggtgttaataaaattgtattaaaaataataatcacattacatatatgtggaaagaataactccatgggcaaccctcattggagatgttgttagtctagattgggtgggctttaggaatttatgaagagtttttttaacaaaaatacttgattttaagcaaaagtttacaattttactgtcatacggaattttttacaaaagtattctctttttataaaacaaccgtaaaataacgaaacagaa

SEQ ID NO: 366332 - DNA, 696 bp, Cannabis indica
tttgaatcacgtcagcatctttccgcgggaatttgagcacgggctctgggcagcacgatcgtcttgacattctgatcgtctactctctccttctgttcagataatttcttaggtcatgagtcgcccccaacctttcaaatacagaagcgactggctgtcttagcgattgatttgattggttgacaggtggaatggcaccattgatctggttggaaccatcaggtataatctctcccgatgaattactagacaaggtttgcccgcctatcgctaggcccatgagtggaactcgtgaccggggattgggcaactgaccgtttgcagtctgggaagtattcatcgttggatcttcttccgtctcacccagggggatgacatttggaggtttctgacttacagtttggtaggcttttcgtatcagcacggtagcttgccgactacgattttcaatctctgtttgatgagcccttaacgcctccatctctctgtctctccactcggtaaacatacgcctttgttcttcgaatgcgagatttaccgcagcgcggagttcttcctgatcatgatgtagggtattgttatgacctgcatgagtccaagagcgtctcggagattttgtaactcagtagcatcttcgatggtcgtctgggtgttggttccaggcagaacggtcgtgttatgaatgccttggttggg

SEQ ID NO: 366333 - DNA, 873 bp, Cannabis indica
gtgcctttcacaactggggcactctgggtacaaaaaacgggtctcagcactaccctgccgaccgcctcgactctggttcccccggaacctcttgttctgcctcgagccaccggatgcagtggatgttttcctcttctgatccatggccgaaccactacctcccctgctaaagcctgatgcaggaggggtaggagccccgccactcactggagtcctaactgactccgacatacatccaactgcgccctcagctcgcagtgctttttccaccatctccgcataggtggtcttgtcgtctgtagtgatcattaggtcatgcttgatcttcacatttagtccatccaaatacttttcctttttactgaagtcggttggcacgattcccgaggccaaccttgccaaccgatcaaactgcgttgtgtattctgtcacactcatattttccttctgggttagatgggtgaactctttcctcttggcacttctgacggcctcattgtagtactttgcgttaaaaagttcctggaacttttcccaggtcatcgtagtgacatcatgtatctgggacaccatgtcccaccagaccaacgcatcctcctgaaactgaaaggtggcacacaccaccctgtcattcccggtgacacccatgaaattcaatattctcgtaatcactgttagccactgctcggctttcatgacatccggacctcccagaaaaaccggaggtgcctgcttgcggaacctttcatacaggggttccattctatttgtcgctactactagttcggcctggacaacaggggcaggtgccactggaacttctggcacaggcactccaggagcaccctaatgtctcaatctctgaatctcatt

SEQ ID NO: 366334 - DNA, 581 bp, Cannabis indica
tatatatttttaattaagtagctagattaagtataaaaattcaaatgatcaaaatctaatagtttaatatttttaaaattaatatttattgttaaatttatttagtaactatcaatgggtaatacttattgaaaagtgtttcattatttctcaatgaatattacctattagctattagtgggaacttttaaaaaataactaaaactaaaatttaatttgcactgtattggagttctcggaacttgtcctctgcagggagaagtatgttgattagctctgttcttatgaccatactacttactggagtcaaattttgcttcttccatcaaaggtagttcatgaaatagagaatatatgtagaagttacttatggaaaggtacaagccaaatggttcggtcaggaaacattgcttgggctaagatctgtaagccaaagtcagcaggagggattgggttcttgagtatagctgattggaacaaagctgctttaatcaagaacatctggttaattgcaacaaaaaaagacaacatgtgggtcaaatgggtccatagtgtctacatcaaaaatgaagattggtggg

SEQ ID NO: 366335 - DNA, 772 bp, Cannabis indica
attaaggtcttatccacattgcgccgaaccttgtgggttttgctatgtttgttgtggctgcatagcgtgcattctaagactattgtggaatggagatttgagttttcagtgtcactgttacttcaaaacaaacaatggtgaaagctgtgaatttgaaaggcttttaaggagttggggatggtataattaggggaacaccagaattgtcaattcagatcacatttttatgagtgaaaaagtagatagtttttatgagtgtcattttgacttctatgcgtttattaacacctgcaaagtaacatatttagtttcttctaagaagatgttggagaaccagactaggagatactgcagttagtctgaatacagttgaagtggaataggtagctgtagtaggaagagctccacattgtggtgatggtgagtcaacttatcttattcaggcacccatcaaaacatcttcttatcttgtatttatgaccattgaaacaatctacatcaccaatgctgtggtagatagatggcaggcacatagttaactacatctgttactagtcaacttttcagatcattatcctttgctaaaacatggcacaattaactcattttaatgtgtaagctgatcttacaatgatgcatatagtaagttgtaccaaatttatgggtagattttacgatgactattatttactttattatttacaagaacttaaaaggagttttttttatgattctaaatgcaaagaacatgaactagaagaacaaggtagca

SEQ ID NO: 366336 - DNA, 608 bp, Cannabis indica
agagcctctagcatttttcacacttactgacgttgtccattcagtcttcagtcattgttggcaaaaagtaccttgtctcaagattatctttcagaggctttgccctcagcatggttgccacaaaagccctcatgtacctcgaccatgaggagctcgacttctttcttcatgacacacatcagaaggggcattaagaagcttcttcagtacattactctgtccatgatgatgaagcgagctgctttctcatcaatctcttagcttcgttctggtcagtgaagaataccttgttctaagtaccgtgctattaaggtcatccatgatggagtgtcgttaatcattaggataggctttgagtcttcattaatgctccatttggtgacatatttgacacgaactacactaagagtgttataatctgtagtgctagcaagctttgctagtgagtctacattggcattctgttcacgcgacacttattaaatggagtagtgctgagctgggctactagatctttagctttactcaagtatgcaatcatgtttgtgttggaaattattttaccaggatctagatttactaccatgtatgttggattaacaacctaa

SEQ ID NO: 366337 - DNA, 720 bp, Cannabis indica
aacttaagtggcgtttagtaacacttttatttttaaattttttaatcgcaaaaataaatgtaaaatttttgtttttaaaattttgattttgaaaaacaaaaatgtattctataaacacttttatttttcaattttaaaaacaaaaaataaaaatgtattctgtaaatttcattttattttttatttgttcattttatttaagtcgggttcagagttgggtctgaggtggcccaagtcgggggttggggtcggattcggtttctaaggtctaagttggggttggagtccaaaatattgattaaaaaaagttgttaaaaaattttgaaagtgatttttttttatttttaaaatttagattcttaattaaaaaatcaagaagtaaaaacagttttatagaacgtgattttagaaaatactttcacttttctaattttaaaaaaaacaaaaaactgagaaaaagtgttaccaaacgcaccgttagtttttttttttccattgaaatttattcacttatatagatgaatggggaaaaaaaatttagattagaaccattgtaagagtggtaaatgcaagattcgaaaaagtggactcaatattctaatttaagaagtttttcactttagatataaaatgtaaagcgcagggtattctttaagaatattgggcttattattttgggcttcttaatatggatttttaaaaagggaaatttacatggta

SEQ ID NO: 366338 - DNA, 889 bp, Cannabis indica
gttgctatagaattcggtggcaagatcaaccaactcttggctcactgagcgagaatggaaaaagtctcaaacggatgtcatcatcactaaccccgttgaccttgaaagactgacataactccatgaagtttgacaagtgcagattcggatcttcaaaagggagtccaccaaactcgactgaagactgcatcatttggggtattgtaggcttaatttcaaagttattagcatctacggcgggcgacatgatgcaagactgaacccccgtaagagttgggagaatgtaatctctcaaactgaggccatttggttgatcttcaacggcacctctattattaccattgttacctccattatttgcagcattagcgttatcagccatgatttctggtgtttcagccgttgctcaaactctttcttgcctcttgttccttctgtttctcctacaagtcttctcgatttcaggatcaacgggtaatatagctccttgtccttgacggcgcatacacctaaaattcctgaaataggcaaagataatgttgaaggaaacagattagcaattagcaggaaaaataaatcaaagtagaatttaatctaatcttatgtaatatcaatctttaaacaatttcccggcaacgacgcaaaaaacttgttacgaattttataaataatacacaagtgtacgtaatcaagtagtaagctaacacaggtgaggtcgaaccacagggaattggactgagtaccactagattaaatctaagtttctatttggcaaatcaatattttttcaagttcaataatcgaataagaattcaagaagctaaaagagacaataaaaattaatcagaaatgagaagatagggaagagaatcctgttgataggtttacc

SEQ ID NO: 366339 - DNA, 827 bp, Cannabis indica
cagatgaagtgggggagagaccttcacggttcactcaacaagactagttattcattacaagcatcgagatgagtatcatggagattgattgttgttcaggatgtaaagtcaagaagactcagggcacaggcagagccagttatctagggtgaaagtctgctggactcaggtactaagataacatcatggcaatgttggcctaaggtgaaagtcagcaggactacaatactaaggcaacattgaaatgtcgaggggcgaagagtcagaatgatcgaggccattccctccgtctttcgggaatctttacgtattggtggccgtagattaagtttccaaatgggtggaagcaatagctagtccaaccaatgatgccaaggtggtgataaaatttttgcataagaatgttttcacaagatttgggacaccgcgagcgttgattagttatgaagggatacactttgtgaaaaaaagtcttggctgcccttttagccaagtatagcgtgaagcacaaaatagccaccgcttatcacccacaaaccaacaggcaagctgaaatttccaatagagacatcaagggaattcttgaaagagttgtgaatcctagcaaaaaagattggccacaacggttagatgactcactttgggcctaccgtatggcatttaaaactcccctaggcatgtctccttatcgcctagtttatgggaaggcatgtcatcttcgcgtggagttggaacacaaggcattttgggcacttaagaacctgaattttgatcttttagctgcgggaaaggctcagaaattgaaattaaatgagttagatgagttg

SEQ ID NO: 366340 - DNA, 1020 bp, Cannabis indica
gattctccaccacagaaatttcaatcggttgtgaatttttgcaacccatataattctccatttcctgtccaagtttgcattcggatcatgattcgatagcagtctgcaggcagacttaatagagaactgaccgttctgttccggaagccaaagccaggaatcattggtagagctttcaggcagggagatgttgagaattctcttagcgtcatcccttgtgaaccatttccgaactagctcctcgttccattgttggttcgagataaagttacttaccaaactcactccttccgaggcatcaaggcagggcattggttgtctattctctccgggaacccaaggatcgaaccatatggaagttgcattcccattaccgattttccgacaaattcctttttgcaattcaccgcgtatgcgaagaatggccttccagagtgttgtatcggaggccttaatctccatgtcaaagaagccttcgctcttcatatatttgtctttcataagatgactccacaaggatcggtctgagtttagaattttccaagcccacttcataaggaacgccttgttcatattctccgttgttcgaaaccccaaacccccattagtttttggtttgcaaagacgctcccaggctatcgtatggagtttacgcttgtcttcagtgtcgccccaccaaaagtctctcaaaagtttgtcgatcttgttggcagtagttacgggaataacatcagatgaagccacataatttgccaaactcgaacctactgtcttgatcaaacaactctttccaacatttgatagaagcttcactttccatccttgtattctttgcatcactcgatcaaccaaatgtttagtatcctctgtcctcttggttgaccggaaaagagggagtcccaggtaggtggccgatcggttcattctcctcacacccagaatcgttgctattgactgagcttttctggccgagacacctttggagaagcaaacagaggacttcaagaagttgattttctg

SEQ ID NO: 366341 - DNA, 703 bp, Cannabis indica
actcaagctcgaggtttctcagtagatggcataagctcttttggcactacttccagctcctcataataccttatgttcaatggcccatacgaatcaagccatttcacataacccattacatcttgttcctcttgctccatcgaatcatcttcaattaggctcagttcgagagggtcatctatcagctttttctcactcgcaattgtatcaattaaatcaacgaagagacatttatcacttgcctttgggtatgtcattgcctttaacacattaaagaccacttcttctccttggactttcagctttaattcacccttctgaacatcgatcaaagcttggccagttgccaagaatggtctcccaagaatgattgggacattgctatcttcttccatatccagaacaataaagtcagctggaaagatgaacttgtcaactttgactaacacatcctcaatgactcctctaggatgagctagtgatcgatccaccagttgtagagttaccgtggttggctttccttctcccaactgaaatctcttaaaaacagacaaaggcatcaagttaatgctggctcccaagtcacaaagcgcatttattccttcaattctcccaatggtataaggaatagtgaaactccctggatctctgagtttcggagggagtttcttctgcagaatagcactacactcttcagttagag

SEQ ID NO: 366342 - DNA, 442 bp, Cannabis indica
gccaaccactacaaataaaggataacaaaataaaaaaaaatcataagcaacaaatttgaacaactaaataaataaattgcaagcaacaagtaaaagacaaaacaaaaactaagcaactaggaaaaaactaaaaaataacatttaaaaaacaactccaatatgctcagcctaaaagatgaacaacttcaaagtaatatatttaccagaaaatgaaattcaaacagtaattgtcaatcgagaaattaaattaaacaacctgaaaacaaacagttaaacatctgttgataacaaggcaataaatcactgaaaaaccaataatactataaactgtttaatagcagaaacaaaaccaaaaaccaactaaaaaacaacacaaaaacaacatcaacaaaaaatacataaaagaaatacaaaacaaatgagacaaaacataaaaccgtca

SEQ ID NO: 366343 - DNA, 528 bp, Cannabis indica
tgacttacaatgcttaaatttttaaactattaagaaaacggcaattttgtttctcatattttgcaatagaaagtttgatcaaggaacaaattatgtaaattatgaagttactggccaatacatttcaatagattgcaaatattaagaactagtacacaagctaaaccatgtgctagaatgcaaccaagaaaatactcaactgtaactgcaatacctaaaagaaggatactaaccattgatgataaatgacgatccaagcctattcttctacatacaactaaaattgaaagatccttatttcccaactctattgtgtgaacatggtcagcaacacaacaacaaccaacaacagctctttctttgcaaggggcaacttagtagttacataacagttgttttaaggttgtatgtcatatccaaaatattaacagaaacataaagcattatcaacatcatatttgatacattaatgtaaagttccaaaaattttcttattacattgactattttgttaaatcttcaaaaatt

SEQ ID NO: 366344 - DNA, 780 bp, Cannabis indica
taaattaaaatttttttccaaaaaaataaagtgtcacaccagcagctcggcacaatcgatcgaatggaaggcatgcgcatgtgtgtcctcacccgttcgctacaaaactagatactccttgtggtttatccctaagtacaaaagttgcactttatatacccttgtaaacaatagctcatatcttgtggtgggattcattccatttgagaaacttacaaaaatattagaatttgggttaacttttacaaaaatactgttacacgaaaaagttttcagaaatactgtgtttttacaaaacaccagtaaaaacttaacacagtatactgcagtatgaaaaaaaaacacagtgaaaaagtaaaaaataccgcctagcagtatttttgtaaaaaaaaaatgacagttagtttaccatgtaaattttccttccatttcacacacactaggacactctctcattttgtcaaaatttcatcaacttcgagaagaagttccaatagtgggcaatgaatgggttgtagatcagcgaagctgcttcttctctttcgcccaagagaagcatgggagagtgttgtgctcagtggtgaggaacgagaatttagcagagaaaattgcaagtgctttatcttgttctcctttcaccaacgaacgatgttcgcctatcattatggaacgattagtgttgttcatcaaacctctcaaaccgcccgcaccgcaaacaaaatgcgatttgaaattctttgcggtgcggccgcgatttgaattttttctaaactgcacggt

SEQ ID NO: 366345 - DNA, 597 bp, Cannabis indica
ccctcctggatatgaactcgccagcaaaaaccaaagaagtgcaaagcttaactggtcgaatcgccgcgctcagcagattcgttttaaaatcaacagacaagtgtgtccaattcttcaacatcctgggaggaaaaaagcagttcgagtggacagaagaatgtgaaaaagctttccaagagctaaaggcacaacttgctaaacctcccgtactctcaaaacctctggacggtgaggaactgggaatataattagctatcacgacacatgtcgtgagtgccgtgctgatcagagaagagaacaacatacaacacctaatttattacatgtaaaagactcattgaggtcgagggccgatatccgttgatagaaaaactcgcctactgcctcattctagcaacaaggaagttaaggccttatttccaagctaatcctgttcaggtatataccgaccagccactatgacaaatactataaaagccatatacttatggacggttactcaagtgggaggtagagttgggccagtatgaaatcactttccaacccgaacagcaatcaaaggccaagccttagtagactttgtggtagaatgcatag

SEQ ID NO: 366346 - DNA, 589 bp, Cannabis indica
ttcacacttttcagtccatttgaaactttttatttcctttaagaatctgaaaaaactctttacatttatcaaaggaacgtgatataaagcgatttaatgcagcgactttacctgtaaggctttggacttcttttggtttggtatgagatcgcatctccaccaaagcttttattttcgcaggattagctttgattcctcgctaatttaccataaatccgagtaattttcctgagcccactccaaagatacatttgagggggttgagtcgcattttatattatcgcaggattttgaacatggcctcaagatgagtgacatggtccctcacatgttgagattttatgagcatattgttaacatacacctccatcgtcttgccaattagatctgcgaacatcatgttaaccaacctctgatatgttgctcctacgtttatcaaaccaaagggcattacctgagtatgcatccatgatgctaagaagttcatgacctgtggtagcatcaacaagttggtcaatgcttggtaaaggaaaattgtccttaggacatgctttgtttaaatcagggaaatcgacgcatgtgcgccatg

SEQ ID NO: 366347 - DNA, 1114 bp, Cannabis indica
atgtttgggcttctattatggtcgggaaatatatgcctttccaaggggccagtttgcaaaattataagtgaaattagataatatatgaaaataatatcatgaggttatgggaatttttttttttttacatttatatgggcttttttataccatatttttgtaaaaatgatggaaatctcatatttgtcaaaataataataagttttgccagataattcaccagtgttggaaaatcatcggtgccagaaaagttattgtcaccagaaaagttgccaaaaaagtcactgttaccagaacagttcccagaaaagttaccgaaaaggtcttcattgctgaaagagtcactggaaaagtcaccggaagtagatgtctcagatataaataaaaatagaacctgttatattatataatgaataaaaataaataacataaaataactcaaactgtttataattgaaatataaccagttctgtaacataacacaaaagaactaaaaccagttataattaaaatagaaccggttctataacagtgttacaatgaataaaaataaataatacaaaataactcaaactgggttatataacatattgaatgaataattttggtgtagatatggtatgcgtgtaattattttgtaggtttgagcatgttgaatggatatttttgtttgagttattttatttaaccagtttttgtgtgtaggtttttatcttagttgctttacagaatcaatttttttgtcttttagttgataaatataaccggtttctttataatttatattatatttgagttattgtgtgttattatttgtatttatttattttgttattaaaccagttctttttatatttctgcctcaatattttttagaattaagccccactttagtttttttttttataaaaaaataataactggtttattaagatattatgtgctatgaggtatttgttgtggaactagttttgtttttaattttatgtttctagtgttttagtaaactgattttcttctttgttttttaacttgtaattagtttgtagttgttgtcgtgttacttatttgtattcattatgttatataattggttctattttagttataatc

SEQ ID NO: 366348 - DNA, 1117 bp, Cannabis indica
tggacgagtacgtcccgggggcatgccgatgtggaggccttaaggagggttttgcgagatgaaatgcaaaatacccttaacgatcaaaactaccagaacccgtgggatctaaacttggacccccagtcggactggttcaatcgtttcctcgggcccaccttggctccttttgccgcggtgatgaccggcgagtttgtgtctcagctaacccggtgcgcgcccaagcggttcgctgcttgtgcatccttgaacttcgtctttcaagttcaggatcttagccactccttgactgtggtaagtatttcgtagtttacttttttcctcattatttttcttaaggactttactcactcttgcatccttttctagcttgctgcagaggtcggccgcctttccaagaacctaatcaaccatggctttgtcttgtccgaatttgggggcatagacgaagtcataaagaccatgcaggatctgtctgctgaaaggcggacgttccaagaggatgctgagcggcgggaggcccttgccaaggccaagtttgaggaagaggccaggcggagggaagcccaagcggaggcaatgattcgggaggagacccttcggagggacaagctggaggccaagcactgggaggacccaaggccaaacgcgagctccgggaggctagggaagccttagctgaaatggctgccaaggcgaagtccttagaggaattgcaccaggcggacttggagtccagggaaaacttggccgtggagctgaaggagcttaaggactttaaagatcaagccttgaagaaggctaagaaagatgagctcctatctcccatctcttgcagccggtgcatcaagcggttcgacgatggcgtctacatggcctggtcaacaaatggccagagtatcaagctcaacttctacccaaaccctacggagatgattgctaaatttcgggagaagaagaagaagcttaatgccatgctggaggctcgcattggtcctcgccttcctccccgaattgactaggccgttctgaatacaacccagatttttcttatctctttttttttattattatttatttacagccaattctcttttatttaagacaatctttattt

SEQ ID NO: 366349 - DNA, 630 bp, Cannabis indica
taaatttcgaaccttagtgatagagtaagtacccacacacagcaagtggtaactcaatcatagattggaagactgtgaaggatcacacacaaagagaaggagtggaaggagacattaattctgttgccatcaatgtaaggttttcttaactttatatgtgtttatttatcattttaaaaagttcatatttagggtgttaaacaacatacttgtgagtagatctaagatcctggtaaaataatttccaacaaatactaccaataaaagtaccaggtcgtatgaccatatcaactactgaacaaaagaacatttactcttaagtaaatggccttctggtccgccaaaggttctgatataattacaaagtactcaggtcggatgaccactatctaaagtacgatttttaattcctgcaatttgttttattgcatgttaagctaaagatcatattagatcaaattaatagctttgatataagttactacggtaacaaatatattttcgatcaataaatgaataaaaatatttatttcaaaattcaaattgagtcgaatttactcgcatgttgttaatttaccatcagtgcgtacaaaaggtttagtcgaggccgaaaccccgaacagacaaaag

SEQ ID NO: 366350 - DNA, 736 bp, Cannabis indica
ttaactttccagagaaccttccataagtcagactccaactgaacaccccattcacctttcagttcttgaaaatagcggtaggagctcttaactgaataaaacccattcgactccttaccccaaaaccaagaatcaacatgaacattataacttagaggaacttgcattatgaactcgatatcccttatctcaaacaaatcatgcaagacctcaagatcccattgcttacgatcgatgtgcatcaactgcgagaccgtgccatgagccaacacaggatgtttagaaatgacacaagggttcatatcagaaaccagccaagggcattaagcacaggggtagacacaccagacccgattctccttctagcaccatcacgaaccagtcgttgtgattcaaacacactccgccaaataaaacttgggttcagacctatctcagctgtaagaaaattaccatttggaaagtatcgggccttgtaaatacgtcccagaagagaatcttcatacagaagaaggcgccatccctgctttcttaacaaggaaagattgtaatcccgcaaattacgaaagccaatcccacctgaattcttgcttctacaaagtcgtcgccaactaaaccaactgacaccttttgttctattattagaggacccccaccaatactttgacattaagctctcaaggtgtgaaacagtcttaaccggatgaagaaacacagacatcgcataggttggcaa

SEQ ID NO: 366351 - DNA, 512 bp, Cannabis indica
aaaacgtttctttattggtcgatctatggcgggtgcgattttattctccaataatcgagccctcaaaacgtttctttgttggtcgatctatggcgggtgcgattttattctccaataatcgagccctcaaaacgtttctttgttggtcgatttttccttcttcaaactttcgaccctgggttaggtgtttcaacaatggtggtggtatgatttttttcttgttcatctatgttaatatgaataattacatgtaatattggaaataataagttggattcaattctgtataataattcaaaaaaaaatttaaaactattcaaacattacattggaaatatatagtcaatacattaaaaagagagcttgttctgattgggtggaatcaccattccttttggccaaaaaaaaacgaatctcgaattaaatgtaaaataaaatgaaagattccattatgccacctcaccaatttgacttttcaaagttgttaaatacttgctatggcaagttggtga

SEQ ID NO: 366352 - DNA, 596 bp, Cannabis indica
tttaagtcttttctatattttttttaccttcttttttctcctatttttttttcaattttttaacttctttttaaaaaattcttcttatttacttattagattttatctgtgtttctggatgaaggacacgtagcaatcaatagaagagaatatctagactatatatttttaattaagtctccttaatgttgaccttggaaaggtctgatcgaggagaggcataagaaacttgccacaaattaaataaataaccatttgggatctgagaatcccaccattactctggcaccaagagaagactaacttacttactagtacaagcagatgttagagagccacgcaaagagtctaggacagaagcccattacgcacagagtatcgaaggccacttatgaggggaaagctggatggctttatgatggttattcttttcggagacagtatcagatcttgtcccctatgtcagactatggtagtgcgtacaccctctttctacgctcttctttattcgacggctcctctgagcattttgtccactaagtgcaagccttcacccaacacgtgccctgcaccaacatcgtgttgggttttatgcc

SEQ ID NO: 366353 - DNA, 912 bp, Cannabis indica
tgacaaaaacgaggcgcgaaaacctttgtatacagtgccttgctacacaatgatcaaaggcaaactatatagaagagggtattcaatgcccctacttcagtgtgtttttctcgtagaagcaaacgaaatcattagagaaatttatgaaggtttctgcgaggatcatgcgggttggcaaagtttgtctaaaaagataattagacaaggaaattactggccaacgatcaataaacacacatgagtttgttaagagatgtgataaatgttagagattttcacatatacctcgcgtacccccaatcgaacttagaatgatgacctcgccttacccatttactatatgggggatcgacctaattggggcattacccactgggcaagaaggagctaagtatgcggtggtagtagtcgacttcttcactaaatggacggaggtcgagccccttgtgtccataacctgcaagaaagtccttgacttcgtcatcaagaacattatctataggtttggaatttccataaaaatagtatttgataatggaacccaattgaatggcgacttgttcactgaattctgcgagaggaataaaattatcaaaagcttctcgtcagtatccaggcctcaggcaaatggacaagtggaagtcgttaataaaaccctaaaggatactatcaagaagaagttagacactgctaaaggcagatgggttgacgagctacctcaggtgctctgggcacatagaactaccgagaaaacagccacaggacacactcatttctcgctagcatttggcttggaagcaatgctacttgttgaagtgaatatatcaactcacaaaagagagttttataatcaagaagaaaaccagaaacttttaaaattgtccttgaatctacttgaggaaaaacgaactg

SEQ ID NO: 366354 - DNA, 609 bp, Cannabis indica
atatatatatatattgtttttattatatataatctatatattatattatttaacaaaaaaaaatctatatattatataatttataaatatatttataaaaaatagaaacgaaaacaacataaaatcaacaaaaaaactatataaaagttatatgtaggataaaaatattggtaaccggttcactttttgtaatataagattaataaattttaaaaagtaaaaactgacatgactactatcagtcctttttttattgaggcggtgccacgcgtcatcgtttgattagctgaaaaatgagagctaagtggatttttaggctgaagacaaactaggcagacgaagcccagttgcgcctcaggcgcatgcgtgacaagcctagaccacacggcgccgtgcgctgcacgggcgcgtgggtcgggtttgggggaaaagcagcagttgcttgtggtgtcttctgccgcacgaacctgtaggtgacacgtggcacttatgtcactgggagaggattttggacccatttgggcttttgtcttttgtgctgttattaaatctcaaaaataccaatttttatagtttttgggccacattttttacaacattttattcttt

SEQ ID NO: 366355 - DNA, 523 bp, Cannabis indica
ttttttgaaaatcgaaaaaaaatcagggtgacatcactaaccctacgcgcgcggatcccctggttcctcggacgtgtgcggcttcggacaaccttgtgtccgagttctctcactcaggatagggtgacattgtttgatgaccaccctgggcgcgcgccgagacgctgcatgtagcctcctgccccatgtcctctcggtcagacccaaccctcttgtgcgtgtggacagtatgcattggatactatcaatgcatattgtccgtaccacttacaatttttttcgttttcttcgatttttcatgctatttcatggaattaatttctaattttttgtgtagttgcgtgttttgatttttccttttcaaatttcaaatctaattatcaaaattaaattaattggattttttaaaattaattttaagatattagtgtaatttgaacttgaaaataggtaaatatctatttttttttttgcttaattatctatcttatttttaaattttgtattattttatcttactttt

SEQ ID NO: 366356 - DNA, 701 bp, Cannabis indica
agcagctgcaatgaagaacaaacatggttagtagatccagaatcaacaatccagaaggatttgtcattctctaaaacacatgattcaataacaaaacattaccttcattcaaattgtttagaagtctgggacatcgttcttcctgatgtcccttctcattacaatttgaacattgaagtgtactactatcaattgtttcacaatttgaacttgaagaagcagccttgttagaagcttcatatttaattcttttcctcttacttaagtctgcaaaacttgagggtggcctccttgcaggtaagctccgttcataagcacgcaattctgcttctagcttgtccatgtcagatgagttaaaattgttgatcatataagatacaacaaatccattatactcaggaggaagactattaagaatgtattgaacccattgttctctacataattcaattcccagcaaatttgctttttggaacttcagattcatcatcaacaaatgttaattaatgcttttaccaggaagcattttcacactatagagtttatttgcaaaggcatttacttggagagggtcggggtgtgggttttccattttgacactacaaatatcaataaacagaaataaatcatttggttctataaattcatacacaagatcagaaaataacaagtaaaacaaatatgtttgtaaaaataccaaa

SEQ ID NO: 366357 - DNA, 512 bp, Cannabis indica
ggattgataaaccatagatttcatgttatttattcgtagagaatttgaacatggcgtgctcaatgtcaatactagtatccctatgagaattgatgttcggcataaggaactgcctccataaaggtgtcccatttctattctgccaataatgaaaccaaaaaacttctcagttggtaaccaaatcaaaaaaaataaagtacttcctccataaagttgctggctgtgtgaagacgtcgttagaagaagggagagaggatgaggatgagagagacagtgactgagtcttagatttaggggtttttttttaacttttacttttaataaaaattaggtaattattttttaataaaaacctgccattaaaactttagtttttctaataaaataaaataataatctgctaatattttaaaaaaatatataaaattaaaaattaatagtattattcgggttatttcgggttaagtcagtttaattgggcgggtttgttgggaattattttaccaggatct

SEQ ID NO: 366358 - DNA, 824 bp, Cannabis indica
acaagtttattttcatcttgtttaatataaaagtttaaattttgcgctattttaattagtaatcccgattatgggattagggtttcataagtattttgggtagcttgcctaattatttagggcgttacagcttgtccattttcctgaggcctggatacaatcttcatgggaattccaaacctacagataatgttcttgacgacaaagtcaaggacttccttacaagttatggaaacgaggggctcagcctccgtccatttagtgaagaagtcgactgctactacggcatacttagctcctcctcgcccagtttgtaatgcccctattatgtcaattccccatagagcaaatgggtagggcgaggtcatcattcttagttccattggcggcatgcgaggtatatgtgaaaacctctgacatttatcacatttcttgccaaaatcgtgggtgtccttattgattgttggccagtaatatccttgtttaatgatctttttagacaggctttgccaacccgcatgatccccacaaaagccttcatgaatctctctgataatttcattcacttttccagggagaacacaccgaagtaggtgcatcgagtaccctcttctatatagttttccttcaattattgtgtaacgaggcactgaatacaataattttcgcgactcatttttgtcatttagaagttgtccgtcgagtaagtaattgataataggagtcatccatgtaggagagtcgtctatcatctcgacgtcttccatttcacatatacttggctcgctcagcatctctactagaactaagttcaattcatccaa

SEQ ID NO: 366359 - DNA, 737 bp, Cannabis indica
gtccgggtgttggtttgggtccttgtcagtgtttgggtccaaggctgggtcccaaatccagacaccaactacgggttttgtccaagccctgggtccttatctggatcccaatctcgtgtcccagtctggttccatttctggtgccggatcacgagctgggtcctaggttcaagttcaggtctgggtcgagtactaggtcccggtcctagttctgtttcccaggtccttatcccgattctggctccaggtcacggttattatgtgggtttggctcccggtctaggttcaggttcgagtcctagtctcggttcaggtttaggtctgtgtatgtttttggatctgcgtttgggtttcagtttaggtccttgtccttgtcctaatcgtagttcggttctagtttcatttgtgattctgagtccgagtttgggttttagttcaggtcagagttcgagtcctggtctgagttatggttcgggtctggatttctgtctaggtctagatcaggctccgggtgtgggttcccatcctaggtcttggtctaggttgggtccgagtcccaagtttcaatcccaatctcagtctgcattcagttgtgggtctaagtccttggttttaatcctggtgtgggttcgagtttgggttcgggtccgggtctagctttgggtctgattctaggtgtgggtgtttaagtttgggtctgagtctatgtccgggttgtgtccaggtctggaccctga

SEQ ID NO: 366360 - DNA, 697 bp, Cannabis indica
ctcagcccaagtccaagcccaattcatagggcaaagagagtctcatgtcactaatgatgcactgctcttctacttctccttcgtcttcttcttctgtgtttttttttttttgtgaaaacaacaaccactatttttggagtcgtgacctccatgtattctcagcaaattgaagcttcatccacactctaaaccatatatatttgcagaacttaacccattaaagatgtatatatgtatatatatatatcttttgcaaaccagtgatattgaaggccaagtcaatgccctttgctccgatggttctctgcgatccgacgtgaccaagcttcttgttgtctgccagtgaccttttcgctccgttcatctacgtcaaagttcgttcgtcgtcttcgatccaagatccattgacgtccccgatcaaagatcctcctccgatctttcagcggcgtgtgaatcaattcccatggtgaatcacctttaacaccaaacacaatctcacgtagctccattttacgatccgcaaacactccactagcatcaccttcttctatgtacacgcaagatgatcggattgcccgagcaagagctggcgaaattcttgaatccccaatctccattcgagcagagagcttttcctctacctccggcgaactgcgattcaactttggttgtgctttgctgccatctcggatgagat

SEQ ID NO: 366361 - DNA, 676 bp, Cannabis indica
attttgttcctttcacagaactcattgaataactcaccatcaaactgggttccattgtacgatactattttaatgggtattagagatatgcaaattatgttcttgacgacaaaatcaagaaccctcttgccatttattgaaactagaggttcagccgctgtccactttgtgaagaagtcgactgccactactgcgtactttgctcctcctcgccttgtgggcaatgccccaatcaagtcgactccccatattgcaaatgggtatggccaagtcatcattctcagttctattggtggtatgcgaggtatatgtgaaaatctctgacatttgtcgcacctcttgacaaattcatgtgtgtctttaattatcgttggccaatagtatccttggaagattatcttctttgacaagctttgccaacccgcatgatccccactaaaaccttcgtgatttgattatctcacttgcttctgtggggagtacacaccgtaggaaaggaatcgaataacccttcctatacaatttgccttctactatcatatagggaggtattgaatacaagagttttcgtgcttcgtttttgtatattggaagttgtccattgagtagatagttatctatgggcgtcatccacgtgggtcacaaaatccttgatattgtgaaattcctctctata

SEQ ID NO: 366362 - DNA, 559 bp, Cannabis indica
tctacaattttttcggatcccacacagggatccaactcatcttcttccgccattcctggctcaataatttaacggaccattagaacgggtaggtgggtcgcaacgttgtaacactgcctggcctctccctgattccctctcacggttcctattccagcctcctgagtaagaaatttcacacacaagtgcctaatcgacgtgactgcaccaaaatccaccagggccggtcggccgaggatggcattgtcagctgtcgggcagtccaccaccccaaacgtgtagtacttgaaagtgctttggggcgtgtctgggcacaaggtgactgggagcctcactttttcaattgggatgagtattgttccattaaaccctgtgagctaggaactgctttgtgaaagatcccgatccgtgaggcctattgctttgaaggcttctttgaataacaaattcacagaactcccgttgtcgattaggattcaggccacaatcttgttagcaatggagtctttatgaccagggggtcatgatgagggaaatgcactgtcttagcgtcctcttc

SEQ ID NO: 366363 - DNA, 490 bp, Cannabis indica
gactaaatgtatttttagtcacaataagtaattaatgacaatttgtagctaaatactatactttagtcacaagtaacattttattgtgactaaaaatttagtcacaaaaaaaataatgttataactaaaaagttgtcactaaaagttacaattttttgtagtgataattaatattataaatcatattatatgaactgatcgataattaagtgtcattataaaaaatattactttttttttaattaaattatgcaattttattaattacaatcagttaaaatataatagcatgcgatctaatcgagacatctcttcattagagacacggttaggaatagaataagaaaaacgagtcaaataattagtcgtctacatcccatatcatttgacaaaaaaactaaaaataaaataagataaaaaagattttcatctaccactcaaaagacataacagtagaaattgttgcggcaggttcattcaatctcgtagc

SEQ ID NO: 366364 - DNA, 644 bp, Cannabis indica
tatagattccatatttatgttgttgatgaaaatgggtattgaattagtgtctttggccttggcttcaactgttgttgttgttaagcatataatcaaaagttaagtgagttaagaagataacaaaccagaagagcagaggtggagatggtggtaatggacgagagaagagccatttccaacttattccacaatattcttctttttcgcacctctgtgtttttttgtttttataagttttttttataagaagaaaaaatcgcaacggcaatataggttttgaaaaaaggaaagaaataatcgcaacaaatgaggatcatgaatatcgcataaaatagttttgattttgagagtttgagggagaagaaagaggaatctaccgtgcgtctaaattgaataacaagagttaacagaaggttagcctccgttaaagttaacagaataaaaataaaaaataccttaaacaaagaattgtcgttacatagccacttttaatatataaagataaagatatatatatgtgcactcttaatgggtattacccatgaatagataatatataaaaaaaagttgagtttttatgagttgaggttgttacatcggcagaaaagaaaataataataaaaaaaaatcagcaaaaaaatgat

SEQ ID NO: 366365 - DNA, 580 bp, Cannabis indica
gctattttgtgagaaatcaaattttcaaaatttaaagcctactaatatctaaaactaattttaattaattaaaaaattaataaaaaataattttactctcacaatcagatttttaattgaaaattcagattctacacaaaattcgaccaaaatttgacttttgtttcagtgaaaaacgatttttgaatcaaaagatatgaagaaaacaagattgaggcacaggggtaggcattgcatacccctgcgcgcgcgatggaaggaactgaccgagggatgaggctgcatgtagcgtcagatgtcgaggaagctcggtgtgagcagccattcagacagggccgtgtccgagaattctcgacatctcctgtctgaacgcgcgtgctgtccgagcgtgtccctatgtccgggcgcgcacacgtgtgcatccgatttcaaatattttcatccaaattcaaaaaatcataactaattcgtaagaaatccaaattaggttttgtaaaatcttaaattcattaactttttgtctacttttcagtaaaatatttccaaatcgaaataaaaaatatttttacaacatatactg

SEQ ID NO: 366366 - DNA, 675 bp, Cannabis indica
tgattaaatttggaataaagagctatccttgagtctgctctcaatgaaagcacacaaatgttgacctcgcttttagccaatgagaatgagtctaattttgtaagcgacaagtagtttaatatgagtaaaatatagtaaagcaaataaagacacaagaattttatagaggttcagtcccgagtagttcggtaatagcctaatcctcgttatttgtattgaattaagaacaaggaaaatggctccttttcttaaagctcttataatagtatctctgaatatgaattcttagataaaatctctcgaccctttgccaagtgaattcaaatcactatttatagggctataagcttggagaggaagtatttcccttctagttacaattgatataagtagaaagattgcatagtaaatacagaatacactaatcgtaggatttggacagcttgccattgttgggaatattttaccaggatctagatttactaacaagtatgttcattaacatcctaaacatgaattctctaaaacaatgaaaaaaacacataagggttaaaggaaaccttacattgattgcagcggaatataatgactccttccgttaaagatctctagcccttgattcctttctgtagcagagcattatcaagatctgaaccttgatctctttctctcctt

SEQ ID NO: 366367 - DNA, 979 bp, Cannabis indica
ataaacaagtaaatgataacatgaaccaaataacacacaaatgagtgaaaaatacttctgtttctttattgatatttaaagaataaagattacattgaaatggagttttatttagggcataaaacccaacacatggtatctcatctagttggaaccttctgcagctgcatgttctttccagtatgttggttgtgaaatcccctttttcttgcacctttacttggtattggattgttgtgattgcgatgacctattttttttttttgaaatataaattaagtgttagaaactggttttgcatcatgataaagaaacaagttttttaataactgttattttctatgatttagtttttgtacttggtatttcattgccttaagcaaattgtctttcagtagtttttcagcatttgatgctacttcggtaaatattccatgtgcttcattgctatttttccacacccatttttggataaggcttctaaagcactcaatcgttgctgtaataggtaatgatcttgcagctaggatcgccgaatttattgattatgctatgtttgaagtcattattgtgcaccttcttgtagggcagtggttcctggtccaaacatcatgtccaattttctcaaagtatggtcttattcgtttgtcaattctatctatttttgccatgtagggctcggatgaggttagcttgtaagtctttgctgcctttacaaagtttattgtcagatcgtctccatgcactccaaagtttgtttcgatgttgtttagcaggtggaagatgcatgctccgtggaagtggtttgggtagacattactcaccgcattctctatacttttatgcctgtttgatattattgtcaaacttgttcacggaaaccagtttttacgagatcagtaggtatgtgttggaagcataaatattttttttttgtttttttgggaagcgtaatcattttttttattgtggaaaccag

SEQ ID NO: 366368 - DNA, 893 bp, Cannabis indica
catacagattaaggacattgtagctcaattgagaggaagcgctctgggccatctcaaatattttggggaccctgttctaatattaaaaatttggtccctaacaaaataacaagtaaaattaaattcaaattttttatagatgaagttcaaaaattttaattttggaagttaaagttaattttttttaaattgttttttacattatatataccttagctttaccacaaatcggtttttgagttttttgagtgcttcattttttttgcctagaaaagctatatatataggattttgaactattttcttccttctctttggtgaagaacttaaaattaggtagaaatatataaatacatataggatgcaaagatttagctgtttgacacaagaaaattgaagtaaggaaaaaagttaaatttattattctattgaattgaatataaaaggttaggaaaaaatgaataatgtactaataacggtgagagattttgggaattagaagtgattttctttttttaaaagtagagttgggagtgatttgaaaagtgggaaacttacaaaaatactagaatttgggttaatttttacaaaaatactgtcacacagaaattttttcaaaaatgctgtgtttttataaaacaccagtaaaacacaaagcagaaccactcaaaacaacagtagaacactagtaaaacactagtagaacaccagtgaaaacttaacacagtatactgcagtatgaaacttattaaaaaacacagtaaaaaagtaaaaaataccgcctggcagtatttttgtaaaaaaatggcaaaagttagtataccatgtaaatttcccttgaaaagttgggtaatttaaaaaaaaaaactgaaaaggctttaaaaggataaata

SEQ ID NO: 366369 - DNA, 811 bp, Cannabis indica
ttctatgtcaaaatcaattggcagtaagaggaatagcttattcatcttatatatgataacttatttccacacataagcaatgtaagactaattctaatatctacatgatttaacaatttttcatacaaaaattattttagttgacaagtccaaaagttatctaccatctaccacatactactatttaaatgaataaattttattaaatactatgaaaataataacataaagttaattttttgaataaaataaaaagataaagtaataccacatggttgttgtcaaatatggacaataatattgttaaattacattaaaaatgaggatcatatagatatagtatatgtgtacaaaaacaaactttatgaataactcccgttagacatgctcttagaaaatgatattagagaaatatctatttctagcagcagttactgttcatacaaatattattaggtttaaatttgtagtcacgaagctttcattttataatcactttatacgaaacatatatatacatatatatatatatatatggtatgtggtcatatattttgattttgatagaaaccaaccataatatattgtgatagagagaattcacggactataaacacaacattaaaggtaaaagttcacaaaccaaaattcatatacagtcaacattaaaggcttaaatgtaagtgtcctctttataaaacgatgtttttcacattaaaaaacgttagtcatatagtttttgtacttcatatatttttgaaaattaaatgattgccctagctagtttgatttattgcgattatcattttag

SEQ ID NO: 366370 - DNA, 499 bp, Cannabis indica
tttatttttctatagcttttattctttttgtgttgaattatcattgtgaggctcaaattttgttaacgaaaatctgcattaacaattccattttcaaatataattgtcattgcatttgttgattcgtattcttcccagtttgacacgtgttatcctttgaagtgctagccaaattttgggtataacaagtgccccttaaaaagttctttttaataaaaagtgccttttaatgattacagagggtatatttgtcataatcccttttaaaaaaatgcatgtcctctgattttagtggttttgtgttttcgagggatatcaacaattaataaccatcttttctactcctctttcaaattttacccgtaggattaatcatctttttgatctaacgaagattaacctaagggaatgtaatgaaaaaaggaacctcatttgcattatccttgccatttttgaaactctgaaaattttttgagcttctccgtcgaaaaaccatcac

SEQ ID NO: 366371 - DNA, 518 bp, Cannabis indica
tgcacatccccttgtcagggtttgcggcacgattattgtgagcgagaatgtagcagtccagctcgccaaggtacctgtcctggtcaagagttcgaaggcgcggctccttaatctttgacggaggatttatccatctaacgcctaaggcaccctgccgtctatgaggaaccgccgcagcaagctcctcactgacgtagtccacgccctcgaccaggacgtctcctttagcatcgactggctgcccagcgtcattgtaccccccgtaatttggggattcaacctcttcctctccctctgcctcggcgggactgccgggacgcatatcctctagctcctcaaccgcctggacctcagcgtccccctcacgatcctcctccatcgggacggtcgactcctgttcgacgctgggcagagtggaaagtcgggccacttgaggatcaatatcgtcagccagacgcgtggttttctttgtacgagccatcatcctatggctgagtacaaggtcagaagaatgtcct

SEQ ID NO: 366372 - DNA, 550 bp, Cannabis indica
tttcaacaatctcaatagttcaggaggcattattttaacgaacttaaaaattcgagggggcatgattttggtttcatgttaaagttcgggagaaaaaaaattctaattaaatagacaacaattttttaagataagttagtaacatttttaatgtcgaggctagctcaagtgaccatacgagggtgtgtgtgtgttggaggtcttgaagcaatgagcggctttagagacttttatcaatattttttcaacgagtttttttttttctacttttttctttatgttcttagttaattgttatcaaatgttttcaacactaaactttaatcatcgttgatctcatcttaattaattgcgttatttgttttgttatttaattttttcttacattatttagttttaaaatcatttcattggattgctaaatagaaacaacaagaatttaattatttggtacttagctgcagtaggggtgttcaacaaaatttacaaatcgcccaacccaaaataaaccgctcaaaccaaatcaaataaaccgataaaaaaaatacaa

SEQ ID NO: 366373 - DNA, 483 bp, Cannabis indica
ctagatcttggtaaaatacattccaacactttgaatactcaaactttttgatctagaacttttttgagtgctcccatattttgttcgaactatctcaaaattgaagattggtagtggttgggtgtatcttaaagatttattaattaccttttcttataacccttaggtcactgtgatatacccaaccacttcattctattttggagtttttagtttttttttttttttttttttttttatgaatcgtgatttaaactacaagtttgaagtggttgaatggttcacagtgacttattgttcatatacctgcatgattcttaagacacttggaaacacccaaccactttttgatgctcaagttgtttagttttgttttttttttgtatgcattactcgtgtaaggacacttcttcttttagatcacactcactgcaatactaaaatgatcttctatctttcaaatgagcaatctcttgaatagtc

SEQ ID NO: 366374 - DNA, 724 bp, Cannabis indica
ataaaactccatttcaatgtaaggagtatgtgattggtaccttgatcgtacgtcaatcttctatgggaaggtggctcgagttcgacgggcagcatagcttcataaccgtacgccattgcaaatggtgtctgaccggttgatattttttccattgtacggtatgaccatagaactttggggagttcttctggcaaatttcctttggcatcttcgagtttcttctttactgtaccattcaaggttttgttgactgttcaacttgaccgtttgcttgaggatgtgccactgcggagaaacttttgattataccatggttatcccagaaatcagggaaagattggctgtcgaactgtttgccattgtctgagactattttgtacggtagtccgaaccggcatatgatgttcttcactataaagtcttgaactttagttgatgtaatggttgcaagtggttcgccttaagtccacttagtaaagtagtcaactgctaccactgcgtactgcactccgcctttacctttaggtaactgcccgattaggtcaattccccaaatggcaaagggccacggactttgcatctgtgccagctcgttggtcagagctcttggtatctttgaaaatctctggcatttgtcgcacttcttagcataggctctcgaatcttcaatcatcgttggccagaagtagccttgccttagaattttcttggataagctgtgtcc

SEQ ID NO: 366375 - DNA, 642 bp, Cannabis indica
tgcttcttgtgtatgcttctatatggtctttgtgatgcctgtttgttgcctttgttgggccattgcgtgccatttgtctatatgtttgcttgtgggttgtgtgagattggtccttggggacgctttgtgtttgcttgctcatgcttcttgtttgcactcaacatgtgcgagacatgtatcgtgcctaacctttgaacttgtttgcctgcaggcgcgtttaggctgacttgctagctcggtgtgccagcaagtgccgcacgtcccacctacttgggggtgtccaaataggcggcccgtgacagttggtatcagagccaagagaaaggggaagcttggtaacacgacataatggtgagcaacacccaaaggattcaagagcttgagaggcgcataggggaattagatggcctggacgagagggtcagggatctagcccctaaaaatcagaactcagagccaacagcgatacagcaacaagttgcctcattggctcaagactatgctaacttattggctagggtagctgcgatcaagagaagagatgctgctaccggaacatcaggtgcacctcaaatggaggattgcatcaaggcattagaacaagcaacagtagacatgcaggctgctatcactgtgctacaa

SEQ ID NO: 366376 - DNA, 738 bp, Cannabis indica
tatattgggcaaaattaggagcagcactagttatgtagaaaaaaataatatatttttcataaatattaaataatttaatattaaaaagtaaccaatccaaagtaaccgatccaatccgctcttttgcggattggattggattggatttgagctattatgcggattggattggatccaaaaaacaaaatccgcacttagtgcggattggatgttgtttgaccaaaaaagtgcgaattgggttggatgaacagccctaattcaagtacccaaatcgttggaggttatttacattcaaatattggaagagcttggaggtcaggggctgcgattgtgatcacagaggtgtagtgttgatttcgtcggtggaggaggtggaaggacggaggtgatggcagaggaggcggagcttgtgtgcattgggttaggttgcgatagggacaatctgttaggatatgttaacattgttaagtaagggtatatttggtataagacttataaaagtggttagatttcaatgaattttaatatgcagttatttttgattagttgattaaaaaaacgaggtattcctcaatttatcccatattaaaatgttacttgtgactaaatcttaaaatttagttacaagttgtgactaatttagttttagtcacaacaagtataatggctaaaaatacatttagtcacaacaaattgtaatttttgtgactaatagttttagctacggaccttttagtc

SEQ ID NO: 366377 - DNA, 891 bp, Cannabis indica
caactagtgatattgacttagaaagatacaacggtagattatatatcttaaccaagatcaatatcggtccagtccaatgtatactccatacattcgaaactagtatactttgccaatgttctggaaagaacataacacttatgcaaagtgtaagtacacttcacgctgattatcacatcagtgtaaatccaatgcactgatgaaacagggactttgtctttcgaagcatataatcacaatcacattccactgtgttgacatcactgtaattgtaaatgactatatgttctggacttaacagattttgtatatatattaaaccataaacatgaaaacaacatgtaaacataaatgacttctaatcttttattgataacaaatcagattagattgtaatgggttttatttagggcataaaatcccaacaataccatgactacaatccatcctttaatgtcgtgacatttttgaccactccgtccagtttccacggtcactgggctcgaaaatattttattccagaaatagtattacgatacccacatattctaataaaatctccgtcattaataaattacactttatttaatcatttactaaattgacactaattaaccctagtaagatcataatcttacttcattattggaataattatatatttaataaactatgtctaattaaatacaatattattttctaagatattacatgtaacgccctaacaaataggcacgctacccaaggttattaagaaaccctaatcccctaaacagaattactaaaagataagtgcgagaaatctaacatttaatcgaaaacagaatgaaaatgaaacttgtaataactttaactttacaataaaaaattacatgtttcgggatcccaaaa

SEQ ID NO: 366378 - DNA, 1091 bp, Cannabis indica
tcttacaatcaaaaaaataaataaacaaacataactttataaactccaaaaattatttaattagaaaaaataaacatgacacaataaacaaagaaaaagataaagataaacaattttttatatatatattatttattttctaaaaaaattactaaaaaataaacataacacacatagagtgatataataaacttatgtgaatattattattttgtttattaaattagtatgtttaattaatagaaaataaaataaacacatatataaaatgttttatatttattagtatgttttttattataattgttaacataaaaataaacatagccaatattaccacatatataataatcaataattattaccatatacatattataaaagaaattgaaaaaaagtttttaattatatataaaaaagtatgagaaaatgataataagtttttttgcacatattttgtaattaattaaaataatgtatacaaaattgtaaaatgcccttatttttatatggtataaataaataatacaaaaaaatatagaattaaaaaataattaaagtttaaaatatgaggaaaaaataataaataaattttaaaaaaacttgtaataataagttttgccaaaaaagttaactgccccagaaaattcaccagaaaagttgtcaatgccggaaaagttactgaaaaagttattgttgccgaaaaagtcatcatcgctagaaaagtcactatcgccagaaaagtcacaagaagtagatgtctcatatataagtaaaaatgaaactgattctaaaacataatgaataaaaataaataacacaaaatacctcaaaccgggtatagttgaaatataaccgatactataacataatgaattaaaacaaataacatgaaataactcaaaactagttataactaaaataaaaccagttatataacataataaatacaaacaagtaactcgtaataactcaagccgattacaattaaaaataaagagaaaattagttcctaaaacactaaacataaattaaaaaaaaactaagttaccacaacaaaatacctcataacatataatacctcataaaat

SEQ ID NO: 366379 - DNA, 417 bp, Cannabis indica
tcgtaatttgaattctaaaaaatataaaagtctaaatatttatatttcaaattttaaatattatgtttgaaatatagttaaaatttaaaaataaaacaaacattatcaaggaaaacagtatatattaaaataaatattcatttctaaaatatatattaatatagtctttttttttggctaatatattctaaatttaagaaaacaatcaaaattaacaattataaaattcaaattcaaatcaactcaaatacaaatataacttattaatgtacattcaaaaaaatggactttttcatttttacacttcaaaacagttttcttttacatttttacgaaattctacataaaaacatctattgcatctagcgctgcaagctaaattgcaacacaaaagtcgtatagaaacccctattgcaa

SEQ ID NO: 366380 - DNA, 743 bp, Cannabis indica
taacttattaattcctcatgactcaactaaagatttagaattgcactcctgattacatagaacactctatataccaaatatagatacgctatgaattatctattgtttcaatctaaataatcaaaaattctctatagacgatctacatcaagtagggacaaatttaccgttgtaccttcaatgtattttatccttaaaatacttagctacttgtaaatgatatttcagtgaactaatataattactgaaatgagcactctatcatttatcgtgttaagccaagctcgaaggaagttatcatttcgcttctaatagttatggaagctatagatttcatatctatgattagcgctcccactcaattgcactaccatgttcccaagatgtaagtattgagttgatctattaggtcagctttgacgaacaagttaaagaacacaaataatatatttaagatagaacctaaccatctcagaattaagatctgttgacctaagatcaactaagtgatattgacttagaaagatataacagtaagtttatgatatcttttccattgtcaatatcagtctagtctgatatatacccaatacatctaatactagtatactttgccaataccctgaaaaggacattctacttatacttgtgtaagtaaaatttatcgctaattatcacgtcagtgtaaatccaatgcactgataaatcatgagactaaagcctttgaagcatataatcacaat

SEQ ID NO: 366381 - DNA, 647 bp, Cannabis indica
atgtctgcctttaaatccaaacttttaatattaatgctgaagacaatggaaatgcacattgctggtaagtgcaacgagtcagctacaatgttgctcaacgacgacaacatagatacattcaggaaggcatatgcagttcaattatatgtgggtagtgcagatccttaattaaccatgtccttgtttataattctgaattttgtaattttgtggataaacttgaatttactctgaacgaccgcaaacgaccttgaatttatactatgcgaccatcatggtcttttatgttcttcaacaaactttaaagaacttgaatttactctgaacgaccataaacgaccttgaatttatactatgcgaccatcatggtcttttatgttcttcaacaaactttaaagaacttaaatttactctgaacgaccataaacgaccttgaatttatactatgcgaccatcatggtcttttatgttcttcaacaaactttaaagaacttaaatttgctctgaacgaccataaacgaccttgaatttacactatgcgactattatggtcttttatgtccttcaacaaactttaaagaacttaaatttgctctgaacgaccataaacaaccttaaatttacactatgcgaccattatggtcttt

SEQ ID NO: 366382 - DNA, 552 bp, Cannabis indica
ttaattaatctattagtattaaactagtttataaaaatcacacacgtgacgtccctatagattagggcgttacattaacagcccaagtcaaggccctaaggaagttgatggctgttcaggcaaaacatgctcaagttacttgtgagctatgcaggagccctcacacatatgacacacgccccgtggatgtgaacagtttgccaattgattaaaaaaaagccattgggaactattctcaaaataataactatgggtataatcaaggagggggttgtcgacagaattttcaagggcagtcctctaatcagcaacaataggggttttactagcaaagaaatcagccccaacaaaatcaacaacaaccacagcaacaaggttttactggagggtctagatcatccattaaagccctagagaattagatggggcaattggctgttgggaatattttaccaggatctagatttactaacaagtatgttgattaacatcctaaactatgattatctctaaaacaatgaaattaaatactataagagtttaagaaacctt

SEQ ID NO: 366383 - DNA, 582 bp, Cannabis indica
aatcagaattgataaaatttctgagagcaaacctagacgtttttgcctggtcacatgcggatatggccgaaatcgacccttctattatttcacatgttctagatatcgatcccaactttcggctagttcaacaaaaataaaggctgttggacaaggaacgagtagtagccctaaaagatgaagttgaaaagctgcgcaacaacaacttcataattgaagctttttactcggctttggtcgcgaatcccgtattagtgcccaagctgaacaagaaatggcgagtctgtattgatttcacagatctcaacaaagcatgccctaaagactatttttcacttccaagaatcgatcatctcgtagacgcaatagcaaggcacgaaatagtaagcttcatggacgcttactcaggctacaatcaaatcaaaatgcatccaccagaccaagaacatacaagtttccgaacagatatgggtctttattgctacaaagtcatgcggtttggtctaaaaaacgctggagctacgtaccaaagattggtaaacaaaatgtttaaagccaagatcgggcgaaatatggaagtgt

SEQ ID NO: 366384 - DNA, 691 bp, Cannabis indica
attataattgtaaacataaaaatagacatagccaatttatattattactaaaataaatatattttctttctattatttctatatattgattattttctaatgagttagtaaacgaattttatttggaaatacaattcttacatcaaaaaataaataaataaacataactttataaactctaaatattatttaattataattagaataaaaaaaacatgacactataaacaaagaaaaaggaaaaaaaataaacaagtatgtatattaattattttctaaaatattattaaaaaaataaacaatgacacacatataatgatataataaacttatgtaaatattattattttgtttattaaattaatatgtttaattaagaaaaaataaaataaacacatatatacatacaatagttaataattattaccttatatattataaaaagaaaaattgaaaaatagtttctaattgtatataaaatgtatgagaaaatggtaataagtttttttgcacatgttttgtaattaattaaataatgtatacaaattgtaaaaatgccctaaaaaaattaaacaacataaccgctctcaagcggttgtaataataattaaaaaaaatgtttaaatttatgtattattttataaatttatacaaatatatatatatataaatatatatatattagagtgag

SEQ ID NO: 366385 - DNA, 647 bp, Cannabis indica
actggatccatccaataccaagaaaaaagtaagtaaaattttaaatgttaatttttatgtatacttatatattttacgtataacattataaaatctaattactcatccaaactaaatgaaaatactaattagtttaactggatgttggatgtattggatttttagacactccatccaacatccgattcgatccaattggatattcaaaaataacatccaatccgatccgatccgatcacaattggatatccaatgtttggcagtcggttgtgattggatcggtcggttgtcattggattggatcgatttatgcacacccctagatatgagattggatagtatagtctggtatttgttaatgtgtgtgtgacgtactgactcatatttattcgtgtttaaaaaaaatggatcgtgtcatgtatatatattattttacataataaaactaatgataaagttattatgtttttgtatttttattaaaaactaactaaacattaacattatgtttggtaggagggggagatgggtggatggagaggggtggagggagagcgatgaaaggagagactaaattatttgtttggcaagagagagagaaggaggaagaagagagatggagggagacattctctttccaaaccttc

SEQ ID NO: 366386 - DNA, 638 bp, Cannabis indica
actaattccacgtcctcctcctcctcctcctcctcctcctcctcctcctcctcctcctccttcttcttcttcttcttcttcttctattttttctctgctaattccctaacaaattctttctactcttcttgttctctctctcattgccacaccttcgtgcaagtactcgaggcccttagccgcaccggcggctatcttgagacgccgactccagtccaagagcgaaaccccatctgggtttcggtgcagatagaattccaagcttgcggagccgacaaactcagaaaccacaattctatccccaggtgttgagtcaatcttagtcaacaagtgctgagtcatctaagttcccaagcgaccctccctgatgattcttctgcggctgaagccatcggtggttgagtcaatcttcgtcaacggtaatgaagtggctattaccttggtggggtgtggttcttgggattggatgggtttttttctacaaatgaagatgagcaggaggatgatgatgagaacgagcatagaggaggatgatgatgagaacgtgcatagaggttgaaagaaatgctatgagcatagaggtggggtgtggttcttgggattggatgggttttttttttcaaatctggattttggta

SEQ ID NO: 366387 - DNA, 814 bp, Cannabis indica
aatagacacatcttaaataattttcaaggtttccaaaaaatcgatacagtgtcccgtttaggcgagagtcaaagatatcattcattgaatagaattgtcagctcatctaaaatggacaccattttagcaagtttttatttgatcgaaataagaatctgacgttgtcccgtttaggcgagagtcaaggtcattctattttatgagcttctaccattgtttcatactttgtaagccctattctagcagtcactattgggatgatcgttactaagaataaaagacttacaataatacttatctttcaagattctatgacgttaaattgctaatgaatgaacatctattagggatgaatctcattaaaacaacaactatgtagaaccaacaatggagattgaatatccttaaacgaaagctcattattttaaagaattattttttcatttgatatatatatattttaatctatttattttaagatcaatatattatttaattaaaattactaatttagataactctaaatattaaatttaatttaatatttataaaattatatacttacttggatagatataaaaataaaaatttattttccatctttagtattaatttttaataaatattatgaaaattacttaatttaacttggtccaaaaataattaaaattaattatcaacttaaatatgattttctataaatatatatctaatactaaattcaaaatctaatatatttaaaaatacattttcgaatttaattttacaataaaaaataaatttggaaaaagttattctaatttatgtttgatct

SEQ ID NO: 366388 - DNA, 644 bp, Cannabis indica
tttattccattccattcctaatcctattcccattcccattcctattcctatattttcattcctcccaaccaaacgcctcgtaaaagtgcactaatatgtatatggaacacttctcaatgggtattactcattgatggttagtaaataaatttaactataaatattaattttaaaaatattaaattattaggttttgccattgacgaataataaaagagaaattctcatatttatgtttagtttagctacttaattagaaaaatgtcaaaaatatctctttttacactatatcaaaaatatgtttagatagaaaatatttaagtcaaatcattttttttattctttttttttttttttgtcgaaaaactctttttcgtaatttttttctagccaatggaacaaccccatcctatataatgtaaaagtgagaaattaaactaattagatagaaaaaataagcttaaaaactaaaattgacccattcataagtaatacccattaaaagtgcaccatatatatatatgggtgcactcttagtgggtattacccatgaatgggtaaaattaaaaaatttggagtttttatgcttaatttttcaatctaattaaaaaaaaaaaaatctctcatttttatataatatgggc

SEQ ID NO: 366389 - DNA, 507 bp, Cannabis indica
tgttcgggagaacactgataccacgtacaaatctcttcatattctgcatgttttgttttgtcactacaaaactggtttttgcagtagcagaattacattctgcttctgcaagcgtatacagttttaaatttttgtatatattattgacatttgcaaaaacttggtttttcatttttcatcgtcttttggatcatcatcctcgggatcatcctctggatcttcattgatggggttttcgtcaatatatttcttagtatgttgagttttcctagtaggactattggtcgcttctgtcaggtctccattgactcttatttttgtctgagtagtagggttcacatcgtccatacgtatatccccatcatgattactaggtttaccaacagtggtttgggtggcaacaatggttgcagtatacaaccattttggtatcactactttcttcatctctcaattaaaacaccaaaatatttatcgacatttttagaaaccaatatccaagagggg

SEQ ID NO: 366390 - DNA, 627 bp, Cannabis indica
ttgatggatttgttttttttttttttaattcagacttttttttatcctttcaaagttatttaaatttatttccatcaaacaatgttttatagcacattaattatattgacacatgtcccaatactatatgttagacagagaattagacacattctctagacagaggatccgcttccattcattagtcctaaataattaaatttatagtttttgtggtatagtttctttaaataaaaagtctccacaatcgtaatttctcaaaagttattcactcacagtttcggaaagtgtttcgtggaatgatagttgtgtctgaaagaaaattcctgaatgactattatgtccactctaggtccaggtctcaggttagctagcctgtctctaggaggaagttcttgttggctaagtaaccatcctgaaatggtagtagatccatatagtcgactccagccggttcaatcctattcagaagcatctttagcgagtttccttaatccgcgtgtccaggagctcattcacgttcctagaggccatgacacgtaagctaactcgaagacttcgctcaaaaaggagttggttaagttagttatttctaacaaatttaacaaccttgtttcttgcagccac

SEQ ID NO: 366391 - DNA, 690 bp, Cannabis indica
gaaacacccttctcgctttcctatgggtgggaggccatggtaccagtcgagattggggcaggttccctacgaagagatgttttcaacatctcacaaaatgaggaaaaacagtcgctttaccttgatcttctggaagaaaaacgcgatcaagcctacttaaaaaatgcggcttaccaacggcgaaccgcaagatatttcaactccaaagtcaaggcaaaagtcctgcgaacaggagactttttccttcgaagagtaatgccaaataccaagaaccgagcgcatggggtcttcggggataattgggaaggaccatatctcatcgcagaaaagattggcggcgctacatactgactcgcagaactcgatggtactgcgattccacgagcttggaatggcgaaagcctaaaattctattatcaatagtactcgcattgtttaatttgtattcgccttgtacttatacttagtcattttttaaataaaaaaaaatcctaagtatagggggtatataatgtactattgattatagaaagaaaattcttggaaattcttcaactttttcaagtttaaaatttttcaagtcttatgaaattttctacttattacaccaggttgtaattaaagtcgatattaagcgcgagtacccgtgtactgcaaaaattctgaaaatagatatccccgcgaggatat

SEQ ID NO: 366392 - DNA, 1034 bp, Cannabis indica
aattgtaacaccctaactactataggcgtgttagtgtgatttttaacgtactgcgcaacttgttgctaatcagcgagattattggaaatcgtgaataattagaactttgcttatttaataaaaacataatatattacattttataaaattctgggatctcatttacaaaataaagttacaaaagtttactcctcatatacaaaatatttgtcacctagcgactaaacaacaaaagctctgatgtctcgaggatcgtacgctccatgcctaaccgcctcgacatgtacaatcttcacctgctcgctctcacggctcctcagctttagctttgcccttacctacacatagcaatagcgctgtgagtcgacagactcagtaagaaaagcataacataaaaaacatactaatatcccgggttataatcaggcgcccatacacccaaccataaccctaactgagtcaggaacgttcttaaaaaagtatgactaaccgggattccaacctatactcaatactctaatcgtactaatgtggtagcagttaactcatactatctgatagcctagcatatatttgttggcatctcggtgcatctttatgtacacctcaccgatgccctgatatgctaatctgagggctatagattttcctattcagacggcaactaacatgtacactaaacatgtataaatatatgcataacattatactaatcttaccttgactctgaattcaggtgtgccggccaacctaagtggaacaactgctcgatgaattacaggctcctaaatcacatcaatcataacataggtaagtgacacgctaaatcactttctggggacttaaacttgaaactaaaagtttccctgtcgatgaataacatggatgtaaagaccgtttggttttaatttggaaaatagctgataaatagggtttaattatgaaatctatgtttgattatggatttatagtttatgatgatttatttgaattcagaatgcattttactaagctaacacgcctatgctagttag

SEQ ID NO: 366393 - DNA, 525 bp, Cannabis indica
taatttaacatttttacgaatttatatagtttttctattaagaaatattcagacaattattttgtattattttaataaaatgttgcttctatgttatttttatgatgctgttatatttacattatgttatttttaggttattttgataacaatgtaaattaaaatcatacaaaagtaaattaaaacccgtaaaaatatataaaaaaactcagttttttaataaaattgtaaaaaacaagtgtcattttaagtattttgtgtaaaagtttatatcccataaccaagtgttattaaaaaaaatattattttagattttgtattttacaaaagttatcgattggactttttattttgttaaaagataaacttaactctatattttctaaaatagtactataaacttattttttgcaaaaataaaatttaataataacccaatttaaaaatgttatgacaagattgattatattttatacatatgttcgtgctaaaaattatctttaagttagttatgttaaaaaaaaa

SEQ ID NO: 366394 - DNA, 1026 bp, Cannabis indica
caatgaaagcaccaaactgttaaggtagattttggtaaccaaatttgagcctcacagtattgatttcctgcagaaaaaataaaagctgtagataaaaatatgaacacaaggtttttttacgtagttttacagttaaaattctgcatagtccacaatttaatcttattcagatttctgattattttctagggcctctcttgtatgagtttttttgtctcttttttgatcttgtctgccactatttataattacataatggtcagtaaattacaaagttgactgtaatatgtttacaacaatcatccctaaaatcatgggatttgattacatatcacgtagtgtaaatgcggtttatgatttgaaaatcgtatagctatgattttcttgcttttatttggtcaaaatgattgtgttttaaatcacgtctttaattattgtttctggagttgtctcgacagaagcttggttccagtaatctcgatagcgagctggggccattcgtctttccaaggtcgacgatgcatgtttggtgtcgaccatgcttcttaaagagttcttcgagactcatttgaatgttatcttcaggctcgctaggattgtaagcctcgctaacgctaactgagtgaagctataagaagtctcccatagcgagacaggcagctcgcttacttgatctcaagtcgatccaacttttacacttagtttgtacattgtacgctacggactttcacgattgatacatgtcgctttctttggtgcctcactattcgcatttagcgacatatagtttctcgctaatatactaagtgccagtttgtacattgattcctcgcctaagaccttacaatcagcgggttacaaatatactctaatacttacgtaattaatgagttattccataagaagcaattgcatcgattcacattccctttatcttgacacgtgtcctccattgagacggtaaccaaatttcgggtataacaaaatggtaggctttaactaacaactctaagaacacaaataaca

SEQ ID NO: 366395 - DNA, 865 bp, Cannabis indica
ttggcttcctgatgagactgaaccctttcattgaatctgtccagtccaggcctttgtggggaagtcggtcgacgtctttaatgaaagtcgagcaggttgaatgggatggggaagttttagctgatctgctcactactagagatcgagctttggtgtggaagattccactcagtagtcatttgagtactgatttgtggtattggttacatgatgcgttaggagttttcactgttaggagtgcctattctttgcttcaattaatgaaacccaacagagatagtccagataactctgggatttggcggctattatggcagctgcagctccctccaaaggttcttaatttttagtggagagcttctaccaacagtctcccaactcggtttaatctctccataaaacatgttccaattgctgcaacgtgtccattctgccttgctgctcctgagacgattctgcatgtgttggtgcggtgctcttttgctagaagttgctggagcaaggttccaattactggggtggcgacggatgcaatgttgttctcgagttggttagaagcggggttggtattgtggaactcggccgaggctcttgaggctggtatggtctgttggtcgatttggaatcgtcggaacgagttggtttggaacttcaagcaccctgatgcaagtgaggtagtggcaatggcaaagttaaattatgttgagtggtttaatgctcaaaaagttaatgtcacagatgcatgcttaaccgggacgacgacattaccagtggagcgatggacagctcccgattttcctttggtcaaagttaatgtggatggtgcacttttttctgcccatgggcagtatggattgggcttgat

SEQ ID NO: 366396 - DNA, 880 bp, Cannabis indica
ccaactaaattttgaaaagttagggttgttaaaaccaactttaaatatctctttaaaatttaaaattcaaaattgaaaactaatttaaaatatctaggtttatttgaattattttatcaaattaaattaaatatcaaataagataaatgatttgaaaaaaaaatcaatatcatcttctaatcttataatttaataaaattaaaaataataaaataaaccaatttaaaatacatgtggttagacaattattattttaagaataaaataataaataaataacaattatcttaattatatgtcaaaatatctcaaattaagcattattcaaatttctacaaaaatatttaagttattaaatatttaaaataaaatttataaatttttaataagtaaaatgatataaaataacataaatatcatttttctaacttataatttataaacaattaaatatttaacaaaataataaatttttgaatttgaaaataatatggttagaatatcaattaaaaataatattttattttaattttagggtttgaaattgaaaaatcttaaatttgggaaaaaatcccatgaaaatcaaatttttggggcaaatctcccggctgcccacgaaataggctgcaagcagcctattccacgcgcgggagagaagattgtagcctcggatgtgcagcaaaccctgacccttgcagggtgtctctcggtgtgtatgtagggtcctaggcgagctgaacttgcgtgaccgagtttcagacaatttttgtctgaaggacgcgcgcggacataaccttatccgagactctgcgcgcatggtgctcgagtgcttgacactcaatgcaccaaaatttttcaaaacaccataactctctcattt

SEQ ID NO: 366397 - DNA, 822 bp, Cannabis indica
ttagggggtatttttaactacacttataaattaaggggcatcataatatagtgtcataagtacagggactaaaaaagctaattattcaaaacaaaataaacagaaggactaaatgtatgcatataaaattatacaaggactatttgtaacaagctgaatagattaaggggcataatagtatagtgtcataagtacagggggtaaaaaagataattattctattttaattactctacaaagacaaatttaagggtttcaataatcaatcattttacgttaatgttatttcctcgttacttctctttattatatcttattagttaattaaatacctaataaagttattacttttttaatttcttctaaaaataaaaatagtcttaattttaaattaagtaggtcgtatttccttaaactaaacataaaatctagggttgatttcgaattaattaagaatatttgcaatagtgtgggtgtgggtgggtgggtggaggtttaagtctatatgctagagtttttttttatttgtttaattatataggtcattaggtataacaaaaaataattgtaaaaatactttaacaaattttaattacacatatattatgccacgttagtatatggaaatttactaaaataaaaatgaaaaagaaaaatttaccaaaaaacaaagatgcaccttgttgatatagtagctcatcatgaaagaactccatggttaagcgtgcttgacttggggtaatttcaagataggtgacctcctgggaagttttctcaagaagtgtgcgagaggacaaaacacactggaaacactcatgttgg

SEQ ID NO: 366398 - DNA, 1576 bp, Cannabis indica
agttcttcgggaaaaacatctaaaaattcccgaaccaccttgatgtcctctggccgaatggtatctggccgagtggtgtccaccaccacggccagaaaccctaaacatccaccatgcaataattctctagctgacatggccgaaatcaccgggatccgagatccccgaactgaaccaacaaacacaaatggttcttcactttccggttggaagatcaccatcttccttttgcaatcaatactagccgaatatttagataggaaatccattcctaaaataatatcgaactctactaagctcatctctatcaagtcagcacttaactctctaccatctattctgatcggcatagacctaatccaccttttggagataactaactctccgccaggtaatagggttccaaaccctgattcatatctatcatacggtctatccaatttactaaagattctggcagccacacaaaaacatccttgacctaagcactcacccggaggatgcctcttactaatgagacactccggtaggaataacgggtctcaacactaccctgacgaccgccttgattctggttccctcggaacctcttgttctgccccgagccaccggatgcagtggatgatttcctcctctagtccatggccgaaccactacctcccctgctgaaacctgacgcaggaggggtaggagccccgccacatactggagtcctaactgattccaacatacatctaactgcgccctcagctcacaatgctttctccaccatctcagcataggtgatcttgtcgtcggtagtgatcatcaagtcatgcttaatcttcacatttaacccatccagatacttctccttcttgctgaagtcggttggcactattcccgaggctaacctcgccaaccgatcaactgagtagtatactcggtcacgctcatattctctcgctgggtcaggtgggcgaactctttcctcttggcgcttctgaccgcctcgttataatacttggcgttgaagagttcctggaacctttcccaggtcatggtggtgacgtcatggatctgagacaccatgtcccaccagaccagagcgtcttcttggaattggaaggtggcacacaccaccctatcattcccggtgacacccataaagttcagaattttaatgatcaccgttagccactgttcggccttcatcacatctggacctcccagaaagaccggaggtgcttgcttccgaaacctttcttacaaaggttccattctgttggccgccacaactatttcggcctgagcagcaggggcgggtgccactggaacttctggcaccggcactgcaagagcaccctgctgcctgaatccctaaatctcattatcttgctcctctattctggcttgcatttcagcaaacctaacttcccaattctgggcttcctgattgacttgggcagcctgcggcgagttaacatcaccccgaccacgagccctgcccctgggacccctacccttggcccgtaaaaccttggggaaaaaacgttgagctcctcgaccttgatctgacccgactgagatgccctga

SEQ ID NO: 366399 - DNA, 716 bp, Cannabis indica
taagttcatcaacgtatgcgtcttccgaatctgcgagttgactgttcatattccgatgttaaactcgcaggtttatcattatgtttaggatgtctgcgtccttagatagtcgccttttgtggacatcacatgacgagctgatagaacctagacatacgagtctatatttgtttatcaaggctgcagggttcttaggaccaactcgcatttatagaaagtcggtctcctggtttatacacggacatggggaggatactcgcacataattcgatatatgcgagctactctcttgtctcgaatgcgatcagactttggtcatgctcgctacctctcgctgattctatcttaagcgaggtttgaaacttcgaggagtccctcatggacatctcagctttcattggaaatctaagtatacgtgtcctctaaacaagggtctggtctcgagtttctaggtgagagaaatctcactataacaacgggtagggttaggttctaatgcgttcaagcttctaatctttctactcctttttagatcacggttgggattagagatattagattctagttttaattaaaattcactcatagaatctgaacctgtcttccccacctaaaaaatttacctcaagtgattaaatgacctaaagtataaattgtaagtcatggtgtcttgtcttttgacatgcaaagtttgtattgattttgagtgctctatt

SEQ ID NO: 366400 - DNA, 685 bp, Cannabis indica
tctttagatgaatttactgtgtttacaaaataagtaatgagcttaaagacatcaaggtctttagcacaactaattatcaaaatattttgacaattaattaagaaattaaattagaaaaataactgacttcgtaggtggtgataattttttcaaatttaataatattcatacatccaaaaatcaattaaatgattttatacttaatataaaaatattctaatattctcccacttgatcaacatttagatttaccacgtaaactcaatgttcttcattacacaataaacatatgaatcatagcgataggtcctcattatatgtcaagtattattttccatgtattacgatatattcactatataacaatgtactttaatctggcaatgtacttaagcgaacaaatcctaaactttatgtttattctgatcctcttacgaaaattttcttagatgaaatcggtgcacgtgaatatgtaaagatatcgaaatcaaagtttcattgaataattctagttgtacaaccaaaaacttcataagggtagctaaatcccatatttactttaccatccttaaatttgtgttgtggcatgcctttagtcaaataagcgatcacccaattcaatattacgtgcttaatgaccacttatcagcctctttatggctaaatacttaatgtcgatatgcta

SEQ ID NO: 366401 - DNA, 504 bp, Cannabis indica
agtaagtgttcttttttttttcttacgcaaagtaagtattctttttaactacaagacaaagacaagaaaagaatatcttatttattttttctaagatgctcaaaaaaggacacattcatttataaacaagaaggttccaaaagaaaattatctatttttgtatatattaaatatgtaaaaaaattaaattatataataattattaataattaacaccccaaaattttttcttgacaatatacacttctactttgacaactcttcctcgggtattgtgtatattttttttttctttaagttgttcaaaaaaaggacacattcatttatatatagagagagatagggtgtgcataaatcaatccagtccaatgagaatcgatcgatccaattacaaccgactgccaaacattggatatccaattgtgatcagatcggattggatgttatttttaaatatctaattggatcggatcggatggtagatggagtgtttaaaaatccaat

SEQ ID NO: 366402 - DNA, 838 bp, Cannabis indica
aaagtgatatccatttaccaagagttaagtgccaacatgactacttatgtgtaccacttatacacgtgttatattatattagtacacctaatataaattttctaataacaattattactaaatttatttaaaattaaaaataaataagttataaaataaaatcatttcagtattttttacttaaaaaaaactattaattaaaggtattttttatttttttttattttacacttcaaaatatagtttttttttttttgatttttaaggaattctacatagaaacccatattgcaactagcgctgcaacctaaattgcaacaaaaaatcgtacagaaactcctattgtaattagcactgcaactactttagaaacctaaatcgtaaatttaaaaaaaataaaaataaaaaaaagtataaaaactaataaaaattagatattggattattaaaatttgatcaaaaaagaaaggacatcttccctattttggtgatgctttcttgaagggagtgtcgtatctagcagagaatgttaatcgtgtccggatatctatattaatttactattattcagttgtttctttatgggttgtaagttggtctgagtggaggctaagaaaaaatagatattagatagtacaactacgacaatcaaaacaatgaacggaacagcttgctggggcttaagtggtcccatatttattagttctttttctacactttcaacttcaagtctcataaaaaaaaaattaaaaaaaaaaaaagaaaaaggaagcaccaagcactactattctttttttttttttttaagaaagtaatcaaactttatttaactttcaaa

SEQ ID NO: 366403 - DNA, 626 bp, Cannabis indica
gacctgatattgctttccagtgaatttgttatcaaggtttagttcatcacctactaagaggcattggaatggaataaaacatatatttcgttatttacggggaactactgatttaggtctatttttcccaaaatgctcaaaccaagaattagttgggtttgcagatgcaggttatttatcagatccacataaagctagatctcaaactggatacgtgttcacatatggaggcactgcaatatcatggcgttctcaaaagcaaactcttgttgctacatcttcaaatcatgctgaggttatcgcactacatgaagccagtcgagaatgtgtatggttgagatcagtaacacaacatattcaagaaagttgtggtcttttgacccataaagatccgaccatactatatgaagataatgttgcatgtgttgctcaaataaaagaaggttacatcaaaagcgatagaactaagcacattcctcctaaatttttctcatttacacaagaacttgagaaaagaaatgatctaaatatacaatacatcagatccagtgagaatctatcagatcttttcacaaagtcacttcctactacaatcttaaaaaaaaattgagacatggtattggaat

SEQ ID NO: 366404 - DNA, 501 bp, Cannabis indica
ttgatattaaacattatacatttagttagagacatcaagaaatctgaatgaactgtgcatgtatgttatttagtggtaacccatttaacagggtagacagattagaaggatgacaatatgagttaaattgttaatattccctagtggaatatagaaaatgagtagttaatggaggcatcgatctaattgattcaaataacaaaatcttttgtttagaagtgatctagcgttaccaaaggtgggacaatttatgagtattgtctggaatcctagatgaattaaaggtgacgattgtgtagtaattttgagattatgtaggagtgggactacctatgttagcaagaagcatcttttttttggtagctcaccatgacggaactccatggttgagtgtccttgacttggggtggtttcatttaagaaaatttcccatgaagcgtgcgagtaagagcaaagcacgttagaaacacttggattggtccgttggaccagtcgtcagtc

SEQ ID NO: 366405 - DNA, 846 bp, Cannabis indica
gcatattgagtataggctgacattatggtcgatagtattgtcgtatgaacgttctagactcagtaccgtgtgggacacggggattagggttatgatcgggtgtatgggcgccaggttataacccgggttagttgtatgtttatgttatgcctttcttactgagtctgtcgactcacagtgctatttccatgtgtaggtaagggcaaggctaaagctgaggaatcgtgaagacgagcagatgaagattgtacatgtcgggacggttagacctggaacgtacgatcctcgggacatcagggcttttgttgtttagttgctgggcgacaaacttctgattatatgtatagctaacttttgtaaagtattttgtaaacgggatcccaaaatattatatatgtaatactttgagtttttaattaaataagaaaattttaatcacgattttcaataacctcgttgattagcaatgagctgcacagtatgtttaaaatcacgttaacacgcctatgctagttagggtgtatcactgtatctccttcaatcgatctttgccttcgccaatcacacactacaaatgtcgtcgacggtaagaaatgggcacgagggagaagaagagcgtaggcgttttggattttaggggttgaggagctccatcggaactgagtggaaatatgagagggaacacgaaatgggaatgaacactcacatgtgttttgagtttttgtcatttattttttcctcaatatggttttttttttagaaatcctgaactgggttttagactttcagtatttaaaatttcatcactatttctttcaaaaaaaattatcattatttataaaatgt

SEQ ID NO: 366406 - DNA, 507 bp, Cannabis indica
accaacatgacatctttatactaggaagcacttcaaaattgagagttcctatccctatgacttttccaacaagaccgttaccaaaagtaacttctccacattgcattggtctaatgttcacaagatattatttttcacctgtcatgtgtttagaacaaccactgtccaaagtaccacatattagtagcaatagttttaaaacaggaagaacccaccaagcatttatttttgacaacccatttttgtttttgtaaaacatgtttatttccaaggtaattagatttaaacatgttttgcatagtgatgcatttaggtcgaatgtgaccttttatcccacaaaaatggcaaatagggatgaaacgtcttccattccctttggaattgtcaaacttacggtgctgcttcttttctgtaacagtagagtgttttactgaaagtgacagaatcttgcgaggtagaaacagttcttccagaaataaaaatttcagatttaacaaaagtggtatt

SEQ ID NO: 366407 - DNA, 704 bp, Cannabis indica
atcaaagaaactaataacttgaatagaagctcatgattactcaggatttaggtcgatctattgttgatcatcattatgatatgaattaggtctttatagtaaatgatatgtttgataaggaccgctttattcatatcggtccttgtcatatataatctccattatatacaataccttcacttagatgtcatactacatcagtaatccaaactaagattacttgcaccgaagaacgggcatcaatgaaccatactagcaatatcaatgattctataacttttatatgttaatgactcttttattcatagctaagtgatcttagttctttgtagagctatataagtcacaacttcatatatgaataagaatttttttgatatttatataaattattcaataataaatattaataatttaacattcatgcatatattaagatgttcaactctttattaataatcaaaaatgtctttgtaggcttttcagggcataaaccttaacaatctcccacttaccctaaaagtaaattggacatttcccttagtcccatattagttatatgactcataaaagattttgactcataaaagattttgctggtaacgtttttgtgaatggatctaccaggttatgatctgacacaatcttcaagatcgtcacatcacctctctctactatatttcttagtagatggtactttctct

SEQ ID NO: 366408 - DNA, 691 bp, Cannabis indica
aaatacatagtagggtgtaacagtaatctaatccctttacaatgtagatcattcatatagaggatcattgatcaaattaggattataacaatggataactaatgatgtatctatagtgaaatatttagaaaaatgcagaaggataaaaatcacagctcgaaggagtctgtgtatgaaacttttcatttatagaagaagctgatacaatcaataatcaaagatgaccactccaggtcttacacgtatagtaacagaaaatacaaaaggcataataatgacatcagcataatacatagcaaatcattggggattctcaattctaacaacctccagattcctgggaccacaggatattcctcatagtagaatttagtgcattctgttattcaattcttttcacaccaccacacaaacgaatgggtgagggcatcactctgagtttgtcaactaagaattgaaatcttgtgtgagacagagccttggttagacagtcggctgtctggtcatgtgttggaacatagcgaatttcgatttccttctttagcactttgtcccgaacaaaatgaacgtcaagttcgatgtgtttggttcgagcatgaaacacgtgattagaggccaacgcacttgcgctcatgttgtcacaccatatgattggggcagctgctattctgatcttcatctcttgcaacag

SEQ ID NO: 366409 - DNA, 560 bp, Cannabis indica
tattacctttgggcaaataattaaaatatacacatttaatattaactcacttcatggaatgtgaactaatatatataactactacctttgggcaagtaattacacatatagccaaccaaaataaatattttctacaacatatgaaatttggtgataaaataatcattaaaaaatttaataattttcaaccaaattttcaaaaagttatatattaattgcttgtaatatattgataataaaaaataaagtgtccaccataatacattatttttacatcgaacactcaagttttacaattttagaataacaaataacggaaagatgtgaaagaaataatattggtggagattacaatagtcaagataaatcatataagagagtgactatgtcaaacagatgagaagaaactcaaaaaattttctatgatttatggatttcgaaaaatcatcaaaaattatttttaataattttttaactcataactatcattaaaataataataattattaaacggagtcaaaaaattatttaaaaatcatagaaaaatcagaaattaaatt

SEQ ID NO: 366410 - DNA, 529 bp, Cannabis indica
tgatcaatgaatacagtttctgagtacacacgtaatgcacaccttgagcaacagatcatccccttccccagccacaatgatactcatgagagcactaaaccttgaatctccattcgtgtgtgaacagtgatctcatgtggtccaagaagagtgaaaatcagctggaccactctctcaactaagcaacaactgataatagcaaaatgatcaattttgtgtggttttttataagaagccttttttttttctatatcactctggcttttgctttagtacccagacatggctttcactctcttcaagagatgtagccgtcctctttgagtaccaagaaccaatagagaaggagcacactacttatgagaacaaggtgtaagagagctcttctcattgcatctgaaagaggtagcctttttgactggggaagattcaagtgtagtatcaatcaaaatagtatatagtagatggggaaggatagaataacccattgctgaagaactgtgacatacatgcatactcataggcaaaa

SEQ ID NO: 366411 - DNA, 553 bp, Cannabis indica
gctctctagccaagatactcgaactgaacataggttctgactatgataaggcaaatcccaacactgacactgaccatgtcactcgtgaccaaggtagcatgtgtggcaagatgccaacaccaagttaacgtgccaacgcttctatcatgccccattcgatactgtccaaacagtctccctcatcgcccaaggactcccatacgtccatggaccaatccacaaggcaccatgggcctccgatgcatgttggcaggccctcgagataagccacaaaactagttgcatacattagacctctgtctctttccaacatggtgtatccgtcccatgcacgtatgcaaacttgcccacgaatgactacgcgtgtcatctcgtgatgagacttgtggccatggcacagtacaatgtctcttggaggttgggccccgtcccgtgcaagcaacttactggcaagccaatggaaacgtacccgttaacctctggcagcttcttaaacgcactactgggtcgacccgataatgtctatgagtactccaactcatggagacatatg

SEQ ID NO: 366412 - DNA, 500 bp, Cannabis indica
aaaaaaactatagtgattgccggagttgttactcgtgccgaaaaagtcaccggagtttgctgccggtaccggaaaagtagtcggagtagctgtcggtgacggaaaagtcgccggagttgctaccggtgccaaaaaagtcgtcagaattagcattgtcgctggaaaaatcatcaaaccagtttcttggtgatttttctggtaattttaccggtgacaatgcaaatttcgacgactattgtggagtttgatgtcggtgccggaaaagtcaccggagtagttgccggtgttggaaaaattaccaaagttattaccggcgtaaaaaaagtcgtcagaattggcattgtcgccagcaaaatcaccaagaaagtagttttttcatcaagaaaccagtttcttcaccaagaaagtggtttcttcatcaaggaactagttttgttacacaacaataataaagattatgaaaacaaacaaaaatgatatacactgaaaataattgaaac

SEQ ID NO: 366413 - DNA, 564 bp, Cannabis indica
aattaaaataaattcatataattaaatgatataaaaattaatttttccatcttcttccagctatataatctttacagattaacaataaacttttttatttgtaaggagattaacaataaactttaattctcgattcaaatgctatttttaattctatttttatatattcaaaattctcattctataaactttctaccaatatttttcaattaatgaaatgaaaaatcaaactttaattcctctatgaaaaattcaactttgaatccccataatcaataaaaataacatcaaatttcaagttctcacaatatataaaactaaataaataaataaatgttgctaacaaaaaaaaaaaaaaataaaaatgaataaataaataaaaacagatcttataaacacaattcaaacattagaactctagtaaaatactaaaatttaaataattaaaaaaaacacacaataaaattcgaacccagagaacttaatattttaagtatttatgtcacaaattttttaatagtaaaattaaaatttcaatattattttattaagtaattattatta

SEQ ID NO: 366414 - DNA, 698 bp, Cannabis indica
tataggcctacaccgggaataattttgggtaaaaggaacgtgacaaactgttaagggagacttaccagatccggatgtgctggcatcaggagcctcaatattgggaagcgggaccagcaacttaggccgagaaggcgttcgttctttacctgcctccagccgaagggttctcccggcaacggcctaagccttgatataggccaactcctattccctcctaaagaggtacttttggtaccgatcctccgccaaggcgatgatgtctgccctgagggccttttccgcgtctggggtacgaatatttaggcagagaaccttagagagattgaattcgtccactaattgactccctgagatgagcttggccttccggcagttctccgttgtgaccaagtcccccacattaagacctttcttgtcataagtggagaaaaccctagcatgttggaggaacacttgggtaggagcaatacggagaagaggagggatcctgacccactctgtgaggagctccgggcgatccacgacttggaagtcggaagagaagaaaaagcggtggcgatattccttaacattcttttgaaaataaaaaaggaccgggccctcgttagaaagatgggcccggagagttaaaaaaccatccttaaacttgtccccctttttgggggcatacacaagttcataaaaatataaaattt

SEQ ID NO: 366415 - DNA, 1134 bp, Cannabis indica
ggcagacgcgaccgccctggagcgaagcgaaagggcaaaatggagaggcggaaccttctaagcggactcagacggggggacacgccggcgccaagcaacgactccgggataccttccgaggcggaggaatacactgtgccatacgacatagtgttgaccccggttcctgcagatgaggagaggtagaatctctgagtggccaaacacaactacgcccttggcgagtacagtcgggggcatgctgaggtggaggccttgaagagaattttgtgggaggagcagcagaacactcttaacgaggatcccttccggaatccgtgggacctaaacatggatccgctgacggactggttcaaccgcttcgtcgggcccaccttggctccctttgcctcggagatgactagccagttcgtctcccacatgacgcaattcccgcctaagagatatgctgcttgcgcctctctgaactctatctaccaggtccaacacattagctctgccatggccgcggtgagtactttgtaatttattccatcccttgatatttcgtctaaggcatctgatctcatccttgtctctttttcagattactgctgagactggccacctttccaagactcttattgaccatggcttcgtcatgtccgaatttggggccatagacgaggccgtgaggatccttcgagacttgtctaccgaaaggggagcattccaggaggaggctcaatggagggaggcccttgcagaggtaaagcttcgagaggaggccaagcagagggaggctgaagtggaggcgaggcaccaggaggcgctcaaggtggagggcgaggtcgtggctatggctagacgcgagcttcgggaggccatggaagccatggacgaaatggctgccaaggtgaagtccctagaggagttgcaccaggcagacttgcagtctaaggccaacctgaccgtggagttgaaggagctaagggacttcagagaccaggccttgaagaaggctaaaagagatgagctcctaaaccccgtctcctgcaagcattgcgccaagcgctttgacgacgacgtctacatggcctggcagtcaaatggccaaagtattaagcttgaattctatcccaagcctgaagaggc

SEQ ID NO: 366416 - DNA, 613 bp, Cannabis indica
acggagaatcggcggagaatgctccccccgtccccatttctgttaaggattttaatccccatccccgcttatttcccatcggggatgggtggagaatcccctaagtggggagggggggaatcccctaataaaaaaataaaatttataataaaatttaaatatataaaaatagtaaactacataaaaattaaaatattacacattaattattatttaacaaactaattattattcaaaacacgacttaaaattcataaaaagaatactaatataataaaaaatacaaacatacattataaattataaaatattactagaattataaaataaaatactaaacgggtccacgtcggggtgaggagtatgatccccgtcccccctccctttaacattaagggacaaaaagtaataattcccgttcttgccccattccccatttagacgagaaatccccgcccctagggctgagcatttagacccgcaaactcgaaaaacctgaccacccaccctgacacgctgcaaaaaaaaaccgaaaacttaaaaatccgtgtggtcgggtcagattcaacccaaaaataccccacacgggtttcgggttcgggtattaaaaatt

SEQ ID NO: 366417 - DNA, 859 bp, Cannabis indica
cataaaacccaacagtatactcttccttaatctaattaaccttatatatcaaattctagtaaaattattataacactaattcttaacaatttaatgtaggcacatctgggagagcataaaatatttgagaaaaaaattcaagtttcatgacccagagcttctcgtagtgaatggtatcaacgatgaagagaagagtcggtcttttgacaatacggcaagatgattggctaccaggttatcattgatgaataataaccaccaaatgttctttattccctggaatattaggtaaacactatataattttttagtgctaattgtttatttatatattataacttagaattattttttatactatcttaccaataacccaatataattttctagtgcgcattggatactagaggtcgttgtgccaaggaaagctatccatttagaccctatatgtgaccaccaagtttccgaacaaattattgaaatgttgaaaaggtaataatttaatgactatttatgtaacaaattagttaagtaactaatgaattgaaatgttaatataatttttcaaacagagcatacaaatatatagggacatcaaatgcgtatcttgggccgtggccaaaaatttcactagcaacttgtctaagacaacctaaaaatcaagaatgtggtttttatgttttgaaaaacatgactgacatcgtcgcacgtggaaacgtcaaccgttatatacaagatcaaaaagcaataagtacttttaattattgattatagtatttattataataacaaataatatatataaattaatataaatttttactttttttttcagtttggagacaagcaggaatacaat

SEQ ID NO: 366418 - DNA, 752 bp, Cannabis indica
aagtctagtatgcacatgtctattcgacctacgtgtgtatacgtaacgggtaaaactacccacctacttaaagtaaaaattcataagttaaatttaattattttctttatatgtttattttagtcttatttatagtttaatttttactattatttgtcgtttccctttaatttgtttttcctttttttttttgtatttacatctatttttttatataaatctttatagacacatttttttagattttatttgtttaacttataaactaaatttttaggttttgcataaagttctctctcaagctctgagaatattttctcttaaaatgcatcataaataccttgaaccttcttatctacttaaagcttttgctatcggaagaccaatacaagcatatcttgtaataataattagggaacctataaaaatattagaatttggattaatttttacaaaaatactgtcacacagagatcttttcaaaaatactgtatttttataaaacaccagtaaacacacaaagcagaacaactcaaaacaacaatagaacaactaaaaaacaccagtaaaatactagtgaaaacttaacacagtatactgcagtatgaaacttataaaaaaacacaataataaagttaacagtatttttataaaaaaaaatagcaaaaattagcataccatgtaaatttccctaataattatgtttagataaacgatacaacaattatatttttttttcaagttaaatacta

SEQ ID NO: 366419 - DNA, 562 bp, Cannabis indica
gaatgacctgggaggaattccgggatttattcaatgccaaatactataatgaggcggtccgcagtgcaaagcggaaagaattcgttgagttggtacaaggcgagggtatgtcagtgactaagtatacaaccaagtttgatcgcttggctaagttaacctctggaatcgtaccaacagatttcagtaagaaagagaaatacttggcagggttgaatgctaagattaggcatgatctggttattacaacaaatgatactacaacttatgctgagatggttaataaggctcttcgagctgaaggagcagtaaaatttttacatgagacccgggagactcctagtgctggtggaaccactactcttcctatttctggccctggaaaagaaagtggagattccacttttgagcaaaagaaaagaacttttacatcctcgggaagttaagggcaaggtaaaaggtttcgaggaaaccagaataaaggaggacgtcagacttactcttatcctgagcgcccgcgttggaggaaacatcacccgggacttgtaatcgaagggcctgtttt

SEQ ID NO: 366420 - DNA, 1187 bp, Cannabis indica
aattgatcaagtttggtaaaaaacactcttttaggtcttaaaaagtcaaaattatgcaagatattaccaaaattaagatttgagcattatttttgaaaaattatttttgagacagtttatatatgagtatttaaacatgtaaaagctttcaaaacaacaattttctcaacaatatgaaattttggcaaatttcacccattatggccttaaaaagttgaaaataagcaaataacataccaaaattttattcaaagcatatttcaatcaagaaaaacctttaggcatgctaactacactcatttgcacatgttgaaacatataaacacatatactagctaaacatgtaaaagttcacatattcattagttcaaatgtatgtccaaagttcaccaaaaatttgcataatgacctataatctgaatttttcagcatgtatagttcaagaatgtcaaaactctactaatcaaaacttttattcatagaaatagtatgtgacataccaattaagcatgtatgcataaaagaatgaacaagaaggatcaaaagcaagtcaattaacaaaacacttcaaatttcattttcttttcatctaggcattttagtcacatcaaaataagtagaatgaataagaatgatattaccgtttcccaaatttgttcatttgggttgttttcaagaattgacacattctttttctgtccttttgagacttgttggtaatgtaggaacttcaaattcttcttcaagcatcaacacccaagagccaactttggttcctctttattgatacctacaaaacaaacttatatctttctttttggtacccacataactttggtcctttgatgttagtctttaaaacctttggtatcgaaatagccttaccaaaatagcattctttttcacatggcaataggatttagtgtgacaatcttggttacaataagtgcaagttaagttcaaattactagatgacttgacaaagaaattcctaagtaatttttgtttcacactagtgttatatcctataccactttttgaaaaagcacatttttgactcccaagcatcatttcaaaattttctttccttttgtaaaattgtaaaccaccttgtttaaatcatcaattttagctttcaagtttacaacatctttttcaaataaggaacaacttttgcattgggtttc

SEQ ID NO: 366421 - DNA, 516 bp, Cannabis indica
gagtctaagatgtctgcgtcctgctcaagtcacttgtacggacatcttgtaataagtcggtaacctaagacatgcaagtccttatcagtttatcgaggttgtagggtcatctggaccagctcgcagagtaaaaaatcgatctttacaattcgcaggaggatgtcgaaagtcctcgcatatatctcggtatatgtgagtctaaaaccattccttggtcctacgctatgcaagccatacgaatgcgactagactcgatcatggtcacatcatctcgctgaatctagtccaggcgaggttcatactcgaggggtcactcaatgacatctcaactttcctcgaaaagagtgagtacacatgtcattttcataggagtccggtctcgagtttctaggtgagaaaatcttactataacacatgcccctagtttcgcgactgacagatcaggtcatgagggaaactataagcgagaggcaggcgaaggggtgtcacgagacggtgacctttggttgtcccatc

SEQ ID NO: 366422 - DNA, 407 bp, Cannabis indica
aaaatactccacacgggtatcgggtttgaattttaaaataagccaaatattttttcgggtgttaatccgaaacccgaagtatttggcaaagcacaaattttcatgctactaaagtcaaaacaaaagtacaaattttttatttattataaaataagaaaaagaaaatgtgagagaaaggttgtctttacctctgccacctacaaaagtaggtcatgcttcccatgccacgtgattgatatgactattcaaattgttttactttttattttttatttttttattttactttcataaaatcaaaatgttattattgtactttctatgtcagtgaaatacacacaactttttattttactttttgttttacagtgctgtccagaaatttaaactgtacactttattttttt

SEQ ID NO: 366423 - DNA, 558 bp, Cannabis indica
tccaaacatgcttggtgcaagatctttgctaaaaaggaatattcttcagagcactaagtctcttatgaagggtttcctccctttgacttgtttgtcgatgcagttggcaacattttgctggaaaacatgccactttaagttggcttggtctcttcctttttttcttctttcgtcaagggatccataatagaccaaaagtacaagagtagactgttggcagagcaggctagctggggtacagaccaagtgtccagccacattgagggagcattgcctggccagttggatgaggctatggtcgaccagctagtggacgtagtggccggctagattcttaattctagggttgggtagccttttgagcccatggtcagccatcctttaagaggccaggtcaatgctgcaattcgatcccagctacacccaattgcctttgccccgtggcatgatttttgtagagcctttacgcactcctattaatagtttttcagcttcttacttggttacacatcttaaagggggtattgggatatcacgtctatgttgggttttatgccc

SEQ ID NO: 366424 - DNA, 581 bp, Cannabis indica
gagagaattttaaaattctagcctatctttatttggatgacacaagtgatagattaatatgttatgatcatgataggaactttagaatataattgagaaagtaaatctaaccattcatatggataaaaataacttatcacaattatgaggataagataggaaattttgttaagtctattcgaatgacttgggcaaaatacctaatccttatgaaaaagttttatggtgtctttaatgattacttattcttaaacaagtattttacattaatgttaatactagaatgctatcttgatgacttagtttagaagaaacttatagtttcagactaagataaaatgtcaccataagatgtccctgagaacccatagtaagaggttaaatgtactcctatgtacgattttaaccagactcctactgttgagtgggagtcatctaagatgtaatcaaacaaggaacattaggagacaatcatggaagaatctctgaaagtgacctatatgttagataataagggtttatattagaatccttatatctacaccaactcataacctattagagatggtggttactctggg

SEQ ID NO: 366425 - DNA, 684 bp, Cannabis indica
ttcttccttattcttaagtcaatacaactaacgaggattaggctattaccgaagtgctcggggctgaacctctataaaatttttgtgtcttattattgctttactacatattcttattacgacatatcttttatcgcttatcaaaaagactcattgtcgttggctaaaagcgaagtcaacaaacctcaaaatatcgaaattaataataatctattgaaaaataaatattattaatttaaaatatgatatttaagttcaaatataattaaaaataatattttattttaattttggggtttgaaaattagaaaaatcggatttttgggaaaaatccctttaaaatcggactttttgggtgagctggcagtaaggctccacgagcagccccaggatgctgcacgagaggccttacgcgcgcgcaggagggacattttagggtcccatgtgcggcacatctcggtgcctacagggggacgtgcgggcgaggtgcagcatcccgtgtctgaagacacgggcgtgacaccttctgacaggcagcgtccctggatgtccgcgcacgtgtgcctggcttgtccgagtgcctagtgcactcgatggacccactcgacagccatggcacccaaatttcaaaaattcataacttttccaatttttatcggaatcgagttctgtaaaaacgaaatt

SEQ ID NO: 366426 - DNA, 755 bp, Cannabis indica
aagaaaaggtaacaataaatatgcaaagttaaaacgatataagtcaatatattcatatattaagggagagctaaactcaacatgtttcaatttacttttcttttcctttaaaataatcaaatattttgatattatcaaaaatgaggagaattttgaccaaaagtcaatcactcacttattctgatgataaacaatatttgattattatttgctattaatcttttcttgatcattttacatacaaattcacaaagtatcaatatttgttcggtaaagtaaaacgtaatcaaagaagtagattcaacaagtatacatacattataagagcaaaagtttcatcaagagatcaaaaattcaagaccttatccaaaaaaggacttcataagctcaaagtcaaaaatcaacctgttgaccttaaaaagtgatcaaccgacaggggggtcatatagatctgatgcttgtcacgtgtttacacaaataagaataaaaagcaataaataacaagatttgttatagaggttcgacccccttgtgatagtgggtaatgacctactccccttttagttgtatttataccgagggaaatactatccagatcactataggtggaatttgctatagcaccctataaggatataaaacatgaattagtaggcagatctctaatgagagagtgagattgccttagaagagtgtgagagagatggagagaggagagagagccctattgggcatgagcaagagagagagagaga

SEQ ID NO: 366427 - DNA, 1230 bp, Cannabis indica
ttttttattgtcgcagatagaccggctcgaccggcactagacgcaactcgcagagaaacagctgaagttctcgaaagtctccctgttcaagatcgtgactagcgactactgtgcacgaccttaaagctgcgggaataaaatcttattctagagaactcaagccttcaaagggagccagtgtacaaggagccgtctgagaagccaaaagagcgcatagacgaacgcctttccaattagacttctcggccaacgtcaggtaacatttcgcatgcataaactagtgcattaagatttattattatttgtacttatcttttcttgtcctcgcagagatgaattttctgaagtccgcaccagtccttaaccgcaagccaaagactggaacagcgacgacatcacctgtcgttcctcagaagaggaaaagcgatgttatggctactcctacctcggattcctccaagaagctacctaagactacgcaagaaaaagggaagaaggtcgtgatcgatccggccattcgagctcgcaacatcttaactcttcaagagaagttcgtgggtgatgagtttatatcaaaggtcgaaggacccctgctgaagagcttctgccttgttctgcggaattggcttcgcagttcattgctacgttttcgagggcatttgtcactagatccaaggaagtggaacttgtgaagaggcagaatgttcagcttcaggaggacatcaagaagctaaagcaggatgcgactaccaaggacaaagagctcgaagaacttcacaagtctaaggagcaagtcgagctcgaagccaagaactctcagatgaagatcgaggagatgtgtcgcgacttggaggtcgagagggagaatggaaagaagcaatacgaccaggcggtctctaactatatttatacaactctttccaaaattccggacttcgacttctcaatccttggggcggaagcggctgagatggctgaggcttttcgagccatgtcgcccacgcagactcaaagcggtggaggaaatctgtttcccgaggatgctgatgctgcggacaccgaggaagtcgtggacgaggctgccagcaaagttgcagatggatctactaccccaactgcccctgctgctcctaatgcttaattttcactttaatatttacttttgctagacttttttatgaggtacaagggtactcgcaacttgtccttagaaaaatttatgcttatttt

SEQ ID NO: 366428 - DNA, 773 bp, Cannabis indica
aggattttcctcaatacccctctcgttaactatgaatcccaaaaactttcccaaggagactcgaaaggaacattttttttggggtttaaccttaatgttatactttttttaatatttttaaagcatttggcgaggtctgaggtatgatccttactctttatcgacttcaccaacataccgtcgacgtaaacctccatgttttgccctatctaatttgcaaacattttgtctactagtcgctgatatgttgccccagcattcttcagtccaaacaacatgactttataactatagagtcccatgtttgttatgaagcttgtatgttcttcatctgagccatacattttcatctggttatatccagaatatgcgtccataaaagacataagctcgtacccagcagctgcatccactagctggtcaatcctgggaagtggaaagcaatcctttgggcatgtcttattcagatcagagaaatcaatataagttctccaatttccgttaggtttagggacgagaacaggattggctatccacgaggggataaaatacctctgtataaaattgttgactaacaacttatcaactttctgttttagttgctccttacctctcggaatctaagcacctccctttttgtctctctactgggtagtttgaatcaacatttaagtgatgacagataatcttagggtcgatccctatcttatcctcatgactccaggcgaattgatcctggtttgcctttaaaagctcactaattgctatttgag

SEQ ID NO: 366429 - DNA, 868 bp, Cannabis indica
ttgcatactttactcctccctttcctgttggcagggacccaataagatctatcccccagaccgcgaagggccaggggctagtcattaaggtaatctcattaggaggagctctcggtatgttcgcgaacctttggcacgaatcacatttttggacgtagtctatgcaatcttttttcattgttggccagaagtacccttgtctcaatattttctttcagagactcggtcctcctgtatgatctccacataacccttcatggacctctagcatgatttgcctagctttagggtccgatacaaaccttaaataaggcatgctgagtctccttcggtagagaattttgttcatcatcacataacggtgagtctgatactgaatcattcttgacagtgccctttcttagggcaactcacctgtcgttatgtattcaatgatggggaccatccagctgggttcttgcccaaccgttgttatggcctctttcactttgatgcttggctctgccaagcgttccacgggtactacccccagtttctcaatctcactatctgaggctaacttagccagacagtctgcgtgagcgttcttttccctgggaatcctttctactttatagtccgcgaactcgtagagcagttcccggactattgctacatacgcgaccattctctctccgcgcgtctgatactctaccgacacctggttcactaccagttgggagtcactgtagacctctactcttttagcccccacgatgtttgctaatctcagtcctgctatcaaggcttcgtattcggcctcgttatttgaagccgaaaagtcgaaccgtagggctgcttagagtcgaagtccgcttggagatatcat

SEQ ID NO: 366430 - DNA, 530 bp, Cannabis indica
taggcagtgttttgggataaacagctattggtttacaattattgtgacatagggccgagattatcggggatagttctccacttgggttggccgaagtgtttgaacctgaattaaaagtaagaaaagtatattgtactgcatagtacgttatatgtaatacaattagtattgcaatgaattgattaatattgagatataattaatattgttatataatgaaaagactgattggttgagtatcgataatgtgatgatattatgcatgtgatatatgggctcacctaattaggtgatgcgatttcttgacgatatactgggcgttagtacgagcatcagtgatatatgatgagtaccgagcgtaggtacaagctcacctgattaggtgatgcgatttcctggcgatgtactgggcataagtacgggtgtcagtgatatatgattgagtaccgagtacaggtacaggctcacctgattaggtgatgggattttcctgacgacgtactgggcgtaagtacaggcgtcagtgacat

SEQ ID NO: 366431 - DNA, 1050 bp, Cannabis indica
tggtaatgagttatattaaaaaatttgtattattttatgaatgtgtatagataatatgtaaatgcatcaaactataaataaaataaagcaatgaataattgagactttaagtaaaaaaaatataagtaaaactagcttaataaaattgtatattaaatatgtacaaaaataatatatattatatataatatatatgttcggtcggttttcggtttaatcggtcggtttgccattgacactaaaaccgaccgtgttaaggcagttttaaccgaaggcagttttttcgattgtcgtttttcggtgttcggacggtcgatgtattcggtttggtcagtttttagattttttgctcacccctaccagccagacctgcattgggtagtgtctggtcacccataactccttcatggctggccagacctacgaaggacagggtctggccaccggtaatgcttccatgcctggctagacctgcaaaaggtagggtctcgctacctgtgactccttgtgtaatggtcgcttaattttaatacgagaattagcatataattagggtttaatttagaatcagacttttaatcatgatttatgaatttatggagatatatttgaatttcgggtgtgttatttatgaaatttcatgtttttcatattttatgctcggtaacaatggaacacaacgtttggttgatagagtcattttttagtattgtttaaaattttagaaagggataattgcggcaaaagtccccaaaaacttaaggttgatgccgattagtccttaacctcaaaaattggcggtgaaaatacctaaggttccaatttttatttgtccgttggtcctttttctaacggatccgttaaacccaaataaagtgccacgtgtcaattttttattggtccaaataataattttaattaaaaaatttaaaataaaataaaaaactaaaaaatatattttaaaattataaatttattttattttattttattttatattttcttttttttattcatcttctccaagatcttcttcacgcatccaacccc

SEQ ID NO: 366432 - DNA, 548 bp, Cannabis indica
ctgtatcatacataagaatagataatacttttcgaaaaaattatgcttaaaatattacgttttgattggaatacacacattatttcttttttaaatctttatactttttatttttacttttatacagtattagattttttgaagggaaagactaatgtatgtgaatcctatttgttggtggtgaaaggtggacgtgtcaaatggcgcgtttcaggtttgttagattgttttttttaaataaaattagataattaaaaataatattaattaaatgagtattttagtaagaaacaaaaaaagaattgtgtaagagcaatgtggtcatgtcaaatcgtcaaaatgtgtcactaaggctaatttatatattaaaaaaagttacagaatatataaagattaatgttcaaaattaagcgtccaacaatgttagttcaattttgtaccaactttcttgatttggatcatccaatctccagaacccaaagtgcaatcaagtctttctttgatgagagttttccaattttaaccattcgaccaagtaaagctacccc

SEQ ID NO: 366433 - DNA, 561 bp, Cannabis indica
ccaaatcccctactatgtaggcttggtttttaattaataactctatttttttattttaggaaaatggccataaggcccagacattggtttgccctttgtggcttttctgtaaagacaagtttgcaaagttggatggccaactttgcttttattttatcttttatttaatgccttgtacttttacattcaaacttaatacatttgtttacttgtgtttttcattcacaacttaaacaattatgttttgatcaaatttaaatactttaggcctttccattgctcttattttcctttgatattgtttgagtagttattaatctacaatatgcgcaagcaggtgttgtctgctatgcttttgatttgcgagcagtttattaattctacttcgcataaacaattgtaatctgttttaagcaaacttaaatatacttttacataattcattttgcgaattatcttgtacattattaattgcttatatgaatagttaggccttctattcatactttaggtttaggtatttttttctcaaggtcatcttagtgtctcatttaatacttt

SEQ ID NO: 366434 - DNA, 892 bp, Cannabis indica
taaattcatcgacctttgctgctagaactgttgagttataatatttctcattaaagacccttttgaaatcatcccaattcatggtatctacatcctttgtttgctccacaacctcccaccagatacgagcatctttcctcaacatgtatgatgcacacttcactcggtcattcccatcgacccttaacatctgtaaaatcctttctatgcgactcatccactcttcagccaccactgggtctatgcctccctcaaactcaggtgggtgttgttttcgaaatctctctacaaacatctcatgtctagcctctgtagcaggatataccaccgcagctggtgggtctttattttctggctctggcggccttatttgaattggttgctctggttgatgtctcagctgacgaagttcttcattttgcctacgaatggttccttctaatgcggtaaggctttcttcccattcctatggtgcttgaggtggttcattcatccatccatcatcttggcctctatctcggccttgaactcgacctcgatctcgacctcaacctttacccaatctgactgaccttccaggcggcatttttaaactcctgaacaacattgaccaaaacaaatcaagaaagatcattttcatcatcaattttacatgaaaagaatattacactcccgcgtgcagaatttaaagacaacttaattataagtaataaccacttatagtacagtgagtcgagctcgtctcatggcggtgaactttacatgttagggttaaccacattctttaggaccgtgttgctctgataccatattgtaataccccgatttcccgagatgtcacacaggatagtccgtataaaaaaatttaataagataaagacaataaaatact

SEQ ID NO: 366435 - DNA, 761 bp, Cannabis indica
tattaaaagagaaacttacaactcttttatatttttaagaattttatctatgctagacaacttcctttaaatctacttttgaggctttctttaatgctactatctatacaactcgaatttatacattttttcttatttatacacaaattttggtttagccaaatgccataaattgcacatgctaacacattcttatgaacataatataacttttatgccacaatctaatattttattattattatttttaaaattatatgtgttttttaaacatatattttttcaataacaaagtcctttaacttaaagccgaaaaaaattaagctcattaatatatgtacacatgacatgtatgaagcagccctctttcttgcttttttctttaacaatttttttaaaaaaaagtagccttttttttaaccaaaaaaaaaatatatcgcaggtgtatgtacatattaccgtaccatataacatgtatttgactttaatcttattggctaaaaaactacaccatgtcatgagatacaaactaaggatcttatagtagaattactcattatatatattcttttatttgttacttttacgtgcttgcaacgatgtagatattggacctatgtatgtatgtgtttataattttttatgataaaattaatttttttcttgcagcaaggtaaaaataattttaattcaaagctttggtaaaatggtaacaataaaactttggatgtgtttgtgcaacaaatattagtagtttattt

SEQ ID NO: 366436 - DNA, 595 bp, Cannabis indica
tattgttacacgattagcttaacagattaggcttacctgtatttttttttttaaacccaaaaaaattaaacaatctttttttaaatttaaaaaaactacgccgatacccacccttaataacaatcatcaatataaaatttaaactctatataaaaaatcgtttataacataaaacatttgaataacaatgtgtatattataggttaatttatatacacaattatgacgttcttaacaattagttttataaaacatatcgtttataacataatttacaattagtcactaaattcttaaacaaaaaccactagaacttaaaataaaactaatatttacgtggcgagccacgtaactctcatctattatactaaaatatatctacttagttattatatattactaaaaattaaaatatttaaataaattaatattttaataaaataaataacactaattttttaattttgttttttaaaaaatatgttgatcgtaatttttagtttcataattatattaacaaaactatataaattttttttgaaaaaaaaaaactatataaatttagtatttactatgatgtgttttttgttttaca

SEQ ID NO: 366437 - DNA, 585 bp, Cannabis indica
atagcttcctaagcactgtctgatgtgctgaccagtgcagacaatctctgtcaattctccaattatgagaatggtggaggcaagcgcaacaatgatggctctgaccaatacaatggcaaaagagggaaattcaacgattctcttatgccatgaagtctaaaggagaaggggagaagtgcacttgcttcgctctcctaccaaaactcccaagtcaaagcatgcctagacgaacccaacagtgtaagtcaacaacaggcagtcataaggctgtcttattctccaaaggctggccttctctcgctaaagcttgcaggaacatgacctaccaaatcttggaaatcgaagaccagactctaagaaaccaaagcttggagatcccacaagatctttctcagattgagatcctacacaagtgagtttcccgcacaacgactccttggtcgttactgttgcgctttgtgccctaaataaaactctatttcaatgtaatcttttctattcaattatcaataaagaaacagatttatttttgttatttatttagtgtgttattttgtttatatgatcatttatttgtttatttga

SEQ ID NO: 366438 - DNA, 905 bp, Cannabis indica
tttctttgtcttcttgcttgtttgttgttcattctctctttcagatcaccatggttagaacaaagaacctagggcatcccaaaaaggtggttgaaaccgatgcaaccccctcgaatcctcctcctgctgcttcaaccgtgcctcctgctgctgcaaaaataggagattcatcgcttcctcagcgtgaatctcagcccgtgaagcccaaacgaattcctaaacaagtggctcgaaaatctgtgcgcccatacaaaacttggacctcatcgtcttcatcttcaaagggatctcctccacctgctgcagtttctcctcctgctgcatcagtaaaagaagttgctacttctactccaactggtccttccactcgcactcgtgcccagcaagcttctgtcgagaaggaacttcgatcatctcgaagtcgtgacaagccagtgcctccagccaagaaacaaaaggtaaatcccccttcgatttctttgagttctgaagaagaagaacccatggaggatccctctgttgattcctcggacaaatccgtgtctctccattctgagaaggagattccagaggacattggagtttcctcagacagtgaggaaactgaactcgagccagagcctcctttgaccaaatctgcttcaactcctgctcgatcctcttcagcagccaaggcttctgctgctgccaaaggcaagcagccaatgaaggaatcatctcctggtaacattcctacatctctctcctattgtcctcgtttctactatcgtgataatgagcgtgattggaatttatatgctacccgaaagtttgagagtgaaaggaactatgatttgcattcatagagtgtatggaattgttaagttcattcaataccatcaatgggagaacactctcactggttt

SEQ ID NO: 366439 - DNA, 582 bp, Cannabis indica
ttgtcctagaggtgggactccttgaccagagaaaccatatacaggcaggagatagggggttagatccttgagctagatccccatcttttcataggcagtcttgaataaaatgttggaataggcgccattatctatcatggttctagccaccatcttgttggctatctggacctctacgaccaacgggtcattgtgcagaaacctgattttgacagcatctttgtcattgaatgttagggttggccctcctgcccgtggcattttaggcttcctttcttctacggccaggatcacttattcttgctcgtgttgtgctgttcgagcatacctctcctgagctttgcccgaatctctagctatgtgcgggcctccaatgatgacttacagatgtccatctattggtggatttagcaagtcttggttattattactcccctgattctgaccggccttgacatacttctgtacatgcaggttattcttccttatcaggaattcaattttccgcttcagattattgcattcattggtgtcgtggccgtagtctccatgaaaccgacaaaacttggtcatgtctctttt

SEQ ID NO: 366440 - DNA, 690 bp, Cannabis indica
gacctacgaaaagtcttgcaacaatagactaagtagaccgtgatctgactgaaccactatacacctttgtcttcttgatatttccagtttttactaagtacttacgttcccagttcgagtactcgctgttttaggtcgaatactcgcattttttcttcatataatttcttcttattattagtattattattcatttttggtgttgcgaatttcgctcgacaacatttggcgctgtctgtgggaatggagaagtacattcttactaaatagaagaaggaaaatcatcatggctagaaaccaagcaaacagaggtgttaacaacgaatccatcaacatcggaatgatgaacgttccattgtctggggctagaacaccacctgtagatgtcatcaatggcggagtaggtcgaggtaatgttagacccctcaatctattccctgaaactgctggcccacaagtcggagaaacatccacgccggcagcaataatggggcactttcgacccatcactccggcggcagtgtccgagggtatcgtccagctaaccactgaccagtataccgcgatccaggaccagctgcgcgccctgcaggccgaggtggatggacaaaacagggacggaagccctcctcgagcccccactactcgcacagaaaaccctcaggtaacccactctagacgtcgtaataa

SEQ ID NO: 366441 - DNA, 1136 bp, Cannabis indica
gactctattgttataaggtcatgtcgttcggactgaagaacgctggtgcaacatatcagcgactagtaaatgaaatgttcgcaaatcaaataggggaaaacaaggaagtttatgttgacgatatgttggtgaaatcgataaagagtaaggatcatacctcagacctcgcggaatgcttttaaaaattaaaaaagcataaaaactcgaaaaaatgttccttttgagtctcctcgggaaaatttttgggattcatagttaatgcgacgggcattgaggcaaatcctgaaaaaatcaaggcattaatagacatgccatccccaacaaagcctaaggaagtacaggccctgacaggaagaatggcggcacttaacagattcattttgaaatcaactgataagtatgtaccgttcttcaacatattgcgaggtaagaaaaagttcaagtggacaaaagaatgcgaggaggcctttcaaaacataaaaaggcatctcgcaacgcctctaattttggcaaaaccaataactggagagacgttatttctttatttatccatctcaaaagatgcaattagtgcagctatagtgtgagaagagggtaagcaccagtaacctatttactatgcatgtaaaaggttatactaggggcaaaatccaggcatccccctctagaaaaactcgcgttatgcctagtccacgcatctcacaagctacgccatacttctaggcacaccctataaaagtgttaaccgatcagcccttgagacaagttttatcaaaactagatgcttctagaagattcataaaatggtcgattgaactggggcagttcgacataacataccatcctcgaacattcatcaagggtcaagctttagcagacttcttgatagaaggtataactccagaagaaatcccatctgatcagcgagatgcgaatacctggaagttatatgtggatggtgcatccaacgagcagagttcaggtacaggggtgacataaatatcactggaaggctttaaatttaaatatgctctgagattccaatttgaggcacaaataacgatgctgagtatgaagccttgatcgccggcctaaagatagcagaggccttaaaagtcaaaaatctcatctgtcat

SEQ ID NO: 366442 - DNA, 651 bp, Cannabis indica
ttctgaaaaagagttaaaattccagcaattaggtctcataccaaatcctaaatcaaaaaagggaatgggggtcccctaaccgctggaaagaggccccctccggacatctctcaacaagaaagccttagaaggatttcctggacaaaattcgggtgtaaaaatctcacagatggtgacattacgcatgaaagaaaaagaaagaagggcagaaattcgagaaaaacgaagtcttctctatgcccttgaaggccaccacacgaagagtgtatgatcctttacaaaatataacaacagtgcgtaacaagagtaaccctaaccccagaaaagggaaatctagacttattacgtgaaaaactcaagggaatacattcccagaaacttcaaataccaaacccaaaaaaacaaacagatagtaaagcatgccataaacacaaacagtaaagtgagggatgcgagaaacttacaatgaagtgttagaactgggggtttgttgttgatcaaacaaggaagtgtagactgacagtaatgagagaaggttagcaaagaaatctgtaaagtgtttgaaggttttcctttggtctgaggatttctttctctctggaaaacttgaagaaagttggcgaaaaaaggaaagtaaccaaatgaaggaaa

SEQ ID NO: 366443 - DNA, 782 bp, Cannabis indica
aaaaatttatttatttttttattgcaattctcttcataataatatcactcataatttagattaattctttcaataaattattttgcctggaaaatttgcaacggaaggaaaaaaaacaactaggggtttgttattggaaaaaacaaaaattataataataaataatatatatataatctacgagaaatgttaattaaaaggtataattggtatctagcattttattcggtgtcatactcttattgatgtaaagtattttgtttcatataacttaaaataataatttttaaaaaatatgattaatcaatagcagtatctacaaaagatgcttggcacacataacaatgaaaaatactaaaaggcattagtagtgtttagcacacttttatgtatttttatcgctactggtccaattaagtatcaagttacatataacataatataataaattttaaaaaaatattcgcaagataacatatctaaaagtagtaggtaccacaatacctaataactatggtccaacctatgcatactctccaaactataattataattgaaagtagtgatgattggacaaatggtatttaaaaattgtgaaatattttatatccaagtttgtgtaacatggggtcattatgaagtagttttttatatttattttttgaaaaagaacaacgttataaatataagaggccaaattgaacagatcacacactcacaaatatcgcattgtttttgataaaccattcttaaaacaaagatgaatattgaagttgaagcaa

SEQ ID NO: 366444 - DNA, 460 bp, Cannabis indica
gagctagacaacttggataagcgcataagaccgtaactggaaaaaattagccatgagaaatagtcaagatatcattcaaaaaaacaactggtaaaacaataacaattaattttaaaaaaggataatgtgtattacagtatctaatattaaaacgttatttttgtgtttttttagtgttgcatattagttggaataaaaattatattgatgataaaaactgtttaaatgataggtacttaacaatgacatctaacatagctgaagtactgaactcaacaaatttagcagcaagggaaacaccagtcacaacattaatggagtgcttaagagcacaactgcaagagtagacatacaataatagaaaagaggcacaaaaactcatagggaactatgtacactcattgcgattaacagtaagttgatattagaggtcacaaactgtagaagtttgtttttatag

SEQ ID NO: 366445 - DNA, 589 bp, Cannabis indica
ctcgcacttcggggtcaatgttcaatcgatgacacatgacctgcggagatattccggccatatctgaatgtttctaggcaaaaatatccaggttttgtttgagaaaagtgacaagcttttctcgctattgaagagttagtttagaatcaattttcaaaattttattattatctattggatcaataggtacctcgatagtgtcttccgcgacttgggcggttgcggcgtagtcaaggatcctaggatccaaatctggctcgtctttatgcggcacttcttctattctaaatacctcctgacgaggaggtgctgcctctagcaagtaaatgacgttaactgacttcttttctgtgagtttgactgttgtgttgtagcattctcgcgagtccggctggactcctcgcacagatcctactccagcgggagtaggaaacttcatggtgagatgatagatggacgtcacgatcttcatctcctttaggataggtcgaccaatcacagcattgtatgtcgagtattggtcaattactgcaaagtcagccatcgatttagctactactggtgcggttcccaaagtgattgggagctt

SEQ ID NO: 366446 - DNA, 688 bp, Cannabis indica
ctaggtctgggttcgggtttggttttttgtttgggttcttatccgagcctaactcccagatcgagacaccgactactgaactgttccaggccccgttacccaaatcttgagtcaagatctgagccactgtcacgggcttcggtatggttcttgttaaggtcccaagtcccatttctgagtttgggtacgggatcgagactggggcacagttctaggtcccgacactggttttgtgtccctagtctggtgccaggtttgggtctgagttcaagttcgagtttgggtcccgagttcaggtttgggttgggatctggctccggctcccaattcagctctaggtctgattgggagtcagggtcctggtccggatacggttcatgatctaggttaaatttcaattatgattcaaagtcgaagtcctagtttcagtcctggtcaactttcagttttagttccaattttgggtcatagggtatttgtattgggactaggttcaggtccgagtgtgggttcgggtccttgtcagggttcgggtgaaggcctgggtcccaaatggaaacaccgactacggattttgtccaagccctgggtccagatccggatccaaatctcaagtcctagtccggttccatttctggtgccgggtcacgagctgggtcctaagttcaagttcgggtctgggtcgggt

SEQ ID NO: 366447 - DNA, 876 bp, Cannabis indica
accatttcagcataggtggttctgtcgtcagtagtaatcatcaagtcatgtctgatcttcacatttaacccatctagatacttctctttcttactgaaattggttggcacaattcccgaggcaaacctcgccaaacggtcaaactgcattgtatataacactcatgttttctttctgagtcaaatgaatgaattcttttctcttggcagttatgaatcacggacaccatgtcccgccaaactaaagcatcttcttgaaattgaaaagtggcacagaccacactatcacttctagtgacgcccataaaattcaagatcctggtgatcagagctagccattgctcggctttcataacatcagggcctcccaggaaaactggaggtgtctgcttacagaacctttcatacaagggtttcatccagttcattgctacaaccaccgattcggcctgcatagcagaggcaggagctacaggtatctctggtgcaggaactataggagcaccctgctgtcttaattgccgaatcacttcctcttgttcattgattttagtttgcacttttgcaaacctgttttcccaattctgggaatcttgagcagcttgggcagcttgggcaacctgtggcgggttatcatcacctcgaccacgtgccctgcccctgagacctctaccacggccacggatatttgggggaatctgagctctccaaccttcatttgattcaaccgagttaccctggctcctggtgtttcacctggaatccatactaatctgaacagcctgcgtaaccaagagctagtctggttagatcatgatcaaggaaaaacttactaatgccacttatttagaaattaaaaacatgcgcctattctact

SEQ ID NO: 366448 - DNA, 1245 bp, Cannabis indica
tcctggtcgggacatttgggtcaatttctatctcttccaattcttccactggcccaacatttgtattcggttccctaagtcggggatccacatccccgtccgcgccttgggtgacttcctattgggcaatacttttccccttgtccaaattctggccagaggaactttcctttttggccttggttagggcaagtttatagcattcccgtgcaatttgttgattccctttaaggcaccctaccctattctttgttgggaacttgacgcaggaatggaaaattgatgtaacagctttcaggccatataaggctggtcagcccaacatgacgttaaaagctaatggaacatcaattattagaaattgtgccatcacagttatgctccttggagcttgtccaacagtgaggagtagatgaatttgccccaaaggttcaacactctggccgaaaaaaccatacactggttgggtacagggggtcaaatctttgagttggagtcccatcttctcatatggtgtcttgaacaggatatttgaagaagctccattatctatcatggtctgagccactgttttatttgctatctctacttccacgactaaggggtcattgtgcgggaagcaaatgtggacatcatcttcttcagtgaaggttatagtgggttcccctacccgtggtatttttggctttctctcctttacggccaagactacttccttttgctcgtgctgtaaagttcaggcatacctctcttgagctttggccgagtctccagttaggtgtgggcccccaataatgacttgcatatacccgtccactggtgaaggcattattagatcttgattattgtctgcttcggcggcccgttgattatgatcggccttgatgtatttttgcacatgaaggttattttttctgatcaagaattcaatttctcgcttcagattgttacagtcattcgtgtcgtggtcgtagtctgcatgaaaatggcagaacttggacgtgtctctcttacttacgtcattcttcatgggagtaggttttttgtacgggaccatagactgggttgtagcgtagatcgtctctaggtcgtcagttaggacagagaaggcagtgaacttggaggcattttctctaggggtgtgttcgactttgccagtgaactttcccttttcctcgttgtcttgcttgccattgttattggaccttttttcgctcggagttaagctgctagggtattgtgggc

SEQ ID NO: 366449 - DNA, 665 bp, Cannabis indica
tcatttaaatttcacacagctgtgaatatctcgcttttactaggtcaaaatgagcgtgtattaaagatatatggtaagccttatcgtattggaatgcctcgctgggaatggagtcgagttaaccttgatggcgagcttgagctcatcatatgtcttcccaaggttgataatgcttttactttaactctaacaactgtagtttctggtgacgagatgttccttttcgcgtgcattccttcctacggtgaggtggacgcctcgctgtctcttgctttggttcacccatatttatacttagcttgtatatcgtacattgtatgctaagtatctccattgtcattatatctcttccacgtaacgaggttagtgcctcgtcttgtacacccaaagttacatggtttgtcatcgaggcacaaggcaacaatgtgtacatttttatctcacataagactgttcaatcagttgagttgtaaacatactctgttaattatgcttttaacgagttattccatgtcaagtgtaattatgattacgtgtttgagttctatattcttcccagcttgacacgtctcttcctctgatgtactagtcgaattttgggcataacaattgctccttaaaaagttcttttttaataaaaagggctttttaatgattacaaaggg

SEQ ID NO: 366450 - DNA, 557 bp, Cannabis indica
atgtaagtttataaagctaaaaagtgggtcaatgacagaagtggtatatctgcaatcacacaaagatagaagtggtatttctgcttcctatgcttatccagagaaaacattagataacgtgaggttaactttaatatataaagatttttttaaaaaaaaataaataaaaaaaattattaatattctctcaagataggtttgttagagagatatgtggttaagatgatttttttaatttaaaaagagattattaatatttaaaagattgtttaattttttagtttaattattgggtttatttgttaaccggagatcaaacctaatcgttaaatttaacagaatattcttttatttttaagtatattctgttaaaccaagaaatgccgttaaataggcacttttaatatataaagatatagatagttagttattttattatctatatttgtgtaaaattctaaaataaattttttaatagaaaaataactacttgatatcaaaaataactaaataactaaatatcttagtcatatcaaaaataattaaataaatagtta

SEQ ID NO: 366451 - DNA, 800 bp, Cannabis indica
agagttgctcccatggctatgagtacttctaataataataatttattctgatgaatgccatatgcaattcactaattgtgcccccttatagtactacttgctactaaagtagataagtgtgctacgcgtcatcttcttatttgttaaacttggaatcattttattttagtaagtggtgtggtactaagctatgttaaaattttgagggtgaagtggtactaaactatgcctataaaattatgaatatagggacgcgctaacagcacaatagaaaactaatgaatactaaaaaaaaaaagtgtttaatatacatacattagctgaaaagtgaaaatttaagccaaatttacatatattggtagaatagtattatttatgtttctttcctcaaaatacacctccatatacttaaaactatttcttctcttccctttctctttctctctcacttcactaaattttattttccctctttctccctaaccaaattacactagtgtgtggtttatatgaatgagtgtagaaataaaattgttattcctaaagaaagatcattcaagtatttgaattggaaaactcattccaatagaaattgtaattcatataaagtagggaattacttttcttaaataaaatgacttgaaaagccattccacaccaaccaagaactacttttcataccattcttataaataaatgattaaagttataattatatgggtaacattttttattggctaattaggatttttttctctcccgaactttgacatgtaccaaatcatgccccctaaactatt

SEQ ID NO: 366452 - DNA, 871 bp, Cannabis indica
aaatttgaagaattcaaattatgggataggatgaggaaatccccttttaaacagttcttcaagagagaaccattacaattttcaggagcattgattcatcaattgatattgcataaaatcaaatctgacaagccagaccaggtatatttttacttggcgaagaagagatgcagattcggtaggatggagtttggtttggtgaccgggttaaacttgttgcccgaacctactgaagaagaaattaaagagaaaggaatttcagaccggttgattatggggtatttcaatggtaatccttccatcagctttggccaattgcgtagagttttgagagttacacagaagttaatgatgtttacaagttggggatgaccttgttttttatgggtgtcctcacaggtaaggaggagaagacttccgttcctcctcttgtcataggaatggttgataaccttccattcttctacgagtacccgtggggaaagatttcgtaccacaagttgatggaaacttgtaataaagactacaaagatgtgaataataagatgcttaagaagattgaaaagggagttagtcagaaggaggctaaatactcatctaacggctatactacagcgttgcagtattgggcatacgaggccattttggagctgggcaacgagtatgcagtgaagaagttgcatcacttttcgagaatggtgaattgggagagtaagccaaaaacgacatttaggaaggatgaaatgatatgattatttgctagaaatgtaagttttttatgctttacatttaattcatattaatttccatctattaatatatttgttttttttttcagtttgacagtttactctatgttatgtccccgagc

SEQ ID NO: 366453 - DNA, 1088 bp, Cannabis indica
atcaattataattctagaattagattatgtctagtttatgaattttcactatgcaagggcaaaattttgaagaaaagagattctaggttttatttattaattaagagactttatatgtctaattaataattatattaaattagaatattaattgataatttatttattaaataattagttttagcatttaaatggttagaattggaaaattagaatttttgagaaaatagagatgaaaattggcaaaattgcaaaataccaagtggggcccattaactctatggccagccacttggagaggtttttttcaattaatatttttattattttaatgccaaataatttttagcctaaacctagttgttacctataaatagatagtgatggctcacacttaacaagtgattcaagagattgaaaatcagaaaattgagcctctcactatccttctatagccgacctccccccctctctctctcttttcttcttcaattttcaaaaaatcttgagtgatagagtagtgcccacacacatcaagttgtatctcaatcatagtctagaagatcgtgaagaatccaaactgaatagaaggacattcggactcagatcttggtgatactctgcgacaggaaggagacatattattccgcttcaaccaatgtaagatttcagaaactttatatgtgtttattatcgttttagaagttcatatttaggatgttaaataacatagttgttagtaaatctaagatcctggtaaaatatttccaacagtccattggtataatcattacgaatattttatcctccaattattaattcataattagaggttgtcataaatactattttacctttctaattatttcttgaattccttatgtgccattaattcaatgtgaacaattagtatataatttattatagatttggatccaactgtcagcactttctaaattaacactacaggagaattaatatttaatctgttaggaaagcttggattccactattgtatatcatgttcccagacactaattttattacattccaaaaacataagttgtaagaattatcttctttgagaa

SEQ ID NO: 366454 - DNA, 1410 bp, Cannabis indica
agtatggacgccaggcgaaacaccaagagccatggcaactcgattgtatccagtggtggtcagggagttcaaactcccccttaatattcgtggtcgaggtagaggtcctagaggcagggcacgtggccggggtgatgttgacccgccacaggctgcccaagctgcccaagattgggaaaacaagtttgcagaaatgcaagccaggattaatgaacaagatgaagagatccggagcttgagacagcaaggtgctcctgcaatccctgctccagaaataccactagctcctgcccctgttgtgcagacaggacttgtagctgcagtgaactgaatggaacccctgtatgaaaggttccgtaagcaggcacctccagttttttgggatgtcctgatgtcatgaaagcggagcagtggctaactgtgattaccagaattctaaactttatgggcgtcaccggcaatgatagagtggcttgtgccacattctaatttcaagaagacactcaggtttggtgggacatggtttccctgactatttaatgcaaaatactataatgagatagtcagaagcgcgaaaagaaaagaattcactcagctgattcataaagaaaatatgagtgttactgaatacacaacaaagtttgatcgtttggcaagattggcctcggggatcgtgccaactgattttagtaagaaagagaaatacctggacaagttgaatgtgaagataagacatgacttaatgattactaccgatgacaacaccacatatgttgatatggtgggtaaggcactgcgagctgagggcgcagtggagtgcaccttagagtctcgagggacttcggttattggtggggctcctactcctcctacatcaggctttagtaggggaggtagtggctcaaccactgatcaggatagaaaggcacctactgcatccagtggtccaggtcagaacaagaggttctaagggaaccagggccgaggcaattgttaggatggctccaaaacccaatacacttacccagaatgccccagttgcaaaaagcatcacttgggagagtgtagagggcaggggtgctttcagtgtggtatgctagagcattacaagagggattgtcccaactcaagactaaagcacagaaaactgcagcgaaacccactccagcaagggtgttcgcaataactcaggctgatgtagaagctattgggaatattttacctggttctagatttactaacaagtatgttgattaacatcctaaatatgaattccctaaaacaattaaaataaacacataagggtttaagaaaaccttacattgattgcagcggaatataatgtctccttccgttcaggatctctagcccttgattcctttctatagcagagcattatcatgatctgaa

SEQ ID NO: 366455 - DNA, 1444 bp, Cannabis indica
ttatactaatctaccttgattccgaattcaggtgtgccggttaacctgagtggaacgatctgctcggcgaattacaggctcctaaatcataataaccacaacactgagaagtgacacgctaaaccacttcccggggacttaaactcgaaactagaagtttccctatcgataaaaaacatggcaaaaccctaaacaacacaaaaatgggaagaactagggttcccaaattttccccaaccagtagaccagttctacaaccggaattccggttctgggacgaaacccaggaaacaaaccggaatttcggttcctacaggccactttgaaccggaattccagttcagtgcaggaaacactaaaaattccatatttcaaccaattcaaccccaatccactccaaactttccagacctgatctaaacatcctagaggtcaaaaacaaagcaataaaacacagcttcgtgcaccataacaaaattcaccattgatgagtaaagcttgagtttaaaaactcaaagcttgctcatccaactaattagctatcaaaacctgatcaattcaccatatataaccataatataactccagaaaacaaacccaaacacaaacaacaaccatagcagctaactcaacattttaccataaaaatcctaagttttgagtttaaaattccaaacttgaacaaaatcaactagcatgcatcaaaacctatttcattccactcaattaaacataaataaatccaagaacacaataacaaacacaaacagcagctgcagcaagtaaaattccaaagcatgcaaatattcattttcttaaaattcaagaaactaaaagagagagtgcaagagctatacgtagagcttggattgtactttgaatggatgtaaaatacagatttgaagcaacaaaataaatcagaaccctagctggtcccaagtggttcgaaaatgagagagaaagaggaatgaaaatgctattttttccttctttgatttttttgaataaaagatgaaataaatgaatcttcttatttcatttcattaacttaataccagccaacataaaataacttacgaaatataatcaagtccactaaaggacgaaataccaatggggcaaaatgaccattttgcccctccacacaaaaataacataaaaggggtactaagggtattttggaaaactctaaattcccgaccaatcccgacattcccaatgtctaaataaaccgtcccactatactaaaatactaaattgtgattctactgagccatacaccgcgttccatgttttcgggcaccgaaaatgcaaaattatgaaatttcactatatgacataaaaatgtattctaaattcaaataaatcaacataaataattatttaaaaatcaataaataattttcataattaaaccctaattatctgctaattccaaatttaa

SEQ ID NO: 366456 - DNA, 825 bp, Cannabis indica
attaacttttattagttttattagaatttaggttgattgaaaaacaatatgattgtcatagttcaatatcaaatgttaaattagatcagtatgttgagatgctacatatcaaagcactgtcatttttaaagtagccacaaagattttcttactgttcaaccaatgagtcgtggtaattgctatggatcaatcaagtacgcatacataattattatatattattattgtgttctatattatatacaaattaatcttcgatctattatcaatttttctaacatataataatatttaatatatggtatcgctgaaaattaatatgtcgtagtaataaaattatatagcacaaagaaattataacaatattaaattaatactaaaaaaatataccactattaaaatatgtatacataggaaaagatttatatacaataaatatatataataaaacggaaactaaataacatcttaaataaatgatatactatacacaacaaaaatcatataccatacaataaaatatatatatatacctacaataaaaagtaaaataaaataatataatattattaaaaaaattgtacatactatattaaaaaaattatatacaaccataaaataattatacaatacttaaaaaattatatataacatttatatatagtaaaataaaaactaaacattcatgacactacaagaaaacccacttttttgggcgcatttttgcgccgacaaaagtacactgaatgcgtcgttgaagcttttccggcgcaatactgcgccggcaaaacatgtctgagaatcttggtcggtaaaagacttttt

SEQ ID NO: 366457 - DNA, 680 bp, Cannabis indica
tctaccaatgactaatcaggttttatctttatgtttttagtaagtttatttaagttatttttatcttttttattttctatgtttgttttgggttactgttatcaggttatctccactctcaccccgtgcatattatcgtcgatcaggtgtactcttttccctatcttttttcatttcatattttttgtgacattgaggacactgtctaattttgagttgggggtggtgagctctggtgagcgttcatttagagaattataattgtcttgttgaattttttaagtcaaattttttcaaaattatccaagcatgatagtaaaattacagtttgagtcaatatttgctatattttgttaccaagttgtgattttcagagttcttttgtgcactttccaaacatgtggtaaaatggttgtaaacacatatagttaagaaaaattttgagtgtaaagtttttcatttttggtgagttgtgagagttgagaaaacaactttttgaactttcattgatcatttgagttggtaaagttaaacttttggaatttcaaacatgacatttactagagggattaatttattgtcaaaagagcctttgtgtttatttctttgtaactttattgtatttctttatatctttatttttatatgttgtctcttgtcaaaaaaaaaaaaagaagaag

SEQ ID NO: 366458 - DNA, 519 bp, Cannabis indica
ggagatttgtaaaacaaaattgaaatttagaaaactctcctaaatcgtcttcttccactcgttctcattcaccaccatcacccatacttcctgcaccgccactgatggctcaataataggaagtccaaccaagaaagctacaagattatgtacatcctatgcgtacgaccacagcttcttgcataatgtatcccatgaatatgtccaacttcgatttcaaacctagcatgattcaacttttaccaacctttcatggtatggaaaatgagagtccatgtgtgcatattcaggccttcgaagaggtggtggccacattcaataaccgagctggcatcatgaacttggtgagattgaagttcttttctttctcactcaaggacaaagtcaaaagctggttgtattccttaaggcctaggtctattaggacatgggacgaaatggcaaaagtatttttctctaaatttttcccacctcttaagctagcagccttaagagggagatctctgttgggttttatgc

SEQ ID NO: 366459 - DNA, 619 bp, Cannabis indica
tggtcttgttcctaagtcctgatccgctttcgttttttggtcctagtttcaagtcacatggtatgggttcaggtagagtttgggttcgagtctgggttcgggtcctgatttttgtctagggtgaggttcaggtctaggtttcggtctcagttagggttcgcggttgggtctggtgccgggtttaggtccgagtccaggtctcggtcctattccaagatcccattccgactccagttcaagttttattttggttcccgagtgtgggtctcggtttggggtcaggtcatggatctcgatccaagttctgaggccacagttctggtccaagtttgtgggccgaattcccaggtctaggtccccaatctatgttcaagtcctaggtcctggtccgggtccatgttcgtcttctggttcaggttcgggtctcgagtcccgatctgagtccaggtcccagtttttgttatggtcccagtttgggtcacagtcctagtgcgaggctgaggttcgggtcctcggtctgagtctggttcttaggtcctaggtccggccccagtttttgggtttgggtctaggtctaggttcgggtcccggtctgggtcaaggtctcggtcttggttta

SEQ ID NO: 366460 - DNA, 501 bp, Cannabis indica
gatctaggggtttaggggtcagggttcaaagttcacggatctggatttagggtttaggagaatgggaatgagaattgaataaaataaaatatataatgcataaaaaatttgataaaaatcattaaattttttctctagttacatgataattgtcgttccttcaattttgaaaaagaatattcattccaccaaaatggttgaaagggcattctgttggaatgacattctaatactctaaaaagaaactaaacaaaagaatggaatgaaaattatatcttttccattccatttcattacctctaaccaaatgccacctcagggtctgtgttcaggtgttacagttcagggtgttggggtttgttgtttgggttctagcgtttaggatttagggtttagtgttttatggtttaagggtttgagggtctaggggtgtggcgttgagggttcacggttcacggttcaggggaatgtgaatggaatgaaaataatataaaatttaaa

SEQ ID NO: 366461 - DNA, 521 bp, Cannabis indica
atcaaaaatgattgatacatccccaaactagatgacaccaatagatgcctacctcgactctaggaaactcctcgataaccgaaatgaagcttagaaaatgagaaggaaagctggacagtatatcataatagagggagttatgtacagaagaggattctcgatggcattgctaagatgtgtcactcaagaagaaaatgcacgactcctatctgaagttcacggattttgtgggaatcatgctgccgggcagagcttatccaagaaaattctaaggcaaggttaattctggccaacgatgattgaagattcaacagcctatgttaagaagtgtgacaaatgccagagattttcaaagataacacgagctccacccaacgagttaacccagatgcaaagtccgtgcccttttgccatttgagggattgacctgatcggaaaattacccaaaggtaaaggcggagtgcagtatgcaatggtagcggttgattactttactaagtggactgaagccgaaccactcg

SEQ ID NO: 366462 - DNA, 969 bp, Cannabis indica
aatgattatttaacatttaaaatattgaaaataaatttaaaataaattaaaaaccccaaaaaaggacattgtcacaaatagtgacaccatgtcaaatcaaagcttttttgaaatatttataaataattttaaaataaatcaaaaccccaaaagaaagtacactgtcaaatagtgacacccacgttacatcaaagctttttttgaaggaaaaaaattcaaaaaatgaagtggcaaaattcggtgaagacacgtgtaagccacaaagtattaataaaattagtaccaatgatagtatactccatataaaacaataaattcatacacagtataaaagtaaaaatacgcgtgtagcagtatttttgaaataaaatgggaaaagttagtaaaccatgtaaatttccctatttatatgagtttattcttcaatatcttttttttttttcaagcccaacaataaataagatataattagaatattcatataatatattccttaactaaaattcagaaaaaatagatattctccaaattcaattcatataacgtaattgaatttcaactatgagatattatctaatttaatatgggataaataattattattccccaaattttggaattaataattaaagtatctttttattcataaaagataataaaagatcccataagttaatttatcacaaaaagtggtaaaattctaaagccatacaaaatggcacaaaattccaaatgagctcactaaaattaatcttggaatattaaagaggtcattcacctcaccaaatttcaaagaggtcttaacctcataaaaatctcaaaaatggtaattttacctaaaaattaaaaagtgcactaaaattcaaagccatagcaaattaaatggcattccaaaagagaggtcattcacctcataaaaaattaaaattcggaactacgtttgacttgattcctataaaaggatacgta

SEQ ID NO: 366463 - DNA, 524 bp, Cannabis indica
aacacttcaactcgaaggtcaaaaatagaaaattcactattggtgatctagtcttatgaagggtcttcccagctactcaagaacccggagtgggggtacttgggcctaattgggaaggaccgtacgaagttgaggatgaaatcggctctgggacctacaagctaaaaagaatggacagaaccatggtgcctagggcctagaatgctgatcacctccgaaagtattaccaatagtcgaaagaataaaagtttatgctctgtaaagtaaatttgtaccggacaagtatttgccacctctaaattaaaatttgtaaaactgagtgacctaaaaacaattttcacgtcactcagggggggttagtaaggcataccacacggacaaatgtaaaacagtccaaaagtttaacaaagttaaaaagcagaatatgtattcaaacataaatgtaaagtgtccaaaccccaaagaaacgctctataaaagataagggtttgggtacgggccttaagtgtctccccttaagaaaa

SEQ ID NO: 366464 - DNA, 968 bp, Cannabis indica
atgcccctcaagtaatttaaataataaaactttgtaattacttggaaaatacttcaactttattaataattgaattaaaaaaattacatcagaaaaagagattacaacatgtctgtgactttactggtagtagggtcgcaaatgctcaacattccaatggttctttattagcgagctgttaagccgagctaatttataaaccctgactcccactattgcttcgatcacattaggaccttctcagtttggattaaatactcctatagatgtgtctctcgtgtttgcaaatacctgtcttagcaccaagtcaccgacgttaaagagccttttcttcactttcttgttgaaatatcgtgtaactcagtgttggtatgctgcattagtaatttgcagctcagtacatttttcatcaagtagatccaaggaaagcttcaagagttcttggttttcttcttgattatagaaatatcgtctgtgggtcgcggtattaacttctactgacagcattgcctctgagccaaataccagtgagaacggagtgtgtcctgttgatgttttctccgtcgttctatgagcccaaagtaccagtggtagttcatctacccatctaccttttgcagcatccaacttctttttgattgtatccttcaagggtttattaacaacttctacttgcccatttgcttgaggtcttaaaactaacaagaagcgcttaataattttattcctctcgcagaactcagtgaataattcactatcaaactgagttccattatcagatactatcttaatgggtattccaaacctacaatttatgttcttgacaacaaagttgagagctttcttgcatgttatgaaaactagaggttcagcctctgtccattttgtgaagaagccaactgccactactacgtactttgctcctcctcgccctgtggggagtgccccaatcaaatcaatcccccata

SEQ ID NO: 366465 - DNA, 1660 bp, Cannabis indica
ctaggaggctggaactaagaagtacgttgtcagccgctacctcaaattccagattactgacgataaatcagtggagggtcagtctcatgaacttcagaaaattgctcacgaaataatttctgaaggtatgtctttagatgaacaattccaaattgctgttattattgacaaattgcctcctggttggaaagattttaaaagtattctcacacacaaaacaaaagaattttctttggaaagtctgatcactcaccttcgcattgaggaggaggctcgtaaacaggaccagaaagaagaagtgcttgttgtgtcaaacaacaacactacgaaatctagtgcgattctaaaacccactgggaaaaatttcaagaatcagaatcgcaagcatgctccaaaccgtaacaataattctcggaataataataagaattggtttccaaggaaccaaaacaaacagcagcaacccctaataagaatgacccagcaccgtttttgtgctttctctgtcacaaaccgggtcatatggcacgcaagtgtcggaacaggtctagttctgctccgcaggctaacctgactgaagagctgccttatacagctatgatttcagagatcaacctgattggtggatcagaagggtggtgggtagacactggtgcttctcgccatgtctgctttgatcgtgcgatgttcaaaacatacacagctgcaaccgaggataagaaagtgttgttaggcgactctcacactactattgttgctggtactggtgatgtggaattaaagtttacctctggaaaaaccatgattctcaaagaagtcatgcatactccagagatgagaaagaatctggtctcgggctatctcctcaacaaagcggggttcacacagactataggggctgatttatttactttaactaagaatgggatttttgtggggaaagggtatgctactgaaggcatgtttaaattgaatgttgaagttaataaagtgaatgtttctgtttacttgttgtgttcttttaatacttggcatgctagactctgtcacgttaacaaacgaataattaaaaatatgagtagtttaggtttaatccctaaattatctttgaatgattttgaaaaatgtgacttttgtagtcaggctaagatcacaaaaacaccacataaatctgtaactagagaaagtgagcctctagatttaattcattcagatatttgtgaattagatggtgttttaactagaaatggaaaacgatactttatcacttttattgatgattgttctgattttacctatgtgtatttaatgaaaaataaaagtgaagctcttgatatgtttaagttatttgtggctgaaattgagaatcaacttagtagaaaaatctacgtagtgatagaggcactgaatatgattctactgcttttgttgatttttataactcacatggaattatacatgataaaactgcaccgtattcacctgaaatgaatggtaaagctgaaagaaagaatagaacctttactgaatctattgttgccatcttacttaattctggtgctgcttctcattggtggggagaaattctcttaactgtctgctatgtgcttaatagagtacctaaatcaaaaagcaagatttctccctatgagattttgaa

SEQ ID NO: 366466 - DNA, 563 bp, Cannabis indica
ttttttgagccctcttcctgagttctggtgtgaacggaggagggcagtaggacaaaatctgctaaaaactagtgtaagtggtgtccatccccttgacaaagtaatactcatctatgaagcctcctatcttcgtcacctcgatgtccgtggtgcccgtcaaccatgaactctcgactgagaggtagaagtaccccaacctgctctatttaggacttgacttcagatcgaataaccagttggtgtcgtgggggatggctcaccccatccttgtgaggcgtatagtacgaatagggaagatagatacaagaggcccttggtagtaaactaagttgggctgatgtggtaataattggctatcttcttgaagtagggaagtaagggtagcattgcaccctgtttggtgtgagctctcaaccaagaacaataaccctctctagggtcagtagctagttgacccggggagggaaggaagcattcaacattccctaagagactgcgcttaaacagattggtcattttcttcatggtcgccacagatgatggagaaatccatcgatctcctg

SEQ ID NO: 366467 - DNA, 853 bp, Cannabis indica
ctcccaacaaaggtacaacttcaatcaaaacatgttaatgttgatcttttatgtcctttgtgtaatatgcatgtggagacaattgttcatgtcttggtggactattccttctcacgatcttgctgggcattatcggccataaaccagtcggctactggtgttaatgccgatttctgtgactggttttttgacatccttgctgccggcagtgaggttgtagcgagtgaagctgctatgttgtgttggagtatttggaatactcggaatgaagtgcaatggcaaagtaaaaaccgaactgctttggaagtggtaagatcggctaaacatgtccttggccaatggaaaattacaaagtttgagtctcctaatgctttgtttgctacgtgggacactacaaacagtaattgttggcgtaaacctgatgttaatacggtcaaggtgaatgttgatggtgcgacttttgaagctcatcaaattggttttggttgtgttgctcgtgatagtcatggcaagcttattgaagctatttctgggagtagatggggttgtgtgtctgcagagatagctgaggtaattggtattaaggaggcgcttagttggataaagcgcaaagggtgggatgcggtggttcttgagtctgatgctttggttgtggttcaagcgattaatagctcagttcatatgccttttgtcaatcgatttgaaaataaggttgcccattatgttgctagggcatcttatttatcgtcaggttgtatgtttaatgagctgaatgctccttctttcttgtgtgacattgttgaggctgaggcctgatttttaatgaaatccttgattcaaaaaaaaaaaaaaa

SEQ ID NO: 366468 - DNA, 574 bp, Cannabis indica
aaataatttccaacacttttttgcagcaagaagctttttattgacttcacccagctccattcagacagctccaagttgaaccctggttcatcagcatccttcctggccaagtccacttccgctctcttggtgttggacatggcaacgttcttggaggtagccgacttagctcgggaataagcataagccatctttagaccggtctgcacaaagaaaaaacattagaatctaagccaagtaaagaaggataaaaggaaactgtcaggaaagcttaccctcgtaaacatctttaagactcctcccatcaccagctctagagaaaggtcattattagctcttaccagttgctcattcaccttaaggactgaccgagtcatgtagtgggtgagcatatccttgcctctcttagtctctcgatgcaatactggaggtggggcaggagcccgaattttcttacattcgttcttgaccagctcagatccgccctttgactgctcgagcctgtctgagctccctcctcgagagtctttggacttagttattttcggcatagaagggtccacgacggttggct

SEQ ID NO: 366469 - DNA, 560 bp, Cannabis indica
atcgcagttttctatttataagtgatttttagggttcgtcggacgattttgcccctggccgtacgggatctcgccgcggctagagtgtacctcgccgcagccaaatatgcttctaaaaacattgtttctgtaattccactatggccgcgacgagggtgtatctcgccgcggcgactggagcatgaaatatttggcattctgccttcgagatatagccgcggccagaagtgcgtcacgcctcaaattggtgtttttcttggctccgctcgtcttttactacacttttacgtcccgagacctccattactctgaagaacctgaaaacttagaaaatacgcgtaattccgttctaaaacgacataaagcgaacataaacttgatccaaaacataggctaaaaatagcctaacagtgatcacgcacattctgatggggttccatccgtgcattgataaatttctttgttgcatcaaagcgagactggattgatgccattccgaatagttcatttaactgcgtcatgatttctgcagccgtgacagtgtttgcaaaccttgtttt

SEQ ID NO: 366470 - DNA, 254 bp, Cannabis indica
ttcgaaaccagcaagaacaaggaagattgctgctggtttttggtggtttcagcaaggaaatcttgggagaatcaagctaaggtaagccctagtaacacccttccttagtttttaagttcttacttggtttgagtttgtggttttgagaattagtggctgttcgggttaggttgagttatagttcaaattttatggtttatttgagttgatttcaagttcttgcagctggttttagtgtctggtgttggatttat

SEQ ID NO: 366471 - DNA, 695 bp, Cannabis indica
gtgggtaccggagtcactactctcccaacgaactcaccgaatccagttcgacctagggttgtacggagtgacactcaaccattcgacctagtgttgtacggagtgtcacacagtatgtagtgaagttagctgtggggtaccggagtcactactctcctaacgaactcaccgaatccagttcgacctagggttgtacggagtgacaccgatgcactatggcagaagtcgcattatgaatttaggttgtttgggctgagtatgtactcagttcatcatgaagcgtaccagagtcactattctcctgactttattactacagtcactttttgtctcaaactactattgtattcataacattaaactgtttttttattaaatatctatatttgtatagtattcaaaaaattattacaatcttgattacaacgattaatacgttaatgtaatcttacaaaaattattgcaatatttattccaacgaataatattttaatgaaatatttaaatcgttttaaaaaaaatattgagttctcattattagtaaacatcctaatttaatttcttattcatttcgccacacatgtttatttcgacataatattaggatatttgttgctacatgtgaaaagtttatgtggccattgttgttcttaacggatgggaacaatgggaacaatgggaacaacatttacctt

SEQ ID NO: 366472 - DNA, 824 bp, Cannabis indica
cttgcttgggggtagacttcaggtcgaagaaccaggcgagctcgttgggggaaggggcatcgcatccttgggaagcgtagaggaagaagagagcggacaaatacttaatgccctttggagtgatctgggccgggcagaggccaaagaagtccgccacatccctgaagtacttgtgcaagggcatcagcgccccttgctggaagtgagctcctgaccaggcgcacattcccttatcaggatttgtggcgcgattgtcgtgggcgagactatagcagtccagctcgcccaggtacccgtcctagtcgagattttggaggtctgcctctgaaatcttggacggagcacttacccacctggcgcccaaggcaccctgcctcctatgaggaaccgcgtcactaagctcctcattgacgtagtccacgccctcaaccaggacgtctctgtgagcattgactggctgcccaacctcattgtactccccgaagttagggggttcaatctctttctctcccttcgcctcggaaggactgcccgaacacaccgcgtccagctcctcaaccttctggacctcagcgtccccctctcggtcctcctccatcgggacggccgaatcctgttcggcgtcgggtagagtggcaagccgagccacttgaggatcagaagcgtcggccagacgcgtggttttctatgtacgagccatcatcctatggcttggtacgaggtcagaagaatttgcttcgctagaaggaggactacgacgaagacaaggatgaacctcgcgcagaagttgaagcaaatcttggtcgatctgatgccctagttcc

SEQ ID NO: 366473 - DNA, 496 bp, Cannabis indica
tgtattggtttaaaaaaaaattaagtttttaagtatagaaaatcaaatttgtactatacattttacaaatttcaacatatataataatgtgaaagaaaatatttaataaatataataaatatatgttgtccttagtactgctcctcatgcctttttcttttgtaaaagatatatattttctttttatttagtttccttcattaattcaagtgattttttattatttcagccactaatacttatatagcaatggccctattttttgtgacaatcagttgtcccgtgatccgtaagagaaaataccgggtaagctgtgcaatcccacatcgtttggggaaggtcaagtgtgatgattctgagactgtgtaggcatgggactacatagttaaagatcgagcttaaatagattgattggtactacctatatcaacaaggtgcatcttatttttcggtagcccatcacgaaagaactcctttggttaagcgtgtgcttgac

SEQ ID NO: 366474 - DNA, 698 bp, Cannabis indica
tccaaatcaacacaaaacatcgttttaattcataattcatgaaagtaaaacattatcatggctctgaggccagttgttttaaattaatttaccaggatctagatttactaacaagtatgtttcactaacatcataatatgaattctaaaacaatgaaataaacacgtataaagtttagtaaaccttagattgggagcagcggaatataatgactccttccgttcagatctctagcccttgattcctttctgtagcagagcatcaccaaaatctgaacctggatctctttctctccttcctttgatgctgatcctccttcttgttgtttggaattctcctacaatcttacacaatatgattgagatacaacttgatgtgtgtgggcactcactcattcactcaaggttcaaaaaatctaagtagggcaaagagaagaaagaagtggcggctagggtaaattagaaagaggctcagttttcatgtgtcaaagttcacaaaaagttaagtttgaatgtgagccatcactatctatttataggtaaccacctagcttcggttagattctaattatttaataactaaaaattaattataaaataatattgtcatttaatatatttattaattagacatataatgtctcttaattaataaataaacctagaatctcttttctctacaatttcgcccttgcttag

SEQ ID NO: 366475 - DNA, 519 bp, Cannabis indica
ctagcatcaaactaagttcttggaaggggagaaaatagggggtgagcttataaagcccagtaggaaaacaactaatatcaaaggactcttgatttaataaaattcctgcatggttagcttagtaaaaagaaaatatctcatcactagtatcaaaatgtataaacaaaataaagagaccacaaagaatcataaagtcaagcatcaaatgcatatcacaccgtccactagacccctagctctcaataccaatcaaagaaaacaacatcaaaaaccaggtagtcacatctgatatccaccataataccggggctcagatttaattcactacctgtacagattctaggtctttcacctacaggtgagtgcacacctgatctacctatgatgacacagagactaggtcgtaaaacaacaatatgcactgaacatgatcaacatgactctcatcagtataaccaaagcacacaaataataagcataaccaaagaacatattcatttttattttatagaaaatctg

SEQ ID NO: 366476 - DNA, 507 bp, Cannabis indica
tccacgatgacaaacttggcatcaaaatccaaagcagcagaaatagccaaacagtaggccgccgcttccccacaaagagcattagaaaagtcaagacaaaccatatgaactcgaaccacctcgcctaagtggttcctggcaacaattgctatacacatgctatcaaaccccattttaacatcgcaatttagtttgatccaatcctgaagggggagaccaacactccttcaggcaagaatcaggggaaaggaaaatagtagcatgtaattctgcaaaagaaaatcgaatagagtcaatgcacttcttcacatctaaagtgagattattatgaaccttctcatttcgagtgcaccagatggtgtcgaccacaagtgaggcatacaggaaaacctcctccacatcagtccccttatgtttcaggtcccaaatgaatttgacccagtcccacatccggataccagtgtcacagatcggataaatactccaaggagaagatcgccagacatg

SEQ ID NO: 366477 - DNA, 575 bp, Cannabis indica
atatgaaagaataaaaaaaacatcgacatttgaaggaggctctaatccattagaggggaaggaacaacgaaggattgtagcacccatattgggatatacgaaactcaataaaagacaactgacgaattacttgatagaactggaaatgaaggatcatgacgctgcacttgatatggattggctatctagtcacggtgcgacaatcaattgacgaaagaaactggttgtttttgaaacaaaggctggggatcggtttattttcaagggagacaagctggccctaaggactccattaatctcttccctaaaagttagtcagctaatgaaggcggggtgtctggcactcttggtcagcgtagtggatcgagcaatagagatgcaactaaatgtggagaatgtgcacatagtctgtgaatttccagaggtctttccagaacatctacctggactacctccagacagagcggtggcgttcatcatcgaattagccccaaggactaatccaatttcataggctccatacaaaatggactgtaacgccctgtccaacagggacgccacgtgtgtgcacttta

SEQ ID NO: 366478 - DNA, 984 bp, Cannabis indica
gttgtgtgcatacatgcctctgttgtgcttattgtccaacagtttgtctgggatattgcttttaaaggagaaacctttgaacagtgtgtgtccatgttctcatgtgatagcctacatcaattaagcaccacacgatagaagagttacctaccaaatcaacgattagatggtcttgtattatttcacaacttcatttgcgtgctgagtaaggaaccctagtggggtaagagggtatgctctcgcccacctacgggcctataaatacctccacttttatgtatagtgggtgaacaattttacttacagaacttctgctaaaattcttagagagctttcttcgagagagaaacaaaaggaatacagagattaccattgtaaacacttgtaatactcaaacatttaccaaagaaggctaatactactgactcgtggactaaggatcattaacgcctgaaccacgtaaaagatctatccctctctggatcagacttcatgacctaggtctccaatactggggaaacaagtgcctaagtgctctagttaatactgttgggaaacctataatggtggaccagcatactaaagattgcacaagggtccaatttactcgagtattggttgaaatggatatatatcactaataatcctccacgtacaattcaatacctcaatgaaaaaggtcagcttatggagcaggggatagactatgaatggttacctatgaagtgaaaaaaaatgctcagggtatgggcacatctgttggaatttattttactaacaagtatgtttttaacatcctaaatatgaacttctaaaacgatataaaataaacaaataaaaggtatgagaaaccttacattggttgcagcggaattaaatgactcctttcgctcagatctctaattcttgtatcctttctatagcagactatcaccaagatctaagctcgacactcctttagttgtttggattcttcacagtctt

SEQ ID NO: 366479 - DNA, 532 bp, Cannabis indica
agcttccatcaacatgtagtttccatgttgattcttcaggtttttgctgctcctcttgctctcgcttcttctctagctccttattttctcatgaatattaagagatttcaacgggtgtgtttgtacattcaaccacaaagtctgcaagggcttaaccctttatggccattctcggttgatatgtgatatcaaattggccatgtttaatggcccacttgagtagtcggccagatgcttcaagtttttgcaaaacctatcacaatggttagttagtgtacacctttattgggtgtgctttgaagtatggcctcaactttcttgatgctaggagtaagttgaaggccagtttctccatgagtgagtatcgactttcagcatcgatcagtgtcttactgatgtagtatacagggtgttgtataccgtcttcttctcttattaagactggactcacagcatgttctgcgacagctaggtacacgcctagctcttcattatctagaggttttgataggataggaggttgagccaattg

SEQ ID NO: 366480 - DNA, 1071 bp, Cannabis indica
cttggatctacttgaggaaaaacgagttgagtcgcaaatcaccaatgcaacataccaacaccgagttacaagatacttcaacaaaaaagtcaagaaaagactattcaatgttggagacttggtgctaagacaggtatttgcaaatacgagagatgtatctgcaggagtgttcaacccgaattgggagggtccatatgtcattgaagcagtagttggagttcgagtttataaattagctcgactcaacggctcgctaataaagaactactagaacgtggaacatttgtgaccctactaccaataaataaaagatgtaactcgcattactgatgtaaaatttaaacttcagttatgaataaagaaaatcatttatattaagtaattacaaagtgttattctttaaaaattacttaaggggcatttatgtatgattgttgtcgagcaaaattcgcaacaccaaatgtatatgatactattaatgacaagaagaaaattatatgaagaacaattgcgagtattcaacctagagtggcgagtactcgaactgggaatgggaaatgcttaacagaatactggaaataacaataagacagaggattatagtggttcagtcagatcacggtctgcttagtccactgtagcaagagtattgtacgtctcatttgatggtggatcacccctttatatacaaagcaggtatccaatcagttatacaaggatggcattcattgtcaatccgtttttacacattgaattacaataactaaactaaacaacgttaacatcaataaatgaataacagttactagattcagcaacgtatgcgcccttttaacatgcgagttgactgttcatattctaatgttaaactcgcgggcccaacacttaattatgtttaggtatgtccgcgttcttatatagtcgcctctttggtacatcgtatgacgagttgattgaacctagacatgcgagtctatattggtttatcaaggctgctgggtcatcgggaccaagccgcattatgaaaaatcgatctctatgcttcgtcaggaatgtagagaggataacttg

SEQ ID NO: 366481 - DNA, 759 bp, Cannabis indica
attcgtaaaaagagtactcagaggaaggacgtgtggaaaacctcatctagtactggagtgagtaaaagctttagccccaatgaccgaaaaaggaaaccagatggaccactggttgtgggtccaaacagaaagtttcaaggtaaccagggctttcgtcgaggcagaaatgaggtttggcagccttaccctgaatgcccaaaatgcaagagacatcacttgggtgaatgccggtctagagtttgctaccaatgtggagtagcaggtcatttcaagaacaactgtccacagctacaaaagcccgaggctaagaaagaaagtcctgtggttcctgctagggtgtttgctttgacccaagcagatgctgaagctggcccttcgactgttacaggtgagatatctattggtggtattatgtttactattttgattgattctggtgccacacattcatatatttctagtagaatcattgagaaattgagtaggccatgtgatatcatgtctagtggatttggtaccttgttacctactggagaagtggtaatctccaggaggtgggtaaggtctctcccagtgttagtagaagggagagaattgtcagtggatctgattgaattagacttagaagattttgatgcaatcctgggaatggattggttgactaagtacaatgctactatagattgtaagagaaaaatggtgacttttgaaccagagggtgagattccatttgtttttatgggaaaggtgcagggatct

SEQ ID NO: 366482 - DNA, 747 bp, Cannabis indica
ggaacttgggactcggacccaacctagaccaagacccaggacgcttacccacaccaagagcctgatgtggacatacactgaactccggacccgaacccaaactcagaccaggactggaactccgacctgagctcaaacccaaaatcgaactctgaatcgcaaatggaaccagaactgaagtaggactaggaccaggaccaggacctaaacccaaacttagatcgagacccaaacccactcaataaccaggacctggaccgagaatcaagataaggacctaggaaacagaactaggattgggacctagtacccgacccacacccggcaccagaaatggaaccagactgggacccgagattgggatccggatcttgacctagggcttgacaaaacccataatcgctgtctgtatttgggacccagccctggactcgaaccttgacaagtacaagaacccacacccagacgtgaaccaagtcccaaacccaaaagtggacccaaatccgtaccctgtgacccaaaattggaaccaaaactcgaagttgaccgggactggaactatgactcggacttggaatcataactgaaattggacatagatctagaaccgtaaccggaccaggacccggacccagatcccaacccaatcctagactcgggacccgaacccgaacttcaactcagacaaaaacatggaaccaaactaacacagaacttagaccaagacctgggacccaaaattagaac

SEQ ID NO: 366483 - DNA, 714 bp, Cannabis indica
tgaggtcggtgaaatcaatacaaacctgccattttttgttcagcttgggtaccagtacgaggttagcaacccaagccgagtagaaggcttcaattaggaaattgtttttacgtagcttttctacctcttctttcagtgctagggcccgcttcttgtcgaacagtctttgtttttgttgaacaagctggaaatttggatcaatattcaagacatgtgaaattatagaaggatcaattcccaccatatcctcatgcgaccaggcaaaaatgtctaggtttactcttagaaattttatcaagcttatttcacttcgagcaacaaacctttcccaatcttaagctttctggtccgaatgtttgggtcgatttcaatatcttctagttcttccactggtccaatgtttttgtttgggtccccaagtcaaggatccacatcttcatccccgccttgggcggttccctgtttggcaatattttttcccatatctgaactctggctagaggatacttctttttttgccttggttaaagaaaggttgtaacattcccaagcaacttgttgattttctcttaggtagcccaccccattttttgttggaaacttaaggcataaatggaatatcgaggtaatagcctttaagtcatataaagctggtcggcctaacatgacattaaatgttgatggaacgtctaatactaaaaattgtgccattat

SEQ ID NO: 366484 - DNA, 537 bp, Cannabis indica
ttttgttcaaaaaatcctaagtatagggggatatatgcccgcatgtactattgattatatgaataaaattacttgataaatatgttttttttaaatgatttaaatttagtttaccaactttaaaaattttcctacttattacaccaagctttaattaaagtcgcacatgtatataaaattgcgattacaccgagctgtaatcaaagttaaaaatacatataaaatcgcgagtacccgtgtactgcgtaaatatcaaaggataagctatccccgcgaggatagaaatttgtccaaaagagaaggtaaatttgtctaagtacagaagtgcgagtacccatgtaccgcatatatataaaaagtactgaaataaaaaaaaataacataaatcagaagataatcaagcgtctggagcagcaggagtactcgcgtcaggagcagtctcgtccgcgactttgctgacgatctcattctcgacttcctcggcctgtacgccctcgacctcatccagaaggttgcctcccccaccttgagtctggg

SEQ ID NO: 366485 - DNA, 532 bp, Cannabis indica
tattttattcatctttaggtattatataagattatttcaatataatttgtgaggcttacacgtcaaatgcctcgagacttacaaaattaataactattaaccaagaattaggactagttactagttagtaactagtcctaattctaccaaaatttcagcaacataacgattataattgaacgttgctaaaaaatttaaagctattaataacaacaaaatacaatccaaaataatataaaataatcacaacaacatttaacaatataaaaatttaccacccatccgacggtagtatatgtatttgcataatctacttcactacggatgaatatgtaagatatttaaactcatctaacatgcatattattccacccatcgatccgaccgcaggtgaatatatcacaaaacctactaaattactagttagtaactaactatagtacactaaatataatttgtaactaactagtaactaatttactctaaataactaactatataataaccagcgcacctcacgcatccatgattt

SEQ ID NO: 366486 - DNA, 549 bp, Cannabis indica
ttttcattctgtttaatataaaagtttaaaatctgcgctattttgattagtaatcccgtttaggggattagggtttcataagtattttgggtagctgcctatttattcagggcgttacatttcatctatgttagacttttttattaaaattataaaaaagtccttaaatccaataatttcaatagttcagggggcatttttaacgaccttaaaaattcagggggcatgatttggtacatgtcaaagttcaggggcaaaaatcctaattagcctttattaaaagcatggatataaatggtcaaataaattaagtttattaaaaaaattaaatatatatatataaatttagaatgaacaaatagtcacttggagaaattatatttaatttttgtatttgtacattgtaattatattttacattttacttattcttttaagaaattttaaataatttaatgtatctaaaataaaatttaaaataattaaatacatatgtataataataaaaaaaaattagacgagcatgcaatgttagaaaaattaataata

SEQ ID NO: 366487 - DNA, 935 bp, Cannabis indica
ggcctagaaacgccactttctccaaccagaactcacactttttgaatttggcgtacaattggtgctctttgagtctacttagagttagccttaagtgctcctcatgctcttccattgtccttgaataaatgagtatgtcatcaatgaataccaccacaaacttgtcaagatattccttgaatactctattcattaaatccatgaaggctgctggggcattggttaacccaaatgacatcactagaaattcataatgcccataccgtgttcgaaatgccgtctttgctatatcttcctctcggactttcaattggtggtacccagatctcaagtcgatctttgaaaagacgatcgccccttgtaactgatcaaacaaatcatcgatgcgaggcaagggatacttgttctttatagtcactttgttcagctctcgatagtctatacacatccgcatactaccgtccttcttcttgacgaacaacactggcgcaccccaaggtgagtaacttggtctaatgaaccccttgtctaaaagatcttgtagttgagccttcaattccttcaattcattgggagccatgcggtatggagccctcgagattggtgctgtgcctggcgctaactcaatcacaaattctatctctctatctgggggtagccctggtaggtctttcgaaaaaacttcttgaaattcacatactatatggacattctctgggcgttgggggggggggggggtttcgtcgttgacgttatctactatgttggccaagtatgcttgacatcccgcacgtatcatcctttgagtctttagggctgtaactagcagtaggcttgacttgactttgactccttcaaatatgaatgcctctctagattcaagggtgaaagtcactgtcccctttcgacagtctattattgctccatgtcgtgat

SEQ ID NO: 366488 - DNA, 531 bp, Cannabis indica
aaagaagagtatattttttgaactacagtattggaaggacttgtctctccggcataatcttgacgtaatgcatatcgagaaaatgtgagtgacaatgtacttggaactttgttaagtatcgagggcaagtctaaggacacagaaaaggcaagattggatctagagaaccttaaaatacgttgtgagttgtggttatttgaagaccgtaacgggagttgtggttatttgaagacgttgtgagttacacacttactcttcctgaacgacgtgaattttgcggatttattaagtctgtgcagttcccagacggattcgctccaaatttagagaaaaatgtcaatgagattgaagacaaaatttatgatctgaagtctcacgattgtcatgtgttgctacaacgcttgatgtccggtggcaatagaaagttcttgaagaaagaagttatggatacaataattgagctgtgtgtatttttccagaaattgtgctgtaaaacattgaatgttacagacttgcaaatcatgcaaaaaa

SEQ ID NO: 366489 - DNA, 739 bp, Cannabis indica
tagacgtgtgaaagcaacacgtaggtctatgccacttagacataaatagacgtgtgagcgcaacacgtaggtctacgccacatagacataaataggcatgtgagcgcaagatgcaggtctgtgtcacacacgcagaattgaatggtattactgtttatattatatgatgagcatattattgatatgttttatactgtcttgctgggcttggctcacgggtgttctactgttcaggaaagggtaaagctgtgtttgatcagccatgagtgtaggagctggacgaggaatgtacatgttcgggccacactagaccaagcgggttggggtctaccagtgatgtattttgagaatctgttttgctgcttaggtcggctagaggaaacgaacttgtaatagtgttttgtaattacttttgggatcccaacttttgtaacttttaaattataaggtttaaattattacaagttattttcattccgtttattaataaagtttaatttccgcgcttattttactagtaaacccgattaggggatcagggttttataagtttatttggtagtgtgcctaattatttagggcgttacaatactagttgagacaaactgcttgtaagactcagttaattgattttagctaatcaattataattctaaaattagactatgtctagtttatgaattttcactaagatatgacttgattgtaaaaaaatcagattttagggtttatttgttaa

SEQ ID NO: 366490 - DNA, 544 bp, Cannabis indica
ttaaagagaaaggaagttcagactagtttattatggaatattttaacggtaatccttccatcaactttggccaactgcgcagagtttttgagagctccaagaagttgatgatgtctacaagttggggatggccttgtttgttatgggcgtcctcactggtaaggaggagaagactgtcgttcctccttttgtcgtaagaatggttgacaaccttccattcttctacgagtacccgtggggaaagatttcgtacaccaagctgatggaaacttgtaataaagactacttggatgtgaagaataagatgcttaagaagattaaaaaagggagttactctgaaggaggaaaaatactcatcttatggctatattgcagcgttgcagtattgggcatacgaggccatcgtggagttgagcaacgagtatgcagtgaagaagtcgcatcactttccgagaatggggaactaggagagtaagccaaaaacgtcactcaggaaggacaaagtgataaaattattttctagaaatgtaagtttcttacgctt

SEQ ID NO: 366491 - DNA, 551 bp, Cannabis indica
aggaagtaaacctcaaaattctggaaatggtaatgggacgactaaacctgaggaaaactttgcccctacttccaaacccaagaacaagaagaagtggaagaatagcaagaagcccgttcaagctgtgaaaacagttaaaaagaaaaaggctgctactcctggtgatacaccaaaagggaaatgcttctattgcaatgaaaaaggacactgcaaaccccaatgccctaaatttctagcaaagaaacaaggtatttcttttcctataaacttatgtgttttagtaaattattaaccacttggattattaattcttgacctactaaccatgtttattttgtttttcttcttattacagctccagctgcttgaactcggatgctatctcagcaagttgaatcagatggtaggacaaaagcggtggagttcgtccaatatgaagatgaatttcagaaattttttttttattatttttgaattaattattctagtttcagaataatttggatttcaattatgagtttgggattttattccctatttttcatattgtt

SEQ ID NO: 366492 - DNA, 705 bp, Cannabis indica
gttttatatagtttataacagcaataaaataaaaaaaaatgacaaaagaagggttcagaacaggaaatacaagacttgaacataggaaagaaaatagaagtaagtttctactctatttcataacagaatcaaaacagtttcaatatcgttgccttgcactaataacaaattaaaaatcacaggaaaaaaaagacattccattcctagtcgtatgcaatggacaatttgatgatcgaaagaactatgaaaattatgaatcttgtgttactaactcatcagatgattttccttgattcatacaacagaaatgcaacttaaataaaacaggaaaaaaactaaaaacaaagcatgtaaaaacagaaacaataaaatataattaaatacctcatcagaaggacgacgatgaatgacattaactttttgttgaatatccttaattacagtcatttacagacttgaaattaagatcagcaaaacacctcaaggaagtgaagtctttggcaaggattcttgattcgaaatgaccaactccaacttagatttcatcaaatcaatgtcctttgaatcagatttcttagaagatgaaccactctcaaatgtttgcttagatataccgcggtcatcaatagattcatcagaaataaaccttccagttgaagcttctgcctctcctcatcagtaggacaaatgtttttaatctttaac

SEQ ID NO: 366493 - DNA, 544 bp, Cannabis indica
tatcggattaagcggggttatggaattggaccattttacccctagctttagaaataccctagttttaagtataaggggcattttagtaatttaccatggaagtgagttggtggctgccttgtattgtgacacctagaaaataggtttcagccaaggtttaattgattaaacctttatttcttttagatggaaaatgagaaaataagctaaaaatcaaaagattgaaaaagcactctctctttgctctctctctcttcgaaccagccaaggataaggggattcattgctggattttgatttttcagcaagggttggaggaagaatcaatcaaggtaaccctagttgctctctagttgtgttgttctcaagttcttagttagtttgattatgtgattttgtgaaaatgggggctgttaagattggtttgtttagggtttgattttttaggtttatttgagttgattaatggttctagtagctggtattgataattaatgtaagttttctgcaagtttaagctttgagttcaaagctttgatcatta

SEQ ID NO: 366494 - DNA, 709 bp, Cannabis indica
atacatataattaaataatgaaatattattttgtgtttcaagaaatgagaaagatacggtgcttgaataatgatgtattctttgaagaacaatacctattacctacaatgacattgtttcaatagaaatgtgtatctaaaactaggaacaacttgatatctgatcgttcttttatccaatctcaattacaaaggacaaaactctctatctcaaaattcatattccaagacaagttctcatggctcaacgaagatatcaaaattgtgacataaatttctgttgatgaagaaggctttcaattcaaacagacaatctttgattttctccctaaggatgttgtggtattttcatcgtgtcaaggtctcatttgttgcaggagtttcttcgctactcaagacctaacaatcaacatttgcaatccattaaataagaaaatgaccaaactgagttgggattcactaggaaatgacaacattgtatctttagcttttgatccatgtcagaatcccatacacatttctacagaatccaatttagtgacagttgaggcatttgatttcaaatctctcttgatttcaaccattccttttttcttgaagagtatatttcgaatgtgaagcacttttctcttcttctccaatctcaaatgccttaactgcattaactttaattttgtacaaatgtgtatgggattctgagatggatcaaa

SEQ ID NO: 366495 - DNA, 764 bp, Cannabis indica
caattagttagaaaatcccgtacttgtgcccaagcctaacggctcatggtgcacatgcgttgactttacagatttaaataaagcctgcccaaagacagcttcccacttccaagcattgaccaacttgtcgatgccactgcaggtcacgaacttcttagctttatggacgcattctcgggatataatcaaatcccgatgtatgaaccagaccaggagcatacctcgttcattactgatcgagtcctatattgttataaagtaatgccttttggtttgataaacgcaggtgccacatatcaaagacttgtaaatatgatgttcgcagatcttattgggaacaccatggaagtatatgttgatgatatgctagtaaaatctcagcatgcaaaagaccatgtcacccatttacaggcaatttttattatactgcgacaatacaaaatgcgactaaaccctttaaagtgcgtctttggagttggctccggaaaattcctcggatttatggttaatcaacgaggaatagaggcaaaccccgcgaagatcagggtgttggtggagatgccatcaccaactaagccaaaagaagtccaaagcctcacaggtaaagtcgccgctttaaatcactttatatcgcaatcttctgataaatgcaaagagtttcttcatattttaaaaggcaataagaagttccaatggaccaaaaaatgcgaggaggcttttcaagccttaaaaacacatttggggcaacccccaatcctatcaaa

SEQ ID NO: 366496 - DNA, 678 bp, Cannabis indica
catgagaaatctacacacaattctcatcctagagacagataccatcacaactagaagaccttgttgaggtcaaacagcaacaaggcaaacctttgaaggattctatctaaaggtttatggcctaggcaaccaaggtcaaaggcttaatagaagaaggccattatacaaccataatgggaggtatccttccgttgagtgacttctagaaagacatccagaggatatcaaccaacaacatgaaggagttcctcgaacgagcaaacaacatcataaaactgaaggaagacgtcagacaagcccaaacaggaggaaagtcaacaatatgcagtctcagagtgctgtacaaccccaagacctgacaaacaagtaggccagcactagtagtgccaaccaaccctccaatagcaagaatactagaggcaagcgcaacaacaacagttctggctggagcagtgtcaaaaagggaaaacctgagaccatttacatggccactctagctactttcccatacaagaatccccttcctattaaaaaaagagatgagtaagagggacatgtctaagttctgtctatttcataatgatttcggccacaacaccaacgagagtcaaaacttgaagagggagattgaattccttataagaaaaacatacgccttgttaaaaattctccctaaaa

SEQ ID NO: 366497 - DNA, 524 bp, Cannabis indica
agggcacaaaacccaacaataagctcctcctgggcggtctttctgtagcttcttgatagcttgctttactccttttgcttgttgcttgattgtttttccatgccttgtaaggagacttggcttactcctgtcctgctattgagaaagtttgtttccacgcgtccttagtcttggcttacgtggacatcccacatctgatggaccaaattttgaataacattttcccccaagtcgctattcgaacatctagttggattaggactttccagctctcatcttgcttgtagtagcctttatcaagaagccttgcctagccatgtagtggctttttgcatggcatgcttttagatctttgatcttctctatccatatttgccttaacttcttttctttaacatctcttctttgaatctgctattattgataagtttcaagttttctaagcttctataaactttttgattcacaaattagattgtaatattttgggtattttgatctgcatgatagttttacaatgcata

SEQ ID NO: 366498 - DNA, 546 bp, Cannabis indica
tgtgacaggtcagcttcccgtcaacaactccttgtttacagtattatttgattcgggagctacacgctcatatgtagctacaagaataattgatcttttgggtagaccttgtgatattttagaaagagggtttggaaccctaatgcctagtggggagttggttatctctaataggcacattaggtctatgccggttaggatcgaagatagggagttgagcgctgaccttatagaattaaaattaactgagtttgacattatactggggatggattttctgtctaaatattcggccagtatagattgtaagcggaaaatggtgacttttcaaccagaaggtgaagatccatttgtttatgttggatcagtccaggggtctcggatcccggtattctctatactaagggctagagatttactatgcagtagctgtgtaggatttctagcagtggtaattgactccagcagacctgaaacatttaggcatgaggcagttagggtggtgaaagattttctcgacgtgttcccgaggagtttccgggattg

SEQ ID NO: 366499 - DNA, 779 bp, Cannabis indica
gagtatcgccaccgcttcttcttctcctcatggttccgagcagtggagcacccggagcttctaacagagtgggtcaggattccccctatgagcggaccgtgcctactcaggtcttctccagagggcccaggtctttgcgacttacgactgggcggaactcgatgtcgggggcctagttacgacggagaattgccggaaggccaagcttatcctgccgcaccaatcagtggaggactctaacctttctaaggttatctgtccaaatgtgagggtgcctgtcgcggagaagaccttccgtgacgaactcatcgccaccgccgagaagtagtaccaggaatacctctaccgaaaggccaacgagaaggcttattccaaggcccaagtagcatccgaaaggccccttcgcatggggagcccggtcgagaggaaagccaggcgatcgccaggaagccttttcgcattggcagcccggctgagaggagggctcctaggccgaagccttcgattcaggtgccaaacaccggggctcctgacgccagtacttccggctctggtaagtctcctttaatagtacattacgttccttccgttggcgaatatgctagtcataggcctgtagggttcgatgagcgtctccataggtttagaattccttcgacccggtggggagaccatatgaaggattattatttttccaacttaggagattttcctaggtcggtcccggatgggttctggtcctccagagctcgttcccttagacccttcggcttacattt

SEQ ID NO: 366500 - DNA, 568 bp, Cannabis indica
cagtggcggctgggttcgcctcggctggagaaatgaaggacgaaggtggggcggggggttcgtcggacagggaggggttcgggttcggctgtggggtgcggtggtcggggtcgcctgggaagattgaggacggaggtggggcggcgattgggtcggctgatcgtggggtgcggtcgggtggtggcgaggaggcgatggggtggtcgggcgatggtttctgggttgggtttctgggttgggtttctgggtttcaagaggaagaaggtgggggctggggggggaagtcgggtaggttacaaatttgaaataacattttatttatttttatttttttataataataatatataatataataaatataaatataataatataatagtaaaaaaaaaaaacacagaatttttttttttaataataatataaatatatatataagtaaaataggagtaatatgtgatagatggacctttcttctcgtaatgtgagtgatattacgcctgctgtagcaaaatttccacaaaagttcagcaaaaatcttgctgagtgctctttgaacatgtattac

SEQ ID NO: 366501 - DNA, 983 bp, Cannabis indica
tacttactcattactcagtagagaagagaccacacacacatccatgtttttgagaagttagagggcaagtgggttgagttgggtacccattattgatttgaggctcacataattgtgaacggttctccaatcaatcatttaacaacgaaacataaccattatttttattatttcacaaacaattttggtttaatttctttgatcccacttttgccaaaccacaaaaacgacatgtcggcaagttttgatatgggtatgggaaaatgatataatccaaaaatagataaataaataagtgacaaatatgtactggttgatgaagacatcaatcaagtggagttgttagttgcatgtaaaggatcccaattgaagaggcccaaaccatataaagaagcttcctataattgaagaaatgctatttttagacattaattgatttaaatattttatattattattattatgaacttaggtggcgtttggttggaggtaatgaaatggatggaatggaaatgaaacaatttttattccattcttttatttggttgcatttttaagtattagaatagcattccactattttggtggaatgtctattcaattttttttaaaaaaaaaaacttaatgtaattttttatcaattttttttatgcatttaaattttattccattccattccattcatattcttattctcattcctatattttcattcctcccaaccaaacttatggctaatgtggatttttggttttgtaaggctaatatgcttagttttgtaagtgttttgttttgattttgtaaggtcaacgtgaccagtatgactagttttgattttgtaaagttgattagtattaatttgtaaggtcagtttggtataagaataacacattaaaatatactataagctacaatatcaaagaattttatgtgaccatatttatatatataaaatttcatattttattaaatatttgttatat

SEQ ID NO: 366502 - DNA, 663 bp, Cannabis indica
gtaaatctaagatcctggtaaattaattccaacaaatacaactcaaaatattgaaagactgaaaccctccaggttgcactgccgcaatatgtacaatcattgccgagctccatctcactgttcgtccagcttagcttttcctttagctacacaaggtagcaaactgatgagtcaacagactcagcaagatatgcataacatatatataaacgatacttataccgacttactgcctaagccatcttgagctccaaaagaaacaagctcaccaaatgattaagaacgttcttaagggaagtacgaccactgtaccaaatgtactaaagtaccaactctatactcgtgttggtagagccattattgtactcccggaagttactaagtgttgtaccacatgcacgacgtactccctggtactcgtgttggtaacactgtaaccatcctgatatcctacactgtactaacacccttaaaataatcatataactgctagtgttagtagtgtaaacatttaacacaagcatacattcacatatataatattatgctatcttacctcgttccgtgctcaagtgtgtcggtcagcctgagtggaagcgcagcttgacgttttacagggccctaaaccataacgttcaaaactcaatgagagacatgctaaaa

SEQ ID NO: 366503 - DNA, 844 bp, Cannabis indica
aacttgctatgggtgggcacacaggcaatacctaaggcccgaatttgattgtgaagaaagctataggaattcaaaattagaagaagaaaaagaagaagaagaagtctcataaacctagttgtcaaagagaaagaaaactaagtttaaagcctttcaaggattagtgggataatgagacattcttttctttttatactaattcagttagggctagggttgatttatttggaataaaaaattatcaaaatatagcaaaaacacccttaagtggccggccatgaagtgggccctacactagttagattttttccatttttcttaacaatttatctatttttcacaaataccactttttgcactttcaaccctataaatgccaaaactatttatttaataattataatatttatcaaataaaattatcatttatagtatattaattagactccataaagtctcttaattgacaaataaaccctaaaatcctatttcttcaccatcaagccatatcttagttaaaattcataaactagacatagtctaattttagaattataattgattaactaaaattaattaactgagtcttacaaacagtttgtctcaactagtatggggaccatgggtctatataactgagcttccaataagcagatctagaccttaccaagtaaattctctaacttattaattcctccttgcatcactatgaaatttggaatttcactctcaattatatacaacactctatatgttccacgatacagatcatatagattatctattgtattatcccaataatcaatgatcctctatgaatgatgtacatagaatagggattaaa

SEQ ID NO: 366504 - DNA, 542 bp, Cannabis indica
ttaattttagtaatgtacattgctttatttttattgtataaaactttttaggatttctctatattattaaatatgtattgtgttgtattgaatatgtattgtgtgtatatatattgtgaatgagaaatgtattgtgtgtatatatattgtgagtgagaaatgtattgtgtgtatatatattgtgagtgagaaatgtgatatatgagagtattttatatattgtatgtgtatatattgagtattttaaactaatagttttgttaaatattgtgatgagaatgagataggagagtattaaaataaaagtttagaagttaatttctataaaattagtgttaaatattgtatatgtatatgtatatattaatttctaatactaattttcattcatattcatgtatttttattactaactagttactcattactaaattgttattagtaataaattaactagttagtaactatagttactcataaattatataagtagtaagtagctaaataaaaaaattggtgattttgtagtatttctttatgtt

SEQ ID NO: 366505 - DNA, 626 bp, Cannabis indica
gaaattgacatttagaggcggtttttggtgaaaactgtaggtatagaatttaattatatgtatgtcgtcagttggggttggggtaaaattaagggttttttattaaccctatgtcatcggttatttggtattaaccgatgccataggtgtagccgttgttcgacacgtggcacctatggcgttagttaataccaaataacctacgccatagggttatatatcagacccctacagtatcatcttcctcatttcacaccttgttgaacatgaagaacaactacccatagcaatcccaaatccacgaaaaaaccctcgccaaccactactaaaaaagcctcatcctccctcatttcttcactattttatcttttttttgtcttaaaatcttctattttcaatacctaaacctatactgtaaaaaagtttagtttttttcccctctatatatcaaaccgaacctattataaataaaaagatattggcggctaaaccacctgaactctacggtttgtaacagttaattacaaaaaccaaaattttggtggcataactatctaaatcccggttccgttttgctctgtacccctccgtccaaaaattacagttaagtgccacggtggacagtc

SEQ ID NO: 366506 - DNA, 597 bp, Cannabis indica
ttttttatttcccatattcacttttaaaccgaggcatctgaggttcttttgaaatgattacccccttttcgttacttgcctataaataccaataagcatttgtacacaaactcattctcaccatccttcttttctaagtgagttcagagcgaaaagagaggtttttggcctcaagtttgctgaagtgcgttcatcgaaactgctcgttggtttgacgttacttgaatccagacatccgattcttgagaaagttctcgatttcctttatgtttatttttgcatgtttactttttgaatgcacgttcgactttgttgtagaaaatatgtaggaaaccctaggtttagaaacactgtgattcttctttgtcatgggttcatgcaattttacattccataattcttgctttctaaattgcataatgcctgtctttcatcttgcttattctaagctccatgaaattttttgccctaactcgagaaaatttcaaactttctaagttttgacttcttgttgaacattcttattctttaatctgttgagtactcttggtcaacatatttgcttgttttatctttcgatattccaaccaaacactc

SEQ ID NO: 366507 - DNA, 770 bp, Cannabis indica
aaataaacaataaatgataccatgaaccaaatgacacgcaaagtgatgagaaatacttctgtttctttattgatatttaaagaataaagattacattgaaatggagttttatttagggcataaaacccaataccttagccccacgaggttagctggctttttgatttgaagtccacccctaagcaaggcaggtcggggtacttctatttctctcagccagacctcaaatggttgacgggcaccgaggattcggccatcagcaaaattgggcgttttgttgatgagtacttcatggtggatggcatgggcaccacccatacttggttttagcagatccctacatatcaccgccctcccctcactcttattcttagggatagagctcaagagcttgctcagttaccgagggatgaccggaatatcatccagttgacttctgaggacaactttgtgaagtacgggctctatccgaaagatttcattcctaagccagtgaaggggaggaagaggaaatctggtgctggctgggctgagggagttgataaggagaatgagctaattcaactgaagcgcgaggctaagttgaagggaggtctaagggccaagcagtatgctcaggaagagcaggtgactctgctcagaaggaggaagaaactttcggcccagcccaggcccattgaacatgcaatttgcattagggagcccagttcacctgcttggccgccttctcccatgctcagaaaagggaaagctgttatggctgagataag

SEQ ID NO: 366508 - DNA, 616 bp, Cannabis indica
aaaactctgtttcaatgtaatctctatgttttaaatgtcaataaacaaacagaagtattttcattacttattatgtcatttggttcatgttatcatttatttgtttatttgctttataaattcatccaaatccatatcacatttatattattgtttattgtgtcgtcaacacagtggaaagtaatcaagattatgtgattaaatatatattcctagatttatcattacacagggtttaactgatatgcattttgggaacatggtagtgtcattgagtgggagcgctaaacatagatatggaatctatagcttctatcagggcatagaagtgaaaggatgatttcctttgatcttggctaaacggagataaatggttgagtactcatttcagtgattatgtttagttcactgaaatatcatttatgtaaagatcgcttactttaatttggaaattagcagttaatcatgtttaattatgaaatatgtatagctatttaaataattatttatactgttattgttaattctgaaatgcattttatgtcatttagtagttttcataattttgcatttccggtgcccggtaacatggcactcggtgttcggctcagtaaaa

SEQ ID NO: 366509 - DNA, 821 bp, Cannabis indica
agttcatatttaggttgttaattaacatacttgtgagtaaatctaacattctagtaaaataaattccaacacttaggaggaaccacctcggcagcagtagggactccagggttggatgtccttttcttccccttacggtcaaggatgtcttcataacccatgtctgcaaaacaagacgaggcgttataatcattataaaagccaattaagaaggggaggagtatatttttccacctaagggatttaccaaaattagtagaaggcgagctatcactagatgttggggtagaaggaccataatatttgctaaaatccctacaacctgtaattttgaatatatcaaaaggtttgattggttttaaatcccagctcgcatctatgtggcctgccctgtcttccatagtaccgtattgcttagctataccataaaatgactcgtgacaattaatctggacgtggaatctaggataccaactgtcaaacttatgagcaatgcggtccacgagaatggaattccaagtataaacattaagacgggagtcttagaaggtaactaatgtattacgctcagctttaagtatagtaggtggccagccacattgattacctcgggatgctccttcaccggattcccgaggggaagtgctttgaaggtattgtgctagggccaagcgatcccaggcctggtcctcgggtgaacaattatttttttctaagaggaatacttgggaatcttgtaatcacaagtgtattctttgtcagcgagaaggcccgccgatcggaagttaacttcgttcaaaaggaatttgcatgatcgaaga

SEQ ID NO: 366510 - DNA, 561 bp, Cannabis indica
ccttctgatgggggttcaggtaagtccttctcaccttgaatattatagcacattggggacaatgtgaatctttagtttggggggagggatttaaaaattttatttttaattttctgctttaattttctgttttagttaggaatggcaataagataaaagataattgtgtgctgctgtttaatgtaatgtgctctaaaattgcaaaataactgtgtgcttaattctgttaactctttggattagtttggatgcttgtataacatgtgtaagaatgcaatttgatgatctgtgaaatatgttataattgttttactatggtttgtggtaagattgactggatagcttagaacttgcatgtcttattcttttgaggcgaaatccttgacaacattcaataggaatatgatttaggcatttgttggatagtttgagcctttcaagcctaccatgaaatgattatccttagttgaccctcttgagcctaaacttgttttattcttcacctgttgaaccgaaatatgtatccacactgttaaattttgtcctcactattttatcaat

SEQ ID NO: 366511 - DNA, 577 bp, Cannabis indica
gcataaaacccaacaccttagtgaccaaaagcccacttagagaagaaaggcagtgacaaatcgaagaagggcgaatagttcggaagagtacgtatacatggaagacgataatacaggacatttttggaattggaagatgttgcttacttgccctctattaggaagaacttgttttctatatctattttggatagactatgttatagtgttcttttggaactgaaaatttgactttgtatcgtgactctatgttggttggtaatggaagtttatgtggaaatttatataagcttgatttacatgatgttgtttctattacttctccctctttcccttcttcttcttcttctcttaatgctattgttggttccaaacgtgcaagattagatttgatatcttccatgctttggcataaaagtttgggccatatttcactgtctgtgttgattgtataaaaggaaagttagctgctaaggttagaaagagtaagtcagacaggtgcacagaagtattggagcttattcacactgacatttgtgggcctttttgtgccacatgctatgggcggctataaata

SEQ ID NO: 366512 - DNA, 974 bp, Cannabis indica
cggagaggggcttcagagaagaggccttctggagaggtcattgacctttctgaggagctggctgctgcaatccttctactccccaatctgccaagtctaaggagtctgggccaccaacatctgggtccgaactggtcaggaggattcctgaacggatgcaggcaccaactctacccgtgcccgtgctgcctgaggtcaagaagggcagggaggtgatggctcatcacatgaaccggctggttcctgaggtcggtgagcagctggctggtgcggaccactcatctctggatgtgttggtgggcggagtcttgcaggagcttaccagggttagtcttttcttttcgacacttcccttttagcttttcatacttagcttcatatgctgaccttttcctttgtgcaggccggtttgaagctgggttatgcttactcccgggctaaatctgctgcttccaagagtacggctctgtccgacaccttgagggcggaggcagacttggccaagaagaaagctgaggaggccagggcggagactgcagctgttcgccatgagttgggtgaggccaacaagaagctttttgccgctaataagaagatcaccgtgctgaccaaggatctcgaggctgctgatcttcttgaggaaaccatcgagaccttatctgctgaggttgatcgtcttcaggatgagaggacttctctgcggcaagcctatcttcggctgaaggaagataaggacgctcaggcggtcgaggcgaaccgcttgaaggagaaggtagatgctttggagactgccggcctcgagctcttctttgatttttggaaggctaatccccaggccaacttcgactacttgggcgacgccaaggaaatgtacctcaagtactgcgcggcccaagttgcctatggtgggaaagaggtggctgcttcaacttccggccaagcttctgaccaggctgttgatgcttctcctgctc

SEQ ID NO: 366513 - DNA, 590 bp, Cannabis indica
ttactgcttgttctaattggtcgtataatctttttatttgtgttcataaacatccaataaaatattttgtgatagccatgtaattaatggataattttcaaatattcaaaagagtatttgaactctataaaaagtggtcactttaattctttttagagtgatctcatagtgttgtagaaggagtagtttgttattcggcaaagttttttgagacttgtctgggccttaagttgtttggcaaaattctttgaaaattgaagtctttacacatatattcagcttggaaaaagtcaaccacagcttcacaaaagttttactctagaatatgtcaataaatagtatttaaaaaaataactaacaaacttttttggtaatgtgcaaatctagaatcaaatcaagtacactatattgagaaaatgtctttataataagattaggaaaatttacattccagtactttaattcaattctttttacaaaaatatggtgttgtcatttatatatcaaaatgtaccgttttttataccgttatcaaattaattcatttttttttaaaagaaaaaaactgaatgggacgtgtgatgtgtgat

SEQ ID NO: 366514 - DNA, 783 bp, Cannabis indica
cgacctgcagggttgctgcaaccactgaaaataccagaatggaaatgggaagatatagctatggacttcgtggtaggttgcctagaaccacgggacaatttgactctgtgtgggtcatagtggacaggtttacaaagtctgctcactttttacctgttcggacgaatttctccattgatcagtatgctgagttatatgttagagaaattgttcgtctgcatggtgtcccaaagtccattgtgtcggatagagatccgaagtttacatcgagattctgggagagtctgcatcgagctatgggaactcagttaaagttcagcacagcttttcatcctcagacggatgggcaatccgagaggaccattcagattttagaggacatgctacgggcatgtgtgcttgactttgagggatcatgggtaaagtaccttcccctgatcgagttttcttataataacagctatcaggcaacaatcgggatggctccttatgaacttttgtatggaagaaaatgtagatcgcccattcactgggatgaagtgggtgaaagaaagttcttgggtcccgaagctgttcagaaaacaagtgaggcagttgataagattagagcgcgaatgctcgcggctcagagtaggcaaaagagttatgccgatccaaagcgtcgagatattgattttcaagtcggggacatggtatttctccgaatatctccgatgaaaggcataaaacgctttgggaagaaaggaaagcttagcccgaggttcattggaccttttgaaatcc

SEQ ID NO: 366515 - DNA, 560 bp, Cannabis indica
tttgttttacttttttattttttgttttttttatgaagggtgattagaattactttgagaattcataacgtagacattaactatcaatggtagctaattgtttagccaaataaaggcccaaaaaaaaaaatgccagccatatttgaaaaaaaaattaacttaaaaaataaggaaattacactctatactcattttttgtttcatattttaatttttaccttctttttactactctttaattaatacccacttttataaattatattcccattatgtacattaggaagtctaattttaataagttttgtgaggttatatttggtactttgattataaaagagggtatttatcaattaaaattattttagagttatatttggttagtgtgtaataaaaaaatgtagttttcaacttattcttaaaatcatattaacaatagaaataattacataaggcaccattttttgtaaaatatttacatttttacgttcaaagaatatttttttacatttttacggttttctaaaaaataacacgaaaacaacataaaatcaacaaga

SEQ ID NO: 366516 - DNA, 1031 bp, Cannabis indica
tttttattgagttttggttgttgtgataataataggaaacgattatcatcgttgagactcgattataatcgagggtaatgatatgaaccgattattatcgttgtgactcgattatgatcgagtaaaagatacggtcattaccgttatgagtaattactcctgaaaccgcggataggtttcttacttatcgtttgctgtatcgggcaacgatagtgacatagtagctcgtggttaacgagtggtaagggtactttataaagtaccagtattgtgtgattacgaagttgtgaaatgacttaagcatgttattatgtgatgatttgtaactggatatatctttgttataatgtgaatgaatggatttttatattgcttaagaaattagtttcttttcttgcagaatcttagtgactcacgaaatgtaagaattcgtgcttatagagatgtaagattagagtgctttatgaagcactgagattatggaattatggtaatgcgtgaattagagtgctttatgaagcactgagattatggagttatggtaatgtgtgaattagagtgttttatgaagcactgaaggtgagtatttataatgataaatgtttaggaggttgtatgaaacacagagattgttgattataaataactatgaatatacttgattacgtaataagtgtgctctcatagacattaagttaattatgcaccttgaatatgtatgacctattggtatatatattacattgtaatgaaatttgctggcactttctatgatagcttttcttcctgagtcattgtgactcacgggtgcttcgtggtgcaggtaaggaagttagaagctgtgttcggccatgagtcagaggtctcccagcaatgtacatatcagccgtggggtcttggcttctagcagaatcgaattttttctatgtttggaaatgtaatctattgtaaaaagatttttttttaataaacaggggatccctatattgcaatagtatttaaaatggaagtcttgattttgaatttaatta

SEQ ID NO: 366517 - DNA, 537 bp, Cannabis indica
gccaaaataaaattccaaaaatgtattttgagcattttgagccctaaacccggttttgcccaaaataccctgttgtgaatatactgcgccaacttgtaagaaaatacatacagatagacagaacaaacatactatataatgatatagtccataagcacgatatattattaaaattacaaatttacccttctcgggtcaaaattacaaaaatacccctagcacatcaacagagtcttagaatacaatttatcaatatacttttatatattaaattatacaataaaagtctttacaacttatatttttttttatcgaatttctaattattatagttatatttttgtataaataagattcatcccattcggattctctttgtcttctctttctcttatttctttaacacttaaatattattttataactccaataagtatgtatattattaaaagaatttttattttgtcttatggttttagggcataaaagtgcaataaatacaatagcctgactaaaaaaataatagtattgttaata

SEQ ID NO: 366518 - DNA, 621 bp, Cannabis indica
caaccatcacctcttgcatttttctattttgcgcttcttaggctgcgatctcggcttcatgatcagtaaccttttgcctcaagatcagtaactccatatagctaccctcgtcgtaagcatcatactcgtcaaagttttctttgtactcttcgtcgttggcctcatctcgctcctcggagcccacgttcactctagaggccacttcctcattctttgggctttgagcatcctgaggaggacggggctgacgtgtattgttgcgagtttccaccattgctgatttaacctttcagattgttgtgtgttaaagatgctttcttcagctctcaatgaaagcaccaaaatgttgaccgaagttttcagcaaccaattaagtaatatataagaagagttatagaaagtttaatgcagaagatttttatgtggttggggcgttaatgagccttagtccacgagtctttggtattaatgagagtatttattatagacaatgttcttggtggatttctgtcctattttctctctttgattccttaaaccaaattgttcgacccctttttaatctgtttgtggggtatttatagtgttttttttctgggaggatccctaggaatggatcac

SEQ ID NO: 366519 - DNA, 907 bp, Cannabis indica
gggattccagattcacggggaggttttggacgacattgttcaacatgcttggttcagaccttaagttttcaacagtaaaaccatccccaaactgatggtcaaacggagataataaatcaattgttggaagagtacttgcggcattatgtgactgctagtcagaggaattgggttgagttgcttgatgtggcccaattttactacaacattcaacaatcttctgcaacgggaatgagtccaacggagattgtcttgggaagacaaccgctgacgccacatgaagtagcaaaacagaaatctcaaggggtttgtcctgcagcctatcggtttgcgagggatagaactgagttgctggaattggccagggacaacctgggaaaagcttcacggaggatgaagaaatatgctgacaagcataggagagatttggaattttctgttggagatcgagtgttgctgaaactcactccacaaatttggaaaaagataaccgataaaaggtatcataagggcttggtccagaaatacgatggtcccttcgaagttgtccagaaagtgggggctgtagcatacaaattgaagctaccggaacgtttcaagctacatccgactttccatgttagtttcttgaaaaagtaccatgaggacaaagaggaaggaagacagcagggggtgagggcaccgcctactgtgaggaaacaatttgagaagaagttgtcgaagatccttgatcatcgcactcttggagccagcaagaaaaaccagagaactgagtatttggttcaatgggaaggtgaaggtgtagttgacgctacatgggaaaaggctgtgactttgtggcagtttgaagacgaggtccagtcctatatcagaagtatatcgacgaggacgtcgattccttctggtg

SEQ ID NO: 366520 - DNA, 774 bp, Cannabis indica
gcaccagaatcaatgacccatttgaggattttgaaagaaggcatgcattagagttacctgaataaccactagtagtgacagaagaagatgaagacttaagtgtttcctgataccttgagaacttggcaaattcatcagtagaaataaggaccgatttgtcagatgcatcactagtgcttgcaatattaacagagtgttgttgtcgattcttgaaatgtaacttcctacactcaaacttggtgtggcatggtttcttacaatagttgcacatgatgctcccagaatttggtgttcgattattaggtccttgtgaattacctcctttgtatccacctggagtagagtttttttctggtgcaaaattattacgactcaccaaggtgctattaagaggagttgaagaggtagtttttgtgcgaagaacatgagtaaacacatcttgtaaggaggagacatcaaaaccagagagaacttgagactttgtagagtcaaatgcagatgacagtcctgcaagaaacttcataatagccatttgctctcgttggcactgttgaactttcacatcaagactaaagggcaataacacattatgctcttcatatgttttcttaaatgccataaagtaactcataagagacttatcttgtttctccgcatgataaaaggctttgcaaacatcatatgtgcaagatatgttgtctttgccagaatacaaaaattctaagtaatccattagttctttaactaattaacaatgattaatcaaactaatta

SEQ ID NO: 366521 - DNA, 570 bp, Cannabis indica
tgggtaaacctagtacttgagtttcgccagcaacaaatgtatgaagaaccgttggagacaacaccgagatctagaacctccgtgatgctcttggacttatacaaggccatactaatactctacatcatgatcgggaagaactccgtactgcagtgaaccttgcattttaagaacaaaggcatatgttcgctgaatggagggataaagaggtggaaacgttgagggctcaacaagcagcaattgacgaccgaacaagacaggccaccgtactgatacgaagatcctatcaagctactaatcagcaacctgcgaccagcatcccactgggcgagtcagacgaagatccagctgggaaggcttctcagactctgaatggtcagccgcccgatcccccgtcacaagttctgcctgtgggccaagcggtaggcgaccagaccttatctagtaattcatcaggagaggttgtacctaataactccacccaggttaacagttccggccaagtgatcggccaaacgaatcagtcactgagacaccctaatgcatatttatttaatagattaggaacaa

SEQ ID NO: 366522 - DNA, 628 bp, Cannabis indica
aatgtcgtttagttttctcgctgctagaaaagttcaatttagacgcctaattttactaaaactttacttattatcgtacgggatcgatagctacctcaatagtgtcttccgcggcatgggcggttgcggcataatcgaggatcctaggatccaaaattggttcgtctttatgtggcacttcttttatcctaaggacctcgcggcgaggaggtggtacctctaacagatagataacattaaccgatttcttctctgcaagcttgactgctgcatgatagcattctcgcacagaacctactccagcggcagtagggaatttcattgtgagatgatagatcgacgtcacgatcttcatctctttcaaaattggccgaccaatcacgacattgtatgccgaatattggtcgattagcgcaaagtcagccttcgagttggctactacatgggtggttcccaaggtaatcgggagctttatcatccctttcaatgcaatgacatcgccggtaaaaccgtatatactcaacgtaacaggtcgcagatccttctcatgcaaccctatttgtttaaaggcttggaaattcaagagattcactgaacttccgttgtccacgagtatacggtggacgtt

SEQ ID NO: 366523 - DNA, 598 bp, Cannabis indica
gagacctaggtctcggtccgagttcaagacccgatcagggttcaagtctttatccgagtctagattcaggttacgatctcggtctgggtcaagatcagggttcgagtctagttccaagttgaggtccaagtcccaagttttgatctgggtctgggtttcgaggcccaggtccaggtcccccatccaggtctgggtcataggtcccggtctgggtccatgttcgtgtttgggtcctagtcacagtttcaattttctttatgtgtttgatttgggttcacgtctcactctgggtctgggtctaaggtcctaatctatttctagatcccgaactcaaacccagactaagacttggacctaggtttggggtacgggtctaggtctaggtttgggttttggtccgagtctaggtctgggtcccaaacccaaacactgactacgggttagttccaagccccgagtcaagatctggatcacaatctctggccccagtttagttccacttttggttccaggtcccaggtcccgatccatgttctaggttagggtctgggtctagggtcagttcttgggtctcggtcccaattctgatgcccgtgtc

SEQ ID NO: 366524 - DNA, 508 bp, Cannabis indica
gaaagaaaattagtaaaacaaaattgattttccccctccttttttagggtaatttttctgctctttcaccctcctcttttcaattccctttatgtgattatcaatttagattatgaaattttcactataaaatgatgcatcaataactctaacagggcttcctggtattgatccatgcttgcatttgtagctttaggttttttattattgaatccaaggctgactgatgtttataccatgaactcatatcattggtttactctctcttgtatcgttacaataaattcacaatatttaagtttaagaaaaaagaagcaaaaaacatgaatactaatagttcaaaaataacaaataaactcatgtgattagattgtgtacctcattgatttttaatacattcaaatgctggttaaggaagatagtgttggattaaaatcctattgtgagcacatatgtataatatatactattataaagtgtgatacaaaattaagtgaccaattatgtt

SEQ ID NO: 366525 - DNA, 714 bp, Cannabis indica
agttattcatatcacaacgatgatcatatagtagatctgtctgaatcatgagtatacatgaactcatgttttgtgttcattgagttctttgatttactcattaaagtttctcagaaaagatgattcttacaacttctgttttgggtgcttaataacatgagtggttgggagcatgttatacaataatacaatccaagctttctaagagtattgaatattagttcccttatagttttaattctaggagtcctaacagttggatccaaatttataattggattatagattgattgttcacattgaaataatcgtacgtaaggaatcatgatataattaaaagagaaaaataataattttgaccaactctaattatgaactaataattagagggcgagctacatatattgattatattaatagactacaagtaagaattttgtaaatataattctaaattgtcaaatagtacaattccatatttataatagagtaataatagaattaataaaccaacttattctattgaagagttcaataataatcaaatgtttattgaagtatcaaaatataggtccatggtctctagatcacctctatacaatattgtacaagggaatgtttagtttgaagaataaattgagaacaaattaatttttatgagaaataattcttatgagaaaaaataataatttgtataaattattattttgaata

SEQ ID NO: 366526 - DNA, 936 bp, Cannabis indica
attaaaaaatttataaattgtacctgaaaaattataccacatacacatttataaaattcttcaaaatgctgattttatatgacatgatcttagtgcgtgattctacgacaacttactcagtgtggtcctgtgactcctgctcaactcacgtgaatgttatataattttataaaacaataataaaatacatgagtgatggtcaagacttgattatgataatatttgcttggaggtgtgatcttaggtggcgtttagttggaggtaatgaaatggaatggaatggaaaggaaacaattttcattccattcctttgtttggtttcattttaaagtattggaatggcattccaatagaatgctcattccaccattttaaaattttaaaaagaaagaaatgaccattccaatgtaacaagaaaaaaaaattaattatttttttatcaatttttttatgcattttaaattctattcctatacccattcccattcctattcctatattttcattcctcccaaccaaggcttgagacagggagatcccctctcccccttcctattcatcatgtgtagtgaagtcctatcaaagttaattcttaaagctgagaaagaaaacatggttcgtggtatcaaggtcttgcgcaaagctccttccattactcatcttttctatgcagatgatgcaattttctttagtcaagctacagaagacaatgctaatacgctgctgaaaatctttgaaaaatatgaagcttggtttagacaacgtattaacagggagaaaagtggagttgtcttctctccaaatactcacaacagcaagaaaacgactattctccaacttctccaaatgcagactctcaaagctaaggagaagtacctgggaaacccgttttcttcacgggtcaaagaaagacgactttcagttcctaaagcagaa

SEQ ID NO: 366527 - DNA, 308 bp, Cannabis indica
ttagtattttcacttgtcatttccttacttgatatgtgctaataatttctgaatgagattttgtgttaaaccttacttgatttctatttattgttatttgtagtatccaatatgacaatgaccaatcccatgttgtcactgttgactgataataagctgagtggatctaacttccctaaatggaaagagaacattaacattactctcataggtaaaagtgccctctttgtgttaactgaaccgtctcctgaacagccgggtgacaaatgcaaccaaagctgtaaaagaaagtacaagcattggtagaa

SEQ ID NO: 366528 - DNA, 677 bp, Cannabis indica
tccctcaagactcctcccatcagtagttccaaggaagattcattgtcagcgtcagtcagctgctcactcacctcaggaaccaaccggttcatgtaatgagcgagcatctccttgcctctcttggcctctagatgcactggtaaaggtggagtaggagcccgcatctgctcatatccgctcttagctagctcgaatctgccctttgattgttcaggcctgtccaaacttcctcctcgggaatcttttgacttagcagcttttggagtataagggtctgcgacagtagcctcgaaaagatcaataacctccctggacgatgtcttttccttggatggggtcgcctttctgcccctagatttcttggccggaggagatgagcttgaacttcctccaactctcttttgagcatcaagcatcttctgagacatgtttatacggaataaagcaacatggttagaaaaaaggcatcaaaagtttaaaagtatgataatcaagaagtttaaaaacaacatggagtatcctgcgaagcgattgtccgagcaagactcgagagtccatcatcacctgataagccttttatctcaaccatgacggcctttccttttcctagtacgggagagggtgaccgagcaggtaaactgggctccctaatgcgaatggcatgctcaacgggcctg

SEQ ID NO: 366529 - DNA, 629 bp, Cannabis indica
aaaaaaaaaaaaagtctttaaatttgctataattatttgaaaactaaaaaaattagagtattgtatcaaatatcatacaatttaagaacaaaaactttcttagttaaataaataatataaaataatttttttaaaaatttgctcaaaatatatgtgctactagtatagtaatgagttatattaagaaacttgtattactttatgaatgtgtgtatacaatacataaatacatcaaattataataaaataaagcaatgatgcagatatatgtgctgttagaatcactcatgaatttacgatgcagatatccgcaaaccgcgcaggaacctccttgaaccaagatagctcatagtctaaccgaaggacatgcttgtcaaatcatgaactgctaaagtaagcgagcaacatgagacaaattgcccccaaaaatttaaacaataaagctataacgtcctcaaacaacacaccaaaatagctagagcatcaacttataacattgaaaactacacaccaactcatttacatatcaaaatgctccacaaactatctacaaaataaaaaagacaaagaaaagtagattaacccctaacgatgatattaaaaactaataaaagaaaatctcaatagta

SEQ ID NO: 366530 - DNA, 339 bp, Cannabis indica
tccttagcatcaaagccctaatttattttttcagactttttcatctctttctcgtcactgttgagtagaacagaacacactaggacaaacaaaattgggaacgatagcgggcgggctggagctatgggcagtgggcgaatgggaaggagcttcggatctcaactcgaaacaccttcatagtcgcgcaatggtccattatctctttccttactccttttctttcactcgtcggtgccttaccctcctccgacgactggtgtttcttgactgttcgtgttcgacgagggctggagatctgggcaatagatgattgcgaaggagctgttggaaattatttta

SEQ ID NO: 366531 - DNA, 708 bp, Cannabis indica
actagaattaataattaagtttggataatttacatttggacacgtttttgtctatttaatttcactattaacgttacttttaattttattaaatttaccgttgttttatgcagttttagctttaattagttttgtttttggttcacgcgttgcaggtgatgtcagagtacagagctgtcgcgtcaatcacactcccaacatctataacctcacgtgcagagctgtcgcgtcaatcacactgctcacatttttcacaatttcaatcatggtttcctattttatagacatttcagtatactgcataggaatgttattttgttactgtatactttagagttttttattttttatttttgaaaaatgtgtttgcatattataagaatgttatatatgtacttttttcatataattaggatatatttttcagtttttgagtgtattgtttaaataattttttgttagagtatatttttgtatttatatttgttttaaaattttattacttcgtttgttaaatgtgattctgtttttatatacttaatagttttttattttatttttaaatatttttagaattttattacaatttgttcaaatgtaattttgatactatataatttaagattttttttctcttttttaagactttattgatgtttgtttgaatgtcttttttatattgtatgctttagttttttttttttttgt

SEQ ID NO: 366532 - DNA, 1185 bp, Cannabis indica
gaaataagtgcaggaaaatttaaacttttatctaaacagaatgaaaattaaacttgtaataattttaagctttacaatcaaaagttacatattttgggatcccaaaaatcttttacaaaatattacaagtcctttcactagccgacctaagcagtaaaatcagagttaccaaattacatcactggtagaccccaacccgcttggtctagtgtggcccgaacatgtacatacatcgcccaactctcgcactcatggctgatcagagactgatttaccctttcctacacagtagagcacccatgagccaagtccaacaagacagtgtaaaatatcaataatcataataacacatcatataaatattaatgccaattcacttttgtctgtatgacacagacccgcgtgttacgctcacatgcctaattatgtctatgtggcatagacttacgtgttacgctcacacgtctaaatacaataaggccttagaatagttcatctcggttaccgagtccaacccgattataccttgaacgcataaccctaaatctcaatatacacatatatttaacatgttatagtatttacacattaataatcactatggtaaaaccctaggccattaaactgctcatgttagggtaataaccctaatcccagttcctaattactcacatatatcattttcaatataagtgccaccgcgcataactctacgtgctaactactgtcttacatgatgttccgcaaacatggagattccagatcctcgggtgctcctgaccaagtgtcaatcctagtcataatttttgggattcacaggtatagggttaatccctaaatccactttcacatattataaaattggtattcaaaatacagattaagacatagagctcagaacgagctttccaacgatatatagaactcctaaaatggagtccggatcacaaagttacaaggattcgaataacgccttcgaatctgcctaaaaacgaagggcgcgccgcggcactccccacatggggccgcgacacctaggtttaaaacccaggatttccccataggcgagccgcggtgcccagagagttgggctgcggcccctgggtttcaaacccagttaaatcccaatttccagcttcgaattacatgctcaaacacacccaaactaagccaaaaacatactca

SEQ ID NO: 366533 - DNA, 611 bp, Cannabis indica
atctacaatgatagtgtcactactgcgattgtacatcggctccactaagtagaactctatttagatatcggttagttattttgttacgaaattggggtctccaataccctatacctaacttgattacatactttgtgtcacgggatgcctaaacattaacagtgatagtgtcactaccgcgagtttacatcgacaccactaagtagaaccctatttcggtatcggttagttattttgttacaaaactagtgactccgatacagtacacctaactttattacagactgttcacctaacgagtgtacatcggtaccactaagtagaaccctagttcggtatcggttagtgggtgactcgatacactacacctaacttgattacagactttgtttcacgggacccataaacacctttagtgatagtgtcaatactgcgagtgtacatcgtcaccactaagtagaaccatatttcgatatcggttagtgatttcgttacaaaactggtgactccaataccctacacctaacttgattacatactttgtgtaacgggacccctaaacatctacagtgatagtgtcactactgcgagtgtacatcgacacagctaag

SEQ ID NO: 366534 - DNA, 723 bp, Cannabis indica
ctctctagattggtagagaagctattgggaaaggaagtattcagggaattaagctaagtagggggggcccggtgatttcccatcttttcttcgctgatgacctaattttggtgggccgggctaacctaggtgaagcaaaagcctattgggagtgccttgacaagttctgcacgtggtcgggtcagacagttaacaagcttaaaacctcaatttttttcagcaaaaataccccggttgggatgaggagaggaataaaggaagctctgggtattggaactccggaaggagttatcaagtatttggggttgccgcttttcagatcaaggcaaaaagatgctgactttaatttcatcattgacaatctaacttctaaacttcaggggtggaaggctaaaacgttatctaaagcaggaagggctaccctgattaaatctgttggtctgtcaatgcccatctatgctatgcaaaccaccaagttgtctaaccggcttgtgaacaggattgatgccttgattcgtgatttctggtggggctttgagaaagggaaccatggactctatcttaaagcatgggataaactgtgcctccccaagtccttggggggatgggttcggaaaaccaagaaatgaatcttgccttttgtcgaatgggctggaattaatgaatgggagtcagtcgttatgttgtaagatccttgaggccaaatacctaaggggaaaagac

SEQ ID NO: 366535 - DNA, 744 bp, Cannabis indica
taaaaataattgaaatccattacccttaatggcattcattacaaaattggtggggaaaattctccttttcttttctcctttatttaattaagttctccatttcttaaatttaataatgtaagtaaacaaatgtaagaaaataattatcttaccattgatttccattacttattagtaaatatatatgctacaatgtattgcatatatgtagtgctactgtaacaatgacaaaccaatatttttaatgggaactattataataggaattaagtattttacttattaatagaaacagtaatttatagtctttgatttaatttaatagatcaaattaaattttcaaaactacactataattaatatattttttttatttataattaatcttgaatattatcaattataggttcaactaacaaactcaaaacctaatttatttttttttacattttattttatgtctatttaaaatttaattctaattatatatattttaattaaatttatttttaaaacaataattatacttatagaaaattataacatattcaatttataataatcactcttaaaataattaaaatatcatgagttcaatactctagaagtaatattttcttttcttttctttacttatatttaatttaagatttcagttaatttaataattttaaaattctatcatattatattaattaattttattttttatttttttagtattcaatccaatctctctaataa

SEQ ID NO: 366536 - DNA, 550 bp, Cannabis indica
aaaagaagaattaagttgttaggaaaaagaaaaggaagcaaggatgaagtgggaataaaagcttaaattggggcaaattgctgaagcaatgctgaaacgaattcagcattctggtagtgacgtggggacacgaaatttagctatccacatcagcaggagcgtgtttgttactaaaaatcaaaccagctagatgatgtgtaggaggaggactaaacctagtgcgccaaggtgcaaaagggattgggcttctagttttagggtatcaatttataccctatctaaccaacaacaaaaagaaaaaaaaatgcgaagtacacaccatcttctttctaacgtgggcagctgccattttttgaaggagaaataattacagaaggaaagtacagcagaggaaggaaagagagaggcacctagattttgtgtttgattttcttttaccctctcttaatatttttctttctcttcttcttttcttgtttcctatacttagacattaaaaacattgttgaactttaaaaaaatgggcagcagccatgaaagataacttttt

SEQ ID NO: 366537 - DNA, 523 bp, Cannabis indica
ttattttattatatataaataaaaaagtgattgatgaatttctcataaattatttatttttaataataaatcattttatttttaacataaataaaaagtctcatgaatttctcataaaacaagaattctgttatataagtacactttatatagaatagatataatagtttataatattttatacttatgatcatgagtgtaaaaggcgcatatagtcgtacacattacaattgtcacctaatgtagttcttctataagttcttaactcatcatataaaaaaagatttcttggtcttttataaggccattaatgggacactaaaatacatatagagtagtttcacacactatatatatatatatattttttttaatgaaagtttcacactatatttaagatactaaatctattctcagaaatgactttatctactaatttagtaggacacactgtagacaatactatttttttttttaaaaaaaaagtttttaattaattaaataatactttaaagaaaaaaaa

SEQ ID NO: 366538 - DNA, 608 bp, Cannabis indica
ttgtgtcatggcggccggtctcatattttgaaagatccacaataatataggtcgtgtcatattagtccataaaaaatataggccatacccatttttgataaatgtgtatctattttttttgtaggggtcaaactcgaatttcattttttactatttatttttacaattaattttttttttgaggaagaacttgtgcttcattagaataaaccagaaaatacaaagccaacaagttaaagggatggcaaagaaccattccaaactaactcattaatatctaatcctaatcctaattttgcaacccaataagccaattgattagaatccatatacacatgctcaactttaaatttaagactgaaagataacaagttcttaatacccactaaaatatcatccagaggactagcattccaattacaagaattaaatttatccactatagttttacaatctgtctttaaaacatccattggaagatgaagcagctgaacccattgaatagcatgataaattgcctttgcttcagctatgattgcagggatacctccaatacaaggcttagctacaccagctttcacaaaaccagaatcatcagccaccacaat

SEQ ID NO: 366539 - DNA, 501 bp, Cannabis indica
atgtaaatatacacatattattataagtatataaatatagatgtaaatttttttatacttcaaaaagaagaataacttaaacagtaaaaatagtaccttaatttattattagtgatgattttaattcatttaattaagacaattttttaggataatctttcaagaaaacaaaaagtgcaagagtagcaagataattaaacgactaaaaaggatcatacagctaaatttgttatcaaaaggtaaatcaatttttattttgtagagttatttgcagcaaaacttttccaactctcatttcactttcaaataaccatccaatctcaaatttttatggaaaaactctccaaaatattgttctatttgtatttttaaggtgttgtctccctatctacgttaaatccttattttacttacgtgacaaatcatctaaaaattattctttgtagtcatatttttcaaaactaaaaattattaataaataattaaaaatcaaaaataaaa

SEQ ID NO: 366540 - DNA, 599 bp, Cannabis indica
tgaggtacaactttattgtccatcatttcccagtcgaattttctgacctggctttcggaggatgtcatttaagggaccatcaccatgtaatgggcgtcacatacaccacacgggtccaccaatttggataatagaaggcaccaagcatccatcagcgtctttagttcgtctttcgttagagatctaagacttgaatcgaagacgaatagcttccacaactcaagattcgcctccatagtgatccaatatttctagttgtccaagaagatggccatgtatgtgcactccatacccttccaagacggcaagaattggtttggatccccacgaacgagttccaagagggactcatcccagacaaagccagcatggtcaatattggtcttccaagcgtcccaccgacccttcaacgatgaagaaaaccaagatggcatgacagtacacttacgtgggtacaactctgggaagaagtgttgcctcctcctcatcatatggaacgctgcatccaaatgctgcacaacacatacaattaagtgagcactgttggaaatttattttacctggatcttagatctactcacaagtatgttgtttaaaca

SEQ ID NO: 366541 - DNA, 740 bp, Cannabis indica
ggttgacgtctcaaaggattctcggggaattcaataccccactcttcaatataagccctatttttaattctcatgaagcgattttgggcctctatgttaccaaatcgggtcctatcaaaactcgtagttggtgggtttgaagaggaactctcctccacattcctagttctctaaggtgccattgttttttttagcaaaagtagaatattttttttcttctaaataatgctaaaaaattgggcagcacctccccttaatttttctacttcccaaaagttcaaaatcaatcactactatttccaaaccacaatacaatattaacaatcccaatatcaacaatatttttccaaaacacacaattattaccacccaaaatctataacaagtgcatcaacatccttaaagattgaaggaagtgatacttacaaacccaaagaagctttactccacctccattgttgaatgttcttgaaaacttgaggttgaagatgaagacaattgtgatttttggatttggggtattatgggtgatttttgatatggtttttgatggtatgggtagattgatgagtgaaatagggtttttgaatggattgagtttgagaaattgaagaaaagatgaaagattaagatttagaagaatttttttgaatttttagtagaagagggggctagggtcggcgtgaaacgagaataaagatttgaaattttggtgtacgtttgaatgggtagggggggga

SEQ ID NO: 366542 - DNA, 711 bp, Cannabis indica
aacgaacaacttttagccatgtggccatacttttcacaattgtagtattttccatcaaatttatcattattctttgactgaccgccccgtttgtctttcttctgagctcctcctgtttgggaatttccatgataactatcattgtcatcatattttctggaatttctactaagatttgatcgggccgacctttcttatccttaccaaagagtttttcttcgtcactttttaatgagactccagatatttgcttagctaacgcttcttggtcagctagaaaatttgctaattcaacaagagaaggttggcttggccaaccttgtattgcaacaataaaagttctaaattttggccttaatccatggataataattcttctacttctagcatctgacatgccagcaccaaagtctaatgcagagatttcgcgaaaaagagattttaccttggtaaagtattggttgatcgtcatgtcgcactgtctaattaaaataagctcgttctccagaagctgcaatctcgtatcattcttcttggtgaacagtgatgtgaatgtatctcatgcttccttcggtgtctttgctggcttgatgtgctctagcatttcattttcaactatggtctgtatcgcaaagctttaatcttccatttctttaaagtggtttcatccttcggttgtgtgactttgttgccaccaacgatctcccacaa

SEQ ID NO: 366543 - DNA, 586 bp, Cannabis indica
tagtattatataaaaatatgatatataatccaattcgatataatacaatacaatacaatacgacctaatacgacgttccaaacgggcccttaatgtataatataacatcgaaggagctatagatatagtgattagcctttggaatgaactagaacacaagataataatgatagatcacatcacaaacaatattaagaataaatgctgttacatatgtcaacaaatcaattgcaatcttaaaaattaacatatgcaggattttaaattaattttcaaaagatatttttttatacaggtacaaatgaaaatataataatgatgtgatcatgtaatattaagaattattcaaaatcaaattgggacactataaaaaaatcttatttttaatcacaacaaaatttatgattaaaagtaaaaaaattgtgactaattataaatcataattcttatgttgtgactaaaaaatccgtgactaaaaatattagtcacaaaattacaatttattgtaattagctaaatgtatttttattctacaatatttgttgtgactaaaagttacatttagtcacaaaaaatttatagttgt

SEQ ID NO: 366544 - DNA, 565 bp, Cannabis indica
attgtgtttgggtgacaagaggagagatcaaggaatatttatatatatatatataaatatatattgtatataaataatagatatttgctttcctttgttgcagaagataataatgatagatcatctcatcacataaacaatattaagaataaatgctgttatatctcaacaaaccaattacaatcttacaaatgaatataatgttataaataatagatatttgtggattagaaatctttttaattaaatcaatgactattaattgtaattattatttcatttttttttatagtttttttaatttattgaattatatatttatataaatagaggttaattccattaaaataagtagcttattccacaaaaatataaaaacaacaaaaatacaagtttatagaattttaaacatttttacgatttttttgattttatttacaaaaatacggtttttttatgttgtaatcttgttaatttgttgttgatttttttattatttgtgtgttattttcatgttacttttatgtagttttcttattgattttatgttgttttcgtgttattt

SEQ ID NO: 366545 - DNA, 644 bp, Cannabis indica
actcttcaataattcaatgacttgagttgatgtgacagctttgttgggaacttcaggcacgagtgaaatattgatgtgacagcctttaagtcatacagggctggtcagccaagcataacgttaaaagcttaaggaacatccaatattaggaactgtgccatgatagttatgctcgtcggagcttgtccaacagtgaggcgtagccagatttgtcttagatgtgtaactccttgaccggagaaaccatagacaggctggaggaatggagttagatccttgagttggagtcccatcttttcgtaagaaatcttcaacaagatgtttgaggaagctccattgtcgatcatggttttggccaccattttattgcatatctggacttccacgaccagcgggtcattgtgcggaaatttgactttgacagcgtcttcatggttgaatgatatggttggctctcctgctcatggaactttgtgcctcctttcttccacgatcaggataatctcttcgtgttcgtgttgttctgtccaggcatacctctcccaagctttgcccgaatcttcagcaatgtgcgggcctccaataatgacttgtaagtgtccatctactggtggaggtatcaaatcttggctgttctgaccttg

SEQ ID NO: 366546 - DNA, 703 bp, Cannabis indica
aatataattaagtatacatgtcttacacgtaatatttaactagtataataaataagtaaatataatttaaaaataaataaatttattatagtcttttaattaaaataacttttatagtagcttttaatttttaattttaactgtttactaaacataattttatcataatatttttttttttaaaaaaataactttaaacttttgaaaaagctgtgacaaatggggggtgggacataagtggtttagtgttcaaagatgattaatatgattttttcatcatcttgttcttattttatatagaatataaaggatcatgttacaactatttttttcttctgaatagaatgtggggagttttatttgcaacctataaaatgataaatacatcatattattaaaaaaaaatataagcttaaataattttttaaaattactcttaatatttttaaatttttttcctcacattattttatgttaatttcaatatttattttgatttcattttcataattatatatattttattatttctaagaaaatttcatataatttttttgttataatatttaaaatataatttatttttgtttgaaatgtatctattctatataaaatgtagctatgtaacagaattcttggtttaacgatactttttgagtttctacgttaactttaacagaatatcctattaattaacagaata

SEQ ID NO: 366547 - DNA, 1192 bp, Cannabis indica
acttaagaaaatctaaaatataattaagtatacatgtcttacacgtaatatttaactagtataataaataagtaaatataatttaaaaataaataaatttattatagtcttttaattaaaataacttttatagtagcttttaatttttaattttaactgtttactaaacataattttatcataatattttttttttaaaaaattaaactttaaacttttgaaaaagctgtgacaaatggggggtgggacataagtggtttagtgttcaaagatgattaatatgattttttcatcatcttgttcttattttatatagaatataaaggatcatgttacaactatttttttcttctgaatagaatgtggggagttttatttgcaacctataaaatgataaatacatcatattattaaaaaaaaatataagcttaaataattttttaaaattactcttaatatttttaaattttttttcctcacatttattttatgttaatttcaatatttattttgattttcattttcataattatatatattttattatttctaagaaaatttcatataatttttttgttataatatttaaaatataatttatttttgtttgaaatgtatctattctatataaaatgtagctatgtaacagaattcttggtttaacgatactttttgagtttctacgttaactttaacagaatatcctattaattaacagaatattctttataattttataatattattatatatatttaaaaataaaatttatatagatattttctataaagaaattttaattttaatttaaaatacttaaaatgttatagatatttttaatcatatttttaaatttattggtttaactttgaattaaaataaaaaattatgtaaatattttatataaagaaatttaaatttaaaatattataaatatttttaacttcattattatttattttatattttaaattgaaatagttgtactaaggaattgattgctttccattttagttatggtaaactgattcacacaccatatttttcgtaaagttaaggaataaaaaacctttatatcaaatttacgaatctaatctatatataaatacactcaaagttaattatgtgagttttagttaagaatatagtacattacaatatatccattatcagataacgttacctaaattaa

SEQ ID NO: 366548 - DNA, 446 bp, Cannabis indica
ccttgttgtctaatcatatcttgcatagcagaatttacatgtttctagtattacaacaataaaggattcttttccttagcatttgcctcgagcccaaacagctcgctaatcaggcagttgaatttcccttgctgtataatttgtcacacatttaatccacatcttccaaacacttaaattttagacatatatcaatttgaatatacatatactatacacatattgttattatagataatcagtacgctattttttccatcatacacaataattatataagtaggtgaggcaataacaaataacataaatatttactataccattagtcgaccgtcttcatagaaaatatacatattcaaccaatctttagcacctttaatactatggttggtctgataccaaattttaacgccctaatctataaggacgccacgtgtgtaatttta

SEQ ID NO: 366549 - DNA, 887 bp, Cannabis indica
gcttcatatgctgactttttcctactcccaggctaaatctgctacttccaagagtgcggctctgtccgacaccttgagggcggaggcggacttggccaagaaggaagctgaggaggccagggcggagactgcagctgttcgtcatgagttgggtgaggccaacaagaagttgtttgccgccgagaagaagatcaccgtgctaacaaaggacctcgaggctgctgatcgctttgaggaaaccatcgagaccttatctgctgaagttgatcgtcttcaggatgagaggagttctctgcggcaggtccttcttcggctaaaggaagataaggacgctcaggtggccgaggcggaccgtttgaaggagaaggtcaatgctttggagactgccggcctcgagctcttctttgatttttggaaggctaatccccaggccaacttcgactacttgggcgacgctaaggacatgtacctcgagtactgtgcggcccaagttgcctatggtgggaaagaggtggctgcttcaacttccggccaagcttctgaccaggctgctgatgcttctcctgctcgaacaacagatcctcctgctccagttggctcagaagaaccgaacccagagcctgggactccagctgtttgaacacttctctttttttatctcctgtttatatatatatattatatggcctcaaggcctttaagacatcatgaccggccaagcggtctttaaacttggaattatttttcattttttggacaacgggctgaccgggcagcttttaatcccggtactatatgctcttgttatccttaatgaatttcattctctgtttataattgcagtgcaattgtgattgttttatgtttaccaaatgctttgtacaggt

SEQ ID NO: 366550 - DNA, 819 bp, Cannabis indica
cagtctcttttcctttctttcagacaatttaattattatcgtttaaggggagacagtttttaaggcccgtccctaggcccttaatatttttttaggacctgcttttgggtcaggacatcttttacatttaaatatatattttgcttagatacatatgctgcttgattttgctaaactttttcttttggcttgttttatatttgtctgtgtggtatgccttactaccccctgagtggcatgaaaacattgtttttaaggcactcagctttatttataaatttagaggttgcatatactttttggtacaaattttcttaacaaagcctaagtttacattttttgactatttgtaatacttttggagatgatcagcgttccagtcccttggtaccatggttccatccattctttttagcttgtaggtcccagagccaatctcatcctcgattttatatggtccttcccaatttggcccaagtacccccacctcgggttcctgagtggctcggaagactcttcttaagaccatatcaccaatagtgaattttctacttttaacgtttgagttaaagtacttagtcaccttcttttgataagctgccattcgtatttgagacttatcccagagttcctcaatctgatccaacacttcttgtaataaagtcttgtttgttgttggatcgtaagttgttctcctatgggatgggaataacgtttctatcgggaccattgcctcacaaccgtacgccattgaaaatggcgagtggccgattgtggttcttggggttgtccggtaggcccataacactcttggcaatt

SEQ ID NO: 366551 - DNA, 788 bp, Cannabis indica
ctgctcaaccatggagcccctaccacctctgccataactagaaatatggcaagcggtatcccgatttcgtggcataacctcttgaggtcctaaaatacattctttagggcttccagtccagagagcattcttcatatctgaatctccctgaaggactgtaggttcatgtatccaaattttctcatgcaatgatcccacttggttatcagccatactatgctctgctggtaataccgaattgaaaatgactggcatatgaggtaaaggtaatacaggaaactcttgttgtttcaacctctgaatctcctcatcgtgtcgttgaatcataacttccatttctacgaacctttgctccaactcccacggagcctgtgacggacgaccatcactcccatcaaaatccctccaaaggctttcaccttggtcacggggagagcttagactccattctctccaaccattactagccctgaccacactatcctgactccccatagtgcaccatgtgtccatactataggacaaacctaccaattagtaagtcagtctggtcaggcaacgaccccattacaaactttctaccgcacttatggattctaaggaaacacactttaaaataattaattaaaatctaatatgcttcctaacatgatctcacattcacaattatttaaaatgctaaacaagtacaggcttactgaaccgtaaaccaagctttctctgatgaagattgtacatgtcttagcaagctttggtatacaaacctagcggctctgataccaaaattg

SEQ ID NO: 366552 - DNA, 661 bp, Cannabis indica
gccgcggcgagggtatataccgccgcggcgagattggacttacagaaccacccttaatttcacggattctcgccgcggcgaggctacatggtcgccgcggcgagatggtcagatttccctttttaaatcccaaaaaccctaacatttcaaaatcacacctcattcaaacactttcttctcccagccgaaaaccacctcttttcaccctaatttcttcatctaatcccattcaaaccaattttcctcaaaattacccataaactttcatcccaaatcatcataatctcttatttctctcatctaacactcttttcctctaaaaatccattccaaaatccctaaacctcacccaaatttcagaaaaatcactattcatcttcttcttccctaaagcttcaaggttctcatcaatggaggttgactaaagagtgattttcattgaggtattgattctaagacttccattccaatttttattgaaaaatttgtgaatttgttggatagttttgaattatttggtggatatttgggatttttgctatatacattgttgaaattgattgtgtgaatagaattgggttaaattgaaagggattttaatcccgggaagtcaatttttaaggggaagtgctgtcaaaattttgaaaaatcttgaaagtta

SEQ ID NO: 366553 - DNA, 505 bp, Cannabis indica
atctggaatgaaggaataacaaaaaaatctgagaaatagagagagagagagagaggcgagatatatagagagtggaacagagagctatataaatacacagagagagagagataaagagaggaagagatttacctgtaatggtaaagatgaagccatggaaactcctctgaaggtggtgattaacgagagagaagcacaagtaaaaaattgtttttaaaaatttttaaaatcatccaaaatctgttttttaaattcactccattctgttttttaattttaaaaacaaaaaataaaatagagttatcaaacacaatttttatttgtattttcaaatttttaattttaaaaacaaaaaattatttttaaaatggttaccgaacacagccttagtgtatattaactttttaaatttatttgagtaatttaaggtattaatatctaagtttaactttcagtgttaaataaatacttaaatttaatttttggcggtaataatacctaagtt

SEQ ID NO: 366554 - DNA, 591 bp, Cannabis indica
gattcaggtctggtcagttcggatctaggtctgggtggaaaactgggtcctagttcggttacagtttcgagtctaggtccaggtccaagtcctggttctggtcccgttctcgggtctcggcctacttccaatttttgttccaattccaggtcacagggtatggctttggatcaaggtttgggtttgggaatgagttcaggtccgggtctgggtttgcatcttggtctgggttcgggtttgggctgggtcccagatccagacaccgactatgggttcggtccacgccccgggtcctgatccggaccctgatctcgcatgctggcctggttccatttttggtgccaggtcacgagctgggtcctaggttcaagtccgggtctggggtaaagtcttgggtcctagtcctagttccgttgcccaggtcccagtcccgattctagttccaggtcccgattctagtctaggtttgtgtccctgtgtaaattcaggtttgggtcctagtcgcgattcgagtttggatctcggtctggttttttatttgggtttgggttcgagtctaggtcttggtcctggtcctggtcctagtcctag

SEQ ID NO: 366555 - DNA, 612 bp, Cannabis indica
tttttttcgatcccctgccgagtggaatatatcactatttatagggatatgtgcttgaggaatggtttccctttgcttacaatttttataatcggtagattacacattacatatatagaatacacagattgagggattcagacatcttgccatatttctgtgatacgatcccagattaataggtattacccttgtgcttcacgatgtgaacactgaaattactaagtgttgatatgttattcggattgtacactactcgactgggaggacctcatccgtacaagtatacacggtgctcgactcgaaacatctccttcgaacatatatgtggaatcacttccacgtgtcattaacatgtgatgccacaccagagtgcaaaaattaggataacaaatacgaatactctttaaaagtaattgaattcaattcgtatcattctctgcaaggaatgatgaacaataaatacatgtcacatgtatttaaagaacattagtcatgttcattgttattcgtatactttatgtttcaatgcaattttcttaatcttatttttgggtattcaaagcctactataaaactgttgagttttgtgccctaaataaaacccattac

SEQ ID NO: 366556 - DNA, 647 bp, Cannabis indica
ttggaaccctagtttttcccatttttgagatatttagggtattgccatgttatttatcgatagggaaacttttagtttcaagtttaagtccccggaaagtgatttagcgagtcactcatctatgttataattcatgtgattagggcatccatctagcacgagaatttccgttcaggtcggccagcacacttgaattcggaaagaaggtaagaactgtatataatgtgtgatatgaatatctgagtgtatgtatatgttatgtgtatatgcatgcttaaaatgttatttgcactaccaacacttatacggttatagtatagagtgtattggtatagtgaatgttatctgagagtaccgtgataccagcataagtacggagaggtactgggagtgcgtggtatatcactcaggggtactcagggtatgaataaaccctaccgacactcgtacattgaggtacgtagtgtatgtggtatagtggctataccctagtatggaacgttcgtactcatctgttaagccttgtaaataggtgtatgggcgcctaagtacaagtcggaaattatatgatatgttatatgcttttcttactgagtctgtcgactcacagttctacttccatgtgtaggtaaaggaaaggcgaaggc

SEQ ID NO: 366557 - DNA, 522 bp, Cannabis indica
aaataataactaattcaaataaaatagaaattaagttctgtaaaaaagtgaattgcttaatttttttccaaaatatccaagaaaagtaattccataacgagattccaattatttttcataaaaaatttggaaacatcaatcaataatcaataaacacatagatcaacatggatgacacccaaatcacacatacatcgttttaaatctatatttctagaaagtaaattattaccatggctctgaggctagtttctagattatattttactaggacctagatttactaacaagtatatttttagtatcctaaatatgattctctaaaacgatgaaacttaaacatatataaagtatgagaaaatttacattgattgaagtagaattaaatgactccttccgctcagatctctgatccttattccttttgtcatagagtataatcaagatctaagcccgatacttcttcagttgtttgcattcttcacagttttacacactatgattgaggactaacttgctatg

SEQ ID NO: 366558 - DNA, 1065 bp, Cannabis indica
gatttttgttcatcaacaaaaaccctaaggttgttgcatataaagtatttattgcagtgagccattaaggaatacattaacatccaattagcttactgtccaattgaaagtgacaattaatcaaatgaaaatttgacttgtagctagcttaacaactagactaaatgtgttctcataatcaatccctggagtttaaagatacccctaaggtacaaatatagatttaaacttgttttgataaccatcaggattaactttacaaatatcgattcaaacttgtttagagagtcatcaggcttgactttcaccctacgcacctatttattcccaataacatgcatgttgttatgaaattaaataagattccagatgtgttgtttcattagagcattaaactcttgttgtttggaggcatgccatttaagatcttaaagagcagagccttttgagagattggattcagagagtgaaagtggctcaggcaaagaatgtttggttgctaaatatgcctttggtttacgaattccactttaagatcttgtcctcataggatgaactttggatagaatgtcaacagttatttgtatttccacaagaaatgaagaatgctctattagtattggagaatatgatgtcattggaacaacaaatagaacatcacctattgatggaaggtggggatcagtttccagtatgtgcgtaatataattactgggaaatagctgggagaaatgaacaagcaccatgtataggtaaagagagagcagatatggtagaatactaattggggatagggtggcctagcagtggggcagatgagtctagtagtggtctcactacaagaaatttcacttttgccagcacatttttgtgctggcaaaagtttggtattgcgctggtaaaatagaatttacttctaatgtgttggcaaaagggattggcaaatcaacgttggtattagaaattttgccatcacaaaatgaaaagcgctggccaggaccggccctgggtaggagggctaggcgtgcgcctcgggcccccgaacgctcagggccccaaaattgt

SEQ ID NO: 366559 - DNA, 589 bp, Cannabis indica
cgatcaaaatcaaagaggtgataataaccaagacttgctacctccaccggtagatggacatctgcaagtcatcgttggcggcccatacatagctggagattcgagcaaagctcgggagaggtatgcccgaacagcacaacacgagcaagaagaagtgatcctagccgtagaagaaaggaagcctgtaatttcacacgtcctaaatattgatcccaacttcggaccagttcaacaaaagcgaaggctattggacaaagagcgagcgctagccctaaaagaagaagtagagaagctacgcaacaataatttcataattgaagctttccacccaactggggttgcaaatctcgtactagtacccaagctaaacaagaaatggtgagtatgtattgatttcacagatctcaacaaggcaggccccaaagattgttttccactcctaagaatcgatcaactcgtggatgcaacagcagggcatgaaatatgaagcttcatggatgcttactcagggtacaatcaaatcaaaattcatccaccagaccaaaaacatacaagttttcgaacagatatgggtctatattgctacaaa

SEQ ID NO: 366560 - DNA, 520 bp, Cannabis indica
tataaaagtatgtatattttaaaaaaatataaaaaatgaggtaaaaattaaaacaagtaaagtaaagtggatgtacaatgtaatttcctccttgtaaaacatgtaaaagcctatatgaattttgtttgattattttatttataaaataaatcaaattaaatagataattatcttttaattattatattaaatatattattagacaatttatttaaaattaaaaagataatatagaataaaaaaatataaacttatctctgttattcatttaattttaaatttaaattaaaatattattatcttttattttatagaattaaataaagagtttatttataacattaaatatacaatgcataacaggagataaaacatacgatagcaaaacagaaagagaacagaaaattgaaaacaacctttcaaactctctctctctccctttctctctacacgacacacagatatatacattattgtgttatgtgtttttcctaatctcaatcacagtgtctcatgagtt

SEQ ID NO: 366561 - DNA, 1229 bp, Cannabis indica
cctgccttaatgagtttggggggtatttatagtgtttttgtggggtgatccttagaattgaggtacatgtctttctgtaattctcagtaaagacacattcccaatggatacatcatagaaaatgcatggtttaatccctaggctttgtaggggtttaatggacgtagtcctttatccttcttgactgatgtgattcctcataaagtagccgtcactaggctcattaatcatagcatagtagctgcagagagggggttacgccgtcagactttaagacatatggcagtttcaatacgcctcctcccatgcgacattaaatgcgaggtgactgttcagataggatctgacacctctcggagttgctttgttatagctttgctctccgggagtatgtgagactcacgtgccttctccgggaggcatgtctaaggttgatccctttggctagggagacttaactgaattatccagatgttagaccatttcggtctacgtgtcatcatccggttggtccacatattttggacaaaattaagggcaacaggttcctagtagcttgtataaccaacaagcaatcagattctaaggttgtgttatgctatccaatattcttgatccaagtaattattttgtttgtcacgtgtgattaaacttgacaatttgatcaatttacactgtgaatagttctaagaccatttttaacgagttgaaaagttcagggcacaataatgcataagtaatagtttgagaaaaaattatcctaaatagccttaatcatttatacaaaatatttctatagtaaattttgtcgcacttaagaatttattaaaaataatttatatataaaaaatactcatagtatccaatttttaattaatttaatatttaaattatatttacataaatagttaattgtaaaaatatacaatacttaggtgggtaaataccattttggaccctgtgttttgcaaaagttactgattgggtcctgtgttttgttaaatgacaaaatggaccccgtatttttccaaaatagtaaaaataagacattgagcttaatttttgacaacttgttttttttaatataatcaacttgaaaataattcctaatacgaacaaatacagaaaatgtaaataattttattataacacttttagatctgattataattaaattttattttgacaaaaaatcaattcaaattcttatttgtaccattttagaaaat

SEQ ID NO: 366562 - DNA, 538 bp, Cannabis indica
aaaaaaaccaaaaagtgcagaaaccgagcagttcgagtttcaagaataaaacaactaaaataaatgaataatatgtgtagatctattcatatcaaactgaatacaacacaataattactaaataaattacatgcttattttttttttttaagaattatgttggtaagggagtttgggttgctcgtatacacttagttgtaggggtgttagcggtgcgggtggtgcgatttttgaccattttttcaaaccaacccgctgttggattttgtgcagtaaataaaacccattacaatttgattagctatcaatctaagaagtttgaagtgatttatgtttgcctgaatttttcatgcttatggtttaatatatatatatttaatatatgaacaaaatcagttaagtccaggacatatatttattcacaattacaatattgtcaacacagtggaatgtgattgtgattatatgattcaaaagactaagtccatgtttcatcagtgttttggatttacactgatgtgataatcagcgatgatgt

SEQ ID NO: 366563 - DNA, 529 bp, Cannabis indica
tgacttgccaaaaaaggactttacataaacaaaagcagacaaataagaataacaaaagaatatattctcttttattttagtgaatccgacaacataacggttataatttgaataaacttaaaaatcataacctgcataaataattgtaaaaaaaaatatatttggcagttagtgccccaaaacagtcgagaaaaatatgtagattaagttttcaatttttgaagcattttataaatcataaaaaataaaatatgtctaatgttatccaacataaataaaattaaatctaataatcaagttgagtccctacttccttagaatcgtgaaactttctacaaaagagacgctcctaagcctttattgattcttaagttccaaatattttagtcactttaaaagtcactttgtcctacattctccaatcaaataagcaattatatgttagcttttatggtgcatattagagttataatagcaagagcaaaatttgataaaaatagtttttatctaatatgaaccataagctcaa

SEQ ID NO: 366564 - DNA, 724 bp, Cannabis indica
cttcctttcttctacgactaggataacttcctcttgctcgtgctgcgcagtttgggcatacctctcccgagctttgcctgaatctctagctatgtgcgggcctccaacaatgacttgcagatgtccgtctaccggtggaggtagcaagtcttgcttattgtcgttcctctgactttaatcggtcttgacatacttctgtaagtgtgggttgtttttccttatttaatttcccgcttcaggttgttgcattcattagtgtcttggctgtagtctccatggaatcgacaaaactttgtcatgtctctcttgctgtcatctttcttcatggccgcgggcttcttatgcggggttagcgactgagtggccatgtaaacactttctatatcgtcagtcaagatggtaaatgcagtgtactttgcttgattctctcgaggagcttgcttggttttgttggtgaattttcccttcttccaattcccttgcctgttattattgttggaacgtttaccatttgagcttgaattatttgggtaataggggagttgggcagactttcagtggaaggaggttttgacttaccaagcttttgctcaccttcctctcgttgaatagcttcttcgagcttgatgaagccttcaacacggtcaagaaaatcactcattgagtctaccaggccgttcttccttatgtccttccaaagttcaccgaggacttcaatgccccc

SEQ ID NO: 366565 - DNA, 969 bp, Cannabis indica
ttggctttttacctcttcgaaatgagacaatttggttcaaaatatgggaagccaaatcaatggatgctcctgaggtgatacgatagaggaatgaggccacatcttgagacaccacagtcttgtttgagtttggaacccaattgctaagagaaaatcgcatgagagatgcatgagcaaaggttagatgtgtaatgcaaagactctcccccaatttcagttcagcccgtgcaccagtgagttcagtgagcatcaattggcgatccatagaaattatggcattcgggacattctctagcagttgcaaggcttgagaaatgtctctttcagaaaaggaaaaccaatgtcctctaacatacacttttcgaaaaagtctagaattttcatcaagaaaatcatcagataagttagcatagaaatctttgacaatgtttgcaatgtaccttttgaaaccagtgagagtgttctcccattgatggtattgaatgaacttaacaattccatacaccctaagagcatgcaaatcataattcctttcactctcaaactttcgggtagcatacaaattcaaatcacgctcattatcacgatagtagaaacaaggacaataggagagagatgtaggaatgttaccaggagatgattccttcattggctgcttgcctttggcagcagcagaagccttggctgctgaagatgatcgagcaggagttggagcagatttggtcagaggaggctgtggctcaagtttagtttcctcactgtctgaggaaactccaatgtcttctggaatttccttctcagaatggagagacacggatttgtccgaggaatcaacagagggatcctccatgggttcttcttcttcagaactcaaagaaatcgaagggggatttaccttttgtttcttggctggaggcactggcttgtcacgacttcgagatgatcgaagttccttctcgacagaagctt

SEQ ID NO: 366566 - DNA, 499 bp, Cannabis indica
tgtacttagacaaatttgcaatttattttggacaagttcatatcctcgcggggatatttaatgtttaacattttcgcagtacacgggtactcgcgttttaatatttattcaactttaattacagcctggtgtaataagtagaaaatctcacaagacctgaaaaaaattgtttaaacttgaagaattaacaagtatgaggcatttcctttatataatcaatagtacattatggtatatataccccctatacttaggatttttttttataaaaaatgactaagtataagtacaaggtgaacacaatttaaataatccgagtactattgataatagaattttaggctttcgccattccaagctcgtggaatcgcagtaccatcgagtgctgcgagtcggtatgtagcgtcaccaatcttttctgcgatgagatacggtccttccaaattatccccaaagatcccatgcgctgggttctcggtatttggcattactcttcgaa

SEQ ID NO: 366567 - DNA, 730 bp, Cannabis indica
taatggagacattcacgggatccagattgctaggacggctcctcctatatcccatctaatgtttgcgaatgacactattctgttcttaagggcaaatgagaaggaagctactaacatctctgaaattctctctacttatgagagatggtctggtcagaaatgtagcagggcaaaatcgagtgtgctattttcaaacaatttgaatcacgaaaggagaactactattctgaagcttctccaggtccaacaggcttcgggggaggaaaatatttaggtaatcctttcatattcaaaagaaggaagaaggaagtctatgagaatttaagagaaaggatgaaacaaaaactggaagggtggaaaatgaaacttctttcctttgctggtagaactactttggttaatttagtattagcaaccatgccagtttatgcaatgtcaacaaacaaagttcccctttcagttagtcgatctctagatgctttggcgaggaaattttggtggctggggaatgtggaaaaggaaagattcttggcattaaaatcttgggacactatctgccaaccaaaacaatctggtggtctgggtttcagaagattcgaagacatgaattgggctttactctcaaaactggcgtggagtttgggtcaacaaaaaaaagaagccttgggtgaattgcttgcttcaaaaatactgtaggatccaaatgttggatattattttaccaggatct

SEQ ID NO: 366568 - DNA, 955 bp, Cannabis indica
gtattaattttaactgctaaaaaaataattaaaaaatggtcaaataatcacatttaaatcggtgttatcgtgtttatagttgcaatattctgtagatgtgaatgaggttttcgacgggattattcaatattataaattaccaatgattctaaaatttgcttgatttttgagagagagagagagagagtacatttgatttcttcagagatacattaactaatataacacatatttaaaactaccttttcttgttcccaatggagattccgggccttaatgttttaaacgtaaaaggtaacattacacctttcatcagacattccattcttcgctggctgcactcaacgcttgagtaaaaacatcatattatactagaaatatgtacacgattaaaatgggatttcatcccaacaaaatgttatatgaaccatattaattgtcccaatgtcatattatttcaataataatgtttgtatattaaggtagttttccctaacaatgagattaattagacaacttcagttcctaacttaatttcaattatcagacaataactttgaattatatatatgccactttgttggtaccaccactacgaattttattttttgatacctcttaagaggttttgtacaaataaagtagcaatcacacttatattcaaggctattcttaatttttccaatgtgaaatttgggttaataccctaatactaattgatttttacaaatgaatttaagttttgtaagggccaaaatacaaaatagtcctaaatctaacaattaagctaataaatgtctctttttataaaaaattaacaaaatgtctctttagttaaaattttgatgatcaaattacaattataaccttggctaattgatcctagctttctaatgtcgtgtctagatcatatggtttcctttttctctctcgacacagtatatcatgaaggaaa

SEQ ID NO: 366569 - DNA, 566 bp, Cannabis indica
cttcatcgatatataaaggggcgagaagattcctatgatcagttcgatctgcccaataacttgagcgactgaagattataaccctattccacaagaagaagggacactttggttatctcgagagggagagggttgcaagagtacaaaaagctgttactccagtaaaagaaaacttgtaaaagaattgcgacctgagtatatactgttgaatttgaatgaaaatatcccaaataaagtgcatcacgtgcgtgcgcaaaagctggggtgtcactcggtcgagaccgagcttcaggcatgctgtccgaggtttctcgaacatgggttatttgaagcccttggtcacgccgagtagcctcggtcagctaggctacaatgccgccctttccatgcataacctccctcatacacgcgcaagggtatgcaatgcatacccctgtgcccaattttgtttatgtgatatcttttgattaaaaaaatcattctttagtgaaagaaaattcaaattttggtagaattttgtataaaattcaaatttttaaataaaaatctaattatcggaataaaat

SEQ ID NO: 366570 - DNA, 670 bp, Cannabis indica
caaagctaggtccatagctttgaagaccaatgacgtaggtggcttagttctatcgaactttgtaaaaattgagagtttgcaatttccatcacttaactctttacatttatagtttgttatttgtttatacacgtgattatctttgttattgcattaaacttgaatatttgcatgaattgtctttgggttttttaatgaaattagcttaaatttctaattcactcccctcttggaaacatatcttgggctaacaataggtatcagagcaagaactcttatttttgggtagatttcacaatctaagagtatatcttttccaatcaattcacacaataatatgtctacaaccatgttatgatacatttataaatcatttaatatgtttatattctatttaattaactaaatacaatttacacgtattaaattataataaatataagagtttatatttaaataggttattattgtgtaatttttaaattaaacatgttaattcaaaaaataatttatttaataaacctcttagccatgtgagctagaaaataactcaaattcatctaaaaccaaacctatttattttagggatttttacacacatactgaaatttcaacttttttattgtgggatagaattttttttcaagaatactgtattttttttttcaaa

SEQ ID NO: 366571 - DNA, 537 bp, Cannabis indica
acagggggtaaaaaagataattattctattacaaatatatatatggtgactctctataatttcctcatctatttttttaaaataaaaacaaaattatagttggaattcgacgacatcgctcaattattcatgcaaattagtctaaattattgcatgcaaatcattttaattaacctaataatatatatgatgatatttctagatgcacaaaattaaatattaaatctccaaatctcaattagcatgcttctacactatgtcggtccatagaacaactataacacattgtccaaatatgcggtttacttaattacttttatttttttaatgataatatatgatgaatattatattttcattatttttatagggatataattttgctccgtgatgtactttcatagaatgtatttcgtggtacattatatgggtctaagggtacattaaatgagtgtcagggtacgtttcaattttttaaccctaattacccctagatcaatctcagccgtcaaatcaaataactccctcatctgacgg

SEQ ID NO: 366572 - DNA, 474 bp, Cannabis indica
aactactcgtgcacatagtaattactaactacttaaatagggaaaatacgagtgattgaaagaccaagattaatctacatttgatcaaaatataattgtttacattgtgaatgaaaacacaagcaaacataaatatattaagtttgattgaaaaggtacaaggcatttaagataaataaaagctaagttgtccaactaacttcgcaaacttgtttttacgaaaataccacaaggggcaaaccattaggccattttcctaaataaaaaaataaatgaatataaatacaagaacaagtatacattatcatagggcacttggtgggatttttttgttctgcatcaacctcttcttcctcataaaattcttccttccgagccttgcggcagtatgcaagcatggtttcggccttatcaccaaaaaaactaaaatttaactcgggttggctgaccaaatctagtagatggtcctcctac

SEQ ID NO: 366573 - DNA, 554 bp, Cannabis indica
gatcaaataaataataggtttgtgaaaaaaaaaatttaataaagaattaaatacaacaaacacaatatccatgtaacaaatgtgaaataagatattaatataattaaattattatttaactaaccaactaaattttgaaaatttagggttgttataaacaatctaaaatatcttttcaaaatttaaaattcaaaaatgaaactaacttaaaatatctaggtttatttgaattattttatcaaattaaattaaatatctaataagataaatgatttcaaaataactaaatagatattttcaatatcattttctgatcttataatttaataaaattaaaataataaaataaattaattttttaaaaaatatggttagggaattattattttaagaatacaataataaataaataattatcctaattatagatcaaaatatctcaaattaagcgttttacaaattttcacaaaatatctaggttatttaaacattttagaatactatttataaatatctaataagtaaaatgataaaaaaaatatcatttttctaac

SEQ ID NO: 366574 - DNA, 502 bp, Cannabis indica
ttgaatgtcagcttctatctgagagagctgactcgacagagttgattagtgaaggtaccacgtgcatgccctcctatagcgatatggatgcctcgctattagttgtttgggtttacctgactgttatacttagtttgtatgttgtgtattatacgctaagtgtcttaccaatcaccatgtctcatctcctaatgcatagcgaggttaatgcctcgccttgtacatctgaagttgtatggtttctcgttaatatatgaggcaacaatttgtatatctttatctggcgtaagaccttatagtcagcaaattataaatatactatgtcacttccgcattaatgagttattctatttcaaaatataattaccgttacaatcattgattagtattcttccctatttaacacgtgtcctcctttggaatgatagccaaattttgggtataacaatatggtatatactgagttgaatgaaacttgcgagaacatattccttgctaatga

SEQ ID NO: 366575 - DNA, 655 bp, Cannabis indica
agaacctaaaaacaacaacactataacgaaagtaaatacaatcaaattaaaaagccaaacccaaaaaagaacaaaataaattgatcaaacaaaattaaagacctaaaaaattaaacaacatcaaatgaaattttaaaagcgaaaccctaaaatttcacaaagtagaataaacaaaaacgcaaaatttagaaatacaataaaatgttcaaaaaaggggaaaacgaaaatgaaactgaaaaccaacctcggttcgaactttggcagcaacactagcttttttcccagaaactttaattatcaatttaaattaaccaattttttatattaataaaattaaaattcattatttgtcaaacaatttttttctaattattttcttaagataaaattatattatattaaaataattattaatatttatttggtattatttttaatttatttttaactctaacaaaattaatatttctactaaattaataatttaccaacttgtattaaaaaattgattcaacttaagttttttaatatactcgtttttttaccgaaatttcaacagcataaagactataataggacaatccaaataattttaaaacctactgttataggcataaatttaccctccccgcgagaaagacttgtctatagagaa

SEQ ID NO: 366576 - DNA, 664 bp, Cannabis indica
tagatccaaatttgttgtacatcctggaagtataacttcaacctttgcctataccagaatgaaagtgggacaagattacaatggactttgttactgggttgccgttgacacctttgaagtatgacgatgtttgggtgattgttgatcgtttgactaagtctgctcattttattccaattaggaacaattacaagcttacaaagctagctcgactttatgtagaaaatatagtccgactacatggagtgccttcaagcattgtttctaatagagatcctcaatttacatcaaggttttggaaggccttgcaacaagccttagggactaaacttcacttgagtactgcccatcatccacagagagatggacagtctgagaggaccataaagactttagacgacatgcttcgctcttgtgtttttgattttggaggtagtttgggagaacacttgtcactagtggaattcacatacaacaatagctaccaagccagtataggtatggctccttatgaggccttatatgggagaccatgcagatcgccattgtgttgggcagaaccagatgagcatgtcactattggacctcagattatcactagtaccactgaaaagattagggaatccaagaaaagcttaaggtgttcagagtcgtcagaaaagct

SEQ ID NO: 366577 - DNA, 530 bp, Cannabis indica
tatgaacaaggtgcatctttttttttctagagcccatcacgaaagaactccaagattaagcgtgcttgacctggggcaatttcaagatgggtgacctcctgggaagttttcccaggaagcgtgcgagtgaggaaaaagcacgctagaaacactcgtgttggtctgtagggtaagtcatcaattcaggctgcaaccagagtggcgtactcgtgtataagagccattattctgtgggtgtaagggcctaatggaggtttgaagtggggacgttccaaaatggtatcagagccttgacccagtcggaaatgtggtcgatgaggacgtcgaaccctgtaagggggtgtgattgtgacagtcagtagtcccgtgatccataaggggaaacaccgggtaagctgtgtaatcccacttcacctggggaaggtcaagtgtgatgattctgagactgtgtaggtatgggactgcatagttgaagagagcttaaatggattgatttttactacctatatcaacaaggtgcatcttgtttt

SEQ ID NO: 366578 - DNA, 792 bp, Cannabis indica
aggaaaattagaaaaaaaaaaaacataatagttattagtttttcacattcttcattcattctagatagtcaattgttcatttcgttttagagagatttatagtgttattgcttcattttgtcaaaaaagatggttgagtgctgattaagtctccaatttgtacattttaagcttaaatatgcatataaaattaatataaattaaatattttataattttaatgataaatttatttttattggaaatatttaatttactttaattttatgttatttttcaagaaaagtggtaaaaagaaaatgcaaaaacccaatttcaaaaggcccataagtgacaatgcaatctcatctttttcaggaaaagtgttttgcaaaagttattaattggacattttattttgttaaataataaaatagattttgtattttttaaaatagtacaaatagaaccatgaatcaattttttgtcaaaataaaatttaaatataatccgatctaaatgtgttatgacaaaactgtttacattttcagcatctgtttgtgttagaaattatcttcacgctagttatattaaaaaaagaagttgtgaaaaagttaaaaaaattaaatacaattaaaaatataaattaaaaattaataaaatgtctattaaaaaaaattataaaataagtatctatttttgggtgtaaataaaatttatccagaatgaaatcccctctcactgtcgtctatatatatatatgtatatgggtatgctcttaatgggtattacccatgtatgggtattttattt

SEQ ID NO: 366579 - DNA, 743 bp, Cannabis indica
gcagctgcaatgtgggacacgtggcaggtagagacctatcacccggagatgaacagaagacttaactaaatctgctcagaactaataattatgattcatgggcaagctcccggacaagagcaaatagctccacttcttctctgggaggtgaaggacgaataaactccttcgggccagttaagctgagaggtgaacagtcacttcgcatttaatgtgacatgggaaaaacatctaggaatacccataagaggacgtgtcagacgtcgtaaacctgactttgcgcgattacatgataaataagggagctagagacggctctattatgaagaatcacatcaatcaaggaaggatgaaggctaatctcacctaaaacctaagcagcctactgcataggtagtgcatgccctattttgtactttttgggaacttgtgcatgcccatagttggcacttgaagacaagttacccattttcttcttcctaccaatcgttataaatacccctcaccaaaatttgtggggggatgggagaaaaagacacaaaaaacattctctgtaagaaacacccacttattaataacagagactcgtggactacgactcattaatgtccgaaccatgtaaaaattacccacattaattatccctaagttctcattattacattagatatttggttgctgaaaacctcggtcaaaaattgtataacattaaaaaaatatatatattaacaactattgtcttt

SEQ ID NO: 366580 - DNA, 597 bp, Cannabis indica
taataaagattagaaatcacattttatgttgcatgcttcaaatgatttatttttgattatatttaatgtatacattttattaagtcctgaacataggtgtaaagaccgcttagtttaaatttagaaattagcacataattaacatttaattatgaaaattatttatagatatttaaataattatttatgttgttataattgaattctgaatgcatttttatgtcatgaaatttcataattttgcattttcggtgcccgggaacatggaacgcggtgtatggctcagtaaaatcaaaatttagtattttagtatagcggggcagtttatttagacattcggaatgtctggattggtcgggaatttagaatttcccaaaaataccctttaagtgccttttaatccttttagtgtgggaggggcaaaatagttatttttccccataagcttttgtcctttagtggatttagtataatgtaattatttgatttattctaaatcttgttagctgaaataagtattgaatatgttaattatcatttcatttttatcaaaaattaaggaaaaaaggaaaaatttcaaaatccctctttctctct

SEQ ID NO: 366581 - DNA, 438 bp, Cannabis indica
catgataggatccatccaaagtgtgcctgtgtgagcctatgtgtttaatttcatatttagggtgtcaatcaacatacttgtgagtagatctaagatcctggtaaaataatttctaatacatacatatatactttatgttaaagtttaaatttttaccttataagcgtaatatggcgaccaattttgacaaaaatctggccaccatacacatacacaacaacataatattaataaaatggaaaaatttccaaaaaatttacaaagacaaaaataaagcaatgtacattactaaaataaatagaaatcatatatataccttaatggacattgatattcaacgctttttctactaaaattggtggctggagttatacccaccactttttctaataggctcgatttacagtgaaataggggaaaaaactgttgggttttatg

SEQ ID NO: 366582 - DNA, 863 bp, Cannabis indica
ggtttaaatattattttttacattgtaaattattctaaatttttcaaaattttataggatatcttaaataactataacatacacaattattaaaaaaaaattagactaaaaaattttccaaaatatcaaaacaaataaaaagtacaccaatatacttttttttttagaattatattataaaatcaccccataaatatatatatataagttctaaataattataatatgcactattatatagaaaataaaactaaaaaaaactctcctatacttactaaatcctccctcgtgaaacttatatattgcatgtattttggtattataatggtctctcgacttaatttattcatgactaatactaatgggagtttttttttttttttgtttaatgtgcaccagtcgtgatgaatatcgacacttcgggaatttccgcgctggaagaacttcacaaaaatttgcttttgcatggaataggagtaagattatacatcttatcctattatatcaagactaattaggtattttttactttctaaactttgacatatactaaattatgctttttatatttttaaagtcgttaaaaatgcttctgaacaattgagattgttagatttaaggacttttatctaattttagtaaaaaattctaacatggataaaagttcagaggacatgatttagtacatgtcaaaattcgaggcatatgatttagtagatatcaaagtctggagagcatggtttagtacataaacaatcactaaaatgaaaaaattgaattaataaattaaacaaaagtccttaaatctaataatttcaatagtttatggagaatttttaacggctaaaaaaaattcaagagac

SEQ ID NO: 366583 - DNA, 1178 bp, Cannabis indica
aaacctaaaaatgaaaataaactttacagaacacacttttgtcttctatttttaaaattaaaaacaaaagtagttatagaacgcatttttgtttttcaaaaataaatttttaaaaacaaaaattttattttcattttgtgattaaaaacttagaaaacaaaagtgctatcaaatggtacctaaataaattatataaactaagggttaataacggtgtaaatacacaaagttttaagtttataaaaagtataaatttaatgtttatttttagcggtataagtacttaatgtttataaaattgtaatttttctctaattaatttcttcactgctgactctgtatttgtcttaaacaaagtacatataaggcccaaattctagatatcattgagtctaaacataaacatgtagtatcggttacttctaaatgttcttttaacaaattcaaaatagaatttgtatattgacgaaattagaagaaacttatagtattacaaacattggttacctatgctactaaaaataaaaattgaatttatgacacttacaaacttaaaactttaaggtgatgtttggttgggaggaatgaaaacataggaataggaataggaatgagaataggaataggaatggaatgaaataaaatttaaaatgtataaaaaaaaattgataaaaaaattattaaatttttcctcatcatgcattggaatggtctttccttccatttcaaaatggaatagtcattccaccaaatggtggaaataccattccattgaatgacattccaatactattatatgcaaccaaacaaaagaatggaatgaaaattgtttcctttccattcctttccatgtcattacctccaaccaaacgtgacataagtacttatactgctagttacccataaactaacaactctgtagaaaggttgcatcaaaaagaaaaagaaaaacctaagtcagtaaaagaaatattttacagaataacgttaaatataaattaaaaataaagtttacacacacgtgtatttttaatatgtgaagggagtcgtctttgtttatttaatcaagagatatttgcagtataaatattttatatttcagattttatacgcttatatactatatgttttaattatgatattaacttatttttaaaataaataacataattataaaa

SEQ ID NO: 366584 - DNA, 586 bp, Cannabis indica
attctaactcttcgcccctcgacatttcaatgttgccttagtaccttagtcctgccgactttcaccttaggccaacactgccatggtgttatcttaatacttgagtcctgcaaactttcaccctagataactgcctgtgtcccgagtcttcttgaatttacatcttgaacagcaatcaatctccatgatacttgtctcgatgcttgtaatgaataactagtctgttgagtgaaccgtgaaggtctctcccccacttcatctgttggcgtcctcgacaacatgcccacacacaaattcctgaccgccctaactcttcgtgcacaccatgccatttaaaagtgcatcccgctagatgtgactctcgagtcaactatctcatatagcacccttgtcgatttccatatgcatgtaatgttcactcaaccatccaactgattcacacttgcatcacgcccttctggctcccacgatgcactaagttccaatgatgctgccctctggccttcatgcaaactttagcacccttcttgaccttcgcaggcaaacatgactaagtctcactggcacgaccctctggcctccacac

SEQ ID NO: 366585 - DNA, 611 bp, Cannabis indica
aattatatattcagagatactgttgtaagagctataagaaaaggaatctttctccttcatcttaagtcaatacaaataacgaggattaggctattaccgaatcgctcgtggctgaacctctataaaattcctgtgtctttacattgttttattatatatcgattattataaatcacttatcgcttactaaattcgactcattttcgttggctaaaagtgaggtcaacattttggtgctttcattgagagaaggatcacgaatcgctctttattcaacatctaaccacaaatacgatggtgcaaactcatagaggcctgattgatccaaaaaattcacagacggtagatcctacattgcagaacccaggaaacacaagggttccgctagctgttaatcctggacagccggggaacatagggagtggtgtaacaactcctatagatgaaatcgcgcctggtatgcaagacactgggaataatagttctgcacccaaccttggcactcacaacacaactattctgctagaaccaacacccagatgaccatcgaagatgccactgagttacaaaatctccgtgatgctctatgactcatgcagggtcataaaaat

SEQ ID NO: 366586 - DNA, 639 bp, Cannabis indica
gtctaggtccaggtgtggatcccgatatgggtctgggttcggtccaggtctgagttcaggtctctggtgcgggtccacgtttgggtttgggtctggatctaggtcctgatctaggtcctaggtttcgatcttggtctgggtctgggtctaagtccaggcttataccttgatccctatctaggttcgagtttgtgtttgcgattaggtcccagatttaggtctaattcaattctcggttccgatctggctacacgaccatctctaagcctgagtttagttctaggtttgggtttgggtcttgtttagggtcctagtcttgttacatggtcttggtccagcagttcttgtttaggtgctagtttcaggtctttggtctaggtctgggttcgggtttgggtcctagtttgggttcgggtcatagtctgaatcccagattcaaacaccaactacgtgtctattgcaagccccatttactggatttcgagtcaagatctggatccctgtcacgggtctaggtctggttctggtcttgggttccaagtccaagtttcggtttgggattgagaccgggtgcgattctaggtcccagccccggttgtgtgtcccaagtctggttccctatttgggtctgagtttggg

SEQ ID NO: 366587 - DNA, 499 bp, Cannabis indica
aagaagtatgagaagtcaattcaacacttcaaaattaacaaagtataagaaaccactttgaatatatacaaacatatatatggatgccctcttaatgggtattacccatgaatgggtcaaattagaaaaatttaagtttttatgcttaatttttctatctaattagaaaaatctcccatgtttacatcgtatggggtgagattattctatcggttgaaaaaaaaaataaaaaaaaaagtgttttagtaaaaaaaagataagtaaaagtaaagtttaacttatatattttaacatgaatatatttttgatatagtgtaaaaaaaagatatttttttaattaagtagttaaactaagcataaaaattcaaatttctcttttattattcgttattagatcaaaatttaatggtttaatatttttaaaattaatatttataattaaatttgcttagtaaccatttatgggtaatacccattgagaagtattccatatatatat

SEQ ID NO: 366588 - DNA, 703 bp, Cannabis indica
aagtgaggcgtcaagatttttcattaatttttgatgcgggcgtttgggttttccatatgcaatctttctgcaacaacttagtcattcattacttgatcgaaagagagggtgagaaggagaattttgggctagaggtttcgagttgcagggaagctcgattcgtagtccgcctcttccataaatggcgaaaacacctctgtcagagctagcaacggtgcacgtgaggactgatcgcgaaccatgaaccatgggttatcatggtggtggtgtaggttttgacgattgccagtcggaaatggcatgggcaagcgtttttttttcacgaccaggtttgttgcggctatataagattgcttgtaaattttacaaaaaaaaaaaaaaattaaatactatacagtgtcaaaaataaaattcaaatattttttttcacgtgtgactattttttcttattaagtataataaacaattgttttagctttatttttgatacgataaaaaaaaaaattaaaaattacatgtaattttaaataaatacaacttacccgactataataaataaattaatttttttttttctaaacaacgaaataacagtctaccaaagcatcctttagagaagtaaactaaataaatttcctaaaaaattattatattttgagtaatttgcggcataaatacctaagtttaactttcagttgcaaat

SEQ ID NO: 366589 - DNA, 232 bp, Cannabis indica
taaattgctcccactagacgaaaacttataaaatcacacatctccaacctaactataaaatagacacgacaaatttttttaaaaaaacaaatttttttaaaaaaacaaattaattttttttttgaaatgtttttttttgaaaaatgacttttttcaatatctataacagtgtaattttataaatatagttttgatcatttgtaataatataacaatatgaaagtattatatt

SEQ ID NO: 366590 - DNA, 504 bp, Cannabis indica
caaaaatcctaattagcaaaaaacaaaataataataaaataagtttaacactatcttgtgctaatttgagtacttattttaacattattttcataatttgtatttgtatataccaccagaagctcttcctcgctttatctttctcttttgaatttgtatttatttgagacattagatggtggtggaggatatggtttttcagccaaaatatgattaccgatgggttatcgatggttttgtgtgtgcactgctatttttatacacaaacagaaatcctcaataacgtattgataaatgtcatcaatatactatcgataaatgccatcgataacctatcgatatatgtcaaattgacaaaactgtgttcacaaatataaatcatcgataaactgtcgataacctatcgacaagcacgttttggccaacaagtatcatagccacaactatccaaggtatgaaacaaacacaaatccaataaaaaaaatacgaagatgaagatgaagg

SEQ ID NO: 366591 - DNA, 610 bp, Cannabis indica
gtagctgtttcaagatactcttcttgatgtatcttagttgttccttcaggccattcaatgggttcttcaaggatgctcaacaacttctgttgtgccagtagagatcttattttcctcctccatattctgtagtcacctgatccatcaaacttataaacatcaactttaaaactactcatattgtatttgttaaaaaatcaaattagataaaggtttagaatgttctccaaatctacaatatctaattcctcctcttgatgtccatccttgtgttcttaattttcaatgtctttcaaacttgcttcttgattgtattattttgaatctctttgcggaaataatttggctctgttaccattgttggaaattttttgtttgaccaacactttttaaagaaacaattaatacaaaggtataaatttgttatttttcaaaaatatcaatttgcactattgtattaattgtttctttaaaaagtgttggtcaaacaaaaattttcaacaagtaacataaaaataacatcaaaacaacaacaaattaacaagagtacaacataaaaagaccgtattttctgtaaataaaataaaaaaatcgtaaaaaaatattaaaa

SEQ ID NO: 366592 - DNA, 832 bp, Cannabis indica
gaaaataaataaaattattttccgtaataattctcaataaatattttaaaaattactcaattcaagttggtctaaaattaattaaaattaactttcaactcaaatataatgttctataaatatatatagcaaaattcgaaatccaatgtattttaaaaataaatacatattcgaaatttcataaaataaaataaaataaattctgaaaaattattctaatttatgttggtccaaaataaattaataaattaattttcaacataaatataattttcctatttaattaaatatgtaagaaaaatatcaaatattaattatcttgtataaaatcaacttaaatattaattttctatttaattaaatataactagaaaaatacttcaagcatacagaaaataactatctagatatttcactaactaattacttattttctaattaaaatataatatattttagtctttattttagtaaattattaatgaaaaatttacttgatttaagttgatctaatattaattaaaataattacttttcaactttaatctatttttcaaaaaaattcaaaattatctgtattaaaaaaaatgcaatttcgaattggtgggagaatgattgataaaataaaataaaatatattttgaaaattattctaatttaatctgttctgaaattaaaatttctaacctaaatataattttctatctaattaaatattctgaaaataactaatatttaagtgtctagataaaatctacttaaatatttaatttttaatttaattaaatgtattaaatataggaaatgagtaattaagtatcttgaataaaat

SEQ ID NO: 366593 - DNA, 592 bp, Cannabis indica
agatttacaaaactcatcatatacagtattttcaaattcttttccatgatcactcctaatgataacaatcttaccaatgttacaatctttttcaactcttaatttcaaacacaaggatttaaaagcttcaaaagtatcaaatttttctctcaaaaaatctacccatgaaaatcgagaaaaatcatcaacacacacaaaaatatacctcttaccattcaagctttcaacttggattggacccatcaagtccatgcggaggagttcaagaactctggaagtattcacatcaggaacactcttattcgaaatttgcagttgcttaccaagctgacatggtccacattttcccaaagattccttacccaattcaggtaatcctcgaacaattccttcattagataatcttcaaagatttttaaaatgaatatgaccaagtttttcatgccataaatcaatagtattatcaatgcagaatgacaagtagcataagaagtgagagtataacaagtatcactagatctgagccctagcaagataatgttggaattattttaccaggatcttgatttactaccaagtatgtttgattaac

SEQ ID NO: 366594 - DNA, 1189 bp, Cannabis indica
ttgaccgttagtctgccaggccatatagacgccatcatcaaagcgcttagtgcaatgattgcagacaacaggggccatgagctcatctcttttagccttcttcaatgcctgatctttgaaatccctcagctccttcacctccacggtcaagttggccgtcgtttgcaagtcagcctgatgaagctcttccatagacttcagcctgcagacaaatcttcaactgcctccttggcctccctcagctcgcgcctcgcctagccacgacctcatcccgggtcttcagctcctccgccttggctgccagtgcctcctgatgcttcctctctgcctgagcctccctctgttgggcctcttcccggaatgctttcctctcagctgccaaatctctcagactcttcatggcctcgtccatgcccccgaactcggacatgacgtacccatgatcaattaaagtctttgagaggcgaccgatctctgtagcgatctggccaaataagaaaaaagagttaagtataagagatcgaatgccagagtacagcacaaaagaaaagaagaaaccattaataaagacttaccgcggtcataacagcgctgatatcctgaacctgatagattgagttcgtggaagcgcaggctgcatatcgtttggccagaagttgggtcaggttggagacaaaatggctcgtcaactcataggcaaaatgagcaagagtaggaccgacgaagcggttgaaccagtccgtcagagggtccatgttcaggtcccaagcattcctaaaggcctcctcgcgtaaggaatttcgatgagcctcccgtaagacctttttcagggcttccatttcggcattccccttgtgtattcggccatggcatagttatgcttggaaatctgaagttgctgcctttcctcatcagcggggataggagtaaggatgatgctggggggtacagtatattcctcggcttcacgagggatccctgaatcagagctaacagccggagtggccaccctcctagactttttggaagactcagcctccaccatcttgcccttgcgcttccagtccagtggggccacgatctcaccttcctcctcctcctcgacctccccgtcttcgtcgatcaagacgattggacctaaggggacactggaagaagacctccccggggtcaccgtctgggcgggtgc

SEQ ID NO: 366595 - DNA, 538 bp, Cannabis indica
aacctctcaattagaatataatttacttagtctcaattatattcttatataaaaattttactgtctattgaaacttgaacgttatatttaggggtgtgcataaatcgatccaatccaataagaattgaccgccaaacattagatattcaattgtgaccagatcaaattggatgttatttttaaatatccaattgcatcatatcggatggtggatggggtgtccaaaaatccaatacatctaacatccaatcaaattaattagtatttttatttagtttagataagtaattggattttatattattatacgtaaaatctctatatatataaaagttaatcacctaattctataatacactccttaaggggacgcaccaatatatttttatccgttttagtatctgaaataattttttccttatagtcatgtaaattataattatttaagacatcttgcaaagtttaaaaaattcaaaaaagtttaacacattgaaaattacgtttaaataatatattacacgcgtgactattttatttt

SEQ ID NO: 366596 - DNA, 922 bp, Cannabis indica
acagggcctctaaaatatttgagacgaccatgtctatgattaacactcccacttagttgtactactaagttcccaagatgtaagtaggggctggtcctacgggtaagctggtaacaaacaagttaaaaaactcgtgtaatacaattaaactggagctcaaccatctcagaattgagatcaaataatctatgatcaattaagtgacattgatttagaaaagatataacagtatgtttatgatatcttttccactaacaatatcggtccaatccaatgtatagccattacatttgatcctagtttactttactaatgtcctggaaaagacattccatttatccaagtgtaagcaaactttatcgctggttatcacgtcagtgtaaatttaatgtattgataaatcatgagactaaataatttaaagcataaagtcacaattactttttacgtaattgtgaataactatatgtttaggatttaataaaacttatacattaaacttataataaaaattgaattttatttaggccataaaatccaacaaataatcactccacaaaatattagaaaagtacattctcatattttataagtaaccaaaccaataatggaatggaacctatgtatttccattcatcatctccaaccaaaacatttcattatcaccaactaaacctagcctaattgtctttccaacctttaaatgggtattgttctttttttttaagataaaacatatgataatatatatatatatatatatatatatatatatatatagggcaagactatggtaggacctagcaaaagttccctaccggtagggaactttttttgaccattgattttagatcatgtggttattatgatgtaaggtgtatactcttacgataagactgcttgtatacaattaaaactttat

SEQ ID NO: 366597 - DNA, 579 bp, Cannabis indica
agattttatatttattgtattttttttaatttagattttttattttgtgttgaaatttttttatttttaatctttttgtttattatgattcttttttagaaaaagaaataaggggtttttcaatattatttttagacacatagatttttggagaattaccctatatactatttttttaactttttttttattcaaatttacggtttgggttttcaaagtggttgaagtgctatttgtaatagaggtttctatacgatttttttgttgcaatttaaattgcagcgcaagttgcaatagaggtttttatgtataattccgtaaaaatgacaaaaaaaaaacattattttaaagtgtaaaaataaaaaaaacccatagattttttaatatttaattattgacaatctttagaaatgattctcaaataataaataaatataatatacataatttatcttgaaagaaatttaaaaataaaaaaataaattaaataaaatttattttataaataaaaattaagaagtttcaaagaaaatttttatttttttcaaaccaaatgttattcttttttaatttttttta

SEQ ID NO: 366598 - DNA, 529 bp, Cannabis indica
aaaaatactcgtctgttttgaaactgacatttacagacaattttttggtaaaaactgtaggtatagaatttaattatatctatgccgtcggttgggggttggggtaaaattaagggttttttcttaaccctatggcgtcaattatttggtattaaccgacaccataggtgcactcgttattcgacacgtgtgtacctatggcatcggttaatacgaaataaccgacaccatagagttatatatcagaacccacacaacttcgttttcctcatttcacaacttcttcaacacgaagaacagcaaccataacagccccatacccacgaaaaaaccctcgccaaccaccgataaaaaagcctcattctccctcatttcttcactattttaccccatttttattttaaaatcttctattttcaatacctaaacttatactgtcaaaaagttttgtttttttcccctttatcactataaccgaacctattataaaaaaaaaggtggtggtagaactccgaccatcgattttagc

SEQ ID NO: 366599 - DNA, 294 bp, Cannabis indica
gcttcttcaagcttaataaaaccatctgcaagatcaaggaagtcactcatagaatctattggtccgttcctcctgatgtccttccttagttctctaagaacttcaatgccccccagtattgcggacaactttccatctttggtcacctgtgcaactttagttacctccgtcatgaatttgctcaggtggcaggaaaaactctgcaacatacatcttctcgtgctccttgcaggtccaattgcatttcaaaatacttgtagatgggataagggatcttccttctcagtatacatc

SEQ ID NO: 366600 - DNA, 837 bp, Cannabis indica
tcggtaaacatgcgcctttgttcctcgaacgcaagatttaccgcagcgcgcagatcttcctgatcatgatgtagggtattggtgtgaccctgcacgagcccaagagcagcacggagattttgtaactcagtatcatctccaatagttgtttgagtgtttgtaacaggcggaacgactgtgttatgaatgccctggttgggtgctgaactgttattcccagtctcttgcacaccaggcgcgatttcatctatagtagtcgttacaccgtgactcgttacactgtgacctacgtttgcccgctgttaaggagtaatagctggcagaacccttgcgtttcctaggttcggcaatgcaggatccatgatctgtggattggctggatcaaccaggcccctacgagtctgcaccaccatcgtactgttggaaatattttaccaggaccttagatttactccttccactcagatctccaacccttgcatcctttctgtcgtagagtatcaccaagattttagtctgaatgtccttctcttaagtttggattctacacgatcttccagactatgattgagataccaattgatgtgtgtgggcactactctatcactcaaggttttcgaaaattagaataagaagagatagagagaggggtcggctatagaaggatagtgcgtggctcaaattttttttttttctgattttcaatatcttgaatcacttgttaagtgtgagccatcactatctatttatagataaccactatgtttaggttagtaattatttcgcattaaaataatgaaaatattaattggaaaaagcctctccaagtggccggcc

SEQ ID NO: 366601 - DNA, 611 bp, Cannabis indica
tttttgagcttcgatctcggcttcgtaatcgatagctttttgtctgagaagcaccagttccgagtaactaccttcgtcgtaggcatactcatcgaggtttccctcgtagtcatcatcggggattatttcctcttcctcggacccctctgctgctcttgaggctacatcttcctcattcgggtcttgagcgtcttcaagagggcgaggctgacgagtacttctagtctccaccatgtttgtgaagtcaagtgtttgtttacagtggctttcattcagctctcaatgaaagcaccaaaatgttgaccgagattttcggcaactaataaaatattataaaattactgagctgtaagaaagtgagagaaggatttttacgtggttggggcgttaatgagccttagtccacgagtctttgttatttatggatgtctttaatacagagaatatacttgggagagtttcacccttataaatacagagaatgttcttggtgagtatttactctacttgctcatatgcagcccaagattctcgatcccatttaatgagctttgagggggtatttatagtgtttttggtggggagatcactagaattgtccttacaagtgt

SEQ ID NO: 366602 - DNA, 562 bp, Cannabis indica
ttgggttttaaaagctgacattctgttatcttggcatatcgataagtgctaaaaaattgcctatagttgaatgagatagtttaatagagaaaatggtacaaagaatcaatgtttggagttcaagaaacttgtcttacacgggacagacgactttagtaaactctgttttcatagctattcattcttattggtctcaactaatgattcttcctcaaaaggttctacatgagtggaccgggtacggtagcttgggatgatttatgcaagacaaagaaagaacgcgaattggatttaaaagaaccaaagaatgaaatgaggcgcctataggcaaatatgtttgggaaattgagacaaaggacgatacattatgggtaaagtgggtaaacgcagtgtatataggagaagaagattggaggacctatgaggcaacgtccttaagtagctggtactggaaacagattgtaagagtgaagaacagattaatgggtaaaatgggtaaatgtagtgtagattttcaataattgtagtttaattttttaagatacgtgtttataattaaaat

SEQ ID NO: 366603 - DNA, 512 bp, Cannabis indica
ctttcctttatataatgtaaagaccgcttaattttaaaattttaattttgaattagatgataattagggtttaattatgaaactagaagattaattttgattcatctttttatggaaatttatttaaattcaggatgtattatttatgtcatgtatggaattttatagtcatgtatggaattttatatttttgcatgttttgtgccccgtaacattagaatgcggtgtttggctattaaaatcacatttaacatttttagtagtagcggggcaacctaattagacattgaaaatgtcgggaatatccgaggttttaaaaatgaccactttactagttaagctttttggagaagggtatttttgtcatttttgtcttgggtgaggtggctgatttttagtgtggtagctggccactatgtgagtaatggctttggtttatcattcatttttatgaattttaaaaaaatagaaagaaataggaaaaaatcaagagaaaccatctctctctctct

SEQ ID NO: 366604 - DNA, 287 bp, Cannabis indica
gcaagcatattgaaaaattagtttgtggatttattgggattgagttgagcatatatggtcagtctaaatattggggtcatttgtgagtcatattatttatttccctaattgaactttaaggttgaactttgttgaaaatctggttaaaaattgcaattgaaattttatgggaaagacaatgtagtgtatatagcaatggtggcttactttatgtgttcgttgtttgtttctttatttcgttgatttaactgttggaatatgttttaccaggatttagatttactacc

SEQ ID NO: 366605 - DNA, 499 bp, Cannabis indica
ctcatggaagattctattactagagaaagggaaagattgaattatcctagggtgttagtggaggttatcatggaccaaaaactacctgatatgctagaattcgagaatgaatatgggatgaatacatcggtgggggtaaagtatgaatggaagcccataagttgctctcattgttcgggtattggtcacttagcagctgactgtaaaagatctgcaccggccaaacaacaatggattgttaaaaaggataataggaagaccacagacattgatgaagatgggtttattagagtatcaaaagggaagaaagttgataagcctgaacagactaaggaggtcccagcagtaacaacaacaaacctttttcaagctctcaatatggaaaaacagttgggaaataagggggaatttggaaaaagcctacctcaagccgatagggggattatggatgacacaagagggggggggggggggagccctctctttcaaatggataaaa

SEQ ID NO: 366606 - DNA, 998 bp, Cannabis indica
cttgagatacactgccttgatgcttgtttaagcctatatatcgacttcttgagtttgcaaaccatgtgttctttgccagacttctcaaaacctacaggttgagtcatatacacatcctcagataggtcaccattcaagaaggcagtccttacatccgtttgtttgagttctagatcaaaatgggcaactatagccacaatcattcgcaacaaatctatggtggaaacaggcaaaaaagtttctttgaaatcaatgccctctctctgactatagcctttagccacaactcgagccttgcacctctctacttgcccatttgagtcacgtttaatcttatacacccatttgcacacgatgggtctacaacctttgggtagttcaaccaactcccaagtgacatagaacttaattcttctttcattgtatccacccacaatgcagatttaggactattcactacttcttggtaactagttggctcagtatcatctcctacatcaaactcatatttatacatatagacaagatagtcatcaagaatagcaggcctatagactctttgtgatcttctcaccacaacctcatcgtcccccaaatcaagattttcatcttgtacaggatcttaaggttcaccatgagcttctattaaaacttgttcaatcacaggatcattagtaggattagaagcagaagcgaaagcaacaggtacagggacatagacacgctcttccttgaatacaatttctcttgacccttgacttgaaccaaattcatccccaaaatagacagctcagtctgattccatcaccctggtggtgtgagagggacaataaaacctagaacctcttgaaccaatagtgtagcttaaaaactcccactgatagtcttcggatccagcttcttagatttagggttataaggccttaccttagcttcgcatccccaaatgtgaaaatgacacaaactcggtttcttgcctgaccacagctcgtatggcg

SEQ ID NO: 366607 - DNA, 766 bp, Cannabis indica
gattgacttttggtcaacagatatggcaaactcaggttcaaactcacattcagatttagacccaatagtagagtgttctagggggatacttaaacgaggtagaactgagatgaaaaaaattagtatgttaatggaccaaggaaaaaaccagcaaaatgaggatccctttatggcgtcagttgtgtttaacccctacaacatcgcctggaacaacatcagtagcaaatttttctaaaactgatgctgaaaggccttaaaaaccacctctaaagtttaattttgttgtagtgcaacattgtttttttaaatcattttcaaatagtgtagtttaattattactttataattaaatattattcaatcattttttttttataaaaatagttatatatttcattatttagaattttcattaattattatttattttaaaaattaaaatattactaattatatttatattaatataacataacttttatcaaaaatttatataatttagtatttaattgtatatattttagttcatttactttttataatttatatcgttatttatttaacaaaagaagaaaaaaaaattgaatacctcctacaaattatttacggtatcaatcaaatatataattatttttatgattttgtaattagcatataaataacaatgtatactaatataaaataagttaaataattaaggtggcgtttggtagcactttgctttttaattttaaaaatagaaaaataaaagtagattttttgtttt

SEQ ID NO: 366608 - DNA, 602 bp, Cannabis indica
aagacaattttccatctctttatatactccaaaaacaaattcaattttcgaaagaagaaaaatccagtcacgatcaaacctttacaaaattcgaatccatataattgagaactaaaagtaaaatctctacaattgagctccctaacatggtatcccgcattctatatatgctctctactaccattttgaacgacgatttgtttcaaaaatcgatggatcaatcgaaagaaggaggagtcaatcggaatgcctaaatttttgccaggcccaaatgaactcaataccatcagggaagccaatccaggttacccagaacaaacaaggcaatcaatctctttcgaataagcctcacctaaacactttccaagttgagcttcgattaagaatccaaatcgttttcaatcgtcgactccaacagaaggaataaaatcgaaggaccaatcggaatgccgtgaagagacccaaataaactcaataccaacacggaagccaatccaggttgaacccaaatcgatttcaatcgtcgactccaacagaaggaataaaatcgaatgaccaatcgaattttttttaaatttttttataataagttaacgggttaa

SEQ ID NO: 366609 - DNA, 467 bp, Cannabis indica
acctataaaaggatagctcccttagctcattttacacatttagaaaaattaccataagattagagcttctctcgatagtttctctctctaaaaattggagctttgacacttagccttttcctataatatcatctcgtgagaaataaaaatatgaagtagatgtagctccattactgtcgtgatacagggagtgatctactataaatttgatgtatctctcttataattacttaactattattttattctaactaatctagcaagcgggtgtggcttagaaatcttagtccatattttagagtcaagaatacatatatgaaatttataattatcaatatattatacaacatattattgttaggttttatgccctaaataaaactccattccaatataatctattttattcaacaataaagaaacaaaagtatttttcattcatatgtgtatgttttggttcactttat

SEQ ID NO: 366610 - DNA, 514 bp, Cannabis indica
aatcagaagggaaatacttcccttccaagcttaaagccctatacatagtgattcatactcactgggcaaagggtcggaaaaacttgtctaagaatttatattcagagatattattgtaagagctctaagaaaaggaaccattctccttgttcttaagtcaatacaaactacgagaattaggctattatcgaactgctcagggctaaacctttataaaaatcttgtgtctttatttgctttattatattacactcatattaaaccatttgtctcttacaaattagactcattgttgttggctaaaagcgaggtcaacattttggtgctttcattgagagcagaatcgaggatcgctctttatctcaaatctaatcgcaaatacaatggtggtacagacacgtagagccgtggttgatctggtgaatccacagacaatggatcctgcactgcagaacccagggaacacaagggttccactaaccatgaatcccaaacagccatcaactgtaggtca

SEQ ID NO: 366611 - DNA, 550 bp, Cannabis indica
cttaatttttattcaaccaataaaagtttaattttaacgtacttaactacaattctcgtgggatcgaccttactcttggtgagtttacaacttattaacgatacgtacacttgtgtgtgcaaattaccacaacaaaagtgctcttttttttttgaaaactttatttgttattattactgtaacataatatatgtcaattgaaaaaaaaaaaaaaaaaaaaaaaaaaaaaaaacaaaacttggtacatgggagagttggttatatttttccatatgcatttttataaataaaataaataaaaattaattaatcttatatgagataccttatcataattaaataaattactaccatcagattataaatcaaagactataaaaatagctcttacacgtgagagcaaaagtgatactctcacctatagagttccctatttatatatatatatatatatttatatatctattctatataaagtgtgcctatataacagaattcttggtttatgagaaattcatggatgactttttatttatattcaaaataaaat

SEQ ID NO: 366612 - DNA, 960 bp, Cannabis indica
gtatgaaaggagatgtggcttttgtagctaagtgtatagtttgtctgcaagttaaggcaaagcatcagagaccttcaggtttacttcaacctttgcctataccagaatggaagtgggacaagattataatggactttgttaccgcattgtcgttgacacctttgaagcatgatgctgtttgggtgattgttgatcgttggactaactcttctcatttttattccaatcagaaaggattacaagcttaccaggctagctcgactttatgtagacaatatagtttgactacatggaataccttcaagcattgtttctgatagagatcctcaatttacatcaagattttggaaggccttgcaacaagccttaggaaccgaacttcacttgagtactgccaatcatccatagaaagatggacagtctgagaggaccatacagactttggaagacatgcttcgctcttatgttttggattttggaggtagtgggggagagcatttgtcactggtggaattcacatacaacaatagctactaagctagtataggtatggctccttatgaggccttatatgggagaccatgcagatcgacattgtgttgggcagaaccaaatgagcatgtcactattagatcccaaattatctctagtaccactgaaaagattaagggaatccaagaaacacttaaggttattcagattcgttagaaaagctatgccgatctccatcgacggaaattgagtttgatgttggtgattatgtcttcttgaaagttactcctatgcgtggcgtaacgagatttggagtgaagggtaagctagccccgacgtatattggaccttttgaggttatcgagaggattggggaggtcgcctaccgattaaacttaataggacagttgggactattggaatttattttaccaggatcttagatctactcacaagtatgttgtttaa

SEQ ID NO: 366613 - DNA, 592 bp, Cannabis indica
acagagttagaaaactaggttatgatagattgaatgggaggatttctcctagggttagatttcaattatatagaattaaaaaaaaaaaagaagataaaattggctaaaaatactccctaagtggccatacaatgggccccactagttacaattttgtcattttattcaataatttatcttttctttcactaatctatattttttaattttagtcatttaaatgtcaaaactatttgtttaataattaaattgtcaaataaaatttgcattaaactatttattaattagaccttacaaagtcttttcattaaaaaataaatcataaaagctcttttcttcacaatttagcccttgcttagtaaaaatctatatatttatatatatatatatatatatatatatttatataaaggaaaagcataaggcggtgacaaggcattttaaaatcactctaaaattatttttctcttctctccttaattctctcaattttaatattttattaaaacataaatttacaaattgatattgtactattattttaataacttttctataaaaaaccattgatctacaaattgatattttacta

SEQ ID NO: 366614 - DNA, 1368 bp, Cannabis indica
catggcaaacataacatgaagtatataaatctagagttttttagaagcaataattagagtcataaaccttaaaacatcaatggttaaaaatagctagttatatatatatgaatgaccatagtatgattcttgtgtggaggaaggcagttccgggaaatacgcgttggagtggtcattgaatgagtcagatgctggttgattgtttggaggttgttgcccctgagatccagtgttatgttgacgatttgggcaccgtcgataatcatggtctgatgagcgacaaatgcgacaatgtcttgagtttcttgggatctgctccccgtttggtccttcccttgtatttcccgtaccctttgttctcacaacttcggggtctttaataatgttggggttgctacgatatcttccaggttgtggcgtctctccttccggattggaattcaagtcaaattcttccttgaacattagagttagccgttcaagctcttcctttgcacggttgtacgagtcctctgatttcgctgcatagaaagtgaagttataagtcagtgaactgagagatccaaacctagccatctcgtaaatgtgctgttgtggttgtgctggcgggttaaaatgtaggtggagatttatctttgcggatttgctccatcgcttcatgagaagagaattaggtattcttctcatgtttaatcttttcattgtagcccataaatgtctacaagggtacccttgactttcatagagcaagcaactacagtgtagtgctcgtcggccttcacagtaatgaactcggtattggacgtccggatgctggaactttccaatggtgaatatctgccactctccttcttgctcttgagttaggacaaaatagttattctctaaatcaagctgctcagcaaccttgtggtacatagttcttgtgtagaattcagcacattggttgtagtaagtggtcaagcatgtaggattaggtgggtgaggtcgagtgcatctacttttgaagtcatttgcagtctcgttgtgtctgagctttgagactgtcatatctatggttgttacaaattcacgcaagcaataattcttctctaaaaatttttttagagcggagttgatggattcgcaacgttgtgtggttctcattcctgcaacgaatgaaccccttaaatacgtttctgcccattgttgtcttgactcgaatgttgtttgacaccattcattatctgttagttgttgggtttggatgacgtctaaccatcttgcttcaaattcttcctcctcgtagtagttgtacatgagatccttaaatgtttttaagaagatcggatctttaacctttttcgaagcatttgtattgagatgcca

SEQ ID NO: 366615 - DNA, 746 bp, Cannabis indica
caaagcaattttagaaatgcctccccgcgtaatttacgtcaactacgtggactacagggaaaacttgcgtatattcgaagattcatctcaaacctgtctggtagatgtcaacccttttcgcggttgatgcagaaaaatgtcccatttatttgggatgaggcatgccaaaatgcttttgaaagcattaagaagtacctgttgcacccaccagtgttgagagctccaatcttaggaaagccattgatattatatatcacttcactcgaccgctccttgggagccatgctggcacaaaacaatgaggagggaaaagaagttgctctttactacctaagtagaactttagtaggggcagaacaaaactaccctccaattgagaaagtgtgtttggctttaatctttgctgtcacaaaactacgacactatttgctctcacatcctgtgactttagtgtcaaaagctgaccctctaagatatatcctatccaagcccgtgttgtctggacgacttgccaaatggtccatgatgctatcagaatttgaaatcaactttgtcccccaaaaagcaataaaaggacaagctttggctgattttctggcagcacacccaattccagatgatatggagttgcgagaggatcttccagatgaagaagtcttcgcaattgatacttcatcgtggcaattatattttgatggggcagcaagaagtagtggggcaggtgcgggaattgtctttgtgacacc

SEQ ID NO: 366616 - DNA, 503 bp, Cannabis indica
aatgcatttcgaatcatgaattcatattttttatttttgctcttgaatgagggaatgagtgtgttggttggtttagaaatgcaaataatttttggaaagattcaatttgtttttgtttggttaatctaatttttggatctttgaatatttcatcagagaaaaatggaacttgactcaatttgtcgaaataactaggcttcaatttttgcaattattaagttgaataatctttacaaactagttgtaaaatagctaggttttccactttcatataacaagctatatataatgtacatatacacggtatataatagatatttagagatttttttctcaacaatagaaatataagggaaatttgataaaatgtatttaaaaatttagactattcttttaacataccacctttaaacaaatactctaaatattctccacaccctaaaacccaaaattacccttacaattcaaaaactctcttctcccactctctctgtctaacttcc

SEQ ID NO: 366617 - DNA, 577 bp, Cannabis indica
atatgaacgatatgaatgcaaaataaaattgtaaagattgaacacatacatacaatgaaaggatcaaaatacatgtacctccaatcattgatattgatagtttgatttattaaagttagatttgcaaaagaaagcgaatacagattacaatgagtactcgggcttcaaagcttttactagctcttttagattagaatgagcagcgagtttgaggatcggtatcgtatcttttcaggtgagatattttatcactatatgctacaattaattgtcaaaatattttgacaattaatttatgaaattaaattaagtaactaaaatatttgataattaaatttgatcatatttaaaatattttttaatcatatataatcaattcactatacatttgattttatacatgtaaatcaattcactataattgattttatatagaatattataatattctcctactttgtaagtatttaaattgatttatcatttaaatcacaatagtttttcttgctatataacatgaatcacggtgataggtcctcatttatgatggcaagtattattttctatgtattacaat

SEQ ID NO: 366618 - DNA, 677 bp, Cannabis indica
tgctccataagagactcctttttttgggcttcatcacaaattgccttcttctgcccctctgactctcagagactcgtcatcgcctcctccataccctcaaattcagacatggtatatccttgatcaattagcatctttgagagacgactgacctctgctgcaatctggcagccaacaaaaaaggaaagggacattagaaccttgtataaaaaataaaagagacttgaggaatctaaaagataagaactcactgtagtgagggccgagctcatgtccttgatttggtacacaaggttggtagaagcgcaggccgcatatctcttcatggggagttgggtcaggctggcagcaaagtggctcatcatctctgaggcagaaagagtcaggctaggtcccacgaagcgtttaaaccagtcggtcaagggatccaaattcaaatcccagatgtttctggcgtattcactttgaacagatccatcctgggtgttccttttgtattttcttcagagctttcaccttcgcgttccccttggtctactcccccaaggcacagttgtacatagcaatctgaagctgagccctttcctcatcaggatggacgggagtcaagataatgcctaaaggcataggatactcatccacttgggaaggaaccccttattggaaattattttacc

SEQ ID NO: 366619 - DNA, 974 bp, Cannabis indica
tgatgcaggaggggtaggagccccgccaatcactggagtcctaaccgacttcgacatacacccaactgcgcccttagctcgcagtgctttctccaccatctcagcataagtggtcttgtcgtccgttgtgatcattaggtcatgcttaatcttcacatttaatccatcaagatatttttccttcgtactgaaatcagtcggcacaattctcgaggccaacctcgccaaccgattaaactaagtagtgtactctgtcacactcttattttccttctgggtcaggtgtgcgaactctttcctcttggcacttctaacggcctcattgtagtaatttgcattgaagagttcctggaacctttcccaggtcatggttgttacaccgtgaatctgggacaccatgtcccaccagactaacgcgtcctcttgaaactgaaaggtggcacacaccaccctgtcattcccggtgacacccatatagttcaatattcttgtgataaccgttagccactgctcgactttcatgacatcaggacctcccagaaaaaccagaggtgcctgtttccggaacctttcatacaggggttccattcagttcattgctaccactatctcggcctgagcaacaggggcaggtgccactggaacttctggcaccggcactgcaggagcaccctactgcctcaatctctaaatctcatgatcttgctcctctattctggcttgcatttcagcaaacctagtttcccaatgctgggcttcctgatcggcttgagcagcctgggcaacctgtggcaggttatcatcaccccgaccacgggccctgcccctgggacctctaccacagcccctagcatgtgggggaaactgagctccttgaccttgatttgacccgactgagttgccctgactcctggtctttcgcctggcgtccatcaagtctgaacagcctgcgaaaccaagagttggcacatcag

SEQ ID NO: 366620 - DNA, 895 bp, Cannabis indica
tattttcgataggaacagttgacaattgaatctaattttttccattattttcgtatccgtaataatgcgaaaagaaggcccgactccaagttgttcaagaatagtggcgttgagtttctcgaccctttgccttaggattagtcagttctatttctcgatggaggacaagggaagggatataactcagcggtagagtgtcacgttgacgtgcttcgttagaaatctatgaagctgttgaaaatgggtactatctgggccttccatgttcggttgggcggaacaagaatcatattctcgggttttttaaggacaggcttcgtaagaggatttaaggttgggagggccgtttattgtctcatgcggggaaggaggtcttgtcgaaatctatagctcaagccttgccaaattatgccatgaatatttttcttttgcctttggaaacttgtaaggagttagaacaacttatggctaagttttggtggcattcggattctagtagtgggaagggtataaactcgatgagttgggataggttgtgtcgtcataagcttgcagggagattgggtttcagatgtttgagagactttaatttggctcttctagggaagtaattctggcggcttttggtgaatgacagttcgctggtcagtaggatttacaaggcaaagcacatggtagtttattctcagctgagttgggagataacccaagctttatttggcgaagcatcttggaagccaaaagcctgatatacttgggagctcaaaaaaactatcgcgaattgggtgaatgtctcaattcttgatgacccttaaatccctcataacactaatgtctttgttgaaacaaggcatcctgtgtaacaccctaactaacataggcgtattacgtgatt

SEQ ID NO: 366621 - DNA, 791 bp, Cannabis indica
ttttttactcttcaattgaaagcaccaaaatattgacctcgcttctagccaacgacagtgagtcaaataataaagtgattaagtaatgtaataaaaagaggaattaaaaacaaataaaggtaaagtgaacaccaaattttaaagaagtttcggccccgttagtgtggtaattagcctactccccttgtactgtattgacttaagagaaggaatgaagtgttctttctcttgaaagctcttacaacaactaatcactgagtgtgtttctctcttagatatatcactcttttctctctaaaatatctctctgagacaattcttttgatccctttcatagggaggtcaggtcactatttataggggcttaatacatgagggatggtttctcttttacttacaatacataaattaggaaattataatgtttctataattacaatataagcaataggaaactagaacatgctgccaattttcctctgactcaatcccacgattatagggatcgtcttcatgtttggacacagcgagattattctttgaagtcactatctcttgtaagtttctcggcacaatcactcttctatcttgtcgaatgtcttctccacagccttgctcagataaccgactattatagatgctggccagtgatcatgtgcaggatgctagggacattttcctccgctcaagtatcagaaatatatagggcacatgtcatttgatcctattgccacatcaatgtgcaaaaaactgtagataacaattataaacttgttgttggaaattatttt

SEQ ID NO: 366622 - DNA, 757 bp, Cannabis indica
ctttagcttgaccagccgaaacctcttctctgacttttactaactctggattagttagctgagcagttttaatacgttctaacagatcagattgcagcgtcaagttctgaagtttacctacaacaaactcgatgctcgatctaaccatatgttctgctaactgagatgaaatttgaaccatgctagctacttgcccggaaccctttctgctcagggccttagccactacattggctttcccaagatggtaaaggatctcacaatcgtaatccttaaccaattccaaccaatgcctttgtctcatattcaaatctttcttagtaaagaaatatttgagacttttatggtcagtgtaaatttcacacctctctccataaagataatgtcgtcaaatctttaaagcaaacaccactgcgtcaagttcaaggtcatgagtcgggtatcgctgttcataatctttcaactgactggaggcataggaaataacctgatcggcctgcatcagaacacaccccagaccctatttggatgcatcacaataaactacaaacttctctttgtcagaaggcagagctaacactagagctgtaattaacctctgcttcagctcctgaaaaattgatccaaacttatatgtccatacagaacgctgattctttttggtgagctcggttaagggtgttgaaatttttgagaggccttctaggaaccgataataataaccggccagacctaagaaacttctaacttctatcac

SEQ ID NO: 366623 - DNA, 769 bp, Cannabis indica
ggttgatcggttaacacttttatgggtgagccttaatgtatggtcgtagcttgcgagacgcatggactaggcataacgcgagtttttctagaagagggatatctggattcttcccctagtaaccttttacttaagtagtaaataggttgctggtgcttgtcctcttcccgcacaataggtgtactaatcgcatctttcgagatggctaaataaagaaataacgtctctctagttattggtttggccaaaactggaggcattgcgagatgcctttttatgctctaaaaggcgtctttgcactcttttttctactcgaactgtttgttgccttgcaatatgttgaagaatggcacacacttatcagttgagttcgaaatgaatctattaagtgccgccaatcttcctgtcagggcctgtacccttaggctttgtcggggatgtcatgtctattaataccttaattttttcaggatttgcctgaatagccctcgtgttaagtatgaatcccacaaactttcccgaggagactccaaaggagacattttttttgggtttagcttcatgtaatacttttataatattttaaagcattccacgaggtctgaggtatgatccttactatttatcgagtcaccaacatatcatcaatgtaaacctccatgtttcgccctatttgtcttgcaaatatttcgtttactagtcgctgatatgttgccccagcgttcttcagtccgaacggctatgaatttataacaatagagtcctatgt

SEQ ID NO: 366624 - DNA, 996 bp, Cannabis indica
tttcttgactcgttcttgtcatgcggtagggttccatcctctaggtactgcattattggcgtcatccagttgtcttgttcattcatactttttacatcttcgttgggtttccatgtcgctggccattgcattatcaccacaggaatggtgactccatctttgatttgaatggatgagccgagattagcaagagcgtcggcgtggttgttctctagtctcggcacttggttaatggtgaattttgtgaatcttgaaatcttgtcttgaacaatctggagataggatgccatttttgaatctttggcctggtatgacccgttgagttggtttacgataagttgagaatctgacatgacttcaatggttttggcattcaactcaatggatagatctagcccagcgatcaacgcctcgtattcagcctcattgttggtaagtttgaagtcacatctgatcgcccgctggataacatctccttgaggggaggtaaggacgattcctaggccactccccttactattgcttgatccatctactgctagcatccatgtcgagttggtttgctcgtttaagcataataattccttttcagcttgtacctgtccaacacaagaaaagtcagcaataaaatctgccaatacctgtgacttgatggctgtcctcggttgatatgttatgtcgtattcactgagctcaacagcccatttggtcatgcgtccagaaagttccggtttgtgtagaatgctacggagtgggtattgggttagcaccactataggatgacactggaaatagggcctgagcttgcgtcctgctgtgacaagcgctaaggccaatttttccagctgagtgtatcttgtttcagcatctagcaatgtcttcgaaacgtagtaaatcggttgttgctttccttcatcttctcgaactagtgcggcgctgaccgctgcttctgaaactccagatacatgtacagcgtttctccatccttaggctttg

SEQ ID NO: 366625 - DNA, 736 bp, Cannabis indica
ctctcactattatgtaagtgttaattttaattttttggtattgccattaatagtattatatgtgatacacatattttttttattattaaatatgtttcttagaatttgagcctcatctgaggtggtgcttagagacatcaagagtaccctctatctcttatgattgattacactttttaagaagaagatgaataagttttatatttctttattgtcttaaattgaaactaggaaggactgtgttcctttcttgaaattttagaataaattatattaggagttcataagacttcgtttgataaacttgcaattgcaactagaagatcaattagaatcaatgtgaggggaacgaccaataaaggtgggggctaaggatgtgttgttctgctgacccacaaatggttgatgttttggagaacccaataacatttcaggttaacgatctgataggggcattaacagaacatcaagcacaactgaaaggattggttgaacagttttcacatgctcagagcaatagatcaccaacactagtagtgcaacttgaagcacataatataatttgcacctagctatgaatggaagcccaacatataggaagtagggatgacttagaataggagacgttatactagactgggacagtatagtttatgaaacccacttattaagaaggatgaaataatagatctttaaggagcaagtgctatcttgttggatattctataagttacac

SEQ ID NO: 366626 - DNA, 632 bp, Cannabis indica
aaaagagagaaggacttaagtataaaaaccatttcatactctcaacaatctcaaagcaaaataggttgtctggtcaaataaaaagtagagcacagacgaaaaagatacgcagtacgacggtcttcaccaaaatcatctcatcatagaaatcaaatgcaactaaaaactttaccaaaaactctgtcctaacatacaagtgaacaagtaaagtaaaatgtacccaggaaaacttacgtaaaggtcaagaactgggaagtgataatgattgacagtaaagtacaaactggcagcgacgaagaaacagcaataagaaatctatggtgtctggaattttctcagaggttcttaggttgaaatggcgaaatagtgaaagtaacccaatgtcgaaacaatgctggcttttatagaccagaaggggcgcaaggcagctgtgatcagacaccatcatacggtgagaatcgaaattgattcgcattctacgaatccaacaggtgagattaatgggtgtcagggcagttgaaaatgtttgagtactattctgacactcgaattaaatgcgccagtttttcaatggacgggaagcaaatcgttgcctgcaaaaggaaattgatattaatgatggccatcataaa

SEQ ID NO: 366627 - DNA, 523 bp, Cannabis indica
ccaagttccgatcccgatcttagtcttgattcacttctcggtctaactccttggttctgatcctggtctgggttcaaattacgtctgggtccgggtctagctttttgtctgattctaggtttgtgtgtttgagttcgggtctgagtttgtgtccgggtttgtgtccaggtctgaacctcgatctgggtctaggttcgggtccaggtccaagtttgggtcccgagtgcgggtccaagtttgggtctgggtgaggatctcagtccagatctaggtccagcatttcgatcccagtctgggtcttggtccgagtacagtttcgtatccggatccctatctaggtgcaagtctgtgtttgggatcgggtcccatatttaggtctaggtccaggtctcagttctcgtctgggtacacgacagtgtccgagctcgagttccaatctcaatttgggtctgagccaaggtctgtgttcggttctagatctgcgtccgggtcctggtcacggtcctagtcttgttctagggtc

SEQ ID NO: 366628 - DNA, 514 bp, Cannabis indica
gagagcgagcatgaagattgtccatgtcggggcggttaggcttagagagtatgatctttgggaaatcaaggctttttgctgtatagtcgcttggcgacaaaacttttgtatgtgaacaacaaactttttaaatgtactttgtacacgggatcccgagattttttatatttcatactttaagtttctaattagataagcaaattttaattaatcacatttttcgttaatctcgttgattagcaacgagctgcacagtacgtttaaaatcacgcaaacatgcctaaattagttagggtgttacatgtaaactttatttcttttcttgttaactttgtcaaaggcataacaatccgagagaaattctccacagagcgacgatagtagcctgccaacccaagaaaacttcgaacttcagtgacattctttggtctttcccactacagaatagagtctatctttgcaggatcaacggtgataccatcttagaaattacatggcccaagaatttgacttc

SEQ ID NO: 366629 - DNA, 723 bp, Cannabis indica
atgtgcttagtaaggaggagtttgagttgatttccatggtgtggtggtgggtgtggtatgataggaattctgtcttgttcgggcataaacaatcgcggttgtgtggaattgtcgagcttgcgcatgcgacattagttgaatttcatgggacgggtgtgggggttgagggggcggctttgaggagtggggttgttggtggttcggtcgtctctcgtagatggtgtcctccaatgcggggtgagtttgtgttgtctattgatgcggcagttactctgggtagggggtttgctgggtttgggggggttgttcgggggggggggggggatggtgaggtgtgggcggcctgggcggtgggtggggttggggagtttcaggttgcggttgctgagcttttggctatgcgtgttgggttgcggtgggcatctattatgctgggctacaggttggtgagagtggagactgattcttctgttgttaattcttggattacttttccgaattctaattttcagtataaacctattgttgaggagattatttctctcttagctgctgttggtggtggttcttgttgtgccatttcgcgtgttgcgaatggtgtggcccacgcactagcaaagtctgttactagttccgtaggggttgatttgtggacagatgcttgtcctaaatttattagtgctcctgtaacagctgatttgattttaatgaactacatcttcc

SEQ ID NO: 366630 - DNA, 580 bp, Cannabis indica
ggcatgcatgcaaacggtttcttcagatagtgtgcatggtgacacacgtgaatgacggttatcggaagttacgtatgtctatctgaagacatgcacatgggcttaagtaatctgttggaggatagatgcatggaatctaggcgagggcttggatggctgacacgcgggtgttagttattttgtcatatgctatgctaatgtgtaatgtgttggtgagtctagcatggcctaggcaattggggatgtcaaccgcaacctaataatggtgttatatagtaggctatgggcgctagagtcatcagtgtgtgatgtccagcgtgaacattgtgtaatccttgatattgtgtaaataacaaggttgggaaaagagtttcctgtatactgtgtgttcttatgcttgtgtatgcatttacttgatagcaatagtgtgttgttgagtaacgttgggtaaaagtgaaaccgtgagtgtgtgtgcatactaacgggttgttgggttggctgactagattcgagtgaatctaggccatcgcagggaaaaatttgagtgtgagaaattaaccttgtgacaactggtatcaga

SEQ ID NO: 366631 - DNA, 645 bp, Cannabis indica
ttcatcacagcaggcggctcaatccaacgagttcttcttcttcttgtttcttgctttgatggttgtaattgtaaaaggttttgtttctttcattaaaacttttaatgaaattttcttctaaaaaaggattttatatgcattgtatatatataattgaaagtttgaaaggccaaaacttattttcaaggtggtcttcctgggcaatttttcccattttattatgagccaattttatttagtaggtcttttgatgttctattatcatcatacaactttaatttttgtgtatttaatttcaggtaaatcctgatggaataaaattaaatggtatttttaaaaacaaaatattatttgggtccaaaaattcttcaatcgaatctggcccattaaaatctgaacccgccgtataaaacccagtgcacccgacccgaaacccgtatgaacctgaaaactgagaaaccgagttcagttaggcattttaatcacccgatacctgaaaacccaaacccgaccacccgaaaacctgaaaattcgacccgtgtgcagccctatacgctattaattatccattgttataatcccaataatcaatgatcctctatagatgatctacattgcatagggataaaattaccgttacaccct

SEQ ID NO: 366632 - DNA, 781 bp, Cannabis indica
tctctgttctagcccactttctttcagtgaaggacactctccctcaaatattttatccagcaatagaatgatggctcgtaccaagaaaacaacgcgtatggccggtgcgtctgatcctcgagtggctcggcatgccacttttccaagcgttgaacaggatccagccgtccaggaggagggggatcatgaaggggatgctgaggtccaggagattgaagagcaggaggatgttcgtcctagtagtccctcctaggcggaggaagaagaggagcttgaacccccaaactacgggggatacaacgaggctggggagccagtcgatgctgacagagatgtgctggttgagggcgtggacttcgtcagtgaggagcttattgccgcggttcctcacagaaggcaaggtgccttgggcgctaggtggttgagtcctccgtccagggttaccgaggaacgcctgcggactgtcgaccagggtggctaccttggcgaattggactgctacattcccgcccataataattgtgccgcaaaccctgacaaggggatgtgcgcttggtcgggcgctcatgctcagcaaggggcattgatgcctttgcaccaatactttaagaatgtggcagacttcttcggcctctgtctggcccagccaaggcctattgaacatgctatttgcattagggagcccctcttccctgcttggccgccttctcctatgctaaaaaaagggaaagctattattcctaaaatagaggcatgtcaggtgatgatggactttcgaggc

SEQ ID NO: 366633 - DNA, 644 bp, Cannabis indica
ggttcttaatgagttcttcagggctcgtttgaatgctatcttctgacttgtcagggttgtaagcctcgttgacgttagctggatgaagctataggaagtcttcccatagcgagacggacacctcgcttatttggtcttgagccgaaatgactgttgcacttagtttgtaccctaagggctttcacaattgatatgtgtcactttcgtcttcctatgtgtattgtccttcatgtctcgcattcagcgacacaagatttcttgctaatatactaagtgccagtttggtcgcctagaccttacagtcaacgggttacaaatgtattctgatacttatgtaattaatgagttattccataaaaagcgattcgatcgaatcacatttcctttatcctggcacttgtcctccattgagatggcagccgaatttcgagtataacaacagctactactcggatggaagttactaagaatataaacacttacaatgatacttatctttcgagattctatgaccttaaattgctaatgaacatccatctattacggatgaatctcactaaaataagaactatgtagaaccaacaatggagattgaatattcttacaataaagctcattatttaaagtgtattttcatctaatat

SEQ ID NO: 366634 - DNA, 545 bp, Cannabis indica
aaacttcttgtaagagaagcaatgctcttatgcaaagttagtttttaaaggaaactttgattattgcctttttccttattaattttgattgtgtcttgatacaatcagagtatacaaactgtttatggcaggaatcaagacacaatacaaaatcggacccgtttatagtaagtttccttttctggtctaatttgctgcgtcagattccgattctgatgctacagatcgagtttttcttaggaaagttttgtacagttgtagattcgatcttgtggctgtctctaaggtttctatgttctataaagagaacctagagagcatccattcgaatcaactattctagtattcattttttgcatttttcttatttgtgaggagagagtctttgttatgtgagaacctagttgttcatctaggttctagtgttttatatattagttcttactatgtcctagagtttattagaacgacttgactgaacaagagagtgttcttcgggagaagacttgttaaagccttacttcgggaggaagtaagcactcaca

SEQ ID NO: 366635 - DNA, 606 bp, Cannabis indica
aggggagcgagtcacccaaagattaattttcactcgccaaggaccgggaataggttgaaacacccaaaacaacaatttgagaagttaatacaatcacttcagacatatagatccagcagactccaacaattggtgtgatctaccccatgtcaacacatagtctccaccagccaacgaagaaggagtgaaaggcgaggcactgcctagtatagggctggtcaacctccaatataccctctcccaaagtagggtcggccagactttggtcaatctaaggctgcaactcaatcaagaagggccaattaaccaaacacccgcaataacaaattcttctgtgcaagcacagttggatcaaatacgagacatgcctatgggcctagctagtccaaaaccttaagaacttgagctaaacagatccagggggtcaccattcttagcatatataaaagccttactcctgccaaaattcaagatgtcgacttggatgatgtacacggggaaagaagatcccctagtacacctgaaatactttaagaccaaatggatctcaacaagtatctaaagatgtatgatgccaaaatttttctggcaactctagctgaaata

SEQ ID NO: 366636 - DNA, 1175 bp, Cannabis indica
cccctaccagctgcgatcagaattgacatctttgctgacagattgaagcaaacgtgtcgaaccattaatgcatcccttacaggtttgatctcttccctgaacaaatctacatgatgaaccctatttgattttaatcaccactgtcctttttcgtattttattagggtttttagtcttaattgatgtgtctacctacctagtcaggggctggatttggataatcccctgcctgatttcgatttttaattcttgcccttttttctatctttggaactcaagtgtacttcgagatatgaaaacttgttctacacttgtcttaattgttgtactaggaatttcctatttaagtaatgatctgttgtttcctctgcataccatgttttcgttccaaaaatctactatttccttgcttgattctattttgccaaatatggaagacttagctcgttctttttctgtagccgttcaactcactgatactgaaaacaccattcttccctcactgaccatgctaacccaaatgagggacttccacctgccccacctcagttccacctcatggttgttgtgctaaaattagatatacgcaagtgcacttagtcacaaacaagtaatacaatgataagtaacgatatcatctccacaaggactgtaaaaataaaatttctattgcaaaagttaattactaagcaaaatgcctaagaaccaaattgaaatgattcatgattcaactaaatgaacaagaaagtaagtaaattaactcaaaagtggatgcaagatgaaaataaaaatgagttgtaaactattgaaatgtgaaaggtttgaactattgaatccccttatgtttagcagaaaccgtgcgttttgctgctgcaaaactttagcaaaaatcctaggttaacaagaactccaataaagtgcataaaactcttccaaattttatgcaatcaatttttgaacctaatcaaaaaacatattcctatgacaatcaagctcaagaataccatttccaagcacagttctcaaatgttacacaaggatataacatattcctatattatctctaatctaatctaataagattaagaacttgtgtcatccaagttaagtccattacatttaacctttccagaattaaatataactcaacatcaagttattggtggccaatcaat

SEQ ID NO: 366637 - DNA, 885 bp, Cannabis indica
gaaaacgccccatgattggttttaccaatttgcctgaggcttcgatatcgacatgcgaaacttttgtcgacttattcctcacgcacttccaggccacgatgacctataggccaccttatacaaccctggccaacatcaaacaagaacccagtgagtctttacaagactagttttaaatggtttcatgcagaagtaacaaaagttgagaaggctcccgagtcttcccttgtttgtatgttgataacaagtattttgtcgaggaccgacttctggaaggagttacgagctcgaaggcgagaatcgctagtcgaattcttcgcaatggccgaaccccataagagaattgagaattctctggcatagttggagaagggcaaggacaagcgcaaatcaccaataccgcgatcaagatctcgcagtcccccagggaagaattccaggggccgaagcccgagaagacgcagcccacggagacagcgaagtccaaagtttgccaaatctcctcccaagaaggagtcctcgccgaaaaggaagggtggaccgcgttttgttaactataccgaactcccagtgccccgagaccacatctatgcaatcgaaggaaggaatggagtcttcaagaaatcgccccccatcaggggaaactgcgacagaagagaccccaaaaagttctgtaagtaccataaagatattggtcataccactttagaatgttgggtcttgcaagacgaaatcgaggagctgattcgataagtataagaagaatgaggaaggtcatccccgagcagatgacaaggaggaaaactaaaatgcaagtggttcgagaacgcctcgcaatattttaactatcatcggagggccccatatcgcaggagactcccgcaa

SEQ ID NO: 366638 - DNA, 609 bp, Cannabis indica
ctaggctcatctctatcaagtcagcactaactctctaccatctattctgatcggcatagacctaatccaccgtttggagataactaattctcctccaggtaatagggttccaaaccctgattcataactatcacacggtctatccaatttactaaagattctggctgccacataagaatgtgtagccccaaaatcaaacaaaactgagtaaaaagagttgttaactgagagctgacctgtcaccactgaagggctggcctctgcatcggcctgcgtgatggcgaacaccctagctagagcaagtctcgccggagaccttggtgcctctgttctgagctggggacaatccctctagtaatgtccgggcatgccacactgaaagcacccctgacctctgcactcacccagataatgccttttacaaatggaacactctgggtaggaatagcgggtctcagcactaccctaacgaccgccttgattctggttccctcggaacctcttgttctgccccgagccaccgaatgcagtggatgctttcctcttctggtccatggccaacccaatacctcccctgctaaagcctgatgcaggaggggtaggagcccc

SEQ ID NO: 366639 - DNA, 719 bp, Cannabis indica
aatgatatgatcatgccaagttatggcatggattgaaaccattattaggttttttcctagcggcgtagctgattaggtacgggcatcagtgacatataggtgcttagatatggcacgggcttgcttggttaggcgatgcaatacatggtgccatattgtggcataggctcatctgattagttgatgcatcgacattacgtatgatggtagattatgatacggaatttcctgattaggccatgcaatatatgattgcttttatttccatgcatataattggttatgttatccacttttgaatgttattacttactcattccatattagtgagataaataattggttattccatgtattagcttttattacttttctcgttgagtctttgtgactcatgggtgctatgtgatgcaggtaaaggcaaagaaaagctaaatcaaccatgaggtgacagtcttctctaacaatgtatatattaacccccaccaacctatgtgccgagtcgccatgagttgttttgggtcatatttgctatgtattttgatttttatgtttttaattaatgtcatatatagtcgttttgtaaaccttttataacagggatccttggaacatgtttttaatgtcgttacgatgcctatttttagtgttttattttagtcaagtttttaatatcatcacggtttttaataattaattaatctattagtattaagcta

SEQ ID NO: 366640 - DNA, 755 bp, Cannabis indica
ggtgttgtcataatagagcagtgctggagaagagtggttgatgccaaagtctttgaggagagtaaggatccaagtgagttcagaggtggcatttgccatggctcgatattcggcttcaacagaagatcgagagacggtttgttgtttttttgatttccatgacacaagagagctgccaagaaataggcaataaccagaaatcgatctccttgtgtcttgacaagtcccccaatcagcatcagaaaagaaggaaatctgaacatttgatggtgatagactagtttaagcataagcagagatagttggtgttgtgtttgatggaaaaaatagtccttgtccaggtgttgtttttaaatatcgtaagatgcgatgtgtagcttgaagatgtggaattcgaggacaagttaagaattgactaagattgttgacaacatatgagatgtcaggtctcgtaattattaagtatattaacttgccaatgaggcttcaaaaaatcgtggtgtcttgaagaaggttccctttgtctttgcttagttttaagtttgtttccatgggagtagaggctggcttagcacctatgtataccatgtccttgagtaatttgatggtaaagggtctttgggagaccaagagcctttttttgttctaccaacttcaagaccaaggaaaaactgaatggttccaaggtctttgagtttgaatttgtcatggagatatgttttaaagtgagagatggcattgtcattgttgctagc

SEQ ID NO: 366641 - DNA, 610 bp, Cannabis indica
acgatattgacacataagaggatgctacaccactgttgccttttagcatttctctaatactattggtgttgacgtcgtattttgaaaacaaataataattagaaattgaatgtgcacccttaacaatatgtataaaactctattatacttttattcgtaattatctaataaaagtaatggtctatattataattatttaataaaatttgtcaaatttgaagtaatttataatgaacattaccatgatatattggataatagttgatataaaatatttttgatatatttattaactattatcatatttttgaagtgagagagatgaataatagtaatgttaaataattgactgtcgaaatatcaacaatgaacatttagcaattcccatcagggcaaccgaagtgcataatgcattttaccagattaatccgctaaaggcccctaacaaggacgagttttatggcttgtttttccagtaacatttagatattattggataatataataatatgatatagaggatgttagaaaaattaataatataccaaaaatctatttgtatataacattgaacacaatagtaatatataataattaggtatatgtacct

SEQ ID NO: 366642 - DNA, 507 bp, Cannabis indica
cattattagaaccttaactaatgctagatatcttcttgatttatctagaaacttaatttctattagtgtacttgatgatcttggtgttgttagtaaaattgaggcaggtacaatcaagttggccaaggggtctatgactatcatcaaagggcacaaaaatgatggtctatactacttgtaaggaagccccgtagcttgctgccacaacactaaagagcatgttacagaagacactaaggctgtcctatggcatagaaggttgggacatattagtgaaagagggctacaacttatgattgaacaaaagctacttggtaaggacaaggtaaccaaggtatatttttgtgtattttgtgtactaagaaagcatcatagacttaaatttcaaactggcacacacaaatcacaaggtatcttagattatgttcactcagatttgtggggtcctgagaaaccctaactttgggggtagtgctatttcttatctattgttgatgattattctag

SEQ ID NO: 366643 - DNA, 497 bp, Cannabis indica
cactcgattattttgatttcccatatttgctttcaagacgggaagtcgaggcgtctaaggtccctttatgtacagttacccttttgcctataaatacttggagtactagcacattacctcatttcatcacccttcgttgttaagcaaaattcagagtgaaaagagagaacttttttgcttcgaagttgttgaagagcttacggacaatttctggcattgcttgaacccgggcactcgaatctttgagtaagttttttattccctttatgcttttcttttgcatggttatgctttgaatgcaacttcattgtagaaagaacactgtaggaaaccctagggtttgaaacttctgcgactcttcttttccatgtccttgtgttagctttcagccgtaaggcttattttagaactgcattgcgtctgttttccatcttgctttttcaaagcttaataaacttttttgacctaactcaagaaaaactttctgacttcttgag

SEQ ID NO: 366644 - DNA, 621 bp, Cannabis indica
ttttaactattaaaaaaaatattaagaaataatccacatcaattggactaattaatgtaaaattggatgcaaacacaaaataaaaaatactctatgagagaaaattaaatcactaatatatatatatatatttgttagtttgtgtaaatttcttaaagaacaataattaatatgtgtcttgatggaaacgggttcacaatccatgtggcacctgggcattggtctttgggcctgagccatgtggatcgagagccccatttcaagggagattcataaaggtaacgtttggtaatatttttttcataagttttttgtttttaaaagtagaaatatttcaagggagattcacctgggattgtcgcccgaaatagctctggcgggctcatcgaggctaaatctaagtacttcggcggggtctatgatgcagaagtcgttgaagcaatgggagtcaaagaagctctgagctggataaagagcaacaattggtctgatgttgagattgagacagacagtatgctcacagtgcaaggcattcgtagtaatcactttgtgaattctatttttggtttgattattcatgatttgccaaattttactttcttctctcaataatgttaggat

SEQ ID NO: 366645 - DNA, 459 bp, Cannabis indica
agaggaagaagagactcccagcctcgcccatggaaagctgtcatgtctgagataagatcaatgtcaggtgatgatggacttttgagtcttgttcgggcggtcaccttgcattttactttatcttgtttttgagcttcttgattttcatgccgtgtgtttttgatggctgtcttctaaccatactatttttgttctgtgcagacatgtctcggcagatgctcgacgctctgaggaagagaatgagcagaagctttagcgccactcctccggccaagaagtctaagggcagtgaggggtcctcttcaaaggaaaagatgccttccggggaggtcattgatctttctgaggagctgactgctgcaaacgcctctacccccaaagttgccaagtccaaggagtctggaccaccaacggctgggtctgaactgatcaggagtgtgctggaaattattttaccag

SEQ ID NO: 366646 - DNA, 524 bp, Cannabis indica
taaaatttcaaacgttatgattttatagtgttgactagatctttcgccaacttgatatataaagaaatatattaatggttaataattaatagtaaataaaagaaaggtgtttacctgattcagtctataatggaaccctagtccaggaatctattgtgttggtaatgaagaagatgaaattccctcttaatactaaaaagaggacccttttacatctggtgccctagccctagttataaaggcaaaggggcttctaggctaaacccctggtagactgttccttagattattttatcacatgatgcgtcacacaatacatagattgggcctatgaggtctgttacagtagagtaaaaagccaaataataatttcccatgctcatctattaggcgcatgaacaatgtaaggctgatgttagtaaccgtcatgaggctgcatggaatgttagcgaagcgcatctcaaagaataattccctttttcgtgggaaatctgtattgaatgtgcaactcgacaagacacttt

SEQ ID NO: 366647 - DNA, 801 bp, Cannabis indica
agagagagagagacttatttgaagaagaagggaaagaaaaaacttaaataatgagaagaagctacaccaccacacttgacacttcaatcataagaaacaaaaatcccaaaaacaaaattaaattttaattgttagcaaagaaaacaaaaagcatttacaggagtatcaaaccatcaaaatccaacgtcttcaatggtaaattccagaaagaacttccctttaaaaaaaattaacactttccatccaaacaaacaagcttacgaagttacaacaaccatgaaccagaaaataaaatagagagagatgaaagagacgaaccagcaaaaaagaaatgaaattgattggaattatggagatctcgcggtcctaaattgggttttggtcgccaggatcaatgagagtgagagaaagagaaagactcaacctttgagagagtggtgtggagatcttcgaatgggagagtgggaaatggggcttaaatatccaatcccagctctccctaccaaaaaaaaaaataaaaaaaatctgaaacaatgaatagagagattggattagagaagaaagaagagccccctaattgaattgagcccccaaacaagaaaggtgtgaaattggattatgggagataatagaaagtttaaggtgaaatgattatgattaatattattcctggcaagaaaacgacagagtaactacgaaaacgaatgtcgtttttcaactgtaagtaaaggtaggtaggtcgtgtggaggtggcgggtaaagaataaagaaaataacaatttgcggcaaaatcctcttatg

SEQ ID NO: 366648 - DNA, 786 bp, Cannabis indica
aaaggcaaaaaagaaaaactagatcaaccatgaggtgacagtcttctccagcaatgtacatattgacctcaccgacctgcgtgctgggttgccaagaattattttgggctatatctactgtgtattttgattttaagcttttaaggcgtcgtcgtatttagttcttttgtaaaaaaaattataacatggatccttggaacacgctttttatgtctttataatgtccatttttagtgttttgttttagttaagtttttaatattatcatgatttttaataattaatctatcagtattaaactagtttataaaattacacatgtggcatccctatagattagggcgttacacttgattacatagaacgctatataccaattatagatacactatgaattacctattgttacaacctagacaatcaaggatcatctatatacattacatcgagtagggacatatttattgtttatcctttgatgtattttatccttaaagcacttagctacttgtaaatgatattttaataaactaatataattattaaaatgagcgctctatgtatcatttatcgcatttagctaaactttaaggaaaccatcgtttcacttccaaatagttacagaagctataaaattcaatatctataattaaagctcccaattaattacactttcgaattttctgttgaaaattattttaccaggatcttagatctactcacaagcatgttgatttacaccctaaatatgaactttctaaagcgatgaaataaacacatataaag

SEQ ID NO: 366649 - DNA, 685 bp, Cannabis indica
gattttgatgatacatcacattccttcagtaaattttaagcctctttccatagcaaaaccgaaccacatcttctcttttcttcttcaatttttcattcccttgagtgatagagtgagtgcccacacacatcaagtggtatctcaatcatagtgtggaagattgtgaagaatcaatcaacaagaaggagaatcaagctcaaggagagaaagatatccaggttcagatcttgataatgctctgctacagaaaggaatcaagggctagagatctgaacggaatgagtcattacattccgctgcacccaatgtaaggtttcttaaactttatatgtgtttatttacattgttttagaattcatattaggatgttaatgaaacatacttgttagtaaacctagatcctggtaaaatatttccaacactctccacaccagatcttcttcatttggtttagtacccttaacaactaatataccatccacctctaagaacaccaatttccatcctatggtcactaggtccaaactaggcattacaaaccaaaaacatttctttcatatgccaataatgtacaagaaccaacttctctcaaagaagctcttgccaatccaaaatagaatgctccaataaacactgagatgactacattaaagaaaaagaaaacatggactcttgttcctagaac

SEQ ID NO: 366650 - DNA, 901 bp, Cannabis indica
cgacatatagcccgtttactaccacgaccgcagtgtgactaattgggcgacatcagccatttgtaggccgtgcaaccccacccaacccaacccgtatgtatactaataataataataataataataataataataataataataataataataataataataataataagggggctattatagtagggattgggtattttacctataaataggaatagtaatttatagcccttgatttaatctaatgaatcaaattacctcttgaaaactacaccataattaatatatatatatatttatttataattaatcttgaatattattaattgtaggttcaactaaaaaactccaaacttaattttttttatctttttattttatttctatttaaaatttagttttaattatatatttttttatttcaaatttacataaaaaaatatattttaattaaatttatttttaaaacaataattatacttataaaaaactacaaattcaacttataataattttataataatcactcttaaaataattaaaatgtcatgagttcaatattttagaagtaatatttctttttcttttctttacttatatttaatttaagattttaattaatttaatagtttttaaattctatcatattatattaattaattttatttttcaagattataatatttagtgtatttaaaatttttagatataaaattaattatttacataaattacattatttataaaatcatgcatgaactagtaaataatatacattcatagtatccttcttcttcaacttagttcaaggtaaatgttcaaggcaagtagggaacataataacggttctagtttatagttattatttttcatggttgtcccatgttgatcaaaccaagta

SEQ ID NO: 366651 - DNA, 423 bp, Cannabis indica
gtttcgacctacaaaaagtaactgatctaattcaattcgcacttaattatatattaatttttaaaaattataatatataatatatatttaatttttagtaatattaaaaaaagagacaaacttcttaattttttaatttttttagtaatatattgagttagtgtattttatttgttttataataaaaaataccagaaaatattataaaaatctcctcttttaacatatatttgatcatttgaatatttttctgcctatattttttctcttgtcttttttattttttttaattttttgtcctaatttttttttagttttttttttcttattagtaaataatagtataaaaaattatacgagcttaagtgatatataatttgatgatatagtaataatttaaaaagaaaacaaagttgaatatta

SEQ ID NO: 366652 - DNA, 808 bp, Cannabis indica
aagacctgaaagccatgttctggtggccaggcatgaagagcgacattgctgagtatattacaaagtgccttacgtgtcagcaagttaaggttgagcatcagcgacctgcagggttgctgcagctactgaacataccagagtgaaaatgggaggacattgctatggacttcgtggtaggtatgcctagaaccacaggacagtttgactctgtgtgggtcatagtggacaagtttacaaagtcagcgcacttcttacctgttcggacaaatttctccattgaccagtatactgagttatatgtcagagaaattgttcgtcttcatggtgtcccaaagtccattgtttcggatagagatccgaagtttacatcgagattctgggagagtctgcatcgagctatgggtactcagttaaagttcaacacaacctttcatcctcaaatggatggacaatccgagagaacgatacaaattctagaagacatgctacgggcatgtgtgcttgactttgagggatcatgggtaaagtaccttctcctaatcgagttctcttataacaacagctaccaagccacaatcgggatggccccttatgaacttttatatggaagaaagtgtagatcacccattcactgggatgaagtgggtgaaagaaagttcttgggtcccgaggctgttcaaaaaacatgtgaggcagtttacaagattagagcgcgaatgctcgcaactcaaagtagacagaagagttatgctgatccaaagcgtcaggatattgatttccaggtcagggactgttggaaattatttta

SEQ ID NO: 366653 - DNA, 523 bp, Cannabis indica
ttttcaatattatacctaaaattaattttatttataaaaataccttgaacaaatttatttgcacaaataccgattgccacgtcagcataaataccgaaatttaaaattattaccgaaaataggaaaaactggaaaattcccgtttccagaaatttcagtgttttgcaagttttaaaaagagtaactttttggttgcttttgatgtaaataatatatcaattagttactatttatttaaaaaaattgtttcaagataattttcttctcatatacgtttagttacttattttaatcagataactttaaaattatgattttatttattaatttttaagctatgtgttattttattatttaagatactttgaggttaccttttcgttttagcaattttaaaccatattttaaattatgagaaacatatatattgttttagatataaaaaaatatgaacaagttaacagtaacattttcctttcttttataaattattaacaaagaagtaactaaatattatatttga

SEQ ID NO: 366654 - DNA, 749 bp, Cannabis indica
acattttattttagtttgataaaataaataaatggaacttcaaaataatatttggggcgagatatcacaaatatataacatacgaaaaagttgtgctccattattatgattaaagttatgcattattaggatatgatgagtatcctaatatccttaattaagaattagaaaaaccaattgcttttatttgaaaccttatctcacctgctccatccaccctaatgccttattcatttaaaattgtaattaatatattatgtattatttgatgtgacactccttttttttaaaaaaaaaaaaatataaataaaaataaattcattcttctttttttttttttttccaagatctggaatatatgaaaaaaccaataatacaatacaaacaccgtaaacttttggtaacaatcatttttgatgagttctttcattttctttaataatcagcataaataatctaaaggcaccacgtttctaaaactttttttatcctaattattttaagacttttacattttccaaaaatccatgcatatactttattagtttgcaaaaacaaaaagaaatttgcatcttcgatatgattaatgattcttgttgttgaaagaatttcacaacaccaaataaataaaagcaataataattataatagtaatataatgaataagtgcgagtattcaacttagaatgacgagcattcaaactgggaacacaaatacttaatgaaaactggaaatactaagaacacga

SEQ ID NO: 366655 - DNA, 575 bp, Cannabis indica
gacagatgcaccatgttagaaagagatagaggtcaaacgtatatgctactagtttggtggcttgtctcgagggcctaccaacatgtgtagaggcatggtgccttgaggattggaccatggacatatgagagtccttgggcgatgagggatattattcagacagtatcaaatggggcatgattagaagcgttggcacgtcagcttagtgttggcatcttgccacacatgctaccttggtcacgagtgactaagtgagcgttagtgctgggattttccttatcatagtaggaacatatggacagtgcaagtatcttggctagagagcttcgattcatggatgaaatcatggatgcttgtgagcatgactcgataggagttatttgagagatggaagtgtgtacaaggcatacggtcgcgtgaaaaatgagcccattattactcagatagttggaaggctgaccttggcttagaaaagtcaaggtgccacacatgtgttccactgcctgaaaatgtaaccccgtgacaattggtatgagagccaagtttatctcattgggaggtgaacctggttggcc

SEQ ID NO: 366656 - DNA, 541 bp, Cannabis indica
ctaatcggagcatcgttggattcttatttaaaacgaaattaatcaattataattctaaaagttagactatatctactttatgaattttcactaagcaagggcgaaattgtaaagaaaagagattccaggtttatttattaattaagatacctcaaaaatgagatcgagaacttgattcgattgggccatctttacgagtggattaagaaccggttgcctcatctcaacccggttcaggcagcaggacctttgccccaaggagcaccagggggtgtgctcggagcattggcaccagtcgccccccagaggaacctcaacaaattcctggcctgccaccaagacccaatggaagagtagctatgatctctagaggaccccatatcggagggactactcgaaaggaactaaaacgttacgctggggctgtaaaacatagtgaggtttgggaagttactcagctcccagctgaaaggctccgactaatggatcaacccattacgttcacaaaagaagatgcaaagacagtgcattttcctcatca

SEQ ID NO: 366657 - DNA, 693 bp, Cannabis indica
acacatgaaggtacaactgatttaagcacctatcaacttgctagagacagggtgagaagagaaactagaccaccagacaagtttggatatgttaatttcatagcatatgcattgatcactgcagaggaattagaatcttcagaaccaactagctaccttgaggctactacatgcagaaacaggttaaaatggctgaaagctattgatgaagagatgacttcacttaagaagaataaaacatggatagtggtcaagaagcctgaaggaaagaaattggtaggctgcaaatggatttttaaacagaaggaaggcatccctggtgttgaaccaatcaagttcaaggcaagactagtagcaaaaggattcactcagcaagaaggagtggattttaatgagattttttctctagttgtcaagcaaacttcaattagggtcatgatggcaaaagctgctaaagaagaactgcatattgagcaaatggatgtaaggactgccttcttacatgggaaccttgatgaggaaatatacatgcaacttccagaagggtatgaaagcaaggatcctaatcaggtttgtttacttaagaaatctctctatggtaaaaagcaagcacctaggcaatggaatttaagatttgatgaatacatgaagaaaatagggtatgtgaaaagcaactatgatccatgcatctat

SEQ ID NO: 366658 - DNA, 418 bp, Cannabis indica
gtcaaaactttggtgaatggttcagctaaattgtctttagtgtctaccttctccatcagtacatcccctcttaccacatattctctgatgatgtgatatttcctctccatgtgtttgcttctcttatggcttcaaggctctttactattggccatggctccagtgttatgacaaagtaaaactagtgatttttccattccatgaacaacaccaagtcctgtgaagaacattctaagccagacaagttccttagcagcgtctgcgccagctatgtactcggcctccatggtagagtctgacattgcagtttgtttagcacttctccaaacaactgctccaacccgaagagtaaacaccatcctagatgtagactttctgtcatcaagacaagcctgaaaatctgaatcaatatagccta

SEQ ID NO: 366659 - DNA, 762 bp, Cannabis indica
tacatcttccatcagcattttaaacttgtggggccacgacaggagattgatctcaggtgagaaaggagttccgtgtgctcagttgagctcaagatcattgtctctttgtccagccatgccgtgaaacatattttttagttcgtctagctgtgcctgtacggctgggctaacctgctcaacattctggtcaatttaaattacatcagcatctttctgagcgagaatttgagtacgggttgccggctacgagattgtcgtaaaacattttgatcgtctactccccttcttctattcagatcattccttaggtcatgggtcgctcccaacctttcgaatacagaagtgcctggctgcctcaacgattgattcgcttggttgacgggtggaatggcaccatttacctagttggaaccatcaggtatgccttctcttgatgaataactagacaaggtcttcccgcctagtgcttggcccacgagtggagctcgtgaccggcgattgggcggctgaccatttgcagtttgagaagtattcatcactggatcttcgtctgtctcacccaggggaatgacgttcggcggttgctgacctacagtttggtaggcatttcgtattagcacggtagcctgccgactacaattttcgatctctgcatggtgagcccttaatgtcttcatctctctatccctccattcggcaaacatacgcctttgttcgtcgaacggagatttactgcagtgcggagttcgtcctgatcatgat

SEQ ID NO: 366660 - DNA, 1020 bp, Cannabis indica
aattgtactcaaaaaaaaaaatagcaattaatttatccaattgaaagtgacggttttatgatttatttttcccccacatatgattcacctacaaaaggtatttattcccattaaagcatttttgaagctttaatttggtcgctgtcatcaaaggatattatatattaattgcaaaaccagcttctgaaattacatagaaaaatataaagcatcaataatatattttaagatgcttgacctcacaattagtttttaatcagcaaaataaaactaaagaatattgccaactatggcactaatttttgtctattcggcctaattgacttgcaacacaatggcaacactgttggaaatggaatagttctcaattcattttttttggtaattttattttgtatttcgaaaaaaaaaatgtaatttcaatattttttatatatattgtaattatctaatataattataatataattgactggcaacacaatggcaacactatattacaattttttttttaattcttgaattaatttacaatattaaaaatttagttgaaaaaataatcaatatacattttcctctattatattttccataatttttttttattttttttttaaataaaacttcttccatttccaatccccaaatccaactttaatagatatttttcctaaaaagaaattaaaataaataggccactataaatttttagcttcttgacatatatcaagttatcttcttcaatttttttaaaaaattctcttaaattattgagattgttaaatttaataatgtttatctcattctttttaaattttactgacataaaaattatccttctattaaattgtgtccttcaaattttaatatttatcatatagtatatgtaataaattatattctctaaactttcatttaatctcaaaagtctaaaagactttaaccacttaatttttttttttggctaattatcaattttctccctgaacttgacatataccaaattatgcccctgaattt

SEQ ID NO: 366661 - DNA, 843 bp, Cannabis indica
gatctcttttatgcctcgcgtgcctcatgggctcaggtttactaaatgcaaccttgtgctcataaacgagataaatgttttctcgagtttcattaagctcagtgtaaatggtgtaaatcagcacgtacttgtcgtgcttcgtttgttcctttttgtctttagctgaacccttagagtcgtctttcctctttgacccagaagcccctgggttattagcttttgtcgagacagtacttgttgaaataatactgggtttgcttcttgagctagtttttaacaaattcatctcttttcgagcttcttcctttcaaacaaacacgtgagccctctcgttgaacttagtgatatttttcagtgcacgaccctgtaggtcgtcccacagttcgcctccaatagtggagagattagtagtgatcccttcctaaagggcagtaagctgggtactatcatccaaattctttactctcgcagtagccatgctaaagcgacttaagtctgccttaagtgtctcgccagactgttactttatggttgtgagtgaggacgctttggatcgcctatcccttacagcctggaactgtcttttgaagtccttagacaactgttcccaggaagtgatggaatgatgagtaaacttattgaacaagttgcttgctgctccaactagtgaggtgtgatacaaaatacaacgtagtttgtttgtaacattgctagctcgcattatagtattaaagttattcaaatgcgagaccggatcaattgtcccgttagatgacgagacgtgggggtttttaaatccttggggaaaaggagtattaatgatgtctggatggtatggctcga

SEQ ID NO: 366662 - DNA, 871 bp, Cannabis indica
tgatgtattgttgtaatttttttaaaatttttggtctgtaaatttttctaatttatttatcaaataagaataaaaaaaaattcaagaagataataagataaaaattgtttcttttttagtgtattattattattatgggcactaaatttttcattttcctttgttaaaataaataaaataaaaaagcccttgaaagagaagaagagtccactccacgtggttggaaatactctctctcctctctctctcttcttctttctctctctaaagtggcgcgtagaaagctaaggactgagaaaaaatggcttatttttatacatacatagtactctctcttcttctcttactaataagtttatgctatatatatacaacaagaggccattgttagtttcatgtctcttttcttagttttattttagtttctcaaaaaaccaaacaactcaacaacttcctctgtatagaacaagagaaatcccttcttcaaatcaaaactctttttatctatttttttctttcatttatccaaaacccaataactcaaaaatcttcaaaccaataaactcggaggatctttactattaataccatcccatatatcctcatttttttcttcttgttaaaaaggtaatgttattatcaatgacttcttcttcttgtttttgaacatatttctttgctttcctctgttcttgtttagttttcaacagatacaaatggaatggtaataaaaaaatggattttttaatgtatgttttgttggttttgtattggttttgttcacttgtttgaatgaaatgggtcttcttgggtcttttactttttgcttcttctttaaacttggtaaaagtgttggtatgtttttttttaa

SEQ ID NO: 366663 - DNA, 656 bp, Cannabis indica
aaataaacataacataacattaattcccaattactaagtccactaaaggacaaaatatcaatgggacaaaatgactattttgcccctccacactaaaataacataaagggtactaaaggggtatttcgggaaattctaaattcccaactaatctcgacattcccaatgtctaataaactgccccaatatactaacataagttgtgattctactgagccaaacaccgagtgccatgttgtcgggcaccgaaaatgtaaaattatgaaatttcactatatgacataaaatgcgtttcagaattaaaaaataacagcataaataattacttaaatatctataaataattttccataattaaatcataattaactgctaatttccaaatttaactaagcggtcttgacatgatcactctttttcacatttgatgttggctaattttttagggttgcggtggtacggtcaccatgggtggtggtgtggtggtggtgtgcgatgttggtggtgcggtggtgatggtgtagtggtggtggtgcggtggtttaaacttgttgattttgagtttaaatggtaattcaaatatttatagatgtggtggtgtaagatctacaatagtatggtggtggtgcgatgattctgatttttttttaaaaaaa

SEQ ID NO: 366664 - DNA, 538 bp, Cannabis indica
tagttgaccatcactctcacatttatttttttcatgtttaatgctaactttaagattaactcaaatacatattgaaatacataatcttattataaagacattttctcagtatagtgtacttgatttgattcaagatttgcaccttgcgagaaaatttgttagttattcttttaaatactacttattgacatattctggggtaaaacttttgtgaagttgtggttgactttttctaagcagaatatatgcgtaaaggcagacaagtctcaaagtactttgcccaacaacaaactatttccttaacaacactataagaacactctaaaaagaaagtgatcactttttatagaattcaaatactcctttaaatattatatttaaaaattatccaccaactccatggctatcataaaatattttattggatgtttatgatcaacaaataaaaagatcacacgaccaattagaacaggcaataagttgcaaaacaactccaaaatagatttgttatgtacttgatgacgacacatcgtctgat

SEQ ID NO: 366665 - DNA, 529 bp, Cannabis indica
ttcttttccttgggtaataaaaatttcactaatttaggttggttttggatgagggttttgggattttgtggctgtaggtttagtttgggttgagatggtgtttttaggtctattttggagtgtgttgaagtttgaatccagttattttaatggctgtttagattgaatgtatttgattaagcaatttgagcttaattttcatttgagatggtgaatttgagctaattgatgaattgtgattaattgatgtgttggacatgttgtatttggtatattgaactgttctgcaaatgcaatttaggtctgtaatggttttggttcgagctggggaacaaaacccagaaatgttctggtctgacagcaaccggtcgaccggttaccagaaggggaaaatttctcgggttttctccgaacccagttttgactcggggtagaacctagtacctgcctttgattgtttttgagttatttgagctattttaaagttgtttaaggcaaagtctaatcggttttaaattagggttttaat

SEQ ID NO: 366666 - DNA, 634 bp, Cannabis indica
caccatacttgtgagtagatataagatcttggtaaaataatttccaacaaactcctcatcgtagtgggagggtttccacaaaaccatttcggtatggcttagatggtgaaatcaatatggttattggtgacggtattgatgatgatctattaacctataaacaggcaatggcaagtccggaacgaaaacaatggtcaactggcatggattcagtaatggattccatgaaaaagaactaagttcgggaatatgtagacgcacccgatgactatcgtccaattagatgtaagtgggtctacaagaagaaaagaggcgctggaggcgaagtcaaaacttttaaagctagacttgtcgccaagggttatacccaaagagaaggcgtggactatgaggaaacttttagtccggtcgccatgctcaaatccatccgaattcttctctccatagcagccgctttcgattatgaaatggcaaatggatgtcaagacagccttccttaacggaattcttgaagaaaccatctatatggagcaaccagaaggctatgttcttccagggcaggaaaagaaagtttgcaactcaataggtccatttatggaattaagcaagcttctcgctcctggaacaaaaggtt

SEQ ID NO: 366667 - DNA, 705 bp, Cannabis indica
cccaggtctaggtctgggttcgggtttagttctttgtttgggttcttgtccgagtctaactcccagatctagacaccgactactggactgttccaggccccgttacccaaatcctgagtcaagatctgggccactgtcacgggtttcggtatggttctggttaaggtcccaagtcccatttttgagtttgggtacgggatcgagactggggtgctattctaggtcccaacactggttttgtgtccatagtctggtgccatgtttgggtctgagttcaagttcgggtttgggtcccgagttcaggtttgggttgggatctgggtccggctcccaattcgggtctaggtctgattgggagtcagggtcctggtccggttacggttcaggatctaggtcaaatttcaattatgattcaaagtccaagtcctagttccagtcctggtcaactttcagttttggttccaattttgggtcatagggtacgggcttgggtccactttttgtatgaggactaggttcaggtccgagtgtgggttcgggtccttgtcaaggttcgggtcaaggcctagatcccaaatgcaaacaccgactacgtgttttgtccaagccctgggtccagatctggatccaaatctcaagtcctagtccggttccatttctggtgccgggtcacgagctgggtcctaggttcaagttcgggtctgg

SEQ ID NO: 366668 - DNA, 1084 bp, Cannabis indica
caagccccatttctaggatctcaagtcaagatttggatccctcacgggtcccagtgtggttctggttctggttcaggtcttaggtcctaggtctgagtttgggtttaggattgagactggggtgcggttctaggtcccggccactattttgtgtcccgagtctggttctacgtttgggtaggagtttggttgcgggtttgggtcccgaatctaggtctggattgggatccaggtctgggtcccagttcgcgtttaggtttgagttggagtctggttcctggtctggttacggtttcgagtctaggtctaggtccggttacgattctaggtccatgtcctagttttggtccaattctcgggtcctggtctacttccagtttcggttctaattttgggtcacagcgtacgagttcgggtctaggtttgggtctgggactgggttcaagtctgggtctgggttcgtgtccttgtctgggttcaggtccggggttggttaccagatgcagacagcggctatgagttcggttcaagcattgggtccagatccgaatcacaatcttcggtcccagtttggttccatttcgggtgctgagtcacgagctgggtcctaggttcaagtccgagtcgggggtcgggtactaggtcccggtccttgttccggttcttaggcctctatcccaattctatgtcacagtcccagttctggtttgggtttttgtcctagtctatgttcgggtttgagtccaagtcttggttcaggtttgggtctcggtctgggtttttatctgggttcggattcgggtttaggtcttggtcttggtccgagtcctagtccgattctagttctagttgtgattcagagtttgagtttggattcgagttcgggtcggggttcaatccctggtctgagtgtgggttcgggtctggatttttgtctaggtctggatcaggctccgggtgtgggttcgggtccttggtgtgggtccaggtccaggttcaagtcccaagttttgaactcgatctatgtctgggttcaattctaggtgtaagtcctgggttctgatctctgtctgtgttcgagttc

SEQ ID NO: 366669 - DNA, 1046 bp, Cannabis indica
tgtgcacaggttggcagtatcaaaagatgctacccctgttaaacaatctcaaagaaggattcgaccagaattacttcccaaagtcgaggcagaaattgacaagttaagagactgccggtttattcgggaagttcagtatcctacttggcttgcaaacatcgtcatagtgatgaagaaaaatgggcaactccgcatatgcgtggattatcgagatcttaatcgggcttgcccaaaagatgaattcccactccccatcactgagttattgatagatgctaccactggttttgatgccttatcattcatggatggattttctgggtacaaccaaatcaaaatggcacacgaggacgaagagctcactgcttttcggacaccaaaaggcatattttgttatacagttatgccatttggcctcaagaatgcaggggcaacctaccaaagagcaatgaccacaatttttgaagacatgatgcacaatactgtcgaatgttatgtcgacgatctagtggtcaaaacaaaagaaaggacaaatcatcttgatgatttaaaacgagtctttgacaggctcaggcaacacaatctcaagatgaatcctttaaaatgtgcatttggggtaacatcgggaaagttcctcgggtttatcgtcagacatcgaggaattgaaatcgaccctgcaaagatcaaagcaattttggaaatgcctcccccgcgtaatttacgtcaactacgtggactacagggaaaacttgcgtatattcgaagattcatctcaaacctgtctggtagatgtcaacctttttcgagattgatgcagaaaaatgtcccatttatttgggatgaggcatgccaaaatgcttttgaaagcattaaaaagtacctgttgcacccaccagtgttgagagctccaatcttaggaaagccattgatattatatatcacttcactcgaccgctccttgggagccatgctggcacaaaacaatgaggagggaaaagaagttgctctttactacctaagtagaactttagtaggggcagaacaaa

SEQ ID NO: 366670 - DNA, 1159 bp, Cannabis indica
ggaaaattactaaccgttgatgctttttatgaagcttgtaaattggttagagctaccgttgttcctgaagatggcacttcaagtcctgcttataggtcaagcttggctgtgggtttctttttgagttctttaggtcctttattgatactacagctgaaactactgatgggttgttggggaaatgtagtgattctgtgttggccaaggatctgaagttgggagagaatcaaatttctttcaaatctgacgaaactctgctatcatctgggaagcagtttattcaaacaagttcagaatattaccctgttggcaagccaatttcaaaatctggagcagccctccaagcttctggtttgtattctgggatgaaacatcactaaatttttgcttaagacttgcatagttgctttgaaagcttcaaaataagaaaaaaaaaagaaatacttattgaattgcatatgttatatctctcctcttttctttttcccttgatattacttgcactaatgttggacttaatttattatgtgaatgatctctacagcacctccctctatagttctgcatgttccagtacatgttttaatagacttccatagctgttttttaatctattattttatgtcaatggagaaatcttatcttgtttgaaacatgaagttgaaaatttaaggaattcaacaattcatatttatccatcattcaaggtcattcagtatttagtgttatgcatatctatgtgaatgacagtcatctctttgtccgcttgagtgtcaagaaaactacagtccggtgtgtctttgttcctctaatgtttcttgtgattacttctaattgaattgcttcaagatatttcttcctttttcttaacagctaattcgtctcatttatgttgataatctgcataggggaggctgtatatgtagatgacattccttcaccaccaaattgtttgtatggggcattcgtttatacgacagaaccttttgcacgagtgaagaatataacattcaagcctgatcaacagctcagtagagtagttgatgttatatctgttaaagatttccctgaaggtggtgagaacattggatccaagaccttgtttggtactgaacctttatttgctgatgatctcactgagtgtgctggtcagcgtcta

SEQ ID NO: 366671 - DNA, 411 bp, Cannabis indica
ctatagattttcgttaaaattgtagattcaatgtactcctgcaacacgttccttattacaacacttttgactattaatttcattcatttatatggcaaccatgaatgaatgaaaaacgacaacaaaaattgaccaaataaaaaccatatttctttatccaactaagcaaacttaatacaaaggtcctaggggtgaacatcaggcgggttgattgggtttcgggttcgtggcttttgggtttgcgggttcaaaaaattgtacccggacctaacccgtgaaatggttcaggttcgcaggtctacgggttcgggttcgtcgggtcaacaggttgactcggtcaacttgttaatttattatttttttaaaaaaattaaatttgatgtggttttttttaggattttttttcaattt

SEQ ID NO: 366672 - DNA, 427 bp, Cannabis indica
ttcattttgtggagcatcagctggtgaaataacaccgacgagaatgtcaggggcacgacattccaaaagttgccaaaacgacatcctgtcgacattatcaaacagtaagtaagaagataatttgttcgacagcatatcgacataccatcgatatgctgtcgacattccaataaaatcaacacaacccaacatcacacaatattatcgacattgtgtcgacattaagtcgatatatcacacagaaattaacagcataaaaagtcgataacatatcgacatacaatcgacatgctgtcgacaacaactaaaaaactatgaatttacattgtgtcgacaacgtatcgacatacaatcgacatgtggtcgacaacaactaaaaaacaatgaatttacaatgtgtcgataacgtatcgacatacaatcgaca

SEQ ID NO: 366673 - DNA, 645 bp, Cannabis indica
cgaggagtccagtcagactcacgggaatgctacaatgcagcagtcaagctcgcggagaaaaagtcagtaaatgttatctacctattggaggcaccacctcctcgccaggaggtcctcagaatcgaggtggtaccacacatagacgagccagatttggatccaaggatcctttatcatgccgcagcagcccaagccgcagaagacaccattgaggtacctatagatccaatagataatagcaaagttttgaaaattggctctaaattgattttcagctgcgagaacaactaacgacttttctgaaacaaaatcttgatgtttttccttggaaacattcagatatggtcggaatatctccgcaggtcatgtgtcatcgcttgaacattgaccccgaggtacgaggtgtccgacagaagtgccgcaaaatggaccccgcgaggtaccaagcgctgaaagaagaagtcgaccgcctcctagcttgcggctttatacgggagtcgttttaccccaattggttagcgaatcccgtactcatgcccaagcctaacggctcatggcgcacgtgcgttgactttacagatttaaataaagcatgtcccaaagatagcttcccccttcctagcattgaccaacttgttgacgcca

SEQ ID NO: 366674 - DNA, 560 bp, Cannabis indica
ctaactgagagaaatcattaccgtattgaaaatctaatcaggtcctttccagctcaaggcatctgccacaacatttgcctttccaagatgatacaggatttcacagtcatagtccatcactagttctaaccaccttctttgcctcatgttcagatccttctgagtgaaaaagtatttaagacttttgtggtcaatatagatctcacaccgctcaccgtataagtggtgtcgcaaaattttcaaggcaaacaccactgcagcaagctccagatcatgagttagatagcgctgctcataatctttcaattgtcgtaaagcataagctatgactttatctgtctgcattagcacacagcccaagccctgccttgacgcatcacaatacaccacaaacttctcttgatcagatggcaaggctaaaacaggagttgtgatcaaccgttgtttcaactcttgaaagcttttctcacacttatctgaccatataaaccgctggttctttctagttaagtcagataacatcattgcaatcttggaaaaaccttccacaaaatgccgat

SEQ ID NO: 366675 - DNA, 618 bp, Cannabis indica
aaatttgttggcacgatacccacagctagtttggccaattggtcgaactttgtggtatattcaatgactgacatcccctccgtttgcactaactcagtgaactctttccacttagcactgtggacgacttcgttataatacttggcgttgaataactccaaaaattcttcccaggtcataacagtgacattctaggtgagggacactaattcccaccacactagggcgtcttcctagaactgaaaaggggtgcaggtcacccgatcattaccaaccactcccatataattcaaaattcgctcaatcacagtgagccactactgagccttcatcacatctggacctcccaaaaacactggaggtgcttgcttacagaatctttcgtataacgcctccatatagttacgagcaacaggttgttctgctggcaccactagagctaccacgacctgagcttgttgtggaggcacggcaggaagaccctaccgcctaaaccttaaaatttcttcatcttgtcggcggattcgatcttgcatctctgcaaacctctgctcccaatccgaaggagcttgtggtggatttacaggacgaccaccttgagctctgccacgaccacgg

SEQ ID NO: 366676 - DNA, 576 bp, Cannabis indica
gtaaaataattccaacacttacaggttcagactaagataacatgtcacaactagatgtccctcaaaacaatagtaagacgttaaatgttcttttatgtataatttaaccagaaacctactgttgagtgggagccatctgaggtgtaatcaaacaaggaacattaagggacagtcaagaaagatttatgaaagtgacctatatgttagataataaggaactatatattagtaatccttatatctacaccaactcattaagaattcgagatggtggttactctgggagtgaaggagttattctagaagagtgtaaaaacccatctataataattcaagctccatcagtgaacatatataactttgtaaattcaaaattaccaaaaagttattcaactgaagaaaattctgcattgtattatctctatttcattctttaaagagtgagagatatgtcttctatttattcaaatgatgaatttcagtatcccttgatgagtaatgcatatagtaaaggatgttgcataatgttttatgaacttggttccacaaatttgggttgagtcaaatatactacac

SEQ ID NO: 366677 - DNA, 677 bp, Cannabis indica
aactgttcggggctgaacctctataaaattcttgtgtctttatattgcttcactatatatcgattgctataaatcacttatcgcttacaaaaataagactcattgttgttggctaaaagcgaggtcaacattttggtgctttcattgaaagcagaatcaagaatcgctcttcatttaaaatctaacgacaaatacaatggtgcagactcgtaggggcctgactgatccagcaacttcacagacggtggatcctgccttgcagaacccaggaaacaaaaatgttccacaagctattaaccctggacagccagcaaatgcgggtcacggtgtaacgactcctatagattaaattgcggctggtgtgcaagagattgggaataacagttccacacccaaccagggcattcataacacaaccgttccgcctggaaccaacacccagacgaccatcggagatgctactgagttacaaaatctccgagacgctcttggactcatgcaaggtcataacaataccctacatcatgatcaggaagaactccgcgttgtggtaaatctcgcgttcaaagaaccaaggcgtatgtttaccgagtagagagacaaagagatggaggcgttaagggctcttcatacaagattgaaaatcgtagtcggcaagctaccgtgctgatcaaaaa

SEQ ID NO: 366678 - DNA, 817 bp, Cannabis indica
tggagttgggcgaggccaacaagaagctgttcgctgctgagaagaagatctccgtgctgacaaaggatctcgaggctgctgaccgttttgaggagaccatcgagatcttatctgctgaggtaaacagtcttcaggatgagaggacttctctgcgagcagttcttcttcggatgaaggaggagaaggatgccaaggagggggagctttcggccgaggtggacaggttgaaggagaaggtcaatgccttggagacagccggtcttgagctcttctttgatttttggaaggctaatccccgggccaactttgactacttgggcgacgccaaggacatgtaccttgagtactgcgcggcccaagtggcttatggtgggaacgaggcggctgcttcaacctctggccaagctgcttcaacctccggtcaagctgctgatgcttctgttcaaacaacagatcctcctgctccagttggcccagaagaactgaaccaagagcctgggactccagctgtttaaacacttccttttatctctttttttaatatatatatcttattcggcctcagggccttttgtaagacatatcgaccggccaagcggtctttaaacttggaattatttttcattttttggacgacgggctgacctagtagcttttaatcttggtactacgtgcttttgtcatccttaatgaatttcattctctatttagaattgttgtgcaattgtgattgttttatttttaccaaatgctttgtacaggtataggtgccccccaagtgaccgagcagatgcatgactcttggtcacttttcttt

SEQ ID NO: 366679 - DNA, 609 bp, Cannabis indica
aaataaaatttaatcaatacaattttatcaatttaactaaatagttctcagttatatgtaatcaaataattaaatttaaattcagaattcataaaattttagattgttgattgtattgataaagttttatcaaaaaaattttaatttagggtaccaaatatatgattttaaaatacaagatactaaatttatatttagaaaaaacacaggatatcaaatgtgtagaaatcttatattttttaattctaagttcttcgtagtttatgataattgaaatattattattttaaaaagaataattactattttttgtttatgacactactaatatgatatcctcaaatacatactgtttgttaaaaatattctttaaaatataatatttatagtaatgtggtctttttgttaccatctatttcatcttaccataaaaaatgtgatgtggcagtacacataattggtagttagtcaattttaggaggcgttttggttggggtagggaatgaaaatataggaataggaatgggaatgggaatgggaataagaatggaatggaataaatttaaaatgcataaaaataattgaataaaaaataaattaaattttttt

SEQ ID NO: 366680 - DNA, 467 bp, Cannabis indica
gggaatataactcctcggattttattccttggcaaaggtatataattaataacagataatcaaaaataaggtgcttttgaacatttttaagcgctttaagtaaccttttccaaatatactgttgctgattaatgatcaccacgatgatcaatatttattctactcttccattctcacattttaatattttttaaaatatttaacaaaaaaaaaaaaaacccaagaaaaatacgatatatgttatagaaaaagaatattttaaaccaaagaccaacttaaataagtgaagtaaacaaaaactaacaagggtgtgtccttgagatcatctctccatatgtaccatgttaattaattttaactaattaagcaatattattaaaggaaaaacgagaccaatgaaaatgcttacttaaagtatttaaagtttgattaaaatataattatttattaagtagtgaataaaaaat

SEQ ID NO: 366681 - DNA, 489 bp, Cannabis indica
tggcgcaggtcacccgatcattaccaagtactcccataatgttaagaatacgttcaaccactgtgagccactgctcagccttcgccacatcaggacctcccaaaaacactggaggtgcttgctttcggaacctttcgtacaacgactccatacggttacaacaacaggttgttctgctggcacaactggaactggaacggcctgaaaaactttttgaggaggcacggcaggaggaccctactgcctcaacctctaaatttcttcatcatgctggcagattcgatcttgcatttctgcaaacctctgtacccaatccggaggagcttgtggtggatttacagggcgaccaccctaagctctaccacggccacggccgcgaccacagggattctgggggttttgatttcctcgaccgcctccggtctcaaccatgttaccctgacttcttgtattctgcggggcgtaaattttataggacttagcctgcga

SEQ ID NO: 366682 - DNA, 569 bp, Cannabis indica
tagaaccgaacacagacctagcctcagacccaaactgagactggaactcgggcccggacacgattgtgtacccataccggagctgagactcggaccaggaccaaaatctgggacccgatcccaaacacagacttggaccaagatagggatccggatacgaacctggactcagaacaagacccagactgggatcgaaatgctggacatatatctggacctagatccagactctaacccaaacttgaacctgcactcgggacccgaatttggtctaggacccaaacctagacccagatcggggtccagacctttacataaaataagacacagactcggacccggactcaaacacccacacctagaatcagacccaaaggtagacctgtacctggacccgaactcgaacccagaccaggatcagaaccaaggacttagacacagaactaaatccaagacacaggacgcgaacccacacccacgagcctgatctagacctaggctgaaaactcctgacgccaaaccaaccaaaacttaacgaccaggacccgagcttcgacccgaactcaaac

SEQ ID NO: 366683 - DNA, 1987 bp, Cannabis indica
aggacgaagccatgattaactatggtcttggaaaggtggctggtctctgcagtaatctggaaaaggaagtaagagtgagaataaaagccttaggcaaaatatcgaggaaagaaataaatcacaagtacttaccgcagccagggcgttgctgatgtcctgaacctggtagacggagttcaaggatgcacaagcagcgtaccgtttgggcgggaattgagtcagatgggagacatactcgctggtcagctccgaggcaaaaggggccaaggtgggcccgaggaaacggttgaaccagtccgtcagggggtccatgttcagatcccacggattccggaagttctcctcgttaagagtgttttgcaactcctctcgtaagaccctcttcaaggcctccacctcagcatgcccccgggtgtactcgtcaagggcgtagttatgtttggctatccgaagattctgcctctcctcatctccggggatcggagtcaacacaatgccatgaggcactgtatactcctccgcctcggaggggatcccagagtcatgactcggggccggagtgtccaccctccgcgggcgtttagaaggctcctcttctaccatcttgcctttgcgcttgcgcacgagagcaacctcttgctcttcttcaccttcttcaacttcctcaggaagtaccccttgctcttcttcaccttcttcagcttcctcaagaagtacctcctcctcgtccactaagtcaatagtgttcggaggggcgctggaagaagctttcccgggggtgaccaactgggaagaagtaggaggaggggaaacatcaggactgtgggctccagcaagggtggccaagatctcatccatgggaacggctgctgcaacaagagaaaagggttaagtgttagaatatctgtgaaagcagtgtacacttaaaaagcaatcaagctagccctaccctgactctctaattcggccctagcaaagtcccgaatcttaacactggctgcatcatccccgagatagctgtccgagggacggaaccagctagaagacagataggctgaagagtccaagggaacgggcactggaggtccagaacccatccgggaccggcctaaataatcgcctaagtgagagaagtaatactccttggcatgatccccccaccgagtggagggcatcctaaacctatggagacgttcatcgaaccctataggcctaaggctagcatactcacggacaggagggacgtaatgtatcattaaaggggacttaccagaaccagaagttttggcatcaggagcccccgtatttggcacttggaccacaggccttggtctgggggtccttctctccaccgggctcccgatacgaaggggccttccggcggccacctgggccttattataagcctgctcctgggccttctagaagaggtacttctggtacttatcttttgccgtggcgatgatgtcctcccggagtacctcctccacggccggaaccctcaagtttgggcagatgactttggaaaggttggagtcatccaccgactgattccttggatcagcttggccttccggcagttctccgttgtgatcaactccccgacgtcgagggccttcttgtcatatgtggcgaaggtcttagtccattggaggaaaagttgagtaggttcagtccgcgcataaggagggatcctaacccacttcgtgagaagctccggatgttccacagcctggaacccggaggagaagaagaagcggtgacggtactccttcacatgtttctgctggttgaaagggaccgggccctcattcaaaggatgggcccggaaaccgtaaaagtcgtccttaagtttgtccccctttttagggacggaaacaagttcataaaaatacaaaatctctgccggactgggagagccccagccccgggcagaataaaaaataaataagcttgaaagtaggcggtaagcttgaggaataagttg

SEQ ID NO: 366684 - DNA, 641 bp, Cannabis indica
ggaccaatgcgactgcgacacgtggatttgaaaaatatgattctgagataatttaactaagcctttttggatcaagagtatcaacaagaaaatacctcccggagaagatatgggggctccacgtactccctcttcagcagctaccacgctatgattaataagcctagtgacggctactttatgagggatcacatcagtcaagaagggataaaggattatatccacctaacccctaagatacctagggtataggccatgcattccccattttgtatcttctgggaatgtgtgcccctactgaaaatacacagaacgacaagatgttcggttctagggatcactccagaaaaacactacaaataccccccaacacattaagatgggggtcgagaattctgggttcgtgatgaaaaaagagagaaaaactaccaagaacattctctgtaataaatactctcataaataaaaaagactcgtggactaaggctcattaatgccccaaccacgtaaaactctcatgcattaaacttcctacagctttctcatatatattattaaattggttgccgaaaatctcggtcaacattttggtgctttcattgagagctgaaggaagcatctgcgaatagacgacagtctta

SEQ ID NO: 366685 - DNA, 489 bp, Cannabis indica
cctccctcttgtaatttatgaaaaaaaatgtttaaaagatgagtgttgcatgtgatttgttgtgatgcttgctgctgtgttttgttgttgttttcagaggattaatcttgttattttaagtagtttagagctagtgaatgcatgatatttgctttgattcaagcttggaagtttttagctcaaaaccttggttttcaaagagaaatggttaaaatctgttgctgtgattttgttgatgtttgtagtagttttcagaagcttttatatgcatgtttaagtaggtttgatctgatttggatgcatgttagttggaattaaccaagtttgagttttggaactcaaagcttgggctttaatggcactttttgtatctgtgcattctgggtagtgttattgctttagatatgttatttgggtcctatagaacaggtttggaaggtttgaggttgtttggattagatttgagcattgtgtgaatttttgaatttc

SEQ ID NO: 366686 - DNA, 736 bp, Cannabis indica
cagaaccaaaatgtctgcatccggttccaaatcttcaaagaagggggaagcgtctggccaccctggaagaaattatgaatggtctggtggcccaagaagggcacaggtcccgcgccaacgggtgggaagcggccgagcttcactccaccttaacttgccctcaccagctggaacatatcgtggtggtggcaggtatcaagcctgcgacgtccaggacctaccaccggccgccccaagacgcgtagatgcccaaccacaactacgggggcttcggatcctggagccaaatgcacttgatgaccggggccatgcttccccttcaagattactttattaattttctgatatttgtcagccttgcgccatacgaactcattcctcaagcttaccgcctgctttcaagcttgtttattttttactctgcccggagctggggctctcccattccagcagagattttgtatttttatgaactcgtttccatccccaaaaagggggataagtttaaggacagtttttgcggtctctgggcccatcctttgaatgagggctcggtcccttttaaccaccagaagcatgtgaaggaataccgtcaccgcttcttcttctcctccgggttccaggctgtggagcatccggagcttctcacggagtgggttaggatccctccttatgcgcggactgaacctactcagctttttctccaacgggctaagaccttcaccacatatgacaa

SEQ ID NO: 366687 - DNA, 513 bp, Cannabis indica
agagtagagagagcttggaagcctgattactcacatcaatcagtttcttttgcaaatcaaagcttgtgtgggactaaagctcaaagattcaatgacatgaggtatttcgatccttaagttatatcgtgtatatattcgtttattccacattttatatacacattcatatattttatattatccattaacaatgtttgaagcttttattgggcgaaaatggggaaagttaggaattatgcagattgtgcggatgaatgaaagatgtactatagttaaattgttaatgagatattataatcaattttagtcaataatcaatataatgtagaaacctaaattagatttcataattaaaacacataaaccctaagagtttaatcataaaattcttcaaacttactcaataattttaaacatgcaatatatcagcagaaagagaatttaacaaggaataaaacccctaaagttttaagattaaacaacaaaaaatttaacataaaataataacgaaat

SEQ ID NO: 366688 - DNA, 505 bp, Cannabis indica
aattcatattaggatgttaatggaacatacttgttagtaaatctagatcctggtaaaatatttccaacaattacaacttgtcagatcctattacaaagagaatactacataatacacttgatttggatatcaaggtgttgagattatttgtgttgacttcgctttaagccaacgacaatgagtttattttataagcgataaatgatatgtaataacagatatatgataaagcaataataagacacagggattttatagaagttcagcccggatcagttcggcaatagcctaatcctcgttacttgtattgacttaagatcaaggagaaaggttccttttcttatacctcttacaacagtatctctgaatatataattcttagataatagtatagtcttagctcaacttcttttcgaccgatctctttcccattgaacatgtatcacaatttatagtgttgggttttatgccctaaataaaactctttacaatctgattagttatc

SEQ ID NO: 366689 - DNA, 627 bp, Cannabis indica
ttatttaggtcacaaaacccaacaattttatcatgtagataatttcttgtcaagatagctctttgatctctttgattggtattgcttataagtaatattcaatttataatccatccatgggataggtccccttttgtttttcttttgtgaggataaaagacctacttaactcagtggttagagtattgctttcatacggcgggagtcattggttcaaatccaatagtaggtagaacttattagatagcaacgtcactagtatataatgagtttttatactcattcgcttttattgattttgtatatttttcatcctactctattgaattttctaatttcaaattagttcattgcattagaatttgattctacttaaattcgatttgattctcattcgattttaatttgaatcgtcataagcaaaataaggtgtatacttctgtttatacaccttattttgcttattcggacacactaactagttacgacatcatattgatagcctctactcgtgtcctagctcgtctgagagctagtttgcctcaattgtttgtctcttgccttcagctttactcaagttaacttccgctatttcaagagtttgctgagcttcttgtggatcaatgt

SEQ ID NO: 366690 - DNA, 590 bp, Cannabis indica
gggcaacacctgcacgctgcagttaagtttggattcaaagcatctaacaacgaagtctagtacgaagctcttatcactgggctaagactagcccgggagataaaggccgaacacatcgaaatctgcagtgattcacagctggtggtaaatcatgtatggagaatatgaagctaggggaggaatgatgatagaaaatctgagcaaaatacacgatctgctcgcacaattaaaaacctacggtctcagacaaatttcaagagaagaaaatacaatcgcagacgtgttagctcgattggcaagcagcaatgtaagtgacaaggaaaacctggttcctatccagttcctcgaagagcctagcatcactggcacgaaagaaatcgaaatgattgatacatccccaaactggttgacaccaatagcagcctacctcaactctggggaactcccagataacagaaatgaggctcagaaaatgagaaggaaagtttcacggtatatcatagtagagggagtcatgtacagaagaggattcaatatcggtccattccgatgcatacaacttggcgcccatacacccgatcataacccta

SEQ ID NO: 366691 - DNA, 640 bp, Cannabis indica
ttctttttcttttctttctcttttctttcttcttcttcttcttaaaattcagccccatcatcgtccccatcattcacctcagaaaccctagccgactcccctccacgcacaaccatcaccagcaactccaccatcaccattcaccatttccatccatcaaccctcctatccaccacgaaccagtcaccctaaaccgaatcaccatctccacgaaccaacaactcagtccaccattaccgtcaaaatccgaagcttcatcaccatcactgtcgccattttcccccaatttgagaatccagcatcaagactccactccgcccaccagaaccttcatccatccccacggagctgcaacatcactaggcctagcgaacaaccaccaaactcgacctccagccacctttttcatccatacctgcgcaacaccacaaaccaccatctccacaaaactagcaccacgagctaaacgcaaagagaaagaaaaagaaagaaggacgagagatctgaaaagagaaagaaaagaaaaaaaataaataaaaagaaaaaaacctgtgttagaaggagtcggctagggtcggctaggacgatgatggggctaaatttttttttttggggggggggttggggggtggggggttgg

SEQ ID NO: 366692 - DNA, 726 bp, Cannabis indica
acttggtcatccatctaagaccactgttatgactatattagaaaattgtaatatctctcatagcaataaaactatctttgatctttgtaatgcttgttgtcttggtaagcatcataaacttccttatcccaattccaaaacagtgtatactgctcctcttaaagttttgtacactgatctatgggggcctgctcctatagattcctttaatggctatagatactacataagttttgttgatgcatacactaggtacacatggatttatctacttagaactaaagatgaggcccttcccacattcacaaagttcaaaacacaaattgaaatacagctcaacttaccaattaaagagatacaatctgattggggaggggaatacagatcttttactaaccttcttgaaaccagtggaataactcatagggttacttgtcctcattcccatgaacaaaatggggtagttgaaaggaagcatagacacttggttgacaccggtttaactctattagctcactcaagtcttcctctcaaattttgggatgaggcttatagggctgctacttatctcataatccggttacctactaaagtgttacacaacttaactccccatgaaaaactctttcatacaaaacctgactattctgcactcaaaacctttgggtgcctatgttaccccaaccttagaccttacaacaaaaataaaatgagttataggtctat

SEQ ID NO: 366693 - DNA, 731 bp, Cannabis indica
ttgaagatatttacgaaaatgccactgccgtacaaactaagcaccagcatgccaccagcatgcacctcaacatgcgccaccacttgaccaccacttggcttacttgtgggcatcacttagcttgtaacatgccatcttggcacgcacggtacattctcccccacttcaacatgtcgatgccctcatcgacggaccgtaggtaaatcttccttatctcgactcctaagcttattccaagtttctcctaaatcctaagtttgaacttgtccctctacctccgtagaaccaccctctcggtgatgatctccctcgcccactcttggacttgatcaaagaacttgtgccactatcgctattcagaatctcccatggactagtgcctccgcactagaatacttccccaacatgaactcctccgagtcgatcacaacgtcccccaggctcttggttcgggtcttctgggctggcaagagatagaggatctgttgtttgaacgggaggtacatcagcattctggccagaggtagaagcagttgcctcggtttcaccataagccacttgggaagcgcagaactcaaggtacatgtccttggcttcacccaagtagtcgaagtttgcttgaggattagccttccaaaagtcatagaagagctcaagactgtctgtctccaaggcatgaactttctctcccagcctcgtcacctcggccgtaagctcctcctccttagact

SEQ ID NO: 366694 - DNA, 493 bp, Cannabis indica
gcttcccaagagtggggtactccttcttctcacgaagttgcttggttctttaatctgaagtccacccccaagcaaggcaggtcggggtacttctatttctctcaactaggcttcaagtggttgacgggcacggatgactcaaccatcagcaaaattgggcattttgctgatgagtacttcatggtggatggcacgggcatcagtcgcactcgattccagtaaattccgacatatcaccgtcctcccctcactcttgctctccgggatagagctcaaaggcttaaccgactactgggggaagaccggaatattatccagttgacctccgaggataactttgtgaagtacgggctctatcccaatcgcctcaccgcccctcgatttcttggccgggggagatgcgcttgagcttcctccaactctcttctttagagcatcgagcgtcttctgagacatgtctgcacggaaaaaaaacagcatggttagaggaaaa

SEQ ID NO: 366695 - DNA, 706 bp, Cannabis indica
attattttttttttagtttttaatattaaaataatgtttttatgattaaatttttatatttatataaatattatataatgtgagataatttaataaattagtataataataaagaatattttttagtgtaaattttagtattgtggttagaatatttttttagtctaaattttagtattgtggtcaccaatgtattgacctttaaagatgtaggattgagaatatgaatgaatcataacactgcctttgttttttaaataatgaatcataaaatttattcttaaacattaatgtattccatttagtatttacttttaattatcaatactattaattatattaattgaatatacataataataatctctaataataattaattatattttttcttcaattatttattgtatcatttttaaataaaataaaaaatacttagtataaaactaagtatacgtgcctcacacgttaacattctactagtatatataaatatgtataataagtatacatttttgtatcttattttttttacagaattttaaacttatttttttttatttaaactactttttattattttttttgttttttttttgttaaaaacttaattattttattaaaacagcagaaaaaaaaaccagtttcattaacatcatcattaaaaaaaaaataatataaaaaatcaataatctaaaaagaatac

SEQ ID NO: 366696 - DNA, 597 bp, Cannabis indica
tcgtgattatatgagccatgctttcaacaatttttcaaacttggacttgtctttacctgatgatttgatagctcataatgtagccgtcaattgatgtatgggatatagtgaaatcagagaattatgagtttaaacccttgatcacgtaaggtgtaggatgttctttcccatgctgcattaaatgcatatacaatgatttaacctcgaacaaagcgtcgtactccacctttctatctatctcgtctctgggtcgtgtgtacttgcagagaagaagggacaaaattacttgttaattggggggaccttctcggaggtgactaattctccacatactcgcaaatagagaaacgttgggagtgttttgacatggcgcatcccacagtgtgggtcccatcaccacctggccgtattttgaactgccacgtattttaaaaaaaattctaggcaacacttatatataagaaaaatataatttaaaataagattaaatatttctttctacatataaatttttttcttcctttgaattttttatttttattttatttgttttaatttattattgaagacataaaataacaataatttattttattt

SEQ ID NO: 366697 - DNA, 1624 bp, Cannabis indica
tttgtcatcgggcaagatactcttctccagatagacaattattggagtcatccaggtgacttcttgggcaatatatatttccattacttcttctggacttactgtcgggtaagccaatacatcaacaggaattacatcgagtaattcagcttttctagtcaaggccaagcgggccaatgcgtctgcgtgtgagttatgagcacggggtactcgggacacgactactttcttgaatttctgcaacagctcgcatactatggcgagatacttaaccaagtgctcgcctctggccagatattctccattcacctgacatacgacgatttaggagtcgctgaaagcctgtaagtattcgattttcatctcgagagcgagcttcaatcctgcgattaaagcctcatactcggcttcattgttagatgcaaaaaattcaaaacgtaaagcagcgtgtaccttaaaattgttgggactaattagtaggattccaccgctggaaccttcgctattagaagccccatcgacgtagaacgtccatccttctccatttggtataacagtgtcgatcttgtcatttatgagtgccacttcagtacttggaaactcgagaatgaaatccgccaaggcttgccccttgatcgcagttctcggtttgtattcgatgtcgaattggcttaactctaccgaccatttcaacaatctccccaatgtctatggttttgctaagacttgcctcaaagggtagtttgttaaaacttcaatgctatgggcctgaaaattaggtcgcagctttctcgacgatattaccagggcgaatgctaatttttccatttgaggatagcgggtctcagcgtccaacaggcgtttactgacatagtacaccaggtactgttgtccttgatcttcgcggattaataccgaactaattgcatattctgacatcgccaggtaaatggataagacttcgccggacatgggttttgataggattgggggctgccccaaattcatttttaatgcttgaaaagcctcttcgcatttgtcggtccattggaagttcttattgacttttagaatctgaaaaaactccttgcatttatcagaggatcgcgatataaaacggtttagagcggcgactttacctgtgagactttggacttcttttggcttagtcggtgatcgcatttcgactaatgctttgatcttcgcaagatttgcctctattcctcgatgattaaccatgaatccgaggaatttccctgaaccgactcccaagacgcactttagtggatttagctgcattttatatcatctcagtatctcgaacatctcttgtaaatggttgttatggtctttcgcctgtcgagattttatgagcatatcatcaacatacacttcaatggtatccccgagcaaatctgcgaacatcatatttaccaatctttgatacatcgcacctgcatttatcaaaccaaaaggcattactttataacaatacagacctcgatccgtaatgaacaaggtatgttcctgatctggttcatacatcgagatttgattgtatcccgagtatgcgtccatgaagctggtaagttcatgacctgcagtggcatcaacaagttggtca

SEQ ID NO: 366698 - DNA, 564 bp, Cannabis indica
tttctatagcttttattttttttgtatgaaattattaccgtgaggttcaaatttagttaataaaaatctgcgttaacacatacctacaaagtcttagaatcatcacgcttgaccttccctaggcgacgtgggattgcacaacttaccgagtatttccccttacggatcacaagacgattgactgtcacaatcatcccctcttatggggtctgacgtcttcgtcgaccacacttctagatgggttaaggatgtgataccattttgtaacaccctactaattctaagatactaaattgtatctaagtgacataattggctaaaatatcaatttctactattactaggcataaaacgtgaaaatactaaaagtcatataagatatgtatggcacacctaaaatctaataaaatttccataatcaagcaattataacactaatgcctatttctgacaatatgacttattttttgctaatacacataaaaattattaattaaatcgttaatattctactaattttcatatctaattatgcggtcattacatagagagagagagagagag

SEQ ID NO: 366699 - DNA, 896 bp, Cannabis indica
ttgattttgtgattatttatggtctctctactttgtttatacagtttgatactagtgatgagatattttattttcacaaagctaaccatgcaggaattttattaaatcaatggccctttgatactagttattttcttactgggctttataagctcaccccatattttctcccattctaggaactcagtttgatgctagtagatgcggatggtaccgttgaggaagaaagtcgttattagtttagtcttattctactctttaatctttctaagaaattgattttgtatttaagctaaaattgatagtctggatgacttaaattagctatatacgagttagaaatgaagaatgatggatgctaggtattattttggtactttattaacttattatatatatctatgcagtgactacgtaactgtggggatattattattttttttgtattgatgagtggtcctgattctgttactaatattttcttattaatataggaattaatccattacttttaaattagtattttgtgatataaattaagagatcatttataagctttatcttcctacaagggttaaagtgtgacctttaaccacccaagttatgaatattatatatctgccacagcctagggctcgggtcgtgacaaaaaaatggtattagagcattgggtttaattacctcggagtgtgtcaccaaatagtttagatttattttaaataataatagtaataagtatcttaatatttatatgtataaggcatatttatattattagcatccaaacctcattaactgattagcttttagttctcagacctaagaaaatgcctccaaaaggaaggaagatagggagaacgcttggagaagacacccctcaagctaatgtccaacct

SEQ ID NO: 366700 - DNA, 502 bp, Cannabis indica
cttctgcaactaacacggagtcatcaaaagcttctctacagtggcaaggcaacaaataaatggacaagtagaagccgacaataaaatcctcaaggtccataaagaagaagctgctggcctgcaaaacaattggcctgaagaattgcctagagttttatgggcctaccgaaccaccccaagaaccacaatcggccactcgacgttctcaatggcatacggttgtgaagcaatggtcccagtggaaacattattcccatcccataggaggacaacttatgatccagcagcaaacaagactttattacaagatgcgctggctcaaattgacgaactccgggatgagtctcaaatacgaatggcagcttatcaaaagaagctggccaaacacttcaacccgaaagtcaaaaatgaaaattcactattggtgatctagtcctaagaagggtctttccagccactcaggaacccggagtgggggtacttgggccaaattgggaaggac

SEQ ID NO: 366701 - DNA, 962 bp, Cannabis indica
aacaaatagaagtaaaagtttaatttcaacgtacttaactacaatccctgtgggatcgacctcactgttggtgagtttactacttgtaacgatacgtacacttgcttttgcaaaatatcgcaacagtgttccaggtgcaataagttgggataagatcccttcttccagcaaatagtctttgaattcagaatccaataatactcaccaccacgatctgatcaaaatatctttaatcatttacctaattactttttagccatagctttgaagtctttgaacgttctaaaagtttcagacttttgtccattaggtaagtataactgtatcttgaataatcgtcaataaaagtgacgaaatattcataactaccttgagcttaaatattaataggtctacacgcatcaatgtgaataagctcaagttgttctttggctctattgccttttgcagaaaaaaggtttttttagccatcttgccttctagacaagattcgcataccagaagagttccaacttttagttctctaaaaggaccatcttttgttaacgagttaattctgtctacgccaatttgacctaaacatagatgccatagatatgtttcatcatcatttaaaacctttgcctcttattttattgaagcaatgctactctaaataattcattattcaaaatatatgttttgactaaaaaattgtcactaaaaatatttttttagtgttacaagaacacttgaaaatcttcctaaatttcttctaaaattttgtaaacccctacatatactcaacctagtgctatcactactacaatgttagcctttagaggcagttttttcaaccccatttataaaaagggaagctaaagggtgtgaaaatacccgctatgttcgaaattgacatttagaggcggttttttgataaaaaccgtaggtataaaaattgcattataccatttagaggcggt

SEQ ID NO: 366702 - DNA, 847 bp, Cannabis indica
ggagttctatataccgttgaaaatcttattccgagctctatgtgattatctgtattttgaatgccatgtgtatactttataaatgtgaaatcaggggttaaccctatttgtgtaaaccctggaattgtgactaggattaccggcacttggtcaggagcagccggggatttggaatctttgttattatgagacatcaagtaagacagtagttagcacgtagagttatgcgttgtggaacttatactagaaatgatatatgtgagtaaatagtaactgagattagggtgattacccttacatgagcggtttaataggctagggttattaccctattaatacatgttgtgaaaatgctacgccatgttaaatatatgattatattgagattcagggttatgtgttcaaggcataacttggttggactcggtaactagaaccgagatgaatcgttctaaggcattattgtatttagacgcgtgagggcaacacgtatgtctatgttacatagacaaatgggcatgtgagcgtaacatgtaggtctgtgtcatacaaacatacgagaatgacattaatgtttgtgataaatatgtttattaatatgttatactctcttgctgggcttggctcacaggtgctctactatgcaggaaagggtaaatctgtttctgatcagccatgagtatgggagcttgacggtgtatgtacatgattgggccacactagaccaagagggttgcggtctaccagtgatgaatattatgactatgttttgtcgcttaggtcggctagtggaaacgaacttgtaatagtattttgtaaaatatttttgggatcccgacacatgtaa

SEQ ID NO: 366703 - DNA, 925 bp, Cannabis indica
ttcatatttaggatgttaaacacataatttgttaaaccagctactcgctgctccaacaagcaaggtggggaacaaaatacaacgtaaattgttcatcacattactcactcacattattatgttaaagttattcaaatgcgagaccaaatcagtggttccgtcatatgacgtgacatgcaggtttttgaatcttaaaagaaaaggggtattcattatatctagatgatatggctcaagctccccgtctgagtcgtagttttctcacttgatatctcctgaacttgtcctccagctcgtttatctgcaattggatgggatcctcttgctttggaccaagctgttggcgaaggtcaggtttctttcgattcaagtgcttttgcaaatccggttgggagtaatttctagcagacctcatcttactcattgatcgtgtcctactcatagactttgtctttgagtgactcgcagatttactggttcccatattttctcgatcattagctcgttgagtactttctcctctttgagttgatcgactgtgggttcttgaccatctcgaggtcacacttgcttcttcacgctatgttctttccccctgagagcggtttgtcgtatttcccccattagggtctgtacgagtcctcgctctatgggtttgggaagaatgcttgtgatttttagcaggtgacctatgttctcccagttgagtcccaagatcctcctcattatcattagagatttctcgttcatcagttttcggttatctcccatctggctgttcattctaattttcaagggtacctcattttccctgggttgttcttcccgggcattttcctgtctcctggtttgtgagccatgagaactgcctcgtggtcttctcactccaggttgaggttgattttgagcattcgtcccctatgcc

SEQ ID NO: 366704 - DNA, 565 bp, Cannabis indica
agatcctggtaaaataaattccaacagcacattgccctgcctcaccttgctttagtgagggaggttcatcaagagagggaggatttagagaagtggttcttaatccgggacagagttgtccgttttggtttggaggagtttgtcttgataacggggttaagtccggaagggtcatttgacttgaatgattttaaacaaaagatgtcgttcaagaagaagatgtttcctgatttgactattaaagtcattcaagaacaagttagagcaaggtttttggctggagaatttgatgatgacgttgacgctatgaagatggcgattgtttatctattgagtcactatttatatggctatgagaacgataagagagtcgacaatgagttatttggttttgtcaatggcgatttgtcagagctaaggaatattgcatttggtaatttgctgtgggataagactttccactacatgaatttggccttcaaggacggtgacaatatatattacaagattgagaaggccaaagaagaaaaggataagttttattcttttaaattccaagggtttc

SEQ ID NO: 366705 - DNA, 516 bp, Cannabis indica
gttacaggctccctcactccaacgagaggtcttcgccaaggccgccctttatcgccatacttgtttctcatttgttctgaaggtctgtctcgactgcttcagcatgaggaaaatcttgggaatcttcatggctactctttgaatcgacactctgctcccatatctcatttgttctttgccgatgacagtctcctattttgtaacgctactgagagctcatgcttggctatgaaacgatgtttggacatatatcataaagcatcgggaaagcttcttaatcctgacaagtcggtaatgtctttctctcccaataccactttggctagccaaattttctttcatcgacaccttgcaatgccaataagcgagtgtcatgaaaaatacttggggcttccatcttattcgggtaggaacaaacagcaaatttttgggaaaatcaaagataaggtgtggaggttaatgaatacttggagtgaaaaaaaaaaattcaactgggggtaaagaagtcttgctaaa

SEQ ID NO: 366706 - DNA, 513 bp, Cannabis indica
tttctatggtttctttagtttatatagcttctcttgcatgatttttgagatgttgggttctgagttgttaaaaatggtggaattttgtattataatgatatattatggttgtttgagctgatttgaggttaatggatgggttaatttggtgtttagacaaggtttgagtttagaactcaaaccttggtctctaatggtaaaatttgattttgagcatgttatgtggttctattgcttgagttatgtttattggggtatattatgcaagtttggaaggtgtggtaaggtttggagttgaattggttagatttttgaaatttttaggttaccaggtgtaaaaccgggtaaccggatcagtaaccgatttcctacactttttcgtgtttttgattcatggtagtttcagagctttggttgattaattccctgctagtttagggtattgccatgttaactttcagcaggtagattttgagttaaaacctaagtcctcggttgtgatttagtgtgtca

SEQ ID NO: 366707 - DNA, 517 bp, Cannabis indica
gagtacttaaataaatgaaaaaaaaaaaaaaaaaaaaaaaaaaaaaaaaaaaaaagaagcaaaaactattttaaagtgtaaaaattaaaaacctttaaaaaatacatcacctcgaatggatacacaaataaaatagcattactcattaaaaaagataaaataaatgataacatgatgcacaatattagtcaacatgagttgggtgacccttttcacatggaaaagaatatactttggaaaagacttttggaagtctagtcaagatctattaaactacgtaccaatttcattaaaatttctattaaggaaattgccatatcattgtaataatgtggatgggaagaagattccatatttatttatggggaattacttgtatatgttataatataatataaaatagatgagaagaaaaaagaagaagaagagagaaagagataataaatgagaatttctcgcttgtttattctaatggggtgaactcctatttatacaaatacaagagtcaaatattaag

SEQ ID NO: 366708 - DNA, 823 bp, Cannabis indica
tttgatgaaaatggagaatattctcggaagacattttgaaaaaactcctcggagttggcccaggtggacaatgtcaacctaggtgttgggccaacaccaggtgtcaacctaggcgcttgtcccttattttcgcccccaatttggcctatttccccaaatagcactccatttttgatgagacaaagaagatgcatgagtcagattttcagtttaatgcttgaaagtggcccaggttaacaaattgtcaacctgggcattgggtgcccgggcacttggtgctccaagtgctcaaaaataaaagttctccaaatataattttgatgcctcaaatatgttcgtagtatgtctagttcatgtcctagtgcaaattttaaccatttgcactaagacggtcctaaaaactaaaagtctgaaaccctagttgggttggcaacttaggcgctgggtgaaaccctaggtgcctaggttgatttttgaggtgttgttttgtgtattttgagctcctaagacatgaacttggatgcttcatgtattcatgatacaaattactgaaagatagtgagttgaaaataacttggcgggatcaaaacatccattttagagttcctagagttaacttgggcatagggctatgaaaccctctaatgtcgactgctatgactcgagactactcaactctgagatgttatctttcttgtcactggggaaagtttttgggttaacagctttgagttgagttgaattaaagttcaaatatcaattactcatattactaataataaattatattaataataaaaaaagtaataataaaacaatatat

SEQ ID NO: 366709 - DNA, 547 bp, Cannabis indica
tttattactcactctttaaatactttaattttgaggttcttttaatctctcaacctctcttaactaaaacccgtttaagtaaaattattacaccaatacatacacagccgaatagcaatgctctttgttgaacacttaaatatcatagggcaacattcattgcctcatggtgaccccacacttcattacaatagcaattttttcatggctctcattattactccatttatatccaatatgttatgttgttgtccatcttttataaacaaggtccacctaaatatcaagtataatttatttaataggttctataaatggtactatttaagaaatttacaccttttcaattattctttatgtcatagcagaatatgttctccgagcaaaattaaaattaaagtaatatatgcagtataaatatttaaatttaaatttcaattgtaaataagtacttaagtgtgtcaatctgattagttaaagtcattaaattttattttttaaaaaaaaaataatttaaatatacaaatatgaaaatgacacgtggata

SEQ ID NO: 366710 - DNA, 686 bp, Cannabis indica
caggcagggatctccactgatccattaaccgccggggcgagttgtgggatgatatacaaggacgtctggtaagaaacataattgagttcaatgagagagctcaagtgtatgtgcaaaaggaagaagcccgaaaggaaatgaacttgttgaaaacaaacttgggaggtaaacccatcaatgtttcaacaaggactacttccacgagaattgataactcgggggcttctagtctaaaaagaaaggacggaattagggaatcgtcgaaggatagaaagaaatagaagaagcatgacaaatatgtcccagtgtatactatttataccgagcttaatgaaactcgggaaaatatttacctcgcacatgagcagaaggtagcctttagcaaacctgagcctatgaggaattcgaggagcaaaagagatcctaacaaatattgtaaatttcataaaaatgtcgggcatacgatcgacgaatgtcgccaattgaaagatgagagagagagagagccttatcgttcgaggccattttaagcagtatgtgagaagacacggccagggatacaaccagcttcgttagcctgataacccaaataaccaggggttacaacctattcctgtggaaggagaggacatcttggttatttggggaggaccgcatattgcaggggaaagcaataacgctcagaa

SEQ ID NO: 366711 - DNA, 969 bp, Cannabis indica
tataaaattaataaaaaatattacgttaaataattgggatattcggttaaagttaacggagaaaactaaaaaatatcgttaaaccaaaaatttcgttacataattacattttatatagaatagacataataatttacttgctcactaatggacttaggttttcatcttttttttatttttttattttcactttgctctaattagaagcgtttctgcaagcaatttcctttctttttcaataataataataaaataaaatataatttgttcatgtaattttttgttaactgacgtaagaagatcgtaaaaaatatagaggattggactaagatatttgatttcaaaataaaccataaagaaacaagaataccaagatttatagtagttcactcagtgatagtaatggagttacatgtactttgaattttattatttggactcaaagatgctagagttatgttctcaggagcatacttaactaaggtgtcgtttggtaacacttttattttctaattttttaatcacaaaatgaaagtaaaatttttgtttttaaaaatattgtttttgaaaaacaaaaatacgttatgtaaccacttttgtttttcaattttaaaaacagaaaaataaaagtgagttctgcaaaatttatttttattttcattttttgattttatttactttaggtttaggtccgggttcggattcgagttcaggtcaaaggtcgggttcagcgccagtgccatggggggatttgggttcgggtctaatcgaagtccaaaatattgattaagaaaaaaagaatgtttaaaaaaatattgaaagtgatttttttttatctttaaaaattttgattctcaattaaaaaattgaaaagtaaaaaataattttataaaacatccttttgaaaaatattttcacttttcaattttaaaaacaaaaaactagattaaaaagtgttaccaaacgcca

SEQ ID NO: 366712 - DNA, 978 bp, Cannabis indica
ggttaatgtattaacctttatttccactaagggaaattaaatgtaaaatcatagaaaagcaaaaaaatagaatatcctctatttctttctctctctctttcggctaagacaaaaccaaggcaaggatcagttattccttcctaattctctgaaattaagctagagtttgaaggatgagcaattaaaggtaaccctagaaccatagttttatgttttgaagctttaaagttttgtttgaacttgtaattttgaaaattagtggttgttattgtttgggatgcttagggttatggacttagtttgagttgattaagggttctaggagcttgatatttggttttagttttgtgcaagtttaagctttgagtacaaagctttgatcattaatggcaagttaagtttctttggtttgttctgtgaaatactagttggaaaatgttggttatatgttgtttaggtatactggagagttttggaaagtttggcttgattttgaggtcatgggagcattttttgggttcccggcacaaaaccggaattccggttctgggggacctgtagcaaccggttgaccggttggtgtcctggaaccggacttctggttgggaactggtctgtcggttggggcagtttttggaacccttgttttaggtcggccagcacacttgaattcggaaagaaggtgagaaatgtatataatgtgtgatatagatatctgagtgtatgtatatgttatgtgtatatgcatgcttaaaatgttagttgcactaccaacacttatacagttatggtatacaatgcatttgtatagtgaatgttatctgagagtaccgtgatacgagcataagtacggagaggtactgggagtgcgtggtatatcactcagtggtactcagggtatgaagcaaaccctccaacactcgtatatcgaggtacgtagtgtatgtggtatagtggctataccctagtatggaacgt

SEQ ID NO: 366713 - DNA, 581 bp, Cannabis indica
ttcttgcctgtgcattctaccatgaagtttactaaggcttggcttttaattgttgttcagggttggaaagtgatttcatactgacccaactttactgcccacttgagcagtcgtccagaagcatctagcttttgcagtatttggcgtagtggctggtcggtgtatacccgaacaagataagcttggaaatagtgcctcaacttccttgttgctagaataaggcagtaggggagtttctctattaatgggtatcaaccctcggcctcaatgagtattttactgatgtaatagactaggtgttgtacgcttttctcttctctgattagtacggcacttaaggcatgttccgtgagagctgactatattcccagctcttctctgtccagaggttttgagagtacgggaggttttgaaagttgtgcttttagctcttggaaagctttttcacactcctccatccactcgaactgcttgtttcctctcaggatgttgaagaatgggacactctgatctgttgattttgaaacaaatatgttgagtgtagcgattcgaccagttaggctttgcacttctttggtttt

SEQ ID NO: 366714 - DNA, 685 bp, Cannabis indica
ttttagaatttttttttagctattgcggctacattggtgtgctatttagatgtaaatatatgtatatacgtattttatatatacaataaaagaatgaatttctttgttatacttattttatattaatctctctatgtataaggattatattagaaaatattttgacgaaatttaaatttaattaaagaattaattactttcaaaatatattttatatattatgtctaaatatatattttaaaaaaaatatattgatagtgatcgatacaatatttaatttgtaattaggaaaatatggttataataaattgtaagtgaaattaaggtttaaatatatatattttatatatagatgtgattatatatagatataatatttatttttagatatatataattaaattaaattttttttatataaaatatgtaaataattttatttttaaatacatagaataatattataaaattaataaagaatattctgttaagtaattaggatattctgttaaagttgacgtagaaaccgaaaaactctgttaaaccaagaattttgttacatagccacactttatatagaatagatatttagagttttccaaaccctaatattttttgaattttaagggtattttattttatttatttaaaatgataatatcctaaccataaatatcttactttt

SEQ ID NO: 366715 - DNA, 714 bp, Cannabis indica
tttaaccaatgccctggaaaggatatagcacttatccaaggtgcaagtaaactatgtcgtagattatcatatcagttcaaccctgtgtactgataaatctaggaatatatttaatcacacaatcttgattactttccactgtgttgacgaaacaataaacaagaatattaatgtgataagggtttggatgaatttataaatcaaataaacatataaatgataacataaaccaaatgacacattaaataattgatgaaaatacttctatctctttattgataattaaaagatagagattacattaaaatagagttttatttagggcacaaagcccaacacttatatagtactagaaagatgaataaagttgaaagcactactcaccagagaaaggtctcgaagtttgccggagtataagctatcatggacaccgtcacccaactcttgcaaagcctaatccatgaaagggatagccctctctatacaccgagtgacagacttagcagccttcctactagcagctgacctcgctcctctaccgggcctccatgtaccgtggccggtaggctgaactataggctgctcgataggtgcaggccttggtggaggagaaggtagtgatggtccactagcataggcaccgtgagaggtcctggccaccttggccctcacttgactggtgggctcatctgaaggcccacctgcaagacctct

SEQ ID NO: 366716 - DNA, 615 bp, Cannabis indica
gagatatatatcatataacatgtagaaatagtaatttttatatatatataaataatatatatatttagatttcaaattgaaaaggttcctcagtatggaagacttaatgggaagaagttaaaaaatacctactttttttatatattaacgaaatttatctctaaataaaatttaattcaaatatatctctttcatgagtattgtacccaaattatcctcacacattcacataagtaagatataattttaaaaataatagttttgtattctttgtagatgaatttgtaggtttataggaaagttggagcaaaatttttattaaagaagaatgaaaactagcataaagtgataaggataaaattggtagaatgattgaaagaaaaaagataaacataataaattaaaaaaaaaagggtaaaaattaaaaacatcaaatcaaaaaaaatatataacgtaatttccacaacctaatgagtctctagaggttggaagaactaaaggcctctagagggtaacgatgaatagtgggaataataggcttttgcaaggggtaagttgaaaaatgtatcttttattcatcaattaatcaaatttacctctaattttatatttatt

SEQ ID NO: 366717 - DNA, 953 bp, Cannabis indica
ggttgattattggatccaaatgtacttaattaatgtaaatatgttgggatttttcttcttttttaatacggggaatgatttgtttatgtatatatgagagcatatgttctataaagatagagcatgtgtaggtgtagaataattgattaaataaacacaatgtaacttttttttttggttatatattctgatatttttgtaccatagtcatttatacatatataaataaggagtttttttattagtgtacaacaaaaatttatattataaaaaatgtgaaaaaaaacacacttaattataaaaagttattaaaattcaaaaacacatttacaaaatatataacatttattaaaaaaaatatatatatacatatataacatttaaattatctaatatattaaatgaaataattacataacttactatacatttatttttttttatgtaacataacacatattttttaatgaattaaatgaagttattaacatgtggttattaataattataaaagttacttcattaaatatagaagtcatttgtttaatttttttcttctacatttgtttattaatttaatattcataataatgtacccctacagtccagacgagtcgtgtaacgccctaatgctaagacatgctacaataatttttcaattacagtgttatctttgctaatcaaagaacttaatcgaaaatcgtgtcaaattaacactttatactaaatattaaactttataactttacaaaatcatttacaagtactgtgattctgattttaaacttttatacaaaagacacaaaatgcataaccaggtcgcacaacgactacaaaataataaacccagatgtcccgagaccgaatactccaggtcgcgccgccatgacatgtacaacctcatctcagcctaggctcactcctgttcagctttcgcctttcctttacctaca

SEQ ID NO: 366718 - DNA, 873 bp, Cannabis indica
gaagaaattccacctgatcagcgggacgcagaaaacctggaagttatacgtggatggtgcatccaacgaacagggtttgggtgcaggggtattattaatatcgctagaaggctttaagttttactatgctttgaggttccaatttgacgcatctaacaacgaggctgagtatgaagccttgatctccgacttaaagatagcagaggcgttgaaagtcaaaaatctcatatgtcatagtgattcgcagctgattgtgaactaggtcctaagggaatactaggccaaaggcttaaaaatggcgaagtatttagagaaagtttggaagaacttggaaagattcgattacattaaaatcgaacaaattccaagagaacaaaactccaacgccgacgccttagcaaaactggcctcgtagaatgacttggatgaattgaacttagtcccgatagagttgctgagcgagccaagtatatgtgaaactgaacacgtcgagatgatagatagctctcctacatggatgactcctatcatcaattatttactcgacggacaacttccaaatgacaaaaatgaggcacgaaaaactattgtattcagtgcctcgctacacaatgatcaaagcaaaactatacagaagagggtactcaatgcccctacttattggaattattttaccaggatcttagatttactaacaagtatgttgtttaacatcctaaatatgaacttctaaaacgatgtgaaataaacacatataaagtataagaaaccttacagtggttgcagcgaaatataatgtctccttccactcagatctctaacccttgtatcctttttgtagcagggtatcaccaagatctgagcccgaatgtc

SEQ ID NO: 366719 - DNA, 1256 bp, Cannabis indica
ggaaccctagtttttcccgtttctatagtatttagggtatcaccatgttgtttatcgatagagaaactcttagttttaagttttagtcccaggaaagtgatttggcgtgtcactcaccagttttacgaataatgtgatttaagggcctgtaattcgtcgagcaactgttccactcgggttggccggcacacttgaattcggaaacaatgtaagattagtataatgatatgcatatgtatttacatgttcagtgtgcatgttacttaagcctgttagattacattataatagtgatatcagtatgtttagtattatattggatattgataaatgtatgttggcttaagtactattcaacaatatcacatcggtacgactagagtacgactagcgtatcgagtataggcatggtcgataatactgtacttcttgacagtatcacatcggtatggctagagtacgactagcgtatcgagtataggttgatactatggtcagtagtactgtcgtacgaatgttctagactcaacaccgtgttggacacgggaataggattatggttgggtgtatggggcctgattataatccgggttattgctatgtttttgtttatgcttttcttactgagtttgtcgactcacaactattgtttgcatgtgtaggtaagggcaaggctaaggttgagcagccgtgagagcgagcatatggagattgtacatgtcggggcggttaggcttggagcgtacaatgtttgggacagcaaggcttattttgtatagtcgctaggcgacaaactttggtaacttgtattatgaaacaattgtaaatatttggtaaaacgggatctaagtttattataagtatattattttagtgttaataattaaataagtaaagttttaataaatcactattttcaataaactcgttgattagcaacgagctgcacagttaagttaaaaatcacgttaacacgccttatctagtagggtgctacaaaagacctacaaatttgataaacgtcattatgaaatgataatgcaactataacgcaacttaaaaaccataatcatattttgatgtatgtgggtgtagatgcattcgaattttctatacttttcgtgatttgatattaatatattcactatgggaaatttgaaaatcaacgttaatgcaacaggataaacattaaatatagtattgaagtattttttttcttttttttttttggattatacctaatttggattgattgg

SEQ ID NO: 366720 - DNA, 677 bp, Cannabis indica
attaaaaaagataaaataatgggcaaaaaatacactaagtggctggccacacatgtgggcctcactagttacaattttaccactttatttcaatcatttatcttttctttcaataatgtcacatttccaatttcgatcatatgaatgtcaaaactatttatttaataattataattaatcattaagtaaaattgtcatttatcttatttattaattagacttaataaagtctcttattaaacctcaaaacctcttttcttcacaattaagtctctgcttagtgaaaattcataaataagatataatctaattttaaaattataattgattaattaaaattaattaactaagtctgcaagcagtattatctcaactagtgtggggatcatgagcctataatcaagcttccaataagtagaactagaatttaccaagtaaattctataacttattaattcttccttgcaccattaaagattcagaattacattctcaattatatagaacactctatatgtaccaagatatagatacgctatggattattcatcattctaagccaagtagtcaaagatcctctatagatgatctacatcgaataaggacaaatttatcgttctacctttccatgtatgttatccttaaaacagttagctaactataaatgatatttcagt

SEQ ID NO: 366721 - DNA, 669 bp, Cannabis indica
aaaaattgagtctttacatctctactctagaatttcaaaatagtgaaaaaagtacttttccactcaattcaagtcaatacttaatcatagtatggaagattatgaagaattctattacctaaggagattcaagttcagatcttggtaatactctgcgacagaaagtaacaagggttagagatttgaatagaaggggtcattatattctgccaccaccaatgtaaggttttctacaactttatatgtatttattcattgtttgaggaaatttatatttaggatgttagattatagattataatcaacatacatgttaataaatctagattctggtaaaacaagttccaacaatacttacatattgggaatatgatagtgctaatcatagatatgaaatatatagcttctataattattacaaatgaaacgataatttcttttgagcttggctgaacatgataaatgattgagtgttcatttcattaattatattagtatactggaataccatttacaagtagctgatcatctatagaggatctttgattatttggattgaaagaatggagtgcatctattattgatatatagagtgttctatgtaatcagcagtgcaattctaaatctatagtggagtcatgagaaattaataagttagaaaatttactt

SEQ ID NO: 366722 - DNA, 634 bp, Cannabis indica
ctattacaaatatcagaattcgcgacggtcctaaaaatgatttttctcgaggaccgtcgctaaaaaattaagtaactatttaaaatcatcggaaaaaatttagtattttcgatagtttaaaattgtaataaacaaaataggcgacagttttttttaataaaatgtgatttttttaatggactcttataggcaacggtttaaaaccgtcgcctatagtataggtgacgattttaaaccgtcgcctataagggtccattaaaaaatcctcacctacttctcgccacatttcccacgtgcccacctacttttttcctatttcccacatgcccacctaattcttctcacctatttcttctccatttcccacaccctaaaatgaaaatcttaaccctccaaaacctcacccacccctccgcaccatcgccctcctctctcgccgtcttcctccctctctcgatctccctttcttctcatctctctcgtctattgatctccacccatccctcctctcgtcggtctccctctactctccatcgcatacgtcgcatacgtcggaccaccaccacctctcgtcggtgtctttctcatcttcgactcatacgtcggaccaccaccacctcctgtccgtctccct

SEQ ID NO: 366723 - DNA, 303 bp, Cannabis indica
tagagaattcatattaggatgttaaacaacatacatggcagtaaatctagatcttggtaaaatcattccaacacctggggcataggagttttcccaattccaaccccagtaactagcgtgcccccagttatttggccaaatgttgggattcctctgtcaacacttgtaaagtgtgtttccaccatcttgttagtaactttcttgagctgtggatcttaatgaaagcacaaaaatagtgactcaaaaatctagactaagacttctaagccacacccgctcgctagattggcaagaatgaaatag

SEQ ID NO: 366724 - DNA, 566 bp, Cannabis indica
tctatcactaaagggtatgaaaatatgaagagatgaatagaggagagtggttcgaatatggtatagaatagatggctcgacttttcctgaaggcaagaattttcatcatctttaagtgtgagccatcactatctatttataggcaaccacctaggtttaggttagaatttattaggcattaaaacattgaaaattaaatggtaattctctctcaaagtggccggccatagaatgtgggccccactttggaattttgctatttttcaataatttttccttattttctcaaaaatgtcatttttccaattttaactacttaaatgccaaaattattttattaataattaaaattaatcatcatataaaattgccatttatcatatttattaattagacttaataaagtctcttaattaataaatatgccctacaatctattttcttcacaattaagctcttgcttactgaaaattcataaactagacatagtctagttctagaattataattgataattaaaatcaattacctgagttttgcaagcaatatggtctcaactagtatgg

SEQ ID NO: 366725 - DNA, 513 bp, Cannabis indica
ggcaaagagaggaccttagaggagtgggcctatgttctcgcccaggctggttttaatcgatacaatattagagccatcaacgctatctactctataattgaagcttttccaaattaatttgcaagatcgtaaaaattagaataaaaaaatgcgaacccaccgtaactttatatatatgcatacaataatggtgggattgcatatatagtttgtgttttattatatcggtattttaattttcaataataataacatctggttcaattcttaatttaaattaaagaaaaaaaaatagtgttttaataactttgagaatttaatgctatatatgtaattgaataaatttatataaaataaaaaataaataaataaatatacatactattttggactctgtattcttgtaaatattttattgagatacaaaatgactctaattttgaaaactaagttagtaaatatttattttttaaaaaaattaagaaaagaccatgttgtaattaagacacaagc

SEQ ID NO: 366726 - DNA, 1141 bp, Cannabis indica
tttttcctttgcatgcttgtgcttttattgtaactttgctgtagaaagaacactgtaggaaaccctagggtttgaaacttctgcaactcttcttttccatgtccttgcgttagctttcagccgtaaggcttattttagaactgcattgcatctgttttccattctgctttcttcaagcttcatgaacttttttgccctaactcaagaaaaaatttctgacttcttgagtttagacttttcttagaacatgatcgttctttaatctgttgggtactcctggtcggcatatttgcttattttttcgcttgatactccgtccaacactcatcttgcgtgttgtcttttgtagatgaacccaggtgagtcttgggagcccgagcaaaaaatagaccaagagctgcttcaacttctgcacgaagttcatcctcatcttcgtgctagtccttctgattccgtacccagccatagaatgatggctcgtacgaagaaaactatgcgtcttgctgacgattctgatccccaggtggctcggcttgccaccctacctgatgccgaacaggatttggcggtcccaatggaggaggaccatgagggggacgctgaagtccaagaagttgaggaactggacgaggcacgtcagagcagccctcccgctgctgagggagaggaagagattgaaccccctaactacggggagtacgatgaggttgggcaaccagttgatgctgacggggacgtcctggttgcgggcgttgattacgtcactgaggagcttgctaaggcggttcctcatacgaggcagggtgccttgggcaccaggtgggtgagtcctccgtccaagatttcggaggcaagccttcgcactctcgaccaggacggatacctgggcgagttggactgctacattcccgcccacgacaatcgcactacaaaccctgataaggggatgtgcgcctggtcgggcgctcacggccagcaaggggcgctgatgcccttgcacaagtacttccgtgatgtggcagacttcttcggcctctgcccggctcagattactcccaagggcattaagtatctgtccgctctcttcgtcctctacgcttcccagggatggggcgctccttctccccacgaggtcgcttgg

SEQ ID NO: 366727 - DNA, 497 bp, Cannabis indica
aaataaatattttttttatttaattatttttcgaaatttaattatttaaaattaaataaattttagcttgtttgtaagttttttaaaacctattattgcttgattgcaaatagtcatggttaacttgttgacaaatccaatgatccaaggcggaatacacagttgtggctaatgttgtttctgattcctgctggatcagaaacctacttctcgagttgtattgtccaattgaaaaggctaccctcgtttactgtgacaatgtaagtgcaatgtacatatgtggcaatcttgttcaacatcaacacactaaacacattgagatagatattcacttccttcgtgagaaagtggctcgtggcgaagtccatgtgcttcatgtgtcgtcccgttaccaaattgctgatatttttacaaaaggtcttctgcgcgttctatttaatgatttcagggacagtctaagcatacgagaacctcccgcttcgactgagggggtgtgt

SEQ ID NO: 366728 - DNA, 1248 bp, Cannabis indica
tatctcaaggggcatataatcacatatatgaccattagaatactgagacacacccaccatttggaatagcaattaatactctcgcaattcaacccacagcatataaaatcctaaaaaagctagctaaatagtcaaaggtaaataagttctgtcaatgtgcgagtattcgaactgtgcatccgaatacccgcgagtattcaaagtatggaacaacgtctatttaaatgtttcttactcagtatgcggttattccaaattacaggtcatttttcataaaattacccagttttttttttacccaaaaaatataacctcatacatatcccttacaaacatgcattttctaaaagccccaaaataccaaaacccagaaaagacatcctttctcaaatacagaaaacaagaaatacaatggaactcgaaactaacctttagtttggcaagttgttcctgcggttactcttgattgcttctgagattgaaggatgctttagatgaacggtagaaatctgagcaaaaggtgagaatggttttgaagtttctgtaagggagagaagaagttaagaaacaagagggaaaaatagggaatttgattcgtatcaaagggtttaaatacccatatccctcattaattgggatcacgacacgtggcaactggaatgcctaaggtcgcccaatccaacggccaaccatggccacgcctacacgaaaaccgaggagttttagtgacgtggcaccataaatgcaataaaaggtaataattacagccgtcatttttcgaaaccctcgatgggacaaccgaaaggtcacctcctcgtgacaacccttcacctgtctctcgagtaatagtttccctctgtgaccgcacctgtcacatcgcgaaactaggggcatgtgttatagtgagatttctctcacctagaaactcgagaccagactcctatttaaaggacacgtgtattcagatttccaatgaaagctgaattgtccatgagagactcctcgatgtttaaacctcgcccaggataaaaccagcgagatactgcgagtacgacctaagtcgaatcgcataactttaactcacattatacaggatggatccaactcgcatgtgtcaggacatatgcgagtatcctctctatatttctgcgaaagcatagagatcaactctctatgatgcgatttggtccctacgatccaatagccttgataaaccgatatagactcgcatgtctaggttctatcagc

SEQ ID NO: 366729 - DNA, 758 bp, Cannabis indica
atcataggtctggtcgcgaccataataatagcagtttattaatttttggagtttttgtttttgccataacttttgactcgagactccgtttgggacgttctttatactgttggaaagctcgttccgagctctatgtgattatttgaattttaaatgccatgaatatattttatgaatgtggaatcatgggttaactcttgttgtgtaaaatcccgatattgtgactaggattaccggcacctggtcaggagcacccgaggatttggaatatctactattacgggatatcaggtaagatagtggttagcatgtagagtatgcgtggtggtgcttatgttgaaaatgatatatgtgagtaaatagtaaccgggattagagttattgccctaacttgagcggtttaatagcctagggttattaccctagtgatataagttgtataaatgctatgccatgctatgtgtatgaatatattgagattttaaggattatgtgttcaagacataatcaagttggactcggtaactagaaccgagaagaaccattttaaggccttattgtatttagacgtgtgagagcaacacgtaggtctacgccacgtagacataaataggcatgtgagcgtaacatgcaggtttgtgtcacaccgggcatatatgaaaatgggcatttacagtttatgtagtatgataagcaggatattgatattttatactgtcttgctgggcttggctcacgggtgctctactgtgcaggaa

SEQ ID NO: 366730 - DNA, 584 bp, Cannabis indica
ctcataaatggccaaggtgtaagtgaagagtggagcttctctggaggtagatgagatatttgagcaaacctttgacacttgtcgcattgttgaacaaaattataggagtttgctcgcatggttggccaatagtagcctattgttagagctttgttgcataaactccgatggcctgagtggtttccgcattcaccttgatgtagctcttggagaatgtaattggattcagccggtaagagacatctgagcaatggccctgagaatgatcgtctgtagagtttcccattgtatagtgtaaatctggccgctttagctcttagttttcttgactcgttcttgtcatgtggaagggttccatcctctaggtaccgcattattggcgtcatccagttgccttgttcattcagactttttacatcttcattggctttccatgtcggtggtcattgcattatcaccacaggaatggtgactccatctttgatttaaataaatgagtcgagattagcaagagcgtcggtatggttgttctctagtctcggcacttggttaatggtgaatttgttgaatcttgaaatcttgtc

SEQ ID NO: 366731 - DNA, 541 bp, Cannabis indica
tatctttattcttttattgatcgaaaatgtatttgttaccgtagtaacttacatcagagctagtgatccaatggatctttttagcttaacatgacataaaacaaataagaaactgtactttaaagtggtctacccgacctgagtacttttgtttctgaaacctttgcgcggagtccgcccaagaggccattcacttatagcgaatgttcaatagtactttaatgtggtctacccgacctgagtactttgaaatggtctatttgacctgagtactttgaagtggtctacccgacctgagtactcattggtagtatttccttaaatgttctccattccagtatcgtggtactaaaatgagttgcattttttcgtcatacttaccaagtttgtatgctccggagtcgagaacttcgaccacctgataaggtccttcccagttgggtcccagtacgcctgacgtgctgtctttggtgtttaggaatacccttcttaggaccatatctcccacaaagaatttccgagctttcacttgtttgttgaa

SEQ ID NO: 366732 - DNA, 871 bp, Cannabis indica
gaaaaatgatcaatgagagttttttcttccacttttacttgatttggttccatgatgtagaattttcaatcttaatttcaacctacaataattttcttttaaccaaacaattttttagaatttcgttcccagcgaatcatacaccaagtattacaaaaattaaaataatagaaaaaattaggaggcggtgcctaccatataaatgcgtaaaataaagactgaatttaaaatatagcgggaaataaataatatgtatataacgggaaacaaaaaattaaattttaaaatatagccgaaaataaataatatgtatatatgacagaaatataaatactaatattaatatatatgtagaaataagacagaattataaatgcataaataaataattatatataatagaaatagaaatattaatattaattataattaataatatataatattataataacaataatataatatttatatataatattaataataataatattttatatatatatcttactattgtaaaagtgttgtaatgaggtgatagtttgaagaccattttaccctttaagaaattcaatattaacaattttatctttccacctctatttgattctctgtcttaattgacagctcatgttttggtaatttccaatatattttgaagctcaaaaagtgtaacagtcaattgacagctcacgttttggttaatgttatgcttttaatatattaaatatcttccattctaccctttaagaaattcaaaagctcaaaaagtgtaacagtcaattgacagctcacgttttggttaatgtaatgcttttaatatattaaatatcttccatttaccctttaagaaattcaatattaacaa

SEQ ID NO: 366733 - DNA, 1038 bp, Cannabis indica
ccatccaatagtgatctaatgactaaaaataaatgtaaccatgatggttacatatttgatgtaaccattgaaacctctccctatatatattatgtatgttatataaaatatgttatatcagttaacagtaagcgaacaaaccctcgttccttctccttcgacaaaacattctccccctatacccattttctttgattttcaacccaaaacttagcgatctaagctccggtagtaacagaatagagaattctcagagcggggaagcttaaggtaaggtttaatttcgttttaagtttaataacaattagtttcgtatagggattttgtgaattagaatagttatgaaggttccgaccttataagattgttctcgggtagtcatgggactagttccgatattttcttgctgaaattgaagtaattttgggttagaaatcgagtttgaaacttttaaagcttagtccgagcgtcaatggcgttttccatttaagggtccgattacgtaaggatggtagtattcatggtatacatgtgccctgtgaagtttagagtgatttggataagttttgatagtgtttcagtgagtgcgaaaattgagatttttcatatttcatagttttagaaattcataggagatcagaaatcgtatttttatcataacttttgacttgggtgtccgttttggacgttctatataccttttttaagcttgcaacaagctttataatatggtgcatgttttagagacaaaatataagttttattatagtgtatttatactgcggggtttggtagtgtttcggtgtttggtagtgatttggataagttttggtagtgtttggtagtgaattgtagtgttttggcatatatgaaatacgaaaaatctcaacactaccaaaacttatccaagtaactccaaacttcacagagcacatatatgccataaatattaccatccttacgtaacaaaaattaaaatcgagcccttaaataaaaaacgccattaacgttcggagtaagctttaaaaagttccaaac

SEQ ID NO: 366734 - DNA, 544 bp, Cannabis indica
gacatttgcaaaaacacggtttttttagcatgttttcgtttggtacgccgtattatattgtattgtattatatttaattgtattttacgcaatatttttatgtaaaactagaagtagtattaacttttatgagcaccttaatatataatattttagtataagttaaagtttaacataatattatatataaaaaaatgatatataatacaattcaatataatacaatacaatacaatacgacctaatacgacgttccaaacgagacattaaagtatcacaaccaacaaaagtgagcccaagcccccctctctccccctctccttgtctctttcttggtggctcgccaccttctcttccctcttcgctcctcttccatcttttgtcctttctcttcttttcctcttctcttctccctctcttctttaccaccttctgtcctcttttcctcttttttgtctacttttcctctttctcctgtcactctagttggttcgctaatgggctcaccaccttcctcctcctcctcctcttctctctctctctc

SEQ ID NO: 366735 - DNA, 572 bp, Cannabis indica
ttgctgaaactgacgagtcagcaaaggctcgtttgtgttcccttattgccatttccatcttttcatcacattcaacctccgtctctagtgttgaaggagatccagaagttagattcggcgcgtagcaatttcgtattccttcttggttgcgaacccgaacagattgcatagcttggtggatccactcattgagatcgttgtcctccgatcttgttgtgacatgacttcggagatcgcgggagaggcggagtagccttacttgcccgagaagtacttgatccaaaagcgaagcaaggtcctccagtgtattaatttcagaggggcgatcataagactctgatctccattgtccttctaattcctccattcgagtagtcgacatccactgaaatcactcgctctgataccaattgataagccccgagatctctaaactcaagaacataataaaacagtagcaataataggaatagaacaataacaaaacaatagaaaatgtgtattgaaagtaggagaaactcaattacaaagtaggggagcccttaggccctttgaagcaactagagatttac

SEQ ID NO: 366736 - DNA, 581 bp, Cannabis indica
agagagagagagtttggaaatttctaatcctttttggtgtgttttctttcaaagtataatcaaagaattaaaacaatattcaacttaaagaaataaaacttaagaattactactaaccacatcccactaaagacaaaataagggtaaattactaatttaccctcttttcaaaaccttaaagtaacttgccacctaggggtattttagtcaaacctaataaccccgaacaatcctgacataccaaatatctatctataatgccagactatttctaagtactaaaccatagaaagaaaaaagtgactctacaagccatacgtcgcattccactgttactggacataaaataagaaaaacataaaatttcacatataacataattaatacacctagaatttatatatatctccataattacgtaaataataattaaaagtctaattttattaaacctaattatctgctaattctcaaattaaagctaaacgatcattataatttataacatgtttagcaatataaggaccattagacacaatatgccacaaattataatccataaattgaaggtaagtttccat

SEQ ID NO: 366737 - DNA, 879 bp, Cannabis indica
attgttagatctcgacagataaatatttgtgaatgcagcatctacgtgtacatccaaagatgacaacttagattagtgtttacaatatgaaacaacgaagaattttttttttaaaaaaaaggaataaccttgactctcccctaccgggacatcgctgaattcttattttaatcgaaattatcctttattttttctcttagctttttcattaagaatttacttagatagtatatcattggataaattatttgcttataatgtgatctatttttttctatgaaattgaatggcgcaaatgactatattctaaacttttgatcccgaaatgatataaatccttgatcttagaaaatctcctacttgtaaatgcttactagaggcaacctagactaagagttagattattagtggtggtccaagaaagaatcattacttaagaaatatttggtataaatttaattttttgactttaaattttagattccaaatataaattttaaattttagttccagattacatgggacattacagtataactttcacaagtttaatatccattttctgttaatggatcaaaactatatgtttatgtatggattatgagtttttttttatattttgtgactagaatccagttagactatcctaagaactctttgttttaactagacataggattcatcaaaccacgatgatatatctatggcatttgtatcttgttcataatgaatttgagaagatcattctcagtaaagaaaaaatatgcttgtatccacttgaaagttagatcatttatatttgaacaaatggatgtactttcatgggttgatatgagttattgttaaattcttagaacgatcactctagattttacctta

SEQ ID NO: 366738 - DNA, 828 bp, Cannabis indica
tctctcgctcctctgctaaagcaaaatatcgagcaatggtactgcagcttgtgaaattacttggttacactccatcatgcatgattttggcattcaacataaacttccttccatacttttttgtgacaacaatgcagctataaacatctctgaaaatcctgtctaccacgagcgcactaaacatgtggaaattgactgtcaccttatccgagaaaaagtcaacaaaggcatcattaaattgaaccatgtcacttccaagtccagcattgcagacatcctcaccaagccactcctcccagctcacttccacaacattttgtccaagatgaatgtcaacaatctctaccatcgttcttgagggggcctattagattaagtggttaggatctgttatgttagttgccacatcttagggaagttagttattgttattgtagttagtcttaaccaacttcctacactatatatattccctgtaatgcctttgtttaaattaatcaatatcaaatcaattttctctgtattctctcctattatataccgcttaattcattttaaattattttgtcttgttctcagttacatcctttatccattagatatatagtggtcatcatccaacggatatcatcatccaacaaataaatattgtctcattgtcttaattagtgatatagaaaataaaatggtgtaccgcacttttctttttttgctgaatggtgtaccaattaattaagtcgtgtcatttgtccaagtagtgactgaaccttagcccaatttttatagtcacaacatgaaatttagaagatagttaacatttttttgtaa

SEQ ID NO: 366739 - DNA, 650 bp, Cannabis indica
acgtctttaattgttgaatctggagatgtctcgatagaaacttgatatattttacgttgattgcgggtatatggaaatcttctgactttccagggttatgagtctcgctttcgttagttggatgaaactataggaagtttcctcgaagtgagacggtcatctcgcattcttgttctgtgagccggtttgacttttacacttagttttcttattgtaagctaaggtatgtgttactcttctccggtgcctcgctattctcctttagcgacttatggtttctcgttaatacactaaccaattcgtacattgattccttgcctaaaactttacattcagcgggttgcaaatatactctgatacttgtgaaattaatgagttattccaaaaaagatatggcatcgattctgtaacgccgtaatgttaaggcactctacagtgctgtctttgctaatcaaagaattttcttgaaaaacgtgtcaaattaaaacttttatattaattattaaactttataattaataaaattatttacaagttccgggatcccgttttcaaactttttaaacataatacttcaaaatacataatattcggtcgcacagtgactacaaaatacaaccccagatgtcccgagaccgaacactccaggt

SEQ ID NO: 366740 - DNA, 340 bp, Cannabis indica
ttcaatctccatattcctcccagcactttcttgagaaatctcttactgtattctgagtaagtacagaggcggcctctcaaattaaattttgaaaccgtgattgacaagcttttatccacttctcattcttcgtcttcatccgtgacctaaagattgtgggttttcttcagtatctcgtccattgcagaggcgaacacctcaatcccagaagatgtgaacccttcaaaagcgagggaagaagacgggacttggccagaatcgaaccctataaagggagttttatttgcacttatattttaagttttttttttcataatatttaaactataatttattttta

SEQ ID NO: 366741 - DNA, 613 bp, Cannabis indica
aaccttgacagccagaacacttacaatggcacagaaaccttagccgtgggtgatggtaagaaattattaatttctcatattggtcactctacaattccatcttctaatccctcatgtcctcttcaattaaagtctgtcttacgagtaccatctataactaagaatcttgtaagtgtatcgaagcttgttgatgataatgacatatttcttgagtttcacaaacattgctgttttgttaaggacaagcaaacaggggcacctctcctcaaaggaaagcgtaaagctggtctatacatgctaagtgaggattcagagatttctacttcagctttacaatgtcaccttactactacatctcagtttgatcaccattactcttgtactgatcatataaagcactcccataataataataatagtgctattgattcatgtaatcaactttcaatgaataaagacagtacttcactttccaattctgctgcattttctgcaactttttcttgtacagatatcaatatatggcattgtaaacttggacatccctcactagccaccttaaccaaattgcttcctcaaatacctcataatggatccattaaaactttacagt

SEQ ID NO: 366742 - DNA, 799 bp, Cannabis indica
aaatacgagggcgggccgcggcatgcccagaccatgccgcggcacctgggaccgattcccaggtccactcagaggagcgggagcatgccgcggcatctgggtgcagaacccagtaaaccaacagctcaacacgatttttcagcaacaaaatccaatcttttccatccaagaactcaaccaaacattcaatttaccaaatattgatgctaacaattaacaaggaaataaaactcatgtttcaaacatcaacttccattaataaacccaagatttcatattgcatgacacaccaactcatgctttaaacttgtaatattcaaactcaagaactttgaactaaaacccaaaactcacacataatttccagcaacaaccaaccataaggaacaaataaataatcgaattcaagcttgaaaaacatccatgaattatcctctaagctcaattcaacacaaatcaagaaattaacaagattaagcatccaattcactaagcatgcaaaatcaagaacaaacaatctcaagcatgcttttatcaccatatttcagccatgaattcaacaaacaactcatataatttcagctagaaactacctcaaatccttgcacaagatagcaccaagcttctaacacaaattttccctcacaatccaccacaaaatcaagctatttctcacaaatcaagctttgaaaaataagagggtaagagagggagagggagagggtgagaggatgagacaaccagaaaaaattaatcttttttcaaaaatccatttaattcaatgtaaatcaattatggt

SEQ ID NO: 366743 - DNA, 696 bp, Cannabis indica
gataactaatcagattgtaaagagttttatttagggcataaaacccaacactggatcccaatttttcccttttgaaaattctatttggtccctaaaaatagttgaatctcaatattttctgaagacggagaagatgctccaaaaaattcttgaaaaactccattttaaatggctcaagttgacaaaatgccaacctaggccagggtcagccccaagtgtcaactttggcgctaagccccgttatttgtgcacaggaattgttgtttttcctctagacagacatgtttccctattttgaatgaagaaggatttgatgcaaaagtcagatctctgattagacacttagaaggcgcccaaattgatagattgtcaacctgggcgttgggtgctcggggccccggagtcggaggtgctcaaaaatcaacttgctccaattctgattctgatgcatcaaatatatccatggtatgtctagttgatgtcccaatgcaagttttgaccactcctggaaactaaaaccctaattcaagatgtcaacctaggcgacaagtgaaaccctaggtcccaatttggcttttgggttgtaggttcgtgtattttatgttctcggggtttggattaggtttttccatgtcttcatggtacataatactaaaagatagtgggttggattcaagttattaaagtccgaacttc

SEQ ID NO: 366744 - DNA, 479 bp, Cannabis indica
tatacaattcataattgtcataattaatcaaaaaataattttgcaaattactattttaccctttagaatttatttcccacataagttaattctcgcttgaaatccattcataaaattaaaccttttcctatacagtgttgtttagaggtgactcgagaacaatagacctatatttcaaagctccaataaatcaaatattactatcaatctcataaatagaattatttggtttattaattttattattacaccactataaatatatcatcgcactctttgataatagagaattatatttacagaatttttacctttctaattatctcttgattccttatgtaccattaattcaaatgtgaatagttaatctataacatattatagatttagatccaactattaacacttttagaattaacaatataagggaactaatattcgatcaattaggaaatcttggattttactattatataaca

SEQ ID NO: 366745 - DNA, 582 bp, Cannabis indica
caattccccggcaacggcgccaaaaacttgttgcgaaaattaataatagtacgcaagtgtacgtaatcaagtagtaaactcacgcaagtgaggtcgaaccacagggaattggattaactaccactaaattatacttatgattctatttggcaaatcgacaatttttaggattaaaacaaaataaaattaaataaaaatctttaagaaacaagtgaatattaatcaagatgagagattagggaggagaatcgagaaagttatgaattttggaaaaatcgaggttcaatggtgtcgagtgggtgctcttgagcaccaggcgttggacaagacacgcccacgcgcgcgcatctcagacaaaaaccttgtttgaagctgtgtccttctgaggagcaccctgcaatcccgccggtgagcaccctgcaaacgccgagattcctcgactgcgcttcctttgtgcgtgcgcgtctggcccatttgcagcctcctggggctggacgtgcagcctactgggctgcctacacctaaaaacccgaattttgtgggattttttccccaatttcgatttttccaattttcaaaccc

SEQ ID NO: 366746 - DNA, 877 bp, Cannabis indica
agccaaagtgacgtactcgtgtataagagtcattcattccgtgggtgtaagggcccaatggaggcttgaagcgaggacgttacattattacacatatatatttatttacatatatatatatttataaggtaaaaaatttaatgtattttatagttgttatagtataatgtgtaaaaaattatttggaataaatttcatgtgttttaaagtattttttattgtaagaaaatatttcggaaaaaagttttagaaaagaaaaaatttaggtttgtgtaaaaattttatttatttaatttattattgtaaaagttaattagttgttttaatttagtttagataaattatgttatgtgatttagtttaggttaataatatattaatgttatatgtaaagaaagtttagtatatgtgtagtaatttataattgtgttgtatatatttatttattatttattttatgttaatatttttttctcaaaaaataaatgttattgtttaattttttaggagttaattgattttttcggtggtcaaataaagtcctcttcttttatcggtggttctctgagcaatctcctcattcttggtatattattgtttaattgaataagattatgtaatatgttaaagaatttgagaaaattgaatagtctcaattaaacatgttaattaaaaattgatgcatattttaaatttaacttttaggtatcaaatcttttgtgttgattgaagagtgcacaagtagctagatttattggaaaaaagataaaaccactaaaactttaaaattctttatttagtggagtttgaatatcttagatattcatccatagtgaagtaggttctgcgaatatacatgtactgcggtcggatgggt

SEQ ID NO: 366747 - DNA, 1111 bp, Cannabis indica
tggccacgtaattacatagtaactgtgtaattagaggtaattgggaggcctcaattactctctccaattctcatacctctcatgagaattgggtgtaattacattgtgtaattacataccaaagtaaattcaaattatttaattaattgatatgatattttaattatttttaatgtattgactttcactttttctatcaatcatcaaacacatatacattcccatatacaacctttcatcaacctattttctatatattccaaatctctcaaataaagaagaaaatcctatcaatgaatataatattgctatagtgtaggcatgataatttgtttcttatatatgtttaattttagagatataatagctcaaaatatatggaacgcaagagcaattagatagtctgaaaaaaaaaattattttaaatatttgctactaaattgttatagttttgactttattttatgaagagattattattgatttatatattattaattaatgaaatttatttttaaatattataatattaatttactgtgtaattactaactatcatgccaaacatgataataggaattcacatgtaattaccacttgacatccaaacacaccttgtattttaaaatacaatgtaattactatacagtgtaattactagggtagtaattacactgcatagtaattacatagttgtttccaaacagaccctaaatatcaaagaacagtatgaagttagaattggtgtattaagtattcatttaaatttatatgttagaaacttattttaaagtgtgtgtcatttttagattatatcttttgcattgtatgttttttttattatgttcatgacgaaattagttttctgattccttttattatctttatcccattttgtatgcttaaattaactctaattttttaaaagcaaatgaaagattgaatgttaaaataaagaataaagttagaagtttagttattagatattcatatagaatttctacatttgaaactggtttttaaagtttgtattatttttagattttttttttgtattgtctttattatgttattgttgaaactattttttttctgctacttttgatgaaat

SEQ ID NO: 366748 - DNA, 431 bp, Cannabis indica
cttacgtcctttttcatgggagcgggtttcttgtatagagctaatgactcagtagcaatgaagatagtctctaaatcttctgtcaggatagaaaaagtggtaaacttggcaggattttccgtaggggtctgttcagtttttccagtaaactttccctttttcccattgccttgtttgttgttattgttgttggaccgtttactgcccgagcttgaatttcttgggtactgagggagctggacggatgttctagcagagggagcttttggctgggcaggtttaagctcaacttcttgtaaagaccgcttagtttaacagttaattacgtttaatcatggaaaagttattcatagctatttaaataattattatgctgttattattgaattttgaaatgcattttatgtcatttagtaattttcataattttg

SEQ ID NO: 366749 - DNA, 562 bp, Cannabis indica
gttaatacttcataaaactcaattttacttctcctatttcaaacacctaatcctctctttttctctcttctctctcgctctctgaactaatcaccccaagaactcgacctacaacccgtcacccacaaccacgacttctccattgataatgttgtcaacaatttctctatcaaccacgacttctccattgataatattgtcaaaataataaattgtataattaatgtctattatctgtgagttgatgttagatttagcgtaaaaaatgaccgaaattgagttgattaatcaaatagggttcatatattgaattattttttattaatgggattaatcatgaacaataatttgaattaatcttataatcttaactttttaattcaattaataattatttgtcacgtaattattaagtcttttccatttaattttccttttgttgatgatgctaatttattcatattttgatttctacaagttttgtgttcagaccattaaggtagtgttctactaggggatctaacgagttttgccccttcgctaatggcctctaagagttcaa

SEQ ID NO: 366750 - DNA, 741 bp, Cannabis indica
aaaatacaaaattatgagatttcatgtcatgccattcattatataatattttgtgatacaaattatatatcctaaagtataatagcattaattaatatcaataaattagatatttttaaaaataattaatacaatattataattaaaaaaatgtattaaggcttattattaatatcaatggtaaaattataattaaaaaagatacatttattgtgtcaaatttatcataatttttagcatgaattatcaaatttggtataaaatttaacacactatttggagaactattttttttatatataaaaaagtgctaaaatgtagcactacaccactattttaacacttaattggagaataaagatgttctttgtgacagtcagtagtcccgtgatccgtaaggggaactaacgggtaagctgtgcaatcccacaccgcctggggaaggtcaagtgggatgattctgagaccgtgtaagtatgggactatacagttgaagagggcttaaatgaattgattggtactacctatatcaacaaggtgcatcttgtatttcggtagcccatcacgtaagaactcaacagttaagcgtgcttggcctggagcaatttcaggatgggtgacctcctgagaagttttcccaggaagcgtgcgagtaaggacaaagcacgctggaaatacttgtgttggtctgtagggtcagtcattagtccatgaagcagccaaagtgacgtactcgtgtat

SEQ ID NO: 366751 - DNA, 457 bp, Cannabis indica
aatattaaaattaaaaaaataattattaaatatatacttaaatataatacattctggtcgggtctcgggtgcacacccgaataaaattcaatggcctttttgaaacccgaacccgatacctgaactatgcttcttcggttcagacccgacccgacaatatgggtttttggttttttggctttttcagcatcgggtcggggcgggtggtcggatttttcgggttgccgcgtcctaatgttcagccctagatccggatacaaacctggactcggaccaagacccagagtaggatcgaaatgctggacctagatctcgaccgtgattctgaccaagacccaaacttggacccgcactcgggacccgaacctggacccagatcggggtccagacctggacacaaacaaggacacagactcggaccagaactcaaacatcgacacctagaatcagacccaaa

SEQ ID NO: 366752 - DNA, 1043 bp, Cannabis indica
gtcccggaggctgatggcttgatgcctgccaccgtcacgatcttttcgagctggtgggcacaagtcagcgtggagtggagctcgtccgcctcccaaccgttggcacgggacttaaaattctcctgagccacgggacccctcatgacctcttccagggtggctagttgaaccgcccccttcttggaagacttggaactagatgcagaagcagacattttggttctgaaaaaattgagaaaatccagcagttaggccccaaaccaaaccctaatgttaaagaaagggaatgggagtcccctaaccgctggaaagagggcccctccggacgcttgccaaataaggaaacaacaagagactttccttggcaagcatcgggtgcaaaaatcccaaaggcagtgacattgtaaaaggaaagaggaaaaagggaaaaaaaggtgaagccgagaaagcacgaactactctaagccctaaaggcgttattacgaaaggtaaaggcgattcctcaaaagaaacgtagtaaaaaggagcaatcaagacacaaaaaaagaggaattcaacgcatcacacagcaaactcaagcaaaattatccccagaagttcaacattcaacccagaaactgtaaacatgtaatatgaacaaacagtaagcaagtgtaaagtgtactgagaacttacatgaagtttgaaggctgggggttggtgttgattgacggtaaagggatgactggcaacggcgaaggaagagaagcaagtaatttatggtgcctgaaattctttcctctctgtgaaagctctgagaaaatttggtgaaatggtgaaagtaaccaaatgaaatgagaaggctggcttttataggccagaacgggtgtgagacagctgtgatcgactatcatcatacggtcagaatagcaatcgattcgcattctacagatccaactgttgggacaagcgtgcattgttaggttatatttagcctatgtttcgggtctataaagttagcattttcgcatctattggtgtcttttggagcagttttacgcttg

SEQ ID NO: 366753 - DNA, 675 bp, Cannabis indica
tagggttgtgtcagttctaactgccaatgtcaagctgccttctgctttgtaaacccaattataaccctcaacacaccaaacaccatcgtacgatacaacaagaaacaccgtcgatcctgcaatttaaaacaaaacaaggtgagtacaggaaaaaataacaaatattgacatcccatcgatatccatcgacattatgtcgataaaaacatcaacagaaagggtgacagttcccatcgataaacaatctacatactatcgacattatgtcgataacattatcaaaaatgagggtgacaatcctcatcaatatataatcgacaccatcgacatactattgatatagactccactatgcaatttgcatgtcagacacgtgtacaatggtaattaatccattcaactatcaacaagctatcgacattgtatcgatattcacttgacaaatacacattgcatgcgtttcatttgtacggttacacatttaatgttaataaattttacctacgttcccaacaactattcccaaccgccacattgcatgtcagacacgtgtattatcgataagctatcgacataacgtcgacatcttatcgaaaatatgtatgccgtttcatttgttttgcatggtgtcgacaaattatcgacatagtaatcgatattctgtcgacaaataca

SEQ ID NO: 366754 - DNA, 770 bp, Cannabis indica
gagtgtgaggctgaggcaggtggcctaccatgtttcctttaatgccatcggcgtcggagctcctgagattccaataaaaagagctttccaattccaaactcaacatctcatctctctaatctccaccgtccattcttttggccgtttcctattctacatctctccattttatttatttatttatttatttattcatttgttatcgactcccttttcctatcatctcttaagtaataatattcttcactacatctgtcaattattttttttctaataatgaacaaacatttcattcaaaatccataaaaaagagtacatcaacaaaaaaaaaaatgaaagaaccatctaaattaattaactatccatcttgagtgcacacagtgctaattcatgaatacgaacatgaattaagaacacctcaaaaaaaatctatatctatatattcaaataaaacaaagcacaaacacgataatgtggcagtctctatgaacatcttcactatttccaagcattcaaatttctctctttttttaataaaaagatattatttttttatgtattatatttatcattatttattgctaatttattattatttttttgaataattactaatttattatttaaaaatgaaacttctaacatttttttttaaaacatcttttcatcatttattgctaattggtctttccctctcataacaacatggtatttattcaatcgacccccattttttattattttctacaactatctctctcaattaaact

SEQ ID NO: 366755 - DNA, 727 bp, Cannabis indica
ttatggatacttggttgaattttctttaatgtcttggtatattttatttaatgttttcaataatatatatgattagattttaagtttgaaaatcattaaaatattgtttaattagattttaaattaaattaatattaattgttttaaaaaatggctacattaacaattatgcataactatgcctagtttttcttgattaatactcacaccatgatggataatcattgtagcgaatatagttaaataataataataataataataataataataataataataataataatgtaaaaaaattctcaatccacacaattctcattccaaatatcaatttaaattaatcatataataatgttttcttttagaaataaaaataaataaataataataataataataataataatataggacattgtggtccgctccaacaaattcaaagtttacttcaacattatagtatttataatttgtttattatttttaagggaagtcagcggcttacattttaatcaatcaaaattaaaattttacctttttttttattatcaagctcttgatttttcctgaatgaatttccgtttcaataataataataattaattaattttttatcttactaattttcttctttagtttttgtcttattttatatgatttgttcttaaaattttcaaatccaacttgacataactctggatccctactttcattgaaaaatgag

SEQ ID NO: 366756 - DNA, 777 bp, Cannabis indica
gagggtttggaaccctaatgcctagcagggagttagttatctccaataggcgcattaggtttataccagttaggaacgaagatagggagttgagtgctgaccttatagagctggaattaacagagtttgacatcatacttgggatggattttttgtccaagtgttcgaccagtttagactgcaagcggaaaatggtgacttttcagccagaaggtgaagatccatttatttatgttggattggttcatgggttttggatcctagttatttcagtattaagagctagggatctactgcacagtggctgtgtaggattttgttgcagttgtgattgactccagcagacccgagacatttgggcctgaagtagtcagagttggtaaagactttctcgacgtatttctcgaggagttttcgggattgccgccacaatgagaaattgactttgtaattgatttggcaccttgagctgaacatgtctctaaagctccgtataggatggttccaacagaacttaaggagcttaagttacagcttcaggggatggttgatattgggttttacccaacccagtgtatcaccctgaggagctctagttctgtctgtgaaaaagaaagttggttccctcagaatgtgtattatttatttggaactaaaaaagttgacgattaagaataagtatccgttacccagaattgactatttattcgaccaacttctaaaagacggtgttttcaaagattgacctgtgatctggttatcatcaactcagaattc

SEQ ID NO: 366757 - DNA, 824 bp, Cannabis indica
ctgcagtatggctggttgatttcaaaattgttggcatcgatggcaagtggtcttatacaagatctggctcctatcaagttaggaagaaaatagtccctcaggctacggtcgttgttgttgtgaccattagtctggtcttctacaactcctccattgttgcgattatttgcgttgtcagccatgactccttcttgttcaatctctactgcagctctttccaatctcttccttcttctgttctttttacaagtcttctctatttcaggatcaacaagtaatctgacaattgcaccttgacttctcatacactcattaaacctgaaaaagataagattctaaaacaaacaggattagtactataattgaaaacaaaaccaaattagaacaaaatttaatttttaataatatattaattatcgatccccgacaacgatgccaaaaacttgttgtgatattttgcacacgcaagtgtacgtatcgttaacaagtagtaaactcaccaagagtgaggtcgatcccacgagaattgtagttaagtacgttaaaattaaacttttacttctatttggttgaataaaaattaagcaaagattaaaactagaaaataataaaaacaatgaaagaagaagcaattaaactaataaggaaattaatagttaataaaaactaggacttcgtcttcaattgtttttattgattatggcctaatatgattatctccctattatcaatttctatgcaatagcaggtttactaaggtaattaatagtcttctcagatatataaatctcaatcacatgcaaactttctactctcgtgataaa

SEQ ID NO: 366758 - DNA, 698 bp, Cannabis indica
ggcacaaaacccaacacttcctgctcagggcatcggccaatacattggccttccaaggatgataaaggatctcacagttgtaatccttaacaaactccaaccaacgcctctctctcatattcaaatctttctgggtaaagaaatatttaagacttttatggtcggtataaatttcacatctctctccatagagataatgccgccaaatcttcaaagcaaacactatcgcagccaattctaggtcatgagtcaggtaccgctactcatattctttcaattgacgagcagcataggcaataacccgatcgacctgcatcagtacacaccccagaccctgtctggatgcatcgcaatacaccacaaatttctctttatcagaaggtaaggctaacaatggagctgtaataaatctctgcttcagctcttggaagctagcctcacacttgtctgaccacacaaaatgctgattcttcttagtaagctcggttaagggtgttgaaattttagagagcccttacacaaaccgacgataatatccagccagacccaagaagcttctaacttctatcactgttttcggtcttggccaatccctgacggattctatttttcctagatccaccttgatcccatctttgcaaacaatgtgcctaaggaaggacacttgagatagccaaaattcgcacttcttgaatttg

SEQ ID NO: 366759 - DNA, 494 bp, Cannabis indica
cccgacccacacactctctgcctttctcatgaattcttaaccctaggagtcgatctccatcactttaaaatgagaataaagaggatcgtttaaaccgaaaatttgaacgatttattctcacaattttagctactgtaaccgtatgtataaaaataataataaaaataatatgtgtatcaactataacatataatattattatataataatattattaatattaccatattatatctctaataaaataacaacaataatataacaaatatattacaccataaaataaattcacataattattgttgttatacccacaataataatatgcacaatataaataattaaattatcacaagtaattaattattaatttaacgttccatacaatgcaaaaaaaatatatatatatttatatatattctaactcaagaaattttttttttaggtcactaaactctcatatgtttaataaattttcttaatatgcaaattaa

SEQ ID NO: 366760 - DNA, 633 bp, Cannabis indica
tcgacacaaaatcaaaaaaaccccaaaatctatctccctaaactcagtttcttccccaaactctaaaatttataaatccaaacaaatacatttcaggtttttcgcagattgtgaatttaaagttaaaaaaaaataaagaacaaacctgggtattgggttcgatgtctgtgtaggattttccagtcgtgggtgggttcgcgggtctcctcggtcgccgtgggtacgactgcgtatggccgtgggttcgtctgggtcgtctgggtcgtgcgggtggctgtgggttcgaggggtcgtctaggttagactgcgtatggttgtgggttcgacgtcttggttcgtgtgtggcgccgattggttggggcgttcgtttgggtggccgtgggttcgaacggtggtttgggtttgtgggtttcggtggagctttggtgatctgcgtccgtccgttcgtgggtttgggtgtgggttcgtgagtttgggagagggaaagaagagagagaatgtagttagagggaatgtgggaagtttgaaatgagagggtatttttggaagaaaagagaaagattggtatattttttctatgtgttataattaggtataatttaacaccattagtcatttttaagcataaaatgt

SEQ ID NO: 366761 - DNA, 427 bp, Cannabis indica
aaattattatcatcgtcctccttttatttctcccgcaaatcaatgccatactcagatcatcgaattttatgaaagtcttattatgagaattcgatctttagtgcatgagaaaatctgctttactgtacacaaagaagaagggaatacaacgtcaacgtctttttctgtgaggggttcaagagcagtcgtttgagagtggttcggatcggctcaacgacgtcctccatttcagatttttattttcatttgttaatttactattattagttaattctgattaatatttttatggggttagaattataaggagctcattccttaattaattttgatgttgagattgtatttatgtggttgaaactaatttagttttcccattagtcttatcttttgacatggttctttagtcttttccttttagttttct

SEQ ID NO: 366762 - DNA, 508 bp, Cannabis indica
tttttgtacttgctattggttctttaaatatgtttaatgtcatatcggtatagtactcaataattgatttgtaattttttttttttatcttttgtattttttttatgtatggatgatctttgtactatttactattatttttggcaaataattactaattagttagtaattttttatgaatgatctttgtactatttaccttttttgttatcttttatgtttttttttattaaatggttttttgtacttgctattggtacccttaatgtacttatgacatgtttacttaaagagaatgagaattaatggtatggtattaattctcatacaattgtttactaaattttaaaaatggagaaaatagtggggcccacacaaattagagagaaaacaaagagaaagattctcccctatttttataggaatacttttccatttcctaacttagtttattttaattttaattttattaattaaaaatgaaaaagacaaatatgccctttaaaaa

SEQ ID NO: 366763 - DNA, 735 bp, Cannabis indica
ttgtaaaggtcgattttgacctttgatactgatattaatattcttgttggtgtagggtaaattggtaaaaatcctacagtggtatcagagcctggtttggctaaggaagatcaacaagattcaagggaaaatatcaggaaggaattggcaagaaaatcttgaaagaaagattgacaaaaaagaacaacactcaaaacagcaagaagatcaagattctgaattaaattcagattcagaaacacaaactgagaatttctaaaactctatctgtttttttaattttattaatatgagtaacataaaagttgatattgataaatttgatggtacaggggattacagaatttggagaaggaaaattaggtctctcctagctcaacagaaattactaagggtgctagatgaacctattgaatggccagaaggaacttcaaaaatacaacaagaagaatacctagaaactgctactggaattctaatcttcaacctatcagatgcaattatcagattggtagataaagaagagactccatcaaagatctggaaaaagctagaagagcaatttcagcagaaatctttgacaaacaagatttatctcaaggaaaggatttttgggttcaaaatgaaccaatccaagtccttagatcaaaatcttgatgaattcttgagaatgcacattgagcttgcaaactcaggggaaaatgaggctctcagtgatgaaaatcaagccatcat

SEQ ID NO: 366764 - DNA, 1235 bp, Cannabis indica
aataatattgagaataatattttttaaaaataggaaactaaataaaattgataaaatattacaaaaattgaccaaaactaatttataaatactaaaactaatatttatgtaaatgtagtaaaaccaaataaaagtcactaaaataaactaaaaatacttgagaacaaaactaatttaatacccaaaaagatagaaataactctattttcatagagttattagcgctctcactcaattgtactaccatgttcccaagatgtaagtattgggaagaatcaattggtcaactttaacgaacaagtcaaagaacataaatagtacaattgaaccagaacctaaccatcttaggattgagatcattgatctaagatcaactaagtgatatccacttagaaagatattacgaacggtaagtttatgatattttttctatgtgaatatctgtccattctgatgtataacaatacatccaatacaagcttactttaccaatactttggaaaatatatacaagtatctaagtgtaagtaaaccatattattgattatcatatcagtagaaatcctgtgtaatgataaatcatgagactaatatttaatcacataatcttgattactttctactgtgtagataacacaataatcgtgaataataatgtgataagaatctaaaagaatttataaaacaaataaatgaccatgaagcaaacatgtgaaccaagcaatatatcaaataagtaataaaataattttgttcatttattgatagatgaatattcaagattacattgaaatagagttttagtttgggtatgaaactcaacaaactctcacttgcactaacataaaacaatcagtacatttcaattaatcttaaattctttctgtgcttttcaaatatggtatgtgtcaaagtcttggtgaatggatcggctacgttgtcttcagtatcaaccttttctactagtacgtcttcttttgccacatattctctgatgatttggcattttctctcaatgtgtttactcctcttgtggcttcgaggctctttactgttggctatagcaccattgttgtcacagagtaacactagtggtttttccatatctggaacaacaccaagctctgtgaagaactttcttagccagactagttccttagcagcctcagtggcagctatgtattcgacctccatggtagagtcaaatattctgattgcttgacacttctccaaac

SEQ ID NO: 366765 - DNA, 826 bp, Cannabis indica
atttttccggaattttgtaagaagaatggtatagtcaagagttttgcttcagtagctcacccacaagcaaatggacaagttgaggcagtaaacaaaacattgaagactacattaaagaagcgcctagaggctgccaaaggaagatggccggaggagctcccacaagtactctggtcctataggacctcacaccgaacagctacaggaaatactcccttctcactcacctatgggagtgaagccatgctcccagttgagacccaagtcccctcacaccgaaatcagtactatgaacaacaccgtaaccacctactcctggaggaggccctagacttactcgatgaaagaagagaggagtcacaattacgtaatgccgctcaccagcaacgggtaaagaagtattatgactctcgtgttcggaatagggagtttataataggcgacttggtgttaagaagggtgttcttagcgacgcgtgacccaacagctggggtccttgggcccaattgggaaggaccgtatcagatcgaaactgtcttgaggcctggagtatacaagctcgctcgccttaacggggagcaagtgccgcgagcgtggaacagtgagcacttgaggcgatactaccaataggtggaagtcctcctcggtcgggggtccttaccttactttgatgtttagccaagtttcctcttagtttatttatttatttagttattttttcatgagaaagatctttattagattgtcatattcttagaaattcttaaagttgttattttcaacgcttgaataaaaatatttacttatttattcaaaatatagttac

SEQ ID NO: 366766 - DNA, 613 bp, Cannabis indica
acctatttttcaaatccatatcacagaaaaaaaattaaacaaagctcaaaccaaacttaaactaaatttaaataaatctaaattcaacaaacaaacacacgtatatatacacaaaatttcactccaaaatctcaaaccttgaaaccctaaattaattttccacaaccattatctttccacagatctgaaaaataaatatcactataatacttaaaaggaacatttatacacagatctattaacaagtttgcaaagaaaaattatggaaaaccctaaataagagagagagatgggtatcgggcagacagagagaaagagaatagggctcggtggtcctcggccaatggctcggtgtcctcatcaacggccaatggctcggtggtcctcgtcgacggcggacctggacctgcatcatcgagagaaaagagggatgagagagagagacaatgaagagggttgagagagaaagaaatagaagagggctgagagagagagagaggcgatcgacttgcttgggttaggggagcctcaacgatggcgtgcgcctggcacggtggtcgtcggcgacgacgccgtgggttaggtacctgcatcgagagagagagagagagag

SEQ ID NO: 366767 - DNA, 513 bp, Cannabis indica
ggaatctaaaatttaaagtcaaagacataaatttataccaaatatttaatgagtaattattctaggttggaccaccactaaagtactaattcaactctaagtttgagttatctttagtaagcatatgaagaaaattttctaagattgaggatttatatcattacaggatagaatatctagaatatggtcatctatgccactcatttttataaaaaaaatagagtgacaacgtaagcagaatacttggacagaaaatccatcccaagtatgatgtcaaactcagttaattcgaattctataaggttagcactcaactccctatcgtcgatcctaactggcatctacctaatgcccctattagagataaccaactccccgctaagcattagggttccaatccctctttctaggatatcacaaggcctacccaaaagataattattcgcgtagccacatatgagtgtgtagctcctaaatcaaataatactgtaaataaggagttgttgacgggaa

SEQ ID NO: 366768 - DNA, 741 bp, Cannabis indica
aaaaaaaaaaaaacttagcagtaacatttaactacactaaaatttttactctttgttgttctaaaataataattgtattccttgttcttatatataaaacaaaaattatttaaatatgtagattttgtaaaaataaaattgcatagtaaattaaaatattgtatattttcataaaatttaataaaatatttatactaaaagaaaaaggtatatgtgcaattttttttttaacatatggtgtgcatacattaatttaaacaaataaatgtaagtacaaaatttttttataacaaaaagttgtttacacattttcgttaaagaaaataatgtataaaaaaagtgtactatcttaaagctgaacaaaaaatataaaaaaaaaattactaatagaggtggtatttggtaacacttttgttttttaattttaaaaacagaaatgaaagtagatttttatttttaaaattttatttttcaaaaaaataaaaatgtgttctagctagaaccacttttgtttttaaatttttaaaatagaaaataaaaatgtgttctgtaaacacttttatttataattttaaaaacaaaaaagattcatccgaggaaggtgactaacgagagagagaagcaaaagtgaaaaaaaaaagtgtttttaaaattttttaaaatcattaaaaaatatttttaaaatttactttattttgttttttaattttaaaaacgaaaaaagaaatggagttaccaaac

SEQ ID NO: 366769 - DNA, 793 bp, Cannabis indica
gagggatatctgtcgtccatacaggatagtattgtctaatgttgacaggtggtcgtgtgccactaatcatgtatagtaaggagtgggcgttgcacaaaaaggtaggttattttttgtgttgtgcacctttcccaggtctgatttgggggacaggcccctaattctatgggatttagtgtcaacgatgtgccacattagaaagacccagaaggttggttttcgcgacacccaagaaggttggctaccgtgataccctttggaatacccttttagatactcgtggagtatacgtttatgtctcatcagacacttggtaattcgattgagtcagctctccgaattcgttgctctaacttcattcatagtcaagtcttaatcaaatcccaactatcagtaagccagcttcatgcttgggttggaccactatctgattaggcctttagaataggctcacaaattgacttaaggataccacacgcacatgtgttgtttgtctggaaacatgaataatacttgttataaaggcttttgtttcacttttaggaatcgcaatagtacaaccaattacatagccaagaatactctagagatagagttagtgcttgatggaatgagaaaattctctttgctgcttatgctgctattgttccaaataagcatactcttgtaatttattttcttcttttgtgaaaactttttcttttaaaaaaacgagccaaatcttctgtcccaatttttttttgtctctcttatcccaatccaattaaatactccacttcaattaaatgtatat

SEQ ID NO: 366770 - DNA, 598 bp, Cannabis indica
gcaatgttatgcactagacctgacatctgttatgcagtaggaatcgtgagcaggtatcagacaaatccaggacaggaacattggagtgctgttaagcatatcttgaagtacttgaatagtacaaggcaatttgtgttagtctgtaaaggtggtgctttaaatcccgtaggctataccaattcagatttccaggcttgtgggtcgagcagtggtttggagaagtgctaaacaaaccgcgatttcagactctaccatggaggcagaatacatagctgctgcagagactgccaaagaaattgtttggctgagaaagttcttcacaagtctcggtgttgtccctggaatggaaaaaccactggttttgctgtgtgataacactaaagccatagccaacagtaaggagcctcgaagccacaagagcagcaagcatatagaaaggaaatatcgcatcatcagagaatatgtggcaagaggggatgtactggtggagaaagtggacacagaggacaacctagctgatccattcaccaaggtcttggcaggaactgcattcgaaaagcaccgtcagaatttaggattaattgatatgtactgatta

SEQ ID NO: 366771 - DNA, 502 bp, Cannabis indica
atgaaaaatcgaagaaaaaaaaaaatgtgagctgtacggatggtatgcagttgcatactcatccccgcgcgccacaaggagatcagccaagaaaactcggcgcaaggagtaacttgcatgatttttgcgcgcggaaaggggtatgagacacccctgggcgtgtcgctcggacaaaatcatgtgcgaacatgcatctgaccgagggaaactcggttccgctcgcgtggggtgtgtgtgatcatcctatcttttttcaaaacttcaaaaaatcataactaattcaaataaaattgaaattaagttctgtaaaaaagtgaattgcttatttttttccaaactatccaataacaataattccataaatgaaaattcaattattgttcataaaatttacaaacatcaatcaatcatcaaataacacacagatcaacattaaaccatctaaatcacacacaaatcgttttaagtcctaatttcttgaaagtaaatcaattaccatggc

SEQ ID NO: 366772 - DNA, 610 bp, Cannabis indica
agcaaaggatttaatcaaatcctttttccaatttagaaaagtcaaagaagaaaagaaattagaaaaaaattagcaaacttgaaagagaagctctttcttctctctctctcttcgaaggcagcaagaacaaggggaaaggggctgtgatttttgtgtttgaagcaaggaattcaaggggtctttgaagctaaggtgagctctagtttttatccctctttattcttgaattcatggatgttattatgagatttctaggtttagtggctgttaggttttgaaatgattagggttcgaattttatagtttatttgagttaaattaagttcctagcagctgattttgatgcttggtgttagttctaagcaagcttgagttttgaaactcaagctttgagctttaatggcaacttgaattataatggtttgttctgtgaaatactggctgaaaattgttgtttatgccctaattaggtactctggaaggtttcattgcatttggtggaggattgagcattgaatgaaaggttttgggaaacctggtgcaaaccggctagccggtttgcagggctcaaaaaccggctagccggttttggcagggttccccgagcctt

SEQ ID NO: 366773 - DNA, 767 bp, Cannabis indica
tcctgaaccaccaccatagtcactgcgcatgtttccttagtcaacaagaaaataaaattagatctaaaactatgtagagttgagacgactgaagagaaaaagaaagtgcgagagagagagtatgcaagatctacaccaccgaagccgaaaaaccaccgaagatgagatagattaagcatttgagattgaaaaagagaaagagatgcgagaacgtacctgggcactgttgatcaggatgtggctgctactggcactactacaaaaactattattttcgatggtcctaaaaacgtattatttgggagattgtcgctaaaaaattaagtgagtgtttaaaactgtcaggaaaaattgggtactcttgacggtttttaaacactcgtgatgtattcccaacagtttttaagcgtgccttaaaaattgtaatttttttaaagcagaattgtcgacggttaaaaattatcgcctatagtgtaatatctcaaaaatgtaattatgaataattaggatttattatatattatgtattaattaggtagtaatgagtaggattatgatcctgctaacctaatttagcataaattataaattttgctataagtagataaataagcgtaatttattaattacaaagatttatttagaatatgtggacgtagtgtaagttatttgtgaaataaaaatattttcaagttcggcgaccctggagacgcgattggaggccaaaaataccacaatcgattttagttagtaatattgatgggatt

SEQ ID NO: 366774 - DNA, 646 bp, Cannabis indica
tgatccaatgaacacccctaagttatactccctgaactcgacaatcgttttggtctatagtccttccatctattttggtctgttaagtgccaaagtagactgcctatacacaaatatacacatgacacattttcattggccttcttaatattaataatttatatattaattttttttaaaatatttaaaaataattaatttttttttcttttcttcttccaaccccaacccaaaaatcaccaacagatattgaactacattccgctggtcctcagaaataggagtgtcaatgggtcgggtcggatctgatccggctatgatccgacgtgatccagatcatgtaagcatctgccccgccctactagatcagatactcggatcggatcagatccgacccgacttattcggatcagatccgacccgacttattcggatcggatatgatctgacctgactactttctttaagaattttaatattaacttataattttatatccattttaattttgtattattattaaatacaatactatatttagtattgacgtgtaaagatccgggtccgggtccgggttcgggtctggatcgtcggtccgggtttgggttcgggtctcgggtcccgatccgggttcgggtttgggtct

SEQ ID NO: 366775 - DNA, 694 bp, Cannabis indica
ctggggggcaacacctgcacgttacagtcaagttagaattcaaagcatctaacaacgaagccgagtacgaagctctaatcgctgggctaagactagcccaggagatgaagggagaacacaatgaaatctgtagtgattcacaggtggtggtaaatcatgtatccggagaatacgaggctcggggagaaaagatgatagcgtatctgagaaaaatacatgatctgcttgcacaattcaaaagctacgttctcagacaaattccaagggaagaaaatacaactgcataggtgttagctcgattggcaagcaacaatgtaagtgacagggaaaacttggttcctatccagttcctcgaagagcctagcatcactggcacagaagaaatcgaaatgattgatacatccccaaactggatgacaccaataacagcctacctcgactttgggaaactcctacataaccgaaatgaaactcggaaaatgagaaggaaagcttcatggtatatcatagtagacggatttatgtatagaagaggattcttgatgccatttctcagatgtgtcactcaagtagaagctggacgactcctatttgaagttcacgacgaattctgtggaaagctgcacttctggccaacgatgattgaagattcaaaagcctatgttaagaagtgtgacaaatgccagagattttc

SEQ ID NO: 366776 - DNA, 697 bp, Cannabis indica
attgtcctgtttgcaatgctgagattgagagccataaacacctatactttgactgtattttctctaagcaggtggttactgctatctttaattggattggtgtcaaggcttggcctttgttgtatgatggatggcttagttggtgttcgaacaggagcaatgggcagagcatgagcatctactatgcctgtcttgcagcgtgtgtttacagcatctggaggaaccgaaacaactgtattcatgagaatttttcttttatagttttgtatatagtcaatgagattaaagttgttataaataataggttgtatagcttacaaaggaagaagttaagtggggatgttaggaagatgataagctttttattacaatgattgtttgtaggctggtgtgagggggctgattgttgtggctgctggttgattaatgaaatttttctttgataaaaaaaaatatttatttacaataagttacaataaacttaaaaaaaaagctcacataactaataaattaataaatttgcaaataaactaataagttacgttcaataaactaataagtcacaattttcttttttatagaataactcgcataatttattagtaaaatttgtaaatatttaaattactaattatctaaattaattaccaataaattattttaaagttatattatatgatatcttaatattatttaa

SEQ ID NO: 366777 - DNA, 531 bp, Cannabis indica
aatagtatactcatttactccacgaggtaagcacgatatttggactagatatatgatcaagaaattcaaattcaataaacaaattttctataattattaatatcaaaatattatacactttgtataaaaaatcaatttatttatttacataaatagaatattgttatagtattttcaatacgcaagtattgttaacaagtaatagactcacaaagagtaaagtcaatctcacaatgattgtaattaagcactaattaaacttttacttctatttagttattcaaatttaagaagaattagaactagactttaatgcaataaaaacaagcaagtaaattactatgtaaattaacaatgattgaagattagaataattgatacccactttttagatttcgtatcaaaattatagacaattaatatatgacaaagcaattaaaactaattgagtacaataaaataaaatacatagaaaattaggagaaaatttattcacattaaatagtagaggtgttcgcggtgcgggtggtg

SEQ ID NO: 366778 - DNA, 789 bp, Cannabis indica
ttcccttgcctgtggttgttgctggaacgcttaccacttgagttcgaattatttgagtaatgggggacttgggcggacgttccagtagaaggagctttcgacttgccaggcttttgctcaccttccgcttgtggaatggcttctttgagcttgatgaagccttcggtacggtcaagaaaatcactcattgagtctaccggcccgttcttccttatatccttccaaagttcaccgaggacttcaatgcccccagtatcgcggataactttccatcttcagttacctgtgaaactttggctgcctccgtcatgaacctgttgatatatgctcggagaggtttgccgggtctttgcttgacttcaaccaggtctcccagatgcaacggaagttggcgagaggaggagaactgtgcatagaatttcgaagagaaggctttacatgaactgaactttccaggggccaacttgaaataccattgctgggcggcttctgacagggtagcaggaaagattctgcaacacacatcccctcgtaccccttggaaatccatttgcattttgaaatacttgatgttggaaagaggatcttctcttcctgtatacattttccatgcttgcattttaaacttgtggggcaacgccagaagattgatctcaggagagaaaggagttctgcatgctcggtccagctcgagatcattgtttctttgtccagccatgccttggaacatattttttcagttcatctagctgtgcctgtacgactaggctaacctgctcggcattctgg

SEQ ID NO: 366779 - DNA, 571 bp, Cannabis indica
aggataaaccactgaaagaacgtaatgtatggattacgtatatatatgaataaggttatgcgagcaaggcataaccaggttaaactcggtaaccataaccgagataaatcatactaaggccttattgtaatagacgtgtgagtgtaacacgtaggtctatgctatatagacataaatagacgtgtgagtgtaacatgtaggtctatgacttatagacatatataggcgtgtgagcgtaacacgcatgtttatatcaaatagacaaatattacggtggcaccattaattatgggttatatatatcgagattaagggttatctgtttaagacataatcaggttggactcggtaaccagaactgagatgaatcattctaaggccttattgtatctagacgtgtgagcataacacgtaggtctacgtcacgtagacataattgggcatgtgagcgtaacacgcgggtctacgttaaatagacaaatatgaatggcattattatatatacgtgaaatggtaattataattgctgttattatttactatcttgctgggcttggctcacgggtgctct

SEQ ID NO: 366780 - DNA, 632 bp, Cannabis indica
tatgagtaattgccatggaatggatattaactctcactcacttaattacaaagagagaaaggttttgttatatatgtgcttatgaatctccaatatcaattgaaactattaagagaatattatatatatatatatatatatatgagcggtgcatattaattgaatacattaacaacattggtttttgtgccgactcaacagtgaattttccagttttttgattctagtactactagtactcaatatctatgtcttcatctgctgtaatctctgttacagagagacagtgttaccccgtttatttatatatatgcatgttacttatttttgtttcttttgtattttctacagtcaattgattattaataattaagacacattattattaggacggtttataaaacactcgattcaatcaaatctgtacgattcaattcaatccaattcgcaaagtgcgactatctacagttatgcggatttgattggattagaaaattcaaaatccgcacttgtgcggattaaatgttaatggacatataaaagtaacacatccaattcaatccatatatatttataaaaaattaaaaaattatatatataaataatattttaatgtaaagaaaataataatt

SEQ ID NO: 366781 - DNA, 927 bp, Cannabis indica
cagactttgatatctaccaaatcacgcccttcgaactttgacatgcactaaattatgccccctgaactttcatccatgttagacttttttactaaaattagaaaaaagtccttaaatccaacaatctcaatagtataggggcattttcaatggccttaaaagttcaaggggaatgatttggtacatgtcaaagttcagggattatcaaataaattttccatttaacttatttattaattagagcttacaaagtctcacaattaacaaataaaccctaaaacctttttttcttcgcaattatgtcattggttagtaaaaattcataaataagacatagtcaaatttagaattataattgattaattaaaaccaattaattgagtctacaagcagtattatctcaactagtgtggggaccatgtgcctacataatcaagcttccaataagcagttttagaatttaccaagtaaattctctaacttattaattcctcctgactccactatagattcagaattgtactcttaattatatagaacgtttaatatgatccaagatatagatacactattaattattcattgttataatctaaataatcaaagatcctctatagacgatctacatcgaatagggacaaatttaccgttctaccctttaatgttatttattcttagaacacttatatttaagtaaactaatataattgttgaaatgaggcctaaatcatttatggcattaagccaagctcgaaagaaatcatcgtttcacttctagaagttatagaagctatagattacaaatctatgattagcgctcccactcaattgaactaccatgttctcaatatgtaagtatcgggaagatccaattggtccactttaacgaacaaatcaaagaacataaataatacaattgaactagaa

SEQ ID NO: 366782 - DNA, 734 bp, Cannabis indica
gaagttgaggagctggacgatgcgtgttccggcagtccttccaagggagagggagaggaagaggttgaaccccaaaatttcggggagtacaatgaggctgggctgccagttgacactgacgaagacgtcctagttgagggcgttgactacgttagtgaggagcttgctgcggcggttcctcatagcaggcatggtgccttgggcgtcaggtgggtaagtcctccgtccaagattacggaggcggtccttcgaactcttgaccaggacgggtacttgggcgagctggactgctacattcccgcccacactaatcgtgctagaaaccctaacaaggggatgtgcgcctggttggggtcccatggccaacaaggggtgttgatgcccttgcacaagtacttcaaggatgtggcagacttctttggtctctgcctagcccaaatcactcctaagggcattaagtatttatccgccctcttcgtcctctacgcttcccaaggatggggtgctccttctccccacaaggttgcctggttcattgatttgaagtctaccccaaacaaggcaggtcggggtacttctatttttctcagccaggcttcaagtggctcaccagcacggatgccaaggccatcaacaaaatagggtgttttactgatgattacttcatggtgaaggatccaagcattacctggactcggtttcagcagattctgacatatcaccgtcctcccctc

SEQ ID NO: 366783 - DNA, 767 bp, Cannabis indica
atattttaaataattataacatagattataaaaaaaaattaattaaaaaatcttaaaaaaaagatagaacgttttagaggtccattatacaagcatccaattaattattattattattattattataggatatgtattaattatgggtaaggatgaaacagctaattatcatgcagtgtgtgcacattttcttatctaattaattcgaatctattaattataatatttagagctacttaaatttttattttttataatttaattcacacttaatgttgtttatgctgttattactctttttaattgatttatgtaccattttaatactaaataataactttactcataaattataaaaaatatttatatataaactaatctttaagtgcatagttatagatataatttagtggtaccattactatatattttcgaaattctgagaagctagaggttctaaatttgaattgttttttcttaatttatatatatatatatacataaatatatatatatatatataatcttagagtgttgctaagctcttattgtaattttagagtgttgctacacattggttattgtattttttgtagctcattgaagtgtggtagtaacattagtaaagacccaccttgagttttgttggacattaagaaaataagagcatatttggtattgttttctgttttttagtttaaaaattgttttagaaataagaacaaaaatagttttgaagtttttaaaacacaagtcacgtttggtta

SEQ ID NO: 366784 - DNA, 500 bp, Cannabis indica
aggtcgagaataacctcctccaagtcttcaattggttttcgtaggtttctttcatcttgaactcgaggatcaagatcttcatatttcttctcgttgtctcctgccaagattgtcatcagctgatgaccggcctttctatgctgcagctctatgcgataacaattgtgagccagcatccggtcgccacacaccattcccataccatctggggtttggaactctaaagacaggtccttgatcgagctaattgcccttagtccaatcaatgttggacgacccaacaatatgttgtaagccgagggcatgtcgagaacgaagaagtcttgcataacagtagcagttaaaggtgcctcgcctatagttaatgcgagctcaattatgcaaaggctggcgatgctatccccagtgaatccgcaaagattcaccatacaaggccttagattggccttttcgagccccattttctttagagtctccttataaatgatatttaccgagct

SEQ ID NO: 366785 - DNA, 930 bp, Cannabis indica
ttgactttgaaacaaatctactaagtgcggctatccgaccaattaagctttggacttcttttatttttgttggcaatttcatatccagaaggcttgaattttctctagattggcttcgatacctcaggcattaacaataaaaccaagaaacttacccgagctgactccaaagaagtactttaagggattgagtttcatgttgtattttctgaggatttggaagcattcatccaggtcatctatatgcccccagcattcttggatttgacgagcatgtcatccacgtatacttccatgtttcgtccaatctggtctttagacattcaattcaccaacctttggtaggtagctccagcattctttagaccaaatagcataactttgtaacagtacagatccttatctattcagaaacttgtatgttcttggtctggtggatgcattctaatttgattataccccaaataggcgtccataaagcttaggatctcgtgcctggctgttgcatccacgagctgatcgaatcttcgaagtggaaaactatctttggggcacgccttgttgagatcggtgaaattaatacatacttgccatttttattgggcttgggtaccagtacggggttggctacccatgctggatagaaagcttaaatgatgaacttgttattgcatagcttttctacctcttattttaatgcttgtgcccgttctttgtataataatcttcttttttgttgaatgggacgaaagtttggatcaatgtctagggcgtgagatattatagaaggatcgatactgaccatgtcttcgtgcgaccaggaaaaaatgtcttggttagctcttaaaatttttattaaagctaattttacttcaagcaacaaacctttgcaaattttgagtttccgggtcgggacatttgggtcgattt

SEQ ID NO: 366786 - DNA, 680 bp, Cannabis indica
atctgggggtgccctgctcatgtcttaagaaagaaagatggaaaacttaaaaagcaaactgaggtttgcatgtttgttggaaattataaggagactaggggtggactattttatagtcgcaaggatgataagaacttcaaaccacaaacgccactttccttgaagatgactatgttaagaatttcaaaccacaaagcgaagtagtattggagaaaatgctttcagatataactccttctaatgttccatcctcttctactcaagtagaggataatcccacttcctcggttgaacctttgcaagttgataccaccgacaaatctaccactaatgttcctgttcagaagatcacgattcctcgtcgtagtgggagggtttccacaaaaccatctcgttatggcttggatggtgaagttaatatggtcgttggtgacggtattgatgaattaacttataaacaggcaatggcaagtccagaatagaaacaatggtcagccggcgtggattcagaattggactctatgaaaaagaacaaagtttgggaatatgtagacgcacctaatgattatcgtccaattggatgtaaataggtctacaagaagaaaagaggtgttggaggcgaagtcaaaactttccaagctagactggtcgctatgggttatacccaaagagaaggtgtg

SEQ ID NO: 366787 - DNA, 725 bp, Cannabis indica
ctgttgttttgatttgagccacgattcaaattattggtattggtgtttcctgcagagccaaaagaattgaaagtattgcctctccctcctggtattggtggtctataaggagggacatttggtcgattgtttgcataaggattccactgattgttccctgactgcccagaattccagtgattatttcccgaatgaccagagttgcttcgagatcgaaaattggaatttgcgatgttgacagaagctgaatcaagatctctattctttctttcgattctatgttcttgagctagaagaagggcttcaagggcagcaacatcaagtggttcagctcttgaatttacggagacgacaaatgtgtcgtaatctggagaaggcaaaccacgaaaaatagcagctatatgttcttttggtgaagttttatgcccaacagaattgagtttgtcgattagaaaacgcacctttaaaagatactcattgagagtatgagcacacttcttgagattctgaagttcagtggtgaattgatcgattttcgcctctgtttgtgaagcaaagtatgtggacagaacggaccataatcttgcagatgtttcacagctaatgactcgagtaagaactggttctgtcatagaagatagcagccaagaatacaagagttgatcttgttgatcccagtccaagaatgccgggttgaagttctctgtaattcgatcttgttcaga

SEQ ID NO: 366788 - DNA, 564 bp, Cannabis indica
ttgtatttttttgatgtctaagtgatgtgttgacaccatttattagttagattcaatgttcgagtgaagctgttcacgagttctcgaagaggtcgctgttttgtgaaatcgagaagactcgaaactctctgattttgttgatattccaccttgttaaaatggtaaaatatcaaagtgtgaatttgacctttcacaagttgtagctctcatttactacaaaaaaatagttaaatgcgggaaatgaaatcgacagaacctagcgcaccagattatggtgtcaacttgggcattgggtgcttcccgagattcatttggataattctatagaattcgagattgtgaacgaggtcttctaccctattttttaaaccattttaagaataatgcccaaaacataatttatgtttgaggagtggaaacatgcgaaccaggttgaatgtcaacctgggcgtaaggcccagtgccatttcaacttgggtgttggggccctgttcaggctccctgaaaatctcgtttgctccccgagatcacttgtatcttcgttatttctaatgacgaaaaaaa

SEQ ID NO: 366789 - DNA, 729 bp, Cannabis indica
tttttccaaaagacgatcgtaagatcttaagtgccgagctccaattctttagtccaaacttacatattactctcacctataccaccaaatggttaaataattaacattatcgcattctacattcaaaatcgagtccaacgacatataatatgactatatttaaaatttggggttccgaagcctcacctaagcggtgcacattaacaatcagtggcggtaaaaattggtgtaccagaaatttcgccgaaaataggagtagtatatatcaaaacgaacacctcgacgagtagatcatacccatgccaactgtttgttaaaacggtacacgatgtcaccgaaaagtcttcggaaaggggcggagctacaaaaatgtcaccgaaaaaagtagcgaaccgggaaaaaatggtttagtgtaggttgttctcctcgaagagctgagtttagtggtgaagaagattcgtcaaatggacaccggaggtgaccggaaaatccgttcaaagtttgaaaccccaaactttgacttgcgatcccgagttaacggtggcgaaaggagcggcagggcttgggggtgaggtcgccgacacctggagtcccgttctgcctgacgcgtggggttgggcggtggccggaggttggtcgctgaagtggtggtgatggtgggttttcttttgtgcttgagtttgaagagagagagaaaaggatagatagatagagagatagagagagaga

SEQ ID NO: 366790 - DNA, 598 bp, Cannabis indica
gacaaaatattagcacaccaatctgccataaacatattctactctgataaagaaactatactgactttatatatccatccctaattacccagatagaatcatagaaccctactgttcttggtaatccaaccatgatgtctatggttacttctttccatttttactcaaatatctttagagattaaaatattactattggtttttgatgctctatcttaacttgctaaaaatttggacagttaacacatacttcacaatgccacctttcatacctagtagagggcttaaacattgtgatacatcttagttgctcctgggtgtaaagagtatggtgcaatatgagactcatttagaaccttctgttcgatatccttattgactggtacacaatccatgtctttatatcataaaattccttttgacaaaattgaaaagtcctttgtcgatccggttccaagtctttctttgtaccggtgtagctcagagtcaccttgatgggccattttaattctctccaatagatcaaactacaatgtgatattaacaagttctccaatcacgaactcaatccccgctctggttattgttgggttttatg

SEQ ID NO: 366791 - DNA, 706 bp, Cannabis indica
gatattctaaccataatattttcaaattcaaaaatttgttattttgttaaatatttaattatttataaattataagtttaaaaatgatattttactattttatatcattttacttattggaaatttataaattatattttaaatatttaaataacttagatatttttgtagaaatttgaattatgcttaatttaagatattttgacatataattaggataattattatttatttattattttattcttaaaataataattatctaaccacatctattttaaaattggtttattttattattttaattttattaaattataagatttgaaaatgatattgaagatattttttttttcaaatcattgatcttatttgatatttaatttaatttgataaaaataattcaaataaacctagatattttaaattagttttcatttttgaattttaaattttgagatttttaaggttggttttaacaaccctaaattttcaaaatttagttggttagtttaagaataataatttaattatattaatatcttatttcacatctgttacatggacaatgtttgtttatttatttatattgtttattacaaactttttttttaacaaacctattatttatttgatctaaattgctatgattaacttgttgacaaacccaatgatcttattttaatcatagtccaattgtcaatag

SEQ ID NO: 366792 - DNA, 806 bp, Cannabis indica
gttaattaattttggaccaacttaaattataatattttcttaaatattaaattagaattaataatttaaattgattttattctagatacttaattatttatattttaataaatttatttaaatagaaaattatatttaagctagaaaattttcaatttcagattaacttaaattagaataatttttagaatatattttattttattttaataatcattttccacattaatttcgaaatacatttaatttaaaatgtagatattttgatatttttaattttgaaaattagattaagttgaaaattaatttatttaattaattttagatcaacttaaatcaagaaattttcattaatgattatttaaaataaatagagtaaaatatattgttctaattagaaaatgagtaattattttatgaattgtctagatagatattttttaggtagactttttggtatttttctagatatatttaattaaatagaaaattaatatttaagttgatttgttctaaacacttaaatatttgatatttttcttaagagatttaattaaataggaaaattttatttatattgaaaattaatttatttaattttagaccaacataaattagaataatttttctagttttattttattttatttttaatgtgaatttcaaaaatgtattgcttccaaatacattggttttcgaattctgtcatatatactaatagaaaattaaatttgagttgaaaattaattatttaattaattttggaccaacttaatttaagtaattttcataatatttattggaaa

SEQ ID NO: 366793 - DNA, 979 bp, Cannabis indica
acaaatacataaaaacaataaaagattacaaaaatacggttgtaattttaaatatttttataatttttttaattttatttattgaaaatacaatatgttgatgtattttatattgtactcttgttaatttattattgatttttttgttattttttagctgttttgatgttattttcatgtaatttttttattattttaacattgtttttataaaatactgtaaaaatatataaaataaaattaaacgtaaaaatatagaaaaataatatattatataataattctaaaaataaattaaaaattatattccaccggaaattaaaattagcattctaccaattattattaggtagataacccatttaacagaataacttcttttttttaggtgaacaagtaaacctataaagatcttaactttaatgcaaataaatcagataaagccaaagagtttaacaatgaaggctatttctcaatctattcattcaaattttgttatcccaaatggtaaaaattgtgcctgagaaaaactatcaagtaagaaaaagaaaagctgggattgtattgaacttacttaacctcgaaataagtaacaattaagccagaaatttacaggcatataaacatggttgaaattgaaaaagcaaagaagctgtgatctgaactctgttttcttcatcaatagtaagtagagttaatggcttcaatcaaaacgacaagttcaaccgcaattttgtagtaatttggtttggccatcaaaactttaatgcctgtcaaggacaagtgttagaatcctggtaatgtacaatacaattggaaaaacttaactcataagaaagacatttaaagcttgttttgtttttggtcaaagaatatgatatccttttacatctttactaccccacaatgatttgctttgagaggtttttcagtttggcagttgaagctttatttaaagctacttacttgtttatcaaac

SEQ ID NO: 366794 - DNA, 840 bp, Cannabis indica
ttgtattctgcgaccagtaccacttgaactattctaagaaccttttattgtcactagacttaagtcatcaaaagaccacacaaccacattctaatatatctatggcattttcttcttgttcatagtagttttgacaagatcattctctgaaagagaaaatatgcctatatccacttggaagtaagatcatctatattcaaaaatatggatgtacatttaggggtggttatgcgttatcgttaaattcttaatacgatcactctaaaatttaccttatgcaaaaaaatttgaaatatttgagaaatttcatgaatttctagcaatgttgaaaaacattaaggtaagtggttaacgatcttgcgaactgataggggtggagaaatatgtagatatgtagttcaaagatcattaagttgaatttttgaattgtatccaaacatacctccccagaaatttgaattacatattgattatagtgaaaggtttatgattagttacttgaagtcgcctaagtccttctagggaaataccctagtgataggaaaatttcagaatgatggaatggttatgtacttactgtaaaccattactagattcaaggatgtcctgatcatgaccttaagaaaagctagaactgttaactatggtttgcatgtttgatagctattctaagtgcttaggggtggtcccactgcctctaatattttcttgattccataagtgttctatcatcttattcgatataagatggtcccactgtctctattatcttgacacaaccgaagaggataataccacttatgttcttagaaagaaagtcacggtatcttgtcgtagtgg

SEQ ID NO: 366795 - DNA, 528 bp, Cannabis indica
ctaatcctacttgctgactagcagtagatgttttaagaaatgcgaggtatcatacttactcaagaggaagagttacatcgattaaggcaaccagcaccggctgctcctgttgagcaagtgttaccaccagcagctgtgggtaaccaggggtttataacattcccgagcaatctactggtttcatgtcagacaccctaccccattcttcgttggaaacttcaggcacgagtggaatatcgatgtgacaacctttaagtcatataaagctggatggcctagcattaccttaaaggctgaaagaacatataatacaagaaattatgccataatagtcatgctcgtcggggtttgtccaacagtgaggggtagacgaatttttcctaggggtgcaaatccttggccggagaaaccatatacaggtaggagatagggggttagatctttaagctagagccccatcttttcataggcaattttgaataagagattggaagaggctccattatctatcatggttctggccaccat

SEQ ID NO: 366796 - DNA, 518 bp, Cannabis indica
aagtaccaaacacaactcccctagaaaaagggttcagagttgagacaataagaagttaaaaacaaatattactccccctttttatttatctaaggaccaaaaacaaaaaaacatgaaaatatagaaatatgtccaacaaaaatataaaaaagaaacagaaacttatgccccatagagcttgatcattgaggacagctgcttggacttctcttgctgaacctcctccatggcagcaagacgattgttcacctattggaccttatgcttgacctcctgaacatctgcaggagcagaacttgaacttgcagcagcaccaacttaaggacgcttgggaaaagctctatcaaaatactccaagggttgaaatatggtgccagtaaggggaggctcaagagtttcatgagagtaggtcacgtctttctgagaggacagaattttaaagattaaattaggaaaaattagcttatgagtacgctttttacctctccaaaatgaaacaattgttggaaatattttac

SEQ ID NO: 366797 - DNA, 520 bp, Cannabis indica
taatatttttttatttaaatagttagacaaaatttttaaaattaatttactttaaaaagagacccacactaaactacttttttgcttttctatagcaaataaaaaaatgtatataatagtaagtagaataaatatttatacgtaaataagaaaaaaaaaattagtatgcaaagagtctattttgtttaatgtaaatctaaaattctatggtttattactggtgaaaaaactgccctcatagtatagggaagaaagtagcccccttacgaataaccctatatatatatttggaataattagcaatttgtccctgaatttttgacaatattaattttacctcctagaatataccgcttgttaagaattccctgaacttttacatttactgaaatttagtccttctgttaggttctgtcctattattccgttgaatgttgacatgtctttgtaaattagcaactttggctcttaaattttgacaactatcaaattgtacccctcaaaataaaaataaaaaata

SEQ ID NO: 366798 - DNA, 605 bp, Cannabis indica
  modified_base (549)..(549): a, c, t, g, unknown or other
tgtgtataagattgtacacataagtagtctatagtgacagttaattagatgatacctttaatttgaaatcagttcaataatttagaagattttaccactaaaatttaaacttaaaaattaaatacaaataaaacgataattgaaaaaatttagcaactaaaaactcgtctaattaacaccatatgttatgtgtttagtccggagcagtaagaaccaaataaggatagaaagaagggccaagccaattacatttctatctatctatttttttttaggtatacaactattatctagtatttaaaagaaagtaaaatatatcaacattacataaaagtaaggggttattacggatcttttatttatttttattttttttatattttttacaaaaatacggagtgtttaagaaaaaatatagttttcacgttgctgatataagaaaatagcgtgattttacttttacaacaatgcagagtgctattttttttcattgtttataataatataatgttgtttagatgttgctgttgtgagaaaataacgtgaaanaatttttttttttaattttttaaaattaaataagtaaaaataaaattaataatata

SEQ ID NO: 366799 - DNA, 522 bp, Cannabis indica
ggagtggtcagaaatgtcacgacatttgttatacccaaatttttgtgagcacataagaggaagacacatgtcgacctaggaagaatgaagaactcaaacacgcaaacgaaagtacacttaacatggaacaactcgttagaaacataatttacagagtatgtttataactcagatgactgaatagccttctgcgagatagaaacgtacgaactactaacttatgtatcgacaagaaagcatgtgagtgcaagtgtccatgacgaggcctcaatctcgccgtgtgaaagagaaacgataacgataaaaacacttagcgaatattacatggtatacaaactaagtatgaaaagtatagtgaatcaagataatagatagtgaggcttctatcttgttgtaagatggcatgcatgcgaggaagataatctcgacaccagaaaatatagttatcgaaagttaaacaatattaatttcgggaaatcatatgacgagtcacagctcaccatcaaagttaactcggcacca

SEQ ID NO: 366800 - DNA, 657 bp, Cannabis indica
aaatagtaaaataagtataaattaaaaatatatgtattttatgcaaaacataaataataaaatacgatatatttatatatttttgaggtaggaataaaatttcacaaaatatatatatttcatctcctaaagatgtacaaattattaattagtaaaataaaataatagtttaattagaatggcaaacttgtaataaaattacaaaattatgggtatttattagtataaataagcatggattcaaaatgacacttgcaatagaatagaaagagtgcaaaagaaagtttaaaatagctgagcattgttattaggtagcttaatactttttagatatgttattttacgattaattagcgatacttcttaaaaattattacattgagttatatgagacctgatacttaattaaattaataacaatattgacgcgtaagagagtgctaaatgctactagtatcctttagcatttctcaaaaagagtgtttagcactccttgcccatttaatctaatggggaaattaattacgaaatttcttttattaaatgagtgtattcttaatagttattatctatgaatgagtagtattagaaaaatttgagtttatatgcttaatttttctttttaattaaaaaaatatcttatttttatattatatg

SEQ ID NO: 366801 - DNA, 784 bp, Cannabis indica
acgcgtgtcaccttagagccactgtcatttgaattcacctcatccctagctattggatcctctggcacagaacgcaaggacacgcatgctctgcatggtagcatggcgtgagagacaacctttgacatcatacataggaaaggtgcggttggtgggcccgtaatttggtacgcgcgggctgatggtctgcgagttaaaagagtgtcccacaccaatgcatcctgatggaaggtctatatcctagacaggagcaaatggttccgtcttctagaatggggaatgtcgctggctcgcgaacacccctttcgtggcctcttcctgggaagacttctctcgcggggactcattctatgaggttcatgctgctatcttcgtggagtgcgaggcgaggcacttagggggcttaatgacttatcgtctctctttaattaatgtccacgtgtcattctggtaaaaatgcagataacataaggaatttttcgatatttaacataaattattcaataataaatattaacaatttcacattcacacatatatcaaatgtttaactctttatttaataatcaaaaatgtctttacaggaattttagggcataaatcctaacacaggttttgtcttcattttgttcaaagccacactatttaatagttttattaaatgtgatatttcaagatctagaggcttacttcaatacataaatagatttaagcaatttgcacatcttttgaccttctctaggttgcacatacccttcaggttgttccatataaatggtttcat

SEQ ID NO: 366802 - DNA, 522 bp, Cannabis indica
gctgggcttggctcacgggtgctctactgtgcaggaaatggtaaatttgtttctgattagccatgagcgcgagagctgggcgatgtatgtgcatgttcgggccacactataccaagcgggttggggtctaccagtgatgagcttttgtaactctgttttaccgcctaggtcggctagtggaaaaacttgtaatattttgtaaactaatttttgggatcccgaattatgtaacctttgattacaaagttaaaattattacagggttattttaattctactttcgtttaaagtttaaaagttttcgcgcatttctgtattgtatcccgtttaggggattagagttcttaatcaccttgggtagcgtgcctaattgttagggcgttacaattagtagtctcgtgattcgtaaggggaaataccgggtaagttgtgcaatccatcgcttgggaaaggtcatgtgtgattattctgagactgtgtaggtatggaactacacaattgaagagggcttaaatggattga

SEQ ID NO: 366803 - DNA, 649 bp, Cannabis indica
aaaataaagtagaagaaagaactgatcattgaaaaaataatattgaatgtctccaaagctgtcttctgcctctaatttgtgtcctcccaaagtcgtcttctgaaaagttttgaaaaatagcctttatatagctaaaaaagattttaaaaaaaacctaattttttttgttagtttagaataggcaggtcgcgacactacaatgcttaaagcacgattttttgcagtgagcttcctactgggttgattgataatattttggccataactctttcaatatcactcagaattagacgattcaagatgttttagaaagataaaagaaatatctaaaacttttattcacaatatttttctcgaaggaaacgcatcatagtcataaattgacttgaagcttcagacttgattttcgatcataaacagacgtgttgagcttccaaaacttagaatttttcaccattatatcttagacctccaaattccatggtaatccatcaaattcatctcatttaacatatttttttttcattttcaattcacattataaattttaccatttaaacctaaaacaaatagaaaacaagtgtaattctacacaaaaatgaatataatcaaattgaaatacacttctaaaacactttataaaaatgta

SEQ ID NO: 366804 - DNA, 1399 bp, Cannabis indica
ggtaccacttgttaggatttataaaacacttaagaaatatataaatcacagatctaaacatattcctaaaagtgctttaatatagaaaaccctaaatcataaatctataaagcctttgctaaattaaagaagaagaagatgataaaatatgagcggaagcactaacctgaagccattgttggagattgcagagaaggttttgatcttccaagaatacactattttcttaagtattttctctgatggggaaggagagaatacagaaaccctagtgtttcttggggaccactacctatttatagactcatcttagaatgagttttgggtatttataatttggcccctcaacaaattataaattaacttatggtatctacacattaattccatgacaatttaatacccttttgatacccataacataattggtcacttaattttgtatcacactttataatagcatatacattatacatatgtgcccacataggatttttaatccaacaaggaattcatttgagtttgtttgtacaagtaatgtgttcaatttctattttaagcgagttttgcattattattattattattattattattattaagggagggatttaaatttgagttttgggacattctctttattataagaaaaagtgtgaaccactaaattatatttataatcacccattattaattttaatatgttgtttgtaactaattgtttgataataataagaattaaaaagtgtatacatatttagtcaatgttagtcattaatttatgtaagagtattgatcagtattacatatttaaattgtcacggcttatgtttacggagaagaatataataattaactaataaattgaaatttctctttaataatttttttttgtttgttcttatggatctaactagtgactacatagataggcagtttgttatataaatcaaatttggacaccacaaaccattgaagacagcacaacgttaaaattatacttaatagtctagttgtgaatacgatgtgtctatgattttgactaaactcttccaatttaattctacatctctttataagctacagtgttcttctaatttctatgaggagtacacggatattgaattagggttcttttagatgtcaacaagtctattaggaggggtatctatgtttccattcaaggcttacaaggatattcttgtttaatattgacaatatatatatgtccttaaagctatttatagttcacatgtattttaaaatttataaataattgaatgaaattaaatttagggtgattttacaatgcacccccttaaaagagatgtattgatgcacctttaatttgtttcggcatccaaaaaaaaatttccgtctaattttttttcatattcat

SEQ ID NO: 366805 - DNA, 553 bp, Cannabis indica
agggcacaaaacccaacaggacttccgtgccccccaatatcgcagacaactttccatcttcacttacccgtgaaaccttagttgcctccgtcatgaatctgctgatgtaggctcggagaggctcgcctggtctttgcttagcttcgaccaggcctcctaggtgcaacgaaagttggcgagaggaggagaattgtgcatggaactccgaggagaaagctttccatgagttgaactttccaattgcaaacttgaagtaccattattgggcggcttccgagagactggatggaaaaattatgcaacatacgtctcctcgtattccctgcagattcatttgcatctcgaaatacttggggtgggaaagaggatcttcttttccagtgtacatcttccaggttggcattttaaacttgtggggcaatgccaggagattgatctcggcggagaaaggggttccacgtgctcggtccaactcgagatcattgtttctctatccggccatgccttggaacatattctttaactcgtccagttgtgcctgcagagctggact

SEQ ID NO: 366806 - DNA, 555 bp, Cannabis indica
  modified_base (541)..(541): a, c, t, g, unknown or other
aggatgttaataaaacatacttggtagtaaatctagatcttggtaaaatatatccaacaggtagtggttcggccatggaccagaaaaggaaagcatccactgcaaccggtggctcgggtcaggagaaagggttccgagggaaccagagtcgaggcagtcgtcagggtatttctgaggcccgatatacctatccagagtgccccacttgtaaaaggcaccatctgggtgagtgtagagggcaggggtgattgcggtgtggcatgccaggacactacaagagggattaccctcaactttgaacacaagcaccaagggttccgacgagacccattccagctagggtgttcgccattactcaggctgatgttgaagccagcccttctgtggtgacaggtcaactctcaattaacaactctttttactccgtattgtttgattctggggtcacacattcttatgtggcagccagaatctttagtaaattggatagactgcatgatagatatgaatcacggtttggaacccttttacctggcggagngttagttatctcca

SEQ ID NO: 366807 - DNA, 674 bp, Cannabis indica
acaataatcgccagtcgcgatcttgtaccagaaggctcccgagaacttcagctgtctctctgcgagtcgcgtcgagtgtaggtcgagatggtctatctgcgaaaataaaaaagagagagttagcatgaaatctcaaaataattcaaaaaataactaggtcaggaagcatgcgacatactaggtcgacgattaaagtcagtcctaatcccaggaactttaaatatataaaaccacttcgatttccaatctcccatatttgaaaccacgccttctaccccgttaatctcagaagtggcccacttgctaaagcagtagaaaccattgtggaggcctacgctctttatgtcatagaagtaactaaactcttctactgtgggagccctaagtacatactccatgtacatcgcataaaaggcaagggctgtgcgatagctgttgggggttagttgaaaggggacacattgtaacgtttgaggatggccgcaataaaggggtgaaaagggaccgataccccacatcgaagaatgggtattgagactaccacatcctctgtgggaataatcgctggattggtaaaggaaaggtgcgccctctgagtaggtttaggtcgcaaagaagcaagtcgcagaaggttcagtcttataaaagtagtaagatccgatttggtgaccctc

SEQ ID NO: 366808 - DNA, 921 bp, Cannabis indica
ataaatttagtatacgtgcctcgcacgtagttttttgctagtatgtatataaaggagaagtatgaggcgctaacgtggcggtctaaaatttctctaaagctatttttctttttctccttaattctctcaatttttaatattttattagagcataaatttacaaattaatattttactattattataataaattttctataaaaatatctatcttaaattaattatttttttaaaaaaaaatacataataataaatattatttaaattaataatattaaattaaataattattcaatctatcaatctatatatatcaatcttctatatatataaataagaaaaataagatggtcatatgacgctctataatcatcctaaatacttttatttattctctcattaattatctcattattttaattttttattaagtttataaatattgtttgattaattttcctattttttgaattttttattaagtatataatattattttattaattaattaaaaattaaaaattgaataaaaaaaactatacacttgattattattattattattattattattattattattattattattattattattatacaagatccatttatatgtgttactttaaataatttattcaactctttcttcttcttctttttttccctattttttactttaattaatctaaaaactaatctacttcaaacggcttacaccctaaaaattcttagaaaaaaaaatctacaacaagcaataataaatataatttagtttaacccttaattttattgtttttttaattatttattctatataaaatgtagctatataacagaattcttagtttatgagaaattattgggtgaatttttttttaaataaaaaaaataacaaattattagatgttgccacat

SEQ ID NO: 366809 - DNA, 629 bp, Cannabis indica
taaaatatatccaacagaatgttgatgcagcactaaatgatcacaataatacttttggtattagagtaattgtacggaactcctttggtgaagttatgacttgtctatctaaacttctattaagtgtgttttttatttattaaatatatttaggattacaaggatcacaaaactaataataataataaaggaaaataaaattagaaaaaaatatatataaataatattaacaataataataagtattaaatattaggttttttttatgccaattgcagttagatgatcattgttcacattcttagtactttttagggtttttaaagtcattttcaataattctgtacaaatatttgatgttttagtttttcttttgatatagtaaagtttactctatttaaataaattaaaaataataataatatataaataagaacaaaatattaaataaagtttttaggatgttagattataatttatttatttttattgattttatttagtttaaataacacttcgagttctattgataatatattttttttttcatgattctttagatgttttcggttttttttatatatatattttttgggtactactcaagtgagagcatcacttttgctctc

SEQ ID NO: 366810 - DNA, 575 bp, Cannabis indica
atcaaaataagagtttgaataattttagttgtacagccaaaaactgcataaggggtaactaaatctcatatttactttatatgatccttgaatttgtgttgtggcatgcatttagttaaggatattgcgatcacctaattcagtgttgcgtgcttaatgactaattatgcttctttatgactaaatactgaactctaggcctaatatgaaactctacaatataccatacgggatgtatccttaaaataatagatgaatctgacttctagaatggaaataacaattaagattctccacgatacaacttactggtaatcttaaacacataatcaaatgttgatttacatgaattaatataaccagtgaagtcataattaaagtggttaactaaatttctatatcagtttatcttaataaaatatgtatgaatataataatctttagtatcttaaagacacctcattagtttgaaaaaataaaatggtcttaaatttaattattctgatacttaacaatcctaaaacaaatacaatgaaaatcttattcacactcttaggtatacattaggcttctaa

SEQ ID NO: 366811 - DNA, 917 bp, Cannabis indica
ctgacccccggttatgtaactcacaaactcaatctcggtcggccgaggacataacatggagtacactgtcaactgaaaaatataacaaatatattaatataatatatggaaattaacatgaattcaacataaagcgtaacaaacttacatttttagcaaataatctggtcacttcatccttcccgagtgtagtgttcggcttactctcccagttgaccattctcggaaagcgatgcgacctcctcactgcatactcgttgcccagctgtaatatggcctcgtatgcccaatactgcaacgctgcagtatagccgtaggctgagtattttgccttcttctgagtgactcacttctcaatctttttcaacatcttattcttcacatccaagtaatccttgttacaagtttccatcagcttggtgtaagaaatctttccccaggagtactcgaagaagaatggaaggttatcaaccattcttatcacaaaaggaggaatgacaatcttctcctccttaccagtgaggacgcccataacaaacaaggccatccccaacttgtagacatcatcagcttctgtgcagctctcaaaaactctgcgcggttggccgaagctgatcgaagcactaccgttgaaatattccataatcaaccgatcagagcttcctttttcttcagtaggcaacaattttaacccagtgaccaagccgaactctaccctcccaaatctacatctcttccttcccacatagaaatgcacctcgtccggcttgtcagattttattttgtgaagcatcaactgataaaaaaatgctcctgaaaattgaataaggctctcttgaaaaactgtttgaaaggggcaccatgtcctataggttgaattcttgaaatttagccttaatcttcgggtagtagtaact

SEQ ID NO: 366812 - DNA, 1199 bp, Cannabis indica
atgtgaatattaaacagtattttaggataaatacttattggtttaccgttattgtgacatagggccgagattattggggatagttctccaattgggttggacaacttgtatgaacctggattaaaggtaagaaaagtatattgcactgcatagtacattgtatgtaatacaattagtattgcaatgaaatgattaatattgagatataattaatattgttatataatgaaaagactgattggttgagtatcaataatgtgatgatattatgcatgtgattatgggctcacctgattaggtgatgcgattttcctagcgacgtactgggcgtaagtacgagcgttagtgatatatgatgagtaccgagtgtaggtacaggctcacctgattaggtgatgcaatttttcctggcgacatactaggcgtaagtacaagcgtcattgacatatgataagtatcgagcataggtacgggctcgtctaattagacgatgcgatatatttgtgctagattgtggcacgggctcacctgattaggtgatgcaattatatggtatgtgggtgtaggtctttggcacaggctcacctaattaggtgatgtcgttatgcgatatatgggttccagtctatggcacgggctaccctgattaggcaatgcaatataggattatcagattaaagtatcgacttgcttgattaagcaaagtgatgtcatgaagatggttgctttctgaggtaacatatatataatttatatgattaaatgaatatgaattctattattagtataatagttgtttattaccaaatatctgtatactgatgttcattcatggtagatttcagtagtgattcggattttatcttatgaataatgtatgacggtttgattcttgttgtgtataaatgataatatttgaatagtaaattatatgattgttattatttcttttcttgctaagtcattgtgactcacgggtgttatgtggtgtaggtaaaggcaaagaaaagcagatcaaccgcgaggtgacagtcttcaccatccatgtacatattgacctcgccggtgtgcgtactaggttgccatgagttattttgagctgtatctattgtgtattttggttttatatttttgaggcatcatcgtatatagttcttttgtaaaactttttataagagggattcccagaacacactttt

SEQ ID NO: 366813 - DNA, 590 bp, Cannabis indica
atacacgaaaaaacacaaaaaaaaatacacaaatatataagcccaatgaataaattaattcaaagagaacatacctctaatttcaaattgttggtgattagtcgtaataattcaaacttttggaaacaaatcagctcaatccttttgtgccaatgtaattggaaaatcttttggctcagttctacctgaaagttgcttatcaaattaattgacaaatataattccttaatttccttttctttgttatatattgaggatatataatactattataaacaagacatttgaataaatataattctaataaatagaggagatatatacctgatatatatcacacacactcaatggagaattgttcactgccacacactcaatggagaattgttcactgccaatggaatgaaatgtgaaacatggtgtctgataaaccataagttatgtatgctatgatttagtcgatagtaaagaagagatagatattttttgggtttaattattgggtttatttttaaattttaatgaaaaaaaaatataatggttagctgtattgtttctatattatataaataatacaaaataacaaaaaa

SEQ ID NO: 366814 - DNA, 745 bp, Cannabis indica
cataaattgcccagttttttcgcctctctccgtggattttccgttgattctacagtgctgtcaagggcgaatcgtgggaacaatttcgtcagaagcaaaaggtcagttttcgaatctcctctgtgtttcgttttcggtttgagtgggaacactgttttctgggtttccaatatgcatgaggctacgttttttaggtaaaaaactgggtaatttcataaaaaatgacctggaaattggcgtaactgcatactgtataagaaatacttgaataggccctgtttcatgcttttaatactcgcgggtattcggactaacacttcgaatactcacaaattgacaaaatatacttacttctcataattggctagatcttttaggattttatatgttgtgagttaagtcgcaagagcattaaccgagtttccaaatggtgggtgtgtcacagtattctaatggtcatatacgcggttatatgccccttgagatactgtgatacaccgagccatttgcgacatgcgttaatattcaaatgagcatactccttggctggtagatattctcggaacggtgggagtacctcagtaacttcagggtcatgcttgagagcgcatgccccttgagtcactgagtttctcccatccgtttctgaaggtatatcgcttggcccaggatgcgtgacttattcgcatttttagtattatctctactcgcatattgagggggtggtcagcattcgcaaggatgc

SEQ ID NO: 366815 - DNA, 543 bp, Cannabis indica
cacaatcacattccactgtattgacaataatgtaattgtgaataaatatatgttttggacttaacagattttgtgcatatattaaatatatattaaaccataaacatgaaaaatacatgttaacataaaccactttaaaattcttaaattgataactagtcagattgtaatgggttttatttagggcacaaaaccgaatagataagtgggctacctccaagacaccctcaaagtccttctcgatcttagagataggatgtatacatgtatctaaatagagggcgtgtatctaacctcttttgaaggagaaggttggtacaagatgaagcaagttctagttcaagacacttaaggtctcgaggacacaatcgatcgcataggcaaacacgagaggaaagtagaccttgacgttatgctgactaagaaagcatgagcaacatgcaaagctaccaatctaagagttaaatcacagacaaggtctgtgagtaattatgagcgaagacaacctgatctttgtgagcacctgaatcgaagacaacctga

SEQ ID NO: 366816 - DNA, 1270 bp, Cannabis indica
ctttggttttaatccaaaaaatcgtatgtttccataaaaacctcaattttccattgcctatggactcggtggatgccacgaccctatgcacacatgggcgtcagcagtctaggctaaaagactttttttgaccaagtttggctttattttgtttgttatcttattttttgagtttcaacttttggttttcaatccaaataatcctatgtagccttgcaagccctaattttctgttgcctgtggactcggtggatgccacgaccttatgcacacatgagcgccaacggtccatgcaaaagatcttttttgaccagtttggctttgttttgttttgttttcttattttcttgagtttaacttttggttttaatccaaaaaaaccctatgtggccatgcaagccatagtttttcgttacttgtggactcggtcaatgccacgaccttatgcacacaagggcgcctacagaacatgcaaaagatttttttctaccaattttggctttgtttaatttgttttcttgttttcttgagttaaacttttggatttcatccatacaaatcatatgtggccatgcaagccacggttttctgttgcctgtggactcggttgatgccacgatcctatgcacacattgttggtattatatttatccaggatcttagatctatttgcaagtatgttgatttaacaacctaatattgaacttctaaaacgatgaactaaacacataaaagttaagaataacttacagtgattgcagcggaattaatgtctccttccactcagatctctaacccttgattcctgtctgtagcagagtataatcaagatctgagcccgaaagttcttcagttggatgtgatccttcacagtcttccaaactatgatgagatactgaatgatgtgagtgggcacttctctctcactagggatttcgaaatctctctcttgtttttctctcttgatttcgtgtgacacactttgcaaagcaaagttttctcaagcaaacacatgcatacaaagagaggagaggggctgctataaataggaaaagggaagatcacaactttccaaataaacagtttcctcttttactgtgtaattgaataactgccttatttagtgtgattcaccactttcctatttaggctaggctttgattagcaattaaatgacaaattaaattgaaaaataataattgggaaaaagcaatgatgtggccggccatggtgtgaatgggcctcacatggattttgcagtttcctcaat

SEQ ID NO: 366817 - DNA, 673 bp, Cannabis indica
aagatcctggataaatataattccaacagttacatcattaatttactggtagtagggtcgcaaatgttccacattctagtagttctttattagcgagccatttagccgagccaatttgtaattctaattcctactactactttgattacatatggacccacccagatcgggttgaacgctcctgcagacgcatctctcgtgtttgcaaatactcgccttagcaccaaatctccaatgttgaatagcctttttttgacttttttgttgaagtatcttgtaactcggtattgatacgttgcattagtgacttgcgactcagttcgtttttcattaagcagatccaaatataactttaggagtttttggttttcttcttggttatataactcttgtctatgagttgatatgttcacttcaacaggtaacattgcttccaagtcgaatgctagcgagaagggagtgtgcccgttgctgttttttcaatagttctgtgagcccatagtacttaaggtagctcgtcaacccacctccctttggcagcatctagcttcttcttgatagtatccttcaaggttttattaacaacttccacttgtccattcgcctgagatctggatactgacgagaagatcttaattattttgttccttttgcagaactcagtgaacaagtc

SEQ ID NO: 366818 - DNA, 516 bp, Cannabis indica
agtttgctaccttgtgtatgtaagagaaaagcaaagctggagaaacagtgagatggagctcggcagtgattgtacatatcgcgccagggcaacctggagtgtttcgatctttattaatttgagtctgtattttgaagttgcctgttggtcgtgtttcagaaaaaaaaatatatatattatgtgtacatattagtaaaatacttttaaatcgtattttgatactcgggatcccgacccatattagtatgaaattataaaatgtgtcaaattgtcttttgagtttaaaaattttaaatacgggcgttacagcttagctgtgtaaaaagtcattttggcagtttattttacactacaaagacccctcaccccacccatactcaacttaactaagcatctaaaaagttggaaaaagaaataaggggttagaattcattgagttaaactagaatgtcagatctcaagcttgtcaaaaaaaataataataataataatcatatatcaaccatatccattacc

SEQ ID NO: 366819 - DNA, 723 bp, Cannabis indica
aaagtaagttcctagcatcattcctcttagttttcttgaactttaagtaatagtttgttttgcatgatttgtgtttttgagttttgtatttgctgcagttagttgatattgttttctggagtttaattatgtttagatatgttgtttttggttggtttgagtggctgtagtgttgattcagcaagctttgagtattagaacgcaagcatggctgtttaatggtgattttcattttagagcatgttatgttgttctattgcttgggatatgtatattggggtataatatgcaggtctggaaagtttggtaaggtttggaatcgatttggttaggtttttgaattttttggggttttctggtctaaaccagccaaccggttttacagcccttataaaaccggttaaacaaatcagtgctgggtttcatgaattttttgtgttgtcaatttgtgttagtttcataggtttggttggttaattcccttttagtttagggtattgccatgttaactttcagtaggtacatttttggtttaaaacctaagtccccagttgtgatttagtgtgtcacttatccatgttgtgaacgatgtgatttaggggcttgtaattcgtcgagcagttgttcaactcaggttgaccgacacacttgaattcagaaacaaggtaagattagtgtaatattatgcatatgtatttacatgtttaacatacatgtttatta

SEQ ID NO: 366820 - DNA, 500 bp, Cannabis indica
taactcaaaccgattataattgagatataaacggttctgtaatataatgaataaaaataaataacacgacataactcaaactagttataattaaaatagaaccggttctataacagtgttataataaataaaaacaaattatacgaaataactcaaatcgattattgttgtggtaatttacaacactcaaatatacgtgtcgttttaacaagtaatactcacaaaaagtgagatcgatcgcatgaggattgtagttaagtacattaaaattaaaattcttacttctgtatggctaaataaaatttgagagaaaattaaaactaggaaacaattaaaaacactaaaagaaagaagtaggtaaattaataaaggaattaacaatgaatataagttagggctttaaatttcaattgtatctattgattatacttaaatatgattctatgatcctaataccaatttctatgcaatagcaggtttactaaggtaatttatagtct

SEQ ID NO: 366821 - DNA, 844 bp, Cannabis indica
gttaaaaggcattttggtctttttgttaaatggagagttaggtggctgcctagacatgtgacacctagcaattaaaatattcagcaaggttaattcatttaaccttagttttattttagaaaaaatataaggaaattgaggaaaaaatcaaaagaaacccttgctccttctccctttctcttcgagcagcaccaaaccaaggagaaaccatctgatctttagctatttttctagaaattcagtagagattcaagggttcttgaagccaaggtaagccctagtaacaccctcctttaatttttgaattttatggttgattgagtttgtgattttgttaattggtggttgttaggtttagaaatgtttagggtttgaattttaaggttcatttgagttggtttaagcttcttgtagctggtttggttgtatggaattggatttatgcaagtttgggtttgagaacctaaactttgatctttaatggcatgttttgattcagtgaattttctgtggtttattggctggaatatgttgtgtataccctaattaggtactctggaaggtttggttacgtttggtggagttttgagcaagaaatgagaatttttgggtgaactggtgcaaaccgagtaaccggttttacacgtacttgtaaaaccggttagccggttttggcagggttccccgagtctctcatttcctcaattctcgtccaatccgtgccatagttgggtgattccctacttcctgagttagaataatccatagagagtataacagaacctagggttgtgggttcgggtttcccggattagggtttttgatcatgtgatttacccgattt

SEQ ID NO: 366822 - DNA, 942 bp, Cannabis indica
ggagtcccaggctctttgtttgggtcttctgggccggctggagctggaggatctgttgtttgaacgggaggtacatcagcattttggccggaggtagaagcagccacctcggtttcaccataaactacttgggaagcgcaaaactcaaggcatgtccttagcttctcccaagtagtcgaagtttgcctgaggattagccttccaaaagtcgtagaagatctcaagaccggctgtctccaaggcatgaagtttctctttcagctttgtcaccttggccgtaagctcctcctccttagctttcttctcctcctccacttcagtagataaagtctcgatggtcttttcaagttggtcagaaacctcaagatccttagtcagctcaactattttcttctgggcggtaaaaagtttcttgttggctttacccaactccatccgaacagctctgagttttgccctggcgtcttcagcatccttcctggccaagtccacctctgccctcatggtgttagacaaagccgtgttcttggaagaagtagacttagcccgggaataggtgtagcccaacttcagaccggcctgcgcagaggaaaaacttgagtatttgagccaagtaaagaggattaaagaaaatcgtcaagaaagacttacccttgtgaactccttcaagactcctcccaccagcagctccagagaagagtcattgtcagcaccggccagctgctcactaacctcaggttccaaccggttcatatagtgagcaagcatctccttacctttcttggcctccaaaagcaccgacgaaggtggagtaaaggtccgcaccagctcagacccacctctcggttggtcagacctgtccgaactccctcctcgagaatcctttgactgggcaacttttggagtggaggggtttgcaaccgctagctcctcagaaagatc

SEQ ID NO: 366823 - DNA, 557 bp, Cannabis indica
cctccagtgtttctgggtggtcatgatgtaatgaaggctgagcagtggctcacagtgattgagcatatccttaactttatgggagtggttggtaatgatcgggtgacttgcgccactttccaatttcaagaggacgctctcgtgtggtgggagtggataaccctcactcgggacgtcacagtgatgacctgggaagaatttaaggagtggtttaactctaaatactataatgaagccgtccacagagctaagcggaaagagttcactgaatgggtacaaaccgaggggatgtcggttacggagtatactactaagtttgatcgtctggccaagctcgctgtgggaatcgtgccaactaatttttgcaagaaagaaaattatttggccggtttgagtgcgaagattagagacgatttggtcattactaccactgaaggaacctcatatgctgaaatggttgaaaaggctttgagagccgagggtgcggtgaaatttcttcaggagccccgagtgactccgagtgtcggtggaacccccacttttcctactcctgtcta

SEQ ID NO: 366824 - DNA, 440 bp, Cannabis indica
attataattgagaattatttttcacatacgtgtatcattgcttggcattactatatacagtggacagagaattggacaggatatatgggctgaggacccacttcctaaaagcaaagttttaaaaaccaattaaactctttaaatgttgtttgattgaaaggaaaaaaacatataagattacaatgagaatagtaatagaaattgaatagaactaaatttaaaatgcataaaaataataaaagattattaaatttttttctcatcttgcattaaaatggtctttctttatttttcaaatgacaaagtcattttataccaaaataatgaaaaaatcattctattgaaatgacattcttatctttaaaagaaaccaaataaagaatagataaaaatatttattccattttattctatttcattatcttcaaccaaatgtcaca

SEQ ID NO: 366825 - DNA, 807 bp, Cannabis indica
gtataaaagaacatcaggaagaatagtggtatcactaaggtaaagaagattacctgaattacttaaggtgacatggtaatgatggagagtactttataattgaatgaatagtcaatgtggtttataaggagaccgttgaaattctaggaaaggattattttattaaggaattatggaaaggcatactcacctagaatggggaaaagcttatgtattgagatgaaatttaatggatatgtatttgagtgattggtgaatggtggatcacaaagtaagttgtttattaaacaacaagctatataattaagtgtaaaataagttttagagtggttaaataagtatgaagatagtgatgattgcaagaaagtaatggtagcgtagggagtgaaacattagtggtaagatagtgatgaatcaacatcatcaatgggagactcgctataagttggtatggtaatttgtaccaatgtgttatcaatataacggagaatatacttgaggtatgtatatttctaggtgtgttgaaaagatcatcaatatctctaccaaacacagaaaaaaaatttcaggatcacggaatgatctttgattaattgttattagttaagaattcgagaaatgtgtatttccagtttagttatgggtacctggtatgagtaatgttgcctctactgtataggctacattaattcactttataattatagttaactttaagtgattgggaaattttaaagctgtgtcagctcaggacaaattgatgcaagttaaaataagtagaaacgaataagattcaagttgacaata

SEQ ID NO: 366826 - DNA, 792 bp, Cannabis indica
tgaacattgaagagtactaccatcaattgtacttgaggaagcaacattgttagaagcttcatccttaattcttttcctcttacaaaattttgcaaattcggggggcggcatagtaatcaaattccgctatgagctcgcaattctgcttctagcttatccatgtcggaagagttaaaattgttgatcatataagatacaacaaatccattatactcaggactattaaatatgaactgaacccactgttcttttgataattcaattccaagcaagttcgctttttggactttcagattcatcattaataggtctaagttaatgctctttccagggagcattttcacactatagagttcatttgcaaaggaatttactgggagtgggtcggggtttgtgttgttcattttgacactaaaaatatcaataaacagaaggaaattatttggttcaataaattcatacacaaattcgaaaaataacaagtataacaaatatgtttataaaaaataccaaaaatgaaacatatttttagtttccaaggttttcaacaaactgatacaatgtcccgtttaggcgagagtcaaagaatcatccattgaatagagtagtcaactcatctaaaatgacaaacattctagcaactttttattcgatcaaaaagagaatctgacgttgtcccgtttaggctagagtcaaggtcattcctatttcatgagcctccactattgtttcatatttttgtaagtcttactaatagtcaccaccattaaggtgatccatactaaaaataaa

SEQ ID NO: 366827 - DNA, 366 bp, Cannabis indica
aagaaaacgaaaaaatttgcaagtggtacggacagtataaattgcatactatccgcgcgcgcttggggaggtgcttgaccgagaaaccttggcgcaggaggctgcatgcagcctctccgcatgcacaaggctgcgtgctgcccgagggatgcccctcatccgcacacgtgggtagttgcagcatcccgatatttttccgatttttaaaaattcataactgtaaaaaaagtaaattgcttaattttttttccaaactatccaataaacataattctagaaacagaatttcaattatttttcacaaaaattcacaaacatcaatcaatcatcatataacacatagatcaacatgaaaccatccaaatc

SEQ ID NO: 366828 - DNA, 808 bp, Cannabis indica
actgagtctgtcgactcacagttttacgtttatgtgtaggtaaaggcaaggctaaagctgagggaccgtgagcgagcttgtgaagattgtacatgttgaggcggttaggcctgtagcgtacgatcctcgggacagcgaggctgattttgtaactagtcgctaggcgacaattattttgtataaacagttaaatcttttgtaaatgattttgtaatcgggatcccgagtctttttgtaattatattttacaagtttaattaaaaagcaaaaattttaattaatcacgttttccataaacctcgttgattagcaacgagctgcacagcatgtttaaaaatcacgtaatacgcctatgttagttagggtgttacaggtatgcaatgcatacccttgtgcaccaaaattgtttttgtcatattttttgattcaaaaatcatttttcattaaaacaaaattcaaattttggtagaattttgtgtagaatctaaatttttaattaaaaatctaattatcagaataaaatttatttttattaattttttaattaattaaaattagttttggatattattagttttgtattagttttctttgaatttgaatttgtttttccacaaagatagccttatggttaattttgaaattttgattattttatttattttaattataagatcagatattacttattttattgttaattttgaatgatcttattttgatattaatttttttttaaaaaaataatctagtttaaattttaaaatttgctaaccatatcatatcctttttaatttttttttatttt

SEQ ID NO: 366829 - DNA, 665 bp, Cannabis indica
aaccatgcaacattaaatgttatttctgatctatattaataagtaaatttgattatattgaaatgagttttatttagggcataaaacccaacacttacggcatgctccgtaatcgctaggtatatccctagctcctcaccgtccagaggtttagaaaggacgagaggttttgcgagctgtgcctttaaatcttgaaaatctctttcacattcttcttccactcgaactttttgtttcctcgcaggatgttgaagaatggaacacatttgtccgttgattttgacacgaatttgctaagtgcggcgattcgaccggttaggctttgcacctctttggtttttgttggcgagttcatatctaggagggcttggattttttctggattgacttcaattccttgggattgacgataaagcctagaaactttcccgagctgactccaaaggagcattttaagggatttagtttcatgttgtatttcctaaggactttgaaacatttgtccaggtcgtctatgtgcccccaacctttctggatttgacgagcatgtcatccacgtacacttccatatttttgccgatctggtctttaaacatcttgtttacgaatctttgctatgtagctccggcattttttagaccaaacggcatgactttgtagaagta

SEQ ID NO: 366830 - DNA, 620 bp, Cannabis indica
ctcaggtgtcctttcttggacacattgtcagtaaagatagaattaaagtggatccggggaagattgaatccgtccgggattggccgcgaccaaaaacagttacagaggttagaagtttcttgggtctgctgcgtattacggtcggttttgtagaggggctctcaaaaatttcaacacccttaattgagcttactaagaagactaagaagaatcaacggtttgtgcagacggacaagtgtgaagcaagctttcaggagttgaagcaaagattaatcacagctccagtgttagctctatcttctgatagagaaaagttcgtagtttattgtgatgcatccaaacagggtctggggtgtgtattgatgcaagccgatcgggttatcgcatatgcctctcgtcagttgaaagaatatgaacagtaatattcgactcatgatttagaacttgtcgcggtggtgtttgtcttgaagattcggcggttgttaggctaaaattagtctaagtttcgggacgtattttcggttagttttcactctttgttctagttttaggactattttacgcttgattcttttgtgtcaggtccccgggtgtttaaagaaagtatttacaagaattga

SEQ ID NO: 366831 - DNA, 1001 bp, Cannabis indica
aaggtgaaccaaaacatacacaaatgaatgaaaaatacttatgttactttattgatattgaataatctagattacattgaaatggggttttatttagggcataaaacccaacaagaacaactaagatttgctacctctaccagcagatagacatctgcaagtcattattggaggccctcacattgctggagattcgggcaaagcttgggagaggtatgtccgaacagtgcaacacgaacaagaagaagttatcttggccgtggaagaaaggaagcccaaagttctacgagcaggagagccgaccatatccttcaacgatgaagacactgttaaagttaagtttccacacaacgacccgctggtcgtggaggtccaaatagccaataaaatggtgggcagaaccatgatcgacaatggagcttcttccaaaattttgttcaaaattgcttaccaaaaaatgggactccaactcaaggatctaaccccatgcctccagcctatctatggtttctccggtcaaggagttgcacctctaggacaaattcatccacccctcactgttggataagcttcgacgagcataactatcatggcacagttcctaatattggatgttccttcagcttttaatgtaatgcttggccagccagccttgtatgacttaaaggctatcacatcaatatttcactcgtgcctgaagttcccaacaaagaatgcggtagggtgtgtgagaggaaaccagaagtctgcacgggaatgttataaccttgcagtggccaaggctaagaaggaagtatcctccagctagagcacagacaaggaaaaaaacattcccaagtagggaagttccctaggcgtggatgaagatgtggatcctcgacttgggcaaccaagcagcaatgttcaacctgtagaagaattagaagagatcgggatcgacccaactatctcaaccagaaagctaaagatcgaaaagggtttgttgctcgaagtaaaatcag

SEQ ID NO: 366832 - DNA, 685 bp, Cannabis indica
cagaggtcagggatgctttcagtgtggcatgcccggacattacaagagggattgtccccagctcagaacagaggcaccaaggactccggcgagacccactccagctagggtgttcgccattacgcaggctgacgcagaagccaacccttcagtggtgacaggtcaactttcagttaacaactctttttactcagtattatttgattctggagccacacattcttatatcgcagccagaatctttagtaaattggatagaccgtatgatagttacgaatcagggtttgaaaccctattacctagtggagagttagttatctctaaaaggtggattaggtctatgccgatcagaatagacgctacagagttaactgctgacttgatagaaatgagcctagtagatttcgatattattctaggaatggatttcctatctaaatactcagccagtattgactgcaagaggaagatggtgatcttccaaccggaaagtgatgaaccatttgtatttgttggtacggttcagggatcttgggttccggtgatttcagccatgtcaactagggagttactacatggcgcttgtttagggtttctggacgtggtgacggacaccactcggccagataccactcggccatcgggaatttctagatgtatttcctgaagaacttccaggtttacc

SEQ ID NO: 366833 - DNA, 676 bp, Cannabis indica
tattattattaaactagtttataaaatcacacaagtggcgtctctatgcaatagggtgttacaatagagtttggcaattaagacaaactaggttggtagttgctgacctcgcttttggcaaacgacaatgagtcaattaataagcgataagaaatgaaataaaacagagagaaaattagtatacaataaagaacacaaggttttaaagaggttcggcccatttagttctgtaatagcctactccccttagattgtattgacttgagaacaaagaacactgtattccctctctcaaagctctgacaatgaaatctctgactgttttttcttagatctctctctaaagcaattctttgatcccttttttagtgaagctagatcattatttatatggctaaatgcatgagggaaggtttctcttttgcttacaatatctaaaattggtaaaacatatattacatatttaaaatacataaaaatgggggattgagacaacttaccatatcccgttgatacaatcccatgattgtagggatttcctttgtgcttgagcttcacgatatcaactttgaagtagttaagtcttggtacacggcttgaagagttaacttcactctttactcggatcatctgccctttgctctgctcggtcaagcagacttgtgcatgcagatgt

SEQ ID NO: 366834 - DNA, 646 bp, Cannabis indica
acaaagacaatgtttatgaagaaaaagcaatagtaataataatcactcaagaaaaatatatatgtgtgtgtcatgtgcatttatagtagttaatatcttataaaaatacttttagtattgatcatcatgtttttagcttattagtcaagtcattgttttaagaaatccctctcttattagtcaagtcatttacagtagtcattgttttaagaaagtttcattcacaaacaagggaacctttgacaaaaaattagaaaattttcaagctaaattattaggctatcatgtatgtgtgattttattctatgtgtaatttttatattgtataattatgttttctttttatttttagaagaaaaaagtgtaattatatgttaagttggatgtttaattattattattattataattagaatgaaataattgatatatgatatatatgttacattttaaatttaattatataattaaaattatatattattctgaaaattattatatctttaattacttaatcattgtatatttctttatgattttttaattaaatttcttaagataatcatattgtaaacgatttgttaattcacatacgtcttttcattctctctttatatttttatataattcataattaatatattaa

SEQ ID NO: 366835 - DNA, 620 bp, Cannabis indica
cttcaagttagtgttgctctaaagttgaacaaaccgtgtaaaataatatcgaaaggagaaaaataagctgctacacacataaggttctaagttcaatttatatgatgtagggataattcaaaaattaaatccctacacttgaaaatctgcacctcctgaaacgacgacctgggtttgcctctgtgttcgatgttcttgaaatccacagtagcaattttgaggttccctttcatggtttgaaccaccagctactctcaaccttctattattgacaccagaactactgtacgaaccttccccatccattcttctcaaccttcgtccaagcttcgttgttgttaagcttcgtccatcatcgtcgttcttaaaccttcgacctagggatttagggatttaggtttgatttagggcttcgtgttttcagtgtgtttggtttttacttctgtaatgaagtttttttttttttttgaaatgttttcaggttttgaattaatttgtttaattaatttgttatattaatttgttttatttactttttttaggttttattaattttttttagttaatacttttatattttaggggaaaattaaaaaaaaaaaggggattaaatctggtgc

SEQ ID NO: 366836 - DNA, 510 bp, Cannabis indica
tcaattggatcattcaaaggaatatccacaaaatcctgaagtgcataatcttcttgttgtggatcaagttcttccagctttgaatagctttcttgatcttcttgtgttgactttctttagcaataaaccttgctctgataccactgttgggattttacagtcttatccctacacaaagtcaactcacacacacaaacacaaggtcaatcttgacctttatctattcagcaagtggacacaaacagtccacgtatcacatgcaaatcttgacacatatgacatttgattgaaacatttaactttaccaaaaacaaaacacagaaaaattgatcaggtttttcttgcttagtttctagggttatcttttatcaaatatgcatgcaatgttcaacgattaaagtgatttgattatgcagatgagagttagggtagagaagaagcaaacacagtattttatagaggttccccctgagttgatggggtagtcctcttgagctcgcctaaaaaaat

SEQ ID NO: 366837 - DNA, 681 bp, Cannabis indica
ccaaaggcagccgtccaatccccggtcacgagttccactcatgggccaagaggaggcagacaaaccttgtttgggaattcatcaggaggggccctgctcgacgaatccacgcagaataatggagccattccacctgtcaaccaagcgaaccaatcgctcagacagccaatttcttctgtgttcgaaaggctaggaacgacccatgacctaagggacgatctaaacagaagaaggggaacagacgagaagtaatactacaaacaaaacatgcagaccccggagcccatactcaaatctcgctcagaaagacgctgacgtaatccaacccgaccaaaatagccaatcaagtcagacaagccgtataggcccagctcgacgaactgaagaatatgtttcatggcatggccgggcagcgtaacaatgatcttgagttagaccatgcacacaaaactcctttcccattagagatcaatctcctgccactaccccacaagttcaagatgccaacgtggaagatgtacactggaagagaagatcctctctcccatctcaagtattttgagatgcaaatggatttacaaggggtgtgaggagacgtatgttgcagaatcttccccggcactctgtcggaagccgcacagcaatggtatttcaagttggctcctgtaaagtttagttcat

SEQ ID NO: 366838 - DNA, 589 bp, Cannabis indica
gatttttttcctcttttctttttttcttttttaggtatgttatatgagacaactacatacttatcaattgtgaaatacaatagtaaaaataagtttgagataagaataatcataaataaaaaatggtccaaaaaattgaaaatgaaaaggcaaagagtgaaaatcaaatgggctaagattggacttataatattatttattttttattccaattatgtccccacaattgttttgagcttcctcttttgtggggcaaaattcaagcacaacctatgttttacaatttgttctcattcttcaaaaaacaatcaaatggttctaataatcttagaagtcaatctcacctttaaaatttaatggctttcttatttctcaaattcttcaaaaaaaaaaaaaaaaactaaataaataatcatacatatgttttatatttagggtttatacaactttgtgtccctttgatttcttttaataattaatttggatcattgatttcgaaaaataggaaaaaaaaaaatagttattagtacgtggggtttttacattacatactgaatttttttaatttttttaatttttattgtgaggc

SEQ ID NO: 366839 - DNA, 603 bp, Cannabis indica
tgctggacctagatctggaccgagatcttcacccagacccaaacttgaacccgcactcgagacccgatcctagacacagattggggtccagacctggacacaaacctggacacaaactcggacctgaactcaaacccacacctagaataagacccaaagctagacccagaacaagacaaaaactcgaacccagactaggatcagaacaaaggacttagacccacaactgaatccacactcatatcgggattggaacttgggactcgcacccaacctagaaccaaacacagacctaggttgagacccaaaatccgacccagacccgaacatgatcctaggacccagctcgtgagtcgacaccacaaatggaacaaaactgggacccaagattgggatccagatctggaccatgggcttggacaaaacccgtagtcggtgtctagatttgggacccagctttggacccgaaccctgatatggaccctaacccacacccggacctagtcaaaaacccaaaatttgacccgaacccgtaccttatgacacaaaattgcaaccaaaaccggaagttgatcgggactggaactaggacttggacttgga

SEQ ID NO: 366840 - DNA, 507 bp, Cannabis indica
aatcctttaactgacgggaggcataagcgatctcccgattggcttgcatcggtacacaccccagaccctgtctgaatgcatcgcaagaaactacaaatttctctttggccgaaggcaaagcgagtactggagctgtaataaatctctgtttcagctcctgaaagctagcttcgcatttatctgaccacacaaaccgttgattcttcttcgtatgttcggttaagggtgttgaaatcttagaaaacccttccacgaaccgacgataataaccggctaaacccaagaagcttctaatttctgtcactgtttttggtcttggccaatccctaacggattctattttccctggatccactttgatcctgtctttgctcacaatgtgtcctaagaaagacacctgagagaggcaaaattcacacttttcgaatttggcataaagcttatgttcccgaagccgttgcagaaccatctgacgatgtaactcatgctcctcttctgattgagagt

SEQ ID NO: 366841 - DNA, 593 bp, Cannabis indica
tgatatattattttttttgctaggaattatttatttttatttatttattattatatattttaattttaatttattattatatatttttatttaatttaagttttttttttctaaaaggaaataaataaaatagtccagtccagtccaatcctttttagtccaatccagtccaatcctgcgtaccaaacggaccttgagattataataacttgttagtgattgcatgcatcaagggttattgtaagagttcgagtttacaagtgtataaaactttgaaagtatctaaagtttaaataattagacctataatctataatgcttgaaagttgtcattagtacaaaactccacggttttgatctatatccattcaattttaagtagtgatggatttttcagaagtatatagcctatttaaaactttagtagtaatggatttttcaaaaatatagcctatatttacaactgaaacttttttaaaaagcaataataagacacatgaattttatagagattcagctacgagcacttcgataatagcctaatcctcgtgattggtattgacttaagatcaaggaagaagattccttttctt

SEQ ID NO: 366842 - DNA, 512 bp, Cannabis indica
actacaaaaagtataagtattcatgtccaatacccatatttatgctcaaaataattgtttgcaaaattatgagcataacacattacaccagatccaaaagattataatttgtatactactgaatgtcaaaggcaatatatattgtcctgcaaattattttagaccaaagtgaataaacatgatctttctaactctttcccgagctgtgtactaaagagagccatcaatcagaagtctcgcccattcatccttctcatcatctgggacactgaaaaagtaagaaaccagagcattatcttgcataatcatgcgagctaccttatgacgttgagttgtagtaagtgtagtacagtcatgttaaaccactactttgtgtggctatagtacagtcatttaattaatcatcacaagtactgtaagggatttctatgtgagactattctaaagaattcttaattttattgttttttttttttttgttaaacatatataacatacaaccatatataaca

SEQ ID NO: 366843 - DNA, 838 bp, Cannabis indica
ttagatttcgaggacgaaatcctattaaggggggatagttgtaaagacagcttagctttaatttgaaaattagcagataattagggtttaattatgaaaatcatttattggtattgaattaattatttatgatgatttatttaaattcagaatgcatttttatgttacatatagaaatttcataattttgcatattttggtgcccgacaacattggaacgtggtgtatggctattagaattacatcttagtctttttagtttaacgggacgatagtttagatattgggaatgtcaggaatagtcaggattttagaattttcccaaaatacccctaagtgccattttatgacttttagtgtgggaggggcaaaatggtaattttgctccatttggcttttgtcttttgtgagttcggatttaagttaattaatcagatttttcttacttttattagctgatttttaattcaaataaaaccaatttttattcatcattttaacaaaaaaaaaaaaaaagaaagaaaggctttctctcttgcaactttctctttctctctctcaaaaatcctagggaagctagggttctttattttcttaatcaatttactgtgacttccaacagctcctagtgaattcaagctaaggtacgcttctagacaactttcctttggttttcttgaacttcaagttatgaaattatgcatgttttgagggattgagttccatagttgttgttggtgtttgaatcatgtttctgtagttagaatatgatttattaagttgagttaagaatgaattagtagttgtttgaaggttttagcaagctttgagttttaga

SEQ ID NO: 366844 - DNA, 719 bp, Cannabis indica
aatagaagattacaagtcatttaggttaacatatcattttcatgattatggtttaatatacaatttctattaaatcgagaacatatagttacagtaatgtcaagaaagtggaaggtaattgtgattatatgtttcaaaacttatgtcccataatttattagtgcactggatttacaccgatgtgataatcagcgataaagtttacttacaccttggataagtgttatgtcctttccaggacattaataaagtatgctagtataggatgtatggagtatatattggactggaccgatattgattttgtaaagatattataaacttaccattgtatctttctaagtcaatatcaccaagttgatcttagatcaaaagatcttaatcctaatatggttaggttgtatctcaatagtgttatttatgctcttagagttgttcattaaagcttaccatttggttcgggccatgacatacatcttgggaacatgatagtacaattgagtgggagcactaatcatagatacaaaatctatagcttctatttggacatagaagtgaaatgaagaattccctcaaacctaggcttaatagagataaatagaagagctcttattttagtaattatattagtttattaaaatatcatttataggtaagctaagtattttaaaggataaaatacattgaggggtagaatggtaaatttgtccctactcgat

SEQ ID NO: 366845 - DNA, 469 bp, Cannabis indica
caaggttctctgcccaaacattcgtacccagacactgaaaaggtgctccaggcagacattatagcctcggcggaggaccggtatcagaagtacctcttcagaagagaacaagagttagcttatatcaaggcttaggctaccaccgggaggaccctccgactggaagcgggtaaagaaaagacgccttctcggcctaagttgctggtcctggttcctaatattggggctcccgatgccagcacattcggatctagtatgtctcccttaacggtttattacatccattctgcccaagagtattcccggtgtaggcctataggatttgatgaacgtcttcttagatttagaatggcccctacccagtggggtgatcatgccaagggcttttatttttctaacttaggtcatttctaggccggtctcggatggggtcaagacctcctgcacccattgttggaaattattttac

SEQ ID NO: 366846 - DNA, 739 bp, Cannabis indica
tctgagtcaagtgagtgaatcttttcttttggcacttctgacggcctcattatagtacttggcattgaaaagttcctggaactttttccaggtcatcattgtaacaccatgtcccaccacactaacacatcttcttgaaactgaaaagtggcacagaccactctctatcattcccagtgacgcccataaaattgaatatcttggtgatcatagttagccactgctcggctttcataacgtccgaacctcccagaaaaaccggaggtgcttgattgcagaacatttcatacagaggttccattcgattcactgcaatctcaggttcggcctggacaacaggggcaggtgccattggaatttctggaacaggcactgcaggagcaccctgctaacttagctgtcgaattacttcctcttgttcattaattttagtttaaatttctgcaaacctattttcccaattctggccttcctgagtaacttgggcagcctgagcagcctatggcgggttagcatcactgcgaccacgtgcccctgggacctctacctcggccccgagcatttgggggaaacagagctccctgaccttcatttgacccaactgagttgccctgactcatggtatttcgcctggcgtccatctaatctgaacagccttcgtagccaagagctagcatggttagatcatgatcacgagaacttactaatgccgcttcgtttggaaattaaaaacatgcac

SEQ ID NO: 366847 - DNA, 561 bp, Cannabis indica
tgtaaaccgtaactggggaaaccgtttttggtggtttggtcaatccggaccgtttacgtcgtaatggttcggttgcggttcgtaatatataattaacggttaaactggaccagaccgtttataataaataattaatttatatatatattttttttatatatgactatatgtataatttagaatttttttgtgtgtcaagttttttcttgcataaattttagatttttatgttatgtttgacttttgagaatgtttttatatcattatttatatcttatagatctattacttatcatgttaaatatatattttgaaaaataaaattaaaaacttagtaaaaatagtacaattactaaaaaaaatatgaataaatattaattccacataaatcgtggtttcaaaccaaaccaaactgttcttaacggtttggtttgagaaattttttggtctggtttggtttctaatattgaaaaaaaccgttatactagtttggttcaaaacttatgaaaaatcggaccaaaccaatccatgaacacccctagcaaaggtgaaaaagaaagc

SEQ ID NO: 366848 - DNA, 540 bp, Cannabis indica
aaacaaataaaactatagtgattgccgaagttgtcactcgtgccgaaaaagtcaccggagtttaatgccgccaccgaaaaagtcgtcggagtagccgccggtgccgtaaaagtcgccggagttgctgccggcgccgaaaaagtcatcagaattagcattgtcgcttgaaaaatcaccaagaactggttgcttgaaactggtttcttggaaaccggtttctttgtgatttttttggtaattttaccggtgacaatgccaagtccgatgactattctagagtttgatgtcggtgccagaaaagtcgccaaagtagttgccggtgtcggaaaaatcgctggagttattgtcggcgtaaaaaaagtcgtcagaattggcattgtcgccagcaaaatcactagaaaaatcaccaagaaagtggttttttcatcaagaaaccggtttcttcatcaaggaattaattttgttacacaacaataataaacattatgaaaacagaacaaaaatgatatacactaaaaataattgaaaccagtttcatca

SEQ ID NO: 366849 - DNA, 710 bp, Cannabis indica
cactcagatctctaacccttgagatggatgtgatccttcacagtcttccaatctatgattgaggtactgcttgttgtgtgtgggcaatactctctcactagggatctcgaaattctctctcttttgcactgtgtatttcgtgtatgatagcatgcaagaggaagagaggagggctgctctatatagggaaaaggagggctaaacattccaaaataaacagtttccttaattacagagtaattgattaactcccttattttgcgtgatccaccactttccatttatagataacgtctaggtttaggttaggaattacttggcaattaaaaaattgaaaataataattgggaaacacaaagaagtggcggggcatggtgtgactgggcctcacttgggttttgcagtttccgcaattttatttatattttcccaaaaataccaattttccaattctaaccatttaaatgccaaaaataattatttaataactaaaatagattattaaataatattgtcatttaatataattattaattagacatgtagagtctcttaattaataaataaacctaaaatccattttctttacgatttcatccctacttagtgagaattcacaaattagacttagtctaacttttagaattatcattgactaatcagttattgagtcttacaaacaatatggtctcaactagaatgaggtccat

SEQ ID NO: 366850 - DNA, 665 bp, Cannabis indica
ctttgaaaacaagagcaaacaacaacagcaagaacaacaaccaaaacctcatttcatgcaaaaattccttttcttacaattcaagaaatcaaagaggaagtttctacacactttaccttggcttggattacacttagatctgctagaaatcactgaattgcagggaaaaataaagaaccctagctggttctagttgggttcgaaaagagagagagagtttgagagagaatgtggtttttgataaacttttattatttttgtaaaataaagaaataacataggttttattaaatcaatctcatccaaatacatttaaaaaatttgattgtatttatttaattaatttctcataaagacaaaatacaaagtgggcaaaaagaccaaaatgcccttacccacactaaactatcttaaaatcacttaggggtattttgggaaattctgaaatcccgactattcccgacattcccaatgtataactatatctccctgctatactaaaaatactaggatgtgattctaatagccaaacaccgcgttccaatgttgccgggtactgaatatgcaaaattatgaaatttctatttatgacatataaaatgcattctgaattcaaataaatcatataaattaataattcaatacttataaataattttcataat

SEQ ID NO: 366851 - DNA, 593 bp, Cannabis indica
attaaagctttgagaggcgaccggtctctgcagcgatctgcaaaataagaaaaaaaaatagttaagtataagagatcagatgctagagtgaagcacaaaagaaaccattaatgaagacttaccgcggtcatagaagcgctgatatcctgaatctgatagattgagttcgtagaagcgcaggctgcatatagtttggccggaagttgggtcaggttggagacaaaatggcttgtcaactcaggggcaaaaggagcaagagtaagaccgacgaagcggttgaaccagtttgtcagagggtccatgttcaggtcccaagcgttcctaaaggcttcctcgcgtaaggaattttcttgagcctcccgtaagacctttttaagggcttccacctcggcattcccccttgtatactcggccatggcatagttatgcttggaaattcgaagttgctgcctttcctcatctgcggggacgggagtaaggatgatgctgggaggtacagtgtattcctcggctttaggtggaatccctaaatcagagctgacggccggagtgtccaccctcctaggttttttggaagactcagcctccaccat

SEQ ID NO: 366852 - DNA, 531 bp, Cannabis indica
atcattattttatatttttaataaagtattaactaacatattaaattttgcattaagatttacaattatacattggagcataataataaaagttgatgtaaaaatatcacaaaatcatattttatgttaaatatagatcaatttttacatcttccattggagatggtctaagtatcgctttaattttgttactaaaagcaagtcaagaaatttctttttcttatatgttttttttttttttgtaagttcaatcatttttgtgcttaattatttatttatatataataattataattttatcactacatgcattttttaagttcaaccatgcattctaaaatctttgtaaaagttttatttcattataattctatttaagatgcatacatatatgcatatgtacattcttcaaacaaatattgtgtattaatttgatagaaaagcttatgccactcaccacactacaaaagatcttacttttagtcacaacaaaatttgtgactaaaagtaaaaaaaaattataactaatta

SEQ ID NO: 366853 - DNA, 1339 bp, Cannabis indica
gtagaatgcacagcaaagaagaaagcataccagaacataatctgccagttcaaattaccgtaaaaatagtttcggacaacggcaaacagtttgacagccagtccttcactgatttttgtgcgaaccatggtatcatcaaaagcttctctgcagtggcgcatccccaagaaaatggtcaagttgaagcaatcaacaagaccctgaaggatacattaaagaaaaggttcgaggatgctaaaggaaactggccggaggagctccttaaagttctatggtagtaccgaacaactaaaaaaagggcaaccgaacagactcaatttgccatggcatatagatatgaagctatgctgcccgtagagctcgatccaccatcccacagaagattgatgtacaaccaagaagaaaatcacgtacttcttgccgaatcacttgatgaaatcaaagagaagcaaaccacagcaaacttaaagttgatagcccatcaacaaaaagtagctcggtatttcaataaacaagtgaaggctcggaaattctttgtgggagatattgtcctaagaagtgtatttttaaacaccaaagacagtacgataggtgtactcgaacctatctgggaagggccatatcaagtggtcgaagttctcaaattaggagcatagaaattgggtaagtatgatgaaaacatgcaacttgttctagtaccacggtattggaatggggagcatttaagaaaatactactaataaagtaccaggtcggatgaccatattaagtactgaaagaacattcacttttaagtgaatggcctgctgggcggactacgcccaaaggtttggacaaaattgaaaagtactcaggtcagatgaccaccatttaaagtacaatttctaatttctgcaatattttttattcatgttacgctaaaagatcagattagatcaaatagctctgatgtaagttactgcgataacaaacacattttcgatcaataaatgaataaagatgcttatttcaaaattcaaattaagtcaaaattactaacatgtggttaatttaccatctagtgcgtacaaaaggtttggtcgaacccaaaaccccgaacagataaaaaagtatacctgcaaaaaataagtgaccaagagtcataagtctgctcggtcacttggggggcacccatacctgtacgaagcatttggtaaagataaaacaaacacagttgcacgatgattataaacagagaatggaattcattaaagataacaaaagcatgtaataccaggattaaaaagttgcccggtcagcctgttgtttgtaaaatgaaaaataattccaagtttaaaga

SEQ ID NO: 366854 - DNA, 610 bp, Cannabis indica
ccgcacattgctggagattcgggaaaagctcgggaaaggtatgctcggaaagcacagcacgagcaagaagaagtcatcctgggcgtggaagaaaggaagcccaaagttccacgagcaggagagccaaccataactttcaacgatgaagacgatgtcaaaattagattttcgcgcaacgacccactggtcgtggaagtccagatagccaataaaatggtggccagaaccatgatcgacaatggatcttcttcaaacattttgttcaagactgcttacgaaaagatggaactccaactaaacgatctatctccatgcctccagcctttctatggtttctccggtcaaggagttgcacctctaggacaaattcggctacccctcactgttggaaaatctctaacaagcataactatcatggcatagttcctaatattggatgttccttcagcttttaacgtaatgcttggtcaactagccctgtatgacttaaaagttgtcacatcaatatttaacttgtgcctgaagttcccaacaaagaatggggtagggtgtcttagagggaaccagcagtctgctcggaaatgttacaaccttgcagtggccaaggcta

SEQ ID NO: 366855 - DNA, 542 bp, Cannabis indica
gtattagttagtgctataaggtggcttgattacctaattatttttagaatattagtaatttatctctcaaatttttgacaataataattttccatcttaaaatataacgcttgttaagaatttccctgaacttttacatttacaaaaatttagtgcttctgttaagttctgctccatcattctgtttaaatgttgacgtgtcttcacaaattagcaactttactccctaaattttgacaattatcaaatcgcaccttctcaaaataaaaataaaaaaaattcaatatttttgttatagtatatcttaaaaaattaatttagatcttaagaaaaaattattttgaatgattaataaaattaaaaaataacttaaaattttaaaactaattaagctatttaaaaaattatttttttattgaaaaattaatttagctattaaaaaaatattgaatttcaatttttgtaaaactaaattttacatgaacaaacttgaatatattttatttttcttaaaaaatgtagatttgtttgagaaaacataa

SEQ ID NO: 366856 - DNA, 905 bp, Cannabis indica
caaccaaagatatgctcgtattaaacaaacaatgcgtaaagctaatgcctctgaccctcaagtggcccagcacgcccccttgcccagcgccgaacaggatccacccacacaggaggagggggatcatgcaggggacgttgaggtccgagagatagaagaacagggcaatgtccgttctggtagtccttccgaggaggaggctgcacccccaaactttggcagatataatgaggctgggaagctagttgatgttgatggagacgtcctggtcgagggcttggattacgtcactgaggaacttactgcagcggttccctagaggaggcagggtgctttgggcaccaggttggtgagccctccatacaaggtcactaaggcacgcttaagggatctcgatcaggatggctacctgggcgagttagactgctacatccccgcttataataatcgagccacaaaccctgagagggggatgtgtgcctggtcgggtgctcatgctaaacaaggggcattgctgcctttgcttccgtacttgaggaaggttgctgacttcttctgcctctgtctgaccctattcactccaaaggcattaagtctctgtctgccctgttcattctctacgcctccaagaagtgggatatgccctctccccatgaggttagctggttctttcacttgaattccacccccaagcaaggcaggtcgggtacttctacttctctcagctagactacaagtggttggacattttgttgacgagtatttcatggtggctggcatgggtgcacctacactcggttctagtagttccctgtatatcaccgcccacccttcacacttgctcttagggatagagctcaaaggcttgctcagctgctgggtgctgcccggaatatcactttgtt

SEQ ID NO: 366857 - DNA, 833 bp, Cannabis indica
gaggaagacacgtgtcaagctagaaagaatatgaactcagacacgtaatcataattacatttgaggaggaataactcgttaaaagcataattaacagagtatatttacaactcagctgattgaatagtcttatgcgagacaaaaatatacaaattgttgccttgcgcatcaacgagaaattgtgtaactttaggtgtataagacgaggcactaacctcgattacgtgcatgagatatatggattgtgaagacacttagcgtataatgtatagtatacaaattaactaagtataacagatgggtgaaccaaagcaagtgatagtgagacgtccacctcgccatgggaggacatgcacaagaaaaagatcatctcgtcctcagaaactgtggttgtcagatagaatattatgtttccagagtaaaagcgacgagatattgcattatcaaacttggaaagaaatatggcgaaccccagctctgtcaagattgcctctgctctattcccagcaagacattccaaaacaattcggttgacaacatatttaatacacgtttatttcaacccagtaaaaagcgggatattcacagctgtgtgatattcaaataataactccatttatttaacgtgatatgtaatcagaccccataatttcaggggataattgttgtaaaaatattagtcaaccctgtaattaactgtctactatgtgattataaatagaggcaagttagactaaaaaagggaaaaaaaaaacaaaaggaaagaagccctaaaagaatcgtcagaaatctaataagattgactcgtggactatgcagaattttaactgcaa

SEQ ID NO: 366858 - DNA, 1250 bp, Cannabis indica
ttaatcatataaattatatatatgttacctcataagtaaccatcttcattacatcaggttgcctaatcaggcaagcccgtcccatagcctggcgcccatatatcgtacaactgcatcacctaatcagatgagcctgtgctaaaaatctgcacccatatatcccataattgcatcacctaatcagatgagcccgtgaagcaacctggcactaatatatcgcatcgcctagtaaacaagcccatacctacgcccggtacataattccatcacctaatttggtgagcccgtgccacaacttagcaccaatatattacatcgtacgacctcgtacctacgcccggtactcatatatcactaccgcctgtacctaatcaggtatgatacacaacatatcgtatcacctaattaggtgagcctgtacctacgctcgatactcatatatcactatcgctcgtacctaataaggtacgatgcccgacatatcgcatcacctaataaggtgagcttgtacctacactcggtactcatatatcattaccgcgcgtacctaataaggtacgacgcccgacatatcacattacctattcaggtgagcctgtataacgcattcatggtatcatcacattatcattgcttaatcaaccaatcttttcattatataacaataataatcatatctcaatattaataaattcacaacaatactaattatattagaatacaatgtataatgcagtacaatatacttttcttacctttaatccaagttcatacatgttgtccaactcaagtagagaactatccccgatgatcttgaccctatgtcacaataacagtaaactaataagaatttatctaaaaaactacttaatattcacataagataatctaggattttctatcaaaccccgcggtataattacactaaaataaaatttatattttggctctaaaatatacaccatattgtagagctcattgcaagcttcaaaacggtatatagaatttctaaaatgaacacccgagtaaaaagttacgataaaaatacaaaatctagtctcttaggaatttctaaaaattgtaaaactcgaaaatcctaaattttgcactcaccgaaacactaccaaacttatccaaatcactccaaacttcacagggcacatatataccataaatattaccattcttatgtaacagaaattaaaatcgagctcttaaatgaaaaaagtcattaacgttcggactaagct

SEQ ID NO: 366859 - DNA, 462 bp, Cannabis indica
ataactaattgtcaaatttctcacgccattgcttaagtgcctgcttaagaccatacaaagatttatctaacttacaaaccttatgttcctggcctgggatcacgaacccttcaggttgatccatgtatatttcttcttctaattcaccattaaggaacgctgtcctaacatccatttggtgcacaactaaattgtgtatagcagctagtaaaattaaaactctaatggatgttattcaagtgacaggtgaaaaagtgtcaaagaaatctacattctctctttgtctaaaaccctttgctactaaacgagctttgtatttgtcaacagttccatcaggtttcaatttctttttcaaaatccacttacaacctatagttttgcacccaggtgataagtttgtataatcccagtttttgttcttaataagtgagtccatttcatcatcaacggcctcttgccaca

SEQ ID NO: 366860 - DNA, 667 bp, Cannabis indica
tatatatatttatatatatagaagaataggttttttctccttttctttattaaatcatttttgcttttgttcttttagttttttaattactacaagaaatgacaataaattcaatggtacttgtagcagaagtgacaatccagttggcatgtttcttatttacaagactagagactggttgagatgaggttggtggagttgataagacttaaaattgatctggatcaagagtatatataggccattgtggagagtcccaaacaatattattgctttggtcacctactccttgacatataaaataagagggtgaaactcaaagaaaatattattgtcaaaagcaaatttagaaacactaaggccacctccaatgggacactaaaacactaaatatagtgtagtttcacactatatttaactccaatggaatactaaacctaatcctcataaatagctttgtctacagtgtcccaccaaatttagtgggacactgtagaccatactattttttttaaaaaaaaacgttttttaaataattaaataatactttaaagaagaaaaataaataattgtatatatttagtattaaaataattctaattatattaataaaataataaaataataaagaatttaaaatttaggtgtaattttagtgttgtggttg

SEQ ID NO: 366861 - DNA, 769 bp, Cannabis indica
agcctttacttgctgataggtaagacacttagcaacatactcaacaatatcatttttcatgcccgaccaccaaaacatggccttaaggtattgatacaccttcgttgaccctggatgaactgagtaaggagtcgtatgagactcattcataatatctcttttaataccatcattcatagccacacaaacacgatgtaaagtcaccagtcttcccagccgaaaccctatctcgggattttactaactctggatcttgcatctgtgcttctctgattcgctctaaaagagtagattgcagggtaatattagctaattgccctacaaccaactcgattttagctcgggtcatctcatttgctaactgttgggagatttgtttcacaatatttatctgattctgcccctttctactcaaggcatcagcaaccacgttggcctaggtgataaaggatctcacaatcataatccttcaccaactctagccagcgtctctatctcatgttcaggtctctctgggtgaagaagtatttcagacttttatgatcagtgtatatcttacatttctcaccatataggtaatgccgcaaaatttttagcacaaataccactgttgcgagttctaaatcgtgagtagggtacttctgttcgtactcctttaactgcaaagaagcatatgctattacctttccagcttgcataagaacacagccaagaccttgtctcgaggcatcacaataaacaacaaacttttccttatctgaaggaagag

SEQ ID NO: 366862 - DNA, 748 bp, Cannabis indica
atttataaactaccaaatatattcattaggcggtttggattttcattgtattatttaaggttgtattttttgtcggtttatttgatttgatttggacggtttgtaaattttgttaaacactcatactctttacattttttgttgtttttatttgtatactcattatttatatttgagtattcataattttaggttattctgcaaagagtgttcttgtttacttgaatactcataatattaggtgttgtttattttttttttccgagaacagtagtattgtttggtggtttgattatcttttgtgtattaagaacattataatgggtgatgccatttgattaatgaagttttcttagtcctagacctcttactgtgatttgcatggaggtgttgtaaaaaaagggtaaatactatttaaaccatatattttgtaaaaattattgattagattatctgttttattaaatgataaaccgaaccttgtattttttaaatagtactaaatagtattctcaaatgattttttgtcaaaataaaacttaatgataactcgatctaaagatgttataataaaactagttacgttctttatattcatttctactataaattatcttcaagttgattatattaaaataaattgttgaaattaaatttaagatcctatttatgctagttttaaaaaaactagaaaaaaactacgtgcgaggcacgtatactaaatttatgctagtttttttctatgtta

SEQ ID NO: 366863 - DNA, 1023 bp, Cannabis indica
attgtacacatatggtgattttttgtttttaatgatcattataaaagaacttgaaaagtgttatgttgtagcgaagcactcgctgttgtatcgacatttgtcacttgctaattgataattgatgatgacaggactactaatattgtttcattcagtacacgtagcattgggaaagaagatctttataataaaaatagttttctaacgtccacacatgaattggataagttatatgatcttactcggaaatagaattatctcattatttttgtggttccataataaacgtacagcatgtacttatctataactatatcatcccttcaaccaaaaaggaaaaaaaactaaattttcattaagatatgaaggtgtttattagatttgatctaataaatttaactcaactaaattaattcaatctaattatttaataaatgttgttttaaattacgaaaaaacttagtgatcaaattgaaaaagtgatgaataaattttggtagggattgaatgtaaattaaaattctctatttccagcaaaatgtgaaggaagcttggacttctgtgactttgttcattttaatgaggcaatattggtaaaagagtaatttgtgccataaatatttacattttatgtcgtgtagcagataagtacttaagttgcattttttgtggtaaaaataccttcggttacactcttggaacttccgtaggtacctctccgttaactgacaaatcaatacctacgtggcagcccctgatatgtccatcgtcattaaaatttttatattttttctaacaattttttaaaaattaaaaaaaaatacttaaaaattaaaataaataataataattaaaaaacaaacatatatttttccttttctcttctctaatctctctctttcctctcgacttcatctccttcaatcttcatcccatttttccattaataattatatcataatacaaaattaaaaatcattaaacagatcaaatcctcatcctacaccatgtttcttttttttt

SEQ ID NO: 366864 - DNA, 513 bp, Cannabis indica
attgggcacctgctttgtatataaaggggtgatccacagtgaaatgacacctacgaaactcttgctacagtggactaagcagaccgtgatctgactgaactactataattctttgtctctttgttatttccagtttttgttaatcatttctcattcccagtttgagtactctccattttaggttgaatactcgcacttgttcttcacgtaaatttcttcttgttattaataatatcatataatctggtgttgcgaaattcactcgacaacatttggcgccgttgtcggggaagcgcgttcgtacaccaagtagatatacaaggtccgactctgtagaaacgcagcaggggggacactatcaggtacatcgaggtgatctgtgtgatcacctcaacgcaggttttagagcgcgttctcgcgccccccataatgaggaaacactccgtgatcccgatgtggacgatcagggtatcaacactaacaataacccgcctaccgcaccgattgcgacta

SEQ ID NO: 366865 - DNA, 655 bp, Cannabis indica
gatccgagaaaaggttttagctagacaagctaaagattttacagtgtcaagtaacgggatgctgttatacaggacgagagtttgtgtttcaagtagtgcagaacttagaaatgagattctcgaggaagctcatagcactccatattaactgcatcgtggcactactaagatgtatcaagatttaagaccctcaggatgaagaaagatgtggttgaatttgtatctcagtgtttaacttgtccgcagataaggctgaacattagagacctacaggattattgtagccaatgacacttcctgagtggaagcgggcggatatcaccatggatttcgtggttgggttacctagaaccacaggaatgtatgattctatttgggttgtggtagatcgatttataaagtctgcccattttctaccaataaaaataacttttacaagtggatcagtacgcagagctatacatgaaagaagtagtaagattacatggggctctgaagtctattatatcgaatagagatccgaagttcaccttgaaattttggcagagtctccaacgagccatgggtaccaaattaaagttcaatacaacgttccatcctcagactgatggacagtccgaaaggacaatccacatactaaaagatttgttatgtg

SEQ ID NO: 366866 - DNA, 511 bp, Cannabis indica
aaaatttgaaagttaacaaaatatctggttacattttaaaatttctagattaaaataattttatttcaaatttcaaacaaggtcattttataaaatttattaaataatagaaaaatataaaatatcttaccttgaattttaaaaaaaagataaccaactaagtaaaatatcagattttatcctttttcaagtcaaaatctactaatatctaaaattaattaattttattctgataattagatttaaaatttgaaaaataaaaatcaaaatacaaaattacacaaaagattcgaaattacatgaaaaaatgaaaaaaaaaattgtatttagtgcggatggtatgcagtgcataccatccgcgcgcgcaggaggaggtgactgggccagaaatgtcgcacatggaggcttctagcagcatatgagcgcgcggaatggggctgttcagacagcccgtgcatgttccttcgaacaaacactgtccgaactgttggaatttattttaccaggatct

SEQ ID NO: 366867 - DNA, 785 bp, Cannabis indica
tacaacaaaatagaaatataccgtacaacaaaatttatataccaacaaccacaaaaactcaataaaaaatttaaaaaatctaacataacttttaaataaaaaagattttaacaaaactaatatagatataccataatctttaaataatttgcttctaattctaaaaaataaaagataaattaatgattttgaaataaggacatttactaacttagtgctataattttggtcatttactataattttttaaaatgaggacataaactagcatattcttatgatttgaggccatttactttactttccctttttatcacatcttcagttcatatggaatttaaagacatgtggaattaatttgacattaacttttcaatagtggtagccatatgatatgtaaatgagaaatactaaaatatattattggtgcctagtagctttctaagtattggtgtaattaagtatcgtttctcatataatttaatgtaataattttaaaaaatatcgctaaccaatcataaagtaacacatttagaagattctagatactaataatacttaataacaataatgctctatataaattagagatggaaatttataccgcggggataggtaaccgcggggacccgcccctagtggggtgaggatcccccgtcttggtggttaatggggcggtagtgggggacaatttcaatacccgaagcggggttggggcgggggcggcaataatactatccgcaccatatctgaccccaatatagagatatatatattttttttta

SEQ ID NO: 366868 - DNA, 556 bp, Cannabis indica
tagaaatacaataactacaaaattctacatcagataaatcttacattatccagaaagtcagatctttttccatggaaaatgaatgtggctgatgcataacataatcttctccccttaaaatatgtctagccccattcatgcttcgatgttcagcagggatcccgccattcttacttaaatgaggaagatccataagatcccaaccactataaagatgacaaaaatgctcaactaaccaacatatcacataatgtatggctgaattatacaaagctcgataaatgtatcccaaaatagagggtgcaaaagaaactttgtgtctgtaagccatcattgaagccatataaaaagtttcaggtctaatgttggagccctcagtagaaaaaaaaaaatgacttagccataaagacagaaaggttgtaagactaccctcttttaaagtgttcaatggaatagagtgaacattaaattttggtttacctttcttttggttgtctcctcctaaggtctcgacagtcgaactttctttcacacctttaaacatcaagatgttcct

SEQ ID NO: 366869 - DNA, 545 bp, Cannabis indica
caaatagtatcagagccttaacctagccagaagtgtagtcgatgaggacgtcagaccccataagggggagtgattgtgatagtcattagtccgatgatccgtaaggggatataccgggtaagttgtgcaatcccacatcgcctagggaagtgcaagtgtgatgattctaagactgtgtatgtatgggactacactgttgaagaggccttaaatgaattgattggtactacctatatcaacaaggtgcatcttgtttttcagtagcccatcacgaaagaactccatggttaaacgtgcttgacctagggtaatttcaggatgggtgacctcctgggaagttttccaaagaagcatgcaagtgaggacaaagcacgctggaaacactcgtgttggtttgtagggtcagtcatcaatccaagaaacagctagagtggcgtactcgtgtataagagctattattttgttggtgtaagggcctaatggaggcttgaaacggggacattacaaatggtatcagagccttgtcccagctggaagtgtcaacg

SEQ ID NO: 366870 - DNA, 855 bp, Cannabis indica
attcccactcaccgctgctatgatgaaatgtgttagatagaggaccccaaagtttagaaaaatcctgccatacagatctttcacaattgaatggatatcttgatatataaacagctccataaatcctagactgattaaaaatatctcgatttgtatgcaaaataaggtctgtccattcgataagatatgtcacaaatacagcatgtccttgaaagaaaaaatttctattgattttttttctctggtgaaacacgatggaggcttggataaaagtccacagttacttggtaaaccatatcaacatcccttttattgtcaatatcccccaagaactttagcttggaaatcgggaccgaagcctcgggtgtgttggacaacattatcatcaagtgaagaatgatattgtaagtcacctgaaattacatcttcaatcttacataaagaaacagggtcttgatgatcattggatgctttaacgtcaatcaatgaaatggagcgtcaataagatggtccaacctctatttctcttcccaaattatttggagctcgttgagtagccaagtctcccaaaattagacaactggaaaaaaaaaaagcaagttagacaaaataaaatacaaaattctcaagcaagatgtgtgtacataaatgacacgcacttgcttgagggggcatctattgaacgagagaaaaaaaaaaaaaaaaaaattaattctattataaatttaattctttttaaaaaaaaaaaacttaattaaaggaaataaattgattttaaaatagtataataaaaaataagactaagtcaaattaagtaagccaagttaaggtagaacgtctactctactatttaac

SEQ ID NO: 366871 - DNA, 749 bp, Cannabis indica
tcatgccatgcggtacattatacttttcttacctcaatttctgaatcaggtatgttggccgacctgcttggagaacgatcgataatctcaggccctatgtcataacaataataaatcaataagtgtttatcccaaaacaccacttaacactcgcgtaagacaatctaggattttctaccaaactctgtggtatacatatactaaaataaaacttatattttggctctaaaacatacaccatatcgtagatcacgccgcaagcttcgaaacggtatatagaacgtccaaaacggacaactaggtgaaaagttatgataaaaatacgatttttgatctctaatgaatttctaaaaactatgaaacacgaaaatctcaattttcgcactcgccgaaacactatcacaacttatccaaatcacttcaaacttcacagggcacatatataccatgaatactaccattcttacgtaacaaaaattaaaattgagcccttatacggaaaataccattaacgcttggactaagctttaaagaattccaaactcgatttctaatccaaaattacttcaatttcagcaagaaaatatcggaactagtcccatgactacccgagaacaatcctataaggtcagaactttcataactattctaattcacaaaacccctatacgaaacaaaggtattaaacttaaacgaaattaaaccttacattaagcttccccgctctgagaattcgctatcctgctact

SEQ ID NO: 366872 - DNA, 697 bp, Cannabis indica
ttgtgactaaaaatacatttagtcacaaaaaattgtaatttttgtgactaatacttttagccatagactttatagaaattatattttataattagtcataatttttttacttttagtcacaaattttattgtgactaaaaataaatttttttgtagtgttatattaaaatataccaatagcggcacaccacctattctacctttaagtgtcacttaattaagagcatctccaataataatattctttaaaggtgtaaaatatcttcacatctaaagatataatattttattttatttttctttcacattatttttagtacccttacttttaaaaacactctaataatatgacagtttttaaaaatactacaattatgatctcacacattattatacatataattttttttctttattaaattattaaaaaaatataatatcaatgtcattgtataacataaatacaaattttaagaatagtattcatttatttctaatgatataatatttttatattttgccacttaaattttccatctcacaaatacttccattagaaaatgaatactatttatctagaggaaattacattctatatcctttttatattgtcctcttttatttttactctcttttttaaagtctatcatttttacctcttttttaaaacattgtatcaattttacccctgtcactt

SEQ ID NO: 366873 - DNA, 731 bp, Cannabis indica
aatctccttgttacaattaattacagtgaagtgctcaataattaaatcattttactaagcaataaacccacgaagcatgtaatctatttaacttaggaaaaatattaaattttatggagacaagttaatcttagcaacaaactaatttaacatataattcatttaacttatgttatattcttcatcacaaataatgatatccgtcacaatatcattaaagcaatttatcacttaaacctataattctagactattagctaggtgaatagaacttccaagaatgatagtagaataatataaaatctaatttagcagtcgtctaagaagatcaaaatattaatcataaattaagcatggaagatataacaattcaacatgaatgaataaaataataatatttatcaaaacatttaataaatcatgtcttgagttttgaaataacccttaacctagaagaggactactctataatctcaaacataatcataagcacaattataaataaatattaaaagagtttaagaagtaaaattagatgtgaatgtagattcttctcttctcttctcttgagtttctctcctttaaaagcttaaatgaaaaactttttgtaaaaaaaactctaaaagtcttatgtatggaacctaaaacaaatccaatttaaacttaaaaacttgactttttactgtaaatcgtatggtacttcgtatggaactgagtgtctgggtagagta

SEQ ID NO: 366874 - DNA, 663 bp, Cannabis indica
cttgactgcagcatgcaagtgttgtcccccaggcatgacaaggaaaattcctgcaccaaatagctaatatgtagccgacccttctacgtgtagcttccaagtcggcttatcttcactgttatttggcggaggtttttgtactggctcggggttgctttttggtatgctttcttctttgcctgtgcattctaccacaaagtctgctaaggcctggcctttcattgttgttcaggtttggaaagtaatttcgtactgacccaactccaccgcccacttgagtaatcgtccagaggcgtctggcttttgtaatatttggcgtaatggttggtctgggtacacccgaacatgatgagcttgaaaatagggccttaactttctttttgctagaataaggcagtaagcgagtttctctgtcaatgggtatcgaccttcggcctcaatgagccttttactgatgtaatagaccgggtgttgtatgttgttctcttctctgattagcacggtgctcatagcgtgctccgtgacagctaactatattccaagctcttctctgtcaagaggttttgagagtacgggaggttttgcgagttgtgctttaagctcttggaaagctttttcacattcctctatccactcgaactgcttgtttcctcacaggatatt

SEQ ID NO: 366875 - DNA, 1020 bp, Cannabis indica
aaacgtcctaggccggggaagccaaggatcccgaaacgcatcaacactttgcccatcccccacaacttttctcatacccgactgcaacaactccaagccccacaccaaactagaccacaaatgagacgaacctggacgatccttagcgtccagaattgaggtagttgggaagtatttatactttaacacacggccagctaaagaattcggagattgaagtaaacgccaaacttgtttagcaatcatagcttgattaaaaagcctaagatccttgaaacctaaccccccccccttcgacttaggctggcacacattctcccatttcacccaagcaatcttccgcttatcattcttcgtaccccaccaaaactgtaaaataattgaccgaagttgatcacatgtggccatcagaagctggaatatactcatcaaatagtttggaaccgcctgaagaacagccttgattagaatctctctaccccccgcagagaagaagctccgtttccacccgcgaacccgtttctgaaccttatcacaaatgcttgcaaacgtgcgcttcttattcctcccaattactgttggcaaacccaaatacttatcatgagtagcgactgatcccaagcctaatacatccaatacactcgtacgatctgcaggtaaaacattcggactgaatgtgatagcagatttatcaaaattgacttgttgaccagaagcatgctcataacactgaaggatccgacgaatagactccgcctctcttccattggctctaccaaagattaaactatcatccgcaaagaaaagatgagacacacgaggcccataccgggaacaccgaaaacccatcaactcaccactaacctctgcttgccgaatcatggatgacaacgcctcagcacaaaaaagaaatagataaggcgaaagtgggcacccttgtcgcagcccccttgaaggcaccacacaccccttcggcttaccattcaccaaaaaacaatattccggcgtagtaacacaatc

SEQ ID NO: 366876 - DNA, 721 bp, Cannabis indica
gcacctggagttgagcctgtttcgaaagcaccatataggatgactccagcggagctcaaggagctaaaaatatagctttaggggatgcttgatttagggtttatctgacccagtgtatcgccctggggacctctagttgtgtttgtcaaaaagaaatatggatccctcagaatgtgtattgattatcagaagtaaataagctgacgatcaaggacaagtatccgttgcccaaaatttatgatttgtttgatcatcttcagggaaagattgtgttttcaaagattgacctacgatctggttatcatcagctcagaattcgggaagaagatataccaaagactgcattttgaaccagatatgggaactatgagtttttggtaatgtcatttggattaacaaatgctccaaaggccttgatggatcttatgaacaaagtattcaaggatttattcgataactgtgttatagtgtttatcgatgacattctcgtatactctcagtcagaagaggagcatgagcatcatcttcgaatggtattacagcgactcagggatcataagttgtatacaaaattcaaaaagtgtgaatttaggttgttagaggtatctttgttagggcatattgtcagaaaagatagaattatggttgacccgggaaagattgaatcagtgaaaaattggccgaggccaaaatctgtgatggaagtgcaaagttttctcag

SEQ ID NO: 366877 - DNA, 592 bp, Cannabis indica
atacatatattattatatatcaataatatatataactctcatgcacaaaattatgtatgttactatcatatcatataacatacacataatattaatatacatcacaactatacatattacataactcgcatacatataacatatactcatcataatatatatcatctccacataatatatattatatatgtatcacatacataaatattctcatcataaatatatattatcatatgctcaacatatataatatatataattcatatacatgttgtatattatatatatatctcacatatacatattaacatgtaatatattcaaatatcatattatatatcactatgataatatgacatatacacccatatatatataactcatatatataatgttatattatttgatataatataatatagattaaaatatttaaatgtgataaattatatattaataggagattaatatatattatgtgttggaagttatatatcatatatagtataataatacacataaaattgtaacatatgatgagttacaaatctgaaaatagattgtaacttaaggatcacaattgataaatatg

SEQ ID NO: 366878 - DNA, 657 bp, Cannabis indica
gggcgttacaattttggtatcagagccgccaggtttgtctaccgaagcttgccaagacatgtacaatcttcatcagggaaagctcggttcacggttgtgtaagcttgtacttgtttattattttaacgattatcaaagtatgtaggaagcatattatattataaatatttattttaagtgtgttgcctttaagtcctaaacagtggtattaagttttatgatcgctgtctaacctgcctggcttataggttcccaggctaagtcctataaaatggacgcctcgcggaatacaagaagtcagggtaacatggttgagaccggaggcagtcggggaaatcagaatccctagaatcctcgtggtcgtggctgtggccgtggcagagcttagggtggtcgccctgtaaatccaccaaaagctcctccagactgagagcagagatttgcggaaatgcaagatcgaatctgccagcaggatgaagaaattcagaggttgaggcaacagggtcttcctaccgtgcttcctcagcaagttgttcaggccgttgcagttctagtggtgccaatagaacaacctattgttggtaaccgtatggggccgttgtacgaaaggttccgtaagcaagcacctctagtgtttctgggaggtcctaatgtgat

SEQ ID NO: 366879 - DNA, 507 bp, Cannabis indica
aagaagctcatctcttttgccttctttcgaggtttgtccttgaagtccctgagctcttcagctcgcgtgagggtggccctgaattctaagtttgcctggtgagtttcctctaaggacctcaccttagcagccatctcctccaaggcttccctggcttcccgaagctcccgcctggccttcgcagtggcttcaccttccgtcctcatctcctcctggtgcctgacctccagcctatctatccgcagggcctcgtcccggattatttcctccgcctgcgcttccctccgcttggcctcttcctcgttagctttggcaatggcctcccggcgctcagcagcctcctgataaagccacctctcagcagtaagatcttgaaaaatcttcctgacttcgtccatgtccccaaaatcggacaggacgaaaccatggttgattattttcttggagagacgaccggctgcagcagcaagctaaagaaaaaataatacaattataagtaagaatctc

SEQ ID NO: 366880 - DNA, 701 bp, Cannabis indica
aatttggacttaaaacgatttgtgtgtgatttggatggtttcatgttgatctgtgtgttatatgatgattgattgatgcttgtaaaattttatgaaaaataattgaattttcgtttctgaaattatttttattggatagtttgggaaaattaagcaattcacatttttacagaacttgatttcgattttatttgaattagttatgattttttgaagttttgaaaaaatcaggggtggtgtcacacccttatgcgcgcggatctccccttttctcgggcacatgcggctttggacaggcctatagtccgaattttctcggtctgtaggcgggaatgtctgaattttgaccctgggcgggcgcggagaggctgcatgcagcctcttgcgccgtgctttctcggtcaagctgccccatacgtgcgtgcggatggtatgcactgcatactgtccgtaccacttgcaattttattttttcaatttttttcattttttctatgatttttcatggaattaatttccaattttttgtgtagttttggtattttaatttttactgttcatatttcaaatctaattatcagaactaaattaattagtattttttaaaattaatttaagatattagtgttatttgaatttgaaatatgtaaaagtctatctttttgcttaattaattaccttatttttaaaatttgattatt

SEQ ID NO: 366881 - DNA, 711 bp, Cannabis indica
ttcatctagaaggacctatttccccattttttatgatgacggattcaatgtaaaatttggatcctcgatcagacacttggaaggtgcccatattgatagattatcaacctatgtgctaggtgctcggggccccaggtgcttaaaaataaacttgctttgaatttgattctgatgcctcaaacatgttcgtggtatgtctagttgatgccccaatacaatttttggccactttgcactaagatagtcccgaaaactaaaaccctagttgaggaatgtcaacttgggcactaggtgaaaccctaggtgcccatgttggcttttgggttgcaggttcgtgtaatttcagctctcggaccttggagtaggttgctccatgtcttcatggtacagaacattgaaagagagttaattggatataatttattgaagtttgaactttcattctagagttctcgaagtcaacgtaggcatagggctagggaccccacccaagtcgacctgttatgactcgggactactcaactcggagatgtcatatttcttaccacatgtcaaacattgatgtccatggcagggctagttttcgagttaatggtactagcaatcgttgtttaaagattccataactttaatatgttgctgactattttattcatagctaagtgatcttaattctctgtgcaatacaagtcacaatctcatgtatgaata

SEQ ID NO: 366882 - DNA, 1412 bp, Cannabis indica
gatgttaatgaaacatacttgttagtaaacctagatcatggtaaaatattcccaacacattgtacatgtcggggcagttaggcctggagcgtacggtctttgggacaactgaacatattttgtatagtcgctaggcgacaacttttgtacaatgcactgtgtaacttttataaattttttgtaaacgggatcccgattttatataagtatgttatttgatatttaaaaatagttaaataaaattttaattattcataattttcaataaattcgttgattagtaatgagttgtacaattaagttaaaaattacgttatcacgcctaaactagtatggtgttacaatttggtatcagagcagctaggttgtcttccgaagatcgtcatgacatgtacaatcatcatcagcgatcaactcaactcacggttcagtaagccttaattattttagtagtttattttaatggtatgttttaagaaaagccttataagaagcatgttagtagcctgatagctgaataggcgcatgttttaaatttccaaaataagcggtaattagtaagttattcttgattgcaatctgaccaggctagctcttagttttgcaggatgttctaatagaatagacgccaggcgaaacactaggagttagggtaactcggtcggatctagtggcggtcagggagcttagattccccaaaatgttcatggctgaggtagaggccctagaggcagggcacgcagtcggggagatgttaacccaccgcaggcggcccaggaatgggaaaaaaatgtttgcagcaatgcaagccagaatcgacgaacaagaagaagaaattagacgcttaaggcagcagggtgctcctgcaatgcctactccagaaatgcaggtggctcctgcccctactgtgcaagcagggccgatttttgtagtgaatcgggtggagccattgtatgaaaggttccgcaagcaggcacctccagtctttttgggaggtcccaatgtgatgaaagccaagcagtggctgacgattattacaagaattttgaattttatgggagtcaccgacaatgacagattggcctgtgccacattccagtttcaggaagatgcccttgtttggtgggacatggtgtctctgactcgagatgttactactgttacttgggaagacttccaggagttgttcaatgcaaaatatataatgaggcagtcaaaagtgggaaaagaaaagaatttatccagctgactcagaaggagaatatgagtgttactaaatacataacccaatttggattggctaggttggcctcggaaattatgccaaccgatttcaacaagaaagaaaaggacctgaatggattaaattcgaaaataaaacatgatcttatgattactactgatgacaacac

SEQ ID NO: 366883 - DNA, 625 bp, Cannabis indica
gatgagaattctaatttttttttgtaaagtctatgttcgggggcattggttttcttttactgtcaaggacattgcaatggcttttcaattacctgaaggtgtgtccaatgctatcatgtctatggatcaccatttgatgctcactgaacttactggtgcacgggttgaatgaaaatctggggagagtcttcgaattacacatcttaactatgctcatgcgtctctcatgaggtttgcacttagcaattggcttcccaattccaacaaaactgtggtgtctcaagatgtggcctcatttgtttttcgtatcacctcaggggcatccattgatctggcttcttcaatattagaccagattgtttcttttcggagaggtaaaaaacgtactcataatcttgtgtttcctaacttaatatattaaattttgtcctctcagaaagatgtggcccaatctcatgaaacacttgagcctccccttactggcactatattccaaccctcagagtattttgatggagctttttcaaagcgtcctaaagctggtgctcctgctgctggtgcaagttcaagttctgctcctgcagatgtccaagaggtcaagcatgaggttcaactggtgaacaat

SEQ ID NO: 366884 - DNA, 521 bp, Cannabis indica
aacataaaatgttatttctgatctttattaataagtaaatctgattatgtgaaatgagttttatttagggcataaaacccaacagttttaatatacaatttttattaaatgcagaacatattgttttcacaattacagtgaagtcatcatagtgaaaagtagttgtgattatatgcttcaaagtctttagtccatgatttatcagtgccttggatttacactaacgtgataatcaacgataaagtttacttacacattgtataagtggaatgtcttttccagggcattagcaaagtatactagtatcggatgtattggatatacatcagattgaactgatattaataatggaaaatatatcataaaaattaccattatattttttctaagttaatatcacttagtttatcttagatcaatagatcttaatcctcagatggctaggttttggcttaattgtattatttgtgttcttcgacttgttcgttgaagctgccaattggatcggcctaatacttaca

SEQ ID NO: 366885 - DNA, 672 bp, Cannabis indica
ccttacttctaggcacacccaattaaactgttaactaatcaaccattgagacaaattttatcaaaaccagacgcttctagaagattgataaaatggtcaattgaactgggacagtttgacataacttatcaccttcaaacatccattaagggccaagctttggtagatttactaataaaaagaataactctagaggaaaatctgcttgttcagtgagatgcagacacttggacgttgttcgtggatggtgcatccaacgagcagggctcgggtgcaggggtgatattaattttgccaaaaggctttaagtctcattatgctttgagatttcaattcgacgcgtcaaacaacgaggttgaatatgaagccttgatcgctgctttgagaatatcagaagcgttaaaaggtcaggaatctcatatgtcatagtgattcacaactgattgtaaatcaggttctcggggaataccaggctaagggccttaaaatggctaagtatctagagggagttcggaagaacttaggaaggttcaattattttaaaatcgagcaaatcccaagagaagaaaactctaatgctgatgccttagcaaaactggcctcgcagaatgacttggattaactaaacttagttccagtggaaatgctaaatgagccaagtatatgtgaaaa

SEQ ID NO: 366886 - DNA, 665 bp, Cannabis indica
tgcatggggggaatttgtggcaatcatacaggtggtaattcccttggcctaaaaatcatgcgaaagggatattactggcctaccctgcgacaagacgccttcactttcgcaaagaaatgtgacaaatgtcagcgaatagccacatatgtccatgaacctccaagcaacttgcattccatcacaagtccttgggcctttgcaatgtgggggatcgacttaataggcgaactacctaaaggaaaaggcggagtcaagtatgctgtagtcacggtcgactacttcacaaaatgggctgaggccaaagcattagcaaccatcacagcgattaagttgcgcgagtttgtttacaactccataatctgtcgatttggtatcccttacaagctcatttcagataatggaaagcaatttgattgtaaggagacgcgacaattatgcgatgacttgggaattaaaaaagccttctctgtagttgcttatccgcaaagcaatggacaaaccaaagcagtgaataaaataataaagcacaccatcaaaggaaaactcgaagagcgtaagggggtatggccagacgagctttcacaagttctatggtcatataacacgaccccccgatccacgactggcgagactcctttctcgctctcttatggatgcgaggccat

SEQ ID NO: 366887 - DNA, 652 bp, Cannabis indica
aaaaatttttttggatgccgaaacaagtagagggtgcatcagtacatctcttttaaggaggtgcattgtaagatcacccaaaaatatatatgaccacgacatgtgtacgaaaattcgaaaatgaataattattgcatattaaagaaattcatataaaattaatgtgtctcgaaaaatactggttatagtttaggatataagttaaaattctaatcataaaatagtagaccagcgagatcgatgaattctatatttgctactttaaatttatttatttttttataaaattttatcaatacaatcagattttttaaatttttatgaattctgaatttaaatttaaatttctgattacatataactaagatctgtttagttaaattgataaaagtgtaatgattaaattttaatttaagatacaaatatataatttagaaatataaaagtatgtttgacattgttttttatattttgttttcaaaaaagcatttttagaaataagaacaaaaaaaagcttttgaagttttcaaaacaaaatcaggtttggttagtgttttttaaaaataatattgaccaaaaataaattattttttaaaatagaaaaacaacattttgttgttttcgaaatttttattttttgtaactttatttt

SEQ ID NO: 366888 - DNA, 523 bp, Cannabis indica
attatttttaaaatacaagatcaaataagcttaattgttttaagaaaataatttcctatttttaaaaataaaaaacaattttttatttacgatgtcaaacataccttaaagtactaattaattagggaaatttacataatatactaatttttgccatttttttttttacaaaaatactgtcaagcggtattttttacttatttactgtattttttcataagtttcatactgcagtcagtgacggacctagaatttttattttgtgggggcttatttatcaataaaaaatatttatacatatattataatcactcttattatatttatttaattttgtggggggcttttctactattttaacttataattatcaaattaaaaaaattacatttaaatttttaaaagataatatttttgttagacacattgatacatgtgcgtccgtcactgactgtagtatactgtgttatgttttcactgttgttctactgatgttttgagttgttctgttttgtgttttact

SEQ ID NO: 366889 - DNA, 426 bp, Cannabis indica
atatgttcaacttttataaaagtatatagtgtaatttgttaagttataattttgaaacttctgtatgtacttagatgtaaattgttaaataaattgagacgtgacaattattgattggtttagattattaaatttttattttttaaaaaataattagtttaaatagactaataagaaaataacacgtggatactgataatatttgacgttcaagtatttatggaagttccagaaatataacttaagtattattaacgccaaaattaaatttagtatttatttataatcgaaagtttttttttctgagaaaaaataattaaaaattaaacttaagtatttatgtcacaaattattaaaatatgactaattagtaatttttccccctgaactttgacatgtagtaaatcgtgccccctgaactttttt

SEQ ID NO: 366890 - DNA, 672 bp, Cannabis indica
ttttccctactcaatgtaaatcatctataaacgatcattgattattaggattataacaatggataactcatagcgtatctatatcgtagaacatagagagcattgtatataagtgagcgtgcaattccaaatctatagtggtgcaaggaggaattaataagttagggaatttacttggtaaattctagatctacttattggaagctcgattacataggcccatggtccccgtactagttgagacaaacttcttgtaagactcaatttgattttaattaattaattataattctagaattagactatatctagtttatgaattttcattaagttatggcttgattgtgaagaaataaaattctagggtttacttgttaattaagagactttgttgagtctaattaataaataatataaatgacaattttatttgataattaatttcattattaaaatagtttttgcatttataggattgaaattgaataagtggtaaatagataaatgacttagaaaagtggtaaaaatctaactagtgatggacccacatagaggcaggtcactaagtctattttttgccattattttatcatttttccaaataaatcaatcctaaccataagtgaattagtataaaaagaaaagaattgtctcataatccaactaatgact

SEQ ID NO: 366891 - DNA, 568 bp, Cannabis indica
atttaggtgaaataaattgggaagagtaaataggtatttatgtgtaatgtgtgggagaaaatattggcattttggcattttctaatctttttgggctgagagaaaagcaaaataacaattcaattttttcttctcctttttcttatgcaggcggacacttggcgtgctcgggttggaggactggagctgacggctgcatgcgtggcgcttgctggttggctgggaaggctgacgaggcgggaccagctgaatgaagctggcaggaggaggcagagtgccactctcggctgtctggggtgtgctacacgcacgcttctgggcctttagatcttcacgcggacggctgcgatgggaagctcactttgaccgcaagtgggccttgcataagggctgatcagattttctttttaaaattgtactttagccccatttcttcaatatttctccaatttaatcccaatctttttctatcaaatacacctaaaaatacataaaattaattagaaaactaaaataaaattaaaaataaatactacataacatattataataaaataattataaaaac

SEQ ID NO: 366892 - DNA, 725 bp, Cannabis indica
attggtcctctgaactaattccaacctagtacttcctttctccaatttcgtcccaatgaataaaggaacgacatttcctaccatatagcatctcatagggagccatccctattgtactttgataactattattctaggagaattcaattaaaggcaaatacttactctatgaacccttaaagtccatgacacaggcttgtaataaatcttccagtatctgaatagttctctttgattgcccatcagtttgagggtgaaaagttgtactaaacttcagcttggtacccatagccatctgaagactcacccaaaatttcgatgtaaactttggatccctgtttgaaacaatagatttaggatctccatggagacgaactatctcctttacgtacagttcaacgtacagatccactgtgtaggtaattttcactggcagaaaatgagttgactttgtgaatcgatccactatgacccatactgaatcatacattcccgtggttctaggtaaaccaaccacgaaatccattacaatgttctctcacttccactcaggaagtgctaatggttgcaataaccttaccgacctctgatgttaaactttgatttgttggcaggttaagcattcgaacacgtaatctaccacatctctttccatcccataccactagaattagggttttaaatctggatacattttggtggttcctggatgcagtgaataaggt

SEQ ID NO: 366893 - DNA, 594 bp, Cannabis indica
gagtgccccactcccttggaaatagagtatctttactctgtcaacgttgttccagcgaggaagaatgcagtagggttttttactatcttgggactcacacaggtgatcgtaagatcattgtggatttgccaaataaaactccctttaaagatgaattcttctggacgaccggtctctccccaattggcacaaccactttccgcataatacgtaagtaattatttgcataagacttggttaaattagtccatctcttttattctggttttgctgactgtaattttgcttttgttttcaacagctgtctcgaaaaagacctgcccctaccccaaaatggtcgagcgaagtaggctcctgctaggtctcccatacggtcttaggtcgtctgagttcctcttgagcgaggtcaacttgaggtctgtgggtctccttactgataatgagtttacttgcgattataaatatcccaagtattcttcttagtagcaggttcctgtcccggccaacgaggaagctcaggatcgcgtggcttaggcacaatacctctagaacactatccctcgggaagccaaagaaggagcatcccgaggtaat

SEQ ID NO: 366894 - DNA, 647 bp, Cannabis indica
aaagcaggagacgaaacacaacttgtaattgcagaattccatcccttaaactcgaataattttttcttcgtactgatgttccaaagctgtagagaaccttcttgactcccaataagaatctgtttaaaggattgtattatgatttctttttcatgaaatagataaacaaaccattgccctcagaaaaatgattcccatacttgctgaattgcaccaaaacttctatatgaacagaaagagtaccttatttaagtaagtatcaggatgcatcatacaactaggagtaaaattgtcatctaggacgatatgtccaactggtgcaggattctgatcaatttccttaaatgcccatatgaaaatattaccttcaacatcaatacttagaatgtggtctccaaacaatagcaaagaattgatctttgctggatgcctactccaagttgatatctgttaaaataaaataaaaacttattgatcttcaagtaaccaaatataacacttggaggaggagcagagcaactaaacatataggatacgtttggttgaaaggaatgaaaacacaggaaggaaatgggaatatgaatgaagtaaaatttaaaatgcataaacaaaaacaataaaaaaattcttgcattggaataatcttt

SEQ ID NO: 366895 - DNA, 1359 bp, Cannabis indica
agtgcaaaaactgctttgggtattcttcttgtttaggtaaaaaaaatggggtaggagacctcgctcgcaatcttgaatgccttagaagtaccaaaacgagcctcgagaaatcacttgggaagcacccagcgcccaagttgacgtgtgacctggtgcgatagaatctacttatcagaatttgattctgtcttgaccatccgactactttttgtagtaaacgacagctacaatttgtgataggataaattcacactttgatattttaccctttcaggaaggtggaatatcaacaaattaacaatgcaataatattattgttacttttcttctaataaattatttgtttaattataaggtctaatctctctaataaaaatagtaaaacacattagttggttatatttaagactagaaggattcgtttagtacgacatattatattgtattgtattatattaaattgaattctatatcatatttgttatattatactatgttaaattttaatttatactagaatattatatatatatatattatatgctcataagtcaatattacagagttttacgtaaaaaaaatattacataatgcacaatttaatataattatacaatacaatatggtgtaatacagctagcgtaccaaatacaccctaagtgaaagtctcgaattatgattctcaagccaatttggatcgatgactcaatgttaacatacataatacatattagaataattaatatttttgtcacctgaactttctgttgggttttgtgctctaaatgaaactcatttcaatataatcaaatttactaattaaaaattaattattttattttttaaattatggccagattttaaaaatttgttaatttgttaatatttatatattaattattataagatcaaatattttaatattgagtatattttaaattaaaaaatagcattatccttttaatttgaaatattgtattaaagttatcttataggataaattaaataattaatatatttaaaattaacctatgtatttttttatagatattctaaccataatattttcaaattcataaattggttattttgtgaaatatttaattgtttataaatcataagttaaaaaaataatattttatatcattttacttattagaaatttataaatagtattttaaatattcaaataacctaggtattattgtgaaaatttgaaaaaagcttaaatttgtagatattttgacataatttggataattattatttgtttattatttttaatcttaaaatgataatttcctaaccataactattttaaaattggtttattttgtttttttaatttttatttaaatt

SEQ ID NO: 366896 - DNA, 419 bp, Cannabis indica
cgttaattatcatgtcagtgtaattccagcactgataaatcgtgagactaaaaagtttaaagcatataatcatcattattttccattgtgtatgcaacactataatcataaataactatatctttgggatttaatataatttatacatctaacttataatcatgtgaactattcaacataaaataatttttgatcttttattaattagtaaatctaattatatttaattagattttatttatagggcataaaatcccaacaaactcctacttgcactaatataaaactaaatgtgcattttaattaatctcattatgttgatgtccaaatcaacataatatgtagtattatcttcgtaataggatctgataggttatatttagtatcaaccttctctaccattacatctccttagtcac

SEQ ID NO: 366897 - DNA, 372 bp, Cannabis indica
aatgtagatcaacatcaagaagcgacaggatttgatcagtttgaggagttcgatactaccttctacaataacgatcctattgtagatttgaatatggacgatgaacatgatttggcagtccatgaagccgtagcggtaccttccttgaggttagagtgtgtaccgagcaaccatggtacacaacgagaacgacaaccccgtaatgaaaatcacactacaccatgaactagcaatagccgacaaggcagaaccgaagaacatgctccttctcgtcatgcaaccttctcaacattctcctcttttgaagtttataccaagttcaaagctcctatgtggacaaaggaagatataacggaaaatcatgagctaact

SEQ ID NO: 366898 - DNA, 576 bp, Cannabis indica
tacgcagtagtggcagtcgacttcttcacaaagtggatagaggctgaaactctagtttctataacctgcatgaaagttcttgactttatcgtctgtagatttggaatactcattcagatagtatctgatcatggaactcagtttgattgtgagttattcactgagttcggcgaaaggagcaaaattattaagagttttttgttagtatgaaggcctcaagaaaatgggcaagtagaagctgttaataaaaccttgaaggatattatcaaaaagaagttggacgcagtaaaaggtagatgtgtagatgaacttccacaagtactttgggctcacagaacaactgagaaaatagcaacagggcacactccattctcacttgcatttggctcggaggaaatattgccagtagaaattaatattgtgacccacaggcgagatttctataatcaagaagaaaaccaaaaactcttgaagttgtccttggatctacttgaagaaaattgtactgagtctcaaattaccaatgcagcataccaacaccgcatcacaagatatttcaataagaaagtgaagaaa

SEQ ID NO: 366899 - DNA, 1236 bp, Cannabis indica
caacaagaaattcaaatggatagaagagtgcgaataggcttttcaaaacgttaaaagaaatctagcaatgcctcaagttttgccaaaatcaataactggagaaatgttactcctctatctggctatctcggaagatgtgattagtgcggctatagtgcgagaagagggtaagcaccaacaacccatttactatgtaagtgaaaggttattgagggcagagtctagatatccccctctcgagaaacttgctttctgcctaatccatggatctcgcaagctgcagccgtaattccagcccttgagacacgtttaatcaaaaccaatgcttcaggaagattgataaaatggtcaatcaaactggggcagttcgacataacataccaccctcgaacatccatcaagggccaaaccttggcagacttcttaatagaaggtataactcgagaagaaattttgcttgttcatcgagacgcggacacttggaagttatatgtggatggtgcatccaacgagtagggctcgggtgtaggggtaatattaatttcaccagaaggctttaagtttcactatgctttgagattttaatttgacgcataatcaaactacgaggctgaatatgaagccttgattttgtcggcttaaggcgttacaagtcaaaaatctcatctgccatagtgactcacggctgattgtaaaccaggctctcaaggaatattaggccaagggcctaaaaatggctaattatttagagaaggttcagaagaacttgaaaagatttgattacttgaaaatgaaacaaatcccaagagagcaaaactctaacggtaatgccttggcaaaactggcctcgcagagactttgattacttgaaaataaaacaaaatcccaagagagcaagtatatgtgaaatggaagatgtggagatgatagacagttcacctacatggatgacccctatcattaactatctactcgacatgcaacttctaactaacgaaaatgaggcgtaatgtaacaacctaactagcataggctgttaacctgattttaaacatactacgcagctcgttgctaatcaacgaggttaatgaaatcgtgattaattaaaattttgctatttaattaaaacttataatattacatacaaaatatttcgggatcccgtttacaaaatactttacaaaagtctgctagtcatttacaaaatatttgtcacccagagagagagagagagag

SEQ ID NO: 366900 - DNA, 892 bp, Cannabis indica
ccctgtccggttggtccacgtatattgggcaaaatcaggggcaacatttaccccccaagccttatttatttgaaaaagaaaacaaggcttgttcaagtgcctccggttgacccctcggtttcctggcacgagctttgagcgcgtgaaggtgcatttaatgatcgcttttaatgcagcgattcactttctgcagatgtcgattcgtttcatgccccttgattgatacggcgcattaatggtgtcagacggatactcaagcgtttccactgccttaattatgaatcaatccaaccgttgatttttgggaatttgaatcgtgcgcctccccagccgttcgattggtaggtgatagtgcctgttcctcatgcactttggcctataaaagccaccatctttccttcatttggttactttccatttcttgccaactttgttcgagtttttcaaagcaaaatctcagacccagaaaaaaaaactttcgaacactctacaaatttccctgcttatactttgtttaccactgggtctgactacccttgaagacgtcgcactgggtctcgttgcctaggaggggtataaacctcgggccacaggatgggaggcggctgagcttcattccaccctaacttgcccccaccaactggagaacatcgtggaggtggctggaatcaaaccctcgacatccgggacatatcaccggctgccccgagatgcggagacgcccaaccataattatggcggcttcggggcttggagccagacgcacctgatggccggggccgactgcttcctcttcaagactattttattaatttttagtattttgtctgccttacgccatactaactgattccccaagcataccgcatgcttttaggcttgtttattttct

SEQ ID NO: 366901 - DNA, 747 bp, Cannabis indica
ctctttttgccttctttgaggcttggtctttgaagtctctgagctccttcagctccgcggccagggtggccctggattccaagtttgcctggtgagtttcctctaaggacctcaccttggcagccatttcctccaaggcttccctggcctcccgaagctcccgcctggccttagcagtggcttcaccctccgtcctcagctcctcttggtgcctggcctccagcctgtctctccgaagggcctcctcccggatcattgcctccgcctgcgcttccctccgcttggcctcttcctcattggccttggcaatggcctcccggcgctcagcagcctcctgataaagccgcctctcagcagtaagatcctgaaggatcttcctaacttcatccatgtccccaaaatcggacaggacgaagccatggttgattatgttcttggaaaggcggccgacctcagcagcaagctgggaaaggatacaagtataagtaagaatctccaaaaaataataataaggagagaagtaaactacaaaatacttaccacagtgagggagtggctgagatcctggacttggaagatggagttcaaggatgcacaagcagcgaaccgcctaggtgcacactgggtaagctgggacgcaaactcgccagtcatctccgcagcaaagggagctaaggtgggcccgaggaagcgaccgaaccagtccgacaggggatccaaatttagatcccacggattctggtattc

SEQ ID NO: 366902 - DNA, 826 bp, Cannabis indica
acaagcgaagactcgggagccttctcaacttttgttacctcggcattaaaacgtttaaaatagtcctgcaaagactcaccgggttcttgcttgatgttagccagagtagtatagggcggcctataagtcatcgtggcctgaaaatgcgtgaggaatagatcgacaaaggtctcccatgtcgagattgaggcctcaggcaattggctgaaccaatcgtgggcattttcctccagcgttgccgcaagaatgcgacatttcgcgagctgaggtacctgatctacttccataatagtattgaacttttctaaataatctatgggattagaggtacctttgtattttagggattcggataatcggaatcccttgggaagctgagcttgtcgcacttccgtagtaaaaggagaggtcccatgcagcttgtatatgggctttctctgctgctcgagtattttcaaagcttacaaaagcatgctttgatcaatactcccggctatgggagctgggactgctgcgactgcaggggttgtggctactgcggcgaggtttgctgggacattaaccccggtagtcgctgttggtgcgttaggcgggtttgtgcgagtgtatacaccttgattgcccatttggggatcacggggtgtttcctcgtcacgaggggcgtgggagcgtgctctgaaaacagcgttaaggtgatcacgcagatcacccctatgaacctgatatcgtccccctactgcgtctccatagaaccggacctcgtatacctgctaggtgtgcgaccatgcgaggacgaggaggcagattctatgtcgttgtctcgtga

SEQ ID NO: 366903 - DNA, 1147 bp, Cannabis indica
tccaattctattgagtcgaaaaaatcagcatgattataatttacctaaagtgcgtacaaaaggtttagtcgaacccaaaacaccgaacagaaaagcaatatatttgcgaaagacaagtgaccaagagtcatacgtctgctcggtcacttggggggcacctatacctgtacaaagcatttggtaaacataaaacaatcacaattgcacgacaattataaacagagaatgaaattcattaaggatgacaaaagcatatagtaccgggattaaaagctgcccggtcagcccgttgtccaaaaaatgaaaaataattccaagtttaaagaccgcttggtcggtcacgatgtcttaaaggccttgaggccacatataatatatatataaacaggagataaaaagagaagtgtttaaacagctggagtcccaggctcttggttcggttcttctgagccaactggagcaggaggatctgttgttcgagcaggagaagcatcagcagcctggtcagaagcttggccggaagttgaagcagccacctctttcccaccataggcaacttgagccgcgcagtactcaaggtacatgtccttagcgtcgcccaagtagtcgaaattggcctggggattagccttccagaaatcaaagaagagctcgaggtcggcagtctccaaagcattgaccttctccttcaaatggtccgcctgggtcaccttggcatccctctcctcctttagtcgaagaagaacttgccgcagagaagtcctctcatcctgaagactgttaacttcagcagataagatctcgatggcttcctcaaagcgatcaacagcctcaaggtcgtttgttagcacggagatcttcttctcgacagtaagcagcttcttgttggtctcacccaactcatgccagacagctccatttttcgcctggcctcctcagcttccttcttggccaagtctgcctccgccctcaaggtgtcggacagagccgcactcttcgaagtagtagatttagccgggaagtaagtgtaagccaacttcaaaccggcctacataaaggaaaaaagtcagcatatggagctaagtgtcaaaaattaaaagggaagtatcaaaaaaaaaaagactaaccctggtgagctccttcaaga

SEQ ID NO: 366904 - DNA, 602 bp, Cannabis indica
caagtctttttacaagcggggatatgttattgttctaactagtatcatatataattattgtagacattgtcctaactagtatcattattggaggttacttactatggaggatacgcttgtggcgaaaatttataaagcaggatattatccacaaggttcatttcttaatgccgagttgggacaaaatccaagctttatttggaggagtatttgggaggctcaatctcttgtttgaagtggtgctagaaagtctattgctaatggctcttcggttagtattttacatgatccttggttgccccatgatactaatccgtttgttttaactgataatcctggccttgttgatcaatatgtttcaaacttgatggtgattggggagaggtcttgggatgttgaacttctaaatgatatgtttgaagagagggacattaatttaattagaagcattcaacttagtcaaactcgggatattgatggttggtgttggaacatggagccttcggggttctattcggtcaaaagcgcctataaagttcttcaagcttcaacaaccatcaatgaatgtcgcgtgatccagtttatttttttattattattat

SEQ ID NO: 366905 - DNA, 746 bp, Cannabis indica
agtttctccaaatgaaaaggttttcgcattcgtccgtttactcgcggtcccaaaagagtcttgtggaatgatagtcgggtccgaaagagagttcccgaatgactatcatgtccacttcaagtgcagtcttcaagatagctagcccttccctgaaaatgagttctagctagctagttatccctcctagattggtagttctggatagtcgactttagtgaactcatatcctatccgaaagcgtcttcagtaagtgcctttggtccgtgggtcgggaagctcgttcatcatctcgaaggccccgatacttacgttgacatggagactttgctaaatgagaagttggttaagttagttatttctaactaacttaacaacctcgttttgtgcagccactgattttaggatcttgatcctaaggctataaataccactaggtgtgtgaagaaagtcatccaatctaattacatccgaccgattcaagcccaaccgattcaatagaatcggatatccaatcacagttggatcagatcgaatgtaaattttaaaaatctaatcggatcggatcggttgttcgatgggacatccgattcaatggataaccaaccaaactgatccaattatcatctaatgctcatccaattatatttatatatttttaaaatacatttataaatttatatatttaatatattttatttaaaaatatatattaattgatttaatatacatttaacacatgagattaa

SEQ ID NO: 366906 - DNA, 969 bp, Cannabis indica
gaaagaaaataaagtactttacttactacaactaaactattctacttattatatattacacttgatgcactatcttattatttatttattttttatttttattccgtttttaggaataccgaaacggaagtgcatgcatataataaaagaaacattattttgtcatgaaatgtaaaatcttttatgaaactctaacataaacaatattataataattgatattatatatcttcattaaattataaatatatagtaaaagtattattttctatgacgtttgtagaatcattcttttaaatatatttttatattatgtgaatcctattatgttttataagaaaacaaaattacatgaaagtaaaagaaagatagacataataatagacagtatcaatatttttttttactcttttaatttagtttttgaattttattggtgattagtttttgaaattatattagtgagttgaacaatttttaaaaaattaatgtgtatttctgttttgataaattaatgaaaataaaattgttattgatgaacaagacactatgagttcatccaaggttgggattagagcatctgtattggagaattataaatatagtgtataatatattgctatttttttagaatattttgctcaaatttaattccgatggtaatgtaaagtgtgtgtcaaatttggctcaagctaaaaattgtgtcaaatttggtacaaagataacataggccaaatttaaccaaattttagcccacaataaatattacattttttaattacatttttaccacttattaatatattattcattgactttcaataaatggtaaataccattttggaccttgtattttgtaaaagttactaattggactatctgttttgttaaatgacaaaatagaccagtggcggacccaaaatttaaagtgagggggggcgtaaataaatttaaaaagaaaatataaag

SEQ ID NO: 366907 - DNA, 524 bp, Cannabis indica
tccgaaattgagacattataactctaatatttatttctaaatattggggttcacaattaaataaattcacaaataattataaaatgacagaaattagtgctaattgtcttttctaatccaaattactaaggcgatcattacatgcaatgaaaccttctagagtacctaattaaggcataaacaatatattccagccagtatttcacagaacaaaccaataaaactcaagttgccattaaagctcaaagctttgaactcaaagctcaaagttgcataaaaccaacaataaaccttcaaaaccagctgctatgtactaaaatcaatccatacaaaccctagaattcgaactatgcaagcatcaaaccctaacaacccccatattacaatttcacaagttcaaactaagcaaaaacttaaaaactagagaagggtttcactagggcttaccttaacttgaatctccctagatttctttgctgaaaacaccaagaatcagcagcccttccccttgttcttgctggttt

SEQ ID NO: 366908 - DNA, 560 bp, Cannabis indica
agatatttatagccaagacaagaagaacaggcctaggattaggaatatataatcatgcatatacgtgggatgcagtgcagcttgtgcaggacaccttagctttgtatttgtagcattcatataaaggccaccaacaccgtggtccatgaacacatttttcaatatcttttttttcgaaaagaagatgttaattaaaggtagaaattacacctcctgattatttatataaaatattttcaaaaataattaacacattaattatatctgtaagatttttaagaaaggtccatatgacagcactttgaacagtaaaattacatattctggaaataaacacatttttaattaataacgtagcattacacgcgattgacgacatgatatgtatataattattgggatataattttatctcgtgatgtactttcacagaatgtattctgttatacattaaatgggtctcagggtacattaaatgtgtgtcaatattaaatgagtgtcagggtgggtacgtttctactttttaaccctaattacccttagatcaatctcagctgtca

SEQ ID NO: 366909 - DNA, 729 bp, Cannabis indica
taaggccctactttcaggctcatcttgtttggttatacactggccaaccattacgccaaatattgcaaaaaccagacgcctctaaacagttgctcaaatgggcagtggagttgggccagtatgatattatcttttagccctgaacaacgattaaaggtcaggccttggcaaattctctagttaaatgtaccagtaaagaagagagcatttttgaaaacaacccagagccagtacaaatgcttcagccaagtattagtgaagacaagccgacttggaagctacatgtggacgggttggctacagatcaactatctggtgcaggaatcgcccttgtcacgcctggggggcaacacctgcacgctgcagtcaaattgggatttaaatcatctaataatgaggctgaatatgaagctctgatcgcgggcctaaaactagcccgagagatgagggccgaacacattgagatctgcagcgattgacagctggtggtaaatcacgtatccagagagtacgaggcttgggggaaaaagatgatagcctatttgagaaaaatacacgatcttctcacacaattcaaaagctatgcattagcttgacttgggagcactactgtaaatgataaaggaaatctgattcctatcaattttctcaaagaacttagtatcaccggcacggatgaggttgaaatgattgatacatcccaaactggatgacgccaatagcggccta

SEQ ID NO: 366910 - DNA, 845 bp, Cannabis indica
catgtcagtctaaatctagtgaactgacaaatcatgagacttaaacttttgaacatataatcatgactatatttcattgtgctgacgaaactataatacgaataaatatataaatatatatgttctggacttaatagaatttatgaattaaacataatcatgaaataaatcatgtgaaccatgcaacataaaacgatttctaatcttttattaattagtaaatctaattatattgaaatgcgttttatttagggcatacaacccaacatctatttccttctccttaaccaccagctcggcatcacagtcttcctgggccttttggatgtctaaggcagcctggctcttgacttgctcattttctgtgcgtaaggtcccattttcaattgtcaagaattggactttggcgcgaagtgggctcaattcgatggtcatattacccacttctttggcaatcctcaccgcgaacaaagcaatctaaaaaggaaaatactagaaaatagtcatacaaccttcattaattaaagcttttatcaagaggaagaacttcttagaggactaagacttaccccagctgcttgttgtttggtggccaccgatagtgtgtatgggtcaacactacaacttacaacccattttttggacgtgagctcgctcacgctgagacccatgctatccaacatctccgcaacataaggagcaatggctttacccaccttaggcaccaaagtttggctcaccgcagcaatatcaaacactggacctgtaataccctggaattaaggaaatagattagcaaaaccctaactagttaatttagtattattgtagaattatattattat

SEQ ID NO: 366911 - DNA, 501 bp, Cannabis indica
tcttcctccgcctcggagggactaccaggacacacatcgtccagctcctcgatctcctagacctcagcatccccttcacgatcctcctccatctgaacggccgaatcctgttcggcgctaggcaaagtggcgagctgagccacttgaggatcagttgcgtcagccagacgtgtggttttctctctacgagccatcatcctattgctgggcacaaggccagaagaatgtccttcagtagaagaaggaggactagaacgagacgaagatgatcctcgtgcataagttgaagcaactcctggtctatccgatgttggagttcccaagactcacctgagttcatctacaaaagacaacacacgagatgagtgttggtcggaatatcgaacaataaacaagcaactatgccgaccaggagtactcaacagattaaagaacggctatgtttaaagaaaagtcagaactcaagaagttaaaaaaatttcctgagttagggcaaaaaag

SEQ ID NO: 366912 - DNA, 708 bp, Cannabis indica
ctttcatccttacccttttttttatttttaccctttttgtacattttgtttttaattgccgtgtatattttcgtattttcatccttctgttgtcttccctctcgttttttttctgggatcctcccctttcttctaccctattcttctatttccccccttctagtcatggcacttcctcgtttcctaagggcagtcttcttcttatggttagcctttctcccttccgctttctttttcttgggtaggttttggttctcgattgttgttttagtggtggtgtaatgtcgaatacggattgtccaggtgtctctccttcggtttccgattctctttcctcgagcattgctcctggatttgttgaatcattgttagttttagatactcctcctatggagactaaaaatgttgaagtccccgacgacccggatgtcgaatgtttaggcagcgtatccgttattccccgttctcgttctggaggcgaggcgggcgtcagtggccaagcggccccgtttgaaggggttactctagcaattcccgcgttgaagaaggccaaaaagaaaaaacatgctctgggtagttcttatctcgacgttaagttgagttgtccgtcggtcctcacccaacgtgagcttgattccttagttttgtcgtgtggttttccgccgggggtcgaagttaggtgtaacaccctaactaccataggcgtat

SEQ ID NO: 366913 - DNA, 1076 bp, Cannabis indica
ttttactttaaccaatgctttggaaagaacatagcatttatccaagatgcaagtaaactctgttgttgattgtcatatcagtataaccaagtgttctgataaatttaggaatctttaatcacataatcttgtttactttccactgtgctgacgacacgataaacaagaacataaatatgaaaagtgtttggatgaatttataaatcatatggacaagtaattgacaatatgaaccaaaaaatacacaaattaatgaaaaatacttacgtatctttattgatattgaataatagagattacagtgaaatggagttttatttacggcattaaacccaacagttggtgtggtttcagatcaattcgggaaggaagttagagtggtttctatcagggaattcagccaacccaagatccgaacctgccccagaagacctttgcaccaacctctttctgggatcgaggaatttcctgaggctgggaataaagtctcgggtgcaggaaatgggatcttctgatgatgaggacaatgaggtatgtgcagagatcaaggctctctacatgtagccggtctttctcaagctatgtgtagtcggtctttctccaagctatgtatagacaatctttctcaggctatatgaagacggtatttcttgagtttatcggcttcccctctcattctttgtttaggatgatgacttaatggaatttttgtaaagacaagtttgtaacccgttttatgttttttcttatcttaaaggccttgtactattttcattctaacttaatacaattgtgtttgcttgcgtttctactcacaaggtaaataactatattttgatcaaatgtacaatacttttgggttttttcattgctcgtactcttcctatttaagtagttggtaatctacgaaactttttgatttttgagcagttgttaattcttcctcgctatagcagttacaatctgccttcagcaaacttatatatactttaatgattttatcactttgtatatgtttaatttgcttgtatgaatagttatataatctatccattttctaggctcaagtactttta

SEQ ID NO: 366914 - DNA, 599 bp, Cannabis indica
acactaactcaggaaatagggaaacacccaactacgacactgaaatggacaagaattgagaaaatggagcattcggggaccctgccaaaaccggctagccggtttacaccagttcaccccaaaatttccatttcttgctcaatcctccaccaaatgcaattaaaccttcatgagtacctaattagggtttacactatattttccaaccagtaattaacagaaaaactcaatgaaactcaacatgccattagactcaaagcttgggtctctaagttcaaacttgcataaattcaacacaaagtggtaaaactagctactagaacctttaatcagcctaaattgaacataacaaccgaaccctaagtatctctaaccctaacagccaccaaaacccaaaatcacatgcttaaccaaccataaaacttaaaaattaaagagcggtgctactagggcttaccttgggttcaagaacctttgaatccctactgaatttccagaaaaatactgatgagaagcttgattccttctgttttgggtttggccgaaaatagagagagagagagagagagagagagagagagagagagagagagagagag

SEQ ID NO: 366915 - DNA, 650 bp, Cannabis indica
gtaacttttagtatttctctaatatataatactacttaattgaatgctattctggttgaagctgaggaggttcgaaaagctcttctccagatgcatccagataaatcacctggtctagatgggtttaatcctggtttctatcaaaaattttggaatattgtccgcaagggcatcattcggttagtccaacacttctttacttttggtgagtttcctgatcatttaaaagaaacaaatactgtggttatcccgaagaagtctaaacctgagagtatgggtgatcttagaccaattgctttatgtaatgtggcctataagattatatccaaggttctagctaatcgcttaaaagttgttctcccaagtgctatttttgaaactcaaagtgcctttttgccaagaagattgataacttgataatattctaatctcctttgaggttatgcattatttgaaaaggaagcaaacggggaaggaggggtttatggcacttaagttggacatgagcaaagcttatgatcgggttgagtgaggctttttacaggctatgttgaggaggttggggtttgatgagctagtggttaagtttataatgcaatgtgttatttctatctcctacactatcacatctgggggtcatgaaattgggc

SEQ ID NO: 366916 - DNA, 619 bp, Cannabis indica
accaatcacaacactgatggagtcattgagagctttgatacaacaatggacatacacaaacaggaaaaaggcacagaaaacaacaacatttttaacacctacagcagagaagaaattagtcaacaactttgtggactcattgacagaaaatgtaaaatctcttaaaactttaagttgcattacagtttttaaatagtttattttcagtttcttgaacataatgacgatttataaaattgacttaatttgcaagtaaagccaataaacgagagcatgttcgaagtggtagaactaacaagatcatgggtaatcaatctcaaggaggaaacatgcagttgcaaccgattccaacttgacgaattaccgtgtgctcatgcgcttgctgttataaaagagatgaacttgaatgtttacaactactgttcaggttattacacaacaagaacatggcttgaaacatacaacgactcaacatatccggtacacaatcacacaacatgtgatgtaccacaaaacataaaagatatcattgttctgccacaaaaccagaaaatggaagaccaaggaaacgaagattttaagctgattgggatacaaaaaaacataacaggtgcagcaa

SEQ ID NO: 366917 - DNA, 776 bp, Cannabis indica
acactaattttgatggatcctatcatgttactatgtttatacacatatgaaagaagattgcaaaattgacctgttacaaattatttatttgaactattgacaattgaacctttggttaaaatcagatcattggatctctcaacaagttaaccatggtaatttagatcaatcaataataggttttataaaacttattttaataataaacaatataaaacacacacatgcaacacattggatagttggatataggatttattaatttaaattaattaaataattaattattttcaaaaatattcaatgataaaaaaatatatttcgaaaatttcaaattaaattaaataattaattttaaaaaataaaccgatcaattttgaaaaattaggtttcaactaacctaaatatctatgtcaaaaagatgctaataactttttaaatttcatgttattaaaataaaattaaatattcaataaaatgaaatgataaataaatataatttttctcattttgtaattcaatttaaatataataacaaaatttaaaaaatagcaaaaatatcttatttcaatttaaaatttcatgattaaaataatcttaatttaaatttcaaataaggtcattttatttaaattaattaaataattttaaaaatataaaatatttgaccttaaattttaaaaataagatacaataataaaattttaaaaataagataacaaactaagcaaaagatagatttttacctcttttcaaggttcaaatatcactaatat

SEQ ID NO: 366918 - DNA, 1131 bp, Cannabis indica
tttataaagtttcacaattaaatcaaaagttctaatttggcacaattttcaagaaaaatcctattattagcaaaggtggcacattaattagaaaatcattgtagcgcgcctaagcattagggtgttacaatttcagtatcaaagccgccaggtttgtctattgaagatcgtctagacatgtacaatcattgtaaaaaaaaaaaagcttcgctcacgtttcagtaagcctttatttgtttagaatgtatgtcattagcaaaggatgttaggaagcataatagtttataattatttattttaatgcattgccttaaaatccataagagcggtattaagtttatgtgatcactgtttgacctgcctgacttatgggttcgctgcctaggtggtcagggaaatataattcccaagaattcccgtggacgcggcagaggtcgtggaagatttcagggtggtaggcatgaaatcccaccttaagctcctccagactgggagcaaagatttgtggaaatgtaagatcgtattcgtcagcaagatgaagaaattttgaggttgaggcagtagggttctcctgtagtgcctccaccacaagttcatgccgctttaggttgaggcagtagaacaacctgttgttgacaactgtatggagctactatacgagagattttgcatgcagacacctccattttttctgggagatctggatgttatgaaggcgaagtagtggctcactgtgatagaaagtgttgttggaagaatttagacaacaccaaataaaataatatatttagaaatataaataggattatgcgagtactcaacctagaatgacgagcatttaaattatggatacacagatgtactggaaatataaatgacacaaagagagtatagtggttcagtcagatcacggtctgcttagtccactgttgcaagggtttttctgtcttgtccatttcatgttggatcactcctttatatacaaagcaagtgtcctttatttacacagagatttattttattatcaatccgtttgtacattgaatataaacatttaaaatcaataaaaacgtaaatacaataaatgaagacagttcgcccaattcactaatacagcaacgtatgcgactt

SEQ ID NO: 366919 - DNA, 663 bp, Cannabis indica
ggtaaggccaatgtagttgctgatgccttgagtagaaaaggtcagagtcggttgagtactgtgaagaaaatctctcaacagctagcaaatgagatgactcgagctaaaattgagttggttgtggggcagttggctaatattaccctacaatccactcttttagagctaataaaagaagtacaaatgcaagatccagaattagtaaaaacccgagctaaggtttcggctgggaaggctagtgatttctcagtggataaaatgggaatgttgagattcgagaatcgagtttgtgagcctatgaatgagttcatcaagaaagagatcatgaatgagtctcatacgactccttattcagttcatccagggtcatcgaagatgtatcaagacctgaaagccatgttttggtggcaaggtatgaagaatgacattgctgagtatgttgcaaagtgccttgtcaacaagttaaggctgaacatcagcgaccggtagggttgctgcagccactgaacttacctgattggaaatgggaggacattactatggactttgtggtaggtatgcctagaaccaggggacagtttgactttgtgtgggtcatagtggacaggtttacaaagtcaactcattttttacttgttcggacgaatttctccattgaccagt

SEQ ID NO: 366920 - DNA, 523 bp, Cannabis indica
tttgtggtggtttcagcaaggaaatcttgggagaatcaagctaaggtaagccctactagaacccttctttagtttttaagtttttgcttggtttgagtttatgattttgagaattagtggctgttagggtttgggatatttaggattcaaattttagggttcatttgagttgattttaacttctagtagctgatttagtggtgttgtgttgaatttatgcaagttggagctttaaactcaaagctttggtctttaatggcaagttgagtttcattggatttttctgggaaatactggctgtaatatattatatataccctaattaggtactctggaaggtttggtgacgtttggtggagttttgagcaagaaatgaaatttctttggtggattggtgcaaaccggctagctggttttggcagggttccccaggcctttcatttcctcaattctcgtccattccgtgtcgtggttgggcttttccctatttctagagttagatttgttgggttttataccctaa

SEQ ID NO: 366921 - DNA, 421 bp, Cannabis indica
tgtttaaacaacatacttgtgagtagatctaagatcctggtaaaataaattccaacatacacaccatcaaaaaatgattgacaaacaatcaagaacacaaagataacatgtaaataatggttagaaatacaaaattattttccatttccataaataattgagaacctaccgacaacctgttgagaaaagtcttccgtgacattgagacattaatgtcgagaacctttcaagaacgtattgaaaactcgtcgagaaggtctcgcctgaccttgagacattagtgttaagaatctatcgagaatgtatcaaaaaacgatcgagaaaaatgaaaaacacacaaaaatactccaaaacaaggggatctcgcgatttcagcgaaatttatgtacaaaaaaaaaaaaaaaactaaactaaaacaaac

SEQ ID NO: 366922 - DNA, 978 bp, Cannabis indica
attcaattaattattttaagaaaataattaattataaataattgattctaaaaaggaaagctttacctattggtaacctgctattataggtaaaaaaaaaaaaaataataaccatgatggttacaaattaaccatgatggttacaataaaaatgtaacaattaagtagtcgcccattattatatataattaaaaaaaacatgaaagatacatacctataaagatttgaaaaaaagaaaaatatcatgttttatgttaatataattttttaattatattcttttttgttctttgttgacctcgcttctcgtcaacgacagtgagtcaaaaataaagccattaaataagatgagtaaaagaaaagaaaaatagtaaaataaagtaaacactaaattataaagaggttcaatgttgggattttatgccctaaataaaacccattccaatacaatctgatttgttatcaatagaatattagaattcgtttatgtttacatgtagtttttatgtttatggtttaatgtatacaatttctattaaatccagaacatatagttattcacaattacagtgatgtcaacacagtgggaggtaattgtgattatatgcttcaaaagttaatgtcccttgattcatcagtgcactggatttacactgatgtgatagtcagcgataaagcttacttacacctttgataagtgttatgttctttccaaaatattggcaaagcatgctactatcggatgtatggagtatacattggactgggaccgatattgatcttggtaaagatatcataatcttactgttgtatctttctaagtcaatatcactggttgatcttagataaaaagatcttaatcctgacatggttaggttcgatctcaagagtgttatttgtattctttgagctgttagttaaagcctacttttttggtcctggtcaaacgtacagtttgggaatatgataatacaattg

SEQ ID NO: 366923 - DNA, 1011 bp, Cannabis indica
aatatggcttcacttgattcaaaaaaatctaacgctcttgataaagttaaaatctttcgaaatgttcttgagatcatttagaaagagtcatcaatgctgttctttcagatcgtggaggagaatattatagtcgttattcaaaatctggactacacatgaggccttttgctgaatattttctagaaaatggtgtagtttctcaatacactatgtcaggttcacctgagcaaaatggagttcctgaaaggagaaatcgcactctcatggatatgctagaagcatgatgagtatatcaaattttccagattttttatgggatgaagcacttatgattgcaacttatattttaaatcgtattcccaataaatctgttcctgaagccccttttgagttgtggactgggaggaagcctagtctgaatcatcttcatgtatgggattctccagctgaagtacagatttatgatcctaatttaaacaaaagttagacctgagaacaaatcgttgttatttcattggttatccaatgcactcaaaaggcaatcacttttattattatactcgtggtacgcaaatttttgaatctcagactactaaatttttagaattcattgttgcttaaaatattccttcaacatctcttgaaataaggaatcatctaaatgaatttttattcatatatctttttcaagagatgataataatagcagtcttattcttactctagttaataacactcacattgttgatgaatatattgctcctaatatctaagatgacgagggtcctattgttgatgaggaacctattattgaagaaggtttttgttgttgatgagggtcttattatcggagaaatccaattgtggaatatgtcattcaaaatgatgatcaacaaatagaggttattccaaaagtacctcttctatggagatctcaaagacaaaagaagtcaacaaagtgtcatactaattttatttatgttggagaaggagaatatgatattgatcatt

SEQ ID NO: 366924 - DNA, 654 bp, Cannabis indica
ttcttcatcgttgttcgtgatcgcatccccagtacttacttctccatcgttttgatcctccaacaaactatcacggtaaatatctctctggttttcttttttcctttttgtagactgaattcattccattttatatagccgtatttcgatattatgtgaattgtgatagtgttttagttggtgtatatactgttggatataatctgtgtgattcgtgaaagaattggttatattaaggaccagtgatcacgattttgaagcaacttttctgtagtttaatacctcttgatcagattcattgttcaagttaccttaagagttttctatttcaattttctttgtctatcgtttgttgctgtaaatgagttcaatgtttttctttcttttgtttcacaactctttttttattctttcttttttcaatgttttctttttttgttataggtttgttttatattgattttgttctattttgcgccattatttatggctttggcgccttacaaggctttagcacctattatatggttgggcccctaattatttagggtagtttgtttacattttcacgtttttcggtatgttttaaagaatatttttaattgaaataatttttaagagtgtttactttaaacgctaattcctattagttat

SEQ ID NO: 366925 - DNA, 1437 bp, Cannabis indica
ggtttttcgaatgatttgaagtcatgcaatccaaacatgtaccacacggccaaagccctccaacttattcccaaccactaatgttgcctttacctgaagcatagagcactcgtcagtcagtgacggacccagaatttttgatctgtgggacttaattgttataaaatatttattatttactttactattaaaattataactattttagtggggacgtttttactattttgttgtataattatttaactaaatagaaaatatttaagttttttttctactactaacgttttttttactggtaggctatagtccccacactcaaataactgtgtctgtctctcctcgtcagtcaagacccacaaaaaaaaaaaagacaaaccggacataacatttaaataccataatcaatatgtaacatccattacaatacataaatcataaccaattatttcaaagatggtcgttccaatcaatgtgaatatttgagcacatataagaggcctaaccaaatagtgtgcattcgagcgcgataatagcaacgtaactaagcacccacaacataacaagtcaattattatcatgacatataccaaatcatgcaatacaaaactaattttaacatgtacgaatattgttaaacaatcacaaaatgtacgcaaaggtatgcttgtatagcaaatgtccacttttctaattacttggattccagcaacaaagaagatacccaagtgtgagtgcccttaattagccctaagtcacaataagttcaacatagatttagtttttcaatttaccaaaacctatggtaatttctttatgaattactaggcattaattatactttaaacatggttaattatatcctaggaacattaactcttgttttcataaggtatcaaaatcccttgaaatcaaaccccaaaactccacgttgagttaggctagtcgattagccatacaggatgatcgatcaattttgaaagttatcctagccccctaaactagtgagggcggtcaaccgactcaagtcagagctcaaaaatgtctgatttcatttcatcagtataaacaacttagggttccttaaaaattaaccttgtatgaaaattcccaatttccctcatcaagaacaaaattaggaaaattgttgagaattcttacattttcccctaaaatatgcttggaaatcccccttccaaatcaagctaaaactttgaaatttgtaagtgtttgatgagtttttcgttggtggaagtgttctttagtgataaagtttgaatttttaaaaagatgaaatgaactaaaagtaagctaattaagtgttgatctttatttacttcaaccaaataaatcaagggttgagatgcaaaatggccctaaatttggtaactaagttagtaaatgtccactttttaaaaaaattaagaaaatggtcaa

SEQ ID NO: 366926 - DNA, 539 bp, Cannabis indica
tttttattttttctttttgcttcaggaagtgacctgatacttgtaattttcttggagaatgaattttgttaaagcattaattcattatggaggagagtggaatgaaagtaactgctactcaaattacaaagtggctggtgtacatattccatagaattgttcattatttgatcttggaaatttgatcaaaaatgaaataaacactacttgggacaatgttgagatctcataccaagtaactaaaagtgagccaccaataaagatgttggtgcttttttacatagacttgaagaagagttgcaattctcatacaaagagttgcatttggtttcaggaacattaccaaacaaaaaaattagcaagaaaatggaccaaaccaagtttgaccatattcacattcccttttgctctcttctgaatgaaagcattcctaacttcttttgaggaacctgcataaattaataaaagtaacctggtaaattattaaaagtaagctacaataataggaaaaaaaagattaggtaaatttaaatctaaat

SEQ ID NO: 366927 - DNA, 688 bp, Cannabis indica
taattatgtatatatatatatcttgttcacttttataattattcctagctaactaacaattatgtattatctttattattaaggtaatatatatattgtaattataaatcataaatcttataatacgccgaacacttgagatacacttctgaatataattcgtattgacataaatatttaatttgatatcctaatttttatccaaccactttagattcaaacttagtctttttattccactcacatgattattataggctccaagaaaccttgcatatgtatcataacgtacacatacttaagaataatatcactaatttaagcctcattaaactgactcttaaatataactcaagtcaatttaaatggttcagttctagcctaatgagctagttccgacttactccaccgctaatggaccttaaattatacttcaggatttaactaaataattttcttaactcataagaataccaaagtcttttatttgttgaaactaatacaactttatacttattttaagaaaaatagccactacactttaataattatctctacttacactatttataaaaataaataagacaactattttcatacgattattatttcaataaatttcaaatactattcttaatctggatatttcgttctaccctccttaaaaaaaattcgtcctcgaaattta

SEQ ID NO: 366928 - DNA, 838 bp, Cannabis indica
gaatctcaggatgtggaagagttaaaggggccaccaggtgggtggacttctgcagggttaggcgaaagcggaagctggttttcttgaaggactacacagctgggaagaagaaacaacgacatgggcccgttgaagtagacactgtgaaaacggcggattcccggctgttaaaatttttctagaagtggatcacttacgctagggacaacggccgtcctagggatgttcacactggcgtagccactcgatcctggtttttgaaactgatggtgcatggagaatggctcaacgatgctgtaagtatttcttaacagaattaattttttgtgtttttaaatatttgtgcgagtttaatgccatttatatgcaatattagtgacatttatgcgactgatatgcaatttaatgcgacgtatatgcgattatatgcgatttattcacttctgtaatttatgtattatttgtgcgacatatgtgcgattaatatgcgatatttgtgcaatttaatgaaacaattttttggtaattttcctgtgcaatttcatgcgataattgtgcgacttttatgcgatatctgtctaactgttttcttttgaaacacagcaaattgatgccatggtgcacttactaagaagaagacagaacctctatccagaagtctacactcgaaaaggtatagtgttggacacatctgctccacagatattcgccatgtattggaatttctatgagggtgacaagagcaagatgaaatgggatgaggccgttatgaattatgtggaggggatacagtgttggaaatatattttaccaagaacttagatctactcacaagtat

SEQ ID NO: 366929 - DNA, 411 bp, Cannabis indica
tagaattcatattaggatgttagcgaaacatacttgttagtaaatctagatcctggtaaaatatttccaacagtgtagtgagattgaaacgacttatcgaaattcgaacacccatttcagagttcctagagtcaacttgggcacaaggctagggacccctcccaggtcaactgcaatgactcgagactactcaactccgagatgttatctttcttgtcgcgtgtcaaatattgatatccatatcattaaggaatatttttgggttaacactaactccatcgttatgtaaggtggtcgaacgacaatagctccgtcaacgggtggtccgacttgtgacagtcagtagtcccgtgatccgtaaggggaaataccgggtaagctgtgcaatcccacaccgcctggggaaggtca

SEQ ID NO: 366930 - DNA, 553 bp, Cannabis indica
agacccgactcatatcttgagttatgaagcccttgaactgcaatcaaacttatcctatgaagagcaacctgttgagattcttgatagaaaagaaaaggttcttcggaacaagaccattgccctggttaaggtgctctggaggaacagtaaggtggaagaagccacctgggaattagagtctaccatgaagactcaacatcaagagctattcaggttagatttcgaggacgaaatccttttacggggtgataattgtaatgaccgctttagtaatttggattagtaaaggcaattagcactaatttttgttatttttataattatttatgaatttaattatttgaggaccccattattattaatgagtattagagttataatttctcaattacggagattttattaaactctagggttattatttgtcctatatgtgaattatgcaactttcgtaatttttgctcgacgacaacgacaaatgcgatggatggttagtttgatcacatgggtaagtttagaaccttatttttagtggaaatattttagagaaaat

SEQ ID NO: 366931 - DNA, 498 bp, Cannabis indica
atcaacatccgatccgcacaagtgcggattttgaatttttcaatccaatccaatctgcacaagtgcggatatccgcactttgcggattggattggattggatcgtgcgaattagattggatcggctattttataaacattcctaatccaaccgtataagcaaagcttataaaaatatgtaattataataataatactttggtagtgagaaaagcctcacaaataattatgaaaggagctaaaagactagcatgttattaaatcataactagggatgcacatttcccccacggcgatggggccccgcggggacccgcccttaatgggacgggcatttcccgtctaaatggggaacggggcggggacggggatcactttttgtcccaaaatgttaaacggggcggggacggggatcacactccccgcccggacggggacccgtttagtattttatcttatattttaataatattttataatttataatttatgtttgcat

SEQ ID NO: 366932 - DNA, 565 bp, Cannabis indica
agtcaacaccacagccaagcaacactgaaaacaagccgacctggaagatgcatgtggataggtcggccacagatcagctattcggtgcaggaattgcccttgtcacacctaggggcaacatctgcatgcagctatcaaattcggattcaaagcctccaacaacgaggccgaatatgaagctttaatcgctggactcaaactagtgaaggagatgaaagccgagcacattgagatctacagtgactcacagcttgtggtaaatcatgtatctggcgaatacaaggctcagggagaaaaaatgatagcatatctgagaaaaatacatgatctgctcacacagttcaaaagctacagcctcaggcaaattccaagagaagaaaatacaacagcagatgcgctagcctgattggcgagcagcaatataagtgacaaggcgaacctggtcccgatccagtttcttgaagagcctagtatcaccggcacggaagaaatcgaaatgatcgatacgtctccgaaatggatgatgccaatacagcctatctcaactctggggaactcccagata

SEQ ID NO: 366933 - DNA, 602 bp, Cannabis indica
aaagaggagcctaagaagaatacttcactgaaccggaggcgactgtttaccatgacttaggctgacgctaatgcttgtgacaggtcagttatctattaatggttgttcatatattgtgttgtttgattcgggagctactcactcctatgtgtcgagtagagttattggaagtttccataagccatgtgatatttatgcttcggggtttggagccatgttaccctcgggagaccttatagtatccacaaggtggattcggtctttgtccttctggattgaagattgtgagttgaccaccaatccaattgaattacaattgtctgactttgacataatcttgggaatagatttcctgtctaaatatggagcgacaattgactataaacgaaagatggtggtgtttgagcccgatagtgctaacccagcggtgtttgtgggtaagatttagggggcacacataccaagaataacattgttgaaagctaaggacctaatgagcagagattgtctggggttcatagtcactgcagtggataccagccaacctgtgacatcagggcctgagaatacaaggttggtatgcgagttccttaatgtctttc

SEQ ID NO: 366934 - DNA, 530 bp, Cannabis indica
gagactgatcatcgtagctcgttgggtggagctcttgcttttttaaaatctctggcacttgtcacattatatgacatagtccatcgagtcttcaatcatcattggccaaaaatacccctatcattatgtcttcttggataggctttaccccatggcatggttgtcgcaaaagccttcatgcaattataccgttagtcgttcaacttcggctttggtgacacaccttaagagaggcatggaaaggactaagtacctactagcttttcttctcaattttctcgcttcattttttgtcttatgacaaggctccagtcaggaggtaagctgcgatagttgtcatccatgttggagtgtcatccaacatgtcaacttcttcttggataataatgcttaattcctttaggaactgtatgggatcagagtttgctttgtttgcaatggggatctgttgggttttatgccctaaataaaactcatttcaaaataatcaaattacttattaatatagatcagaaataacatttaatgtt

SEQ ID NO: 366935 - DNA, 721 bp, Cannabis indica
tttattaatttatttatgatttagagaaaccctcccctttttttcctcttcatttatgtaatttatggggttagtgttacttgcttcagtaactggtgcttcacgtcgttatgcttttgttgagtttgaaacagaaaaagatatgcggcgtccattcaaggtcgtatgattatttgtttgctcttcttcttttttaataggctttgttgttatagttggggctatgaaggaagagtgggaataaaacaatggagctcctagggaaaggataaataatattaaaaattggtttttaaaagaaaataaaaaaaaaaaaattgattggttgttaattattttaattgggtgttaattttttttaattgggtgtcaattttattttttatttttttaaaaaaaaaaatagataacctacaaacaaatacatcttatacaatcttgactttcaaaagcaaaaaaaacaaaggactaaaaaaatatatgtatagtatcatagtcactaccataaaattattctataaatatatttatctatatatattgggtaaatactattttggaccctgtgttatgcaaaagttacaaattggactctgtattttgttaaatgacaaaatggaccctgtattttctaaaatagtaaaaataggaccttgagcttaatttttgacaacttttttttttaataaaaccaacttgaagacaatacttaatacgaaca

SEQ ID NO: 366936 - DNA, 732 bp, Cannabis indica
tcatctacaaaagacaacacgcacgatgagtgttggatggagtatcaagcaaaaaacaagcaaatatgccgaccaggagtacccaacagattaaagagcagccatgtttgaagaaaagtctaaactcaagaagtcagaaagtttttcttgagttagggccaaaaagttcataaagcttaaagaaagcagaaaggaaaacagacgcaatgtagttctaaaataagccttacggctgaaagctaacgcaaggacatggaaaagaagagtcgcagaagtttcaaaacctagggtttcctacagtgttctttctacagcaaagatacattcaaaagcacaagcatgcaaaggaaaaacataaagggattcagaaacttactcaaagattcaggtgtctggattcaagcaagattggaatcgtctataaactcttcagcaactttaaagcatgaaagctctctctttttgctctgaagtttgcttaacaacgaagggtgatgaaatgaggaaatgtgtcagtactctaagtatttataagcaaaagggtaactgtacgtaaaggaaccttagacgcctcaacttcccgcctcgaaagcaaatatgggaaataaaaataatcgagtgcaactgtcagccgtggagagagaaatttggattttcaaaatattaaatgtcagagcattaattagccgaaaaccgaagggacgcccagtcagcttcacatcgagtctcaaa

SEQ ID NO: 366937 - DNA, 142 bp, Cannabis indica
aatatagcagttatatataaatagaaagtgatggctcacaccaaataaggcagttaagcaattgttcagtaattcaggaaactgcctctttcagaaaattgagccttcccttttctctatatatatagccgcccatctcctc

SEQ ID NO: 366938 - DNA, 697 bp, Cannabis indica
caatttgatctacactacgttccgcatttccataaaagggcaggcgctagtagacttcatcacggagtgcaatgaagctgaagctaccgcaaacatacccacaccatcagtcccggcgtggaaggtatttgaggacggagcctccaacgagaacggatccggaccaggggtcgcaatgatatcctcgaacggacttcgactccaagcatccctacggttcgaattctcagcttctaacaatgaggccgaatacgaagccctgatagcagggctgagattagcaaaaactgtgggggctaaaagagtagaagtctacagcgatttgcaactggtagtaaaccaggtgtcgggagaatatcagacgcgcagaaaaaaaaatggccgcatacgtggcgatagttcccgaactgctccacgagttcacggactataaagtggaaagaatccccagggaaaggaatgctcatgcagactgcctggctaagctagcttcggacagcgaaattgagagactgggggtggtacctgtggaacgcttggcagagccaagcatcaaagtaaaagaagccacaacaacagttgaacaagagcccagctagatggttcccatcatcgaatacataagaaaaggtgaattgccccaagagaaggcactatccagaaggatacagtatcaagcgtgttgggttttatgccc

SEQ ID NO: 366939 - DNA, 511 bp, Cannabis indica
ttttaaaaacagtttttttaaaattaagttttaaaaaactggaaaacagaaaacatcaaaatgttgttttcaatttttcgaaaacaatttttttttgtctaacatattatattttatattttcgctcacttactcggatcctagacccggaaccatacccgaacccgaaaccggatgggttcatatcatgatatggtattaaaatattaatttttttaataagaaaaaatctaaaatagttttaaaaattttttgccaaacaccattaaatttttaaaatgataaaaaactattttctattctcacttttaaaaactgaaaacaaaacacagctaaacaggaataacctagagaaaaacgattgaaaggagataagagttgaacagaggctgaactatttggtgtggtggccgggggtggctatggctccactaattttgggattttttgtttttaggttttgtataatttatataaattaaattaaattaaggggaattactccatatac

SEQ ID NO: 366940 - DNA, 727 bp, Cannabis indica
ataaaattgatgaatgcttctaatgttccagatttattttcagggagattgtgagattacatggtatgcctagaataattgtatccgatagggatgctaagttgttaagttacttttggaaaaattatggggaatacttgggacaaaacttttattttctacaacttgtcatcctcaaactgatggtcaaacagaagtagttaattgaacattatccactttattgagggctatcatatgtaaaattattaagacttggaaagattatttaccacatgttgagtttgcttataatcgttttatgcattctgctaccaaattttcaccatttgaaattgtttatggttataatcctttgactcctttggatgtatcacctttacctgtttctgagcatttgaatttagatggctaaaagaaaactgaatttgtgaagcaaattcatgagagggcacgactcaacatagagagaagaattgagcactgcataaagcaagctaacaagggtcgtcacaagcaggtttttgatcccaatgattgggtatggttacattcccagccaaagacgttccaaattgctacctcgaggagatggtctgttttgagttcttgaaaggatcaatgacaatgcctaccaactcgatttaccaggagaatataatgttagtgctacatttaatgttttttatttgagcccttttgatgcaagtgaagatttgaggacaaa

SEQ ID NO: 366941 - DNA, 874 bp, Cannabis indica
ccgcatgtcttgtcctataacaaaaccaaagatccagtctcgcatttgaataactttaacacgataatgcgagcgagtaacgtgatgaacaatttacgctgtattttgttccctacctcgcttgttggagcaatgagtagctggttcaaaaggttcactcatcattcaataatttcttgggagcagttgtctagggattttaagaagtaatttcaagccgctagggataggcaacccaaagcggcctcgctaaccaatataaagcatcagcctgacgaaacacttaaggcgtacttaagtcattttagcacggttgctgctagggttagaaacttggatgacagcacgcaacttacagcccttcaggcggtaatctccactgatccattaaccgatgggggcgagttgtgggatgatttacaaggacgtccggtaagaaacatcaccgagttcaacgagagggctcaggtgtttgtccgaaaggaagaaggccaaaaggaaatgaacttgttgaaaacaggctcgggaggtaaacccagcaatgtttccacagggactgcttcacgagaattgataactcgggggcttctggtccgaaaagaaaggacggtattagggaaccgtcgaaggatagaaagaaataaaagaagcatgacaaatacgtgccagtgtatactatttataccgagcttaatgaaactcgggaaaatatttaccttacacatgagcagaaggtagccttctgcaaacccgagcctatgaggaattttaagagcaaaaaagatacctaacaaatactgtaaatttcataaagatattgggcttgcgaccgacgaatgtcgccaattgaaagatgagatagagagtctcatcg

SEQ ID NO: 366942 - DNA, 1098 bp, Cannabis indica
tcgtgtttccacgtactgccagaatgctgaattcgcttcagcattgcttcagcaatctgcctcaatttcagcttatgttccacttcttccttgcttcctttttcaacaacaaacaagcacaattaattggaaaatcacacctaacaatatcaatatttacaagacttaaaagttagcttactaaatagaaaatgacactaaaactaactaaaattaagcaaacaaacacattttcactactcttctcacaatacttttagtttaaaagcataaaaataactctataccatagagttatcacaccccaaacttagagtattgctcgtcctcgagtaatgaaaaacaaaaagaactaaacaataaaaacagaaaatgacagcgacactaacatgcttgcagcagagaaaatattgctctttcacacttggtttagcgacgaaaatgctctcagaattagatggaatggaagtgtaattggtggtagtgaatatgccttgacttgtgtgtttcaacagaattttgcatgctatctatgtccttaatacttaccaagagtaattcaatcaataaagtgtgcaaatacttcccaccaacaccttgaatttctataacaactaccctcgatcctcaagtttaaaaagtttgcttccataagttgaactagtgcaatcctctccactaatgtagcttagctttacaacttagatcaaaaggacttgaataggcttgaaatgtgaggtttaggctcgggtttggtaaaggatgacatttttaggctcatgacctaactacctcaatttatcaaggactttttcttttttctctcaagcgctcacccaaaatttcattttcaacccacaatattcactcaatctagttcccactctcttgctatatgtatgtactatatatatgtatttttttcttttcaaatcaactagataaagagagagaaaaaacaacaatctttttctttgattaggggtggtacaccccaaacttagccttaactttgcccctttttttttctctcttattttatttaatattatgactgtacatatatgtatatgtatttttttcttttcttttcttatt

SEQ ID NO: 366943 - DNA, 763 bp, Cannabis indica
gtctagatcttaggtcctggtcttggtccaagttcaggtcggtttgaatctcaagtttgggtccgagtctaggtcccagtacgggttcaggtattggtttgggtctgggtccagaatgagtccaagtccctatttgggtccaggtcggggtcccaaaccgggcccaggcaaggtctaggtcacgaaccaagttttggtctgggttttggttcgagtttaggtcttgagtttgggtctggatctgggtctgggtcttggtcctgggttccaatctcgatttgggtatgggtctgggcccgtgtccaggtttgggtttagggtttagggcttagggcttaggatttatgggtaagtgtaaagagtttagaatttagggtttaaggtttaggatttagagtttaatggtccactttcagattcggttcaaatttcgggtcacagggtacgatttaaggttcgggtgtgggtctgggtccgagtcctggtttaagtctacggctgtgttttagttctggtttgagtcttagtcccaaatccaaacacaaaccacatgtcgagtctagttttgagttttggtacgggttcgagttctggtctgggtctaggttcgagcctaggtctaattaccagatttagacaccgaatatgggtcgggtccaagcctcaggtctttggtctagtcccgggtcaaaatcaaattcctggtccagttctagctcaagtcttgggtcctggtccgggtcttatgtccaagtttgggtct

SEQ ID NO: 366944 - DNA, 783 bp, Cannabis indica
tgttatactcgtatcatgagcataagctataagagagggatgccaagggaacgtacaacaaaagatgaagtggttaaagtatgcacgcctctgagaaagtagtggttgtacgataagtacaagtagtggagacactatttgtctcactcggagtactaactgacacccaacaaccaaatctccactactcgtttgatatgctgatcttcatgatacaaaagtaattttgtcccctaattttcgagacctcttgtgttttggaatcattagagctccctgtaaatatctctcttttccattgaaaaaagaaggaaaaacaatcatttgtaaggaaatttcaagattcaatacaatcccatatttctccattaatgcttgaatttctcttaagcttttcatcttcactcgtttacattttattttctaactaaagtttagttaacaaatttttactgtcaacaataattaataaatttaaatatcaattatattattagaattatatttacacatttaatgatgtataaataggtccattattaaggataatataatatctatacacataattatagtaaatttagtcattaatgtattgttgaccgaggttttcggcaaccaataaaataataagaaattaaagagctgtaagaaattaggagaaggatttttacgtggttggggcgttaatgagccttagtccacgagtctgtatatttatgagtgtatttaatacagagaatgttcttggtgagtttttactcttcttgcacttatgcaacc

SEQ ID NO: 366945 - DNA, 739 bp, Cannabis indica
gtgaactactatcagaggatgtgttagcttcagggtcagtgttgcaagggctacttggttgactgaagggacattaagatggactcagaagagttcatgttgggggaagtattctagtgcggaggcactactccatgggagattctgaataatgacagtggcactggttctttgatcaagtccaagtgtgggcgagggagatcgtcaccaagagggtggttctacggaggtagaggaataagtgcagacttaggattcggatgaagcttggagtaagcttaggagtcgagatcaggaagatttgcccgcggtccgtcgatgaggacatcgacatcttgaagtgggggagaatgtaacgtgcgtgccaagatggcacattacaagctaagtgatgcccacaatttggccaagtggtggtcaagtggtggcgcatgttgaggtgcatgttggtggcatgctgatgcttagtttgtacgacagtggcattttcgtaaatatctttaatattgtcttgattgggacgagacttggttttcgccatttatttgtgtctttaaatacaatggtgcaatcaaatttgagaaactacgtgatttcgtatatggtttggctatatgtcttacagagctaaattcatgtatgttcctggtagaaggctaaaagctctgaatgctctttaaggggggactctggtgtcagctctccatcaccccttggcaccttggtgttaagtgagcta

SEQ ID NO: 366946 - DNA, 526 bp, Cannabis indica
atgaagaagagattcagaggttgaaacaacaaaggtttcttgtagtatcttgaccacaaatgccaattatttttgattcagtattaccagcaaaacatggaatggctggtaatcaagcggaatcattgcaagaaaaggtttggatccatgaatcttcagtgtttcagggggattcaaatatgaagaacgcttcttgggctgaaagccctgaggaaattattgtgagacctcaggagattatggcaaagggttaggatatcacctgcctgatcccatgttatgatggaagtggtaggagctccatgattgagcggaagaggaaacctacgtcatcagtggtgggtttaaggcagaacaagcggttccgaaggtttcaagccaaaggaggacgccagggttattcttaccctgagtgcccacgttgcatgaaacaccatcctggagaatgcaaccgcaaggtatgttttcaatgtggcaaggttgggcattttaagagaaattgccacaggtggagaaagaagaacaa

SEQ ID NO: 366947 - DNA, 412 bp, Cannabis indica
ttttctgtgtttttccatgcttgaattgaatggaattaagtaggtttcatgcatgctagttacttggttcaagtttgtggaattttgttcaaaagctatgattttctaagaaatgtgttcaatctggtaatcgcttgctgtagatgtttgttattgttttcagaggttattctaggcttgattaagtagatttgagctagtttggatgcatgttatctaggtttaaccaagtttgagtttaaaactcaaagcttgggctttaatggtgatttttgtttatgtgcaatctgggtgagtttgatgctttagaaatgttctaggggttatatagaacaggtctggaagttttggtttggtttgagttgttttgagaattgtgtgaatttttaaagttcgaccgatcaggctgaca

SEQ ID NO: 366948 - DNA, 539 bp, Cannabis indica
ttggtttttagtttcaatatgatgtcaacatgtatgttgatatgatatcgacatgatgtcgatatgatgtcgaaacctatgtatccaaacatttcattgtgttatttgtttcattgtcgatgacatatcgacattttgttgacatgatgttgatatctatgtaattgattttttatattaccgtatgcttactgtatttttctaggatatattttttgaggccactacttcagaccctcagcccagtgcatcatcttcatcaggccttggtggtgccgagtacagggaattagtggggaggttggacaggatcgaggctgagcagaagggtctgtacgcttgtcatgtcgagctgaatgaggcatatcagaatagccatatagagctgaagggtggttagaacctgattatggagcagctcaaaactatattgagcatgttgcatcgtacgccaacgacaactccaacaccggagcccctagcagatgcatcacccccactagcacctgcatcacctgttggggattatttactaggat

SEQ ID NO: 366949 - DNA, 635 bp, Cannabis indica
gtaaaaataggaacttgagcttaatttttgacaattttttttaatataaccaacttaaagataattcctaatatgaacaaatacagaaaatgtaaatagttttgtcatagcatttttatatcagaatataattaaattttattttgataaaaaatcaatttagggttctatttgtactattttagaaaatacagggtctattttgtcattcaaccaaacagggggtccaattgataacttttgcaaaatacaaggtccaaattagtatttaccctatatatattttaaaacttttttcatatttatgtaacttttgagcaatattttacaaaaaatcatataaaaatatattaatatttatttataaatactcaacattctataaataaattaatatataatcttaatttttcatactttaataattttaacaataaaattataatattcaaattatatttaaattattattattattttaatctatttataattgataaattcatatattattattattattattattaaattgtagagtaatttgcggcaaaaatatttaagttttatcccgagtagcagataaatacctaaatcgtatttttggcggtaaaaataccttccgtcacatttct

SEQ ID NO: 366950 - DNA, 621 bp, Cannabis indica
taattaattataattattgaataaatagttttggcatttataggattgaattggaaaatatggtactattgaaagaagaataagtggttgaaataaagtggtaaaattgttactagaaagttgtccttttgtatggccgaccttaatgttatttttgtcaatattttattgttttttaatccatatgatcagccctaagccctagttgaaacactatataaggaacatgatgctctcatctcatcgactttgtcaacttgacttttcaaccaaatcaaaactagttttcattctctaacaactagtagatgggagagttccttttatagtgatttcacctccttcattgttcttcacatattcaaatccttagtgatagagtgtcatgcccacacataccaagtcaagtactaattaaatcatagtaagacggtggttaccaaacccgaaggagagaaagagatccatgctcagatcttgataatactctgtaaaagaaaggaacaagggttagagatctgagcataaggagtcattatattctactgcaaacaatgtaaggttttcttaaactcttatgtgcttaatttttattattttaaagatattcatatttaggat

SEQ ID NO: 366951 - DNA, 517 bp, Cannabis indica
tatatgtttgcttgtgggttgtgtgagattggtccttgggggacgctttgtgtttgcttgctcatgcttcttgtttgcactcaacatgtgcgagacatgtatcgtgcctaacctttgaacttgtttgcctgcaggcgcgtttaggctgacttgctagctcggtgtgccagcaagtgccgcacgttccacctacttgggggtgtccaaataggcggcccgtgacactgagcgatgtgctagagatggcaactttagagattaatttcgttgtgtccaaatgcgaagacaatccctataattatgggattgattcagagaaaaaagataacctattctaagtttcctatttctatttcgtacattgtaattattgaatcattgtatttcctatttcattcattgtgagcaaaagggaaactatgcctcatgtattaagtctttataaatagtgacttagcctcactatgaaagggattgagagaattgttgtagaaagatactctagagagaaaagagt

SEQ ID NO: 366952 - DNA, 543 bp, Cannabis indica
tacacataagcagcccatagtgacagttaaccgaatgacaccttaaatttgatactagttcagtagtttggagggttttaccgccaaaatttgagcttaaagggttaaatgcaagtgaaacaataattggaaagattttaccgcaaaaaactcttttaataacaattagttcaaagtcaacgtgtctttgaccttgtagagcttatgttgttactaaaatgcaacttgatcgatttattgtcacaacatatattgttaatagttttcaataccatttctaattttgcagccatatgtgacaaaaatctcactactaaaatcataagatcggaatcaaaactcttaatgatctccaaaattttctaagttttgattagtgaacatgtagtcttttgttctccataaattccttatctcatttgactgcataccaaaagttatttataagattacttaaatatttatccaacattcttgatatgtatgttaaataaaaatttgtatacatgcttgagcatataatagattatataaataaaaaat

SEQ ID NO: 366953 - DNA, 499 bp, Cannabis indica
gagagagagagagagtctgacacttagagaatatgagatttctagcttagaggaggcttaagcaacttagctttttagatagaggttaaggcatttatataggaggcctagaccctaggttcacaacttaagtcccactaaaatatgatagttagctagatatttacataagaccaaaattcccctagattctagatatttcccagcctgtttattgggcttttggggcccaattcgtagcccacttatgatgtccacgtgtgggtgtgtcggacacattgagtaatccttggccggccatggccttgtgctggccaggttggcctggctagccatgatgctgtttcctggcctggttagccacaggaccggctaggggtggctagccaactctcgagagcgagctagactgtcacttgatccccgtttgagtgtcggggtcttcgttggctcggatgctgacttagccttttttttgggtgagttgtactgccacgtg

SEQ ID NO: 366954 - DNA, 866 bp, Cannabis indica
ttggacaagaaatccattcccagcataatatcaaaatctgctaaatccatctctattaagttagcactcaactccctatcctcaattctgatccgccaggcaatagggttccaaaccctgattcataactattgtgcggtctacctaatttactaaaaattttggctgacacataggaatgagtggccccagagtcaaataacacagagaagtaagagttatttactgagagctgacctgttaccactgaagggctggcttctgcatcagcctgagttatcgtgaaaacccttgctggagtaggttttgctgcagtcttctgtacttcaggtttgagttgggggcaatcctacttatattgtcctggcataccacactggaatcacccctgccctttacactctcccagatgatgcttcttacagctggggcactctgggtaagtgtatcaggtttcggagctaccctgacgattgcctcgaccctggttccctcgaaacctctagttctgacctgaaccactagatgcagtaggtacctttcttttgtgatcagtggccgatccactaactccccttctaaagcctgatgtaggaggagtaggagccctaccaacaaccagagtccctcgagactctaaggtgcactccactgcgccctcagctcgcagcaccttacccaccatatcagcgtaggtggtgttgtcatcagtagtgatcattaagtcatgtcttatttttgagttcagcccatctagatacttctctttcttactaaaatcaattggcacgattcccgaggccaatcttgccaaacggtcaaactgagttgtgtattcagtacactcatgttttccttctgagtta

SEQ ID NO: 366955 - DNA, 622 bp, Cannabis indica
gcacctgcttgaaacttgggattgtctaaatacaggggagttgaagctcaaagttggaaatagtgaattattatcggtccaagctaagggaaaagctcgcctcaagttttaaaagaaatttttagttttagacaatgttttgtttattccaaattttagtaaaaacttaattagtgtttcatgtttacaaacacaattttatcaattgaatttttcgagttctatttgcactatttctcgtaaaggatttcaattatgtgttgcttacatggaacaagggctttatgttttacgaccagaaatacaaattgcgcttaataacaaacttttcaatattgctaaacctagaaaccataaaggaaagagattgataataatgatgaaacatatctatggcatttacgattaggtcatataggctatgatagacttcgcaggttaaccaaagatggtccattgaaaaatgtcatcttcggtgaattaccagtttgtgaatcttgcttagaaggaaaaataagcgttctttctctgcaaagggagagtgtgccaaagaacctctagggtagtgcattcagatgtctgtggacctctaaatgtaaaagccagaggaggttatgagtac

SEQ ID NO: 366956 - DNA, 524 bp, Cannabis indica
catggcagcatttttggaggcagtgaatttagctcgggaataggtgtaagccaactttagaccagcctacacagacaaaaaactttaaaagtactgaaccaagtaaagaagaattaaaggaaactaatcaacaaaggcttaccctggtaaattctctcaagactcctcccatcagcaactctagggaagactcggtatcagcaccggccagctgctcactgacctcaggaaccaaccggttcatgtaatgggtgagcatctctttgcctttcttagcctcttgacgcactggcaaaggtggagtaggagcccgcacctgctcagatccgctcttggccagttgagatccaccctttgattgctcaggcctgtccgagcttcctcctcgagaatctttggacttagcaacttttggagtagaaggatccgcaacagttagcttctcagaaaggttaataacctccccggccggtgccttatccttggaaggggtcgcctcagcgcccttagatttcttggccgaa

SEQ ID NO: 366957 - DNA, 518 bp, Cannabis indica
taaacctcaaaatatcataaaataataatattctattaaaaataaatattattaatttaaaaaatgatatttaagtttaaatgtaataaaaataatattttattttaattttggggtttgaaaattggaaaaatcgaattttggggaaaatcccacaaaattcagaaattgtgggttggctggcagcaaggctgctcgtgcagcctcagaggctgcaaattgcccaagaagcgcgcgggagagggagtgacgccgagaaatctcggcgcctgcagggtcatcctcggtggacagcagggtcctgggcgtgtctgagcgagggacgcgtgcgcctcagatagggaatttgtccctgtcacgcgcggggatgtcgtcttgtccgaagggtctggtgcgcgcagcacccaatctcgacatcccttcaacccgattttccaaaattcataacttttgcaatttttatcggaatcgagttccgtaaaaacaaaattgctcaatttttcacaaagaatccaaat

SEQ ID NO: 366958 - DNA, 986 bp, Cannabis indica
taggcaggcagaccttgtctagtaattcatcaggagaagtcatacctgatagttccaaccaggctaacagtgccattccacctgtcaaccagaaaatcaatcactgagacaaccaagcccttttgattcgataggttggggatgaatcatgagctaaggagcgatttaaacagaagaagaggagtagactatcagattgtcacggcgatcgtacagcctggaacccgtgctcaaattcccgctcagaaagatactgacgtgattcaaatcgactagaatgccaagtaggttagtccagctgtgcaggcacagctaggcgaactaaaaaatatgttccaaggcatggccagacagagaaacaatgatctcgaactggaccgagcacgcgaaacccctttctctcccgaaatcaatcttctagcattgcccacaagtttaaaatgccaatgtggaaaattaacacaggaagagaagatcctctttcccacctcaagtatttcgagatgcaaatggatttacaggggatacgaggggatgtgtgttacagaatatttcctgctaccctctcggaagccgcccaagaattgtatttcaagctggcccctggaaagttcaactcatggaaaaccttctcctcggaattccatgcaaaattctcctcctctcgccagctcccgttgcatctgggacacctagtcgaagtcaagcaaagaccaggcgagcctctccgagcatacattagcagattcatgacggaggaggccaaagtttcatgggtaactaaagatggaaagttgtccgcaatactagggggcattgaagtcctcggtgaactttgggaagacataaggaagaatggctcggtagattcaatgagtgattttctgaccgtgttaaaggcttcatcaagctcgaagagctattcacaagcagaaggtgagaaaaagcctggcaagtcgaaagctccttccactggaacgtccgcc

SEQ ID NO: 366959 - DNA, 511 bp, Cannabis indica
gagtgttggacggaatatcaaaacgataaacaagcaaatatgtcgaccaggagtactcaacagattaaagaacggctatgtctaaagaaaagtcagaactcaagaagtcagaaggttttcttgagttagggcaaaacagttcatgaagcttagaataagcaagatgaaaggcagatgcaatgcggttcagagacaagctctatggctgtaagcccacatgaagacatgataaagaagagtcgcagaagtttctaaccctagggtttcctaagcatttttctacaccatagtgaaagttgcattcaaagtgtaaacatgcaaagaaaagcataaaggaaatcaaaaacttactcaaagattcgagtgtctgggttcgagcaacatcaagccaaccagcagttgtatgaagtcacttcggcgactttaaagccagaaaactttctttttgctttagagtttacttagcaaagaaaggtaataaaatagagtttatgtgccaatgttatgggta

SEQ ID NO: 366960 - DNA, 805 bp, Cannabis indica
gaatggattgaaaaatcataatgggaagaagaacgttttctgaatcgtggggtgcagttggttgaacgtgtcccttaactgatacagctatgtaatcagtttcaattaaacaaatttctcttaaaaaataaaaaattattattttattaagtgtgtggtgggtcaagtgtgtgtgtcctcacccattcgcacaaaactgggtaccccttggggcccaaacccaaatgccaaagttgcactctttatacccttgtcaatgagggttcatatcccatgtgggactctttccaactcacacacactaagacacttatatattttgttaaaatattcacaatatttccaacaatcccccacttgaatttttaaaaaaatatttccatctactagtatcattcaacaataagattgagcataaacaaaggtatctttcgatttgaacctctgcgtagtgaatacgatttagattttactagagtgaccgtagtcttgaactctatctctaacattgtaccacgcaacaaccttttcaagggtgtaatcaaaagcccgtgcgttaatggccatgcacgtctatcccagtatagtgaacgctctagaaattttgcccaaaatttcataggaagcggccccactcccacattcacataggtgagtctatcaagagtactcccgtagctcggtactccactccacttggagtatagatctcattaagagtttctattaactcaaccttaaatcgcttcaggaattcatgcttctcttttcgtataattatagcatgatctcacttttatcactt

SEQ ID NO: 366961 - DNA, 1220 bp, Cannabis indica
tcttgacttctatctataaaccaactcaagtcatttcaatttgagaaaagaatgagacaaagaaaaaaatgagatgagggaaatgtgaaaaaaattaaagaactaataagttttgaatgtattagagttagtcccatattgttaatgtgtggagataaattgtcatatataagatgaatgcgttactccttccattgccaattggttttgagatggaatctcattcatcttatctcaaattctaacatggtatcagagccacttgtgatccgttgtgagcccaaagtgtcactgatccaaaaagtcgtttgtgatctgttgtgaaccaaagtgctgccggtccaaacagatacttctgctgtctcccctttaacctccatttgggacctttcggccaatgtgtgccagtttccagtgttggatctttgacctgtttcaaaaatccacaaatttcccaacgtgtacacccacaaatttctcgatatttggccttgtgggattctttcaaatgtcacgttcgggcttatatggtctcttaaaggtcgttcgttatatccacactttctaggtccaaacgtgaggagggtgtattaaagttagtctcacattgttaatgtgtgtagataaattgtcatatataagatgaatgagctactcctcccattgtcaattagttttgaaatggaaactcattcatcttatcctaaattctaacagaatgtttgatactttgtgagatttacatgtgagttgagagtttttcaaagataattgagtgatctctccatgtaaattgagtttctcttgagagttaagtgtttttgcatgagagttttgataggatttgatgttgtgttgagagctaagttctaagaaatctttgtgtaatcttgattatttgtaactcgatccatttgaaagcagtaaagcctagtgtttgttccccaatagactcaaattaaccacttaatctgcgtttttgtttctaatagcttatgtggaattcataatttcatctatcaatattgtccttatttttgttcatttaagcattaaatttaagttttgaatttgatttggttattacttttgattcattcaatgtttagtttgatgttctgatcggtgtgatttgtattaaatcaattacaattataatcctaaaatcaattagagttataaaaaatgttataccattttggagcttaattattattatt

SEQ ID NO: 366962 - DNA, 562 bp, Cannabis indica
ttacctgttttccgaattcaagtgtgctggccgacttgaacggaaatctcgtgctagatggatgccctaatcacaataattgtaacacagatgagtgactcgctaaataactctccgagacttaaacttgaaactaaaagtttccctatcgataaacctcatggcaataccctaaatatctcaaaattgggcaaaactagggttctgaaaattcccccaacaggcagaccggttcccaaccggaaatccggttctcagtcaccatccggtcgaccagctgctagggacttagattaactcaaactaactctagaatttgaactctaaacctttcaaaacctaacatcccctcaaattcaatttcacatactcaacctaagcttaaattcaagaattagggctaagagttgctagagcttaccttagttgaattccccttgaaactttggctgaaatcaaagaaaatcacagccccttccccttgatctagctgccttcgaagagagagagaaggagacaagagttgttcttctaattttttttttgatttttcttaatttca

SEQ ID NO: 366963 - DNA, 770 bp, Cannabis indica
tattatgtttagttaaaagtcatattttattgtgactaaaaaacaaatttagtcacaaattgtttatgttgtgattaaaagattattagtaaaggtagtattttttgtagtgaatacattatacaattttttattaaacaaaacaataagtctgatcaataatttttgcaacacaaaatttgaaaaaaaaaaaaatagtatttacccatatacttgcactatgtttggtgagatgatcaatggagagaataaatgataggaagttgagagatgatagagaatataaagaaaggagagtatggtagtaatttttttaagttgtttgaaaagaaacatagagagatagaaggatacattagtataaatttataaaattatttattttccatttatctatttctttttatataatttttatattggtgtatacttaattctaaaataaattagaaataacactataaatcgttccattaattgaggaaggattcaaaatgggtagccacctctcatctcccttccacaatcctccatgccaaacaaatgaatgttccacttctcccccttccctctccatccacccactcccactgtctccctccttaccccttactattagataagaatgtgttataaccatttgtgtagaactcacagtcaaaagttatcgactagaggagggtagtacccatatgccattaccatcaaccaattttatacgtacttaattacccgatgtacactctgtctcagatccactctacagtcgg

SEQ ID NO: 366964 - DNA, 602 bp, Cannabis indica
cattaaacataatcatgaaataaattatgtgaaccatgcaacatagaatgatttctgatattatattaattagtaaatctaattatattaaaataagttttatttagagcataaaacccaacaataacaagttatgaagtgataaaagtgagatcatgctataattatacgaaaagagaatcatgaattccagaagcaatttaaggttgtgttaatagaagctcttaatgagatctatactccaattggagtggattaccaagctacgggagtactcttgatagactcacctatgtgaatgtgggagtagggccacttcctatgaaattttgggtaaaatttctagagcgttcactatactaggatagacgtgcatggccattaactcacgagcttctaattacacccttgaaaaggttgttgcgtggtacaatattagagataaagttcaagattaggggtcactttagtaaaatctagatcgtattcactatataaaggttcaaatcgaaagatacctttatttatgctcaatcttactgttgaatgatactagtagatggaaatattttttaaaaaattcaagtgggggattgttggaa

SEQ ID NO: 366965 - DNA, 427 bp, Cannabis indica
atcttcctccgagaatacaatcggaagttcttcagtcttagctttcttagaaggttccggagcaaaagcagactcttcgttgttcacttcctttacatatctcttttgggcattgttactttcccctgtaatatgttgccctcccgagataaccagaatatcctctccttctagaggaggaggttgtaatccttggttgactggattattaggcggatttggcttgtttttcccattgccttatcttttcacatatttttagaagtgacatcacgcgattagactctctatctcatctttcagctgactacactccttttttgtatggccaatgtccttgtgatacttacaaaatttggttgcatctctcttatgtctcgcatgcctcatgggctcacgttacgaaatgcgaccctctgctcatatg

SEQ ID NO: 366966 - DNA, 793 bp, Cannabis indica
ttatatcttagtgggaaatattttagagaaaataaaatatcgggattaagcggggttatggaatttgacaattttacctatagctttagaaataccctaattttaagtcaaagggcaatttagtcatttggttaagtggagtattgggtggctgcctataggagtgacacctagcattaatttatttcagctaaggttaaagtttaaccttcattttcatttatagaaaaaaaaaaataaaggaaaagctaaaaatcaaaatcgagaactctttctctctttcggctgggacaaaatcagaggagatcacctcctttcaactcatttttcaggaatttctgtaagcattcaaaggttcttgaacccaaggtcagccttagtagcacccttctttcatttttaagtttttacatggtttgagtttatgatattgagaattagtggctgttagggttaggttgagttgcagttcgaatctttaggttcatttgagttggtttaagcttcttgtagcttgttttgatgtttgatttaggttttgtgcaagtttgagcataaaaaccttaaccttgatctctaatggcatgtttttattcagtgggcttttctgtggtttattggctggaatatgttgtggataccctaattaggtactttggatggtttggttgcattggtcgaaaattgagtaagaaatggaaagtttggggtgaacaggtgcaaactagctagcctgttttaccagacctctaaaaccggctagccggttttggcagggtccccaaacacttca

SEQ ID NO: 366967 - DNA, 587 bp, Cannabis indica
acaatatatatggtataagtcaacgggtgaagaatgtatatgttttgcttaaagttggtaataatttgaatttattttgtaagaaccattattttttgtagtgataaattatgtccagtggcattccagttgcgtctgggtcttgtagtgttttgtctggagttcgtactgttagtgttagtccacgtcagcaaagatattttgggttttaattgttcagattgtaacagctgtctttctcggatttcttggtttagctgggtataaatacaatttctgggtattttgttgataaaccttttttatcggagattagggattacgtttctttcttcttgtttcttctttatgttccatggcaggtgatctttgagcttggaggtattactccaaagttgcagatcagagcttgaagatgttaagttcagattgaagggatttcagtatcattttcatcactagatctgaagggagttcagattgaagaagtgttgaagagagctcatcattcacacaagggggatcttgtgtctccaatcaagggtcttggttggtatgggcatagattcactgtattttgtaaaaga

SEQ ID NO: 366968 - DNA, 693 bp, Cannabis indica
aagagagtcatagctagaaattacaaggttcaagcctgtaatatgcttggtattttctcaagaatcaatccaactaaaaagagagtaagtcattacccgctaatcaaggaggtcaaacctctataaatctatgtgttacttttatcatttgttattatttggtgattatcagtaacaaataacgcttcgctgtcagttgaccaaattttgagtcaacattttagtgctttcattgagagctttatttgattttcatccatctcattctgattaatcaccattgttctaaccagaagaaccactttctccacttccttgggtattcctcaagatcccatgacggtcgatctcgatgttcgtgttcctcccacaacggaaggtccaactaatctgactaatattgtgaatctggtcaatcctacaatccttgtgaaccttacaaattctgccaatacctttaatcttactaattctgctaacccagtgaatcctaatgatcaacccttgccgcctaggacaaatccaccagcagcgcctcgaatagaaaaccctatatggaacaacctccagagaacaaaactgggactgctccatggtactaagtaggagagacagggccaagaattggtgaaccatctattagtgagcctcacttggaccttggggattgtgttgagctggttaatatcagag

SEQ ID NO: 366969 - DNA, 1091 bp, Cannabis indica
  modified_base (43)..(43): a, c, t, g, unknown or other
tcagacaagctacatacaaaaggttctagaaacttttaaaatnagtaactctaaggtagtgagtactccgcttgcacaacatttcaaactgagtattactcagatactagaagatgaaattacgaagttagttatatcaagagttccataagccagtacagttggctctgtgatgtcatggtttgtacaagactgaccatagcactaagcacggtgattagattcatgggaaaattaatggttatgtggactctgattatgcagggtgcattgatacttagaagtctttgacgtgatatgtgtttactatgtttggaacaactattaattagaaagcggacatctagaaggttgtggtgctatcgacaaaaaaaattgaatatatggtcttgacaagaagcgatcaaggaagcactttggttaactgggttgatagaggagctgaagctaaccaaaaggttattattatttattgtaataatcagagtgcaattcaattaaccaagaattatgtgcaccatgaatgtactaagcacattgatatcaagcttcatttcatacgagaggttgtgaagaaataagttgtgaagattgccaaagttttgactgaagacaatccttcagatatgataaccaagatagtgccaagtagtaagtttgagcattgcctaaagctgatcggagttagctaagcccggaggggcagaggggacaacaacatttaaacattaatttatcaagcgactttaacttgaaaccaaggtggagatttgttgattatggttgcaaaatttgttgtctgggagtggaagttgtgaatctagagagtagatacatgaagcttagtgtggatctagaaattcttgtgcatgaggtcttgtagagtctagaaggttcttcttcataagcttgtaccgtgtatacattgtctctcttggttagcttgttatgaatccaaaggtacactcctggatagctattgctagtctttaaggttcattcaggaaggaagccatgtacgtatctggaaggattatgtgtttacaatgctcctagattgctcgtattgaaagcacgtattttaagatgac

SEQ ID NO: 366970 - DNA, 1188 bp, Cannabis indica
gatctctatctcagatgtagcaatccaggtcgcccaagtgttcgtcctggtcgagagtccgaaggcacgcttcagtaacccttgacggagggcttacccacctggcgcccaaggcaccttgccttctatgaggaaccgcaacagcaagttcctcactgacgtagtccacgccctgaaccaggacgtctccgtcagcatcgactggctccccagcctcgttgtactccccatagtttgggggatcaaccttagcctcttcctccgcctcggaggaactgcaaggacgtacatcgtcctgctcctcgtacattcgtgttctttgatttgttagttaagcctacttttaggtcagggtgatacgtacattttgggaacacggtagtgcaattgagtgggagcgctagcataaacatggaatctatagcttctatctggcgaatagtaagcaaaggatgatctccttcgagcttgaccaaacgaacataaatggtggagtactcatttcacataagctgaaatatcatttatacggggtcaagtgttttaaggaataaatacattgtagggtgtaacggtaatttaatccctttacagtgtagatcattcatatagaggatcattgatcacattaggattataacaatggataactaatgatgtgtctatatggtggaacatatagagcattctatatactgagagtgcaattctaagttctatgcgtggattcaacgaagaattaataagttagtgaattttagtgctaaattcttgatctacttattggaagctcggttatatagacccatggtccccccactagttgagataatattgcttgtaagactcatgtaattggttttgattaatcaattataattctcaaattagactatgtctatttgtgaatttttcactaagtaagggcgaaattgtaaagaaagagtttataggggcatatttgttaattatgatactttgtatggttcaattaataaatatgataaatgacaatattatttaataattatttatagttattaaatagttagaattggcatttaaatggttgaattagaaaattggcgtttttgagaaaatcagatgcagaaaaggtaaaactgcaaaattgcaaaaagtgaggcccaaatccactagtatagggccggccacttttgtaggaaattt

SEQ ID NO: 366971 - DNA, 662 bp, Cannabis indica
atctactattgatcatcgtgtgaatgaattagttctttatagtaaacgtcaagttagttaaagacaccttcattcacatcgttctttgtcatatataatctatattatatacattacattcactttgatgtcatactacatacataatctgaactgagattaattgcaccgaagaacaggcatcaatgaatcgtactagcaaccattgattaaagattcacacactttaatatggggctggatattctatgcatagataagtggtcttagttctctgtacagctacaagtcactgcctcatatatgaataaggaattttctaatatttatatataaattactcaacaataaatattaataatttaatattccagcatatactaaaatgttcaactctttattataattagaaatgtttttacaaacttttcaaggcataaaccctaacaccgttagatgaacgaccaacaacggtcaccaccatacttgaaaaggaaacccaggtacatcattgtagtggggggggggggttgggtgcatgtccgttatgaacatgaaccacaagtttttgtcttttaaacagaaaaggatgatccattgatttacaaagaagcaatggatgaccctgactcagacaagtggaacaatgccatggatcaaga

SEQ ID NO: 366972 - DNA, 759 bp, Cannabis indica
gtgtaatttaatatctatatattttaatctaataataaatattagtagaaaaaattattaactatttataagacacctctcgtacttaataataatacacaacaaattttatcattattatatttgtttgctgaacaaatatataactttacaaaaaatgttggtgtcatacaatcattattacaagtattgaactttacatagtttaatttaatatttattatgataaattattaattattttgtggttattttcgacacaactaattgctaaaatcataccgtaataaaattgattatatatatttttattagagtaatttgtggtataaatatttaagtttaatttttagttgtaaataaatactaaactttattttttgtacaataatctaagttatatttttagaactttgtaggtacataaccttattatccacgtgtcatttttttattggtatatttaaattattttttttaaaaaaaataaaaatttaaatgacttagatcaatcaggatttgacacgtggcaatttacttaatacttaggtacctacaacagttctagaattataacttaggtattattaccgtaaaaaattaaacttagatatttatttacaattgagagttaaatttaagtatttatgctgcaaattactcaaaattttagttgttgggttttgtgccctaaataaaactcatttcaatgtaatcagatttacttattaataaagatcagaaataacattttatgtt

SEQ ID NO: 366973 - DNA, 938 bp, Cannabis indica
attttgccgctcccacactaaaaaggttaaaaagcagttaagggtattttaggaaaactctaaattcccgactaatcccgacattcccaatgtctaaataaaccgtcccactatgctaaattactaagttgtgattctactgagccatacaccgcgttccatgttgtcaggcaccgaaaatgaaaaattacgaaatttcactatatgacataaaaatgcattctgaattcaaatatgacaacacaaataattatttaaatatctataaataatttcataattaaatcttaatcaacttctaatttccaaattaaactaagcggtctttataggtgggccaacaaatatctttcctatgctggtcgtgttcaattaatccataatacttttataggattaagaaactattggatgagagttttcttgttgccttaaagtgtcattaaggagattgagaaactttgtcgcggtttcctttggggtttaaaagacgctctagagttcacttgataagttgggaaagggtgtgcctccctaaagcttatggtggtcttgggttcaaggatggttctaaatggaataaagcttccttagctagattcatttgggatttgatgaacaaaaaagatttattgtgggttaagtggattaactcgatttatcttaaggggagtgatttctggtcctatagaatgagcatggatactagttggtattggagaaagctttgtaggttacgaacaaccttcaacaaagctgatgttgtggcagcgggtggagaaaagttcaaaaccagcagattttattgcagctcgctgaaacagactttatttcctgcagcaggggctatttggtatggtttgaacatgcctaaacatactttccaactttggcaagcaacccaagacaagttgttaacaagggatcatcttagcaag

SEQ ID NO: 366974 - DNA, 571 bp, Cannabis indica
actggaactaggacttggacttggaactagaactgaaaatggacgtagatccagaaccgtaaccggaccaggacctcgactccaaatcaggcctagacccgaattgggagccggacccggatcccaacccaaacgtggactggggacccgaacccgaacctgaactaagacccaaacatggaaccagactaaggacacagaactagggtcgggacctagaaccgcaacccagtctcgatcccgaacccaaactcagaaattggacctgggacctgaaccgaaatagaaccgagactcgtgaaagtgatccagatcttgactcgggattcaggtaacggggcctggaacagaacagtagtcgatgtctagatctttgactgagactaggaccagaacccaaatgaagaaccaaacccgaacccagaccaagacctgggagccaaaattggaacttgaataaaaatcgcccaaccaggaccctaaaacaagactaggaccgtgaccaagacccggacccagacctagaaccgaacacagacctagcttcagacccaaactgagactggaactc

SEQ ID NO: 366975 - DNA, 597 bp, Cannabis indica
aaaagaaccttagatgcctcggttcccccttaaaagtgaatatgggaaatcaaaaataatcaagtgcagtcgtcaaccgtggtgagagaaaatcggatttcaaaatattaattgtcaaagcattaattagccaaaaactgaagggacgccctttcagcctcacatcgagcctcaaacaaacgcgctcgacacgtgtccccatccaaaggcagaagcagctcagatgaagtctacacgcaacttggaagtctcgtacagacttgggggcgaatgttatctgaatttttgtactatgatgtggcatcacatgatggtgacacgtggaatcaacttcgagtatgtgctcggagaggacagtccgaacaggatgcctcataggcatgcctggagcaaagcgatcaacaatccgcatagagcaaccaacacttagtgaattcagatttcgcatcgtgagtcatcaaagaaatccctataacttggggatcagactgtagagatatggcaagctgtccaaatcccacgatctgtgtattctgcatttatcatgcaatctttatgcttatatccattggaacgagaagggaaatacttcctctc

SEQ ID NO: 366976 - DNA, 746 bp, Cannabis indica
ggtgtcggtggtacaacacttaatagtattcaaggtgcggtccataccctacctacactagtacgaaggtatactgagtgcatgtggtacatggtacatggtcgtatctgttgacctcacttttagccagcaacaatgagtcttatttagtaagcgataagtgatttatagtaattgatatatagtaaagcttaataaagacacaagaattttatagaggttcagcccggatctgtatggtaatagcctaatcctcgttatttgtattgacttaagaacaaggagaaaggttccttttcttatagctctgacaacagtatctctgaacatgaattcttagaaaactctagggtaaagtctcgactaaactatctatgactcaactgttctcttgcccagtgaacatgcatcactttttatagggctttaaacgtgtagagaaagtgtttcccttctcgttacaatgtgtataagcaaaaagatcatgtgataattgctgaatacactgatcgtgggattatgggataaatgcggaatacactgatcgtgggatcgttgatacggcatatctctgtaattctgacccctaagttatagggatgtcgttgatgactcatagtgcaaaagctaaattcgccaagtgttgatcattatgtgcggatcactgattatcctgcgcagattgctgacgaggcatgttgctcagattgggtttctccgaacagatactcacagttgcttccacg

SEQ ID NO: 366977 - DNA, 507 bp, Cannabis indica
aatagtaagagactcattagcagtcgacacccgattatgcatacaagtcgtgaccctaccctaatcaattttcgaagctatgaacaactctctaaaataatcttccttttttattttcattttaaattatattacaatattttttttattattattattgttattgttctaatttttataggtacctaacaggttcccaaactcaatggggattctgttacactacaacaattttggttattaggggcggacctattaccggcggggaaggtccgcccctaataataaggttattaccggcggatgtgggggcccgccggtattaatcaaaattttcagatttttatttttgtaaaataaataaaataataattagcggcgggcatttggtaataccggcggacagcccgccgctaatttgaagtgatatgtaaagtgcgggaaaacgaagcagggagaattcaaaatttattagcggcggaccaataccggcggggtccaccgcta

SEQ ID NO: 366978 - DNA, 832 bp, Cannabis indica
aaatcaagccaaataaatgaggaattttacacagctatgaatagcccgccttttattgggctgagatgagcgcataattaaagatatacggtaagttgtatctcatagggatgcctcgccaaggagagagccaagatcactttgatagcaagcagctgcttgtgattttagcttctcgaggataatattgtcttaacactgatggttatactctctagggtcgagaagatcttccgtgcatgcaaaacatcttttagcaagataaatgcctcgctgtctgttatcttggctcgctatactatctatactcagtttgtatatcacataatatacgctaagtatttttagtgtcgtcgctttctctttcacgcagcgaggttgaggcctcgtcatgagcgtatgcacacacatggtttctcgtcaatacataaattagcagatcgtatgtctctatctcaaagagggctattcagccaattgagttataaacctaccatgcgaattaaactttccaatgagttgttccatgctaagcgtacttgtcgtttgtgtgtttgagttcttcccagcttgacacgtgtcctcctctgatgtgcttaccaaacttaaggtataacaatcgccccttaaaaagttctttttaattaagaagagctttttaatgattaccaagggtatttttgtcacactcctctatttttgaaaagacgcattccctctgattttggtggttgtgtggttttgaggtacatcagaattaaatgaccatcttttcaacttccacttcgaaccacgtccattggatcaaatcttttttgaaatcattatcgtg

SEQ ID NO: 366979 - DNA, 909 bp, Cannabis indica
ggagcttgcgttggccctccaaagtaaaactacgtaatttaattatctattgattgacgtttatatatatttataaatatatatgaaatattactaataaagtcaatcgtataaacaagtaatgaataataatactgataatggtatacgtgtgcatgatatgatatgtatgcatacctatattatgtttcatttattttcaatgaaatagaatattaatctagtctctattttctcagtgatactatcacaatcactttactaatttcttttagcaaattggaatgctcaaataccaaaaaggaatttctttttatcttttttaatcgaactatacacttagaaacttaaactctaaatttgatgtgtttctcgtgtaatttaactttaaagttcagattaaaactaataaatttattaatttatgtattcattaaaaaactacttttatagtgataactttttagttacaacataaatttttgtgactaaatttgacttttagtcacaataaaaaattacttatgactaaaacataatatttaaaggtgttcattggatcatatctagtatttttaggcctatccagatccaatccaattaatattgaatgttagattttaccatccgatccaatccaattaattttagtcatcctatcgatccaatatccattgaatgttgaattggatcacttttatccattagatgtattttaaatatatgcattggtttaatttgggcttatctcatattttagaactagtatttttttaatctgatcagatccatctaatattttaggttcagtatgtaatggattagattggatccatccaatccaagaaaaaatagtaaaattttaatgttaattttcatatttatatatatgttacgtataacaatata

SEQ ID NO: 366980 - DNA, 774 bp, Cannabis indica
gattgtggcacaggctcacctgattaggtgatgcaattatatgatatattggtgccagattgtggcacgggctcacctgattaggtgatgcaattatatgatatatgggtgcaggtttttgggcataggctcacctgattaggtgatgcagttatgcgacatatgggtgccaggctatggcatgggcttgcctgattaggcgatacaatacaagatcatcagattaaagcatcgacttgcctaattaggcaacatgatgtcatgaagatggttgctttatgaggtaacatatatattatttatatgattaaatgaatatgaattccattattggtataatggttttgtattaccaaatatctgtatactaatgtttattcgtggcagatgccagtagtgatttggatttcatcttatgaacaaagtgtgatggtttgattcttattgtgtataaatgacaatattcgaataataagctatatgattgttattattacttttcttgctgagtccttgtgactcacgggtgctatgtggtgcaggtaaaggcaaagaaaagctagatcaaccatgaggtggcagtcttctccagcaatgtacatattgacctcgccggcctgcgtgccgagttgccaggagttgttttagactggctgtatctgctgtgtattttgattttatgtttaaatggttgtcgtatatatttctttagcaaaactttttacaacagggattcccggaacacactttttatgccgttataatgtccatttt

SEQ ID NO: 366981 - DNA, 720 bp, Cannabis indica
cgccgagcagttcttccactccagttgaccggcacatagaattcggaattaaggtaagattattaatatcatgcatatgttattacatgtttagcgtacatgtgttattgcctgttagattacattgatagcaataatagtatacatagagttgtacagattatagacaaatgtatgttggctagaatactgatcgatgctgtcacatcaatatggctagagtatgactaacatattgagtataggctgacattatggttgatggtattgtcttatgaacgttttagactcagtaccgtgtgggacacggggattagggttatgatcgggtgtatgggctccaggttataacctgggttatttgtatgtttatattatgcttttcttattgagtctgttgagtcacagaactatgtttatgtgtgtaggtaagggcaaggccaaagctgaggaattgtgaggacgagcagatggaggttgtacatgtcggggcagttaggtctggagcgtacgatcctcgggacatcaggacttttgttattagtcgctgggcaacaaatattttgtaaatgaatagcgaacttttgtaaagtattttttatacgagattctgaaatattttgtatgtaatattataagtttttaattaaataagaaaattttaattaatcacgattttcaataacctcattgattagcaacgagctgcacattatattt

SEQ ID NO: 366982 - DNA, 1049 bp, Cannabis indica
ctcttccagtgtacatcttccagtcgattttaaatttgtggggcaacaacaggagattgatctctggagagatgggagtttttcgtgctcggtctagctcaagatcattgtttctttatccagccatgtcgtgaaacatatttttcaattcgtctagctaagcatgtacggctgggctaacctgctcgacattctagtcaatttgaattacatcaacatctttctgagcgggaatttgagtacgggttctgggctgcgagattgtcataacattctgatcgtctactcccctcctactgtttagataattccttaggtcatgggtcgctcccaacctttcaaatacagaagtgcttggctgcctcatcgattgattcacttggttgacgggtggaatggcaccatttatctggttggaaccatcaggtatgacttctcctgatgaattactagataaggtctccccgcctaccgcttggccaacgagttgaactcttgaccggggattaggcagctgaccatttgcagtctgagaagtattcatcgttggatcttcgtccgtctcacccaggcaaatgacgtttggcggctgctgacctgcagtttggtaggcttttcatatcagcacggtagcctaccgactacgattttcaatctctgcatggtgagcccttaatgcctccatctctctatcccgccattcggtgaacatatgcctctgttcgtcgaacacgagatttactgcagcgcgtagttcatcttgatcatgatgtagggtattgttatgaccctgcatgagtccaagagcgtcacggagattttgtaattcagtggcatctctcatggtcgtctgggcgttggttccaggcgaaacagttgtgttatgagtgccctggttgggtacggaactgttattcccagtctcttgcacaccaagcgcaatttcatatataggaactgttacaccattccccacgtttgctggctgtacggcagaacccttgtgtttcttgggttttgcaatgcaagatccaccgtctgtgaatttg

SEQ ID NO: 366983 - DNA, 533 bp, Cannabis indica
attcatgagtcatactcatgtaatgagatttactgcaagtggtgtaatgctcattacaatgtaaaattacaatgtaaaagttaaaaggcccaaccaaacatttgtaatctcctttccattccattattaattacaccaaagcaaacataggcttagggggcacatgaacctattcaaattttattaagttatattttttatgcataatgtttgaaatattttttaatttttctttgtaaatttatttcttaatatattttttttcattataaaatttaggctttttatttttaatttcacatatttttcattttatctctataaattgtatattttcatttatatccttaaatatttatatttttattcctataaatttgtaatttcttatacaacaaaattaatacttttcattaatatcctattttttttttttaattaaaaacctccactaacatttatttacgtgaatatatcaagcatctgatgttatattattttatataatataatatttagattaaataattaag

SEQ ID NO: 366984 - DNA, 862 bp, Cannabis indica
aaatacccctttagtgtgatttatgtgattttggtgtggaggggcaaaatggtctttttgccccaatgatattttgtcttctagtgactttattaattgaattaaaataaatgttaattgtttatttttggctgaaatgatattagtttatgttagatagcttttagttcatttttatcaaaaaattacaagttagaagaaaatagaaaaaaattggaaaactattctctcttttcctctctatttcggctgggtgtgtgaatgcatgaagctggatttttttccttgattttcaagctagcttcaacctaatttctagtaatctcttgttgtggtatgcctctctagctttttctcctttgttttcttgaaattttaatgaaaaaaatgagtaatgcatgatgattttggatgatgttgctgctgttaattgttgttgttttcataggttaaatcttgttatttttaagtagtttaaaggtagtgaatgcatgttggttgtttggattcaagctttgaagttttagctctagaatatgaattttgaagatatatgttgaatctgtaattacttgctgtagtgggttgttttcattttcagaggcttagttatgcatgattatgtaggtttaatctagtttgattgcatgttagttgattctaaccaagtttgagttttggaactcaaagcttggtctctaatggtgttttgtgaatctgtgagttctgggtagtcttgttgcctttgaatggttatttgggtcatatagaacaggtctggaagatcttgtgtgatttgggttggaattgatcgagttatgaatttttgaaatttttctgcgaggaaccggaattccggttg

SEQ ID NO: 366985 - DNA, 655 bp, Cannabis indica
ggtctactcctggaggcatgggcatgccacttaaatccaccagggtgctcatgtcagttttgccagctgtagtggccaaacttgcagcgcctgttgtggtgatgggattcaccacatctgcagtattcatgggaatcccaattgtcactgaaacttgagtacctggatctgagatctatgggtcttgaggaagacccgaagatgcagatggtaggacatggaccttcttgtgtttaccatggcgtttgatcagatcacaatatccacgctctcaatgaaagtaccgaattgttgacctcaaaaagtgatcaaccgacagtaggttcatacagatttgatgctttccacgtgtttccacaaataaagatgaaaaataatagacaataagatttgttatagaggttcggcccccttgtgatagcaggtaatgacccactctccttttagttgtatttatactgagagaattactatccagatcgctataggtgggatctgctatagtacccttaggattacaagctatgaatcaatattggcaaaactcaactgctgaactacagtagggtaggcatgagagagagagagagagagagagagagagagagagagagagagagagaggaggagagagagagagaggagagagagagta

SEQ ID NO: 366986 - DNA, 547 bp, Cannabis indica
aacttaggagatttcctaggtcggtcccgtatgggttctggacttccggaacccgttctcgacctccggaacccgttcccttggacccttcggcctatatttcttccagctggttctggccctcggacagctatctcggggatgatgcagccagcgttaagattcggaactttgctagggccgaattagagagtcagggtaggactagcttgattgctttatttgagtgtttactgttttcacagatattctaacacttgactcttttcttttgttgcagcagctaactccatggatgccattttgcccgaacttgccggagctaacacttctgacgctccccttcctttagcttcttcccaagtggacactcccttgaaagcttcttccagttcccctcaagacactattgacttagtggatgaggaggaggcgcttcctgaggaagctaaagaaggtcaagaagagcattgggctctccctgaggaagttgaagaaagtgaagaagagcaagaagttgctctgattcgcaagcgcaagggcaaga

SEQ ID NO: 366987 - DNA, 926 bp, Cannabis indica
acgactcgctcaaaccctcaaacccacgactcggtcaaaccctaaaactcttcgatcgcttacagctacccttgatgaggaagacgacgacgaggagatgacgacaaggacgtctcttgcccaactcctcctcctcctccgacggtcctcccacggcgacaatgacaatgtaataatcacattatctaatttgaaatcggtcataaacataatatatgtgttttgttatatgttttgattttatggttatttttttttttttggaatgtccgatttatagttgttatgttaccaaaataggatactatacttataattaagtgatttataattaatttacactttaattttacagtttggaatgaaaaaaatatactatgtggagacgatattactgtcactacaacatcaagggttattgaaattgacatgatatttgtactagttagctttagacttataattttaggcaatacttattttgtgtacggtttttattagtaaggatttaatatattttgtaatgtatacttcaacttgttataatataattagaatatcttttgtacataattttgttatataattaaaatgatttttattttaaataaaatatttattcttataattagtttataattgtttcaaaaaaaaaaaattaatcactaaataaaaaattaatatatatattcaaatttaaataataactgaagatctaattggagcataatttatataataattgaactttttctcttcggttttttatataataactgaagagaaaagtgagttttgtcttcggtttttacataataaccgaagacaaaggctccccttacgtcttcggtattttagaacatacgtcatcgcctcaaataacttcggtagcaaatttttataaaaaccgaagacaaactgactta

SEQ ID NO: 366988 - DNA, 645 bp, Cannabis indica
aagtaaaacagcgaccaggcgagccactctgggcacacatcagcagattcatgacggaagcgaccaaggtgtcacgggtaaccgagaatggaaagttatccgcgatactgggggcattgaggtccttggcgaactgtagaaggatataaggaaaaacggaccggtcgactcaatgagtgattttcttaaccgggccgaaggtttcatcaagctcgaagaagccattcagcaagcagaaggtgagaaaaagccaagcaaaacgaaggttccttctacaggaacgtccgcccaacttccccactattccagcaattcaagtggcaagcgtgcaggcaacaaccacaagtaaggaaacgggaagaagggaaaggtcactgaaaaacccggacagactccctgtgatcacaccaaacacacttcattcactatattaactgaagatatagaaagtgtgtatatagcaactcagtcgttaattccgtacaagaagcccaggcccatgaaaaaagataccagcaaaagggacatgaaaaaattttatcggttccatggagactacggccacgacaccaacgaatgtcacaacttgaagcaggaaatagaacttctgatcagaaaaacaacccgcacttacagaagtacgtc

SEQ ID NO: 366989 - DNA, 508 bp, Cannabis indica
ctgtcaagccatcactcactcaatcacttccatttctcttttttgttttttcttccattttcttattttccctcatttcagcaaagtattaggtttctctctcctaaggtttcccatttcgtttaagtgttaaagcgtttatggtgcgtactaggagttcaatgtctccatcaccggaggtgtttggttcgaagaagaaggtggaaaaaatagaggaagttgcaaaaaaaaaaatggttggatctggttcgaaggttgttgagtctgataaggagaagaaaaataagaatgtgtccatttcgaagaggagtggtgtttctgaggcttcctttgacgatcggcgctctaagaagttaaagagtgttgttgaagattttgatgattttgattcagaatgtgatgaagcccctattatgttgccaaaaaaaaaattgaagattagtatactggttgtttatactgaatcgtgtattttttttatttgattcttgttaatgtggatgcacat

SEQ ID NO: 366990 - DNA, 502 bp, Cannabis indica
ataaaacccaacaatatatattttcatgtttagcgtagatattgttattgcctgttagagtacattgatagcggtatcagtatacatagagttgtactagatactgataaatgtatgtttggcttaaataatgatcgatgttatcacatcaatatggctagagtatgactagcatattgagtataggctgatattatagtcgatagtattgttgtatgaatgttctagactcggtaccgtgtggaacacagggatagggttatgattgggtgtatgggcgcctaattataatcaggattattattatgttattacttatgcttttcttactgagtctgttgactaacagttgctatttccatgtgtaggtaaaggcaaggctaaggctgaggagccgtgagagcgagcagatggagattatgcatgttgggacggttaggcctgaagcgtacgatctttgggacataagggcttattttgtatagtcgctaggcgacagact

SEQ ID NO: 366991 - DNA, 503 bp, Cannabis indica
ggtaagaacaatcataatcactaataccgtgttttttaaggaataaaatattgattaattactaatataaaattcttcataatttaaattcaactaagtaaaaaatcctaaactaacatcctcattctcacattctcacgtgtccctctctcttccactctctatacatctattactatagcctttacaaatatatatatatatatttattttattatcaagcttatacaaaatatatatattcctattataaatatcaatagtcttattcatttaataaacttatatgtataaaatagtatactaattttatctatatccctattacatgtataacaaatattatcacttaatcatacaactattcactaataacttattccctaatataattaatattaattaatacttaatctaattaactatataattgtacttaacaaataccaataatattcatattttatttaatgcaacaataaaatatcaaaacacacaataat

SEQ ID NO: 366992 - DNA, 718 bp, Cannabis indica
atgtgatgtggacactaatacgccccctcaaggtgagcagatattgatgatgctcatcttgctcaaaaggaatttgtgttgagtaggggacaatgctttggtcattatgtctgcaacattatgccgagaaggaacatgaatgagcttgagccggttgttagtgacctagtctcgaacaatatggcagtcgatctcgatatgtttggtgcgctcatggaagagtacattctcggatatgtggagggcagcttggttgacacaatatattgttgcaggttgtggatgtgagatgccaaagtctttgaggatgttgaagagccataggatttcacatgtggtgttagctagggagcggtattcagcctctcagaagatttggacatcgttgcttgcttcttcgatttccaagatatgagagagttgccaaggaagatacaataccctgtgatagagcgccttgtgccagggcaagtgccccaataagcatcggtgaaagcatgaagttgaaagttgttggtattgctggaactgaaaagtaggccttgaccaggtgtgcctttaaggtattggagaattcttgtaaagaccgcttagtttaatttggaaattagcagttaatcatgattaattatgaaaactatttatagctatttaaataatttattatgctgttattattgaattcagagatgcatttttatgtcatgtagtagtttgc

SEQ ID NO: 366993 - DNA, 557 bp, Cannabis indica
ttattcatggccaagaaacaacaatcaaataaaatgaaactcacttgaatgaacaaaggcaaaaatgttcaagtaagcttaaaaattaatcatacccaacatagaagttcatagccattcaagcctcaaaagtctagctcatattcaaatcaaaaactaaaatccaatctagctaaaaatgtatcttccatagctgctgcccaatttttcaatttaacaaagtttttaataactaaatacaaacaacaagaaaagataaagagaaggaaaactattaagagagagtaaaagaaaaatcaaacactcaagcttggtcccccttttcttcctcctctgttgtactttttcagcacttaattcccttccaaaaattgtagttcctacgtgatagagaagatgatggtgtacttagcttttttcttcttttagttgttgggtccctagggtacaaaaaatcacaccctaaaattagaagcctaatcctttttgcattttggcccactaggtttagtcctccctttacaaagcatccatctggtctcatttttagtgacaaa

SEQ ID NO: 366994 - DNA, 874 bp, Cannabis indica
gattcacagttaaaaaaggaggtgattctagaattgttattagacattgtattagatatttaaagttattaaattaattaagtgggataatataatttctcaactttcagcccaaaagctaaaatattacaatacgttctttgaaattgcgtagcaggagagacaatcatatttctcattttaaacccctacatatgctttatagtttatactacatgcacacctaaaattaaaagaaaaaaaaagattggccgaaaactccttaataatagtatcaatcagattgagaagatttttcaaaccagcatatattcaaagatacatctcataaacatgaaagttgtaaaaaccaaataacatataattaccaattttttggtgcaaaatcattgtatatataataaacaatataaaagaaataaaaaatacacaaatttaatacacatttttcaaatgcatgtgtcaacaaataaaaaatctaaaaagttccttcaaactcttgtggaaatataaatatatgtaattttataattgtaataattcggtcattttttttttttgctaaatggaacatttcattaactaaaacaaaaacaatccaacacaacaagtctagagcatggaagtaacaaatagtgcaacctccctaagagaaggaaacgagtcacattacaggatgtcactcacgcaacaatatcatgagttgtgataaactggttacagtagttagttagtgacagttagaggttgttatgtttctgttgctcttttctagtaatttgttttctttttcaatcttgtaacaaactctgtatcagctccctataaatactagaaatttttacatgaaaaatctattttgcacaatttatta

SEQ ID NO: 366995 - DNA, 744 bp, Cannabis indica
taaatacacaaacacagatcaaagaatacacaaaaagaaaacctttttaaacatgtcaagagtgtgaagaacaaaacaacataatagtaactaaaggggtgagaacgagaaaacagagctgggtggtcagggagtatataatataatttaaatataaacactgccactgaaatttagaatacaaataccatataattgatgagaatacaaaccaaagcatattactgaaacaatattatatatctcaaaaacccattttaaattttctcccagaagtttgggagaagcaaaaaacagctttatacagatatctaaaaataaatcgaagaaaaaacttgtaggatccaaatattatttattcaagtgtgtaaaaacccaatcaaacagatcagattagttacatctattattcttgttagctttctgttagtctttgtaccctgtaaatttctttgcctataaattaagtcctaatctctgagctttggaacttttgtaaagcatccgagatacaagaacctggtgtaccacaccatctgttgaaacataaagaatctaacagtaactagcttacttaagaaaaattgaatcaacagagaagattagcatagtcaagaagtcctcaccctcggctcctcttgattgtccgctatacaatccagctgctgtccaatacttggtaaaattcttcttaactcttttcaaaagctctaaaatgtagtcacccttattgttatacttgta

SEQ ID NO: 366996 - DNA, 509 bp, Cannabis indica
attttaaaaaatacagaatctattttgtcatttaacaaaacagagagtctaatcggtaacaagatctaaaatggtatttaccctataatgtaccacgtgtataagaatgtttgcataagcaattcatgttaatagttaatggtggtaaataaatgataccttaaatttgttaatagtttagtagaaagttttactaccaaaatttgaacttagagggttaaacatatgtaaaatgataattaagacttaggagggtataacagcaaaaaattcttatatataagaaatgacataaatcatctaaaatagtaatgttttataattacacaatatatttttttttatttttatttttatttttgtcaaataactctaatttaattagataactattgctattttattgaattcaatctcatgcttcattttattgttcttttagtgggtggaatttcgaccttattatatgttatgttggttttgtaagaaatgttacatttatccaggtc

SEQ ID NO: 366997 - DNA, 532 bp, Cannabis indica
gactatatgttgttgattttttgctaataactgatgtcgtagtccgttatgccgtcggttatctatttcgagccacagcatcagaaacttcccttttcttcctatcaaaaagtttagacgcctttgcaatgaacctgcaaattcataaataaagttaacgaatatttattttgtctaactaatgaaataacatttttttaagtactagcatacccagcagccttgacacgtccagaatgctctggtgttccgagagcctacgttagaatgtcatcttggccatggaccttaacttgtccatgactaacttgctcttccagttgagcctagtgcatatatggatatggatatggattgccaccctcaatatcatctacccccacttttctaatagatatgaataatcagttaaatgtttgccataccaataccaagtataacttctattgaaacctcctaaatacacatgatttttaatcatcgtaattttttattttgatctattacagcaatctacacatggataatgaat

SEQ ID NO: 366998 - DNA, 578 bp, Cannabis indica
taaataaaaaattaaaagatgagagaattaaaataaaaaaaataatgtaattggagtaattataaaatgtcatgtcaccgtcctatttctcaactttatatatatatatatatattttatttttcgttagatttaaatcgctattattcacagatgaaaaataatgtatatacattatataataatactattattaatgaaaatttatttaaaaaatagaaaagaaaagagaaaaaagatatagattaatattcagttattaataatttagttattaatattcagacatttgaaaatttgattggaagaccgtagaaatgagtaaacaaagctcctagttatggtactgctacaaatggtacgaccaagcctgaggtaaacattgcctcaactttgaaatccagaaagaagaagaaatagaagaatagcaagaaacctcttaaagctgttaacacggctaataagaaaaagactgctaatccaaaggcaaagaaaaagggaaagtgcttctattgcaacgaaaaggaccactagaaaccccggtgtcctaagtttttggcaaagaaataaggtatttc

SEQ ID NO: 366999 - DNA, 789 bp, Cannabis indica
agaaattttaaattgtaacaagatattttgctaactttcaaattttgttatttttatttaaattaaattataaaattagataattgatatttatttatcattttgttttattggatatttaatttattttaaaataacattaaatttgaaaagttgtttgcatcttttgaatagatattaaggtttgttgaaaacctaattttttaaatttataggtttaattttgacattaattattcaatttaatttgaatattttcgaaaataatatttcattatttaaaatttttgaaaattaattaattatttaattaatttaaattagataaatcttatatccaactatccaatttgttgcatgtgtgtgttttatattgtttattattaaaacaagttctataaaacttgttattgtttgatctaaattgcaatggttaacttgttgatagatccaatgatctgattttaaccaatggttcaatagtcaataggttaaataaataatttgtaacaggtaaattttgcattcttctttcatctgtgtataaacctagtaacatgataggatccatccaaatcagtgtttcggtgtgagcctatatgtttgaattgggcttagatgcatatagggcgcccatttaatttttgtaattaaaatggactagtttgctaaataaaattgtcacatatgatagattttatttaggctcaattaatattgggcctattcaattaataacagttgtttaaattaaggttaaattctataaggaccgtcggacaccatcta

SEQ ID NO: 367000 - DNA, 525 bp, Cannabis indica
ataaagtatgaatgcctcacactcatattatttatgaataaaagttattagagggatttagtaacccaactcatggatggaagcgagtactcttctaaacattaaataataaaaatgaaagaataaagaagagatttacaaatcgcaagaaagacccatcactcatctcactactgctgccatcatcgaaacgttgcagtcaattttttttaaaatattttgggtttaattattttgtttatttttaaatttcttgaaatttgaatgaagctaatggtgtaaaaaaatttcaaaaattggaatatacgatttttttttaatttaaaaaaagattgtttaatttgttgggtttaattattgggtttattttttaaaatttgaatgaagcctaatcgtgttaaaaaaatttcaaaaattgggaatatacgatttgttagagagatatgtgggtaagatgattttttttaattaaaaaaagattgtttaattttttggggttttaattattgggtttatttatttgtt

SEQ ID NO: 367001 - DNA, 506 bp, Cannabis indica
atacgcctaagttagttagggtgttacacatatactcaacatggcataacatttacacaacatatatcactagggtaataaccctaagctattaaaccgctcatgttagggtgataaccctaatcccggttactagttactcacatataacatttcccaatataagcgccaccacgcataactctacgtgataactactatcttacctgatgtccctcaatagcagagattctaaatccccaggtgctcctgaccaggtgtcggtaatcctagtcataataccgggattttacagagctagggttaacccctaattccacattcataaagtatattcatggcatttaaatacaaataataatcacatagagctcggaacgagctttccaacggtatatagaactcccaaaacggagttcggattacaaatatatgaattttcaaagtccacacatgcatgaatctgcgcagaaactcgagggcgggccgcggcatgcaaaagccat

SEQ ID NO: 367002 - DNA, 510 bp, Cannabis indica
ttttctttttcatttattctattaattatagtaggatatgcaatttctttgttaattctactatttttaatatttatcacaaagtgtcatctttttatatattttaaaaaggataaatactattttagaccctacattttgtaaaatttactaattggatcctctattttgttaaataataaaatatattttgttaaataacaaaatagatcatgtattttctacaataacacaaataggaccctaaactaattttttttatcaaaacaaagtttaataataattcgatctaaaagtgttatgacaaaactgtttacattttctgtatctgtttgtgttaggaattgttttcaagttggttatattaaaaaaaaagttgtcgaaaattaagtttaaggtcctatttttgctattttaaaaagtgcagagtctattttatcttttaacaaaatagataataattcgataacttttacaaaacacaagatctaaaatggtatttaccttttt

SEQ ID NO: 367003 - DNA, 1096 bp, Cannabis indica
attctgattcagcactggatctagatacaacattttgtttcttactcttccaagagactagattgcccccaataatacacaatatcttaaaatggatcgtctatctacattggagcctaccaaatctacattagaaaaacactgggtatgtccatgatccttgtaaattatacctcgtcctggtgctcctttcaagtaacataaaatttgctctagtgttgcctaataatgaattgttggagaagacacgaatcgactaatgacactaaccgggaatgcaatatttggacgagtgacagttagataattcaactttccaaccaatctgcgatatttctcaggatcttcaaatggttcttcatcatgtgtaagatgcacagctggattcattggagcattacaaggttttgctcccaattttcctgtcttagttaacaaatcaagtgcatacgtcctttcagacagaaaaataccttgtttactccaagtaacttcaatgcccaagaaatacttgagctcccctaaatcttttgtgttaaactgggtatgaatgaaagacttaagggatgagatgccttcagtatcatttccagtaacaacgatgtcatcaacatacaccactaacaaaatgataccagcagttgatcttttataaaatacacaatgatctgacttacttttcaacaaactaaatttctcaacaacctgactaaatttaccaaaccaagcacgagggctttttttcaatccatataaagatttgcgaagacgacaaactcgccctaactttccctgagcaacgaacccaagaggttgctcgatatacacttcttcctcaagatcttcatgaagaaaagcattttgaatatcaagctgatgcaaaggccaatgatgagtagctgtcgtggaaatgaacaatcaaacaaatgtgagtttagcaacaggagaaaaagtatcacaagagtccactccataggtttaagcataacccttagtaacaagacgggcctttaagcgagcaattgttccatcttgattgaatttaactgtaaacacccatttacaccctatggcccgttttcttgaaagtaaatta

SEQ ID NO: 367004 - DNA, 853 bp, Cannabis indica
gtattacgggtgcctcgctatctttttcaatggcatatgattattggtataattaagtatagaaatatacataaaatttaagaaaattaaattttaaaaatattagcaaaccaaccatttattttgacattactagtgtttaataaaaatgctttaatttttattattagttacttttttctaacattatttttagaggaaatggcactgtatatttactttttattttcttattttaatttttattatttttttattattttttaatttatacccaattttataagtcatattcttattatgtgccttagagagtgtaatatattatgtgagattatatttagtacattaattataaaaaagtacttatcaattaaattttttataattatgtttaattaatatctaataaaaaatactagttctaaacttatctttttttttttctttttaaagtagatcaatttaaatagtttagaagcctatcaaatttataggcatgcatatgtgtaatgtcattgccaattatacaaaaagctaagctattattaccatggaattggtttccttctgttctattcatatgatatgacttttctttttgactttttctttttgttttggatagtaattgatgatagttccaagaagttgccagtgtaaggttgttttcatatcaaatgagtacaacactagactgggttaaactcaattgtgatgtgaaagtgggtttggagagtatgtgtatcgctgttgttgctagagatcatcttggtagagtgattcgagttcatacagctcgggaggagttctcggatgctctttgtggtgaagctgcggcttgctgcttggc

SEQ ID NO: 367005 - DNA, 796 bp, Cannabis indica
aagatcttttgatctgataggggtggaagaagttaagaagtaatatatgctgttcaacgatcttttatttctattgaactctagactatattcataactccacatgatctgtataacacttaggggtggataaagctattgacatatgtagttcatttggaactctagactatactcaatacaccacagtatctctataacacacatattttgattagacatggatgtaatataatgaacaaattagaaaattagattcttgatcctatatttttttccaattattgttgtagtagaaattgataccaataaagttcttggacatagtatcacagtaccttatttgagtgggagaattttaaaattctaagcccatctttatttggatgacaacacttgtgatagataactatgttatgctcatgatacgaactttagaattcaactgtgaaagtaaatctaaccattcatatggatagaaataacttatcagaattttgaggataagataggagaattttgcaaagtctatgttaatgacttaggcaaaatacctaatcctcaataaatttgttttatggtatctttaatgattacttaatcttaagcaagtatttaacttttgtgttaatactagattgttatgttgatgatctagtctagaaggaacttatagtttcagacaagataatatctcacaacaagatgtccctaagaaccaatagtaagaggttaaatgtacttctatgtacgaatttaactagactcctacgattgagtgggagccatctaagat

SEQ ID NO: 367006 - DNA, 543 bp, Cannabis indica
ttcgcggcggatgtataaaatattttaaactacatataaaaataatttgtgtatttcaattaataataaatacttaataaaattatatttaaattttaactttattattaaaaaatttgtgacataaatatttaaaatattaaatttattgctactaaatactgtaatttaaaaaatagtaacattaatcctcatttatggtttaatttttattgtgatgtgtgtgttaagttttaggttccaatttcattgtgtgtatttttaatgttcgagttttagtgtcttactggggttctaatatttgagtttgtgtttatgagatttattttttatttatttatttatatatagattttgagaactaaaaatttgatgttatttctattaattattgggattgaaagtttgatttttcatacgggaattaaagtttacttttttatttcattgattgaaaaatattagtagaaagtttatggaatgagaattttgaatatataaaaatagaattaaaaaatagcatttgaatcgagaatcaaagtt

SEQ ID NO: 367007 - DNA, 1096 bp, Cannabis indica
actgctgctcccctgttcttgatcactgatggaatcaaagggacaatcttcatcactatccccagtcccgagtcatcttgataagtaggagagattcttcgtttgctctctcctgctcaagatcatcttgagaaacaataggggattcatggtcactgtctccctgctcgagctcatctagggaaacagataagaatctatttcattagaggcattcagtgttgatttttcttcattttcctagtcaatatccatttgagactcaggaaatggataaacagtgtaattggttgcttctagttgaacaactcctctaaccttcttcaaggcctcttcgagcttgatgaagtcgtcaactctgtctagaaactcttaaatggtgtgtattgatttaagtttcaagtctttctagaatgaacacataatttttagtcgagctttcattgccatgaccttggcgtctttgtaagtatctttgtttgcgtggttgcctctaagaatcgttgtaggggtaatcctttagagcctcatcttcttgttgcttgatgtagaccaaattattgagctcgattagtctatgtcttgacggggacaattgatcatagaattattgtttaagtgtttcccaagaatcaatagaacccgaggaaagcatgagataccattatttttctgtttctaatagcgtggcttgaaagactcggcatcgagaatcgtctcaaatcccttgcaagtcagtttgtacttaaaaattttgtatgtgaaagagtgtgtcttcttttccaatgtataaatgccacactggatttttgaacttggagggaatctccaaaaccttgattcaatctgagagaggtgagcaccgttctcgatctagctcaaactaatttggctttggattagtgatacccttttaccagagtagcaagggtgtcaaacttggccctatagacatcacgagtggtgatgtgtgtatcagttggtcattcctgactgatgttattttgcatgatttttcttcttccaagtcgatcaaagatgttgatcgacctagactttgtggttgtttcctggtcgtgtggccttgctggaaatt

SEQ ID NO: 367008 - DNA, 570 bp, Cannabis indica
tgacttaagctccatgggatttgtggtagtagggatgaaggtagtgttagggataggaagtggagtagtgttaggcttatcatggatttcacctaattgagtagaagtaggggaaagatacttttccataactcctataaaagtaacaacataaaaaatacacaaaatcaactaactagcatacaaaaataataacaaatatatattaacaaaaatttaatacaatgcataaaaatactttgataataaataatattatatataaaatcatgacacaaacaaatatttcataaatatgcataaaaataaataaatttacgttattgatacatcgataatataagacatgcatgttttctaaaaaaaactaatataagatatgataaattatctttacaatacaaaataatacttaaataataaaaatgatgagctagaataaaaaaacacaattctattcatatatatatatttatactagatgaaagttacgtggcgagtcacgtaaatattagttttatttaagttttagtgatatttttaaaaaaaattcggtaaactaattgtaaa

SEQ ID NO: 367009 - DNA, 632 bp, Cannabis indica
attatctagatagatattttctaggtagacttttggtatttttctagatatatttaattaaaatagaaaattaatatttaagttacattttgttcaagacacttaactatttgattatttttcttaagggatttaatttaataggaaaattaatatttatgttgaaaattgatttatttaattttagaccagcataaattagaataatttttccagttttattttattttaatttttgagaaatttcgaaaatgtattattttaatacattaaattttgaattctatcatacatatatttaatagaaaattaaatttgagttgaaaattaatcttatttaattttggaccaacttgaattaagtaattttcataatatttattggaaaattaatactaagcatgaaaaataaattttattttcttcctagagtatacttttataaatattaaattaaaatttatatttagagtttatctaaattagtaattttaattaaataaatatatgttaaaataaatagattaaaataagtatcaaataaaatacaacccttaaaataatgagcttttggtcctacatggttaatttgttttcaatataacctcgagacgctagacttcgtcccccta

SEQ ID NO: 367010 - DNA, 978 bp, Cannabis indica
attcgaattagggagcccagttcacctgctcggccatcatctcacgtgctaggaaaagggaaagtcgtcatggcaaagataaaagacttgtctggtgatgatgaactttcaagtcttgctcggacaatcgcttcacaggatattctgtcttgtttttaaacttcttgactatcatgctttatgcttctgatgcccttttttctaaccaagttgtttttgttccgcgcagacatgtctcagaagatgctcgatgctctgaagaagagagttggaggaggctcaagctctgttggaattattttaccaggatctagatttactaatcaagtatgttattaacatcctaaatatgaacttctaaaacgatatgaaataaacacatataaagtatcaggaaccttatagtggttgcagcgaaatataatgtctccttccactcagatctctaacccttgtatcctttctgtaacagagtatcaccaagatatgagtctgaatctccttctcttgaattaacattttttgcacttaaaatagttaggtggtatttggtaatatttttattttctaatttttttaatttatatacatctataaaggagaagtacgaggcggtgacatgacattctaaaattactctaaaactatttttctcttctctccttaattctctcaattttaatattttattaaagcataattctacaaattgatattttaccattattttaataacttttctttaaaaaaacataaatttacaaattaatatttcctaatatttaatttttataaaatataaatattttttaaaaaagttaagtaaataaaaataaattccaaaaaaatataaaacttaaatacaaataataattaaatcgtaaaatttcaatttatatacatacataattatcaatcatctatatatatctataaggagaagtatgaggcgataacatggcattctaaaatcactct

SEQ ID NO: 367011 - DNA, 807 bp, Cannabis indica
aatagactgctagcatatatcagaggattaaaaacacatatctcatgcatcaaatccaacaataaacttcataatttcagattacaaatccataaagatcatgcttcattcaagaacataattcaacaaaatttcatacttgcaaccttaaatctctaggcatgaatcaaccttattttccagcaactaaaatataacaacacatggattcaagctagaaaatactttgtaatataatccatgcacaacaactcaaatcatgcaattcataccaaaattcaccaagattaatattcaaagctatgaacatgcaattccacaaactcaacaattcaaaacatacttttcgatgcttttaccaccataaattcaataggaagacaagattaaaaacctgcaaaagctacctcaaacaaagcttgaactcccttaactccaagctccaaaaatcccccaattccaagcttcaaatcaactaaataccaaagccaaaaatgaaatttttaagagagggtttgagagagggagagggtcggccaagagagaagttcacagccaaaattttctattttgttttctcaaaattccattttccaaacataacaattagaggtcaaataaccaaaatgcccttagggccaaaactcacacatacaccctcacaagggtagtttagtcatttaatactcaattaattccaaataaatttcagattccatattatcaaataaaatgtcaaataatgcaatccaatgtcaaataatgcccggttgtgactatactgcgctaacctgtcagaacacacct

SEQ ID NO: 367012 - DNA, 458 bp, Cannabis indica
atgataattggatcggtttggcaggttatttattggatcggatgtcccatccaacaactgatttgatccgattcaatttttaaaatttacatccgactctatccaattatgattagatatccaatttattggatcagtcggttgtaattggattggatgactttctgcacttataaaagaagaggtccttagctcattttttacattaagaaaactacctacaagatcagagtttccatctaaactttctttatttctctagagtttggagtactttctgatacttagtcggttgttgtaattatcatcgcgtgagaaataaaaactcgaagtagacgtagccccattactatcgcgatattagggatgaactattataaattgttgtgtctttcttattaattcactacaaaaaaaagaccacttttagtgacaatcttttagtcacaacataaatt

SEQ ID NO: 367013 - DNA, 674 bp, Cannabis indica
agggcctctttcgtatgagttttttcgtcccttttttgctcttgtttgtcactatttattattacatagtggacaattatttacaaagttaactggaatatgtttatagcaattatccctaaaatcgtgggatttgattacatatcacgtagtgtaaatgcggtttattatttaaaaatcgtatagctctgattttctcacttttactgggtcaaaataatcgtgtattaaacacgtctttaattgttgtatctggagatgtctcgacagaaacttggttacaatgatcctaataacgagatggggccattcttctttccaaggtcgataatgtatgtctggcgtcgatcgcggttcttatttacaaagaaccattttgactcgccagggttgtaagcctcgttaccgttagctggatgaagctataaaaagtcttcctatagcgagtggtcacctcacttacttgctcttgagccgatctgacttttacacttagtttgttcattatacgctaagcaccttcacgattgatacgggtcgctttctttggtacctcgtgttggaaatattttaccaggatctagatttactaccaattatgtttgattaacatcctaatatgaattctaaaacaatgaaataaacacataagcgtttaagaaaaccttacattg

SEQ ID NO: 367014 - DNA, 457 bp, Cannabis indica
attcaactaatgttatctttgactctcgcctaccaggacactgtatttcatatgttggaaaccttggaaaataatacatatgattagtttttggtatatttgcaaacatatttacttcacttgttattttctgaacttgtgtatgaatttattgaaccaatattttatttctgtttattgatttttgtagtgtcaaaatgtacaacccacacccaaatcctcatctagaatatgcctctaggaatgaacttcaaagtgtgaagatgactcatggtcagagtatcacttcacacttgctcatgatgaacatgaaattccagaaagcagctaagctgggaattgttttatctgaagagcaaagagttcattgctccgccaattctactacttcaagctcaattgagaagaatagagaaagtgattccacttccttagattatccttcacaacagattga

SEQ ID NO: 367015 - DNA, 403 bp, Cannabis indica
tgaggccgttagaagtgccaaaacgaaagattttcccacctgacccagaggtaaatatgagtgtgacaaagtacactacacagtttgatcggttggcaaggttggcctcgggaatcgtgccaatcgacttcagtaaaaaggaaaagtatttgaatggattaaatgtgaagatcaagcatgacctaatgatcacaacagacgacaagaccacctatgctgagatggtggaaaaagcactgcgagctgagggcgtagtggatgtatgtgtgagtcagttaggactccagtgagtggtggggctcctacccctcctagcatcaggcttcagcaggggaggtagtggttcggccatggaccagaagaggaaaacatccactgcatccggtggctcggggcagagcaa

SEQ ID NO: 367016 - DNA, 873 bp, Cannabis indica
gtacgatttctcatctcttaggaatttctaaaaactataaaactcgaaaatctcaattttcgcactcacgaaaacactaccaaaacttatccaaatcactccaaacttcatagggcgtatgtataccataaatattaccttacttacgtaacagaaataaaatcgaccccttaaatgaagaacaccattaacgttcagactaagatttaaaaacttccaaattcaatttctaactcaaaatcacctcaaattcaacaagtaaacatcagaactagtaccatgactacccaagaataatcctataaggtcagaaccttcataactattctaattcacaaaacccttatacgaaaccaattatttttaaacttaaaacgaaattaaaccataccttaagcttaccattttcaaagatttgctatcctggtactactagagtttagatcactagatttcaagttgaaaatcaaagaaaataaatatagggggagaaggttttatcgaaggagttattttactattattttatatataaaacttaatatatatatataataacaaaactgataacgtttcgtttatatataataatataatattaataataataataatatattaatattaataaaaacattattattaatagttatcttattatttcttaaccgttaagaaatctatatttctatggtatttggttgattccgagtatctcaaaatacttcggtatttctaaaatcaatttattataataattccatcaatagctctaactaaaacagttgtgacattttttgcctccaatcgggtctccaaggttgccaaacttgaaaatatttttatttcacaaataactcatattatatccac

SEQ ID NO: 367017 - DNA, 1355 bp, Cannabis indica
atttttatttttttgaaaattcataagtagttctttaattttttttttttttttttgatttaagcgttggactcaaatccacgacctccaatacacacaccctatggccacttgaactagcctcaagtggttataagtagtcttaaataactataatttaaataatcttaaaaataaattgcactgaaaaaactgtttgggagaccaatacaaattaaaagtgccagaaaagagtattttcagggagtgtaataaaattactatgtataatataataatataaaatagagtattattaataggcattattgtgtgtagagccacctttactatctaaattggcgcctggcaaatattagctagtgatattccaatgggattcaataattatgccaaataaaaatataatactttttgtcaaaaaaaaaaatatatatataatactttaatagtgctagataatactaatacttttcatatataagctctttggtgaagaaagagggagtggattttataatgttttttttttttttttttgttaatttagaatttttatctcctaaaatttgacatgtatcaaatcatgctctctgaacttttaagatcgttaaaaatgcttcttgaactattaaaattgttgaatttaaggacttttatcttagtaaaaaaaatctaacatggacgaaaattaaagaggcatgatttagtacatgtcaaagttcaaggggcatgatttggtagatatcaaagcatggtttagtacataatcaatcactgaaatagtaaaattgtatgaaattgaaaaaaagtcattaaatctaacaatctcaataattcaggagaaatttttaacggccagaaaaatttagagaacatgatttggtacatattaaagtttagggggttaaaatcttaattaaccttttttttcattaatatgtttagctaattgcttcaaatatatataatttgatatttctaaaattaatatttatagttaaatttgtttagtattcatgggtagtacccattaagaagtgttctatatatatacatatatagaacacttcttaatgagtattatccattgatggttactaagcaatttaactataaatattaatttaaaaaaatattaaactattagattttgatccaataacgaataataaaagataaatttagatttctgtgcttaatttaactacttaataaaaaagtatatcaaaaaatattactttttgcactatattaaaaatatatttatataaaaaaatatttgaatcaaatttaactttttttttgcccgaattttttttttcttgatttttttttttcagccaatgaaacaa

SEQ ID NO: 367018 - DNA, 854 bp, Cannabis indica
aaatcactcctaagggcattaagtaatttatctgccctcttcgtcctctatgcttcccaaggatgggttactcattctcctcacgaggttgcctggttcatcgatctgtagtccaccccaaaacaaggcaggtcgaggtacttctatttctctcagccaggcttcaagtggttgaccggcacggatgacaaggccatcagcaaaatagggcgttttgctgatgaatacttcatggtaaaggatccgagcattacctgaactcagttttagcagattttgacatatcaccgtcctcccctcactcttactcttagggataaagctcaaaaacttgcccggttgctgggggaagaccggaatattatccagttgaccttcgatgataatcttgtgaggcacgagctttatcccgaggactttactcctaagtccgtaacgaggaagaagaggaaatctgatgctggccggaccgaacgaactcattcggagaatgagttgattcaactgaagcgtaaagctaagttgaaaggaggtgccagggccaaacaatatgctcaggagccattgaatcctaaagatgaggccgaggaagagcaggtgactccattgaagaggaagaagaaactcccaacctcaaccaggcctattgaacatgcaattcgcataagggagcccatttcacctgctcggccatctcctcccgtgttcggaaaagggaaagccatcatgtctgagataagatcgatgttaggtgatgatggacttctgagtcttgtgcgggcggtcaccttgcattttactttgttctattcttgagcttcttaattttcatgccttgtgtttctgatggttgt

SEQ ID NO: 367019 - DNA, 646 bp, Cannabis indica
tttggtaatttgaaaatttttcaaaagaaacatagtgctttgaaaaaaaaaatagattgaaaaagaaaaatgttaagctggtttttctgataaaagtgctgcttctcaaatgtggtattttgacagtggttgttctagacatatgacaggtgacaaggagtttttagtgaatattagaccaatgcaatgtggtgaggtcatgtttggcaatggtttaacaggaaatgtcattggtatgggaactctcaattttgaaggattaccaaggttgataaatgttatgcttattgagagactaaaaactaatttacttagcattagtcaaatttgtgatcaagggtttaccatcaattttgacaatgatcattgttttattcttaacagtgataaacaatgcattttacaagggtttagatctattgataattgctatactctcacatttattcttacttgtcattttgcatgtgaaaatacttgtgctataaatatatctaaaaatcttgttcaacattcccgtacaaaacaaattaatataaggtatcattttattagggaacttgttgacaaccaaacattgcaattaaaatatgttgatactgaaaagcaattggctaatatttttactaaagccctagattcaagt

SEQ ID NO: 367020 - DNA, 508 bp, Cannabis indica
taatttaaggagaatttttaatgacctgaaaagtgtagagaatataatttagtacatatcattatcaacgtttaaagagtaaaaatcctaaaaaaacctttataaaaaaaatcattaagcaacaaaatagattttcaattaattatatataagtaaagaataaacatcttttgataacataaaaacatagatagatgtaaacaccttataagtccaacaaattacctaattatcacaaaaacaaaggtaggtgattcataaatcataataataataattacgttatagagattcattgttacgttacaattatatatattatttatttaagattatatatgtgtaataaaattttgaatttttttttaagtagactcttaaaaaattattttggtaaattactttatatagtttcagtattaaaaaatatataatatatattttttttcatgatcacgtacattgtaactaataactatttagaatacatttatatatttttttttaa

SEQ ID NO: 367021 - DNA, 765 bp, Cannabis indica
caggctcactctcctctatcatgtctctctttttgacagaaaagggcaacgagtcacaagtcgccatctccgaccatcgatcgttgagcacaaaagagttgacacaatctacagtaggtcaatagcaatggtgggcacctcgacgataatcgacttcatttctcatattgacattgggaacctcaagtgtaattttccttccatatttttggtagtggaaccctaagtaacaagttcgaattgaatatctcaactctcaaatttgggactttgaggagcagatcgatagtatatggtattggtattgttgtattgatttttcagagttagatttgtttttgtgcaaaacaaaattattagaggaaatatgtgctaatggtaatggtaatatggtggtgatattggtggggatagtggtagtgtaatggtggtggatatggtgtgactgtggtagatacttgcatagtgaaggtgacagtgatgatggtggtggttttagttggggctaaatatcgagtgggttgatcgggtttcgtgtttgtaggttttcagtccaaaagaatgaactcggacccagcccgtgagagggtcaggttagcgggtcatgggttggcagggtcgcgggttgacccagtcaactcggtcaaaaatttatggaaaaaaattctaatattctatatgatttttttcttatggaaaaaatttacataaatgaatattttgggaacatttttctttttttttttaaaaattttaaaaaaataa

SEQ ID NO: 367022 - DNA, 773 bp, Cannabis indica
aaatccatctaaagagagttgagagagcgaggaaggccgattacccacatcaattagtttccttcgcagatcaaagcttgtgtgggattgaagctaagcttgtgtgggattgaagctcaaaaattaatggctggaggtatttcgatccttattcataatgtatatatgtttgatttaatttcgcattttatacataattatgtatgtttcagtttatacaaataaatgtctaacagttggtatcagagcggattatatatctctgccttgattagatttaattttcgttcatatttatatatatgtatatatatacggtatcagttttttttttatatattttatatatatacattcatatttatctgatcatatatatttatatattttttatttacgtatatatatacatattcataatatatataaatttatatatatacattttttttatattcatatttcataatatacatgttgatacatatatatatatacacattcatatttatattcatattcatattgtgtatatacatataattttcatgtatatttgtttatatataatactcaatacttttatacttttattgcataaaattgtatgtaatactctcttccatacattaatgatgattttatgcggtatatgtattgtatacgagtatatatatacatgaaagttttatgcttcggtccgtatttttttccgttttcattttttggtatttattttgaattctatatgtattactatattcataagatat

SEQ ID NO: 367023 - DNA, 751 bp, Cannabis indica
tcaatattgatcgtgaaacaccatactaaaaaaaaggcacacatgatcatgtacatgcacaactattgtaccttaattaatctggggacacatacaattatccaaatataccagatgtcctaaaacactaaatttcccaggcaataatttcatagtgtcggctttacaggctccaacacatctatacacacagttagaagtcctgcgaagaaaattttgtccattaatcgcgagctaccaaataagaaaacattgtcattatgaattatgaaatgtaatagaaaattggaaataaattatgaataaaatatataatcttaataagaagaaataaattacatcaaataattttaaataaaatcaagaaaagagacttcctaaaactctataatcttatataatacccattatcttattcactctttattattctcaatatcttcaaagatgaccctttacgtcaaaagatattaaatcaaaaaggtaaaataacggcagcataatagattgagatttacaatatcataaatgataaaataatatggtatttattcactaattgagcacataatttgacagaaaatctccatctatattaacagagcaaatgaaggtccacaaaatgaaaagtctgacagtttttcacatatataatcttaataagaaaataatgtcaaaagataagtacatacctcaaacaagacccaaatggaacgttatgtgcctagtgcacagtttcaaacacctaaga

SEQ ID NO: 367024 - DNA, 1155 bp, Cannabis indica
tcgttcatgggtgattacaaatattatagtgattcactatataagtattaatggtatagttacaaataaatattgagaattcatggtattatgatagttatttcttatatttatttacttaatttataaattataaaaggacaactttgataacataaacataaaaaataataaaaaagacatctactaattttttaaaaaatatatcattaaggataataatttttatttatttatattttatttttttaatattaaaaatcttttaaaaacatgtcttctaaaataattatcatgtaatataatttaactcaaaagaataattaatttagtcaatttaaacatattttgattacgttttctcataaaataaacaatataaattattattattctatttctaaataattttaataaatatattacaaatattaatttagataaattatttatttatttagataattatttattttgtttgttacattctttcattaatgtgaaattaataattataaaatattagaacatcaatacaatgcatgtgttcattaattaatttttttttttttgaataaaagtaagatttcattaaactgaaaagtcgtccataacatataggcgacaaatcaagtgcctgaaggatacaacttgtgaaaaaataaaagctacgaacaagacagtgaacaaatattgcgagtaatcatgtgttcattaattttgatatattaataagttgtaaacttttgaaagaaacaacgtgtaagtctctatatatatatatgcatattataatttcaatgtctaaattacaaaaaaaaaaaaaatcattacgataatattatcactaattatttatagccctaatatacgtggaacacttcttaatgggtattattactcatgaatgattactaaacaaattcaattataaatattaattttaaaaatatcaaaccatgaaatcacaaatttgaatttctatgcttaatttgactgcttaattaaaaaaataatcaaaaaatatctctttttacactatattaaaaatatgttcatacaaaaatatttaactcaaacttaactttttttttaatttttttttatcgatgaaacaatctcagcccatatgatataaaaatgagagattttttt

SEQ ID NO: 367025 - DNA, 611 bp, Cannabis indica
gacatatatcgatattcagtcgacaaatacaccatttcatgcgtttcacctgtacagttacacatttaatggccattaaattttcctacattcccaacatgtatactactccataaaagcaaatccctttcttattcataagtgctcttgtcttatacttctctcttacacttaaaaatttctcttattcttaagttctaaatatggcacctagaaagaacaagggcaaattcccaatcttaactcctgaagagctgaagcaggaggatgttggcataattactcctgaaatgcagaaagtttttgacgcccaaagagctttcgaaagagaacgatgtgggaacgagttcaggttcaggcaacttgaagcacatttttgcaaaactggtgtatggccggctccaccaccagggttccccgaaggatgccgtcgttgcaaactaggcatctttaacggtaaaccggtgaagcctggaacattatgcaagtattgcaaggctcacccacaagccaaagaattttaataatttgttatgttatggcttgtggtgagttttatttaatgtttgtttgttttttttatgaactttattttctgttatttttaatgt

SEQ ID NO: 367026 - DNA, 541 bp, Cannabis indica
agacaagtacgtccgcccctgaacggagggaatgtaagctcttaagtgattaattgttgtggttaattaattaaatgacatggccttttttaattggtttgacagaaaattagacagcaaattttgacaggggatccaagtccataataagagatgttccttattataattcaatattaataccatctaaaatagcgtttcaccattgattaacaatatttcttaaaaaaacctaacatacttaattacattaataacaatagtagtattaaatttacatactttttagtatttctctaataaattaagttgagtggttggtttattaatagttagatagataaattatttgagtttatgtgttcccatagtgccaggactactgaggcataaagtatttgcaatggaggtcaaaagtgaaaaataaataatttgagaggagccattatatacatttttttaataatatttttgaaaaaaaatacaaaattataactgaaaaaaagtaaatataatatatatatagggtaatactatggta

SEQ ID NO: 367027 - DNA, 800 bp, Cannabis indica
tgcatgtaaatgtaatccattaatcagtaaaattattttttgcttatcctaacattatttattatggatagaatatttcaattttcaaaaaacaaaaaccctaatatttcaaattaataataaagccaaaattaaatattctgtgtcaacctagaggtaggcccaaaccagggatggaatctttgaagaactaagaagattagtcttatctttggaattgactagaggttgaagctcttgcacaagtgcaattttatattgaagtatagaacacccaaattaaagtcaataatctacatttttaaatagataaaatttaaatatatatgaacttcatgaaatgcttctttgtgctaatatgctatgctaattaggcaaatctttcttaactcaaaagaaacaccttttctttgtaatatatttatttctttaattatagtaagtttcataaaataataaaaaagaacaaattcacctttccagctagaaatttgataaattcgactgaccccatttcataaagtgatataaaaaatcttttgaccataataaaatatagcatataggaaacccttatcattatttttatcaatatcttgtgaaagtttctcatataagtcatagtatttaattatttatagttttgttttatacaaatgggataatcgactttaatggtaatgtaatcgatttcacaaaaagctttacttttttttctttttggtttcattaaggttactctaataaaataaaataattgttataaaataatataaaatagtataaagtagatgagaaga

SEQ ID NO: 367028 - DNA, 458 bp, Cannabis indica
attatagataacataatattatagataatataatattaattttggtatataaattataaatgtgggagtttgtaataaattggaggtagggacattaattatgaattaatactttgttttattttatttttaattttgggaagatattgaaataaatgggaagtaaatgctaatgacgtattgagagtattaccttattagttgtataggaagatactaatatgaatagtttttgtaataatttgaatagaataataattaggaggttatctatttaaataataaataaggaagcattatgtcataatgacgaattgaattaattaatattaatttaaattttttaattaaatgtatgatgaagtggtattaggaaaatgatacttttgaatgtgaaaagtgcaatcttaagttttaaggatattaatacaattttggtttaatttaggttgaataaa

SEQ ID NO: 367029 - DNA, 583 bp, Cannabis indica
acacagcaagtggtaactcaatcatagattggaagactgtgaaggatcacactcaaagagaaggacattcggtctcagatcttgataaaactctgggacagaaaggatacaagggttagacatctgagtggaaggagacattaattctgctgcattaatgtaaggttttcttaactttatatgtgtttattttatcgttttagaaagtttatatttagggtgttaaacaacatacttgtgagtagatctaagatcctggtaaaatagcaagctatcacaagtgtcatccatatgaatggttagatttactttctcagttgtattctaaagttcatatcatgatcataacatagcaagctatcacaagtgtcatccaaataaagatgtgcttggaattttaaaattctcctacttagataaggtattgtgatactatgtccaagaattttattggtataattctattactagagtaacatatcaattggaacaaaaacatgatcaagaataagttctaataaatttgctaattagttcattatactatatccatgtctaatcaaaatatgtgtgctatagagat

SEQ ID NO: 367030 - DNA, 525 bp, Cannabis indica
ttgcttttctgccatgctaatgaatcttcttgtcaagccatcagtcgagtgttggatgtatatcaccgtgcttcgggtcagcttctcaatacggataagacggttatgtctttttctcttaatgctgatgatgcgctaaaaaatagattccatactgtgttaggaatgcctatttgtgatcttcatgaaaaatatctgggactgccatcctatgctggaagagataaatttgagctatttagttacattaaatatcgtatttggaaactaatgaactcctggcatgccatcctatgctggaagagataaatctgagctgtttagttacattaaagatcgtatctggaaactaatgaactcctggcatgccaaacgtttttccattggaggtcgtgaggtgttactaaaagttgtagttcaatcgattccaacatatgctatgagttgtttcagccttcctaagaagttctgttgccaacttgaatccatgatggctaatttttggtggggttctagtactaataa

SEQ ID NO: 367031 - DNA, 1529 bp, Cannabis indica
tttcttgtatttgtcggccttgcgccataccaactcattcctcaagcttaccgcctgctttcaggcttatttattttttactctgcccggggctggggctctcccagtccggcagagattttgtatttttatgaacttgtttccgtccctaaaaagggagacaaacttaaggacggattttacgatttccgggcccatcctttgaatgagggtttggtccctttcaatcagcaaaaacatgtgaaggagtaccgtcaccgcttcttcttctcctccgggttccaggctgtggaacatccagagcttctcacggagtgggttaggatccctccttatgcgcagactgaacctactcagcttttccttcgacgggccaagaccttcgccacatatgacaagaaggcccttgacgtcggagagttggtcacgacggagaactgccgaaaggccaagctgatcagggggcatcagtcggtggatgactgtaacctttccaaggtcatctgcctgaacgtgagggttccggccgcggagaaggtactccgggaggacatcatcgccacagcagaggataagtaccagaagtacctcttctagaaggcccaggagcaggcttataataaggcccaggtggccgccaaaaggccccttcgtatcgggagcccggtggagagaaggacccctagaccaaggcctgcggtctaggtgccgaatacgggggctcccgatgccagcacttctggttctggtaagtcccctttaatgatacattacgtccctcctttccgtgactgtgctagccttaggcctatagggtttgatgaacgtctccataggtttaggatgccctccactcgggtgggggatcatgaaaatgagtattacttctctcacttaggcaattatttagggcggtcccggatgggtactggacctccagtgcccattcccttggactcttcagcctatttgtcttctagctggttccgtccctcagacagctatatcggggatgatgcagccagtgttaagattcaagactttgctagggccgaattagagagtcagggtagggctagcttaatttctttttaagtgtacactgcttttacagatattctaacaatttactcttttcccttgttgcagcagccgatcccatggatgcgatcttggccacccttgctggagctcacagtcctgatgtttcccctcctcctacttcttcccagttggtcacccccaggaaagcttcttccagcgcccctccgaacactattgacttagtgcacgaggaggaggtacttcttgaggaagctgaagaaggtgaagaagagccaggggtacttcctgaggaagttgaagaacgtgaagaaaagcaagaggttgctctcgtgcgcaagcgtaaaggcaagatggtagctgaggagtcttctacacgcccgcggagggtggacactccggccccgagtcatgactccgggatcccctccgaggcggaggagtatacagtgcctcatggcattgtg

SEQ ID NO: 367032 - DNA, 533 bp, Cannabis indica
ttcttctttcacttaaacattcaggctatgcttaccagaaggaaaagagagagaatggatagaaaattagaaaggatagaaaataaaaaggatgaagatgagtggttgttctcttttgtattgtttagtaactaaaagtaaaattaagaaaaatgaagaatagaattaaaaaaatagagaagtaaaataaatattaaggactcctacataaaaaaaaaaaaaaggtaatatattaagactatgtttgataggaaagagggagagtaaggtggataaagaatataagagaaagaagagtaataatggttttatattgtttggtataggaagaatagataattactaatttataaaactactattttattcttataattattttttttaataatatttgttgaaagtatttttataatttataataattaaagagagactgagagagttccaattagggggtattcacaaagtatctgattcaatccaatccgcacgatccactccaatccaatccgcaaaatgcggatatccgc

SEQ ID NO: 367033 - DNA, 301 bp, Cannabis indica
ggtaaaatatattccaacagatacaagggttagagatctgagtggaaggagccattaatgctccgctgcacccactgtaaggtttctgaaactttatatgtttttatttacatagttttagaaattattatttaggatgttaaataacatacattgtagtaaatctagatcctggtaaaacatattccaacagttatacccctagctatgtgtggcgcagtatggtttgaggtaaatctttgttaaagaaaggattacgtagacgagtgtgttgggttttatgccctaaataaaactcttt

SEQ ID NO: 367034 - DNA, 513 bp, Cannabis indica
aataaccaacgccatagggtaacaaccctgttttccccaacccccaaccgacgacacagatatatatacattctatacatacggtttttaccaaaaaaccggctctaaatgtcaatgcagatattttcacaccctttagcttccctttttataaattgggttgaaaaaagggaggctaaaggcttacattgtagtagtgtatgctatcagataatcacaatactgctgcctcatgttctattttcttcctttgcacaaactagaatttcagctccaccaactctaacaattaatttagatgctcaatttatcacacaatgcataaccacaagatgacttcacaatcgaaacaatgttataataactttactctttccaattattccacaacccgatagctcataagcttgcatgcttacctctctccactaatgttgacaacatcctttcgaaatcaatatggctttttgaggtttagaaattatggcttagatatttggaaatcgaaaaaca

SEQ ID NO: 367035 - DNA, 745 bp, Cannabis indica
tctttaaacttggaattatttttcattttttggacaacgggctgaccgggcagcttttaatcccggtactacgtgcttttgtcatccttaatgaatttcattctctgtttataattgccgtgcaattgtgattgttttatgtttaccaaatgctttgtacaggtataggtgccccccaagtgaccgagcagacgtatgactcttggtcacttgtctttcgcaaatatattgcttttctgttcggtgttttgggttcgactaaaccttttgtacgcactttaggtaaattataatcatgctgattttttcgactcaatagaattggaaatactatctttattcatttattgatcgaaaatgtatttgttaccgtagtaacttacatcagagctagtgatctaatctgatcttttagcttaacatgacataaaacaaataagaaactgtactttaaagtggtctacccgacctgagtactttgtttctgaagcctttgcgcgtagtccgcccaagaggccattcacttagaagcgaatgttcaatagtactttaatgtggtctacccgacctgagtactttgaagtggtctatccgacctgagtactttgaagtggtctacccgacctgagtactttattggtagtatttccttaaatgttctccattccagtaccgtggtactagaatgagttgcattttttcgtcatacttaccagtttgtatgctccggagtcgagaactttga

SEQ ID NO: 367036 - DNA, 784 bp, Cannabis indica
catgaaaacaaaacagtaaagctagtcctaccctaactatctaactcagccctagcaaagtcttgaactacaatgttggcttcatcatccccaagaaatctatccgaggggagaaaccagctagaagacagataagctgagtgatttagagggatggtgcaggaggtccgaaacccattcgggaccggcctaaaaaatgacctaagtgggaaaaataagaggccttggaatgatccccccaccgagtggggggcatcctaaacttaagaagacgctcgttgaattctataggcctacaccgggaatattcttagacagaaggaacatgatgaactgttaaaggagacttaccggagccggatgtgttggcgtcgggagccccagtattgggaaccaggaccagcgatttaggcctaaaaggcatccgatctgtgcccgcctccagacgaaggatcctccaggcggtagcctgagccttgacataggccaactcttgttccctcctaaagagggacttcttgtaccggtcctctaccgaggctatgatgtccacccggagcgccttctaagcggccggagtaattggctctcggagataagcttggccctccgacagttctccgttgtgaccaagtctcccacgttaagacatttcttgtcataagtggagaatgtcttggcatgctagaggaacagttgggtaggagcagtgcggagaaagggggaatcctaacccactccgtgagaagctccggacggctcacagcttggaagccggaagaga

SEQ ID NO: 367037 - DNA, 701 bp, Cannabis indica
agtcttctacaaggaagatatatgatttttactatgtagacatatggtcatcaccataaatcaaatcaccaagtttctcaaatctgattgcactattatattcatagacccaaataaatagtgaataccaagtcccgtcccgatctggataatattgaagatatttacaaaaatgccactgctgtacaaactaagcatcagcatgccgccagcatgcacaccaacatacgccaccacttgaccaccacttggcctgcttgtaggcatcacctagcttgtaatgtgccatattggcatgcacgttacattgtgtggtcttggaggtttgtacttgttaatccataaacttgtcttgatgacgtatacgttaatgtttgatatgtggcaagaaagaaaacatcccagagttgagtagttctcagttatagtagtccacctaggaggggtccctagccttgtgcctaggttgatttcgggaattttggaatgtgtgtttggattctaccaacttattttcaactcactatctttcagtattttgtaccatgaaaatatgaagcatccaagtccaagactcaagagttaaaaatacatgaaacacaacacaaaaatcaacttggacaccttgggtttcactgagcgcctaggttgacaatccaactagggtttcagtttctaggactgtcttagtgcaaataggt

SEQ ID NO: 367038 - DNA, 589 bp, Cannabis indica
tagtgtattagtgagaaaccatacatcgctagatgcaaatagcgaggcactggagaaagtgacgcataccaactttaaatgtctgtaccttgcaatatgcaaactaagtttaaaagtcagaacgactcaaaaaataagatgcaagatgaccatctcgctatgggaagacttcctatgcttcattcaactaacaagagcgaggctcacaaccctggcgagtcaaaagatttctttataaataaccacgatcgacacaaaacatacatcgtcgaccccagagggaagaatggccttagctcgctattgggatcactataatcaattttctgtcgagacatctccagcttcaaaaattaaagacatgtttaatacacgagaatttagacccagtaaaagcgggaaaatcacaactatacgattttcaaatcataaactacatttaaatttcctgatatgtaatcaaatcccacgattttagggataattgatgtaaacatattcgtgtcaactttgtaccactatgtaattataaatagtgccagataagctcaaaaaagggacaaaaaaactcatatgaaagaggccctga

SEQ ID NO: 367039 - DNA, 566 bp, Cannabis indica
cagtcatatagaaacgctctaatgtgatacttagcatttatatttctttagagtgtgagctccggcaagtgcggccaaaatggcatccatggaattacctgctacaacaaaagaaaagaggcaagtgttagaatatccatagaaacagtaaacacttgaataaagcaatcaagctagtcctaccctgactctctaattcggccctagtaaagttccaaatcttaacgctggttgcatcatccccgagatagctgtccgaaggccggaaccagctggaagaaatgtaggccgaagggtccaaggaaacgggctccggaggaccagaacccatccgggactgacctaggaaatctcctaagttggaaaaataataatccttcatatggtctccccaccgggtcgagggcatcctaaacctatggaaacgctcatcgaaccctacaggcctaaggctggcatattcgctaacgtaaggaacgtaatgtactgctaaaggagacttaccggagccggaagtactgtcatcaggagcctcggtgttcggcacctgaaccgaaggctttggc

SEQ ID NO: 367040 - DNA, 778 bp, Cannabis indica
atatttggggcaaaggacatatggatcgaccactgctcactctcacactgtaaggatgggttaatagacgcagtgatgggttcaacaggaatcaccatatcaaacaacctcttctcccaccacaacgaggtcatgctgctcggccacagcgatgattacactcccgactcaggcatgcaagtcaccattgccttcaaccacttcggcgagaacctcgtccagcgcatgcctcgctgtcgacgtggctacatccacgtcgttaacaatgatttcactcgttgggaaatgtacgccatcggcggtagcggaaaccccaccattaatagccagggcaaccgctacactgcgcctattgaccgcaatgccaaggaggtttttttaatttcacccctttacttaatatttatatatatatatatctacctttcttttttttttttttctgaataaatttagaaacgtagattagcaaaagtgaaaaataagaagaaaatagctaaacaactttactgtaacaatctatacaggaatacatcacaggttaacaaatggtatccgactatccggatagaattaatttaaatactccaaaaaatctgcacacacaaccgatgtgacaaggcaaatacacacaaaatcgatataggattcttaaggtaaacacacaaagggacaagggccctacgattttttaaaaactttagattataaaactatgataacagcaaatgtctccacaaatcacattcacatacgaaaaataagtccacaaaacact

SEQ ID NO: 367041 - DNA, 449 bp, Cannabis indica
tatatatatatttttaaattaatcaggagatttattaattaaactcattcaaaataatagaacgtacttcagatgaacaatcctccaactgaagcatacaacttatagagaaacaagaatctcttgccaagcaatgagccaacttatttgcagatcgtttaacaaaacataacttaacaaaagataaagcaaaagtaaattcctaacatcttgaacaataagactaaactgtgaggacataaagactttacttaggactgcttggacacacaccaaactatccgtttctaacactacattgtcccagggatgagtcgcaatctaactcaacgcttctttgatgcctatgatctcagtaatttcgggttggacatactcaatctttcccttcttgaaagcttctaccatgattctatgatgatctcaagctacatagcccactccaaacc

SEQ ID NO: 367042 - DNA, 643 bp, Cannabis indica
aattccttgccacgggccaagatactcatgtgcgtcccctatatatctgaatgcattatttgaaaaattatattagcatttcaattcattagttaatttaaatttgttacataagaagtcattaaattattaccttccgatcatttgagtaatttcttcgggaattgggcggccacgtacagggtctaaatggataattttctttggcgtaacgacctctagcgtccaatgcgcactagaaaattatattggaatataagtaagatagtataaaaataatttgaagtcataatatagaaatgaacaattagcactaaagaattaaatagagtttacccgatattccaaggaataaagaacatttggtggttgttattcatcaatgataaccaatcagccaatcgtcttgccgcattgtcaaaagactgactcttctcttcatcggttttcccattcactacgagaagctctgggtcgtaaaacttgaaaaaatttctcataccgttgatgctctcccagatgtgcctgccaaaaaaattgttaagtattagtgtcttataataatttgactagaatttgatatataaggttaattagattaaagaagagtatacatcattccaaacagcattccctggttgcc

SEQ ID NO: 367043 - DNA, 748 bp, Cannabis indica
gggtggtgtagaaaaaaattacgttattttccataatacattatttttatatctctatcattcaaaactattgttattattgtatttcacttgttgtcattatatctcacttatttttatcactgtatctcacccgttgttatcactgtatctcatcccttgtcattgtcgtagttcacttgtagtcgttactattgtatttttcaaatctatatcttaattttaaattttatctcgaattttaaatatttaaaatatttgagaaaatttattagtttgttatgttattattaatcaataagtattaaaaaaaatgattattattttttaaatatcttaattaaaaaaaataaaaaaaatataaaaaataaatatgatattttagttatgagaaatgctaaaaggcaaccctccttggtatcatacaactattggtgtaattaagtagcaagtctcatataacttataaaattattaaaataataataaaatattaatttgtagaattatgttatttatataaaaaaagatgattaaaataatagtaaaatatcaatttgtagatttatgttttaataaaatattaaaattgagataattaaggagagaagagaaaaaatagttttggaatgataatgctatgtcaccgcctcatacttctcatttatatgtatgtatattgttcaaccaaatttacctttaatttttattttttttttgaaacatgcctctttttatatgtattgta

SEQ ID NO: 367044 - DNA, 539 bp, Cannabis indica
aaatacgccgtagtcgcagtcgattattttaccaagtgggctgaggcaaaagcccttgcgactattacaactatcaaattaagagagtttgtgtataattccatcatatgcagatttggcatcccttacaaacttatctcagataacggaaaacagctcgattgtaaggcaatgcgccaattgtgcgatgagttgggaattaaaaaagcgttttcagcagttgcctatccacagagcaatgggaaaatagaggccgtgaataaaataatcaagcatacaattaaggaaaaactcgaagagcgtaagggggtatggccggaagagcttctgcaagttctatggtcgtataatacaaccccctgatccacgactggcaaaactcccttctcgcactcctatgggtgcaaagccatgataccagtcaaagttggggcagggtccctgcgaagagatgttttcaacgttactgaaaatgcagacaaacaattgctccagcttgatcttttagaagaaaagcgcgatcaggctcatctgaaaaa

SEQ ID NO: 367045 - DNA, 678 bp, Cannabis indica
agagatcttgaacggaaggagtcattatatctgctacaatcaatgtaaggttttcttaaacccttatgtgtttatttcattgttatagagaattcatatttaggatgttaatcaacatacttgttaggtgaatctagatcctggtaaaatattcccaacagactactttattcaatgattaatatctttgactctagcacaatacaaagcactgatatcagtttgttggaaaccttggaaattatttagaattgtatgtttttgtattttcactagtcattcctacttgctaagtactaataatttctgaatgtctatgattttgtgttaaaccttacttgattactatttattgtaacttgtagtacacactatgactatgaacaaccacatggtgtcactgttgactgacaacaagctctctgcagctaactttgtcaaatggagagagaacattaatattgctctcattggtgaaaatgccctgtttgtgttgactgaagaggctcctgagcagcccggtgagaatgtgaccaaggcagtcaaggaaaagttcaagcgttggcaaaatgctaacaacaaagcttgatactttatgttgtctagcatggtcgacaccttgaaaacaaggtttgccaatactctcacgactgcagatatcatgaaccagttgactga

SEQ ID NO: 367046 - DNA, 1698 bp, Cannabis indica
ttcagtttgacttagctagggttacaccttggtcttcatgtttcgtgacactccttgtacccctttgttttctcccttgcatagatcgagtcacaaactcttccaccaaagtttggtttgtgactttctaaatgcaagtttaacacatgttgtcttatttaagtacctttaaatccattttatagtcaaccaatgtatcttcccagtcattaccatatacttgctaacagcaactataatatatgttgtatctagtacggtacttaacatgaaatacatctttgaaccaaccccattagagttgaggatatgactcatatcctctttttccttctttgtcttagggcatctttctttctgtctaaagggtcacatatgtttcacaacactactctttccctttggttttggaacacaaatccaagtcttgtttttactcaaagagtctgtctcttcatccattgcactgtcctacttcttagcattcttgcacttcatagcttttccacaactttctggtttgtttttatgtccttgcaaagcacttgatagtgcataggcaaagtcctcattccaaatgttgaagctatacttgggattctgtctaggtcctcttttaactttgtctctagtcaactggtagtcctccaagtcctctgcctgactttccctcaagtttccttgttccacatgaaccatgctctctcactgttccacctgaacagtgttttctccctgttccacctgaacggtgttctttccctgttccacctaaacagtgttctctccatgttccacctgaatagtgttctctccttgttcatcacttggagtaataggtcttagatcaaagttgatagagtcacctgcatggttagtactagggcaaaaacctaaacatttgggttagtagtaatgcatggaaaaatattttcattaaataatacttttctactattgatagttttaaaacctttttctcttacccttagtctgtacccttttgttccttctggatatcccaaaaatacacactctagagctctaggctctatcttttcatcaccttggtgtgcatatgttgcacagccaaaaacttttaagtgggataaatcacgtggtttgctggaccacctctcttcaggggtctttaactccacagcacttgatggacttcggtttatcaaataagctgctgtgagaactgtctctccccaaaatccagtagctaaccctgcttggagtagcatgcacctggccttatttaaaatagtcctattcatcctctcagctactccattttgttgtggggttattcttacagtcctatgcctttggatgccgttattggtcctaagagtcttaactcttttgttagtcaagttttctattaaaattttacattcttgaaatttagcaaaggcatcattttttatgtttcaaaagaaaaactcatacttttctagagtagtcatccacaatggattaaaaataactactccccccatgtgtagctgttttttctggaccccataaatcaacatgtatgtattctaaaatttctttagaattatgtgccccatttttaaatttaagcctatgatgcttactcaatatgaaatgctcacagaaataaacattacttactttatccttgcataaaagattttgttaatgttatagtgagatctctctcac

SEQ ID NO: 367047 - DNA, 1237 bp, Cannabis indica
atataaatatatatatataattgtgagctcagctcattatattatattaattacactcatcatgatgatccctccaataacatgaatcacttagttataaataacactatatataatgattcaccatactcatactattagaatgaaggagttgatcttttcttttagcttatgtttttgtctttttctaagtaaaattattgatttgggttttaaataaaaacaataataatgttaaggaaatttacaaaaaatactagaatttaaactaattgaatttttttcaaaaatactgtgtttttataaaacactaagagaacacaaaacaaaacaactaaaagcaacagtggaactactaaaaaacaacagtgaaataatagtgaaaacttaacaaagtacacagtataaaacttacacattattttggaaaaaaaaattctacctcacggtataaaagtaagaaaattaaaaatttaagtggtgtaattatccgtaatgatatgaatatatattttatatatataaggtgttggtggagtctgttttcaggcaaagactgtaaaaagaggacacgagaaagtgaacatttatgaattgttatttgtcataagcttcacgtggacacacaccaaaaaaaagaatgagtagaaaggacaagttattttcatatgagaaaatatataagttggtttggtagacatatatattgaatggtagttcaccacgttattaacatattttatatcaatgaagagaaaggctaaaagtacagtgtacaaaaccagtacgtaagggttacatacttcaacaccttactatacaagtcttccaaaaaaaaaaaaaaacttactacaagtccacaaaactatactccaaaaaaaaaaaaaaaaataatatatatatatatatatatataacattaacatgttagactttacattgaaattacactattaaataatatctctatgtagtacttaacactttcttttaacattttacaaaaatattatattgatatttttttataacatagtatttatccgattattgaaatttagattataacatatagtttatatgcaccaagatatgcacaaaaagctaaaaatagaatgcatttggtgtaacacagaccatttggccatattcaaatttaatttttcttgtcttttttggtgattttattattaattttcagtataagcactttttattcttcattcattattgtatt

SEQ ID NO: 367048 - DNA, 538 bp, Cannabis indica
ctggtagaataccggcgaccctgctcaatcttcgacgacttttactttcttcgattttgcggaataattttattgacaggtgagatcccctcctttccacccagaccagtctcagattcttcatcgtttcgaatacaaactgtccggagctattcctgtaacttcgtcacttgttcgattcaactcctcgtcattctccggcaatgtcgatctctgcagtgttcagattcagaatccatgcgggaacgaggttagacacagcacggtgttcagattcagaatcgatgcgggaacgaggttagtctcgtcctcggctgggaaaaagaatggaggagctgtgttaatgctgccggcgactacgggcgacggagaaaatggattgaagggaggttcgtcctacctgtctcgacgtccgagccaacttgtgaaaatgactgctcatgcggctgatggtctcgcgaagtcccaccgtgctgtgtggtttcctaagagtcgtccgtacggagtagagaagtcagttgccatttctggctttgga

SEQ ID NO: 367049 - DNA, 1104 bp, Cannabis indica
cctggtaaaattaattctaacacactattccttgtaccattgggagaattgaaggaataaatgcactatgtgatttgggagccaatattaacttgatgcctctgtttgtttttaaaagattgcagtcgggagaagcaaagccaacattggtaattctacaattggcggatcgatcactagctcatcctaggggagttattcaggatgtgttagtcaaggttgacaagttcatctttccaactgattttattcttctggatatggaagaagataacaatgtcccaatcatacttgggagaccattcttggcaactgaccaagctttgatcgatgttcagaaaggtgaattaaagctgcgagtccaaggagaaaaagttgtttttaatgtgttaaaggcgatgacttacccaaaggcaagtgataactgttactttgttgatctgattgatacaattgtgagtgagaaaaagttgatagatgatcctttagaactgagtttaattgaagatgatttgacggagcaagagggaaaagaagtaatgggttatgttaaatggcttgattcctatgggccattaaacagaaagtattatgaagagttgggagtagtaccaaaagagcttgtgccatctactgaaaaacctctagagcttgagttgaaggtgtgcttcctagtcatctacgatatgagttcttgggagaagataagaagctgccagttatagtgtcagcctcactttctgatgtttaaactgatagattgcttagagtacttcgggcgcacaccaaggctattgcatggacactgggtgatgtcaagggaatcagtccctcaactgtgatgcattgaattctgatggaagaaaatgctaaaccaacaattgatgctcaacgtagactcaatccacctatgaagaaagttgtcagaaaggaagtgggcaagtggttggatgctggagtggcctaccccatctctgatagtaaatgagttagtccgatacaagtagttcctgttgggttttatgccctaaataaaactcatttcaatataattagatttacttattaatatagatcagaaataacatttaatgttgcatggtt

SEQ ID NO: 367050 - DNA, 548 bp, Cannabis indica
aaaaaaaaaaatcttgaagaaacttatcataaaatatcatagaataatagaaataagagattaatttatgattttctaaaaaatatataataatacataacttaataatctgttgtaaaaataatataaagcaaaacagttacaccatataaattaagaatagtgtgtaagtatgcttattttttatcgtttatatagtagtaagataatggtaaatataggtaacatatttataaaaggtatatggatagtgaacttttaattatatagagaaagaattgcactaatattaatgtacatataaataaaatcatcaagaaatatgtttaagagtgtgagaaaaataaaaatctaaatataataagtaatatagagagtagtaccatataattttttttattgcatctcagtatattattgtacacaataatgttatcatcgacaaatacatttacgagtgtataagaaagattgagaatttgaaaaaaaaaatagaaaaaaagataaaaagcagctgtgtttagatttaaattattattgtttttgtt

SEQ ID NO: 367051 - DNA, 585 bp, Cannabis indica
atttctctgatgatttcatttgcttctgcaggaagaacacaccgaagtaggggcattgaataccctcttctatatagtttgccttcgaccattgtgtagcgaggcactgaatataatagtttttgcgcctcatttttgtcatttggaagttgtccatcgagtaaataattaataataggtgtcatccatgttggagagctatctatcatctcgacgtctttagtttcatatataattggctcgcctagcatctctaccggaactaagttcaattcatccaagtcactttgcgaggccaattttgttaaggcatcggcgttggagttttgttctctcagaatttgttcgattttaaagtaatcgaatctttccaagttcttttgaactttctctaaatacttcgctatttttaaacctttggcctggcccaaggacctggttcacgatcagttgcaaatcactatgacaaatgagatttttgactttcaatgcctctgctatctttaagtcaatgatcaaggcttcatattcaacctcattattggatgcgtcaaattggaacctcagagcatagtgaaacttaaa

SEQ ID NO: 367052 - DNA, 656 bp, Cannabis indica
aaatatttttcaaaagcatgttctataaaactgttttcactttcaatttaaaataaaaatcataattttaaaaacaaaaaaaaaatcactttcaatattttttaaacagttttttttcttaattaatattttggactctgaccagacccgaacccaaatcccctccccacggccctggcgttgaacacgactaccgacccgaacccgaatccgaccgcagacccagacccgacttatataaaatcaaaaaaaataaaaatgaaaatgaattttacagaacacacttttgttttctgtttttaaaattgaaaaataaaagtggttacataactttttatttttcaaaaataaaatttttaaaaacaaaaatttaactttcattttgtaattaaaaaattaaaaagcaaaagtgttaccaaattgatacacattcaacaaataaattccaaaaactcaaataacaaaatttaaataattaaatggagtttgagaagatttcaacttacttatttttattgtcttcacggggtttcaatccattttacttaatttcttaaaatatggtgtaaagtaattatttccttagagagagaaagagagagattaagagacaataaaagagagagaaaggaagaatgaaaattgggcgtagcctt

SEQ ID NO: 367053 - DNA, 790 bp, Cannabis indica
cacctccccattcagtttggatctttttaatttttctctcaaattgattttccaccattgttttaaattgaataaaggctcctaaggcatcggatttagctttgagagggtaaatccaagtgtatctactaaagtcatctataaaatgaatgtaatatcttagattggtattggacataactggagagggaccccacaaatcggaatggattaagtccaaaactttggttgctctactgttggataacttgaaaggtaaagcatgggatttcccatattgacaagcttcacaaaatagtaaattctcattcatagaagcttctacattggcattatttaaaacttgatttaagactttacaggaaggatgacccaacctcctatgccataaatctttcacagactcttgacttgaactagaagaagacttagactgagacatagactcaacaattgcagaaaaaggactaaaacaaagataaaatgactcgggtctactgttggataaaccaggacttgaattctctaagtgtaaaggtttggtagcaccttcaagttgatataaaccatcctaagtctcccccgcagcaccaccatctttgtttccatgtccttcacaaaaaaaacatcagaaaagaactcaacaaacactttattatcagcagttaatttggaaatgcttataagattctttgcaatctttggaacatgtaaaacatcagtcaaaagtaacttgttacctgtaaagcccgcttagttaatttggaaattagcagttatttatgttaat

SEQ ID NO: 367054 - DNA, 505 bp, Cannabis indica
acacataatttaacgcgaataaatgtaggtacaacataactctatacagtacactcaccaatagttcattttgcaattcaatgtttcatagggagaaaatttacatttttttcctttcacacacatgcagtcacaaaaaaagacctcagtaactagcttcacttttctttcccataaaatcatatatttatctataattatgaggtggcgatttatcacaaaattgttatctgtatttgtatttttgtgattaactaaatataacatgtggaatataatatgatgaccttaaacttaaacttgtcactaaagttgtgaaccaaacatattgtcattaagtggcaaatgatttaatttgagaatttaaaagattttaatacatatatactcatgataaaaaatctaaacatattattaatttttctattatcaagataactaaataaccaggaccgtcttaaacattttggaggccctgttccaatcttaaattttaggcccctaa

SEQ ID NO: 367055 - DNA, 623 bp, Cannabis indica
atccactacgctggccaagaatgccatgcatcccgccttcattagctgactagctttcagggaagagattaatggagtccctagggctagcttgtcacccttgaatataaaccgatcccagcctttgtttcaaaaacgatcagtttctttcggcaattgattgtcgcaccgtgactagatagccaatccatcccaagtataacatcatattccttcattcccagctctattaggtcgcccatgagttctttgctttcgattatgataggtacatctcgcattcttcttgttgatagcatggtttctcccgagggtaattccgtcacaataccacatctaagtaggtcacatggcttatctatactatcaattaacctagtagctatataagaatgagtggctccagaatcaaagagaacattacaaggcaatccgtaaatagaaacctcacctgagacaatagtgttgcttgtggccacttctcctctggtgagagcaaacactcgagcaggagcggcttggttctcctgaggtccatatattccaatatggactccactgagcgcaaccattcctcagcttcaagtgagtccgagttcccattgaattggttctggattcac

SEQ ID NO: 367056 - DNA, 530 bp, Cannabis indica
attcaagcttagacttcgcttgaaaagatacaaaaggggaaagtatcccaaggagtaaggcagacctcaagcagtccttccattctgggaaagagggttgaagatagggctgagcataaaatccaaaaacccaaaaaatggttcaaactgacctaccgaacactgttggaaccgaaactaacggaaccgaaatttgaaaaaactactaacggttaaaacttccattgaacggtcagttttttttgtgtaataaatcgaccgaaaaaactgaaactagctgtcatacatatatatatatattaatttattaagtttttttttgctttatgtattgtagttactagtaatatataataataataataatatattattattattattttattaatattaaagttaaaagaataagataattagtttttgaacaattaatttgtatgtttgtagttgtaagatgtaatatgtttataaaataaattggatcatattttaaagaaaaaaaaaagaagtttggtttgggcggttta

SEQ ID NO: 367057 - DNA, 848 bp, Cannabis indica
cattcactttctctttctctcttcatcttcttcttctttcttctcatctactttatattattttataacaagaatatatattttaattatttttaatctttgttttttggttgaatttgtaacacttattatattttgtgtatttattttcatatgttttgatctcttttattacttaataatattattgttttagttattttaaattttagttgcattaaacttgaaaagatgaaatctttatatagtattaaattaaataaagggtgatatttagtttttatatattttttatttgaagtcaatattaaaaaattaggtatgtaatagaatatgtaattataaaattgatcaaatctaatcaatttgatccaatgtgtaattagagtaaaagcgataataattttctaaatataagtattaattgaattaaattataggaaaaataaagattgaattgaatgggaaggccagcccaaatcgtgatcaacgaagactgttaagaaaaactgaatggaatgttgcatgaatgtggcacgtgaagaagagagaatttttggggattgaggcctttttcaatttatttcttgtcatcaagctgtcaaacaaagtcactttcaactaattttaacttttaccatttggtagtaagaatagttattgaatttttttttagtacactctttaattatattattatagtttttatttgtgttggcattaaatgaaatttttagtttataatttttaaagtatatgttgtagttgtttaaattttttttataattttttaatagtttataatattaaaaataaaattcaaacaactatttattatatatatatat

SEQ ID NO: 367058 - DNA, 601 bp, Cannabis indica
tatttttttaaaaaaattataaagaaacgaaattgtatcttaagcatcatagaattagcaatattacaaaaaatattattttaagtaacattatattattttattatttaagatactcttacgttacttttacttaaaagtaataaagttcattatcttcaaaacttagttgcaaattaatgataatgttacaatgtacaataacatataagtacttactatatagtttataaataaaattagtggatgtaatataatatttaagatacaatttgtaaagaccgcatatgattaatactttgaattattaaataattagggtttatgtatgagattttattattatcaataatattacgattatggaaatttatttgagtgcataaatatatttatgtaatttcttaatttctgtgattgtgtccggaagctgtggaaagcgacgttgggcctatagagagtcgcattttataatttagaatttatttggggtacctttgttaggttttagcggtattggtattttcgggatttagtaaatgaccattctacccttatgttgtgttaattgtttttttgagaagggggcaaaaaggtcttt

SEQ ID NO: 367059 - DNA, 441 bp, Cannabis indica
gggcataaaacccaacacttagggggcacgtgttatcccaaattttgtccacctgacgtggtatgtccacgtaagccaagatagagtacatgtggaatacaaccttgctaatagcagaacaaagccttcttacaagttatggcaaaaccatcaagcaaccaacaaaaaaagttaagtgagtcgttaagtagttgtaccaatatgtttggttggccaaggggactctataggccagccagatgagcttgtatggccgaccagtaggggtgagcaacggtcggtttggtcggttttttacaaacaaaaaatccaaaattcaatttccagttttcatggttataatctgaaaaccgaccgaccattatacaaatataaaaaaaaaaccgaccgttttaatccacggtttggtcggtttaaaccgaccaaaccgaacttcatttt

SEQ ID NO: 367060 - DNA, 950 bp, Cannabis indica
tcccaatgaatacacactttgtgagattttttggatctaaaataacttcttgagttcttcaatcggtttcaataaattccgttcatcttgaatctgaggattaagatcctcatcctgcttcttgccctcttttgtcatgactcccattagctggtgaccgacctttctattctgcatctctatgcggtagcatttgcgagccagcatttggtcacctcgcactactcccaacctatcaactttcgaggtaagtgcttaattgaactagtttcccctagtccaattaacgctggttgaccaagcaatatgttgtaggctgatggtaggtcgacaacaagaaagtcttgcataatagtggtggataaaggcgcttcgcccacagttaatgggagctcaattatttcttgactagcaacatttttgcctgtaaatccaaacagatttaccatgcaaggttttaactttgctttttcaagtcccattttcttcaatgtatccttataaagaataccgaacttccgttgtccaccagcaccctttttatccttttgttggtgagctggatggtaatcactagtgggttgacatgagggtatctcttatgctttgcatcctctttcgagaacacaattagagattcctcagtcttagctttcttagaagattcaggagcaaaaacaaactgcgcgttcttaacttcctttacgtatcttttttgggcattattactttccccgacgagatgtggccctcccgagataaccaagatgtcctctccttcaagagggggaggttgtaatctctggttgcctgggttattgggcagattaggctggttttatccaccgccttgtcttttcacacattagtggaagtgacctcgcgcgataagactttctatctcgtctttcagttgacaaaattctttgtcgtatgcccaatgtccttgt

SEQ ID NO: 367061 - DNA, 634 bp, Cannabis indica
atattttcgtatatacaactgacatttgcaaaaacacggtttttcaattttatacattgtaaaagtatttttttgttagctgagactttgtttaagacatgtccaacaccatgagtattagttttatagtactaaattaggtacgcagcgaaagagtttcgtattgctgattatcatggtatcatatctcaagggatctctagatgtgtgtacattaaatcaaaataataaaatataagtttaaaaatatacctcttcaagtctatcagggtatcttcaagatttcttgtaagttgtatctcttaatccacttgatgaggaaattgcaattggactcacaccagtgtcttccaaattgatacaccacagacaaggaatagtgtggtgtggtctgttaagataaagtgtataagctttgttcttgttaagttctcaacacataagcaagaacaatttagagaaaaattaatttcctaggtatttcaaaaaatagcaatattctgggagtgagaagtgtgctctgatttctcaaatgaggctattatttatagtagttaaattcctttaattaaatcatatttaattatttaaataaataaatatctataaccaaatttaattactgatatttatg

SEQ ID NO: 367062 - DNA, 662 bp, Cannabis indica
ttctttgttggaaacttcaggcacgaatggaatatcaatgtgacagcctttaagtcatacaaggctggtcggcctagcattacgttaaaggctgaaggaacatctaataccaggaattgtgccatgagagtcatgctcgtctgagcttgtccaacagtgaggggtagacaaatttgtcctaaaggttcgtctccttggccggagaaaccatagacaggcaggagacatggggctaagtccttgagctggagtcccatcttttcataagcagttttgaacaagatattggaagaggctccattatcaatcatggttctggcaccgtgttgttggctatcaggacctccacaaccatgggtcgttgtgtggaaacctgattttgacagcgtcttcatcgttgaaggttatggtaggacctcctgcccgtggaattttaggcttccttttttctacgaccaggatcacttcctcttgcttgtgatgtgctgttcgggcatacttctcccgagctttgctcgaatctccagctatgtgcgggcctccaacaatgacttgcagatgtccgtctaccggtggaggtagcaagtcttggttattgttgttcctcttactctgatcggtgttgacatacttctataagtgtgggttatttttctttatca

SEQ ID NO: 367063 - DNA, 702 bp, Cannabis indica
tttaccaagtaaattctctagcttattagttcctccttgcgccattatagatttcgaattgcactcttaattatatagaacgctctatatgtaccaaattatagatatgctatgaattatccactgtttcaatccaaatagtcaaatatcctctatagatgatctacatcgaatagggacaaatttaccgttctacccttcaatgtattttatccttaaaacacttagctacctataaatgatatttcagtaaactaatataattgctgaaataagatctcaatcacgtatctctattaagccaagctcgaaggaaatcatcgtttcaattctaaacacttatagaagctatagattccatatctacgattagtgctctcactcaattgaactaccatgtccttaatctgtatgtcacgagaagatctaattggtcgactttcacgaacaaattaaagaacataaataatatatttaagatcgaacctaaccatctcaagattaagatctataaacctaagatcaaccagtgatattgagttaaaaagatataacggtaagtttatgatatcttatccaagtttaatatcggtccaatctgatatatactccatacatgttgtaacgccctaatctatagggacgccacgtgtgtgattttataaactaatttaatactaatagattaattaattattaaaa

SEQ ID NO: 367064 - DNA, 971 bp, Cannabis indica
tggctcgattattgtgggcgggaatgtaacagtccaattcgcctaggtagccatcctggttgagaacccgcacgcgcgcctcagtaacctttgacggagggctccccaacacagcacccaaggtaccttgccttctatgaggaaccgcggcagtaagttcctcactgacatagtccatgccctcaaccaggacattgccatcagcatccactggctccctaggctcactataccccccatagtttgggggtgcaacctcttcctcttcctctgcctcgaagggactgctaggacggacatcgtcttgctcttcaatctcttggacctcagcgtccccttcatgatcctcccccctggccgactggatcttgttcgggaaaaaggacgtgctgagccacttgagggtcagatgcgtcaaccatacgcattgtctttttggtacgagccatcattctttggctggacgaaagacttaaggaagaaagatagtcacttgtaaaagtgggattacaacgaagaggaggatgatcctcgtgcaagagtttaagcagatcctgatcaatttggtgttcgcctccccaaaactcacatgggttcatctacaaaagataacacacagagtgtttggtcggaatatcgaatgttaaagcaagcaaatatgccgaccaggagtactcaacaaattcaagaatgagaatattcaacgaaaagtcaaaactcagaaagtttgaaattttcacgagttagggcaaaaaatctcatgaagcttagaataagcaggatgagagacaagcattatgcagttcaacagataagcattacggacgatgcatcgcataaaccatgacaaaggaaaatcacagtgtaatgaccgctttagtaattcggattagtaaaggcaattagcactaatttttattattttattattatttgtgaatttatttaattgtggaccccaatatttagaa

SEQ ID NO: 367065 - DNA, 1276 bp, Cannabis indica
aattctaacacataacattccatgaatgttatggtctcaattaaatgagtatacaattcattctccaacaattatattactataacttttaagaattttaatttaagatgtgaacatctttttacattcttaatattagtgataattgtggaggttactcataacaacaagtaactcctcatataatacaaaatgatgacaactaatatatattattcataaataatataacaatcatccactaaattataatattatcttattattaacaaacttgcaactttgtaatatttatttaatcaatagttcagggggcatttttaacgaccttaaaagttcagggggcatgatttagtacatgtcaaagttcagggggcaaaaatcctaattagccttttttttataactctcttactctttttctatcaaacacacttttttgttttctccaagaccaccacttttcaattttgttttcaatttcctataaataaattttaagtgtaattattttatcaaaatttagaagaaaatatattattatacatataaaattaaaataattttgcttaatatatattgtggacctccttaatggctcttgttcttgagggtgttgaatttgttcttctggaacaatagcctcattttgatttgggagttgttcaacattgtcttgttgaggttccggattcatttcttgatcaatgacaggtgtggaagcctgaacattgtctaaaatgatagtaggaactgagtttgaattcaattcctcctcaaaaacaatgtctctaaccttatttctcccccaaattcaacatcctcaaaaaatgttgcagttcccgtctcaaaaatatttctgacagtgggatcataaaacttatagcccctagatcgctcagaataaccaataaagtagctgctaactgttttggagtccaatttattttcatgtggcctataaggccttgcctcagctggacatccccaaatgtggaaatgctttagactaggctttcgacctgtccaaagctcataaggtgtttttgcaactgctttacttggtactctattcaaaatgtaagctgctgtctttaatgcttctccccagagggacctaatctcttagttttggtctgttttcccttgatacaatctacacagacattgaaatctatgaagtcaagagactctaaaatgtcatcagacacaagacgctcaattctacctcttgagatatgacctaagcgttatgccataatgacgctgaattttc

SEQ ID NO: 367066 - DNA, 506 bp, Cannabis indica
tttcacctgatgttgacgcgtgattttctaattttcttttaaaattagtttggctcaagtcaatgtaggagtggcaaaatgtgtcatcgtgtcgtgtttgtatcatattttatgtgatttggttttatatttcgtttcaagtgtgtcggcctattttttaactcgtgtctaattatttcaaccataacccaacccgtaaaaaatcgtatcgtgttcgtgtcgacccactatgactcgttttgttattattgaagctggaattgtaaaaaaaaataatagatttaagcttccttaaaaaacttatatacatgtatatataggttgttatatatataataaaaattaaaaaagttaaaatatttttaatttcatgttaaagaaaattaaatttaaaatttttaacttaacattgaatcactaaatatatatttttatataattattattaattttttattttattatatttaaaaaatacgtgtcaaacgtgtcacatttgtgttaag

SEQ ID NO: 367067 - DNA, 530 bp, Cannabis indica
aactcatcttcttcagccatttctggatcaatattttcccagaccactagtacgggtaggtgggtcgccacgttgtagcattgcctcgcctccccatgatttcctctcaccgttcctatcctagcttcctgggttggcacaagtgtcgtattgatgtgactgcaccaaagtctaccaaggtcggtcgatcgaggattgcgttgtatgtggttgggcagtctaccaccacgaaagtgtagtacttgaatgtgctctggggggtgtccggtcacaaggtgacgggaagtctcactttccccattgggataagtgtcgttctgtttaatcccgtgagttgggaaccattcggtgagaggtctcggtctgtcaggcctaatgcggtaaaggcctctttgaaaagtaaatttacggaactcccgttgtcgatcaggactctggccaccactttattggagatgggggtctctatgacaaacgggtcatggtggggaaaaacgcaccgtcttagcgtcttcttccgtgaatgtgat

SEQ ID NO: 367068 - DNA, 524 bp, Cannabis indica
ttggacctagatccagaaccgtaacctgaccaggacccgaaatcaaaatcagacctagcccgaattacgagccggaccaaaatcccaacccaaaccaagactcgggacccaaactcaaacctgaactcagacccaaacatggaaccaaattagggacacagaaccacagtcagagctagaatcgcacccaagtctcgatcccgaacccaaactctgaaatgggacctgggacatgaaccagaaccagactgagacccgtgacagtgatccaaatgttgactcgggattcaggtaacggggcctggaacagactagtagtcgaggtttagatcttggactcagacaaggacaagaacccagatgaagaaaaaaacccgaaccctgacctagaccctggaaccaaaattagaacctgaacaagaatcgccaaaccaggagcctggaacaagactaggaccgagaccaggacctggacacagacctagaaccaaacacagacctagcctcagacccaaactgagagt

SEQ ID NO: 367069 - DNA, 520 bp, Cannabis indica
gtcgtgtacccagaccggaactgagactcggacctggacctaaatttgggacccgatcctaacacaaacttggacctagatagggatccagatacgaaccgggactcggacaaagacccaaacttggacccgcactcgggactcgaacttggacgtagacccgaatctagacccagataggggtccagaccttgacacaaaacaagacacggagtcagacccaaactcaaacccacacctagaattagacccaaagctagacctgaactcaaacccaaactcgaactcagaatagcaaatggaactagaactgaagtaggacgaggacctgtacaaggacctaaacccaaacccgaacccaaataaaaccccaaacagagacaaggacacgaaccaaaacctaaaccgggacccaaacccacacaataaccgcgacttggaccaagaatcaagataaggacctggcaaaaagaacttggaccgggacatagtaccagacccattcccgaacttgaaccta

SEQ ID NO: 367070 - DNA, 588 bp, Cannabis indica
gaaaagatgattcttttctaggttagattttctatggggtgtacgatatatttaagaaaaaattgtggattgtttaagacctgtatttggaattgaagggagtgtaattacaaaatgataacaatttaataaaaaagatagggtgtggtgatcaattattggggtgtaaatattttttctataaaaaatgactcaaattctcttttttcatgtaagaataaaaattaaactagggacaattttgtaaatttatcacttctaatatttattccaacaaaaaataaaacatcgtaattaattctcattaccatttttattctatcgcatcactattattattccattaaactaaacattatatagtctcgataatttttttacactattatttaataataagataataagaagagctaatacaatcaagaaattagcaaacaaaattgaaaaaaaaaaaacacacaagataaaaaaataggtaaaaaaaggtacaaaagattaaaatattcttttttctttaatagaaaggaggtacataatgttagagatattattacaatagaaggtaaatcaagatatatacaactc

SEQ ID NO: 367071 - DNA, 502 bp, Cannabis indica
ttacaacttggtatcagagcaaccatggttttaaaggtcctaaagactagtcgaatctgtacatttactgcaaggacaggtcgactcatggtattgtaagtatttatattatttgctatttgattacctggcttggctattataaagtatgttgggaaaagtagcacagtaatgattgtgataagaatatgtgtacgatatttgcatattgatattgaattccgtctgagttctaaatggttagaatatgtggacttaatgtgtgataagttatgcagtaagggcaatcgaatattctaattagcgagctatttaggctcgaggcaaacagtaaggaagagaattctttattgccataatgctgggaacaagtaaattctgctatgcaggatatgatttgtaatatcccaataagtctaatggtaaataataagggtttatatttatattatgagttaatcaggtaataagtgggattatgatcctactaatttatttcagc

SEQ ID NO: 367072 - DNA, 561 bp, Cannabis indica
gggttaaccctattcgtgaaatcctaaattatgtgactaggattatcgacacctgatcaggagcacccagggattcgaaatctctgctattgcgggacaacaggtaagacagtggttagcacgtagagcagtgaagcttatattggaagtgatatgtatgattgtttagtaacgagaattagggttattaccctaataggaacggtttaatagcttagggttataactctagtgatatatatatgtgtaaatgccatgccatgttaaatgtgatgagatttaaggattatgcgcttaaggcataatcacgttagactcagtaaccataaacgatatgaaccagttctaaggccttaatgtatacagatgtgtgggcgcaacacataggtctacgccacgtagacataaatgggcatgtgagtgcaatatgcaggtctgtgacacacagacatatataaatggcatcattgttcaaacagcatgatgagcatattattattgttatgttatatactgtcttgctgggcttggctcacaggtgctctactgtgcaggaaaggg

SEQ ID NO: 367073 - DNA, 327 bp, Cannabis indica
tttttggtgatattggtaatggtgttggattagcaacaacacctaattaattacctgtataggaaaagcaaccaatgggtatattcgataatgggtgtgacggtcaccacactaagtaacatgattgagatcactctttcattgcatttgtatttgcatgtattgtattttctctctatatatattatatgcttgttgacatcataagcataacactttgcctactactacttcttcctaagccactaatatattcttttagtattataacatgaaaatgtgtatattctacctattttttttattatttaaataaagaataaatct

SEQ ID NO: 367074 - DNA, 621 bp, Cannabis indica
tgctgccagctcaatgtcgtgaaacggatatcactactcatactccttcaattgcctagacgcataggcaattacttttccagactgtattagaacacaacctaagccctaataggatgcatcacaataaatcacgaacttctgattactgaccagccaagttaacagaggagcaataattaatctttgtttcaactcatgaaaactattttcacacttattagtacaaacaaacttatagttcttttgagttgttaggggcgtagaaatcttagaaaaccctcagtaaatcttttgtaagatcccgctaatcctagaaaacttctaacctcgattgcagacttaagttgaggccaatcccaaactacttcaattttcaccagatccaccaagatactgtctttattcaccacatgccctaaaaaacttaactgggacaaccagaattcacatttcttgaacttaacatataacttatgctccctgagacgttgcaacaccattcgaagatgtttctcgtgtgtcacttttgaattagaataaattaaaatatcatcaatgaagacgataacaaaagcatctataaagtccttgaacactcggttcatcaagtccatgaat

SEQ ID NO: 367075 - DNA, 605 bp, Cannabis indica
aaatacatcaatactatagtaaaatatttatcttggtgtattttgttgttttccaaatttctaatggtgaagttgttcatattaaattataaaagacatgtagatagagttatgtacatgaaaacactgttctgatttttaatgtttcacaacagttgcataaacattttgctaacagttattttgtatgattgaaacctttgtttgatgcaaccttcggccaaccacccagaaactttcgtctgaatgaaatcttcgtctgatgcaaccttcggccaaccacctagcaaccaccatacgaccatcgtctgattgaaatcttcgtctgatgcaaccaccgcacaaccacgcagcaactactctgcaaccatcgtctgattgtgtaagtgatgatagtgtaagtggtattttggtaattaaaatttcataaaaggtataaatgtcgactttaccttatagaggtatttttgtaaataaaatgttaattatattttctatgtaattatttcttaaaatctatataaataattaaatttgaaataatatataaataaattcatattaatatatatatacaagtgtgtatatatgttgggttttatgcc

SEQ ID NO: 367076 - DNA, 899 bp, Cannabis indica
gccccaaaccaaaccctaagtcaaaaatgggaatgggggtcccctaaccgctggaaagaggccccctccggacggttgtcaataagaaagccttagaaaggttttcattgacaaaagtcgggtgcaagaatcccacagatggtgacatcacaaataaacaaagaaaagaaaaaaagagagggtaaaagccgagaaagacaaagtcttctctgaacccttgaaagtcattacgtgaagaaaagatgggcccttggaaaaaatacagtacacaaaataaaagaaactcaaacaccagaaaagaggaacctaacgtattacgcagaaactcaaggcaaaaaattcccagaaacttcaaacatcaaacccagaaaaagcagatgaacagtgaagcatgcaatgaacacgaacaataaagtacaggatgtgaaaaacttacataaggctttagaactgggtgttgttgttgatcgacggtggaacgttgactgacaatagcgaaggaaggctagtaagaaacctatggtgtttgagggttttctggtttgaaggtttctttctctctggaaaattcgaagaaatttggtgaaagtctgaaagtaaccaaatgaagggagaatggtggtttttataggtcgaagtgcatgtggaacaggcgtgatcacctaccaatggtggtttttataggccgaagtgcatgtggaacaggcgtgatcacctaccaatcgtgcggttgggaaggcacacgattcgaattcccaagatccaacggctgatttggtttgtcatcaaggcggtggaaacgcttgagtgtccgtctgacacccattaatgcgccgtatcaattaatgggcatgaaacgaatcgacgcctacaaaaagtgaatcgctgcagtaatgatg

SEQ ID NO: 367077 - DNA, 629 bp, Cannabis indica
gggatggcccattccctcgaccaaatgcgtgttcagacaagttttgtccgagcaacacgcacacggggtgtctgaaaccccattccgcgggcataaatcctgctgggataccccagcgccgagttttctcggccagatcacttctgggcgcgcgcggatgagtatgcaacaacataccatccgtacaacccactaatttttttcgtttttcttcgttttctcatactttttcatggaattaatttccgattttttgtgtagttttgtatttagatatttactattcctatttcaattctaattatcagaattaaattaattcaattttttaaaattaatttataatattagagtaatttgaacttgaaaataggtaaatatctaccttttttgcttaattaactattttatttttaaatttgattattttatcttaattttaaatttaaggtcagatattaattttttttgtattacttctttttttaaattatttgaccttatttaaatttaaaataagattattataatcatgacattttgaatagatataagaattttgctaacttttttaaattttgttatttttatttaaattaaattattaatgagaaaatgatatttttttt

SEQ ID NO: 367078 - DNA, 906 bp, Cannabis indica
gaactttagagctcaaactttgctctctcatggtgatttttgtttatgaggtttttattcagttcttttgcatttgcatggtttatgttcattatggcttgaataggtgatctaaaaagttaggtttgatttaaggtcaaattgaggtgtttttgtggtttttagggattcctatactaaaccgttcgatcagttcattatggacctgtaggaatcggaaatctagttcatccctagacagacccctcaaaactggtttcccagttgggaatcggtctaccgattcgggtattttagggcaccctaaattttctcatttttatgatatatagggtatttctatgttatctatcgatagagaaacttttagttttaattttaagtccccaaaaaatgatttggtgtgtcactcaccagttttacgaatattgtgacttaggggcctttaaatcgtcgagcagcagttccacttaggttgactagcacacctgaatttggaaaagaggtaagattagtataatgatatgtatatgtgattacatgtttagtgtgcatgtttatgaatgcctgttggattacattgaaatagcagtgtcaatatcgtaagagttttattggatactgattaatgtatgtttggcattagtactgaatggtgctatcatatcattacgacaagagtaccgagtataggctgatattatggtcaatagtattatcgtacgaatgttctagactcagtaccgcataggacgcggggatagagttatggttgggtgtatgggcacctaatcgtaatccgggttatttttatgattatgattatacttttcctactgagtttgtcgactcagatttattgtttgcatgtgtaggtaaggtgtaacaccctaactatcttaggcg

SEQ ID NO: 367079 - DNA, 637 bp, Cannabis indica
agtttattcaagggttggatgaatatattgcacgggatgtgattgttgcttctaaacaacctagggttgcttggacttatgcccagatagttgaactggccgtagtttctgtgggtgcagaagatcatatacgaaagaaaaatattgccagaagagattcgtggaagcaaacatcaggtgttggttctggtaggggtactgatctcggtgaccggaagaaaaggcctagtgaatcatcagctgcaggcccaaacaaaaggttccagggtaacaggcttccgtcatggtgagaacaaaaactggcagactttctctaaatgcccgagatgtaaaaggcgccatcagggcgagtgtcaggccagggcctatttccattgtgggatagtaggtcatatgaagaggaatttcccacagctactacggctagaggaaaagaaggatgatacacctgctcctgcccgagtgttcgccctgactcaggctgaggctgatgctggtccttcaactgtgacaggtcagctttctgttgctgctactttattgactgttctaaattattctgctgcaatgcattcttatatttcaagtagaataattaagaagttgaatagacctagtgatgtgccttctagaggtt

SEQ ID NO: 367080 - DNA, 898 bp, Cannabis indica
acttttaatgggtattactcataaatgaataatattagaaaaaattgagtttttatgattgattttttatttaattagaaaattttcttatttttacattatatgggctggggttgttccatgaaaaaaaaataataaaaaaaacgttttcggcaaaaaagtaataaaaaaagttgagtttgacttttcatataaacatattgttgatataatataaaaaaataagtattttttgatatttttttttaagtagttaaattaagcataaaaataaaaatttatgttttattattcgctatcggactaatatttaatagtttaatatttttaaaattaacatttatagttgaatttgtttagtacccatcaacgggtaatatcgattaagaagtgttctctatatatttttttatatactttctctctcataagaaaatcttggatagagtgtggatccaaatccgaattccgtaccgagataagggtgaggctgcttggatttgtgtcatgatgtgtggtgtggaataataaagtatggtaaatttcggcataaatacctaacgtttcagattttatacacttaaatatcttatcttcgtttttagaggtaaaaatacctaatgttacaattctcttacactgttaccactatttctgttaactcgtaaatatggacacgtggagggtccggatgcattagatttatttattttattttaaaatttaatattcttaatataaaaaattaggcgtttggttgggaggaatgaaaataaaggaatgggaatgagaatgggaattggaataacaatggaatggaataaactttaaaatagataaaaaaattgataaaaaaattattaaaaaaatttcaaatcttgtattggaatggtctttc

SEQ ID NO: 367081 - DNA, 860 bp, Cannabis indica
gacacactaaataagtgatgaaaatacttctgtctctttattgataattgaatgataaagattacattgaaatagagtttttttaagggcacaaagcccaataccaacagctagggataagggaaatttaaaaaggaaaggccctgggacgacacgcgtgtgaggcccaacctatacaatctaacacctttaaaggtcatatggagaaaaggtgacctaccaaatcaatggtcagatttcacctgaggatgatcaatccaagccagcacatggaaagaagttggcctataaatacccctataaaacacacgatagagcaagactcattcttccaacttttggtaaactcgcatgtagtaagctaaataatatattgagaaactctacaatatccctactaagcttcctcttctttaggaggaacacaaggaaaaccaagtttcagtccattgtatccctacttgtataaacagttaccggccgatgagcctaatataatgaattccatgactaaggatagttaacgcctaaaccacataaaaatctcttgtttgttatcatgttatttattctgctatttctttcctaagctttaaatataataagttgccaaaaatctcgataaacattttggtgctttaattgagagctaaagtaagagagaaccatgcacgatggtcaccgacgcatgcctgtaaaaagaagatcatgtgcaaggaaagaaagaaggaaatgccgcctaatttcttgtgtggggttggtttgaggccaggagcgtgttcgtcagatacatcatcaaaaatggacacccacacccctatccagtcaaagaaagtcaagtgatgaacgcgtatggtctt

SEQ ID NO: 367082 - DNA, 695 bp, Cannabis indica
tcagcagtacaggcatcgtactggttaagagtgtattcaccctggaaagtatgttggtactatcatagcgacacaaccattgtgtcggttcagcagtacaggcatcgtactggttaagagtgttattcaccctggaaagtatgttttggtactatcatagcgacacaaccattgtgtcggttcagcagtacaggcatcgtactggttaagagtgatatcatggccaatcatacttttggatgctattgatgctatcatagcggcacgaacatagtgccggtcctacagcacgattatagtgctagtaggagtgatatcatggtcagtagcacaagcagttagaacgttcttgctcatctgttaagccctgtagataggtgtatgggcgcctatttacaggtcggaatttatgtgatatgttatatgcatttcttactgagtctgtcgactcacagtttctactttcatgtgtaggtaaaggaaaggcgaaggctgaacaggagtgaacctgagctcgggtgagattgtacatgtcaaagcagcgcgacctggagtgttcggtctcgggacatctggggatttgtattttggtagtcgctgtgcgacctgtaatatatgtatttttgaaaagttaattttacaaagtttgaaaacgggatcccgatatatgtaaatattttattatattataaagt

SEQ ID NO: 367083 - DNA, 548 bp, Cannabis indica
cctatcctgattctgggtccaggtcctgattattgtgtgtgtttgtgtcccggtctaggatcgggttcaagttctagtctcggttcgggtttaggtatctatttgggttttgatcaggcttcgggtttgggtttaggtcctgtactggtcctagtcttatttcggttgtagttccatttgcgattctgagttcgagtttgggtttgagttcgtgtcagagttcgaatcctggtccgggtgtgggttcgcgtcctggatcttggtctaggttcggtccgagtccgaagttccaatcccgatcttagtctggcttcagatctgggtctaagtccctggtgtgggttcaaatttgggtctgagtccgggtccagctttgggtctgattctgtgcgtggttttgagtttgggtccgagtctgtgtctgggtttgtgtccacgtcgaaacacaaatctgggtctaggttcaggtctaggtccatgttggggacccgagtgcgggtccaagtttgggtctaggtcaggatctcggtccagatctaggtccagca

SEQ ID NO: 367084 - DNA, 1123 bp, Cannabis indica
aatgaggctggggagccagtcgatgctgatgatgacgtcctggttgaaggtgtggactacgtcagtgagaaacttactactgcggttcctcatagaaggcaaggtaccttgggtgccaagtgggtgagccctccgtccaaggttgctgaggcgcgcctgtgggttctcgaccaggatgtctacctgggcgacttggactgttacattcccgcccacaataatcgagcaacaaaccatgaaaagggatgtgtgcctggtcgggtgctcatgcccagcaaggggcattgttacctttgcacccgtactttaagaatgtggcatacttcttccgcctctgtccgacccagttcactcccaagggcattaagtatttgtccgccttcttcattctttatacctcccagaagtgggatatgccttctccccgcgaggttagctggttttttgatttgaagtccacccctaagcaaggaggtcgggtacttctatttctctcaaccagacttcaagtggttgacgggtaccagggattcggccatcagtaaaattggggcgttttgttgatgagtacttcatggtggatggcatgggcaccacccatactcagtttcagcagatccctacatatcaccaccctcccctcactcttactcttaggcatagagctcaagagcttgctcagctactggcggatgaccggaatatcatccagttgacctccgaggtcaactttgtgaagtacaggctctatccgaaagatttcattcctaagccagtgaaggggaggaagaggaaatctggcgatggccggactgagggagctgataaggagaataagctgactcaactgaagcgcaaggctaagttgaagggaggtgcaagggccaagcagtatgctcaggagcccttgaatcctgaagatgaagctgaggaagagcaggtgactccgctcaaaaggaggaagaaacttctggcccagccaggcctattgaacatgcaattgcattagggagcccagttcaccagctcggctgccttctcccgtgctcggaaaaaggaaagttgttatggctgagataagaggcttgtcaggagatgatggtattggaaattattttaccag

SEQ ID NO: 367085 - DNA, 617 bp, Cannabis indica
atgaaatacttatacccttcaatggtacaagtattataagggccccaaatgtcaacatgaataagatcaaagcacttttcagtaatgttatgatttgaaatgaaaggaagtttcctttgtttggcataatggcaaatagagcaatgaaataaagaattagaatcaacatgaaatttcaaagctttattcaatggatgagtttttacacaagatggatggcccaatctataatgccaaacagtttcattagacatcttagaatctgaaaaagatgcagaaacagaaacaagatttttattacagctttgatcacaattcaagtagtatagattgtcaagttttctacccttcccaatcaccttggtcttggtagtgtcctgaatgatacaatcatcatcagaaaacaagaaagtgcaattagttgtggctgttaatgagttgacagacaacaaattaaacttaaaggtaggcacatataggacattttcaagaataagttcaggactcaagtgaactgttcctatgcaagaaatctcaacatgcaatccattaggcattaaaacagtttttaacttggtattgacagtggtatttttgaacaaatgaatatcatagca

SEQ ID NO: 367086 - DNA, 599 bp, Cannabis indica
tttaaaaaaaaaattctaactttaattaaattttcaattatttaatattcgaaaattatatatagatataaatatataaaaatcgaaattaaataaataactaaaatataataaaataaaatttgaaaaatatctaatttaagttgatgtagaaatatctaaaaaatccaacttaaatatttttcaaacaaaaaatttaattaaatatcaaattaagttataaccacctaatttgaaagatattccattttaagtttaccaaaaattttaaaaatttttaacttaaaaaatatcctaagaatcttcaataactaattcctagaattcctcaacttaattttaaaattcaaaagatattcaaatttaagttgataaaaaaaatagttagaagtaactaatttacaacttaaataggaatatttaataaaataattaaaataagctagggaaagaatctaattagttataattcgtatttaattaaatacaagaaaaatacatatagtttatcttgaattaatatcattaaactaagtgtgtttttcttaaattaatttcaaaatatacgatgaaaaataattccatttatttcgaaatta

SEQ ID NO: 367087 - DNA, 871 bp, Cannabis indica
taaggtggcgtgccgagccacttgtgggtcggatgcgtcaaccctacgcattgtctttttggtacgagccatcacctatggctcgacaaaagatttaacgaagaatgtctgtcactcaaagaagttggactagaatgaagacggtgatgatcctcgtgcaagagttgaagcaaatcctggtcgatttggtgttcgctttcccaaaactcacctgggttcatctacaaaagacaacgcacaagatgagtgtttggtcgggatattgaacgttaaaatgggcaaatatgtcgaccaggagtacgcaacagattaaagaataagaatattcaacgaaaagtcaaaactcaggaagtttgaaatttttgcgagttagggcaaaaaatttcatgatgcttagaataagcaagatgaaagacaggcataatgcagttcaaaaatcaagcattacggacgatgaaattgcatgaaccgtaaaaaaggaaaatcgcagagtttctaaacttagggtttcctacatatcttctacagaaaaatcgaaagtgcattcagaaagcaaatgtccaaagtaaacataaaggaaatcgagaacttcctcaaggaatcaaacgtctgggttcatgttacgtcaagccaaacgagcagttttgatgaaagcacttcagcaaacttgaagccaaaaacccctctttttgctctaaacgtacttagcaaggaaggtcggtgtggacaaatgctcactggtatttataagaaaccaacgaaaaggggtaatcatttcaaaagaacctcagacgcctcggttcaccctaaaagcgaatatgggaaatcaaaagtaatcaagtgtagccgttgttatcccaaatttggcact

SEQ ID NO: 367088 - DNA, 719 bp, Cannabis indica
tggtggaagctcataaaatgagaataaccttgactttcgcttaccgggacaacgttagattctcattttgatcgaataaaaggttgctaaaatggtatctattttagatgagctgactactctattcaactaatattatctttgactctcgcctaccgggacactgtatttcaatatgttggaaaccttggaaaataataaatatttttagttttggtatttttgcaaacatatctgctcacttgttactttctgaatttgtgtatgaatttattgaaccaaatgatttacttctgtttactgatatttgtagtgtcaaaatgtacaacccacaccctaatcctcatctagaatatgcctttaagaataaacttcaaagtgtgaaggggactcctggtcaaagtatcacttcacacttgctcatgatgaacatgaaattccagaaagcagctaagctgggaattgttttatctaaagagcagagcattcattgctccgacaatcctactacttcaagctcagttgagaagaatagagaaagtgattccacttcctcaaattatccttcacgacagattgaaccatcaataagaacaaatccaaaaaggttaagcaatgatgctttagtttttgaatcatgtgtgttagagtaatgataaatccatttggattcttgattctggtatctacaaccatgtagttgttcattgcattgcttg

SEQ ID NO: 367089 - DNA, 570 bp, Cannabis indica
gattcgtgttcgggtcttgagtcttggtctgaatccaggtcttggtttgcgtttgggtcccactcctagtgtgggtctgagtttcatatccttggtccgagtctggttcttaggtcctgggtccagccccagtttttgggtctgggtctgggtctggctttgggtcccagtctcggtccaggttccggtctttgtttaggtccctagtaacaggtcccgatccgggttcaagtctcggtatgggttctagtctgagttttggtttaggtttcggtcctgctacttcccaggtctgcgttctagtccttgacctagtccgattgctattctgattctgagatcgggtttggatcacggtctgggtctaggtccgagtctggatacggatccgggtctggatcttggattcaaacacttactacgggttaggtcgaagcctcaagtctagattcggatctcgatcttattccagtttatgtcccaggtcttgggctgcatcctatcaatgtgtttgtgtctaggttcggggttgtgtccctgtagtcaggtcttgggcttcgggtacaaggt

SEQ ID NO: 367090 - DNA, 738 bp, Cannabis indica
aatttgggaaaaaatcccacaaaaatcgggttgggtgagctggctgcgcctgtagcccaggaagtctgcaagcagccgagacgcgcgcgcgagggagggagtgacgccgagaaaactcggcatttacagcctccctgaccgagaaaccttggtcagctgcaggggacgcctgcgggtgttgtctgaacgaggggctgcaccctaatttgaccttgtttcaactccaaacttccaaaattcataacttttgcaatttttatcggaatcgagttccgtgaaaaccaaaatttcttaatttttcacaaagaatacaaataaaatattttcagaaagaaaaaaaatattttcatggaaaaatttcgtaaaacacatacattcatcaaataatcacataaaccatcatgaaaccatccaaatcaacacaaacatcattttaattcatacttcatgaaagtaaatcattaccatggctctgaggctaggtgttggaattattttaccaggatctagatttacaactgtcgcccctgattttgtccaatatacgtggaccaatcagacaaggacacgtggatcaaacagcttagcattcaaattatttgctaagtctttatgtaataaggaagcatccgggacatgcctcctggagaagacatagggagccccatacgctcccggaagtccaagtaatattaagacgactccgcgaggtgtcaggcttcccctgagcaatcaagt

SEQ ID NO: 367091 - DNA, 742 bp, Cannabis indica
tttttttttttaattttacttcaaactcctaaatcttttttctatcatgtgcactactgtatataattattatatatccatattgttaaaagttttttgcggctaaaccctcctaactatcgttttacttgcacttaaccatttaagattaaattttgacagtaaaaccttttaaactactgaaatattaacaaatttaagatgtcatccagttaactacaaccgtgggttgtttatgtgtacactcttgtacacatgacacgtttatattgatacacataatattttaatgtaaaaaatatttcaaaattaaataaaattataaaaataaaaattaaaaaataaaaaatattatgaattttgaaatatttttttataattttacaataataatattgagtatatcaatataaatgtgtcacgtgtacaagagtgtacacataagcagtctctgttggcaagttaactgtaaaaaattgataacacattaaatttgctaatagttcagtagtttggagggttttaccaccaaaatttcaataaggtgcatcttgtttttcggtagcccaagaattccacggttaagcgtgcttggcttggggtaattttaggatgggtgatctcctgggaagttttctcaggaagcgtgtgcgagtgaggacaaagtacgctgaaaacactcgtgttggtctgtaaggtcaatcgtcagtccatgaagtagccatagtgacgtactcgtgta

SEQ ID NO: 367092 - DNA, 663 bp, Cannabis indica
taatgttgattcttggttttggagtaaggagccgacaggtttttactcggtcaagagttcttatcactatctccaagagttgaaaggtgaatggggccttcagttggagtctgaattatggagggctctatggaaagtcaaagttcctcccaaggttcttcactttgcgtggaaagccatctcggggtgtttaccaactcgttcccagttacgtactaaacatgttcctgttgacccccgctgtgtgttctgcaactctgatgaagaaaccattgtccatgttttggttggatgtcattttgcacaatcttgttggaataggtctggtgtggggctgcagttttctgcagaagctacctttgctgattggtttaaggcgtttttggtagggggtagagtggccttggtggatgagctattgatggtggcatggggtatctggaaagcccgaaatgagcttctttggcagggtcgttcttctcaagctgcggatgtggttcgaatggctaggtctacactttataattggttgttggctcaggaaagtaggtttgaaccgcagttatttgatgctgttgttgttggtagcagtgtgtgttgggagaagccgcctgctgggatgttgaaaataaatactgatggggcgatttttgctgcaacgac

SEQ ID NO: 367093 - DNA, 661 bp, Cannabis indica
cactaagaaaaaaaaattcatactccactaaactcataaatattcaaaataataaattatccccattgacaaacaaaataaactaagagtaataaaaaaattaattatccaagaaagcggatattacaattatgccctccgaaaaagaaattttgtcccgaaattctactcgattttttttggaaaacgaagactcgatgtcttatacgtcagcacttgtcctcactctgtcctgcttctttgatagtgaagaccctcgttggaacatatttatcgtcttcctttaaatcttctttgttctcagtttgtccccacaatagacaattacgtttaatatgaccttcttttccgcatttgtaacatgcattttccctacactctccgagatgaggtttggtacatttaggacattctggaaggttgcgtccattgtttttatttgatcggtggtcgttgtcagtcttgtacctcttgtcttgacttgactatacgggctgatcttgtccccttttcttgtggtcattagaattggctccaccttacttagattccctcttagcagcatattccttccaattttttttttccacttccctcagccataggagccatttcgacaacttgagcataactgaattgaccccttgacacaatctctaca

SEQ ID NO: 367094 - DNA, 726 bp, Cannabis indica
caagataataatttatttatatacagagaatgataaacatgttttggattatttcacaatgttattccattttcgaaaatgagaaagaaataaaaatttatagcttaaaaaatcaaatgatgtatatataatgattataatttcaaataagaaatatttgttgtatgagactgagttgctttaaggtttgataatgtggttgttgtatgaaattgagttgtgctacatgttgtataagattggattggacatggttgttgtatgatattaggttgctaacatggttgatgtataagactagattactaacatagctattgtaagagttgctaatatggttgctgtatgagattgggtagctgtaagaattgctaacaatatagcttgtgagattgtgttgctataagggttgctaatatagttgttatatgatattcatgagttgctataagggctgctaacatggttgttatgagattgagttgttgtaagtgttgctaacgtagttgttgtatgcgattgaaatgttgtaattattgctataacatagttgttgtatgagattaggttgctaacaaagtttctatatgagagggttactaacatggttgttatatgagatttgctaatatgattgttgtatgagatttgttgtaattagtattgctaacattgttgatgtatgagattgggttgttataactgttgctaacatggttgttatat

SEQ ID NO: 367095 - DNA, 427 bp, Cannabis indica
tggcagactactccctctctttcttcttccttgtttactaaactttatatgtgttcatttcatcgttttagaaagttcatatttagggtgttaatcaacatacttgtgaatagatctaagatcctggtaaaataatttccaacagatcggacaggcctgagcaatcaaacggcagatccgagttggccatgagcggatctgagcaggtgcgggctcctactccacctttgccggtgcttccagaggccaagaaaggcagagagatgcttgcccattacatgaaccggttggttcctaagttaagtgagcagctggccggtgctcataacgagtttccctggagttgctgatgggaggagtcttgaaggaatttaccagggtaagcctttgttgatagtttcctttaattcttctttatttggttcag

SEQ ID NO: 367096 - DNA, 494 bp, Cannabis indica
caatatttctacaccaccggcccaccaccaatctgcaaccaaaaaatcatagacaaaattgtaataataaaccgtaggcaagaagaatatataatagaataagaatatggagaagggaaatgactttaatttgccaatctattgcaagctactactaataagagattcataacaatttgaagaagttaaaactaaaaattcaatactataaaaagaaaatgaaattttattaatgatttaacccccacccaaaggatcaatccaagcttcataagaaagagagagagaataaatacctaaacttacttttatcctcccttttcgttcatccgcactcctgagcctgtccagccgtcgttctctaaaccaagatctagtcgtcaacaccgtgtggtggtggtggtgattgattccaattcgagagaaagagagatagtagagagataaaaattgaattaagagagagagagagagagagagagagagagagagag

SEQ ID NO: 367097 - DNA, 617 bp, Cannabis indica
aaaaaatatatttttggcaaacaaatagataaagttgggttaagtattttttagacaaaatatattttttatatagtgtaaatatagattttttcttttttttttaattatgtaactaaattaagcatagaaattcaaatttctctttaattatttgtcattagatcaaaagttaatggtttactattttaaaaatttatatttatagttaactttatttagtaatcattaatagataaggatgactctacaatgcacccccttaaaaagagtgtactcatgcacccttgacttatttcggcatccagaagaattttttagtctaattttttttcatattcatatatgttatagctattgaagataacctacaaaattttgagaaattcagaataatttacaatatagaaaacaatgttcaaactgtctattttacacgcgtataaaataaaatagttacgcgtgcaacatactgtttgaacatatttttcggcacgttaaaattttctaaatttcttaaaattttgcaggatgtcttaaataactataacgtacatgaccatgaaaaaaaaaattgaataaaaaatatttcgagtgttaaaacagataagggtgca

SEQ ID NO: 367098 - DNA, 845 bp, Cannabis indica
tgcttttttgctaagtgtatgctttctcatgaattcctaacacttagcttatttctttgttgcagcagtcaggcctatggacaatctcttggctactcttgctgaggcttacagtcccgatgcttctctgcctccggctccctcccagtcggttactcccgggaagtcctcctccaacgccccttcgggcgcaatcgtcttgatagacgaggaagaggaggttgaggaaggcgaggtggcggacgcggccgcccttgagtgtaagcgaaagggaaagatgatggaggcggaaccttccaaacggacccggagggaggacactccggcgccgagcaatgactccgggattccttccgaggcgaaggaatacactgtgccgcaaggcatagtgttgaccccggttcctgctgatgaggagaggcaaaatctccgcgtggccaagcacaactatgcccttgatgagtacagtcgggggcatgctgaggtggaggctttgaagaaaattttacgggaggagcagcagaacactcttaatgaggacgccttccgaaatccgtgggacttgaacatggatccgctgacggactggttcaaccgcttcgttgggcccaccttggctccctttgcctcggagatgaccagccagttcgtctcccacctgacgcaattcccgccaaaaagatatgctgcttgcgcctctctgaactctgtctaccaggtccaagacatttgctctgccatggccacggtgagtactttgtaatttattccatcctttgatattttgtctaaggcatctgatctcactcttgtctcttttttcagattactgtcgagaccgaccg

SEQ ID NO: 367099 - DNA, 571 bp, Cannabis indica
gactcaaattggccaaattgtcgcattccgctcttactgagcaaaacaaatatgaaaatataaaattttatatctaacatacataatacacctagaattcaatatatctccattaatacaaaaataattgtttaaagcttattttttataataagtcgtaattatctgctaattcccatataaagctaagcaatcattataattatcccctattttgtccttgaaatctaacatgaacaactctggatactgagccttcatattggactctaactcttaggtggcttcctccaccttactgtttctctaaagtaccttgaccattgttatggttttgtttcgaagaactttgtccttcctatcaaggatctgtactggtagctagacggtaagctaccaatcctactttctcaagaatctcagaaggccctgtaaatctagggcatagcttccctttttctcgaaatgcttaacccatttcgttggagatacccgtaggaagacatgatctcccacctaaaattctatatctctgcgcttcggatctgcataacttttctgcctgctttga

SEQ ID NO: 367100 - DNA, 766 bp, Cannabis indica
ttgaagatagagggatagacattgttaacctgagccaaactgcaaacattcctgctgtatttgcgtccattagagatcaaatcttaaataggcagtggactaagttcgtggatgtcactgggcgtagcaaccaaaccttagctttagaattcttagccaactggccagaaagagaggatgacaaagtgagagttaggggggttaaagtgcctgcttccacagctgcaattcatgctctttatgagctaccaaccttcactgtagaacagcaacccttgaagcagcaatttcgggcaaggagtttgaattatgtggatatagccgaaactctagggtatcctggccttaggttccatgaaattgatggagaaccgtatcaattgtatcggtgtgaactcaacccggtagccaaggcatggctatacttcgttagtgcaaggatgctcccgaacaaacattttttgatgctcagattgacaggattaagtgggtttatggaattatgaaaggttacaatttgaatgtgggggacataattcgagtgacatttgatataatggttgaggggtcttgtggtggtggacttgggcttgccggaattataaccgatctttgtgagaaacatggagtaccacagtactcttatgatacaaaggtagcgccacaacgcagtattaccttggccactgttcttcgcttcaaaccacctcacccttatggtcaaccgccagctcagagagatcctcctgcaagagaacaagaggag

SEQ ID NO: 367101 - DNA, 750 bp, Cannabis indica
gcatgactgaacttatataaaagatactattaaatttggaagaaaaattaaaagatgaagaacaatttaataaatgagatatggagatgaagcacaaaagatcaatatcaataatagaaataagaattacaaaagctacactcaaacctcaccaatatttctaaaatagttcactcatttttgtcactaaaataagtaaaataaaatagtaataagagagaacaagatgaaaaaatgtatttctctactctaaaatctgataaattttacggtgcaaaaggttgcaatttatagtgaaagttggctctctaaaatggtattttcgtgtaccatttagtaggctaaatgactcaaaaactgataaaagtggtatgagaaatgcgataatgtaggaagtggcgatttagtaatgggtgcattagttagtgtgccacgcataagtcagttgttgaagatagcagtagaaatatgggacttgtgtcatgttgctggagcttgccgtaatggagataatggtccgcctattgataacgttaatgactttagacatcatattgggccttttgcttttattcaagcccattttgttatctttagctatagtagtttgcttttaacgtgatggactttcatatatatatatagggaaatttacatatatatattgttttttgagcaaaactttacaaaaatactgggacacggcaaaaataactttttactgcctaagcccattttctttacttttat

SEQ ID NO: 367102 - DNA, 563 bp, Cannabis indica
tcgatatgtacatttgccagagatgactatcacctcatatggttgtcctaattttcccttacccttacctgcactacaaagcacccatgagtcacaaagactcagaaagaaaagcaataacaacaatcatataattcatcacacagatattatcaattaaacttgttggtttttatggtacatatcagaattagaaaagtggaagcagctttgataaaaacatttttatccaatatgaaccataagcccgagaatctcaatataatatctattctatataaagtgtgcctatataactgaaattcttggtttatgagaaattcatggatggttttttataataataaaatattatttatatataataaaataataataaaacaaatcccattaatatttgaactgatatttgatgttaaatatttgagaatcacaacccatttaaaaagaaaacaatttgatactgtgagactctcaaattaaaaaaaaaaagtaatatggtcatcaaatttgtatttatttttaaacatggtgaaaaaatgaattatctttcatattattca

SEQ ID NO: 367103 - DNA, 848 bp, Cannabis indica
ctcaaaatcaacttgaacctggactaagaagaccacgaggcagacctcgtggctcacgagccaggagacaggaaaaggcccaggaagaaaaacctagggaaaatgagacaccccctgagaatcaagatgaatagccagaaaggaggcaaccagaaactgatgaatgagaaatccctcattaaaatgaggaagatcttggaactcatccgggagaacggagatcacctgctaggaatcaccaacattcttcccaaacccatagagcgaggactcgtacgtaccctgatgggggaaatacgacaaaccgctcccgggaagaaagaatagagcgtgaagaagcaagtgtgacttcgaggcgatccagaacccatagctgatcaactcgaagaggagaaagtactcaatgagccaatgatcaggaaagtatggtgacaagtaaatccgcgagccacttaaagacaaattctatgagtggaacgcggtctatgagttaaacgagatgtgccagctattactcccaaccagatctgcgagagcacttgaatcagaagaaacctgaccttcgccaacaacttggtccaaagcaagatgatccaattcaattgcagataaacgagctgaaggacaagttcaggagatatcaagtgggggaattagggaaatcatctagatacgactctaatgaggagcttgagccgtatcacccagatattatgaataccccttttccttcaggattcaaaaacccgcatgtctcgtcctatgacggaaccacaaatccggtcttgtatttgaataactttaacacgataatgcgagcgagttacgtgacaaacaatttacgctgt

SEQ ID NO: 367104 - DNA, 777 bp, Cannabis indica
ttagggtataaaacccaacaccaccgtcatgttgagtcctcctggaacgggtggtgcgtcttgacagcgggttggtagacctcctggagcccatgggctctttcccagaacgatgattagtgtcctcatgtggggtgttaacattttctggattttcagccttgaaggaggtggtttttcttcaaaagaaaggagggtttctttgagatttttcacagaagctctcaatgaaaacaccaaactgttaacgcagattttctttaactaaatttgagcctcacagtagtgatttcacacagaaaaagtaaaagctgtaaaaataaaaatatgaacatagggtttgttacgtggttttgcagttaaaattctgcatagtctacgagtcaatcttattaagatttctgattattttttatagcctctcttgtatgagttttttcgtcccttttttgatcttctttgtcactatttataattacatagtggacagttaattacaaagttgaccgtaatatgtttacaaccatcatccctaaaatcatgggatttgattacatatcacgtagtgtaaatgcggtttatgatttgaaaatcatatagctgtgattttcccacttttactgggtcaaaatgatcgtgttctaaacatgtctttaattattgtttctggagttgtctcgacagaagcttggttccagtgatctcaatagcgagctagggccatttttccttccaaggtcgacgattcatgtcttgtgtcgatcgcggttcttattt

SEQ ID NO: 367105 - DNA, 548 bp, Cannabis indica
gttatttagtggaatattttattctttataaattataagttcgaaaaatgatattttatatcattttacttatcagaaatttataaataatattataaatatttaaataacttagatatttctatagaaatttaggcttaatttgagatattttgacatataatttagaaagttatcatttaattcttattttattcttgaaataataattgtctaaccatacctattttaaaattggtttattttgttattttaattttatcaaattataagattgaaaaatgataataaaatatctaattgattattttcaaatcatttatcttattagatatttaatttaatttgataaaagaattcaactaaaacctagatattttaaaattagtttaaattttaaattttgtaaagatatttaaggttgtttcaacaaccctaaattttcaaaatagttggttattcaaatgataatttaattatataattaataaatatctcaattcacatttgttacttgattgttttgttttatttaaattgtttatcaa

SEQ ID NO: 367106 - DNA, 826 bp, Cannabis indica
attatttaattaaataaagatttattttttatttatttatttattaattaattttaacacgtgatcagaagaggtaaaacgcgatcagtcaatgatccgccttttactcccacgatccaactcatccacgaacgataacattaccgttttcttaacgttttttcttggatcgacttctatataagtcgtatcagaacaacgtaagaatatatctttttcaaccaaaaaaaaatcttttctttcttccttatgatttttctcagagcaaattttaaggtgttatagagcgatacagttcggtgtagaatgtatcgtacttattcaaaggttgttttatcctggggacgccgtggtttctagactaccgtgcacacttcgcgcagagccgcgaaacgtcttaaagagagcgacattgtccgcaactcagccagattattctatcggtaattcgttccaatttcattgtttttaatttcggtctaacaattttaagacgttgagttctgctatggctgctaccgatgaattttctggctctgcttctaacgatattaacaagcctttccgttttgagggattacattttaagcgatggaaacaaaagatgttgttctacctgacgatgaagaaagttgcttttgttctcattgctctgaagtcggttctctctgaagcttctaccgacaaggacaaagaggctgaacgcgagaagcaacaaaaggatttggactcttaggtcaaaaacaactttctctgtaagaattttattcttaacggcttatctgatgatctgtatgactattataattcagataaatcgacaaac

SEQ ID NO: 367107 - DNA, 602 bp, Cannabis indica
ttgatgctctctgaactcacaggtgcacgatctgaattgaaatcaggagagagtctttgaatcacccatcttacctttgctcatgcatctcttatgcggtttgctcttagcaattgggttcccaactccaacaagaccgtagtgtctcaagatgtggcatcattcttataccgcatcacctctggagcttcaattgacttggcctcccacattctgaaccagattgtttcattccgaagaggtaaaaatcctacctttaagcttgtttttccaaatctaatatttaaggttttatcctctcagaagaatgtgacccaatcacatgaaacacttgagcccccaatcaccggacctacattccaatcctcggaatactttgatggtgtgtttcaaaaacggcctaaggctggaggtgctgttgctgctgcaagttcaagttctgctgctgcagaactctaggaagtcaagaatgaagttcaacaggtgaacaatcgtcttgctgccatggaggaacttcagcaagagatgtccaagcagttgacatccttggtcaaactctaccgagactaagttttttggtttctttgcttttgattggacat

SEQ ID NO: 367108 - DNA, 505 bp, Cannabis indica
tagtatctacacattaattccatgacactttaatacccttttgatacccataacataattggtcacttaattttgtatcacactttataatagcatatacattatacatatgtgcccacaaaagatttttaatccaacaaactcatcttttgaaaaaatcgcaactagacttgaaaagttatttttattttcgctatctttttttcagaaattttctactgtgacgactgatagtatttgagccataactctctcaatattactcggaattggatgattcaagatgttctagaaagctaagaacgagatctaaaattttcacgttgagctccaagttcagttttgcttctaaaattatcaaaattcataattaagctccaccttgtaaaatcgagctcgccggcttccactatttatcaccaaaatatgctaaaagtcttccaaaaaactctaaatgcatgaataatctttaaaatagcttaacaaattaaaattacactaatca

SEQ ID NO: 367109 - DNA, 713 bp, Cannabis indica
catgattaaaaaaaactaaaaaaataattttgtcacaacctcaataccaaatagcgatagtagttatatttgtcaagtccaatcataaaaaatacaaaacaaaaaataataaaaaaacaacacaccttaaaaaaaaattttaaaattaaagctcgtcaaaagtatttttaggtagaaccaaaataaaagaaaaaaccaataaataactatagagaaagaagaaaaaataatattttattagtctccatcttacacacacacggatagaaccaccatagcaccacgagtttacccagaaaacaaatcattaattcaaacaacatagcaagaacagtgaaatcgacattaaaaaaatagattatgtaaaataaccgtaaaacaacactaaaagaaataaaaaaaataaataaacacagtatattgcagtataaagctcataaaaatacacggtaaaaattaaaacatactatctggcagcacttttgtaaaaataacaaaaatcagtataccgtgtaagtttcctttattagaacatattattattgcccatgtaaataggcaggcctagctaaggatacttaacattttatccgaccatatataagaaaatatatgttatatatatttgaaatttttaggaagaatatttaaaatggtactttttttttatatgtttacagattttttttttaatatttttacaaattattttt

SEQ ID NO: 367110 - DNA, 338 bp, Cannabis indica
tatgtttatgcatgtgcggtaatgcttattatcattaatttggttagaaagattttaaccatgaaaaaagaatagtcgcgagtgtactacctgaggcaatctagtaagaataattgcgagcttaccaggctcggagttggtagtgcgggtatgaatcttctattactgcaacactaggagaaaatttatgccatgaagtaagagattacctgagtggcaaggtagtagaacttacatagttaatcctgggtagcgcagtgatgtagaatgacactaagttggactaattggtaaagttttgttttgatgaagcagctgcttgttggaaattattttac

SEQ ID NO: 367111 - DNA, 710 bp, Cannabis indica
ataatttaataacagtaatctaattaatattaccatgaataaccaaacacagtaataagtttacagataatcatattcccctttataatattccccttaatcagattattttaaatcctttataccaaacgcccccttagtgtaaattaggatgtcaagtacatcaaaccacctaggatacaacgttatcaggtgtgaaagtgacttcacattcgatagattggggatctagtgaagttgtaaagtactaaaggctcactataaaaaggacccttgaattcattgtaaaggggctttggggattattgaataaaacgataatatttctggagatcaaaagatctttaaataccattttaagcctttgttctttcgttgactagttcttacagtaaacagatatgttagctagtttttttaactactcaacccttaaaaaaacaaaacaaaaacaaaataatcaaaacaaggcataatagacaaagtatgaatcaaaatacatctaatcacatatatgttgggattttatgccctaaataatatttcaatataattagatttactaattaataaaagattagaaatcattttatgttgcatgattcacatgattactttcatgattatatgtttaatgcataaattctattaaatcctgaacatatagttattcatgattatagtgttgtctacacagtagaaaataatca

SEQ ID NO: 367112 - DNA, 806 bp, Cannabis indica
ttattgttatttgtagtatccaaaatgacaatgaccaccccatggtgtcactattgactgataataagctgaatggatctaactttaccaaatggagagagaacattcacattgctctcattggtgaaaatgccctgtttgtgttaactgaagaggctcctaagcagttgggtgagaatgcaaccaaggcagtaaaagaaaagttcgagcgttggcagaatgccaacaacaaagctcgatactttatgctgtccagcatggttgacaccttgaaaacaagatttgcaaacactctcacgtctgcatatatcatgaacaagttgactgaactattcggtatggcgtcaattcaagctcgctttgaggcgacaaagaatttcatcaatgcacggatgagacctcatcagagcgtgcgtgataaccttcttcggatgacgagttacttccaagaagctgagaatcatggagctgttatggatcaaacaactcaagtgagtctgatcttgaatagtttgactctagcctttctgcccttcacttcaaactatgtcatgaacaagttggagcttgactttcacgagttaatcaataaccttcagacatttgaaaatttgattggaggaccgcagaaaggaggatcgaaagctcctagttctagcaatgctaatggggcggctaaggctgaggcaaagattgcctctacttccaaacccaacaacaagaagaagtggaagaatagcaagaagcctgttcaagctatgaaaacaattaaaagaaaaaggttgctaatcccagagataagccaa

SEQ ID NO: 367113 - DNA, 1043 bp, Cannabis indica
ctgactgtcacaatcaccccccttatggggtctgacgtcctcatcgaccatacttttggctgggttaaggctctgataccatttttaacgtccttgcttcaagcctccattgggcctttacacctacagaataatgactcttatacacgagtatgccactttggctacttcatagactgatgactggccctacagactaacacgaatgattccagtgtgctttgtccttactcgcacgcttcttgggaaaacttcccaggaggtcacccatcctaaaattagcccaggtcaagcatgcttaaccgtggaattttttcgtgatgggctaccgaaaaataagatccaccttgttgatataggtagtatcaatcaatccatttaagctctcttcaactggatagtcccatacctacacagtcttagaatcatcccagttgaccttccccaggtgatgtgggattacacagcttaccacgtatttcctcttacggatcataggactactaactgtcacacactaagtgttgtaccacacacaccctgtacctttccgtacttgtgttggtaacagtgtaatgtactctttaaacattgtacgctataccaatacactctgtaccacttctgtataagtgttggttgtgtactaaccataacaagcatgcatatatatatatatattacacatacatatatttgcatatatatatatatcatatgttctacgctattcttacctcatttttgaattcaagtgagttggctgacctgaacggaaaactttgtgttggatggatgccctaatcacataacataaacacgtaaacgacacgcccaaaaccctaattcgggaactccaaacctccaactatacactacaagaaatttcactttttccagcacatttttgtgctggcaaaagttggtattgcgctggtaaaatagaatttacttgtgatgtgttggcaaaagggggttcgcaaatcaatgttggtattagaacttttgtcagcataaaatgaaaagcgctggtaaaagttaga

SEQ ID NO: 367114 - DNA, 1331 bp, Cannabis indica
atatcaacatattgcaaagagaaggaagattacaagaatttctacaattaacgttgttggatcaatgtgatgaaaccaatgacaaacacaacaaggatgaagcatatattccaagtcttgctctatcacaaccacaacaacaacaagtgacgcaaaccaatgataatgcatatagtagtgaaattgaatcagtagaagaatgggaaaaaagtattggcattactctagatgatgatgattaaaatgcaactacactaattgaacaagactatgcacgtattcctagtagtggcggcgtagcttgctatataccaatccttcctccatcacaactaacacaacaacaagtgtcgcaaaccaatgataatgcatatagtagtgaaattaaatcagtagaagaatgagaaaaaagtataggcattactgcttagagggtaaattataagcaaatctgaaaattagatatgcaattgtcagcattatccacctaaatctcaaaagggaaatttgaatttatatccatcttttacacctaaattaattttttaaactaataattataactattgaaaaaatatgatcacttttccctaaaccctaaaatacccctctcattattctcaaccatctctctcttcctcctttctctctcaaagcaaacccaaaacaaaactaaagcaccacccaaatccaaccgaaccatggcgttccacccaaaacgccgatcgagcaccacccacggttaaccaccgcacccacccacgctagaccgcacccacactagaccgcacccacccaccgacgctagaccgcacccacccactcttgaccgcccccacccattcttgaccgaccgaacccgttgtgaccaccacggagatccacgaagggatctcgatctccaccgaaccaggaaaaccatcgggcccatcggacccacgaacaaatttgcccaatcaagagcatcgggccgtaccatcgggcccaactatcgggcatcggacccatgaacagattttgcccaattaagggcatcgggccctaccatcgggccataccatcgggcccatcggacccacgaacagatttttgcccaattaagggcatcgggccacaccatcgggcccgaccatcggaccacatggaattttcaccgttttggcacatcatccactaccatcgggcccaaccatcgggccccatcgggccttcatcttctttgatgaaaatacactaaatcacaccctaaaaatcacagaaccaaaatctatctagaaaaagtattttcaccctaaatcaacaattaaaaaatgaaaaataccatgaaaaat

SEQ ID NO: 367115 - DNA, 622 bp, Cannabis indica
actcaaatgatgtccaagttccagaatattggcgagagattcacgggcttatgtgtgtggcggttgttttagacccgaggtacaagttcatgttgctcgaatattatttccctgtaatttatggagatgagcaatatgtaactgaaattgcgaatgttcgtgagctttgttgcgagctactagaggagtacgggtcttagttttctcatttgagagaaagaagggttcaagaagaaaatgtatcaacatcgtcttcaacacgccgattggatgccctttctagctttgacaaatatgttagagcttcctatttagtagagaatatgaagtctgaactggatttatatttagaggagaacttgatacctaggactgaagactcatttgatatatgcaactatttgaaggtgacgggcttcaaataccctttgttaagtatgattgccaaggatgtatttgctgtgcttgttagcactgttgcttcggaatctacattcagcactggtggtaggcacgtgagttcacatcgatcgagacttcatccttctacattagaagcattagtatgtacacaaaatgggttgaagactgacaaaaaaggtagatattatttaacaattgt

SEQ ID NO: 367116 - DNA, 669 bp, Cannabis indica
aatggtaattagttaagtttttgtaatttatcaaataaattatttatttttattattaatacttttttctgtttttatttttttgcaggagccttacgtagttgatcttgatgattagaaagtacattgttctttttagtatatgagtgaggacatggatgagaacaaattgtagtgtttagtacttatggttgctagttattatatttgagtttatggttggtagttattattgatgtattaaatattgttaggaacaaaagtacaatctcaaactttcctctattatgcataattgaatcactcatttattcattataacaaaaattcaattattcattgaaaaccttagtttccaaccttatctattattaaagtaaaattgaaaaaaaaattaccatcacacccttataattctcttcattaaaaataaattgacttacataattattacaatattgattttaaaacgtaatcaaacaacataatatttctcccattacccatgactcaaaacaagacaaaaccaaagaaaaaagaaatcccttttaataaggcatgtcatattgtaatagtataatagttataactaaccacctcctaataataataataattttttagaaagaaaataaaaaaaaaagagggcaaataataataataatcaat

SEQ ID NO: 367117 - DNA, 505 bp, Cannabis indica
tatcatttataggtacctatatagaaccacttaaagggttcaattatgatcaaatatgctatgtctaatttctttagggagtctcttttagaataccgtttttatcacagttattatttttaaattattaataatttataacattaagatatttcattgagtacctctagatttaacatcttcaaagaaaattaaataaaatatattaataatttctacatagttcatttacgcttcaggcgtttttggactcattctaactcaactttaaataatattaatttgcagttgcaatatattattttaaactatattattcttgtatactttgtgcaaggatcattttttaaaaatcttcatcaatcccaactgcatttttctcctccagattgagagaatttttaaaaattataaaatcaaataatattaatactcatgtaagaattcaatatatcacaataaatcaatatttatttaaactcatatatactacatgacattgaac

SEQ ID NO: 367118 - DNA, 542 bp, Cannabis indica
taagctaagactatattatctaagaattatattttcagagatactgttttaagagctataagaaaaggaattttcttccttgttcttgagtcaatacaaataacgaggattaggctattaccgaactgctcggggctgaacctctataaaattcttgtgtcttattattgttttattatatattcattacgacatatcgtttatcgcttatcaaaaagactcattgtcattcgctaaaagcgaatcaactcttatggtcttcggtcatgcgagttccttttaaacgaggccaacctgcgatcggtgggccttctcgccgacaaggactatacttgtgattataagtttcctaagtattcttcttggtagcagattaccgttccagacgaggataaggcctggaatcgtgtggcttaagcacaatatcttcaaaacactgcccctccagaagttggtgaaggagcatcccgaggtaatcaatgtggttagtctctcacagtacttagggctgattgtagcacattagtgttgggttttatgcc

SEQ ID NO: 367119 - DNA, 846 bp, Cannabis indica
aaacctaataatctaacatatataataaacattaatttagcctaacttaattctcacgatctcataataaaattgctaaaaaataaaatttattcaatactgttgaaaattttattagtgtttaggatgatgagaattaatattttagatttaaggtttctctctttaatctcatgcgtgcaggtgcacaataagaataaaattaattatattttaaatatataatgtaaatgtattttaaaaatataaaaatataattaaatgactattggataataattagatcggttcgatttggttatccattggatcggatgttccatccaacaaccgatccgattgaattttcaatatttacatccgattcgatccaattataattgaatatctgattctattggattggttggaattgaatcagtcggttgtaataggatcaaatgactttctgcacactcctaaattcaggtagttacgacgccaaaaaatcaattatgtgattaaatgtcacaaatggtataatttaagtagttttgccgccaatatcttttataaatatttcacactacttttacaatataagctcattctcaaagctatgaatatgctaataatagattgttatttaatatttaaggtgtctaacaatttttcatattatttattaaattaaaatgtgtagatgagatatcaaaatatgctactatcactgttctcatcgctatttcaaaaccgtacatgagattttcactttatacagttccttgaggaccataaataaatctaaggatcgaatcccttttagagtattttttttaggcttttttatttttacgctttaaaaca

SEQ ID NO: 367120 - DNA, 504 bp, Cannabis indica
tgaaggaaggtagagacatttaaagctaggcttgtggcaaaaggctacacacatcgagaaggtatcgactatgacgacaccttctctcccatggcaatacttaaatctattcgtattcttctttctatagttgtcgcatatgattatgagatatgacaaatggacgtcaagaccacatttttaaatggcgatcttgatgaaaccatatatatggaacaaccagaagggtagggaatgatcgaaaggtgtgcaaattgcttaaatctatttatgaattgaagcaagcctctagatcatggaatatcacctttaatgaaactattaaagagtatggcttcgaacaaaataaagaagaagcatgtatatataaatatattaatggtaatatagtggtattactagttttatgatgatgatattctacttattgagaataatgtagaaaggttatcagatctaaagaagtggttagttcacaaattctaaatgaaagatttgggagaa

SEQ ID NO: 367121 - DNA, 725 bp, Cannabis indica
gaacctgtttctaaagctccatatagaatggctccagcagaactcaaggagctaaagttacaagttcaggggatgcttgatattgggtttacccggcccagtgtattgccctggggagctccggttctgtttgtgaaaaagaaagatggttcccttagaatttgtatagactatcgagaactaaacaagttgacgattaagaataagtattcgttacccataattgacgatttattcgatcagcttcaaggaaaaacagtattttcaaagattgacctgcgatccagctataatcaactcagaatttgggaaaaagatataccaaagactgcgtttcgaatcaaatatgggcactatgagtttctagtaatgtcattcggattgactaatgctcttgcggcctttatggatctcatgaatagagtatttaaggatttccttgataactgcatcatagtgtttatcgaagacatcctcgtatactctcagttagaagaggagcacgagcatcatcttcggatggtattgcaacgactcaaggatcataagttgtatgcaaagtttaaaaagtgtgaattttggttgtctaaggtatcttttttggggcatatcgtcggaaagaatggaattatggttgatccaagcaagctcgagtcagtgaagaactggccgaggccaaaatcagtgacagaagtttgaagttttctcggtttagcagggtatta

SEQ ID NO: 367122 - DNA, 1010 bp, Cannabis indica
aaaataaatttggaattccacaattttggtagtctcgacaacttttaccggcgcatgtcacgaaatgcgccggcaaaaacaccttttcttgtagtgtagccatatttctagaggtatgtgctactgtgaagatgaatggtgttagtgatgatgccataagactatgactctttcctttctctttaagggatagagcaagaagttggttacaatctctacagccagggtctataactacatgggatgaaatggccagaaagttcatggtgaaattcttccctccatcaaagtctgcacagtcaaggagtgagattgggcaattcagacagcttgattcagaacaactttatgaagcatgggagcgattcaaagacttattacattgctgcccacaacatggctatgagagctggaagcaagtttcaattttctacaaagagttgaatgggccaactaggactattattgatgctgctgctggaggagcgttattgtctaaacctgcaaatgaagccattaatttactggaggagatgaccactaatagctataattggcctaatgaaagaaatactccacgaaaggtggccgggttatatgaagtagatcctatgacaaatatagcagctcaaatttctgctttatttaatcaagtggcagccttagttaatcagaagaatacatcaactgtagaaaatgttgttgttgcatctacatcacaagggattgagatgagtataaaacaagcacaatatatggtcaataaaccttacaataacaactacaggaaatccaatgcctaactactatcatctggggttgagaaaccatgagaatctttcttatggtaatactaaaaatgtcttgcaaccacctcctggatttaatgcccaacaacaacttgaaaagaaatcattagaagatattttgaatacttttatgatagaatcaaatatgaggtttaacaagaatgaaacaaggttggacaacatagaaactcatatttctaa

SEQ ID NO: 367123 - DNA, 639 bp, Cannabis indica
ttaatgtcgatatgctagcttcgaccagtaatattgtaactgaatttatcgcaaaattttcttaatggcctaataaaattgtaattctgaactctaggcctactatgaaactctataagacaccatacaagatgtatactcaaaacaataaatgaatctgacttctatagtggaaacaacaatcaagattctccacaatacaacttactggcaatcttaaggacgtaatcaaatattaatttacgtgaatgaatataactagtaaagtacgttagaatctaattggttaactatatttccagatagtcaattcatcttaacaaaatatgtatgaaataatttttagtatcttaaagacacctcatcactttgtacgaaaaataaagtggtcttgtaacaccctaactaacttaggcatattacgtgatttttaaacgtactgtgcagctcgttgctaatcaacgaggtttatggaaaaacgtgattaattaaaattttgcttttcaattaaacttataaaccatattacaaaagactcgggatcccgattataaaatcatttacaaaaagattcaactgtttaactgttacataaaaataaaagtcgtctaacgaccagttacaaaaattcagccttgc

SEQ ID NO: 367124 - DNA, 273 bp, Cannabis indica
attaaatatgtatattaaaccataagcatgtaaaacacatgttaacataatcacttcaaaatttttaaattgataattatcagattgtaatgggttttattgagggtacaaaacccaacatattttgtatcatttatttcttaagagggatttatatgaatttttaataatttagggctagaaattattttaccaggatctagatttactaccaagtttgttttattaacatcctaatatgaattctaaaataatgaaattaaacacatataa

SEQ ID NO: 367125 - DNA, 519 bp, Cannabis indica
ggctcttctagactcgagacatactcttttctctcgcgcattgtataaggagaaacatgaatcatcttcttgagatatttgtcagagcatgtcgatgtatgttcattcgggatactccaaggatgacacgtcttctccatgcctcttgtggtgtggtaacgtgtgtcccttggaaatctaggtacaacattataaataaaatataaaataaatatatttacaatatatttaaatgatgcaaagaaaaaatatataatttaatatttgtggttatataaaaaaaatataaatttggttatatattttaaataataaagtagaaaaaaaaaaaaatctttaaacatcaatgtatgaaattttcttattttaggaaagaacaaaaaagatacttttatcaaattgtttgttttgagatttattttcatcctttaaaaaataaaaaataaaaaataaaaataagatgttttatcattttttgaaacgaaagaagatctattcaatacctaatatatttaggat

SEQ ID NO: 367126 - DNA, 1017 bp, Cannabis indica
acgagcagaggtaccctactcacgatttagaacttgcagcaatagtatttgcactaaagatttggcggcattacctatatagcgataaatgtgagatatacactgatcataaaagtctaaaatacttcttcacccagagagacctgaatatgagacagagatgctggatagagttggtgaaggattatgattgcgagatccattatcacactggtaaagccaacgtggttgctaatgccttaagcagaaaggggcagagtcagataaatactgtgaaacaaatctccaaacagttagcaaatgagatgacccaagctaaaattgagttggttgtagggcagctagctaatattactcaacaatctactcttttagagcgaattaaagaagtgcaaatgcaagatccaaagttggttaaaactcgagatagggttttggcagggaagggtagtgatttttcagtggatgaaacaggaatattgcggttcagaaatcgtgtttgtgtgcctatggatgagagtatcaaaagagagatcatgaatgagtctcatacgactccttattcagttcatccagggtcaacgaagatgtatcaagacctaaaagccatgttctggtggccaggcatgaagaataacatcgctgagtatgttgcaaagtgtcttacttgtcagcaagtaaaggctgaacatcagagacctgcagggttactgcagctgaacataccagagtggaaatgggaagatattgctatggacttcgtggtaggtttgcctagaaccacgggacattttgactctgtatgggtcatagtggacaggtttacaaagtcagtgcacttcttacctgtttggataaacttctccattgaccagtatgctgagttatatgtcagagaaattgttcgtcttcatggtgtcccaaaatccattatttcggatagagatcttaagtttacatcaagattctgggagggtctacatcgagctatgggtacttactcagttaaagttcagc

SEQ ID NO: 367127 - DNA, 986 bp, Cannabis indica
actggaggtgcttgcttgcgaaagctttcgtataacagctccatttgcttgccagcaacaggttgtactgctggcaccgctgaagctgcaacggcctgagcttgctgatgaggcacaacaggaagaccctgctgccttagcctctaaatttcttcatcttgttgacggatttgatcttgcatttctgcaaacctctgctcccaatcctgaggagcttgtggtggatttacaggacgaccaccctgagctatgccacggcctcgaccgcgaccacggggattctggagaatctagtttccttcaccgcctctggtctcgaccatattaccctgacttcttatatttcgctgggcgtccattttataggacttagcctgcgaacccataagccagacagtttagacaacgatcataaaacttcataccgcttttatggacttaaaggcaacacacttaaaattaataattaaatataatctaatatgcttcctaacttgctttaataatcatttaaaatactaatcaagtacgggctttactgaacctcgaaccgagctttctctgatgaagattgtacatgccttggcaagcttcggtagacaaacctggcagctttgatatcaaaattgtaacgccctaatgctaaggcacgctacagtatttttttcaattacagtgctgtcttcgctaatcaaagaattttcttgaaaaatgtgtcaaattaaaatttttatgttaattaataaactttataatatacaaaactatttacaagttccaggatcccgttttcaaactttttaaacataatactccaaaatacataatatccaggtcgcacagcgactacaaaatataacctcagatgtcctgagactgaacactccaggtcgcgctgcctcgacatgtagaatcccatcctagccagactcactcctgctcagctttcgcatttcctttacctacacatggaagcagaactgtga

SEQ ID NO: 367128 - DNA, 498 bp, Cannabis indica
cttctcgtatttgcctccttgatcgactgtgtcctcgagaccttcagtgttccgaactagaacttgcttcgtcttgtattggtcttctccttcagaagaggttagatacacatcctctctttaggtacgtatatacaccttccctctctgatcgagagggacgctgagggtgtctcggtggcagcccacctatcctaggttgagtcccaggatttctctcgttgccacaggatttcctgctccctaggtcagggctatctcgtatcctcattcctgtgagaagcttctggtacatcattatgttcattcccttggttcataaatccttgggatctctgaggaacatctcgacgttgctcttgattattttgttgttcatccactggaacatccctagtacccccaagttgttcctcctgggtgttttgggcatttccttgattggcttcctgtctcctggttcttgaacctcgatgtctgcctcgtggtcttctcacc

SEQ ID NO: 367129 - DNA, 706 bp, Cannabis indica
tcaactgttacattaaaaatgtatgtgggtcaaccggctagggttctacttatattttagaaggttcattctaaatataaagtccactttaatttatgtaaaaatatagctcgtgccaaattaatttatatttaagggtaaagtttaaatattcgtgccgaatttttacagactgaaatataagtaccaaaatataagtatgattaatatagactcaaatttggtatttttagtctactatctaatatttttgaagcatccttgattcatgttcgtcggtaagtttctcatgaattagttgtgcacgcaattaaagtggatgatgagctagtttggaggaaggattttccttcttttttttttgatgtactcaacgttgtattttttttaataaaattttgttcattgttcaaaaaaaaaaatatatgatatttatacatctaatttttttgtataatacatctaatttttcatatttaattaataaaaaaattgtatttaaataaaaaaaaaccccttaaataagaaataaatgatataatcttttaaggtgaactcacaattgtcaaatatccaactcatcacgtaaattgaaaaataccttttttatttaccaaataattaaatttatctttaatttattttcaattgaaacatacctctttttatctttactgtacctaaaataccctgatataatggagtt

SEQ ID NO: 367130 - DNA, 724 bp, Cannabis indica
cgggtttgggttcatttttttaaacccgaaacccgtgaacccgaaacccgccaacccgaaacccggtaaacccacccgatgttcagccctactcacagcatgctccgtgacagctaagtatatcccaagtttttctccgtccaaaagttttgagagtacaggaggctttgcgagttgtatttttagctcctgaaaagctttttcacattcctctgcccactcaaattgcttgtttcctcgcaggatgttgaagaatggaacatacttgtcggttgattttgaaataaatctgctgagtgcagcgatccgaccagtcaaactttgtacttccttggttcttgttggcgatttcatatttaggagtgcttgaatcttatctagattggcttcaattcctcgggcattgaaaataaagcccagaaacttacccgagctgactccaaaggagcattttaagggattaagttccatgttgtatatcatgaggactttgaagcattcgtccaaatcatcaatgtgcccccagccttcttggatttgacgagcatgtcatccacatatacttccatgttttgtccgatctactctttaaacatcttgtttaccaatctttggtatgttgctccagcatttttgagaccaaatggcttgactttatagcaatacagacccatatctgttcagaaacttgtatgttcttggtctggtggatgcattttgattt

SEQ ID NO: 367131 - DNA, 536 bp, Cannabis indica
atataaaattagaggtagttttaattaattgataaatataagaggtatttctcaatataccccaatatcatagtgtacttaaaatgtgaagtgagatgaggttgattagtcaagctcttcagaataaattaatgcccaattataagcccacaaaacatataaacacgattagctgggtttgattagaaaacctcctcttcagaacaaattaagacccaataagcccataaaacatataaacacgatgagatggacttgatttagaaaacctcattagaacaaactaaagcccaataagcccacaaacatataaaaatggtgagataggattgattattcaggcccaataggcccaataacagaagtcctagttgtcgttgaaaataaattgggaaacttacgaaaatactgaaattttggttaacttttacaaaaatactgtcacacagaaattttttcaaaaatactgtgtttttataaaacaccagtaaaacacaaagcagtataactcaaaacaacagtagaacactagtaaa

SEQ ID NO: 367132 - DNA, 540 bp, Cannabis indica
ttttgatatttagaattagttaaattttaaatattattttaaattaattttaaatgttttgataacttaaccagatgagattttcattaattacgaagataaatttaggacgaataataatttattatgctttcaaatttcaataattatcactacattgaatattattaattttaaaattatgatattaaaataacactaaaaactaaaataaaattaacatacgtgacttggcacgtaacatctatctagtatattattatatatagcaattaattatatgtaaagtccaaattgatagaaattatattattttttttgctgtatttaataataataataatacaaattgatgatacatcaaaataataataataataataataatgatagtaataataataataatagaaggttttacaatggatagtttgtactaattatttttaaaatgtttatgttaagagatttcaaaaaattgtggtagggattgatttagagaaagatggtggtaaatattattttaaaattttgtgtttt

SEQ ID NO: 367133 - DNA, 758 bp, Cannabis indica
tcgcttggttcttcgacctgaagtctacccccaagcaaggccggtcggggtatttttacttctctcagccaggcttcaagtggttgagcgggatggaccacaaggccatcaacaaaatagggcgttttgttgatgagtacttcacggtgaagcatccgaacatcactcggacttggtttcagcagattccgacttatcaccgtcctcctctcaccattactcttagggatagggctcaaaagcttgcccgattgccgacggaaaacagggatatcatccagttgacctccgatcaaaatctggtgcagtacgggctttacccaaaggacttttcctctaagtccgtggcggagaagaaggggaaacctgctgctgcccggcctgaacgagctcatccggagaatgagttgattcaactgaagcgtgaagctaagtggaaaggaggtgctcgggcaaagcactatgctcaggagcctatgaatcctgaagatgaagctgagcctgaggctgaggctgagcaggtggctcctttgaggaggaagaagaaactctcggccatgcccaggcccgttgaacatgccattcgcataagggagcccatttcttctgttcggccattccatccttatgctggaaaagggaaggccgttgtggctgagataaagtcgatgtcaggtgatgatggcttctaactttctgggcgggcagtcactctgcgctttacttctttttcagcttcttgactttcatactttgta

SEQ ID NO: 367134 - DNA, 538 bp, Cannabis indica
tttttgagtatatagtaggggatctgaataaaattttacgattataactgatgttagacattacagaaattaattccataataaatattagtacaccatatttataatttgtaaggtataaatttattatatttgaaaagccaaagtcaataaaaatgaaattagtaaaacggatggatgtaataataatagattcagctttaaataatttattaatctatttttaaaattaaaataattagaaaatcataaaaatatccacaaaatagaaaaaagggattactcaatcgttaagcctccacatcatcaccctaatcactccccaacaatagcattatatagatatatagatagatataaataaataattgaaatgtgctaccgtgatcaagcttcaattacaattttaatttcaataaatttttgtgcccaaaaatatatgtgggaatattttttttatataaaaaattcaatggcaatgtttgttatgataacaatatcattactgtaaatatttaaaaaaatttgaataatttac

SEQ ID NO: 367135 - DNA, 711 bp, Cannabis indica
gggcataaaacccaacatgaaatgggtaacataaactatttgggcctcccgctttttagatcccgccaaaaggatgcggactttaacttcatccttgataacctggtgtcaaaactccacgggtggaaattaaaatcgttatcaaaggctagtcgtgctacgttgatcaaatcggtggggcttgctttgcctgtttacacgatgcagacgacaaagctttctaaaaagcttgcatctaggattgacgatatggtgagggatttctggtggcgctgtgaacaaggtaatagaggcatctgtcttaaatcctgggaccaattgtgccttcccaaattccgtggggggcttggctttagaaagactatggagatgaaccaggcattgctggctaagtggggttaggctctgcttactgaggaacagtcattgtgctgtaatgttttcagatctaaataccttaagggtaaacagttttttgactgtgaggttaaaacctccgattcttggttttggagaaatgtggtgcgatctaataaagagattttaagaaaaggggcgtgcaagctaatatccgatggaagagagacaagtatttgggatgacccttgggttatccatggtacagatttttaccctaagcctagttatcgtcaacagctgggcttggagaaagtatcggatttactttacctgacggaaattgggacacac

SEQ ID NO: 367136 - DNA, 953 bp, Cannabis indica
ttgaggcaaatccagaaaaaaattcaggccctcctgaacatgccatccccgaagaaacacaaagacgtgcagaacctaaccggaaaggttgcggctctgagccgttttatctcccggtctacagataagtgcattcccttcttcaacatcttgaagaagtgttagaagtttgaatggtttgacgaatgcgaggaggcattcaaaaaactaaaggagcacagggccaagcctcccatcctgtcaaagcccgttctcggagaggacttgtttctgtacttggctgtctccgagcacgtggtcagcgcagccttagtccgggaagaggagaaaactcagcatcccgtgtactacgtcagcaagcgcatgataggggcggagacgcgatacccgtcattgaaaaatttgttttttgcttcctaatggcctcgaggaagttgagaccctacttccaagctcactcaatcaaggtgttgaccaatcatccactccgacaagtcctacaaaagccagaggcgtccggaaggctcctcaaatgggcaatggagttaagtcaattcgacttacactacgtaccccgaatttccataaaggggcaaccgctagcagacttcatcaccgaatgtaatgaagccgaagcaaccgcgaacataccggcaccgtcggtcccagcatataaaatgtatttgtggacggagcctccaacgaaaatggatccggagcgggggttgcaatgatatctccgagtggacttcgactccaggcagccctacggttcgacttttcggcttcaaataacgagaccgagtatgaagccttgatagcagggctgagattagcaaaggctgtgggggccaaaagagtagaagtctacagcgactcccaactggtcgtgaaccaggtatcgggagagtatcagatgcgcggcgaaaaaatggccgcgtatgtggcgatag

SEQ ID NO: 367137 - DNA, 560 bp, Cannabis indica
aaaatttcattacaatgtaatatgtataccgataggtcatacactttcaaggtgcataaataacttaacttctatgagagtacacttatcacataatcaagtatattcatagttattcataatcaacaatatttgtgtttcatacgacaccctaaacattcatcattataaatactcatcatcagtgcttcataaaacactctaattcacacattaccataatcccataacctcagtgcttaatcttacctctttagaaacacgaattcttatatttcgtgagtcactaagattttgcaagaaaagaaactaatttcttaagcaatataaaaatccattcattcacattataacaaagatatatccagttacaactcatcacataataacatgcttaagtcatttcacaacttcgtaatcacacgatcctggtactttataaagtacccttaccactcgttaaccacgagctacttatgtcactattgttgcccgatacagcaaacgataagtaagaaacctatccgcgatttcaggagtacttactcataacggtaatg

SEQ ID NO: 367138 - DNA, 744 bp, Cannabis indica
gttatgctcgtcggagcttgtcaaaaagtgaggggtacccggattcgtcctagaggtgcaactccttgaccgcaaaaaccatagacaagctagaggcatggagttagatccttgagttggagtcccatcttttcgtaagcagtcttgaaaaagatgtttgaagaagctccattgttgatcatggttctggcaaccattttactggctatctggacttccacgccaagcgaatcgttgtgcggaaatctaatcttgacagcatcttcatcgttgaaagttatggttggctctcctgctcgtggaacattgggctttctttcttccacggccaggatgactacttcttgttcgtcctgtgctgtccgggcatacctctcccaagcttttcccaaatctccagcaatgttcgggcctccaataatgacttgtaagtgtctatctactggtggaggtagcaaatcttggttgttttgaccttatttcgtcttgacataatactgcaggtgcagattgtttttcctattaggaattcaatttcccgcttcaagttgtaacatttgttagtgtcgtggtcgtagtctccgtgggaaccgaaaaaactttgtcatgtcccttttgttggtatctttcttcatgggcccgggcttcttgtacgggatcagcgactgagttgccatatatacactttctatatcttcagtcagaatagtgaatgcagtgtatttggcatgattctcccgggga

SEQ ID NO: 367139 - DNA, 633 bp, Cannabis indica
gagagaagaattcggatggatttgtgcatggcgattggactaagagtttcctcatagtctacaccttctctttgggtagaacccttagcgaccagtctagctttaaaattttcgactttgcctccaccacctcttttcttcttgtagacccacttacatccaactggaccatagtcatcaggtgcgtctacatattcgcagattttgttctttttcatggaatccgtttctgaatcaatgccagctgaccattatttcagttcgggacttgccattgcctgtttataggttaatggatcgtcatcaataccgtcaccaaagaccatattaatttcaccatccaagccataatgagatggtttagtagaaatcctcccacaacaacaaggagtcgtgaccttctgaaaatgaacatttgtgttagatttttcaattgtaacatcttgtgtcggttcaactgagggagtgggattatcctctacttaggaagaagaggatggaacatcagcaggagttatatctgaaagaatttcttttaatactactttacttttcagcttgaagtctctgatatagtcaccttcaaggaaggtagcatttgtagagacaaacactttgttatccttgtgacta

SEQ ID NO: 367140 - DNA, 664 bp, Cannabis indica
cctcaactttagctttgcccttacatacatatagcaatagcactgtgagtcgacaaactcactaagaaaagcataacataataaacatactaatatcccgggttataatcaggcgcccatacacctaaccataaccctaactgaattaggatcgatcttgacaaagtatgactaaccgcgaatccagcctatacttaatactctaatcgcactgatgtggtagcagttaattcatactatctgatatcctagcatatatctgatggcatctcggtgcaactctatgtacacctaactgtttccctgatatgctaatctgatggctataggcttgcctaacatatatttgatttgttattctgacggcaactaacatgtatgctaaacatgtataaacatacgcatgacattatactaatcttaccttgattctgaattcaggtgttctggccaacctcagtggaacaactgctcggtgattacatgctcctaaatcacatcaatcataacataggtgagtgacacgctaaatcactttccagggtcttaaacttgaaactaaaagttttcctatcgataaataacatggaaatactataaacaacacaaaaatgggaaaaaatagggttcccaaaattgccccaaccggaattccagttctgtg

SEQ ID NO: 367141 - DNA, 993 bp, Cannabis indica
tcatattcacgtcttattagtacaaattcattgtgactagtggcaaaatttttggagcgacataaggtcttatggtggtgtatcttgtcttgtgctctccctgtaagagctgtgatcggtaacagattccatatagaggacccaagctgccccctatgtggaaggtgtgaagaatccattgaacacctgtttctatcctgtgaggtggcacttcatttttggcgttcatctccttggggtatctatccggtgtgtgatacaggcatccgtgtctgggattgggtcaagttcatctgggacctaaaacataaaggagcttgtgtcgatgatatattcttatatgcttctattgttgtggatactatttggagggtgcgtaattgagaaggtccataataattgtcctgttgatattaacaaatgcattgataatatttgtacttcttatgtagatatgtatgattccttgctccaatgtgctaccccagctttaaaggaagtttagtccccttctcctcaggattggattaagctgaattgtgatgttaaagtgggtttggatagtatgtgtattgttgttgtggcaaggaaccatcttggcggagtggttagagtttagacagctcgggagaacttctcggatgttctttgtgtgaagcggcggcctgctctttggctgtggctgttgctttggatatcggctctaagtatgttatagtggagaatgactcgagagtggttatcgacgccatcaatgggaaggggtctcgttgggcaatagagaactgtatctcattttgtactaagttatctcactcatttagtagttgttgtttttcttatgtcagtagatcttgtaattatgccgctcataatgtggctagatgggcttttacccatcagacttttgagtctctcccggtcgatttcgtcccggacaccctattttgtaatgaccgagaggtctaactctttatgaatctatgatataaa

SEQ ID NO: 367142 - DNA, 524 bp, Cannabis indica
tgagattataagagccactacccttgtagtttttgatttattacttattttggataccacatgtcactaatttatacatcatttttttacaaagaatttatatatatatatatacttaaaactatctctttcatagccaccaatactccattgatagagtactttttgatgaacctaaaaccaaactttagtaacagaatatatttaaaggtttaaatatatataaataaaaaataaaaaaaaaaaaaacaatcagcaacaagagcactatatatgacttaagccctcttaaattaattaaacaccttctctcatgtacgtggtgtactaaattatattctaatatatattttttctaagtggatctttgttgagtatgaatcctctttaatatgtttccatggataagaagataatagagattagcttaaattaattcatattgatatatatatatatatataatataggataaataacgggtataagtatttaatatttattaaaagaaatatttaaaagta

SEQ ID NO: 367143 - DNA, 666 bp, Cannabis indica
aaaaaaaaaaaaactaacaaccagtgtcaaattcagaagaaaaaaaaatcaatataaagttgttgcaatcttgtcaaaaaaattatctcaggtaattaagaaagaaaaaaaaaggtattgggattgtgtcaaaaatatttttgggtgacatgattggagaagcttatggtatagacaagcctaaatgaccatttcaactacccttacctaagcctaacactacaagcctagaaagaccttctgattcttggttgtgcattaatttatattagtggagaatagtaagtattgcaagcatatggaattttggggtagtggattgatgattgtaattggcatgcataaagtggttcaattgttagttaattgcgttctatggtttcgtgagctaaatgaaaataaattgaagtgtgtcaagggcgtaattgaactgaaattctggattgtatgcataagtaaaaattttcacaatcatgttatggagtttatttgaaaattactcatattctggagattgacttgtttaatttgtttttcatttagtgttttactcgaggtcaagtaaatgtttagtttgggagaatttgttgggttatttttagtattatttttggattaattttagggtaaatggcggcaaaacccccaatacttttgttttggttt

SEQ ID NO: 367144 - DNA, 940 bp, Cannabis indica
gggtaacaaaaaattcgaatggactgaggaatgcgaaaatgccttccaagctttaaagcaacaattatcccagcctccggtcctttcaaacccctagatggtgaagggttaagcttatacctagcagtaacagaacatgcggttagtgcagtcttggtgagggaggaagatagagcacaacaacgaattcacacggccattcgctttggtttccgtgcctcaaacaatgaagcagagtatgaagcattaattgccgatctaaaactagcgaaagaggtgaaggccaaacacttagacatttacagcgactcccagctggttgtaaacaaagttttgggagagtacatggctagaggagaaaagatgatggcctaccttagcaaaatacaagacttgcttgcccaactggaagggtacaccaatcaacaaataccacgagaagagaatgctactaatgatgccttggcaaggttggcaacaagtgaaaagatagataaagctagcattgtgccaatagaatacttacccaagccaagcatccgcaccaaagaagaagtactcctactcgatatgacttaatcgtggatgacccccataatcgcttacttagaacaagggacactgcccaccaacaaaaacgaggcaaagaaaatgagaaggaaggccacccggtaccgtaatcattgatggtgtcatgtatcggcgagggtacgtcaatgcccctactacgatgagtatatcaagaccaggcccaacgactaatggaagaagtccatgaaggattttgcggtaatcacgctgggggcgaaagcttatccaaggaggtctaaggcaaggattcttctggccaaccatgatagagactccatggagtatgttcgtgttggaaatattttaccaggatctagaattactaccagtatgtttatttacatcctaa

SEQ ID NO: 367145 - DNA, 973 bp, Cannabis indica
ttgttctctctcaaacccgaacccctcactccctttaaccctttttgaatttcaacttgaattgaagaatttgcttggtgttacttgattttgaagcttgatttggggagaattttaagcttgaaattgaggtaatttcttgctgagtttatgtgaaacttattgttgaattcttgctgaaattattgtgttaaaggcatgctttaggttgtttgatcttggtttgcatgtttagtgaaacgaatgtttaatcttgataatttgagtgttaatctcttgatttgtgttgattcatttggttgatttatggaagtaaccctaggagagggttaatacttgaatttgatctctatttgcttacttgctgttaaaatgttagggattgaaggattctaagcctaagttattaacttgaagttttggagtttgaacatgagtttaagttggtttttacaatctgaaatttggggttaattttggtatagtgatgcatgaaatatgttatttgagcatctattaatggttagtaatcctatttgttaatttgaaagtttggttgtgaatttggggtgaaaagacttgattttcttgctgaaaatcgtgtttgagcttgctagtttctgggtttggaacccagatgccgcggcatgctctaggaatgccgcggcctgcccctgttggtggaacctgggttttgtcccaggtgccacgacatgagttgggcatgccgcggcccgcctgtgagtttttgggcagattggattcccaactttgaaaattcatatcttgtgattccgaactccgatttgggggttctatatatcgttagaaagctcgttccgagctctgtatgattatctgagttttacatgccataatgatattatatgagtttgaaatcaggggttaaccctagctgtgaaaatcctggatttgtgtgactaggattaccggcacctgatcaggagcaccc

SEQ ID NO: 367146 - DNA, 723 bp, Cannabis indica
ctagaaaatattgagaggcttgtttatttccaaaagcatttccatttccctaagtgttttttataaggggaaataagtgagagggcaaaaaggtcattttgcccatatgtgctttgtcttttatggatttgttaataaagctattaatctgatttttctaatttagtttggctgaaataaaataaggaaaatcatccatttactcattttatgaaaaattagaaaagttagaaaaaataacttcattttcactctcaaattctctctctttcgaaaccctcaaaaccagctgggattgctgtgtttttctccttcttcttgttgattccagcagattttaagggatcttgaactcttggtaagcctttaactttgtctctttgagtttcttgagttgtaaggaaaagtaaattttgcatgcttggtgattttgatgttgtagctgttgttcatgttttatgttgatttctaaagctttaaaatgtttagatatgaagatttaagcaggttcttatggttgttaattggttttattcaagtttggagtttgaactcaaaaccttgggttttaatggtgaaatggtatttttgctactgtggttattgtttgtgtttgagtttgttttctggatgttagagatgttgttttatgttgaattaagttgggtgtggtggctggttgttgtgttagccaagctttgagctttgaagctcaaacttgga

SEQ ID NO: 367147 - DNA, 573 bp, Cannabis indica
ctctctctttctctctttcggtcaacctagaaccagctatggttcttgtgtttgcttcttcaattctttgtttccagcagcttattgtataatccaagccaaggtatgatttatggcaacctcctcttctagtttctttgaatttcaagaaagaaaatagtcgcatgtttagtgtttttgtggttttaatagttgtggttaattgttgttgtattcagaggtttatatatgtttatttgagtgaatttaaactgattttgttgttagagagttgggtttaaccaagtgtaagctttgaactcaaaatcttaaaattcaatcgtgaaatgttgaattagtttctgtgaatgttgtttttgtttggggatattttctgtagtaatattatgcttatttgggtagattaaaacatgttttgatgcatgttagtgggatttaaccaagcttgagttttgaactcaaagcttggagctttaatggtagttttcgtaattgtgcataaagcttgcttttattgctttggaaatgttctttggggtctaaatagcaggtctggagggtttggtatgattt

SEQ ID NO: 367148 - DNA, 620 bp, Cannabis indica
ttttttgtttttttccctttaattaacctattatttattttatttaaatggctatgattaacttgttgatggattcaataatccaaattaatcacagttaattgtcaataaactaaataaataatttgtaacgggtaattgtataatcttctttcattagtatcataaacttagtaacatgataggtctcagccaaattagtgtatatatgtgagcctacgtatgttattgagcttagatgcatataggagcccatttaaatttaaaaattcaaatagactaggttgctaataataaaaatatcacattgataattttatttaagtccaattagtattggacttattcaattaatgacaattatttatttaagtgaaaattataccagatatgaaattctataaaaaaaaaaagtttcataaatatggtatttttaactttaccacccttatatggcatttgttcaagtttaaattttttttatggtatttcagttgccaccttttttgtaaatttaatttttaaatcttatattttaagattgtgtattcaacccaatttcttaaggggtaatttaataattttaaatctttttttcaattcgattcttatgttttttt

SEQ ID NO: 367149 - DNA, 1142 bp, Cannabis indica
gggaattattttctattacaaaataataacagtaaagagtggatccttgattcaggatgcacttatcatatgtgtcccaacttagaatccttctttgattatcaagaaaccaataatcgtggtagagtactaatgggcaatgatgtttcttgcagggtttttggaattagtaaggtggctataagataaatcaatggtgaagtgaagattttgcataatgtgaggcacatttcgaaattgaggaggaatctgatatcacttggacccttggaagatgaaggttatggctataagtccttgaatgggagcctaaggatcacaaaaggttcaattcttgtgatgaaaggaaagagagtacatgagttgtatgtactcgaggatgaaactgtacctacggctgaggtagatatagtaaaaggcttagaaaaagatatgcagttatggcatcaaaggctcgaacatatatgagtaaacaaggcatgagggaattgcacaataagggagtcattgaaagcttcagacatgtgccttaccattatgtgagacttgtgtttatggcaagcaacacaagatcaagtttacaacaacaactcacaacacaaagggagtcctagagtatgtgcatgctgatttttgggggctaggtagaaccccagcacatttagataaacactacttcctatctattgttgatgattttagtatatgtgttcggacctatttacttagaaccaaagatgagtgtctagaacagcttaagatatggaaagctttggtggaaaacaaaacaaacttaaaggttaagacacttaaaactgataatggtctagaatttatcaacattgagtttgataggctatgtaatgagaatgggataactaggtataggacagttgtgaaaactccacaacagaatggatttgctgagcgtatgaattgaaccctttttgaacaaagtgagatgttgacttcttagttcggggttgggaaaaccttattgggcagaggctttagctactgcttgtaaccttattaataggagtcctaatagagtcatagacttgaagacaccttatgagatgtggtatgggaagataccaaacctaaaacacttgagagtgtttggatgtgcagcatatgta

SEQ ID NO: 367150 - DNA, 498 bp, Cannabis indica
tctgattttaatagttattttatactgaataaaagtatgtaaaaaccattttaatatttctaaaatatcaacacccttaaccgaacttacgaagaagaattagcgatttgtgtggtcagataaatgcgaagctagttttcaggagctgaaacagagattgatcaccgctccagtgttagctctgccttctgacaaagaaaagtttgtggtttattgtgaagcatccagacagggtctggggtgtgtactgatgcaagccgatcgggttatcgcttatgcctcccgtcagttaaaaggtttatgaacagcgatacccgactcatgacctagaattggccgcggtagtttttgcgttgaagatctggcgacattacctttatggagaaaggtgtgaaatttatcccaaccacaaatgcctcaaatacttctttactcagaaagatttgaatatgagatagaggcgttggttggagttagtgaaggattacgattgtgaga

SEQ ID NO: 367151 - DNA, 523 bp, Cannabis indica
agccttttaaaatactttgtcttaaccgtctgatctcattgctatagaaaaataactactttagtttcctttttgatgtctaagtgaagtaagtgaagaaaggatcccacatgcattacataactgctttttggagggaaaacctttttcacttctcatgttttactttttactttctctcattagaaattttctttagaaaaagctcatctttctctctagaggacgaatccacaggcatcatcttctcaggatttttgcattgttttgatgatccaagcttcccacctccttcttcaacaacatcttgtagtgggtaagctttctgttcctgctatttcacttgatttggctaattttgccatggatgaatgaacactattccttgctttgaacgtgctttgattcttacgttagattgttatcctttcagtattttgatatgcatgatagccttaggatacataatgtgttatttctagacgaaaaagatctaaatctgaccttcattgtgattcttggc

SEQ ID NO: 367152 - DNA, 1008 bp, Cannabis indica
ccatgggcctatataaccgagcttctcaataagcagatctagaatttaccaagtgaattcactaacttattaattcctccttgcaccactatagatttggaattacactctcaattatatagaacgctctatatgttccacgatatagatacgctatgagtatccatttgttataatcctaataatcaataatcatctatagatgatttacattgagtagggacaaatttattgttacacccttcaatgtattttatccttaaaacacttagcaacctataaatgatatttcagtgaactaatataatcattaaaatgagcgctctattatttatctctatcaagagaagctcgaaggaaatcatcgtttcacttctatatccagatagaagctatagattctgtatctatgattagcgctcccactcaattgaactaccatatccttaatctatatgtcatgagaagaaccatttggtcgactttaacgaacaatttgaagaacacaaataatacaattgaactagaacctaaccatctcatgattgagatcatttgatctaagatcaactaggtgatattgaattgaatagatattacgataagtttattatatctaattcaagttccatatcggttccttccgatgcatactccattcatccaacccaagcttaccttaaccaatgccctggaaaggacatagcacttatccaaggagcaagtaaactacattgtagattatcctatcatttaaaccctgtgtactaataaatcataataatacatttaatcacacaattttgataactttccactgtgttaacaacacaataaacaagaatatcagtgtgataaggatttggatgaatttataaataaaaaaataaataactaatcacatgaaccaaataacacaataaacaagtaatgaaattaaatctgtttctttattgataatttaatagaaaagattacattaaaattgagttttatttagggcacaaa

SEQ ID NO: 367153 - DNA, 683 bp, Cannabis indica
ttatataatatcttagtgcattaaatgatttgcattgtataaggatggccacacattgcgatttggcaaacagaggaataatttgcttataagtcgttggtttcatcattataaaaaaatcttacttttagtcacaataaaagttgtgattaattataaatcacaatttttatgttgtcactaaaaaacttgtaactaaaggtattagtcataaaaatcaaaatttgttgtgactaaatatatctttagtcgcattatttgttgactaaaactaatttagtgacaaattgtatctgaatattatgttttagtcacacgtaaatttttattgtgattacaggttacatgtagttacaaaaaaattatgttgtgactcaaaagttatcactaaaagtaggccttttttttttgaagtgttcatacaaatatcaatttgacgatttttttttctttaatttatcaataattttatcatgatttttcttggaatattcattgatatctttatctttagggtacatatcattttagaccatgtgttttacaaaagttaccaattagactctctgttttgttaaacgacaaaatggaccctgtatttttcaaaatggtataataaagaccatgaattgattttttgtgagaataaaatttaataaaaatatgatctaaatatgttatga

SEQ ID NO: 367154 - DNA, 1410 bp, Cannabis indica
gttcttgaaatcaattcgaaagtcatcaaagttgttctttcagatcgtggaggagaatattatggtcattattcaaaatctggactacacatgaggccttttgctgaatattttccaaaaaatggtatagtttctcaatacattatgtcaggttcacctgagaaaatggcattgctgaaaggagaaatcgcactctcatggatatgttagatgcttgatgagtagatcaaatcttctagagtttttatggggtggagaacttatgactgcaacttatattttaaatcgtgttccaagtaaatgtgttcccaaaaaccccttttgagttgtggattgggagaaagcctagtctgaatcatcttcgtgtatgtggttgtccagctaaaataaggatttatgattctaatttgaaaaaagttagatctaagaacagttcggtgttattttattggttatccaatgcactcaaaaggctatcgcttttgctgtcctattcgtgatacacaaactgttgagtcttagactgctaatttttttagtaatttgtatgttgctaaaaatattccttcaacatctcttgaaacgggggagtcatctaaaggaatttttattcctatgtgctttttcaagagatgataataatagcagtcttattcttactctagttgataacactcccattgctgatgaatatattgctcctaatatctaagatgacgagggtcctattattgatgaggaacctattattgaagaaggttttgttgttgatgagggtcttgttatcagagaaatctaattgtggaatatgtcattcaaaatgatggtcaataaatagaggttattccagaagtacctcctatatggagatctcaaagacaaaagatgtcaacaaagtgtgatgataattttgtttaccttggagaaggagaatatgatattgatcattttgtggatcctgtcacttttagtgaagcacttaatagtccacaatcttcaaaatggttagcagctacggatgatgagatcgactccatgaagaaaaatggtgtatgggagctagttttattacctgatggttttaaaccaataggttgtaagtggattttaaaggctaaaagggataaaaagggacagattgaaaggtttaaagcgcgtttagtggctaaaggctttactcaaagagaaggtattgattacactgaaactttctcacctgtttccactaaagattcattcagaattattatggccttagttgcgcattttgatttagagttgcatcaaatggatgttaaaactgtttttctgaatggagaattgagtgagaaagtctatatgtctcaacctgaaggcttcgaggaaaatggaaaagaacacttagtttgcaagttgaaacgatccatttat

SEQ ID NO: 367155 - DNA, 1145 bp, Cannabis indica
gatggggggacctagaccagggacctaggccccagaacacagacccaaatcggaatgcgggactcgaacccgaactagaacttcacctggactcgagaatctgaagtcagacctagacccagactcgaaacctaccccgggcccaaactaggataggaacaaggacacgaaccaggatcaaatctgaactcggacccaaacccaaaatcagacccttactctggacctgaactcagatagagacctagaattagacccaaacctagacctagacccagacctgaactcaaacccagactaggattggaacccaggacttagacccagaattgaacccaaactcagatcgagaatggaacttgggactcagacctagacccggacctggaatcgaacccacacctggagcttgatccggacctagaccgaaatccgaacccgaaccgaaactcagaccaagactcaaaccccgacatgaacttgaatccaaactcaaacgcagaattgcaactagaagtggaaccaaaataggactaacactaggacctaaacccgaacctgacccagataaaatcaagacaaagacccaaactcaaatcgagactaggactcaaacctgaacctagactcggacccaatcccagacaacaattgggacctggaccctgaatcaggatagggacctgggcaacggaactaggaccgaaacctagtactcgaccccagacctggacttgaacctaggacccagctcatgacatggcacccaaaatggaaccagactaggacccgagattgagatctggatctagagccagggcttggatcgaacccatagtcggtgtatggatctgggacaaagccctagacccgaaccaagaccagcacccgaaccaaaactcagacctgaaccgaatcctagacccaaaccttgacccaaaatcgtaccttgtgacccgaaattggaaccgaaatcagaagttgaccttgacccagaattgggaccagaaccaggacttggacctagaaccgtaaccgaacctggacctagacccaaaactataaccggaccaagacccagactcaaacttagacgtagaccaaaaccgggacccaaacccagatccctgcccggacctggacta

SEQ ID NO: 367156 - DNA, 523 bp, Cannabis indica
agcttaaaccatcttccatattcttttcttctcaagaacacttcatatatatatatatatatatatatataaataattatatataacactctctttcctaattaaacttagtgaatacatttggctacgtaggctgattaatctcaacaatatcaaacaaaaaaaattacatcttcattctagtttatcaagaatacaatattaaaaaaaatggaaaattttaacaaatctaataaaaacaagaacacaacaaaattgcaaaaacaacatacatgccaaatttgaaatatttcttcaatcttctaatttcttcattagattttttaacatgattttgcagtgccattaaattttcttcaataatctctaaccttttaaccaaatttatatcattccttggagttggtgggtcaatccattttgaaaaatggcactcaatctgaacgttactctttcaaaaccaaacaaaaacccattaacaaattttcaatacccaaataataccaaaaaaaaaaaaaaacta

SEQ ID NO: 367157 - DNA, 882 bp, Cannabis indica
acgaaccaagaaatcagagacacatgcaatccactcacggaatacaagaaatttagcaaacgtctacaacctcccactttgggattttaaagggcttgagctggtcatggtctcgcgtactatagtgaatttggatggtagctgcaagcctctgcgactcttgagcctcgaaggcttgggggtaaatattatccatgtttctggataagtgacacgtgtgcatctagtagtctaactcaacttacgggcccattcacaaagcccaaaaatacaagcggcccagcccaagaatgaagtcaaaaaaaaggtttggattcaataaatatttggtaacaggtaaagtctgacctacaaatccagaaggttaacacagctggattatcgagcatctaggaaggcataaacaaatgccacgtgggtatccaggacaattagtccaaggggtacatagaggtcgacccttcgggttcaatctaacgtggaatacctcttacagcacagaatcaggggtttttcccttatgtcgggcctgggaaaggcacacaatacaaaaagcaaactaccttttgtccaacatccactaccctcacaataactatacacaattggcaacgcatggctaccggtcaacatcaagttgtacaagttcgtacggacgatggttatccctcaattgggcatcacctacttggccgaaagtctatattataatgtattttaccccatcaatgggcttaaatctcatgcaagccctaacaagtccgagtttattcgtaaacctgaagtggcatctaaaatctggtcgatcttgggtagcgggaagcattccttcggacaagctttgtttagatcagtgaaatctatacaaactcgccaagtccc

SEQ ID NO: 367158 - DNA, 450 bp, Cannabis indica
tattttctaaaattgtacaaataagacactgagctaatttgttgtcaaaataaaatttaataataatctaatctaaaatatgacaaaactttttacattttttgtatttgttcgtattagaaattgtcttaaacttggttatatttaaaaataaaattgttaaaaattaagcttatggtcatatttttaccattttagaatatataggatccattttgtcatttaacaaaacaaaaattccaattaataatttttgcaaaacacggggtctaaaatagtatttacaatgacattactggcaaaagttacgtaaccaacgaagatgcctaaccttagggtaagttgaaatgtacccttttttttcatcagaggaagattttatttattagataagtgtataatcggaatataacaaataaaagagggtataaattaaatatatagaaaaga

SEQ ID NO: 367159 - DNA, 573 bp, Cannabis indica
catcctatatggagctttagaaacaggttcgactccaggtgccagatcaattacaaaatcaatctctcgctgtggcgacaatcccggcaactcctcgggaaacacgtcgagaaaatctttcaccaccctgactacctcaggcccaaatgtttcaggtctgctggagtcaattaccactgctagaaatcctacacagccactgcatagtaaatccctagtccttagtacagaaataaccgggatccgagacccctgaactgatccaacataaacaaatggatcttcaccttctggctgaaaaatcaccattttccacttacaatttatactggccgaatacttggacagataatccattcccagtataatatcaaactcagttaattccaattctataaggtcagcgctcaactccctatcttcgatcctaaccggcatagacctaatgcgtctattagagataaccaattccccagtaggcattagggttccaaaccctcttacaagaaaatcataaagtctatccaaaagattaaatactctcgataccacatacgagtatatagtcccaaa

SEQ ID NO: 367160 - DNA, 760 bp, Cannabis indica
ctttttttcattgttaaaaaaagaattcattctaagtatgttctatggttgcggttctaattgatcatcgacattagaaattttctcttgtgattttgtttttagttgtgtgaaatttgcatgcatcattggcaacgagattcaaagattcatttggttaaaagaagactgtatttgcttgaaattgaaagtgttattgggaatattttaccaagatctagatttaccaacaagtatattgaattaacatcctaaatatgaattctctacaacaatgaaataaatccatttcaatataatcagatttactaattaataaagatcaaaaatcgcttttatgttgcatggttcaaatgatttatttcatgattatggttaatatataaattctaataagtctagaacatatgtatttgttaattaatatagtgtcttcagcacagtggaatataatcatgattatatgttcaaaaatttaattccctgatttgtcagttcactgaatttagactggcataataatcagcgataggtatacttacaccttggataagtgtatgtcctttctagggcattggcaaagtttaccagtatcggatgtatagagtatacattggaagggaccgatattgatcttagattagatatcataaacttaccgttatacctttctaagcaatatcaatggttgatcctaggtctatggatcttaatcctgactaagagcgttatttgtgctctttgatttgttagttaagtc

SEQ ID NO: 367161 - DNA, 705 bp, Cannabis indica
agttttaaatgtagttattgacacccaaacttgcaatagatgtaaataaaagacgctataattcaaaaaggttcggctccgaatgtcggtaatagcctactccccgtgtgttaatgaaccgaagtgcaaaagtcaagaacaggctcttgattgcaaagaatgataagtgtttattttctaagtgttcaagattgtggatcccctcccaggtcatggatgactcgttacataggggtggggttgctgcttctcaattcaagagacgcaaccaacgcagagccacctcaaccgtccccttgaatttcggtggtagttgaagttttattttatgataatatccgctattttcgtgggttgataactgtctttgagccttttatgggattcaaatatttgaatgagctactgacgatgacggtctcttatgggtgtgacacggtcgtcaacaaccttttggggaaggccatacttgggggaaacacccccatcgttgggtgaccccccgagacccagcttgagggggtgatagtcgtcatctcggggtgaccccttgagacccagcttgagggggtgacaatcatcatctcaacgtgaccctccaagaccccttgtccattgtcagtacttatggtgtaatgtggatgtccccatatacctttgagaatgtcattatgtctatgggaaaatgtatgacttgtaccatga

SEQ ID NO: 367162 - DNA, 1084 bp, Cannabis indica
tattggaaaatctatttgatggtcttagttttggttgtgaattgggttgaaatggatgagtttaggggttgaaattcattgttgaataatgatttatatattgctggtttttggtgttgttggagagtgaactaggtgtaattcttctattattatttggcttatgctcgatgaaagtttactatgattgtgggcggatttagcatgaaaattagtatttttggatgcattacgtggctggaaactgggtttcctgggttttaaaccaagtagccgcaaccattttatggcagcatattgtgtttttttcgaatttttgctttggtcataacttttgacttggtactccgtttgggatgttctttatatcgttggaaagcttgttccgagctctatgtgaatatttagaatttcaatgccaattttataatttgtggaaatggatttagggattaaccctatacttgtgtatcatgggattgtgactaggattactggtacttggtcaggagcatccagggatttggaatctccatatttgcgggacatcaggtaagatagtagttagcacgtagagatatgctcaatggcacctatatggaatatgatatatatgagaaactagaaattgggattagagttattactctaaagtgagcagtttattggcttagggttattaccctagtaaattgttaatatgtaattgttatgccatgatgtatatagatgtatattgaaattaagggttatgtgttcaaggcataatcaggttggactcggtaactagaaccaatatgaattgttctaaggctttattgtatatagatgtgtgagcgtaacacgtaagtctatgccatatacacataaataggcgtgtgagtgtaacatgtgagtctgtgtcatatagacaaatatgaaatgggattaatatttatgtgatttgttcattatgattattaatattttatactgtcttgctgggcttggctcacaggtgctctactgttcaggaaagggtaaatttgtctctgatcagccatgagtgtaggagttggacgatgtatgtacatgttcgagcctt

SEQ ID NO: 367163 - DNA, 790 bp, Cannabis indica
ggtccgggtccgggtctagcgttgggtctgattctaggtgtgggtttgagttcgggtctgagtctctgtccgggtttgtgtccaggtctggacctcgatctgggtctaggtttgggtccaggtccaagttgtgttcctgagtgcgggtcaaagttttggtctggattaggatctcggtccagatctaggtcaagcattttgatcccagtctgggtcttggtccgagtccttgttcgtatctagatccctatctacgtcaaagtctgtgtttgggatcgggtcccagatttaggtcccggtccaggtctcacttctggtcttggtacacgaccgtgtctgggcccgagttccaatctcagtttggttcttatgtttgatctgtgttcggttataggtctgggtccgggtcctggtcacggttctagtctctttctacggtcctggttcggcgattcttattcaggttctaatttttggtcccaagtctaggtctgggttcgggcttggttcatcgtctgggttctagtcctagtctgggtcccagatctagacaccgaccactggtctattccacgacccgttttccgaatccttagtctagatctggatcactgtcacgggtctcggtgtttttctagttcaagtcacaggtcccgtttttgagtttgggtttaggatcgagactgcggtgcggttctaggttccgacccaggttacgtttacgtactctggttccatgtttgggtctgagttgaggttcgggttcgggtcctgagtcaaggtttgggtt

SEQ ID NO: 367164 - DNA, 586 bp, Cannabis indica
atcattattatataattgagtcacgtcaaaataaaggtaattaccaaaaaaaaaggtgtacgcaatatctaagagccactagtatatgagtacaattcttcccacttatcaaaataataatatttaaaagtagattataatgttacaattctttagcacaaaactttgttaatgtagtgaaaacatgtttaaaaaatatatcaacattgcttcataaaataactagataacatacaataagtaactttaattacttatgaaataaaaaaatatgttttaataactaatgaaattgattagtagttgtattttattttaaactaaatttattttatttaatataaaaataaaaaaaaattaaaaaattaacttttgtaattcaatgaattatctttttttaattgccggttgaaaatatatatactttccgcatataaaataattacaataatcctaatggtaaaacacttgagagcaaataattaataatgtagatgatcattgaaaaagatttttaaaactataggaaaaaagagagactatatttgatgtgtcccatcatttttttcacaaaacaaacaataaa

SEQ ID NO: 367165 - DNA, 354 bp, Cannabis indica
tcatgtttctattggattttattttatcaagatctaatttactaccatgtatgtttgattattaacgtaataatctaacaacctaaaatatgatttacaaaatgtcaaatacatacattcgagttttggaaccttaaattggttttagtaaaataaagtaactccttccactaattcactctaactctcgatttcttttttgtagtaagatattgccaagtgataaccctggtatactttgactagtgatttgatcgttcttctacacaaccttccatcaagacgtaagtattattctgagagagttgaatgacttgaatgacaaagtctctcatcactttctatttatacaca

SEQ ID NO: 367166 - DNA, 1085 bp, Cannabis indica
tttatttagttacacaaataaaatcgtagctaatttgcattttatgatctgcaggttcctgaccaggacatctaaactgttcggtaggaagaaatgggaggtggctaatgttgtggctcggaaacagaaggagattgaaaaattaaaacccgaagtccaatcccttaaacagaagagaaacactatcgaacaagaggaagaaggagaggtggcttgtgaggcgtatgttccacaaccatacgctcgtgaggatgagggtcaaccacaaacatatgatgaggagtttatttcccttaacgagcaagctctcccgtataattttgatgaccatgcgacccttgattagcaagtatatctctgctctgacaacatcgacaacattgtggcccgagcgtatctgtacgagcatgagggtgacatcactattcactgcacaccatacgatgattcacatgcctgggttctgattttggaaatgttgcaagaggacgctgaaatcccaatctcagttgaagggtacagatatgttagggatgtaccacacatgttccttccttggcgtaaacacttaattgtaacatccaaggtaacttctcttataaattaattattaatgattagtggagtttgaatatcttcaatattcaaccatagtaaagtaggttatgcgaatatatgtgctgcggtgggatggatgaacaaactactgtgatatctgtgttatttgtcgtgatacaggcatgtttaaaatttttgagggcattcaattacagccgttatgttgcagaaatttctgcagaatttggatgaaatttgatgtattatgttttgttttgtttagggtccactcactcaaccaccttcaagacgtgatgcgtggaaggggaaagctctgatgctttctcaacaaggcggtagtgcacgggaagatgaattattctagaaaaagaagatggacttgatccataaattgctaaaatggatggttgttgaattcctgaacctcaaagataaacgtgatataatcacaatccctgtgcctaagggattcatagcactgcgtacccagatcacgttatctggag

SEQ ID NO: 367167 - DNA, 423 bp, Cannabis indica
caaaatactaaagtggggcccattaacccatggccgaaaacttaatgatggtttttccaattaatattttcattattttaatgtctagtaattcctaacctaaacctagtggtttcctataaatagatagtgatggctcacacttaaagaatgaaaatcagagatgaatttttgccttcataaaaaattgagcctcctatcctattgtctatagccaaacctccctctccctcttttcttcttcaatttttcgaaaccttgagagatagagtgagtgcccacacacatcaagtgctatcttaatcatagtttggaagattgtgaagaacccaaactgaagagaaggacattcggactcagatcttggtgatactctgcgacagacaggatacaaggattagagaactgagtggaaggagacat

SEQ ID NO: 367168 - DNA, 572 bp, Cannabis indica
aaaagcaggtgtgagattacgtaaaagaagaaaaaggtgtgagattatgaatcaaattttttcataatgtattatttttatatcccgatcatacatagttgatgtcatcattgtagttcctatcgatgttctcaaatttttaaacttaacactcaatctaacgttttgttagttgatcaataaagtgccacatgtaaatatagtattggtcaaactaataattcttttagaaaaataattttaagaaacaaaaattaattaaaataaaatcatattattcaaaaaagaaaaaatattatatacacatcaaatgaaataaaaattaatttttccatcttcttccaggcatattatctttacagattaacaataattttttggtaagaagattaacaataaactttgattctcgattcaaatgctatttttcaactctattttcatatattcaaaattctcattccataaacttttctactaatatttttcaatcaatgaaacgaaaaggaaaactttaattctcgtatgaaaaattaaactctcaatactaataatcaatagaaacgacatca

SEQ ID NO: 367169 - DNA, 655 bp, Cannabis indica
atatatcttcccgaggttgatattgcttttactttaattctgacaactacagtttctggtgtcgtgatgatctttctcgcatgcatgccttcttacagcgagatggacgcctcgctatcaatcattttgattcacccatctgcttatacttagtttgtataccgtgtactatacgctaagtatttctcttgtcattatagctcatccacgctacgaggttaatgcctcgtcttgcacacttgcaattacatggtttctcattgaagcacaagtcaacagttagtacatttttatctcgcataagattcttcagtcaaccgagttataaacaaactctacaaattgtgcttttaacgagttattccacatcaattgtaattgcgattacgtgtttgagttctttattcctcctagcttgacacgtgtcttcctttgatgtgctcgccgaattttgggtataacatcaagattgtaacaatagataattataacgtatctatatcgtggtacatatagaacgtactatataattgagagtgctattcaattccaaatctatagtggcgcaaggcagaattaataacttagagtatttacttggtaaaattctagatctacttattaaaaagctcggttatataggctcatggtccac

SEQ ID NO: 367170 - DNA, 893 bp, Cannabis indica
aaataatattatttttattaaaaatataatgcatgtttactattaagtaatgagaattaattgtaaggtaatcaatcccttacatttgtttacttacattaagtaatgagaaattttttcatataattagttgcgcttttactaagagttgcctggacagggggctgggagggacggttggagggggtgaagttactgtgtttggcagttggtttgataatgtttgtaaggtgcaacctatggatcgtattgagaggcttgctatgcttctttggggagtttggggagctcgtaatgacttgatttggaataataaggctttgtcgttagagagggtggtgagtgttgcaattaattaccttgtttcttggaagaatgctcagttggagagtagagttgtgttgccaatttctggtccgaacacttccgggtgtgagcaatgggctaaactttgttttggtgagattaaggttaattgtgatgctactgtctttgaggatgacaatagtctcggtttggggtggattgatcgggatcataatggtttattcattgatgcgatggcggttaaaacttatggtcaacctgacccgcttttggctgaagctatggcgttgaaggaggcgctcagttgggtgaagggaaggtgggttgagggggatgtgcctgctggtgtggttatggagtcgaactcgctactgctggtgcaagttgtgcaacaaaagaagcgtttgttgtctccggtggggcttttaattttggattgtgttgctcttatgcaatcctttcttttgttttctatttcaattagatttgttaaacggtccgggaaccaagcggctaactttttagcttgttcttttggttctattcctggctgtgtttcccgcggg

SEQ ID NO: 367171 - DNA, 878 bp, Cannabis indica
atatttatatatgtggactaataaaattgtgtcacgtgtacactgtgtccaggtagacattccaccatgacaattaacaactaaaaattgatggaaatgttaaattgctaacataacacaagtttaggaaattttacctctaaaattttagaattggggatcacttacaaaaatctaaccacttaaaaaagttataccgcaaataactcttaatttctagcaaattaaaaagcaacaacattagaattaattttgtaattaataaatccatagccagctaggtatttgtgtatgtatctccatttaatctaccattaatattatatgttggtcacttggtgaggtgggtgaggaaaagtcaagtactgagtcacactttatttgtatattttccattagaaatggtttataataataaacaatgaccttcttaataatttcttgcaataattaacaaagactatatttacctttctaatttattaataattgtgggttctagactagctactatagtgctctagctagctttgtagtatctccatttaattttctatagcacaatacttaatataaaatataattttataaatataaatatgtaagactctatagctaagtgtcttggtaaggtgtgtgagaaagagtcattgatgagaagaaaagtgataagatcatgataaaatataaaagttgagttatatttaagtaaaaacaaaaaaattaaatttgtatatttttacattaaattttattattatactccaatacatagtttataaattttgatgcagaatttaatctatcattaaatgtttatttaataattaattaaaaatataataatataataataatacaaaataaataaaaaaaaa

SEQ ID NO: 367172 - DNA, 621 bp, Cannabis indica
atacatttcatttcacaaaaattaaataacattcaacagtaggtaatataatcagtcatatggatagaaatagatatgctcatatatttgcattgcctaaatagggaagcctgtgtcataatgcgatatcatatataatatcattgcgccacctaatcaggtgagcccgtgccacaacttgagactaatatatcgcattgtctaatcagacgatctcgtacctacgctcggtactcatcatgtgccactaacacccgtacctttgcctggtacgtcgccagatatattccatcacctaatcaggtgagaccatatattgtatccatagtatcattacattatcattgcctaatcagacaatcgataatttcacaacatgtcatgccatgtggtacattacacttttcttacctcaagttccaaatcaggtatgttggccaacctgcttagagaacgatcgataatctcaggcccaatgtcataacaataataaatcaataagtgtttatcccaaaacaccacttaacactcgtgtaagacaatctaggattttctagcaaattctgtggtatatgtatactaaaataaagcttatattttggctctaaaacatacaccata

SEQ ID NO: 367173 - DNA, 505 bp, Cannabis indica
tggccttgattgtacatatcttgacggtcatcagtgaacaacctggtggctttgataccaaactgtaacgcccgtatttgaaatatactaaacttaaaagataactttatagtattataactttataatcatatgggtcaggatcccaaatttcaaatcacggtttaaagtatttttactattacaaagtctactagtatatatatatatatttttttgttaaaatataactcaaattattgaaagaccaaaacccttcaggttgcactgccgcggtatgtacaatcactgccgagctccatctcactgttcctccagcttagcttttcctttacctacacaaggtaccaaactgatgagtcaacagactcagtaagatatgcaatacatatataagcaatgctagtccagctttatgcttaagccgccctgagctcaacaaccgtgctcaccaaatggttaataatgtttttaagggaagtacgaccactgtaccaaatgcact

SEQ ID NO: 367174 - DNA, 615 bp, Cannabis indica
actgaagttaatctcctatttttatggggttttaagaccaatttgtaactggaagtttttaacaagttgaaagttgtagaggcacaaaaagtgcctgtgagaagagagattggttggccttcccattgttgcaggctagctcacctatgttagaaatcaggccagccaggggtggtccagtcagatccccttggttaaacagttcgttgcctcttttcctacttaagtatttggactccccatcaagtggtacgttgggcatggtgacttagccttcttgctgacaagttgtactccagatggcatcaatcttgtctatatggacataccccctaagtccctgtgtggacgtctgtacagattgggactttccagcttcagttttaagtgttgaagtcttaaccaagcaggttttatataacaacttcagttatgaaatattttgtcttttcggctgctcacgttccccaatagggaactgataatattcttcatggttatttcgcaggctgcgtagttgcttgctgcatgttggatgattagggctcaccagagcctatttaacgctatttggtgaagtatattctcgtatcaccctttattctctctctctct

SEQ ID NO: 367175 - DNA, 557 bp, Cannabis indica
ttttttttaggaaaatattatttttctgtaatagcaaacgtcaaaaataataatttttgaaaacaacaaaaaaataatacaatgtatttttgtaaaaaaaatataataaaattcataaaaatgtaaaaaaaaatagagtagatacatacaaatgtaaaaattttgctatttttgtatatttatgaaataattctctattatttttcaaccaatcatttttgctatttttgtaacaattttaagtatggttggagtttatgctcataaatagataaatatttataattaatgatcggaaatttatgagccaaaaatatgtcattttaaaaaatagttgagcagaagtgatttttaagagaagaaaaaatataccaatgcacttgcatatttcatggcccaaaaagaaaatttggacatttggaatgcggatatgtaacatttacaaaattataaatttaaactttgggaaattaaaagtttttttttatcaattttatgggttttcatatttttagtataaacaatattggtttttttttttttttttttactttttt

SEQ ID NO: 367176 - DNA, 592 bp, Cannabis indica
atgaccatataaaaccttcttttctttgttcaaagaaaaccctagctgccacacttgtttttcacagccggcccttcactcctcttctctccttcttctcttttctttgaacagcaagcaaaacccagttgggtttctttttcttccttcttttcttcttgctacagcccagctgagacacctctcttcctcactttcttcttgctgcagcaaccccagccgagcttcctcttctccttcctttaaccttcttgctgtagatctaaaacccagccgagacacccttttcttcaagctacggttgtagctttcatggctgcaacttgttttctttcaaaacctgcaacacacacataaaccgagaggctagaaagatctaaaataatctttgtagatttagtagagtaaaaccgaaaaaaaacatagcagaaaaataaagatgaacactatatatttgatttcggagttccccttgaaatcaagagtacatctccgtcaagcttccctcaaagacgcttgattcttcactatcaaagtccaaaccgattacaaggatgggagattcctagccacaaagttcagtaggtaatct

SEQ ID NO: 367177 - DNA, 704 bp, Cannabis indica
tatacttctgttaaaattaacttgattctgttaaaaaacaaaagaatctgttaaatgtacaacaaaaatagttagataggcatttatataataggtaagatatatatatatttatacaggattatttaggagtaattcctaatacattataatagcagaaatttttttatatatatatatatatataaatataaatatatcttttaagattcttactaattttattacataattatgtagttcgactgaataataatgtatttatgaaatgaaatttttacgtaattctggtattaaaaattttaatatacaagttactttatatcgaatttaagagttacaaaaacgacgaggtatttagagaatttgaccgtttttgcccctctcccaatttctttttcttatagtggacatgtagtcctctttataaaaaaatacatgggctattaaaactaaaaactcattttcttactattccctttttggttaaatttaagggtgtcagtcattttgattgatattatgttatattttatttaactcaacataaacattgtgttacaaaaatttaaatacaacatgcctaaataagaaaaaacaaattgaacctgttcaatgaattggttggtttggtatagtcaacctgtccaaatcgagcactaatatttttttcacattcagttattatattatagttaattgtg

SEQ ID NO: 367178 - DNA, 593 bp, Cannabis indica
atgttgtaaaattttaccattgctggtaattttagtttcttacaactatcgaacaacggtttatctgcaccacttagaaaattatcgaatttttcatgatcattaaaaaattcctcatgtgcttttgtcaagtaagtccattggatgatcattgaaatcattaccctcaatatcatctacctcctacttccctaatgtatatagataatcagttaaatgttcgtcattccaataccaagtagtataacttctattaaaccctcttaaatacacatgattcttaatcatcgtaatattttcttttgatttattatagcaatttacacatggacaatgaatacgtttgcaatttctagaattctttagggcaaactctataaatgcatcgaatcctacttaaaatcttaacaaaaaaatctcagtatttagtatgtttgttgtctctctgcattagagtgttttccaattctttgtgtgagtttctttacttttgagtgagttttgtttctaatggcttccaccagtggagtgaataaggaagtggaaaaaaatggaaaaatatatgtcttgatgatgaggaggataatgagatt

SEQ ID NO: 367179 - DNA, 543 bp, Cannabis indica
atagaaagactagacttttgtattagatatatatatatgtacaaagtgtccattatttctctatatagataactgatataatttataacaataaattattgacacattaacaatcatatctttggatagatttttgtgtatgccaatataatgattattcttatatatgatgataatattttttctataattggaaagatgtggaaactctttatttttttactaaactgaaatatcatgagtaaacactaataacttcaaattttagggagcttcttattggattcaggcatcacttttgtccttaattaaggaaaaaatattttctgtatttagcacttcaagaaattgtgtttcaatttgtttatatgatagtatatatatattatagttatgggctcgtttggaacgaagtattaggtcgtattgtattatattgaattgtattttatgtaatatttttatgtaaaactgtatgtggtattaacttttatagacacctaatatataatgttttagtataaattaaagtttaacatagta

SEQ ID NO: 367180 - DNA, 577 bp, Cannabis indica
tctccaaaaggtggattaggtctatgccgataagaatagacggtagagagttaagtgctgacttgatagaaatgaggctaatagatttcgatattattctaggaatggatttcctatctaaatactaagccagtattgactggaagaggaagatggtgatcttccaaccggaaagtgaagaacaatttgtgtttgttggttcagttcggggatcttggattccggtgatttcggccatgttagctagggagttactgcatggcggttgtttagggtttctggccctggtgatggacaccactcggccagataccattcggccagaggacatcaaagaggttcgacaatttccagatgtttttcccgaagaacttctaggtttaccacctcagcgggagattgattttgttatagatttggcacccggagtggaacccgtttccaaggctccgtatagaatggctccagctgagcttaaggaattaaagattcagcttcaagggttgcttgacatagggtttattcggcctagtgtgtcaccctggggagctcaggtttattcgtcaagaagaaagat

SEQ ID NO: 367181 - DNA, 837 bp, Cannabis indica
ctcgaggctggcagtctccaaagcattgaccttctccttcaaatggtctgcctcggccgcctgagcgtccttatcttccttcagccgaagaaggacctgccacagagaactcctctcatcctgaacacgatcaacttcactagataaggtctcgatggtttcctcaaagtgatcagcaccctcgaggtcctttgttagcacagtgatcttcttctcggcggcaaatagcttcttgttggcctcacccaactcatgacgaacagctggagtctccgccccggcctcctcagcttccttcttggccaagtccgcctccgccctcaaggtgtcggacagagccgcactcttggaagtagcaaattcagcccgggagtaggtgtaagccaacttcaaaccggtctgcataaaggaaaaagtcaacatatgaagctaagtatgaaaagctaaaagggcagtgtcgaaaagaaaagactaaccctggtaagctccttcaagactccgcccaccaacacatccagagatgagtcgtcagcaccagccagttgctcaccgacctcgggaaccagccggttcatgtagtgagccatcacccaggcagcacgggcatgggtggagttggtgcctgcacccgctcagggatcctcttgaccagctcagacctagatgttagtggcccagactccttagacttggcaaatttgggagtggaaggatttggagtagtcagctcctcagaaaggtcaataacctctccataaggcctcttctctgaagacccctctccgcccttagacttcttggccggagggaggcgctagagcttctgctcatcctctt

SEQ ID NO: 367182 - DNA, 780 bp, Cannabis indica
ctcttttcttttatttgtattttatgctttgggattgtaactctttatttaatatattgtccttgtaatattttggttagagttgtaattgtcttagtcttttatttcatcttattttattcttccattgtaatctctctattatttctaacaaggaatagtgtgggctattaagataaagtgtataacctcgttcttgttgaatactcaatacatgagaaagaacaattgagagagaaaacaattttctttttaatctctatatttcaaaatattagagtaaaagtaatgtcaaagcctaagtctaatttctcaaatcatgctcctatttatagtagttaaatacctttaataaaataattatttaattgtttaaataaataaatatctataatcgaatttggagagtgatatatatgagggaatctctcaaccacttgagaaaatatctcaacaaccttgaaatacctataaccactttttaaattagatattttcctaattgaatcaatatcaatatcatcaatcaatatatatatatataaaggaaagtttttagagagttgatgtggcatgtttaagcttcatattatctctaatactcatttttcccttttcttaattttttaatttttctttccaaattgtttaatgttgtaagttatgattttaattaatatttcagtttacgttttgtaattaattgtagtttctcaatgtgtctcttcatgtgaagattatatcacatataaagtgtattgatgattaattcaaaatcaa

SEQ ID NO: 367183 - DNA, 1007 bp, Cannabis indica
ggaatgtgatgatatcacatttacggaaagcgataccagatgggttcaccacccacatgccgatgcactggtcatcgtcactaacattggaggagacaatgtccaccgcatactagtggacaacggaagttccgtgaatctcctaaactttcaggcttttaagcaaatgggactacaagagaaggatctgcgaccaatcgtgtcgagtatttacggttttactggagacaccatttctttaaagggaatgatcaaactcccaattactttgggaaccgcacctatcgtggctaaattaatggctgacttcgccgttatcgaccaatacttggcatataatgcagtgattttttgccctatcctgaaggagatgaagattgtgacgtccatctatcatctcaccatgaagttccctactcccgctggggtaggatctgtgcgaggagtccaatcggactcgcgagaatgttataacgcgacattaaagctcgtcggttaacatgatttatatgttagaagcaccaccccctcgacaggaggtgttcataatagaggaaataccgcatgaagacaaaccagacttggatcctagggtcctcaattataccaccaccgcccaagctgcagaaggcaccattgaggtacccatcgatcctttacataataacaaggttttgaaaattggttctaaactaactttttaacagcgagaaaaacttgtcacttttctcaaacaaatctagatgttttcgtctagaaacattcagacatggtcggaatatatccgcaagtcatgtgtcactgattgaacattgaccccgaagtgcgaggtgtctgacagaagggccgcaaaatggacccctcaaggtaccaagcgttgaaagaagaagtagatcgccttttggcatgtggcttcataagggagtcattctacccaaactggttagcaaatcccgtactcgtgcccaagcctaatggctcattgcgcacatgcgttgatttcacta

SEQ ID NO: 367184 - DNA, 1031 bp, Cannabis indica
tggtctaaattaataaataatataaatgacattttattgataattataattattaaattataatttggcatttatagaattgaattgaaaaatatggtatattgaaagaagaattagtggttgaaaaaagtggcaaaattgaactagagattgttccttcatggctggcccttagagtgaagttttgcctaatatttaatcttttttaatccatataattcagccctaagccctagttgaaacactataaaaggaacatgatgctctcactcatccacttgatgccttcaaccaaatcaaacctagttttctatatcagacaactagtagatgagagacaccttctatagtgattcaaaccctcattcattgttcttcatattcgaaccttgagtgatagagttccatgcccacatatagcaagtcaagtactcaatcatagtgagtaagacggtggaaaccaacctgaaggagagaaagagatccatgctcaaatcttgataatactctgcgacagaaaggaataagggatagagatttgagtgtagggattcattatattttgctgcaaccaatgtaagggtttttaaactattatgtgtttgaattcattattttaaagatatattcatatttaggatgttaatcaacatacttgttaggtaatctagatctctataaaatattcccaacagtagggtattctgattttgatttcgctggatgccaagatagtagaaggtctacattaggctatatttttctgttaattggaggagttatatcccgaaaagtatcaaacaaacacttataacttcttccactatggcagcaaaatttgtagcgtgttatggggcatcaaatcagggaatatagctgagaaactttgtcactagactgtctattttggagaatgtagaaagaccactcaaactcaaaatattttgtgaaaatatatcagcagttatgtattccaataacaataggagctcatccagtcatagcatattgacataaagttcctagttgtg

SEQ ID NO: 367185 - DNA, 1074 bp, Cannabis indica
ttttcttaagaaaaaataaaaaatatatatacatgagttagaaaaaattatgaaaatgaaattaaaataattattgaaattaacataaaataatgtaagaaaaaaattttaaaaaaatatcaagagtaatttttaaaaattatttaagtttatattttttttaataatggggtgcatttataatttgatggggtgcaaataaaagtcccctacctttaaatgtttgtcctgatagcatatttaattttttttcctttttatccttacaaaaagaaaaaaaaaatcttttttatataacagaatatttttatatatttagaattattttgttaaaccaacaaaaatattagataataacttttaatatataaagattttaaatgtttaccattactttatttttgtataataaaaaggtcattgaattttataaataaatgcattacaaatatataaagagaaaaatgaaaatatacatataatcataagttttctgtgggtacataagtgtgtttaaaaaaattggttatgatttgtgaaaaaattaattaatattaaacgataaaagaaaataagataaattgtgccatgcatcaaatatataaagggtgcatgtgcattgattgaacatttcaatttcacaatatattatttcaaatttaattcgtgcttgtttttaatattataatttaattcgattaattaattattaattaaatagatcatcatgccttcaaactaattattttttgtctaccaaataatttaaaatttacttataaaaaaaaaaaatattaattttattttatttaaaaaagttcgggccgaccatcgaaaaataataacaattcctcgtacttaattttaatctctttttttttgttttatgttttttgttttgttttttttttttttttattttttttttgtaaatttaattcaactactatcttcattttttaattacaactttatctcattggtattactatgccaaggtatttaaaattagaatggatataaatactttaatatatatatatgtggcgtgcatgttagattaatataatttag

SEQ ID NO: 367186 - DNA, 551 bp, Cannabis indica
attattttggtattttattgacttatttgattacataactgtggggatattatttttcttttatattgatgagtgaacctgattttgttactaatattttcctattaatacatgagttaatccattacttttaagttagtattttgtgatataaattaaaggatcatttatataagctttatcttacaacaagggtcaaagtgtgacctttaaccacccaagttatggatattacatatcctctagtttgaataaccttgtaaaattactattttcacattataaaaactccaacttctataaatagtggagaaagatactatttcaccaatcgaattagagataatattttatagaaatggtaatcatagaattttattaatgtgagggggaattattgggtaaatactattttggattgtaaaagttactgattggaccctttattttgttaaatgataaaatgaaccttgtattttccaaaatagtaaaaataaaagaccttgaacttaattttcgataatttttttaatataatcaacttgaaaata

SEQ ID NO: 367187 - DNA, 973 bp, Cannabis indica
ggtgatcttactcagtcttgatcgctattcactctatttggagccaaataatagtgctgaccaaagaaaggttattttagaaatagagggctatttaacaggagctttctatggagtggcagccaccaacttaagggagttgctgctgtagcttggaggaatgtttgcaaggagaaatcagcacggggtttgggtctcaaacaggtaacttaatgaaatattgctactatgtttaaatatatatgtttgggccattgcgaaaaaagaagataatatgtgggtgaaatgggtacattgtgtgcatataaaagatcaatcttggtgggaatacaaagccggccaaaagtaatgatagttggtattggagaaagattgtggatttgaaagagagagtgaaagagctctacgatttagaggaaagaaagaatatgtgcaacaagtatgtaatttcttaaggctatctcaaactcattgctgctaaaaataaagagcattggtcgagcattgtttggagtcggctaattaaacttcccaaaatatagttttgttatgtggatgatcatgcttaaccggctcaagacaaaggacaggatagctaaataccatcctgaaattgataaaacttgtcttttttgcagcagtgaaattgagataatggaacactttattttttgaatgtcaggttgggcagatatgtataaatcaagtgaaaagctgaactagagcatgagcaaaagaacattgccaggggtgatcaaatggcttggaaagaccaaattgagcaagtttcgtcgaggaattttggttgctgcactagcaggtgtacacactgtggtgctcccgaaacttgattttttgggaggaaaagttgtaaaaagcggtacaatcatagcacaagtaaagaacattacaaatagtagaatttcttgtatttggccaaaaaaaaagtgtctaatatagatagaatttggtt

SEQ ID NO: 367188 - DNA, 683 bp, Cannabis indica
cttgaactttctttgatgtaatggttgcaagtggttcggctttcgtccacttagtgaagtaatcaaccgcaaccactgcatactgcactcctcctttgcctttgggtaattgtctgtatatgagttaactcgttaggtggagctcgaggtatctttgaaaatatctggcatttgtcacatttcttaacataggcttttgaatctttaatcatcgttggccaaaagtaaccttgccttagaattttcttagataagcttcgctcggccacatgatttccacaaaatccgtcgtgcactttagataggagtcgtgcagcttcttcttgagtaacacatctgagcaatggcattgagaatcctcttctgtacataattccctatactatgatataccatacagctttccttctcattttttgagcttcattccaattatctgggagtttcccagagtcgaggtaggctgccattggtgtcatccagcttggggaagtatcaatcatttcgattacttttgtgccagtgatgctaggctcttcgaggaactagataggaaccaagttcgccttgtcacttacattgctgcttgccaatcaagctaacgcgtctgcagttgtgttttcttcccttggaatttgtttgagaccgtagcttttgaattgtgcgagcaaatcatgtatttt

SEQ ID NO: 367189 - DNA, 1350 bp, Cannabis indica
ttcaacctgtccacctcggctgaaagctccccctccttggtatccttctcctccttcatcaaaagaagaactgctcgcagagaagtcctctcatcgtgaagactgttcacctcagcagataagatctcgatggtctcctcaaaacagtcagcaacctcgagatccttagtcaacacggagatcttcttctcagcagcaaacagcttcttattggcctcgcccaactccaaccgaacagctccggcttcgccctggcttcttcagcttccttctttgccaagtccgcctccgcctttaaggtgtcggacagagccgtgtttttggaagcaacagacttagcctgggagtaagtgtaggccaacttcagaccggcctgcacagagaaaaaactttagcatattgagctaagtgtggaaagttaaagggaagtatcaaaaaagacttaccctggtgaactccttcaagactccgcccactagcacatccaaagacgattcattgtcagcactagccagttgctcactgacctcaagaaccagggctagcatctccttgccctttttggcctcttgaagcactcgcaaaggtggagttggtgcctgcatccgttcaggatcactcctgaccagttcagacccaactgttggcggtccagactccttggacttggcagttttgggggtagaggggtttgcagcagttacctcctcagaaagatcaataacctctctggaagttctcttttcctttgaagaggacccctcaccacccttagacttcttggctggaggagaggcgctagagctcccgcccattctcttcctcagagcatcgatcatctgccgtgacatgtctgcacagaacaaaaacagtatggttagaacacaaccatcagaaacacaaggcatgaaaatcaagaagctcaagaatagaataaagtaaaatgcaaggtgaccgcccgcataagactcagaagtccatcatcacctgacattgatcttatgtcaaacatgacggctttcccttttctaaacagaggaggagatggctgagcaggttaaatgggctcccttatgcgaatgcatgtgcaacgggcctgggcgaggctgggagtttcttcttcctcttcagtggagtcacctgctcttcttcagcttcatcctcgggattcaaaggctcctgagcatattgtttggccctggcacctccttttcaacttagcttcaagcttcagttgaatcaactcattatcctcatgagctcatttagtctggccagtaccagatttcctcttcttccccattacggacttaggaataaaatccttaggataaagcccgtacctcacaa

SEQ ID NO: 367190 - DNA, 623 bp, Cannabis indica
atatgctgacttttttcctttgtgcaggccagtttgaagttggcttacacttactcccgggctaaatctgttacttccaagagtgcggctctgtttgacaccttgagggcggaggcagacttggtcaaaaaggaagtcgaggaggccagggcagaaactggagctgttcagctggagttgggcgaagccaacaagaagttgtttgctgccgagaagaagatctccgtgcttacaaaggatctcgaagctgctgatcgctttgaggagaccatcgagatcttatctgctgaagttaacagtcttcaggatgagaggacttctctgcgtcaagttcttcttcagatgaaggaggagaaggacgccaaggtggtcgaggcggacaggttaaaggaggaggtcaatgccttggagacagccgacctcgagttcttcttcgatttctggaaggctaatccccaggcaaattttgactacttgggcgaggctaaggacatgtaccttgagtactgcgcggcccaagttgcttatggtgggaacgaggcggctgcttcaacctcgggccaagcctctggctaggctgctaatgcttctcctgttcgaacaatagatcctcctgctccagt

SEQ ID NO: 367191 - DNA, 660 bp, Cannabis indica
atattcatccgtagtgaagtaggttctgcaatatattgtactgcgactggatcgatgggtggaataatgtgcatgttagatgagtttgaatattttaaatattcatctgcagtgaatgagaatgagaatattttaagagagatgagatttagggttattggtctgaaatttttagccaatatttgaaccagcttgtaccaaattttcagccaatattattttttcttttgataaatttagccaataatattaaataggtataaaatacatcttttcccaacagttattaattgttgggtatattaagtattccccacagttataaactgttgggtatacttaatattcccacagttaaaaaccgttggaataaactatttttttttaaaaaaaatatatatatttagtattgccaacggttatgcactgttggcaatagctatcccaacaagtttttttgcttcagtgctaaaccgatgggaaaaacttccactaacttttcccaacggttttcataattgaccctcttttaaaccgttgggaatagtccattttgtagtagtggcgaatacatgtatagcactcggatggatggtaaatttttatattgctaaatgttattgtgattgttttatattgttttgaattgtgttttgttgt

SEQ ID NO: 367192 - DNA, 935 bp, Cannabis indica
tctctctctctctctctcgaaatccctagaccagctagggttctggaattgttcttcaaatcttgtcaatttataacttctctaagtgaattcaagctaaggtaagcttctagacaactttcctttggttcttgaattttaagttatgaaattatgcatgttttgagagattgagttctatagttgctgttgatgtttgatttatgtttctgtagtcaaaatatgatttactatgttgatttaaacttgaattaatggttgtttgaagatttaaacaagttttgagttttagaactcaaacttggagctttaatggtgaaattcaattctaagctttgattgttgttttgttgcttgaaaatagtttattggggtataatatgcaggtctggaaagcttgattgattgagtttggaaacgatttggttagggtttgaaagtttgttggttttctgggtaaaaccggctaaccggttttacaatgcttgtaaaaccgattacccgaatttgcagcagggaaaacccgaatttcagcttgtcgtttcgtgtgagtttcaggtttctagttggttgactccctgctagtttagggtattaccatattgagttacaatagatagtgttttggttttaaaccttagtcctggttgtgatttagcaagtcacttatgtgtgttgttatcgatgtgatttaggagcgtataattcgccgaacagttgttccactcaggttgaccgacacacctgaattcagaattgaggtaagattagtataatgtcatgcatatgttattacatgtttagcgtacatgttgttattgcctgttagattacattgatagcagtaataatatacatagagttgtgctgattactgataaatatatgttggctaaaatactgatcgatactgtcacatcaatatggctagagta

SEQ ID NO: 367193 - DNA, 882 bp, Cannabis indica
caaaccgacaaaattattgggcgggttgaactttttctaaattttcattgggcgggttacgattaaatatttgcaacccgatatttatattgagttaataaaaatatgctacaatccgaccaaaccgaccgacgtatactcctactctatatcgtttatttattttaaataaagcattgttattaggtactagtggtggctagcacttttttaacatgtcacgttgtaattggttagtgatactccttaaaaattattatattaaattatatgagatccgatacttaattagaccaagagcgatattcacacatagaaggatgctagacaccactggtaccctttagtatttctcatttaaatatgtggaggacctattggcacttagttaaggtgtgaccttaacatttctcaatattattgtacttatatatactttctctcccaattttagaaaacaaaatcagagtatgcatttatttagtaaagccaagccaataaagaaaatatgaatagataagctgtcaattgtagagactatagtaaatggcactaagattccgtggtaatattttagagaatgcttgatgaagtggaaagcttatgtgacaaaatatagagatgttatgtatactattaaagataaaaaatgctattcttcaaatttgcattgatgccacacaatgacattgatgctatgtcttttttatacaataaaaaattaaaagtgcaatatatatagtagtttaataaagaaaaaaacatatatatatataataatatgtgatatcataattatagtatttttaaaatgtattatattattggagagtttttaaaagtaaaggtgtcaaaaataatatggaaaaaaaataaaataaa

SEQ ID NO: 367194 - DNA, 598 bp, Cannabis indica
ttccgtgtagacatgtctcagaatatgcttgacgctctcaggaagagaattggcagaagttccagcgcatctcctccagccaagaagtctaaaggcggtgaagggtcctcttctaaggagaagatgcctactggggaggtcattgatcttttcgaggagctaacggttgcaaacccctctactctaaaagttgctaagtccaaggagtctcgaggagggagttcgaacaggcctgaacaaccaagaactgggtctgagctgactaagagtagacccgagcagatgctagcccctactccacctttgccggtgcttccagaggtgaagaaaggcaaagagatgcttgcccactatatgaaccggttggttcctgaggttagtgaccaactggcggacgctgataataactcttctctggagctgctgatgggcgaagtcttgaaggaatccacaagggcaagtctttcttgaactttcctttaattttctttacttggctcaaatattaaagtattttctttgtgcaggccagcctgaagttggcctacacatactcccgggctaagtttgctgcttccaggaacacggctctgtccac

SEQ ID NO: 367195 - DNA, 567 bp, Cannabis indica
tgatgagtttggttttatagctgttgcgtatgtttgttattgttttcttgggcttgatgatgtttagatgaatggtttagagcaggttgtggtgatctttagttgtgtttattcaaagtttagaattttggctcaaaaactatggttttcaaagcaaaatgatgattttcgttgctgtggttattgttatcgttgagtggtgttttctgtggtttaattatgttgaaataggttgagatatgcatgattttgtgggtgtttggagggttagtcaagttttgagttttttaactcaattttgaacctccaatggtgaaatgtgtttttgtgtttgaagcttggttctattgcttgggttttgttatttggggtatgtagaacaggtctggaaggtttgagagagtttgggtttgaattgagtgagaaatggatttttgaagtttcctgctcagaactggaattccggttcagcaatcggaattccggatggtgttccaggaattaccagaaccggaattccggttgtagaaccggtctgctggttgggggatttttgggaaccctagt

SEQ ID NO: 367196 - DNA, 632 bp, Cannabis indica
gtgacggctatgacttgttcatgtgtacatatttaatatcatcatatcacatcacagttattattaatatagagttattcattttcattaaataaattaaaaataataaagagtacttattcatgaaaatgaacttcctccacagctgtttttgttaatagtgctcatcaaccaagccaaacacatcaatgaattatatgtacacgtatatatatatatatatatatatatatatatatgactaaatctatcaatacttttcaaattattcctggtttggttatgactttatttttcaatgtaggagcctacatttcatgattatggacttggctagacacacacaccactcagcttggcattcaatgcacaatgtgttgtgtggaggaaacaagctaatggaaaagtacttaagagttttgagtgaagccaaagtcaagatttgtgtaattcatggtgataaagacaaaattgcccctgttgaatgtacttacaacatcaagagaatggctccaaatgcagagattaacatcataagaggtgccaatcacaacactataatccttggtagagaaaatgacttcactacaaaccttcaacttacttgggcttcttcatcacttcatcatgat

SEQ ID NO: 367197 - DNA, 800 bp, Cannabis indica
tgaaatttatataaaaaaaaataagtgtttttttattaaatgaaattaaatgagtaattattagtagtggtgtaatataaatatgtttctctctcaaaaaaaaaaaaaatatatatttatatgtcaattgttaacttcaatagttattaatattattaatttgagagctgagcaaatttaataaatttgtgacaattcattggatcaaccattaatattgatattggtttcgtttaacaccaagtttatattctaattaataactattatatacatatataaaaagatatgttgaacaccgtttaataacaaatggaaaattatatatcttgttaaataggttcattgttcttaattacgatacatatgacagtaagtagtctagatttgttgcctaccacaacaacatatacgtgtagggattactattagtaaccatagctggtacttttttctcacgtcattgcatacataatcaatttctcatgtattaatgatatatatggtcctgctttctcatcatcaataatatattaaatcccaaaactcgtggttcaaatatgttaagctctccctctcaaattctctacctagataggtcggcaatcactaaccataaacactcacacagaaatattaactcatatatttatttccatcaatatcggaatatataccattccatgcactaaattctagttgctactatgattgattagttttgcttttgttttcagaaaaatgacaaattcaattaatttaaaatgtgtagaaagactctctctaaaaaaaaaaaaaaa

SEQ ID NO: 367198 - DNA, 935 bp, Cannabis indica
agtcctctcatcttgaagacgatcaacatcagcagataaagactcgatggtttactcaaagcgatcagcagcctcgaggtcctttgtcagcacggtgaccttcttctcggcagcaaaaagcttcttgttggcctcacccaactcatggcgaacagctgcagtctccgccctggcctcctcagcttccttcttggccaagtccgcctccgccctcaaggcgttggacagagccgtactcttggaagcagcagatttagcccgggagtaagcataacccagcttcaaaccggcctgcacaaaggaaaaggtcagcatatgaagctaagtatgaaaagctaaaagggaagtgtcgaaaagaaaagactaaccctggtaagctcctgcaagactccgcccaccaacacatccagagatgagtggtccgcaccagccaactgctcaccgacctcaggaaccagccggttcatgtgatgagccatcacctccctgcccttcttgacctcaggcagcacgggcatggatggagttggtgcctgcatccgttcaggaatcctcctgaccagttcggacctagatgttggtggcccagactccttagacttggcagattggggagtagaaggatttacagcagccagatcctcagaaaggtcaatgacctctccagaaggcctcttctctgaagacccctctccgacctttaacttcttggttggaggggaagcactagagcctccgctcatcctcttccttaaggcgtccatcatctgccaaagcatgtctgcacaaagcaaaaacagcatcgttagcaaaaaccaacaaaaaatcaaagtatggaagccaagaagctgaaaaaagaagcaaagcgcagagtgactgtccgccagaaagtcagaagtccatcatcacctgacatcgactttatctcagccata

SEQ ID NO: 367199 - DNA, 428 bp, Cannabis indica
ttcctttcatatttattttttttaaaaaataaaacaaataaaactatagtgattgccgaagttgtcactcgtgccggaaaagtcaccggagtttactgtcggcacgggaaaagtcgtcggagtagccgtcagtgccggaaaagtcaccggagttgctgccggcgtcgaaaaagtcgtcagaattagcattgtcgctcgaaaaatcaccaagaaactggtttcttgatgttagaaatcggtttcttggcaatttttccgataattttatcggtgacaatgccaagtccgacgactattttggagtttgatgtcggtacccaaaaagttgccagagtagttcctggtgttggaaaaattgccggagtaaaaaaagtcgtcagaattggcattgtcgccagcaaaatcattagaaaaattaccaagaaagt

SEQ ID NO: 367200 - DNA, 338 bp, Cannabis indica
taaaataatttccaacattaagcgcaataacaacaactcaagaagaaatattgggaaaaaggggaagtacaacacttcttccacgccacgaaaccagaaagataaggaggataagtacacttgcttcaccgtcctaacagagaaacttgagaaaatctacatggccactcagggcactatctcgtacaagcctcccatcgaaagggagatgagtaagagggacatgtcaaagttttgttgatatcacaacaacttcggccatgacaccaatgagtgtcaaaacttaagaagggaaatttaattccttataaggaggaacaatccccacttgcatcatt

SEQ ID NO: 367201 - DNA, 646 bp, Cannabis indica
gcttacccactgaacaagtgtaaatatattgaacaaccttggcattctctcttatataagctgacttctctgaataacaacatacttttgttgcaacaacaacctatgaattcattcattcattccaattatatcacattcaagtaagaattctgttacataacaaataaattactttcatatcaatttatagttattatgaacaagtaattgaattgaaccttattacggggttgagacttgagccagctactaataaagacatcagttcttccttgtgtctcctttttcattggaattgggtactgtccagcaacataaagttcaaacctttatcactaatttcatacacaaaattcacccaatttcacaatttattctaacttacagctttggcagtgtctagggcattgatcccacactcaaatgtgtaacttagcatgtcgtgagcttcttcctctgtgctaactggctttttcaactaaatgttaaaactatcgaaaaattggaaatcaaattcaatctgaaattaaacaacttctctgctatcaaaatcaaactatatatccgaatctcaacatcaacatcaacatgtatatatctatatctacatactaaaaaactccatggagagagagagagagag

SEQ ID NO: 367202 - DNA, 762 bp, Cannabis indica
ctttatagtatgtctaagaggaaattaataaagaagaaaaataatgtcatttttgtatgtatataaatgagaaatgctagtaaaaattattattagtgaatagtattctcttaagtgttattttgttattagtgtaattaagtattgagtctcaatataatttaatataaagaattgttaaaatgcaccagtagcactatctttagtgtcatactgctatttgtgtaattaagtatcgagtctcaatataatttaatatagaaaattgctaaaagacaatagtagcaccatcttcagtatcatactgctatttgtgtaacaaagtaattaagtctcaatataatttaatatagagaattgctaaaaggcatcaatagcacctttttcggtgtcatactgttatttgtgtaattaagtatcgaatctcatataattttaaaaaataatttttagaaaatattgttaactaatcgtgaagcgctacttatataaggtgctagatactactagtgtctaataacaatactagcttttaaaaaatatcgataattaatcttaaaacgtcacttttaaaaagtgttgaagatcactaatatttaataacaatactctgtatatttatatatatacaaatatataaggactagctcatgtgaaaggtttttcgttagttatctgaaacgaattctaggccataacatatattttatcatatatatgccgaattaatatgttacatgtaacatatatatatatataatt

SEQ ID NO: 367203 - DNA, 539 bp, Cannabis indica
ttttccagttgattttgccagaattaatggttgtattttcctcattttggttattttgcggttttgaaacgatcgaggtatgttcatcttcaacgttcgctctgtacagttgaaaacttagtgtatgtggtatttttgaaaatatttgtatgtggactttataaatgtttaatgggccggcccagagtatttttgtaattttttttcttttttttatttttctatttttttccccaatatataatgaatattctaatattttcctacttggtcaacatttagatttactacttaaacttaatgttcctcattacataataaacacataaatgatagcgataaatcctcattatatgtcgagtatcatcttccatgtattacaatatattcattatataaaaatatactttatgtggaaatgtgcttaattaaatagactgtaaactttatgtttattctggtcctctttaattttctcaaataaaaattaagatgcgtataaatatgagaaaatatcaaaataagagtttcattaataa

SEQ ID NO: 367204 - DNA, 1140 bp, Cannabis indica
tctcagcagtaaaaaacttcttgttgacttcgcccagctccatccggacagctccaagttccaccctggcgttatcagcatccttcctagccaagtccacctccgccctcatggtgttggacatggcaacatttttggaggcagcaaatttagctcaagaataagggtaagccaacttcagaccagcctacacagagaaaaaactttaaagtctgaaccaagtaaagaagaattaaaggaaactatcaacaaaggcttaccttggtaaattccctctcccatcagcaactccaaggaagactccttatcagcaccagccaattgctcacttacctcaggaaccaaccggttcatgtaatgggcgagcatctctttgcctttcttagcctctgaaagcactgacaaaggtggagtaggagcccgcatctgctgagatccgctcttggccagttcggatccaccctttgattgctcaggcctgtccgagcttcctcctcgagaatctttggacttaacaacttttggagtagaaggatccacaatagttagctccttagaaaggtcaataacctccccgaccggtgccttttccttggaaggggtcgtctcaccgcccttagatttcttggccagaggagatgagcttgagcttcctccaaccctcttctttagagcatcgagcatcttctgagacatgtctacacaaaacaaaaacagcatggttagaggaaaaaaggcatcagaagcataaagcatgatagtcaaaaagtttaaaaacaagactgaatatcctgcaaaccgattgtctgagcaagacacgagagtccaccatcacctgatgagtctctcgcctccgccagggcggccttccctttcctcgcacgggggaaggtggccgagcaggtgaactaggtccctaatccgaatggcatgttcaatgggcctaggctgcgccctcccttcaacttgctcccttaacccgtctagcaccatatttcctcttcctccccttcactggcttaggaatgaaatccttccgatagagcctgtacttcccaaagttgtccttggaggtcaactgaatgatattctggtcatcccccagcagctgaccagctcttgagctctatctctaagagc

SEQ ID NO: 367205 - DNA, 540 bp, Cannabis indica
gatcctactagttacgtaccacttgtagaattagagaataggcaacttcgacaacgtttggctaaatcaaatcaaggaaacacagagttggtgcgagaagtcgtagcgactagggttgtacagggaacagttcctcaaagccaacctgatccaactgtaaggagacctcaaggaagacctcgaggctctaggatatggaggcaggaaaataaccaagaaaatcccccaaatacctaggaggaataacctgggaatacaagggatgtcccaatagataatcaacctaatcgaagtaatacaaggaaccatgaacaacgacgagatgtcccatacacttcccatggatttgcaaactaagagaatgaacaaacttatatgcctaaatcatctcgcatgatgaagaggcgagacaaactcaaccaagaaactaaggatttcttgtgataatgaaagaaatcttagaaacaaacctaggtctagtggtctcctcctgagacatccataacacactactacaaaaaaaaatttcccgatattttt

SEQ ID NO: 367206 - DNA, 692 bp, Cannabis indica
acatcaaaaagaaaagaaaagagcaagtacacgggggtcatcttcatcatcttgtatgtacagtacggggcagctgcatatttttttctagaggagctttaattgcagcaggaagtacacgaagaagaaagaagaggggaccaagcctagtgtttgaattttcttttaccctttcttgatagtcttctttatttttctctttgttattgttgtttgtacttagtattcaaaacttcttgagattgtaaatttgggcagcagccatggatgaagtatttttagcttggattttatctttttatttgaatatgagctaagcttttgaggcttgaatgactatgaacttctaagttgggtatgattaaattttaagcttactttagtatttgtttgcctttgttcattcaagtgagtttcattttaattgattgttgtttcttggccatgaataacaatttgctaagctagatcttgtaccggaagggctagatctagtagttcaacttgaatgaagcaagtgaaaacctagacttaggcttttctttgtaagtgggataggaatatttcatttaccttgcataactcaccaaattaatgcttgaatagtgttctgcttgctggtttgatataggaatatattaagctaaatggtagaattaaagttgtgagtgttggaaaattctcacaagcct

SEQ ID NO: 367207 - DNA, 782 bp, Cannabis indica
atccgggaccgacctaaataatggcctaaatgggagaaataatactccttggcatgattcccccaccaggtggaaggcatcctaaacctacggagacgttcatcgaaccctataggcctaaggcgggtatactcacggacaggaggaacatagtgtattattaaaggggacttaccagaacccgaagtgctggcatcgggagccccagtatttggtacggggaccacgggcttgggtctgggggtcctccgctccaatggagccaattcggagggcccttccagcggtcgcctgggccttaatgtaagccaactcctgttccctcttgaagaggtacttctggtacttatcttccgccacggcgatgatgtcatcccggaatactttctctgcggctggagccctcacattcgggtaaatgactttggaaagattgtagtcatccaccgactgatgccccaggatcagcttggccttccgacaatgctcggtcgtgaccaactctccgacatcaagggccttcttgtcgtatgtggcgaaggtcttggcccgttgaagaaatatttgagtgggttcggtccgcatgtaaggggggatcctaacccacttcgtgagaaactctggatgatccgtggcctggaaaccggaggagaagaagaagcggtgacggtattccttcacgtgcttctgataattaaaagggaccgggccctcattcaaaggatggtcccggagaccgtaaaaagccgtccttaagagtatctccctttttagggatagaa

SEQ ID NO: 367208 - DNA, 1000 bp, Cannabis indica
ttacatccctgcttcaaatcaccaagccacaaaacccacagaaggggatgtcgtgcctggtcgggtgcccacaccaagcaaggggcaatgttgcctttgcacccgttctttaggaaggtggcagactattttcgcctttgtccgacccagtttactcccaaggacattaagtatctgtctgccactgttcatcctctacgccattcagaaatggggtgtgcctactctgcacgaggtcaaatggttctttgacctgaagtctacccccaagcaaggctagtcggggtacttctacttctttcagccggatttcaagtggttgacagacactgtggacaaggtcgtgagcaaagtcgggggttttattgatgagtattattttatggaaggcatgggcaccacttatactcgatttctgcatatcctaatatgttactgtccaccccttacactgactcttagggacagagttcagaggattgtccaactgccggatgccgcctggaaaaacaaaattttggacctcggaggccaactttgtggaatccgggctttattcagcagactttatacctcagcctgtgaaggggaggaagaagaagtccagtgctggcggggctgagggagctgagcaagagaaggagctcattcaactgaagtgtgaggctaagttgaagggaggtgcaggagccaagcagcatgcttaggtgtattctgagcaggagaaggagcttattcaacttaagcgtgaggctaagttgaagggaggagctggagccgaacagtatgctcaagaatattttgaagcaggaggatgaggccgaggaagagcaagaaagaccgctcaaaatgaagaagaccctcccgaccgggcaaaggccccttgaacatacaatccagatcagggagcccggtctacttgctcgtccatctacccctatagaaggaaaggggatagccatcctggaggagcaagaagactcgtcggatgacgatgccc

SEQ ID NO: 367209 - DNA, 668 bp, Cannabis indica
ttaagttaaaataaaaaaaaatgtaatgtattttgacccttcacgtgtccatatttatgagttaacgtatattgtagtaacaaatgtaagagaattataatatttagtatttttgccttaaaaaataaagataaggtatttaagtatataaaatgtaaaatattaagtatttatgctacaatttatattttgaagtgacgtagaagtttttaatactaagaatactactattaggggtgttcatccgatccaatccgcacttttttggttaaacaacatccaatccgcactaagtgcggattttatattttggatccaatccgatccgcataagagtttaaatccaatccaatccaatccgcaatagtgcggattggatcggttatttttttaataataaattatttaatatttcatagatttttttttttaaaaaaaaactattgtttcttaatctccaataataatctattttcatctctatttatatacaaattaaaccaatatacatatatatcaatatatgtatacttatctttagatttacactaaaatatatatgtatctattactaaaataaataagttagtatatacatatttaaactttatgtgtatgtgtctatgtgaataagaattatttttcttgtgttttttattacaaaataa

SEQ ID NO: 367210 - DNA, 505 bp, Cannabis indica
taagtttatgatatattttccactataaatatcggtccagtctgatgtataaccaatagatccaatacaagcttactttgctaataccttggaaaagacattccacgtatgcaagtgtaagtaaatcacattgttaattatcatatcagtgtaaatccagtatactgataaatcatgaaattaatttaatcatataatcatgattaatttccactgtgttgataacacaataatcgtgaataataatgtgatagagatttaatagaatttatatatcaaacatataattatgaaataaacatgtgaatcaagcattacactaaataagtaataaaatagttttgttcttttattgatgataatgaaattaaagattatactgaaatagagttttagtaagggcactaaatctaacaagggctatgattttttattttttattttttttattttttttttgttattaggtaataagtaatagttaagtacacaagtatcacttttt

SEQ ID NO: 367211 - DNA, 521 bp, Cannabis indica
gacttctctactaatacttatgaacaaactatatacatttaatatttctcaatatacaaaaaaaaaaattgttcttcaatcattaaaagtataattaaaaattcttcaagagtctactataacatacaatttacgaatttatattacataaacaatcatacatatttttttaaattataatttacttacatgtctttatttcatacatagatttttgtcatatagtgcgtgcgactttgaatttataacacttaaaatatgtattaaatttttctagaatttttagataagatatatttcaaattcttaatatattaggagctctaaataaataatattttattgcaacatttatgtgacgcttataaattctcataaattatattccagactataatcaaattatgattatattttctcaagcattatttcaatcaatctcatgtctttacaaactttagcaacaattcattttgtgtacaaatatatatatatatacaaatttttcattagaaatattt

SEQ ID NO: 367212 - DNA, 734 bp, Cannabis indica
atagttttaatttgtgtctcaaatcaatattgtagttgaactcttattgtatataatgtaatcactagaaacatctatcttattattctaataaatcatcttaaggatgaaccaaaaattctttaaagagcaaattgttcaacatgcatgttgtttagaaattgtaagcaattattaaataacatgacttattagaattttatcaatgacttgtgtattattaatggattctcaataatcattaaagttaaaggttgttctgaatcataattaatctaatacttgaggtggaagtttgagaaaataaataatattttctagaaactaggttcctatatggatctctcctattgatcaagtaaattcttaattccacaattctagtattgtgggatggataataaaatatgtaacccctagacattataacgtttcagatgaaatgcttatttatcgtatttgggcccagttctatcctttgacaattgtacttattgacctcaaataatgatcaactgacagctgggtcgtatagatctgatgcttgccacgtgttacacaaacagaatgaaaaagcaataaacacagagatttgttatagaggttcggttgtatttataccgagggaaaatactatctagatcacaagaggtggaatttgctatagcacccttaggattacaaagtatgaatcagtaggcagatttcaagtgttggacaacctagggtgttgg

SEQ ID NO: 367213 - DNA, 606 bp, Cannabis indica
acaaaattttaatatatatatatatatattatttttttttttgaataaaaattttaatatattttgatttggcgctacaattaattgccactttttttttttgaccttccagactttttcttttataccaactttaaaaagaagaaattaaactttatacttatttcttatttttaattttaatttttatcatcattttattattttttaatttatacttagttttataaattgtattcccattatgtgtattagaaactctaattttgataagttatgtgaggttatacttaatactttgattataaaagaaggttttatcaattaaaattattttagagttatatttagttaatgtgtgttgagtaaactgctagcaaaataaaagaggaacgatattaccgaatgaagaattctgggttgagtcgcggactaagtcgctctctttaagacgttcgcggcactgcccaggagtgtgcaagcagtcggaaattgccggtcgtccccaggataaaacagcccagtcgttgcactgtatcggaaccccactgcactgtagagcaccgtcgaatacacccaaaaaaatttgatatcgcagatggaatt

SEQ ID NO: 367214 - DNA, 695 bp, Cannabis indica
ccaatcacccactccggcaagtcttgcaaaagccagaagcttccggaaggctcctcaaatgggcaatggagttaagtcaattcgacttgcactacgttccccgcatttctataaagggacaagcgttggtagatttcatcaccgaatgtaatgaagccgaggcaaccgtgaacgcaccgacaccgtaggtcccaacatggaaagtatttgttgacggagcctccaacgaaaatggatccgaagcgggggttgaaatgatattctcgagttgacttcgactccaagcagccctacggttcgacttttctgcttcaaacaacgaagccgagtatgaagccttgatagcagggctgagattagcaaaggctgtgggggccaaaagaatagaggtctacagcgactcccaattggtcgtgaacaagatatcaggagagtatcagacgcgcggcgacagaatggctgcatatgtggcgatagtcctggaactgctccacgagttcacagattataaagtagaaagaatcccaagggaaaagaacgctcacgcggactgtctggctaagttagcttcaaacagtgagattgaaggacttggggtagtacccgtggaacgcttggcagagccaagcatcaaaataaagaggccatagcaacggttggcaagaacccactggatggtccccatcatagaatac

SEQ ID NO: 367215 - DNA, 480 bp, Cannabis indica
atagggacttaatgcatgagggatgattttgcttttgcttacaatgactaaactagaaaattgcaatgattacataattacgatacaagaaataggaaactggaacaagttgccatatttatctctcaatcccacgattgtagggattgtcttagtgtctgagcattacaagatcattctgaagtaattaactcccggtaagtagctcgccgtcgcagacctctatctggtcggatgtccaatcttccatcatggtcgggaaagtgatagttataaatgccgatgtataatgtccaggctattcgggacacttacctctgcccaggtatcaaaatatgagacacgtgtcgctcggtcctcttgccacgtcaatgtgcaaaaaacaaagataacatatgcatttatagaagctatagatttcgtatttatgataacgctctcgctcaattgaactaacatgttcttaatctgtaagtatcg

SEQ ID NO: 367216 - DNA, 613 bp, Cannabis indica
tactgtttaatgtttgtgttcttcatgatccttgatatttgagttgacttagagttcatcatgtcgtgtctttgtctttgtcctagaagaaaatctcaaccttataagaattacagtcattatcttattgctaatgtgtttggttttgggtcatacaggttttattcaggaaaatttttcactcctcccaggaatattcaggttcatcaaacactgttatgtaagctaccattttcaaataaaaatatttaaaaactgtgtgttcaagctccattggatgaataaagctacctatctcaatgtgtgaaagtcgtctctgagtaagttggtatgtaattgagagttatgtagaagatacgctaccattgaaaagggctaccattgaggtagtgtgacagcgtctcctatggttacaatttatcagaaaaagtctttttgacaaattgggcaatgttccctgcttacactttcacacacttatgcttgacacagtttgtggtaaaattttcatatcctcgaaaatggtgttataaagctgttacatactgtttgatttgctttaatattcttggtgactgagtcaattttttttcctgcgtaaccggtatgacct

SEQ ID NO: 367217 - DNA, 1132 bp, Cannabis indica
aattctgattttcttttggacagtttagtaaagaacataataaaatattatttctaattattttatattgtaaacacatccaattgatttctgattctagatacagtttagtaaatgttccccctcacttttgtcactaatattagtttattcccacttttaacatggcattattttgatcttatatgacaaagttagtattgttttaccttatttttaatatttttacatttaatcctcaataaatagtgagaatatattttatatttatataaataatttttatataaataatattcgacaaatctcaaaacatgtaaaatactattattataataattatatatattttaccaaaacattttatctcttaataaataagttttcttaaatttagtattttcactaactaattggatgacattaaaatattattatattaaaaattaaatattattatattttgaacaatacacagcttgttttgtttttttgaacaagaacaatttactctttttattagtataatctcattttttttttgttttattataaatgtaaaaaaaagtaaatatattttcatgctataaatatataaaggcactccattcattataaatattaaactaatttattttttagtactttttttttcatttttatacattattaattttttttcatattaaatttacgcattttacttttttttcttttataattttttacaaaataataaatatttttaataattttttgtttctacgtgaaaatttatgttttgaataataggttttgtaagagtaaaaaaaataaaataaagtataggtcttaaaaatataatttatgttaattttattaaaaagtagggtgccttaattaaataaatatagtaaaaactaatatgttcataaaaaatatttgcttaagttaattttgactaatgttaaaaaatagggataaaataatacttactttgtccacaagagcaaaataatattatgtcaaaaaactccataggataaaaataataacttactttgcctacactaagggggcaaaaacgaatactacgtcaaaaagttgggggagtcgtaatatactagtggcaaaaagtcaaggaaaatccatg

SEQ ID NO: 367218 - DNA, 467 bp, Cannabis indica
tttagggcataaaacacaacactttaacattcagtctctctggtagacttagagacttcagataggtttttatacttccccaaaatcgctactccaccaccatagtaatcaccataacatcagaacactttctagcactaaggcaagtctacaaatctgatttggtgtagtctaagagtattaaatacacccttatcgactaacatatagttcttcttcttgatcttaagattcacttgattgccttccaatgttaatttcctaggttaatgtgttacctactcattagtcccactcaacagttggtgcctggtctaatgcatagctaagcatatctgagatctcccactgttgatcctaaggaattctttcattggccttaaatggtaaaaactttcaattagataaatgaaatctatatctagaagtcgaaaaagcttctatagatttagccaccagaaaaaaaa

SEQ ID NO: 367219 - DNA, 644 bp, Cannabis indica
tacattaaataacaaacaataaagagtcaggcaaaagatcttagttaacttctcttttactattcccacttttcctatgaatattattagattcagaaaacttatatttttctacttaattttcttacctcgaatgtggagtcctagcattgattgcaatgaaagtgacccttgagaaataattgtcttacaaaaaacctaaatttcatacttattaattagaacaaattatagtggtatatatatacatacatatatatatgatgaaaccttaaatttcaatctaaaaatccaaaattataaaatgatataccttagcttccaataagatttagttgagcactaaaacttgtaaaatgatagtgatgtgatgccaatatgatgaaggatatatacatatatctatatatataagaaataattatggttgtatatggttatagcttgaggtagtatatgatgatatgatgtttgtggggttaggttttggctatagatgaaacaaatgagaataacaaaatgggagaaagagactatggcatggattttggtaatgacgaaatggagaatgtttgagagattagtttggcttctttgaatgagtgagaaaataagttaattatatggctatttataggcctaga

SEQ ID NO: 367220 - DNA, 778 bp, Cannabis indica
aaaaagtataaaaactcctataattagcacacagttctcgaatgatcaaaaactaccgataaaaaataaaaaaaaaaatctacactacgtgatccctctttaattaagaaaataaaaaaaaaaaaaaaacccttttaaactcaatacactcaatactacatacatagtactatgattatattttactctttaaccatttttgcccttttactccttcctaatatttttctttattcttttgtccttttttctttctctttcctatgttttattattaatattattattattatttacttctctctccgaccacacttcccatataactcccttcttcctcacaacaccatactcctttaccactctctctctctctcttccttcttttctctctactaaaaaaacccatctcatctcatctaatctcagtagttgaacacaatagaagaaaaaaaaaatacaattatgggattacaaagccaattaaacgacgtgtcgtctgattcaattcctctccttatggtagctctaatcgccagttgcgtcagctacgttcgttcttcaatcttgggcctcgttcatttcttgggcctttcacgatttggggcccaacccagttgttgttgttgtcgacgacggtggcttattacgagccgtcggctcaggtctcgccggtttaatcgtcttagctaatcagctcaacctaaatcgcctcaactcttatccatacaataacaatcactcatctcaagccgaagccgaagccgaagccgaagcc

SEQ ID NO: 367221 - DNA, 778 bp, Cannabis indica
gggtagaacggtaattttgtccctactcgatgtagatcatctatagaggatcaacactatactgagtcaagaacatttgtaaaacagtactattgaccataatatcagcctatactcggtacgctagccataccctagtcgtaccgatgtgatattgtcaaatagtatttaagtcaacatacatgtgttgatatccaatataatactaaatatattgatatcttaactaacatgtacgctaaacatgtaaacccatatgcatatcattatactaatcttacctcgtttctgaattcaagtgtgccagccaacctgagtggaacagctgctcaatgatttacagggccccaaatcacattattcgtaaaatcgatgagtgacgcgctaaataacttttcggggacttaaacttgaaactaaaagttttcctaccgatggataacgtggcaataccctaaatattgcaaaaatgggaaaaactagggttctctaaaatgccccaactggtagactggttccccaaccagaattccggttgtgtggggtttcctggggacgaccaaccggaattctggttcgtataggtccctctgaatcgaaattttggttcagtgcagaaaccaccaaaaaccacctacacacttcaatccaaacccaaacctcacaataacttccagatcagctaattatacaataacaaacataatccatgcaataacatcaagcaataaacccaaaatttaaaaacaccattaaagagcaaagcttgagttcttaa

SEQ ID NO: 367222 - DNA, 700 bp, Cannabis indica
tacataatatcataaacacacaaccttggtactttataaagtacccctttaccactcgttaaccacgagctgtatatgtcactatcgttgcccaatgaagcaaacgataagtaagaaacctaaccacagtttcaagagtaattactcgtaacggtattaaccgtttcccaccctaggtcataacctaggctcaacaaatgtttaatcaaagtcttgataataatcaaggccactaccattcaaccattaatatttaaccacatatgatgcttaccacttttcttaccttaattcagaattcaagtttatgggccgacctgagtggaaaacaagctaggcgatcccggtcctcaagattcttggttggtttgggggtcgagttcagctctgaaatcgaaggtttgctgaagaaaaaaagtccccctaatggctggttgcagctgctcgaaggaagaggagaagggagagcttggttctcgttttttttttttttttaaataatcagccctagaaaagttaaaagggcaaaagactaattaataccaaaacactaatctacccctccaaactttttaaaataacttagggcattttttgtaattttgctaattccattaaaccgacattctaaactttctaacctagtccggaatatacctaaataaattcttccattaacgtcgtgacattactaaccaca

SEQ ID NO: 367223 - DNA, 567 bp, Cannabis indica
gaatgatctaaatagaaggagggcaacagatgttccaaatgttacggcaaccgtgcagcccggagcccatactcaaatccccgttcagaaagatgttgacgtaatccaagttgaccagaatgccgagcaggttagcctagtcgtacaggctcagcttgacgaactaaaaaatatgtttcacggcatggctggacaaagaaataatgagcttgagttaaatcgagcacgcagaactcctttctcgccggagatcaatctcctgccactaccccacaagttcaaaatgtcgacttggaaaatgtacatggggagagaagatcccctttcccatctcaagtactttgaaatgcaaatggatttgcaaggggtacgaggagatgtatgctgcagaatctttcctgccactctgtcggaagccgctcagcaatggtatttcaagttggctcctggaaagtttagctcatggaaaaccttctcttcacaattccatgcacaattctcctcctcacaccaactcccattacatttgggagacttggttgaagttaagcaacaaccaggcgagcc

SEQ ID NO: 367224 - DNA, 516 bp, Cannabis indica
gggtcgcaatattgacttctactcgcagcattcactactacaaaaaccccctttcagtgtcagttttggcaaaatttgctaccgacgctgacgagggcgacgctaaagggttttgaggaaccgacaccatacatacccctatggcgtcgattattagctaggaaccgacgccataggggtacatatggcgtcggttcctagctaataactgacaccattggtggcgtaggaaccgacgccaaaaatgagcagttttccatttttttaaatttaattatataatttattttaattatatatttattaatttatatattattttatttaatttaaattacatatttattttttaaaatgtaaattaaatattatttaaattaattttaaaattggctaaaatacataatttcatttcataaaagtaattaaatattacacaaacactaatgtaaaattagtcaaaaatattaataagttaataaatctaaaaaaattacataatgaagaaaaattctt

SEQ ID NO: 367225 - DNA, 650 bp, Cannabis indica
gttttctttccattccattccattccattccctccaaccaaacgccaccttaggggttcgagagctaaggcttagagtttaatgtatttacacacttcttccatagccatgggaggattaaatctgacaaaaaaagatagtaaagggagaggtcgggtgtgctggaggaagaagatgaaggagaaaaaaggaaaaaaaaaatagagaaaaaagaaagaaaaaaattgattttaaaatgtattttttttaatttaaaattatttggtggaccaattttgttgcaaacacgtgacaattataaataagtaaactgatcatttaaatttaagactaatggacttacaaaaaataccactttgattataggggtgttcatccaatccaattcgcattattttactcatagtgcattcgatccgcgctaagtgcatattttatattttagatccaatccaatctacacaatagctcaaatccaatcaaatccagtttagatcggttattttagattgattactttttaatattaaattatttaatatttatcagaaaatatttttctctcacataactaataacaaaataaaacaaattattattgttttacgtctctaataataaactaaaataacaaataataaattaaaaaa

SEQ ID NO: 367226 - DNA, 967 bp, Cannabis indica
aggagccttctaagcgccccaggagggtggacactccggccccaagtcatgactctgggattccctccgaggcgaaggaatacacagtgcctcatggcattgtgttgacttcgatccccggagatgaggagaggcagaatctttggatagccaaagacaactacgcccttgacgagtacacccgggggcatgctgagctggaggccttgaagagggtcttacgagaggagctgcaaaacactctcaatgaggaggacttccggaatccgtgggaccttaacatggaccccctgacggactagttcaaccgtttgctcgggcccaccttggccccttttgcctcggagatgaccagtgagtatgtctcccatctgactcaattcccgcccaaacggtacgctgcttatgcatccttgaactccgtctaccaggtttaggacatcagcaacgccatggctgcggtaagtacttgtgatttatttctttcctcgatattttgtctaaggcttttattctcactcttatctcattttccagattactgcagagaccagccgcctttccaagaccatagttagtcatggtttcgtcctgtccgaattcgggggcatagatgaggtcgtgaggatcctgcgggacctgtccgctgagaggtgggcgatccaagaggaggctgagcgaagggacgcccttgctaaggcaaagcttgaggaagaggccaagcagagggaagcccaggcggaggtgatgctccaggaggaggtcctacaaaggggataagctggaggcgaggcaccgggaggcgttgagggcggagggcgaagccgttgccagggccaagcgggagcttcgggaggctaaggaggccatggatgaaatgggctgccaaaggtgaggtcccctagaggagttgcaccaggaggatttgtagaccaagggccaacttggccgtggagttgaaggagct

SEQ ID NO: 367227 - DNA, 608 bp, Cannabis indica
ggcataaaacccaacatcatcacattgagcgctacggatcttccttgaatgaagggtccttggttttgattaatcaaaccaagaagcactattgcaagcctagagcataaaagcttcaaaatacacttgtaaatcgtggaacaacgagcgatatgtctataatccacaactctagaaggattctcatgcttaggaataagagaaattaatgtcgaatggagttcaaaaggcataaaacatgtaatgaaaaaatcattgataatagtgcaaaattctagtcctaattctggccaaagtttcttgaaaaagcctgactttttaacaacttgttgagtaaacagtttggggtttgcaaaattttctatgattgttttgctaataagactttttaaatttaattgcgtgagaaaataaaaatttgtcatccttagaaaaattaaaatttttaacatatatgtggtgaatcctcaccctcaaaacaggtttacaacagtaacaatgtctaagaaacacaatttaaaactaaaaccaatcacaaaatcaaaacttgaaattaattaaaattagataaaaaaaacttagctcgataatgaatgaatgatggattt

SEQ ID NO: 367228 - DNA, 661 bp, Cannabis indica
aatgtaatttatatattatgttagaaataattttagtaaaaaatatataaatcagtttattcagtttattcggattatttgggcgggtttgaataatattcaacccgcccaatatattcattgggcggtttaaatttttcgtaaagttattcgagttgtattttttatcggtttatttggtttgatttgggcaatttattcgggttgggcagtttgttaatttttttgaacaaccctattagaaactaccaccacaacctatttttcaaattcatttcgcacaaaaaaaaattaaacaaaactcaaaccaaacttaaaccaaattcaaatcccacaaacaaacacacatatacccaaaatcttgatcctaattcaaatctaaaaaccctaaatttattttcccccaactattatcttttctcagatctgaaaaacaaagaacacaataatactaaaatagggacatttatacacagaaatatcaacaagattgcaaaaaaattatgaaaaaccctagatcgggacagagaaagatatagaaaaaggaaatcgagattgggagggaggagcttgggcgtcctcgataatggcgcctggctcggtgatcctcgatgacagagttttggtcctaggtacctacatcgagagagagagagagaga

SEQ ID NO: 367229 - DNA, 568 bp, Cannabis indica
agggtggtgaaagattttctcgatgtgttttctgaagagttgccgggatttctgccacaacgagaaattgatttcgtaattgatatggcacctggagttgaacctgtttctaaagctccatatagaatggctccagcagaactcaaggagcttaagttgcggcttcagggatgtttgacattgggtttaactgacccagtggatcgccctggggagctccgattctgtttgtgaaaaagaaggatggttcccttagaatgtgcgttgattatcgagaactaaacaagctgacgattaagaacaagtacccgttacccagaatcgataatttattcgatcagcttcaaggaaagacagttttttcaaagatggatttgcgatctggttatcatcaactcagaattcgagaggagaacatatcgaagactacttttagaaccagatatgggcagtatgagtttcctataatgtcattcaaattgactaatgatcctgtggcctttatagatcttgtgaatagggtatttaaggatttcctcgataactgcgttatagtgtttatcgatga

SEQ ID NO: 367230 - DNA, 831 bp, Cannabis indica
tgattattttttttaggaactctcttgtatgagtttttttttgttccttttttgctcttgtttgtcactatttataattacataatggacaattaattacaaagttgaccgaaatatgtttacaacaattatccctaaaatcgtgggatttgattacatatcacgtagtgtaaatgcggtttatgatttgaaaattgtatagctgtgatttttctgcttttatagggtaaaaataatcgtgtattgaacacatctttagcttttgtatctggagatgtctcgacagaaactttgttacagtgatcccaatagcgagctggggccattcttctttccaaggtcgacaatgtatgtctggtgtcaatcgcgattcttatttacaaagaaccattctgactccccagggttgtaagcctcgttaccgttagctggatgaagctatggttagtcttcccatagcgagatggtcacctcacttacttgttcttgagccgatccgacttttacacttagtttgttcattatgcactaagtacctccacgattgatacgggttgctttctttggtgcctcgctattcgcatttagcgatataaggtttctcgctaatatactaagtgtcagtttgtacattgattcctcacctaagaccttacagttggcgggttacaaatatacactgaaacttacgtaattaatgagttactccataaaagcaatgatatcgattcacattccctttatcttgacacgtgtcattcattgaggtggcagccgaatttcgggtataacataccgtataacaaaaaatacatataccattcaccaaaa

SEQ ID NO: 367231 - DNA, 609 bp, Cannabis indica
agatcgtgtgatcaatgctgaatgcaaggatcgtgggattgaggctgaatacactgatagtaggatcgtgtgtatgccacatccacgtaagttgatccctgagttgtaggcattaagctgatgactcatggtgtgtcaagctgaattcgctaagtgttgatcactctgcacgttgaatatttcattttggatgtgccagcgaggcgtcctactcagctcatcgttccgagcagatgttccaagtggagtccacgtgtcaacattctcgtgatgccacgtcagagtgccaaatttgggataacacatattaatttataaattactcaaaatcttgttttaggctagttcatgttattaggttgtttagttgattaaaatgttaataaaatttaaaagtttatataaatgtgtatataattattttttacttgacctaacttcttgttactatgttataattaactagttatttgggttatgtaaatattaatatgtttttagtaagatttatcctaattctaccaaaattttgtcagcataacggctgtaattggatgtttccaaaaattttaaaagtgtctaaaataacaaacaaaacagataaacaat

SEQ ID NO: 367232 - DNA, 602 bp, Cannabis indica
tcgtgttcctatttaccaattcaatcttataaatgccaaaactatttaattaataattataattaattactaaataaaatttttatttatgtaattgaccacaaaacctcttttcttcaccattaagcccttgcttagtggaaattcataaataagacatagtctaattttagaattataattgattaattaaaatcaattaactgagtctgcaagcagtattatctcaactagtgagggaaccatgggcctatatagtcgagctttcaataagtagatctaaaattcaccaagtaaattccctaacttattaattctgccttgcgccactatagattggaattgaatagcactctcagttatatagaacgctctatatgtaccacgatatagtacattaatgattatccattgttacaatcctaatagtcaaagatcctttatagatgatctacactgaatagggacaaattcaccattctacctttcaatgtattttatccatgtccttaatctgtatgtcacgagaagatccaattggtcgactttaacgaacaaattgaagaacataaataatacaactaagttgaacttaaccatat

SEQ ID NO: 367233 - DNA, 645 bp, Cannabis indica
agagataatcttgatgaaataggctggactctgcagcctagtcaatacgagaagaaaggcgagggccccgacgcgcctcaagcatggcatcaagtttcttcttcttctcccgaaatttggcaatagcctcctcaggcttaggatagaagtcgagcttgatgctttggccatttgactgccaggccatatagacgccgttgtcgaagcgcttgacgcagcgctttcaggagacgggggataggagctcatcttttttagccttcttcaaggcctggtctctaaagtccttcagctccttcaactccacgaccaagttggcttggactgcaagtctgcctggtacaactcctctagggacttcaccttggtagccatttcgtccatgacctccttagcctcccgaagctcacgcctggccttggcgatggcctcgccctccgccttcagtgccacctgatgcctcgcctccagctcagcctcccttcgtcggacctccactcagagcttcgcctctgccttggcttccctctgcttagcctcctcctcgagcttcgtcttaccaaggacctcccttcgctcagcctcctcctggatcgcccgcctttcagcggacaggtcccgtaggatcctcacggcctcgtctat

SEQ ID NO: 367234 - DNA, 501 bp, Cannabis indica
ttccaaaaggaagtgggactctagaaatggctcaaagtctaccgcacgtcatcacatatcacgtggagtagatttagatgctagcataggacatattgagacttggcaccttcgtcattggcataaagagaatggatgggaaactccagagctgaaggacacatatgtaagtgtattttcatttaatgtagccaattataataaattagttgtcttatatatttacttttatatatgcaggaaaaaatgatacagttaaggcaagataaccctccagagaagatgtctgacaaggaaattttagaacaggtacttggtcgacactttgttcgtttgtttgggcagggtcgatctcctaacatatctgagacaacaagtactagtagcgatccaaatcgtcctagttattctcaactcatggagctttatcttgatttacgaggagagcttgacactatgcgacaaactttaattgcaaaggaaatcatgttaccttcaaca

SEQ ID NO: 367235 - DNA, 620 bp, Cannabis indica
atgtgtgggcacgtactctatcactataagattcaaaatgaagagagaaagagagaggaaggatttgaaatagagatagatagaaggctcaaaattttggttgaaaggcttgagtgcatcatcattcaatttgagaccatcactatctatttataggaattcatataggtttaggtttgaattatttggcataaaaaaattgataaaataaagggtaaaatcatgcttaagtggctcgccataggatgtgggcccaccacttgcaattttgccattttcaactatctatcttatttttctcaaaaatgccatattttccaattcaaccacttaaatgataaaactatttatttaataattaaaattaattatcaaataaaattaccatttaacataattatcaattaaacttaacaacgtcgcttaattaacaaataaaccctagaatctcttttcttcacaattaagccctagcttagtgaaaattcataaataagacatagtccaattttagaattataattgattaattaaaagggtaaatgacggtaaaacccccaaaacattcatttggtttcacttaacccccaaaacccaaactttaggcggtaaaatcccca

SEQ ID NO: 367236 - DNA, 729 bp, Cannabis indica
atattattgaaaatatagggtaccaattatgtttgggaaatttgattaattatgcatttattagaccaaaattttttttgtaaacctaaactattcaacattggtataatatgtcattttttcctaaaatcccattctacccctttcatgtgaacagccccctctctctctttcctcgttctctctctctcgctctctgtaaacacgcacacagatgagcacacaattgacccacaaccaccacccactaccttggttccttctctccacgaccaccatgaccacagacccaaggacccacggactcaatgaccatcgcgaacccaacgacttctctatcaaccacggtttcactatagttagatttgtcctgtgaggaacaaccaattcaaatcctcgataggaaggaaaaggttcttcgaaacaagaccataacattggtcaaaatactctggaggaacagtaaggtggaggaagccacttgggaatcaaagtccagcatgagggctcaatatctagagttgttcaagctagattttgaggatgaaatcctcttagcgaagggataattgtaatgatcgcatgattataatttggattagtaaaggcaattagcattaattattgatgttttatgattatgcatgattttatttgttgtgggacctatttttagaaaatacacattagagttataatttctcaatttcggaaattttattaaactct

SEQ ID NO: 367237 - DNA, 581 bp, Cannabis indica
actttatatgtgtttacttataatctttttagaatttcatatttagggtattaaataacatacttgtgagtagatctaagatcctggtaaaataattccaacagatacaaccaatcctatttgccatacacgagggagaatgcgaaagccacgccagggggtaatccatgtctcgaaagattttaaaataagtacactattggccctccttagagaagatgtaatggaattcgctaaaacatgaaacaagtgccaaaagcacgctaactatagctggcgtctacctgttgaactcactagcttgaccagcccttggccctttgccatgtgggggatggatcgaatagcagcactaccaacaggtaggacaggagtaaaatacgcgattgtggcaatagactactacaccaagtgggcagaagttgaacccctagaacacataatcacctgctaagttgtctgtcctaaataaaactcatttcaatataatcagatttaataattataataaaagatcagaaatcgtttaatgttgcatggttcacatgattcatttcatgattacatttaatgtataaatt

SEQ ID NO: 367238 - DNA, 721 bp, Cannabis indica
tagagttataatttctcaatttcggaaattttattaaactctgagggtattatttatgttatatgcaaaatttacaaaatttatgatttttgctcgataacggtggaaaatacgacaaatggctagtagagtcacatgggtgagtttagaaccttttatttagcggggtattcatatattgatatttggagtattggggttaggcggggttatagttttggaccactttaccgctagacctataagttgcttaagtttaaagcaaggggcgaaattggaatttgtcatttcattgagattttgtcttgtagtggagttagtggaaactcctaggttttgtttatgctttgtttgtgctggtggtatgatttagtttattaaggaaatagaaaaagagaaagtaggaaaaaaaaactaaaagttatctctctctctctctctctctcacacctttgtccctaggaaagccaaggaaaactaaggttaggcttccatattcaagtcattttcagaaagaatttgaggagaaaccttaagccaagatcaaaagtaagccctagatactttattccttattgtttttgaagttttaagcttggttctctcttgtgagtttaagaatttggggtttagtttatttgaggttgtattgtgtgagagactattttaaagtttaattttagttatttatagcttgtttttggaagtagtagcagttgta

SEQ ID NO: 367239 - DNA, 722 bp, Cannabis indica
atgaacagagcaaaaaaattttgaaggcaaaaaaaaaaaaacgaaacaggcagagaagaagacgaagatcgtgaggatatttaggtttcctattttatgttttttatttatttctaattaaatccttttgttaggtaggggtattaataaactttcaactaccatcaaattactatgtcacctcaaattttcttatgtcacatcagcaaataaacgggggtctgttaaaaaacccaacagaaggggtacaataatatactggttatatattagggagattttttaacagcccttatattttaagggccacaacttggtaatgacataagttcagggagcaaatttgctaattattctataaactaacttatttataagaatagttttagtatctcattagagtaaatatagtgtgaaactacactatttttagtattttgaggtccagttggagatagcctaacttcatcatcttaagcattccaaacactcacttcagcagcttttttattttattttttaaaatatattattaaaatttattttatttatgggattatttcacaaatatacaaaaacaacaaaaaaattacaaaaatacggtttcacagaattttaaatatttttacgatttttttgattttatttacagaaaatacggtctttttatgttatactcttattaatttgttgttgattttttgttatatgtatattatttt

SEQ ID NO: 367240 - DNA, 705 bp, Cannabis indica
aaaacctagcccacctttttgtttaggataacagagcttacgccaagctaaccaatgcatcttctttttatgaaccgaagagctccaccaataccaagccattagtgattctaattcatcacagctcttaattggaatttagaaacatgacattacatatgtagctatagcttgaattactgctttaagtagtacctctttaccaccataagagaagagcttgttttcctaagaattaaggcgaaaccatactttctcctttataagactgaacagtcgttgtttattttgtccacttagcattggtaatgctaaatatttctctatagcctcagtcacttgcatttgaaaagtttcaacataaagagattacagatcctccggagtatttggggagaaatataatgtggacttagtgaaatttataagctggaataggtaagaaataatctataatagttataggggtgagcataaaatccagaaaaccgaaaaaaccgttcaaactgacctaccgaacaccgttggaaccgaaaccgacaaaatcgaaaatcgaaaaaaccgctaacggttaaaactgtcattgaacggtttgtttttttgggtaataaactgatcgaaaaaaccgaaaccgaccgttatacatatatatattaatttattaagttttttttttttgcatgtattatagttactaataatata

SEQ ID NO: 367241 - DNA, 434 bp, Cannabis indica
gtgtcatgtcactgtctcattcattttctttacatacatattaggtaacatagagggccttcgtgcagtgattttaaatatttattttaataataacgtagtttagatatatatttttaattatttgatttttatattatatttgttgacttattatttaagaatcacttgtgaaattttaaaataataaaataaaaatataaagttcaaattttgaaatatattatagtatcgtagtctcgactacatttaaaattattctgattattgtattttacatatagttgtttgtaacgtccgtatttgaaatttactaaatttgaaaactaactttaatatattataattacttaattataaagaccgggatcccaagttataaaacatattaaaaactatatttgttattacaaaactgttggattttatgccct

SEQ ID NO: 367242 - DNA, 630 bp, Cannabis indica
taaacaatcatagacaatatttttcaaccaaaccagatgctaaatgctatattcaactcaaatgaacctagaaaatcaaaccttaaacaaacctaaccctaacaacccctatttcacaaaattctcacattcaacctaaagaaaaagcttcaaaaacatgctcaagggttctatcgttttacctttgcttgaatcctcctccaaccttgctgaaaatacaaattttagcaacaaatgcccttggtttgcttcagccgaaagagaaagagagaaagagatagttttctttaatttttgacttttttccttattcctctattttcttcaaatgaaaaagagataatccccaattaattacttgctgaataaaatggataggtgtccacaccctaggcagtcaccaaatcacctatttagcaaattacaaaaatacccttaagcttacaacttagacatttccaaaactagcagtaaaatggtcaaattccataaccccgtctaatcctggtattttatttcctctcaaatatttcccagtaagaaataaggttctaaacttacccatgtgatcaaactagccatccatcgcattttctgttatcgccgagcaaaaattacaaaaataacata

SEQ ID NO: 367243 - DNA, 532 bp, Cannabis indica
gaaggaaagtgggagtaagatctgttttcttgttttatatgtggacgatattcttcttgtatccaatgataaagggttgctacgtgaagtgaaacaatttctttcacactataaaccacgaacttttctttgtcagaaggcaaagctagcactggagctgtaattaacctctacttcagctcctgaaaactagcctcacatttgtctgaccatacataacgctgattctttttggtgagctcagttaaaggtgttgagattttagaaaacccttctacaaaccgacgataataaccggctaaacccaagaaacttttgacttctgtcactggtttcggtcttggccaatccctgacggattctatctttcttggatccaccttgatcccatccttgctaacaatgtgtcctagaaaggacacctgagataaccaaaattcacactttttgaacttggcataaagcttgtgttctcgaagccgttgcagaaccattcagagatgtagctcatgctcctcttctgattgagagt

SEQ ID NO: 367244 - DNA, 1274 bp, Cannabis indica
aaaatattacacaaatacattggaaggccctataaatatttatacagcccaaaaatagaaatttacaaaaatacattttgctttattcattcagtctcattaaccaccttcttcaacaacgacaactttcagcaaccaacctagtaacccaacacaaccgaaacccgaccaaaaagagaaccaccattaattctggcaacttcacttgagaagacgaccagaatcaatcaaaacagaagttgtttcgaattcataaaaaaatgcagaaaaattactacaaaactaaaattcaactaaaaatctagtttcattcgcataaaactaatgtcctaacttcaacttttagatccatgaaatgcaaatcttaaaaagttgaactggagttcccaaacaatccaactcaagtataatctaaaaaaaattacatcaatactatatttaaatgtttatcttgatgcattttcgttgatttttagatttttaattaacggtgaatttgttcatattaaatcgcgaatagaatagtaaattcacatgtagatagagttacgtgcgtggaaatactgttctggttttttatgtttcatgacagttgcataaatattttgctaactctctaaaacttgacacatcaattattacaaattgataacgatacaatgaattttatcatatttacaagtgtttcatattgtcaatacaatacaaagctctttaaagaaacttttataacatgtttagttttattaatatactaaattagttgatataaagttagtttatagaggtctaataattatttcttcacatattactataaaggtacaattaattatcgatcagtgtgacaaaaaatactaacaaatagtttcttatatatacaaattcacatttaacatttttagttgcaattaagttgcacgttagttgaataactgttttgctactacaacatcatagtattataaaaatatggttcgaaattgtcaaatatacgacctaaacagataaaacatgattgttgtataatattcgtttgtgttaaatatgtgaaattattagttgttatatggttttatgttagttggctcgcaaatataactgttgcattgcaatttccttatagttttctcatagtagactgaccataaatgaattttcaaaatgtcaggaaaggaacgtaattctatttttcatattttacaataggcaatttgatcaaggaataaattgtataaattacaaagctagtagcaaattcatctcacactact

SEQ ID NO: 367245 - DNA, 596 bp, Cannabis indica
aaaataaaaaaaaattaaataaagagagggaggcgttggtgtctttattcatgggctaaggaaatttgtgcttaattggtaagtatcatcatttattctaaattgatttattttaatatgtttccttttaaagtttgatatcatgttcattgtattttgtctttgatcttgaaggattctcttaatttggctatttttggaaaatatcttggttattctagtttccttttattttttgttaaaaaaataattttggaaaagaatgggcggcttccttttgtgtttgtgggctagtggttactcaaaattttgaaattggtttcctttttgctcaactctcccatgtttttaattcttctttcagaaattaatggctaagactaagaacctaaggcatccaaggaaaatggtggaatccgaacaagccccctcgaatgctcctcttgctggccgctgtcttcattgatcaagttttatggggaataagttttctttctttttgtttttgttggacatatttctatgtttctatattttcatgtcttgttgtctttggcccttagataaacaaaaagggggagtaattagtttgtttt

SEQ ID NO: 367246 - DNA, 1089 bp, Cannabis indica
tatatataatctcactaacttattgtgtaaactattatatgtgtatgatgagttctacaagcattctatttataataacactactactactactaattaatctatatatattaaaaatactaattaatctatatattaaaaaggaaaagagaaaagaaaaaggaagggtattttaggttttgtacagaaatatagggcacctaccataaattaataagaagtagaaataaataaataaataaaaatgaaaacccaacaattattactacccaaacttcaaacaattccagctcaactgaataaaaaacaaatgatcaaaacaaataattgtaccattatccccataaataattgtacttgatcataatcatattttaaacatccactaacgattcttaaataaaaaataatcttcaactaattacaatatcacccaaataggcatttttaataaaaacactccaaacaaatatctatctatctattatcagtcccacccaatcacaaaacttgtctattaattaaatataaacatttgtttataatataaacaaatatctattatcactcctaacgtacgtataaacattttgagcaaaacaaaattaaatataaacaaatgtgaattattgacaaatctattcaaagtgatattcacatgtacatttgtttataatatatatatcacatgtacatttgtttataatatttatatatattatataaatgtgaattattgagaaatctattcaaagtgatattcacatttacatttgtttaaatgtgaattattaacaaatctattcagagtgatattcacatgtacatttgtttataatttatatatatatatatatttatatatataaactaatgtgaattattgagacccggaaactacaaaaaggataagaaagtagatctaaaattattgtgttttaggtgtgcatatcaaagaagaatggttcttatgataagaataattaattgattttatattaatattaattataataatatagatttatttatttatactaggtgagattagcacgtgcctaattctactttatttatatttttatttgc

SEQ ID NO: 367247 - DNA, 490 bp, Cannabis indica
catcgaaatcataaaacaattaattgatggacaggaaattaaaaataattaagtacgaaagaaatagaatacataaaaactgggggaaaataaatcatattaaagccataaagcaatgtcaaacaatatccatctaaaccctaatcaagtgtttctcatgtttatggaagcagaatcatacatattagctactcatgattttcaaataggcgggtcgcggcccgtgtgctctagtgctcctattttctacgcgaataatatttttttattcaggactccgattttttttcacattgatatttttcttgcgatcttttatctttttctattgatatttttcaaatcttcttctattttaaatctgcaaaggtaaaagataacaagcgtaaaattgcttcaaacacgattaaaactacattaaaaatatactaaacttaatttaaaattaatactaaaaataacctaacggtaactcctctcagatgcctct

SEQ ID NO: 367248 - DNA, 880 bp, Cannabis indica
aatacaaccaacttgaagacaatgcttaatacgaatagatacaaaaaatgtaaacagttttgtcatatagcacttttagatcggattataattaaactttattttgacaaaaaatcaattcagggtcctatttgtactattttagaaaatacagggtccattttatcatttaacaaaatacagggtccaattggtaacttttgtaaaacagagggtccaaaatagtatttacccattaaatgtaaataagttatttttatattatacaatagggttgtacataaacttttttataaatctcgcaactcacaaaatgctcaaatcaaaccgagataacctaatgaaaaaatacaaactgaaaaaatatgacaaaaatataatccgcccaagggttgaaaataatattaacctgtccaatcaacccgaactaacccgaccaacccgattagttgtatttattatatatattatataatttatatatatttaaaaaaaaataaaaaaattaaactaattaggcaaataaaacttggataagacattaatcaatcacccataaaaaaataatattttttagacaaaggaaagtactgtagtaagaattttatttataacctacatagataaaacctaaacagttttgaaacaatgttggacttttaatttgtttgtgtggtttggttttaaaaaaaatagaaaaatgttagaaataagaataataggaagaaaaaattataaaatgacacataaactcttattgtattttcctttaaagtttaacatccacaatagtctcatatcaaagaagtatatataaaaaatatatatttaaggtgtcttattatgctaataaatatcatatattaataaatcaatatag

SEQ ID NO: 367249 - DNA, 760 bp, Cannabis indica
tccatgcacccaacctgagctttactttaaccaatgctctaaaaagaacatagcatttctccaaatgcaaataaactctattgtagattatcatatcagtaaaacactatgtctgataaatctaggaatctttattcacatagtcatgtttactttcaaatatgttcacaacacaataaacaggatcaagtatgtgaaaaacgtttcaaatgaatttataaataaaatagacaagcaattgataaggtgaaccaaaacatacacaaatgaatgaaaaatacttctgtttctttattgatgttgaatataatggattacattgaaatggagttttatttagggcataaaacccaacagatattaccccactcgggtagcaggatatgtgcccagagcccagctctcaggcactgtgccagcagcagctccaccgatgagcggcatacagttttctgccactcccggatatagccagggacaagccctggcccccgcatcgtcccattttggaaacccttcagggataaacggacaagccccctcgcactccgctccgacagccagtctagccggtccttcccagggctcgaggagcaaaaggtcctctaaaggcagcacccggacgtaggagaagtgacagaaaaaggggtatactccccaatatacccagtacatggagttaacggactcccaagaacgtgtgtactttgccactggaaaaatacgcactaccggagaccgcctcctttgtacaaagaca

SEQ ID NO: 367250 - DNA, 518 bp, Cannabis indica
aagttaaaatccagtacctctttaccagccaaaactttatttttctgaacaattgtatatagtttatttatttattacttgcgtttgtttgtttgtggctttagtaatattttttctttcaaatgcaagttcattgctttgtttgttgtttcactattttgttatttggcgagctttgtcttttttagacttctcttccgctggttcacaccatctggacatgactgtggtctcaacaccttctttattgttatgactttgatttcagtgtttgtcttcgctatagtagcactacaccctgctgtaagttaatagttgatgacttggttaccttgacacttgttcagatctgaaagattaatgtgctacagtttaaccctttgcttcaaagccttgtaaatttatgtttcttcttgttgtgtatagttttttatcaaagccttgtgtattgaatgcacatgaatgatgaaatattgtaaggatcttgactatatttatcctttcctgatgtggttttc

SEQ ID NO: 367251 - DNA, 509 bp, Cannabis indica
agtcccaaattttatgtaaacatggtgttcctctaccatatgtgagggcttctaataaacttgaagacatttgacctttgtctctatttacttggaaactttccttggaccatcttagtgcaaaatggtcaaaacttgcattgggacatcaactagacataccacgaatatatttgaggcatcagaataagaatcagagcaagttgatttttgagcctccggagccccgagcacccatcgccctggttgacaatttgtcaatctgggtgccttccaagtgtccgatcggagatccgacttttgcatcttcttcgtcttcatcaaaaatgggaaattatgttctttcaaaggaaaaacaacaaatccatgttagtacaaataagagggcctagcccaggttgacacctggggctaggtctgcgaatgtcaacctgggccacttaacatggagttttttcaggaatttttttgagcatcttccctgttttcaaaaaatattgagattcaac

SEQ ID NO: 367252 - DNA, 652 bp, Cannabis indica
tctctctctctctctctctctctctctctctctctctctctctctctctctctctctcttgatggtgcaaaatcagaccacaccaatcactcaagaatcattcacaccattataatgggtaagttgtgttttaatcattttgttagatattagtaatagtatgtagtttgctttcgttatatgtgtgtagtatttgttgaaagtagtagtttttggtctgaaatgtgtcatctggtagatctgtatttttttgttgaaatttgggttgtccagatttatcgacaatttttcgatagaatatcgatgcaatatcgataacatgcgaaggaaggtcagcgatgaccattgtcgatatgatatcaacagtttgtcgatgatatgttgatgaataaagtaatttaaataaaatgtacatatttggaattttatcaatagtttgtcgatatgacaccgaccttttgtcgataatacacctatttaatttaaattgttgtcgatatttagaaatatttgctggtgtttatgtttgtcgacaatttatcgatagaatgtcgataaattatcgacattaagacaaagaagattaaaaacttttaaacagtcgactcgaaataagtgaaaatttttagatagtaaataagtaaagacaaac

SEQ ID NO: 367253 - DNA, 700 bp, Cannabis indica
aattcaagaatatctcaagaacaatactcaacatatcttgaattcttaatacaaaattggtatatcatcaatggcaagtaatttgtcaccaatatataataccaagatcatattcttactcccactgaacttgtgatgtatacacaatcatcaaaaacttctatctcaaaaccaaatgagaatacttaataaaaattgtgttattattgacgagaagcttacttgactctatacatgaattttcttaatttgtaaaccatattctttgaatctttgaatacaaagtatctggttgcaccatataacttttgtcatcaatattaccattgataaatgacactttaataatccatttgataaaactcaagaccataaggagcagtcagtgtcatgcttgtcctgacaattttatttagcaatctagtctattttaattacaaaaattaaatgggctccctatatgcatctaagcccaaagcaaacatataggctcacacaggcacactaatttggatggatcctatcatgttactaggtttatacacagatgaaagaagattgtaaattttacctgttacaaattatttattgaacctattgacaattgaaccattgattaaaatcagatcattggatctgtcaacaagttaaccatgacaatttagatcaaacaataataggttttataaaaaaaaaaaaa

SEQ ID NO: 367254 - DNA, 520 bp, Cannabis indica
ccaagagaactatggttaaaaccattcatattgagtaacaaaaagttttcttttacaaggacaagaaaggaacttttgaacaaaattctattcaatggacttaacaaaacttcctgttcctagtattaaaggtttaagattacctaaacatatgggttatggtgtacctggtgatttaattactctagtgcgagcaacttgctttagtaagatgttgtagcatttttctaatggcttcatctatagaagcttttcgaattctagacatagattttatctaagaaaaagttttaactattccagaaaagataaaggccgataaaagaattccttaggatcaacactgagaggtctcagatatgtttcgtatgctgtgacgaaaattatgaacaccacgcaagtatacgcagtcaagtagtaagctcacgcaagtgaggtcgaaccacggggaattggattaattactactaaattatacttatgattctatctggctaatcaatactttttatgaattcaa

SEQ ID NO: 367255 - DNA, 274 bp, Cannabis indica
cttttatattgtatttttatctctccgtgtactttttgttatttttttttttttttaagtacctccaatatatcaatcaaatgaaatatgaaaaatacaattcatgattacatcaacagaaagatgaaaacaatgaaaaaataattataagaaacttcgtgaccctgattaataaataaaatgtaaaaataaaattatcataataaaataattatgaaaatatacattatatattagtgttctatattataaacctttcttgttccaaatatac

SEQ ID NO: 367256 - DNA, 755 bp, Cannabis indica
agagtatctctactctgacaaggctgttatagtgaggaagaatgtagcatgaggttcttactatcttgggactcacataggtgagcataagatcattgtggatttgccaaataaaacaccctttaaagatgaatttttttggacggctggtctctccccaattggcacaaccactttctgcataatacgtaagtgattatttgcacaagacttggttaaattagtccatgtcttttattctagtttagcttattataatttttctttgtttttgacagttgtctggagaagacatgcctctactcctgagatggccgagcgacgtaggtcctgtgggtctcttagttgacaagaagtttacttgtgattataagtatcccaagtattcttctgggcagcaggttcctatcccagcagaggaagaaattaaggatcgcgtcgctcgggcacaatacctctacaatactacccctcaggaagccaaagaaggagcttcttgaggtaatcaatgtggttggtcacccacagtgcttagggccaagcgtaacactcttgtttcattttgagatagccgctataacttttatacttggaatcccctcctcgtagatcgcattacacataggtttgatagtttgtatcccaggttccacgtccaaatcagttgtactgagtcgtactaaaaaatagccgagcagtacaagaccatgacaaataggctaagtcatttagacgcgagctgggatttagaacca

SEQ ID NO: 367257 - DNA, 1030 bp, Cannabis indica
acccaaaggcaaagagaatagtcagtatcgtatagtgtaaattaatttaactgtctgtctacaacatatatagatctgagcctacaaccaaacagaaaaatttatacatatattatacgtaggtgggttgcatgtaataactaatataacgtaattttattaatttttagataccattaaaataatgataagatttaatacatattatttataaaatatttaatgttaaatacgaaattaaaataaattaatataagtatgttagtgttctagtagtggataatattatttttagtcatctattatcacaagcctctaattattaaattagtaaaagttcaatataattttgagaatactcaaacaactttatttaatttttccccaaaaaaaaatatttatatattttctcaaaatttttatttattaattaattaatttatttaaaatattaaatattaattaatatataacaattaaaattatttaaaaagaattttaaaagcctaactgtaatatccatttaaacgtgaaataaataaatatacacaatgaatttattggaacctttgatttggggtttatcggagttggcggagtctcgtacgaaaatgaactataataatatatttaattaattatttaatggtttttaagaaagggaactaattaaacaaacaaattctaaacatgataattaaataaaatgattttgtttcgaataaaaaaaagaagtaaaaaaaatgctcacgtatggttagaatttgagaataagatgaatggagttctatttcaaaactaattgacaataggaggagcagcccattcatcttatatatcacaatttatttccacacattagcaataatacatttgttaaataatagttttactatgcatttgttcaaatagtaaatgagtaaatacatacacataaagttaataaaatattaaaaatgttcgattaaaatcctatgtgggcacataagtataatgtatatgttattataaagtgtgatacaaaattaag

SEQ ID NO: 367258 - DNA, 736 bp, Cannabis indica
actcttgctctttgggatagagcccaaaggctttctcgactgcccggggaagaccgaaatattatccagttaaccttcgaggataactttgtgaagtacgggctctatccacaggacttcattcccaaactagtgaaggggaggaagaggaaatctaatgctggacgagttgaacgagctcatcaggaggatgagttgatttaactaaagcgcgaggctaagttgaagggaggtgtaaaggccaagctatatgctcaggagcccttgaatcctgaagagcaggtgactccgctcaagagtaggaagaaaattttggccccgctcaggcctgttgaacatgcaattcgcataagggagcccatctcacctactcggccatcccctcccgtgcttggaaaaggcagcccatcactttgcaggcccctttgtcttgtttttaagcttcttgactactatgtctcatgtttctgatgtctgttttctctaacaatgttgttttttgttccgtacggacatgtcttggtagatgcttcacgctctaaagaagagaatgggcggaagctctagcgcctctcctcctgccaagaagtctaaaggcggtgaggggtcctcttccaaggaaaagaggcctattggggaggtcattgatctttccgaggagctaacggctgcaaactcctctaccccaaaagctgcaaagtccaaggagtctcggggaggaagctcggacaggtct

SEQ ID NO: 367259 - DNA, 532 bp, Cannabis indica
ccagatagaatcaatagtataatttagtagtaattagtccaattccctgtggttcgacctcacctgtgtgagtgtactacctgattgcgtatacttgcgtagtgattataaatttaataacaatagatacttcattcattaagctcgtcgtgaaggtatcaggtcaccatcagatcatatcttaaatttataggtagcattgggtcactattaaattatcatcggacattcgtcttcaacctttacttattttaacaacaagaagttatcagacctagcaaaaaaatcagttttccacccaaaactcagattcgaccatttctgaccctaaatctaagataataaacattaatcatacaatttattcatttgataatattaccgatagagaagtcgttgggtccgcggtggtcattaggttcgtgggtcgttgagtttgtggttgcaatagttgtagagagaagggaccgaggttgtgggtaggagtgttcatcaaaccgctcaaaccgcccgcaccacaccacaccgcaaa

SEQ ID NO: 367260 - DNA, 1063 bp, Cannabis indica
aggacgaagtgatacgattatttactagaaatgtaagttttttacactttatgtttaattcatattaatttccatctattaatatatttgttttatttttcagtttacagtttactctatgttatgtccccgagcgaatgagattgagtttgtgagttgcatcactggcggtcaggcgcttttatttgttgacttcgaggaacttgtgttgggtgacaatgggcaaccaacacaggatgctttgtgaagccagaccgaaaatcttacctcgacattggaagaatgagcgaatgcagaccaaatatttagagactctacaccacctgcactgtctccaccacgtgcactgtcttcactaccagatgagtctggtgttgccccatctacagcatcacaagatcatcctcttcgcccgtcaacatctattcccaacacctcagatgctagcgaaccagtataccatgccatcttggcaaggttggagactgtggagagggagcgtattactttgagagaaggacataccgctctactaagaggacagacagcgattatggatcagttgaagaccataatgagactcctataagatactggaagggcgacaccagatatacagtcacaaccacagccacaaccagatgaagagcctcagtcaccggaaaatgaaataattctcccaaataattatagaccgaatgatgatgatatgtttagtgcacctaagaacatgaatatcaccagcatcggtgatacttaggattctaaggtacaggtgttagagacaactccagaactagtggagaaccggatgaatagaaagcgacctaggtggttcgatgactacattgaaatgaagaagaagtctagggcatcaaagacacttgtgaatgtggacccacttagtgtcattgattgaaagctgctcacgacttttctacagttgggttctcggccagattgggaacaagtacctgagagagtgtttcttcggtagacacgattcagcttggtcctccaactacatactccgaagacatggcttggagacgtatgtaagttt

SEQ ID NO: 367261 - DNA, 566 bp, Cannabis indica
attgtcttgtagtcgagattatgttaattcaaaaccgttgtcatcaccgtatcttacttatatattcaaagtcattgttgtcatcatcgtatttcactttactatttataaacaggttacataaatcgtatttggattttattttttgacacaatattaaacgagttgtgttcagcatatacttgtaatacatgtgttgacacgaacatgacccatgaacacaaactgccactctttttaatgagaccgaattatcttccaactatttgtatcattattttagtcggtaaaaaaagaatactttatgacaaaaaaagagaaatattttttttttgaaaagtacttgagtttaggagaattaaaaaaattacaaaataaatatgaaatagtatgaaattatgaggggtagactttttttttatttatttttaacttaattttagggatagacttaattagatagatttttaaaaattaaattataatatattatttattacttaattagttagatgtatttttctaatacttccaaataaatttttttactatacatatatatatat

SEQ ID NO: 367262 - DNA, 633 bp, Cannabis indica
gttcagggaagggaaattatggaatatggctttgatagctaaacacttgtgggctctatccaacaaacaagacaacctttgggtgaaatggatcaactcaatttacttaaagggacaggatgtttggtcttttctggtaaaacccgatgtaagttggtattttaagaagcttttgaagattcgaaacacaacgaatgtaagcttattgaaccttgctttaaccggttgcaatttcaaagtgcagagattctataatgaaatgataggggtgctaagttcccctatgcaactaatgtctggcacaaacttgtcgttcctaagcataggttcatttattggcaaattataaatgaacagttgctcactcgtgacattctactaagtaggttccttcctattgcttctagtttatgtgtggtttgtgatgttgctcctaaatcccataaccacatattcattgattgtatctttgcaaaaaagctgattacaagtgttgaaagctggtctggtatgctgaattggccgagcttcttatgtgactttcaccaagttaaatcagcaaaagccgatcttgcagcagcgatcctgaatgatgttattgttgggttttattgccctaaataaaactacttt

SEQ ID NO: 367263 - DNA, 644 bp, Cannabis indica
acggtcttttccaagatcgatcttcgctcaagctatcatcagctgagaattcaagaggatgatatcccaaagactgtgttccgtactcggtatggactttatgaatttctagtgatgtcttttggactcaccaatgccccagtggcattcatggatcttatgaatcgggtgttcaaggattacttggatagatgtgtgatcgtgtttatcgatgacttcttagtttattttcaatcagaagaggaacatgagttgtatcttagatcagtactacaatggttacgagatcacaagctgtatccaaagttcaaaaagtgtgaattttggttatctcatgtctctttcttgggacacatagtggatgaagatgggatcatggttgatttggccaagattgaagctgttctggattggccaacaccaaaattggcaactgaagttagaagcattttgggtttagctgggtattaccgtcggtttgttgagggtttctcaaagattgttgtacccttaacggaactgacccaaaagaatttgaagtttgtttggattgatcggtgtgagaaaagttttctagagttaaatcagcgcttgattaccgctccaatgttaactcttcctttagataaggaaaagtttgttgt

SEQ ID NO: 367264 - DNA, 613 bp, Cannabis indica
atattatgtccaaaacatatatttcaaaaaaataatgatagtgatagatacaatattcttaatttgtagttagaacggtgtagttataataaagtgcacaaattattattagaagcatattgttatcctgcttttacactataacgtggcacaatatacaagttacacatgtcctacattcttcgcatctggagggagatggatgtcccaaatagacttcataatatacatttgcttgttacccgagcaaggtggaaggtggattattcgagcaggagcaagtttgactttccctttagaatgatctcgtgaagtccaagcacgaagacaatccctataatcgtgggattgagtcagaagaatatggaaacttgttccaatttcctatttagtgcatcataattatgtaatgaatattccttcctattttatatattgtaatcaaaagaaaaaccttccctcatgcattaaggccctataaatagtgatttagcttcactgtaaaagggatcaaaagaattgcttcagaaagagatctaagagaattactcagagatttcattgtaagagctttgagagaagaaaaaactttgttctttgttctcgagttaat

SEQ ID NO: 367265 - DNA, 723 bp, Cannabis indica
tggttaacgaaaatctgtgttatttggtgctttcattgagattctgaaaaagctcaaaaaaaaccctcatttcttttgaagaaaaaccacctccttcatggccgaaaatctaaaaaatgttaataccccacataaagaaattcatcatcgttctgggaaagagcccatgggctccagaaggtctaccaacccacggtctcaacggaccacccgctctaggaggactcaacctgagggtggccccaacactcggatcacacatttacgaagaacccaacccgacgttggtcctagtacgcggacaacacgcttgaggagaactcagtgtgggagtggccagaaccctgggacgagggatgaagcgcccaatcgtggaggtgcccaccctatgggagaaggtacttatgaaatagaaaattgctgcctaagacgccgtctggaagaggcgcagcggtggaacgctgaattagaacgtgacggagccgcggtcagggtggcacaggggactaatgctcaaaatcaacctgaacctagagtgagaagaccacgaggcagacctcgtggctcacgaaccaggagacaggaaaatccacgggaagaacaacctgttaggttttgtgccctaaataaacccatttcaatataatcagatttactaattaataaagatcaaaaattgcattttatgttgcatggttcacatgatttatttcataattatgt

SEQ ID NO: 367266 - DNA, 422 bp, Cannabis indica
cttgaagcggggacgttacacgtgtccctcgtgcacacttctgtctctcgaacaactcccaccgagtcatgctcgcaagcatccatgagtgcatccatgcatcgaggctctctagccaagatactcgcactgtccatagaatcaaactatgataaggcaactcccaacaccaacgctcaccttatcactcgtgagcaaggtagcgtgtgtggtaagattccaacaccaagttaacgtgccaacacttctatcatgccccatttgatattgtccgaacaatccctcgtcacctaaggactcccaatacgtccatggaccgatcctcagaacgtcatgcctccacgcatgttggtagagcctcgagacaagccataaaaactagttgcatacattagacctttgtccctttccagcatggtgca

SEQ ID NO: 367267 - DNA, 689 bp, Cannabis indica
caaagtgcaaagagagaaggacacaaacttttgtgtttgattttcgtttactttcccttatgatttttctttcttcttttcttttcttgtttcttttatttagatattaaaagcttgttgaattgtaagcaaaggacagcagccatggagaaacagttagtttgaattttattttcttatttgaatatgagctagactttttgaggcttgaatgattataaactcctatgttgggtatgattaatttttaagcttattttagcatctttgcctttgttcattcaagtgagctcgtcattttatttgattgttatttcttggccatgagtaacaatttgttaagctagatcttgttccggatctagtagttaaacttggatagagcaagagaaatcctagatttaggtttttctttgtaagtggaatatgaatatttcatttaccttgcacaacttaagaattgatgtttaaatagtattctgcaatctagtttgatataggaatatatttaagtggtagaatttaatttgtgatttatagaaaattctcataagcatagaagaatctctgttatctctgtgcaaaaatgctgaagtaatgctaaagctatgttgtaacaactgagaaaaaacctgactaggggggattaggtattcaagccactttttaccatattacatttcttgcaa

SEQ ID NO: 367268 - DNA, 534 bp, Cannabis indica
gggtcctgagtctaggtctgggtggggtgccggggcttgttcccagttcgagtctaggtcttggttggagtgttggtcatggtccgactacggttccgggtcatggtctaggtctggttacggttccaagtccagatccaagtcctggttctagtcccattccaaggtcctggtctacttccagtttcggttccaattttaggtcacagggtacgggtttgggtccagggtttggtatggtgctaggtttcggtccgcgtctgggtttgggtctgaggctggtcccagatctagacaccaactacgggttcggtctaagccccggttccagatccagatcttgatcccgatcttgggtcccgacctgattccattttgggtgccgggtcacgagctgggtcctaggttcaagtcaaggtctagggtcgggtattgggtcccggtcctagtttcgctgcccaagtccctatcctgattttaggtcaaggtcccagtttttgtcgggttttttgtcccgatctaggtacgggtttg

SEQ ID NO: 367269 - DNA, 958 bp, Cannabis indica
tatcccaaattttttctacctgacgtggcatgtccacgtaagccaaagacagagtacaggtggactacagcgctgcctatagtagaacagggcctccatgcaagatatagcaaaatcgtcaagcaacaatcgaatggagtgaaacgagccctcaaggagttgtactaacattcttggccatccaagagaagcctataggccggccaagatatgtgcgcaagctggccagccaagaagttacttctgaacccaaggagactccgttcaaccaagggaacctaacctcttcaaggaaacaatgtacaaagttgtcctcaacttgccaaaggctgacctccacactcaaaggttggcctcctcttggtgaagctatagtgacctgccaggtcctagctggaccattgccggccaggattgacctagcaggaccatggatggacaaacttccctctaggtctatcgccagccaggattgacctggcaggactccatgaacaactctacatgtggacttctaaggtaggcaacgaattgggccccaaaagtctaacaaaatggctgaataatatctagaatcaagggcactttggtcttttgcaaatattcaactaactatgctattttcaaggcatctgaattgtaaacctaatgcttaaggcttcctatataaaggccttgaccctagccttgaagcctaagttgcctctagtcactaagcctccaaattattttaagtcaaaaccatagtctatcttcctctctctctgctacacgcccccaatggctctccctctcttctcttcatctctctcacatgcctctaaggcaatctcactctctcattagagatttgcatactgattcatgatttgtatccttatagagagctataacagatcccacctatagtgatctatctgaatagtaatatctctaagtatcaatacaaccaaaaggg

SEQ ID NO: 367270 - DNA, 838 bp, Cannabis indica
agtaaagcatgcgatgtacacaaacagtaaactaaagtacgagatgcgaagaacttacataaagcttgagaactgggcgttgttgttaatcgacggtaaagagttgattggcgacggcgagggaagataagtaagaaatctatggtgttcgagggtttctttttctctctggaaaacttaagaaaatttggtgaaattctgaaagtaaccaaatgaagtgagaagggtggcttttataggccaaaacacatgtgaaacagctgtgatcagctaccaatcgaacggttgggaaggcacacgattcggatccccaggatccgacggttggattggatcgtcatcaagacagtggaaacgcttgagcttccgtctaacacccattaatgcgccgtatcaattaatggacaagaaacgaatcgacgcctgcaaaaggtgaatcgctgcagtaatggtgatcattaaatacgccatcacgcacccaaagcatgtgccaggaaaccgaggagccagccggaggcacctaagcaagccttgttcacttcacaattaaacaaggctttgggggtaaatgttgcccctgattttgcccaatatacgtggaccaaccggacagtgacacgtggatggaaatggtttagcgtttgaattaaatagctaagtctttataaagcaaagtattattttggatatgcctcccggagaaggcatgcaaggtctcatatgctcccggagagaaagatcgcatcaaagcatctccgggtggtgtcaggcttcctctgagcagtcatctcatatttaatgtcgcatgggaggaggcgtgttggaactgccacacgca

SEQ ID NO: 367271 - DNA, 590 bp, Cannabis indica
aactctgtttgtttcaagatctttttttttcttcaagttcactagtttatgagaagtcaaggtgcaactgacatattacatgttgatcctgaaatagagaaaacttataaaaaagagtagaagaaggaagaaattggaaagcgctgcaatcaagattgaacaagaaggagtcatggctgacaacgccaataatggcaacaatggaggagtggtagaagaccaggttgatggtcacaacaacaacgaccgtagcctaagggactatttgcttcctaacttgacaggggccagatcttgtataagaccacctgccattgatgccaataattttgaaatcaagccagccatactgcagatggtccaatcttcagtccaatttgggggattgccatcagaagacccaaacatgcacctcaccaacttcgaagagctttgccagacattcaagatgaacggagttagcgatgacgccattaggctaaggctattcccattctcactaagggagcgagccaagagttggttggtatctttgccatccaattctatcaacacttgggaggaattggccctgaaattcctttccaaat

SEQ ID NO: 367272 - DNA, 680 bp, Cannabis indica
agaataaaacttttattagaaaattatcaaattgaccagaatctaccaaacaacaagaactaagcaaccagaaccccactaaaaattattagaactagccaaagggattaccctttggctagtagcaactgaattatagcactctacttcataaccttcttaaagtcaccatcctttactaagatatcatctaaaataaattttagtatgtaatttagtaaaaaataatgaacctaaatcctactatatatataatgaaactataatttgatccatttctatttatatcaattatagaagttgactgccatatttgaaaagatcttccaaaaacaaccttggaaaatctaagctttttgattgacatttccaacagataatataagaaaaaattactctatgctatatatatgaagagaatgataatatattaattaatattgatttttttttttttttgagaaaatattgatttttaatgatattgatcattgttttataaaaaaaattatactaattaatattgaatttttacatgtgttaaatcatgatcctgaatttttaaagttgttaaaaatacccctgaactattgagattgtttgatttaaggacttttgtctaattttaataaaaaaaatctaacatggatgaaagttcaagggacataatttaatacatg

SEQ ID NO: 367273 - DNA, 518 bp, Cannabis indica
gtttcgtataggggttttgtgaattagaatagttatgaaggttctcaccttataggattattctcgggtagtcatgggactagttctaatgtttacttgttgaatttgaggtaattttgaggtagaaatcgagatttgaacttgttaaagcttagtttgaatgttaatggcttttttcattcaagggcttgattttaatttctgttacgtaaggatggtaatatttatggcatatatgcaccctgtgaaatttggagtgatttgggtaagttttggtagtgtgtccgttttggacattctatataccgtttcgaagcttgcaacaagctctacaatatggtgtattatttagagcaaaaatataagttttattttaatgtatttataccgtggggtcttgtagaaaaccctagattgtcttatgtgaatattaagtagtgttttaggataaacacttattggttattcgttgttgtgacatcgggccgagaacatcggggatagttctccacttgggt

SEQ ID NO: 367274 - DNA, 765 bp, Cannabis indica
aaagttttttaaaaaaaaataaattaaaacactttgtaattttatatttgatcttatcattaatgttgacatggcatacaaaggaatgttcataccattaccaccactagtttagcgaccaataattccaacctaaagatagtatgcaaatgcttttggatttagaaccgtcggcctccactcacacagtatggtgagcttaaattcaagccatcatattactttggtttattttgcacatacatagttgattgttacatttttgagtttaaataacacaagtgagatataaaatttagttcaagatttgattgactgagctcttttaaaattgtgttgtcaagcattttattggcatttatattttatgctagataataatatacttgatagtcattttaaaaaagaaatggaagttctctctagatctttctggaaccgtatccctctttctctgtttggtacccgaaatgggtctctgatccacccttaagagttgtgtggtggaagttggtatcgtgtcccttttttcactacaagaaaatcatcttttgccggcgcattgttgcgccggcaaaagtaccctaactgcgccggcaaagctttgccggcgcagttgtgcgccggcaaagcttatctgtgaagcttggtcggtaaaggactttttaccggcgcgtatagtaactgcgccggtaaaacttcctttaaccgccgagaaataacgccggtgaaaaataagcgccggtgttaaaaaatggccttatc

SEQ ID NO: 367275 - DNA, 645 bp, Cannabis indica
ggttagcttgtcctagaggggatgaaggcgtgtggaaggactaagatgggctgaatgctagaacaagatgtggttgagctagttaatctcctaaagtggattagtagactgagatggagttgagactaggttgcttcgaattaagttcagagatgctagaaagacaactaccacgtgcaattgtagagaggcgcaacaatagctttgaaactcgttggcgtggtacaaggtttgattgggtagtccatattgtatgcttggtacactaggtcgagtttgcctgagtgacatcgtaagacgcaagaggtgcttttgttgaaaaagaagcttgttggcatgggtgtggaagtattgcaagggtcgtcggattcttatcagtcacgacagtgatcgagagttgatgaccaagatggttcaaattaggatagacatggaatgcttcagttgctacgtgtctgtgtgttaagagggacgcacatggagaccaaggggcagatgcgacgatcgccagaggatgatcgtacttggaggaatttgcatgtgacttttatttaatccatatgggaagcatcaagacagttaagtgagatgtgttggcttgtaaaagcaccaatgggcgtaagtcacacaaaggcatcgatagag

SEQ ID NO: 367276 - DNA, 759 bp, Cannabis indica
acttagagataaatttacaaagtatgaaacaatggtggaagctcataaaataagaatagccttgactctcgcctaccgggacaactttggattcttattttgatcgaataaaaggttgctagaatggtgtccattttagatgagctgactactctatttaataaatgatatctttgactatcacctaccaagacgctatatcagtttgttagaaaccttggaaattatttaagatgtgcttgttttgtattttcacatgtctttcttaattgttcaatgtatgataatttttgaatgtgtatgaatttatatttgaatttatattgaatcgtgttgttttctgttattaatgttgtagtgtaaattttgaatcttcattgttggtcgaacttagtttgttattttaacgggacaaatcccaagggattgtcatccgttagacaaacaaaatagtgttagatctcaacagataagtatttttaaatgcaacatctagttgtacatccaaagatgacaacttagagtagtgtttacaatatgaaacaataaaaaaattataaaatacaaataatttttactctcgcctaaatggcacgtcgttggattcttatttttaatcgaaattatcctttagtttttcttcttagctttctcatagagaaattgcttataaaatatatcattggatagaaggattataaatcatatgcttatgatatcattctattttcttttatgaaattgaatgacacagatgac

SEQ ID NO: 367277 - DNA, 803 bp, Cannabis indica
aatattttaatctacaatcagcacttcgtgattttaaaattgtaaaaattacaacgaaaatttcagtaatagtactaatgacagtttgaatggtttatactatcattattatcatattataatgaaaattcaaaaaattaatttaataaaattttaacaatatctataacaaaaatcttaccaaagttttcacattataatatatatatatactaatcattaactcattgtaattgtttttaaaaaataatataatatacacatatattatatatactagtgcttatatgaaaataaaaataatatattttaaaaaaaagtaatttgcggcataaatacttaagtttgactctcagttgcaaataaatacctaaatataatttttggcaacacctaagtttaactctcagttgcaaataaatatctaagtttaatttttggcggtaataatacctaagttatatttctggaactctgtaggtacctaaccgttaaatgttaagccattatatccacgtgtcattttcttattggtatatttgaactattttttttaaataataaaaaatttaataacttggaccaatcagggattgccacgtggcaatttatttaaccaggtacctacaaaaattctaaaattataatttaagtattattaccgcaaaaaaattaaccttaagtatttatttgcaactggaagttaaactaggtatttatgccgcaaattactcttttaaaaattaataactttgtaatatatagtgcggtgcaatttaaactgtaattattaaatttaaaac

SEQ ID NO: 367278 - DNA, 975 bp, Cannabis indica
gcataaaacccaacaaaaactacgttccgtactcggtatggatattatgaattccttgtgatgtcttttggactcaccaatgccccgcggcattcatagatcttatgaatctggtgttcaaggattacctggatagatgtgtgatcgtgtgtatcgatgacatcttggtgtattctgaatcggaaggggagcatgagctgcatctcagatcgattttgcaacgattacgagatcataagctgtatgctaaattcaaaaagtgttaattttggttatctcgtgtctctttcttggggcacatagtagataaatatgggatcatggtggatccgaccaagattgaagctgtttgggattggccaacaccaaaatcggctactgaagttagaagctttctgggcttagctgggtattatcgtcggttcgttgagggtttctcaaagattgctataccttgacggagctgacccgaaagaacttgaagtttgtttggactaatcggtgtgagataacttttctggagttaaagcagcgcttgattactgctccaatactaactcttcctttagataaagaaaattttgttgtttattgtgatgcgagacaaggtctcagttgtgtgcttatgcaagatggaaaggtgatagcctatgattctcagcagttagaggagtacgaacagaggtaccttactcaatatctagaacttggaatagtggtatttgcgctaaagatttggcggcattacctgtatggcgagaaatgtgagatatacactgatcataaaagtttgatatacttcttcacccagagagacctaaacatgagacagagacggtggctagggttggtgaaggattatgattatgatatcctttatcaccctagtaaggctaatgtagttgttgatgccttgagtagaaaggggcagagtcaaagaaattctatgaaacaaatctcccagcagctagcaaa

SEQ ID NO: 367279 - DNA, 512 bp, Cannabis indica
ttttttctcactcgatatattaaacttaagggtgttcacggtgcaggtggtgtgtttttggaccattttttatatcaacctgcatatgccgttttttcaatttcttaaaccgcacccgcacaacgaaactaaaaactgcagaaactacactgtaaaaaatggtgcggtgcagtgcggtgcggttttgcactttctacagtttagattattaccaaataataaactatcacaaatacgataaagcttgagcaacacttgtcaaaaatactataaggcttgaaaataaatatgaaaaaaacttttaagtttcaacaatacaataattagtgggctttgagttggactttcacatattggacctaaataattataaaaattggtatttttataatatgcagtgcggtgcggtttgaatcgcatattaccaattcaaaactgcaaactgcactgcaccgcgtgatttaaaaaaattcaaaccgtgactgcaccgtaaagaatttcaaaccgtattt

SEQ ID NO: 367280 - DNA, 720 bp, Cannabis indica
aatgagacatcaaggtgtcttagataaaaagagctttaaacctagtatatgaatagatgatttaactattcatataagaaatcaagaatgtacaaagtgataagatcattgaaagtatattcaagattgcttgaaacagattataactattattgcgagacagagttgataactgcttgcaaatcaaaagcctggcacataataaactgctcgcgcacatagtagattactaactacttaaatggaaaaatacgaggcatttaaagataattaaaagcttagttggctaaccaacttcacaaacttgtctttacaaaaattccgctaggggcaaaccattaggccattttcctaaacaaaaaataaataaatataaatacaagaccaagtctacattatcataggggactttgtgggattttcttgttctgcgacaaccttttcttcctcgctaaattcttcctcctgagtcttctcgcaataagcaagcacagttttggccttatcactcgaaaaaaaactcaagttcaactcggggttggctgaccaaatctgatagatggccctttaaccgatattgttgatcctctctttggtttcagtccccaattccttgagattttgatcataatcaacttgttttttaacaagatcagcttgaagaaatttaacataattctcgagtgctttaattttgttggtcagcttggtgttgctttt

SEQ ID NO: 367281 - DNA, 755 bp, Cannabis indica
atgaccattcatggtcgagatgtagtctccaaattcttgtaatgttagtataaagttcaactattgagttgagctcaaccgtttgtgggtaaagcttaactattatgtttgtactcgattagtataatattacctctttttatttaaattagtcaatgggaagttttgaagaacaatctgaaacgaatggagaagaaaaacagaatcaagtggacaagaagaaacagaatcagatggaaaagaacaaacagaattggatagaataaaacaagtagaattgggtggagaagaacaagcagaatctaatggagatgaacaagtagaattcgatggagaagagcaagaagaatttgatggagaagaacaattagagccttcatcagtgtcacgagacaaaataaatgcgatattttttaaatttgttcactttattctattattatttgttttatgttatttagatagtagaaagattatgtttaatttattgtaggtgaaaaaaatttctcgattggtgcctatattaaaggaaaataaacattttgagggcaaaataagtatgaaaagtcggatggatgagatcacaaggcacattaatgatgtactaaaaaatgacccgactcacttaaaattgtttaaagaatctccgtttggccactttctcgatatttttgactactgtagacattttagctaagtgatgtggctattactctcgagaagcagattgttacagagattcagagatgtggttt

SEQ ID NO: 367282 - DNA, 494 bp, Cannabis indica
taatatataagattaattcaacaacataaagttccaaaataaacaacaataacaactgaagaaagaatatacacaggagactgaagcatattaaaagatttacacattaatcatagaatgaaatactgaatatggtattagtttcagtatggtacaatatacttggtttttatttcaaaaaatttgctctaggcaaggtaagctgatatttttaataaatctgaccataattgtgcacaataggttcaacagtattgaaaccagcatgtaattgaattatatcgttccttataacaatttttttttatttatgcttcaccaagtcctataaaaatataactacaggcaaaactttaagtacctcaaattcaatctattgattctacagcttttctctgcatgaatccttttgtaaatgaaaagtacaagtcattaactttatttgatatgcttagaatttcatagcttgtatattttctaaggttaaattatct

SEQ ID NO: 367283 - DNA, 829 bp, Cannabis indica
ttgatactcttcttgtgactttgctcaggcccacctctcgactttacacagtaagtacctcattctttctttgattttactgaggtgatgatctgccttaggcttcattacttcatttggttcaacatttaaggttcatatcatactcacccaaaaattccaaaccttagtccaagttggaagtgaatgattccgggatttaagatcatccgattaagtcaagccaagaagaaactgttagttgttataggtaattcttataagagatttctgaaggaaagcatcattctttgcaaattgtggcctggtctgaacccattttttttttcatttgcgaacccaatgtttttattcaacgtcattgttacttcattgaccttttacctttgcctccgcaggaatggacgtagattttgagagcatgttcataggtcctccccaagccgacaagagatccaggaagaaggtaacccaagctgatgaggtcgcggattctactaaagaacctaaaaggaccaagaaaaatgcctacatgaggaaatcctcagaccagcttatcattgatgctgataaatttcccgaggctgggaatgaggttctcagctgcatggaatgaggtctgtgctgcagggaatgaggtctccgctgcaaggaatgaggtctctgctacaaggattgtcgaggggcatcctaccgagtcaacataccaggtcgagttctctggttcttgttcggagatggttctccctgagccctactgtcccctataataacgtagacttagtcttgtattatttgtttaggaaaatggcctatgttggaaatattt

SEQ ID NO: 367284 - DNA, 703 bp, Cannabis indica
tttttttaaaattttaagattcaacctatgatgtaacttcatctaaataaggattacaagtttcatgaagtgagatatctcaatattgttgggatattattttgataaacatttatcatctcgcaataagaaacttgtagttagtcgtaatacaaggaacttatagttggtcgtaatacaaggaccttgtggattatcataatacaaaggatcttatagctggtcataatacaaaggaacttgtagctggtcgtaatacaaggatcttgtagctggtcgtaatacaagaatcttgcatctcctcatattacacagtcactaatgctgctcctcgtatttcacagtcaccaatacatctcctcatattacacaatatataatgcatctcctcatattacacagtgtatctcctcgtaatacatgctcatcaatatatcttctcgtaatacacagtccacaatatatctcctcgtattacacagtcaacaatacatctcctcgtaatacacagtcaacaatgcatctcctcgtattacataatcaccaatgcatctcctcgcaatacatgctcatcaatgtatctccttgtaatacacaatgtaccttctcgtattacactcgttatgcacctactcacaaacaacatgttctgaccaagtcaaagaccatttctttgtattttaaatataaataattatttata

SEQ ID NO: 367285 - DNA, 548 bp, Cannabis indica
ataaagatataaatgataacatgaaccaaatgacacattaaataagtgatgaaaatacttctttttaaataatagagactacatagaaatagagttttatttagggcataaaacccaagaaactcccacttgcactaatataaaacattcagtacatttcaattaatcctagattctgacggtgcttttcaaatgcagtttctgccaagactttggtgaatgggtcagctaggttatcctctgtgtccactttctccaccagtacatcccctcttgccacatactctctgatgatatggtattttctttctatatgtttgcttctcttgtagcttcgaggctctttactattggctatggctccagtgttatcacaaagcaaaaatagtggtttttccgttcaggaacaacaccgagtcctgagaagaactttctaagccaaacaagttcttttgcagcctctgcagtatctttgtattttgcctccatcgtagagtctgaaattgcagtttgtttagcactttctccaaaaccactgctccaccccc

SEQ ID NO: 367286 - DNA, 446 bp, Cannabis indica
gcataaaacccaacattttcctaggtcatagttgtgacatcttcaatcattgagaccatgtcccaccagaccagagggtcttcttgaaattggaaagtggcacagaccactctatcattaccaatgacgcgcataaaattcaaaattctggtgatcactgttagccattgctcgacttttatgacatcgggacctccctgaaaaactggaggtgcctccttacggaacctttcatacaagggttccattggattcactacaaccactagttcggcttgcacaacaggggcaggtgctgtaatgaccgctctagtatatggattagtaaaggcaattagcactaatttttattattttactattatttgtgaattaatttatttgtggaccccaatatttagaaataaatattagatttaaaatttctcaattccggagattttatt

SEQ ID NO: 367287 - DNA, 532 bp, Cannabis indica
ctcaacaaattccttccgctttgcactgcggaccgcctcattgtaatatttggcgttgaataattcccggaactcttcccaggtcattctagttacatctctggtgagggataccatttcccaccaaatcagggcatcctcttgaaattgaaatgtggcacatgccaccctatcatttccgaccactcccataaaattcagtattttctcaataacggtcaaccactgctcagcttttaaaacatcagggcctcccagaaatactggaggcgcttgctttctgaatctctcatataaaggctccatgcggttaccagcaacatattgctcagctggcaccgcaggggctgcaggaaccgcagcaggcggttgcggggaacagcaacatattcctctatattttcaaacaaatatttcaatttatataataaatctgaatgtgttagaaatggtattttgtatcttggtctttactgtattattgtacaaaataataccactaataatgttatgcatgttcacgctggcacta

SEQ ID NO: 367288 - DNA, 938 bp, Cannabis indica
aagaaagtaaataaaatgagaaaggaaaaatgagcaaaatgatgagctagaacaatcaaatccacttagaatgcaaattcaatgtaaatgtcatagaggaatgcattactagtaattaaattttgtcaactggaaatataaatgaacatatggtttttccaaacctatatgtgttatgggctctcaaaattaaattaacatattcctatacaaatctagacctagagaacacaaattaagcaccaatttccatgggtcatacaaggtaaatagcatattcctataccatctacaaatcacacttttccaaggtgataatcttgcatcaatcaagtatttccactaaattattattttttccaaaatcaagattagctaacaacctacaattggtgatcaagcaaaagtaggtagacaaacattaggcatccttgaatgaacaaaactttcttaccaaaaatattcataaaacatcaacaaaattcacaatccaaggttcattaaaagttccaactaaaagaaattagttcatgctcaaaaacataaaaatacccaaaatgaaaacaaagaagtataaaaatgaaatacaaaagattaaaggagtagaagaaactatgtggatggctcctccttcttccttcttccttgtgcactccttttcttcttcttcttcttcttcttcttcttcttcttcatttctctaggtattttcaaaaatggtggctgccaagaattgtgtccctcttctcttttaagctagggtaaaatcccactttttacttttccaaaaagccccccaaaatggtcccttaatttccactttagagacttttcaaactaggtcagatctaaaccacttgtcttttgccacctcaccctcatatttgccacctcaattaataaattgccacatcctttttttttctacattagtttca

SEQ ID NO: 367289 - DNA, 394 bp, Cannabis indica
atttttgtaattttttttttcaaatttttatggtctatgtaaaattttgttaaaatgtggaaataaatgttaaactccctttaaaataacattaaattttgtgttaattttagggaaacttacaaaaatactggaatttaggttaaattttacaaaaatactgtcacacggaaatctttttaaaaatactgtgtttttataaaacaccagtaaaacacagagcagaataactcaaaacaatagtagaacactggtaaaacaccaataaaacaccagtagaacaccagtgaaaacttaacacagtatactgcagtatgaaacttataaaaaatacagtaaaaagtaaaaattccgcctgacagtatttttgtaaaaaataacaaagttagtatac

SEQ ID NO: 367290 - DNA, 578 bp, Cannabis indica
agtaatagtggtgttgcactacggtttttggagtaggagaacgatcactactcacctcccaatcttcaaagcttgagttagaaagtccgtcactcaaacaggatggacttgcatgaagacgaggttgatcctcgtacaaaagttgaagcaaatcctcgtcaattcggtgtttgcctccccaaaactcaccaggcttcatctacaaaagacaacacacgagatgagtgtttggatgggatatcaaacaatatacaggaaaatatgccaacaaggagtactcaacagattaaaatgacgaaaaatgcacaaaaattaagtcaaaactcagaagtttgaaattttttggttaagggttaatcaaaagtttgaaattttttggttaagggttaaatttcacgaagcttcgaatgatcaaggtaagagtcaaacaatgtgagaataaaagtagaatgttgtaaaccacgaagttgtaagaattattgcagagaaaataacaaagttttgagcctagattttctatgtatcttctacaacaagtcaagaataatggcattttctacaatggaaacccagaaatt

SEQ ID NO: 367291 - DNA, 1154 bp, Cannabis indica
ttttttttaaaaaaaagaatcatattaaagttttgacatcataacatatatatatatattaattattaagttattatattaaattgtctttaaaaaaaatataataaatacatacattacttatatttgttcttatatgaaaacagaataaaaatcatattataaaatttagtaactatgtaatataccgtgcgatgtggtttgaatcgtaattattaaatttaaaaccgtaaacctaaccgtaccacgcggtttggaaaaataaaaccgcaaccgcaccgtaaaagatttcaaaccatattttttaaatgcagtgtagtgcagtgtgagtagtttgtgtagtgtatacaattttaagcatttaattatatttattattattgatgatggtaatttaacaggaaagaattcattaattaaataataataataataataataataataataataataataataatacctggaaactataacatttgatgagctcttaagtctatccacacaaatagttgcccttcttcatcaagtatccaatatctcccgttttcacccaaccttgttcatctatggttgattttgttgcctctagattgtttaggtagcctgaaacaagtcatatccattttactattattacatcattttgatcactgattattatattataagaaagaaagaagagaataattatcgtgagagaatagatcttttaaaaatattattacgtgatttttcttggcaaaatttacaaaaataaggctttttttggaaaaaatattttacgggaaaattaaaaaaacaaaaagaaaaaagaacaatgggaaagcttagggtaacagttaccaataggtaattaaagggtaacgggtaacaaatcagttaccttatactatttttttaatttttttttaaaaaaattatttatttaagaaatatcatatttcttataaattttataaaaacccataaaatatataattttgataaattaatggtttcttttatacaaattattttacagtgttacgaataccattttaaagaatactcctttacaaaaataacattaaatttctattttgcaaaacaagacagtatttagaaatgacttaaaagataaaactaaaaggggtaaaaaaaaagaaaag

SEQ ID NO: 367292 - DNA, 795 bp, Cannabis indica
tcaagaccgaccaaggtcagaacagccaagatttcctacctccaccggtagatggacacttgcaagtcattattggaggccctcacattgatggagattcgggcaaagctcgggagaggtatgcccgaacagcgcagcacgagcaaaaagaagtcatcgtggccgtggaagaaaggaagcccaaagttccacgagcaggagagccgatcataaccttcaacgatgaagatgctttgaagattagatttctgcacaacgacccgctggtcgtggaagtccagatagctaataaaatggtggccagaaccatgatcgacaatggagcttcttcaaacatcttgttcaagactggttacaaaaagatgggactctaactcaaggatataatgccatacctccagcctgtctatggtttctccgatcaaggagttgcacctctagggcaaatccggctccccctcactgttagacaagttctgacgagcataactatcatggcacagttcctaatattgaatgttccttcagcttttaacgtaatgcttggtcgaccggccttgtatgacttcaaggttgtcacatcaatatttcactcgtgcctgaagttccccacaaagaatggggtagggtgtctaagaggaaaccagcagtctgctcgggaatattataaccttgcagtggccaagtctaagaaggaggtatcctccagccagatcccagacaagggaaaaaacattcccaagtagggaacttcccaaggcgaggatgaagatgtggatcctcgacttggggacc

SEQ ID NO: 367293 - DNA, 672 bp, Cannabis indica
ttcaggggcatatttgtatatgtcaaagttcaggggaaaattactatttagccaaaaaaaaaaataagtattttataaacatttaatttgttttaaataatttattatataaaacatccaatttaaaataatgttttccacgcgtattaagtagtatgcgtacgtgtaactgaatatttaaatgttatttttaatatcataaattatttaattttaaaaaaaataaaacaagaaaaaaaagagtaccaataatacttattatatatcaaaaacaagaaatgttcctacagtccacaaaagaaatgatgccctagttaagattttttaataaaattattatcctaaaaaaaatattaaaattatataattttttttttaaaaaaagaaaagaatagttaggattacgtttggtaacacttttttaattagatttttatttttaaaattagaaaagtaaaaatatttttaaaatcacgttttataaaactgtttttactttccaattttttaattaaaatctattttttttaaaaaaaaaaccactttaaaaatttttaaatagttttttaatcaatatttggactcaaaccccaatttagaccttcgaaaccgaacccagacctgactccaaacttggacccgtccccacgtcctaacctcggacccggcttc

SEQ ID NO: 367294 - DNA, 515 bp, Cannabis indica
ttccccaaccggaattccagttcctacaggcccctctggaccggaattccggttcaatgcaggaaagaccaaaattttcatatctcaaacaaaacatccccaatccgaaccaaactttccagacctgctatttataccccaatgaacatatctaaagcaataaaacatcacaatatactcagaaacaaaatccaccattaaagctccaagtttgagttcaaaactcaaaaatttgttaaatctaactaacaacaatcaattcaagcttaaaccaacacaatcaaggataattaaacttttgtaaacaacatctaacaactacagcaacaacagtagctaaaacaccatttcatgcaaaaatccatctcttaaaattcaagaaaataaaagtaggagttaaaaaactataccttcgcttgagatcactaacaactagctgagaatgattgccttacacaaggaaaaccctcaaccctagctggttcttgaacgcatgaaagagagagagagagaga

SEQ ID NO: 367295 - DNA, 480 bp, Cannabis indica
attgttattcagtaaacaacattaatttttatgaaaaaaatatttgattgaaatgctatttgtaaaaaaaaaaaaaaaacttaatagtatttaaaaataaaataaataaaaatatagtgttctaagaaaatttaatggaattattacataaaaatatagattgatattttatttacaaaaatacattcataaggtgtggacaatatttataccttttatctcactttaattacaaaaataccacttacactatcacttacacaattagacgatagttgcagggtggttgctgcgtggttgcgcggtagttgcatcagacgaaagtttcaatcagacaaaataactggtagcaaaatatttatacaactgtaatgcaactgttgtaaaacattaaaaataaagagaatttgaataaagagaatttgaattttttttttcaatagtgattttgagaaagaaattgtaacttgtgagaagtta

SEQ ID NO: 367296 - DNA, 589 bp, Cannabis indica
aataccctaattatttcatctagagctcaacaacaaaaatcacaacaagttcaaggaatcaacaattaaatcccatcaaaacattacaattcttccatacatgcattaacaacaagatcaacacataatcatgctctttccatagctaatttcagcaaagaatccaaaaataaaaactgtaaaaactacctcaatctccaattcaaagcttagcataattaattcccaaaaatcaagctccaaccaagcttattcctcacaaaatcaagttgcattcaagagagtaagagagggagagagagtcgggtttgggagagagagagagagtccagaattttcatttacttttccttaaaaaatccattttgtcaaagtaaatcatataaggtcaaaagactattttgcccctagggccatataacatgcataaacactctcaagggcatatttatcactccatacacatttcattcaaataaaattcagattatcaccattatcaaattaaatgccaacatttaatcccaaattgcatttcgggcccgaaccccgttcggcccaaaatacctggttgtgactataccgcgcc

SEQ ID NO: 367297 - DNA, 582 bp, Cannabis indica
tgctaaaagagtgacattcaatagatatgatcattctaatagagctcaactagctcgaccaaaaatggtcaagatagtgttaatactcaattgttgttaaactctttgatggacacattgataacacttaattgaatttagttgaaaattgaacttgttaattataattttaacatcaatatattttaactattttttaatatcaaccatctatttttcatacaggaatgactcgaatagtaatctatgttcagtacgatggggagtggaaggatgaacatgggtcatataagtggtcgccaaaaaataagaaagttatatctataattatcgatgattcgagcactacatttgagatgttattggataaattgtataagaagattggagccaatcaaaatgacatcgaattaaaaataagttactcacccgtaacacttagagacaacatgccgccacttattttacgaggggatgaatgtcttgcagcttatcttttggactgtggagagaataatcagagaactacattacgtgtggagcttataaaaaaagacagaggtgaaaaggatattgaaagtt

SEQ ID NO: 367298 - DNA, 567 bp, Cannabis indica
aaaggagaagtgggaggaggaggaaaaggaggagtgggaggaggaggaggaggaaaaggaaaaggattaggagggctttacatgaacttttatggggaaagttgcgagaatcttgagcaaacagtacaagatattacttgggcaaaggttcaagcagatgcaaccatggctcctaagctcctaaggctgcattaccacgattgtttcgtcagagtaagtctattaattattattaagctatttaattagttcaaattatattaattattattaagcattgttattaagtagcacttctagaatatgtcgtgttatgattagctagtaatattctttaaaagttattatattaaactataggatctgatacttaatttgatagtgatattaacacatagaattagaccccatatatgtcttttagcatttcttatataattttatatatgatgccttgggatggagctatatatagacactactacactaccgatgctatatatatttcttttgagataagcccctaatatacctgtcgcctttaaataagtcactcctaattacaag

SEQ ID NO: 367299 - DNA, 586 bp, Cannabis indica
ttcaaacatataattaagattatattccactgtggtgacaacactataatcattaacaaattgatatgttctggacttaaatagaattcatacattatataaataatcatgaaataaatcatgtgaaccatgcaacattaaatgttaaaatcaaatctttattaataagtaaatctgattatattgaaatgagttttatttagggcataaaacccaacacaaacctacaccgggcctatatcagacccacatcttcaacattaatccttttaacctcagaataccatctgttgaccttagatttggccaaccgacagccgagtcatattaatattgatgcttgccacatgttacacaataagaacaagaaagtaaaagaacacaggaatttatagaggtttggcccccttagttagaaggtaatgacctactcttttttaaagttagaaggtaaggaatttatacaggaatttatctgatcactataggtgggatttgagatagctctcttaaggttacaatgtaggaatcaaagatggtaaattttaagttaagagagaagcgatggtgtgtgtgtgtgtgtgtg

SEQ ID NO: 367300 - DNA, 554 bp, Cannabis indica
gcaactttcctttttaattttgtttcttttattttgtctttgttttatttggaaaattgtctttcttttagtttctttttttcttggttgtaagttggctatataaagccgtgtaaacactttgaaaaatcagaatattttggaataaaattttgagaggttttcttcttgagttcttaagagaactattcaaacttatcaaggagtattccttgtggcgttcaacctgacttatcaaacggatttccaccaccgtttgtggcgtcttccctcataccatggttcatgcttaactaagcattgggtcgcggttccatatccaaatttcgagaattcttagaggctgccataattggtattgggtttcatcacaactgttggtgtggttcgtatcaccaacgactttttcggcatcgacaactactctggtgatttttctggcgtcggtagcaaactgcagcgaatttccagcataagttccaaataaaatgcctaaacaaataaaaatattaaatatgggatttaaaaacctaatttatatgtatatgacatat

SEQ ID NO: 367301 - DNA, 449 bp, Cannabis indica
ccccgaaaatttagacaataaagctataacatcttaaaataatgctcctaacttgttgaaatacatctccccgttattgatagctgtcactaaagctaacgaatctgaataaactgaaacaaatcagaaaaccaaaaaatattttattagaaaattatcaatccgatcaaaacactcaaaactcaaaaactgaaaaactagatcctcatataaaatactataactagccaaagggaaagtagcaacatctaataatattattcgtcctaaatttatcttcggaattaatggaaaatgctcatctggttaaactatcacgacattcaaatttaatttaaaataatatttaaaatttacctaattctaaatatcaaaatttaaaaataatttttaataaaaaaaataaacaatatgaacaaatttattattaattgcaacatctaataatt

SEQ ID NO: 367302 - DNA, 571 bp, Cannabis indica
actcctggtcgacatattttcttatttttcgtttgatactccgtccaacactcatcttgtgtgttgtcttttgtagatgaacctaggtgagtcttgggaactcgggcatcagatcgaccaggatttgcttcaacttctgcacgaggttcatcctcatcttcgtgctagtcctccttcttacgaaggaaactcttctgaccccatacccagccataggatgatggctcatacgaagaaaaccacgtgtctggctgatgcttctgatcctcaagtggctcagcttgccactctgactgacgccaaacaggattcggccgtcccgatggaggaggaccgtgagggggacgctgaggtccagaaggttgaggagctggacgaggtgcatccgggcagtccttccgaggcagagggggaggaagaggtggaaccccctaacttcggggagtgtaacgaggctggacagccagtcgatgctgacggagacatcctggttgagggtgtggactatgttagtggggagcttactgaggcggttcctcataggaggcagggtgccttgggcgccaggtgg

SEQ ID NO: 367303 - DNA, 666 bp, Cannabis indica
cactatattagtaaccaaatagtttctttttcagaaatagcaaaaaaatatatgcttctcacatattgtaatattcacattaaataatagatcacaatggtatttttttaggctcatccgagtaacgacgtgatcaaaaattatttttaaaatttgagagaagagagaaaaaatgagatgaagagagtaacgtgaaaaatgaaacaaaagaaagatataaataagagtattaaaacatacccaaacaaataaaaacgttattaaaaattgactgaattatttttgacaattagattacaattttcctttagtaattattgttagtgatattttttgtacacgcaagtgtacgtatcgtaacaagtagtaaactcaccaagagtgagttgatcccacagggattgtaattaagtactttaaaattaaacttttacttctatttggttaaataaaaattaagaaagaaaattaaaataaagaaaactaagagtaaaagtaggaagcaaataaataaagaaaattaacagttaataaatactagggtttcgatttcaatcgtatctattgattatgacctaatatgattatactttctagtatcaatttctatgcaaaagcaggttcactaaggtaatttatagtcttctcagatatataaatctcaat

SEQ ID NO: 367304 - DNA, 550 bp, Cannabis indica
catgaaatatggatttaaaatgatgaatattgtttgtgtgttgatttggatgtgttcatgttggtttatgtagctatttgatgaatgtatgtgaattacgaaatttttccatgaaaataattttattttcgttctgaaaatattttatttggattccttgtgaaaaaattaagcaactttcgtttttacggaactcaattccgataaaaaacgagagagttataatgttttgaaatttttggtgcattgagtgtcgagcactccagcaccatgcgagataggccctcggacaagccaatccgcgcccggagaagggacaaatccatgtctgaagcacgcacagctcccttgttcagacacaatgtcgcgcgcccagcaacctgcaactgaccgagatttctcggtcaaggaggctgcaactcctcctccacgcgggcgtccgaggctttttgcagcctgttttggctgcaagtgcagccttgctgccagccaacacccaatttttgatttttgtgggatttttctccaaattttgaatttttgcaatttt

SEQ ID NO: 367305 - DNA, 928 bp, Cannabis indica
agtgcactaatgaatcatgggacgtaatcttttaaaatatattatcacaattaccttccactgtgttgacatcactgtaattaggaatgactatatattctggatttaaaagaaattgtatattaaaccataaacataaaaactacgtgtaaatataaatgacttttaatcttctattgataataaataagattacattgaaattagttttatttaaggcataaaatcctaacaaactctcacttgcactaacataaaacaagaagtgcattccaatcaatccattatcctgatatccaaatcaagtgtagtgtgtttgactaaacccaaataactggaattgtaaggttgtggtaagtaactgctttatccactattaattcctttgtggtcataaaacattatgcaatattactttttctgtatgcattactcctccaaggatactgaattttttattgtttattaagtgcatctgaatgaacaaaagacatacctctaattctatccaaaatggaatagagataaaaacagttaaggactttcttcaatttgaataactttctagtgcctttcaaagcaactaagttacataacttcattggtagaactaaattattatagatgggtttttacgtccttcttgaataattcttccacccctggtagccaccatctctgatgttaagttttgagtcggtgtagatataaggattctaatatacacccctatcatctaacatataggtcactttcagagattcttccttgattgtctccaaatgttgattacgtcttagatggctcccactcaatagtagaagtctggttaaattcatacacaagtgtggatttaaccttttactattggtgcttagggacctcttgttgtgacataatatctgttgggttttgtgccccaaataaa

SEQ ID NO: 367306 - DNA, 609 bp, Cannabis indica
attaggattgattttataatgaatatacatctcatagacagcttacattcggtctgaacaagacctcaacccactagaaacttccctaaaataattcttcaatcagtccaggaatttccgtttctgtacctacagaatcgtgggcagtaactacaactttccttttatagaaaaggaaagtttagctccggttttctcttcaagaaacctgatcttagaaaatgggaaactcaacacaagatcagaataacagctggttagcaaagaatcaatgtgtaatcaaaacttaccatttttacctcaatttccataaataggaaagctagtcaactttccttccaagtttagatttacacaaatagggaaaccatatcaatatatgccagccgaaatatacattaaataataaaatattttgtcaattaaatatgccaaaaatggaattaacaacatttatttttttatttttaaaacttaatatttttaatatataaaactaaatgctacttgtttaaaaaaaaatacagttctcataacaatttgtacatgatattggcactttaatttgataatcaagttccatatactgcactggtactcagctatggt

SEQ ID NO: 367307 - DNA, 1032 bp, Cannabis indica
agtatttttgtaaaaaaatcgtgtgatagtaaaattgtaaacttttatacaaaatttcagtattttttttgtaaagattcttttttaattggccatagacttaacttaatgacattaattattagcaaactgatcttctccatctctctctctctcattttgctcaatcaaaaactgattggccaagcttgtacttataaataaacaaactattataagtttgttactttagtaaactaacaaataacaactgtaataactaatttttgtaacaatctatttctgttactctatcatcccctcaagttgtactggtctagaccacgtgctaacttgtctttgaggaagtggaatgaagatacaagtaaatatatcagctatttgattcatagagtccagatatcttacatccagttggttggaaagaactttatctcgaacaaaataaagatctatgtcaatatgcttggttcttgcatgaaatattggattggaagccaaagaatcagctcccaaattatcacaccacaagattggacactgaagaattggtatgctgagctcaatgaacagagattgaatccaaaccagttcaaaggtggccagagcaagggccctatattcagattcagtgcttgatcgggcaaccaatgtttgtttctaggagcaccaactgaccaagttacctccaaggaaaatacagtatccagatgtggacttcttatcatcatgacaccctgcccaataagcatcagtctgcaactccattttggaagctggtgtgaagactaaaccagtgtccaatctccctgctaaataccttagtgttctcttgcaagcactacaatgttctgaagtaggagcctgaagaagctgactcaatttattaacagggaatgctatatcgggtctaatcattgtcaaacttctatacattgtgggattttgcattggagttcctgtttaagattacatctttattgtggaacacatgggagttggctggggctcggagtcactgagttgagtttt

SEQ ID NO: 367308 - DNA, 595 bp, Cannabis indica
tatttgtcaatatcgctattggttcaactaagtatcgggtaccatataatttattataatagtttttagggactatcgctagctaatcacaacgcgacagatcacacaggtgctagacaccagtggtacctaataacaatgctcataataattaaatggagagaatagtataaagtttatatatagtcaactatagtcttcaaataagtcttgattatagacaatgccacttcataatgagtttgtattaattaatatatgtactgccaatatccaaagcagcacaagaatactttaacaaggctgaaaaggtttatctcctattattaacgctagagtcaaaaagaaagttcctcgagagaaaaaggtgaggtttataatcagcctagcttttgtaatctccttttctgtcgaaaaagaagaaaacctataattgaaaattgcttgaaatattgcttagatttagcctattatagatattgattgatatattaatattattatagatagatttaggtaccgtttggtaacacttttttaatcagttttttatttttaaaattgaaaaagtgaagatatttttcaaaaacatgtt

SEQ ID NO: 367309 - DNA, 582 bp, Cannabis indica
cattctcccctccttaaagaaatttcgtcccgaaattttaaagtacaacctcaagttgaaaattaaacaagtgaggatacttcatatacatctcggactctaactcccaagtagcctcgtcttctctgtggttcttccataagaccttgactactagaatctctctgttccttaacacttttagctctctcacaaagattttgacaggttgttcttcataagtcatatcgacctgaagagggatagcctcatactcaataacatgtgacggatcttgagtatacttcctcaacatagacacatggaacacattatgaacatgtcccaactgtcctggtaagtttaatcgataagcaacctccccaatcctctcgataacctcaaaatgtccaatgtacctcgggactagcttacccttcactccaaatcttgttacgccacgcataggagtaacattcaagaagacataatcagcaacatcaaacttaacttcccgtcgatggagattggcgtagcttttctgaggacttcaaacaaccttaagtctttcttggattcccttaatcttttcagtggtactag

SEQ ID NO: 367310 - DNA, 863 bp, Cannabis indica
acaacaatttaaaaaaaaaaagataagtttcaataaaaaaaaaatatatactgacaaaattcaaactcatgggcttccatgttgggttaggccaaagtgggtttaaattaaacttaattttttttaatttcatttaattctaattataaccctagtgaaaccttataaataaaatatgatatcatttgatttaaaaaaaaaaaactcttgagtcacttttgtttgattaatagaatcaaagagagatctattatattttatagtaaatttcgagtttctcttattctatttctctttttttcgaatggtataagttttgactaattgctcacactttataaggtaatactcaggttagtaaagaatactgtgtagtcttttctcaagtactgaaggagaatttaggttcagttcttgatcataatctacaacagaaaggataaaaaagttagagaactgaacaaaataagttaattaattctgttgcaaccaatacaaggatctctatatccctttatgtgatttacattattgttttgataattctatgtttaagatgttagattagtaataatcaacatactcgaataataaattaagatcctagtgaaatattttcaacaaatcatactataggtacaaacgttcgaattatgaatatacacatttcatacagttagtagacttatagtaactgagtgtatgggtactcagtaacaagttaaatattgtattttatattgtatgttttctcttatcgagtctgtcgacttacatatatgttattatgtgtaggtaagggaaaaataaaaattgaaacagtagtgagttgtagagcttagtgaagattgtactatctcgac

SEQ ID NO: 367311 - DNA, 451 bp, Cannabis indica
agcctatatgtttgcttttgggcttagatgcatataggaagcccatttaagtttgattatttatatatactaggttgctaaaataaaaatatcacattgatagttttatttaggcttaattagtattgagcttattcaatgaataacaattatttaattaatgcttaaattcttctcatttgggccttttgtgagagttaggaggccatagtattgggtatgacatactaaacccagccctccctcacatgaatcaccctaattatgaaggtccatttgccttatttaaataattgtattaggataattatattagtttaacctaactaaaattgattagcaacataatcaattttaaaataaataatgaaattaatatttcattagattattttaaaattaattaaaaaaacacgcttagtttaataaaatatatttaagatagttattt

SEQ ID NO: 367312 - DNA, 814 bp, Cannabis indica
ggttcttccaccatgaatcaccttgtagcttgcagaactaacacacttcatcaccaatgatatccgacctatccgagaagccaatctttctaagcaccgaatccaagaagttccactctatacgatcataggctttgctaagatccagtttcaaagccatataaccgtccttgccttttcttttcctcttcaagtagtggagaacttcaaaggaaacaagaatattatcagtaatgagtctccctgggatgaaagcgctttgggattcagatacaatttggtccatgtaaggcttcatcctgttggccattactttagtaatgatcttatacaaaacattacataaagcaattggtcttaaatcaaccatactttcagggactttctttttcggaatcaacaccacattagcatcgccgcaagatgaactcagttcccctgtagtgaagaaatcctgaaccacgttgacaacatcaatctgaataatatcccaacacttctgataaaaagctggagtcataccatctgggccggggcttttatctggatgcatactgaacacagctttacgaacttcctcggcaagaatcggttgattgaggtcttcattaatacgtgtagacacccggctttgtatactctgaaccaccatgtcactactcaagttcgatgcactgaagagagaagagaaatattccacaacgacatccgcaaggccattttcccaatccttccaagtaccactagaatctttaagctttgaaatcttgttgaagctttttctattgctagcagccctatgaaagtatttaga

SEQ ID NO: 367313 - DNA, 511 bp, Cannabis indica
ttcttgtcatttatcgttttcctttttttgccgtagtgcccccttatagattgccaacccggatcgatagtttggccataccgagttgggcctacctttatattcttgggcctggatgtatagtttggccataccgagttgggcctaactttatattcttaggcatggatgtatttattttgatgggccttttaaatgtgggcctttttaatgtgggcctttttgtagtcctttattttgttgagccgtttatttccaagttcgatttttcccctcaaacactactccccctagttccaattatagttttataatctggaactgcccctgataactgctctagctcagtttttatttattattattggtttctcatcatatattttttgtgtacagttccttaattttgaatttttcaatttcttaggaagtggcggttacccttgatgtgatggtggcacctcaagaaccgtttttcttataaatgccctattaattccctaacctccct

SEQ ID NO: 367314 - DNA, 633 bp, Cannabis indica
actttatttttttttattattttaatactaattaaatctaacctaaccctaagtggtttcctataaataggtagtgatcgctaaagggaaaagatgatgcatctcattcctttagtaaaaatttgagcctccttcacctaccctattcaaaacattctctctctcttcctcagttcaaaatcgaagcctatagtgaaaagagtgagtgctcacacacatcaagaggtactcaatcatagcgtgtaaggttgtgaagaatccagtttcaagagaaggagattcagactcagatcttggtgataccctgctaccataagaatacaagggttagagatcctagtggaagaagacattatattccgctgcaaccactgcaaggttcctgaaacgttatatgtgtttatttcatatcgttttagaagttcatgtttaggatgtcaataacatacttgttagtaaatctagatcctggtaaaataattccaacaactcgcctcagagccatggtaattgatttactttcaagaaatttggacttaaaacgatatatgtgtgatttggatggtttcatattgatctatgtgttttttgatgattgtttgatgtttgcaattttttttacaaaaaataatt

SEQ ID NO: 367315 - DNA, 638 bp, Cannabis indica
tttctctcaaacctctctctctttttcggccctcttggagcagcaagaaccagccaatttccttggtgattcaagctctattttgcaaaattctagtgatctcaagttgttggtatgtttcccttagctttcctttaagttttatgtaaatttgagtaagtttaataggttgcatgcttagttttgtttggattcttgctgctgtatgttgttgttattttcagagatttaagcatgtttatttgaggttaattaagctacttgtggtgcttgatagttaggttgtttagagttatggattttctatgcaaaagctatggtttttcaaagtgaaattgagattttggtggctgtgattagtgcatgagtttgtttgggttttctgcagctttagtatgcatgtttaggtagtttgaatcatggtttgatgcttgttggtgagctttagccaagtttgagtttgaaactcaaagcttggagctcacatggcactttttgtttctgtgcaatctgggtgagtttgttgctttagaattgttatttgggtcatatagaacaggtctggaaggtttgaggttgtttggattagatttgagcattgtgtgattttctgaaattctgcctgcgaggaaccagaa

SEQ ID NO: 367316 - DNA, 725 bp, Cannabis indica
aagacacctagaatcagaaaaagaaaaggaataaaacaaacaaaattaaattttcagacatatcattaaaccgacaatacataagaacggacaaatcaaaattaatataaaactgcaattaacaaaaaacttgtacttaatatacataatcattgaccataaaaatagcaaacctttgaaaaaaagaaaaaaaaatgcaaatcacgcgtcggtttaatgcggcaacaccttgatcaatgccccatcatgttcatcgcttccggcggcttccgctatgaacgacactccaacgaattcatcttaaagcggaacattgactatttgatctccagtcattcttgcaattcgctttgccactgattcactgccaccaggacccctttgctttgataaattctttaccgcaatcaccacaccgacacaaccattgtattccaccacaacactgttatttttatgtctcactattttaaccatgctaatacgagaattataagagtgagatagaacttagactaagataatcagaaaagttaataataataataataagcaaatatattttaaatatataccggaactcaatataaatatacatatgtataatatggtgcagagtaggggtgggcatcatccaatccaatccaattgaactgaaccgatccaatccaatccaattacaaaaagttaggatatccaaattacaaattggattggattggatg

SEQ ID NO: 367317 - DNA, 995 bp, Cannabis indica
taaaaaaaattagaactaaaaaaaaattattttggatattaaaatagatagaggtccatcgatgcatcccttttaaaggggtgcattatagaataggaaaattctacaatacaccccttaaaaaaggagtattgatgcacttatctatttcggtatctaaaaatctacttagttcaatttttttatggtcgtatacattatagttatttaagacatttgacaaaattttgagaaattcgaaaaaatttaacacgtcaaaaatgatgttcagagagtctgttgcacgcgtgaattttttattttatacgcgtgtgaaatagactgtttaaacattgatttctatattgaaaattatttccaaacttcacaaaattttacaggatgtcttaaataactataacgtacacgactatgaaaaaatttagactaaaaaattcttatagataccgaaacagttaggggttgtatcagtacaccgattttgatgggatgtattgtagaagcaccctatataatattgggtaagtctacagtataccccctaaaagggtgtttggatagatcccctatttgtttcggtatcccaattttttttttttttcatatgttatgttataataatttaggactagatgtaaatttttagaaaatgccgagaagtttacaatgccgaaaataaaacttatatattttattgtacgcacaattgttttttcttatacgcatagtaagtaactatttaaactttatttttaacattgtaaattatttagaattttttaaaaatatacaaagtaatcataataataactgcaacatacacgaccataaacagtaaaaattactaattttttctctagctgtcgaaatacatagaaaatctatcgaatcaatattttaagagggtctactacatgaattttttataatattttatagtttaaggaaattctataaacgcacccccttaaaaagggatataccgatacatctct

SEQ ID NO: 367318 - DNA, 747 bp, Cannabis indica
ttatgtttactcaatatttgaatttaatgacataataagattttttttttcaaatgtaaactataatttcagacatatttattcgtacaatacttattttaatacagtttaaaccatttcctatttaggagttgtactaaatttggactactacccattcttaatagtccacgttcttatgttgttgggaattatttaaaattgtccaaatattgtaatcttcttaaccaagtatggactatttcctctaattttaatttgtacatactcactaaaaaaaccaattgttgtcttatcaatatttaattttctgtgtacgtcccacagtgtactcactgacgttaaatggagtatttcctatactttaaataacgtacgtcagcgatttcacagtgtaacgtcaaatcaaactcagtacattatgacatgcagatctcatgggattccctgatttgagttaattaagatactatatgcaaacacgaaacctacctatattacttaaggagatttaatatttgttgggctctaatatactaatatgacatttttcttattaaaatttggacaaatcaattaggtcagatttaatacgatagtagtccctatgatagtattacccaacaaattaacaaaactaagttaataactatgatagtagtaccaacaacgattatgatgtcaaattttaataaattattgactactgaaatgagtggatgtcatatcacattttttatttcacca

SEQ ID NO: 367319 - DNA, 644 bp, Cannabis indica
ccccccttctgcagctattacgctatgattaataagcctagtgacagctactttatgagggatcacatcattcaagaaggaacaaaggattacatctacctaatccctaagatacttagggtgtagagcatgcatttcctactttacacttattgggaatgcgtgccgttactgacaaatacaaaaagatatgtagctcggttctagggatcaccctaaaaaacactataaataccccccaaacacattaaggcaggggtcaagaattctggattccataagaacagtagagagaaaaactaccaagaacatcctctgtaataaatactctcataaataaaaaagactcgtggactaaggctcattaatgccccaacccacgtaaaaatactcatgcattaaacttcctaaagctttctcatatattattatattggttgccgaaaaacctcggtcaacatgtgtaaacaatgaatactagattgaattattttcatatatgtaacttcaaagttcataaatgaagcaactatagtcctactgatctatatatctaaggggatgtttggtataagatttagatttgatgggaatgaaaatgtcaaactaaattaaattttaatgactaaaggagtttgtgtttt

SEQ ID NO: 367320 - DNA, 442 bp, Cannabis indica
taaggttttcttaaactcttacgtgtttatttcgttgttttagaattcatattaggatgttaatgaaacatacttggtagtaaatctagatcctgataaaatatttccaacagacacgtgtcaacctcaaggaatattaaccggcaaatataatggcaattatatttattaatattaaatggaataactctttaaatgcagaagtcaatagtgtatatttataacttgcagactgcacagtccttagcgaggcacgaatgtacgaactattgactcatgtgttgacgagaaattattttgtgtcagaagacataatcacgaggatgatgtcgataatacatagcgaggcgtcaaccccgccctgtgaggaaaggtgttgacgaggtgatttggctgttaaaacactttgtgtataatacacattatactaactaagtataac

SEQ ID NO: 367321 - DNA, 698 bp, Cannabis indica
ggcataaaacccaacaggttggaggctccttcttgctgtaactcgttccagaatggagtccctgtgcggatccctacttgaagaagtgcaagatgttgtccgtcatcaactttcttagtcttctaggcttcttccttaaacctctttatgaaatttttcaatgtctccgtaggcagctacttgatgttagtcagggcgctgacctccagattaacctttctcgcggcgacaaactacctccgaaaattaacttgcaacttgttccagcagtccactgatcctggttccagcttcttgaaccattcctccgcggacccgcttaatgttagcgggaagcataaacatttggcgtcattgctgactctcatgaacgtcattactcggttgaaccgtgacaggtgattgctagggtctgagttcccagtataagctgccatttcgagcatcttaaaatttttggggagctccgcctccaggatgtgcctggcacatggctcacggtcttcacagtcagagtcggagtcatcacctttttgtctccgggagactcgagcaatgtctttacatagtatggccagctcagccatgattccctcgttcagcgttcccgtggaggccgctggcgcatgtttcttttggtctaggtgatcccggaggtcaccgtgctttccgttaatctgatgtctcagatcgacggg

SEQ ID NO: 367322 - DNA, 457 bp, Cannabis indica
tgaaaaagtcaaaaacttgccaaaaatcccctatttcgcccctggttgcgactacataaagcctagtcgtgaccataggcaaaatacaaaaaataagctcgctgtctggctcctagtcgcgaccatgaaaaaaggtcgcgaccatggaaagtggtggttgcgatttactgaagaaaaatttgacagcttcaacatctttcagtaaaatgtgcataacttttcacatatgaactccaaatgagttgattcaagatgcgttggaaagaagaaaaagaaatttaaacttttatgttttatttttttcctaaaatattatcataacatagtcaaatttaagcttgaagtttcacctttattttcttgcataattttctctatgctatggattgtattttccgaaatatgatcaattgatatattccaagtgtgaaacctagaaactaaagaaaacaagcat

SEQ ID NO: 367323 - DNA, 528 bp, Cannabis indica
gtcatcgaaaaacttgttttttgcctcctgatggcctccgagaaagttgagaccctacttccaagctcattcaatcaaggtattgaccaaccacccactctggcaagtcctgcaaaagccagaggcgtccggaaggcttctcaaatgggcaatggagttaagccaatttgacctgcactacattccccgcatttccataaagggacaggcgttagcggacttcatcacggagtgcaatcaagccgaggctaccgcaagcatacccacaccatccgtcccagcatggaaggtatttgtagacggagcctccaacgagaatggatctggagcgggggttgcaatgatatctccgagcggacttcgactccaagcagccctacggttctacttctcagcttcaaacaatgaggctgaatatgaagccttgatagcgaggctgagactagcaaagattgtgggggccaaaagagtagaggtctacagcgactcacatctggtagtgaaccaggtgtcaggagagtatcagac

SEQ ID NO: 367324 - DNA, 528 bp, Cannabis indica
gtaaaatatattccaacagttggaaccacccagcgtgtcctttattcctgtggcaaagcctttgcttttagccaacgtcacaattgcttttgaaccaggtgaattggatttttaaattatgcctcccaagccatgtacttctaaaactcctaaggatcccaacgtcaccttcaaggttgagttgattgaatcaaaggtgccatctatctcaggctacacgagcaagatgctgaaaacctgtggaattgaacttcagaaatcatgccaagttagatcggtacgagagggtgagtttagttgctaaacccctgacgctttgtcaatagtaacctgaggaccagtggtgagaccagtactagtggttcaactagcatgggagcctggagcgttagacatatcagtgaaggggccacccttcctctttgggactacttcaaagactatataaaccacattggagttgccccattccagttgactcccatctcctacaggattcttgattgtttgaaagttttttacaaaatt

SEQ ID NO: 367325 - DNA, 565 bp, Cannabis indica
  modified_base (8)..(8): a, c, t, g, unknown or other
aataacanaattttctaatttttaccaatttcatgggtaatacccacatatatatatatataaaaaaaaaaatatatagaaatcaaaaaaaaattaaaagaaggaaaaatttacataaaaaaatacaaaaactcaaaaatattacccttatgcttttacaaggctactcatttttatattttatattattttatttacactaatacctcttacacatacataatattattataccacattcacacactatctacttttcctcattttctatcaatttttgttttcagtttcatttcattttttattataactttttgtttgaaaacatctctcacgatcaaaactatttttgatccaataaaaaaaaatatttcgtccatctttcttaactgtcttcctttatcacctgaccatattttttttctccaatttttttcttctttttttccattctaaaggcaaacgattcattgttgaagatgttgattaagactttgctccgcctaccaaaaaaagtgatcgccgtcctgttaagaagaaatcaaaggttaatgttagctgaaaa

SEQ ID NO: 367326 - DNA, 541 bp, Cannabis indica
tttgaataaagattcttctttttccataaataaaggaaaccttataatttttcttatggtacaaaatataaattgaatcctgagaattctattatactttggtataagtattaaggttatatctcccaaaaggagaatagaaagacttatattttaatagaattcttgaccccttgatttaataaattttagattttgtaaaggggtaacaaacaaacataaagaaatcaagtgacaaaataaagtttcatctctaagaatttatgctatattttggtagatctttcctcatggtttcatggaatgatcaataatagtatcttgtctttagactaatgaaacttattttgttcataagggcattaatcttcagacgttatttcttttgaattttcaaaaccatagttgactaatcaactaggcaagaaaattatagtcgatgaaactaactatggtggttaatactaccatagtaggtttgacaaatcaagtaagtaacatctaagattattttgcacaactactaaaagaatgtaatttt

SEQ ID NO: 367327 - DNA, 834 bp, Cannabis indica
gagaagtgggcttcatatgaagttgaggcttccccctcgaaggttggtgttagagggaaagggaagaagttaaaggagacattatctgctgagccagggattgagaacaatgaaggggtaggggatgttcaagtttctggccgttgctccttcgaacgtttgggtagaatagtcccacttctcaacgacgctcaaaaagaaatggtcacaaatgctggtttttctacattcttaagggaggatgccccgtacatcgatgctaagatagttagttggctcatcgatcacgtggatccaaccattctcggctggagatatttggaagaacgatccaactatcgtcgaagctgtttgaggatgtcatgggaatcagggatgggggagaacctgtggcaaccgaaagtgaccgtgacctcgttgagtttgaccaaattttaaaggccaaggattataggttttccctgactttgctggagaatgagctgaaggaaagcagcgagagcaattacctgtttctcattaagtttgtgcttgtttatattagaattgtcttgctgcccaagaatggtaccgaggtcagcactagctacatgcactctttagttaatacaaggtcaattaagaagaagaattgggcgactgctgggtttcgatatcttatgagctctctacagcggtacaagactaagaacacgaaaaatgtctccggatgcaccatatttttacaagtaagttttcgaattttttgtgatggtaggaattttattctctcgtgtactgcggtgctaatagatgtatgtatttttgtttagtggcagcttgtatatttgatgc

SEQ ID NO: 367328 - DNA, 526 bp, Cannabis indica
gcgtgcatttaatgattatgagctaaaagcaagagcatctgacttggaataaaatgatttaatagttttaaccatgaaaaaaaaagaaaaagaatcacctgtcccaattaccttatcccagccttgtccctccaataaataaatgccacatatttttattttctcagtcaattaattcacttaacttttttggttacttccgtttcttgctactctgttagctccattaccccataaaaatatatattttttttaaaagttatattcattcacataaatatgtgatataataaatattttcacaatttttttttttactaaagtcactaaaatcatttctattctattaatttgctattttttttgaaattattattattataaatcatgtcatatttcaatgaaattttgagatgtattttgaaaataatctacaccttatttaacatgtaataatgaaaataaatataaatttatttattttttcattttgaaattatacgtccttattttgttaatgtaaaat

SEQ ID NO: 367329 - DNA, 1273 bp, Cannabis indica
agatgataaattttctaaaaaaaaaaatttagaagtaaaaatttaaaaatgtatatttaaattattatggtctaaaaattattaaatagtgataatttttattttttcaaattgaagtagttattttttcaaaggggtacaattcaatgataaccgaccgtcaaatattggacatctcattgtgatcggatcggattggatgttattttttaatatccaattggatcggatcagatgttggatggagtgtctaaaaatccaatacatccaacatccaattaaactaattagtattttcatttaatttggatgagtaattagattttataatgttatacgtaaaatatacgatataagcctcgagtatatttcctaaagattatttttgtatattttttatttgttggagcataatgaataactttttagtctattttgtatttatatttattgataatcttaaataattacaaggtacatgaatataaaaaataattaaactaaatttttttttctaaaatgtcaaaacagataaaaaatatacaagaacaactttttttttattatttatttatttatttcgaataagataacaactttattaaacaaaacatccttaacatcatccccataaaacatatgaccagagatagaataagatgcaaagaaactaaagaaagagtcgacatcaaactaaaaacaaacacaaagaaactataggaagagtcaacatcaaacttttacaatcctcacgaagtaagagagcattggtgcacttccagcagtcaagcgataacgaactgcttgaaccaacaccaaacaattggtttcgagcaccaccttcctacacggctgctgctgtaaccaacttagagcttctttgagactaatactttctccaacttcatgctgaggagcacttggtttacacaccgatcgagcctccaacaagttgccattattatctctaatgacaaaagcaaaactatagcgacatgtttcagcaaaaagtgccaacatttatgttttccataagagtttttgaatttggtttttattaaaatatttttattttaaggaaataaaataaataattgattttttgataaatgaatattttatatttattgaacatgaacaaaattaattacgtaatattctatatcttgtcagatttcaacattcattacctgatttgattttcggaattaattatcaaaatattctgacaatttatgtggtgcagatactaatgaagtatctcacctataaa

SEQ ID NO: 367330 - DNA, 647 bp, Cannabis indica
ctaagcaaactctatgaacaaaattgatattgctattaaattacatgtttggcacgtggtataaaattaggtggtatacttgttttgttcaaattaggtggtatacttgttttgttcaaatatatataatatttagttacttttttgtttataatttataaaagaaagggaaatggtacttttattttgttcatcttttctaattatatcggaaaaaatatatattttccacaactcaaaatatgatttagaatttttcgaaaagaaaaaataaccccaagttatcttaaataataaaagaacatataatgtagcctaaaaattaaaaaataaaatacataaatttaaagttatctgatcaaaataagcaatttaaatgtgtttgagaaaaaattatcttaaaaatagtttttttttcttactaaaatgtaactaattgatatattatttacattaaaagcaacaaaaaagttgccttttttaaaaacttgcaaaataatgaaattctagaagcgagaatttcaagtttatttcatttttgataataattttgaattttgttatttatgctgacgtaacacatcggtattagtgtaaataaattttttgaatgtttttttataataaaattaattttaagtataata

SEQ ID NO: 367331 - DNA, 578 bp, Cannabis indica
ctgcaaactacgtaaaaaacctggtgtcatcattactattattatttttcttaaatttcttatggtatctgtgtttaatttattacaaaataaggctcattatttgttaacaaaaatctgcgttaacagtttggtgctttcattaagagactacgtgataaaaactcaaaaaaatccttcctaaccaaaagaaaaaaattctccatggctagtcatgatcaaaacgataatagtcatcctaaagagactaattgtcgtcctgggaaagtaccaatgggttcatagaggccacccacttcaacaacaacacgttcaagaagaagccgacgtggtcatgatcaaaactcagaaactgggaatgaggaaatcaatgctaacacttgttatgtacctagaagtgaggatacatatgatcccactaggtatgtaccattagttgaattgaaaaatcgccaattccagcaacgtctggctgagtctaaccaagaaacactgagttagaaagagaggcaaccgcagccagggcgactcaaggaaacgctacacaaaaccaacttgatcctggagtgaggaggcca

SEQ ID NO: 367332 - DNA, 969 bp, Cannabis indica
gttaaatttttcctatttagtgaaattgtgaaaatttcccttctttttaataaaaaaaatatattttacgtttaaagatttttttatatatttttacagtttttcataaaaataatacgaaaacaacaagaaaactacatgaaaataacatctaaataatatcaaaacaacaacaaaaaataacatacaaataacaaaaaagcaacaacaaattaataagagtacaacataaaagaccgtattttctgtaaataaaataaaaaaaaatcataaaaatatttaaaattacgtgaaatcttatttttataattttttgttgtttttgtgtatatgtgaaatgatcccttttgaaaattacacaaatacttccacacggaaaaaaaaatacagaatctaattttttttttttggatcttacaaaaatacttattattttgttatttttatattttcactgtcacatttttatttttttatttttatagtactaattttttaaaaaatatagtattaaagtttcaaaattacaaaaatatagtgcttcagtaaaataaaaaaataacttaaaaacaactctaaaataacttaacaaactgttgacgcagtttttcgtcaactgatctaagaagatcgtaaaatatatagaggactgcaatgaattaaacttgactaataaaaccgcaataaattaaattaacaccagaaatttatattagttcactccccatatcgcgatggtaatgggtaggggtgttcgcggtgcgggtggtgcggttttaaccattttttcaaaccaacccgcacatgcggtttttccaattttccaaaccgcacctgcaccgcaatactaaaaaaccgcaaaaaccgcaccgcaaaaaaatgatgcggtgcggtgcgatttttgcggtttgaactatcacaattttttttttgaaatcatcgtaaaataattaaactatcattaatata

SEQ ID NO: 367333 - DNA, 429 bp, Cannabis indica
atcaatatcactattgataaatgacacattagtaatccatttgatataactcaagaccataatgagtagtcagtgtcatgcttgtcctgaaatagtctttcaattaaaccaaaagaaagtctattcaaaataaatatatgttttatgagtaattccttacatacaaggcataacgtgtatctctccacattacaatttgcatccctcttgattataaatatttatttataacccattgattttacactttatagcaatagaaaaaataccaaaactttattgtctcacatcaatttgcactctttatttatgatatcaatctagtttcgagagttggaaccttcatggcatgataaaagttgattggatcatcgtctatcattccattatttccttatgtcctttgtaacaccctaactaccataggcg

SEQ ID NO: 367334 - DNA, 616 bp, Cannabis indica
tgaataataccttatgatgattttggtggcctgccatgatatttgtttgccccgtattgctcatactcttggcctttgcttcttttatatactctctttttttttagaggaaaacttgtgttgcttctcttgtactgtagtatgcataatttcatatacaaatatatatatatatatatattttatgaattgtaatgtatatggctgtggataaaaggagtttcttttgtgtatgtgtttatgcagattgaatggaactccatactatgggccataaaagaaagacagtttcttcaactgtagagagtgcagtttcatctgaatgtgatgacggtccaccttctcgtgatgaattatttcctattatccatgaggaagacggggtttacctttatcaggactcagcgagagatcatataatttctggccaagatcttccattgcgttgtcattatgaaggcaatgattttgaaattgactatcgatcactttctggcgcaatcaatggttggaaggaatggagtacttctgtgttaacacgttttcaggcacctttgaaatcagtgggtatattatcttccatgtgggtatgctctggtattgagatatttcgtga

SEQ ID NO: 367335 - DNA, 709 bp, Cannabis indica
ggatgttcataagagaataaatagtttgtctcttaatggcatgtaaggatgttcataagagaataaatagttttactcttaagggcatttaaggacgttcataaaagaagaaaaaaacttttataatattacgggcatgatattgcaaaacttatgtaaagaatatatttataaattaccattatttaaattatgatagattatgttttgttattaaagtaatgtatagaggaataacaatatttaaattaagttgtatatgttatagatgttatggtttgaccggtaaggaaagattaaatacttgtctttgggtccacacggtagataggaaggcaacatgttagtaaatgacataaaggcctaatactctcagtgtttgaaaagtaaaattcgaggacgaaatttcttttaaggagggtagaatgtaatacttagtttgagtatgttatgaattgataaattgtgtgtgtgatataactaattttatttgtctagatgagatttattatttatagatattatgtatatatttatatttgttccatgcatatgatttgtgaagtttgaatatacaaatttaaaatcttttagtgtatacatatttgaaggagtattgatgtgatttagaaataatataagtacattttactatatgaatgtaattgaaggttttttttttttttttgtattgtattaattatttact

SEQ ID NO: 367336 - DNA, 607 bp, Cannabis indica
gcagatcacaatctgactgaaccactataattctctgttttattgttattttccagccttcgttgattgtttcccattcccagtcgagtactcgccattctaggttgaatactcgcacttgtctttacacctaaatttcttcttgttattaacaatacaatataatttggtgttgcgaaattcactcgacaacacttagccaaagctatttccaagaaatctaacactcaaccaaaaagttcaaccctaacatgcaaataaacagtaaagacatagagtattgtccaagaaacttacatgaaagttgagaactaggggttagtgttgatccacggtaaaaagcggattggcagcgacggagaaatagcagcaagaaatctatggtttctgaaattttttcacaaagatgttcttatgaaaaaaaatggcaaagtgatgaaagtaaccaaatgaaggacaaaggctggcttactctacaccaaacaagcctcgtttactctgcaccaaaaaaggcttagggggtaaatgttgccctctatttcgcccgaaatacgtggaccagtgtaacgacgacacgtggagctgagaggctcaactcttaaagaaa

SEQ ID NO: 367337 - DNA, 509 bp, Cannabis indica
tatgatgggaccacagatccgatctcgcatttaaataatttcagtacaatcatgtgagccaacaatgttacgaataatctacgttgtattttgttccccacttcgctagttggagcagcaagcagctggttcaacaaatttacccatcattcaatcacctcttgggaacaattgtctaaggatttcaaaaaaacagttccaggccgcaagggataggcgatccgaggcgtcctcactcactaacataaagcaacagtcgggcaagacgcttaaggcctacttaagtcattttagcacaactgctacgagggtgagaaacctggacgatagtacccagcttactactgttcaggcaagcatcactactgacctctccactgctagagtcgagctatgggatgacgtacagggtcacccagtaaaaaacatcactgagttcaatgaaagagctcaagtgtttgttcgaaaagaggaagcaagaaaagagatgaagttgttaaagactggct

SEQ ID NO: 367338 - DNA, 510 bp, Cannabis indica
gtagtgcccccacacacatcaagtggtacctcaatcatagtatgtaagactgtggataatcaacatcaaagaaggagagaaggagatccagattcagatcttgataatgctctgctactgaaaggaatcaagggctagagatctggaaggagtcataatattccactgcacccaatgtaaggttttcttaaactcttatgtgtttatttcattgttttagaattcatattaggctgttaatgaaacatatttgttagtaaatctagatcctggtaaaatatttccaacagagaaaacttgaggaactcctaaaagtttgtagttgaccgagtttttgattgactctctttggttgaccaaacctttaatggttctttgagtaagtaaaggttgacttgggctcaagatattggacctgaaagaagattgcaaaaatttgtgagttataataatatcacttttattatgaccgcataatatagtgtaaaattagaaaaatactattttttt

SEQ ID NO: 367339 - DNA, 808 bp, Cannabis indica
attgtattacatacaacgtactatgaagtacaatatacttttcttacctttaatcaaggttcataaatttcggccaaccaaagtggagaactatccccgatgatcttgaccctatgtcacaacaacgataaaccaataagtgttcccaaaacactgattaatattcacataagacaatctagggttttccaccgaatcccgcagtataaatacaataaaataaaacttatattttagctctaaaacatacaccatattgtagagctcgtatcaagcttcgaaacggtatatagaatgtccaaaacgaacacccgagtcaaaagttacgacaaaaatacgatttatgatctcttaggaatttttaaaaactataaaactcgaaaatcccaatttttgcactcaccgaaacactaccaaaacttatccaaatcactccaaatttcacaagacgcatatatacaataaatattaccatccttgcgtaacagaaattaaaattgagccattaaatgaaaaacgccattaacgttcggactaagctttaaaaaattcaaaactcgatttctaactcaaaatcacctcaaaattcaacaagtaaacatcgatactagtcctataggtaccaaagaacaattctatgaagtcagaatttcattaactattctaattcacaaaactcctatatgaaaccaattgttattttaacttaaaacaaaattaaaccataccttaagcgtttcctcttcaaggatttactatcctgctactaccggagcttagatctttaagttttggattgaaaatcaag

SEQ ID NO: 367340 - DNA, 566 bp, Cannabis indica
cataaaacccaacagaaacatgtcagcatttattctttgaatgctcggttgcacaccaatgtctgatggaagtcaagagatggctgggagggcatgcctaaaccagcaattttcagcaacttctgagatggatagggagatctagattgtctaaattcaagaaaagtgtgttggctgctgctacagtcaggctggtgtatagcctatggagaagccgaaatgatgcaatctggaaaaaactaaatgtcaatccagttcgaattgttgaagaagtacagtggaccaccaaggctcggattgaaagagttttgcccaaaaaaattaagagcattgacaaagagttggttttttgcattatagagcttatacacaatatgttttagggaaagattatacaattgtatatagaattcggcccttattgggtgcgcatactttagtaaaaaatttcgtattatgcaatacaattcattgatttatcacaaaaaaaaaaaaaagttagaccatgtctaatttatgaattttcactaagcaagggcgaaattctaaagaaaagagattctagg

SEQ ID NO: 367341 - DNA, 846 bp, Cannabis indica
cgaaaaggcaagtaagtgtgttacccctttggcaactcatttttgaggaagatttgataaagcaacacgaggatggtagacgtagaagtgtcctacataacggtgcacaattgtttaatgttggaagaggtgctgacggttctgactttgaaaaaggtggtgatgtgaacttagttgagagaacatgcacttgcgccatgttccaattgttaaaaattccttatccccatgcatgtgccgcagcgcttactcaaaatgtcagtctctacgctctgtcatccccctattacacaaatgagacatggaagaatacttacaatgcaacaattaatcttgtcggcgaggaggatgaatgggtgcttccaaaatacatgcagaacatgagaatcgatgtaccaatggagaagaaacctgtaggtcgtccagaaaagagcaatgcaggaagaacacggactaaccgatttccatcgaacggttaaaaagtcaaggaaccacgcaaatgttcaaactgtggcacattgggacacaacaaagctacattcaaggcaagggtttgagcatcattttcgtttttaaattgcatgcattattattattatggtttatgacatgttacttgtagttttttatgtatgactatgttttatcgatattttttcgacattattttctgtgtatgtggttgtttaacgacgtatctcagattttgtatataattgtgtatttcacgacactttgtgatatgtagcgacatttttgcgatataggaagaaattttattaattctagaaaaaattgaaaaattgcgacgtttcacgactatagtagcgacatgttgcgatatag

SEQ ID NO: 367342 - DNA, 640 bp, Cannabis indica
agttctatgagtggatgcaataaggaattaataagtcagtgaatttacctggtaagttctttgtctccttattggaagctcagatatatacaacttcctcttttatacaagaaagtgtaatgatatgggaagttatatgtgactaggtgttgtatggacatttacaacatcctcatttgtaaaggtagaatgtgtggcgtgttacgaggacattgattgtacattacaattgtgatattttgtttcagtgttaagagtagttgattctattgtgaacttactgaacttatgtgataaatatcacaatcatatctttctctcgaaacttgagaagcatcattgctccattaatggtgatgacgttccatatgtagtgagaaagttgtgaggtcctctaccagtatcataacacgcacttacagacaacatgttaatgactacactgacacggcttacctgaacatatgtactaagaagttatttcttgtttggattattgggagccaaagatgtatttgatcaatgggagtcattatttttcatgtatgacagacatgttgagaattgctattgattgttgaatacatgcacattctggataactctttgatgttgtgtgtgcacacttgttgatgcgagc

SEQ ID NO: 367343 - DNA, 886 bp, Cannabis indica
ggaaagaaagaagtgcgtaattttaatgtgtctaatcaaccaggcaatagtgcagtaccgacatcttcacagaattcactacacctaaaccatcaattattgcacctctcatgtcttcatttacactttttttttatatgtagaaattgatgtttcactgattcaatatttatatcgctttctcaaaaattaattcattataaattacttttctaaatttttaaacctttcattttattaaattacagttcatcacaaaaaatacagatgcaaatcctaaagaatcacgcaacttccattttcttcaaaaacaagaataattcatatattctttgaaaacaaacataagtactttaattcaagtttgatttttgtcataattattaatcatgactatggaaattaacaatacatccaaattaatatttaggaaattcccattcatccaaaataaaataatttatatctttatccagcatctataaataaaatttattgtggtcataacatagatcaatggttctaacattaaatggagatctcaagttcaaagttttctcccaaatataaaaaaaaatggtaaatggcggtaaaactttttaaaaattttaatttttagttttcacctaattcccaaaacttaaatttgggcggtaaaactcctaatactcgtattctgttagcaatttaacattttttcgtccattttatgtgttaagtgttggaaatattttaccaggatctagatttactaacaagtatgtttaattaacatcctaatatgaatttctaaaacaataaaataaacacataaggatttaagaaaaccttacattagatctctagtccttgattcctttctctcctggatctctttctctccttc

SEQ ID NO: 367344 - DNA, 543 bp, Cannabis indica
tcttctcattctatcaattaattggttgacaaaaatctcggtcaatagataccaatctgattctcattgatgtagtatgcattaatatttggactgaaatactcaaagtaccctaaaggttgggaatctcaagctgagtcaaaatcattcaaagatagacactttcgtgaaagaccttcatgcatcaccattgacaacttaaagaataaattaaaacaattacctatttcaggagatagcccaatgccttcacaatccatggacatataaacaattacttgatgttccataaaattcaacgtaagtatatttataagtctattatacacgctttcttagtcgatatttattgcaaacatatatgtattattgatttcaaaaatttcttataacaggggagattgtgtggtatatgcaattaagttcattgagttcgagatggatggtcttagctttgaaagcctatcagatgatagaatggcattctacagaaagaagatggcagtagatattttttgtcaacaataggacccttagtaattt

SEQ ID NO: 367345 - DNA, 1011 bp, Cannabis indica
atttaaaatatatcttatctagaatttaaaatttaggttgtaagagaatatttgaaaaaattcaaaaacctaacaaatcttctaaatatcctaaattctaacttaaattcaaatatttaaccaattttcaattttcaagtttatttaaaaatttaaattaattaaatttctaataagataatataatataatatcttgaattttaaaatttagggcattgaggtttccagtggcccttttcactgcaatagaagcattttccttttggctttccatcgggattagcagcctttttctttttaactattttcacagcttgaacaggcttcttgctattcttccacttgttcttgttgttgggtttggaagtagatgcaatgtttgcctcagccttagccgcaccattagcattcccagaactaggagctttagctcttcctttctgtggtcctccaatcaaattttcaaatgtctgaaggttgttgattaactcgtgaaagtcaagctccaacttgttcatgacataatttgaagtgaagggcagaaagggtggagtcaaactgtttaagatcaaactcacttgagttgtctgatctataacaactccatgattctcagcttcctggaagtaactagtcatctggagaaggtgatcacgcacgctctgatgaggtttcatctgtgaattgatgaaattcttggtcgcttcaaagcgagcttgaattgatgttatcccgaacagttcagctaactggttcatgatatatgcagccgtgagagtgtttgcaaaccttattttcaaggtgtcaaccatgctagacaacataaagtatcgagctttatagtagccattctgccaatgctcaaacttttcttttacttcctcggttgctttctcactcggctgctcaaaagtctcttcagtcaacaaaaataaagcattttcaccgatgagagcaatgaaaatgttctctctccatttgataaagttagctccattgagcttgttat

SEQ ID NO: 367346 - DNA, 622 bp, Cannabis indica
atttgacgtagtggctggtcggtgtatacccgaacaggatgagcttagaaagaaggcctcaacttccttgttgccaaaataaggtagtaagtgagtttttctattaacaagtatcggctctcggcctcaatgagtcttttactgatgtaatatacagggtgttgtacgctattctcttctttgattagtacagcactcgcgacatgttccgtgacaactaagtatattcccagttccacaccgtctagaggttttgagagtactgaaggttttgcaattcgtgcttttagctcttagaaagctttttcacactcctctgtccactcaaactgcttatttcatcgcaggatgttgaagaatgggacacacttgtatgttgactttgaaacaaatctgctaagcacaatgatccgaccagttaagttttgcacttctttggtttttgttggcgagttcatatccaggagggcttgaatcttctctcgattagcttcaattcctcaggcattgacgatgaagcctagaaactttcccgagctgagtccaaaggaacactttaagggatttactttcatattgtattttttgtaggactttgaagcattcgtccaggtcgtctatg

SEQ ID NO: 367347 - DNA, 708 bp, Cannabis indica
caaacatgcacttagtttttttttcctattttttttttcttgtgttctttaatgcatatattcttcatttatctctaattctatttgattttttgttctattaattcttgagtagtagcagtaatatcaatggccatcatcaatacctcaatttttaattggtatttcaatattttctctacttctttttttctatttttttatagatttttaatgtttctctctctttaaatatatcttcataatttaaagaaatacagactttttttttttatgttagacaacttgaccgttttcgatgacttcgaattatttatgatttatttattagcatgaattatttgatgtaaaaaaattaattttttattctatataaacaattgtatgatattttttttttagaaattatttagaattttctatattgatttactattttttaataaacacatattacatagaaataagtttaaaattatttcaattaatatttatattataatttaactgccgcacgcgaagtgcggcctgtctactagttttttatgtaaatgcgacattagagcatctccaatggtaatatttttaaggatgttaaaaatttacacattatttaaaattataatattttattttatttcttttccacatcatttttgacactcttacttttaaaaatattttaatgcataacactttttaaaaatg

SEQ ID NO: 367348 - DNA, 753 bp, Cannabis indica
caaatcataagcgcattattaaaaatccttttataaggaatatcaaatattctttttattacaaaagtatgatcatgtaatattatatataaatttggttgggcatgtaattagttatagaatatctcaataaaaattgatggaattatcaccactttattgtaatttgtgagccattaaaagttcacttaaaatacaactccatttcttaagataaatcttgagtcacctatgttagccacatgaaaaaaaaaagattcaattttcaatgcatatgcttagaaaaatattatcacaggtttggaaacaaaaaacaaaacaactaaagttaaaaacgtaaaaaacaacatataaaatattagtgagtgaagaaattcttaaccaaaaaaaaaaaaggaccaaacttgagatatcacattatataaccattttttctttattagaaactgtgttggattggatatcataatctgatgttgctcgaaaaaaataggatgcgagttgaaaaaaaaaaaaacgcttatgttatatataagggggcatgagagtttatttgtaattaagtattagcattattaatattaattataataattgataaaagaaaggaaaacgacgattaacaaaaagtgagttagtcatttcacattcttgatgctttttattaacggttacaaaattgttttgatttctcatttaataataatataaagaaactatttgtattctttgacagttataaattaatataat

SEQ ID NO: 367349 - DNA, 893 bp, Cannabis indica
aatgtctataaaattgtaattttcttccagtttcatcagtacagatttttgttattatcataaacagggcacatataagactcagattatagattatttggtctggacggaaatatgtagtatcagttacttccaaatcttcatttaataaatttaaaacggagtttgtattgacgaaaatagagaaaaattacagttttacacacattaggtacttatgccactaaaaaaatcattaggtgtataccacttataaactcaaaactttgagtacttatgccgctatttatccatatatatacttttgtaaaagcctaaagtgaataaaaaaaattaagcataatgtggtgcatataaataaaaaggtaactattcaatggttacatttttattgtaaccatcatggttacatttttctttgacctgtaatagcaggttactaataggtaaacattccttttgttagaattaattaattataattaactattttcttaaaataattaattaagtattttacaaaacctctttcagcaattaatatttataaataatttttttaatttatatttaaattcttactctaattattttaacaattaagccatttaattataatatttacaataaaatttatttttttacaaaattaaaacttctttttacacaaattaataaattctcttcttataataaatttttaagtgatatttaattattttgttacaattacatgaactaagtatgaggcctcaagctagtcaatcgataacaagtgtagccatttttttttaaaaaaaaaaatcttcaacttatttcactttctactttttaaatatttaaataaaaaaattaaataattaagtgtaataatttaaaattaagattacaag

SEQ ID NO: 367350 - DNA, 603 bp, Cannabis indica
cctatcctgattctgggtccaggtctgggttattgtgtgggtttggatcgcgttctaggttcgggttcgagttctagtctcggttcgtgtttaggtctctgtctgggttttgatttgggttcgggttttggtttaggacctggtcctgttcctagtcctagttcggttctagttccatttgagattctgaattcgagtttgggtttgagttcgggtcgaagttcgagtactgttttgagtatggattcgggtccggatttcagtctaggtccagatcacgcttcgggtgtgggttcgcgtcttgggtcttggtctaggtttggtttgtgtcccaagttcaaatcccgatctgagtttggattcagttctgggtctaagtcctttgttttgatcctggactatgttcgagttgggtccaggttggggtttaccttttggtctgattctaggagtgggtgtttaagttcgggtccgagtctttaacctggtttatgtccaggtctggaccccgatcttggtctaggttcgggtccaggtccaagtttggttcccgagtgcgggtccaagtttggggctgggtcaggatctcggtccagatctagg

SEQ ID NO: 367351 - DNA, 859 bp, Cannabis indica
gtaattaaatccctttatagtgtaaatcatccatatagaggatcattgatcaaattagtcagtgaatttaagttgtaaattcttgatctgcttattggaagctcggatatatagacccatggtccccacactagttgagataatattacttgtaagactcatttaattgattttaattaatcaattataattctcaagttagactatgtctattttgagaatttatcacttattaagggcaaaacagtaaatagagagtttgaagggtatatttattaattgggaaactttgattagttttattaataaataaaataaatgaaaatatattatttgataattaattataattattaaataattagatttgacatttatgtggttaaatgacagaattggcaatttttgagaaaatgggaaactagaaatgatgaaataggaaagttggaaaagtggaaggcttgtttccacaatgctatggccggccacctttgcttcccttttctcatttatttttcattttttaatgccaagtaattcaaccataaccctatgtggtcttctataaatagaaggtaaaggcttcaggttttacacacactttacaacattattttctttcactcaaaaacactcttgaagccgccactctctctctctcttccttctctgtttttcgaaatccctctaagtgatagagtagtgcccacacacatcaagtaatacctcaatcatagttaggaaggctgtgtagaattcagagtcaacaaagaaggacattcgggctcagatcttgattatactctgcgacagaaaggaatcaagggttagagatttgagtgggaggagacatattatt

SEQ ID NO: 367352 - DNA, 612 bp, Cannabis indica
attgttattattacttttcttgctgagtccttgtgactcacgagtgttatgaggtgcaggtaaaggcaaaaaaaagctagattaaccatgaggtggcagtcttcttcagcaatgtacatattgacctcaccggcctgcttgccgagttgccagaagttgttttggactagctgtatctgctatgtattttgattttatgtttaaatggttgtcatagatatttttttagcaaaactttataacagggattcatagaacacaaattttatgcttttataatgtccgtttttagtgtttaattttagtcaagtttctaatattatcacggtttttaataattaattattttattagtattaaactagtttataaaatcatacacgtggcgtccttatagataagggcgttacaacttggtatcagagaagccatggttttaaaggtcttgaagacgggtcgaatatgtacatttgctgcgaggacaagtcgactcgtggtatagtaagtgttttatattatttgctattggattacctgcctaggctattataaagtatgttggaaagtagcatacagataattttgataagaatatgtgtatggtatatgcat

SEQ ID NO: 367353 - DNA, 601 bp, Cannabis indica
ggtctgggtcttggtccaggtctcattcccgatttagacaccgattatgggttgggtctacgcctcgggtcttgggtcctgggtcccaggtccaaatctagatccttgtctagttctagctcatgtcttgggtcatggttctggtgtcaggtggatgtttgcgtctaggtttgggtcttaggtcctaagtcatgggtccaggtcccagatttagggcaggatcctaggtcccggtccgtgttcggtactggtccttgtcttgggtcttggcttggtctaggtttgtcatggtttagttctaaggtcctaggttcgagtatcgggtccagggtcgccgtcccggtcccatgtcccggtcccggtctcggtctcggtcccaggtctcgatcttggtcccaggtcccgagtctcgatcccattcccaatttgggttctagtcctagtcctggttcaggtcttggtcctagttcgggtctaggtcccatacctgatatcggtctaggtccccgtcccgagttcgagtccgagttcttgtacgagtccgagtctgggtctgggtccaagtttcagtccgtgtatgggtccgggtcttagtctgggt

SEQ ID NO: 367354 - DNA, 641 bp, Cannabis indica
caacttgaaaattgttgttgtacttgccttcaagcatggcaaacgatgagtttgaatcaaagtcagtaccaacaacataagactttggatgatgagcttgggaagaagcatttcgtagctcgtagaggatataatatggtgttgatggaatatatatatatatggatccattggtggtttattagtcaatatcattaatgaagtcgaatcaatgatgccatgttcttcttcatcctccaatgtcacagtatccacactttcatctaacaacccttcttcttgttgctcactctccaattggctatccatacccttacttgtgatttcatattcaatgagttcctcttcaaaaggatcttgatcttcaattgtaggctcattatcttccttctattcaactaatgtcccttcttcattgtaccaataactctcataactttcattattggagttattacattccgaatcatgaaccattgaattatcacataaggatctcaccatgttcgttaagcgattaatctctcttgaaagtgattgtagaagtgcttttcagttggttggggtgagtttgggcaatatggtgggtattggtgactctaaccctgaagtgatatatcccaatgccagtcgtaatcaaa

SEQ ID NO: 367355 - DNA, 846 bp, Cannabis indica
gcagccatagttttaaaggtcctgaagactggttgaatatgtacattttctgcgaagacacgtcgactcatggtatagtaagtgtttatgttatctgctattgccttacctacttagacaatcatagtgtatgatgggaagaagtagtatgtgaatagtttatgcatattcttatcgatatcgtttgaattctaaatggttgaaggtttttgggttacaggatattagatcatgcagcagcagtctggccgtttaaactgcgagctggggctcggggtaggtggtggggaagagcatcttccaccccctcaggactgggaacaattgtatgttgccatgcaagagatgattaggcagcaaggggagcagatttgagacctgagggagcaacaggctcgtcctgcacctatactagcacctcaggtagtgccacagaatatgggggatcatatggaaccaatttatgagcggttcaggaaacaaaatctacctgtgtttgagggtggcccaaacccactgaaggtagaatagtggatgagtatgattacttccatctttgattttatgcgggttgaagataatgatagggtacggtgtgatatctatatgttacgggatgatgcccggatatggtgggagattgtttcccaaggttataatctgaatactatgacttggaatgcattcagggcactgttttatgataaatactataatgaatccattcgtgctgctcaggttaaagagtttgcacgattagttcagggtagcatgactgtgactgattatgctaccaaaggttatagactgaccaagtttggtcctgatgaagtggccagtgatgct

SEQ ID NO: 367356 - DNA, 946 bp, Cannabis indica
ccctatctttttcattgcatatttattttgacattgaggacactgtctgattttcggttgggggtggtaagttctggtgagctttcatttggagaattacattgttgtgttgaacttttaagtcaaattttctcaaaattttctaagcatgattgaaatattttgtttgagttggattttgctatgtttagctattaaggagtgattttcagagttctttaatgcactttccaaacatgtggtaagatggttgttaacacaaatagttgagaaaattttcaagcttaaagttttccatattttttttgtaagttgtgagagttgagaaaacgactttttgaacttttattgatcatttgagttggtcaatttagatttttagaatttaaacacatgacatatactggagggacaatttcatttgttaaaagagcctttgttgtaatgttatttttcatatttctttttattcatgtatttttatgttgcctcttgtaaaaaaaaaaaatcaaaaaaaaaaataaaaaaaaattaattaaaaaaaaaaacaagagcaacatttcgttattgtgtttcctttatattttattgtcaaaaaaaaaaaaaaaattagttaccaataaaaaaaaaagaagaataaaatgaatgaaagaaacatcacttcatgtgtttacttaaaaaaaaaaatatttaaattccaaaggttgtttgtcatttaaattctaattatttgatttgcctatcttgtgatcaatatttgttcaaattgtttgtcctaaaaaaagtttatcttctctcatttgagctttaattgttacaattccaactccaagagtgtcacctctcccattaaaaaaatactttgaatgcctgtgaggaaattggagttgagacctttaagcttttgaagtttttcaatactatttgtgttatggcttgtggtaag

SEQ ID NO: 367357 - DNA, 560 bp, Cannabis indica
cttgtatttggccaaaaaaagtgtccaatataaatagaatttggtttgaaatcttataaatattagagattatttaaattctctagttggagaatgttatatagtgttctacaaattttcttagagtaatgaaaatcacttgatttatcaaaaaaaaaaaaatataggaacaataatttataattaatcacaattttttagttttagtcacaagttttattgtgactgaaaataaaatttttaaagtacgtcgtgtagtgcagacgatttgtgcactgtagacaatttaatgaacaaccctaatgaaaatacgtaaatacgtatatttatgaatgtatttaattaaattaataataacattaaataagctatgtcaattaaaaaatatatatatttactacagtacccctcacattattggagctgcagaaaagtcaaatttaaactgggacacacatctgtgtattagggtcgagttttggtcgacttacattgtccttcacataaacaggaccatcattttaataataaatgtaatgagagaatattaaataattata

SEQ ID NO: 367358 - DNA, 508 bp, Cannabis indica
aataatactttgactctcgcctacctgaacactgtattagtttgttggaaaccttggaaattatttaagatatgatagttttgtattttcacatatctttgttgttcgctaaatgcttaattttcgaattgtgtatgaatttatatggaaccatgttggtttttgttattaattgtatttgtaaatttcgtgtaaaaataagaataactttgcctctcgcctaccgggacatcgttggattcttattttaatcgaaattatcctaatttttcctcttagcttattcatttcgaatttgcttacataatatatcattggatgaatgtttataaatcatctgcttatgatgtcattctattttctcttaagaaattgaatggcacatgtgattatattcccgatattttatcccgaaatgatataaatcctcaatcttagtatctcgtacttgtatatgcttactttaggcaaatcagacttagagttagattagtagttgtggtccaag

SEQ ID NO: 367359 - DNA, 915 bp, Cannabis indica
cccccccatgtggcccaaattatcctttctattcctctcccccttaccccaacccaggatgatctgatctgggaaccttcaatttctgggatttacacagtcaaatcaggctatcacctcagtttttcctctactagcccacttgacattccctcctcctcctctccctcgccttggtggaaaaacctttggcatctttcgattcctcccaaggtgaaacactttgctttccgagccacaaaccaaaccctccccactgcaaaaaatctagcctttaggaaaatcatccaatccccgggttgtagccgttgtggaaaccatgaagaatcggtgtctcatgcgctgttctactgtcagagtgtccgaagagtctggaaaggtacgcaatttcaaccctacattttttcctgctcttctaaaattttgtttcatgatttagctcaccaaatttatacgtcttttcctaagaacgatgtagatctctttctgtgtatcgcttggtttaattggtttaacaggaataaagctctcaaaggtcaaccatccgatcaaactcatgcaattgtcagtctggctcaaagttttttggcagattataactcgacctcgtcagccaaacctcccctaggccgacccagtttggccactgtccctgcttcctggattcccccagcgcccggcactctcaagctcaatgtagatgcagcagttcccaagaatggtggaaaagtgggtttcggtggagtaatccggaatagtgaaggtttggtagttgcagcctttgcccaaccctattatggaggcggttctgtcgccactttagaagctaaggctctcctctctctgcttcgctggtgtattgacgagcattttttggttcaagaagtagaatcggactgtaaagcagtaactgac

SEQ ID NO: 367360 - DNA, 700 bp, Cannabis indica
aaaaaaatacacaaataccacttacacacgccatctacgattcttgggcaatcatcgcgcaaccacgcaataacccaacgcaaccgaaataaaaattcaaaccatcattaattctgacgactttacctgagaagacgatcaaaatcaatcaaaacatggactgtttcgaattcatgaagaaaaaaaaggtgtagaaaaactactacgaaactaaaattcaactagaaatccagtttaatttgcataaaactaatgtgctgacttcaattttcaaatccgtgagatgcagatctcaaaaagttgaactagacttcccagacaatccaactcaagtataattaaaaaaaattacattaatactatagtaaaatgttcatcttggtgtatttttgttgttttctaaatttttaatggtgaatttgttcatattgaatcatgaagagacatataaatagagttacgtacgtggaaatagtgttctggtttttaatgtttcataacagttgcataaatattttactaacagttatttcgtctaatgtaaccttcggccaatcacccaacaacttttgtctgattgaaaccttcgaccaaccacctaacaaccagcaactatcgtctgattgtgtaaatgatagtgtaagtgatagtgtaagaggtagtttgataattaaaagcacataaaaagtataaatgttgt

SEQ ID NO: 367361 - DNA, 562 bp, Cannabis indica
aaaatagtaataatttattttttaaatttataaatttaataaattggagaaaagacaaaagttgtctagacaaaatataccactaatgtcttgattaagacataggtggcgccactatcactgtgtcctaacacaatgataggtgcctattatcaccaccaatgctaactttatttatttaataattataattagttattaaataaatttacaatttaaatatatttattaattagattctcaaatgtctcttaattaataaacaaatcatgaattctcttttcttttcaattatgtcatttttttaatgaaattcataaacaagacacagtcattatttagaatcctaattgattaaataaatcaattaattgagactacaaaataatattatctcagttagtgtggaaactattgacctatgtaaccaagctccaaataagtagatctgaagtttactaagtaaatttcctaacttactaatttctcctgactctactatagatttgaaattgcactctagattacatagaacgctttatatatataccaaatatagata

SEQ ID NO: 367362 - DNA, 549 bp, Cannabis indica
gagacgagggatgaagagctcaaacatggaggtgcccaatgtgcgagagaaagaacttatgaaacagaaagccatcgccttagacaccgtctaaaagaggcgcaacgtcgaaatgctgagttagaattagaggcatccttgaccagggcggcgcaggggacgaatgctcaaaatcaacctgaacctggagtgagaagaccacgaggcagacctcgtggctcacgaaccaggagacaggaaaaggcccgggaagaacaacccggggaaaatgagacaccccctaagattcaggatgaacagtttgaaaggagacaaccggaaagtaatgaacgagaaatccttcatgaaaatgaggaggatcttggaactcaaccgggagaatggagatcacctactcagaatcaccaatgttattcccaaacccatagagcgaggactcgtacataccgtgacgggggaaatacgaaaaactgctctcgggaggaaggaacagagcgtgaagaagcaagtgtgactttaaggtgatccagaacccatagctgatcaact

SEQ ID NO: 367363 - DNA, 331 bp, Cannabis indica
ttttgggtttgggactgggttcaggtttgggtgtgggttcgggtcattgttaaggttcgggtccagggctgggtcacaaatctagacaccgactacgagttttgtacaagcccatggttgagatccggatcccaatctcgggtgcaagtgtggttccatttctggtgctgggtcacgagctgggtcctaggttcaagttcgggtgtgggtcgggtacttggtcatttttcctagttctgtttcccaggtccctatcttgattctcggtccaagtcccggttattgtgtgggtttgggtcccggtctaggtcttggaaattattttaccagg

SEQ ID NO: 367364 - DNA, 826 bp, Cannabis indica
ctttgatccagttcttaagggacaaccaagatgtctttgcttggtcacacgaagacatggggggaataagccccaccgtgataagtcatgctttaaacatcgacgtcaaaaatttcaagtcagttcaacagaaaagaaggttactcgacaaagaaagggccaaggcattgaaggaagaggtggaaaaactatggaacaacaatttcatcaaagaggcctactacccagtttgggtatcgaaccctgtactagttccaaagccaaatggcacctggagggtgtgcattgactttacagacttacacaaggcatgcccaaaagattgttttcccttaccgagaatcgattagttggttagagcacctgtttggtaagcgggaggtcttgagttcaactctcaatgaaagcaccaaaatgtttactggatttttagccaaccgacgcagagtcgtaataaatgagatttaaactaaaatcacaataataaatgcaattaataacaccgaaattcgtaataaatgtaaataaaagacaccggaatttaaagaggttcggccccggatgtcggtaatagcctactccccttgagttttattaatctgagttgcaaaagtcaagaacaagctcttgattgcaaagaatgagaagtgtttatttttctatgtgtttcagattgcggatccccctcccaggtcatgggtgaccccttatataggggaggggggtcggtgcttctcacttcaggagacgcgaccaacgcggagctatctcaaccgtctccttgattttcggaggcggttggagtctgtatttttaggataatatc

SEQ ID NO: 367365 - DNA, 502 bp, Cannabis indica
tccaatcgttactactcggtcaaaatcatcagatcccatagtacataattcataattatgtctttctactccttctatgagatctcctaagctgatctactgacttaacttagtaacaagttaagtattcatttttgatagatattcaattaaagcatttcttattttcgcccatttacttgtctcaataccttgtaaatttctgcttattaacgcatcacttcctcttaataatctctggaacgactaccgattctgaatcctaatatgaatctttctagcgtactttgtcctcactcatacacttcccgaggtgactccccaaaggattttccatcttgagattaccccaagttaagtatgcttaactccaaagtaagctcatggtaggttatcagaaagtagatgcttctttgtcattcctaattgtatttcttgctttcattctttcattaataaaattcaatttccatcactcccttcataaacctcttgcaattcc

SEQ ID NO: 367366 - DNA, 676 bp, Cannabis indica
aatttcttttcttcacaatttagccccaacttagtgaaacctcataaataaaacatagtataattttagaattataattgattaattaaaatcaatcaactgggtcttacaagcagtattgtctcaactagtatggggaccatgagcttatataactgagcttccaataaacagatctagaattaccaagtaaattccctgatttattatttcctccttacaccatatagatttagaattgcactctcaattatatagaatgctctatatgttccacaatatagatacactatgaaaatttaaccctcgttctaattccaataatcaaagatcctctatagatgatttacaacttctatgtccagatagaagatatagattccatatctctgtttagcgctcccactcaattgtactatcatgttctcaaactgtacttttgacccaaaccaaatggtaggctttaactaacaactcaaagaacacaaataacactcttgagatcgaacctaaccatgttaagatctcttgatctaagatcaaccagtgatattgacttagaaagatacaacggtaggattataatatctttgctaagatcaatatcggtcccaatctaacatacatccgatactaacatactttgccaatgttttggaaagaacataacacttat

SEQ ID NO: 367367 - DNA, 461 bp, Cannabis indica
taatctccccattgttgattgtatgtgtaagtatcatagtagggatcatattgatacacttgtgacgagatataatatggatcacggtattgttgattgtatatcgccatgtttctaaaggaatatctgaaaattaaaaccataactagaagaaaaagttagtaaagcaaaaattaaatataaataataaaataaaacaatagtccccgacaatggcaccaaaactttgatgtgtgtcgtaagccataaaaaaattattaatatatatttctaatacctctaattattttagaataattgtaagtcagggtcgatcccacgaggactatgtttatttaattattcaaaaattagtgacaaaagttagaaaatggagttttgaggtttaaagtaaaatagcataaaaaaaataaaaacaaattaaaattgagattatgatatgaaaaactagttaaaggtta

SEQ ID NO: 367368 - DNA, 606 bp, Cannabis indica
aatttggattgattagcagctagagaagccttccagtcaaatactccatttatttaggacaaataagagcggagttagaggatcaccttgtctcagccccttcttgccttggaaactcccttgaactctcccattcatcaagattgagtaagatgtctattttaagcaagtcatgatccaagttatgaatctgcccagcatgttaaactccgttagaagcttctccaaaaactcccaattgactgtgtcatatgctttacttatgtccaccttgatagtgcatctaggtgaaatgttcttccttttgtagttctttaggaggtcttgaagaatcatgacattatgagctattgatctcccttgcacaaaagctccttgattctggtttaccaatcccggaagaacctgagagagtctcaaacacagtaatttagatatgcatttgtagattatagtgcagcaagcaatcggcctgaactccacagctttagtcgggttttctgtcttgggaataagagtgatcatagtggcatgaagttcccgtggcatgatactgttggaaatattttaccaggatctagatttaataccaagtatgtttgatta

SEQ ID NO: 367369 - DNA, 1022 bp, Cannabis indica
cccgccctcgggtactgccccgaccgcaactccacagacaagcggcatacaattctctgccacccccggatatagtcagggccaggccttggcgccagcatcatcccatttcggcaacccgtccgggatgaatggacaaactccttcgcactctgctccgactgctagcctggcaggcccttcccagggctcgaggagtaaaaggtcctccaagggcagcacccggacgggggagaagcgccagaaaagggggtacactccccagtacactcaatacacggagctgtcggactcccaagagcgtgtgtactttgctactaggcaaaatacacactaccggagaccacaaccattgtacaaggatagctcccggagagatccgagcaaaagatgcgagtaccacaacgacattggtcatagcaccaatgaatgcaagaatctcaaggacgagattgaaaacctaatccggttgggccacctctatgagtggatcaaaaataggctgcctcaccttaatccgggccaggcgactgtgggtgtgcctcagggaacaccggggagtacagcaggagcgttagctccaactgctcccgcgggcgacgcccagcacatccccggtctgccgcccagacctaacgggagggtagccatgatctccggaggtccccatatcggaggaactactcgcaaggagctcaaacgatacgcaggggccgtgaaacataatgaggtttgggaggttactcaactcccagctcaaaggccccggctgatggaccaacccatcacgttcacggaagaagacgccaagacggtgcgcttccctcatcatgacccattggtcatagagacccccatcgctaataaagtggtggccagagtcttaattgacaatggaagttccgtgaacctactcttcaaggaggccttcaccgcaataggcttgacggaccgagacctctcgcccagtgggtcccaactcacagggtttaatgggacgacacttatcccgatgggaaaag

SEQ ID NO: 367370 - DNA, 905 bp, Cannabis indica
tctctctctctctctctctctctctctctctctctctctctctctctctctcatttgatgaaaaccacccccacccactgcccaccacggacaacccaactgtcgtcgttcccctccgcctcaaggctctctccttctcacacagtatacatatatttatttatttatatattgtttcatattatgtaattatttttatatatatatttttaaatgaatttatttatttaaatatttagaatttgaagaatatatatttataaattaatagataaagtaaaatatatatattttttaagttttattgtatatttatagaaatttaagtatatatataaatatgtgtattttattttttagaattaggtaaataaataatttttttaatttgtttgtggaaagaatgattagttttgcaattttttaggtttaggtaaaaaaatatattatatgatttagtttaagctaactgttgccccaagttttacccaatatacgtggcagtctcagcataagacacgtggcaaactaagacccgttactcggagatgagaagagtacttaaccaaatcccctctgaaggaaccaataactcgtccaagagaaagcttccggatgtgggaaacacaaccttgcttcctctccgggaggtgaagggcctatgaacccctctggactatcgaaattggaaatgaacggtcacctcgcatttaatgcagcatgggggaagcgtttgggaacacccataagaggacgtgtcagacgtcataaacccgtcttttagagattacacgataatcaagggtgcaagtgacgactccattatgaagaatcacatcaatcaagaagggatgaatgctaatctcacctaaaacctaggcagcctactacgtaggttgtgcatg

SEQ ID NO: 367371 - DNA, 627 bp, Cannabis indica
caaacataaataaaattttcctttaatacccattattccttaaatattcaaaatattatatactaattatttcattttatctcttaaaaatattacttatttatagaagaaaacatgtcaaaatccttaataagtcaaattatttattattttatttattgtgttaaacatgatatctataatctttattcaacctaaattaaaccaaaattatattaatatcctaaaaacttaagattgcacttttcacattcaaaagtactattaatttaattatattaaattaataatattaaattaatattaattaacccaattcggtattatgacataatgcttccttatttattatttaaatagataatctcctaattattataccattcaaattattataaaaactattcatattagtatcttcatatacaactaataaggcaataatctcaatacttcattagcatttgcttcccatttatttcaatatcttcccaaaaataaaaaataaaataaaataaaatattctcaattcacaattaatttccctacctccaatttattacaaaatcacacatttataatttatataccaaaattaatattatgatatctataagaaactcatat

SEQ ID NO: 367372 - DNA, 819 bp, Cannabis indica
tagcaccaggtcaacctaggcgccgggctcagatttcaaacccttaggattgtgtttttttcctaatttttcttgtatctttgttatttttgataatgaaaaaatttctaggaacactttttcggaaagatgattggaaatgacctaggttgaaaatatgtcaacctgggcactaagctcagcaccaggtgtcaacttgggcgctaggtccagttttaggccacctagaagttttattttgttgactaataaatttggactagacttttaagccacaccgttcgctagattggtgagaataaataaaagtagttaagtaatttagagaaacacaataatttatagtagttcacccctagatcatgatagtaatggggctatgtctacttcaagttttttatttctcacaagatggtaattacaaccatagactaagtatcagaagctccaaactatagagagataaagtctagagagaaaaactctaaccttgtgggtagttttataaatgtgaaaaatgagctaagggagcagtccttttataggtgaaggacgcccaaaaaaataagggaaaaataaaaataagctgttatccacccttgatgatgatttaacggtgaaaattagcttctggtggtgatggccaatttttggtgcccgacgggtgccgctgcaggttacctagagcttattttttttaaatctcttgggagtgatttttgatgatgatagcttcagaattaagtctagtgtatgagacatgacttgatagagagtttaaatagcttcaaaacaaaagttgaatcgtgtcaatcaaat

SEQ ID NO: 367373 - DNA, 591 bp, Cannabis indica
tttctatccttttcagtggtatcgtcagtaggtttcggaggtgcattagttctcaaggtaaaatccactctcataagagtcaaattcatcatgaaagattctacccactacttgtgattagttccgttcagcgtcaacatggcagacattcttagattgcttaaaactaatgagaaacaagagcaataaccattaaatgcatgttataacataatcatgccatttgtgctctcttctcataaataaatgatcgcaaaataacacatgatcattatgcatgctagagttctcacacaacttaacaagatggaactcatacacaggtaagaaaaatctattaaatattataatcaaatgcattaattcactatcgaaaggatagataaattgtgattcataatatttaataattttcttcaccatattacgcatctttaataagcaaccatcatcgataggataattaattactcataaagatctcaatgttatttggaggaaaatacaatacttaaataaattaatatttaaagtgttcctccttaccaaactaatttccatgcttaattttacgataggcaagaaataagc

SEQ ID NO: 367374 - DNA, 603 bp, Cannabis indica
tgtttatgttgatgatttgaatattattgaaactcctaaaaaactttcaaaagctgtgaaatatctaaagaaagagttcgaaataaaagatttaggaaaaataaaattttgtcatggtttacaaattgagcattgaaaatgtagaattttcattcatcattcaacttatactaaaaagattttgagacgattttatatggataaatcacacccattgagtagcccaatggtagttagatcacttgatgtgaaaaaaaatcttgtttgacctagagaagaacatgaagagctacttggtctagaagtaccatatcttagtgcaataggaacattgatgtatcttgctaactgtacaagacctaatatagctttctctgtcaatttgttagcaatatttaattttgctccaacatatagacattgaaaagggatgaagcacatacttcgctatctctaggatactattaataaaggattgttttattctaattattttgggcacaacttattggctacgcaagtgcaagatatatatatatatatatgatccacataaagctagatctcaaactagctatttgttcacttgcggtgacactgcta

SEQ ID NO: 367375 - DNA, 979 bp, Cannabis indica
agaatttaaatttatgcagataaacgcatacaaactatctaatttccttacctcaaatcccgctgcttaagacttgttatctcgtcactactacctataataacacatgggtcaaggccctaacattaaaattcacactcttacagtacagcagaaagaatactatttttgaccaataactacacgaattcagtaaaagtttccttcataaaaattataggaaattcaattatctttccaacgatatatagatcattaaaaatggattaaaactgagggagttatgatagttttactgaaactatttctgagaaggaatatggagtaacgaatcacaggagacatcggaaatacaaagttttgatactgaaatattccaaatcagagaatactctcttcataaaagttttagaaaatcaaattccctttctaatgacactaaaatctttaaaatcggagttataacgtaagagatatagatattataccgaaacagttttctagaaatcctgaaacaaatggatttcgaactacagcaataaaacaataattttgacttagaataatcaataattagtgaatggtttcttcataaacatttagaaaatcaaattatctcttcaacagtaccaagatcgctagaatcggatcattatttcaggttttactgagacaacatttaccgagaatatgcgaaaaatgatttacaataaactgtatataaatgctactttttgacatagaaaggttccgaatttgtaagaggtttaagcatgcttaacctggagtaatttaaggatgggtgacctcctgggaagtttttccaggaagcgtgcgagtgaggacaaagcatgctggaaacactcgtgttggtctgtagggtcagtcatcaatcggggaagcagtcagagtgacgtactcgtgtataagagccattcatttcatgggtgtaaggacccaatggacgcttcaagcgggg

SEQ ID NO: 367376 - DNA, 741 bp, Cannabis indica
catacttacccagcttgtatgcttctgattccaaaacttcaatcacttgatatggtccttcccagtttggtccgagcacacctgtcgtgctgtctttggtgttcaaaaatacccttctgaggaccatatctcccacaaagaatttttgtgctttcacttgcttgttaaagtaccgagctaccttttgttggtgggttaccagtttcaagtttgttgtggttcgcttttcttcgatttcatcaagtgactctacgaggagtgcatgattaacctcttggttatatgtcaatcttctgtgggacggaggttcaagttctacgggcagcatagcttcataaccatatgccatggaaaatggagtctgttcggtcgctattttctcagttgtgcggtatgaccataatactttagggagttcctccggccagtttcctttagcatcttcaagtcatttcttcaaagtatctttgagtgtcttattgactgcttcaacttgaccatttgcttagggatgtgccactgcggattaactctttatgatcccaatggtttgcacagaaatcagtgaaggattggctgtcaaattatttgccattgtccgagactatcttatacggtatttcgaaccaacaaattatatttttcacactgaagtcttgcactttcttggatctaaagtaatcaactgcaaccactacctacaatactccacctttgcccttgggcaattgtccgatcagg

SEQ ID NO: 367377 - DNA, 688 bp, Cannabis indica
ggaccggccgagatagagagagaaagagagatgctgtgagagtttgagggtatttttggggttttgaaaaaaaaaggtatagtttttttagggtttaaattattggtttaggaaaaaaattttaagattttctaagtatagaaaatcaaatttccctttgattttggtactagctttagtcatggtacatcttgacaatgaacaacactatgctggactggccatgagatataagcctaagacaaattattgaaaagtacattttttttatatctatttatcaaagatacatttatattatattttagcatataatattaaaatatactcacttttttgagtgagttgcccaatctacttttattttctacttaaatttaacatataatttacacggtctaatgagaacatcatctataaaagtgggtatattttacagaatatgaaaataaaggtaaaaattaaaagaaataaaataaaatgggtatacaataaaatttaatttcgcggccctaaaaaatatattgaaaaaaagttttataggattcaaacccatgacattgcataatgtgtcatacaccccaattaactaagttatgaatatttattgtttacaacacacttaattttttttattttttattttggcccccgaaaagtatgagccctaaacacaggcctagcccgc

SEQ ID NO: 367378 - DNA, 567 bp, Cannabis indica
atatatatatatatatattcactgccgttgttggattcggaaagaaagaggacccaactccttaaataatggatatcatatattaacattagaaaaaatttcaatgccaataattccaatttatatatataaaaattacatatacatgtgcagtatattttaagaaagccaacattttagaactcactaacctattccaaatgatgaacaaaattcaaattgtaacaaccagcgaccgaagctagaatgagggagcagtgcgatgccgaatttcgaaagaaaagctgtgctaatttattattgttcgaatgagtaaggagaagaagatgatggataatagtaatggcaaaagaaagagcattaaataatttttttacgggtcgtattctgttttattcagatttaaaatttgattttttatttaataaaaattctaatcttacgttaatataactgagggaatatttgagtcccaacttttttaaggggtcaatattataccttttcagggtagttagaatactaccataaaagcattaaagggcttaaaaaatctaaaacttcata

SEQ ID NO: 367379 - DNA, 718 bp, Cannabis indica
aaaaattatttcctaaaataaaatattcttataatctcatcatgtattatttattatggaaactaaacaatgtcctaatgtaatttctcattttagacaagctttaaattttaataatggacttgaagtccctagagtagatttaggtggtggctttcttttattatggaaagatgatgtgattgtaactctattcaattataattttaatctgtttgactactatctcgcttttggcaatggtcctactttccattttactgctttctatggctctccagaacgaggaaatcgttgtcactcttggttgactttaaagaggctgcaagatgttacccctcttttaccttggcttgtgattggtgattttaatgagatactttccaacaataataagcaaggtggtgcattaagattgatgactttcgtgaaacattagatttttgctctttgactgagctgccttacattggagatcctttcacttggcttaagaacagacataaagcagatacaatcaaggagagattggattggtgtttcgtcaatgataaatgactaacaagtttcgagccgattacaacatcccatttggacttctacagttctaacccatcgtgctatatcagttatggttcaacaaataaaccaacaacctgatcatgtccagaggaaaacatgattcagatttgaaaagatgtggcttaatgatggtgaa

SEQ ID NO: 367380 - DNA, 774 bp, Cannabis indica
atacctaaaacaagtcaagtataagaaaaaatctgaaataaaacctttaaaaacccctgaacggagcttcaccggcgggtcgtcttctccggccacgacgagttccaaaactcatgttttctttctttcgacgcctcctttcaaataggaaggatccccacaatgcccagaaactcaaaccgatccaatctcgtccaaagaaacaactaaatcacgtcctaaaagagttgtcttctttagctccaatgtaccgccgtttatggtgtcaaaatattggttctgtgtttttgacgtcaaaactccattattttatgtccaaaccgagccttagggtcccaaaaactcaaatacaacctcctttgattctcgaaacaacttaaacacgttcaaatctgaatccgtttcaagaacggtattttgaacgtaacaatggtgtctctcaaaaggtgcgattacaaaccttctaattgcatctaaaactcttctcggatgaaataaaactcaaagaaatattctagagcagcccaaaaactttcaaactcaacaaaccaaaaatctcacttttgttcacggctcggtttcgttggatgagcctctctcttcgtctctgcctctcaccactgtttctaaccctctcaaccctaaacaatcatataaacattttatgtatagtcttaaccctaatataaccctaaatcaacaacttaaaatttcaaaatatatatattcttatgtataataataataaaaaaaataataaataaaaataattat

SEQ ID NO: 367381 - DNA, 537 bp, Cannabis indica
ctagaaactcgagaccagactccgttttggaagacacgtgtattcagttttccaagaaaagctgaggtatccatgagagactcctcgagtttaaacctcgcctaagctagaatcggcgagatgatgcgaatatgatcaaagtctagtcgcattcatatgactcgcattatgtgagaccaagtaacggatttaactcgcatataccaggatatgtgcgggtatcctttctatactcctgcgaagacataaagatcgattctccataatgcgagctggtcccagtgacccaacagcctcgataaaccaatatagactcatgcgtctaggttctatcagcccactacacgatgtccgtaaatgcgactatttaagaacgtaggcatcttagacttaaccaaatgttaggtatatcctaagcccgcgagctcacatcaaaatatgaacagccaactcgagcaatagaagtcgcatacgttgctgtatttagtgaaagaaaattgttattcatttattaatgtttacgtttttagtttaatt

SEQ ID NO: 367382 - DNA, 1062 bp, Cannabis indica
atcttcaatcatttataatatattcaaaaactcttcaagagtctatcacaacgtataatatatgaatttataaaccatacgtatttttcaaataataatttacttatatgtttttatttcatataaagatctttgtcatatagtgcgtgtggctttgaatttaaatcactgaagacatgtattaaattcttctagaatttttagataaggcatatttcaaatttttaatatattaggagcttcaaataattaaccttttgttgtaacatttatgtgacgcttataaattctcataaaatatatttcatgctataatcaaatcatgattatattttatcaatatttaagccttatttcaatcaatctcatgtttatgcatactttgtacaacaattcattttgtgtacaaatacatatatgaaaaattttcattagaaatattaggagcttcttctcacatagtgggactttacttagaggaatatcttggatatttatttttatgggttgtatagcggagacttcacttggatgtgtcggcttacgagtattaggggtactatctaatagaccctgtaggggtttggcgagctttccaaagtacacttgcttgtgtctgtcttcaagactccgttttcttcctcgacacaaatgtatttttccgctctctcgtagaagtcttcaatgccatctaattctctttttagcatattcatccataatctacacccaaggcatattccaacagctatggaaaacttatgctcatggttggacatccttcctactttggcgacttcatcattaaagtgttggatgtatctccttaagctttctttctctctttgctttacattggtgatactcattacacgcacaatgttcactcgctgcttgatgctattggaggaatgcctttgaaaattatttctatgatgtaattgctcctggtccaagcctcttgaaccactaatatgcgacccctttaagtgtaaccacaaagcattgttaccttgccttgcatcacacttttttcatcttcattagctcattaaaagcacc

SEQ ID NO: 367383 - DNA, 562 bp, Cannabis indica
tgttgtacaaaacctttttccataaaaaaaatattttttctgttttttcaaataatttatttggattccttgtgaaaaattaagcaatttatgtttttacggaacttaattccgataaaaaacgaagaagttatgaattttgaaaaatcgggtgtccatgggtgctcaatcgcacgcatcaggctttggacaaggaagtcgtgcgggcgcgtgcttcagacaattccttgtctgaacccgtgcgtctcgccccagcagcctgcatccgccaatacgactccctgcaggcgccgagttttctcggctgggatcttgctgtccgcgcgcgctcaaggctgcgtgcagccttccagggctccatgtgcagcctactgggcagcgaacccaattttgcaattttcatgggatttttcccaaaaaatcaaatttttctaattttcaaaccccaaatttaaactaaaatattatttttaaatatatttgaactgaaatatgatatttgaaattaataatatttatttttcaataaaatattattaattttgatattttgaggtttaaa

SEQ ID NO: 367384 - DNA, 535 bp, Cannabis indica
tctaaggcattcgatcttactctggtctccttttttttagattactgcggagaccagctgcctttccaagaccatagtcaatcacggcttcgtcatgtccgaatttgggggcatagacgaggtcgcgaggatcctgcgggacctgtcttctgaaaggcgggcgatccaggaggaggctgatcgaagggaggcccttgctaaggcgaagctcgaggaggaggctaagtagagggaagcccaggcggaggcgaagctccgagaggaggcctaacggagggagcctgagctggaggcgcggcatcgggaggcgctaaaggcagagggtgaggccatcgccaaggctcggcgtgagcttcgggaggctaaggaggccatggacgaaatggatgccaaggtgaagtccctagaagagttgcaccaggcagacttgcagtccaaggccaacctggccgcggagttgaaggagctgaaggactttagagactaggccttgaagaaggctaagagagatgtaatatccgctaactccgaaagg

SEQ ID NO: 367385 - DNA, 1817 bp, Cannabis indica
agttagaatattaaattttaaacagacttgttatattaggaacaattgatacaaattcttgaacagaaagagaaagtactacggaacaaaagactatatcgcttattataatactctgaaggaacaataagattgaaaagcgatttggaagttaatgtcgcagttgtgggagtcatgtcccaagttgtttgaataaatttcgaggacgaaatttctataaggaggagataattgtaatatcccggaaattaatatattatttaaatggacatattttattaaatatgtaattattttggtaatgaagtaagattatgatcttacttagggtaattggtgtaaatttattaaatgattaaataaagcataatttattaattacggagattatatcaaaatatgtgggtatcatggataccatttttgaaataattatttcttgggcctggcaactgtggaactagacggagaggtctgaaatgtcacgacaataaaaggtgaattaaattggaattggattttataccagactagattagaattttaagttgtcggtttggcgggattggttagaaattattaaaatatccctaggatttgatattaagctcaagggttataagaagggtaaaatggtcatttggtgtgataagttaatgttatgtcttatttgttttggatggctgaaatgaattgggagggttaagttatttatttaagtgttaactacttattctattaatagaaagtgataagttaaaggaagtcaaaatttaaagaaaagtcaagagcatcacttttctcttcctctctctttcggctccaaggaaaaccagcaaggaacttgtgggaatctcagctctcttcatcaaattcttggcaaaaccttctgccctaggagttagtcaagttgaggtgagtttggtaccattttcctttgatttctttaagtttaaggttaggttttggttagggtttcaagaaattcggggctggggtataagttaggattagaatctgttcttaggtttggtttaaagcttgtataggtttgagtttgctgaatataagggctgcttaacttggaaatgagttgaatgaagttttatgagttctagttcacttgggaatacaattttgagcaaatggatgagttgtggtgttttgatgcattggttatgttgtgtttatgatattatattgatctggagcagttggacaggtttggtttagttttggttcgagtttggaggagaaaactcttggttgcaatcctgccagaaccggtcgaccggttggttctggtgtagcagaaccggtcgaccggtttgcttacaggggaaaattttcagtttttgttagggccgattttagagctcggggtgatttccgtgtctggtatagattgtttggaagttgtaaaacctattttggagctaatagaagttaatgttcactggttatgggaagtagggttattcccgaatttatggattaaggtatttattgaatgttattgtcgtgacataggacccgggatcgtcaagctttgtttatccacttaggctggcatgcacgcttaatctctggactgaggtaagaaaagtattaaatactgtataaggttaatgttatgattgttacagattcgattaagatcgaaatcttgttatacgttgttgtgacttaatcctaatcgaggttaacgatatgtactggatgtgactcgattatgatcgagggaaataataggaaacgattattatcgtttgactcgattatgatcgaggggaaatattatgaaacgattattatcg

SEQ ID NO: 367386 - DNA, 587 bp, Cannabis indica
aatggagtttttgggtgttctgaacctagttgtcgcgacgagatttttggccgtcgcgactgggtttggcagtgagaaaatttatttttcccaattttgttttggccataacttttgactcaggactccgtttgggatgttctttatatcgttggaaagctagttttgagctctattttattatttgtgttttgaattccatgtttatattatgtgaaagtgaaattagggattaaccctatttgtgaaatcccaggttgtgtgactaggattaccgacacttgatcaggagcacccaggtttttggaatctatgctcttgctgaacagcaggtaagacagtagtttgcacgtagagtatgcacaatggcgcttatgtgaatatgatatatgtgagttattgtaaccgggattagggttattaccctaataggaacggtttgttagcctagggttattactctagtggaatatgtgtataaatgccatgccatgctaaatgaaatgaaatttaaggattatgcgcacaaggcataatcaggttggactcgggacacataaccgagatgaaccacttctaaggcctta

SEQ ID NO: 367387 - DNA, 853 bp, Cannabis indica
gaaagagtatcaagcttggaaaatctgattggtgtttatcagcaaaaacagaatatgcagaatttttattgttgtcatggctgccatgatttatagattgtggttaaacagaaatgattgtattttcaatggttactcgagcacaaccactagcattgtacatgatattaaaaagaatcatgttctatagattaacaatagctaaaagagagagcttgaataggcatgagaggaaatttatagagcatttattttgtaattagttgtttcgttagtagctggtttttttcagcttggctttgtttgtagttgcttgttgattaatgaagttgttccttgataaaaaaaaaatcttattttcaattttgtttatttttgctaaatttattttattaaattataagattagaaatataatattagaaatatttcaattttcaaattcaaatattatactatactatattattgaatgtttaattaatttaaattatttaaataaactgaaaatttaaaaattagttggatatttgatcttcagttagaattttagatatttaggagatttattagattttaaatatttttaaatattctctagcaacttaaattttaatttctagttaagatatattttaaatagaaatatcgtaacctactttccagatatctgttacatgtttgttatgtttgtttatttatttattcaattttttaaacaaacctatatttattatatctaaattgctataattaacttgttaacaaatctaatgatttgattttaattatcgtccaatcgtcaatagaccttataaataatttgtaacaggtaaatttttgtaatttcttt

SEQ ID NO: 367388 - DNA, 520 bp, Cannabis indica
tcctcaaaagcacttgtttccccctttttcataaagatgaaaaagatgcacaagttaaatttttggtttgatgcttagaagtagccccggttgacgaattgtcaacctaggcgctaggtgtccaggcaccgggtgctcaaaaatgaaaattctcttaacctaattttgatgtctcaaatatgttcgtggtatgtctagttcatatcctaaaacaaagtttgacccattggaataagactgtgttaatctcgcttttagtcaacgagagtgagtcaattattaagcgattagatatataattaaaatagagcaaaaaccaataagtaataaagaacaccaaattttgaagatgttcgaccctattagtgttggtttttatgccctaaataaaacccattacaatctaatctgatttgttatcaataagagaataagaagtgatgtatgtttacatgtagtttttcatgcttatggtttaatatatgcacaaaatcagttaagtccagaacatatattcatt

SEQ ID NO: 367389 - DNA, 649 bp, Cannabis indica
ttgcacagcttacccggtatttccccttacggatcacgggactactgactgtcacaaattataataattataattactttttatataattgtgtgtaactattattgaaaaaaagatataagaataattaaaacaattataaaatacacatatattttagtatttagttcatcaattgtaataaaaatgcaaaaaaattgagtacaaatttgagccggtataaaaaataagttggtctatttgaaaaaaatgggtcgaactgaataaagcacgacacgaatccgagcacagtacgaaattaccggacttgcaggcccatgctggatctataaaattattacacgatacgatccatatttttttaggcctgacacacacgacccgtatttaaacagtctaaaaaatataggccaaactaacacgacacacacgcatttaccactatactttataagtagttagacaagaccgatcttgggctaagcgggctaggccaaagcttaggcccatataaatttattaactaatagagaaatgtaagtaaatggtcctatttctaactctatagataattaatgtcccttttttaaaataataaagcaaatattcttttttactttttaatacctaaaatacccttcattatata

SEQ ID NO: 367390 - DNA, 532 bp, Cannabis indica
tagtagtacaaatttattgtgactagtgccaaaaaaaattccaagattggtccaggccacatttcacaaaggggtacccctatcagaaatgtgagattttcattatttcgattaaaatgatcgttagtgcaagaaaactaatttctctctcaacgtgttaaacagaaaagtgatgcacaacagtctttgttttgtccatacaaaattgcactattttttcgagatgtgtagggtgagattttaacagagcaacaacgagtgtaagggtaatgaaaaaaacttgttaaaatttaccgagaaaagaagaatattttcatattttgaatgaggggaccattttaacaaaatttaatgcaaaacaaatcttcatattcacgtcttagtagtacaaattcattgtgactagttccaaaaaaaaatctaagatgggtcgacgccacattttacaaagggataccgctatcggaaatgagagatttttactattttgattaaaataatttttagtgcatgaaaactacgttttctctca

SEQ ID NO: 367391 - DNA, 1047 bp, Cannabis indica
ttagtgcatgaaaactacgttttctctcacgtgtccattggaaaagtgatgcacaacagtcttcgcttcgtccctgtgaaaattcttgatatttgaagctgtgtagtgtgagattttaacggaacactaacaagtgtcagagtaaggaaagaacttgctaaaatttaccctaaaaagaataatattttcaatttttaaattaaggggccattttaaaaaaatttaatgccaaaccaatcttcatattcacgtcttagtagtacaaattctttgagactaggggccacatttaacataggtgtaccactatacaaaatgtgagattttcactaattcaattaaaaggtctgtaagtgcatgaaaactaaattttctctcaacgtgtcctataaaaatgtcatgcacaacagtgttcgcttcgttcctatgaaatttcacgattttttgagatttgaagggtaagattttaacagaacactaacgagtgtaagagtaatgaaaaaacttgttaaaatttaccctaaaaagaagaatattttcaattttttaattagcaagccatttttaccaaatttattgcaaaaccaatcttcatattcacctcttcatagtacaaattcattatgactagtgccaaaagaaatttcgaaataggtccgggccacatttcacaaaggggtaccactatcagaaatgtgagatttttactattttgattaaaatgatggtaagtgcctaaaaactacattttctctcaacatgtccaatataaaagtgacgcacaatggtctatgcttcattcctgtgaaatttcacgattttttgagaagtgaagggtgagattatagtagaatactaacaggtgtaagagtaagaaaagaacttgttaaaacttaacttgaaaagaagaatattttcaatttttaaatttggaggtttttttaaacaaatttaacacgaaaccaatcctcatattcgcgttttagtagtacgaatttattgtgactagtgccaaaaaaattcaagatgggttcgggccacatttca

SEQ ID NO: 367392 - DNA, 673 bp, Cannabis indica
agattcacaagatgatattaatttaataaatccttcaccaaaactattaaaaattatatgcaaaactttattattataactagacaaatttttatctccagtagtctaatttagtttaggttttaccttagcattaccttcatcataattttcagtaggtcgagaccaacctacaagtgcaaccctctaagcctttgcatcttgtgactaaatgaatgctctcattttgacctttcaatgtggataattcgagtcattcaacagggatggtcgagtaatggagcttccttctacaaacaacatctcacatgaaataaattaaaccaaatacaataatctcaagatctcactaagaatttagtgacaaactgtgatactaattgaaattttgtatttaaaattaccaatttattatttaattaatattttaattaaatacagaataataaaattggtgatgaaataattattttgtagctacaaaaaataactatgtaactctaaaataaaccagaaaataaacagtgcagaattgtaaaaacacacaagatttttttacatggtttcaataatccttgaagattattactagtccacgggaccacagagattagattcattagatagatctcaaaaataaaaagtaattggcttatgcataaatagactccct

SEQ ID NO: 367393 - DNA, 862 bp, Cannabis indica
gagtggtgacatgaaaaatgtgagctatagacagtatcgagcttactcttttgaaatattagcataacacaccacgactcatattttatggtgcacggcctcggcccatatggttgcggattttttacaaatatgaactgagctgacataatgtgccatattttacaactatacatgtggcatattaaaattgttatgttattaagctatgtcttctccagcgatatttgttgttagaagtttaatcaaaattatttagtcttttttttgttttctatattttaaactttgattattttttgaaagtacaaaatacatttcgctcaacataaagtaaaaaaataaactgaaaaataacaataaattaacttcacgacaattataaattaactataccaaaattaatctgaaaaataacatcgtgacaacaataatacaactataaataaattataaaataaaaaaaaaaaaaacttaattatttttactgaagaagtatttttataaataaaaagatcaaagagtaaaaataatttttttttctgtgttaatgtattttagtaattttttaaaaaaatgttagcctatcatgttattttttcttaaatttatcaaaaaaatattaaaatgaaacaaattctttaataataataaccaccactaattaaaataacacacatttctttctaaaaaaacgaaaggaaacttatggtacttagtatatctttgtaaaatataatagtactattagtaaaatttaatatggagtgttacttatttattttaatataagttattttataactagttgcagttttttttttttgtatgaagttttttttttttttttatttttagttta

SEQ ID NO: 367394 - DNA, 452 bp, Cannabis indica
ttggaaatgttttttcccttgtctgtgctctggctggaggatacttccttcttagccttggccactgcaaggttataacattcccgagcagtttgttggtttcctctcagacaccctacgccattctttgttggaaactttaggcacgagggaaatattgatgtgacaacctttaactcatacaaaggcagacggcctagcattacgttaaaggttgaaggaacatctaatacaggaaattgtgccataatagtaatgctcgtcggagcctgtccaatagtgaggagtagacgaatttatcctaaaggtgttgtaaagaccgcttagtttaaatttggaaattagcagataaatagggtataattatgaattaatagtttattatgattcattttaattcaaaatgcatttttatgtcacatatagaaatttcacaattttgcatattttgt

SEQ ID NO: 367395 - DNA, 561 bp, Cannabis indica
ggttaggaatttggatgatagtacacaactcacagcccttcaggcagggatctttacggatccatcaaccgctggaggtgagttgtgggatgacttacaaggtcgaccagtaagaaacgttactgagttcaacgaaagggctcaggtattcgttcgaaaagaagatgcccgaaaagaaatgaatttgttaaggacaggctcgggagacaaacccagcaatgtttcaacaagtactgtttcaacgagaatccataactcgggggcttctagctcgaagagaaaggacagttctaaggaaccgtcaaaggattaaaaaaacaaaagaagcatgataagtgtgtgccagtgtatactatttataccgagcttaatgaaacttgggagaatatttacctcgcacatgagcaaaaggttgccttcggcatgcccgagctcatgaggaatgcgaggagcaaacgagatcctaaccggtattgtaaattccataaggatatcgagcacacgaccaacgaatgtgccaattgaaagatgagatgaaagtctcatcgctcgaggtcactt

SEQ ID NO: 367396 - DNA, 525 bp, Cannabis indica
ctagttgagacaaactgcttgtaagactcagttaattgattttagttaatcacttataattctaaaattagactatgtctattttattaattttcactatgttatggcttgattgtgaagaaataagattttagggttaatttattaattaagagactttgtggagtctaattaataaatattataaacgaaaaattttattagataattattttaattattaaataaatagttttggcatttatagggtggaaagtgcaaaaagtggtatttgtgaaaaatagataaatggttgagaaaaatggcaaaaatctaactagtgtagggcccatatcatggtcgaccacttaagggaattttcgctctatgtttatcattttttttattccaaataattaaccgtaaccttatgtgaaattagtataaaaggaaagctatggtctcattatccaactaatgcttctaaagctaaaaacctagttttctctataggtttatgagacttcttcctttcttcttctaatt

SEQ ID NO: 367397 - DNA, 590 bp, Cannabis indica
atttttaaaaattattataaaagatcgtatattttttaaaatgtattttattatttgggctcctaaaataagtaaagccctaggcgcaggcctagcccacctatgcttagggccgaccatacatttgacccaaaacacatcaaatttagagttaatatcccaaatctacttgcttatcatcctattgttccattagaattctctttaaaactaacatcttaatattattgaggatgataaactttatcccaagaaacaatgatagatattacaaaatctattatgctaatcacaaaatttattttttgatcttaattaaacacgttatataaataagtaaacatagatatcattatcattatttttacaagaaagttgttgtaaaaataaattatataataaaattataatacatttggtttcatgtgatgtgttgtaaacatcaataaatctataaattaaaattaaatgagtcaaaaaaatctcaatattgaaaattatatatttaagaggcatttggtaatatttttttttaaaaaaattttaattagaaaaataaaaataaaatttgtgtttctaaaataaaaaac

SEQ ID NO: 367398 - DNA, 594 bp, Cannabis indica
agatgttgtatgacatgaagtgcagatctccaattctgtgggatgagactggaaaaaagaaatatttaggtctggaatcaatgcaacggaccaatgaggctatagaaaagatcaaggccagaatgcttgcctctcagagaaggcaaaagagttatgcaaatttagaatgaaaaaacatagaatttcaagtaggaaattatgtattcctacgagtatctctgatgaagaagattaaatgtttcaagaaaaaaggcaagttatgccctaagtttacagggcttttcaagattctcgagaaggttggactggtagcatatcgtttagccttgcctccgaaacttttagcagtccacaacgtatttcatgtctctatgttgcaaaaatacatatcaaatcctactcatgtgctgagttatgaaaacctagaacttcagccggatttatcatacgaagagtaactatttcagattttagacagaaaagataaagtccttcgaaacaagaccatagctttggtcaaggtgctctggagaaacagtaacgtggaggaagccacctgggatttggagtttgacatgagggctcaatatctag

SEQ ID NO: 367399 - DNA, 1006 bp, Cannabis indica
cattcagatctgtggggtccatctaaggtgacaagtttgggagggtcaagctactttctgagtattgtagatgattactcaagaaaggtttgggtgcacttgctcaaaaccaaagatgaggctttcaagactttcaaggaatggaaaacattggttgaaaaccaatctggcaagaaaattaagaagctaagaacagacaatggcttagaattttgctctacacagtttacaaactactgcaaagaaactggtattggaaggcacaaatctgcaccaaggacaccacagcagaatggcttggctgagaggatgaatagaactcttattgaaagagttagatgcatgctgaagggtgctggtttggagagaaagttttggggagaagctgtcaaaacagcttgctacttggtaaatagaagcccatctgctgcaattgagtttaaaactccacaagaaatgtggacaggtcaggttcctactctagagaatctgagagtttttggttgtattggatatgtgcatgtcaaacaagacaaattgcaacctagagcaattaaatgcatgttcattgggtaccctgatggagttaaagggtacaaactctggtgcttagaaactggttttaagaagtgcatagtgagcagggatgtggtttttaatgagaaggcaatggccatgaaaccagaagacaaaactgagactagcattgaggctagacaggttcatgttgaagtcagatcagatgcaagaaccagtgaaaatgctgatcaggaagttgtagaagagactgatcaaccacaagatagctcacttgacaactatcaaacttgccagagatagaactagaagggaatcaagagcaccagctaggtttggatttgcagattacactgcacatactttaaccatagctagtgaaatagaaaatgctgaacccgcaacctatgatgaagccataaactgcaagaacaaagacaaatggttgcaggccattgatgaagaaaaa

SEQ ID NO: 367400 - DNA, 499 bp, Cannabis indica
gagttagtctcttgtcccgcataataagagttataatcatgcgatcagactttggtcatgctcgctgtatctcgctgactctatcttaagcgaggtttaaaacttcgaggagtctcttgcagacgactcagcttttattggaaaactgagtacacgtgtcctctaaacaagagtatgttctcgagtttctaggtgagagaaatctcaatataacacatgcccctattttcgcgacgtgacaggtacggtcacatgggaaactatacacgagagacatgtaacgccctgtccaacagggacgccacgtgtgtgcaatttaataaaatactgatatttatataatatgtaattatactaaaagtgtgggtaattaaattttgataattaaaattcaacttttaaactgtttaacaaaagataagtaatatggactacggggttcccctgtttttaaaatattcacaaactggtttcaaagtattttacaacataaacttta

SEQ ID NO: 367401 - DNA, 576 bp, Cannabis indica
cttgtgccaaatgagatgatcttctgtttgagcaagatttgttagtatggccaatatgagattcctgtcttgctcaaggaatagatcttgtaacaactcgacatcccatccttctccctccatattcatgagattagccactttagcattcgcaagagcggggtgatctgaaatgactctcggattcaaaaggtcttgcaaccaaggttcacccaacacagagatattttcccccgttcctacacaccaccgaacgcccatagacaccaattcttgagcttcaagaacacttctccaaacaaaacttgggaagtatctagccttgaaaacccttgataccaacgagttaggatgagtgagcagtctccaaccttgtttccctagtaaagcaaggttaaaatttctgaaattacaaaagcccatacctcccaagtctttgtgcttgctcaaccgatcccatgatagccagtgtatccccttgcttgatttgtttgaagattgccaccagaaccttgttatcatcttcttaatatctcttgttatttcaataggtaagaggaaaacactcatagcata

SEQ ID NO: 367402 - DNA, 467 bp, Cannabis indica
cctttcattagtaaagaagcatttttcaatttttctttcatttaatctatcatggcaatgttcacagtacaattatctaaggtaagggtagaaaacttacactcaatagacaattcaatcaaacactacagcaatacttttgctagaagtttagcagtatgagaggcatgcacatatataaacctgaatgtacacaaaaaaataattagcatatatcgatatcaaatattgacataataaaaaaaattctaagtaatttattatattacctgatcattcaatcacacaaaattcaagaatcatcaatataatgtgtagtcactaccatataccctctcttttgattatttgatatctacatgttagttgtaatcacaactctaatacgattgtcattcattgagttcattgtattggtattttcattctcatatatcttcaatatatctctcctaatatagtagttt

SEQ ID NO: 367403 - DNA, 1123 bp, Cannabis indica
ctctctgtgacaacgacagtaatagagtttacgtttactttaaatttttatactcacgaacttgataaaaatagctaagcctgacaaactttacttttaaagagagatactctgactttataagtattttttgaatatgaaaaataaactaaaagagctctcctttttatagagaatgaggtcctattaaaataataataaattaaaaaaaatatgaaaaaaatatagaaaaaaatatatttaggctattttttgaccgttgatgatgatgtaacagtgaaattgactctggaggtcagtcgttaatttttggaacttggattgcgtctgtggacccacttcgggtaagttgtagcttaaatttgcaactctcttaagcacaaaattttggagtttataactttaattttacaattggagtgtgagacatgacttaatatatcattaaaataacttcaaaagacaagttgaatcgcattaatcggatcaatagtgagtgaattgtggtcgttttactgaaggctattctaggaccagcgcccaagttaacatccagcgtcaagttaatgttggaacttattttaccaagatctaaatttactaacatatatcttgattaacaccctaaatatgaattctctaatacaataaaataaatacatataaagttcaaaaaatattatatagatggcagcagaataatatgtctcatttcgttcagatctctaacccttgttcctttctgtcatagagtaataacaagatctgagcctaaatctccttctcctttagtttggttaaccactgtcttccgctctatgattgagtacttgacttgctatgagtgggcatgttactctatcactaaaggcttgagttgatagaagaacattaagaggagttagaaatcactatgaaggagtctctcatctactaattatctgacagagttagaaaactaggtttagattggttgaagtaggttggatgagaatgagagcattatgttccttttatagtatttcaagtagggtttagaatttaattatatgtcttaaaaaagataaaacaataggcatgcataaatcaaagctagtgcccagccatagatcgtgggtctcac

SEQ ID NO: 367404 - DNA, 625 bp, Cannabis indica
ttgagcgtattctcaactttatgagagttgttggtaatgatcgggtaacctgcgccattttttagttccaggaggacgctctcgtgtggtgggagttgataaccctcactcgggacgtcacaatgatgacctgggaagaattcaaggagttgtataactctaaatattacaatgaagctgtccgcagtgctaagtagaaagagttcactgagttggtgcaaaccgaggggatgtcggttaatgtatatactactaagtttgaccgtctggccaagctcgccgcggggatcgtgccaacttactttagtaagaaagacaagtatttggccgatttaagtgcgaagattaggcatgatctagtgatcactaccactaaagcaaattcgtatgctgaaatggttgaaaaggctttaagagccgagggtgctgtgaaattccttcaggaaccccgagggactccgagtgttggtggaacccccactcttcctactcctgtctatggtagggatggtgatgattccaccattgagcagaaaaggaaagtcacctcagcatctggtggttcagggcaaagcaagcggtttcgtggaaaccaaggcagaggtggacgccagggttactctta

SEQ ID NO: 367405 - DNA, 543 bp, Cannabis indica
aagcatcttgttttggtagctcatcatgacggaaatccatggttgagtggaactacatatgttagcaagaagcatcttgttttggtagctcaccatgatggaactccatggttgagtgtccttgacttggggtggtttcatttaagaaatttccccatgaagcgtgcgagtcagagcaaagcacgttagaaacacttggattggtccgtgggaccagtcgtcagtccaggaaacagctagagtgatgcagtcatgtataagagccatcattctgtgggcgtaagggcccaatggaggcttgaagtggggacgttaccggggtaacgtataaaagaacgtcaggaagagtagtggtatcactaaagtaaagaagattacctaaattacttaaggtgatacggtaatgatggagagtactttataattgactggatagtcaatatggtatataaggagaccattgacattctgggaaaagactactttattatgcaattatagaaaggcatactcacccagaatggggaaaagcttatgaattga

SEQ ID NO: 367406 - DNA, 431 bp, Cannabis indica
taagttttattttgacaaaaagtcaattcagggtcctatttgtacaatttgaaaaataagaatctattttgtcatttaataaaacagatggtctaattggtaacttttgcaatgaaaaaatttgagtgtgtctatatataggctggattcgtaaatttggatataaatattatttattctcaaactttacgaaaaatacagtgtgtgaatcggtttaccataactaaaacagaaagcaatcaattccttattacaatcatttcaatttaaaatttaaactaaataataataaagttaaaatatggttaaaaatatttataacattttaaatttaaatttctttatataaaatatctacataaattttctttttattttaatttttacttttaaatatatataatgatattataaaattgataagaatattc

SEQ ID NO: 367407 - DNA, 597 bp, Cannabis indica
aagtttccctatcgatgaataacatggcaataccctaaatatctcgaaaatgggaaaaactagggttctaaaaattgccccaactgatagaccggttccccaaccagaattccggttctgtggggtttcctggggaccaaccggaattccagttcctacaggtcccattgaaccggaattccagttccgtccagaaaagtttcaaataattcatatctcatgcaaatcaaccccaaatcatatcaaaccttccagacctgctaaatagaccccaatgaagatttcaaaagcaacaaaacaacaacccaagtatagattcaaaatccaccattaaagctccaagttttgagttcaaaactcaaacttggttaaatctaactaacaatcaacaaaacctgcttgaatccacttaactaaacatttttaagcttcagataacaacactaaacaataacagtagctacagcaagcagttcctcaaaacatgaaaaatttcattttcttaaaacccaagaaactaaagagaaagctataagaaattacctagagcttaagcacttcaaatccttgaagaatcttgctggaaatgcagaaaaa

SEQ ID NO: 367408 - DNA, 539 bp, Cannabis indica
tgatatgcagatttaacattaaaaatcccagagttatcctttccccagattaaaacatcagagcacatatgacctgcaataggtatatctaagatatgatcaatgatgaaagcaggaaaatgacatctcagtttattcaactcctaagcacctgaaggagaaataaaataggacaaagaaggagaaggaagcacggctatcaaatcagaatccttaagagtaaaattaggcaaccagcgatcattaattgtattaatagtttgcccattacctaccttccaaagaaggcctctcttaagaagatctctaccccatatgatacttctccaagagaaagaagggttatgacctggaacagcatcaagaaaagaagtgtgtgggaaataccttgcttggagggtaagactaagtaaagaattaggattttgaaaaattctccaagcctgttttgctaacatggcctgattaaaatgaaccagggacctaaaacccatacctcccacaaatttggattggcagatcatagaccactttttcca

SEQ ID NO: 367409 - DNA, 702 bp, Cannabis indica
aatggtgtttttacaccacggaaacaaatttctaccaactgatttgattctcgtgaaaataacaacttgttacaatcaccaaaacaatcaattccagtaatcaaataaaactcctcagcactaaaccgtatgcaacggccagcaaccttagcccaaaattctttaggattgggctggtaaacttccctcaataatagactatgaacaacttggggatggaaaacatactcaggcatatctagaaaatgaccaaattgagtatcacgaaacatggacagtaaattgacagataaagttttcttaatattatcaataacagaaaaaaggctagtgcaaacacatttagatctgtaataatcagagggactaaatttgtagtcccagacctgcaagataaccaaaatggcaacaataaatataaattatcaataatcaagtatagcaactataataaaactataacaaaactaaaaacaaactcccaaacagaaacaaccatacgaatataaactgcaaacatctgaaatcgtattgatacctaaaaactaacagcaaacaactatacctaataaaaatcccaaaacacatcaaacataaacagattaaactataaacaaactaagaggaaactacaacccactgattacacacactaaaacgaaaacagaagtttcaaaaatatctaacaataaattacaaaca

SEQ ID NO: 367410 - DNA, 549 bp, Cannabis indica
tgagccatatcagaccaagcgggttaagggtctaccagtgttgaacttttgaaattctattttgccgcttaggtcagctagaaagaaaagacttgtaataaagtttgtaaatatttttgggatcccaactgtttaaaagtttaaatttattgcaatttttattttcattctttttaatataaaagtttaaattttgcactattttgattagtaatcccgattaggggattaggatttcataagcattttgggtagcatgcctaattgtttagagcgttacaggctcgctcggacaaaaccccttcttactgtgtcaagtcgcccatggaggctgcatgcagcctcctgtctcggccattcccctcatgccgcgcgcgcaggggtatgcaaagcatacccctgtgcaccaattttgtttttgtgataacttttgattcaaaaatcgtttttcattgaaacaaaattcaaattttggtagatttttgtgcagaatctatattttcaattaaaaatcttattatcagaataaaattaatttttattaatatt

SEQ ID NO: 367411 - DNA, 815 bp, Cannabis indica
ggatgctttaaatccaaacatgactgtagcgtccaggtgttgcccccaggtgtgacaagggcgattcctgtccggacagttgatttatagccgacccgtccacgtgtagtttccaagtcggcttgtcttcactattacttagttgtggtatttgtactggctcgaggttgccttcagatatgctttcttccttgcctgtgcattctaccacaaagtctgctaaggcctggcctttgattgctgttcggggatggaaagtaatttcatacttacccagttctactgcgcacatgagttaccgtccagaggcatccaacttttgcaatttttggcgtaacggttggtcagtgtacacccaaataggatgagattgaaaatagggccttaactttcttattgcttgaatcaagtagtaggtgagtttctctatcaatgggtatcggccttcggcctcaatgagtcttttactaatgtaatagaccagatgttgtgtgtttttttccttctctgatcggtataacactcacgacatgctccgttacagtaaagtatatcttaaattcttctctgtctacaggtttcgagagtacaggaggtttcgcgagttgcgtttttagctcttgaaaagatttttcacattcctctgtccactcaaattgcttatttcatcgcaggatgctgaagaatggaacacacttgtctgtggattttgaaacaaatctgttgagtgcagcgatccgacaagttaagctttgcacttccttcattcttgttggcaatttcatatccaggagggcttgaatcttctctggatt

SEQ ID NO: 367412 - DNA, 463 bp, Cannabis indica
ggtaatgaccctaattcacgacacatattattttagagtaataaccctaattcatgctttcatttgattaaccatattatatattattgcacattattgctttcatattctcatatatcctagggtaataaccctagaccacattattactaaacatagagaaacaaccctaatctcgatttctcacttaaacacagtatactatccaacatgagcgccatagtgcttgactctacatgctaactactgtcttacctggtaatccaagtattttgagattccaaatccctaggtgttcctaagcaagcgtaggtaatcctagcattacaaatatggttaattcctgaattcactttcacatatacacataatttcaactccatttacatattaatatatatagctcgagtcaaaaatataaaggacgtccaaaacggtgttggaatttattttaccaggatct

SEQ ID NO: 367413 - DNA, 538 bp, Cannabis indica
ttgaatagtagtgagtctgaagctcgaggatgattgtacatgtcgatacggtgtgaccaggagtgttttttcttgggacagcatgggcttcattttgtagtcgttgtgcgacgtgtttataaaagttattttgaatatgaatgtaaaattttaaaaataggatcctaactttatgtatgaatatatgtatattataaaagtttaaatttaaatcaaaatttaaatttatcacgatttctgaaaaaacccctttggtttgcaaaggggtgcactgtaattaaaagcccactatagcgggtctaactattagggtgttacaatttttggtatcagagctgccatgtttttcatcgaagaccgtcaagacatgtacaatcatcgtcagagataagctcgactcatggttgagtaagcctttacctgtttagtaatttatttgattagaaaagtatgttaataatatgttggctaattatgatttttgccccctgaactttgatatataccaaatcatgccccctgaacttttaaggtcatt

SEQ ID NO: 367414 - DNA, 1027 bp, Cannabis indica
gatatgtcggaatcagctgaaaccgagttccagtgatgcttggatccttcaccatgaagtactcacaagcaaaatgacctattttggtgatggcctggtcatcgctgccggtcaaccacttgaagcctgactgagagaagtagaattaccccgacctgccttgcttgggggtagacttcaagtcaaagaaccaggcgacctcgtggggggaaggagcatccaatccttgggaagcgtagaggacgaagagagcgaacaaatacttaattccctttggagtaatttgggtcaggcagaggccaaagaagtctaccacatccttgaagtacttgtgcaagggtattagtgccccttgatggccgtgagcccccgacaaaggacacattcccttatcaggatctgttgcacggttgtcgtgggcgggaatgtagcagtccagctcgcccaggtacccgtcctggttgagggtttgaaggcgtgcctccgaaatattggatggaggacttacccacctggcgcacaaggcaccctgcctcctctcagcaagctcctcactgacttagtccacgccctcaaccaagacgtctccgccagcatcaactggttgcccagcctcgttgtactccctgaagttagggggttcaacctcttcctctccctccaccttggaagactgcccggacacacctcgtctagctcctcaacctcctagacctcagcgtccccctcaagatcctcctctatcgggacggccgaatcctgttcggcgtcaggaagagtggcgagccgagccacttgaggatcagaagcgtcagccagacgcgtggctttctttgtacgagccatcatcctatggctgggtacaaggtctgaagagtttcctttgctagaaggaggactagcacgaagacgaggatgaacctcgtgtagaagttgaagcaaatcctggtcgatctgatgctcgagttcccaagactcaccttggttcatctacaaaaagcaacacacaagatgagtgttggacgga

SEQ ID NO: 367415 - DNA, 508 bp, Cannabis indica
actttatggtgggataaaccacaggtcaggtaataatccatgtctgcatttaacctcatatattataaaatattataaaaaaaaatataaacaaatcacattaaaaatggaaacaacaaaatgaaagcaaattaacctcaaaagatgcaaacaattatttaatctcaaaataaaaataactagcatttaacctcatatgtatatgtgcgtgtgaaatagaaataaatattacaaaaaatagaaacaaatcacattaaaaatagaaataatttaaactcgaaatgaaaacaactatcatttaaccttaaaaaaatagaaaactagctcgcatttaaaaatgcaaacattttaaccttgaaaaatagaaactatactttgttaaatggaaacaactaatatttcacctcatatatcataactaatggaaaaaaattatatagaaaatggaaacaattagtatttaacctcatatatgtgtgtgtgtgtgtgtgtgaaatgaaaacatatc

SEQ ID NO: 367416 - DNA, 676 bp, Cannabis indica
aaagatagtaattgacaatcaaatatttaatgtgtctttattttccacaaaagtaggacacgattttgacaactataaacataatgtggcatccacttcagcatacagtcgacatctcaagggttgggcattccagacatccattcaagcaaaatctcattcctcattttctaaggaaaaatctagggttcacacacttgtataaaccatacagcttttctagtgttatcgtgaactaagacttgttagcacccaaaccaatagtaaaaactctattgttattttctttattattcatcgatttctataagcttgcacatatagtttattggtttctaaaaatctcgataaatattttaatttttttattgagagctgaagaaagcagtgataccatcaaaggttgtatactacaaccatggtactcacgtgaaacaaaattggcagtcgcgatggaaacactcctctagacgacgtagatcctacagttcaagcaaagataggagttgatggagatctaataaaagcaactagtaaaaatttacgagatgagatattcaaagatctcgtgaatcgttgactctcccacacaagcagggtgaacataacaatactcaatcgccttgcgttttacacaacatattaggcatcttgcatcatcaatacaatagagggg

SEQ ID NO: 367417 - DNA, 586 bp, Cannabis indica
ctttctaattccaatgtaggttgtctccatgaggagacatgactttagttgattctaagtaagtttagacaatgtctaaacttgtcaattgtagtactctttgtaaagatgtctgaaggattgtcatttgttccaatcttcttaacttgagcttgctttgaactgattatatctcgaataaaatgtagttttatatcaatgtggtttgacctctcatgaaacatgggatttttcatgagatgcaaggcactttgattatcacagaaaaaagtgatgtcttcagattctatctccatttcagttgacattaccttgagataaatagcttccttgatggcttctgttgcagccatatattcatcttcagtggatgacagagcaaccactttttgcaaattagatttccagctaacacaccctccataaacagtgaacacataaccagttagggaccttctgctggcttttgtgccctaaataaaacccatttcaatataatcagacttacttattaataaagatcaaaaattacattttattttgcatggtttacatgatttatttcatgattatatatataatgtat

SEQ ID NO: 367418 - DNA, 1125 bp, Cannabis indica
gcttgagcaatgtcttttgaaaaggaaaaccaatgtcccctaacatacacttttcgaaaaagtctagaattctcatcaagaaaatcatcagtgagattagcatagaaatccttaacaatgtttgcaatgtacccattgaaaccagtgagagtgttttcccattgatggaattgaataaacttaacaattccatacccgatgagcatgcaaatcataattcctctcactctcaaacttacgggtagcatacaaattccaatcacgctcattatcacgataataaaatcgaggacagtgagaaagggttgtaggaacgttaccaggagaggattccttcattggctgcttgcctttggcagcagcagaagcctttgctgctgaagaagaacgagcaggagttggagcagattttgtcaattgaggctctggctcgagttcagtgtcctcactgtctgaggaaactcccatgtcctctggaatctccttctcggaatggagagaaacagatttgtcagaggagacttccattggttcttcttcttctgaactcgaagaaaccgaaggaggattggtcttaagcttcttcttggctggaggcactggcttatcacgacttcgagatgatcgaagttccttctcgacagaggcttgctgggcacgagttcgagtagaaggaccggttggagtggaggcaggaactgatgcagcaggaggaggaactgcagcaggtggaggagattccttcgaagatgaggacgatgaagaccaggttctgtaaggacgcacagattttcgagccacttgcttaggaatgcgttttggcttctcaggctgagattcacgctggggaagcgatgaatctcctatttttgcagcagcaggaggcacggatgaagcagcatgatgtggattcgagggggttgcatcggtttccaccatctttttgggataccctagattctttattctcaccattttgaactgaaagagccaatgaacagtagcaacaagagagacaaggaatagattcgggtaggtggtgagtttaaatgacaacaattggtttaaataaacatggaagcaagaagagaaaaggaaaccgattttgaaattttgaaaaataac

SEQ ID NO: 367419 - DNA, 633 bp, Cannabis indica
aggcgaaacaccaggagccaagggaattcggttggatcaagtggtggtcagggagctcaaattccccttaatatccgtggccgaggtagggcacgtggtcggggtgatgctaacccgccataggctgcccaagctgcctaagaatgggaaaacaggtttgcagaaatgcaacctagatacaccgaacaagaggaagtggttcagcagttaagacagcagggtgctcctgcggtccctgctctagaaataccagtagctcctgcctctgctgtggaggccgaacatgtgtttgctatgaaccggatggaacccttgtatgaaaggttccgtaagcaagcacctctagttttcccaagaggtcccgacgtgatgaaagccaagcaatggctaaatgtgatcaccatgatcttgaatttcatgggcgtcactggtaatgatagggtggcctttgccacttgccaatttcaagaagatgctctggtttagtgggacatggtgttcatgattcatgacgttactacaatgacctgggagaaattccacgagctttttaatgccaagtacaacaacgagggagttagaagtgccaaaagaaaagaattcacacaggtgactcagaaagagaatatgagt

SEQ ID NO: 367420 - DNA, 480 bp, Cannabis indica
tggaagggatcgatattgaacttagataagatatcataaatttactgtgatatctttctaagtcaatatcaatggttaatcttaggtctatagatcttaatcttgatatgattaggttcagcttagctgtgttgtttatgttcttacaggtgttcgtagatgctaacctatggttctgacagatatttacatattgggaacatggtagttcaattgagtgggagtgttgatcatatatattaatctatagcttctacaagtatttagaagtaaaatgatgatttccttcgagcttggctgaatagagataaatgattgaggccttattttagtaattatgttagtttactaaattatcatatatagatagctaagtattttaaggataaaatacattgaagggtagaatggtaaatttgtccatttttgatgtagatcatctatagagaattttttgactattaggattgtaacaatgga

SEQ ID NO: 367421 - DNA, 805 bp, Cannabis indica
gtggtcatccttttgaggatgaccagcttcttaggaagcaaactaaaaggaaaagtaaaataaaaaggaaccaaaaagaaaaagcaaagtcaaaagcaaaaatgaaagtcaaaaaataccaaatcaccttatccttctccctctactttgtggcttctgaaccagggccaaaactcagtattttccacaattttcaagcctcttcctattggaattcattaaggaattcaacccctagctcctccaaacttctaaggtaaaacctaacctgaaatttattggttttctagtatttttgttagttttcagtggctgtttatagtagaacatgttgaataagtttaggaaggttatgaaatgattattaaggtcatttagtattgtttggaaatggtttgaattgttttggatggttgtagcaaaagttatgcaagtttgagaactcaaacttaacttggttgtgataacatgaattttgttacgaactgggttaaggtttcttcatgaaatatgttcattataattttttaggttctctacgaaatttggtaatgtttggatcaagattggatgagttatgggatttccgaactcaaacagggaggtttcgagccatctattgagaatttgattgaggtttcttcatgaaaaatgttcgttgtgatgtttttagataccatgcaaaattttgtaaggttcttcttagaatttcaggagttatgcaagttttaaaatgggatagtggagtttcgggccatccaatttaggcagaatttgggggtccatcttaagacttttcccagga

SEQ ID NO: 367422 - DNA, 603 bp, Cannabis indica
aatggtctccaaaatctcaaatgcttcattgtaagacttcgacaaaatagcaccattggccgatgcatctaacaccattcgagaagctgccttcaagataagtacaaaaatgagttaccaatagttaattcatttattccagatgttgtaaatataaaacgtgagggctgtccacgtttcaaaaacggttatctctaagaccaaaatagaatgattatcattcttaaaaattctataagtagggatagaacctactatgtaagtgatagataaatttttgggagaaaaaaactttaagaacttaattaagtatagaaaattcagagattattactttatatcgaatatcttgtaatattaaatagctcaaaaacttaaaattaatatggactcatgaactatgtagatttagcaaaaaaatcacgtaaatatttttgtattttattatctctattattaatagttacttcttaattttattcaaaatgtctcattattgttgacaaaattatgtgttaacatcctcctttactttttctatatttttttttactaattactaaattatttgtgtattttatagttttagttatatttatataa

SEQ ID NO: 367423 - DNA, 1099 bp, Cannabis indica
cgtctctaattaccccgcaaagttataagttccattatctaaaaaaatggcagcatcaacattaatcttcaaggtattaacagctggtttgatccatgtctcatctccatctacatctgtaaggaaagcagcagtgggattcatagttgtatcttgagcatgagtccaatctgtaaggagggctttagctaaatgaacaacgctctcaaccgtggggattttctcagatcaaactaattcattacgatgcctccatatcgcccaacacatcattgcagctagccttcgttttcctcatctacctgctataggaccgaagcaaaccagttggcaaaagaaccaactactgtcagattaacaccagcagccaatcgttgccaacatgccttggcaaaagagcaatcaactaggctatggtagatgcagtttcttcgcacacagggcatacgatatcaatcggcacatgtctagagcggagtcttgtttttgtaggcaaacaattagtagcagctcgccataacaagtctttcacttttgggggaacacttttgggttattaccgtttttaaaccatgtattttgtaaaagttaatgattggatcctttattattaagttttattttgacaaaaaatcagttcaggatattatttaaaactattctggaaaatacaagatctaatttgtcatttatcaaaatagaatgtccaattaatatttttataaaacacaaggtctaaagtggtatttacctaaaataaaataaaataaaaatgattatttctacaatgcacgtgatgcaccctctacctgtttcaacctctagaagaattttttagtccaatttttttatattcgtgtacattatagttatttaagatatcctacaaaattttgagaaatttagaataatttacaatataaaaagcagtatttaaacaatctatttcacaagcgtaaaaaataaaatacacactacaacacactttttgaaccctgttttcggtcggtgtgttaaattttctgattttttaaattttataaaatgtcttaaaaactataacatacatgacaatgaggaaaaaaattgattaaaaagt

SEQ ID NO: 367424 - DNA, 619 bp, Cannabis indica
taaaaataccttccgtcactattgtggaacttccgtaggtacctggccgttatgtgccaagttagtgtccacgtgtcattctttgattagtccacgtcatttaatttatatattttaattaaaaaattaatttaaacatttaaaaagtattttaatattaaaaaatataaaaattatattacaattaaacataatttattaaaaaaactaaatgacatacttaaaataaaattaaacacatttaatatacattcaaagtcatccattgctcccgaacccagaaaatttctaaccccaattcaaattcatccattgttcttccccaaattttttttactcagatcttcctgtagcaacatcaaatgcggtcgaaaacctcatcactcaccaacatatatttagcaaaatcaaattgacaacaaaaatcggaccaccaagaaaacacagaaaaacttgagtaatagtaaaaaaaaccccaaaaaaaaatacttttgacaatgaacaaaacagagattagtcgctaaaaaccaacataaaaattgcaaggttcaaagagtaatttcagaacaatctttataaactatagtgaggttgatacccatgtttagattcaagaaaa

SEQ ID NO: 367425 - DNA, 510 bp, Cannabis indica
aaaaataagagttttgatttttacctttaagcttctaaatctgataaaaaaaatatgaagattgaagaataaaaatatgataattcatatcagaaacaattaatattgattaatgagatttcaattttagttaaatatagaatatcaatcgtcaatccacatgcaaacggatgaattatattttggaggggctgatttatttaataaatatatacatataaattaaaggaaaacaaacagactaacggagacttaggctcttaaatgtacagtttggcattattgagttggaaaaatataatttgttgggacagagatgggacaggaatatgggaaaagggaattttttcctctatccaggtagtctttaaacacccaattcataagatccatgaatgctgccggggcattggtgagtctaaaagacatcacaaggaatttatagtgtccataccgagtacagaacgcagtttttggaatatcttcctctcgaattctcagctgatgata

SEQ ID NO: 367426 - DNA, 465 bp, Cannabis indica
tgaattaaaacgatgatatgtgaggatgtggatggtttcatgttgatatgtgtgttatatgatgattgattgatgttgtgagtttttgtgaaaataattgaattttcgtttctggaattattttattggatagtttggaaacaattaagcaattcacttttttacagaacttaatttcgattttatttgaattagttatgaatttttgaaaatcagaaaatatcagggtgacatcactcaccccacgcgcgcggatcctcggatttctcggtcgtgtgcgggttcgaacagccttttgtcagagatttctcagtctgaaggcgccgaggatgtctggagcatggactacgcgcgcgaaaatgctcctggacagtatgcattgcatgctccatccgcccggtcgcatgctcctggacagtatgcattgcatactgtccgtacacttgcaaattttttcgttttctt

SEQ ID NO: 367427 - DNA, 960 bp, Cannabis indica
actaatgaggattctttagtggctaaggtgtataaggctagatactatcctagaggcaattttttgagtgcggagttgggtccgaacccaagtttcatctggcggagcattttggaggctaaagatttgcttcaggctggccttaggagatccatctgtgatggtaagaacacttctatcctcaacgatccttggctccctggtgttgataaccattttgtgactacatatcatcctaatctggtgggaagatcggttgatagtttattgcaattagagagaaggagttgggatgtggatttgatccgtgatatgtttaatcaacatgacatggatttaattctttccatccaactgagtgatgcacaaaggggagactgctggtactggtgtaaggaaacaaatggggtttattcggtgcgtagtgcttataagttgttgcagcagattagtggagattggccgagtgatggtgcggatgtgtactggaagagattgtggcagctgaatgttccagctaaggttcatcatttagtttggcgtgtgatttcgggtactcttccaactaagttacagctctctaatcgacatgtacatgtcgatcttacgtgtcctatgtgcaataaagcccctgaatcgattccgcatgttctttttggttgtgagtttgctcactcctgctggaatattgcagcagttgctgctgctggtgtatctgaaagtgagttcctcacgtggttctgcgatattctgcagcaaggaagcaagcagatagcagaggaaactgctatgatattgtggcggatttggatggcgaggaatgacatgttgtggaataagaagtcgactacagttttagaagttgtccgttcggctagaactaatcttgacacatggaaaaatgctcaaacaagggtgttaccccgtgttgaatgtcaatttcagcaatggaagagagca

SEQ ID NO: 367428 - DNA, 953 bp, Cannabis indica
tcaactctggggaactcccagataaccgaaatgaagcttgaaaaatgagaagaaaggcagcacggtacagcatcgtagacgggatcaagtacagaagaggattctcaatgaagctgcacggcttctatatgaagttcacgacggattctgcggaaatcatgcagccggacagcttatcaaagaaaattctaaggcaaggctacttctggccgacgatgatcgaagattcgaaagcttacgtcaagaatgcgacaaatgccagagattttcaaagataccaagagctccgcccaacgagctgacacaaatgcaaagtccgtggccctttgccatctggggaattgacctaatcgggcaattacctaaaggtaaaggcggagtgcagtacgcggtggtagcagtcgactactttacaaagtggactgaagccgaaccactcgcaactatcacatcaaagaaggttcaagactttatagtgaagaacatcatatgccggttcggactaccgtacaaaatagtttcggacaacggcaagcagttcgacagtcaatctttcactgatttctgcgcgaaccatggcatcatcaaaagcttctccgcagtggcacatccacaagcaaatggtcaagttgaagcagtcaacaagaccctgaaggacacactaaagaagaagcttgaagatgccaaaggaaattggccggaagaactccccgaagttctatggtcataccgtacaacggaaaaaacagcaaccggtcagacaccattctcaatggcgtacggttatgaagctatgctgcccgtcgaactcgaaccaccatcccacagaaggttgacgtacgatcaaggtaccaatcacatactccttgcagaatcacttgatgaaatcgaagaaaaacgagcaactgcaaacttaaagttggtagctcatcaacaaaaagtagctcggtatt

SEQ ID NO: 367429 - DNA, 800 bp, Cannabis indica
agctcatgggagtttttctattatgtattgaacatactagtatcttgtatggaatgcttatgatatgtgttgtttattgaagtgacaggtacaaaaggagatgaatgcgcatagtctcaattttgttgtacctcatgcatgtttagtttgattgttaatgattgttaatgaataaatgtcttcaaggtcaattcatacataatatatgtatcctgtcgatatgatattatgtacgtcttaattggataccttatgtgtgatagacaatgttatggtggttgattatattgtccaagtgggagaatgttagaattattattgtggactaatataatcatgagcttaataccataaacacaatcattaactatgtgcccaatatttactcataaccataatgggatggttgataaattaattatgtattagaggcacatgagagaacactttatattataattggccattaaattatagtatactgtaaaaggaccacttaagccctattagtaaataatcttttagggttataagggtatgggatgtatatatatgttattgatgatagagtggttttaaggtgtatggtaataagaaaagagggaatagctccacattgtggctctaagggcttaggtccaatcttgagaacttgtcggtgattcttgttggaggcattaaagcaaaatagctcatatggatggattgggaggtatgtgtatttatgaatttgatgctctaaataaatattgatcttggttgatgattatgagtaataaaaattagcatttaatgtattt

SEQ ID NO: 367430 - DNA, 605 bp, Cannabis indica
acgagcacagttgggcttccacattaaactgccgaggaaggaactgcaaagaagcaccagggaagttcgagaagagcattcgaatgcaggaaactaaaccagaaagagcagagttgtcctgccaatctccatttacttttgtgactaagtttagacaatccgagaaaacgacttgaggtgtatactgggagtcgatgcaccatttgaggctttgcaaaagagcttggctttctgagaaaatgggcgaaacaacaccaggcagcctacggaaatgagaagccaacacagtctgatatccacatttaaagacaaaaccaacaccagtgaggctgttatgatggtcaatggctgcatctacaaaaagagcaggagtatcaggtgacaaggaaagaggccaatgctgatgaaatgactgagagatgtttgaagcttctgttggctgactgtcatgttgttgggagtgttgcgcatccttgtattcctgcaaataattcacagcaaattcttccacattgttagtagtatgattctttttgaaaagaatagagtttcgtgtattccaaatctgccaaatgaaagtaataaagacttggaaatcctgttta

SEQ ID NO: 367431 - DNA, 713 bp, Cannabis indica
tttgctacttgtatttgtattttatcatttttttatgttccgggtcatgttcgtgtctaccatctaaaataaatttcaaaattcaacataacacgaacatgacatgatgacattaaaatcaacaatttagtttacaacccgccaacacaatatgtgattttgtgggtttgacacgacatgaacttattcgagtcgtgttcgtgtctgtgttttttaatttcttcgtgtcacgtgtcgtgttcgtgtcagcaacttattagtaaatttaagacctcaacacaacacgaacacgacacaccaacactaattgccactccaacatgacgagcacaagaaagttcaatcccaatccaaatggcacatgtaacattatttacaatgcatgattggctacagtatgtgctacttgattagcatccctacaaataaaattcaaaccaattacacaatcatgtgtaatattaatttattttaatatgaattaaaaaaaatgtttattaatttatttttgagtaatttatggcgtaaatacttaagtttaactctttattgtagataaatacctaagtttaattttttacggtaataatacctaagttatatttctataacttttctagttacctgtccattaagtgtcaagttattatacacgtgttatttttttattggtatatttaaattaatttttaaataaaaataaaatttaatga

SEQ ID NO: 367432 - DNA, 505 bp, Cannabis indica
gaagaataagtggttgaaataaagtggcaaaattgtaactagagaatggtcctattaatggccgaccctagtgttgattttttcctaatattttattcttttttaatccatataattcagccctatgccctagttgaaacactataaaaggaacatgatgctctcactcatccacttgattttcatcctgccaaaatctagtttcaaactctgttagacaactagtagatgagagacaccttctataatgagttttcaagcctccttcattgttcttcatactcgaacccatagttatagagtgccatgggcacacatagcaagtcaagtactcaatcacagtgagtaagacggtggtaaccaaactcgaaggagagaaagagatccatgctcagatcttgataatactctgtgacagaaaagaacagagattagagatctgagcggaatgagtcattatattctgttgcaaccaatgtaaggtttcttaaacccttatgtgttt

SEQ ID NO: 367433 - DNA, 398 bp, Cannabis indica
ttcccatacagctaacttacccaacccagaaggaatcttgcagaatgatagttgagtctggaaagaagttcctggatgactatcatgtccactcctagttcagtctttaagattgctagccctcctccaaaaaggaatttcaaacagctagttatccttcctgtaagtttattcctcatggaaggttattcttcctgaaaggtcattctccttggaaggcagtttcggatagtcgacttcagctggttctatcctatctggaagcttcttcacaaagtgcctttggtccgtgatcccggttactagtatatgttcccggatgcacttagactaatgctgacgtggaaatctctcacataggagagttggttaagttagttactgttggaaattatttt

SEQ ID NO: 367434 - DNA, 847 bp, Cannabis indica
tttaccaccagctgtgaaccattgtagatttaaatgtgttcgaccttcatctcctgggctagtcttggcccagcgattagagcttcgtactccgacttcgttgttagatgctttgaatccgaacttgactgcagcgtgcaagtattgtccccaggcgtgacaagggcaattcctgcaccagatagttaatctgtagccgacccatctatatgtagtttccaggtcggtttatcctcattgtgacttgactgaggtatttgtacgggctcggggttgctttctggtatgctttcttttttgcctatgcattctaccacaaagtctgctaaggcttggcctttgattgctattcggggttggaaaatgatttcgtactggcccaactctaccgcccacttaagtagccgtccagaagcatctggtttttacaatatttggcgtagtggttggtcggtatatacccgaataggatgagcttggaaataaggcctcaacttccttgttgctagaatgaggcaataagtgagttttcctattaacgagtatcggccctcggcctcaatgagtcttttactgatgtaatagactgggtgctgtacattattctcttctctgattagtacggcactcacgtcattttctgtgatagctaagtatattcccaggtcctcgttgtccagaggttttgagagtatggaaggtttggcaagttgtgcctttagctcttggaaagcttattcacactcctttgtccactcgaactgcttgtttcctcgcaggatgttgaagaatgggacacacttgtctgttgattttgaaacgaatctgctgagcgcgacgatctgac

SEQ ID NO: 367435 - DNA, 1089 bp, Cannabis indica
cacggtttggttcttaggttccaagtccaagtatcgggtcctagtcccgttcccagttcccaatcgcggtcccagtctgggttctagtcctagtccaagttcaggtcacggtttttgtccaggtttgggtctcagtcctaatctttgtttagctctacgtcccggtttcaagtcagagttctggtatgagtccgtgtctggctcaaggtccaggtttcagttagtgtttgggttcgggtcttggtttgagtctgggtctgggtttgggtttgggttcttgtacgggtctagcatctggtccaggtcccgagtcacgggtcctgggtagcaggtcctggcgcaagtcttggtttgggttcgcgtttagagctagttttgggtccaggtccaattcctgttccaaggtccttattctggttcttgttccgatttcaggtcttgggtccgagtctgggtttgggtcctggtctagaaatgtttctaggttagggtcctggtacgattccaagatctagacaccgactacgggttgggtcaaaccctaggtcgtgggtcaagatccgcatcccaatcttgggtctcagtctcgtttcgattcgcatcctgggtcccagtccgttttcgagtctgggtttgggagtgagaccgaggtcgggtcttgggtcccaatcccaatcttgggtcccgattctggttctaattttgagtttgggtccccaatgtaggtctggtcctaggtccaagtctgagtctccaatctcagtctgaaacctgggtctgggtcttggtctatgtccgtgtctgggttcaggttcgcatccctagtgccgatctgagttttgatttgggtctgcatctcgatccgggtctgggtctaaggtcctagtctgcttccaattcccgaactcaaacccaaactcagacttggacccaggtctggagtacgggtctaggtctaggtttgggtgtcggtccaagtctaggtatgggtcctaaatccaaacactgactacaggtcaggtccaagcccgaatcaagatctggatcacaatctcgggtccaagtttagttccacttcaggtcccaggt

SEQ ID NO: 367436 - DNA, 504 bp, Cannabis indica
aatctgtttaatattttattcttgaaataccattgctgagcggcttccgaaagggtagtaggaaagattctgcaacacatatcccgtcgtatcccctgcaaatccatttgcatctcgaaatacttgaggtgggaaagaggatcttctcttcctgtgtacattttccatcttctcttcacgtgctcgatccagctcgagatcattgtttctctatccagccatgccttggaacatatttttcagttcgtctagctgtgcctgtaaggctgggctaacctgctcgacattctggtcgatttgaatcacatcagtatctttctgagcgaggatttcagcacgggctttgggctggatgatcgtcgtaacaatctgatcgtctactcctctccttctgctcagatcgctccttaggtcatcactccagcttcacaatttcatcttgaggccttctgtgatgctgcttgggcctcgaaccccgatgaccgtcgctctacgactggtttt

SEQ ID NO: 367437 - DNA, 555 bp, Cannabis indica
acaaaaatagagggaaaatatctatttttaaggggcattttagtcatttatattttactaatttaatatgtaaatatctgcttaatttacctaattaaaggatttaagctctcctatataaagagccttaactaaaccctaagaccctaagctgaattctaagtcataagtagcaaatcctaagctaagtatgaactctttctttctcacaaacaggcccaccattgcttctctcttaactagagattttccatgtctaattcttacattgtaaccttaaaagagctactttaggtcccacctctagtgatctgagtagtattatttctcggtatcaatacaactaaaagggaagttaggtcattacccgctaactaagggggccgaacctctataaaatctcgtgttcttttactttcttgttctcattgtgtaacacgtggcaagcatcaatattaatacgactctactgttagttggccaaatatgaggtcaacaataatattattaaaaaaaggctaattaggatttttaccccctgaactttgacatgta

SEQ ID NO: 367438 - DNA, 562 bp, Cannabis indica
tcatcaaaattcaactttcaaatataaaattaaggtatatatcaagagcatgtgttattagaatttctttgatatcaaggtacttgtgtgtaataataataagaataataaagtgctttgaaggtgagtgtaattgatagcaagcaccacaaagagatcacaaaaagagttaggtaggattttcgtattcaattagtttgaaatttgatgctaagatatgataattaataggctctccaagtaaaatgtttgattttgaagagtcataaaataatggacacatttgaatcaaagtcggggctagactaaggcgaattaggcctatgatgtgctttaagacttactcagccccagaggctcaaaaagcaaaaaaaaaaaaaaaaaatcattttaaagctaataattttgttgctacctaaaatccaataaatttcaaagttggtcctaattaggaatgtcaatggggcgggtcggatctgatccgactctgatccgacctgatccagatcatatacggatctgccccgccccaccccgcctggatcagatactcggatcggat

SEQ ID NO: 367439 - DNA, 752 bp, Cannabis indica
gccatccaactttgcaaatttgtctttacaaaaaaagtgccacaaggggcaaaccattgtctcggccgaaaggccattttcaaaaaaaaaagggataaataaaaaccaagtctacatggtgggagacttggatggatcttcttcttcttccttttcctcggcctcctcctcctccttcctggacttctcgcagaaagccagagtttcctcttcctctcctccaagaagcttgtgtccatgttgggattcgccatccaggctagatatacagtacgaaggccaaccttgttgcatcgttatgtggtttcgacctccttctcaatgagattcttctcaaattcatcggcttgggcgttgatggtcttctcggcttcttcaagatctttctttgacttctcggcttcttgtttgaggtaggtcatttcctgctgggcgtcgtcccattgcttaatcacagccttgcattggatagtaatttctggacctcgccctccaggtatttgagccgctccgagagtcgtcgattggaagcaaaagagaggaaagaagcttggagaattacaaacaaatgaatatgagaaaaaagagaaaaaaaatttataataatacggccaacttaccatgaggttgtagtccaagttcctcaaaagcatctcttctggactcccaagattgattagatcccaatcagggggaaggagagccttaagtttgtgccagcaagcaatcccatatgcttgggcaaattcaga

SEQ ID NO: 367440 - DNA, 675 bp, Cannabis indica
aaatacgagagatgcatcagcaggagtgttcaacccgaacagggaggatccatatgtcatcaaagcagtagttggagtcgtagtcaataaattggctcaacctgatggctcgctaataaaaactactagaacgcagaacatttgcaaccctactatcaataaataaatgatgtaactcgcattacttatgtaagctttaaatttagtaatgaataaagagaataatttatattaagtaattacaaattttcattctttaaaattacttaaggggcatttatgtatgactaaccgcaattcatttgaaaaaacattgtctaatgcaaacccgccatttcaaaaaaaaaattgaaattcaaaggttctcgactaaacctctttgacgaaagtggagtcaaaccgttataactacctcaccaaacctttttgacgagaaagtggtcgaatcgttataacaccttgatccaacctttttgacaaagaagtgatcaaacaactataattttttgatttataacctatctgacaggagaggaaaatcaaaagttataacttgcgtataaaactgaatactaacagttctcgcgagcttggaaagtactaaaagaggcatcacgacgccttgataaaagtacttaaacctagaaaacaaatagataatataactatccatgc

SEQ ID NO: 367441 - DNA, 884 bp, Cannabis indica
tttcctacatatgtatttttaagctttttaataaaatattaatttaaattaataaataaataaatctaattagaatacatatattacctctttgaccatgtcattcagtgtccttcccagtatttcataaatactcttaggagaatgactttgaatacttccaaggaatgttaatatcatgataccaccactcaccatttcctctgaacgatatcttaagaaatttgtgaaatcaatttgaaattgatccaaatatgatttgaacaccacagcaggacttgtcttcgaaatgtaaatgtttcctttgttatgtgcttctccagtttgatcatctactaacccttttggaaccttaatttatagtagaatttatatatgtaattaataattagtattactattgaaattaaataaataaatatcatgtcaaaatatatcattcaactactctggtagtatatatatctaagtttcgcaatagtttacattttcctaaatggtaagtccctagatgtgatcaaagtggaggtctcctatttctatggaaatctcatgtggcaatagctataaacattactcaacaaatcacattgactgttttatagatgaccaagatggttcctcactgcactttacaggattctatggccacccaaataataatttatgctctcacacctggttattacttcgtcgatgctttgatgtagcaccaaggccggctatgatggagtgcaaagtgggctactgcacatggcccaaaaaaaataaaaggctcaatatattttttctttaatgtctattagtcacttctatcccaatgcctaaagtccattttcaattctattaatgcttttaagtaaaaaaaaaatctattactgcta

SEQ ID NO: 367442 - DNA, 738 bp, Cannabis indica
aacagcgccgaaccccaatcctttgtcgacaatgaaccaccatgaaccccacaacccagtcgacttcgaacagccacgaaccttgaagctctgaagccccgtcatcgatgaatagccttgatactcgaagctctgaagctccgtcatccacgaacttgcttgattctcgaacccaaacaccataaaaaccatggtccacaacaagtatcaaactccatcaacaacaaactcgcacgacgaacatcgagatcctgcacagatgagagacggagagagagaaagagagactgagaaatgaatgagaaaacaaatcgaccattagctgccggtgtcgcatggtgcttccgccgtaaggttgggaagtcgttcgctggggctgggaggtgcttcgaccgtcgttcgctggctgggaggtgcttccgccgtcagttcgctcctgggaggtgcttccgccgtcagagaaagaaagaaagagttaatggttagagaaagaaaatgtgacagggttagagaaagaaagagtttgggttaggtagttttaagtaacgaagagagagaaataaattattattattattattattcaaatgaataaacaataaagaatacagttgtattttattactcatttagattcccaatgatcattgtattttattattttattattttactattttattatttacttagtaaactgatagggtttgtaaaagtgatagggttgttttatttttt

SEQ ID NO: 367443 - DNA, 613 bp, Cannabis indica
ctgatcctcaagtggctcggctcgccactctgcccgacgccgaacaagatttggcgatcccgatggaggaggaccgtgagggggacgctgaagtctaggaggttgacgagctggacgaggcgcgtctaggcagtcctcccgccgcgtagggagagcaagaggttggacccctaactttggggagtacaatgaggttgggcaaccagtcgatgctgacggagacgtcctggttgagggcatggactacgtcagtgaggagcttgccgaggcggctcctcataggaggcagggtaccttgggtgccaggtgggtaagtcctccgtcgaagatttcggaggcatgcctccgcactctcgaccaggacgggtacctgggcgaattggactactacattcccgcccacgaaaatcgccccacaaaccctgataagggaatgtgcgcctggttgggggctcacggccaacaaggggcgctgatgcccttgcataagtacttcagggatgtggcagacttctttggcctctgcccggcccgaattactccaaagggcatcaagtatttgtccgctctcttcatcttctacgcttcctacggatgggatgctccttccccc

SEQ ID NO: 367444 - DNA, 558 bp, Cannabis indica
attaattttagtacaaaacttaatatttttgtatattagttcgaatcgaaaaaacttataattatcaatgtaaatactgtttgtttttttttctagttatgcttctataaaatataattttatatttataattaatttaattattattatatataatttattaatttaaaacaaaatgttttaccgatgcattaacttacccctaaatcactcgtgctttttcccacattggcgcaaaatgttttcccggcgcaatatgtgcaccggcaaaacctttcgtgccaaatgtggggaaaaggcgatgcgccaacaaaaaggattctaagctggcttaaggaggactagggtattcgtttatccaggcgttgaagttgtcgcagtgctaattagcgccgacaaaagctagttttgttggcacaattcacctatgccccggtaaaagctcttttaccaaccaagtatcgttgacttcttttgccagcgtaattatgcactggcaaaggtgttagcccaagatatgtttccaagaggggggtgaattggaaatttaaactaatt

SEQ ID NO: 367445 - DNA, 576 bp, Cannabis indica
aggaagcccaaagttccacgagcaggagggcctaccataactttcaacgatgaagatgctttcaaaattagatttccgcacaacgactcgctggtcgtggaagttaagatagccaataaaatgttggccagaaccatgattgataatggagcctcttccaatatcttgttcaaaactgcttatgaaaagatgggactccagctcaaggatctaaccccatgtctcatgcctgtctatggtttctccggtcaaggagtcgcacctcgaggacaaatccatctacccctcactgttggacaagctccaacaagcatgactatcatggcacagttcttgatattggatgttccttcagattttaacgtaatgctgggccggccggccttgtatgacttaaaggctgtcacatcaatcttccactcatgcccgaagtttccaacaaagaatggggtagggtgtctgagaggaaaccagcagtctgctcaggaatattataaccttgcagtggccaaggctaagaaggaagtatcctccagccagagcacagacaagggaaaaaacatttccaagtaggga

SEQ ID NO: 367446 - DNA, 741 bp, Cannabis indica
attgcaataacatatcacaccttatacgtaatagttagacatcactaccatttccttttatattatgttaactaaagaataaataaactgttaatttaagtaaaaattaattaattataccaactaacttcacaaaatattatattttattattattattttcatatttaaaagtaaccatgtattgttgtttaagatagcttcacattctttcagtaacttttgttacctttaaacatgtgtgataaaattacagagttaggataaagtacacttaatatcaaaattaataaagtcaatttttttaatattaacgattctaatattaagatactatttggtttctttataagttcttttaggaatttatcagaactgtttcaataagataaactcatttaaaatactattatgtaacttttaaatatcaaattagaaaaaaaaattgtaatctattaaagttcgttaaattttatagtttgattactttttcgttaacaaaatataaaataaactaaaaggttactttttatttcaatcatttttctagattcagcaaagaaatatatgatttccatatattaaaatgatcatcttaagaaagtaggtcgtgatgatattgagctcaaccaactaacgatgtgatgtaaaaaaaaaaagagataagtggatatacttttataaaaatttattgaaattgctatataaaagaagtgtatgtaaattacaatataaaggtta

SEQ ID NO: 367447 - DNA, 635 bp, Cannabis indica
cccctttatatacaaagcaggcgtccaattagttatacaaggattgcattcattgtcaatctgtttttacacattgaattacaataactaaactaaataacgttaacatcaataaatgaatagcagtcactaaattcatcaacatatgcgcccttttaacatgcgagttgactattcatattctaatgttacactcgcaggcctaacacttaattacgtttaggatgtctgcgttcttaggtagtcgcctttgtggacattgcatgatgggctgatagaacctagacatgcgaatctacatcggtttatcaaggctttagggtcattgggaccaactcgcattatagagagttggtctttttgtttatgcaagaacatggaaaggatactcgcacatagttcgatacatgcgaattaccctcttgtcccgcataatacgagttataattatgcgattagactttggtcatactcgctgtgtctcgctaattctatcatgagtgaggtttaaaacttcgaggagtctctcatggacgtctcagctttcattggaaaattgagtacacgtgtccattaaataggagtctggtcccgagtcgctatgtgagagaaatctcactataacacatgcccct

SEQ ID NO: 367448 - DNA, 968 bp, Cannabis indica
agaatattagattatttaattatgtgtatagtgaaaaataggttaatatttattaattttaaaaaattattaataagataaaaagattaaaaaaaaaatgaaagtaaatattattagattactaataaatacttacaaagataaaaagataacaatagatgatagtttcaattcaataaagataaaaatacggaagaccaagccttcgtcttctccgtctctcaacaagcatgttggctgtccagatctcttcttcttcctcttcaaactttcagagtagcgatgagtctcaaaaatctttttcccacccgtctccgtgtcgtggtggttcaacattaatggcgattgacagccatccatcagccttctctcagctgggatcggaatcgtcaaccttgctgacgatttgggagaaagcgtgccaatccattaatgtctcccttacaggtttgatcccctctctgaacaaatctcattatgatccctattttctcttaatcatgactgcctattccagttctcttaggggttatagtcttaattgctctttctaccaacctggtcagtggatggatttggataatcccccgcctgatccggtattaaatacctgtcttttattctccctgtatcactcgagtacatctctagatttaggagatctatctgttagattcttaattgctctatgctttgtttcctatttaaactcagttctagatttagggaagcttaccctttttgtgcattatccatctgtgctttattcgtgtgtccctttattactgaaaatggaagacttagctaaatctttttctgcagcccttcacctcactgatactgaaaatacaatccattctcttgctgagcatgtcgatccaaatgagggacttccaccagccccaccccagtttcatctcatggccactctcttcacaacaaaaatttttaaccacaatgccctcaaa

SEQ ID NO: 367449 - DNA, 599 bp, Cannabis indica
tgtaatgtattgtattgtattggattgtgttgtattgtattagtattatttaatacaatacaatgtttggtattgacttgtattaattgattatataaagttataatatatttttaatacactcgatcccaacaccaattacgggtctgaatccgggtccgagtctgggtccgggtccgaattcgggtccgggtctcgggtctgggtccgagtcggagattggtgttgacctcaaatcttttgtaaatattataatacaagctaacacggatcatttattaggtattaaataatacaacgtacattgtattaaaaaatttggtcgtaataattactacaatacattgttttatccaaacatagtgttatttattgtttaatataatacgacgcttatacggcgtaccaaacgagcccttatattttaaagttatatattaaaatttactattcatgatctacacttaattatttattactctaaacatattttattaattattttgagatttaataattatttataaataggagacctagaatttttactttgtggagtcttatttttcattaaaaaaatatttatacttacattataa

SEQ ID NO: 367450 - DNA, 613 bp, Cannabis indica
ttggattatacttgagttggattatttgggaactccagttcaactttttgagatttgcctttcatggatttaaaaactgaagtcaggacattagttttatccaagttaaactgaattttcggttgaattttagtttcgtaatagtttttttacactttttttatgaattcaaaacaaccaatgttttgattggttttggtcatcttcttaggtgaagtcgccggaattaatggtggttctctttctggttgaatttttgtttcggtcgcgttgaattgttacatggttgcgcgatagttgcccgggaagcatggatcctgggttgaaggtgtgtgtaagtggtatttgtgtacgtaatttttttatttgggttgtatatttgtttatttgaccagctataagtatttttataatattatttactttttttttttataaaactagaaaaaaagaaaaccttaaaaaaactctctaaatattctcttcccttttatttttgagatttccaaccacaaattcaaatttttttaaaatcaaaaatattagagcatgtttggtattattttctgttttttgttttcaaaaaattaattttttagaaatgagaacaaaa

SEQ ID NO: 367451 - DNA, 582 bp, Cannabis indica
tccgcacaagtgcggatgtccgccctttgtagatttgattagattagaccgtgtagattagattgtctattttatgaacactcctactatgtacacttcttttcttttaattataattggttgaatttgctttcctatagcatgaggaaataactacaagtcctactgtcaatggtagagccagccacaaatattaggaggacaaaatacttataaaaatttatttttattataaagaaaaatataaattttatagagaccagagcaaatttatgagaataaatatgaaaatatgtgaagataaaaataaaaaaatacaaatttatataggcaaaattataatatgtgatggtaaaactaaaataaaaattaaatttataggggtaaaaatacaaatatataaaaaaaatatatacaataaataaattttaaaaagttgagtggtgtcatgtgccccccacatgacccccatgtccccttcgtcattgcctattgtagaaattcctccattgttcattttgagatgcgagtttctctaagagttaattttgagtttatgaaaactttgttttatgtgataaa

SEQ ID NO: 367452 - DNA, 769 bp, Cannabis indica
cttagtactatttagaagtgatattttacaattggtaacgatattcttaaaagttattactttaaattatacaagactctatacttttttttttttttttgaagaaaaagtgttctttattaacaagagctatcgcccaagagaatagacaacaactccaaaggaacactattaatagggaacatacgttcagctagagacaaagagtgtcgggcaataaaatgcgcggcacgattcgcagaacgtttgacaaaacataaagtaacatttaataaacttctaaggattaacttgcactcttccacaataaaaccgaacccagatttaagcttctcattgcttcggatagcagccacacaaaccaggctatcggattcaacagtagcgtgggaatagttgtgatttttcaaacaacttaaagcttctctaatgcccatagcttctgcaatttcaggtgtaactttgccttgctttgcaccagcaaaaacggagatcaattcaccatcaggatttcgaatcacacagccgaatccatgcttgagatcttgttcaaaaagggctgcatcgacgttcaacttgatgcctacagtcggtttggtccagatctccgaggcatcaccaggtttcggaggcgacaaaggaagtaagttacttctaccttgagccttcaaaaactggtgcaaacttgattgagcaaaacaaccacactttttacacttcgagcccgattcttccaaaggaaatcatttctggctgaccatattgccca

SEQ ID NO: 367453 - DNA, 642 bp, Cannabis indica
atatcataggtgtcattggagagaattgagtccatctcatcatcaacggcttctctccaaaatgccctatgtctagattgcatggcttctagaaaagtcttaggatcatcttcaataagaagtattagaggaattttccttattacttcttctctattcccttctaccatgtagaaagagattagttgagaatctattttatccttatttagacttttctctttcactactacaatttgcctttttagtgacactatatagtgacacgcagaaaagtgcatgtcactaaagagtcaagagtgatttttagtgacatgcacaattagactctaaaaattcagtgttagtctcttgtaatgtgagtcactaaaaatatgaagtgtcactaaagactaaaacccaaaattttctgatttttattaatataaaaaatactgacatatagtgacacgccaggcgcgaatggataaatatatgcccactcatttagcgtgtcactatatcataatttatttttttatatataataaaaagtacaactctaattaataagtaaataaaaaacaaaaaaaataaattgtaaatacatcccacgccagctagcctttttttttaacaacacactacctctttcttaaccaa

SEQ ID NO: 367454 - DNA, 583 bp, Cannabis indica
tccacattactagagcggtcattacaattctcggatacattagcttacttctctctttggtaattgagtccactattattggcttccccaattgccttatgattttcaataatgacttctctccccaatatttcaactccagattttccaatggaacccaaattggaatcacataaagattctcctttttaaagttaccatctgggtttcatggtttcatacaacagggcgcttattcaaaaagatataccctctttttagcacattatccatgtcttctatagtgtaaaaacggatcaagaatactccatatgaaatcatttgaaccttatcaatcttatctttccatacacgtcttgcaaaaccattgataacagacaggggagtgttagctccaacaacatagcaaacgattactgaaaaccagaagttaacctcctcttctatatcatccttagttatcctcactctttccttctccaaattcttaaatgaattatccgaatttcgttgaatattaccagattgcagtattggaggaatggaagtcttaccttgtgagatgttattgttacattgagca

SEQ ID NO: 367455 - DNA, 585 bp, Cannabis indica
gtacttctgtgtcaacacgttttcaggcacctttgaaattagtgagtatattatcttccatgtgggtatgctctggtattgagatatttcgtgatgtgactattttgaaccaattagtgagttgctggtgtcctacgactcacacatttttggtgaattggggtgagttttctgtaacattagaagatgtctatgctctccttttactgcctatatgtggtattacttccgcgattgaacctctgtcgaaagatgagaaagacctgttgtcagccttgacggaagcatccaatgatttaaaaaaaaatgatgccacgtgtgatatgcacgaatggataacccatttccatagaggtaacggctatagtcttgtggaattggctgcttgtatcactttatggttaagtaggtacgtttttccctcaaaacaatccaggtcagtacgtcgtgctttataccccttagcatgtaaacttgcccgcgggaagcaactcccaataggagctttttacctaggaactttgtatcataacttagactccatagttcgtgatataaattctggaagtatgaagacaattagtg

SEQ ID NO: 367456 - DNA, 678 bp, Cannabis indica
gtagaaaaatatataaagaatttgatgtatagaataaatagtaatgtaaatgtgtgaagtaataaaaaaaaataatattttagtaagatattttaaataataaaataaagtaattattaagagtacttatctacctatcttttaaaataattaattaaaatttttaatttttttttattttacatcacatatttacattatatcacatattaaattttttattatttttttacatcattcaaatattatatttattaaaataaaaataaaaataataataaagaaatagatagtaagagagagaaggtaaaagttaaaataaaaaattaattaaaaaatgtttaattacagagagaatgtgaatgctgacaaaaataaattaattaaaaatacaataaagcagctgcatgccttagctatatgtaggaggaaaatcttagagtgagtgtatatgtagttttcttatatacatatgtagctgatgggagtgcattttaaaatacctcactaaaatatgattttttttattttatctcacacattaatttctctatatttttctctatgtcatttaaataaaaatatgaaaatgagtaaaaaattaattaattgaaggaaaaagagaagaaaatataaaatacattttacctcttcactattcatgagctaaatgtagag

SEQ ID NO: 367457 - DNA, 610 bp, Cannabis indica
aaaattgaaaaatctgaaatttgggaaaaaaatcctacaaaaattgagttgggtgaggttactgcctaggatgctacgcgactgcagcctaggaaggctgcaaggagtcgagacgcgcgtgcgagggagtgagtgacgctgagaaaactcagcatttccagcctccctgaccgagaaaccttggtcaactgcaggggggacgcgggcgggtgttgtctgaacgaggggctacacgctgagttcagacagggggctatccgaacacgtgcgcacgcggatctaccttgtctgagggtctgtgcgtgcggtgcaccctatctcgaccttgtttcaacccgaaacttccaaaattcataacttttgcaatttttatcggaatcgagttctgtaaaaaaacaaattgcttaatttttcacaatgaatccaaataaaatattttcagaaagaaaaaaaatattttcatggagaaatttcgtaaaacacatacattcatcaaataatcacataaaccatcatgaaaccatccaaatcaacacaaacatcgttttaattcatatttcatgaaagtaaatcattaccatggctctaaggccagttgttggaattattt

SEQ ID NO: 367458 - DNA, 607 bp, Cannabis indica
aaatattattttaaaataaaaaggcatgcaccttattattacattgcaaatagcgatatattgaaaagagtgtatcatcacttatgactatttatatatcgaaaacatcaaagggtcatacattcatatttaaagggtatattttgaactcaactcactgactttctaggtcattgtgatttttctatttaaaaactattataaaaaaataaaaaatccacacataataaaatatatgacaaataaattgaaagagatttgaaaaataagacggatattaaataatatgtttttcttttttctttttaagaacatattggtcaagtttggttaacataaaattcaatacaaaatatcttcttatcaaaaccatttttcacttcaaaattgttcactcgaaaaatagaagaaataaattgttaaacacaattaatattgtcattgaaaggataaatattattttggactttgtattttgtaaaagttattaattggatcttttattttgttatataacaaaatagtccctgtattttttaaattatacaaataggaccatgaactgattttttttcaaaataaaacttaataataattcaatctagag

SEQ ID NO: 367459 - DNA, 534 bp, Cannabis indica
tactgtatgcatcagaaatacttgaaaaagaagattttgagaaagtgttaatttcagcatggacaatatggtttgaaagaaataagaaaagtcatggaagcactataagaactccacaccaaatcaagatatggatctcttcttattagtttcaactgggtgtactagtgagcaaagtaatacagagacagaagttcttagctataaactatatgtggacgcagcgatatcaacccctcaatatgtgattggttttggagcattcattttttcctcaggcaaacaaatgaaggcagtcttatctaaactactacaaggtaaatcagtccaatttactaagtattatgtttcttatagcaaggactgggataatacatacaattttaaaataatatagtaaatatcagttgggtctatttttttagttttaagtttatgttttcaaatttacttatgaaggtataaaacaatgtaataataacaaaggtgacttcaacttaaatatttttaactaaataattataagtggatttt

SEQ ID NO: 367460 - DNA, 417 bp, Cannabis indica
acacaaatatatcataaataaaaattattaatttcaaaaaatactttaaaaatataaaaatagacaaatatttaactaaaatataactacattttttttaattgaatcaaaataaaaaaaaaagaacaaaaatatttgttgatgcaaaaatttgaccaacactcgctctctagattagcaagaggaaatataagttaaagcaagtaaatagagagacacaaataatttatagtagttcactccccgtgtcgcgacggtaatagaattgcgtctgctttgagtttttattaaaaaaccggctagagtactaagagctctgatttatagagagagaaagtaaaaagagatgctctgaccttatggggacttagaagaatgtaaaaagtgaactagaggaactctcattttatatagaat

SEQ ID NO: 367461 - DNA, 918 bp, Cannabis indica
gatcttttgatgcactggatattagcttccaggaaataagcaaaatcgtcacaaacatcctcttgttgctgcagagctcgaagtgatgatcgaggtgataaaatctggaattggtcgtccagtgcagtattctcttccacaggtaactcctcttcatccgtaaacttagcagcttcaattccaaggatagaatccatggatttgaatttccttagcttcacatgatgaattagggcctcatttcttcgcaccaggtttcttagttgcagattgtgtttcctttgtgccttggatctcgttttcgccatggcaccagctcgagagcaagaaacaaaggaaacaaagagcttatttatataattaaattaaatatctaataagataaatgatttaaaaataacaaaatagatattttcaatatcattttctaatcttataatttaataaattaaaataataaaataaactaattttaaaacagttatggttagacgattataaaataataataaaaaaaataattattatccaaattatatgtcaaaatatcttaaattaagtattttttcaaatttttacaaaaatatttaggttatttaaatattataaacattaattataaatttctgataagtaaaatgatataaaatatcatttttctaacttatgttttataaacaattatttatttaactaaataaccaattttaaatttgaaaatattatggttaggatgtctataaaaatatctaggttaacttcaaatttattaattatttagtttatcctataagacaattttaatataatatttcaaattaagaaaataaggctatcatttaatttaaaatatcccaacattaaaatatttaatcttataattaaataatatacaaatattaaagaaattaacaaatt

SEQ ID NO: 367462 - DNA, 490 bp, Cannabis indica
aagaacaactacaaataaaaaaaaaaaattaaaaaagaagatacaacgtgccttgcacgtagttgccgtctagaaccattcacaaacacctattcgcacaaatcacaaatgattcaataactctctatgtatatataagcgttaaatggaatgggtatctgctaaaaactcttcattaaatctgatgaggattcaatgattcaataactctctatgtacaaaaatatgatgatggttagatataaaatcataaatcataaaagcttaaaagtatcatataataaatgtagtggaggatggaaaggaagttttatatatatgggatgggttcaatgtcgacattaattttaacactatttttagaccatggcccaaattaaaacaaacaagtaaacaaaaattaaaagctttgtcaactatatctattccctcgcctaatcaaatttttgtatttaaaactcttcaattaacgtcgtctaccaccaattca

SEQ ID NO: 367463 - DNA, 596 bp, Cannabis indica
tcggttactttttgaggtcaaacaacattcaatccgcacaagtgcggattttagttttttcaatccaatccaatccgcacaagtgcggatatccgcattttgtggattggattggattggatcggataatttgtgaacacccctagtaacgattaccctaaattatttttttttcttcatatttttaactttacttttttataaaaaaaaaagaaagaaaaatcacaaaatgtacttatgttttgtaaaaaaatataaaataaaacaaaaactataaaaataaaaattctcctttatgtatttatttatttaagtggcctcagtcattcatataacattgcttgaaaataaaatttttggaaaaaaaatgttgacaaaaacttacttggcccaacattgtggcaagccgaattgactcgaaattatagtattttgttttagactgtgaaatttagggattatttcaaaaaaaaataatatctttatatattaaaagtgcctatttaacggtgtttgaccgtagtttttcggtcaactaattaaatattataagtttatagagctgtaagaaatttagagaaggatttttacgtggt

SEQ ID NO: 367464 - DNA, 385 bp, Cannabis indica
tattattgtactcttaaactttttaatccgttaaaaaaagtttctgaactattcacaatattgtaaattggtcattctattaaattttgttacatgttgttgcccctaattttgtccaaaatacgtggaccaaccggacgatgacacgtaggtggaaagggtttagcgtttaaataattcagctaagtcttcttaagcgcagggatcaaccttagacatgcctcccggagaaggcatgacaatctcatacactcccggagagcaagactgcaacaaagcatctccgggaggtgtcagatcctatctgaacagtcatctcgcatttaatgccgcatggaaggaggcgtattgaaactgccatatgtcttaaagtctgacggcacaa

SEQ ID NO: 367465 - DNA, 1622 bp, Cannabis indica
gatgtatgttgcagagttttcttgccaccctatcaaaaaccgccaaataatggtatttcaagttggcacccggaaagttcaactcatggaaggctttctcctcagatttctatgcacaattctcctcctctcgccaacttccattgcacctaagagatataatcgaagtgaagcaaagaccaggagagccgctccgagcctacatcaacagattcatgacggaggcgactaaggttgcactggtaaccgaggacgaaaagttgtccgcaatactgggggcattcaagtccttggtgagctttggaaggactcaaagaagaacagaccagtagactcgatgagtgattttcttgatcgtgcagaaggttttatcaaacttgaagaggccattcagcgagcagaaggtgaacaaaaacctggcaagtcaaaagctccttctactgggacatccgtccagctcccccattacccaagtaattcgagctcaaacggtaaacggtccagcaacaataataggcaagggaataggaaaaagggaaagttcattggcaagaccaaacaagctgtctgggagaatccttccaagtatactgtatttactatcttgatggaagacatggaaagtgtttatatggctactcagtcattagccccgtagaagaagcccgcacccatgaaaaaagatgtcagcaagagagatatgacaaagttttgtcgatttcatggggattacagccacgacaccaatgactgcaacaatctgaagcgggaaatcaaattcctgataaggaaaaataatccgcacgtacagaagtttgtcaaggccgatcaaagtcagcggggcgataataaccaagacttgcaaccaccaccagtagatggacatctgcaagtcattattggaggcctgcacatagctggagattcaggcaaagcttgggagaggtatgcccgaacagtacagcatgagcaagaagaagtagtactgggcgtggaagagacaaaacgaaaggtcccatgggcaggggaacccaccataacatttaatgataaagatgctgtcaagatcagatttccgcacaacgacccgtcggtcgtggaagtccagatagcaaacaagatggtagccagaaccatgatagataatggagcctcttccaacatcttatttaagaccacatatgaaaagttggggctccaacttaaagatctaaccccctgtcttctgcctgtgtatggtttctccagtcaaggagtcgcacctgtagtgaaaatttgcctacccctcactgttggacaagcttcgacaagcataactataatggcacaatttttggtattggacgttctgtcaacctttaacgtcatgttaggctgaccagctttgtatgacttaaaggttgttacgtcgatattccattctcgcctgaagtttccaacaaagaatggggtagggtgtctaagaggaaatcagcagattgctcgggaatgttataaccttgccataaccaaagccaaaaaagaagtatcctctagccagagctcggacaagggaaaaaacatttctaagtaaggaacttcgacaaggcgaggatgaagatgtggatcctcgacttggggga

SEQ ID NO: 367466 - DNA, 501 bp, Cannabis indica
attataaatatcaaccattaaatatttgatctaatggtcaagaataaaatatctatacatgggtaatactcattaagagcatacccatatatatatatatagatagatatttttagtataaaaaatccataagaaaaatggtggtaacgtcgtatttttctcattttttaattattttttctaatttttatcaaatatgcatttaaattatatctatatatacaataaaacattatgaaaaaagaatctatataccaataaaatatttaaaaacaacaaactaaaaatattattcctaattaacacataatattatactatatactctattataatacacactaatttttttctctatgctacactattttttttttcgaaatctcttattcatttgttaatttatttttttttattaggcaagttaccttccctaaagtatagcaccattttttttacatgattaatataactatcatttttatcaaaatatatatatat

SEQ ID NO: 367467 - DNA, 556 bp, Cannabis indica
atgaattaacggttaaaattaaaaattgtattgtgtttttttttaggcaagagtgatgttttctaatttttgcaccaattgacttttatgcatatttacttataattaatattttcaggctgtgcaattgctcaatcatccaagctaacatactatagtttggtaatttaatggcacgaagcaaaagatcaagtattatagatccaaaacaaccaatccaacgacagttgattttgaacgaaccaactcctcccgcatgcacaacaacaactcaatcaaataatgatgtaaatgggtagaactccacccaatatgtttgagatttttaaagtctatttgatatattatataacttgattagtgttagtagagatccaacataaatggtcgagatttaattttgactgcttttagtagagctcgatcaatgtagtctcaaaagtcttgaaatattagtttatagctcgaccatgaccattcatggtcgagatgtagtctccaaattcttgtaatgttagtataaagttcaactattgagttgagctcaaccgtttgt

SEQ ID NO: 367468 - DNA, 554 bp, Cannabis indica
taaagtcattggtcttccagctaaaatcttgtctcgggacttcactaaattagggtcttgatattgcacttctttaattatttccaggagagtagactgcaaggtaatgttagctaacagtcccacaataaactcaattttagctcagatcatttcattttccagttgcttagatatctgcttcattctattcatctagttttgacccttcctacttagggcatcaactataatattggcctttccaagatgataaaggatttcccagttataatcatttaccagctcaagcaaatgcctttgtctcatgttcaggtctttctaggtgaagaagtattttagacttttatgatcggtgtaaatctcacatttctcaccataaaagtaatcccgctaaatgtttagcgcaaatactatttctacgagctctagatcgtgagtagggtacctctattcgtattcttttgattgtcgagaatcctaagctattatctttccagtttgcataagtacacagcgtagactttgtcttgaggcatcacaataaatgacaa

SEQ ID NO: 367469 - DNA, 532 bp, Cannabis indica
aaattccataactcaatcaaatcaaacccaatgcataccaaaccttccagacctgttctaattgcacctaagaacaaatccaaagcaagagaaccaagcttcaatcacagaaactcattttaccattggaggttcaagattgagttcaaaaactcaaaacttgactaaccctccaaaaatccattaaatcatgcatatctcaacctatttcaacataataaaacaccagaaaacacatttacacagcaacaacaaccacagcaacaaaactcacattttcactttgaaaaaccatagcttttgaaccaaaaattctcaaactagaacaagggtaactagcatgcatttcaacctatctaatctcatttaattcagcattttaatcacaaaaacaacagcaggaacaacaccaaaaactagcatgcaacctatccactttcctcaaaaattcaagaaaataacaagacaagtttcaagaaccataccaacaacttgatgatcaccaaatcttgctaaaatgagcttgaaatcc

SEQ ID NO: 367470 - DNA, 542 bp, Cannabis indica
ggtggtacgagagtttctagatgcctttctagaggagctacctgggttaccaccaaagtaagagattgactttgagatcgaattgataccagggacagagcctgcatataaggtcctatatcagacgccacttgcagaattaaaagaactaaatgttcagttacaaggtatgttgaatttgcagttcactaggccgagtacctcaccttggggtgcactaattttgttgataaataaaagtacggaacactaaggatgtgtattggctattaggagttgaataaactgatagtgaagaataagtatcgtttgccaaagatagacaatctgtttgatcaatttcaagtgttgttactagaatttcacaacaccaagaagtgtaatttagttggtaaaagatagaattatttgaaagatgataaatgcgagtattcaacctaaaacggcgagtactcaaataggaatgcgagaacagacaacaaagctggaaaaaatacagaagacaatgaaatatagtggttcagtcagattttgttctgctt

SEQ ID NO: 367471 - DNA, 675 bp, Cannabis indica
cttttgaccaacacacacaatcccaatgttaaaagacagtaactccattcaaaattagaatgaataagattcttctttttttgaattatgaacattaattaaagctagagttttgcttcataatttcattttgtgttaaaaataatctaattaattgttataagaacatcttttaggagacgacatatatgttaaatattgtgtatgtgtcgtttaagaaaattgcatttcttacagcattttatgattttactgtagtcactgcataggttttttttatttttttatttttttaatttagttaatatttatatatatatatatttatattattgtatttgttaaatcaataattattttttagaaaattttacaatgcacatttttaagaataatgtacgaatctactcctatttgttttgatacctgatagattttttttatatagtagtgtatattatagttatttaagacattttgtaaaattttgaaaaatttaatatgccaaaaataatgtatttcttttaatttaatgtaatttctttggtcatgagtgtaatgtttgttctctagtaatgtagtatttatgttattgcaatatgatgtttaatctatcaaatttcactaattttacagtattattatctttaatctaattagtaagtttatttaaat

SEQ ID NO: 367472 - DNA, 499 bp, Cannabis indica
tgtctatttactccttgttgtatctcttgttctgtatctgagaaaaaatacttccttttatactgatctgtaattctgatcttgggcagagccctagtgtaatatttgtaactgatgtttgtaactgtttcagttgtaactgattttatgttctttagtcttgatctttgttgtatttgatgtaaagggtatatttgtcaaatcgtgtgagtagtgttatacaacttaagggtattaagtgaatctgtaacaacaaattccacccaaattctcttatgtacccaaggatagttgatgatgctatgagggcttgaatgaccccaagggtcagtaccatttgtttatccctagcaagttcagtttgactttaggttaacaccttgctcttcatgtttgtgacacctccttgtgtcacctagtttttatcccttgcatagatcacgtcacaaagcccttccatttggttttgtgactttctaaacgcaagtataacacatgt

SEQ ID NO: 367473 - DNA, 475 bp, Cannabis indica
tgctttagatgttgttggtgcaattatagggataggagctattattcgcaatcatgatggtgaagttgtagcaagttactctaaaccgattcatggctgctattgcccaaaggagatggaggctgctgctatgtttcataatgtgcaatgggccatgacacatcaattgacaattcacttcatagagacagattctcttttagttgccaatgcagttaacaatttatcctctacgagacttgtaactcattttcatgactcactaaatgatatctcctatcttttattatttttcctaaagcaaaagtatctcatgttaaaagggatgctaataaaactgcccatggtttagttaaatttgctctttgattggatgaagatatttcttggttgggaaaattcccttcccaatctactctgttgttattatggattcctacctttagtgataatagttttttgtaaaaaaaaaaaa

SEQ ID NO: 367474 - DNA, 984 bp, Cannabis indica
taatgcagagatttcattgtcaacgtttctgggaaaaaagctaatgttgctgctgatagttcgaaccggaggttcggtttctattttcgtttccccccattttaaacatttacttgtatttccattttatcgttttggtttcttctggtttgtgaaattttagggttttcattttaaaatttcgtttggttttctttggattttcagggcattaattttgcttgatcaattttattttgttcttttgtgggcttcacattttagtttgtttcttatttctttcgtttaatttttgttgtgttttatgttactagttttttttagatattttgaaacatctgtttcgttttagtgtctctaatcagtgggttttagttttatcctagttttttaatagtttaatctgtttatgtgtgatgtgttttgggaatattattaggtatagttgtttgctgttattttttaggtaacaattcgattttagatgtttgtagtttatattcgtagagttgtttctgtttgtcagtttgtttttagtttttttttatagttttattatagtttatatacttgtttagttgcaatttatatttattgttgccatgtttgttaacttgcaggtctgggattacaaatttagtccctctgattattacagatccaaatgtgtttgcactagcaatttttctgttattgataatattaagaaaactttatctgtcaatttactgtctatgtttcgtgaaacccaatttggtcattttcttgatatacctgagtatgttttccacccccaagttgtacatagcctactgttgagggaagtgtaccagcccaatcctaaagaattttgggctaaggttgctggccgttgcatacggtttagtgctgaggagttttatttgatcactggaattgattgttttggtgattgcaacaagttgttgttttcccaggaattaaaccagttggttgagatttgtt

SEQ ID NO: 367475 - DNA, 643 bp, Cannabis indica
atcagagaagaggacagcgtgcagcatccagtctattatatcagtaaaagactcgtcgaagctgaaggccgatatctgttgatagaaaagcttgcctactgcctcattctagcaacaaggaagctgaggccttactttcaagctcatcctgtttgggtgtataccgaccaaccactatgacaaatactgcagaagccagatgcctctggacggttactcaagtgggcggtagaattgggtcagtacgaaatcaacttccaaccccaaacagctatcaaaggccaagccttggccaactttgtggtggaatgcacaggcaaaacagaaaacataccagaaagtgatcccgagccaataccacaaccaagtaatattgaagacaaaccgacctggaagctacatgtggacgggtccgcaaccgatcaactatatggtgcagtaattgcccttgtcacacctgggggcaacacctgcaagctgcggtcaaattcggatacaaagcctctaacaacgaagccgaatacgaggccctaatcgctggacttaaactagcgaaggaaatgaaagccgacacattaagatttgcagtgattcacagttggcggtaaatcatgtatccggcgaatacgaggctcggggtgaa

SEQ ID NO: 367476 - DNA, 760 bp, Cannabis indica
tcatgtatccggcgaatacgaggctcggggtgaaaaaatgatagcatatctgagcaaaatacatgatatgctcgcacaattcaaaagctacggtcttagacaaattccaagagaagaaaatacaactgcacatgcgttagcttgattggcgagcagcaatataagtgacaaggcaaaccttgtccctgtccagttccttgaagagcctagcatcactggcacggaaaaaatcaaaatgattgacacatccccaaactggatgacgccaatagcggcctacctcaactctggggaactcccagataaccgaaatgaagctcgaaaaatgagaagaaaggtagcacgatacattataatagaaggggtcatgtacagaagagaattctcgatgtcattactcagatgtgtcacaccagatgaagctgcacgacttctatttgaagttcacgacggattctgtggaaatcacgcacccgttcagatcttatcaaagaaaattctaaggcaaggctacttctggccaacgatgattgaagattcgagagcctatgtcaagaagtgcgacaaatgccagagattttcaaagataccaagagctttgcccaaccagctgacatagatgcaaagtccgtggccctttgccatttgggtaatttacctaatcgggcagttacctaaaggtaaaggcggagtgcagtactcagtggtagcagtcgactactttacaaaagtggactgaagccgaaacacttgcaaccat

SEQ ID NO: 367477 - DNA, 538 bp, Cannabis indica
tatgtttattttgttttctatttatcaaacatattattttaataaataaaataataacacgttaaaagcataattgacagagtatatttacaactcggttgactgaatagtcttatccgagataaagatatacaaactgttgccttgtgcatcaacgagaaactatgtaacttcaggtgtacaagatgaggcactaacctcgttacgttgatgagatataattactgtgaagacatttagcgtataatatacaatatacaaactaagtataacagacgggtaaaccaaaacaagtgatagcgaggcgtccatcttgctataggaaggcacgctcctggtactttcaccaatcagcttcagacgtttttcaatgagatttatagtcttgacgagttggttctcttgagcagaagctgtcattcaaatgatgttaactatcgaagttatccttgttattaagaaccgcgattgtcaaaatgaagcgttatatctccaagcgaagaatcgacgaggtttacattatcaacctcagagagat

SEQ ID NO: 367478 - DNA, 525 bp, Cannabis indica
gaagctaccatcggcaccctgtcagtagaagtgaatagccttcaagaggaaatgggagttcttcgaagtgtcttccgtcggctggaagaagagaataagactaaggaggaggagcttacttctgaggtcgagaagcataaattggaagtggcgaggctgaagagaaagtacatgcattagagacagccagtctcaagattttttatgacttttggaaggcgaacccctaggcaaatttggattacttgggcgaggccaaagacatgtatcttgagtattgtgcttctcaagtggcttatggtgaacccgaggcgactacttctacctctggctagaatgttgatgtaccttccgctcaaacaacagatcatccagctcctaccggcccagaagatccgaaccaagagcctgggactctagccatttaaatacttctcattttatctttcttttttatatatatatcttattcggccataaggcctttttttaagacatcatcaccaaccaagcggtctttaaact

SEQ ID NO: 367479 - DNA, 84 bp, Cannabis indica
tacttattaataaagatcagaaagaacattttatgttgcatgattcacatgatttatttcacgattatatatataatgtatgaa

SEQ ID NO: 367480 - DNA, 663 bp, Cannabis indica
ttggattttgaggtcatgggggcattttttcaggctcctagcacagaaccagaattctagttctggcggacctgtagcaaccggtcgaccggttggtgacccagaaccggacttctagttttgaaccggtctaccagttggggcagtttttggaaccatagttttctcatttttgagatatttagggtattgccatgttatttatcgatagggaaacttttagtttcaagtttaagtccccggaaagtgatttagcgagtcactcatctgtgttataattaatgtgattagggcatccatctagcacgagactttccgttcaggtcggccagcacacttgaattcagaaagaaggtaagaactgtatataatgtgtgatatgaatatctgagtgtatgtatatgttatgtgtatatgcatgcttaaaatgttatttgcactaccaacacttatacggttatggtatagagtgcattggtatagtgaatgttatctgagagtaccgtgataccagcataagtacggagaggtactgggagtgcgtggtatatcactcaggggtactcagggtatgaacaaaccctaccaacactcgtacatcgaggtacgtagtgcatgtggtatagtggctataccctagtatggaacgttcgtactcatctg

SEQ ID NO: 367481 - DNA, 618 bp, Cannabis indica
gccgagccattccacttataatactgaaatcaataaactaacgaaactaatctattcaccaagaaaaaggagagagagggattcgaaccctcgatagtcctttgttttggactataccggttttcaagaccggagctatcaaccactcggccatctctccgaaagtttttttttattttttttcattgaataagaatagcgatataagttgatacctttagtatattatagaaatatatcgagtatgaatctatagatctagctatctatatatatagatgcatgatctagcgttcccttttgtaaagtaaaaaaagtgtcctcgatgcattttttttttgacaattttttggctgataaagagatcaaatggtatataattcttttattggtaaattggaggattagaaacatgactattgctttccaattggctgtttttgcattaattgctacttcatcaatcttactgattagtgtacccgttgtatttgcttctcctgatggttggtcgggtaataaaaatgttgtattttccggtacatcattatggattggattagtctttctggtaggtatccttaattctcttatctcttgaacctggtcgttctaggt

SEQ ID NO: 367482 - DNA, 760 bp, Cannabis indica
aatttaataaatattcattaaaaatatctctgatatataatttaaattttataataatcaacgcaaaataagtcattttccatggatgccagcttgattacatatgcaccacacaaagaattttctaacccaaaatataagttaaagggatatttcatatgtataattaatgatgtgacttcaaatttgtagccacaacttatgactcaaaataagcttttaatttatatggaccaatatgtgagcttcaaagaattttccaacccaaaataaaatatgagttgaagaatattcatcatatttgtatctaattttattcctttaaaaattatacaagactcagactcggctgccatacactaatacctggtcaattaaaatgcataaaattgattgataagcatatatatgcatggatgagtagtatttatgaaattagtataaatacactcaaactcaacttatttattttttttttttttgagtgaacaaactcaactatataattatacctcagagataataatatatataagagatccaagatgagttactattggattgttatactaatattcctaagtcattcattaacaacccattcatcatctctattttcaccttctaataatcatcctcactttcacttgtgtaatactcatgacaccactgctttgctccaattcatcaactcattttccattgaatatcctcaagatctagacttgaagattctgtcttggaagaatggaactgattg

SEQ ID NO: 367483 - DNA, 513 bp, Cannabis indica
gtttgctcagatttcaaattgcaactgatccctcatgtttgctctgttcggggagtgcagaaacttgtgagcatctattttttatatgccctttctttattgaatgtctaaatcaggttaagagttggttgggatggaagaccccagtagctaacttaactgatctggtgcgagttatagagaagagatccacctctgctttccgaagacttgtgagctctactttaccttatttggagagcaaggaacaatatattgtgggtgcagacaaaagaagacccgaagtctattgtacagaagattaaaaatatttgtaaaactagaatacaaagtgtatggcctaggaaggtttcaataggggatactacatagtttaatgattgtaaccaatgtaattacttagaaggaaaagatcagaccttattttattaaaaggtgttgaatagattgtaaaaagtcatttggagtaatgaaaaacactcctaatttcccaaaaaaaaaatgaaaaaaaaa

SEQ ID NO: 367484 - DNA, 659 bp, Cannabis indica
gtaatttttttgctataatctcttagtaaatttttgcattcaattcaatgagaattatttttttaatgttttataatgatattcgttataattataatatttttattagtaatttttaaaaaatactctgaaaatttttatagtacaagaataagttgttaatatttcaatttaacatatagtattaaaaaatttcaaacttattttctacattgaaaatttttaaaaattttcaaaaatttacaacgatcgtgttataactatcacgagcaccgctatgagtttttttttttttttgtaaaacgatattcagacatatattttcagttatggaggttgactaagagattgtaataggtggtttacagtagtgcttctctaaatattacatttaattatttaatttaaatttttatatatttgcgacaaaatcttaacatttataattgtaacacatttgactctaataaaaaaagtggcagcaaaattctaaaagtactttataattagtcaaaactttcttactttaatttatcaaaaattaattttattgtaactaaaagtaatatttttatggtgatcaagtattagtcacaaaaattacaattttttgtgattaaatgtatttttagtcacaatacttgttgtgactaaaacta

SEQ ID NO: 367485 - DNA, 660 bp, Cannabis indica
cagcagaagtgaacaaaaacctggcaagtcaaaagttcctctcccaagacattcgtccaactcccccattacccaagcaattcaagctcaaatggtaaacggttcagcaacaataataggcaagggaataggaaaaagggaaagttcactggcaagatcgaacaagctccccgggagaatcctgccaagtatactgcatttaccgtcctaccggaggacatagaaagtgtttatattgctactcagtcattagccccgtacaagaagctcgcacccatggaaaaagatgtgagcaagagagatatgaccaagttttgtcgatttcatggggattacggccacgagaccattgaaggcaacaatctgaagcacgaaattgaattcatgttaaggaaaaataacccgcacgtatagaagtatgtcaaagccgatcaaaatcagtgaggcaataacaaccaagacttgccaccaccactagtagatggacatctgcaagtcattattggaggtccgcacatagctggagattcagacaaagcccgggagaggtatgtccgaatagtacaacatgagcaagaagaagtagtcctagccgtagaagagaggaagccgaagatcccatgggcgggggaaacccaccataacatttaatgatgaaga

SEQ ID NO: 367486 - DNA, 548 bp, Cannabis indica
ttcggctgaagcaaaccagaggggttcaccctcaaagcttggtatttttctagattgaagctaaggaattgagcattcttgaggctaaggtaaccctagaaacttttgttatggaattcttcaagtttttacttggtttgagtggtggttttaggttttaagggttgttagggttagagatgtttagggttcgaatttttgggttcaattgagttgaatttagttcctagcagctggttttggtgtttggtttaggttttgtgcaagtttgagctttgagttcaaagctttgatctctaatggcataatttgattcattgagtttttctgtgaaatactagttggaaaatattgtctatgcattgtttaggtactctggaaggtttggtggcatttggtggaaaactgagcaagaaatggaaagtttggggtgaactggtgcaaaccggctagccggttttaccagtacctctaaaaccggctagctggttttggcagggtccccaaagcttcattttctcaattttcgtccatttcagtgtcgtggt

SEQ ID NO: 367487 - DNA, 511 bp, Cannabis indica
actaaaacaatgaaaaaaaaaataaaaaatatggatcggtttaaacggtttaacccaacaaaactgacgaaaatcattgggcgggttacacttttttatttttcattggacgggttacaattagatatttgcaacgcgacatttatattgggttggtaacacactataacccaaaactaaccgaccgacgtacaagttggggctttatgccctaaataaaatccatttcaatctaatctgatttgttatcaatgaaatattagaagtcatttatgtttacatgtagttttcatgtttatggtttaatatatacaaaggtaagtcctgaacatatagtcattgacaattacagtgatgtcaacacagtgtaatgtgattgtgattatatgcttcaaaagataaagtcccaaattcatcagtgcactggatttacactaatgtgataatcaacgatgaagtatacttacaccttggataagtgttatgtctttccagaacattgacaaagtat

SEQ ID NO: 367488 - DNA, 532 bp, Cannabis indica
acatattgatcaagacttgagaacgcaaaagcaactacatcacttacacttcgaacacggtccttccaaattagatcgtttctagccaaccataaagcccaacacagcatgacaattcggctaagcttgtcattgtccttactgtgtgcattaaaagacatctattgcagcagagaactgttgttgcggctagcatctgcaacagcagcttcttcccaacacgatcttgcaaattggcaagtcacaaggaggtgcacttctgtttcggcatagattccacacatggggcaaacattatcagtcaacacctttttaatgcagagatttacccttgttgctagacaattagaggccgccctccataacaaatcttttgtcttgggagacaccttgagagaccacaatttcttccaaaaaacattttcagctgagttcaaaggaggaaacttgttgtcttggatcattttataagcactacggacagagtaagacccatctttttcaccaaaccagtaccaatagtctccctcag

SEQ ID NO: 367489 - DNA, 418 bp, Cannabis indica
tgtatattataattttttaaattttgttataaatatgtgtggatttgattggatcagttacttttacatgtcaatcaacattcaatccgcacaagtgaggattttgaattttccaatccaatcaaatccgcacaattgcggatatccgcactttgcgaattagattggattggatcgtgcggattggattggatcggctattttatgaacaccccttatattattgccaatatgatatattttcattcttaaacttttaataaaattattttctaagttcttaatggcagaattgttattacttaaatatattttattacatatgtttttattgttttatttttcgattaaattattaagaagtgaatgatttaattgtattacatgtatgaataaaaatttaaataaatgagccaaa

SEQ ID NO: 367490 - DNA, 771 bp, Cannabis indica
aataatactttttaaataattaagaaattaatttttctaataataaaataaacataaaaacattaaagtaataataacttaaaaaataaatacaattaattaataatatgataactcttaaatgatcaataattatttttaaaaagtaacaataatctatgatttttttaaattcataaaataatataaaatattttaatttaaaatatcataaaattgtgtcattaacatgaaatcttatatgcctttataaaattttagatgacaatcgacaagtcttgaacgacattgcaaaatcatagatgtccgcaatattggaatggtgtaaattcatttttagagatggcctcgaaatgtaaagatcgtgatggtagaattaggtgtccttgtgtaagatgtgtgagcaataggcttcaaactttacctgttgtgaaagcatacatattcgagtgaggttttttactggttacgagaagtggacttaccacagggaagcagaatctagcgccactaatgtaatgtatgaccatgatggcgctgatgatgatgaccctaaaattgatgagatgattctgatagtggatgacttccttcagccgtcatttgaaatggatgataatcctgatgcaaatcaatggcgcgatgaattatttgaagagattgaggtcgagttgtatcccggttgtgattggatatcttctcttaactttttggcaaagttatggcatttgaaagttagggaaaagattcctaacaacatatttgatgaat

SEQ ID NO: 367491 - DNA, 599 bp, Cannabis indica
ctgacgctttagtggtgacaaatcaagaatcaagaaatgaatggattcttgacttagggtgttctttccacgtgacactaagaaaggaactgtttagtgaattcaagaaaattgagggaggattcgttttgttaggggacaacaaagcttgcaagattgcaggaataagaagtgtgatgatgagatgcatgatgatcaagtaatactcatacaagaggttatgtatgctccttaacgtaagagaaatttactttcacttggtgaacttattgttgggctttgttccctaaataaaactcgatttcaacataatcttttccattcaattatcaataaagaaactgattccatttcattgctcatttaatgtgttgtttggttcatgtgataaattatttgtttattgtgttgtcagttgaaagtattcaagattgtgtgattaaatgtatccctatgattcatcagtacacatggtttaactgataggataatctacaatgtagtttacttgaaccttggataagtgctatgtcctttctagggcattggttaaagtaagcttaagttggatgtatggagtatacatcggaagggactga

SEQ ID NO: 367492 - DNA, 628 bp, Cannabis indica
gaatgtagagatatcctaccgtgcctttttctgggtcgtgtatgagattgtaattgtgcagtatgatacggcgatgttgctgttgaatgtagagataccctatcctattacaatggtagggttgcatatgcccaggttattatatgggcaagttaggcccgggatgttgtagggccaagttaggcccgagttatgtctgtaatggctatgatatgctaatgttatggcaatgatattatgattttatagtattgatatgattatattatgagtatgatattggatttatgatctttgtacatatgtatggtgtgaacaattagtatggacctatatgataaaggtttccatgtgtagcaatatttggttatggttataaaataaggtgtataatattgctaaaacttaattagtacattaatgatatgtgttatattgtatgatattgtatgataagtatttttttattgggcttttagctcactcccttattttcccctacaggtattagacagggaagtgctactacgtatagtgagcaaggtgagttttggtatgtatactacgagtggctacgaacgagcaaatgatcttgaacgtaggtggtgccttagttttattttaagca

SEQ ID NO: 367493 - DNA, 506 bp, Cannabis indica
tggtgggttaacatctgcctgaccgtgtgccctgcctatttggcttctgcctcggccacgtatattcaggggaaactgagctccttaaccaccactagatctgaccgagttaccctagctcctcgtgttttccctagcgtccattctaatagaatagtctgggaaaccaagagctagcctggtcagatcacgtagggctgagaatcggtcggtttggtcggttttttttctatataaaaatctaaaattcggttttcggtctggattggtgcaatccgaaaaccgaccgaccaatccagaatctattttaaaaccgactgttttgaaccggggtttgggaactttttaaaaaaaaatcaaatttattctataaatacattattttacattttacaactacaaacatataaattaattgttcaaaaactaattatcttattcttttaactttaatattaataaaaaagtaatatattattttatatattattagtaactataataca

SEQ ID NO: 367494 - DNA, 581 bp, Cannabis indica
aatcacactcaaactctattaagattaacactcatgcaaccaagaacatcaacatacaacataagctcaactacaattaatttcatgcttttcaaccttaaattcagtaaggattgtagattaaaatcaatagaaacactgcctcaaatatagcaagagcttctttaaattccaagctccaaagatagcaagatttaagcaatttctctccaaattaaagttgaaaatgaagagggttagagagagagagagaggggttcaggttttgggaaaaacacagccaaaaaattcattctttatcttgccaaaattcatttattaaacataataaaaggtccaaaagaccaatttgaccctatggttaataaagcatgcatacacacacagaagggcatttaagtcaattcatgctcactaaattttcaaataaaattcagatttttcactatcaaataaaatgccaatattgcatttcgggcccgaacccagttcggcccgaaatacccggttgtgactataccgcgccaacctgtaaaaacaaacctgaaaaagacaacacaggaatactatataataatata

SEQ ID NO: 367495 - DNA, 303 bp, Cannabis indica
ctctatcactgagggttttgaaattatgtggaggaaaagagagcaggttggttcggctatagagagagggaagactcagtttactgaaaaaaattgattttctgattttttgacaaaaggcattaatttgactgagctatcactttctatttataggcaactactaggtgtaggttagtaattatttggcattaaaatgatgaaaatattcattggaaaatcttgcttaagtggtcgggcaaggtgtgtaatgggccccacttagtttttacagttttcaaaatttttatttctattttctca

SEQ ID NO: 367496 - DNA, 503 bp, Cannabis indica
aactgaaatttttggacgaaagtataaaaagcaaaataaaatagaggttcagtacgttttgccaccaaaattttggtttatgtggttaagtgttacaaaaataaagtttaggtggattttactgtcaatattcttattaacttatatgtgacctgatactgaaatgcaccaatagtgatatgatattttagagggtgtgttaggcaccaatagtgatatgatattattaggataaaatttactagggtaaaaaatttatttattttttattttaaatatatattatagggaaattctttaataggcacccataaaatagactaattaatagttccatgttccactatcctgtagtataattggtccacatacgaaaattttagaaagttattgtagattgtagtgtattgaattaaaattagatttgaattaatcaaagtaggatatactgatagacacttaattattattattatttaattgatttggtcaatatagaagca

SEQ ID NO: 367497 - DNA, 694 bp, Cannabis indica
tttatttagggcacaagacccaacaaggtcaaccgactctatatgacttaaaagctgtcacgtcagttttccatctatgcgttaagttcctaacaaagaatagggtagggtacctcagagggaaccaaggaatagcacaggattgctataaccttgccctaactatggtcgaaaaggaaagtttctcctgccagagttcaggcaaaggaaaaagtatttgccaataggaagtcgcccaaggcagggacgaggacatggatccccgacttggggaaccaaacacaaatgtagggccagtggaagaattggaagaggtagaaattgacccaaatatgtcaaccagaaaactcgaaattggcaaaggtttgttgctcgaaataaaattagctttagctttaataaaaattttaagagcaaacctaaacgtttttacctggtcacacaaggatatggtcggtatcaacccttctataatatctcacgccctaaacattgacccaaacttccatcccgttcaacaaaaaatgagactactagacaaagaacaggcacaagcattgaaagaggaggtagaaagattgcacaaaaatgagttcatcatcgaagctttctacccggcttgggtagctaaccccatactggtacccaagcctaataaaaaactggcgagtatgtattgatttcaccgacctca

SEQ ID NO: 367498 - DNA, 646 bp, Cannabis indica
acaaaacttttgtatatgaatagaaaacttttgtaaatgggatcccggaattgtataagtatgttactttatgttttaattaaataagaaaattataattaatcacgtttttcactaatctcattgattaggaacgagctgcacagtacattaaaaatcacgctaacatgcctaaattagttaaggagttacatgttgcatctatggaataggggctttatgttctttgaccagatgaaccatttgcgcttaataacaaactatttaaggtagctaaacctagaaaccacaaaaaacaaaagatcgataatgaagacgaaacatatctatgacacttacgtcttggtcatataggctatgataaacttaataggttaaccaaaggtgatcaattgaaaaatgtcactttaggtgaattaccagtttatgaatcttgcctagaaggcaaaatgacaaaatgttctttctctgcaaagggaaagcgtgccaaaggaccattaggcatagtgcattcagatctttgtggaccactgaatgtcaaagatagaggtggttatgagtactttgtcactttcatcgacgattactctagatatggtcatatttaccttatgcataaggaatctgaaacgtttgaaaagtttca

SEQ ID NO: 367499 - DNA, 686 bp, Cannabis indica
aatacaattatgatcaactaaagtactctcaagaaaattattacttgttgtggtgcattataaccatttggaactgcaaatgcttcatcatcaagagggatatcagctgccggccacactgaccgtacgaatgtgcttgttatccccgcattcgccttgtccagaatgcttgtgaagagaaaaaatttgactatgatttgaaacaacagggattgcctcgttgcaacctcggccatggttagggatggagcctgtgaatcacaatggactgactacctacatctcaaaaatacaaaagtaatttttacttaccatgaaaaatcaaccagagaaacatgaacactgaaatgcacctacaaagttacaacccattactacaatatttcaaaatatcaaatgatttagtttgagaaacctcaggataaacacttgttggaggtacatgtagcgtcataaaaagtgttagagagtcccacattgataatatgtgaaaattaaataccacaagatgcatgggctacttgttggggtatcaacccaagtctcacatttgaagaatagacaagagttgtcttggatataagtgttccaccttctccattagtataaggcttttcgggaaggtgcccaaaaacaaaaccgtgagggcttaggctcgaagcggacaatatcatactaatatgaga

SEQ ID NO: 367500 - DNA, 709 bp, Cannabis indica
gtgttctttttttattattgggcttatccctataattagcaataaatttgtgttaataagataaaaacaacattaaaacaaccttgatttctacattgtacattattaatcgtttcttaggaatgatatatgtgaatatttttctttttaaaatgacttgtataattaaataatttcatattatactgttttaaatttttgttaatgttcagatttaaatgtgggtgtgttttttctagttttttaaaaattacaatactgtgggtttaggcgtgtttacctctattgtttctttctgctataaatattgttgttcgttcttgatttgttgttgaattagtaattttttctcttcaccggattttatggttttttcttggtgtttctatgattccagtgttgatttgtccgtccccaaccacgaaggaggtgccgtttgtgctttgttactgttcaaagaacaaaagtaaatatattgggcctggacagtatgaaagaataaaaaaagagcctggacagtaaaaaagaaattattgtcatgtggcagtattattgtaaaatttaaggaaaagtttttgtaagtttccctaaaaatattaggttcaataattaagaactcatgactaccaaaacttattttatgttcatagatatcacttttatttataatatatgttgtaactaactaaaatgcatatatatatatata

SEQ ID NO: 367501 - DNA, 511 bp, Cannabis indica
tcaactagtatggggaccatgagcctatataaccgagcttttcaataagcagatgtagaatttaccaagttaattctctaacttattaactcttccttgcaccactatagattttgaattgcactctcaattatatagaacgatctatatgttccacaatatagatatgctatgagattatccatttgttatcccaataatcaacgatcatatatagatgatttacatttaatagggattaattgactgttacacccttcaatgtattttatccttaaaacaattagctacctataaataatattccagtgaactaatataatcatttaaatgagtactcaaccatttatctctattaagccaagctcgaaggaaattattgttgacttctatattcagacagaagctatagattccgtatctatgattagtgctaccactcaattgaactacgatgtccttaacctatatgtcacgagaagaaccatttggtcgactttaatgaacagat

SEQ ID NO: 367502 - DNA, 768 bp, Cannabis indica
tttggtggcccttggttaatcttaggcgatgtaaattttgttctaagaaactcggagcaggttgggtccaaggggagggatcaatttatccccttcatttcggagttaattaaccgtcatgcgttggttgatttgcctattaaaggggataacatgacctgggacaatcatagagacggtgttaatcacattaagtcggccctagacaaagctcttgtaaataatggctggctgcaaatctttcctaagacggtcgttcggtctctcaccacctgtaattctgaccattggcccctctttatcaataccgacacttcggtctctaacgccagaaggcctttccgttttgaagcttggtggacaagagaccctcatagttccttggtggtggatcaagcatgggggtctgtttcccatgattgggcccctgctagagtgtttaagaaagttggtgcgacccgcctggccttgagtaactgcaaccgagtgcaatttggcaagttggattcttgcatctgtaagttggagggtcagttacaagctatccaaagtttgattgctggtgacagaaattgggctaccagaggttgaggtgaggaaagagcttaatgaggctttaaggcggaaagcaatttactggcaacagagatccagggtttctttgattagggatggtgataagtgtactaattttttcttcatttctgccacgattcgtaatgaagaaactcggtggatgtaatcttgaacaaggatggtgtgtggata

SEQ ID NO: 367503 - DNA, 660 bp, Cannabis indica
tatctttctaagtaaatatcactcagtttatcttagatcaatttgatctcaatcctgagatggttaaactttaaattgcttgagttctttgagttgttcgttaccagcttacccgttgatttagctcgcatttacatcttgagaactcgatataattcaattgagtgggagtgttaaccatagatctggacatctatagcttctatgattatttaaaagtgaaacaataatttccttagaccttggctaaagagttaaatggtggagtactcatttcagtaattataacagtttactgaaatttcatttacaatgagctaagtgtttataggataaaatattgaagcttattgttgtgatattttgcacacgcaagtgtacgtatcgttacaagtagtaaactcaccaagagtaaggtcgatcccacaggattgtagttaactacgttgaaattaaacttttattctatttggttaaataaaaattaagaaagaattaaaaataagaaaactagtaagaagcaattatttaagaaaattgacagttaattaaaactagggcttcgatctcaattgtttctattgattacggcctaataagattattttcctaatgttaatttctgtacaatagcaggtttactaaggtaatttatagtct

SEQ ID NO: 367504 - DNA, 685 bp, Cannabis indica
gatggttcctcaaaatgtgtattgactatcaaaaactaaataagttgacgatcaagaataagtattcgttaaccagattcgatgatttattcgatcagcttcaaagatggtactttcgaagatcgacctacaatccggttatcatcaactcaaaatacgggaagaagatataccaaagactgcgttccgaaccagatatggacactacgagtttttggtaatgtcattcggattgactaatgctcctgcgacctttatggacatcatgaataggatattcaaggattttctcgataactacatcatagtatttatcgatgatatccttgtatactctcagccagaagaggagcatgagcatcatcttcgaatggtattgcagcgacttagggattacaagttgtatgtaaaattcaaaaagtgtgaattctagttgtccgaggtatcttttctagggcatattgtcaggaagaatggaattatggttgatccaagcaagatcgagtcacgaaaaaattggtcgaggccaaaatcagtgacagaaatccgaagtttcctcagtttagtagggtattaccgacatttcgtcgagggattctctaaaatttctatgccagtgaccgagttaactaagaaaaattagcgattcctgtggtcagacaaatgtgaagcaagttttctggag

SEQ ID NO: 367505 - DNA, 541 bp, Cannabis indica
atttttacggtttttcatagaatcaacatgaaaacaacaagaaaactacataaaagtaacatgaaaataaaatctaaataacattaaaatagcaacaaaaagtacaaataacaaaaaatcaaaaacaaattatcaatattagtacaacgtaaaaaaatcgtattttttataaataaaatcataaaaatatttaaaatttcgtgaagccgtatttttgtaattttgttttttgatttttgcatatttgtgaaataatcccttaaaggttcttatatttaaaagtaattaattatgaatattataatttaatatttatatatactaataaatattaaattataatctttaaatatataaatattcacatttttacttttaagaatatttatatatttataaggacattatataactacaaaaaatcttacttttaatcacaacaaaactcgtaactaattataaattatgatttctatgttgtgactaaaaagttcgtgactaaaagtattagtcacaaaaattataattggttgtgactaaa

SEQ ID NO: 367506 - DNA, 703 bp, Cannabis indica
agctgacacaataactgtcacctttttatcttcacccaaaaactcataccgcaagtgactagggagcaccttcaactcaagctctggaggtttttcagtagatggcatcagctcttttggcactactcccagctcctcataataccttctgttcaatggcccataggaatcaagccatttcacataacccattacatcttgtccctcttgctccgtcaattcatcttcagttaggctcagttcgagaggatcatctagcaactttttctcactcacaattgtatcaatcaaatcaatgaagagacagttatcacttgcctttgggtatgtcattgcctttaacacattaaagaccacttcttctccttggactctcagctttaattcacccttctggacatcgatcaaggcttggccagttgccaagaatggtctcccaagaatgattgggacatttctatcttcttccatatccagaacaataaagtcagctggaaagatgaacttgtcaaccttgactaacacatcctcaatgactcctctaggatgagctagtgatcgatccgccaattgtagagttaccgtggttggctttgcttctcccaactgcaatcttttaaacactgacagaggcatcaagttaatgctggctcccaagtcacatagtgcatttattccttcaattctcccaatggtacaagga

SEQ ID NO: 367507 - DNA, 693 bp, Cannabis indica
tttttttggttttacataatattatatactttatttcaataactatatcatgctttattagcaaactactttttgaatcaatgcatcaatctccatcaaaaatttaagacaacccttctggtacatggcttacacaagatgccgtcaaaaagcagatcttgacaatgaaacatcatattttaaatgctacacatgcaacgaatcatctgttgagacaattccaaggtttatattaactcaatttagcacaaatcttattatcataatttgttacttaaataaattaatttgtatttgaatatattaaatgccgctttcaagctcaactaacacaccacacaggctcagtaatagcaacattcttcggcaaaaatgcagaaaagtttttaaattgtaccgcacaagagcttattcacatcccaaatgtaaattctactacttaaactcattcacttcattaacatacattaatattactatctttctcaatgatgttgttaataacatgatcaaaacatattatcggttgcaaggctttctacaacgagtaaattttttatttacttaaaagcaagagcggatgcatatagtggcggaagtcaaaccaaatacaacattatctcactgctcgaaagtgatgctgagtcaagcacttcaaatactactaatgatacttgaagtatctacaaaata

SEQ ID NO: 367508 - DNA, 604 bp, Cannabis indica
cggacgctcgtcttcgtcccggacgaacttcgcttggagtgttttctcttctgctagtgccgtcagggtttgagccggggccgccgtagctgttggggagccatatatatatatatatataaatatttatatagctcagttctttggtttggttttactagtcttatttgaagggtttatatagtacgtactctgtttgtattatggcatgtgcataacgggtctgctttttctatttgatttggaaattatatatataggactaaatgaaataatagtgggtatttagttatattatttttggggttagaggagagaatggtagatatagctaccaaacgaagtggctcgtgtctaccaaactagctaaccataatcacctttttaatttattttttttaattattttgatccttgtccttcctctaaaatattcatgttgcaaaataaatatattgaattgtattttatgtaatatttttatataatattttagtataaattaaaaggataaattgcggcataaatacctgtttcagattttatacacttaaatatttatctttatttttggaagtaaaaatacttaatgttacaattctct

SEQ ID NO: 367509 - DNA, 621 bp, Cannabis indica
tgtgtggtgatcattattaaataagtacgtaagcaatattgccttaggatgtgaagcagaaaatcttgcatgtcgtatggtaagtataggaatgccaatcgggcgggtccaacccaatattattttggcccgacccaactcgattcgacttgactccttcctgtagcctaatgagtcaagcccgactcatatatataatatattttttaagaaaaaaataattttatttatttatttattttaaaagaaaatagttgaattaattaggtaaaagaattttaaataaaaatagaagacatgtttaaaaatttattaaattttccataagttgattttgcattatggaggaataaatacatctatattttcattattcagctacttttacgcttgaatggcaacgctttggaaaaatgaacaacaatagggactaatttgtttatatttaaaataatatatatttatttaaaattttatattttatgatttgataaaaatgccaaaaaaaaaaaagtgttatgactcttttaaaagtcattgaaaggaatagcctcttataaaataaaaattatataagatttgcatgtggttttcttaaagatttgctccatgtaagagatg

SEQ ID NO: 367510 - DNA, 1101 bp, Cannabis indica
aaagcccttccttagaagacactttacaacaattcatgcaatccacccaacaaatcatgcaaaatcaatctcaatccattgccaaacttgagacacaattgggtcaacttgccaatgctgtaactgagagagaaaaagggagatttcctagccaacccgtcccaaatcctaaaggccaatatgaagtaggagttccaagtcataaagaagaagctaagtctatttcaactcttaggtccggaaaacaaattgccaaacccgattacacacctcaagttgaaaaagaccaaagccaacctcaaagttccaacacaaatgacttgtcaaaagataatgatcaaattcttccttccattccaaaagctccttttccacaaagattacttccactcaaaaaaggcaaccaatatagtgacatcttagaagtgttcaaacaagtaagtatcaacattccattcttagatgccattaaacaaattcctgcctactccaaattcttgaaagacctttgcactgttaaaagaaacactaatgttccaaaaaaaaggcatttttaacctaacaagttagctccataattcaatataaaaatcttgtaaaatataaagatcctggttgtccaacaatttcatgcagtattggtgatcattttatgaacaaagctttacttgatttaggagctagtgtaaatttattgccttattctgtttataagcaacttggtctaggagaattaaaaccaacttctataacacttcaattagctgatcgttctgtgaaaattcctagaggtattatagaagatgttttaattaaagtggataaattctattttcctgttgatttcattgttcttgatactcaacctgttgaaaatgctcatgctcaaatacccatcattttaggtagaccatttttagctacatctaatgcaattatcaactgtcgtaatggtgtattgaaattatcttttggaaacatgactgttgaattgaatgtttttaatgttgctaaatctgttgagtgtgaggaaatacatgaagtaaacatgattaacacggaaaatatgtttgaaatggacatgaatgaatcttttgaaac

SEQ ID NO: 367511 - DNA, 498 bp, Cannabis indica
gaaggttaggtaggtagcatatcggctagccttaccaccagcgttatcagctgtccataatgtatttcatatttcaatgttgaggaaatatatttcatactcgactcatgtcttgtgttacaaagcccttaaactacagtcagacttgtcctacgaggaacagccagttcagatccttgatagaaaggaaaaggttctttgaaacaagaccatagccttggtcaaagtgctctggaggaacagcaaggtggaggaagccacctaggaattagtgtctgacatgaggactcaatatccagagctattcaggttagatttcgaggacaaaatcctttaaacagagggataattataatgactacttttttagaatatgaattagtaaaggcaatgagcgttaattattaatatttttagaattatgcatgaatttatttaattgtgagtcccattattaaaagtgggcactagggttataatttctcaattctggagatt

SEQ ID NO: 367512 - DNA, 547 bp, Cannabis indica
aaataattccaacaactggtatcaaagccatggtaattgatttactttcaagaaatttggacttaaaacgatttgtgtgtgatttggatggtttcatgttgatctgtgtgttatttgatgattgattaatgtttgtgaaattttaataaaaaataattgaatttcgttttggaattatttttattggatagtttagaaaaatctaagcaattcacttttatatagaatttgatttcgatttaatttgaattagttatgaattttgaaaatcagaaaatatcaggggtgacatcacccatatgcgcgcatggatgcacgtgcacacgggtgacacacgtggttcaaacagggcgtgtccgaggaatctcgcccaggctgtctaaaaagccccttctacacttgtggaaatgctgcatgcagcatgcttgtgtggcaaaccacgcccaggacacctaaaacgcgcgcgcggatggtatgcactacataccatccgtacccgactgcaattttttccaatttttctttttacatgctttttcatggaatt

SEQ ID NO: 367513 - DNA, 774 bp, Cannabis indica
aaccttgtgttttgtaaaatttattgattagacctttaggttttttaaatgataaaatagacactgtatttttaaaaataatacaaataggactctaagttcattttttttatatataaccaacttgtaaaaataattcctaacacgaacagatgcaaaaaacgtaatcagttaattttgttataacacatcaagttatattattaagttttatttttgaaaagaacatggtccatttagttatttaacaaaataaatgatctagttggtaacttttctaaaatagtattcaccccaaattatattattattgtgaattaattccctaataaatacaacaaaactgtacatatataggtgatgggatgattgagaagctgttagaaaaatatggcaatgatattttaaaagggaaagatgatcatggatggactcctcttcattatgcagcacacttgaatgagtttggttggtgaataagttttgtctaaaccctccttaatttgttgtgttcaagacaatgaaaacatgtctcctcttcacattgcggccaagaatggttctttggaagcattacagtcattaaaaaatggatcgggattatatagttacaagatgttcgagttattggacaagaacaatcgaaccgctctacatgttgctgtggagagtaaacacacatctttggtaaagagaatgctttgttttgaagaatgtaagtacattattaattggaaagacaaagatggaaatacttgctttcatcttgctgct

SEQ ID NO: 367514 - DNA, 402 bp, Cannabis indica
aatagaaacatttcttcctcaacctatattctttatcataaattaaagaatattccttagaataatttctttcaccaaaaaaaaaatgcaatttatatgataataggaaaattctttgttaaactaaagggaaaaaatttaaaaataacaatttttgtagtcttacactcttttttttttaagagttggtcttactaaaattgattaattattaattttaaataatcatatatatgttacatgttcaaactaaataccctcaccttttcgactagttgtaattttattttattttttttattttgagaacttataaactttgctgtccataatatgataaaatgaatgtttgcaagaaatgtatatggctgagttgatctctcttggattctagacaacatt

SEQ ID NO: 367515 - DNA, 821 bp, Cannabis indica
tctttcatatgagttttttttgccctttttttgatcttctttatcactatttataattacatagtggacattgaattataaagttgaccgaaataattttacagcaatcatccccaaaatcgtgggatttgattacatatcacgtagtgtaaatgcggtttataatttgaaaatcatatagctgtgattttcccgcttttactgggtcaaaaagattgtgttagagataacgcctttaattatggtttctggagatgtctcgacataaacttggatatagtaatcaaatagtgagctgaggccattctctcttccgaggtcgacgacgtatgtcttgtcactactacaaaagaagcctttagaggcgcttttttcagcataataattaataaccgacgctatagggttgaaatttttggaaggaaatttgacgccacttttggcgtcggttatttccaaataactgacgccaaaagggtttataaccctagccaatcactttgtcatcctcattcgatcagccaacccagaaacccccaaacgagagaaaccccaaaccctctctgccaaccaccacggaaaatcacccccatttcaccaattttttaaccatttaagctcatttttgcttctaaatcttttatttttcatacctaaaactatatacctaaaaagatcatatttttccttattttttagggtaaaccgaaggtagaggtagtggttgtggtggttatgttgggttttatgccctaaataaaacttatttcaatataatcagattcgcttattaatatagatcagaaataacatttaatgtt

SEQ ID NO: 367516 - DNA, 611 bp, Cannabis indica
aacaatcatcaatataaaatttaaattctatactaaaaaatagtttataacataaaatatttgaataacaatgtgtatattataggtttatatacacaattatgacattcttaacaattagttttataaaacatatattgtttataacataatttaccgttagtcactaaattcttaaacaaaaaccacaagaacttaaaataaaagtaatatttacgtggcttgccacgtaactctcatctagtaaataaataaaaacatttttaattattttaattattttggccaattccccttaataaggaacctttttttaaaggttgaaattattaatacgatactgttataagaaaacaatagtatttaccatctaaatgtagcgtcttataaatcattagtcatatttgtataataattatttaattaatgtgagacataattatttcaatatcaataaaatatctatatcttatctaacggcaatttttggtttaacgatgttattttgtttcctccgttaactttaacagaatattcccaattaatttatattatttttttaataaaaatttattcaaaaaaatacacattccgttaacataacattattt

SEQ ID NO: 367517 - DNA, 620 bp, Cannabis indica
aggagatttcctaggtcagtcccggatgggttctagacctccggagcccgttcccttggacccttcggcctatctttcttctagctggttccggccctcggacagctatctcggggatgatgcagccagcattaagattcggaactttgctagggccgaattagagagtcagggtaggactagcttgattgcttttttgagcgtttactgctttcacagatattctaacacttgactcttttcttttgttgtagcagctaattccatggatgccattttggccgcccttgccggagctcacactcctgacgctccccttcctttaacttcttcccaagtggccactcccttgaaagcttcttccagtgcccctccagacactattgacttagtggatgaggaggaggcgcttcctgaggaagctaaagaaggtcaagaagagcaatgggctcttcctgaggaagttgaagaaagtgaagaagagcaagaggttgctctgattcgcaagcgcaagggcaagatggtagccgaggaggtgcccaaacggcagcggagagtggacactccggcccctggccctgattccgggatcccttccgaggcggaggaatatacagtgc

SEQ ID NO: 367518 - DNA, 769 bp, Cannabis indica
aaaacaaccgacgccatatataccttaatgcgtcggttattagtggcgtcagttcctaactaataaccaacgctataggggtatacatggcgtcggttcctagctaataactgacgccatatatacccataggaaccgacgccaaaagccataaggattatttttattcagtttatttaatttatttaaattatgtatttattcatttatatattattttatttaatttaaattttaattagatatttatttttgaaaaaggtaaattaaatattatttaaattaattttaggattggccaaaatacccaatttcatttccaataagtaattgaatattatacaaatataataaaattagtccaagtattaacaagttaataaatctaactacaagttaacttaaaaaataagttagggaagaaaaattcttaggtctttcagcatcaatcgtccaaggcatcgtaaatcaataccatcaaccgttcgatccactgtcgctgtattggtaaaattaagtttttggattgtattgctgcttatctccaaacttttttaaaaaataaaaatttatattagtttatgtatatattatttgttattataataaatactataatcaataattaaaacttacaactttttgatcttgtatgtaatggttggggtttgcacgtgcgatgatgtcagtcatgtatttcaaaacataaaaaccacattcttagttttcggttgtcttggacaatttgctagtgaaattcctagccacg

SEQ ID NO: 367519 - DNA, 517 bp, Cannabis indica
ttttgtggaatttttggtggattcggatctgagaacccattgggaaagaagagggtccgatggggtccgatgggttgggtctgatggtcccgatgcatgggtccgatgggttcgacgggttgggtccgatgatccgacgggttgggtccgatggtcccgatgcatgggtccgacgggttgggtgtaatggtcacgttgcatgggtccgatggtccgattcgtggaggtctgattggaccgataggatcgaaaagctctgcgtcgttgattgggtcgattatcgtgggtcgactgggtccgtcaccgtgggtcgattgggtccgccgtcaccgtcagctggggttggggttgggatcgggtgggttgagcgagagtgagttgagagagaggaagagagaggctgatgagattagggatttcaaatgtgagtggtatttttgagaaattagtaatgtgctcatatatgaccaattttaataactatgcatttagggataaaattttagggtattgtaag

SEQ ID NO: 367520 - DNA, 858 bp, Cannabis indica
ttgttggtgtcctcgacaacatgtccacatgcaaatgcctgactacccaactcttcatgcacaccatgccatctaaaagtgcatcccgcaggatgtgactcttgagtcaactatctcatatagcaaccttgtcgatttccatatgcatgcaatgtctgctcaaccatccaattgattcacaattgcatcacgctctaccagctcccatgatgtactaatttccaatgatgcagccctctagccttcatgcaaactctagcacccttcttgaccttcacaggctcacatgactactaatctcactggcacgaccctctggcctccacacaaactctagtgccatcttaacacttgcgctcggtcttcttagccctgctggcttcttcgatgcattcattccacaactctacatctccattgatgtctttgtgttacttacgcccacgggcacttttacaagccaacacatcccactcaactgcctcggtgcttccatatggatcaaataaaagtcacatgcaaacacctcacagtacaatcatcctctgacgattgtggcatctaccccccttggtctccatgtgtgcccctcttgacacacccatgtagctactgaagcattccatgtctatcccactttaaaccatcttggtcatcaactcttgaccactatcgtgactaacaagaatttgacggcccctgcactacttccacacccctgccaacaagcttctttttcaacaaaagcgcctcctgcggcctacgatgtcactctggcaaacattgttgggttttgtgccctaaataaaacccattctaatctgattagttatcaatttagaattttgaagtgattta

SEQ ID NO: 367521 - DNA, 534 bp, Cannabis indica
gcaagtggcactattaagtcaaaagcacactgcttttggctatatttaatacttaaaacaatcaagtcgaagcttgatctaacaagttaaaaaacttttagcactttgtacatatttatatcacagaacccaataaattaaacaagaaattaatatcaatggagttatctcacatgtcaagatagtcattgatgacacaataaatatcaatgggagtaatgtctatgtttgggtcttagacattattattctacttagagatcattaatgcgatttcatgcaataaattagatgcacccttgatgttatcctccatggatgtccactcctggaaattgtgaaggctacctgtgaagtcagtgaaaagtccatcaactccaatatgatgattaagccagtaattgaactctacatatgggtcttcatgaaaattcaagtgcaagaactggttctcatttcggtatgtgtatggatgcacctgtatttacacccgaaaaaaggaaaaaaagacaagtaaaaatcgagaatgcatag

SEQ ID NO: 367522 - DNA, 642 bp, Cannabis indica
ggtcggggcgttgggtcacagtcccagtcctgggtcccgattctagttctaatttttagtttcgggaccccaatctaggtctgggtcttgagttaaggtccgagtctccaatcccgagccaggtcctgggtccgggtcttggtccaagtccatgtttgggtttgggctcgtgtcccgagtcccgattcgagttttaattcaggtctgcatcccggtaagggtctagtttgggtcttagtcagattctagttcctagactcaaacccagtgtcggactcggacccaagtctagggtacgggtgtgggtttttgtcagggtccgagtccgggtctgggtttgagtccgggtatgggtccttgatccaaacactgactacggttcagttccaagcaatgagtcaggggtcagggtcctagtctagttccactttgggtccccggtcctggtctgggtcctaggttagggtccgggtttgaggtcgggtctccgtcctaatttttatggccatgtcccgggtctaggtccctcatccaagtctgagtcctaggtcccagtccaagtccaggacccggtcgtgggtcaagtcctagtccgagtctggctttgggttccgatctcggtttgggtccaaatttgggttc

SEQ ID NO: 367523 - DNA, 546 bp, Cannabis indica
aaaataaaattgaaaaataaattaaaagtttaaaaaaccaaacataaataaaaatgtaaataagatgctaaatttgacatttagtgtaaaaattctttgtttttaattgggtagaatcaccattttttatgtcagcaaattgactttataaagttgttagaaacttgttatagcaagttactcattttaccacgtcatcaatatgataatattttatgggttaaaaagtaatccatatccaatggtatttaacatctaaaaaaacttcaaataaaaagcatctcaagccaaaatatcacaagtaccgtctcgtcgcgtcgatggtgtgggctacatttacaactaatccatatttaaatagtttaaaattgttaatgttgacggtgcacttttttcaaatgagaggagttatggtattggcttggtggctcgggatggtaatggtatgtttatccaagcaaaaacattgaagaaggctggtgatttacaacctcatgaagttgaagccattggaataaaagaggctttgagttggattaaagataa

SEQ ID NO: 367524 - DNA, 870 bp, Cannabis indica
atcctctatctcatctcaagtatttcgagatgcaaatggatctacaaggggtacgaggagacgtatgttgcagaatcttccccgcaactctgtcagaggccgcacaacaatggtatttcaagttggctccaggaaagtttagttcacggaaaaccttctcttcggaattccatgcataattctcttcctcatgtcaactcgcattgcatctgggagattcggttgaagtaaaacagcgaccaggcgagccacgccggacatagatctgcagattcatgacggaagcgaccaaggtgtcacggttaaccgaggatggaaagttatccgcgatactggggggtattgaagtccttggcgaactatggaaggacataaggaaaaatagaccagtcgacacaatgagtgatttcctcgaccgggccgaaggttttatcaagctcgaagaagccattcagcgagcagaaggtgagaaaaagccgaacaaaacgaaggctccttctactggaacgtccgcccagcctccccaatattccagcaattcaagtggcaagcgttcaggtagcaaccacaagcaaggaaacgggaagaagggaaagtttgccgaaaaacccgggcagactccccgtgatcgcgccaaacacactgcattcactatcttaactgaagatatagaaagtgtgtacatagcgactcaatcgctaattccgtacaagaagcccgagcccatgagaaagataccagaaaaagggacaatgacaaaatttagtcggttccaatggagactacggccgacgacgaccacgaactgctacaacttgaagcggaaagtagaactctgatcagaaaacaaccgcactacagagatgtcaa

SEQ ID NO: 367525 - DNA, 734 bp, Cannabis indica
ggggtgagcttggaagtatggccgtagtttgcgagatgcatggactaggcataatgcgagtttttctagagggggataccttgattctgcccctagtaaccttttacttacgtagtatataggttgctggcgcttgctctcttctcgcactatagctgcattaattgcatcttccgagatggctaagtaaagaaataacgtctctccagttatgggtttcgccaaaactaaaagcgttgcgagatgcctttttatgctctgaaaggcctattcgcactcttttttccactcgaactttttgttgcctcgtaatatgttgaagaatgacacacatttatcaattgacttctacatgaatctgttaagtgccgccattcttcctgtcagggcctgtaattccttaggctttgtcggggattggatgtctattaatgccttgattttttttttcaggatttgcctaaatagccctcgcgttaactatgaatcccaaaaactttcccgaggagattccaaagaacatttttttgggtttagcttcatgttatacctttttcatattttaaagcattccgcgaagtctgaggtatgatcgtttctctttattgatttcaccaacatatcatcgacgtaaacctccatgttttgccctattttgcttgtgaacatttcatttactagtcgctgatacgttgccccagcgttctaagtccgaacatcatgactttataaca

SEQ ID NO: 367526 - DNA, 631 bp, Cannabis indica
gggctagagatcttgaacggaaggagttatattattccgctgcaatcaatgtaaagttttcttaaactcttatgtgcttatttcattgttttagagaattcatatttaggatgttaatttaacatacttgttagtaaatctagatcttggtaaaatatttccaacaattatgtgatgcaatactcttggcgacgtgtaggtacaggcgtcagtgataagaaaattgccgttatggcataaaatgaaactgttgtggggttttctcctggcgacgtatagatacaagcgtcggtgatatgaaaattgtcaggttatggcatagaatgaaattgttgtagggtttcctcctgacgacatgtagatacgggagtcagtgatatgaaaatttccaggttatggcataattgaaacagatgtagggtttcttcctagcgaagcaccaggcgtaggtacgggcacagtgacatatgagtactgagcgtaggtacgggctcacctaattaggtgatgcaattatatgatatgtgggtgccagactacggcgcgggcttgcctgattaggcaatgcactacatgattatcagactaaagcatcgacttgcttgattaggcaatgtgatgtaatgaagat

SEQ ID NO: 367527 - DNA, 670 bp, Cannabis indica
ataatttttttttactaaaaaaaggtgtattgtaattatcaatatcaatatatatataaaggaaggtttttagagagttgatgtggcatgtttaagcttcatactatctctaatactcatttttcccttttcttaatttttaaaattttttctttccaaattgtttaatgttgtaagcaggacggagagacttaagccattatgtaggcttaagccctcactcaattttataatatataaaaaaaatttatgttacatatatgtatctaaatttttgtttattataaatgtgtattaagcccacgctcaatctgttcctgcccaattttaaaggtaataccactaaaatttaacacctaattcaaaaacaaaaaaaaaaatcaacacttttttttttgtaagtacatatgtaacactctatttaacatgcttttttatttcattcaatttttatttaagcccttgaaaaagaaaatattcaagccctcactgaaccgaatttttggctccatcactgattgtaagttatgattttaattaatacttcagtttacgtttgtaattaattgtagtttctcaatgtgtctcttcatgtgaagattatcacatataaagtgtattgatgattaattcaaaatcagttataatctttaattatgtggagaaagat

SEQ ID NO: 367528 - DNA, 661 bp, Cannabis indica
ttttagagagagaaagtaatagttatgtatttatatatgtgtagtggaatctgtgaaggagaggtagaggaggaacgtgatgcacttcgtgacaatggttggttccagactcgtagctttgcccctcccctggtcgtattttgccctttttcttttcttgttatgcctttcttgacttggcgagcaagaaaaatgagacacgtgtcgtagggttaggactagaagcatttcccatattagttttttgacatgtaggatagtgggtgggcccctataatgtgctggaagccgcgtgatcattttcatcagtctcctcatcatgtgatcgagcggtctgttctagtaggtctaaatctgattaaagaatccaattttttcggagaattgaaaaacgtgatattttggaatatagttgcgtaattaatattacacaactgaaaaaaaaaattatgattatattattccttattaggtcagtcggtgtgtctcccgatttggaaaaaaaaaagaaggaaattacccaatattattttcttaatttacgatttggattttaaagtagttgtagtgctaattgcaataaggatttttgtatgaaattttatgtagaattttgtaaaaatgtaaaaaaaaaaactatttttaagtgtaaaaataaaaa

SEQ ID NO: 367529 - DNA, 320 bp, Cannabis indica
taggatgttaaataacatactggtgagtagatctaagatcctggtaaaatatttccaacagtaatgacctactccccttttaattgtattcactcttgagataatacaacacagatcacaggttaataccttgtgatttctagctatggctctcttcagtatcacaattacgaaaacaaagtggtatagatataaagaactagtaagatcttgtgaagaacttaagaagatacttaacttagtgtctaagaggcattgatggaatgtgaggattgagagagagagagagagagagagagagagagagagagagagagtcg

SEQ ID NO: 367530 - DNA, 617 bp, Cannabis indica
tcaactttctcacccatcatcatttttttaattcattccaatttctatttttttttctatttatactaatctttagtggtaatttacctccatgtggatacgacatagcccatttactactgcgaccacagtataactaattgggcgacatcaataggcattgagggactaaaaatatagaaaaatgcacatgttgaagaatcttcttcagcattaaagtaggagaccctaggcccacgtgagaaaaaaacatgatatttggctgcttgagaaggggcgggccgcgacgacactttgttgggccacagcctgtgtttggctgtgatacgtgagattttggttcttctacataggcgggccgcggtccctgtgtgatttttcccacgtgtgcaatgcgtaatatctttttctatggtcaggattacgatttttaacattgatatgaaagatagcaagcgtaaaattgctccaaacaccattaaaactatactaaacttaatctaaaattaaaactaaaaataacctaacacattcccgcaaactaagtttttactcgtcctcaagtaaaaactaaataaacattaaaaaagtcattctccaaaacatgagtaattttc

SEQ ID NO: 367531 - DNA, 770 bp, Cannabis indica
atgagtgttggaagatcaatgctgaccccagtacctaaggcatacaaaaatcgagctgtattgtagttgatcgtggaaatatgggaatttgcccaccagttggacatagctattttatggaggatcctgtaaaactctgagagaaccgtgacaggtaactccttcccattccaaacaaaattaggattgccagtaatctcagctcctacaaccttaaactctggtttatactcatcattaaatgtgggatgggtgatggttttgattttcaggacacaactaatggtggagggagcaaaccgaaacctattacctctaatataagcaagataaaggaactgactcttcctatttagaatgctttcatcaaggttggcataaaactctctcaccagattctcatttgggggttggagatgagtaacagacaatgaccacccacgagactcaattaactccttaatcctaggaaaatgcttgagcttaacacggtattcaggccacaatgggcgacgacatacattctcttgaaatctaagcagtttatcattagagtaaaatggtgcattggacaggttttgctcagacacactaggttcaggaattttgaattttttaggcactgacgaaggagtagcatcagaggaaacatgtttcctttttgggtgagactttggcagagggggcggagacgagtcagactcagtgggagggaggggtgaagtggtggatgagggtggagccttagtcgaggcaaatggaattgacat

SEQ ID NO: 367532 - DNA, 666 bp, Cannabis indica
atttaaattgagaaatagtgggggcgcatcaactagcaatcttccaataattaaaagtaatgaacatactaaggatttagaaactaaacctagaataagtaagagagcaagattagctaaagactttggttctgatttttgtgcttataccttagaagaggatcctgttaacctctaagaaactttgtcttctttagatgcagatctttggcaagaggccgtagatgatgaaatggactctcttgtgaccaacaaaacctggcatgttgtaaacttaccccctagctgcaaaactataggttgtaagtgaattatgaaaaagaaattgaaacccgatggaattgttaaatacaaggctcgtttagtagccaagaattttagacagagagagaatgtagatttctttgacaccttttcacaagtcaccaggattacatccattagagttttaatttcactagctgccatacacaacttagttgtgcaccaaatggatgtgaagactgcattcctcaatggtgacttagaagaataaatttacatggatcaacccaaagggttcgtgatccctggccaggaacataaggtttacaagttggataaatctctgtatggtctaaagcaggcacctaaatagtggcacgaaaaattcgacactttagtcat

SEQ ID NO: 367533 - DNA, 1296 bp, Cannabis indica
taatcctgccgcaccagtcaatggaggactctaacctttctaaggttatctgcccgaatgtgagggttccggccgcggagaagaccctctgggatgagcttattaccaccgcagagaagaagtaccaggagtatctctaccggaaggcccaggagaaggcttataccaaggcccaggcggcttccgagaggccccttcgcgttgggagcccggtcgaaaggagaagccaaacggttgccgggaggtccctttgcattgggagcccggttgagaggagggctcccaggccaaagccttcggttcaggtgccgaatacaggggctcctgatgccagtacttccggctccggtaagtcacctttagcaatacattacgtcccttctgttagcgaatatgctagccttaggcctgtagggttcgatgaacgcctccttaggtttaggatgccctcgacccggtggggagatcatgccaaggattattatttttccaacttaggagatttcctaggtcggtcccggatgggttctggtcctccggagtccgttcgcttggacccttcggcctatctttcttctagctggtttcggccctcggacagctatctcggggatgatgcagccagcattaagattcagaattttgctagggccgaattagagagtcagggtaggactagcttgattgcttttttgagtgtttactgctttcacagattctaacacttgactcttttcttttgttgtaacagctaactccatggatgcaattttggccgcccttgtcggagctcacactcctgatgctccccttcctctaacttcttcccaagtggccactcccatgaaagcttcttccagcgcccctccagacactattgacttagtggatgaggaggaggcgcttcctgaggaagctaaagaaggtcaagaagagcattggactcttcctgaggaagttgaagaaggtgaagaagagcaagaggttgctctgatccgcaagcgtaagggcaagatggtagccgaggaggtgcctaaacggcagcggagagtggacactctgaccccgggctctgattccgggatcccttccgaggtggaggaatatacagtgcctcccaacataatgctgactccggttcccagagatgaggcgaggcaggagctcctgatagccaagcataactatgccatggacgagtactcccgggggcatgccgaggtggaggccttaaggagggttttcgagatgaaatgcaaaacacccttaacgatcagaactaccagaacccgtggg

SEQ ID NO: 367534 - DNA, 555 bp, Cannabis indica
atttcttttggatcagagattaagtgagtctaatcaggtggaattgttgggattaaactcacttaacctctcaagtcagtatgttcatctattagctcatcagatgaatctgaagaaagctgctgcaatttatagcagttgactttaatactaacttaaagggggacccaccagcaactatatataggggttcctctattctaaaaagtgaggtctgagtggagagggttctgatctctaatctcgaatgctcatactttagattcagttgagagagagagagagagagagagtccaagatcatagtgagtgtctgtggagggatgtacaaagggagtatccctcttgaattgactttccctcaatatgaggctatttctttgtaattacttgctgtgttgagttgtaatcttgtgctcaatctattgtgtactactgactattcctatttaataaagatccactactcatccattattgagtttaagttttctttgtcttatttcaattaagttcaagttttggttttgtgattggttttagttttgatttgtg

SEQ ID NO: 367535 - DNA, 536 bp, Cannabis indica
acttgaaagaggatgaccattgttcacaagagcagggtgccttgtaacgacatagctgttaaaactatgtggaagccaaggatctacaagaatggatatattttccccattagcgattgttcttaaagcacaggaatgtactacatctttagcttcaataatacttcgctagatgaaactaggattatctcccaattcagcagaaaacaagttgccatgagcataatattttgtcttatagagcctactaaccaaagagtcatcattaaccaacaatcgctaatattgtttccctagaagagccaaattaaagcctctcaagcttcgaacacccagtccttctgcatgtttatgacgacacaaccgctcccaactcatccaattaatacctttaccactgctcaaattcgaatgccaccaaaacatagccataagccgctctaactccttacaagtgtctaaaggcaagagaaatacattcatagccatagaattggcatttaaatggttgaattaggaaattggcatttttgaga

SEQ ID NO: 367536 - DNA, 700 bp, Cannabis indica
ttggaagttgttgaaaatattttttatttaatggtaagatatttttgcatttatgaccgactgtcttaccttgtatatttggatttagttgatcttttcttggttaggaaagatgcttttaatgctaaactttccattatttggaaatttcttgtaagagaatcttttctcttatggaaagttggtttataaaggaacccttgattaaatgccttctcctcattaaattcgattgtatcttgatacaatcagaatatataatttgtttatgtttatgacaggaatcaagacttaatagaggatcggacccgattatagctagtttccttttttctggtctgatttgctgtgtcagcttccgattttgatgctgtagatcgtatttatcttaggaaagttttgtacagctacagattcgatcttgtggctgtccctagggtttctatgttctataaataggacctagagagcagccattcgaatgagctcttccattattcattttttcccatttatcttatttgagagaagagagtttctttgttatgtgagaacctagttgttcatctaggttctagtattttatatatcagttcttactctaacctagagtttgttagaatgacttgactgaacaagagactggtcttcgggagaagactctttgaagccttacttcgggaggaagtaagcactcaca

SEQ ID NO: 367537 - DNA, 503 bp, Cannabis indica
tgttgtcactgtcccctccaacgttttttttattttttttttttagaaaaagcgtttatatctattcataacaagttagacctctcggtcattacaaaataaggttttcgggagagatccaaatacctgatgggtaaaagtccatctagccacattataagcggtataatttcaagttctattgacataagaaaaacaacaactactaaaagagggagaagacttagtacaaatgagatatagttctttattgctcaacgagaccccttcccattgatagcgtcgataaccactcttgagtcattctccacaataacgtacttagagccgatttccaaggcaacagacacagctaaagagcaggccgccgcttcaccataaagaacatccgagaaatcctcccgaactgtctgaactctaatcactctgccaaaatggttccttaccacaacaacaatgcacatactatccaaacccactttaacatcacaattcagcttaat

SEQ ID NO: 367538 - DNA, 731 bp, Cannabis indica
attttagaaagagggttttggaacccgtaatggctagcggagagttggttatcgtccaataggcgcattaggcctatgccagttaggatcgcggatagggagttgagtgctgaccttatagaactggaattaacagagtttgacaccatacttgggatggattttctgtccaagtattcggccagtatagactgtaagcgaaaaatggtgacttttcaaccagaaggtgaagatctttttgtttatgttggattagttcaggggtctcggatcccggttatttcagtgctaagggctaggggtctactacacagtggatgtgtatgatttttagcagtgttcatagactccagcagacctgaaacatttgggcctgaggtagtcacaatggtaaaagattttctcgatgtatttctcgaggagttgccaggattgccgccgcaacgagaaatagattttgtgattgatctggcacctggagccaaacctgtttctaaagctccatatagaatagcttcagcagaactcaaggatcttaaactacagcttcaggggatgcttgatattgggtttacccaacccagtgtatcaccctggggagcaccggttctgtttgtgaaaaagaaagacggttccctcagaatgtgtattgattatcaggagctaatcaagttgacgatcaagaataattacccgttacccagaattaataatatgtttgatcagcttca

SEQ ID NO: 367539 - DNA, 667 bp, Cannabis indica
  modified_base (614)..(614): a, c, t, g, unknown or other
ctaaatatctctaatatttacattcaaaccaaattctatctatattagacacttttttcgaccaaatacaagaaattctactctttgtaacattctcgacttgtactatgattgtatcacttcttacaacttttccctcccaaaatatatggactttcgggagcaccacaatatgtataccaagcctgctagtgcagcagccaacactcctccccgaaacctgctcaatttggcctttccaagccatttgatcacacctggcaatgttcttttgctcatagtccagttcagccagcttttcacttgattaatgcatacctgcccaacatgacattgaaaaaacaagttttccattgtctcatcttcactgctgcaaaagagacaagttttatcaatttcaggatgatatttagctatcttgtcctttgtcttgagtcggttaagcatggccatccacataacaaaactatgcttcgggaagtttagccgactccaaacaatgctcggccaatgctctttgttttctgcagcaatgagtttgagatagccttgagttatcacatacttgttgcacatattcttcctttcctctaaatcatagagctttttttacncttctctttcaactccacaatctttctccaatccaactatcattacttttggc

SEQ ID NO: 367540 - DNA, 541 bp, Cannabis indica
aagggttcttttgttaaagctgaaaagaagagagcatttcctaaagagcaacttcgaacgctttggcgttgttggaaaagattgatgtgtggtagttctgaaggtgaacttactctggagcaaaactctgaaatcaacactattagtggtccagtttcttcatttagtacgagggctctttttgatgcaaagggtccacccaacccagtctgatggggctcagataagtctctatcacctagaattttcttttaacacattggggacaatgtgtatctttagtttggggggacagatataatttttttagttttttcgttttatgttgagatttaattttttagtttttttgttttaagttttttattttcgtttttggattttctagttagtttttgttattgttagtgtcgtgtgttcatagctaagttggaagattgattgaaccactgttattcacttatgcaatggattaaaaatcctaaaccgtgtgcttgagtcataactctttgaattaaattggatgtgtattagaaggttg

SEQ ID NO: 367541 - DNA, 531 bp, Cannabis indica
atggagcaaccagaaggctatgttcttccagagcaggaaaaaaaatttgcaaactcaataggtctatttatggacttaagcaagcttctcgctcttagaataagaggtttgatgaaattatcaagacctacggttttaaccgaaaccaccttctctcgctctttctctcttctaaaccgagcctatagtgaaagagtgagtgcccacacacaacaagtggtatctgaatcataatgcgtaaggttgtgaagaatccagattcaaaagaaggacattcgggctcagatcttggcgatactctactacaaaaaggatacaaggattatagatctaagcggaacgagacattatattccgctgcaaccactgtaaggtttctaatactttatatgtgtttatttcgtatcgttttagaagttcatatttaagaaggtaaaaaacatacttgttagtaaatctaagatcatgttaaaaatattccaacaacaggcctcacagttagagtaattgatttactttcaagaaatttgg

SEQ ID NO: 367542 - DNA, 817 bp, Cannabis indica
ctccgaagacatggcttggagatgatgtatgttgttaagattttgtctaacttttttatttaatctctgacataatttattttcatgttttattatttaaatgcagtatttcatttgatgaggaggcgacaacacttttatctggaggtgtacccaaatacatgtgtcgtcttgcctcacatttttccatcaggagttactggtcggtggaaagctgcgggtaatgaccactctaacttttagtgggaagacgacatactggatttgattggaggggatgatgtccaatacttgcagagttggaagaatacgaagagaatatatatgaccctcttcttaaacagtgcaaagcattgggtgactttagaggcagaccttgattgttggatgttgaccatatttgactcgagccttggattgattcccccgcatgaattgaagagtcacttgacattatgtgaagtgttgttcccaactttgttgttgtattctggcctattcgagaatcatgaaatggtcgccatgcttcaattgatagtctcagagagccaggttagaaatttcagttcagaaatcatcgatgagaagattgtacgacagatggaatcaagttaacttatttacaattgattttttaataattaacatgatttaatttgtatacttgtatttaaatattttttattgtctcatacagtggtgattgccggatgtatgtaatagagtacatcgagcataaaatgctggaactttcgtttgataatgtaaatgatgataatatgaagaaatttagagagcggtggtgtgtagatttgtt

SEQ ID NO: 367543 - DNA, 747 bp, Cannabis indica
ttgtaggttgtgatgtcaatttgcaagaattcagcttatttggtgttgatcggtttctagctagctcgaggtatacatttactaacttttattattaattaatcatgaatgcttagtagattttgaatatcttaaatatttatccatagcgaatgttttgtgatatattgtactgtggtcaaatgggtagaataatatacatgttagatgagtttgaaaatcttacatattcattcgtagggaagtaggttctgtgaatacatatactgtggtcggatgggtggtaaatttttgtattgttaaatattattgcaattattttatattattttagattgtattttgttgttattactaactttaaatttttgaaaaacgttcaattatagtcgttatgctgctaaaattttggtagaattaggactagttactagttagtaatttagtatgctatacttagttactagttattaatttcataagtctcgggtcatttgacgcgtaagcctcacaaattatgttgaaataatcatttagaatacctaaagatgaataaaatatcacataaaattcaaacataccaaagatgtatcataaaacttaaactaaagtaaagataataattataattgtagacctagaaccctaaattctcttttcctagaatacacttgactcataaagctcgaattaaaatattaatgggaaatgcaatgatgattgaaattatctaagtcatcatcactt

SEQ ID NO: 367544 - DNA, 639 bp, Cannabis indica
aagtaaaaagaaaaaaaaaaataacttacaatcaaaaataaagatatttaatttacatgttattatatattaatgtatttgtatttttttttaaatgataatgcatttaaatttatcgattattgtatatacatttaattaattgaaaaataaaaattcacaaaaaaaaaaacaaaatagtactaagcacaaaaagacaaaataacttaacaaaaaaaaaatcacccatttttatatatatgttatagattataaataaatcattatgtgccgaatttgcgacaaaaataatgcgatcaagtgataaaaaattaacatataaatttttacacatcaaatgatcaatataaagatttcaatatatattctatttttataaaataattaatcatcatgtcacattggtgtatatgataaagggaaacttatgggagaaagtttacaaaaattctgttatccaaagttttttacattgttagtgtattaattttataaaaatattgtgcttaaagtttcaaaattataaaaatactatgttttagtaaaatagaaaaataaataaaaaataaccctaaaactacttaacaaacaacatgaaaaaaaattaaaataacaaaaatataactacaaagcaacaga

SEQ ID NO: 367545 - DNA, 591 bp, Cannabis indica
ctttgcatgtttatatgtcaaatgcatcctctactttgctatagacaaatgtttaggaaaccctaggccgagaaacctctgcgattcttctttatcatgtcttcgtgcaattttacagtcataacacttgtttctgaactacgtaacgtctatctttcatcttgcttattctaagcttcatgaacttttttgccctaactcgagaaattttttgacttcttgagttctgacttttcttcaaacataatcgttctttaatctgttgagtactcctggtcggcatatttgcttgtttatcgttcgatattccgaccaaacactcatcttgtgcgttgtcttttgtagatgaactcaggtgagtcttgggaaaacggacatcggatcgaccaggacctgcttcaacttctgcacgaggatcatcctcgtctttgttctagtccaccttcctctagcgaaggacattcttcaaaccctgtacccagccatagaatgatggctcgtacaaagaaaactacgcgtctggctgacgcgtctgaccctcaagtggctcggcatgcctctttgcccagcgccaaacaggatccagccgtc

SEQ ID NO: 367546 - DNA, 997 bp, Cannabis indica
aaaccggtttatttatgttaagtatatctaacaaacaatagaaaactatttaataagatattgtatttaatgtatatttctacttgaactaatttcttaccttctctttctccgaatgtttctcttagcttgtggaagaaccactctcatgatgaatcattctccgagtctcctattccgaatgccaatatgaatatgtggttattagcatccattgttgatgttgtaaacaacgtccctccgtatgttgttttcaagaatgtgccatctaccacaatcaccggtctgcaatgaatccatcctctaattgagtttgacagtgctaggaacatgtacttgaaccggttcttcttgtctgttatcaattcggttacggtgcctggatttgctttttttagcatatgaaggtacattgggagttgttggtatgagtcttctggctttcctcttgacaattctagagccttctctcttgttctccaagccttttgatatcccatcgagaccccaaactcatgtagcatgtccttcatgatgtcattcggtgcatgcttcctgtttattgagtcgtacttcttctttactatttgagcaatagtattgtaagttgcttgcctgtgatcttccattatgacatccaacgagcaggtgtggttgttgacatattttctaatcttgaaggtttgtgtttgtttcaactttgaagcgcgcagaaaccaattacaatttttgtcaacacatgtaaccatgtattccctcggttcggacctcttcgttctgatttgaaagttctttatcattgcatagaatccgattgccgttttcagtatgttcttgtcactgtatatgtaatgaccgctctagtaatttggattagtaagggcaattagcactaatttttattattttattatttattattatttgtgaattaatttaattatggaccccaatatttagaaatgaatattagagttataatttctcaattccggag

SEQ ID NO: 367547 - DNA, 525 bp, Cannabis indica
tgagttttgaactcaaagcttaaagctttaattgtgatttttgaatctgtgttttctggatggttttgatgctttagaaatgttctctggggtatttagaacatgtctagaaggttttgtttgaattggatttgatttgagcaagttatgaatttttgcatgtttcctgcggggaaccggaattccggttgtgcatccagaattctggatggggttcaggaattcccagaacaggaattccggttgcagaaccagtctgccggttgggggattttcaggaatcctagttttgctcgtttttatgttatttggggtattgccatgctttttatcgatagggaaactttaagtttctagtttaagtccccgggaagtgatttagcgaatcacttaatagtgttgtgattgttatggtttaggagactataaaccgccgtgcagttcgttccactcaggttgaccggcacacctgaatttagaattgaggtaagattagtataacattatgcatatgtattacatgtt

SEQ ID NO: 367548 - DNA, 717 bp, Cannabis indica
agtctctgttcgggtttgtgtccaggtttggaccccgatctgggactaggttcggttcttgtccaagttggggtcccgagtgcgggtccaagtttatgtcttggtcaggatctcggagcaaatataggtctagcatttcgatcccagtctgggtcttggtccgagtccaggttcgtattcggatctatatctaggtccaagtctgtgtttgggatcgtgtcccaaatttaggtccaggtctgggtctcagttccggtctcagattgggtctgaggctaggtctttgttcggttctaggtctgggtccaggtcttggtcaaggccctagtcttgtgtgcggtttgggatcaagactagggtgcggttctaggtcccgaccctggttttgtgtcccaagtgtgattccatgtttgggtctttgttcaggttcgggttcgggtcccgagtctaggtttgtgttgggatccgggttcagctcccaattcgggtctaggtctgatttggagtcctggtcttcgtccggttacggttctggatctaggtcgaatttcagttatgattccaagtccaagtcctagttctgtttcccaggtccctgtcctgattcaggttcgggtgtgggtttgggtccttggcaaggttcgggtccaaggttgggtcccaaatcctgacactgactacgtgttttgtccaagccctgggtccagatcttgatcc

SEQ ID NO: 367549 - DNA, 579 bp, Cannabis indica
acaaattagcagtgaattgtctaaaaaatttaggtttagaaccactcataacagaataatctctttttggacccttcatcactaataaatcaatcatttttgaatcaagagcatcccaatttcttggatcaaatatatcaagcaaatgttcaaatgggtttgattggtctgcattgttatcatcattatcctctaaaacatcttcgtttttaagtgaattattcaaatgatcatcatcactatttgtagtattatgattttgattttccatattatcatttttaaatgacacatcactattattttccacattaacattttcaataggcacatcacctctattttccacatcaacactttcattttgattctcaatactaacattttcattaggaaccatattttcaagaatttcaacatcaacaatgtcataattatgattttctaaagaaactaatggttcttttataataaatttatcaagagctcctttttgagattgagttaactcctcaatttttttctttttcttacgtttttcatacccagactcatgttttctaatattgggaggcatag

SEQ ID NO: 367550 - DNA, 687 bp, Cannabis indica
aaaaaggaagtgatgcaaaggaaaagttggaacaaaagctgaaaactggatagaaatgctgaagcaatgctatagcattctaggcagtttgggaagtgacgtgaaaaaagtatataaaatgactttcacttatccacatcagcaatttcatcccagtcactcaaagtatgccagttggctgctgtggaaggaaaaatactaaacctagtgggccaaggtagaaaaagattgggcttctattttaatgtataatttttgtaccctaaagacccaacaaagaagagaggagaggaagtacacctcgattaggattatggcaaccgccatttttgaagaggagtaattgtagaaagtacagaagagaaggaaagagaggggggacccaagtgcaagaaaaagagaaggacaaaagccctattgtttccatctctttttcccttatcttctatttttcttttcttttctatcttgtctttaaatacttgaatcttgttagttgtaaaaaaagcagcaaccatggatgaacaatttcgaatttggattgtaatttttgtgttcaatatgagctaattttcttaaggcttgagtggctatgaactcttatgttgggtatgattaactttttaagcatattttagcatttatgcctttgttcattcaagtaagcttatcattttatttgattgt

SEQ ID NO: 367551 - DNA, 1048 bp, Cannabis indica
aataaataaaaataaataacataaaataactcaaactagttataattaaaatagaaccggtactataacagtgtataatgaataaaaaccaataatacgaaataactctaaaaccggttataactaaaatagaaccgattatataacataatgaatacaaacaagtaacatgcaataattcaaaccgattataattaaaagttcctaaaacactgaaacacaaattaaaaacaaaactagttctgaaataaaaaacctcataacacataatatatcataaaactgattatatttttttaaaaaaatggagatcaatttcaaaaaatattaaggcataaatatgaaaagaaattgttccataacaaaataaataaacacaaataataacacacaataactcaaatataatataaagaaaccgattatatttatcaactagttaaaaatttaagacaaaaaaatcggtttcgtaaagcaactatgataaaaactcacacacaaaaccagttaaataaaatagctcaaataaaaacattcattcaacatgctccaacccaccaaataattacacacataccatatctacctctaaaatattcattcattatgttatataaccggttctaatttagttataaccagtttaagttatttcgtgctatttatttttattcattaaaacattgttatagaactggtttcattttaattataattagtttgagttattttattttatttgtttttattcattatgttacagaatcggttatatatcaattataactggtttgagttatttatttttattcattatattatagaaccggttctatttttgtttatatttgagacatctatttcttgtaacttttccagtgattttttttcgatgatggtaatttttccgacgacggtaacttttctgaagacactaactttttcggtaacttttcctgtgattttatcggcaatgacaatttttcgggagacttttcctgcaaagcttattattgtttacaaatatgagatttctatctttttttta

SEQ ID NO: 367552 - DNA, 1522 bp, Cannabis indica
atagttgaaaaatggcaaaattgcaagtggtgagcccacatcctatggtcggtcactattgcttatttttaccatttatttatcaattttttaatgccaaataattcaaacctaaacctagaaggattcctataaatagataatgatggactcaaaacttacagttgatgcacttaagcctttcagtcaaaattgagccttctctttctgtctctatttcgaatccttcctttctctctctttctctcttcaatttcgaacccttatagtgatagagtacatgcccacacatagcaagttggtactcaatcatagtgtgtaagactgtgaataatccaatcaattgaaggagaatcaggctcaaatcttggtgatactctgctacagaaaggatataagggttagagatctgaacgaaaggagtcatttaattctgctgaaaccaatgtaaggtttcttaaactttatatgtgtttaaattctattgttttaaaaattcataccaggaaggctgcattgcagccctttccacgcccatccgcccacaaatgcgctcgcagagagtatgcaatgcatactccttgtgcccaaaattatttttgtgatattttgacttttttcattgaaacaaaattcaaattttggtagaattttgtgtagaatcaaaattctcaataaaaatctaattatctataataaaattattttttataaattttttaaattaattaaaaattagttttagtatattagtagcctttgaatttgaaaaatttgatttttccacaaagtagccttatggttaactttgaaattttgattatttttgtttgttttatttattttaattataagatcagatcttacttattttattattaaaatttgaaataatcttattttgatattaaaatattaataaaacttagaaataatctagttaaaatcttaaatttgttaaccatatcagattttcaaaatttattattttttaaatatatttttattaaaatttaaattataactattagaaaaaatagttgttttgtacattttatcttattagatatttattttaattaaaattttatttttggaaaaataacatgaaattttgaaaagtttgttaattttggtttgaatagaaatttagggttaggtaaccataaaattttcaaacttaggatattttgttttaattaattattagataaaattgataatatcctaaccatctaaatatcttaattttcaaattgtttattttgttaaatttattttattaaattataagagtagatatataatatcaaaaatatcttaatttttaaattaagagattatattatcttatcttattagatatttaattaatttaaattatttagataaattgaaaattttgaaaaattagttagatatttaaatttcagttagaattttagatatttaggagattttttagatttttaaatatttctcaaaatatcatctaacaacctaaattttaaattctagttaa

SEQ ID NO: 367553 - DNA, 871 bp, Cannabis indica
ccaagaacaatctcaaaccagaaaataagaaacaatttcagactagaaaacaatcacaccatgtcacaaaagacaagacttgcagaaatggccgtccgacggcgatgccggctgacgatgtacagaagtgaggcaaggaacaacgctcatgtagctgttgtcttcgttcctgtagggttcctgtagcgagagagacgtaaagcacttcatggaaaaaatctgacgtggctgattgacaagtatattaattaatttattagtaaaaattaaatagggtttttattttacacttcaaaatagtttttttttttttttttatttttttacggaattctacatagaaatctctattacaactaataatgtaatctaaattgcaaccaaaattcgtataacaacctacatagaaactaccggagaaaccacttcagaaacccaaaccgtaaatttgaaaaaaaaaaagttaaaaaaataatacgggataatttccaattaaaaattaggtaattatttttagaataaataatatttaaatcatttattatctatatatttatataaagccgtgtatctaacgtttggaaggaaagttgtacaacattcctatttatggaaaataaggtaaaatagtaagtttggttactcatttctttgttatttaaccaactattatattctaatcttgtgtgcgttttccattttgtttgatctgattttttgaggagaaaactggagctaaactttcattttctatataaaaaaagttacacttactgcctacgattctgtacgtacataaatggaaattcctgggctgattgaagatctttttttgttatttgttttcttgagtctgtattcaagtctacaa

SEQ ID NO: 367554 - DNA, 693 bp, Cannabis indica
aatactctatatgtaccaagatatagatacactatgaattatctatcattctaatccaaatagtcaaagatcctctctagatgatctacatcgaatagagacaaatttatcgttatacccttcaatgtatattatccttaaaatacttagctacctataaatatatttcagtaaactaatataattaatgaagtgcgatctcaattatttatctctattaacccatgctcgaaagaaatcagcgtttcacttctaaatacttataaaagccataaattccatatctatgattagcgctcccactcaattatatatcatattcccaagatgcaagtattcggctgaccgagttttaacgaacaactctaagacaataaataataaaattaaccagaacctaaccatgtcaagattaagatctattgacctaagatcaactaattgatattgacttagatagatataacactaagtttatgatatcttatccaagtttaatattggtccaatccgatgcattatctatacatttgatactagcatactttgccaatatcctagaaaggacatgaaccttatctaaggtgtaagtatactttatcgctgattatcatgtcaatctaaatctagtgtattgacaaatcatgagacataaaactttgaaacatataatcatgattatatttcactctg

SEQ ID NO: 367555 - DNA, 581 bp, Cannabis indica
aggccacacccgctcgctaaattggtaagaatgaaatagttattaagtaattataagagagacacttttttgagggtctcaggattatggttttcttcccgagtttgcttaaatcttcattatttctgatgacggaaaaaatgcccaaaacacttttttcgagaactgggttggtaacaacctaggttgacaatatgtcaacttgggctgggtcccccttttggcccttcagaagtttcgttaagtccccaaaaatagttgaatcttaatctttgctaaaaatagagaatatgctcgatagaattctcagaaaacatcattgaaatcggcccaggttgacaaaatgtcaacctgggcgctaggccttgcttctggtacccaggaagtgttgtttcttccctgaaagtacctattatcccgtttttgatgaagacggagaagatgtaaaagtcaaatcatcgatttcatacttaaaagcatccagattgacaaattgccaacctgtgcaatgggtgcctgggctccaggtgctctgggtgctcaaaaatgaacttgcttcgattctgattctgatgcctcaa

SEQ ID NO: 367556 - DNA, 648 bp, Cannabis indica
attattccgctgccatcaatgtaaggttttcttaactttatatgtgttttctttttatcgttttagaagttcatatttaggttgttaatcaacatacttttgagtagacctaagatcctggtaaaataaattccaacaaaaagatgatagcatatataagcaaaatacatgacctgctcgcacaatttaaaagctacggtctcagacaaattccaatgaaagaaaacacgactgcagacgcgttagctcggttggcgagtagtaatgtaagtgataaagcaaacttggttcctatccagttccacgaagagcctagcatcaatggtgcggaagagatcgaaatgattgatacttccccaaactggatgacgccaataacagcctacctcaatactggggaactccccgataattgaaatgaagctcgaaggctgtacggtatatcatagtagagggaattatgtgcagacgagggttctccatgccattgctcaaatgtgttacccaagaagaagctacacgacttttgtctaaagtgcacgatagattttgtggaaatcacgccgccgggcagagtttgtccaagaaaattctaaggcaaggttatattggccaaaaatgatcaaggattcaaaggcctatgttaaa

SEQ ID NO: 367557 - DNA, 586 bp, Cannabis indica
tatttctacataataataaagagggtatacttttgtaatttaatgttaggaggctcaaattattttctcttttatagagggaacacttacaacggattcattaaaataaagaaatttaaaaagtttaaagagccgtactaaaaatacgctatagtagatgctataagctcattctttattatgaagtttctttaaaatttattatttatgctttatatttataaaatattatttattgctctaaatatattttattaattgttttaggttatattaattatttttatagagagatacgtgtatatattattataatatattaaaataaattaaatatttaaaattttaaaaaagtgaagtcttcataaaaaaaatgatgtatagtgtaatataaaaatggacaataaaaataaataaaataaaattttaataatgtactttaaaaataaatcaaaaaagctgttgggattcctgttcaagattattattaagagatttttacacctcatgtcaaaattgacaccttttttacatttttatccatacacggttttttaaactttttaacttttacatttttcaattt

SEQ ID NO: 367558 - DNA, 505 bp, Cannabis indica
attcttatttcatgagcttctaccattgtttcatactttgtaagccctactcttagcaaccactattggggtggtcgttactaagaataaaagacttacaataatacttatcctttgagattctacggcgttaaattactaataaacgaatatttattagggatgaatctcactaaaacaagaactatgtagaacccaatggagatcaaatatccttttaattaaagctcattatttaaaaataatgtatttttagttaatcatttattttaatctatatattttaataatgaaattacttaatttaagttggtctaaaactaattaaaaaaaataattttcaactttaatttaattttgaaaatttatacataaatataattttgaaattatttaaaatataataaaataaaaacctaaaaaatatctaatttaagttattctaaaataactaaattttcaactgaaataatttttcaaaatttaattaaataacaaattaagt

SEQ ID NO: 367559 - DNA, 812 bp, Cannabis indica
caatcttgaatcactttatcacatgccatgccatttgctcgcttatttttgttcggatctcaggcgcctttgcaccatctggatctcgtgcggctggctaaccatctggataggtgtggatcgaaagtccgctagggatatggctctgataccatgttgagaatcatggggttctatctcaaaactaattggcaatgagtggagtagcccatgttcttatatatggctcaatacttttatatttaatccatgtaggacaatgttctccaataatgaccccataatcaatgaaagaattcgagactggagagaaggtgagctgagtattcccaatgatttgcttgatgttctcatatcgcttaaagattctgatgaaagcccacttttgtcgaggaacaaaattacgagcacaaatcatggtaaattaagtcaatatgatattaatcagtatatatatatataaataaacataaaggaaagttaaaagagaggtgatgtggcatcttgtgtgagttttctttgcttttctttttttttcttattttttcacatattttaatattttttatacttttagtaatatgagggtcatgctaaacaagtcccatatggtttaaaaatcattgtgggtgatatacttttacattatatagatcaatattcttttactttggtttgtaccaaaattagtattatttatctttcatattggtgattgataaagttaatcttgctcaattagttgtattttttttaaagtaaatgcaaaaataattattaataaaatcatttgattattttttcatataaaa

SEQ ID NO: 367560 - DNA, 715 bp, Cannabis indica
tctctgtgttgcctaatgagtcttttttaattttatagacccatttacatatatttatatatgtatgtatgtgcattatagttcgataattaatatttaaatagaatagttttttaattttaaaaataataaattacttcaattttcaaattttattgaaatagtttttattttttaatttgttatgtcttattttttataatatgaattttaaattttagaatgataaattacacatagcatagttttgtaaagtattatttaatttatttattttttaaattttagattttattaatattcatttaatattattctttattaataaaaaattaaaaaaaataattaatttattaagaaaaacttatacgccattttgtcttatcctacaccaaacataacatagtactaatataattcaatccagtccaatcaaattcacattaatagtctaattcaatccaatccatactaataatccaattcaatctaatttatactatgttggagttattatttgcatctcacattaagagaaataacatgttccatattctaaataaaaaaaaagaacatcttccatattcttaatttaatttttgttaaaccattggattacatctaggaataacatgttgcatattctgtaaaaaaaaaaaaaaacgggggattagtaatgtgtcaggagaaattggtacaagaagctgtggatacc

SEQ ID NO: 367561 - DNA, 481 bp, Cannabis indica
atcgtgactttgaaacaattcaagaactctaacaaaatacttacattggatcttaggcagagactcatgcttaaagcttgggcagagactcatgcttgatatgctaatttgatggctactatttttcctagcatatatctgttgatatcttagtgtaactctatgtacacttcaccaatattctgatatgctaatatgatggcaattgaatatgcacgctaaacatgtatacatatatgcatctatttatattaatcttatcttgattccgaatgcaagtgtgctggtaaccctgagtgaaaagtgttgctcgacgatttaaggctctaagtcacaatttacataaaactggtaggtgacccactaaatcactttcgggggctttaactcaaaactaaaaatttcccaatcaataatagcgtggcaataccctacatatttagaaaatactgttaagaatactgtgttggaaattatttta

SEQ ID NO: 367562 - DNA, 776 bp, Cannabis indica
gctcccgaccaggcacacatctccttctgcgggtttgtggctcggtgatttgaggcagggacgtaacattcaagtccgcccagatagccagacttgtccaaatccttcatacatgcctcactgatcttgaacggaggactcacccatctggcacctaaggcaccttgcctcctgtgaggaactacttcagtaagctcctcggtgacgtagtctactccttcaactaagacttcgccctttgcagacactggctccccgacctcattgtatcctccaaagttcagaggttcagcctcctcagcctgctcgacctctgaagggctgccaggacagacatcgtcctgttccttaatttcttggacctcagcgtccccctcatgatctccctcctcctggacgggtagatcctgttcagcgctcggtaatgtggcgacttgggccacgtggggatcagatgtgttgaccttccgcatcgtttgctttattcgagccatcatcctactgctggatgaaaattggtgcgaatgccgggcaaccgtaacagtaggaacagtgatgggaatgctgaagttccccgaacttggatggccaatcagaagagtgtcagcaacacctggccagacaatgtatgtccagttggacgacagataacgcctccaacctttcttcaattcccaaatgaagcggtcatacccctctccagcgatctgctcggagtaatagtggtgttgcacttcgggatctagagtagaagagcgttcactactcacctccca

SEQ ID NO: 367563 - DNA, 826 bp, Cannabis indica
gtttgttctagtcatactagtagtgctcacaagctttaacttaatgaaggatctacctttgaagacaaaaatctttgtcaaagtactttaggaggcttacaatatttgactctcactcaaccagatttggctttcattatcaataaacttactcaagttattcatgcacctatttctgtccattgggaagcatgtaaatatttactgagatacttgaaaggtactttaactgaaggtattcttcttaaaccatttctcgaatgtttgttgaagcttatttggataccgattgggcaagttgtcttgatgataggcgttctactagtggatatactatcttttttggtccaaatctcatttcgcggtctgttaggaagcaataagttgttgcacgctcttctacagaataacaattttgatccttattaacaaatactggtgctgaaatcatgtggttacaatccctgctttttgaacttaagtccctcttgctgatgttcctatgatctaggtcgacaaccaaagagctgctgccttaggtgctaactcgatatgccatgcaaggtgtaaacacatcgagattgatcaacattctgttcgtgatcaaattctgaataatacactttcagtacgatttgtgctatcaatcgaccaagtggcccatattctcactaaatgcttacttaaagattgattttcgtatcttaaatccaaactcaaagttgtcaatactgttggaaattattttaccgggatcttagatctactcacaagtatgttgattaacaccctaaatatgaactttataaaacgatgaaataaacac

SEQ ID NO: 367564 - DNA, 514 bp, Cannabis indica
ttttcttgcacaattttctctattttttagatcatctttttgtgagatttgaccaatttatattctaagtgttgaaacctgaaattaataaaaacatgcgtgattctattccaaaaagtgataataaagaagaaaattaactctaaaaataacataactaataaactaaaaatatcctaacaaatttccacaaactaaattcttactcgcccttgagtaatactaacacctaaaaacaacacaatctaatgaaacaagtcaatcaaccgaaacattagcaattttcaagtaagataaataacatggttatgaccaaaaatttcacctataataatctaaaatttcagttcaatcacacccttgattcaccttaatcttttattcagtttatgaaaccataattagcacttaactaatagttggaacaacttatgcatgtcaattacaactatcaatctactatctcaaaaatattccatatgcttgctatacttactattattcactaatataa

SEQ ID NO: 367565 - DNA, 534 bp, Cannabis indica
taaaaaagtaaaagtagttttgtaaaaatgtttaataaattgataaccattaaaaatgtaagaaagtaattaaatttggtacctagtgtaaaaatctcaattaaaaatgcaatcagggtgagatataaaggcccttgcaaaggaatgagccgctacatttgctaatcgttttacaaaataagaagaaacattacgcaaagtactaagtaaatccttgcaatcactaacaaccttgccaaacaaagaaagcataaccacagagctacggatagcttgcacaaccgaaagacaatccgtttctaaaattacactgagccacgaatgatctttgatccaactcaacgcctcccggaccccaattgcttcgaccaccacaggagaaatcgtaccatggaataactttgtaccaccctctacaaaaaagcagttggaatctctcgccacaaactcaacaccataggcagagttatcattaaacatagctgcatcgacattaaccttaatactattaccgcttggaacacaccattgctc

SEQ ID NO: 367566 - DNA, 853 bp, Cannabis indica
caaaggatcctatatggcgaaaagctatggacactgaaactgatgctcttgaagccaatgacacttggatagttgtgactctccctgatggtcactatgccattggctgtaaatgggtatacaaaataaaatacaatgctgatggctctgttgatcgatgtaaagctcgattagttgccaaaggcttcaaccaaaaacaaggtattgattatcttcacacttttgctcctgttgcaaagtttaataccttaaaacttatgcttgccattgcggccattaacaattggtctctgtaccaacttgatataaacaatgcctttcttcatggcgatttaaatgaaactgtctatatgacactaccaaaagggtataaacccaagggacaaattcccccaaatgctgtttgtaagttaaccaaaagtctctatggcttgaaacaagcctctagacaatggtactcgaaactcagcaattaccttctatccactggcttcacccagtccctttcagatcacacactgttcatcaaaaatgataaaggtctttttcttgcccttctaatatatgttgatgacattgtaattacctctaacaatgatgatgctgtttcagattttaaacagcaacttaactctgtgtttcaacttaaagacctgggtcctttacgttttttcttgggattggagataggtcgttcttcctccggaatatctgtctcccaacgcccttttacacttcaacttttaactgacacaggttttttaggagcatcttctgctcctacaccaatggaatccaacattcggctctcatccgatgttggaaaaccattagacaaccccaaaacctatcg

SEQ ID NO: 367567 - DNA, 685 bp, Cannabis indica
gacagcagacttctcagatgatgccgacacaacaagggcagtagacatctcaaatgatgccgacactacatgggcaacagacatctcggatgatgacaagtttgcaaatgccgacatattacccacagatgctggttgttcctagagatgctagtgatgaggacgatgctactacaaacttcttttcgaatttttattttaattttacaaactatcaattttctgtttattaatattttatgaacatttaatttatatttaagtatgcagtattgtaatgtttatgactcactttttattgtaatgtttgtgactctaaatatttacttttatttaaatgattttatattttaattaattaaataattttatgtattaatcaattaaatagaaataattttaatataattaattaattaaataatttttatataattataaaaatagaaaattttaatataattatttataatattcattaaataattttaatataataataattaattagaaataattttaatataattattaattttttttttcgaaaatactcatcagtgacgacattgtcctcattgataatataatcaatgaagacattgttgttgttgatgtacaaatttttttttaaaaaaataattattattcccaatgactatgtcgttggtgatattataaattg

SEQ ID NO: 367568 - DNA, 593 bp, Cannabis indica
agggtaatttattacagtatcaacgacgtgtagctcgagcatatgacaagctcgtacgaccaagaatattccaagaaggggatatggtactaaaagctgcggaccatgtgatgcgagggacgcatgcaaccaaatttgtacccaattgggaaggaccctataccgttaaagaaataaaaggtagtggctattgcaccctcttagatcctaacacaggagtaacgcttcctgttacaaatataaaatacattaagaagtacttttcttagaataataataaaaggtctcaagatctaaaaaaaaaaattaatatatatataataataaaacttaatacatataattatatcttcacattctctactctttgtatcacataatatatattaactagtttagttttattttattaagatgagagttaagaaataaaacttaatatatatacgcatcttcacattctttactcttggtgttatacaatatatatttatatatacatattaactaatttagctttattgagatgataaaacattctctacttttacattctacacgagtgagagtaaaacataacttgtaaaaaaaaa

SEQ ID NO: 367569 - DNA, 873 bp, Cannabis indica
gactccatatctcattgttatacagattatgtggcttgcttgttcctccgatgttacctgtggctcctcttgcttggacaccgccgcctgaggattagatcaaaatcaactgtgatgcgagggttggtggaaattctatgtgcattgcagccctggctcgaaatcactcagggaatgtcctgtgggctgcgtttccatgctcggctttagggatccgttgataggagaagcggttgtttgttgacttgccctcgactcagcgaggctcaggggtcacaactttttcttggtggagagtgattcagaaatggttatcaacgcgctgaaaggtctacatcagttatggaatattgataattatgtttctttttgtaatcaactctctaaaaactttttatcgtgtaatttttcgtttgtttcgcggtgttgtaattttgctgcccataatgtggctaaatgggctttcgatcggaactttacagggtttgtggaaccttccttaatacctgttcccatcctttgtaatgaccatgaggtctaattttccctatctatataatgctttattttcaaccaaaaaaaaaaagacttgtactatacttataatttacaaacacatatattatatttttagaccttatgttttgtcaaaaagataaaaaatagtctcttgaatttgaatttggttgaagttttttttaacctagggctttacttgcgaagtcatcaacttggaaaatgtatgaattttcaaagaatgttgattttgatggggttatatttgaaaatattttgaattaatttaaatttaggagattattttttaactatttgacaaatatatgtttaaaaatgtgtatttttttaaaaaaa

SEQ ID NO: 367570 - DNA, 539 bp, Cannabis indica
ttaaaaataaaatacattacctaattaaaatatttaacgtattacacttaatatcacttaattaaacctaattaaaaagaaaattaattatatctgcaggttatatcaatctaatttatacataaatataaataatatatgtctatactaatacatataaatatttttaaaaaatattttaaacattaatcaagaactcaataaaacaaaaacagaacggtcacaatttataaaaactaatgaaattgaatttaaaaactaataaatcttttagttaataaaaggaaagaaaattaaaaaaacaaaacgacctaatatatcaagccacaataaatttttagggtttttattggaaaaaaaaacaataaagaaacaaattagctttttgacaataaaatttaatcgtataactgcaaatgttgtatttcgtatttataacaagttggttcaaaaatattaattattttttattaatataataggaaacaaaccgcgcttcgcgtgcggtttataaatatttttaattatttatataaaaa

SEQ ID NO: 367571 - DNA, 523 bp, Cannabis indica
gtggattcaatgaggaattaataagttagggaatttacttggtaaattcggttcgacttattggaagctcggttatatagacgcatggtccccatactagttgagaccatactgcttgtaagacttagttaattgattttaattaatcaattaaaattctataagttagactatgtctgctttatgaattttcactaagcaagggtaaaacagtaaatagagagtttaaagggtacatttattaattgggaaactttgattagtttttattaataaataaaataaatgacaatatattatttaataattaattatagttattaaataattagatttgacatttatgtagttgaaagagagaattggcaatctttgagaaaatgggaaactagaaatgatgaaataggaaagttggaaaagtggaaggcttgcttcctctatgtatggccagccacctaagcttctatttctcattttatttttatttttaaattgccaaataattcaactttaaccctatgtg

SEQ ID NO: 367572 - DNA, 543 bp, Cannabis indica
ggaattctacataaaaactcttattgcaactagcgctgcaacctaaatcgcaacaaaaaaatcgtatagccacccacatagaaaccacaagagaaaccactttagaaacccaaaccgtaaatttaaaaaaaaaaaaataaaaacagtatgtataggataattcccttaataataataataataataataataataataaggcaataatgaagtttccttaatcataaagattattaattattaattttatgagagattcccgttccacttgcctaataattatgtatatattaatgaatattataatatacacgaggtggtgatgattatttttttaatcaagacattattcaagtctcatatatatggaatattatattttttttttgtaaattagcgtgatgtcattaaatcaaaataaactagacctcatggtcattacataataggttctccggtaacaccgataccgagatagatccaaacatatgatgagcaaaggcccatctagccatattgtgagcggcaaaattaaaagttcga

SEQ ID NO: 367573 - DNA, 472 bp, Cannabis indica
aaaatgagacgtagttttcaagcgcccaacgagattccgtcccattgatagcgttgatcaccaccctcgaatcattctcaactataataaacttgtgtcccatctccaaggcagtcgaaatcgctaaacagcacgcctcagcttctccgcaaatcacatcagaaaactccaccctcgccgtctgaacacgtaccactcttccaagatggttcctggcgacgactgcaacacacatattgtcaaaacccacttttacatcacaattcagcttaatccaatcctttgggggagaagaccaaacttccttgagatgagaggtgggactgggtaataaagaagcatgaatatcagtaaaggtaaaatatatatcatcaacacattttttcacatcaacaaggtaattattgtgaactttatcattccgcaccctccaaatagtatccacaacaatggaggcatacaggaaagcatc

SEQ ID NO: 367574 - DNA, 1013 bp, Cannabis indica
aattttaattccttattgattgccaacaaccttacttgttgatttataagtttggttgtgaatttgaagtgaaatggatggaattgttgctgaattttcgtgttctttgcggctgctttctaggttttcaacctaggtgccatggcatgctctgggcatgccgcggcctgcccctgctgatggaacctgggggttcgtcccaggtgtcgcggcatgacttgggcatgccgcggcccgcccttgagtttttgggtagttttgagtttgaattttgaaaattcataacttttgatttcgaactccgatttgggagttctttatatcgtttgaaagctcgttctgagctatatgtgattatctgagttttaaatgccatgattatattttatgagtatggaatcatgggttaaccctatttgtgaaatcccggattgtgtgattaggattaccggcacctaatcaggagtacccggggattcataatctctgtcattgtgggacaactggaaagacagtggttagcacgtagagtatgcgcagtggcgcttatattgaaagtgatatgtataattatttaatgaccaggattagggttattaccattataggaacggtctaatagcctacggttattaccctagtgatatatgtgtgaaaataccatgccatgttatatgtaacaagtttcaaggattatgcgcttaaggcataatcagttggactcggtaaccataactgagatgaaccaattctaaggccttaatgtatttagatgtgtgagagcaacacgtaggtctacgccacgtagatttaaatagacgtgtgagcgcaacacataggtctacactacatagacataaacgggcatgtcagtgtgatatgcaggtctgtgtcacacagacatacgtgaatggcattattgtttaaatagtatgatgagcatatgattgttgttatgttatatactgtcttgatgggcttggctcacgggtgctctactgtgcaggaaaggg

SEQ ID NO: 367575 - DNA, 799 bp, Cannabis indica
gtgcgattcttctttcaactccattttgttgtggaatgctaggggcagtatactgcgattcaattccaagttcagttaaatgatctttgaactgtatatccatatactctccatcgctattagttcacaacatctttaatgtcttacctaattggttttgagtcaaaggatgaaattcctaaaacttctcaaacgtttcaaatttcttttgcattaggtaaagaaaactatatctagagaaatcgtcagtgaaagtgacaaagtactcataacctcctctgccttttacatttagaggtccacagacatctgaatgcactaaccctagaggttctttgacacgttctccctttgcagagaaagaatgcttagtcatttttccttctaggcaagattcacaaactggtaattcacccaagatgaaattttttaatggaccatctttggttaacctgcaaagtctatcatagcctatatgacctagtcgtaaatgccatagatacgtttcatcattattatcaatatcttttcttttatggtttttaggtttaaccaatattgaaaagttcgttattaagcgcaatttgtatatctggtcgtaaaacataaagcccttgttccatgtaagcaacacataattgaaatcctttacgagaaatagtgcaaataaaaatcgaaaaattcaattgataaaattgtgtttgtaaacatgaaacacttatcaagtttctactaaaattcggaataaacaaaatattgtctaaaactaaaatttcttttgaaacttgaggcgagcttt

SEQ ID NO: 367576 - DNA, 833 bp, Cannabis indica
aggaccatacgagtttttgtgaagtgttgggattataaaatgatcaagcaacataaaaggcacagagtatgcaaatgatactacaatccactcatgatttgctttgtggacaatagtatgagtatgtttaagtgaatagaagcaaataagaaaaaaaaaaaacttacaaaagtgttaattttggtcaagagaggtggcatttctatgctatatagtgttagaggaaagaatgacatcagatctgccaaaagttaaagttgtcaagagctaagaattcagacaaatatttgaaactttctcgacccagagggctagtaatggagcaatatcctagaggaacatactaagatggaataagacaatagccattgtttggaaaataactaaagtttatctaattggaagtgaggaacttataaggaaagagaaaaggatgtatatattgataacatgattgcattcagatatggaatgaagatgcttaagtgaagtatggacttatttttaaaggtagtttaggaagtacgagtcaaagagccctggctaaataattataaaaagtgagtctctagtagcaaatcagatacaagtggggtgtaggaggtatagtaacgatgaacagagtaaggtctgttcggcatgatttgccaattatgtatatagtatccttaccccgacaacttggttgattgatatattatgagattacatgattaacctatggttaaatagtaaatgataaataaataattgggctacctaacctatgttaaggttgaactcgttttaaagggttactaatgcacttacgatattttagcatatatgatctt

SEQ ID NO: 367577 - DNA, 852 bp, Cannabis indica
aggttcgggtacaggtccaagttggggtctcgagtgcgggtccatgtttgggtctgggtcagttactcggtcaagatcttggaccagcatttcgatcccagtctgggtcttggtctgagtcaaggttcgtatccggatacctatcttggtccaagtctgtgtttgggatcgtatcccaaatttaggtcaaggttcgggtcttaattttggtctgggtacgcgaccgtgtaagggcctgagttccagtctcagtttgggtttgaggcttggtctgtgttctgttctacgtttgggtacgagtcctagtcacggtcctagtctttttctagggtcccgtgttcggcgattcttgtttaggttctaattttgggtcccatgtctaggtctgggttcaggtttggttctttgtctgggttctgttcctagtctgattcccagatctagacaccgactactcgtctgttccaggccccgttactagaatcccgagtcaagatctggatcactgtcctaggtcttggtctggttcttgttcaggtcctaggtcccatttgtgagtttgggttcgggatcgagagtggggtgcggttgtaggtcccgacccttgttctgtgtccctagtttggttccatgtttgggtttgagttcaggttcgggttcgggtcccaagtctaggtttgcattgggatattggtcaggctcccaattcgggtgtaggtcggatttgaagtgcgagtccttgtccgattatagttctggttttggttccaattttgggtcacagggtacgggtttgggtcaacttttgggtttgggattgggttcaggtccgggtgtgggttcgggtccttg

SEQ ID NO: 367578 - DNA, 580 bp, Cannabis indica
aactacacaaaaaattcgaaattaattccatgaaaaagcatgaaaaaatgaaaaattttggatttggtgcggacggtatgcattgaataccgcataccatccacgtgcatgatggggaaggcctggccgagaaatcatgcatagggaggctgcatgcagcctttctgcgcgcgcacggcccttgttcagacacgaatttggtcccctgatcgagaatactcggacatccccttgtccgaacccgcgtgcaccccgtgtgacacgagtgtccgcgcgcgtgtgggggtgtcaccacccctagtatttttcaattttcaaaaattcataactaattcaaataaaatcgaaattaagttctgtaaaaaagtgaattgcttaattttttctatactataaaataaaaataattccagaacgaaaattcaattattttatgtaaaaattttgcaagcatcaatcaatcaccaataaacacatagatcaacatgaatcacatccaaatcacacatatatcgttttaaatccatattacttgtaagtaaatcaattaccatggctctgaggccaattgttggaatat

SEQ ID NO: 367579 - DNA, 647 bp, Cannabis indica
taataataatgtgtgatagtatagatatagtgtatttttttttaaaaaaatattaaaataatataaaaaacatcacggtaaaatatttaaattcagttttttgaagtgtgttcacaattttttattttacaaagtataaaaagataagaaggagattataaaaaacaaattaatatgaaaagaacaaattaatatgaaaatagagttgatgtacttatatggtgtttagcatcacaatgaagtgtgaccttataattagttagcaattttttataatatttattaaaataaaataaataggacccaatattaaattgcactaatagttatatcataccttacaaaaatgcttggcaccatgagtacccaatgtcatttctctaatatgaaacatataacaaagtgagcttgtacaagtttaactgaatagaaaattgatgtccatttattagggtgctgttatttcgcaactaatttttttttttttttgaataatcgtaactaattatttttattatactactctttcacacattggatacgaaaaaaacggtaccccttaaaattcatccatcatttcttgacttaagtattttatcttggcatataagtacacatatttttacgttcagaaaaagaaaaaaaaa

SEQ ID NO: 367580 - DNA, 649 bp, Cannabis indica
aaaattctgcaacatacgtctccttgtactccctggagatccatttgcatctcgaaatacttgaggtgggaaagaggatcttcttttccagtgtacatcttctaggttggcattttaaactttaatctcgggggagaaaggggttccacgtgctcgatccaactcgagatcattgtttctctgatcggccatgcctttgaacatattcgttagttcgtccagctgtgcactaacctgttcggcattttggccaatctgagtcacgtcagtatctttctgagcgggaatttgagctcgggttctaggctgcatgatcggcgtgtcaagctgatcgtctacccctctcctcttattcagatcatttctgagatcatgagtcgtccccaacctatgaaatacggaaacgcctggctgtctcagtgattggttggtttggctaatgtgttgaccgacagcatcaacctggttggaattgttgggtatgacttcttccgatgaattacttgacaaggtctgcccacctaccacttggctcacaggtgcaacctctgacaggatatttggcggctgaccatttatagtctgagaggtattcatcactggatcttcgtctgtttcacccagaaggatgacattcgggggttgctac

SEQ ID NO: 367581 - DNA, 646 bp, Cannabis indica
tgaatccaagctaaggtaagcctctaaccaatttcctccttagtttcttaagttttaagctgtaaatgtttgcatgactttggttttaaggagttgtggttgctattattgtttgttcttgtttttagagattgaattatgtttagatatgatgatttaagcttattttagtggttgtagcatggattgagcaagctttgagttttataactcaagcttggctctttaatggtagtttttaattctgagcttgggttgttgttttatcacctggaaaatgtttattggggtgtattatgcaggtctggaaagtttggttaggtttggaaacattttggttaggggtttgagctttgttggtttctgagtaaaaccggctaactggttttacacttcttgtaaaaccggttacccggattttgcagcagggaggaaaatcggtttttcagcttatcgtttcgtgtcagtttcaggtttctaattagttgatttccctactagtttgtgatattagtatattaagttgcagtagatagggttttggttttaaaaccttagtcccggatgtgatttagcgagtcgcttatacgtgttacgattgatgtgatttaggagcctatgattcaccgagcagattgttccactc

SEQ ID NO: 367582 - DNA, 1173 bp, Cannabis indica
attgttttaggcgacgctgtaggagtaaaatataaccgacggtatagggcccctatggcatcggttattttataataatcgacttcataggatcctatggtgtcagttatttcatgataactgacgccatagggtcttcctatggtttttttattcaactttacaattttaattagaataaattttatatatatattattttattattaatataattaaattaagtataaattagatataataagcataaataaaaattaaattgaaaagttaaatgttcccttagatttttccccaaaatacgtagtcgcgtgtaagggtgacacgtggacctatgagaatttcaacttacgaagatcaattaagtcttggggaaggatgttcatctcagggagcgagcctcttggaggagagcacaaaacacgcctttactttccgggaggctagaattgcaacaagtcatctctgggaggaaaagagattgttcgaacgatcacttcgcatttaatggcgcatgggggaaaacgtattggaacctccataaaagatatgacaatggcgtaagcccctttttacgacgattacacaacaatcgatgagtttagtgacggctacattatgagaaatcatatcagtaaagagaggataaatgattatatccacctacccctaagatacctacggtataggtcatgtatttcctatttggtatttgataggagcatgtacccctaagaagctaacacagaaagacaagtgatcccttcctagggaccccctcagaaaaacactataaatacctcacagacagaatggaaaaggggtcgatgattttttgattaaggaatcaaagagagtaaagaagagagagagagagattcaacaagaacattctttgtaataaacactcccataaatacaaaagactcgtggactaaggctcgttaatgccccaaccacgtaaaaatctcatgcattaaactttctacagctcttctcattttagcatttaattggttgcagaaaatctcggtcaacattaaataaatacacatttctattactctaaatgtttgtatattaactattatttattaatattttatagggtaaatattattttagaccctgtattttacaaaattaatcaattagactctatgttttgttaaa

SEQ ID NO: 367583 - DNA, 575 bp, Cannabis indica
aaagctgacaagagtggtaccattcagttcaacaagacaaatagtattaatgtgagaaactaccaaatagcatttactaatgtcttagatgtcacaaactaccaaactctaaaataatcaactataaacataaccacactaaagcaataataactatatgagaaatgttaaagggcaccagtgatgcttagtactttcctacatgtcaatattgttattggtccaattaagtaatgaatcccatataatttaatataatagcttttagggagtatttctagctaatcacaacacgacatatcgagaaagtactaagcaccactgatgcctaatagtaatgctctaactatatatatcagtagtgcttccaaaaccgacaaacaataagaaaactaggacacattagcacaatatactagctaggagcagtatgagagagccataagtcaagtccaatataccatacttaaaagtagggatattcataaaataatcgatccaatttaatccacatgatctaatttattctaatctccaaagatatccgcacttgtgtagattgaattggattgaaa

SEQ ID NO: 367584 - DNA, 864 bp, Cannabis indica
gtcatgtgatgtggtaatcttcaagtcccaactaattgtagcattttgtcctcgaacatacttctatttcctggtgaaatctataggcaccagatcactagcaaatttagataaccgatcaaattccagagtatactcggccacagacatctttccctgagtcaacttcacaaaatcttcctgatgtgaagttctcacagcaacattataaaacttttctccaaaaagtttcttgaacttttcccatgtcataacactgacatctcgggtctgacccactatgtcccaccagacgcgggcataatcttgaaacatgaaggccgcacaattcaccatctcagctcccgtcacccccatattatcgaggataagggtaacagtgctcatccactgatcgaccttaataatatcaatacctcccaggaaagtcggaggttgcagcttcacaaactgctcaaatacagaatccttatgtggcactatgcccttggttacccaccactagcataggagctaatggtaacccttgattaactggggcagcttgttgcctcaaacgttgcaacttttcttcttcttgacgaagtatgatacctcgcattccttaaaacatctgctgccagtcagcaggaggattagcattgccaacccccgcattatcccccccggattctgcggaggtggaggcggtgccggtggattggtttggtctacaccatgctctacaagctcgccctatggtctggatgattaaagagggtccattctacaaataacccaataatcaacaaccccagcgagtcaggcaccaatcccactcttacgcacttattgccttaaaccctaactcatctatttacccca

SEQ ID NO: 367585 - DNA, 575 bp, Cannabis indica
actgggttcaggtcctggtctgggtacacgaccatgccaaggaccgagttccagtctcagtttgggtttgaggctacgtcggtgttcggttctaggtttgcgtcctggtcttagtcacggtcctagtcttattctagggtcctagttcggcgattcttgttcaggttctaatttttggtcccaggtctaggtctgggtttggatttggttcttcgtctgggttgtggtcctagtcagagtcccagatctagaccctcactattggcctattctaggccatgtttcccaaatccagagtaaagatctggatcactatcacgggtcttggtctggttctggttcaggtctcaggtcccatttcggagttttggttcgggattgagactggggtgcagttctaggtcccgaccctggttctttgtccctagtctagttacatgtttggctctgagttcatgttcgggttcgggtctcgagtccaggttggggttgggatccgtgtccggctcctaattcgggtctaagtctgatttggagtccttgtcctggtccggttacagttctggaactaggtc

SEQ ID NO: 367586 - DNA, 848 bp, Cannabis indica
acttactcaagattcgagtatctaagttcgagcaacgtcaagcaaccagcagttgtatgaaggcacttaggtgactttgaagccaaaaaactttcttttcgctctggaggttacttagcaaagaagggtgatgaaataagtttatgtgccaatgctatgggtatttataggcaagtcacgaagagaggtaattgtcttaaaggaacctcagacgcctcagcttcccgcctcaaaaatgaatatgggaaatcaaaagtaatcgagtgcaaccgtcagttgtggagagagaaaatccaatttcgaaatattaattttcagagcatttattagccgaaaacaaaagggacgcccagtcagcttaacatcaagtctcgaatggtcatgctcgacacgtgtccccatctaaaggcagaaccagcttggaagaagtgtacacgcaacctcagaggtcccgtacagacttggggggcacatgttatcccaaattttgcactctgacgtggcatcacgagaatggtgacactggagtccgcatggagcatctgctcgggaagatagaccgagcaagatgcctcactggcacatcttgagtaagatattcaacaatccgtgcaaagcactcaacacttagcgaattcagctttcgcattatgagtcatcagctcaatccctataactcagggatcaacttacgtggatactgcatacacacgttcccactattagtgtattcagcctcaatcccacgatccttgcattcagcattgaccacacgatctttctatttatgtgcattgtaacgagagaggaaactcttcctcctcaagtttcccagccctataaatagt

SEQ ID NO: 367587 - DNA, 740 bp, Cannabis indica
ggttataaggttttaccttaagttaagatataaatatatagtacttaaacgtgaatttgtaaaaaaaaatctgacaaaccccaataatgaagataattaaatatatcccaatcaaaaaacaaaatggattcatggtaaaatgattcatggtatagttctaatttgccgcatattataagggtgttttatacgatttaattcgtactattttattatttgattcgcactgatttcaatctgtatagtaactcaaatctaattaatctaatctaatctaaaaaaaaatacatattggatcggttatatttgattaattactttttaatatatattgaattatttatatttattaaaaaatattttttttttacataactaacaacaaaaataaaacaaattattgttgttttgtatcttcaacaataaattaaaataaataaaataaaaataacaaatttaaaggaagaagaaaaaaaattatatgtataaagaaatgtttaattctggtttagattatatttttcttgtaaataagaatgaaatacacatttggtttattataatctgaaatatttttgtatcacatgtattatatttttaaattattattttttatattaaaatattaattgtatatataatttttttaatatatataaatatgtatggattagattggatcggatttttttacatgtcaatcaaccttttaaatttttcaatctaatctaatccgcaca

SEQ ID NO: 367588 - DNA, 510 bp, Cannabis indica
tgggatgtgttgggttggcaagtcgccagagggcgtaagtcacacaaagacatcgatagagatgcggagttgtggaatgaaagcaccagagaagccaacagggctaagaagaccgagcgcaagtgttgagatggcgctagagtttgagtggaggccaaagggccgtgcgagcgagacttagttagtcatgtttgcctgcgaagatcaagaagggtgctagagtttgcatgaaggccagacggctgtatcattggaacttagtgcatcgtgggagccagaagggcgtgatgcaagtgtgaatcagttggatggttgagcagactttgcatgcatgtggaaatcaacaggggtgctatatgatatagttaacttatgagtcacatcctgcgggatgcactttcagatgacatggtgtgcatgaagagttggggcggtcagtcatttacgtgtgggcatgttgtcgaggacgccaacaaatgaagtgggggagagaccttcacggttcactca

SEQ ID NO: 367589 - DNA, 819 bp, Cannabis indica
gatggatgctaggtattattttggtatttaattgacttatttaatctatctatttggtgattacataactgtggggatattattgttcctttatactaatgagttgtcctgattttgttactaatattttcttattaatataggagttaatccatatattttaaattagtattttgtaatataaataaaaggatcatttataagctttatctttctacaagggtcaaagtgtgacctttgactacccaaattattgatatttgtaatctgacactaactaagttaaattttaatggttgtatttttagaaaaaaaattcactttcataattggtcataaagctaaagagttagtaaaagaaaatttatttatttattttttttagaatttttaggaagttgttcatggaaatatttttttaaatatatgaggctattttataggtaaacttttgagttgtgtgtttacttttaataataaattttcttgattggagaaagatttttttttcttttttgttggggtaactgataaagattaagataacaacggtaaaaaaagttacagagaaggagggggaatttcttccatccaagaatgttcattgtctatcctaagggcatgcttagccaatctatgagcctcaactttaaagttgcggctaacatgagaaagagacgccctaggaaaactagataataggactttaatatcagaaaagataacccccagtttacttaaatacacagtctggccctccaaagctgagaccaaagaaagtgaatcagaaaaaactctctccacgggaagtcccacatc

SEQ ID NO: 367590 - DNA, 701 bp, Cannabis indica
aatatctaaaattcaaaatgaaaccaaatatctgacttaattttcaaaattttaagtttatttaaattgtttaaattagttaaatatctaataagatagtataatataatatccttatttgagaattgagatatttttggtattatatttctaatcttataatttaataaaataaatttaacaagataaacaaaattgaaaataagatattttgatggttaagatattatgaactttacttaataaataaataaataaaatatcctatgttttaaaattttatggtttccaaaccctaaatttctattcaaaccaaatttaacaaattttgaaaaatttcatcttattttgacaaaaatataaattttaattaaaataaatatccaataagataaaatgtcaaaactaatattttcgaatcttgtaatttaatttaataaaatatatttaaaaaataacaaattttgaaaaactaatatattagaaacttgatattctaactagattatttttaagttttattagtattttaatatcaaaataagatcgtttcaaattttaataataaaataaataatatctcatcttataattaaaataataaaaacaaacaaaaatatttaaaaaatttaaaactaaccatttggctagtttgtggaaaattaaattttaaatttcaaagcctactaatatctaaaact

SEQ ID NO: 367591 - DNA, 580 bp, Cannabis indica
aaataacataaaaacgaggaaactagggttcctaaaaattccccaaccggtagtccggttctgcaaccggaattccggttttgagaattcctggaccctcatccggaattccggttgcacaaccggaattctggttcctcgcaggaacttttcaaaaattcacacaatgctcaaatcaattccaaaccaccccaaaacttccagacctattctaaataccccaaagaatatttctaaagcatctacacagcccagaaaacacagaatcaaaaatcaccattaaagctccaagctttgagttcaaaactcaaacttggttaaacctagataacatgcatccaaactagctcaaatcatcctaaacatgcatataacaacctctgaaaactactataaacttcaacaaaatcacagcaacagattttacccatttctctttgaaaaccatagttttgagctaaaaacttccaagcttgaaatcaaagcaaatatcatgcattcactaactctaaactacttaaaataacaagattaatccactgaaaatatcaacaattcacagcagcaagaacatatcaaa

SEQ ID NO: 367592 - DNA, 582 bp, Cannabis indica
aaaaatacaatagagagccttatataggcagagaatgcatacagagagataacaaaaccaactaacattactgacacagtcaactaacataaccgacaatagaatccaactgattctataactaattcttgataaattagtcaaaattattttcatcaatgagaattatttataaaagtttatggcaaacttttcatgcgatccaccaaatacgaaaggaaaaaaaataatagaagaacaatttaacccaagaaataacaacgtactaaagaaaatgaataaaaaacaaagaaagcaagctttcaattcaaattaatatataccttgtatagagtcacaatttcgtcatgagctttgtgcctcctgctaactttcactaactttcctattctgaaaatcgatttccacaaaaaaaaatgatttcaaaatttccttcgtatatcaaaaaatatattatatatatatatttatatttaagatccaacatatatcagttacaaaaaaaaaaaaaaaaacaaaagatccaacacatatatttactgttccttcaaattcatattagaaacttggaaaaaaaaatga

SEQ ID NO: 367593 - DNA, 574 bp, Cannabis indica
cgctcgcactcactgttgttcagtcttagctctgcccttacctacacatgcatacaataactttgagtcaacagactcagtaagaaaatcataatcataacatagatataatttgaattacaattaggcccctatacactcaaccatatttcttccccacatcctacacggtaccgagtcaagaacattcatatggcagtactatcgaccataatattagcctatactcggtactctagtcgtaccgatgtaatagcatcaatgtgtacttatgccaaacatacattcatcaatagctaatataactctacgtatactaatattactattctaatgtaatataacaggcgatcataaacatgtatactgagcatgtaatcacatatacatatcattatactaatcttacatcaattctgaattcatgtgggccagtcaacctgagtggaactgctgctcgacgatttacaggcccttaagtcacaatattcataaaattgatgagtgatacactacatcactttttagggacttaaaatcaaaactaaaagtttctctatcgatggataacatg

SEQ ID NO: 367594 - DNA, 553 bp, Cannabis indica
ttaaaatatattaattaaacaatagttacttaaattgattctaagagaaacaatatgacaataaaattatatattctttttaaattactagaaaatttatattaatattttaaaaaattaatatttgtattaaattagtgataaaattagtgtttatcataaataattttatattatttaagtattttttattttactattttaattatttattaattaaaaatatgataaattattttattatatatttatgatatatatatttaagtatatatgatattttattttataatttaattaatttatttttatttttttggtacgtattattaatttttattttatttattgttatatatttttattttagtttaagaatactccaatctattcttaattaaaccaaacgctagattacttccaacataatttaatcttgtttagtctagtctaatcattttcagtccaatccaattcaatccatgtgtaccaaacaggtcctaaaagtaaaacaaacccaaagtcttagaggctatttggcttcataacttaa

SEQ ID NO: 367595 - DNA, 553 bp, Cannabis indica
ttttttttttaaataaattaacatattatcaatgggaaaaataatataaatattaattttctttcctgcagaaaaaaaaggttacatcgactggtattgcagtctgcactgcagtattcaagtcagccaaaaaacttttatttatacattcctctaatttatatcaattcacaatctcacattactatattagtttattaaaaatatacagaaaatagcgaaatataaatgatttgacaaattgagtttttaaaataatattctttttcaaaataatttaattcattatgtatcagagaataaatttattattttataatttttctagaaatttttacatcaaaaatttaatttacacaatttattacaaaaaaaccctatacgcctatatcaacttttttacttaccatctttgttttattacaaaaataccacttagtcatcattccatgcacagacacgtgtgccatccccatcactcatcaatcaaatcccattctcttccctctcttttttccttttctttcaacttcattttcgatttttccttctg

SEQ ID NO: 367596 - DNA, 631 bp, Cannabis indica
gacaacgttggattctcattttgatcaaataaaaggttgttaaaatggtgtccattttagatgaactggctactctattcaactaatattatatttgattctcgcctaccgggacactgtatttcattatgttggaaaccttagaaaataataaatatgtatagttttttgtatttttgcaaatatatttaatttacttgttattttctgaacatgcgtatgaatttattgaaccaataatttatttctatttattgatatttgtagtgtcaaaatgtacaacccacactccaatcctcatctagaatatgcctttaggaatgaacttcaaagtgtgaagatgactcctggtcagagtatcatttcacaattgctcatgatgaacatgaaattccagaaagcagctatgctgggaattattttatatgaagatcaacttttatgcaactgtgatgcaactattctaaaacataaaaaactagaatagtgtttccacgtacgtggctctatctacatgtgaattcactattttatttgtgatttaatatgaataaatacaccattgaaaatctgcaaaacaacttgaatgcaacgggtaaacattagctatagtattgatgcattttttttt

SEQ ID NO: 367597 - DNA, 551 bp, Cannabis indica
catacagttgttatattttttttatatacaactgacatttgcaaaaacacggtttttcacactgaaatagtaaaattgaatgaaattagacaaaagtccttaaatccaacaatctcgttcaggggcatttttaacgaccttaaaagttcaggagacataatttggtacatgtgaaagttcaggggacaaaaatcctaattagcctaaataattatttgcgaacataagattagtgttccagaggacctacagcaagctttgcaagacttgcgagaaggtgtctagaggggtgaaaacatgagcgctttgggaagtacaaacatgggtgttttgaggaaactttggaggttataaataggtgtttaggacatgctcaagataggcaaaaaagaccgtgaacaccccaaagaggaggttgcgagcatgagagtcccttccctacaacgacatagcctgtgatggaatctgaggcaccaaattctacgacagcaagacataaaatgattgacacttttttcaatattcaaattcaattcatcaattgtaccaca

SEQ ID NO: 367598 - DNA, 789 bp, Cannabis indica
atttgttcatattaaatcataaagagacatgtagatagcgttacatacatggaaacactgtttttatttttaatgtttcataatagttgcattacaattgcataaacattttgctaacagttatttcgtctgattgaaatatttgtctactgcaacgtttggccaactacccaacaaccacctagcaactttcgtctgatgcaaccttggccaaccacccagcaacaatcgtccgattgaaaccctcgtctgatgcaaccaccgcgcaaccacccagcaaccattgtttgattttgtaagtaatagtgtaagagatattttggtaattaaaatcacataaaatgtgtaaatgttatccacaccttataaaggtaattttataaataaagtatcaatttatattttttatgtaataattctttaagtttattgttcttgttctttattaaattttatcacttattattttgaataattctaattttgattgccaaatagaaaataaaataagttattggcacttgataattaatttttgtgagaacaataccggtcttaccgaattaaactacaaaaacaaatacgtatacttgtgtagtttatagtttttgcaacaacacaatttttttcaatgaaataaaataaaaaataattaaaaataatataactttcaatgttgagttatatatttttagttttaattttcttttaaaagaaaatttagaaatatttaaattttaattatatatataaaaaactaatataatacttcttggttttgtttttggg

SEQ ID NO: 367599 - DNA, 811 bp, Cannabis indica
gcaggaatttttcaaaattccatttctcaaccaattcaaccccaaacttcatgcaaccttccagacctgctaattagaccccaatgaacataaaccaagtgaataaaaccaagcttcaatcatagaaaagaatttcaccattgaaggttcaagattgagttcaaaaactcaaaacttaactaacccttcaaacaaccactacaactagcttaattcagtctaaaacaacataagaaacatccagaaactaaactcaagcatacacaaccaccacagtagctaaatcaccatattaccataaaaccaaagttttgagtttaaaattccaaacttgaataaaaacaactaacaaccaccacaacctgttctaacccattcatctgaacataatcaagcccaagaaaacaacaacaaacacatacagtagcagcaacaagaaaaaccccaaagcatgcaaaattcttttcttacaacttaagaaactcaaagagacaaagttaaagacttaccaagagttcaagatccctcaaaatctgcttgaatcaacaagaaaatggagaaaacacccagcaatcccaagtggttttttgagggtttcgaaagagagagaatttggagagaaaatgagattttgccttctttgattttttttttcaataaaaatgatcaattacaaacttaattcatttatttcagccaatatacttaaaataaaacaagtaattacataacactaagtccactaaaggacaaaggcttatggggcaaaatgaccattttgccctcccacacacaagggataaaaagcact

SEQ ID NO: 367600 - DNA, 615 bp, Cannabis indica
caaatttaaaaagattggatacaactaccttaactgtaaaagcagtttggttggttggagctaaaaaatgttttaactaacagtttaatggcaccatttggcttagctttgattaaatttttttttttaatttttagaattaaaaaaatccttctaaatgtatttagaaaaaatatgaaagttcttttagaaaagttaagatacttttgaaaagctatttttaaaattaaaataatttacaaaatctcttactcataagaattttttaatgatatacaaatactttaaaaaatacttttcatgataaaaaaagatctttataggtgccgtttagtaacatttttgttttttaattttttaatcacaaaatgaaagcaaaatttttgtttttaaaatttttgtttttgaaataactacttttgttttttaactttaaaaatagaaaataaaagtgtgttcagtaaagtttatttttattttttgattttatttacatcgggtctaggtccggggtcgaattcgtgttaaggtcagaggacgagttcaacgccagggccgtgggagaatttgggtccgggtctgttcgaagtccaaaatattgattcagaaaaaaaa

SEQ ID NO: 367601 - DNA, 565 bp, Cannabis indica
tttatattttgtattttagttttttagtcttttattgttttcctcatgttttttgtttgaactgctgcaagaatgagattacatatatgacccaaagaatttgtttattgcgaaagccgtctccactgctacataccaggttatagataatattaagtcttgcctttcacctgaacagcttgaaatgttttcaaaaacctattttggacatttcattaagcttcctgagttcaaagttcaaccgcaagtttttcatgggttgttgttgtaggaggttcagcagcctaatgatgctgaattgtgggttatgattcgtggtgttaggattaggtttagcattgaggaatttgcattgataattggtttagattgtgaaagtgattgtggtgtgttggattttaagcaagacgttaatagtctttgtgataaatattggccaacttcatcctctattactaaagaatttattagggaatgttttaccataaagaggtggggtgattctgatgaggatgttgttaagttggcagttctgtattttgtagaatggtttttgcttagtggt

SEQ ID NO: 367602 - DNA, 744 bp, Cannabis indica
gagaagaagagaaggaggcttcagctagggttagaggaagtaaagaaattgggctgctagggtttctgctgataaagaagcttttatactgccataaaaaggcagggttttgagggaaaggtctcttgatccgcacaagggaggaaggtctttttttgaccttgattttttgtactttggggtgttggtgtaggggcattttcggtaatgcttaatttcctacaacaacaaattatttaattttatttttagcactacaaaatattgaaaagaaactaaaaaggtacaagagttttattataactataatgaacactatcttaaaaaaataggattaaaatgttttaattgtgccaattgaaggacagattggacatagactatattgtaggcacctcctataatagatataaaaatttggtgcatgttataaaataatatagaataatataaaatagataagaagaaaagaatgagaagaagaaggtgaagagataaagagaaagtgaatgagaatttttcagttgtttatttcaatgggatgaacccctatttatacaaaaatatgagtgaaagaatgggaaactaaattaattgaataaaggaaaatacaaccaaacattaatggtgataattaatttggtgatttggatatccataaataatatttcattatactccccattggatgtccataaaaactatctcattaaaaatcttgctggaaaaacttggccaaaagaa

SEQ ID NO: 367603 - DNA, 1593 bp, Cannabis indica
aactctaatttccatgaatgtccctaataagatataaacaataaagttgtaaattaaaaaaaaagtagcaaaatttcagttaatataagaaatagaacaaattgaagatttatacaatactggaatttgaactcttagaggccattagcgaagaggcaaaactcgttagatcccctagtagaacactaccttaatggtctgaacacaaaaattgtagaaatcaaaatatgaataaattagcatcatcaacaaaaggaaaattaaagggaaaagacttaataattacgtgacaaataattattaattgaattaaaaaattaagattataagattaattcaaattattgttcatatattgattctagaaagagtaaaattaagattataagattaattcaaattattgttcatatattgattctaaaaagaataaaattaagattataagattaattgaattaaactttttgatattaacaaaattgttgctttaatttttcatcacactgaaaacatattgttttagctctattagacaatcatattttccctcgtaaaaagtcattttttttttataattgaaagatgtgatgtttgagtaattacatgtatcgtgtaattgaagatttgatgttgagtctattttttttattttattaatgatgtttattttttttttgatttaatgagatttattttattatatataaataaaaagtgatccatgaatttttcataaaccattttatttttaataataaaacattttatttttaatataaataagaagtcacccatgaatttctcataaaccaagaattcggttatatagacacactttatatagaatagatatattactcattaagttattatattgaattgtctttaaaaataatgtaatatacatatatattacatatatttgttcttatatgaaaaaaaaaaaaatcatattgtaaaaattgataactttgtaatatatagtgtggtgtggtttaaaccgtaattattaaatttaaaaccgcaaactacaaaccgcaccgcaccgcacaatttgacaaaaatgcaaactacaactgcaccgcaaaagattttaaactgcatcttttatgtgatgtggtacggtgcaggcaatttatacggtgtggacaatttgatgagcacccctaattattattaattgggaattttcacaatttttaattattattattattattatgaaaaataattagtaattttactcttgaacttttgacaatactgattctgtcccctaaaatatattgtttgttaagaatcccttcaacttttacatttacaaaaatttagtccttctgataagttatgtctcattatttcgtttaaaatactgacatgtctttgtaaattagcaactttaccccctaaattttgacaactattaaatcgtacttcatcaaaataaaaacttgaaaaattcaatattttcttagtaattcttacaaaattaatttagatcttaaaaaaaaaaggtcattttgaataattaagaaaattaaaaattttaagctaagtaagagatttaaaaatttatattttttattaaaa

SEQ ID NO: 367604 - DNA, 519 bp, Cannabis indica
ttatctctttggttccaagggctgatctggcgaggtcatgagctgcgatgttcgtagttctgggaatgtggtggaggaccgcacctggaaaagacgacaaagaggagactatgagggcaagtagacccgagagcgccgaacgatctggtgaaaaattctggatacgatgcaccaaagtttggcagtcagaagtgatgacagcaattgggaaacggactgcttgacaccaaaggagagctcgatggagggcttcggcttcagcaaaaataggggcaagagctgtgtgcgaaggagccgtaaaagttgcaatggctgttcctttggaatcagttactaccgccccgtacccatgttggttagttgattgagaaagagcagcatccacagaaagccgatatgtgtcatcggaaacttgaactcgcggtgaaggatgatgggatgtgtgagatgatatggatatccgatcttgtgcatccctatattcctgcaaataataactgacatagctctccacacaga

SEQ ID NO: 367605 - DNA, 350 bp, Cannabis indica
aaaaatagaataattttttaaaaaataatatctgacctctaaatttaaaaataagtataagaagaaaacgaaaaaatttgagtgtggtacgaacagtattcattgcatactgtccgcgagcgctcgaggggcatcatggccgagatttcttggcgttggaggctgcaagcagccattccgcgcgcgcatgaggccatctttagacagcatcgcttgtcctgaccgagagaactcggacaaggcgtgtctgaatgcacacgcttccgaggaaaatggggtgatccgcgcgcgtgtggggttgatgcaaccctgatattttccgattttcgaaaattcataactaattcaaa

SEQ ID NO: 367606 - DNA, 621 bp, Cannabis indica
aaatatttttacttttactaatttaaaaaaaaacaaaaaaaaacgatttcaagagtgttacaaacacacccaaaagtattacaaaatgtcatcatattaaattaatctttatatattgtctattatcaataaatttaacaatcaataaactaaaagaaatcaattaaaaatgtaacaaattaaatcaatattaatatcagtatatatatgaatataatgttgttgttagagtaggtgatttcgccttctaatctttcttctttatatattatctacttttttctatttttaaagttttttatttatttatattcttttaataatatagagctcatgtaacagtaaaattttaaatgtatatatatacatgtataaataataattatcatcaatatattaaaactaattgaaaactatacatgacagaatactcgttagtaaatttatatatttataggatttttcttaagtgagagcactacttttgctctcactcataagaatattttctgttacatttgattggtcaaataataaaagtgtaatgaaattataacgagttaggaaatatacaatacatactattaattatgctaatattattttatttttaaaaaaatt

SEQ ID NO: 367607 - DNA, 456 bp, Cannabis indica
gatattctaatttgtagaaagagtttgcatgatcacgcttcacatttgcaatcagttttggatgtgcttcgaaaacaaaaactatacgctaaccttagtaaatgcactttttgcaccgataagattgttttcctaggatttgttgtgagtgctacaggtattgaggttgatgaagaaaagataaaagccatcaaagagtggccaaccccctcaactataggtcatgttcgaagttttcatggccttgctagtttttacaggaggtttgtgaaggatttcagcaccatcgcagcaccgcttacagaagttatcaaaaagaatgttgcttttgaatggggtgaagcacaagaggaggcatttcaactgcttaaacacaagcttactcacgccccagtactcgctttacctaatttttctaacacatttgaaattgaatgtgatgcttctggtataggt

SEQ ID NO: 367608 - DNA, 714 bp, Cannabis indica
agctatatcatggaggagtgcaaaacaaacactcataacttcatccaccatggcagcagaatttgttgcgtgttatgaggcatccaaccatggtatatggctgagaaactttgtcaccgggctgcgcattgtggatggaattgaaagaccacttaagttgtattgtgacaataagtcagctgtattgtattccaacaacaataggagctcgacgaagtcaaaacacattgacatcaagttccttgttgtaaaagaaagggtacaaagtggacagatttgtatagaacacttaggtacaaactccatgattgcagacccccttactaagggtttgccacccaaggtctttcatgagcacactgctcgtatgggtgttttagattatgaggatatctagattcagtgggagtttgtctttattatccttagtgtgttttatttgtttcatgaaacatgtgtatttggatatttttctgatcagaaattatgttattcagtttatttcactttgtacatttaagctaaagttttgatctccataaagtaaagtaggaccaattgaaaattgacatgaatagatcaccatgcatgtaattttcataccacattatcatgattgatctatgtcatttggctatgttgatgtatgtgaccattgatgggtttagttgtgattgatacaacgaaaatcgctttgatcctatgttgatatag

SEQ ID NO: 367609 - DNA, 764 bp, Cannabis indica
ataaacatactaatatctcgggttataatcaggcgaccatacacctaaccataaccctaactgaataaggattgatcttgacaaagtatgactaactgcgaatccagcctatactcagtactctaatcgtactgatgtggtagcaattaaatcatactatctgatagcctagcatatatctgttggcatctcggtgcatctctatgtacacctcaccaatgccctgatatgctaatatgagggctacagatttgcctatactgatggcaactaacatgcacgctaaacatgtataaacatatgcaaaatattatactaatcttacattgatttcgaattcaggtgtgccggccaacctgagtagaacaactgctgggcgaattacaggctcctaaatcacatcaatcacagcacaggtaagtgacacactaaatcactttccggggacttaaacttgaaactaaaagtttccctatcgataaataacatggaaataccctaaatatctaaaaaatgggaaaaattagggttcccaaaactgccccaactggtagaccggttccccaaccggaatttcggttttgtggggtttcctgggagcaaccggaatttcggttcctacagacccctctgaattggaattccagttcagtgcaggaaaggctaaaaattctataactcaaccaaaacaaccccaatccacatgaaaccttccagaactgttctaagcatcctaaagatcaaatcccaagcaacaaaaccaa

SEQ ID NO: 367610 - DNA, 585 bp, Cannabis indica
tatgtgtttagttcatcgttttaaaagttcaattttaggttgttaaatcaacatacttgtgagtagatctaagttcctggtaaaatataattccaacagtaaaccctactaaggtcttattataaatagacgtgtgagagtaacacgtagatctatgctacatagacatcaatagacgtgtgagcgtatcacgtgggtctatgccacatagacatatataggcatgtgagcgtaacatgcatgtctttatcaaatagacaaatagtgcggtggcactattaattatgtgttatacatatatattgagattaagggttttgtgttcaaagcataatcaggttggactcggtaaccagaattgagattaatcgttctaaggccttattgtatctagacgtgtgagcgtaacacgtgggtctacatcacgtaaacataaatgggcgtgtgagcgtaacacgcgggtctatgctaaatagacaaatatgaatggcattattgtatttgtgatatgttaattataattgttgatattatttactgtcttgctaggcttggctcatgggtgctctactgtgcaggaaaggg

SEQ ID NO: 367611 - DNA, 522 bp, Cannabis indica
gctctctaggctctatttatagatcatagaaaccctagagacagccacaagatcgaatctacaattgtacaaaactttcctaagataaacacaatctggagcatcagagtcggaagctgacgtagcaaatctgaccagaaaaaggaaacttgctataatcgggtccgatcctctattaagtctttattcctgccataaatgaattatatatattctgattgtatcaagatacaatcaaattcaataaggaaaagacaataatcaaagtttccttaaaaaccactttccataagagaaatgcttctcttacaagaaatttccaaacaaagaaaagttcagttgtaaaatgcatctttcctaacataggaaagagcaactaaaaccgaatatacaaggtaagacaatcgggtatgaatgcaatgcaatcttaccataaaagaaaaaaaaattatcatctaacttgccaaaaaaggactttacagaatctaacacatgcccatcataaaattgttggaaattatt

SEQ ID NO: 367612 - DNA, 529 bp, Cannabis indica
ataacataatttacaattagtcactaaattacttaaacaaaaaccacaagaacttaaaataaaactaatatttacgtggtttgccacgtaactctatctagtatatatatataccttcatataagaaatatcagtttggcaatggggacaaaatgatcttaaagattatgatgtatcgtttgggctttaaggagggatgcatccaaaagattatgcactcggttcgcttggtttcattttctttccttatcaatggaggttagaattagaattattctgaaaatatatttttgggttggattgtgaatgggtctttttaggacccttgttaattgtataaaataaagttatttttcatcattaatattttagatttgtgtaagtttagagtttttaaagtttactttgttttgtttgttttattcattttgtttaattctaatattaatttgttattttagtgtttttaataggaaaactttataagaaaaagggaaatttgcggcaaaagttctcaaaaagttcagtt

SEQ ID NO: 367613 - DNA, 449 bp, Cannabis indica
ggttccaaatcccgtactcaaaaaacatacgctaggtctatcaagttgattaagaaaccttgatgacacataagatcgagtagcacctaaatcaaagaaaacagtaaaaataagattgttaataagaagctgacctgtgaccacagacagactggcggcaacatcagcctgggtaatagcaaatacacgagcaagtgcaagtttggcttcaggctttggttcctccttcttcaattgggtacaatctttcttgaggtgccccactgatccacactgaaaacaagctctccggttgcaagtccaaggatgatgtttcttacagcacgggcactcaggataggagtaagtgtgacgtccccctcctattctggtttccacacttgatacaatctttgaaacgcacttcttgttttattattagtgcaagtgggagtttgtttggattttat

SEQ ID NO: 367614 - DNA, 934 bp, Cannabis indica
gaaatatttacccagtcacgtttggcatgtcactatagattaatcttttttaaaataataaaaattaaataatttcgggttttactctatagtgacactcgatatttttagtgactcacattataagagactaatctcaaatgtttagagtctaattgtgcatgtcactaaaaattactctcaactttttagtgacccatacttttgtgcgtgtcactaaatagtgtcactaaaaggctatattgtagtagtgtcagtctgagttgtcccgtacctagagagttgggtctgcgttggggcaagaccaaacacagtgggtccataaacggttggggagaactgagacctgggaagagacaaatatggagtaggagtctgagaggcaaaactcggagtggctgttgtgggcactggcgccggacggacttcaaatgcttggttgtaggcatcttcaaggttaattatgccttgtgctttggatataaactcacttagcgttttggacctttttcttttcatctccccctatagcaaggaacctacagccaatcccgattagagagccattagctgtgggaaatattttaccaggatctagatttactaccgagtatgtttcattaacatcctaatatgaatttctaaaataataaaataaacacatataatttctctccttccttgagcctgattcttcttcttgttgattggattcttcacaatctttcgcaatatgattgagatatcacttgatgtgtgtgggcactcactcaatcactaaaggctgaataatatgaagaagaaaagagagggaatgagtgtggcggctagggtataggtagaaggcttagaatttttctctgaaggaatgcaatgcatcatctttttcctgaagccatcactacctattataggtaaccacctaggtttaggt

SEQ ID NO: 367615 - DNA, 697 bp, Cannabis indica
taaaattgaaatatggcataagtgaaagaaaagatattattgaataaaatgaccaattttaactagtggtgtccacttactatggtgagccacttaatgattattttgctattattttatcttttttattccatataatttaaatcttaaaccctagaaaaagtcctatataagaaataagatgactctcattctcataacctacataagactattctctcaaataacaaaaagagatcctccttctatagttatttcaaaattccttctcttcttcttcatgaatttttgaactgatggtgaagattacatgcccactcgtatcaagttaagaactcaatcatagtatggaagattgtgaagaatctaacactagaaggagatctaagttcagattttgttattactctgcgacagaaaggaacaagggttagagatctgaacggaaggagccataacatttcagtgccaccaatgtaaggtttactaaactttatatgtgtttatttttattattttaggaattcatattttgggtgttagattatagaatataatccaacatacttgttagtaaatctagatcttagtaaaatatattccaacaactcgcttcagaaccatgataataattactttcgtgaaatatggatttaaaacaatgaatgtatgatttggatgtgattcatgttgatct

SEQ ID NO: 367616 - DNA, 574 bp, Cannabis indica
catattatttatatatatctatactattaaatgaggctatataacaaaaagtattgttctttttattaaaaaaatattaatattcaaatttaaaataactacacatgtttctcttatcttttatcttatattaaatgagtctatataaagtatttttttaatattgcaattcaaatttaaattcattacagatatcttaaaaatatttttttttattatcttcttttttacgaaaaagatatcttcttattattattttttaaaaaaaataatagaaaacttgtatgatatttactaaaaaaaaaaagtaaaaagtattttgattaaactaaaattataattaacaataaattttgaatattattataatttatttttataaatagcacttaaatttaaattttttttaataaaaaatgatttgtttattgaataacataccaaaaaaaattaattatacagctaaaaaaaataacttaaaccaaaaataaaaaattaagtatacatacattacatgtaatattaacctggtatatatttatatatataatatattatattgagtgtaatattg

SEQ ID NO: 367617 - DNA, 615 bp, Cannabis indica
aaaactgagcctctctctctccctatctttggccgaccactccctctctctcttcttcctaaagatttcaaaattcttagtgtttagaaagttcatatttagggagttaatcaacatacttgtgagtagatctaagatcctggtaaaataatttccaacagttatcccattttttgcactatgacgtggcaacatgtacgggtgacatgtgtccatcattccttgcacttgggcagaaagatattctgaatgggcttcaagtaatatatttgcacgcacaacgtctgcctatccgagcagaatgaagggcagactattcgactagagaacgagtttggtttttcgaactgtatacttggacttgactacttcataatggtatcggggagcccaggcacgaaggcaatccctatgatcatgggattgaattagagggatatggcaggctatctcaatcctccatttcatgtattctaattatgtaataaatgttccttccaattatagacattgtaagtaaaagggaaaccttccctcatgcattaaggccctataaatagtgatttagcttcactgtaaaagggatcaaaaaaattgctttagagagagatctaa

SEQ ID NO: 367618 - DNA, 541 bp, Cannabis indica
taacttttattcattgttaatttacctattaatttacttgcttcctgagttttattattcttattgttttcttcattgtcagagggccaccacgccatcttgtatacttggtctctggggtgactcttcgaatgctattctggttgtatcacatatgctcattcagatggtctcagtagttgactcttattcgggtaggatgcccttccggatccagagagttccagtcacaaaaataaacgtcttggcactacaagaaatgtcacttttaccagcacagtttgctactgcgctggtaaaattaagtaacttttactagcgcattttgcaaactgtgctggcaaaaaggtcaaagttttactagtgcacatttgcagtggctagaatctaacttttaccagcgcatttacgcgctgggaaaatttatttttgccagcgcttttcattttgtgctggcacaagttctaatacgaacgttgatttgccaattccttttgccaacacatcaaaagtaaattctattttaccagcgcaataccaa

SEQ ID NO: 367619 - DNA, 543 bp, Cannabis indica
ttacaaggcttaacagatgagtacgaacgttcaatactagttgtgctattgaccatgatatcacccactatcagtactatgatcgtactgtaggaccggcactatgatcgtgtcgctatgatagcataaatagcatctaaaggtataattggccatgatatcactcttaaccagtacgatgcctgtactgttgaaccgacacaatggttgtgccgctatgatagcaccaattcataccttatggggtgagtatctcccaaacatatacaatcatacataaaacatgcacatatctcataccacacgttatatacaattcttacctgttttcctaattcaagtgtgctggccgacctgaacggaaatgcttgcgctagatggattgtaacacagatgagtgatttgctaaatcactttccggggacttaaatgaaaattaaaagtttccctatcgataaaccacatggaaataccgtaaatatctcaaaattgggaaaaactagggttccaaaaattccccaaccggcagaccggtcccaactg

SEQ ID NO: 367620 - DNA, 651 bp, Cannabis indica
aaaccggctagccggtttttgcatggttcctcgaatgttctattttctcaattctcgtccatttcagtgccgtagttgggtgtttctctatttcctaagttagtgtaatccctagagagtataacagaacatagggttgtgtgttcgataggaaataggggcacatattcctagcacatgcaaaataggaaatacatgacctatatcgtaggtatcttaggagttaggtggatataatcttttatcccttcttaattgatgtgatccctcataaagtagcggtcattagccttattaatcacagcgtaatagctgcaaatgaagggttacgccatcagacatattgcttatggaagttccaatacgttttctcccatgcagcattaaatgcgaggggactgttcaaatagagtccagtacctcccggagatgcccgagcatactcttggacttcgggagtacatggagccttctcacatcttctcagggagttatcttcttactgacactcctattgccagacttagttgatttctttaagagttgagtctctcagcttcacgtgtcgttgttatactggtccacgtattttgggcaaaatagagagcaacaatactatactaaaataaatatattttctttctattattt

SEQ ID NO: 367621 - DNA, 579 bp, Cannabis indica
caaattaattcaaagagtaaaaaaaatcaagcacatagtttaaaatttcaatcaattccacaaataataacagcagcaaaatcgacattagcttaattaataactaaaacaaacaaataaagctaaataacaaaaaataaattaagcccttcccccgaacttaaaatttcacattgtccctaatgtgaaacagaaatttaaagagaagaaaacttactttaggtccataccatatcaacaagtggttgacgcccataataagcgtcatgcacgacaacttgaaagttgtttttgaaaatacccttaagcttggcatgcaatgagtttgaaccaaaagctgcaccaacaacacaagactttcgatgatgtgcttggggagaaaccgttgataactcgtagagaatacaatatggagaatacggtattagtggaatataagggtccattgattgttcataatatagtgacgttgaagacctcaaatcaacaactacatgtgattcttcagccaccaatgacccctctttttcactttcctcaataacctctcaattggttgttcagtttcctcatgaccat

SEQ ID NO: 367622 - DNA, 803 bp, Cannabis indica
ttttttagtaaaaattcgtatctttacgtttaaatatttttttatatatatatatatttatagtgtttataaaaataacaagaaaactacacaaaagtaacagaaaaataacagtcaaataaaattaaaacaacaataaaaaataacatataaataacaacaaattaataagagtacaacataaaaatacattaaaggaccgtattttctataaataggatcataaaactcgtaaaattatttaaaattccgtagaaccgtgtttttataattttttgttgttttgtgtatttgtggaatgatctcgtgtaaaaattccattgtcaaagtaaaaatataaacttcaaagaaaaatgggccagccatggcctttgtatgcttgtcggccaccttgtcagtagcttggctggccacctgctcagtaggtgtgctgaccatagcctcattgaagtggcttggtgacgactcattgggctggatgatggtctatttgttgggattttatgccctaaataaaactcatttcaatctaatctgatttgttatcaatgaaagattagaagtcatttatgtttacatgtagttttcatgtttatggtttaatatatacaaaatctggtaagtccagaacatatagtcattcaaaattacagtgattataagcttcaaaagacaaagtccctgattcatcagtgcactggatttacactgatgtgataatcagtgatgaagtatacttacaccttggataagtgttatgttctttctagaacattggctaagtatgctagtttcggatgtat

SEQ ID NO: 367623 - DNA, 337 bp, Cannabis indica
ataatcaaattttaaaaaataaaaaaaaattaagcaaaaaagatagatttttacttattttcaagttcaaattacactaatatcttaaatgaattttaaaaaattcaattaatttatgtctgataattagatttgaaatatgaaaagtaaaattcaaaatgcaaaactacacaagaaaatcggaagttaattccatgaaatagcatgaaaaatcgaagaaaacgaaataaaattgtgagatgtacggatggtatgcacagcataccacccgcgcacaccagagggagtttggccgaggtttctcggcgctggacgatgcaagcagccattccgcgcg

SEQ ID NO: 367624 - DNA, 535 bp, Cannabis indica
cctaatatctaattataataatattttttaccatttaaacctaaatatcgatattctaaattaataatatttaatttttaataggtaattaatatttttcgatattttggtttaaatttaaaaaattgattattttaattttttaaattatggttagatttaaaaatttgttaaattctttaatatttatatattatttatttttaaggttagatattttaatattttatatatttgaaattaaagatatcattatctttttaatttgaaatattatattaaaatcaccttagatgataaattaaataattaataaatttaaaattaaccttgataattttatagatattctaaccgtaatattttcaaattcaaaaatttgatattttgttaaatatttaattgtttataaaatataagttaaaaaaatgatattttactatttttatatcattttacttattagaaatttattaattatattttaaatatttaaataactaagatattttgtagaaatttgaataatgcttaa

SEQ ID NO: 367625 - DNA, 897 bp, Cannabis indica
tccttgtctattaatctgattatgtgataagttaaaaatcatgattccagttgcagtttccaagtattcttcttgttgaatcttggtagtcccttctggccattctatagggtcattaagcactctcaataatttctgttgagccaagagtgacttaatctttctcctccaaatcctgtagtcaccagaaccatcaaatttgtcaatgtcaacctttagattgctcataattaatgaatttaaataagatcaaataaagataagtaataataagcaattttgttataaagattattagaaaatatcccagaaatcttttgtcaaagatttcagattgatcttgttgagttcttgaatttcttgtttgtgtttcttgatttcttgcttgagttttcttccttcttgattagtttggatgttgatctttctccagctttaaccaagctctgataccattgtaggaaatttaagattgtattttacaattctgccctacaccaacaaaataaacaaatcaatatttaaggtcaatttcgacctttccctgtttccctgacttttcaaagtcaacacaacaaaacgactccgttttgtgtatgaacaaaacccccaaggctcgagaaccttctcagtcactttctctcttccttaggtttcctttgaaaccctagcagagagtttctctctgagaaactcgaaccctaaccctagcaaacccagaaatccaaacacaaacacaacaccacagatcagatctacaatgatctgatctatacacaaccacacacacaaaaccagaaagatttgagttagaatacaccagatttttcccgaagttcaccaataaattggctacgtctccgtttgagctgctcctcaaagttgagagctcgattc

SEQ ID NO: 367626 - DNA, 542 bp, Cannabis indica
tgaaagtgacaaagtactcataacgcgatcaagcacacttaaaaaatgcggcttaccaacggcgaactgcaagatacttcaattctaaggtcaagacaaaagtcctgcgaacaggagacttggtccttagaagagtaatgccaaataccaagaacccagcgcatggggtctttggggataattgggaaggaccgtatctcatcgcggaaaagattggtgacgctacataccgactcgcagcactcgatggtactgcaattccacaagcttggaatggcgaaagcctaaaattctattatcaatagtactcgcattatttaaattgtgttcgctttgtacttatacttagtcattttttataaaaatcctaagtatagggggggtatatatatatcataatgtactattgattatataaaggaaatacctcatacttgttaattcttcaagtttaaaattttttcaagtcttgtgagattttctacttattacaccaggctgtaattaaagtcgaatatatactaaaacgcgagtacccgtgt

SEQ ID NO: 367627 - DNA, 687 bp, Cannabis indica
ctctccaatcttgccaatatggtggaagatattggttcctgaggctaataatggaattaaaaaacttacatttttgcaaacaatttaatgacttcatccttgccgagtggcacctccttactctcccagttcaccattctaggaaagcgatgcgattttctgatcgcaaatttcttagcaagctcaaggatggactcataagcccaatactgcaatgctacaacatatccataggccaagtacttcgactccttctgagtcattcccttttcaagcttcctatccgtatacttcttcttttctatgaagtccttactctaagtttctttcaacaagttgaaagaaatcatcccccacgggtactcgtagaaaaaaggaaggtcgtcagccattgtcatgataagtggcggaactaaggtcttctcctctttcccagtcagaaaacccatcacaaacaacaccatacccaacttgtaaacatcatacttcttagtgcaactctcaaagacgctgcgcagttgaccaatgttgatggatggatccccattgaagtattctactttcaaatggtttgacgtcgccttctcttcaaccttaaactcagggtccacataacatgttaagcctagtcaccatggaaaactcagctcgggcgactttgtatctcttccttgcaatgtaaaaatg

SEQ ID NO: 367628 - DNA, 1006 bp, Cannabis indica
ttttgggcatcttaaagtttttggggagctccgcctctagaatgtgtctggcgcatggctcccagtcctcacagtcagagtccgagtcgtcccccttttgtctccgggagacttgggcaatgtccttgcgtagtatggctagctcagccataattccttcgttcagcattcctgcgtagaccgccgatgcgtgtttctttttgtccaagtgatcccacaaatcaccgtgcctctcgttgatctgatttcttagatcaatgggagggtatcttcggttccctcttcatttttccccgggttcctgatgcacagaaacgctctttcggtcctcttggagtttgcccctctgcggacctttccctttcagaaaatttgagcggacctttcgcggatcctgcatatttttcttttttctgggatggaagtagggtttttccgttggtttccttcagagagataccgtatggggctaggttccctggacttatgcttcagagtgcttggtgaggactcttccggtgtttcttcgagtcctgtagggatggctttagggtgtatatggatccctgctgtctccatggttttctgcatagcgaccatcacctcttgcatctttttgttttgttctttttggtctgcgatctcggcttcatgatcagcagccttttaccttaagagcagtagctctgtgtaactgtcttcctcgtaggcgtcgtactcgtcaaagttttcttcgtactcgtcatcattggcctcctctcgttcctcagaatccacgttgacttttgaagccacttcctcgtcttcagggttttgagcatcttgaggaggacgaaggaggacggggctgacgcgtatttttccaccgttgttgcttgagcttataagactgttgtctatttggagacgcttccttcagctctcaatgaaagtaccaaaatgttgaccaaggttttcggcaaccaatttaataatatatgtaagaaagtgttggatattattttac

SEQ ID NO: 367629 - DNA, 693 bp, Cannabis indica
atgtttattttaattttgtttaggcaactaagtataggaatgaaacaacaactctactataatatgcaaataaatcagatatcaacatattatttcatcaaaacttaaaaataaccccaaaacaaccttccaaaaaaataaaataaaacttgaaaataactacaaattactcgtatatcaacttattatattaacattgtagttttttaaatggtgacttttacttgtttttttaatttttttttttgtttttgttttctttcgagttgcctacactatttgttgatgtctaattgattttcatatgtacatagtgttgttatgcaattattttttagttcttattaagatttttttttgaataattaagttattttatcaatacataaatgagtatataattatttgtttatggtattacttttaatttttaagattatttatgtgttgtttataagtttgttttgagttgacataatttgttggtacccaatttatttttagggataattacataagatactattttttgtaaaaaaattacatttttccgtttaaagaattttttttttatatttttacggtttttcatacaaacaacaagaaaactacataaaagtaacatgaaaataatatttaaataacatcaaataacaacaaaaaatgacatgcagataacaaaaaatcaacaac

SEQ ID NO: 367630 - DNA, 797 bp, Cannabis indica
aagaataagtaacctttgccaaggatagatgatttatttgatcagctgcagggaaagaccatcttctccaagatcgatcttcggtctggttatcaccagctgaggatttgggaagaggatattcccaagacagctttccagacccggtatggacactatgaatttctggtaatgtcctttggattaacaaatgctcgggcaacatttaagggcttgatgaaccgagtgctcaaagattttctggatgattttgttattgtctttattgatgatattctaatctattcagacttagaagagaatcacggaaaacatcttcggatggtgttacaacgtctcagggagcataagttgtatgcaaagttcaagaaatgttaattttggttgcctcaggtgagtttcttgggacacgtggtaagtaaagatggtattttagtatatccaatgaagattgaagcggtacgagattggcctcgacctaagtcagaaactgaagttagaagtttcctgggattggtagggtattatagaaggtttgttgaaggttttgcaaagatttctacgcccttaacagagttgactcgaaagaactgcaagtttgtttggattgataagtgtgaaagtagtttccaggaattgaaacaaaggttgattaccgctcctgtattaaccttaccggtaagtgatgaaaagtttgtgatatactgtgatgcatccaaacaggggttaggttgtgttcttatgaagttagggaaagtgattgcttatgcatccaggcaattgaaagagtatgaaca

SEQ ID NO: 367631 - DNA, 781 bp, Cannabis indica
ctctctctctctctcacatatacacatatttattagttattattaatatataaagactaattaataattaataagcatttttgaattaagtaaacatttaaaatgaccgaccacgtggaatgcgcaaacagccgcatcacacgccggggagcggcgcctaccccttttgccactgtcccatccacactcccccaattcattttaatgtcttttactcactcaacccaactcattatatataaattataaacatagagaaatgctaaagtgcactagtagtacctacaccctcttatgtgtcagtatcgctattggtcaaactaagtatcgagtcccacatagtttaatataataacttttaagaagtatcgttaaccaattgcaacgtgacatgtcgagaaggtgctaggcaccactagtgcctaatagcaatgctcataaatatatcctacggattattttgtttatagtgtatccgatcagcactaagtgtagattttatattttagatccaattaaatccgcacaatagttcaaatccaattcaatttataaaaattcatactatttcatgaatacccttagttaataccatttgaaaccttactgttggataaattcccatactattgtcccataaataaagttacaaggaaaataaattagacctctttataaagcctcaacagaccattataactcatagagttgtcggttctgttttcctaggcttaggtcttttattcttaacaataaaaggaagcaaataaatatctcaaga

SEQ ID NO: 367632 - DNA, 715 bp, Cannabis indica
gaaaaacggtcccgcaatgtgaaacttaattgttagactagaaaaaaatttctagtccaataatgttggacttaaaaagcagtatatttctagtctactattcttggactagaaaaacatttctaatccaatattgatggacattatatatcaaaacaacaaatattttaaatattaaataattaataaatataaaatatccaaaaatttaaatatatataaatgttatttattaaaaaaatatttttatttataattttatatatataaaaaattaattaaaataatatatttttatttagtaatccaattagagttatacacatttacataggaaaaaaagttaggtacctatgaacaaaattaattaacacaaaactcatacaaaattatagaacacattacaattcaaagttatacacaaaactgaacaatataacatattaagttcaagaatgtaataaaaagaccaaaaaattctagcttgccgaagtcctcacttgagcaccaccactatcgtcgaatcttcctcttcaatgagattcggaggctcttggatctaactcgagaatcctcgttcacggtggtttcttaacagcaagcccttgggggttcagaagctaaggcaatctagtgccaaaattaataattaataaagaaagaaagaagtcgagagagagagagagagagagagagagagagagagagagagagt

SEQ ID NO: 367633 - DNA, 866 bp, Cannabis indica
taagtcattttagcacggctacttttagggttagaaatttggatacaaacacgcaacttacagcctttcaggcagggatctctaccgatccattaaccgtaggggcgagttacgggatgacttacaaagacgtccggtgagaagcatcattgagttcaacgaaagggctcaggtgtttgtccagaaggaagaagcccaaaaggaaatgaacttgttaaaaacaagcttgagaagcaaaccaaataatgtttcaataggtactgcttcaacgagaattgataactcgtggacttctggttcaaagagaaaggatggaattaaggaaccatcaaaggatagaatgaaacaaaagaagaatgacaaatacgtgctagtgtgtactatttatactcagcttaatgaaagtcaggagaatatttacctcgcacatgggctgaaggtagccttcggcgaacctgagcctatgaagaattcaaggagcaaaagagatcctaacaaatattgtacattgcttaaggatattgggaattcgaccgacaaaggtcaccaattgaaagatgagatagaaagtctcatcgctcgaggccattttaaacattacgtgaaaagacagggtcagggatacaaccaacccagtctgcccaataacccaaacaaccaggggttacaacctattcttgtggagggagaggacatcctggttatttcgagagggccacatatcgcagggaacgcaacaatgcccagaaaagatatgttaaagagataaagaatgtgcagtcgatcttttccccagaaccttccaagaaggtgaaaaccgaggaacctcccattacattcacgcaggaagatgagaaaaatgtgag

SEQ ID NO: 367634 - DNA, 850 bp, Cannabis indica
actacaaaaatacatggaactaaatgtcccacttttccctcaaaaaaaagtctcacattctttataaatgatgtaggcatcatctatctagcttataaatattattctgtttgtgtcatattaattcatctaaaagtatttttgtttatggatggttgattaatttcttaccctatgagtttttattattttatttttaaggtcttataattttatatctttcatctaatataaattttattatttatacttttaaaagtaattatttaataaatatttgttttataagttttttatatttgatgtaatatataataataatatacaatttattataagttaattttattttaagattttatatatatataattctatatttttattagtccaaaaaaaattcgaactaaattattttaaatgaaattaaatattatttttttctcaatatataaagaaaaatataaatcaaatgagatgtcattaacattttcttactatttaaattcaatatattttataatatttcttctaagtaatatatatatattttgtaatagtctcacattgtttacaaactatgtgagtattatacttattaactataagtaaacacaatatatattatatttcattaaaataaatactacaagtaaaatatttcttcatttacacggatttgtccaaaaattaacattgtttctctttgtagaggcaattgaataccttacccaattaattttatatatttatatataaatatatattcaattgatcaactttatacaaatatccaaaaattaatatttgattattttttttatttttatttcataattactttgaatat

SEQ ID NO: 367635 - DNA, 930 bp, Cannabis indica
aatacttgactgttgggtctatatgttagataggggaccatttagtagtgggtacgattttactgaacccaaccctccgccatttagtccaatagcttgagtttattttccaaagtcatactcgggcgtaatcattattatgtgatgtagcttagaacctagttaatagttactagtgataaaattaagtttatgtattgctacttgtctaaatatatgcatgtacattttagttaagttttattttatttatttatgtgactacctggcacacatttccttactgagtttagtagctcacccttatcaaattaccatgtgcagaccaaggtaactaaaagtctagaatgccggtggcgagtggaactttggatgcttgtgtgtgtgaactcgctgagggccatataactgcgggcggtctagggggctttgtttatttatttacgctattaaatttatgtcgcaattattttagttattatttattatgtcttttgtacgaaaactggccagttgtgaatattttagtattaaataaaaatgtgacattatgatttttcgcgtttaaagcttgtaaataaaattaatatttttataaaagtacgggcgttacataaaggcatattgattctttgcagagaatgatcttgtcaagaccactatgaacaagatataaatgccatagatttctaaaatatgtggttgtggtcttttgatgacataggtctagttacaagataaagttcttagaatagtccaagtggatccttgtcactgaaaactaaactcaaatccacacataaatatacagtttgaatccattgacagaaaatggatattaaaaaaaacttgtgaaagtcatactgtaatgtgtaatgtgttctaggaaataaaaatataaaatttctatttggaatctaaaatttaaag

SEQ ID NO: 367636 - DNA, 634 bp, Cannabis indica
tttaaatatgtatatcaattataggtacttatatagaactacttcagtggttcaattatgatcaaatatgttatgtctaacttttctaaggagtctattctgaagtaccatttctatcacgattattatttttaaattatcaatactttataacattaagatatatctccatgtgtacctctagatttaacatcttcatgataaatgaaatgaatatttattaataattttttatattttttatttacgcttcaagcatttttagactcattctaacttaaatttgaataaaattaatttacaattggcgtatatcattttgaattgtgtcgttcatattatactttgtgcaaggattatttctcaaaatattcatctccctgatcgatagaatttttaaaaaacttataaaatctaataatattagtttaatacacctatagaaatttcaatatatcacaataaattaatatttgtctgaatccacatatattatatgacattgaatttcaggttcaattatagttatgagcttattttatttcaaagaatgagtcatatgtgtataattagaaatacatatatttatgatcatatgatcttatcacatcgataagaagctatgcaataaaaa

SEQ ID NO: 367637 - DNA, 511 bp, Cannabis indica
tgcaaatcactatggcagatgaggtttttgactttcaatgcctcaactatctttaagtcggcgattaaggcttcatactcagcttcattttttgatgcgtcgaattggaacctcagagcatagtgaaacttaaagccttctggcgatattaatattacccctgcactcgaaccctattcgctggatgcaccatccacgtataacttccaggtttccgcgtctcgctgaacatgtggaattttttctggagttataccttctatcaagaagtcagccgaagcttggcccttgatggatgttcgaggatggtatgctatgtcgaactgcctcagttcaatcgaccattttatcaatcttccagaagcatctgtttttgataaaacttgtttaaacggcttaccggttaacactttcatggggtgggcctggaagtatagttgtagtttacgagacgcattgattaggcataacgtgagtttttctagaggggatatctagattctgcccctag

SEQ ID NO: 367638 - DNA, 535 bp, Cannabis indica
ataaaattaagagaagagtgaataaatgtgtagcattattatattataaatatatttcaacctaatctttatcctcttcttctctttctttatgcaaattttgaatttgacctttcactattgatttccaaataactccacacagtaattaaaattaatttttgaaccattttaaattatatgactatttattgaatctaaattatagagcacctaacataaaactaattatacgtgtcttgcacgtaactttttttctagtatatatatatatatgtatgtatgcttgtcttctttgattctctaaccctacctcactcttactcctgccgccactcccattttttctcattttggaagctctttctcactcacacactcacagatctctctctgtttatagtgaatgatatgaatttctattattatatagtttatttacttttatgtttgtcagttgtaaagatattttagttatgagatttggtattttgtcaaaagtttaaggcttatatatattgatatcaaaatgtga

SEQ ID NO: 367639 - DNA, 634 bp, Cannabis indica
agaaagacttatttttaatagaactcttgaccccttgatatttaataaattttagattttgtaaaggggcaacaaactaacataaaaaaatcaagtgacaaaataaagtttcattatctaagaatttatgctatattttggtggacatttcctcatggtttcatggaatgatcaataatagtatcttgtctttagactagtgaaacttgttttgttcataagagcaataatcttcagacattgtttcttttaaattttcaaaaccatagttgacaaaacaactaggcaagaaaactaaagtcgttgaaactaactattgcggttaacacaaccatgggaggtatgacgaatcaagtgagtaacgtctaagattattttgcacaactactaaagaaatgtaattttgtcttccaatacaaaatattaggcaaaaacatgaagggtatttgagagatgtaattaacatttatataaggacataactagaagtgtgattattcattcttcttcatgaaactcgttttggaaagaaacagttaagactgcaacataaattctgaattgtatatcaagtaaaatataagttaaaactctttataaactaaggttgtggttagacttatagtctaacata

SEQ ID NO: 367640 - DNA, 604 bp, Cannabis indica
tgtatacttaatgttatgcccaaatttggtgagcccatcagaggaagacacgtgtcgagttgggaagaacgaagaactcaaacacgcaatcgtaagtacacttggcatggaacaactcgttagaaacacaatttgtagagtatgtttataactcgactggctgaacgtcttctgcgagacaaaaaatgtacgaactgctacgttatgtatcgacgagaagctatgtaagtgcaagtgtgtacgacgaggcttcaacctcgtcgcgtggaagaaaaaccaaagcgataaaaacacttagcgtatattacatggtatacaaactaagtataaacaaatgacagacagcgagtcatctatctcgttgtaagatggaatgcatgcgagaaagatcatctcgacatcagaaaatatagttatcagaattaaagtaatattaatctcgggaagtcatatgacgagcaacagctcgccatcaaagttaactcggctttattcctagcgaggcatccccatgagataaggcttaccgtatatctttaaatatgcattcatcttgatccaataacagcgggatactcacagctgtgtggattctaaataaaaa

SEQ ID NO: 367641 - DNA, 787 bp, Cannabis indica
gaagcgaaatgatgattttttttagtttagcttaatagacttaaatggaagagctcttatttcagtaattatattagtttactgaaatatcatttatatgaagctaagtattttcaggataaaatacattgaggggtagaatggtaattttattcctactcgatgtaaattatttatagaggatctttgattatttagattgaaataatagataattcatagcgtatttatatttggaacatatagatcattctatctaatcaagagtgtaattctgaatcaatagtagagtgaagaggaattaataagttaggaaatttacttgataaatttcagatctacttattgggagcttagttaaataagcccatggtccccacattgtctaggataatattgtcttgtagactcagttaatcaattttaattaatcaattagaattataaataagactatgtcttgtttataaattttcactaagcaagtactaatttgagaagaaagaggatttacggtttatttattaattaagagactttgtaaggtctaatgaataaataagttaaatgacaattctatttgagaattatttatgattatcaaatagatagatttgacatttatagagatagaattaaaatatggcatttgtaagagaaaagataagttcttaaataaaatggaaaattaaaaccttgtaggacccaatatagtggttcagccataggatttaaattaagccattattttatctttttaattatatataattcaaattctaaccct

SEQ ID NO: 367642 - DNA, 1200 bp, Cannabis indica
tatcttctacagcaaagtcaaagttgcatttagaaaataaatgtacaaagtaaacataaaagaaatcgatgaattactaaaagatcaaacgtctggattcaggttaggccaagccaaactagcagttctggtgaaaacacttcagcaaactcaaagctaaaaacctctcttttcgctttgaacttacttagcaaagaaggttggtgaaaatatgtttatggacaatgctcactagtatttataggcaaacagcgaaaaggggtaatcatttcaaaagaacctcagatgcctctgttccccccaaaagcgaatatgggaaatcaaaagcaatcaagtgcagtcgtcaaccgtggtgagagaaaatcagattttattaattgtgtcagagcatttattagctgaaaactgaagggacgcccagtcaacctcacctcgagtcgcgaacagacgcgcctgacacgtgtcacccattcaaatgcaaagacagctcagatgaagtctacacgcaacttcggaagtcccgtacagacttggggggaaaatgttattccaatttttgcactctggcgtggcatcacacgatggtgacacgcggaatcaactttgggtatctgctcgcaggatacaggctgaacaggatacctcatatgcatgctcaagatgaagcagtaagcaacccgcgcagaatgacaaacacttaggaaattcggcttccgcatcgtgagtcatcaagaaaatccctgtaacttggggatcagattacagagatatggcaagctgtccaaatcccacgatcagtgtattctgtatttactatgcaatcttttcgcttatagaaattgtaacgagaagggaaatacttcctctccaagctcatagccctataaatagtgatgcatattcactgggtaaagggtcgaaaacattctagttgagagattttgtctaagcatttatatttagagatactattgtaagagctataagaaacgaaacctttctccttattcttaagtcaatacaattaacgaggattaggctattaccgaactgctcgagactgaacctctataaaattcatgtgtctttatattactttattatatttcaatcgttataaactacttgtcgcttactaaattagactcactgtcgttggctaaaagtgaggtcaacaagttggttagataaaataataat

SEQ ID NO: 367643 - DNA, 679 bp, Cannabis indica
ggtccagatcaggctccgggtgtgggttcgtgtcctgggtcttggtcaaggttgagtccaagtcccaagttccaatcccgatatgagtctagattttgttcttggtctaagtccttggttctgatcctggtctgggttcgagtttgggtccgggtccgggtctagctttgggtctgattctaggtgttggtttgagttcgggtccgagtctgtgtccgggtttgtgtctaggtctggaccttgatctgggtctaggttcgggtccaggtccaagtttaggtcccgagtgctggtccaagttttggtctgggtcaggatctcggtccagatctatgccgagcatttcgatcccagtcttggtcttggtccaagtccaggtttgtatccggatccttatctaggtccaagtctatttttgggatcgggtacaaaatttaggtccaggttcgggtctcgattccggtctgggtacacgaccgtgtccgcactcgagtccagtctcagtttgggtctgaggctaggtctgtgtttggttctaggtctgagtccgggtcctggtcacggtcctggtcttgttcaagggtcatggttcggtgattcttgttcaggttctaattttgggtcccacgtgtaggtctgggtttttgttttatttttcgtctgggttctggtcctagtc

SEQ ID NO: 367644 - DNA, 943 bp, Cannabis indica
aaaaagttatccatgaatttctcataaactcaagaattcagttatataggcacactttatatagaatagatatattttgttattttatttttattaaaaaactagtgaacaaagccgcacctcgtgcggcatgtataataatagaatacaacttaatactaaaatatattaagtaaaatatattttagatcgccacatcagcgtctcacactaaaaatatattttttttgttaggacaacaaaatacaactttttttttattacacataaaaataatagaattacaacttaatactaaaaatattttgaatattaaaagaactatataaataagcaaaaaaattcacaaattttcatatatatatatattccaaaataaaggagcaccacaattaagttaaactttaattctaattgagaatttagtccttatttcctcaatgtattattgttattatttatttatttatttttgcatgaatctctatgtgtatttttatagcagaccttcaaataaaatgaaaatactattttaaaaaatatataagagagaattgtttatatatataaattatatatataacaaataaaaaatagtgatcaagaatacttacttttaatataagattgatttgtgttgttctctatttatatacatactactttgcatgattaaaagttgaaaagtatttattagaaaataaataattggaaaaaagaaaaaattgtaggaatttaatggacaaagaaatataaatagtagtcaataaatttctcattgatttcagtggaagtgcaatatgtaagggtgatattgatttagttaattgtataaatggagaagtagtaagatctgagtatatatttaatcgggttgttatatacttttttataatattattaaatgaaaaaaattataaaaaaaaaccgcaaattaggtaaa

SEQ ID NO: 367645 - DNA, 615 bp, Cannabis indica
ccatcatttgagaaaaaactcatagggaactacgtacagtcattgcgattaacagtaagttcatattattggtcgcatccagtaaactgaaagagttgtttttccatagttttttggttgttttaaagttgcttcaaaaaacatgcaggtgaaaccagcaaatcaaaacctatttgaggtgatagatgaagacagaacaagaatagtaaacttgaaggacaagacgtgcacatgcaatagatttcaaaaagatgaaatgccatgtaaccatgcagttgccgtcatgaaggacttgaacataacacatatacaactactacactattacacatcaaaagcatggctgcaaacatatgaagaaacaatatacccagttggaaaccttagagaatgggaactacaagatttttttgaacacatcatagtgttgcctccaaaagaaagaatcaagtctgaaaggtcgaggaaaagaagaatggcggcagcttgggaaacaaagacgcaaaacaagtgtggcaagtgtggacaaaagggacataacaaaaagacctgcagaagaattacagcatagaagtacaaacaactattcagcaactaaaaaacaactattctgaa

SEQ ID NO: 367646 - DNA, 558 bp, Cannabis indica
ttcgggttaagcttcatattgtacttttttattatctcaaagcactccgcggggtctgtagtatgacctccactctttattgacttcactaaaatatcatcgatgtatacttccatgtttcttccaatttgtcgagcaaacatttcattcacaagtcgctgatatgttgccccaacatttttcaaaccaaatggcatgactttataacaataaagtctcatgttggttacgaagcttgtatgctcttggttagggacatgcatttttatctcgttatatccagagtatgcatccatgaatgacataagctcgtgtccagcagttgcatccactaactagtcaattcttggcagtggaaagcaatcctttggacacgccttattcaagtctggaaagtcaatacaagttctccaagttccatttggttttgagataagaacagggttggatatccatgagggataaaaagcctcgcgtataaagtcgtttaccaacaactaatccatttcctacttgagtgccccttgtctctcaaaatccaaggatcgtctcttttgt

SEQ ID NO: 367647 - DNA, 603 bp, Cannabis indica
ttccctgcttacactttcacacacttatgcttgacacagttttcagtaaatgtttcatatattcgaaaatggtcttataaaactattacatattgtttgattttcctttaatattcttggtgactgagtcaacttttttcctgcataacccgtatgacttcattccactagttcattagcttgataaaataatttttgactattctcatgaatttgattttttcattagggacaaagacaatttgacactctgtacttttgttagcaaaaatatcaaggttattttattttttttttattgtcaattgagctttcttaaaaattcttgttattttttttttattgtttcattattttcttagacactatttttgctctaaagtgttgattggtactttatgtatccttgtgtgttgttttgttcgttctttgcaaataaaattggggggcttattttgaaaaaattcaagaaaaagggggcattatttttccgaatttttgggctgttttttcttttatttttttatttatggaaacatgtttttattgcattttatctattgtgtttcttttatttttttgttggggattttgcttttattt

SEQ ID NO: 367648 - DNA, 578 bp, Cannabis indica
ccacaagccataggttcagataatcataaacctttaatatactaggatcaggaagttttgttaagtccattgaatagacttattatcataattttctttcttgtctttgtaataaaaaacttttggttactccatatagatggttttaaccatagttctcttggctttgcttcttagttcctcattctgactatccattacttgtttaaactaacaatagatttttatcacgagtgtcttccaagtcataatagggtgggttccttaaaatcctcccactacgacaaggtaccgtgactttctgtctaggaacattaatggtattgtcctcatcagttgtgtcaatacaatagaggcagtgggaccatcttttatagaataagatgatagaacactttagaataaaaaaaaatatctcctctactttacttctttatttttagaagtaaagtagaggagatataatcataattatatttcactgtagacaacactataatcatgaataactatatgttcgggatttaatagaatttatatattaaatatataatcatgaaagtaatcatgtgaatcat

SEQ ID NO: 367649 - DNA, 1336 bp, Cannabis indica
ttttgggctgtatccagaaattggcacgatcgaaaattttaaagaaactgttttaataaaatatgcataaatcctagtatgaataactctgattttgatggtctgtataccgttagaaaggtctttcgattgtctaaaaactttgtgaacaacagtattcttaattcaaatgttttaagagtcaaattctgggttaaacttgatgtatagtatgaattacaattatattgagtttatcggtggtctaagggtcctttaattggttatgtggcctagaagatattgtaagagtaaattatagcagagttgaggtaaggaaaaataattatactttatacttgtgctttttatattgtttgagtacctagtgagacttgttgaataaattgtattgaaattgtaaaatgtgatagtttcggtgaaatagtattttatcgatagattgtatatggctgtttgatcatgttctaagtacttcgacgtggttagaaatcacacatttattgtgatgtggtaagtggggtattgtacgtaagggtgcactggacattggtactacattctggttaagaacgtaagacactccagacttgtattgaagttagagtgtgagtgtgtgatatttctgtactagtgtggatgcctctatttaaaaaatatgatggatttgtttcatatatattagggaatttaccaattataggagattaccattttttttctacttttatattttaattatgcttttcatttttataaaacttattttactataattactctaactaaaataattagtttatatacttaaattttaacttttctctaaaattaacttaaaaattaaaactaaaactaaaataaattttttttaatttttttagttagttaaaaactaaaactaaaaataaaaaaaaaaaaaattggtagcagatatggtccgatgggtccgatgggtgatccaattataaaaatgggggtgatgtaaatggagggtattttagggatatcataaaagttgtcatatcctacaaatattagttattatttgttcagaaaaaaatatttaaccaaatgtaagcataaaaaatcaaatttccctatttatttatactcttaatgttcattttgcaaattcagaacactgctagaatcgagcctgaagatgttgccaagcatccaatggattacagattccacgcaccaactatctgaattataaagtatattatttagataatctaatctaataactaataatatttttctttaatttttaattgtattacttttaaataataaaaaaaaattagcataaaatttagtatatgtgtct

SEQ ID NO: 367650 - DNA, 524 bp, Cannabis indica
agctcgtcgttgttgtaggccttcgactgtcttgggtttgtggtcttttgttcaatctgaatcgtgcttggtttgtggtctgggatagtcaatatcgactgttcatgttcaatggcaaaagaaattttttttctcagaaatttattttgtaactgggttgtattgttatataattagtattaattttatttgggtggtttaaaattgtatatttcttattttctggatttgatgtgaagatataattagtacaatttgattgtgtatatgataaaatattagtattggtaaaaaaaaaattattggcaaaaggattaataaaaaatattacttacttaattaattaattttttaaaaaagaaaaaattaatatagcaatattaagtagtgcctataattaaaaaaaatatatataaaaaaagtatatataaagatatagtgtcggctttttatagacagtatataaatgaaataaaaaaatgaaataataaaataaaataaaaaaatgatatagtgacacgcat

SEQ ID NO: 367651 - DNA, 646 bp, Cannabis indica
taaaaattattaaaacacctgatgaaatatttaattaattaaaaagtatatagtttacttaaaaatctaaattattcctaacaaaatatttctaaaatttattttatttatacacatgtattttaaaaaatcaaatcaaaattattgaaaattcaataaataatttaaacaatttaatatttttttgaagaaaaaatcaaagttatttatatttataaactcatatcttaagaaataaagaaaaataattaaaaattcaataaaaatataaaattattttaaaaaaaatagaaattaaactaaaaaaatgctatatttactttaacaaatctaattttttggagaaaaaaatagacgcaaacttgttcccctaaatttagttttataaaaattgaattttttaatatatatatatattttttatatctaaatagattttttaataaaaaagaaattaatttttttaaattgattaattagttcaaaaattttaatctcctttttaacttttttaattattcaaaattaattttcttttaagtatctaaattatttttttaagattttactaacaaatattgaatcattctcatttttattttgaaagggttacgatttgataattttcaaaatttagggtgcaaag

SEQ ID NO: 367652 - DNA, 644 bp, Cannabis indica
atatatatatatacaccattgttacactttgaagcttggggttggatagcatatatcaccttaagagttaagctatcataaacaaaacttggtaagtgatatattgagagttagaacctaattctattctttgatatatttaacgtaggtattgtaaattattgttgaatttcaggttgttagactctattttggtaaattattgtgtttagaacaggtttggattgaaccctggaaccgaaactctgaatggtataaggttggaccaatcggaattccgtttggcaataactgagaaatgccgatttttcgtattttggccataactttttactcgagtatctattttagacattctatataccattttgaagcttgcaacgagctctgaaatatggtttatattttaaaaccaaaatataagttttattttagtatatttatattgcgggatttggtaagaaaccttagattatcctttgcaactattaaacagtgttttagggtaaacacttatcggtttactgttattatgacatagggcccaggttcatcgatcgttttctaagaaagtcggcaaacatacctgaaccgaaatttgaggtaagaaaagtataatgtaccacatggcatgacaggttctg

SEQ ID NO: 367653 - DNA, 480 bp, Cannabis indica
aagtaattacatatttaataaaatatgtctatttaaatattatttattttctgggatattacagcataattatgtaatagtgagcataattagttagtgtcaaaaatccataagacaaaaatgctaattactctctttgccatgaacaatcataaagcccccggtcctgatggtatgtctattttgttctttaagaactattggtagtcagtggacgatgaattctgtgaagcggtttccgatttctttaggactggcaaaatgcacaaaggtgtcaaggctacgaatattgtgcttatcccaaaagtctagaaccttcaaagaaccaaccatttcaggccaatttctctttgtaatgttatgtacaaggtcatttctaagatcattgcaaatagaatcaagcctatattgcctaatcttatttgccccacttaagtcgcttttgtgtcgggaaggaatattcaagacaacaatgtgata

SEQ ID NO: 367654 - DNA, 630 bp, Cannabis indica
ggattttaaggcaacacattaaataaataactatatagtaatatgcttgccaacatgctttaataatcacatacaacactaaacaagtactggcttaccgaaccgtgagctgattttttctctgatgacgattgtacatgtcttggcaatctttggtagacaaacttggcgactctgataccaaaattgtaatgttgtaatactaaggcacactacagtgctttatcaattctagtgctatctttgctaatcaaagaaattttcttgaaaatcgtgtcaaattaaaactttagaattaattatgaaactttataaacattatatatatttacaaaattcgcgatcctgttgttaaactttttaaaaaactattccaatatacaatagtctggtcgcaaagcgactagaaaatgtaaaccctagatgtcttgagactaaacaatctagatcgcgctgcaatgaaatgtacaacatcaccctagctcgaagctcactcctgttcagcattcacctttcttttacctacacataaaagtagaactatgagtcaacagactcagtaagaaaagcatataatatatcatataatattgacttgtatctaggggcccattgttggaaatattttac

SEQ ID NO: 367655 - DNA, 606 bp, Cannabis indica
aaagagtaaaataagactaaactaataacgactaccttttccaacggtaacatcctcatccactagcatcaaactgagttcctagaatgggagaaaatagggggtgagcttataaagcccagtaggaaaacaactaatatcaaaggacccttggtttaataaaattcctgcatggttagctttgtacaaataaaatatctcatcaccagtatcaaaatgtataaacaaagtagagagaccacaaataatcacaaatcaaacgtcaaatgcatatcacaccgtccactagacccctagctctcaataccaatcataaaaaacgacatccaaaaccgggtagtcgcatctgatatccaccataataccgggactcagatttaattcactacatgtacagattctaggtctttcacctacaggtgagtgcacacctgatctacctatgatgacacagagactaggtcgtgaaacaacaatatgcaccgaacatgatcaacatggctctcatcactataaccaaagcagggaaataataatcataacaaagaacatattcctatttattttctaaaaaaaattcggcagcataacagctgtattttgaat

SEQ ID NO: 367656 - DNA, 461 bp, Cannabis indica
cttggcctctagcctatccctccattcggacctcctctcggatcatcgcctccgcttgggcttccctttgcttagcctcttcctcaaacttggccttagcaagggcctcccgccgcgcagcctcctcttagaatgcccgcctttcagcagacaggtcttgcagaatcttcacgacttcgtctatgcccccaaattcagacaagacgaagctgtgattaactatatttttggaaaggcggccagcctctgcagcaagctggaaaaggaagcaagagtgagtaaaggccttaagaaaaataatgagaaaagaagtaaatcacgaaatactgaccacggtcaaggagtggctgagatcctgaacttgaaagacggagttcaaggatgcacaaacaacgaaccgcttaggcgcgcaccgggttagctgggagacgtactcgccggtcatctccgcggcaaaggag

SEQ ID NO: 367657 - DNA, 536 bp, Cannabis indica
ttaaaataatttttaaaaattaattaattttttttaaaaaaataaataaggtgtacctataattttttggaatataaataaaattaaaaaaaaaatctttctggttctatcttattagaaaaaaaaaaatactagagggtattagtaagtgcatacctagtaccttcaaaaatataatattattattggtataattaaatattgagtttcacattatttaataagaaatagtaaaaattacacaatataaaatatacacaaaatactactattagtaaaaaaaatatatatattatattatatttttacggtattctataaaaacaatacgaaaacaataaatacaaaaaataacattcaataacatacaaataataaaaaactaacaacaattcatcaacataataacaaaaatacaatattaaaataatataaaatatcaaaagaccgtatttataaataagatctaaccaattataaaatatttaaaattttgtacaactatatttttgaattttatttttgtttttttttgt

SEQ ID NO: 367658 - DNA, 510 bp, Cannabis indica
taaaataatttccaacaatcactcccttcattcacctcttacaattcctcatcggttccgttcacttaaacttaaggaattctacttatcttaacttgtatcgatttcttttgaactgtcacaactttaaaatttctcaatcacttagagttaaccaccattataaagaaaattgatgtaacctacacaatagaggcaacactgctcataccaggtacccacaactaaactggaaatacccatttcccgaattctcaactaataacaattaattaaagatcattccttgatcctgaagtttcttttctgtgtttgctagaaatattgaaatcttttcaagcacatccagaaaaatacatacctcaagtatattttttttgttttattgataatcccttggtacaaattaccataccaacttatagtgagtctcctgttgataatgttgattcatcaacacctgagaatctcgtatatttttcccgtcattaccactaaggttttactccc

SEQ ID NO: 367659 - DNA, 527 bp, Cannabis indica
attgtcagtttggcattgtcttccattagaattcggtgcatcaccgttgaaggactgattcctttaacatcacctagtgtccaagcgatggccttgttgtgagctcggagtaccctcagcagcctatcagtttccacattagaaagagaggctgacacaataactggcagctttttattttcacccaaaaactcatacctcaggtgactaggaagcaccttcaattcaagttctggaggcttttcagtagatggcctcagctcttttggtactgttcccaattcttcattataccttctgttcaagggcccataggagtcatgccacttcatataacccatgacatcttgtccctcttgctccgttaattcatcttcggttaagctcagtttgagaggatcatctagcaactttttctcactcacaatttcatcaatcaaatcaatgaagaaacagttatcacttgcctttgggtatgtcatagcctttaacagattaaagaccacttcttctccttggactctcag

SEQ ID NO: 367660 - DNA, 771 bp, Cannabis indica
atctttattaattagtaaatctgattgtattaaaataggttttatttagggcacaaaacccaacaggtgtagggtagaaagtgtcgttccccaatcaattgggacaacactggataaaggaagtacttgggtcaggagttagttcaaaagaccaatgaagctatagataaaattaaagctgagatgattgctgttgttggacgaatttagacaacaccaaataaaataatatatttaaaatatgagtaggattatgtgattactcgacccaaaattgcgagtattcaagttatggacacacacatgtactggaaatataaataaaacaaagagaatatagtgattcagtcagatcatggtttccttagtccactattgcaagggttttctgtcttatccatttcatgttggatcactcctttatagacaaagcaagtgtcctttaattacatagaggttgatttaattatcaaaccgtttgtacatttaatataaacatttaaatcaattaaaatgtaaatacaataaatgaagaacagttttggcccaattcactaactatagcaacgtatgcgaccttcatggtacaagttgtctgttcatattctcacataagcttgcaggctgaagatgtatacaagactaatcgaggctatgtttttccaggacaggaaaagaaagtttgcaaactcaataagtccatttatggacttaaactcaaggataatcaagtggtagtattcgtagtcctttatgttgatgacattttga

SEQ ID NO: 367661 - DNA, 503 bp, Cannabis indica
taaaagataacaagcgtaaaaatgctccaaacacgattaaaactaaattaaaaatatactaaacttaatctaaaattaatactaaaaataaactaacaagtatgcagaattatacataaaagaaatagtacgacttcatggggctctaaagtctattgttttggatagggatccaaacttttaagttttgggaaagtctccaatgagccatgggtgcgaagctaaaatttagtacaacttttcattctcggacagatggtcagtctgaaaggacaattcagatattggaggatatgttacgagcttatgttatggatttcaattaaagttgtacctttggtctgggcttttaatcacgacacaatacttgcacgagcacgagtgacacaacgtacgacgcaacacgaaagaataatgggcttgagcctagcacaacacaaataaatatgggctcagacacgacacgaataatatgggctaaagtacagcaggacacaaaaata

SEQ ID NO: 367662 - DNA, 655 bp, Cannabis indica
taattattttgagtttaaaaatacaattttgttataacagcttataaaaacaatataatcatcataattatatttataattatatttttaatgtaactattaaatagtcacttatataattaatgtaaatgaattgctttgatgtccttatttgtctattagaacattgctttaagtttaagcacattaaagtgctcaacattatattaataggaatatgattttatctcgtgatgtacttttacggaatggtgtcagggctacgtttttacttttttaaccataaatacccctagatcaatctcagccgtcagatcaaataactcccttatctgacggctgtcgtacatcaggaattacaatccgtgaaagtacacgggacaaaattatataccctgtatttaatattagcgcattgtgagtgtactatttttagggtagagcggccaaatctttttttctctttaagatgtcatttcttttttaagaaaacaaaaattactcttaaggtcccaaattttatttttgctaaataaaaacccaattttttctcaaatttgccgcctcataaaagctaaagatgactatgcgagtgattagcaatttgttacattatttattaaatcaaaatgactgataaattctatcaataaca

SEQ ID NO: 367663 - DNA, 589 bp, Cannabis indica
gtgtcccttgcagagcgtccttggcagccttagcgtcctccatgcgcttaaaaacagaaacgcatagctccgtgacgagtatgatgtgacgctgtcgagcgctccgtactgagcaaaaaggtccatgagatcggaatcggtgacatcgctagccaagttccctacccaaagattattagaggggttctcggaatcatcctgcttactcgatttcatcggaggcgccattagcaaccaaaacctaaggtaataaaaagaatgtggctaacaattagggttagggttttggagaattaggagtatgagacaggcaaaatcataataaggaaagagatgggtcgaggatattgtggggtactcagtgagagagagagagagagagagaggaggaggagaacgtccgttattcgtgaatctggtttttttttctctcttttcttttgagcggtttatattcgaacctttgccgtaatctttttccttttcttttcttcttttccttctgacaaaaaaacaaatctttagctaaaaccaatttcggagataattcattaaaatttaaaattattaaacaaatatatattttaaa

SEQ ID NO: 367664 - DNA, 1101 bp, Cannabis indica
agtttttttgttttttttttttttttttttttttagttcttttcgtctacactagaggacaggtggaaaccaacgctgaccgttggataatatcaagagtcaatcactaccgttcgctgaggctagaatttgattaatgctctgcctttcatttccttatatttattgttattcctttttttaagtaaaactattttctgttcctttttattattattattattattattaaaaacaaacattataattttgtgttaaaaccaaacaatttaacttcggtttctccgtgggccgtcgatgtgagatcaatggtaaaaggtttttgtttgctgtactttggtccatgcagcaaattcatgttcctcactacatcttattttttttgttagtttatatgtagtgagcactcaataataagtccactatcatccaatcaaattcaattgaactgaaataatttttatttttaaagaaaacattgatcataaaaattagacttcacagtcattacataggatagtgttaggtatagcagagggttctacaatacccaagatattctgagcataagcccatctagcgacattatgagtcacaaagttacaacttctaagaataaaataaaaattacaagataaaaacttcttagagagttagattacaagcaagacaaatagttaacaatcttccaattggaatggacacctttaatagcatttataactacttctgaatcactctcaacaaggataaaatcatacttcttggcagtagcagtttccaaagtaagctgacacaccgccacatcgccgatcaaaggatctgtgaagttgaggaagttggtcgcacccccacaaaaccgtccccacactgatctctagccaaagcaactatgcacatggactcaccaccaaccttcacatcacaattaattttgatccagtcttcaggaggggtcgaccagctatgaggaagcacctctactgtcggagaaagtaagcaagtagcataatctgtaaaacaattagagatataggtcaaatataaaaaattagattataataaaaattaaatatttggatttaatattaaaaattagat

SEQ ID NO: 367665 - DNA, 1057 bp, Cannabis indica
ttgccggagactgatccgcaccgttttgaactgcattactcacagtttagcttggagagtaagtaatattgtattatatgaaatcgtttctaagttaaatatttttatagtaatgattatcactacttttaatttatatttttactcaaaatttaatataatgtgtcaattcaaacaaaaatttaattaaaacaaaagcaatcaagttagcattgattatcaaaataaataaataaatctccaaccaaaaattgttaaaagttttttttttttgagaaaaaaaaaaattgtaaaagttagtgtgttatataattatttttataccaaaattatatgtataaatatatagggtaattaggacagtttgaacttacatggtagtgtacctacacgtgtgattttttttatttaaaaaaaattgctgtcataaaaaaattaaaaaataaaaataatggtaaaaaaaaaaactggaaagatggaagttttatatatatgtagtgtgtacgtgactttgttaattttaatttttttaaaaaaacataaaataaaaaaataaaaaaatgtattaaaatgtttataaaaattatattatatatagtcgtaaaaatgtgttaataagtataattgatagtatttagttaaatcgaaatttgtgtataaataaaaaaaatacatgaatttgagttgtatatattatagcattgaagagagcttttaaagtaaatttaatcttgtacaacaaaaaaagatgtttagtatagataaaattagttttaaaaatgtaaaacaactgtaaatttttattttgaagagaaatctcatgtaattaacttcgtttgatttaataaaataatttttcttgttaaaaaatttaataaagtaaattaatttaaaatataattataatagaactatatatttaaataaattagtagcaaaaatattaaaattaatagtgaaattcgtatgtaaaattatttttcaaaaaataaatatttatataaaaataatttaaaaaataataatttaaattaaaaattaataaatttttaattat

SEQ ID NO: 367666 - DNA, 513 bp, Cannabis indica
gatcctctatagatgatgtacatataggattaatttaccgttacactcttcaacgtattttattcttaaacagctttacctataaatgatacttcagtgaactaatataatcactgaaatgagtactaaaccatttatctctgttaagccaagcttgaaggaaatcatcatttgacttctatatccggatagaagctatagattccatatctatgattagcactctcactgaattgaactaccatgtccttaacctatatgtcacgggaagaaccgtttggtcgactttaacgaatagattcaagaaaacaaatactgcatttgaactagaacctaaccatctcaggattgagatcatttgaactagtatcaactaggtgatattgaattgaatagatattacggtaagtttatcatatctagttcaagttcaatatcggtcccttccgatgcatactccatgcatccaacgcaagcttactttaaccaatgccctggaaaggacatatcact

SEQ ID NO: 367667 - DNA, 629 bp, Cannabis indica
aaaaatgtaaaacaactgttaaattttttatttttgaagagaaatctcatgtaattaacttcgtttgatttaataaaataatttttcttgttaaaaaatttaataaagtaaattaatttaaaatataattataatagaactatatatttaaataaattagtagcaaaaatattaaaattaatagtgaaattcgtatgtaaaattatttttcaaaaaataaatatttatataaaaataatttaaaaaataataatttaaattaaaaattaataaattttttaattattaatattattttattttttaacaataaatatattattattattattataatatgtataaaattttaattatatacaattagttctatacatcttatattttaatgaccacataatttaaaattgataaaaaaatttccccaagaagtaaaaaatttatgctaagtcctattataattttgtcccctattaattttttaaaaaaagtttatttttatcattttttagtctcggaacttgtttttctaaattaatcttttaaaaaaaaaagttaattttttaccttcaaataatcaaagcttgtactagattattttttaaatgcatgaatatatatatatatat

SEQ ID NO: 367668 - DNA, 641 bp, Cannabis indica
ccagtctgggtcttggtccgagtccaatttcgtatccggatccctatctaggtgtgagtctgtgtttgcggatccggtcccagatttaggtccaggtccgggtctcagttctagtctgggtacacgaccgtgcttgggcccgagttccagtctcagtttaggtctaaggctaggtctgtgttcatttctaggtctgggtccgggtcctggtcacagtcctagtattgttcaaggatcctggttccagtcccggtcaacttccggttttggttccaattttgggtcacagggtacgggtttagctcctctttagtgttttggactgggttcaggtccgggtgtgggttcgtgtccttgttagggttcggggtccaaggctaggtcccaaatccagacaccaactatgggttttgtccaagccctgggtcctgattcggatcccaatctcgagtcccagtctggttccattccgtgtgcaaggtcacgagctgggtcctaggttcaagttcgggtctgggtcaggtactaggtcccggtcctagttctgtttccctggaacctatccagattttgcgtccacgtctcggttattatgtgggtttcggtctcggtctaggttcgggttcgagtcctagtctcgg

SEQ ID NO: 367669 - DNA, 620 bp, Cannabis indica
ctcatcacaattgtataccttttgataatcagataaaacaaactgcttctgatttagagatctagggaggaagacttagttgatagtattgcactatcgaattggagtaactgctgtggatcaaactgagataattgctatggatcaatcaggtacacatacctaattattatatcttattattgtgttctatgttatatacaaatagatcttgggttaattgttaatttatctaacactcactactactagacactataaatattaaataccctttaaataattctcatcgttttcatttggtttctaataatttttgcatattattaaattactttgtatcatgtatttttttttctaccccataatctcaataatttgacacactttgtctgccagtgccaccatatatatatatatatataaatataaatactaagacacattactatttattagtctcttgttcataattcccttaaacagattcctgactacagggggcttctattaaatggttctatcattgtctatcgatctcagttttgtccaaatgaaggactttaagcttttgtgatgtcctgttagatgtttgtgtgtcgatatatacatatctattc

SEQ ID NO: 367670 - DNA, 992 bp, Cannabis indica
aaatgtattcctatgatttatcagtacacagggtttaaatgataggataatctacaatgtagcttacttgcaccttggataagtgctatgtcctttccagggtattgcttaaagtaagcttggtttggatgcattgagtatgcattggatgcatggattataataaacttaccgtaatgtatattcaatttaatatcacatagttgatcctagatcaaatgatctcaatcctgagatagttaggttctagttcagtttcattatttgtgttcttgaatctattcgttaaagttgatgaaatggttcttcccgtgacatataggttaaggacatggtagttcaattgagtgggagccctaatcatacatacggaatttatagcttctatccagatatagaagtctaatgatgatttccttcgaacttggcttaacagagataaatggttgagtactcatttcagtggaatatcatttataggtagctaagtattttaagaataaaatacattgaagggtgtaacggtaaattaatccctattcaatgtaaatcatctataaaggatctttaattattgagatattaacaaatggataatctgatagcgtatctatatcgtggaacatatagagcgttcaatataattgagagtgcaattccaaattctatagtggtacaaggaggaattaataagttagagaatttacttggtaaattctagatctgcttattggaagctcagttatataggctcatggcccccatactagttcagaaaaactgcttgtaagactcagttaattgattttaattaatcaattatagttctaaaataagactttgtctagtttatgaattttcactaagttatgggatgattgtgaagaaataggtttttaggttttatttattaattaagatgttttatggagtctaattaataaataatataaatgacaattttatttaataattattttaattattaaata

SEQ ID NO: 367671 - DNA, 496 bp, Cannabis indica
ttagtgaaaatctagatagttattttctgtttgcttgaagtatttttctaggtatatttaattaaatagaaacttaatatctaagttgatttgattcatgatacttaaatatttgataattttcttaatgtttaattaaatagaaaaattatatttgtgttgaattaatttattaactaattttggaccaacataaattagaataatttttcaaggatttattttattttattttaagaaaattcgaaaaatgtatttatttttaaataaattagattttcgaatgtcgctatatatatttatagaaagttaaatttgagttgaaaattaattttttaattaattctggatcaacttaaattgaatattttcgaaatatttattgaaaattattactaagatggaaaataattttatttattttcagatcaatctaagtataattttataaatattgaattaaaatttatatttagaatttttttctaaattggaa

SEQ ID NO: 367672 - DNA, 500 bp, Cannabis indica
agggagccaaggtgggtcccaacgaagcggttgaactagtccgtcaacggatccatgttcaggtcccacggattccggaaggcgccctcgtcaagagtgttctgctgctcctcccgcaaaatcttctttaaggcctccacctcagcgtgcccccgactgtactcgtcaagggcgtagttgtgcttggccactcggagattttgcctctcctcatccgcggggaccggggtcaacactatgtcgtgcggcacagtgtattcctccgcttcggaaggaatcccagagtcgtcgctcgtcgccggagtgtctcccctccggttccacttggaaggttcaacctcaaccatcttgccctttcgcttacgctcaagggcggccgcatcctccacctcgccttcctcgacttccccctcctcgtctatcaagaagattgcgattgatggggcattggaggaggacctcctgggggtcaccgactgggagggagccggaggcagaga

SEQ ID NO: 367673 - DNA, 1225 bp, Cannabis indica
aaacattacctttgaagattcagccatagaggtttttctctctagcagctgaagctggtgccatggccaaaaataggtcaaaacaccaagggaagtcgaagaactcctctgtgaaacagaaaaggaaggtaccaaactctgtatctgatgaaatttgtacgaaatcgatggatgttgtattaggtattactcctctggagttatctgatgaagacgatgaacctgatgcgattcaaagtcgatcctcccctacggttcaggatttccaggagccgttatcgccaagggcttctttgagggaaataaggtgagctgaggatgtgagatcatatttcctacactttgttcaagctaataatcaatgtaacagtaatgctagacaaggtaagctttcaatcccccctatactcagatctggcactgttattaggaatttggaacaatcttttcaacaaattgagaagcctgtcaaagtcaaaattgaattggaagacattgaagaggagatttcttactggaacccttctattgtctgttatgtactgggttcaaatccccctctgcatatcttagatggctttgctaatgaatatggaaggagaaggtagataaaggtcaaattgctcacttatgggattttctcattcggtttcattctgtaaaaattaggaatgagagttctgaatgggggatagtattttcttcaataagaaaccagtaatcatgaagccatgggacccgaattcaagtgttaagaaagaagatgtgaaattagtacctatttggatacaattagagggcttagagctcaagtattggggagaaaagtctttgtttaaaattgttgtgcaattgggaaagcctatcatggtagatgcgattacaagagaaagagaaaggcttatgttcccaaggattttagttgaggttagcattgaacaagacttactagaattgattgaatttgaaaatgaatatggcagcaacactacagtaatagtccagtacgaatggaagccaagtgtgtgtcaacattgttatggaatgggccatgtgactgctgaatgtaaaaagaaaactcaggccaaaaaagaatgggttgtgaaggcagataataaagtagaacccaggaagaatacacaggatgaagatggttttcaaccggtatcaaaaggcaaaaagatcagaatgcaagaagaccatgtagaaaccgaaacacagaatg

SEQ ID NO: 367674 - DNA, 588 bp, Cannabis indica
atgcttatgatccaactaggtatgtaccattagtggaatcggaaaatagacaactccagcaacatttagctgaatctaaccgacaaaatgcagagttggaaagagagactgcagcggctagggcaacacaaggaataaatcctcagactcaacctgatcctagggtaaggagtccatgaggcagacctcaaggttcaagaaccaggagacaggaagcaaaccagggaaatccccaaaacacccaggaagaacaacctgggggtacaagggatgttctagtggatgaacaacaaaaacaattaagagcaacgtcaagacgttcctcaaggatcctagggatttatgaaccatgggaatgaacaaaacgatgtaccagaagcttctcgtaggaaataggatgcgagacagcctcaacctagggatcagggaatccctcgtggcaacaagagaaaccccaagaaccaacccaggacaagtgggctacctccaaggcaccctcaacatccttctcgattagagagggaaggtgtatatgatggaaattattttaccaggatcttagatatacacacagtatgtttattaaca

SEQ ID NO: 367675 - DNA, 387 bp, Cannabis indica
gtaaaataaatatccaacaataacatattcctatgttatctctaatcttatctaataagattaagatcttgtgtcatccaagctaagtccattacatttaacctttccaaaattaaatataactcaatatcaagctattgatggccaatccatatcaagaaactaacataaagcacacttgaatgaacatgagaatttttactaaatatttacataagaaaaatactaaactaaaacataaggttcttcaacaattcaaaccatcaaaaagtttagctagctcatagctaacttaataacctccattacaatgtaaaattcagccatggagtttgaatgctagagttagagaagaaaaaaaaagaaataacaaacaacaatagagga

SEQ ID NO: 367676 - DNA, 869 bp, Cannabis indica
aacctctatccaagaatacacttgggaccaagtaaattatattctaattaagaggttataactaaatagagttaaactagaaaaaaaaattaaaaactaaaaaaatatcaatattacaataataacaataaataatcattaataatatatcataatataaatactttagagtaaatataatatccatacatgtattataatttaaaataaaattattaattttacataaataaatttataaaatacatgtatatactttattaagatataattattcttatatagaggtatactttggtaatacgggacttagaaaatatataactaattacaatttagaggttattcttatttataactggcccaaattgggacttgatttttttataacaaattagaggttattcttgaatagagtattcttaaatagaggttctactgtattttcatttaattttgttttcaaattattatagtttctttaagaactttatattaaataatcatttgtattaaaataatatgatttatttaataaaattataaatgacataattacctaaaatctattctatataaagtgtgcctatataactgaaattcttggtttataagaaattcatgggtgactttttatttttatttaataaaataataaaatattatttatatataataaaataataataaaacaaatcctattaatatttaaactgatatttagtatatttcaactctatatataatcacaactataactctagaaattaaaaatatatatataaaataaattgaaccttaaaccgcatatacaattagtttgttgagagagattaggaaaagaacgaattatatataaaatttttttt

SEQ ID NO: 367677 - DNA, 702 bp, Cannabis indica
ctactatctctctctctctctctctctctctctctctctctctctctaggatactcacaacagacacacacacattgtactagtcggacgccccaccggagctagtgttcagccgtcttacgtagaggaaatttgaaactaaccaaagctctaagaaagacattcctttagaaaataatgggtatgtaatttctttagtaattattgtttgatttagttgtatttatgttgatagtaatagatctacacatatccttgtttttatgtaccatttttgtcaatgaaacacgaaatgcagcaagtctgcgttttttctggtgttttgcgattttagcgatattttacgacttaattagcgacatctagcgattaaagtgctggtgtgaggttagggatgaagtttatcgatatgtcgcgatttacgtcgcgacacatagcattcttgtgttatgttgtcgacatttttttaattttctcgataattttacgacgtttgtcgatatatgttgttatcgataatttccacgatgagttgcaattagtttcgcgatattttttgacatataagtttttcataatttgtggtcatttttgtttgcagattcaaatgtgtttgtagttgtactgtatgatggggcttgggcagttgaaggtttcaactggatattcaataacccaaaaagtaagatgttaatgtttgag

SEQ ID NO: 367678 - DNA, 700 bp, Cannabis indica
acctcaattccaagctcaaagatccacaatctcaaagctccaaccaagccaaattcaagcaacttttaagaaattcctcaattttaaaaaataggttaaagagagagagagaggggggtttggggtcaaagaagccagaaaaatccattttcaattcttaaaattcaactcttttattatttgtaaaataagggtcaaaatgaccattttgcccctagggctataaagcatgcacacacgtacacaagggtattgaggtcatttcacacacacataaatccaattaaattttcagattattcatcaataattaaaatgccaataattctattccaaattgcattttgagcccgaacctggttcggcccgaaatacccaattgtgactataccgcgccagcctgtcagaacacacataaaaaagacaacacagccataccatataataatatagttccataagcacgtaaataaattaatctcactgttttacccttctcgagtcaaaattactaaaatgccccttgctcaccgacggggtcttaacatagcataaatcatataaattctcatatattaaattatataataatataatttctcaataatacataattatctaattagggttttgctaatccatttcataactctagggtattacagttgtgttgggttttatgccctaaataaaactcttt

SEQ ID NO: 367679 - DNA, 630 bp, Cannabis indica
taaaaaggaaatgagaaatgagtattgtagtttatttgcttatgtatgattcgcttgttacaagtttgtagtgctgtatctttcatgtgactcactctttaagttggttttttggtttttttttaattaaaaagaaaaaacttcattaattaacttagatggcgtttgacaacactatttttattagtttttgtttttaaaattaaaaaagtaaaaatatttttaaaaaacatgttctataaaactgtttttactttttaaattcttaattaagaatcaaaattttaaaaacaaaaacaaaaaaaatcactttcaatattttttctaaataattttttttcttaatcaatattttagattttgatcagacccggacccaaattccctccacggccctgacgctgaacccagactctaatccggacccgaatccgaccccagacctagacccgacttaaataaaatcaaaacataaacatgaaaataaactttacagaacacacttttggtttctgtttttaaaatttgttaggtctttttttgacaatataattgtcaaaatattttttaataaatatgcatttttattgagcatttaaattatttttattacattgattttgtgcattt

SEQ ID NO: 367680 - DNA, 166 bp, Cannabis indica
catcgttttaattcatatttcatgaaagtatatcattaccatggctttggtgccagttgttggaaatattttacaaggatctagatttactgccatgtatgtttcattaacatcctaatatgaattctaaaataatgaaaaaaaaatacatataaagtttaggaaa

SEQ ID NO: 367681 - DNA, 531 bp, Cannabis indica
aggaaagagattttaggatttatttgttaattaagagactttgtggagtctaattaataaataatataaatgataattttatttaataattaattatgattattaaatagatagttttggcatttataggattaaaattagaaaatatgacatttgtaaaataatagataaatggttagaaaaataacaaaaatataactagtggggcccatctatttgtcggccacttagtcctatttttggctattattttatcattttttattccatataatttaaatttaaccctaagtgaaatagtataaaaagaaggatggtctcattatccaacaacttaacctaatgcttttaacctagtttacaatttgttagaaaactagagtttttgagacctccttcttcttcttgttcttctaatttttgaatctccctgattttttttcataaattttgagccattagtgagtgagtgcattcacacccatagcaagtctagtacttaattatagtgtgtaagactgtgaagaatcc

SEQ ID NO: 367682 - DNA, 637 bp, Cannabis indica
cgtacttcaagctacttaattacttaattatataaatctaccctgcacctagctaggaccacaaaaataccaaattatatatttaaagtattctaaatattatccaatatcttatatataatagttttccatcttatttcataaacaataaaacatatcattttttcatttacaaaaatatataaaaaaattaagacgcaataatttccatgcataaaaaatatatatgaatatatatgatcattagagtttttaattttcttcatttgatgtacgaaactcaataacactacacagcttcaaaatgactttatattattattattatttgtattgaacgtagtgtaagtgtaaatatttattatgtcaccatatatataataagaaaaaaaaaagaaaagaatgtgatatatatgactttaaattgaattattcatctcatggtgtcatttcataataattaataatacaaattaccaggcgggattagcgtttgccatatatatattataatgcattggtaaattataatataatgaccccacattaattaattatacatatattcacatatacatatatataatgtgaattaagtggattttcttagagagagagagagagagatttatatgta

SEQ ID NO: 367683 - DNA, 920 bp, Cannabis indica
aatgaatgcaacaatctgaagcaggaaatggaattcctaataaggaagaataacccgcatgtaaagaagtatgtcaaggccgatcagaatcagaggagtaataataaccaagacttgctacctccaccagtagatggacatctgcaagtcagcattggaggcccgcaaatagctagagatttgggcaaagctcgggagaggtatgccctaacagcacaacaagagaaagaagaagtgatccttgctgtagaagaaaggaagcctaaaatctcatgggcccaccataacattcaacaacgaagatgctgtcaaaatcaggtttttgcacaacgacatgttggtcgtagacgtctagatagccaacaagatggtggccagaaccatgatagataatggagcctcttccaacatcttattaaaaactgcttatgaaacaatggggctccagctcaaggatctaaccccctatctcctgctcatatatggtttctccggccaaggagtcacacctctaggaccaattcgccaacccctcactattggacaagctccgacgagcatgacagtcatggcacaattttttgtaatagatgttccttcagcctttaacgtcatgctacgccgaccagctttgtatgacttaaaggttgtcacattgatattccactaatgcctaaagtttccaataaagaattgggtagggtgtttgagaggaaagcagcagacttctcaggaatgttataaccttgcagtggccaaggctaagaaggaaatatcctccagctagagcacagacaagtgaaagaacattcctaagtagggagcttcccaaggcagggatgacgatgtggatcctcgagttggagacccaagcagcaatgttggacctgtggaagaagtagaagagatcgagatcgatc

SEQ ID NO: 367684 - DNA, 536 bp, Cannabis indica
tgaaagtaccaaactgttaacgcagattttcgttaactaaatttgagcctcacagtagtaatttcaaatagaaaaataaaagctatagaaataaagacatgaacacatagtttttttacgtgattttgcagttaaaattttgcatagtccacgagtcaatcttattcagattctgattattatttttttaggaaccctctcgtatgagtcccccttttttcatcttgcctgccactatttataattatatagtgggcactaaattgcagaagttgattgtaatctttacaacaattattccctcaaatcatgtgatttgattacaaattatgctaagtaaatgcagatttttatttacacacagcgagtatcccacttttattgggccaagatgaatgcatattttaaagatatactgtaagccttatctcatggggatatgtagctaggaatggagtcggtgctcgtcatatgacttcccgagattgatattgctttaattctgataactacattttctggtgtcgagatgatct

SEQ ID NO: 367685 - DNA, 600 bp, Cannabis indica
cttaaaagtgtattagagtaagtgagtgggctttaaaaaatattgagattcttaactttacaaaaaaaaatgctctaatttaaataagtaatttgcggcaaaatcctctcaactattaatttacttgtaaaaaactatccaacttcatattttagtgggaaaattctccaaagtactgttctgtttacatttttaaagtgacgtctgttcaacctcgttaagtcctaattttaccccgtggcaatgatgggtcactaaaaaataatcttacgtagccatattttacaaaatagaaattaaaatcagtaattcaaataaaaataaaaactttaagagtaatttgcggtaaaatcccccaactatcaatttacttgcaaaaaactatccaaccttaaagtttttttaagaatgattttttgtaagtaaattgatagttaggagagttttaccgcaaattactttaaaatatatatacacacatgatgtcttttaacgtttatagttgaaatttagtgcagtgctgaatatatatatatatatttccagatgaagtagaatttataattattcatatttttttaagtaattatactattttta

SEQ ID NO: 367686 - DNA, 812 bp, Cannabis indica
ttttctcctcaagaaacctgatcaaacaaaatagaaaactcacacaagatcagaatatcacagctggatagatagaaaagaatagagtaactaaacttaccatttttaccttattttccataaataaaaaatctagacaactttccttccaaaaataaattgattaatataaaagttaaatacacaaaatatggaaaccaatttaaatactccaaccaaaattaaataataaataataaaatgtttttgtcacattaaagtgccaaagtggaattaacaatcttcccctttggcactttgattgacaaaacattttatccggagaaaacctacatcaagtgttagaaacataaataatagagtatagaaactacttcccctgcatgaaagcacattaacacataaaataaaagaaactttttaaacggaaaagttcacaaaccacaaacaaaataattccccctaaaacaagggtccaaagttgtaacaaacattccaaaaataaatactactccccatttttttctatcaaggagccaaagacaacaaaaaaacttggaacaaagacataatagttcaaaacacatagataaaaacaaaaagattaaaaatgaaccacttattcatcaccattggatcggaaaaatttcatgatgctatccatcctcatgagaagtaaggcttgactttgtctccattcttcccaaacgcaagttaaattcatccatttctgtaagagcaaatgtggaagcagatgcagcagcaatgtaacgtcataatgctaaggcacgctacagtgatttttcaattac

SEQ ID NO: 367687 - DNA, 508 bp, Cannabis indica
ggtcaagaatatcatgtattaaacacgttttcaattgctgaattgggagatgtctcgacaaaaacttgattgtagtgatcccaatggtgagctagaaccattcttctttccaaggtcgacaatgtatgtcttacgtcgatcgcaggtatacaaaaatcttttaacttgccagggttatgagccgcgctcctgttaattggatgaaactataggatgtttcctcatagcgagatggtcatctcgcatacttgttctttcagctgatctgacttttacacttagtttgcttattgcaagctaaggtatgtgtcacttttctctggtgcctcgctattcacctttagcgacatatagtttctcgttaatacactaagtctcaatttgtacattgatttctcgcctaagaccttacagttagcaggttacaaatatactctgatacttatgtaattaatgagttatttcataaaaagatattgcactgattcacattccctctaccttgaca

SEQ ID NO: 367688 - DNA, 543 bp, Cannabis indica
agatgatcacttaactgatgattttcccaaagaaaaagacgattcaagaaaaatgtagttacgtgaggatgctcgcttatttcttcaaattcaaaattctattgataatgatgttattagtttgattaatcactgtgaattggttaaagaactaagggattacttggatttttgtattctggaaaagacaaacctatctcgtatgtatgatgtttgcaaagtcttttatcgtgcagagaaataagatcagtctcttatgaattactttatggaattcaagaaaacatatgaagagcttaatgtgttactaccatttagtcctgaactgaaggttcaatagcgccaaggagagcaaatggctattatgagctttcttgcaggacttgttagggtttataccctaaaaagcctgtaaagatattttttgattattaaattaagagctaaacatttgatatatgtatggatgttaagttattaatattattattgaataatttatattaaatatttaaaaattctttattcatatatgaggatgtg

SEQ ID NO: 367689 - DNA, 627 bp, Cannabis indica
  modified_base (243)..(243): a, c, t, g, unknown or other
atggatgttggatcgattggatgactgaaatcaattggatcggatggtaaaatctaatatccaatatataattggatcggatctggatgggcctaaaaatattggatgtgatccaatgaacacccctaaatacaataaagaaaaaatgtcacacaataaatttaatgatatttttcctttaaataaaccttaactttatattagtcaaattcaatttgaaaaattaaaaaaaaaaaaaaaaanaaaaaaaaaaaccttacatatatcataaactttgtatcgttgttgttgaacaaattaataatggaaaattttacaatgcaccatttaaaaaaagtgcatcaatatatttttattatctattttggcatctgaaaagatagtttagtgtaattttttcatagtcgtattcattaagatatcccgcaaaagtttgggagatttgaaaaaatttaacatgctgaaaacagagtttaaattatctgttacacatataactattttattttatatgcgtgtgaaattaatagactgtttgaacataaattaattggggattacccctatactattttttttaaatttatggtttgagtttctaaaatagttgtagcgctagttgcaata

SEQ ID NO: 367690 - DNA, 652 bp, Cannabis indica
atatatgaggatgtggcttgtagatgtgcaaagaactaagaccacttagctatgagtaaaacaatcagcaatatattaaagttatgaaatcattaatcaatagttgctagtaaggttcactaatgcctgttctttagtacaagtaatctcggttcaaattacagatgtagtatgacatcaaagtgaaggtaatgtatataatagagattatatatgataatgaccgatatgaatgaagctatctttatcaacataccattaactataaagacctaattcatatcataatgatgatcaatagtagattgacctaaatcttgagttatcatgaactcctgttcatgttattagtttctttgattcactcattaaagtttctcaaagaaaatgaatcttacaacttctattttgggaatataataatgtcgatggctggaaacataatttacaattatggaatcctaacttttttaacgaatcgaatgctagttccctttaagtattaattctaaaactggaatgttgtgcacaaattttgatgagatctaaattatacttctactagtaattaaattaatggaactaaatgataaagaagtaattagaagggtaaaacgataatttgaccaaaactaattacgaatcaacacat

SEQ ID NO: 367691 - DNA, 858 bp, Cannabis indica
tcgggggaagaccagaatatcattcacttgacctccgaggataactttgtgaagtacgggctctatttaaaggatttcattcctaagccagtgaaggagaggaagagaaaatttggtgcaggacaggctgaacgagctcataaggacaatgaactcattcaagtcaagcgtgaagctaagttgaagggaggtgcaagggccaatcaatatggttaggagcccttgaatcctgaagatgaagctgaggaagagcaggtgactccgctcaaaaggaggaagaaacttccagcccagcccaggcgtattgaacatgcaattcgcattagggagcccatctctcctgctcggccgccttctcccgtgctcggaaaagggaaagctattatgtctgaaataagaggcatgtcaggtgatgatggactttcgaggcctgctcgggcaatcatcttgcatactactccgtcttgtttttaagcttcttgactattatgctttatgtttctgatgtctgtttcctctaaccatgttgtttttgttccgtgcagacatgtctcagaagatgcttgatgctctgaagaagagaattagaggaggctccaacgcatctcccccggccaagaagtctaaaggcggtgaggggatctcttctaaggaaaagacgcctgccaaggaggtcatcgatctttctgaggagctaacggttgcaaacccctctactataaaagttgccaagtttaaggagtctcgaggagggagttcggacaggtctgaccaaccgagaggtgggtgtgagctgatgcggacccctactccacctttgccagtgcttccagaggccaagaaaggaaaggagatgct

SEQ ID NO: 367692 - DNA, 781 bp, Cannabis indica
ttgatccaaaattacaaatttctaacttatttttatttttaaagaattatctgaataactaatttcctagaaaattctacttaattattaatttcaaaatattctaatttaagttgatcaaaattagtttgaaaaacaaattttcaacttaaatatattttctatgaaaatccaaataattaagtatctagaagaatctaattagttataacttcttttatttaattaaatacagaaaaatacatctagtttatcttgaaaaagtttcattaaactaagtgtatttttcttaaattaatttcaaaataatctgatgaaaaattaatttcatatatttctaaattaattatgttgctaatcaattttattaggttaaacaattattcaaataaggcaaatgggccttcacaattgggattgtttatgtgaaggagggatgggttcagtatgtcgtacccagtactaatggctccctaactctcacacaaggcccaaaggagaggaatttaaccttaatttaaacaattgttattcattgaataggcccaatactaattggacctaaataaaatctatcatatatgacagttttatttcgcaacctagtccatttaattacaaaaattaaatgggctccctatatgcatttaagcccaaagcaaacatagaactcacacaggcacactgatttggatagatcctatcatgttactaagtttatacacagatgaaagaagattacaaaatatacatgttacaaattattcgtttgacctattga

SEQ ID NO: 367693 - DNA, 740 bp, Cannabis indica
cactgtttgtttcatgaacaaatgtgttttcatccttccactcctttaaattcaataatgaatcaattaataaaaagacaaaacatgcacacaatattgagggcaattttttttcttctttttccaaattatatttataaataaagcaaaacttaaaagaacaaagagtgaattacgatacgaatattcttctgtatattatttatgggttgaaatgcaacacacttgacaaacatattagaataattcgttccaaatatataatatgttaatttattaggataaatatatttagaatataaacgactaatgattcattcagtacataccatcatttcattatatcatgtttttattcttttctctatggtaaaaattgtcaaatctcatcaaaccttgtttcaattattttcaatcactatctatattttctataaatgcaaaaggccatatagtccccattagagaatatgcttaagcaccatatatatatacttactttttgactttggaaatgattaacattcatttatccactgctgtcaattttgcgcacctcttatttattactgtttttcttaccttaaaaaaaaaaacaaaaagaaaaagaaagccgttttctttttatataaattattattatttttttttttggataaattgcagcataaatacctaatgtttcagattttatacactgaaatacctaatgtttatttttggaggtaaaaatacctaat

SEQ ID NO: 367694 - DNA, 718 bp, Cannabis indica
taattgttagtaaaccgagtggcggtaaacaaagatcaaagttgtgtagaacatcagtactggcaattatttgggttgtttggttggaacgaaacgctagaatttttgaatgagtcgaaagttcggcatcagatatttgggaaaaggtgaaattttggacagccacttggatttccaaaaccaaacattttagaatctgtcctttttagacctatgtagagattaaaatgcatttttgtaggaattctgttcttgattaatttttgttttctgttgcagtttgtagtgtttttgttttggttttacctttgtaaccacggttttcctttatcacaagtgagagtttgtatttatatcggtggtggggctagtctaagacaaaggcctcatgctctttttcaaaaaaaacaagaagtggtaagagaacaagttgctgggtattcgagagacccaactctctcccaagagctaaagctcacttaaccaaatggttcaccccaacccttttaatacactcctatatgtattacctcaagaccccattacaatgacccatttaccctctttatttaatatcctatggcttaacagtttgataccaactctccaaaacttatatagtttagagatctgtggtatatatttatgtagaaaatagtgattcgaattatgtgtgtcaatttcatagaataatacatatttatatacaaagctagga

SEQ ID NO: 367695 - DNA, 632 bp, Cannabis indica
gtggtttaatttaaatctttaattaaattcaaaataaagacttccattttaaatactatcgtaatatagggaccccctgtttataaataagaaaatcttttacaatatattacatttccaaacatagaaaggaattcgatcctgcttcccagaagccaagaccccacggctgatatgtacattgctgggagacctctgactcatggccgaacacagcttctaacttcctaacctgctccacgaagcacccgtgagtcacaatgactcatcaagaaaagctactatataagatcatagaaagtgccagccaattttattacaatgtaatatatataccaataggtcatacatattcaaggtgcataaataacttaatgtctatgagagcacacttattacataatcaagtatattcatagttatttataatcaacaatctctgtgtttcattcaacctcctaaacatttatcattataaatactcaccttcagtgcttcataaaacactctaattcacacattaccataattcaacaatttcagtgcttcataaagcactctaattcacgcattattataactccataatctcagtgcttcataaagctatctaatcttacatctctataagc

SEQ ID NO: 367696 - DNA, 482 bp, Cannabis indica
gtcaatgaaagtgacaaaatacttataacctcctctagattttacatttagaggtccacagacatccgaatgcattaacccaagaggttctttagcacgctctgcctttgcagagaaagaacgcttagtcatttttccttccaagattcacaaactggtaattcacctaatacgacatttttcaatggaccatctttggttcacctgtgaagtctgtcatagcatatatgacctagtcgtaaatgccatagatatgtttcatcattattatcaatctcttttcttttatggtttctaggtttagcaatattaaaaagttcgttattaagcacaattcgtatatccggtctcaaaacataaagccctcgttccgtgtaagtaacacataattgaaatccattacgagaaatagtgcaaatagaactcgaaaaattcaattgataaaaccgtgtttgtaaacatgaaacactaatcaagtttct

SEQ ID NO: 367697 - DNA, 575 bp, Cannabis indica
ttttttacaaaaaataatgccttatgtaattatctcatgaatataatgtattagaattttaatataaaaatatattatttttgttgtcatgtttgttttacattattgtccatgagtttgaaacaaaaattgtacaaagaaatgcaaaaataacacaaatataatgaaaaaatgtgattaaaaaccataaaacaactaaacctaaataaacatcttgtaacaaccaaaattcaaatggaaaatgacactagtatatagataagaacaactaaaaaaaactacatagcatctcaaaaactaccaccaaaacccgtaatcaaacattaatacttcttctaagacacaaaaattacaggaaaaaaccccctataaatcaaacttaatgaaattggccatcataatgttgaaaaacattacataaatcctaaaatccaaccaaagaaactcaggttatcatacttagaataaaacattaaaaactaaaaaactacaaaaaaatacctccaaaaatacatttgcttagtgataaaataaaactgaacaacaacaaaaaaatgataaatggctaagtagaa

SEQ ID NO: 367698 - DNA, 541 bp, Cannabis indica
tcgtgagtagggtacctctgctcgtactcctttaactaccgagaagcataggctattacctttccagcttgcataagaacacagctgagaccttgtctcgaggcatcacaataaacaacaaacgtttccttacgtgaaggaagagttaatacaagagcggtaatcaagggttgctttaactctagaaaacttttctcacaccaattagtccaaacaaacttcaagttcttttgggtcagcttcattaagggtacaacaatctttgagaaaccctcaacgaaacgatgataatacccagctaaacccagaaagcttctaacttcagtagccgattttggtgttggccaatcccgaacaacttcaatcttgactggatctgtttggaacattttactaggatctagatttactaacaagtatgttgaattaacatcctaaatattaattctctaaaacaatgaaataaacacataagggtttaagaaaaccttacattgttgattgtagcagaatataatgactccttccgttcaagatctct

SEQ ID NO: 367699 - DNA, 711 bp, Cannabis indica
tttatagtccgtgaactcgtggagcagctcccggactattgccacatatgcggccatcttttctctgcgtgcctgatattctcccgacacttggtttactgccagttgcgaatcgttatagacttctactctcttagcccccatggtttttaccaatatgagtcctgctatcatggcttcgtactcggtctcattgttagaagctgtgaattcaagccgtagggctgcctggagtcgaagtccgttcggggatatcatcgcgactcctgctccggacccgttctcgttggaggcgccatccacaaataccttccacgctgggacttgcggtgtgggtatgctagcattggcttccgcttcatggcacttcgtgataaagtctgctagcgcctgcgctttgatggaagtgtgtgggatgtagtgtagatcaaattggcttagctccattgcccatttgagaagtcttctagacgcctctggcttttgtaggacttgtcggagcgggtggttggttaatactttgattgggtgagcttggaagtaaggtctcgactttctcgaggccattaggaggcagaaaactagttttgatcaccgggtatcgcgtcttcgctcctatcatgcgcttgctgacatagtacacgtgatgctgagttttttcctcttcccgtactagggtcgcgctaccaaattctcggagacagccaagta

SEQ ID NO: 367700 - DNA, 684 bp, Cannabis indica
aaatttccatgaacattctgaaattagaatatacattttggatggtcccatggttattttgtcattataactgcaatcatcactctcctgaaaattttagatttcctgtagtttccgttgatgcatgcattaaagtcaaattagaatatacattctgaaattatgtttttcggccaagagatttctgggttcggtgttgagagaagggtggttttttgggttcatttttggtgctcttggcttgagttcaagagagtggtttctgggtttattgtttcgggtttgaagagaaatattttttaaaccctaggtgatctagttaggtgcggctgttggtgtaagaaagaaaaatagaaactttacaaaccaaaacccattagaaccatagtatcgatgtaattttattggattatacttgagttggattgtttgagaactccaattcaactttttgagatctgccttacatggatctaaaaattgaagtcaggacattagttttatgcaaattacactagattttcagttcaattttaatttcgtagtagtttttctacactttttttatgaattcgaaatagcccttgttttgattgattatggtcgtcttctcaggtgaagtcaccggaattaatggtggttctctttctggttgaattttcgtttcggttgcgttgggttgct

SEQ ID NO: 367701 - DNA, 894 bp, Cannabis indica
gtaaagggctaggggctagtcattagggtgatctcgctaggcggggctcttggtatgttcgcgaatctttggcacgaatcacatttcaggacatagtctatacaatctttttacattgttggccagaagtatcattgtctcaatattttctttgagagactcgaacctccggtatgatctctgcagaacccctcatggacctctagcataatttgcttagcttcagggtccgatacacaccttaagtacggcattctgagtcctcttcggtggtagataatactatccatcatcacatatcgatgcgcttggtactgtatccttctggatagcgccctttcttgaggcaactcgcctttggttatgtatttgatgatgggtttcatcgagtttggttcgggctcaactgcagcgacaatatctttcactttaatgcttggttctataaggcattcaacgggcaccacccccagtttctaacctcggtgtctgatgctaacttagccaaacagtctgcgtgggtattcttttctctagggattctttccactttataatccgtgaactcatggagtagctcccggacagttgctacatacgcaaccattttttctccatgcgtttgatactctcccgagacttggtttaccaccaattgcgaatcgcagaagacttctaccctcgtggctcccacaggttttgctaatttcagccctgcaatcaggttcattgttagaagccaggaattcgaaacgcagagctacctagagtgaaacatcgttcggagatatcatagctatcccagctctagatccgttttcatttgacgctccgtccacgaatactttccatgctggggtttgtggtattggtacgtttgcgctagcttctgct

SEQ ID NO: 367702 - DNA, 479 bp, Cannabis indica
aactaaacgccacattagtagagagttactaatcttctctatccctttcactccccatctcatttcaactctcccatccatcctattctcccttcttctccctatcaaagctagccgaaaagataattatttttcttttccaatcatttttcttttcatattttttccttaaacaaccttaatgattttataaacattatatataaattttaaaaaataagctatagaattttgcttcaagaaaaatacaagtaataacttttgagtttttttggtgactaaaccctctcaactatcattccagttgactcgagccctaagcagtgacagatatttaatatccataacttgagtgattaaaggtcacactttgacccttgttggaagataacgcttataaatattccttgaatttatatgtatcacaaaatacttatttaaaaataataaattaactcctatattgataaaaaaaaaaa

SEQ ID NO: 367703 - DNA, 485 bp, Cannabis indica
tttcatattcttatttattaattattttctctggtaaaaagatcatttatatctttatctttataaattaaaagtgcctatctaacagcaatttttggtttaacgattctttttggtttatctgtttgtttaaacagaatataccattctttaacagaatatccataattaatttgatattattttataaattatttgaataaaaaaatattatacaatttatctacagcctaaaaaaactggaaagtagttaagtattatcgcatcagttctgaatgcttgcggccaaaacgatcgattgaatgaagccaaaatagaacgaaagaactccaagaccactgctttaggacggagatcggtgtaatctgggcattttgaaaggaatcgagccacgacaaggacgacattgagctgagggcgcaaaaccttaggagatccagcgacgagagcctcggacactcagacacttgttgggttttatgccc

SEQ ID NO: 367704 - DNA, 534 bp, Cannabis indica
aaaataaagtattctttttattagtatattattaaaaaaattatagtgcacccataaattggtacaccgatatatttcctatttattttagtattcaagagaattttttaatctattttttaatggtcatatacgttgtagttatttaagatatcttgcaaaattttgaaaaattcagaaaagtttaacacgccaaaaaatagagcttttaacagtctattgtatatgcgtgtaaaataaattattcgagcagtgctttctatattgtaaattattctaaattttttaatattttacaaaatatcttaaataactataatgtataccattataaaaaaaaaactaaaatttatttttatatgctaaaacaatcactgcattattatttaggatgcatagtagatgcacaaaaaaaaaaaaataataataataaatgtgaatgttgtaatgttacgtactgtacctaaaacgttaatatagtgtataaaatatatgcctaatactatgattatttctaaatttaaaatatttgta

SEQ ID NO: 367705 - DNA, 1078 bp, Cannabis indica
atcgatccaatccaatttgcacgatccaatccaatgaaatctgcaaagtgcagatatccgcacacttgtgcgggttagattggttgtgtggattggatgttgattgacatgtaaaagtaaccgatccaattcaatctacacatatttataaaaaaaaaattaaaaattatatataattaaaatgtaaagaaaataataatttaaaagtctaatacatataatacaattatatttcaaaacttaaaagatcaaatgtatattccattgatatatatatataattttttttcaatatgcaatttagaacaaaattaaacatttcattatacatataattttttttcatcgtttgaattcgttatttgttattttatttattttaatttgttgttggagccataaaataataataatttgttttattttgttgttagcataaatattaaataatttaatattaaaaagtaaccaatccaaaataaccgattcaatccacacttttgtagattggattggatccaaaattgaaaatccgcacttagtgcgaattggatgcactatgagtaaaatagtacatatcagatttgatgaagtctgatggcggacctaggatttaaagtgagaggaggcgtaattttttttgtaagtgagggaggggcaaaagtaaactaaaaaaaaatacttttagtagaattagaacccttatcctctaaggatatgttaagtagcttaatcattacaccaaagttaatattatgcttataaatataatcttttattataagggtaaattgcggcatagataccttatctttatttttagaggtaaaaaaacccaatgttacaattttcttacatccattactattacgtccgttaactcataaatatggatacgtggagggcccatatgcattacatttatttattttattttaaattttaatattcttaatatcaacaactaaatgctacttgtttcaaaaaaaaaagagagattcaaaactaaattacgataactgagtgaaccagtgcagtatatgtgaaaattatatgagaacttggttttttttttttt

SEQ ID NO: 367706 - DNA, 544 bp, Cannabis indica
ttttgagttaaactttatattgtagttattttgcaagacatattttaaaggacaaagttgtcattatatatttaatattaaaaaataaaataaaaataataaaaatccattacccttaatggcattccttacaaaattggtgggagaagttctccctttcttttctcccttatttaatcaacttctccctttcctaattttaataatgcaagtaaacaaatgtaagggaatgattaccttactattgattctcattacttattagtaaacatgagtttataaaaaggaagaaaatcagacaaaaaaaggggggagaggagagtatcgcattttgcaaaggaaaaaaatagagaaagaaaacagagagaaagagataaaaaaagtcactgtcattgttgttcttctaagtattcaaggtcttcaagggtaagaatgtatgcattcctctttctctctccctctctctgttctactttgtatttgttcttttctctactcatttatggaatgccctcattctgtaaatgaaaaaggatgccctcat

SEQ ID NO: 367707 - DNA, 836 bp, Cannabis indica
atataaatatcaaagatattaacaaatttttaaaatctgaccataaataaaaataaataatcaatttataaattcaaatctcaaaatatcataaattaataataatctatcaaattaaatattattaatttgcaaaattgatatttaattttaaatatattaaaaataattttttattttgaaattagggtttgaaatatagaaatattcaaaattgaatgaaaaatcccaagaaaatcaaattttgggtaaagatggccgagctgcccacgaagaggttgcacgccgcctcttccgcgcgcataagctaggggttgcagggtgagatgggcgggatttcacagcgtgtgcagggtcctcacggaatgcggcgtttcgtgtctgaacgctggggctgaccatgtcttcagacacaaatagtccccttccgcacgcgcgtatgtcccttgtgtctgaattcctggtgcgattggcaccatctcgacatccatgtttacctaattttcaaaccttcatatctttttcaatttttatcggaattgagttccgtaaaaactaaaattgcttaattttttacaaggaatccaaataaattattttcacaatgaaaataaaattatttttatggaaaaatttcgtaaattacgtacattcatcaaataacacataaaccaacatgaacacatccaaatcaacacaataaacaaattcatcattttaaattcatatttcatgaaagtaaatcattactatggctctgaggccagttgttggaaatattttatcaggatttagattctcttaatctaagatcaacttctgatattgacttggaa

SEQ ID NO: 367708 - DNA, 605 bp, Cannabis indica
ataaaatatataaaaaaaaaacctctaaccactagtaacgcgccatatcattatgatgttagacactataaagtacgtatagcattgcttgtatcaataaaatcatgaattatgaataatgaaaaatcaactacaattaattagatttttttattattatttgtatgaatagtttgtttgttttgtggtactaaattagatatgcagcaaaataataatttatgattattatcatgcctattggagaatattgtcccacatggattaaatgtgaaagtattgagccatatataagaaacatgggctactccactcattgccaattggttttgagttggaaccccatgattctcaacatggtatcagagtcatatccctagcgggctttcgatccacacctatcaaagagttagccagccgcaagcgagcaaaatggtactcccagccgcgaacaagaataagcgagcaaatggaactcccagccgcaaaataaaaaataagcgagcaaatggcactacttatgataaggtgattcaagattggtgagcaaaaatagccaccatcttgagaggggatattggagaatattgtcccatatggattaa

SEQ ID NO: 367709 - DNA, 537 bp, Cannabis indica
gctaatcccaaggcaaatttcgacaacttgggcgatactaaggacatgtaccttgagtacttgcgcggcccaagttgcttatggtgggaaagaggcggctgcttcaacttccagccaagcttctaaccaggcttctgatgcttctcctgctcgaacaacagatcctcctgctcaaattggctcagaagaaccgaaccaagagcctggcactctagctctttaaacacttctctttttatctcctgtttatatatatattatatgtggcctcaagggatttaaaacatcgtgaccgaccaagcggtctttaaacatggaattatttttcattttttggacaacgggctgaccgggcagcttttaatcccggtactacgtgcttttgtcgcccttaatgaatttcattctttgtttatacttgtcgtgtaatagtgattgttttatgtttacgaaatgctttgtacaggtataggtacccccaagtgaccgagcagacggatgactcttcgtcacttatctttcgcaaatatattgctt

SEQ ID NO: 367710 - DNA, 1313 bp, Cannabis indica
attcaagataaactatatatattttttctgttatttaattaaattaaaaagttataactaattagattttttctagatacttaattatttgatttttcatagaaaatatatttaagttgaaaatcagttattctaactaattttggatcaacttaaattagaatattttgaaattaataattaagtagaattttatagaaaattagttattcagatattctttaaaattattttttaagttgaaaatttgttaattaattttagatcaacttaaataaggatatctttttcaaattaaggtgattagttcaagatacttaatttgttgtttaattaaattttggaaaattatttatgttaaaaatttaattatattagaaaaccttaaattagatattttttcagattattttattatattttcaaaattttgtaattatttataaatggattttcgaaaattaatttttggaaattaaattaaagttaaaaattaattttttaattgatttttgatcaacttaaattaagtatttttcattattaaaatatatagactaaaataagtaattagataaaaatacattttaaataatgagctttaatcaaagagatattcgatctccattgttggttttacattgttcttgttttagtgagtaatcatccctaagggatgaacgttcattaacaatttaataccatagaatcttgaaagataagtattatttgtaagtgttttactcttagtaacgtccatcccaatagttgctgctaagagtaagacttataaggtatgaaaccatagtagaagctcatgaaatagaatgaccttgactctcgcctgaacgagacaacgttagattttcttttcgatcgaataaaaggttgctaaaatgtaattcattttagatgagttgacgactctatccaatagatgatatctttaactctcgcctaagcgggacactatataagtttataggaaactttggaaaataattgaatatgttttattttggtatttttgcaagcatatttacttacttgttattttctgaacttgtgtatgaatttaagtgaaccatatgatttatttctgtttattgatatttgtagtgtcaaaatgaactaccctcctcccaactctcaccttctacatgccttcataaatgaactctacaatgtaaaaatatctcctagtaagagcattaagtcacatttaattatgatgaatctgaagttccaaaaagcaaatttgttggtgttgacttcgcttttagccaatgacaatgagtctttttgataagcga

SEQ ID NO: 367711 - DNA, 509 bp, Cannabis indica
agataaagttacgtacgtgaaaaaacactatctgatttttaatgtttcacaacaattgcattacaattgcataaacattttgctaacagttatttcgtctgattgaaaccttcatctgatgtaaccttcgactaaccacccagcaaccacccaaaactttcgtctgattaaaaccttcgtctgatgcaactttcggccaaccacctaacaaccaccctgcaaccatcgtctgatgcaaccaccacgcaaccacgcagtaaccaccctgcaaccattgtctgattgtgtaagtgatagtgtaagtggtattttggtaattaaaatcacataaaaggtataaatgttgtctttaccttatgaaagtatttttctaaataaagtcaacttatattttctatgtaataattcctaaaactaatatagttataatatagtgtaatatttaagtattccatatataaaaatatctttatatattaaaagtgcctatctaacggcatttcttggtt

SEQ ID NO: 367712 - DNA, 548 bp, Cannabis indica
aaattttaaaaataagataataacttaagcaaaaagatagatttttacctattttcaaattcaaatttcactaatatcttaaattaattttaaaaaaaaatattaatttaagtttgataattagatttgaaatttgaaaagtaaaaaatcaaaatacaaaactacacaaaaaattcgatattaattccataaaaagcatgaaaaaatgaaaaaattggaaaaaaaaaattgcatttggctcggatggtaatgcataccatccaggcgcatgcactcgggcagatggggctggtttcacgcacagggatgctgccagcaccatttccgcgcgcgcagcccaccttcagacaaaatcagcgccttcagatcgagaattgtcaaacatgtgcgtgtctgatgcgcgtgcacccgagaattctcaaacatccgcacgcgcatatgggtgatgtcacccttgatattttccgattttcaaaaaatcataactaattaagtaaaatcgaaatcaatttctgtaaaaaaaagtgaattgcttaatttttccaagc

SEQ ID NO: 367713 - DNA, 585 bp, Cannabis indica
tcccaagatcttcctcatttttatgaggaatttcttggtcatcaggttcttgttaatcattccaattttcaggtggaatctcattttccctaggttgttgttcatggacattttcctgtctcctggttcctgacccacgaggcttgcctcatggtcttctcactccaggttcaggttgattttgagtgttagtcccctgcgtcgccctagctgcgcctggatcatcctctaactcagcattctgcagctgtgcctcttccaggcggtgtctaaggcggcacttttctgtttcatcggtgccttctcccataggctgagtacctccacgattgagctcctcatccctagttctgggattctgaccattcccacgctgagttctcctcgagcgtgttgttcgcgtactgggaccaatgttaggttgggtcctccgggaacgtgtggtccgagtgctagttccaccctcaggttgagtccttctggagcgggtggtccgtctagactgtggattggaagacgttcaggagcccatgggctctttcccagaatggtgatgagtttcctcatgtggtgtattaacatctt

SEQ ID NO: 367714 - DNA, 699 bp, Cannabis indica
aaacccaacaactacaagctaggaaactctatatggacagtgcgggagttttaattgctgaaggagagtgcgaattatgggataggccttggatccctaggcgtaatccagcagatatcaaagaccgctttcaatttgtccgtaattaggctctttggaaagtcagagatttgtactctgaaggaacccgctcgtggaatgaaaacccggtcagagaatgctttgaagaggagattgctaatgagatcttgaagattaaaccgatacaagaaggccctgatattctgttttggaatgcttccaaatcaggaaatttttcagtgaaaagcgcgtactggaacagccaaaaacatcgtctaaaggatgaatcaaaaatctgggtgaaactatggaagactgatattcatcctcgtttgaagcttttttgttggagattattgtcggacattctccctactactaacagaaccagttttattcaggaatcaagtcctacgtgttgcttctgtaattctgagagtgagtcatctttgcatatgttctgtcaatgtcctttcactaggggtctattgtttcgaaaaggtgttagacttgactcattttattggaacaatatcctggagtttggttcctagtggtgcaaccttcaggaccccgaattcactactacaaaattgggttttcccaacggttaataag

SEQ ID NO: 367715 - DNA, 466 bp, Cannabis indica
attccctcatttcaagagggtttggtgaaggtgaagtgtttgtcccactccccccttttgttgccttcctacctctccgaggtcgagaagtcggtgttgcctcagtttcctccgcagaggtaaccatcactgaggcgacagtaggcaagaaaataggaacaaaaccaatcaagatacgctcccattcctggatcattacgggggagccaatcttcgttggcctcctttctgtcttagcaaccttagctgcaaaccttttcattgcccaggcttgcctctttttaaagccctttgctgccttgcctcttaaggcctgtgcagtcttagggacattcttcacacctttccctcttccaacctttttagctggtgtaagtgtcttcacattctttattggttcaggcaccctgcatgaaatgggtgctcggtcaatagagaatgctgccaaaaagcggctctttttccc

SEQ ID NO: 367716 - DNA, 789 bp, Cannabis indica
tcttttttctccaatatttttctcttagtggtaggagtgtttctaatttcgttattatcatttcatatgttggcaaacacacatattgactaggggcataatccttattttttttagagtaatttgcgtcataaatacttaagtttaactctcaattacaaataaatacttaagtttaatttttggcggtaataatacctaagttatatttttggtactctttaagtacctaaccgttaaatattaagtcaaatttacttaacacttaacagtcgggaacttacaaaagtttcagaattataacttaggtatttatgccgtaaattactcttttttaatatatatttgcaatttagtcctaaatatgtatattttgacatttatgcccatctaaaaatatatttctttccctaaaaaaaaatatatatatatatttcttaatatcagcctcctaaacaaaatttgtggatccactcaatgccgaccctatatgattttggaccttagtcaaaaatgaaaaaacttaagcccttgtatataaaatgatgatgttggattttaaacccttaattaacttttaaattattatgctattcatgtgtggtgtcatacatgacaagtaagtattagtagcacacgaataataaaaattgcattataaaaattgtgttatgaaactttctctagttaattagcttaccatgcatgtaagtaatttcttttcttaattttttctttatattaataaaattttttcattagttgtggaataagtattagtctaatcat

SEQ ID NO: 367717 - DNA, 689 bp, Cannabis indica
ttttgtaaaaatttgaaaaaggcttaatttgagatattttgacatataatttggataattattatttgtttattattttattcttaaaataatatttgcctaaccctatctatttaaaaattagttaatttgttattttaattttattaaattataagattagaaaatgatattgaaaatatctatttggttattttcaaatcatttatcttattagatattcaatttaatttgataaaataattcaaataaacctagatattttaaattagtttcattttgaattttaaattttgaaaagatatttaaggttattttaacaaccctaaaatttcaaatatagttggttagttaaataataatttaattatataagtaataaatatctttttacatggatattgtttaaataataattttaaatgtcacatattgttacatggatattgtttactttatttaattgtttattcaaagcttttttaacaaacctattatttatttgatctaaattgctatgattaacttgttgacagatctaataatctgattttaatcatagtctaattgtcaatagatcttataaatagtttgtaacaggtaaattttatatttatttcatctgtgtaaacttagaaacatgatagggcccatccaaatcaatttgacctgtgtgagcctatatattt

SEQ ID NO: 367718 - DNA, 668 bp, Cannabis indica
gaccctagaacaagactaggaccgtgattaggacccggacgccgatctagaatcgaacacagacctagcctcagacccaaacttagattggaactcgggcccggacactgtggtgtacccagatgagaactgagacctggacctagacttaaatataggacctgatcccaaacacagacttgcacctagatagggatccggatacgaaactgtactcggacaaagacccaaactgggatcgaaatgctggacctagatctggactgagatcctctcctagacccaaacttggacccgcactcggcacccaaacttgcacctggacccgaacctagacccagatcgaggttcagacctggacacaaacccggacacaactcggacccgaactcaaacacccacacttagactcagaccaaaagctaattcgaacccagaccaggatcagaaccaaggagttagacccagaactgaatcgagactaagatcgggattggaacttgggacacaaacccaacctagaccaagacccagtacgacaacccacacccggagcctgatctggaactagactgaaatcaagacccgaacccaaactaagaccaggactcgaactccgacccgaactcaacccaaactcgaaattagaatcacaaatggaactagaa

SEQ ID NO: 367719 - DNA, 398 bp, Cannabis indica
tgtattgctgacactcatttgaaatcatccggtgtcaccaccctctgatgggatttcggcgggcgttcacgttaggatgtttaaaagccatcttgaaacctacttcactgtcggagtgatgtattgctgatactcatttgaaatcatccggcgtcaccaccctccgatgggatttcggcgggcgttcacgttgggtgattgaaatagttacttgtcttttattttagttacttgtcttttattttattttgcaaaactaaaatcctatcaaatatttggagctaggttagaatattcttattttgtttgaaatagtttcttttgatgttagtcaactccgatgggttcgaccttgcatttacatgaacattattgtaagaccctaactagcataggcg

SEQ ID NO: 367720 - DNA, 599 bp, Cannabis indica
gcaagattgtagaacaggtgatatccctattgctaaaggagataaatttagtcttagtcaatgccctaaaagcagctttaaaattcaggaaatgcaaaagattccctatgcatcagctgttgggagtctaatgtatcttcaggtatgtatgcgtccagatatcccgtacattattggggtgttaggcagacatttaagcaaccctggtatagaccattggatagtagccaagaggattatgagatatcttcagagaatacaagattacatgctcacatacaagaagtcaaatcattttgaggtagtggggtattttgattctaattttgctggatgccaagatagtagaaggtctacatcaagctacatttttttgttagctggaagagctatatcctggaaaaatatcaaacagacacttatagcttcttccactatggcagaaaaattcgtagaatgttatgaggcatcaaatcaggaaatatggctgataaactttgtcactaggctgtgtttttcggagaatgtagaaagaccactcaagatattttgtgataataaatcagcagtgttgtattccaataacaataggagctcat

SEQ ID NO: 367721 - DNA, 761 bp, Cannabis indica
tagaaactcaaaatcgtaaatttaaaaagaaaaaaaagtatataggataattcccctaaataaaataacctcttagattcatttctaaataaaaaatgcccttattttaaacttattaaaatatttgctttatatataaataatttataaaattaatattaaagaaaatttttcttaactaaataattaattttttattgtaataattaaatgtatgaatagcaatagatgataagagaattttttacgtgattttgaagttaaatatacatggtccacaagtttatcttattcaaaatttataaattgtatacataatacaatttagaaataaatgataaacaatctcaatattatctatttttctaaagattggtcgttccttgtttcttggaatctgtccttatttatagaagtctaaaatgatagttattctcttagaatttgatcattttataattgttcatgaaacgtggacattctccacattttatttttatgcacatcagataaatataacataaaaataaaaaatataaatcttacatattaattaattatatatatgatgatataatattaaaaaatttaaaattaaaattaaatttatatataaaaaaaatcctctacatgacctatatcatcattattattagagaacattatcctacatggattaaatataaaaatattgagccatgtataagaactaggggtgttcataaaaatcgaaaaaccgaaaccgaccatcaaaccgacca

SEQ ID NO: 367722 - DNA, 627 bp, Cannabis indica
ttgctactcttccttcgccattgtcagtcctcgttataccgacgatcaacgccgacctccagctctcaaccttcatgtaagttttttggacactttgtgcttgtttactgtttgtttgcatggtaggattagaatttcttggttgagcgctgaaattccgagaaataactttgattgaatttgttgtgtaatgcgtagaatctcccttattcgtgtctttgctattttcctttattgctatttagagttgactcccttttatcgagatattgcttttagggcatagggcgatttttgcttctaccttctgcgttttctttttattttcttttcctctgctttcgctacctttgggatttttgcacccgatgtttgctaaggaatgtccttcgggtttccatttttggcaaacatccggaggaggcctctttccagcgattaggggacccccattcctttttttcacattagggtttggcttggggcctaactgctggattttcttattttttcaaaaaaaaaatgtctgctcctgcttccggaacgaaatcttccaaaagggggcggccactttggccaccctggaggaagtcatgaagggccctgttgcccaggagaactacactt

SEQ ID NO: 367723 - DNA, 932 bp, Cannabis indica
aaccgctgggggcgagctgtgggatgacatacaaggtcatccattaacaaacatcactgagttcaacgaaagggctcaggtattcgttcgaaaagaagaagctcgaaaggaaatgaatttgttgaaaataggctcgagaggcaaacccagcaacttttcaacaagtattgtctcaacgagaatcgataactcggaggcttctggctcgaagagaaaggacggttctaaggaaccttcaaaggataaaaagaaatagaagaagcacgataagtacgtgccagtgctcgaagggaaaggacggttctaaggaaccgtcaaaggataaaaagaaatagaagaagcacgataagtacgtgccagtgtatacaatttataccgagcttaatgaaactcaggagaatatttacctcacacatgagcaaaaggttaccttcagcaagcctgagtccataaagaatgcgaggagcaaaagagatcctaacaggtattgtaaattccataaggatattgggtacacaatcgacgactgtcgccaattgaaagatgagatagaaagtttcatcgctcgaggccactttaaacagtacgtgaagagacagggccatggatacaaccagcccagtttctcgataacccagtaaccagggttacaacctctctgttgaaggggaggagatcctggttatttcagagggccacatatacgtaggggagagcaataacgacccaaaaagatatgtgaaagaaataaagaacgagcagtcgacatttgatccattggtgattaccatttaactcgccaataaaaggtataaagtagggtgttaatagacaacaggagctcagtaaatattacctttataaggaaacgctgaggaagatggggctcgaaaaagccaaattgaggccttgtatggtaaattctttacagc

SEQ ID NO: 367724 - DNA, 657 bp, Cannabis indica
aaaaaatgaattattctcatagctacatatgaacgtgtagctcccaaatcaaacaacacaatataaaagaagtcgtttacagggaactgacctgccactacagaagggcttgctgcatcatcagcttgagcattagcattcatcggggtaggaacaaataccgctttctgctcttgttcttctttctccacctgtgggcaatctttcttaaaatgcccaaccttaccacattgaaaacatacctttcggttgcattctcctggatggtgtttcatgcaacgtgggcattcagggtaagaataaccctggcgtcctcccttaccttgaaaccttcggaaccgcttgttctgtcttaaacccaccactgatgacgtaggtttcctcttttgctcaatcatggagctcctgccactttcaccataatctggattcaggcaggtaatattctgaccctctaccataatctcctgaggtctcacaataatttcctcagggctttcagcccaagaagcattcctcatatttgaacctccctgaaagtctgaaggttcttggatccaaatctttccatgcaatggttccacttgattaccagccattccatgctttgctggtaataccgaatcaaaaatgattggcatatgtggtaaagatact

SEQ ID NO: 367725 - DNA, 788 bp, Cannabis indica
atgtgggaaattgtgtgacggctgcacactttcccatgttacaactcttgaccttctcttttttccatgcatgccaatttttgtggcattaactccctaaagttttttgggagaaatttttttccaaaaactatatataagtgcctcattcttcttttcattcttaacttctcgtctatattctctaagtaaaaaatcctctccaagacgccatagagtcgaagccttatgagcccaagttcttcatggatttttgagtttctgactcaccctactcgtgcagactagctagagcctcctttcaccttcccattggataagttcaaagctttctctctttttcgttctttgaatttctaccattgatgagttttagagcttttatgaacttcttgaatctcatatcttaggatagtttttacgcattataatcaattcaatagctttaggatacataatgtataactccatgatgaaaaagatcgaatattgcgctctattttgagattttaatctttgacattcgaagaaagtagctttgaattttagaaaatatggttttttatccatttagggacctagctagcgctttgggtttgttagagaccctgtacggttcttggttctgtctaaaacccttagcgggtacttagttcttggaactctatctagcccttataggactaaatctatcctggtcggttcatagtgaaccaagttttagctagacgattcttggtctaccttccagaggttggccgattcatgtttgtgttgggttttgtgcc

SEQ ID NO: 367726 - DNA, 506 bp, Cannabis indica
aaatcaatggtcaaaaaaagttccctaccggtagggaacttatgctaagtcctaccatagtcttgccctatatagatatatatacagtcataataataagagaaagagaaatgcttgcttagtatttttttttgtcataataataatttagtttaatacatataataatttttaaaaagtattgttagccaatatataacagcatgtctaaaaatagtaggcgctactaatatttaataatactctaatagaaactagccaaaaattatatgctttttatgaatactagttggaacaacacgtgctacgcacgtgtaatctttttggaagtaaatatataatttttattaatttactaaatcagttaaaagataagattcttcctcaatagaaacatcgctcttgttgaacactcgaattagaaaagaacaagatgctcaagcaaaactatgagcaactatcattaataaaaaacaaggaactattgtgtaaagatggaagaagtt

SEQ ID NO: 367727 - DNA, 692 bp, Cannabis indica
atagtgtttatcgatgacatccttgtgtactctcagttagaagaggagcatgagcatcatctttgaatggtattgcagtgacttagggatcacaagttttatgcaaagttcaaaaagtgtgaattctggttgtcaaaggttcttttctggggcatattgtcagaaaggatggaattattgttgatccaagtaagatcgagtcagtgaagaattggccgaggccaaaatctatgacagaagttcgaatttttcttgattgagcagggtattatcgacattttgtcgagggattctctaagatctctatgccactaaccgagttaactaagaaaaatcaacaatttatatggtccgacaaatgtgaagcaagttttcaagagttgaagcaacggttgataacagctctggtgttagctttgccatcaaattaagaaacgttcgttgtttattgcgatggatctagacagggtttgggatgtattctgatgcaagctgacaaagtcatagcttctgcctctagtcaattgaaggattatgagcagcgctaccaatgcatgatttagagcttactctgtgttttttgctttaaagatatggcggaactatctttatggtgagaaatgtgagattttaactgatcataaaattctcaagtactttttcacccaaaaagacttaaacatgaggcagag

SEQ ID NO: 367728 - DNA, 606 bp, Cannabis indica
gcgacaaacttttgtaatattcacgatgaaacttttataaagattttgtaaaggggatctcagttttatataggtatattattttaatgtttttaattaattaagtaaaattttaattaattacgattttcaataaacttgatgattagcaatgagctgcatagtcagttaaaaatcacgttaacatgcctaaaatagttagggtgttatagctattttctctgggaacccaaagaaagacttatgcttctagttagacaggtgatcaacacgagcttcctgtatggaattaggctttggatgggagagctagagctagcactatgagtccaagccttaaggataacctcttcccaatatggttcagtcaaccaaacattcttgaagaggaatctcctatcccctttaaccttcaagagatttggtggagaattaaaaagcatcaggttaatggctctatgattagagccaaaaaaaattgagatgactggaggaagcattaggataagtatccaaccaatgtttgtttgctaaagcccaatctaattagggttgttcatccgatccaatccgtacttttttggtcaaacaacatccagtccgcac

SEQ ID NO: 367729 - DNA, 486 bp, Cannabis indica
taataataataataataaagatatgaacattgctattagatacctaatttataaataaatacttaagtttaatttttgtggtaataatatctaagttatatttctggaactctgtaagtacctgacagtttaatgttaagttattatccacgtgtcacttttttactggtgtacatctaaattaaatttttttcaaaaaaaaataaaaattcatgatcttgactaatgagggattgtcacgtgacaatttatttaatatataacaattaggtacctacatagttctaaaaatataacttaggtattattgacgccaaaaattaaatttaagtatttatttacaatggagaattaaatttaagtatttatgctgcaaataaattactttatacataatgtggtctaattttgaagaccaattttatgtagtgttgttcaatagacaatggtcacatacttttttttttttttatttttagttttaat

SEQ ID NO: 367730 - DNA, 426 bp, Cannabis indica
cagttaactaccactataaagtaaattaatgtaacctatacggtagaggcaacattgctcataccaagtacgcataactaaactgaaaaatacacatttctcgaattatcaactaataacaattaatcaaagatcattctgtgatcctaaaatttcttttctataattggtagagatcttgatgatattttcaacacaccaagaaatatacatacctcatgtatattctctgttatagtgagtgtatcgttgatgatgctaatgttgggattttatgtcctaaataaaactcatttcaatctaatctgatttgttatcaatgaaagattagaagtcatttatgtttacatgtagtttcatgtttgtggtttaatatatacaaaatgtgttaagtctagattatatagtcatttacaattacagtga

SEQ ID NO: 367731 - DNA, 707 bp, Cannabis indica
gattttgatgcaatcctgggaatggattggttgactaagtacaatgcgtaccgtaggtggtaagaggaatatggtgtacttttaaaccagagggtgagaccccattttatttttatgggaaaggttaagggatcacgaattccaatgatatcggcacttaggactagggatttattgtaagaatgatgtatggggtacctggctagtgtgttggataccacaaaagatatacttgggatcggaaaaggtttgagtagtatgtgaatttctagatgtattcgcgaaggaattaccaggattagcaccaaagagagattgactttgagattgaattagtaccaggggttgagccagtttctaaggccccttatagaatggcaccgacagaattgaaggaattgaaagtccaattacataacctacttaatctgcgattcacaaggccgagtacctctccttggggtgcaccagttttgtttgtcaagaagaaggacaagtcgttacgtatgttcaattattatcaagaattgaataagtatagaataaagaataaatatcctttgccaaggatagatcatttgtttgatcagttacagggaaaaaccatcttctctaagattgaccttcgatctggttattaccatttgaggattcgagaagaggatattcccaaaactactttcatactcaatatgggcactacgagt

SEQ ID NO: 367732 - DNA, 1170 bp, Cannabis indica
tttttgtggattgtttaattaaattgttaatctgattttctagctttgtttggctgaaacaatttaataaaataaggaaaatcaattcttttattcattttatgcaaaaatcaaaagttagacaaaagtttgcatttcactctcaagttctctctctctttcgaaaccctcaaaaccagctgggattgctgtgtttttctccttcttcttgttgattccggcagattttaagggatcttgaactcttggtaagcttttgactttgtcttctttagtttcttaaattgtaaataagtaatagttgcatgctttgagcttttgattgctgtagctgctgttaatgtttagggttattatctgaagcttaaatatgtttagttatatggattcaagcaggttttgttgattgttagttagatttaacacttggagctttaatggtggaatttgattctgtgtatgggtggatgttttgttgccttgaaaatgttctctagggtgtatagaacaggtctggaaagtttgaattggattggggttgatttggtcgagttatgaaatttttggaaattcctgcactaaaccggaattcaggtttagagaggcttgtaggaactggaatttcagttgggaaaccggtctaccagttggggaaattttgggaaccctagtttttccctttttgtgctatttagggtattgccatgttattaatcgatagggaaacttttaatttcaagtttatgttccggggaagtgatttagcgtgtcgcttatcagtgttgtgattgatgtgatttaggagcctgtaatttgccgagcagattgttccagtcaggttgaccggcacacctgaattcagaatcaaggtaagattagtttaacagtatgcatacgtatttacatgtttagcgtgcatgttagtaagcctgttacattacattagatatgtatgttggcttttgtactatccgacagtatcacatcagtacgactagagtatgactagcgtaccgagtataggctgatattatggtcgatagtatcgtactatttgacagtatcacattggtacgtctagagtatgactagcgtaccgagtataggcgtatatagtatcacatcggtacggctggagtatgactagtgtaccgagtataggctgatgct

SEQ ID NO: 367733 - DNA, 582 bp, Cannabis indica
ttttatcttttttaattccatttaattctaaactaaactctaattgaactactataaaaggaataagataactctcattctcatccatctaaaataacctagttttcattctttgtcagacaactaaaaattgagagtctccttctatagtaatttcgaatcccctcttcttcttcttcattgattttgttcatttagtgatagagtaccatgcccactcatatcaagtcaactactcaatcatagtgtggaagaatgtgaataatccaaccaaattgaaggagagtagatccaggttcagatcttggtaatgcttagctacagaaagaaatcaagggcttgagatttaaatgaaaggagtcattattattctgctgccatcaatgtaaagatttcttaatctcttatatgtttattttatcatattagaatattcatatttagggtgttagattataaaattataatcaatgaacataagtatatctagatcttggtaaactaacttccaacagcagggagtttgaatatttctacaaaccgtaatttattgaaatgagttatttaagttgcatttaataa

SEQ ID NO: 367734 - DNA, 967 bp, Cannabis indica
aatttaaaaaatattatggctaggatatctataaaaatatgtaggtcaatttcatatttattattatttaatttttcatataagataattttaatataatatttcaaattaaaaaaaaaatactatcatttaatttaaatatgtccaacattaaatatctaactttataattaaataatctagtaaatttaaaaaaattaagaaatttttcaaatctaaccataatttaaaatttaaaataactaatttttaaatttaaacttcaaaatatcataataatctattaaaaaattaaaaattattaatttaaaattttgatatttaagtttaaatattaaaaatttattagggtttgaattcaaaaaattcaaaatttggtgaaaaatcacccaaaaatagattttaggtgcaaagcccccttgctgccgagggataggctgcacgcaaccctatccaggcgcgcacgaaggaggcagcagggtcaatagccgaagtttctcggcatcttacagggtcgtcttggcgcttcaagtctgaaggaagggacttgaccgagcatcagacacagttttgtccgagtcaagcacgcagacaaggtgtcttgtccaagttcctggtgcgcgtgagcacccattctcgacaccttagcacccgaaatttcaaatcaacatatctttctaaatttgtatcagaatcaagttccgtaaatattaaaattacttaagttttcacaaggaatccaaataaattattttcagaatgaaaataaaattatttttatggaaagattgttgggttttatgccctaaataaaactcatttcaatataatcagattttacttattaatatagatcagaaataacatttaatgttgcatggttcacatgattttatttcatgattatatgtacataatgtataaattcatctgaaacccttttcacatacttgatcctgtttattgt

SEQ ID NO: 367735 - DNA, 547 bp, Cannabis indica
aggtcgaggtagagcgactgtttttcttcattctgttcacgtttaaaacatctcttcgtagagaacctgccccaatctcaactggtaccatagcctcgcatccataagagagcgagaaaggagtctcgccagtcgtggatcggggggtcctgttgtatgaccataaaacttgcgaaagctcgtctggccatacccccttacgttcttcgagttttcctttgatggtgtgctttattgtcttattgactgcttcagtttgcctgttactttacggataggcgattgcttagaatgtttttttaattcccaagtcgtcgcataactaccgcatctccttacagccaaattgctttccattatctgaaatgagcttgtaagggatgccaaatcgacaaattatggagttgtagacaaactcgcgcaacttagtcgctgtgatggttgctagtgctttggcctcagcccattttgtgaattagtcgaccgcgactacagcatacttgactctgccttttcctttgggtagttcatgttggaaattatttta

SEQ ID NO: 367736 - DNA, 701 bp, Cannabis indica
gaaatcaatgctctaggttttttacaatctgattaaaaattgttgtttgtttatttatttttctatttatcttattatttgtttcttaattataatttactttgtgttatctaattatgaaatttaaaagtataataattagtaaaatttaataatcaatccatgtgggttcgacaacctttttagtattaaaactttgctataacaacactgtacgcttgcagtaaaaattgtgtatcaagtttttggcgccgttgccggggattgaaaattcttaaattattgctgatattattactaaagttttttgctttaaattagattttattttgtttcttattttatttgttgctttgtggttcagtttatgcaaagaaatcaaagttctacaccactcacactgctgaatcctgagattgaaataactctaaagcggttaaaagcgaagaaaaaaatagatttcaccatggcagccaataacaacaatggccttaataacaaccaaccaggacttgctgcaactgatgcacaaccatgggctgttcgtgattattgcttaccagtggtgaatgaaaattttattggtattgctaatccagtcgttgctgctaataattttgaattgaagcctactttaatcaatatggtgtaacagaatcaatttggtgggttggctactgaagatcccaatatccatctag

SEQ ID NO: 367737 - DNA, 1005 bp, Cannabis indica
tgaacgaaaggaatcatttaattatgctgtaacaaatgtaaggctttgtttgaacggaaggaatcatttaattctgctataacaaatgtaaggctttgtaaggctttctataaatttttatgtgtttatttcattgttttaaggaattcatatttaagatgttagattatagtgatataatcaaacatacatgttagtaaatctagatcctagtaaaataagttccaacagttataacaacaaattccatgaagaaaaataatgtaatagtataaaaagatacatcaagttgtcaaaattaagtaaaaaaaagattttgtaatacgaaaacatgttgaggagttgatattgttttgcatattgtaattacatcaatgttttattatttttctattgttttgtaattattttcatttcgtttattaaattattttagagttgttttttaaccgtcttagttgttttaagttattatctttagatttactactacaatatatttataggcagccgattttgtgcccatatatgcaaaacacggattggaatccgttgtacggcaggggggccccaccgtacttttaaatgttttttaatttttgaaatgtaagtggtaaccggttgttgtaggtgtggttaccggttgggagtttatttttttaattataaaataattaggtacggaaaaagtacaaaatggtactgtttgtgttagttagagtacaaaaaggtacatcagtcttcactgttcctggcagttgatggtacgaaaacactgtaggcagtgggtccatgttgtcggattaaggctattttggtattttccttcattcataagatcatatgtatttgtgggatggtaattaagtacattatatagagtaccgtgtacattacttatttctgcgtgatgtttagtaaaattagtgtacataatatcacgtaccgagtacaaaatttcacgtaccgagtacgttcatttacgtttcgtagtatattgtttag

SEQ ID NO: 367738 - DNA, 796 bp, Cannabis indica
aggtaattacagtggtatgatagtgtgtacgtacacttgtacacttgtgtatttttttttttttttggttaaagaaaaagagttgctttgtaaaaaaattgttaaaaataaatagaaaagagggctactttatatatgtcgtgtgtatgcatacattaatggacttatttttttttttcgggtttaagttaatcggctttgttattgaaaaaaatatgcttaaaggaaaaacacatataattttaaaaataataaaaaacaaagtagaatgtgtcataaaaatatattatatttattagaatgtgttagtatgtgcaagtaaatatacttttttgtaaaaaataaaataaataaacatgcatattttttaattatagaaataataaaattaaatttagaaaataatttgatacaataagatccatagtattattgtgcacccaagctttttctagccattagatgtatgatcaaaggctctaaaagtctcctcacccataggataataatggagtctcctactattgtcatggggtagtttttttttggccaatcacattaaattcaaatagaaattacatggtatggtagtgtgtgcgtacacatgtgatgttttgtttattggtttaaaaaaagcatctactttataaaaaaaattattaaaaaaaaggaaagaaatatatgtggtgtgtatgtatacatgaatagagttatttttgttgggctttaagttaatgggctttgttattttattatttttattatgaaaaaaaaatatgtttaaataaaacacata

SEQ ID NO: 367739 - DNA, 476 bp, Cannabis indica
atttccaccaaactatgtcagacaagagtttgaaaattttgatggaattaacggttcttcccatgagcatttggtgtattttacttctgcatgtgtgaattcgcttaattaaatgcattgttaattagataattcatgcaatcactaaaagaggcagcgttcacttggtacactcagttgccccaggatccataaatacctgggacgacatgaaaaagcctttggcacaatttgtgagttcaaataagaccataagcatccatgacttggtggaaacaaacaaacgaagctagtaaaaatagcaaaggaattcatcacaagatggagaaatcttaacctcctaagtccagagaggttgtcagaacaagcagcaattttgatgtatgccaaaaacctcaaccctgaggtggcaacctttgtgagcacagcagaacttaaaacttttaatgagcttgtcttgaaggcctgtaacgtcg

SEQ ID NO: 367740 - DNA, 989 bp, Cannabis indica
tagtccgctcaaatcatccactatcaccaaagctcaataatgggattacaaagttcttctctagtaaaactagagtactcacaacaacatcaagattaaacaatcttggatcaccaatacaatcatcatcatcatcatcatcatcatcatcatcatctcaaaagatggatacacaaatagaaaaagtttaagtctcaccaaatggatattgtagaatagcaccttagagaggacaatcgccaaatcggaaccggtacatttgaagagcaccttgcaaggattcaccacccaaaatttgagctaaaatagatgagaatcaaccacttgatcttcaaagcaaaatgacaaaacccccttctctctctagctttctttttggctgcttgctgctcacgaagcactctgctgcttccctctttttttttttcttttaattgaatcaaacaaaatgggacttaagcccttattggtccaagcccaacaaaaggggcggacccaacatgatgctggttgtgtgaatgagagtttgcatttgagattcaaagatctcggacaacttacaaaaatactgccacatggcaaaaataacttttatactgttttgtgacttttttttttattttatactgtaaacacagaaaataataaacgaggtctccatcttccacatccacagacaaaaccaccacaacaacaccaaaacaaccgaaaaactaccattaaatccggtgagatgaagcagaaacattaaaagcattaatattgggacaatcatggtttttctaatgttgtttttgggttgttctactattgtttcgtatgtttaacaaatgttggtttcaaattacacatgttaaaccaaccactgaatatttgtttgagataactagaatgaaagaatcatagacagtaatagtcttaccttccattaaagtggtgaaatctagaagaccaaaaaaaaaaaaaaggatggaagctagctgggaaaa

SEQ ID NO: 367741 - DNA, 608 bp, Cannabis indica
ctacccaaatggccatacagaggcggttcctgcaacaatccatgaagctaatcgaaattataatcaggtaaaatggataccccctgctagtggtagcatatgtgtgaattgtgatgctgcagttgtagataataccccaggagtaggaatcggtttcatttggagaagggctgatggtcaactgatctctgctggtatgagctatttgcacagctgctgttctcccaaaacggctgaggcctgggcgctttgggaagctttgaacaacctccctgcaactgagatcagtcattttgaaatccagtccgattgccggctgctggtggaagaaatcacaagcaagaatcgaagcctcactgctgacagcaccatcattcacaagatcaaaactttgctggaaaacttcactcatgtaaatataattcatgtaaaaagaaccaataatgaatgtgcaaatttgttagctaggaaatgtctagccgacaaaaattccttttctttttacaactccttcccggattggttagtcaagttttgtaaggctgatcatcctcttgagttgtagtttgttgttttggttctaataaaatttctttcaaaaaaaaaaa

SEQ ID NO: 367742 - DNA, 642 bp, Cannabis indica
tttaataatctaaaatattaatcgtatgcggtcattataaacaatattaacaatggagtttaactttgtaaaaaattgatggacagggataacttctctagatgcagcaactaatgccaattgcaaacgatgtgcaaaacaatgaacatagtaagcataaggacattcacttgaaattaaagcttgcaaaccattccattgtccacgcatattacttgcgccatcatacccttgcccatgaataaattgaaacatgaatactataattagagagtatagagaaactatcttcttttaatgttaaagcagcagtgtctttgacgtgaataagcccaaaaaaatgttcttgcacataatcatctttatcaacaaatcttaatcaattgaaatttactctttcttagattcatctcttgtttcatcaactattacagaaaattttacatcaccaatttcttcacgaattgcatttctcactttatttcccaacacatgcaaaacttgtttttgtgttgttggtgatgtatatgtggcatttcgtggagctttatccaaaacttctgctaccttatcactataggaagttatgaaactcaataactctaaaaagtttccccgattaattgaagttttagattcatt

SEQ ID NO: 367743 - DNA, 77 bp, Cannabis indica
agcaccccctcacatgaaccaccccaattgtgaaggcccatttgcctgatttgaatgactgtactaggttaattaca

SEQ ID NO: 367744 - DNA, 769 bp, Cannabis indica
tttaatgttgtaatagatactttggaatttctttgcaatgaggagtctatgttgcattttctgtcgccattcagggggagctctttgttaaacttcttattttcttagggggagaatttggttttggacaatattattgacatggattatgctcaatgaagggggagaaatacttatcctttttgtgcttttctgtttgtttagactctgttatattttgatggttgctttgttttgcactggtattgttgtcattgaccataatttgtcaagggggagattgtaagaaccattattttctgtagtgacaaattatgtccagttgcattccagttgcgtctgggactcgtagtgttttgtctggagttcgtactgttagtgttagtccacgtcagcaaagatattttaggttttaattgttcagatggtaacagctgtctatttcgggtttcttggtttagctgggtataaatacgatttctgggtattatgttgacaaactttttgatcggagattagggattacgtttctttcttcttgtttcttctttatgttccatggcaggtgatctttgagcttggaggtattactccatagttgcagatcaaagcttgaagatgttgagttcagactgaagggatttcagtatcatcttcatcaccagatctgaagggagttcagattgaagaagtgttgaagagagctcatcattcacacaaggggatcttgtgtctccaatcaagggtcttggttggtatgggtatagat

SEQ ID NO: 367745 - DNA, 730 bp, Cannabis indica
aaaaaaaccagtttcttggtattttccggtgacaatgccaattttgacgaatttcccagagtttactgtcggtactgaaaaagtcaccggagtagctgtcggtgtattagtcgtcagagttgctaccaacgctagaaaattcatcagaattgtcattgtcgtcagaaaaattaccggaaaattaccaaaaaactggtttcttcatcaagaaaccagaaaccaatttcttggtaatttttccggcgactatgccaattctgatgacttttttgaagtttactgtcggtgccggaaaagtcgccggagtagctgctagcgtcagaaaagtcgtcagaattggcattgtcaacggaaaaatcaccaagaaaccggtttcttagacttcaagaaaccggtttcttggtgatttttcagtgatttttccggcgacaatgccaattccgatgaattttctggcgccgcagcaactccgacgacttttccggcaccgaccgctactccagcgacttttccggcaccggtagcaaactccggtgacttttccggcatcaattacaaataaaacttcctaaacaaataaaaacattaaatatgggatttagaaacctaattacatatatatgacatatcaaataccataaaaaaaacctaaaaaaaaaaaaaaaataaccaatataaaattaggaccaaaccttaaaatagtgccatattatcataagaactttaaaat

SEQ ID NO: 367746 - DNA, 507 bp, Cannabis indica
gaaggaagtattaaaaaaattatggaaaatttggaaaaccgtgatcatgtgctctgcacctcctgacgcacgtcccatccaactgtcactgacgtcatccttctctgcagcccactttgacatgacctccatcccattcaattgatactgacgtcaacccccctcatccactaagcatgctcaacaagccaaacataaagaaataaaataaaatgaaaaaattgtaaaactgacggtatattcaataatttaaaaagtaacgttattattagaattaaatggaaaaaaacgtgtccacatgtaattttccctattttatttgtaattatttcatatttaatttttcttaagtggccttaaatttaaaaattaagttagtaaatattaattttttttaaaaaaataaaatagtaaaacaatcaaatatattaaattaactaataaaaattataaatacatttactacatattaatttttttaaaaaattataattaattaaattaagt

SEQ ID NO: 367747 - DNA, 720 bp, Cannabis indica
agacgctactagcaaaatctttttttgggtcatattgctaatatgagactaagggatatgcccaatttgtttttagggcaagtgggaaatattagggtttatgccccgaaaagcttgtaaagacatttttgattatttaaataaagagttaaatatttgtatgtgtgaatattaaattgttaatatttattattgaataatttatattaaatatataaaaaagttttattcatatatgaggctgtggcttgtagctgtacatagaagtaagactactttgctatgaataaaacagtcaacaacatatattaaagttatgaaatctttaatcaatggttgctagtacagttcactgatgccagttcttcggtgcaagtaatcttggttcagattacgaatgtagtgagaaatctaagtgaaggtactgtatataatagagattatacatgacaaagactgatatgaatgaagttgtctttattaatttgttgtttatcataaagatctaattcatatcataacgatgatcaatagtagatcagcctaaatcctgagttatcatgaacttctgttcatgttattagtttctttgattcattggttaaagtttttcagagaagatgattcttacaatttctgttttgagaatctaataacatggatgactgggaacatgatgtacaattatagaatcctgactttcctaacagattaaatatt

SEQ ID NO: 367748 - DNA, 1066 bp, Cannabis indica
aaattaaagggaaaagacttaataattacgtgacaaataattattaattgaattaaaaagttaagattataagattaattcaaattattgttcatatattgattaatcccattaatcaatatatgaacaataatttgaattaatcttataatcttaactttaatcaaatagggtttataaaagaggcataaataatcaaatagggttagaaatacggtaattaaagaaaatctagaaccatatttttttttggatttaatgggatttattttattttttattttattatatataaataaaaagtgactcgtgaatttttcataaactattttatttttaataataaaccatagggttagaaatacggtagttaaagaaaatctagaactctattttttttggatttaatgggatttattttattatatataaataaataaaaagtgacccatgaatttttcataaactatttatttttaataataaaccattttatttttaatataaataaaaagtcacccatgaatttctcataaaccaagaattctgttgtataggcacactttatatacaatagatataaatatatatatatatttaattttttttaattaggtaatatatatatatattttttaatttttaaaataagatttaaaattttaatctttaaaaatatcgtgatgaataattgtgtagtcgcttaagcggagttgtcttttattttaattcaaacttaaactaataaagttaaaaatatagttaattattttaattcaaacttaaattaatatagtgttaaaaatatttacaatattttaagtattttaaatttaaattaatattttttatataaaatgtttacataatttttctttttattttaattcaaaattaaatcaattttagttacaaatatagttaaaattatctacaatattttaagtattttaatttaaattaaaaagtctttaaataaaatatctatatattttattttaatatatataagaaattaaaaaataatatatataaatatctacataattttatttttaaattatat

SEQ ID NO: 367749 - DNA, 703 bp, Cannabis indica
ctcccctcggacagctttcttggggatgatgaagccaaccttgtagtccaagactttgctagggctgaattagagagtcagggtaggactagttttattactttcttgttaggctcacgcctttctcatgattattataacactttgtttatttctttgttgcagcagccaggcctatggaaaaccttctggctactcttgttgaggcatacagccctgacacctctctgccttcggctctgtcccaatcggtgacccccgagaggtcctcgtccagtgcccctttaggcacgatcgtcttgatagacgaggagggggaagtcaaggaagatgaggtagaggttacgaccgcccttgagtgcaagcggaagggcaagatggttgaaatcgagccttctaagcgaactcggaggggggacactccgaccgtcagtactgactctgggattcctcctgaagcggaggagtacaccgtgccgcacaccattttgttgaccccggttcctacggatgaggagaggcaaatgctccgagtttccaaacacaactaggccctggacgagtacagtcggggacacgctaaggtggaggccttaaagaagatcatgcgggaggagcaggagaacactttgcacgaggacgccttccgaaatccttgggacctgaacatggagcctttgacggattggttcaaccgctttgt

SEQ ID NO: 367750 - DNA, 1051 bp, Cannabis indica
ttctttttcctattagttttcttgcctcttcttctctttattatatatacatatattatatctcttctatattcactagtatatgtatatactatatatctactatatatcattcatatatatctctttattatatatatatatatattctcttttttgttttacatttatgtgtatatatttgctttgagttgtatctttgtcctcatcttttctttctctttatttgtattttgtgctttgggattgtaacttttatttaatctatagtccttgtaattttgttgcatagagttgtaattttcttggtctctttattcatcttattgttattcttctattgatatctcatatttttctaacatccctacaatcatgggattgaattagagggatacggcaggctatctcaatcccccatttcatgtattctaattatgtaataaattctctttccaattatagatattgtaagtgaaaggaaaaccttccctcatgcattaaacccctataaatagtgatctagcttcactgtaaaggggatcgaaataattgctttagaaagagttctaagagaaatactcaaagatttcattgtgagagctttgagagaggaaacactgtgttctttgttctcaagttaatacaatctaaggggagtaggctattatcgtactaaagggactgaatttcttcgaaatttggtgttctttatcactttttggtttttgctctattttcattatatttctaattgcttcataattgactcattgtcgttgactaaaagcgaggtcaatattttggtgctttcattgagagaaaaaatccaagtttgttctttgtcttaaggctcaacatgcatacagaatggtggtgaaaactcgtagaggcttggttgatcagagtgacccaatggtgacaaacagggacacacccattaagattgatgtgggggctatagcccccactaacaaaaatattgccttttaaaaaattaaatgtaaattttttaatttaataattataggccaaaatagtagaaaaaccc

SEQ ID NO: 367751 - DNA, 505 bp, Cannabis indica
tacagtgttgccaaccttttattaaagaacctactgcaaagtatagatatttgaatttgttatcttcatctgtcactaggtctgtaattgttcctgtttcaaaagtaaccaattagtttattatataaatacctatgtagcatattattatgtttattcatatcaattatcttatttattactttatgtagacgaagtatattattacttaggtttgatattttcatcatgtataaaattgatggtatctcattgtatgatgcttgtgggcagcgacgagcatccacaattgccttttctctagctctccatgctttttggtaagatatagagacactgtaatcatcagccatgtcatccacaatttttgttggagtgtaatctctttttgggtttacaaacttgttttatataacatttccaactaggttgcttgtagcttgaggatggtctccagaagtaatgtccaatgaacatgttgttggaatttattttaccaggatct

SEQ ID NO: 367752 - DNA, 558 bp, Cannabis indica
tcactgcttataagtgatagtgttattgatggcacacaaaaccatactaatgaagaatacaagagaaaaaatgaatggccccatcatttccaaactacattaccataccaatatgaacattccaatcaactaaagaatgttactttttggttcagatttctatcaaccaaatatttatgaacccatttctaaaaaataccatattaaagagttgagttatacaaataataaaataattctgatgtactaacaatgtttaagtccttcgaaatacctaaagcatacctaaagcaagagaaagaaaataaaaacagagcccaaaatatgtgaagctagtctaataaaccaagacagtactaaagcacttacttggtcactagtgcagatgataaaaatattggcagcttgcatatgtcatttgtaaaggctcgtttggtacgccgtattgtaatgtattgtattgtgttggattgtgttatattgtattgtattagtattattttatacaatataatttttagtactgacttgtattaattgattgtgtaaagttataat

SEQ ID NO: 367753 - DNA, 519 bp, Cannabis indica
ctaatttattaattaaaaccaattcactgagtctacaagccaatattttctcaattggtgcgggatcactattgattatatagaacgctctatatgttccaaatatagatacgctattaattatacattgtttcaatccaaataatcaatgatcaatcctttatagataatctacatcaagtagggataaatttactgttctacatttcaatgtattttatccttaaaacacttagctccttgtaatctaccatttaatctcttttagccaagctcgaaggaaatcatcatttcacttctatgcatttatggaagctatagattccatatctatgattagcgctctcactcaattgtactaccacgttcccaagatataagtattagaaagatctaattggtaaactttaacgaacaattcaaatgacacaaataatacaattgaaccagaacctaaccacctcaagattaagatcattgatctaagatcaactaagtgatatttgttgggttttatgc

SEQ ID NO: 367754 - DNA, 441 bp, Cannabis indica
gtaataaacattatgtggattagatctgtattagttatgttattttctcatgtttgttctgctttgttttagcttgtaactgagaagtatatttcatttgctttagcttgggttaacataccgctcgatgaataaaaaacttatcatccatttccctccatttgtgccttgaatttgtgtgttgaaaatgccaagtttaaatgctattttgtctaaatgctagtttaggaggacttctttcaaatatgtgtacttgtgctatgccattatgctttgagtttttagaatgattaacaccttgagagagtttaggcttctagaattggttagtgtacccgttgaggcaaaatcctagctaggtttacaacttggaaatgatctaggcaatttttggacgattgaaccttttaagctaacccgagaagatttacttatcaatag

SEQ ID NO: 367755 - DNA, 687 bp, Cannabis indica
ttttggtttctttgacactcctcaggtgaatcttgatcaaccttccattgatgaacgcaatccgtatcaccttggaactggagacaaccccaattttctcattgtccccttccaattgactggccaagatcatttccagtcatggaagcgcgctgccacgatcaatctagctgccaagaacaaaactccatttatcgaaggtgctcttcctcgtccttctgttaatcatccatatcgatctgcttgggatcaatgcaatagtatggttatggcttggatcttgcaatctgtctcaagtgaaattgcagcgagtatcatgttcaaataatcggctcttgctatgtggaataatctccacgatcgattcaatcaaagtaatgaccctcagatttttcatctcaagacctctctaactcgcatcaaacaaggcgccaattctgtcaccacctattttactcagctgcaatcgctatgggacaaactcagcgagtttcaacctttcacaccatgttcttgtggctgtacttgtggtgcgatgcaaaaaattcaagatccctattctcgtgatcaaatcttacagtttcttacgggtctcaatgactcctatgctggtgctcatgatcaaatcttgatgtttgagccacttcctccgctgtccagggttttttccatgatagttcagcaaga

SEQ ID NO: 367756 - DNA, 554 bp, Cannabis indica
caattgtatacttttgataatcacatagataagattgatttgatttagaaacctacataagaagacttagttgatagtgttacactatcaaaatcaaattgtcatattctagattatatacaaatttgtatttgagttatttaattttctaacaagttgttgactaaaaactaagtcaacaatatggattaatgaaaacatgtcacttatacaagtaaccaaaatagacagaatttgaaagagcaaaacgaaccaaaatttgaaagtttttgccctaaaatttcattaccagggattaaagttgtacatttgggtcgggctttttggcacgacacgaaatcggtacgagcacgagtgacacgagtactgcatgacaccaaagaatatgggcttaggcccaaaacaacatgaataaacatgagtctaagcacgacacaaataatatgggcttaaacacggtacgccacgaaaagcactacacgaaaacacaaatttcttagcacggaagcatgacacgaaaatacaaattttttagcacggaagcacgacataaa

SEQ ID NO: 367757 - DNA, 715 bp, Cannabis indica
tcaaataataatttcgaaaatctatttataaatgaatataaaattttgaaattatataaaatataataaaataattttttgaaaaatatctaatttaagtttttctaaaatgacaaaattttcaacttaaataatatttcaaaatttaattgaataacaaattaagtattttgaactaatcaccttaatttgaaaaatatccctatttaagttgatctaaattaacaaatttttaacttaaaaatatataaaagaatatatgcataagtaatttcctagaaaactctacttaattattaatttcaaaatattcaaatttaagttgatccaaaattaatttgaaaaactaacaacttaaatatattttccatgcaaattcaaataattaagtatccaagagaatctaattagttataacttcttttatttaattaaataaagaaaaatacatctagtttatcttgaatatgtttcattaaattaagtgtgttttcttaaattaatttcaaaataatctgatgaaaaaaatttcatatatttcaaaattaataatgttgctaatcaattttattaggttaaactagtttaattaacctattaaaattcttcaaataaggcaaatgggccttcataattgaagttgttcgtgtgaaggagggttgggtttagtatgtcgtacctgttgggattttatgccctaaataaaacccattac

SEQ ID NO: 367758 - DNA, 487 bp, Cannabis indica
agaatcaggatagggacctgggaaaaagaactaggaccaagacctagtacctgacccagaccggaactttaaccttggacccaactcatgacgcggcaccagaaatggaaccacacaaggatccgagattgggttccgaatcttgagcccaggcttggacaaaacccgtagtcactgtctggatttgggacccagccctggacttgaaccctaacgaggatccgaaaccacacccggacctaaacccagtcccaaacccgaaactggacctgaacccctaccgtgtgacccaaaattggaaccaaaaccggaagttgactgggacttgaactaggacttggacttggaatcataactgaaattggacttagatgcagaaccgtaatcagaccaggacccggactcaaaatcccacctagacccgaattgggagccagacccggatccccaccttaacgtgaactcgggacccgaacccgaacctaaa

SEQ ID NO: 367759 - DNA, 523 bp, Cannabis indica
ctctgccttctgcaagtatatctctgatgaagtgtagccgaacatcaatgtgcttggtcctctcgtgatacatctggttcttgcttaagtgtaaagcactttggctgtcacacgagactgtgatacatctttgatcaatgttcatctccctgctcaagcctttaagccaaattgcttcttttattgcttctgtacaagcaatatattctgcttcagtagttgacaatgcaactatagattggttggctttccagcttatagcacactggtttagggtgaagatgtaaccagtttgtgaccttcgagtgtctgtatctcctgcataatcagagtcgacaaaaccctgcacttcttgcttgagtgacactgacttgtacttgagtcccatgcttgatgttcccctgagatatctcataacccatttaactgcattccagtgtcaagacctggatttcccatgaacctactgatcacacttaagctgtgacaaaggtcaggcctagtacataccataatgtacatt

SEQ ID NO: 367760 - DNA, 514 bp, Cannabis indica
ccttatctcatttctgatggtggcaacgtcgatgttgtgtccgtcaaagagggtgtggtttctctcaaactccaaggtgggtctcatttctttttatctatatttccttcttttcacttaaaatcatattctttttgtctaattcaatcaattacaaggttcactaaaattttatatccaatttcaagagatttgttcttgaattgcaactattgaatgttacattgcagtccaacttggcataaagaatggaggcttctctgttgcgttctgtttaaaaaaaaattacacccaaaatgaaaacaaattagttagatctcaacaaaatgtgaccaaaaaataatttaattaatttagggaaggaagaagacgaaggggagagagaagagaaagggtagggctgagaaagtctttagaagaagaagagaaagggtcgtggctattcaggcgtagtggtgctgctggtgtgtggttggggattggtggttggtggtttctggcagtgagaaaaaga

SEQ ID NO: 367761 - DNA, 1090 bp, Cannabis indica
cactatgttgggaggcgcagtgtgttcctccacctcgggagagatcccggaatcaagtgcgggggccggagtatcagctctccgctgccgtttgggtacttcctcggcaaccatcttgcccttgcgcttgcgaatcagagcaacttcttgctcttcttcactttcttcaacttcctcaggaagagcccattgctcttctttaccttcttcaacttcctcagaaaggccccattgcttttcttgaccttctttagcttcctccggaagcgcctcctcctcatccactaagtcaatagtgtctggaggggcactggaagaagctttcaagggagtggccacctgggaggaagttaaaggaaggggagcgtcaggagtgtgagctccggcaagttcggccaaaatggcatccatggaagtacctgctacaacaaaagaaaaaaggcaagtgttagaatatccatggaaacagtaaacactcgaataaagcaatcaagctagtcctaccctgactctctaattcggccctagcaaagttccgaatcttaacgctggcagcatcgtctccgagatagctgtccgaaggccggaaccagctggaagaaatgtaagccgaagggtctaagggaacgggctccggaggaccagaacccatccgggaccgacctaggaaatctcctaagttggaaaaataataatccttcatatggtctccccaccgggtcgagggcatcctaaacctatggagacgctcatcgaaccctacaggcctaagactggcatattcgccaacggaaggaacgtaatgtactgctaaaggagacttaccagagccggaagtactggcgtcaggagccccggtgttcggcacctgaaccgaaggctttggcctaggagccctcctctcagccgggctcccaatgtgaaggggcttcccaccgatcgcctggcttctcctctcgaccgggctccacacgcgaagtagcctcccggaagccgcctgggccttagaataagccttctcctgggccttccgctagagatagtcctggtgttggaagttattttaccagaaacttagatctactcacaa

SEQ ID NO: 367762 - DNA, 539 bp, Cannabis indica
ttcagctaccatgggatcttgtccaccctcaaactcaggcacttggatccgatgaaagatctgaaaatgatgactctgtccagcggcaggatccatttgttgagcgggaactgctcttaaggcttcaagaagggcgttcatagggaattcagcttgtggaggttggacattagcttgaggggcgtcttctccaaccgttttccttgtcttccttccttttggaggcattttcttaggtcagagagccaaaagctaatcaattagtgaggattggatgctaataatataaatatgcctaatacatataaataccaagatacttattactattattatttaaaataaatctaaactatttggtgacacactctgacgtaattaaacccagtgctaagatactatttttctgtcacgacctaagccctaggctgtggcaaatatataacattcataacttgggtggtcaaaggttacactttgacttttgtaggaagataaagcttataaatgatccttttatttatattacaaaatactaa

SEQ ID NO: 367763 - DNA, 613 bp, Cannabis indica
acatctatgctccagcttgagggggagtgttagaatattagttttatattagctgtaaaagaattagggtaattgatatttcctagatattttgtagtttcctattttattggtagtttcccttttagtctcctagctttgtatatgaatatgtactattctatgaaatatacatataatttgattcactattttctacagtgttgtacgaaatttttttttctattttttaaaatattttatttggattccttgtgaaaaattaagtaatttttgtttttaaggaacttaattccgatgaaaaacgagaaagttatgaattttgaaaaatggagtgcacatgcctcaatcggacgcacaccaggcttcggactaggaagccatgcgtgcgcgtacgcctcggacaggcactatctgatgtcgagccacacgcccacgaggaccctgcagtttccttgcaggaggttgcatccgccgagaaacctcggctgggtgcctttgtccgcgcgcaccctagggtcttttgcagcctctagaggctgcacgtgcagcctccggggcagccaaccccatattgcgattttttgtggtttttcctcaaaaatccaatttt

SEQ ID NO: 367764 - DNA, 499 bp, Cannabis indica
cttagtatgttagtatattgggacggttatttagacattgggaatgtcgggattggccgggaatttagaatttcccaaaataccccattagtactctctatgctattttagtgtggaggggcaaaatggtcattttgccccatttatgttttgtcctttagtggacttagaaaattagaaatttcaaaagctctctctccctctcttttcggccaagcttgggagctgctagggctgggttttcttgcttgattcaagtgattttcagcaagatcaaagtaattctagtggaggtaaaccttgctctagcttcttttcttgtttcttggaaattttggaagaattttatggtttgcatgcttagtttaggttgttgttgttgctgtgattttgttgttgtttacagaggtttaagcatgattatttgagtggattagagctagtttgatgcatgttagttgccttgattcaagcttagaatttttatactcaaaactat

SEQ ID NO: 367765 - DNA, 755 bp, Cannabis indica
taatgtcatttctaggttctacataagattaaattatttcttttatttgcaagaacttgtatacacaaaaatataatgaactttaatgttaaagcatttatcaactttgtgaatcaagggtacaaaatagctaaacaagcatatcgatgattcttgaagcctttctttcttttactattgattacacctttatttacttctttttaatgtttattaccaaaacaaaaatcacaaaatcgtttgcccctattatcattatttattaaatttttgtttctatttttctactaaagtttttgtccataatcacctccctgtggaatcgaccaccctatctatactacaactaccgctagtggaagtcacattttgggcgttacacatcaatttcaaaaggataaaaatgcatcaaattttattcagcatagaatacaacagtcccaatcgcaccaacatgtctggtaaagtccctatccatacagacgtccgcacagggacttagacgtcaaatattatcccaatttttgtcctcctaatgtggcatacttacatggaaaaaatcactaccacatggtagtacaattgattaataagaaggccaagtcagcacctaagcaaacagagacccatgtgttatacccaaaatttggttgtactttagagagtgacacgtgttaatctcatggaatatgaaccaatagatataatgataagtatatcattaaatgcaaaatggaataactcattaaatatag

SEQ ID NO: 367766 - DNA, 599 bp, Cannabis indica
ctatgagcttggagaggaagtatttcccttcacgttatagtagatataagcagaaagattgcataataaatacagagtacactgatcttgggatttggacatcttgccatatctctacaatctgatttccaagttatatggatttctctgatgactcacaatgcgaaagctgaattcgctaagtgttggtcgcgcagggcagatttctgattgctttgatttgagcatgcatatgaggcatcctttttggactatatttagctagcagatactcagagtcgactccacgtgtcaccatcatgtgttgccatgccaaagtgccaaaattgggataacatttgcccccaactctgtacgagaagagaggtttttggcttcgagtttactgaagtgtcctcatcaaaactgctcgtttggcttgatgcaacttgaacccagacgcttgactccttgagtaagttctcgatttcctttatgtttactttgcacatttactttttgaatgcaccttcgactttcctgtagaaatatgtaggaaaccttaagtttagaaactctgtgtgtaacgccctactactaaggcacgctacagtgctttt

SEQ ID NO: 367767 - DNA, 661 bp, Cannabis indica
agatcctggtaaaataaattccaatagtacacgtgtcaggataaaaggaatatggaccgatgcaatcgtttcttatggaaaactcatttattacataagtatcagagtatatttgttacctgctgactgtaaggtcttatgcgaggaatcaatacacaatctattgcttagtatattagcgagaaaccatatctcgttgaatgcgaatagcgagacatcaagtacattatatctagaaagacaaaagcaacactaatcgactgtgaaggcccttagcgtataatgttcaaacaatgtgtgacagtcgggttagcttgagacctagtaagcaaggtgcctatctcactatgggaagacttcttgtaacctcacccatcaaacttctgacattttcttagtgagtcttacaatcctaacgagtcagaagctaatattcaaacgagcctcaaagaactctttgtaaacaagaaccgcgatcatcacaaagaagcagcaagaggcgcatcgtcgacctcagaagagaaaatggccccagcttgctattatgatcactggaagtaagcttctatcgagaaatcctcgggtacaacaattaaagtcgtgtttaaatacacgatcattttgacccggtaaaagcaggaaaatcatagctatatgattt

SEQ ID NO: 367768 - DNA, 1158 bp, Cannabis indica
cacgacacgaaactactaggcttgctttgctggccatatagcctatcctataaaattattaacacgacacgacacgacacgactcatatttttatatggcgtacaacacaatctattttttttttggaccagcactacacacaaatatttacaactctatctcaaaacacatatgtgattatgattttggatatttatggtaaataatgatgtgatttcggactataattagctttttggtgtaatttaaatgttcccaacttgatttatgagttatagataaatgtaaaattagaatatgcttgagggtttggttggttgtacttgtatgcatacatgttacatgcaacacaacacattaggttgatgcataataagatttccatgagtctagctatggctaaatctaaattatgcttgagtagtagtgtgattgttgagactagctcgttaaccacttgaggctagttcaagtggtcatagaagagtgtgtgtgtgttggaggtttttggattcgagtcctaaattatacatggttgtaatatataacgttttaaataaaaaaaaaaaaaaaactaagctcgtttatgatatgagagaataatttgtattgattccacaaggttgcttttggattctcaactctgagatataacctatagtttagtcctagtctttattcatgtattgctaatgctttagctacaccttaaagagaatagttattccttaccagcttttgttccatttagtgaatgatttataatggttaaaacatactatttatttatttatttattttatttttaaaataatagttttatttaaaattagtcaaactatcacattgcgatttgtcactatttaaatcatcttcttctttgtaagatatgtgtctttttaagtcatctatagcatttatttattttatttttaaactaatagttttatttaaaattagtcaaactatcacattgcaatgtatcactatttaactcatcttcttctttgtaagttatgtgtgtctttttaagtgttgcctaatttgtaagaatcccatttatgttgccttactaagtaaaggttcattttccttaaaaaagaaatatggattaatttttttttttatatatatatatttaaatattataataaatt

SEQ ID NO: 367769 - DNA, 602 bp, Cannabis indica
ttttttcttggcttttgtactatatataatatgtattacatttcattggttacaattcaataatacaaaaattttctctttgttcaaacacttttattgttctattcctaataagctactctggtttacaacatttggaagatcataaatagtgcttacgatcaaaaaataccaacaattgggctggtgttttatacatggtagagaatggattgggattttatgtacaagttgtaattaagtttggagtttggttacatggtgtttgagctgtacaaattgtttgtggtgaatataattgtagctgatttaccaaaagaaaaaaattatgccataagtatatatgttttgactcagatttttcattgagactgaaaaatataatttttttttgtagtgatgatagtataaaagaaaaatagtatatgtgcatataaaatatttaccaaaacattacaaaaattagtgattttctcaatcaacatatttatttgaaggctgttaattacaacctcctatctcttagttaacttttatgtttgaaatcacatatgccgaaatattttttttcaaaaaaaatttcattagcgttattcgttata

SEQ ID NO: 367770 - DNA, 576 bp, Cannabis indica
agtcatggtgatccccactaatctacactcaaggttgtgagtgagtgtttatatatatattattctcttgttatatatatacatatattatattacatgtgctgtaatcttctcttctacctttcatatatatatatgtaatatatatagtgtatatatatgtattgtaacatatatttaatcaaatctcttttattgtccttgtattatttttacaattgagttgtatatatcttggtttatcttccattgtaataatatctctaacattaggtatcagtggtgtctagcactttctttacatgttacattgcgattgactagcaatactccctaaaaactattatattaaattatataggacttaatatatagttaaactattatattgagtattatataggatattagacaccactttagtatttctcaatatgacctatatgtatactcgagaaattcgtttgaacctatttatccgtattctcttgactccacatggaaaatgggaaaaatgggtcctattaacattaattattcatagccattaccttccatgtcatttctatttttttt

SEQ ID NO: 367771 - DNA, 766 bp, Cannabis indica
ttcttcaatattttgaagaaatgtcaaaaaatttcgcgtggactaaagaatgcaaggaggcattcaaaaaactaaaagagcacatggccaaaccacgagcattgtcaaaaccagttcacggagaggacttgttattatacttgttggtttttagaacgctgtcagtgcggtcctggtctgggaagaggacaaggtccagcatccggtgtactatgtaagcaagcgcatgataggagccgagacgcggtatcctttaatcgagaaatcagttttttgcctcctgatggcttcgaggaaattgagaccctacttccaggcccatcccattaaggtacttacaaatcatccgcttcggcaagtcttgcagaagcctgaagcctcaggaagactccttaaatgggccatggaattgagccagttcgatatacactacgtcccgcgcatttccataaagggacaagccctggcagacttcataacggaatgtaacgaagcagatgccagctccaatatgtcagccccacgaatgccggcatggaaggtgttcatggatgggcgtcaaatgaaaatggatctggagctgggatagtaatgatatcaccagacggactccggctccaggccgccctgcgcttcacgtttccagcttccaacaatgaagctgaatacgaagcactaatcaggactaagattggccaaagttgtgggcctgcaggtagaagtattcagcgattcacagttagtggtcaaccaggtatcaggggaa

SEQ ID NO: 367772 - DNA, 750 bp, Cannabis indica
caatgcttgcaaagaataggctttcattcatatttgacaatcactgatgtatcatccccatactcattttcaaagtagatcagcccaggaaattcttgttccagtgaaacctctatgaggatttgtagaaaaagaagcttgtccctttcccttgtaacctcatccaccaatattggttttcctaactgacctactatcttaaacagtgatttttggcctcaatatttgagttccaaatcctccaattggatccaaatgggaatggttccaaaatttaattaaatattaaaattaagtggtaactacccaatttaagaatattccattttaagtttaaaatcaacttaaaaaatatcttaagaatcttcaataaccaattcctagaattcctcaacttaattttaaattcaaaagatattcaaattaagttgataagaaaaatcagttaaaaataactaatttataacttaaataggaatatttaatgaaataattaaagtaagtttcaaaaagaatctagttagttaaaattcttcatttaactaaatacaagaaaaatacaaatagtttatccagaaataatatcttaaactaagagtatttttcttaaaattaactttaaaatattaaatgaaaataaatttaatatattttaaaagttaattatgttgctaatcaattttattaggttaaactaatttaattaacataacacagttatccaaatcaggcaaatgggccttcacaatt

SEQ ID NO: 367773 - DNA, 678 bp, Cannabis indica
aataaaataaaaaaataatatcatattaataagcaaaaattaccacaattattttatttaactaataatttaaataaccaattagattaaagataataatactgtaaaatcggcaaaatttcataaattaaaatatcatattgcaataacataaatattacattactagagaaccaacaatacattcatgatgaaagaaattacattaaattaaatcaaacctgaaacacacacttgtaattgattaaattatattagttttgtgagttaccatatttgtcccacaagtgttcgattaatgcatttcgaagctcaatgtgagcttctttatctttaatttttcaatgtctggctaaaattcttgaaaccgagcattatcatcttctaccatctcaacttctggacttggcacttcgacactctcttcaattggtgcatttagatcacgttcatcttatattatcatattatccataataatacatgaagtcattatatcatgtaaaactgttttattccaaagacgtgtcgatccagcaataattgcaaatctagattgcaatactctaaatgcacgtttagcatcttttctacatgcttcttgtttcatttcaaatagtttctttttcggaccacgtggatcatggatagtttgaacaagagtggaccattttggat

SEQ ID NO: 367774 - DNA, 614 bp, Cannabis indica
gtgtttggtgtattgtggtctaataaaaagtgttctaagtcttagtgtaattactttttcaataataaagtaattacgttttcacgtgttgtggtgtccaacaagtggtatcagagccggatcgagttcgttccgaaagagtcctttgttgagtttcttagagtgatcgtgtgtggtttagtactatagagtttgcacgatgggtgaccttcaagtggtcggcggaattaagaaacttaacaaccaaaattacaacacgtggtcgatgcacatggaggcatatctccaaggccaagacttatgggagatcgttggtggcaatgaagtcacacaaccagaggatgcatccgctttaaagaaatggaagattaaagcgggcaaagccatgtttgcgattcggaccacagtcgaagatgagatgttggagcacatcaggccggcgaagacaccgaaggaagcatgggatacttttgcatcgctgttcaccaagaagaatgatacaagattgcagcttctggagaatgagcttctctcaatcaggcagcgcgacatgacgatcaaccaatacttcaccaaggtaaaatctctttgtcgcgaaatctctgcattagact

SEQ ID NO: 367775 - DNA, 743 bp, Cannabis indica
atatcaatgtgtaagtaaactttattgctgattatcatagtatatatccagtacattgataaatcatggaactaaaactttgaagtatataatcacaattactttccactgtgatgacatcactgtaattgtgaaagactatatgttcttgattttctagaaattgtatataaaaccataattataaaactaacatgtaaacttaaatgagttcaaatcttctattgaaaaaaaaaataagattatattaaaataaattttatttaggcataaaattcgaacaaagacgtggttggtcagggctttgacgacttgcttaacttcttttgcttattgcttgatagtttttcttgattgcttcaaaacccttgatagttgacatgccatgtaaggtgacttatcatcatgttgttaaggagttgtattccgcgtgtgtcttcagtcttaaccatgttttacatgccaagacaggtggataaaatttgggataagatatacatagttagatttttatatcagtttcctccctctaagctttagcctcatactttgacggcacaaagtttgatccaaagtcatcactgacacttcaagaaaaagctctcctctatgttgggttttgtgccctaaataaaacccatttaaatatagtcagatttactaattaataaagatcagaaatcacattttatgttgcatggttcatatgatttgtttcatgattatgtttaatgtataaattc

SEQ ID NO: 367776 - DNA, 463 bp, Cannabis indica
ctgtgcgaggagtccaggcagattcgcgagaacactacaacacagtagtcaagctcgcggagaaaaggtcagtaaacgttatatacctattggaggcaccaccccctcgctaggaggtcctcagaatcgaggaggtaccgcacatggatgaaccggatttggatccaagaatcctcgatcataccgccgcagtccaagccgcggaagacaccattgcggtacctaatgatcctgtagataatagcaaagttttaaaaattggttctaagttgaattttcagcagcgagaacaactaacgacctttttgaaacaaaatcttgatgtttttccttggaaacattcagatatggtcggaatatctccacaggtcatgtgtcattgcttgaacattgaccccaaggtgcgaggtgtccgacaaaagtgccgcaaaatggaccccgcgaggtaccaagcgctaaaaga

SEQ ID NO: 367777 - DNA, 524 bp, Cannabis indica
tatcaagaagaaaagctacttactgtttgaagttagggtttggggtgatagacagctcttcggcctgtgaatctttaaatgcagtgaggatctcttcgagaatgtgaagtcagaggaaacttgtagaaataatgtcaaggacagggatggcatgcaaattctagggcaaactcgatactgtttcttagcaaagaagcttaagagtttctcagaaattctaaaatggaggaaataatgcaaaggtggttcctttttcttgttttatactcttgaaatcagtttcgtcggatcagagagatgtttgatcctacagacagaattcaaagtagaagtggaaaagatggtcatttaatgttgatgtacctcaaaattgcaaaatcgcaaaaatcaaaggacatgcattttttcaaaaaggaattatgacaaatataccctttgtaatcattaaaaatcactttttttattaaaaagaactttttaaggggcaattgttatacccgaaattcagctaacacatcagagga

SEQ ID NO: 367778 - DNA, 592 bp, Cannabis indica
atctttgggcacaaattcttcacttgaatcggacaagccctctgaatcacgatcctcctcagttccttcttcaggttcaaaaccgaagatgagacggaagggggattctccttgagatttttagcctttgaagatgaagacaccacttttttccctttggagacatttttgggtagaaccacttcgggcttttgaggagtcgataccttggaccttgttcgagaactcaccgcgggcaaagtcactatcgctttctcgacatttggagcatcattcaaagaagaagacttcgacattgtgtgatcggatgactgagattcatcatgatcaccaaatccaagtgttggagtagcaatcgaagaagcaatgactcgaggagaggcgagattgaaggtcgtttttcgagcttgggtcttcgactttctggcagatttcgtcagagcagaagacgaactaggaactccggtcactggagcaggcggcgtaggtggggtgatcggagatacaaaagcagagccacgagagagcttcttggacggttgagcattctttgtttttgccatttctctttgaaaccctagaacacaaacac

SEQ ID NO: 367779 - DNA, 523 bp, Cannabis indica
aaatgttgattcatgtacacacagggatcatactgatttttagtgaaaccatactagtgataaagctgtcaaacttgatattccattgcttacatggaccttttgagcaagcatacttggtttgtatctccatattcatatccttgtggctattccatatagatttcttcatctaattctccaggaagaaatgttgtcttcacatccatttggtccacctcaaggttatctttggctgctttggcaagcgtgactctaatggatgtctgtttgacaacatgggaaaagatttcattgaaatcaatcccttcaatctgagtaaatccctttgcaaccagcctggccttgtatcttgctggttcaactcttgagattccttcttttaatttcatgattgttaggttatttttagtattaattttaaattaagtttagtatatttttaattgagttttaatcgtgtttggagcatttttacgcttgttatcttttatttgtgcagatttaaaatagaagaagatta

SEQ ID NO: 367780 - DNA, 757 bp, Cannabis indica
taaaattataattagatcggatctgatgcaaacttaaataaccaataataaagtaaaacctctatataagttattaagaaattatacccatatataaaaataattatatcttaataaaatatatataaatttatttacataaaattaataattttgttctaaattataatacatgtataaatattatatttacttaaaaataattttattataatataatattaaaaattgtttattgttattctctctttccttttctcactgtcttttcccttctcacccaaccgaccaccacaaaccacctcaaaattcacaaatcgcatcacagcaccaccaatcatgatccttcctctctctggtacctggccgacgacccgcaacccatgaccaccaccatcgaagggactgaagaacgatctgtttggtaaaaagttgagttgtgtgaaattgtaatttttttgtatatatatggtctgataggtgattaatatggtatgatggtggatacgatagtagtgtaatttgaagatttgagttgaagatctgataataatctgattgtaacgtccccgcttctgattgtaacgtccccgcttcaagcctccattgggcccttacacccacggactaatgactcttatacacgggtacgtcactttggctgcttcttggactgataactgaccctacagaccaacacgagtgtttctagcatgctttgtcctcactcgcacgcttcttgggaaaatttcccagg

SEQ ID NO: 367781 - DNA, 695 bp, Cannabis indica
gtaaatatgcataagcgtcaatcagtgtaaaaatgagaaaaacatcactcttgcctaagaaaacataatataatctttaattttgttagatattagatatatattagctgtaaaagaattagatatttagtagatatttagtctcctagctttgtatataaatatgtattattctatgaaatcgaaacacataattcgaatcactattttctacatggtatcagagccattgtgattcaaaattcgaaattcgaaattagggttctgaaaaaaaaaaaaaaaattagggtttgagtttagggttgtttttcgaaaaccctatttggagtgaaaattttttctcaccgcccacataggaggactgcccagccgccggactgcaaaacccaaaagtccggcgtccagattcaccgcgcgtggggcccacgcgccgtcgttcgccgctgccgaccatcccacgcgccggcgcgtgagggcgcgtccggcgtcttctccggtggcggtcgacgcccgtcccactcctgctccgttctcgtcctccttgcttcggttttcggcggttcttcgcattttgtggtttgatacttttgtcttctttgtgtttgggtatctattcctttgagtttgctctcttcctttttctgttctattttttggtttcgtgtattagtggctagagtataaaatcagtattc

SEQ ID NO: 367782 - DNA, 961 bp, Cannabis indica
tttagttagaagtaataaaatgaaatggaatggaaagaaaataatttcatttcatttttttgatggttgcatattaaagtattacaatgtcattcttctaccattttggaggaatgattattccattttgaaatggaaggaaagattattctaatgcatgatataaatttatttttatgcattttaaattttattctattctattcttattcctattcctattactattctcatttttattcttatggttttatttctctcaaccaaaagctactttaattttttattgaattatgcgcgctaaagtgacagacttgaagtagagaggagggggacaaaatttctgagatgaagctctccaaacaaaaaaaaaaaaaaaaaaaagaaagctttctctagttgtcgatcaatccttattcctaaagcttaatcagtcgtagctagctaactccaatcgttgtgaaaattgaaggtatgatagccccaatctagcaccattgaagctatttatgattttttattaaacttatttgtgttttgtttatattagggattttataattttgtttgttttccttttttttctttccctttttcatgtttctatcaagcaatagtgattgaaatttttggtcgggagaaaatttgtaattgtttgtaaattttgagagtattaatttttagaattattgatctgttcagtttttatattattagtttcattctcttgttgattattgttggagttagagaaattaaattatagggcaatttttaattatatacaagtaaattatttatattacaaaaaatatggagaaaaacataattacacaattttacataattttataaatatttataaataattttatattcacattatataataaaaataagactaattagcaatttttccctccgaactttgacatgtactaaatcatgctccctgaatttt

SEQ ID NO: 367783 - DNA, 553 bp, Cannabis indica
ttgggatatgtgagtaccggggatatcaattttgaaataaaatatttcttttattgggcccggcgattttcgttagaaatgtcacgacatttatggaagaattattttgagaatattctggactaggttataaattttagaatgtcggtttaatggaattagcaaaattataaaaatgcccctagggttgttttttttaaaaaaaattatggaagggggtagattagtcttttggcaacatttaattgggccatttgatttttttttagctgcctattattttaaaagaaaaaaaaaagaaaagaaaaaaaaaaacctatttaatgagatgacttccaagcaaggaattaaaagaaaaagagacaagcctcttcttcttcttctcctccccttcgtgcaagccaagccagccacccttggaggattttcttcagcttccaaccctcatttcagagttggttcttgtcgcaagttagcctaggagaacttgaaggtaagttcccaaccttttttttagattaaaattctaggttttaagttagttttgaagtag

SEQ ID NO: 367784 - DNA, 840 bp, Cannabis indica
aagggccttttctctaatgaattcttcgtcccttttcaatgtaacttgctcctatttataattacatagtaggtcagttaattacaaatttgactaatattttacaacaataattccctaaaattatggaatttgattacatcccacgtaaaataaatgtggttattatttgaaaatcacacagctgtgattggtccgctttttccggatcaatgcaaacgtgtattaattatgttgtaaagtgtatcgttctgggacgtctcgctgggaatatagcaacaataaccctggttgcgagctagagcttttctcatgtctttttcgagattgataatgtaaacctcgtcgtttctgcgcttgaagacataacgctccatctgacaatcgcagttttggtgacaaggtgaacttcagcaatcaacatcatttgaatgttaacttctatctgagagagctaactcaacggagctgtggatctcattgaaagatgtctggagctaattagtgaaggtaccacgagtgtgccttcctatagagagatggatgactcgctattaattgtttggactctttcgactattatacttagtttgtataatgtgtattatacgctaagtgccccaacaatcatcatgtctcgtctatgtctcgtcacgcgtagcaaggttgatgtctcgtctcgcactagtgatgtcgtatggtttctcgtcaatacgtgagttaatatagttcatacatcctagtctcgcttatgactttacaatcactgagttataaatatactctatcaattcaatatttaatgagttattctattttaacatctacaaatataattaa

SEQ ID NO: 367785 - DNA, 559 bp, Cannabis indica
gaaatttcttgtgtgtattgtggtgatgggcatacttttgaaaattgcccttcaaatccagcttcggtttgctatgtgggtaatcaaaacttcaaccgcaacaacaatccatactcaaactcctacaattcggcatggaagcatcatccgaatttttcatggggaggtcaaggggcaagttcaagtggagcacaagcacaaggaaaacaatcatttccactgggtttttctcaacaaccacaccaacatcaaggctctcaaactagttctttggagagcttaatgagaggctatatggctaagaatgacactgtaatgcaatgccaggcagcatctcttgggaatcttgaaattcaattggagcaattggccaatgatttgaagaatagaccacaaggcacttttcctagtgacaccgaaaacccaagaagagatggcaaagaacattgcaaagaggtaaccttgagaagtggaaaaattcttgagtcaaatgtagctgcaacaggcagtaaggggccctcttcaatccaaaagaggggaaatgaagaaaaaccagcaa

SEQ ID NO: 367786 - DNA, 594 bp, Cannabis indica
tttttttctcgattttttttttcagggggggcgactgccccccctcgctacaatgtgggtccgcctatgccctacccgcttagatccttatgtttgaactttgagttcacttttcagttttcatctttgatttttttggtttttttttcctttttaaaagtttgattgctaatttatttatttatttttaaattattcttatttgattatttttttttaaaaaaaaaattattagttaaattaaaattttgtataaaatttgcaatttttctccctgaactttcgacaatattaattttgctccataaaatatacgacttgttaagaatttcccctgaacttttacatttacagaaatttagtccttctgttaggttctgtttcattatttcatttaaatactgacgtatttttgtaaattagtaactttgccccctaaattttgacaactatcaaatcgtaccctcaaaataaaaatgataaaggttcaatattttttttagtaaatcctaaaaaaataatttatatcttaaaaaaaattatatcgaatgattaaaaaattaagaaagaaattaaaaatttaaaactaattaa

SEQ ID NO: 367787 - DNA, 514 bp, Cannabis indica
ttttaggtacacgctgcttacgttttgaaatttctgcatctaacaatgaagccaagtatgaggctttaatcgcaggattgaagctcgctctcgagatgaaaatcgagtatctacaggcttttagcgattcccaaatcgtagtctgccaggtgaacggagaatatctggccagaggcgggaggttggttaagtatttagccattgtatgcaaactgatgcagaaattcaagaaagtaatcgtgtctcgagtaacgcgtgctcgaaattcacacgcagatgcactggcccgtttggtctcaagtagagaagccgaattccttgacataattccggtagatgtattagctcacccaatgattaattaagaagtgattatggaaatagataccaatcaagaagtcacctggatgactccaatagtcgcatatctagaaaagggtatcttacccgatggcaagatggaagcaagaaaactgcgacagtgagctgctcgatatgtcatatacgatggaag

SEQ ID NO: 367788 - DNA, 558 bp, Cannabis indica
tggcacgtttaatatacagtattcaaaatcgaaataaattaatggagaaatgcaacggaataaataaaaaataatcgaaattaatatttgtaaaatgttgtttactaaatttttttggaaatagaatagttgtaatttatcttgtttactttattaagaaaggtaatcggaatgcttaaattgattaaattgcccttttaaattaaactatattatatggtagttattttgtaaaatatatttttaaggataaaattgtcattatatatttaatattaaaaaataaaattaaaataattaaaatttattacccttaatggcattccttacaaaattggtgggagaagttctcccattcttttctcccttatttaattaagttcttcatttcctaattttaattttaataatagtttacgaattggcgacgtttggttgggaggaatgtaaacataagaatcagaataggaatagaaatagaataaaatttaaaatgtatatataaaaaaaataaataaaaaaatcattaaattttttttcttgttacattggaatagt

SEQ ID NO: 367789 - DNA, 758 bp, Cannabis indica
attagaaaaatatcagaggaaaagatgggaaaaaagattaaaatatctctcaaaaagatgatatttaaaatagagaaaattatgtaaaacaataaagctgaaacttcaagcctgaattagactatcttttagttagattttggaaaaagtcaaaacatgaaagttctagatctatcttttgtctttccggaacatcttgaattgtccaattccaaaaaatattgagcaagttatggctaaaatactataagtagtcaacgcagtagacaaattaccatcgaaacgaagccatctggtgaaactccaacacggacagcgacccgcggcccgcccccctaattaacaccataacaatcatatttttgtctcacgtgggttttggtggttccctaattcgaataggtatttaacatgtgcgtattaaaatctttttagtccctcaaaacctatataaagggtgaactagagttgatttaagtcaagcaattttagaggaaaaaaggagtacgaatttcagagacagaagtcaatactggaggcattctgcaaagtgtttttagcattattttattctctatcttcttctctttcttaaagttaatatgtgttattttgcttccatgaacatgtgtaactaaacacttgattagggttagatggatgttgtttgatattgctttacggtattaatatgatttattttcccccagtttcaatgtattctatttcattcgtgcttaattacttttaattgcttg

SEQ ID NO: 367790 - DNA, 797 bp, Cannabis indica
tagttttctaattaaagttttatgctgtttttttgatgtttttttcaggtggaacttcagtattttattgagttaggagcgttgtttgaagatgttatagctttattgtctaaatttccgggggcagttttgtcccatggggcttgctctaagattttagcggcccatggttggcaaagcatgctctgcggttagacgatgagctatcttggttcgaggaggttccagcgccggtggcggacgtgggcgtcgtaaattcatgagtgattttaatcactttgtcaaaaaaaaaaataataataataataataaaaagaataaaaaaaaaaaacgaattttatatacattctcaaaaaataaatgattattaatatatttaatttttttttgaaatatagcacaaattcaatttttatgtcaaattttaaatttccattaatcatagtctaatacaatagctaaagaatataaaattgtacattctttaaaggtaaaatagagcaccactctttgaaggaataaatgtgtatactttttcttaattatcttatattttctccctcttttcatttaacctttgcctatttgtttgtttttatttaattgataaatatgtgtaaagacatgtgttaattcataaattcgttaatattaattgagtaatttgtgacataaatatttaagtttaactcgtagttgcaaataaatatttaaatttaatttttaacagtaataatacatatatttctagaattctaaaaaaatattagacttttaaatgttaagtcattatccac

SEQ ID NO: 367791 - DNA, 733 bp, Cannabis indica
atccggttctgggtcaccatccggtcgaccggttggtacaggtcccccagaactggaattccggttctgtgctgggaacccaaaaatttcccccatgacctcaaatctcaaccaaactttatcaaactctccagtacacctatacaatgcataaacaaccatttccaaccaataattcacagaacaaaccaataaatctcaagttgccattaaagctcaaagcttgagtttcaaaactcaagcttgcttaaaactaacatcaagcatcaaaatcaacaaccagaacctttaatcaatcaatattgagcataaaaactgaaccctaaccatttctaaacctaacagcccctaaaacccaatttcacatattcaacctaaactttagattcaaaaactaggctaggagttgctagagcttaccttgggtttaatttctagttgaattccttgctgaaactcagaaactcagcagcaaatctcccttgtttgcttcagccgaaagaggaaaagagaggaaggtttatgttgattttctatttttcttctattttctctaaatgggaaaagcttaaggaaaaatccattttcccttgctgaatttaacttggctaggtgtcaactaaccaaaaagccacctatctcctattttttttcaaatgacaaaaatacccttaaagttataacttgggtatttctaaagctaggggtaaaatggtcaatttccataaccccg

SEQ ID NO: 367792 - DNA, 592 bp, Cannabis indica
tgtaaaatttgtgctaaatttgggataaaaaataaatttgtgttatatttagcccactatttacaattgtgcttcaatgtacaagatgtaaaataagtaaacaaataatcaattatataaagagtcatttgatattttcttgagaatatacaaaaactattattttttttatttttttattatttaaataatggtaatatggttaataaagaatgtaaagtttagtaaacgtcaataaatcataataattagtggtattatagtaaataaaaatgtagcatttattgtgggtcaaattcggcaaaatactatatcttctgtcaaatttggcataacttttagcatgtgtcaaatttagcacacttttaagaataccattggagcaataatttttgttaagtgtgctaaatataactatacaccacctttatagcactccattggagatgctcttatcctacaggtgtatggtcggccaggattgacctagcaggatacttctatacaacctgatacgtggactgcaagctatctgcaaattgggcccgtaacacccaataaaatagatggaaaatatctatgtttaagggaa

SEQ ID NO: 367793 - DNA, 602 bp, Cannabis indica
aaaaaactttaatcgaccctaaatgaatccatgaaactctagttccaagaaacaaggaactcacacacaaaaaaaaatgcaaagaaaaacctgtaatgaaaatgaatcagtttcaacagatgtcagatcggagaaaacttacccaaaaaaaaaaaaaaaaaaaaacgaagcgcgagctgttctttgatgcggctgagaagagaaatgttcatacacagcttaattagcgcaatggcgaacctttggtgggttcggtggatcttcaacctgatctgacgctaaagttgatgggttttgagtaaaatacaagaatgccaatcccgtagaatatcatgactttagaagggtcattcttaaattttaaagactttggggggctttgattttaaattttggacatgttgtctttaatttaattttattttttagagaagacatattcagaagcattcatacacacataatattttaatttcgtattttagttaaaatacatattatatactactagaaaattctttatttttttaaaaaaaagggtaataatttattattttacaaaaattgatcatgcatctggagaaaaaaaaaactttattttg

SEQ ID NO: 367794 - DNA, 588 bp, Cannabis indica
ttttgcatttccggtgcccggcagtatggaactcggtgtttggctcagtagaatcacaacttagcatgttagtatattgggacagtttattagacattgggaatgtcggggtttggtcgggaatttagaatttcccaaaatacccctttagtactcttttatgttattttagtgtgaatggtcattttgccccattgatattttgtcctttagtggacttagtacattgggatttaatatgttatttgttatatgttggatgaattaattgggaatcctttctttatctcatttattcaaaaattagaaaaaaaatatgaaaaatcaaagaaaagcaaaatttccttttctctcaaactctctccctctttcggcctccttgagcagcaaggaatcttgggatttctctttgtgtttcaagcatattttgtgtataatccaacctctaggttagctcttactctttctctctttgatttcttgaaaattaagaaaagatgatagttgcatgtttagtttttgatctgttgttgctgttgtagttatatgttgttttctgtggttttatatgtttaaattgattggatt

SEQ ID NO: 367795 - DNA, 881 bp, Cannabis indica
aaaaaaataaaacaaaaaaaaactccaatttgttattgctgaattctagtttccctatttgtgtctacaaatctgtttccttattttgtttctcattggtttcccaaaattgtttcataaagcttgtctaattggtttctttttttttctttgtgtcattagcaaagtaaaaaaaaaaattcgaattcatacaaaaaaaaaaaaacaaagaaaaaagatataagttttttttcacatttttttatttagttttttctggttggaaatattttatttatggtaactattgtttgtaatttctataatttttattttttgatgtttattttggttattcaaaagaataaatttacaataatatttatttatttattatttttatgtttcatcccactaatgtaaagtttatttatgtgcagttaaaatactaatgtcccttcaaccttttagagaaaggataacaagttttaaaataaattgcgggacgctgatgatattggattgcaatctgttaccaagattttacaattgtgatttatttttcaatgaagtttccctactctaatgattttaagatcattgttagaagttttgacaagtttgtcatccagattttcaagagtgtccctaatctgtgttgctcatggattagttgtgcatgctcttcggatggatgagcaacttgtttggctagatatgatgatccagttttttgttggatgtatagaagtatcgtgataatcatgacatgtatactatttatttgatgaacatgatcataactagcttgtataatgttattatattttcaatgaaaatatagtagagcttacttttttctatggcataaaaaataatgtaaaaaaatatgagattaaaaa

SEQ ID NO: 367796 - DNA, 510 bp, Cannabis indica
ctgacagcagagccttatttattgttgataatcactatgtgtaaataatagggaaatttgcggcaaaagttcccaaaaagttcatgttgatgcagattagtccccaagttccaaaaatagcggcaatagtacctaagctggactttcgtgtttgtctgttcataccacattcgttagtatgactaacggtacacgtgtacgcataagatttaatcgctttatttttatttatttcttttcaaaattgaaaaaaaataaaatatttttccaaattaaaaatttaaacaatttaattttttaactaaattacaaaataaaattaaaaactgaaactaaaaaactaaaataagaaaaccccatcaccctgaatccaaaatccctaatcacgattctttctcgcgaggtacccaaaaatcgaaaggaggtctctgtaaatcgagagagagcttcaaagattcattcgtggaaggtgaaaatggacggggaaggttcttacagtagttccactcg

SEQ ID NO: 367797 - DNA, 635 bp, Cannabis indica
tttattttcttttttttttttttgtatgtaataggaacatacagtatacagttcagcatacactaacaatattaatggatacatttatctcattatccaaattattcaaaaaaagtccaaacaatgttaaaaataaaaaaatggcatttttaaaaattaaatttcatttcagcctaaaaattaagcatttgggctcagcccaataggacgcgcacccgaccacgcccaacccgactaaacccgacccgatacccgacgcaccagaacacttgaaaatcgggttcggttatgtattttcaaggtcggaagccccaaaacccgaacccgaccgcccaaaaactcaactcgtgtgcacccctagtatttttatggcttcacagtttggtcttattgttcaagatattcaaaatttagttttggtttaatcttttgttgatttgtattttgtgaaacaatctacatataagttggctcattgcttggtaagagactcttgtttctctacaggtcgtgtgcttcaattggaggactgttcatctgaagtgtgttctattgttttgattgaatttattaattaatagatcttatgatttttattcaaaaaaaaatcaagatgtatggcagttaccgatcca

SEQ ID NO: 367798 - DNA, 515 bp, Cannabis indica
ttccaataaattaaagattactaccaatctcatcaacagaataatctagcttattaattccattattactccactttaaatatggaattgcactctttgataatatagaattatatatatttacagaattcttaattgcagtctattgatataatcaatataagtagctcaccctctaattcttagttcataattagagttagtaaaaatattattttacccttctaatcatctcttgattccttatataccattaattcaatgtgaacagtccataacttattatagatttggatccaactgttagcactctcagaattaataactataagggaactaatattcgatccgttaggaaagcttggattccactattgtatagcatgctcatagactctcatgttattaagctcccaagatagaagttgtaagaatcatcttctctgagaaactttaatgagtgaataaaagaactcaatgaacacaaataggagttcatgtatactcaggattca

SEQ ID NO: 367799 - DNA, 594 bp, Cannabis indica
taatatataaacgcttaaatcaaaaaaaaaaaaaagcacttaaaccaaaagcaattgctggagagactgaaatacatctttttcagccactatatatgctaaattaattaataactaataagttaaggctaagctcttttttgtgtttgccgactgtgaatttctgaaagttgagattattattattagggcaatgataatgatattggcgtttgaccaatatatgttctcaatcaaaagcatatacatacagtatatagctgtatattgtccaacattattattattattattattatgagtaatctttggtacaattaattagcatattctatttattttaatttaataattattataaaataatattaatatattatatgtggtatactgggcaagtaataaaatgtacacagaacatttatattagaagagctataatgatatttcctttaaaatagagaagaaaaaatgacgaaaaattaatttcataggtgaattattttaactcaaatttttaaaaatgttacaattattcatttctcaaacaatattttaataatatgtaattcatattttattattatttatttt

SEQ ID NO: 367800 - DNA, 615 bp, Cannabis indica
tcaaagtctagggagcatggtttgtacataaataattattgaaataataatatttaatgaaattagacaaaagtccttaaatctaacaatctcaatagttcaaatggaatttttaaaggcaaaaaaaaattcaaaaaacatgatttgatacatattaaagtttaaggggcaaaatcttaattagccccaaaataatatatataatagataaattattctaattgtaaatactgatattgattataatatagttgtgatattttatagaaatttttacatcaaaaatacaaaatgcaatatttattacactaatatcagtacacaggcttttttactcttcttctttattttattactattttaccacatgcacactcattcaaagcatcggtacacgtgctgactaggggtgttcacaaagtatctgatccaatccaatccgcacgatccaatccaatccaatccgcaaaatgcggatatctgcacttgtgcggattggattggattgaaaaatccaaaatccgcacttgtgcggattggatatgtttgacctcaaaagtaaccgatccaatccaatccgcactaattatacatattttaaaaattataatatat

SEQ ID NO: 367801 - DNA, 406 bp, Cannabis indica
aaaataatttccaacagctgtgcccaatgtcattgtggtactcgcatctcttattggggtccccccgggagctgtctttgtacaggggaggcggtctccggtagtgtgtattttgcctagtagcaaaatatacacgttcttggaagtccgttaacttcgtgtatttggtatactgggtagtatacccctttttctgccgcttgtcctccgtccggttgttgcctttagatgaccttttgctccggaagccttgagaatggctggctaaacttgcggtcagagcggagtgcgttggggcttgtacacttatccccgagggatttacaaaatgggaagatgtgggggccaaggcctggccttgactatatccgggagtagcagaaaattgtatgtcgctcattggtgg

SEQ ID NO: 367802 - DNA, 531 bp, Cannabis indica
aaaaagtgtgaaagtaaaaaaaatttattttagtaacggttaaaagaaattaattaaaattttttataatgattaattatgaagtagtttgacgatatagaataagtatttgtaattttttttttgaaaaaaatattaaaacaaaattttgtgagtttttatgtttaattaaatttctctctaattaaaaaatctctcatttttatattatatgccctcgagttgtttcattggttgaaaataaaggtagcataaaaagatatattttttgatatttttttaattaagtagttaaattaagcatagaaattcaaatttatcttttattatattcgtattaaatcaaaatctaatggtttaatatttttaaaattaatatttataattaaatttgtttaataggcaatattcattgaatagtgttctatatataacaataaaaagatttagtgtgagaaaaaaaaaagatagaaaaaagaaagaaaagaggaaaaaaatgaaaaagaaaaaagagagggaagagaaaaaaaa

SEQ ID NO: 367803 - DNA, 554 bp, Cannabis indica
attggcacgtggggctacaggttgttgtgcatttgctccttgttggttgtactgcctattccttgcataatgagcaagaggcccattacgtataagagtctctatctcatccctcaagtttcgacactcgttggtggtatggccaatgtctttatgatattggcaatacttggatggatctctcttcgcacgacttcctttcaagggttcaggtatccgaaaggccacccgatgttcgtttgccacatatatggtttcttgtgtctccacaagttcggagtatattgtgaacatggactgataacctttgctctttttggcattgttctgatctcctccattgtcgccctttctcttattattgtgcccagagttattggtggctggagggttggcagttgttgcctttggattggtggaagttgctgttgtagtaactgaaataggttgtcctgagggaagaggcaggttgttagctaacctggcttcctcaatgtttatatatttttgggcccttttcataaattcgttcaataagtggggcggacctctcc

SEQ ID NO: 367804 - DNA, 659 bp, Cannabis indica
gctttcagctcctctttctttgccagagggcaatctttcttgaaatgtcccaccatgccacacaaaaagcatgtcttccggttacactctcccggatgatgtttcttgcaccgtggacactcaggataagagtaaccctagcgtccacctctgccttggttcccacggaaccgcttactctgcccgaaccaccagaagcttggataactttccttttctattcagtggtggagtcaccaccatccctaccatagaaaggagtaggaatagtgggggctccaccaacactcggagtcactcggggctcctgaaggaatttcaccgcaccttcggctctcaaagccttttcgaccatttcagcatatgaagttgcttcagtgatagtaatcaccaaatcgtgcctaatcttcacactcaaaccagccaaatatttctctttcttactaaaatcagttggcacgattctcgctgcgagcttggccagacggtcaaactttgtcgtatactcagtaatcgacattccctcagtttgaaccagttcagtgaactctttttgctttgcactgcggacaacttcattgtaatatttggagttaaacaactcctttaactcttcccaggtcataattgtgacgtcccgagtgagggttatcaactcc

SEQ ID NO: 367805 - DNA, 491 bp, Cannabis indica
ttaagaaactttttgaggaaagttctataatgtggctgtaaggacttcacaccaggaagactttgtgaagttgactcaagggaagatgtcggtggctgaatatactctggaatttgaccggttatctaaatttgctggtgatttggtgcctaccgattttaccagaaaacaaaagtatgttcgaggactgaatgctacaatcagtcgagacttgaaaattaccacatcccatgacactctgtataagagagtggtagacttggccttaattgctgaagaggccgagcagcaagtgatgaaagagcaggctgtaaaggatgccgccatggcatcaaaccctcctgctggtggtaatttcagtaaggggatcgacagtagcaaccctgagcacaagcggaaggctgaggcttccggagcttcaggaggaaatagaaaagttttggggaaacagaggtggtcgtcaaggcggcgggtcctcattctggtcatac

SEQ ID NO: 367806 - DNA, 1060 bp, Cannabis indica
ataatggatgaatgatggatctttattgaataggaatagtcagtagtacacaatagattgagcccaagattacaactcaacacagtaagtaattacaaagaaatgcctcacattgagggaaatcacttcaagagtgatactccctttttacatccctccacacacactcactatgatcttggactctctctctctaaactgaatctaaagtatgagcattggagattagagatcagaactctcccctcagatctcttttttgtgaatagagaaacccctatatatagttgctggtgggtcccctttaagttggtattaaagccaactgttataaattgcagcagctttcttcagattcatctgatgagcaaatagatggacatactgacttgagaggttaagtgagtttaatcccaaaaattccacctgattagactcacttaatctctgatccaaagaaataaatgaggacattaaatatcctgacttgagaggttaagtgagtttaatcctaacattatcttttgcaatagataatttgatgatggaatgaattatgcaaattacaaagttagtgggcaattcatctcaattgattgtaaatatgaagaactaatacacaagctgaaagaagtgttggaatacaaccaacaaaaacacactgacctgcaactgaaatgccaagtgaaaaaagaataccgaccgttgaagataaaagactatcaaagcatatacttctacatacaactaaaacttaaggaacctgacttcagaaggttttcattgtgtgtgaacgtacaacaacacaacaacaaccaataatcaatccttcttggaaataagcaactcattagttgcacaaacaaatgcaatagcaacaatggtagacaatgcaccaccaatagaagaatcaacaacttaacaaaaaaaaaaaaagcaaggcacaatgctggaagatggtaatataatcactactacaaaaagtacatttcccgtcaatttttaattgacatttgttgcccctgatttcgcccaatatacgtggaccaaccggacaggg

SEQ ID NO: 367807 - DNA, 683 bp, Cannabis indica
acttgtctgctgaaaggcgggcgatccaggaggaggccgagcgaagggaggcccttgctaggcgaagcttcaggaggaggccaaacagagggaagcccaggcagaggcgaggctccgagaggagatccaacggagggaggctgagctggaggcgaggcatcgggaggcgctgaaggcggaaggtgaggccgtcgccagggccaggcgtgagcttcgggaggctaaggaggccatggacgaaatggttaccaaggtgaggtccttagaggagttgcaccaggcggacttccagtccaaggctaacttggccgtggagatgaaggagctaaaggacttcagagaccaggccttgaagaaggctaaaagagatgagctcctgtcctctgtctcctgcaagcgctgcggcaagcgtttcgacgacggcgtcgacatggcctggtcgacaaatggccaaagtatcaagcttgacttctatcccaaacctaaggaggttattgctaaatttcgggagaagaagaagaagaaacttgatgccatgcttgaggcgcgtctggggcctcgccttcctcctcgtattgactaggccgattgagttcaacccattttaccaagcttatatctctttttttttctttctttttacagctatttttcttttatccaagacaatcttaaatatgtag

SEQ ID NO: 367808 - DNA, 1032 bp, Cannabis indica
atttgtatttacgtcttgtcatgcattcttgtcgtgtttaagctcatatttctcgtgtcgtgtcaagcttaaacacatattgttcttatcgtgtcgtgccagtttgtaacattgtgtggtgtcgtgcctaaacatatattttttcgtgtttggtcgtgctcgtactttttgggctcatatcaatttcaagttatgtacaaaaaatccaacctgtatttataacactagttgggagtactctaaaagtatcttcatcattaacgaagatgctttaaagaatgattaatgatatggatatattgttttacatcttttaataaatatttatcgttaaagtaaaaaagattgccaataaaaaatattattgcattttatttttattattattttgtcttagagtaaaaaaagttaattacttaacatatgttaaataataatagaataaatatcatttttgactctatgttttgtaaaagttgtaaattagaccatttattttgttaaatgataaaatggacattatattttccaaaaattttgtcaaaataaaatttaataagaatatgatctaaatgtgttatgccaaaactatttataatttctatatctatttgtgttaggaattgtcttaaaatttattatattaagaaaaaaagttgtctaaaattaagctcaaggttttatttttattattttaaaaaatacaaggttcattttgtcatttaacaaaacagaaagtccaatcaataatttttgtaaaacacagggtctaaaaaaatatttacctctaataatataatactagagggcttattattgaaacattaattttagaataaaaaaatttaaaaataatgtgcaagagagataaaatattatattttcatgtgatataaatttttttaactcttttaaaaaataaagagtttttcatttttacactttaaaatagtttttttttttttgttatttttattagaattctacacagaaacccttaactagcaactaatggaacaacttaaatcgcaa

SEQ ID NO: 367809 - DNA, 752 bp, Cannabis indica
aggtgagcatgaacaccttatgtagtgttcaacaactatcaacacctaaacaatttttatatccaaaacaagtgggtgttaaggataagtttcttccaatagctagtcgggccaacaaattcttacagaaccttccatgtccattccgacagtaaaagcccctacagtgcatacttttgcgtattttgatcaatcctccatactttcatatccattccattgttccatataacacggttgttgcatcaatggttatggtgaatcgttccatcttcgttaaaagatttgaagaaatccatcaaatcctctttaataacttcccagctagcttcaaagactgcaatactaaaaccatcaggacctagagccttactaccttcacgactaaagaccgtacttttaacttcatcttcttcaaaaggcctttcttgttgtcccgccaagaaatccaaaaatttttaacactcaattccttcaatacttcttcctcttgttttctcaaaagtgtataatatcgataaacgatccatcctccctttcaattcatgaaattgtgtttcttgcctttctcgcattcaacatgtcataaaaaaatctcgagttagcatcaccctctttggcccacttacatttagcttttaatcatgcacttctttcttcagcaaaagctaaaattttccattccttttttgtctttcttttttcctctattaaagcttgattcccgcctcttccaatttatccaattcgac

SEQ ID NO: 367810 - DNA, 601 bp, Cannabis indica
agatctacctcaaacgatgcttttttggtttcgaactcagctcgtcattgttgtatgactagttctgctgcaataatctctgcttcttttgctttaaaagcttcaaaatcctttgtcttgttagtaacagatatggacaaatgatttatagccgccaaattatccttatcacgacgaagaagatccatgataagagattcattaagactaagggcattctcaacaacttgagcagaagtgagagacttttcctgagttttgagcaaatcattgacattgttagtgaaccatgaaacctctgctaagcgacatttgtaatgcccacagagaaaactcaacacgtcaagttgcacacccacgttcgcatgatgtttcgagatgtttgttgttgtcaaaggagaagatatcaaacgaagaatgtctttcatgcattcaatcacaaacctcttggtatgctcattcaagtctgagttggtgattgctgaagctgacagtgccaacactgggtacgatcgaggaataagcaaatctgagggaacaactaatgatggaacatctgtctttgctgagacaatcggttctggtagaatggctggctctg

SEQ ID NO: 367811 - DNA, 539 bp, Cannabis indica
tgaaccaagttgtgtgcttttgaataggtgttatttgtcctgtttttgccgagtttatgtaggtgtgtgtcgagtgttggtggaatgggtgttagagcatcggttgctattttgagttgaaaattttgctatcaaaatgtagagcagaatgagaataagtgggggactgtgtattagcttttttgatgtgttcatgttttgttgtacttttttttaatggaaaccttttttagtgatttctgaggtaattaattaaaaagtaaaagaaactattagctgtatatcataaacttaaaacagtgaatccgctaatgatttacaacattgttaagcactttgacattgtgtgagatttatggttgtgtgtgtatatatatatatattcatattgtacttaatctccccatgtctgaaccaatcaagcgaagagtgtactcagtcaatggtgcatcctaatgattaatttgttagtattgatgatattaactcaataattttttttaacatatatatataatcaacaagctcctggaagtaag

SEQ ID NO: 367812 - DNA, 1017 bp, Cannabis indica
acagggtctgggatgtgttctgatgcaagctgacgaagtcatagcccatgcctctcgccaactgaaggattatgagcagcactacctaactcatgatctagaacttactactgtggtttttgttttaaagatatggcgacattatctttatggtgagaaaggtgagatttacattgttttttaagagtctcaagtacttttcacccagaaagatttaatcatgaggcagtgaaggtggctggaactagttaaggattatgattatgagattctgtgtcaccttggaaaagccattgtggtggctgatgtacagagtagaagaggtcgcaggcaggttttcactactgttatgatatctcctcaacttgcttcagatatggttaatgtaggaattgagttggtagttggaaagttgcacatcttgacactttaatataatttgttagagagaatcagaaagacacagttagaagattcccagctaatcaaggttcgagatgaggtgatggctggtcggcctaaagacttttcaatgtcaaataatagaaagtttacggtataaagctcaagtttgtgttcctagtgtttttgagctcaagaaagaaatcctcggtaaagctcataccacaccttattcactgcatccaggaaccaccaaaacgtatcaggtcctaaaaccctacttctggttgtataggatgaaaagagatgtggtagattacgtgttaaataatgtatcaggacctaaaaccctacttctggtggtatgggatggaaagagatgtggtagattacgtgttcaagtgcttaacctaccagcaaattaaggttgaacatcaaaggtcggcagggttattgcaacgtttaaccctttgcaagtggaagtgggaggacattgtaaagaatatcgtaactggttcacctagaaccactaaaatgtatgatttagtatgggtcataatggaaatattcacaaattagctcactttctgcaagtgaaagttacttatgcagtgg

SEQ ID NO: 367813 - DNA, 750 bp, Cannabis indica
aaactagtgcattaaaacttatcttatttgtacttatcttttcttgttctcacagagatgactttcctgaagtccgcaccggtcctcaactgcaagccaaagactggaacagcgacgacatctcctattgttccccagaagagaaagagcgatgttgtggctacccctgccgcggactcctctaagaagccaactaaggctacgcaggacaaggggaagaaagtcgtgattgatccagctgtccgaactcgcgacttcctagttctgcaggaaaagtggcatacaaggacaaggagcacgaggaatttcgtaaacaagtcgaactcgaagccaggaactccaaggcgaagattgaggaggtgtctcgcgacttagaggtcgagaaggagaatggaaagaagcagtacgaccaggcggtctctgattacatctacacaactctttccaagattccagacttcgacttctcgatccttggggcggaggcagctgagatggctgaggcttttcgagccatgtcgcccacgcaaactcatggaggtggaagaaatcttttcccgaggatgctgatgctgccgacactgaggaagtcctggacgaggctgccagcgaagtcactgatgagtctaccactccaactgcccccattgctcccaatgcttagcttttactttattacttttgccagactttttttttaagcggtacaagggtaccttcggggatctttatttatgttatgacatcttc

SEQ ID NO: 367814 - DNA, 566 bp, Cannabis indica
aatttttgttctggaattttttttgttggatagtttgggaaaaattaagcaattcacttttttacagaacttgatttcgatttaatttgaattagttatgattttttgaagttttgaaaaaagataggggtggtgacacaccccatccgcgtgcggatgcacgtgacacacgggtgtcacccttgttcagacacgggctgtctgaattttcttgcccaggtgctgtctgaaaccccatcctgcgtgcggaaatcctgttgtgcatgatccgtgtgcggcaaaactcggctgtgcactcctgggacgcgtgcagatggtatgcaacgcataacatccgtacaacttcctttttttttttcaattttcttcattttttcatgctttttcatggaattaattttgaattttttgtgtaattttggatttagatttttgtttttcatatttcaaatctaattatcagaattaaatgaattaatatattttttaaaattaattaaagatattagtgaaatttgaatttaaaaataggtaaaaatctattttttgcataattaattatctta

SEQ ID NO: 367815 - DNA, 754 bp, Cannabis indica
ctcgaacccgaacctagaccgggacccaaacccacacaataaccaggacctggacccagaataaggatagggagctgggaaacagaactaggaccaagacctagtacccgacccaaacgcgaacctgaatctatgacctatctcgtgacctgacgagagaaatggaaccacacttggacccgagattgagatccagatcttgacccagggcttggacaaaacacgtaatagtgtctagattacggacccagccctggacccgaaccctgacaaggaacccaacccacaccttgacctaaacccagtcccaaacccaaaagtggactcgaacccgtaccctgtgacccaaaattggaaccaaaactggaagttgaccaggactggaacgaggacttgaacttggaatcataactgaaattggaactagatccagaaccgtaacctgaccaggaccagcaccccaaataagacttagacccgaattgggagccggacacggatcccaacccaaacctggagtcgggacccgaacctgaacctgaactcaaacccaaacatggaactagactagggagaaagaaccagggtcgggacctagagccgcaacccagtctctatcccgaacccaaactccaaaatgggacctgggacctgaaccagaaccagaccgagacccgtcacagtgatctaatccttaactcgagattcgggtaacggggctggaacagaccaatagtcagtgtctagatctggg

SEQ ID NO: 367816 - DNA, 602 bp, Cannabis indica
aacatacctgaaccaaaacttgaggtaagaaaagtataatgtaccacatggtatgacaggttctaaaattatcgattgtctgattaggcaatgataatgtgatgatactatagctatagtatatgggcccacctgattaggtgatgcaatatacttggcaacgtgccgagagtaggtatagacatcagtgacatatgatgagtactgagcgtaagtacgggttcacctgattaggtgatgcgatatagttggcgacgtaccgggcgtaagtacgaccatcaatatcatatgatgagtaccgagcataggtacgggctcacctgattaggtgatgcgatatacttagcgatgtatcgggtgtaggtacatgcgtcattgacatatgatgagtaccgagcgtaggtacgatctcacctaatttaattttaaaaaatataattaatcttcattaaaattttataagaaaataaattattaggtgactattaggttataagttaattattatttatttttatttaatttttaaattaagcacaaccattcaatgataatctaatggctaaaaaaaaaaatgtaaccatgatggttacatatttaat

SEQ ID NO: 367817 - DNA, 556 bp, Cannabis indica
aaaaaataataacttaatatttttcttattaatttaaaacttttctcaaaaatatgactcattccgctcaaatctctgacccttgttattttctgtcgtagagtattatcaagatctgagtctggattttttttctctcctttgggttggttaccaccgtcttccttactatgattgagtacttgacttgctatgtgtgggcatagcactctatcactaagggcgaattggttgaagaacaatgaaggagggttcgaatcactatagaatgtgtctctcatctactagttgtttgacagagttagaaactagatttggcaggttgaaagtcttggatgagatgagagtatcatgtcctttctatagtgtttcaaatagagcttaggtttaaattatatagattaaaaaaaaatatatatattgggcaaaattacacactaaggccggccacttagtggaccactctcttgttacaattttgccactttatttcaaccacttatttttctttcaacaatactatattttccaatttcaatcatgtaaatgccaaaac

SEQ ID NO: 367818 - DNA, 633 bp, Cannabis indica
gttttctaccaaaccccgcggtataaatacactgaaataaaacttatattttggctctaaaacatacaacatattgtagagctcatcgcaagcttcgaaacagtatatagaatgtccaaaacggacacctgagtcaaaagttatgacaaaaagacgatttctgatctcttagaaatttctaaaaactataaaactcgaaaatcccaatttttgcactcaccgaaacactaccaaaagttatccaaatcactccaaacttcatagggcgcatatgtaccatccttacgtaacagaaataaaaatcgaccccttaagtgaaaaacgccattatcgttcggactaagctttaaaaagttccaaactcgatttccaactcaaaatcacttcgaattcaacaagaaaatatcggaactagtcccatgactacccgagaacaattctataaggtcggaaccttcataactattctaattcagaaaacccctatacgaaacaaattttttttaaacttaaatcgaaattaaaccataccttaagctttccatttttaaggatttgctatcctgctactaacggagcttagatcgctaagttttggattgaaaatcgaaaaaaatggatataggaggagaa

SEQ ID NO: 367819 - DNA, 935 bp, Cannabis indica
tataaattattataaataaaataacaaaataacttcttctttttttttctataatttaacaattttttttttaatattttcttctctccgctcacccaccctcatcatcacaaatgccatcttcatcaccacccaccattcgccacgattgaatcaacccccagtcagtacaatctattcctcaattctaaatcaacacccaaacaaaaaccaaattcaagtttaaaaaaaaattcagtttcagatttcaatcaagaacaaaaaaaataaagaaataaaatgtaaaggaggaggtctactcttctgctcaaccatggagcccctaccacttctgccataactagaaatatggcaagcggtatcccgatttcgtggcattacctcttgaggtcctaaaatacattctttagagcttccagtccagagagcattctccatatctgaatctccctgaaagactgtaggttcatttatccaaattttctcatgccatgatcccacttggttatcagccatactatactctactggtaataccgaattgagaatacctggcatacgaggtaaaggtaatacaggaaacctttgttgtttcaacctctgaatctcctcatcgtgtcgttgaatcatagcttccatttctgcaaatctttgctccaactcccacgaagcctgtgacgaacgaccatcactcccatcagaagccatccaaagactttcaccttggttgcggggagaactcaaactccattctctccaaccgttactagccctgaccacactatcctgactccccatattgcaccaggtgtccatactataggacaaacctgccaattagtaagtcagtctggtcaggcaacgaccccattacaaactttctaccgcacttatggattctaaggcaatgcactttaaaataattaattaaaatc

SEQ ID NO: 367820 - DNA, 756 bp, Cannabis indica
cctaaacccaaacccaaacccaaatcaaaacccagacagagacctaaactcgaaccgagactaggactcgaacccgaaccaagaccgggacccaaacccacacaataattgggacctggacacagaatcaggatagggacccgggaaatagaactaggaccgagacctagtacccgacctagacccgaacttgaacctaggacccggctcatgacctggcactagaaatggaacaaggctaggacccgggatctggatctggaccaagtacttgggacctagccctggacccgaaccctgacaaggacccgaacccacacccggacatgaacccgtaccctgtgacccaaaattgacaccaaaaatggaagtcgaccgggactggaactaagacttgcactcgaaatcataattgaaatttgacccagatccagaatcgtaagcgaactaggacccgtactccaaataggacctacaccaaaattgggtgtcggaccatcccaacccaaacctggactcgtcacccaaacctgaacctgaactaagacttaaacatggaaccaggctagggagacagaaccagggttaggacctagaactgcaccccagcctcgatcccgaacccaaactctgaaatgggacctaggacctgaaccaaaaccagaccgagacccatgacagtgatcaagatcttgactcgggattcgggtaatagggcctgcaacagaccagtagtcggtgtctagatctgggact

SEQ ID NO: 367821 - DNA, 1196 bp, Cannabis indica
ataccttgtttctttgccaaaaacactggggtttctagtggccctttttgttgtaatagaagcactttcctttttactttgcctttgaatcaccagccgttttattcttattagttgtgttaatagctttaataggcttcttgctattcttccacttcttctttttgctgggtttcgaagtagaggcaatatttgcctcagccttgcccgtaccattagcagtgctagaactaggagctttgtttcctcctttctgtggtcctccaatcaaattctcaaatgtctgaaggttgttgattaactcgtggaagtcaaaagtcaacttgttcatgacataatttgaggtgaagggcagaatagctggagtcaaactattcaagatgaaacttacttgagtttcctgatctataatagctctatgattcacagcttcctgtaaataacttgccatttggagcagatgatcacgcacattctgatgaggtttcatccgtgcattgatatatcaaaaaattactaatatttaatattgaatagtttatatataaatatcaaaaaattctttatttatacacgagtctgtgaattgtagttgtatgaagaattaacatcacttaatcatgaataaatcagtatcaacatattaaagttaagaaatctttaatcaatagttgctagtaaggttcactgatacccattattcggtgtaagtaatttcaattcgaattattgatgtagcatgacatctaagtgaatgtgctatatataatagagattatatatgacaaggaccgatatgaataaagttatctttatcaaaattaccatttactataaagacctaattcatatcataatgatgatcaattatagattggcctaaatcttgagtaatcatgaactcttgttcatgttattagtttctttgattcactcgttaaagtttctcaaagaagatgattcttacaacttctgttttgggaatctaataatgtagatggctaggaacatgatctacaactatggaatcctaatttttgtaatggatcgaatgttggtttcctttaagtattaattctaaaattgaaaatttgtgcacaagataggatctaaattataatttcactagtgattaattgtactaaaggataaaaaagtaattataaaggtaaacagtaatttaaccaaaattaatt

SEQ ID NO: 367822 - DNA, 781 bp, Cannabis indica
attataggttagaatatactaataaaaaaaatgtactaggttaatttactaaatttattaattatttaattcatacatataaggcgtatttaatataatatttacaaatttaaaaaaaagataaagttatcttttaatttaaaatatgacccaatattaaaatatactaaaccttaaaaataaataatacataaatattaaagaaattaacaaatttttaaatctgaccataatttaaaaaattaaaataatcaatttttaaatttaaagctcaaaatatcaaaaaataataataatttattcaataaataaatattattaatttaaaattgatatttaagtttaaatatattaaaaataatattttatttttaaataggggtttgaaaaattgtaaaaagtcgaaatttgggaaagaaatttgggaaaaaaaatcccacaaaaatcgtaatttggggttgctggcagcaaggctgcacgtgcagccatgagattttggaaatttcccatggacgtgcgccgaagcggaatctggaggttctccgctgagtttcgtcgacacctgcagggtgctgtatgggcgagctgcagccaggcgtgagacgctcgtgtctaagcgagtactgaccgaggaattcagacaaaaggttgtctgatccgcgcggatcaccttttctgaagccctgcgcgcgcggtgctcgagtgctcgacactcaatgcaccaaaattttcaaaacaccataactctctcattttttatcggaattgagttctataaaaa

SEQ ID NO: 367823 - DNA, 893 bp, Cannabis indica
ttaaatttctctcttttgggccttgtgtgagagttaggggccattagtaatgggtatgacatactgaacccagccctcctgaacatgaacaaccccaactatgaaggctcatttgtcttatttaaataattgtataaggctaattatactagtttaacctgattaaaatttaattagtaacataattatttttcattggattattttaaaatttatttaaaaaaaaaaaacacacttagtttaaagaaaagattctagatacgaatttcaagtaagtaatttatattttctaatatttaattaatagaaaaatatatttaagtggaaaattaatttgtttggtaattaattttagaccaacttaaattagaatatttttcttagaacttaaaaatagaattaataaataagttgattttaatcaagatacttaattatttatttctatttcaaggaatttaattaatttaatagaaaatataattgagttgaaaattaatttattaattaattttagtactaacatagattagaatatttttcttacatattgaattaaaaattaataattgagttaattttattctaagaaatttaaatatttatttctattttaataaatttaatttaaatagaaaattaatatctaagctagaaatttttcaattttagatcaacttaaattagaataatttttagagtatattttattttattttaataataatttcccacataaattttgaaatacatttattaaatgtagatattttttaaatttgcaattttaaaaattagattaaagttgaaaaccaattttaattaattttgggtcaacttaaatctagtaattttcattaatgatttattaaaataaatagaaaaaatatatt

SEQ ID NO: 367824 - DNA, 786 bp, Cannabis indica
gttatctagggtgaaagtctgcaggactcaggtactaagataacaccatgacaatgttggcctaaggtgaaagtcagctggactaaggtactaaggcaacatagaaattttaaggggcgaagagtccaaatgaccgaggtattagttcaacatctttatcaaagtgacatttgaaatggaggaaccatatgcgagtatgcggttagcttgcaagctataccttgaggggtattcctctaagagggaagttcttctcaagttgaagtgggggagcccactaattcatatgtttgaagaatcagggtgtaaggttcattgttttgacatattatattaatagtgagtccagtcttatctgtggttttaatctgttataactgcataccagttttctattaaagtccacgtgagtctgttatgttttaactattggtttaaattgttcttaggccggttgaactattgtctatagatagctagtttcattctgtaaaccagtcaactagctaatttataattttggttagttcagatatatcatgtggtatcttgtatagttcgttgctatttttcaagtctgattgcatagcttggtgatggatatccatagtagaaagatgagagcctggtgttgctgagtttagactgaagggagtttagtgttatcttcgtcgccatatctgaagggatttcagattgaagaaaagtgtcgaagaagaacttagctgctgcacagggaatcttgtgcgtacaaccgagaatctttgttgttgttggtaatacatt

SEQ ID NO: 367825 - DNA, 620 bp, Cannabis indica
aatgaagcaatttttattttattcttatttcgatatttcttattctagttatattttcatttattttaatcaaactccacttaatgaagtgtttgttatatgaatttggagagaatagagttagaaggaatagacttgaagggaatatgaaacacaaagtattggaaggagataatattactgccattttaatttaaaaagtaggacccacttaaaataaaaatccttcattttcaaaatttaatttagtttgataatctcattttttttttttttttttcttaatattaattagttttccgagatgtgtttataatagtgtaatatatatattaacagtattattattatttagtatactcatgtaacactttataattagttagcgattattatattagagcaatttgcggtaaaatctctttatatattaatttttatacacttaaccctcttaatttttttatggtaaaatccctttatattttaatttttacacactttaacctctttattctttttttttttggttagcaaaccccttaatttacttttctttgtaaatttaaattttcagtttagatattactattaaatactaacttgatttactattttat

SEQ ID NO: 367826 - DNA, 1083 bp, Cannabis indica
cacactactagacttattgaccatatcgattttatactttggtatttatgattatgaatatcttttggtgagttaaaaataatatgattgtcatagttttatatcaaaggttaaatgagaccgttatgttgagatgctgtcagagaactatcattttaaagtggtcacaaatattttcttgttgttcaacccatgagtcatttttcaaataaaattattttaatatataacaaatatatgtataaaaattaatatagcctaagtgggagaatgttagactttttatttggatttacatcaaattttattaatacttggattgattggatagtttttttgttgtattagcccatattgttggtgatcaatagttaatgggccgtaaagtctaggtgaagcagaagtatggatttttttagttaactaaagcctttgatgagcaggtccactccaactagggttatgtagctaagtctcttccctaactctataaatacatattgtttcatcacaattgtatactttttataatcgaatagataaatgcttctgatttagagataaaggaagaagatttagttgatagtattgcactatcaaattgtggtaattactatggatcaaccaggtacgcatatacctaattattatataatgttattgtgttctacattatatttgatattgtatttattattaatttttttaacatatttatgtaaaaaaattatactgtaattaagtctattgtcgtggctgttgttgtaagtgcttgtgattaatgaagctgattcttcatcataaaaaaaaatcaagtttctaaaatttatgggataatgggatatggaaaaaggcaattggatccaataattgcctcaacacaacaacaagacatgtcaaagaaaaaaaaatcacgtgtcacaaataagaacaaaacaatctccctctttttgcttttcttattattcttatactctaattatattatggaaatttgaatttccacacttaaaacactttataattttttccctaaatgcataattattaaaattggtcatatatgatcactttactaatttc

SEQ ID NO: 367827 - DNA, 653 bp, Cannabis indica
tgtcaacatgggggctaggtgaatccctaggtgcccagattgacttccattttgcacgttcatgtgatttttggggcttgggatttggttgctccatatcttcgtggtacagaatagtgaaagaaagagagttgtaaatgagttattgaagtccaaacttccattccggagttcccaaagtcaacttgacgcagggctagggaccctcccaaatcgactgctacgactcgagactacttaattctgagatgtcatctttcttgtcatttgtcacattgctgtcaatatcaccaggaaaagtttctgggttaaccaaaggtattttctatttttaaaataaaataatatcctaaaaatctgttcaaaattaattaaaaacataaatacgaaattgtatttttgaagtgttaaatataatttaaaactaatatataacaataaaataagaagtatgaatctaacagttaagtgactaaatatagttgataagtatttgaattttatgagcatcacattttttctaaataaaataaataaataaatggttaattattacaaaaagacttttggtataggatttaaatttttgtgattgacttatagatatatatatatatatatatatactagcaaaaactacgtgcgaggcacgt

SEQ ID NO: 367828 - DNA, 524 bp, Cannabis indica
tcgggagtgagccatgaaggccacggcatgaggactagtaaatagccacacaccaaccacggtctcctgagaagaacattttcagcatcaaagcttgttctgaatgagaattgtagtagcccatcctctcgttctttccagctccatccagagatggaagcccaagcattgttcaatgaaccctgtatcgcctttctgccaagtctagtgtgacaaaagagtttccccagaataaccttgcaaggctcattcgggggatccacctcaccgggatgaagatcacaagtgatgtctcaacactgacttggacagactcctcaaataaatcattaagtgttgtatcagccatatctcgataaaagaagatgaaatggaacttagcaccctgtagtcttgtgaacaaactaaatgaaacaatggtaaactcctttatgtagaagaagcttccatacacttccaccggaagttagcacattacatgcacattacatgcataaattcaactttgatcacaataagattat

SEQ ID NO: 367829 - DNA, 537 bp, Cannabis indica
aaaagtgcggattggatcggatgaacacttttcaatccaattagaatctaacttttaacattcaatctaatccaattacaattggattagatttaatcggttcggttcaattagattaaattggattagatgttgcctaccctttagtatatataatttttttaaaatataattaatttatagatatatataaaatatttattaaattataactaactacttgtggaaatataaatcataaattgtatttgggtaaaaaaatacttttaaacaaattaatttaacatactaaaatacatattataacttatatagatgacacctaaatgatttataaaaaaaaaaactaagagacgtcaccaaatttatttttccattatagatatataggttatatatatatatatataaggctaattaggatttttgtccctgaactttaacatgtaccagatcatgcccctgataattgaaaatgccccttgagattgttagatttaaggacttttttctaattttagtaaaaaagtctaaaat

SEQ ID NO: 367830 - DNA, 528 bp, Cannabis indica
aaccagctgctcaatgctatattaaactcaaatgaacctagaaaatcaagccctaagcaaacctaatcctaacagcccctatttcacaaaatcacacacccaaaccaataaaacttaaagaaaataaagaagaaagctacaagggcttaccttggttccaagaaccttgaatcctcactgaatttcagaaaaatactaaagatcaaaaggttctcgcccttggtttggtgctgcacgaagagaaagagaggaagagaagggtttctcttaattttggtatttcttggattttattattttaatttccctaagtggaaaataaaggttaataccttaaccttggctgaagtaaaggcttgctaggtgtcactctaataggcagccaccccatacatcatttaaccaaataaccaaattacccttacacataaaactaaggtatctcaaaagctagaggtaaaatggtcaaatcccataaccccgcttaatcccggtaatttattttctctaaaatatttcccattaaga

SEQ ID NO: 367831 - DNA, 683 bp, Cannabis indica
gtaagagctataagaaaaagaaacttcttccttgttcttaagtcaatacaaataacgaggattaggctattaccgaactgctcggggctgaacctctataaaatttctatgtcttgttattgctttattatatattctcattacgacatatcgtttatcgcttataaagaagactcattgtcgttggctaaaagcgaagtcaacattttggtgctttcattgagagcagaatcacagatcgctctcttcaatattcgacacgatggtacaaactcgtagaggcctgtctgacccagcaagctcacaaacgctggatccgacattgcaagacccagggagttcaaggattccacccgctgtcaatcttggacatacgggaagcgtggtgaatggtgggacaactcctgttactgaaactgcgcctggtgtgcaagagactgggaataacggttccgcacacagccaaggcgttcataacacgactattccaccaggcatcaacgcccaaacgaccatcggagacgcaaccgaattacaaaatctccgcgctgcgctctgactcatgcagggttacgagcaatactctacatcatgatcaggaggaacgtacatgctgcagtaaacctacgcctttgacgaacagaggcgtatgtttgtcgaatggagggacaaagagatggagg

SEQ ID NO: 367832 - DNA, 689 bp, Cannabis indica
gatattacctatttgttacataataaaataataactaaattatatgttaattaaccaccaaaaataggtaaataactgatctttatcccctattttcgtgggttgttgaagcacaattcgtgacttgtagtccttctaggatgtaagctgcacaacaagtgcctcccaagatgtaggctacacaacagtgcctgccaggatgtaggctgcacaacaagtgcttgccagaatgtaggctgcacaataagtgcctgctaggatgtatgctgcagaacaagtgtctgctagcatgtaggttgcacaacaagtgcctgccaacttgggcaactgtgcgctggcctttgtacaactctccttgaaagggtcaggattccttggtcaaataggcctttttgtgtctaacagtcaccctttggccggccagcttgtgctcaaaccaagcaagcttctcctagccgacctatgtacttcccttggttcgcctgactgctatacttagtttgtatattacacgctaagtgttttcccagtcattatgcatcgcttacgtctacccagtcatgacgaggttgacgtgtcgccttgtgcgtgccgtatggtttctcgttaacacgtgagacaccagtttgtatatctttatctcgcaaaaaacctcatagtcaacaagttgcaaatatactctgtcactt

SEQ ID NO: 367833 - DNA, 814 bp, Cannabis indica
caattgatgagcatcatacgaaagactgaatatttgatatgccatgtggctcatgtcgtttaaggagctgccttgtcgtttagaagcaaaggtctcgtacgtagagaggattaggaattttatataaattattattttggtataatttttactacatttatagatttattttatatttttagggtgttcattaaaataacaactaaacaaaataagaaagctacatgcaaataaaagtaaaacaacaaccaaaataaaataaaaaaaaaataaatatacaaataacaaaaaattaaccgtaaaataattagagtgcaacattaaaatacatcaaaatattgtattttatgtaaataaaattttagaaactgttaaaatattaaaattccgtataactgttattgttttttttttaaaaaaagaataatccctatatatatgtacaccgattacttgctatccaaattggaagcaatatggggcatttctatggatgtcttagcatgtcccggttggcatgtcaagcctgggccaagatcccatatttggactcaaaaaagaggaaattacactttatacccattttttgtttcatattttaatttttacttttattttactactctttaatttatacccacttttataagttatattcccattatgtgcattaggaagtctattttaataagttttgtgaggttatatttggtactttaattataaaagaggatatttatcaattaaaattattttagagttatatttagataatgtgtaataaaaagggtagttttcaactttatcccaaaaa

SEQ ID NO: 367834 - DNA, 588 bp, Cannabis indica
ttgattaatgaaaatcaattaatgagtcttacaagcagtatggtctcaatccagataatactatgcgacagaaaggatacaagggttagagatctgagtggaaggagacattattccgctgccaccaatgtaaggttttcttaactttatatgtatttaattatcgttttagaaagttcatatttagggtgttaaacaacatacttgtaagtagatctaagatcctggtaaaatatattcgaacaaaggtaaccctagaaacttttgttatggaattcttcaagtttttacttggtttgagtggtggttttaggttttaagggttgttagggttagagatgtttggggttcgaatttttgggttcaattgagttgaatttagttcctagaagctggttttagtgtttggtttaggttttatggaagtttgagctttaagttcaaagctttgatctctaatggcataatttgatatattaagtttttctatgaaatactggttggaaaatattatttatgcattgtttaggtactctggaaggtttggtggcatttggtggaaaactgagcaagaaatggaaagtttgg

SEQ ID NO: 367835 - DNA, 618 bp, Cannabis indica
agcacatttttgtgttgacaaaagttagtattgcgctggtaaaatataatttccttgtgatgtgttggtaaaagggggttggcaaatcaatgttggtattagaacttttaccagcatcaaatgaaaagcgtttgcaaaaatgactttttccagcgcgtaaatgtgctggtaaaagttagattctagccactataaatgtacgctggtaaaagtttgacctttttactagtgcagtttgtgaatgcactggtaaaagttacttgctacattattacttactacattactagtttagttttgaattgtaaactcttttctgtaatggtgagctaattacaagaatccaatagtggttctatttcttgttctatatgcatttacaatgacaaattaggaattaggttaggtttttgattaattgatgcattgtcctttttctctgcagtgctccgtgtattactgagtagtttttaatgatgctgatgatgatgttgttgtggaagaaattgaaaagctctatatgttgttattccatttgattgaaaagccttaatcaaggtaattctttttcaaggtttttttatcaagaattttgtattaattgatttctatttgtgt

SEQ ID NO: 367836 - DNA, 671 bp, Cannabis indica
atttatattttctaatatttaattatgtagaaaaatatatttaagttttaaaattaatttgttaattaattttagaccaacttaaattagaatattttttcttcgaacttaaatagaattaataattgagatgattttattcaagatacttaattatttgtttctatttcatgaaagttaattaaatagaaaatatttaagttaaaattaattatttaattaattttggaccaacttaaattagaatattttcttaaatattaaattagaattaataattaagttgattttattctagatacttgtttacttctattttaatgaatttaattaaatagaaaattatatttaagttggaaatttttcaatttcaaaccaacttaaataagaataattttcaaaatatatttaattttattttaataatcattcccttaaaattttgaaaatatattttctaaatgtagatattttgaaaatttacaattttcaaaattaggttaaagttaaaaattaattttagaccaacacaaatcaagtaatttttaataatgatttaattaaaataaatagattaaaatatattatattttaataggaaataagtaattagtttatgaaatatctagatagatattttcttagtagactttttggtatttttctagata

SEQ ID NO: 367837 - DNA, 662 bp, Cannabis indica
acagaaaggatacaagggttagagatctaagtggaaggagacattaattctgctgcatcaatgttaaggttttcttaactttatatgtgtttatttcatcgttttagaaagttcatatttagggtgttaaacaacatacttgtgagtagatctaagatcctggtaaaataatttccaacaactggcctcagagccatggtaattgatttgcttgcaagaaatttggactttaaaacgatttgtttgttatttggatggtttcatgttgtattgagtgttatatgatgattgattgatgtttgtgaattttcgtgaaaaataattgaaattttgtttctgaaattatttttattggatagtatggaaaaaattaatcaagtttctttctcacagaactcaatttcgatttaatttgaattaattatgaaaggtgactgtgcaccttcacgcgcgcgcggattcagacagcaacgaccgagcttgctgtctgaatccctcatgcgcccacggaagcttgtctgaagcctccctacgcgcgcgggaatgctgctaattccactgtctgccgaggtttctcggccagtcactccaggttgcgcgcgcggacggtatgcaacgcataccgtccgtacagctcccaaatttttcgtttttcttcgttt

SEQ ID NO: 367838 - DNA, 374 bp, Cannabis indica
taaagatttaattaaaccacaattttttcaaaatttatagattagtgataataagtttataaaagcacacacgtggcgtccctgagggtcagggcgttacacccatacatgtggtagtaatacactctcccaatgcatctggttgtagtacatactccccaaacatctggtcatagtacatacttttaatgcatatggttgtattacatactctcatgcttttggtcgtagtacatactgttggaaatattttacggggttcggtttcaatagtgaagaagagagaggaagagtggcggctaggtttatggtagaaggcactcaggttttctctgaaggaataagatgcatcatctttttcctgaagccatcac

SEQ ID NO: 367839 - DNA, 541 bp, Cannabis indica
attattttatgggtgtaaggacctaacagaggcttgaagcggggacattacaaatagtatcagagccttaacccaaccagaagtgcggtcgacgaggacgtcagaccccgtaggggggtgattgtgacaatcagttgtctcgtgatctgtaaggggaaataccggtacccgatgtgcaatcccacatcgcatggggaaggtcatgtgtgatgattattagactatgtaggtatgggactgcacagttgaagcagggacattacaaaaggtattagagccttcacctagccagaagtgtagtcgacgaggacatcggaccccgtaagagggggtgattgtgacagttagtagtctcgtggtctataaggggaaatatcgggtaagctgtccaatcccagatttcttggggaatgccatgtgtgatgattttgagactgtgtaagtatgggactacatagtttaagaggggttaaatggattaatttgtactacctatatcgacaaagtgcatcttattttttggtagcccatcacgaaagaa

SEQ ID NO: 367840 - DNA, 433 bp, Cannabis indica
aattgcaagtcttgggagcatacacctaagacatttgaagctatttcacctttttgagtacaatattttggtttatcattcataagtactctcactctaatatgagttccatcgagtgctcctaagaaattctaccatatcaaaaacaaagttttttcttattactatttcaaacaaacaaaccatttccacctaaaccattttaattcaagaaatatatattataccttgaaccatttcaacctctcatctgttgaattttcaagaacagattcaggtcttttcaataactctccatatagtcaaatgattgaatgtaacacattatgaaaatatttacaaatagtctcacccgatctcataaatcgaaatctaacgactctgtttttcacatgatgagcaattacatttaaaaatatagccacttgttcat

SEQ ID NO: 367841 - DNA, 904 bp, Cannabis indica
aactttatatgtgtttatttcgtcgttttagaaatttcatatttagggtgttaataaacatatttgtgagtagatgtaagatcctggtaaaataatttccaacattaacatcctaaatatgaatttataaaaaaatgaaatttaatcccatataaagtttgattagttttacattgattacagttgaatataatgactcctcccactcaaatctctaacccttgttcctttctgtcgtagagtattatcaagatctgagcctgattctccttcagttgtttagattcttcacagtcttactatgattgagtactagacttgctatgggtgggcatgcactcaatgctcgaaattttttgtgaagaacactctaagaattcgaaaattagaagaaagaagaggaagaagtcttaagaactctctagttatctgacaagttgtaaaataggttaagagtcattagttggattatgagactatcctattctttttttactaattcacttagggttaggattgaattatacggaatagaaaatgataaaataatagaaaaaaggacttagtcgccggccaagtatgtgggcccactaattatatttttgccattttttaaaccatttatctattattccacaaataccatatttccaaatttaatcctataaatgccaaaactatttatttaataattataattaattatcaaataaaattatcatttatattatttattcactagactctacaaagtctcttaattaacaaataaaccctaaaatccctattcttcacaagtaagccataacttagtgaaaattcagaaataagacatagtctaattttagaattataattgattaattaaaatcaatcacttacaagcagtattgtctcaactagt

SEQ ID NO: 367842 - DNA, 890 bp, Cannabis indica
actgatatatgtaaaacataacttaaaaaaaatctccatattcaacaggaagaagttgtgttttctatgaattaaacatacaaaatttcattgtctgagactctaatgcattggatgttaagcccattggccgtgtcagtgagccacaagctcaactacgacctcatcccggactatccttaggacgttcatggcctaggccatgggccatggacttaagaaaggccatggacttaagaaatatatatatatatatatattaatcacagatctaattatatttttaaaagtgttttaatattataaattttaaattatatttaatagaacctttgctaaatcaaagaagaagaagatgataatgagatgagcaaaagcactaacttgaagtcattgttggagattgtacagaaggttatgatcttccaagaatatactatttctctaaagtattttccctaatggggaaggaaagaatataggaactctagtgtttcttgaggaccactacctatttataggttcattatataataaattttgggtatttataatttgatccctcaataaattacaaattaacttattgtatctacacattattttcatgacaatttagtactattttgatacccataacataattggtcacttaaatttgtatcacactttataatagcatgtacattatacatatgtgcccacaataggattttaattcaacaagctcccaactgggcaacatatattaccttataaatgtataactttatgagctcaaaatttgttattatgtaaaggtattcactacaatctcgtccatcaactatacccatgtagaatcaaagtagttttcgtcatatcagtcatgactaaacccatcaatggtc

SEQ ID NO: 367843 - DNA, 548 bp, Cannabis indica
ggctgactgtgatcaccaagatattaaatttcatgtgcgtcaccgggaatgatagagtggtctgtgcaacttttcagtttcaagaagatgcgttagtatggtgggacatggtgtccatgatacatgatgttactacgatgacctgggaaaagttccaggaacttttcaatgccaagtacaataatgaggccgtccgaagtgccaagagaaaagaattcacccacttgactcagaaagagaatatgagtgttactgaatacacgacccagtttgatcgtctggcgaggtgggcctcgggtatagtgccaacagatttcagtaaaaaggaaaagtatctggatggattgaatgggaagattacacatgacctaaggattactaccaacgacaaaaccacctatgctgaaatggtggaaaaggcactacgagctgagggcacagttggatgcatgtcagagtctgctaggactctagtggttggcagggttcttacccctcttgcatcaggctttagcaggggaggtagtggtttgtgttgggttttatgc

SEQ ID NO: 367844 - DNA, 898 bp, Cannabis indica
gggttctggtctaggttttgtttcgagtttgggtccaagtgtgggtcttggtctgatttcaggtccgggtctggatcactgtcagggtctgggtccgggtccaggtctctgtttgggtccgagtctgggtacaggtctgggtttgggtcccctgtttgggtccaggttcgggtctgggtccaggtccaggcctgggtccaagtccctagttccgagctcgatctgtatgtgggtccgtgtcccgagttttgatcccattttgggtttgggtccagattcgagtctagttaagcgtctggctctaagttcggttcccgggttcgagtatgatgtcgggttagggttcgagtctgggtcctagttcagtctgggtctaggtctaggttctggtctggttttggttcggggcagggtccgagtctaggttcgagtttgggtccctggtctatgtctcggttcgggtcttggtcgcggtcgcattctagggtccttgtacgttctctggtccgtgtctaattctcaaatcatggggtatggattcaattttagatttgggttcgagttcgggtcctggtctgggtgtgagtcttggtgtgggtccgagttcgggtcgcaaagccaaacaccgactacgggtccggtccaagccctaggtccagatcatgaacccaaacttgggtccttatctcgttctagtttaggtgccaggtcccaatctaggtcctaggtctaggttgttgtttgggtctgggtcgagtttctagtcctggtctgagttcgggtctaggtctggatcccagtctaggtctgggtccaagtttaggtttgggtttgggtccaggtctaagtatgggtccaggtgtgggtctgaatctcgcgtttcgatcccagtcttggt

SEQ ID NO: 367845 - DNA, 692 bp, Cannabis indica
tatttttagaaaaattaggtctagagttagaattttctccctgtcctttatatttatttggtttgcctttgtttagaaaatagcaatctctcttgaaatgccctggcttgccacagttgtagcatcccgtaggatcaggtggttcttttgagtttgatcttcccttgttgtgactctttcctttgtggtgatctctgctgtgacttttacttttgtagtgtccatgttttctttgattgggtctccctctactgaagtttacttctccattagaacctccatgcttctcattcttgatctccaagtcttttgacttcaaggctgaaatcacttcttctaaagtaatttctgtcctaccatatttaatggcattcttcacttctttgtaggattcgggtaatgagtttaagatgatgatggcttggttctcatcacttaatgcctcattttcaccagaattagccaattcaatatgtaaccttagaaattcatctaggttttcatcaagagtcttgctagtgctcatcttgaaaccaaagatcctttctttaagaaagatcttgttgattaaagatttcttttgaaactgatcttcaagctttttccatatttttgctggtgtatcttctttgtcaactaacctgataaaagcataaaacaaattaaaaaactgattaaaccagtaccagttt

SEQ ID NO: 367846 - DNA, 537 bp, Cannabis indica
tgtaacataacgaaacgggcctggggggcgggaccataataattgtctccacttagaaaataaacagctaaataattaagattgtctcaaagaaaagaaaaataggctgtaaataataataagaaaaagaagagatatgataacaaagaaatgggttggactcagcagcctaatcaatgcgaggaggaagacgagggccccgacgtgcttcaagcatagcatcaagccttttcttcttctcccggaatttggcaagagcctcttcaagcttgggatagaagtcaagcttaatactttgaccatttgactgccaggccatgtagacaccatcgtcgaagcgcttaacgcagtgcttgcaggagacgggggtcaagagctcatctcttttagccttcttcaaggcctggtctctgaagtccctcagctccttcaactccactgtcaagttggccttagattgtaagtccgcctggtgcaactcctctaaggatttcaccttggcatccatttcatccatggcttccctggcctcccgaa

SEQ ID NO: 367847 - DNA, 694 bp, Cannabis indica
cgtgtgatcaatgctgaatgcaaggatcgtgggattaaggctgagtacactgatagtgggatcatgtgtatgctatatccacgtaagttgatccctgagttgtagggattgagctgatgactcatgatgcgaaagctgaattcgctaagtgttgattgccctacacggatcgctgaatatcttattctggatgttccagtgaggcatcctgctcggtctatcttcccgagaagatgctcaaagtggactccacgtgtcaccattctcgtgatgccacatcagggtgcaaaatttgggttaacaataagttttgatataaagttgttaagtatgtttaagcatgtgcggtaatgcttattagcattaatctttgttggaaaagattttaaccatgagaaaaaaaaaggtcgcgagtgtactgggggcatctagtaagaataactgcgagcttattaggcttggagctggtagtgtgggtatgaatcttccactaccataagattatgaacaaatgaatgccatgaagtaagagattacctgagtggcaaggtattagaacttacatagtttatcccatgcagcgtggcgatggagaatgactctaagctggacagaatggaaaagttttgttttaaagaagtggttgctaaggccgctaggaaggctaaatccaattgtgttgggttttatgccc

SEQ ID NO: 367848 - DNA, 724 bp, Cannabis indica
gatccgaagtttacttctgaattcagcagagtttacagcgggatatgggtaccaaactgaaattcaatacaactttccatcctcagactgatggacagtccgaaaggacaattcagatactggaacatatgttgcgagcctctgttatggatttcgagggctcctggagtaagtacctaccactgatagagttctcgtataataacagttatcaaagtacaatagggatggctccctatgaattgttatatggcagaaaatgtagatctcccattcactgggatgagacaggggagaagaaatacttaggtccagaatcagtacaacggactaatgaagcaatcaagaagattaaagccagaatgcttgcctctcatagtaggcaaaagagttatgcagatccgaaacgcaggaatgtggagtttcaagtaggggatcatgtgttcctacgggtgtctccaatgaaggggatcaaacgttttgggaaaagaggcagattatgccctagatttacgggacctttcgagattctcgagaatgttggacaagtggcatatcgtttagctttgcctccagctctttcagcagttcacaacgtattccatgtttctatgttacgaaaataccttacagactctgctcatatactaagttatgaaaatcttgagctggaaccagacttatcatgcaaagaacagccagttcagatcctagacagaaagga

SEQ ID NO: 367849 - DNA, 657 bp, Cannabis indica
ataggatttgtataactacatttctaccttaccaaactctttatctgatcaactttctcacctcatcatttcattatttttaattcattccaatttctatctttttctatttatactaatctttagtagtaatttacctccctgtagatacgacaatagcccgtttactaccgtgaccgtagtgtaactaattgggcgacatcaggtacacggtttgctgacacatgtaccctatgtcgtcggttcctataaaggaaccgacgccatagggtcgtccaggatatatcttcagcttcgtcttcttccttcccacttcactcaacagacccagcaaaccagagagaaaagaacccagcaaacccttgccgcaaccacctcctccccaccatatctcccccatttctcaaccatttgagcacattttcttttttaaaatcttccatttacgatacttaataatatacacctaaaaagttttccttttttaccctctttgagtgtcatccgaacccaaatagaaaagtttaggtttaaaatccggccaccattttttgttgagaaatccttgaatcttaacctcctttaaggtataaatatagtttctattcatttttataatgtacattgttttattttgggtttttgtaaattattttt

SEQ ID NO: 367850 - DNA, 666 bp, Cannabis indica
cccaactttatggatacttacagatatatttgtaagaacaattctagggattaccccaaccaaaacactataaataccccctcaaagctcattaaatgggatcgagaatcttgggctgcatatgagcaagaagagtaaatactcaccaagaacattctctgtatttataagggtgacattctctcaagtgtagaatctgtattaaatacatccattaataacaaagactcgtggactaaggctcattaacgccccaaccacgtaaaaatccttctctcactttcttacagctcaatattataatcatattttattagttgccgaaaacctcggtcaacaataataataataataataataataataataataataataataataataataataataataatgttttaatttagtttattgtaattacaaatatatcaaaacttatttcatataatattttttatatatatttttaattttttttttcaaaatataaatttatatacatttgataatgataatttatagagattttatattatattttatcaaatagtttaaaaaattagaaactataagaaaatttgtaaattcatgtagttttgttaatattaaaataaaatataattttttaagaaaaaataagaaatttaattattatttatt

SEQ ID NO: 367851 - DNA, 802 bp, Cannabis indica
  modified_base (52)..(52): a, c, t, g, unknown or other
gtgactgttacactcagtgtcattctaccagaaatcattattagtgcttaanaatttttaaaatagggggtagaaagaattcaacacttgtgttagttcagtatgctgattatttatatctctaatacaaatttgattaatttgttattaaagaactctcatggtcatacaaaagatgaaatgtcttagagctatttgctattaaagataagaatgttgttgagaatgaagcagttgaccagccaagcaagaaaaagaataaattgtttgtttagatgtctaactaaatagtctctcttgcattatcatttaatactagattgggtgagccttaagaaaataaaaatcatttaacactttatttaaaaaatatatagtatttttgaaaattactgaaaaatatatatatattttaaaggaaaaatatttttttaaactcttgggttgagtagaccctaggcgcggacttagtccgctttagcccaagcccaaccttgtatcttacaaattttaacaaggtattagaggaaaaacaaaataaatctctaacaattgtctaattcaaaaaaaaaaaaaaaatcaaaacatatttttgtaaataaaaattttaagatcttaaaattataaataaaacataattttttttttaaatatttctcaaagttttatttgatatgatatgatatgtcattttttaacaaaaaaaaaaaatatgagtgttttaatgatttttctttttccaaaaaggtaatttgaaatagcagtccctaatatctagtgatacttgctataagatccttaa

SEQ ID NO: 367852 - DNA, 702 bp, Cannabis indica
taataaatatataatgaagattaaaatgtggcatattatatattaatatgagattaatatatattatgtgttggaggttgtattatatcatatatagtataataatacacataaaaattataacatatgaggagttacaaatctgaaaatagattgtaacctaaggatcacaattgataaatatgtaattatgtgagttattacatatgggagttatggaattaatgggataagtttctagctgttagaaactgttacaatactcaattatatcatttaaatgggtattgggacgttggaaaagatttaacttgaagatgatttacattttgagttctctagaaacaattgtttaatagttgtttttatgttgttttatggttgctttcaaacaccaggaaccagatttttaaaaacgttcataaacgtatataaattaattgagcatgtttccagctctcttgtgttgggttttgtgccctaaataaaatccatttcaacataatcagatttactaattaataaagatcagaaatcgcattttatattgcatggtacacatgatttattttatatttaatgtataaattctattaagtccagaacatatgtatttgttcgtgattatagtgttgtcagcacagtggaatataatcatgattatatgttcaaaagtttaataccctgatttgtcagttcact

SEQ ID NO: 367853 - DNA, 632 bp, Cannabis indica
tcgaaaagagctttccaacggtataaagaacatcccaaacgaagtcccgagtcaaaagttatggccaaaacaaaatcaggaaaaacatattttctcactgccaaacacagtcgcgacggccagaaatcccgtcgcgaggactgggttcagaacacgcaaaaactccatttttaaggcctaaacttgcaaacttttcctaaattttgaaccccaaccaaactgagggtaaaaacgcatattaaggctcaaaaatcacaactcaaatgcatctaaactaagattcaaacaacaaacaacataagctccaaacaagagcaggattctccaagaacccaacctcaagagcttaaaagcttcaccaaaattctcagcccacaataaaaacaaattcacagctaaacttacaatataacaaataggatcattagcaaataatagatgctcaaataatgcatttcattcatcaaaatcccatagcaaaagccaaaaattcagattgcataaatgactcaaaaatcatgctcaactcataaaaatctcaagttcaaaaacatgaactcaacccaacacaaacttaataaaaatccagcagcataacaccattttaacatgaaaatccaacctagaaattc

SEQ ID NO: 367854 - DNA, 474 bp, Cannabis indica
cccaaccacgtaaaaaatctccctcttaatttcttatagctctctaaatcattattattttattggttgccgaaaacctcggtcaacattaatttttattgatattgaataaatttattcaactattcatctttataatatcccatctttttattattttatattataataaatatcattgggtgcttatgtggtgtcggtgatattgagattattggaggtcgttataaaaaaagagacatcaaaattatgacagattagtaagtgttgtaattttttatatgtacaatttactttatttatttttgtttttacttattattaaattctgttaatatttatgtatagttcgatcacattaaagattactttataggaaaaattaggtgagatgttcaatccaaatttattatgaatcaaacattatgaattgaacaaaaaaaaaagcaagtgtgagattatgaatcaaatttt

SEQ ID NO: 367855 - DNA, 819 bp, Cannabis indica
ttttttttgtgacgcggtgatcaaaatcacacaagattatcaaagcaacaatccacaatcggcaacggcacctcctcgaaccaggatagctcatcgtctaaccgaagggtatgctttgccaaaccatgcgctgcagaattctcatcccgagccacatgggacaaaactggccccgaaaatttagacaataaagctataacgtcttcaaacagtaccacatcacattgaaaaaacaccttcctattattaactagttgtcttcagagcaaagcaaaactggaaaaattgcaacaccaaaacaaaaaatacacttattagaatgacaatcttcaaaataacaataatatacaaatttaaaaattaacacacacttcataacactagctctcagcattactaaaaaactaataaatcaacaaaatttctaagaataactagccaaaagtattaccctttggctagtaacaacaaactagcactctaatataaaaatgctgaaaaataataacaaacaaattatgtttaaaattaaaattatgtttacctaatttagtaccaaaattgcaaaacaatcaataccattaaaccggataccattaaattaacaccaatgaagaaactttcctacaaaaattttattctaattaatctctaaatcaccttcaaaatctaccaatatcactgatattcaaaattaaagaatatcatactctaaaagaagttaaactttccacaaatagctagacaaattacatgcctcttttaaagctataccataaatataaatacatacaaacatataattatataatatctaat

SEQ ID NO: 367856 - DNA, 697 bp, Cannabis indica
gattgattggttaagcaatgatagtgtggtgatattataaaagtgatattcaggctcacctgattaggtgaggcgatacccctggcgacgtatagatacgagtgtcagtgacatatgagtaccgagcgtaggtacaggctcacctgattaggtgatgcgatactcctggcaacatactaggcgtaggtatggacgtcagtgacatatgagtaccgagcataggtacaggctcacttgataaggtgatgtgatactcttggcaacgtgtagatacgggaatcaatgatatgaaaattactaggttatggcatagaatgaaaccgttgtagagtttcctcctagtgacatgtagatacaacgccaatgatatgaaaattgccaggttatggcatagaatgaaatcgttgtagagtttcttccttgcgacgagtgtatacaggatgagtgatatgaaaattgccaagttattgttaaaatatgttttactaggatctagtgttactaccatgtatgttgtttaacatcctaaatatgaattactatacaatgtaaataaacacatataaagtttcagaaaccttacagtgggtgcagcagaattataatggctcattccgctcagatctctaactcttgtatcgtgtttgtagcagagtatcaccaagatctgagcccaaatctccttctcttgaatttg

SEQ ID NO: 367857 - DNA, 500 bp, Cannabis indica
tgtttttacgttctgctacaccactttgaggtgcaatatcaatacaagtttcatgaagcatgtcattagaggtcatgtaagattgaaattgagcagatgtgtactatttgacattatcacttctcaaagtacgaacagacactaggggtgttcgcggtgcgggtgatgcgatttttgaccattttttcaaaccaactcgcacatgcgatttttcccatttcccaaactgcacccgcaccgcaaaactaaaaaaccgcaaaaatggtgcggtgcggtttttacggtttctgtggtttgaactatcaccaaataattaaactatcacaaatataacaaagtttgagcaacacttgtcaaaaataccataagacttgaaaataaatataaaaaaaatcaacaatacattaattagcgggttttgggttggacattcacatattggacctaaataaatataaaaattggtatttttataatgtgcagtgcggtgcgatttgaac

SEQ ID NO: 367858 - DNA, 1266 bp, Cannabis indica
tattattttgagaataaaataataaataaataataattatcctaaatatatatcaaaatatctcaaattaagcattaatcaaatttctacaaaaatatctaagttatttaaatatttaaaataaaatttataaatttccaataagtaaaatgatataaaaaaatatcatttttaaacttataattaataaacaattaaatattaaacaaaataactaatttttgaatttgaaaatattatggttagaatatctataaaaatatctaggttaatttcaaagttattgattatttaatttgtcatataagataattttaatataatatttcaaataacttttaatttaaaatatgctaaatatcaaaatatgtgatcttataattaaataatatataaaaatattaaagaaattaaccaattttttaaatctgaccataatttaaaaaataaaataatctatttttaaatttaaacctcaaaatatcaaaattaataataatttattaaaaaataaatattattaattgaaaatatgatatttaagttcaaatatatttaaaaataatattttatttaaatttaagatttgaaaattggaaaattggaattttgggaaaatccataaaatggattttatgggtgtgttgctagtagggctgcactcagcccacataggctgcaaaaacaaccttgcgcacgcggatgagggacttttcagggtccctggtgcggcagatgcaggcggatgcagggtgtcacatgggcggacagcagggtcctgggtgtgtgaccatgttcatacaatgggttgtctgaagcccatgcgcgtgcgtgtggctggttgtctgagtgcctggtgcactcgatgcaccaacccaaaacccacggcacccaaatttctaaaattcataactttctcaatttttatcagaatcgagttctatacaaacgtaaattgcttaatttttcacaaggaatccaaataaaatatttttaaaattataaaaaatatttttcatggaaaaaagttctctacaacaaatacattcatcaaatacacataaaccacatgaagccatccaaatcaacacatatcatcattttaatgcatatttcatgaaagtaactcattaacatggctctgaggccagttttgggaaatattttaccaggatctagatttaataccaagtatgtttcattaacatcctaatatgaattactaaaataatgaaataaacacttataaagtttaagaaaccttac

SEQ ID NO: 367859 - DNA, 873 bp, Cannabis indica
gaaaaggacaatcacaatgggtgaatataacttccaatactatgaaggggaagaagtagcttgtatctctaacatagtggctacaccagtgctacttcagcaagttaagcaacgtcagtggcaatatgaaaagctaagacttatttggaaccgaatccacgatggcgagcaactagatgggtggacagttaatagtgaagggtacctataccatatgggaagactagttgttgcagatatccctgatcttagggagaccatttttattgaggcccatagatccaaatttgttgtacatactggaagtacgaagatgtaccaagatttaaagagacaatattgctgggaaggtatgaaaagagatgtggccaactttgtagctaagtgtatagtttgtcaacaaataaaggccgagcattagagaccctcaagtttacttcaacctttgcctataccagaatggaagtgggacaagattaccatggactttgatactgggttgccattgacacctttgaagcatgacagtgtttgggtgattattgatcgtttgactaagtctgctcattttattccaatcagaaaggattataagcttactaagctagctcgactttatgtagacaatatagttcgaccacatggagtgcgttcaagcatttttttgtgatagagatccttgatttacatcaaggttttggaaggccttacaacaaacctcagggactgaacttcacttgagtactgcccatcatccacagacagatggacagtttgagaagaccatacagactttggaagacatgcttcgctcttgtgtttttgattttggaggtgttgggtagaacacttgtcactagtggaattcacata

SEQ ID NO: 367860 - DNA, 529 bp, Cannabis indica
gccactaatttgcaaaatcactactcaaccaaaacttaaaattcaagaactaagagatagagatgctaaagcttaccttggtttgatttcccttgaaattctttgctgaaaacaccaagaatcaacaaccaattcattggtttatggccggtttgaaagagagaaggaggaagagaggttctcttgattttggcatgtttttcttattttctttacttctttctaaatgaaataatggtttaactaaattaaaccttggctgaatattcacttgctaggtgtcaacacctaaggctgccaccactctccactattaaaaaaactaaattaccctttaggttataacctaagcatttctcaaaactaggggtaaaatggtcaaattccctaaccccgcttaaccctagtattttcttctctctaaaatattttccactaataaataaggttataaacttacacatatgatcaaactagccatcaatcgcattttccattgtcgccgagcaaaaattacaaaaataacata

SEQ ID NO: 367861 - DNA, 556 bp, Cannabis indica
aagaaaggattttgatgaaaaaaactttttaaggggaaattgttatacccgaaattcggctggaggacaaatgtcaagataaagagaatgtgaatcggtgccgtatttttttatggaataactcattaattgtgtaagtactagagtatatttgcaacccgctgactgtaaagtcttaggcgaggaattaatgtacgaactgatacttagagtgttaatgagaaaccatatgtggctgaaaaagaataacaaggcaccagagaagaataacatatacctcggctcacaaataagcaaactaagtatataagaagaactagctaggagttcaataatacgagatgaccatctcgccacgagaaaacttcctatagtttcatccaactaacggaagtgagactcacaacccgggcaagttaatagatttccttatatccgcgatcgccgtatgttgtcgatctcggatagaagaatggttctagctcaccattgggatcgctacaatcaagtttttgtcaagacatctccagaatcaaccattaaagacgtgtttaat

SEQ ID NO: 367862 - DNA, 1039 bp, Cannabis indica
ggatttttacccccattaactttaccatgtactaaatcatattccttgaatttttttagctgttaaaaattctccctaaacttttttagctattaaaaatttctcataaactattgagattgttggatttaaagacatttgtccagtttcatttaattttactgattttttggttgtccatgcattaaatcatgctccctagattttgatatctaccaaataatgctcctcgaacttggacatatactaaattaagctcctgaactttcatccatgttagattttccttactaaaattaaaaaaaaaaaaaacttaacaatactcaatagtttaagaagaatttttaataggtcttaaaagctgagatggcataatttattacatgttaaaattcaagaacaaaaatataattaaccattagaatactatatgtacattctcaaactgaaaaataccaaatgaacattataaaaatacagagtactaattatacttttctaaaatacatatgactaaagagtatattcccaattgaattttaatgtaagtgttttgttttgtctatgagaagatagcaagtgttacttactgtctgtgagaacaatcatgtcaatttctattataacacgtatgtgcataaataattaactatagagtttttcacaaaaataaaataaaatattagaaggaattaaagagagtgggaagagaaaaaaggaatgacgaccacctgttatgatttcttaaatcttcattaggatttaattttcttaactatttttaatcttgtcttgtagttgtggagctgtcctagtgtccatggttttttcttgaggtttttacaaaaatattaaattttagataaaatttacaattttactattacaatactgaatcttttaagaaaatactgtcttcttataaaaataactgtaaaacaacactacagaataattaaaacaacagtaaaacatttaaaaaacaactgtaaaacaactgtgaaaacttaacatattacacggtataaaacttacacaa

SEQ ID NO: 367863 - DNA, 543 bp, Cannabis indica
ttataaaacaacatatactcaagacaaccacatattacttttctattaaataagaacactgtggactggattaaattccacaatacagatcttataatcccaactttattatcaaaagagtacgactgcaacactacgttttcactatcttttatatgagactttattaaatcaattgacattttagtatagggtaaataacgccataaatacttaaggtttcaagtttgtaagtgatataattttaatgtttatttttagcggcattagtatctaatgtttgtaaaactgtaatttttctctaatttcgttaatacaaactctgttattttttttaaacagaccatatataaggtccagattcttcatcattcagtctagacagaaacatgtagtatcagttactttcaaatgttcatttaataaatccaaaacggagtttatactgacaaaactagaggaaaattacagttttacatacattgggtacttatgccgctaaaaataaaaattgagtatgcctcttacaaacttaaaactttg

SEQ ID NO: 367864 - DNA, 501 bp, Cannabis indica
aaaagtgcatttcaaataatatcaacaccttgatatacaaatcaagtgtagtgtgtagtatactttccgtaataggatctgacatgttgtattaaacccaacattttctccaccattacatttccttaatcacaaaaactttgataatgtgaaattcctctctatgtgtctactctcttgggataccggattctttactattggcaactacttttatgttagtcaggaagtaacactagtagttaatcaatgttggaacaatgccaaaaatgtatagaactttccttagactgaataagtacctttcctgcaactttaacattcagtctttctctggtagacttagagacttcagataggtttttacacttctccaaaatcactactccacccccggagtaatcaccatctcatcagcagaccttctagcactaaggcaagtctagaaatctgatttggtgtagtctaagagtattaaatacaccctttattgactaacat

SEQ ID NO: 367865 - DNA, 1253 bp, Cannabis indica
ccccctgatcccacccaagacacctacttctggcagcactccacttcaggacactactcggttaggaaaggctaccatgttgctaaacaagccattaacttggctcaaccttcttcctcaaacacggaaaccctcacccgttggtggaaatccctctggagtctcccaatcccccccaaaattagacattttgtttataggttagctcaaaactccatccccactactgacaatctttatcataggcattgtattagttcccctatttgtcctagatgttctctctgttttgagtcagtgcagcatgctttgttcgagtgcaaggaaatgaagaaggcttggtcaggtacgattttcaactctgtccttaaagaaaccaaacacatgaacattttcgatattcttttattaatgcagttaaatttttccaaagatgagtttaacctatttctttgtatgctttggaagtgttggaatgcaagaaatgcaactgttttcaggaaccaagattcaagaccggagaccattgaacaagaagctcttgattatttggaattttatcaagcagcccaagacaagcgtgggaaccacacccagtttacctcagacagaaatcttctggattgggagcctccgccagtgggatttttcaagctcaatacggatgctgcaatctcctctcaccagaatagaacaggagggggagcattagttcgtgatcacacaggaaaagttatagcagcaacagcttttaaccgaattggacaattgcatacggcaagggaatacagcagctcataatttggcacaaatgtccatagggttagataacacttggagttggaatagccaagacccttttccttttctcttgtaacctttgggtcttatcttcaaaaaaaaaaaaatgactgtgacataattaaattggacacactaccttagggccaggtataggtggattaggtgttagactataatatataatacgaaaatacaacatatatgaacaatatgtaataagacgaataaattataaatatatggaaatgtatatgcaatgaaaggatcgaaatacctctagctattgatgtttgagcttcaattcctgcgatagctttggtattagagtttgggcttcttcgctctctcaattctatttagatgaaattttgttgttatgaacagaatgagtgaggagctcggggattaattgtcagaatattttgacaattaattcaggaaatcaaatc

SEQ ID NO: 367866 - DNA, 553 bp, Cannabis indica
acttgagagtgaaattttaacttggagtttagagaatttctggataggtgtgagtgagtttcttaagccctaagaagtattttggatgtgcgaaaacaactcagatgcaccaaggtcggggttcgcaaggtttatgtacgaaaataccgttcttaaaacgaagttggatttgaacgcgtttaagtttctttggagatcaaaggaggttgtgtttaagtttatgggactccaaagatcagttttaacgtgaagaatcggagctttaaggtctgaaatgaaatttgccattttggactccaataataacggtacaccaaagttggagaagatgactccgatctgatgctttggggttgttatcttgggtagttcttgatcgatttgaggtcctaagcactttgggaagcttccccaatcgaaaggacacgtcaagagcaatcagggacaaagttatactttgccggcgacagaactgacatgaacgtcagcgactgcgttctgggaagttttgaggtatttttcccatctttttttgtagatttagattctacat

SEQ ID NO: 367867 - DNA, 687 bp, Cannabis indica
gaagaataagtggttgaaataaagtggcaaaattgtaactagagattggttcctttaagggtcggccttagttgttattttttcccaatattttattgatttttaatccatataattcagccctaagatctggttgaaacactataaaaggaacatgatgctctcatctcatccacttttttgacaatttaactattgccttcaacctaatcaaacctagttttctctgtttgacaactagtagatgagagacaccttcaatagtgatttcaagcctccttcattgttcttcatattcgaaccgataatgatagagtgacatgcccagacatagcaagttaagtaaacaatcatagtgagtaacatggtggtaaccaaaccagaaggagagaaagagatccaagctcagatcatgataatactctgcgacagaaaggaacaaaggttagcgatctgagcggaaggagtcattatatttcgctgcaactaatgtattgttttctaaactcttatgtgtttaatttcattgttttagagatattcatatttaggatgttaattgttagtaaatctagaacctcgtaaaatattcccaacaactggcctttgagaaatggtaatgatttattttcatgtaatatggattcaaaacgatgaatttgtttattgtgttgatttggatgtgtt

SEQ ID NO: 367868 - DNA, 554 bp, Cannabis indica
ttttgtaagtccttctcctaacacgcgcatccttttcaacctcagacttagagtcgaaacactcaacccgctagtcaacctcaggacctctgcctgaccaacctctagatttacatcctcatgaggctatgtggcctcctctacaactctgactctgcccatcttttccaccttggcaacatgaggatcatatagctgcgcactacaacatgattatttcattctgggcatgactacctgtaacatccccgcttcaagccttcattgggcccttacacccacggaataatggctgttatacacgagtatgtcactctagctacttcatggactgatgactgaccctaaagaccaacacaagtatttccagcgtgctttgtcctcactcgcacgcttcctgggaaaacttcccaggaggtcacccatcatgaaattaccctaggtcaatcacgcttaaccatggatgtaacgccctaatctatagggacgccacgtgtgtgattttataaactagtttaatactaatagaataattaattattaaaaaccgtgat

SEQ ID NO: 367869 - DNA, 720 bp, Cannabis indica
aagtactataagactacacgtgaagtgaggacgtcgttacaagttattgattatttaccagtcgtcaaatatatgttaacatgcaaatgaaaccctaattaagatcaatgaatatatagcattcaagtatatcatatcatctatatataaacaagaatataaagattaattaatataataccttcacataataattaacgtttgagattaagcgtaggtgccaactaaactaatcataaataaataaaataaataacaaaaggattaggtatatattaatgctactacactacttcaaggttaattaactcttttaagttttttcttttacctatttttgactaataaaattttagtagagagagtagtaggccgggcaaatcttttttcgattaataacccccacatggggacaagacaggtgtagttaataaaaatctgaaaatgatatatgaagatatataattaattaattaattaatggacgttttcatatgtatatttacattgaatttgttctaattggttacaaacatttaaagcttttaggtttaattaaacccacccattaattaattaattaattaagctcaaacccctctaattaaattacaactgtattctttcaaaaaaaaataataaaataaaattacaaactgtatttgtcatgaataagtcaatagaagtggtcgtggtgtagcaagtggcatagtagtggca

SEQ ID NO: 367870 - DNA, 803 bp, Cannabis indica
attaccaatcccctagtcatcttcacaatctgttttatccctagatgtccccaaatccgctttataaagccttcgaacacagccataggaggattagctccaagaaccatacatatcactgctgaattccagcttgcagcctcttctttaacctcctctagatcaagttgggcaatcttgataccattcttgataatcggttcagtaaatttcaacttgggatccctataaaccaacttctcatctttaaatgacttccaatgacttcttgcagattcttggaagtgaatctggtccgtttcatcagcaatttcatcctccacttcctttgcccagttcgaatgcccctgttcgacgacttggttgatgaacccagaggttttatctgctcgaaaaatctcatcagtcttcaacatctcagctatcttatctagctctgtagtgtctccttcagttgtcttctccgtttctccgtcgtcggcatcatcaatcgggtcaggatccaacccacgagtaactggctttcgaacggtccttcttttcttcgccatggaagagagagaaaggataggtcgaagctatacttattttattttgtttactttaatttttatttttatttttatatttttatttttaagcctatatacttttttataaataataatgtctttattatatccctcaagttaatgtaaattatgtgatagacttaagagcacctccaacactaacaacgtttcagttctagaattattaagcttttacactaaccaatcagaaagaaaaataaaaagaaaaaa

SEQ ID NO: 367871 - DNA, 537 bp, Cannabis indica
caagtgggtctgactccaggctctgaagcacccataattgtggttggacgtctcctcgtcccgaggcagctggtggtaggtcccggagaccaaaggtttggtgtctgccaccaccacgatcttctccagttggtgggcgcaggtcagagtggagtggagctcagccgcctcccacccgttagcatgggacttgtacttttccttagccacagggccctgcatgacctcctccagggtggccagacgtacttcccctttcttggaagatttggaaccgggtgcggaaacagacattttggttctgaaaaaatcgaaaaaatccagcagttaggccccaaactaaaccctaattcaaaaaaaaaactgggaatgggggtcccctaactgctggaaagaggccccctccggacacttgccaaataagaagccccaagaggtttccttggcaagagtcgggtgcaagaatcccaaaggtagtgacattgcagcaaaaaaaaaagagaaaaaagagggaacagagaaaaggccaaaaaaggc

SEQ ID NO: 367872 - DNA, 712 bp, Cannabis indica
ggtctttctcaagccacgtgtagcttgtctttctccaagctatgtttagacggtctttcttaagctatatgaagacggtctttctcgagtttatcgacttcccctctcatcgtttgtttagaaagatgacttaatggtttgcccctagtggtatttttgtaaagacaagtttgtaacccaacttggattttttcttatcttaaatgccttgtactattttcattcgaacttaatacaattgtgtttgcttgcgtctttattcacaatttaaacaactatatttcgatcaaatgtacagtacttttggatttttccattgctcgcaatcttcctatttaagtagttagtgatctaccaaactttttgattttcgagcagttgtcaattctgcctcgctatagcagttatgatctgccttaagcaaacttaaatatactttaataattttaccactttgtatatttttaatttgctcgttatgaatagttatatctatccattttctaggttcaagtacttttatcaaggtgtcgtgatgcctcgtttagtactttcctagctcgcgagaaccgttagtattcagttttatacgcgagttaaaacttttgatttttctttcccgtcagataggttttaaataaaaaattatagttgtttgatcacttcttcgtcaaaaggattgatcagatgttataacaattcaacccctctc

SEQ ID NO: 367873 - DNA, 500 bp, Cannabis indica
attatttttcacagctacatagaaacctctaatttagacgagactactctattttacttttaaaacttattaatttctattgtgtgtgtaattattttgatgcgtataatcattattcattgctaattaaaaagatggattaatttttattttattagtttttaaagtattaatttgtacaaaatatagtaatttttctaactaaaaaaaaagttttattttatgaagtaaaattttaagaaaaaaattagaaaggtatgggacaaaaaaaaaaaaaaacagcataaaatacatatttactctcttatggtaattggttatccatctggtaatcacaagggtacctagttattctttttgaaaataaaatcatatttttccacaaaaattataaaaatccataaaatttattgtttcttaaaaaaaaatagggaaatttacaaaaatactgaaatttgggttaacttttacaaaaatactgtcacacggaaattttttca

SEQ ID NO: 367874 - DNA, 566 bp, Cannabis indica
tactgcctttgcagccacatttgactcaagattttttccacttctcaaggttaccactttgcaatgttctttgccatctcttcttgggttttcggtgtcactaggcaaagtgccttgtggtctattcttcaaattattggctaattgccccaattgaatttcaagattccaaagagaggctctctggctttgaattacagcatcattcttcgccatataatctctcattaagctctccaaagaacttgtttgagagccttgaggttggtgaggttgttaaggtcttggttgttgagaaaaacccggtggaaatgtttgttttccttgtgcttgtgctccacttgaacttgccccttgacctccccatgatgcttccatgccggattgtaggagtttgagtatggattgttgttgcggttgaaattttgattacccacattgcaaaccaaagctggatttgaaggacaattttcaaaagtatacccatcaccacaatacacacacgaaatttatgccctttgaatggcagcagctgggctggttgtacacttcctcccatgttcatg

SEQ ID NO: 367875 - DNA, 550 bp, Cannabis indica
acagaatcttacgcagacctgaagcggagagacattgagttcgaagtgggtgatcatgtgtttcttcgagtgacaccacgaaaaggactctcagtgaagagatttggcaagagagggaaactaagtcccagatatgttggtccatttcagatattggacagagtaggcagtgtagcttatagaatagctttaccgccatcattatctggggtgcacaatgtatttcatgtatctcaactccggaaatatgtgtcagacccatcgcatgttttgagctatgaaacactgggtttgcaggaagacttgtcttacaatgaacgcccggtaaagattcttgatcaaaaagatagaattttgagaaataagacaattaccttggtgaaagtcctatggagaaacagtgtggttgaggaagctacttgggagctagagtctgatatgcgagaacaatatccagaattattagtaaaatttcgggacgaaattttcttttagagggggataattgtaatatccgctaactccgaaagggtatttttgtaattttatt

SEQ ID NO: 367876 - DNA, 592 bp, Cannabis indica
gtcgacaatacaaattaaattcaacatgtaaatataatcgacaatatatcgacaacatgtcgatatgctgtcgacaaattcaatcagacccaatttcacaacatgtcgacaacatatcgacatactgtcgacattaagtcgacaatacaacctaacaataaacaagttgatctaatcgacaaaccatcgacatactgtcgacaagtcgtcgacaatatagggcagaaaatacatttcccccactaatcgacatcctgtcgacatacaacgatatcctatcgacatactaataacagctaaattcaaacagacaccctaaatgtcgacatcctatcgacatcctatcgatatgtcgtcgacaaacactgtacatacatataatttcgccaaaaataatacacagaatcaaaggaatccacagaatgtacatgaacaaagataaatcacaagtaatcaagtaatccacaaaaatctagcaaaattgaacatttaaaatcaattttttttaaaaaaaaaatggtacctttttgactgaagtgggtgtcgattgaggacggtggtgcgtgtcgactggattttgtggtcgttgttt

SEQ ID NO: 367877 - DNA, 564 bp, Cannabis indica
tgtttatggtattaaactatattatattagtccacaatattaattctaacattctcctacttggacaatataatcaaccaccataacattgtctaccacacataaggtaaccaattaagacgtacataatatcatatcgacatgatacatatattatgcatgaattgaccttgaagacatttaatccagttacaatcattaacaatcaaacaaaacaatcaaattccaaatcaaaatgagcaaccatagccatgatgatttgcaaagaatctttagtagagacaagtgagaatgtttctttgaaatcaataccttctctctggctataccctttagcaaaaagtctagccttataccttactatttgcccacttgagtcacgtttaatcttgtaaatccatttgcacccaatgggtctacaacctttcggtaggacaactaaattccaaactttgtttcgcgacatggaacttgactcatctgtcattgcattcaaccataacttagattgaggactcctcatggcttctaataagaaaactggctcagaagcgtctcccacat

SEQ ID NO: 367878 - DNA, 511 bp, Cannabis indica
ctaatgcagatcaaagagggagatgtaaggataaacattattggacaccaacacaagatagtgtattaattgaatgtcttctagagttgagtcaaaattcaacatggcaagctgattctggatttaagaatggatatttgcaacaaatggagattatgttagagaaaaaattactaggctcgaagttgaaggccttgttgggctttatgccctaaataaaactttatttcaatgtaatctctatcagttaaatatcaataaagagacagaagtatttttatcacttatttattgtgtcatttggttcatgttatcatttatgtgtttatttgatttataaattcatacaaatccttatcacatttatgttcttatttattgtgtcgtcagcacagtggaaagtaatcaagattgtgtgattaaatatatatttctagatttatcagcacacagggtttaactgatatgataatctacaacatagtttgcttgcaccttggataagtgctat

SEQ ID NO: 367879 - DNA, 620 bp, Cannabis indica
ttagaataaaaagaatctcatacaaacaaagtggtagacatattcattacttttctttctcctttttatgcttctaatcgagttcgtacaactacttatcattactttttaattatttatttcttttcaaataaagaaaactagtttaatattggtgttgacagtctctttttgtttatttgtttttatttttatttttttatttttttaagtttttttttttaaaaaaaaagaaaagaagaaaattgagaaagtgttatttagatgatattctttgtttttctttttggtaatatactattaagttattgtttaattaatatcaattttaatatatataaatatttttgcaggtattaattattttaacattttgtaaatgattaattaatttaaaatatattttttttaataatttgcgacataaatacttaaatttaacttctaattattaataaatatttaagtttaattttagcgataataatatttaaattataattctgaaacttttgtatgtatctgacagttaaatattaagtaaattaccatgtggcaatccctgattagtcaaagtcattaaattattttttaaaaataatttaaatataccaataaga

SEQ ID NO: 367880 - DNA, 856 bp, Cannabis indica
aattatatggaatgcacaatcaatatctcaatttgatcctcgtacaaatcaatgtgaacttgaagttcaaagaatagttcatttgcgaatatttcaaatcaattaccagatgtattcaccgacccaaagaaaattacaaaatcacatattcttgctgaaaatgctccagttcgaattgatgtcccagaaggacaattagctaatgattctaaagcacgcttgaaatgtggtagaccagtcgattccaaagataaaaatcctcaaaaaagaaaacgagaaaataatcaagatggccctaatgaagaggctgaaaatttcgaggaagatgttgacataaacaaatctcttgtagagatttaggtacctaaaaatattagaaataatgatatctcaataaattatgtcaatacaggaaaagaatgggattgacttgaaataattgtctataatatttttacttataatgtagcgctagaaattgttaatgaaaatgagaatcttgaacctaaagctatcaaagaatgtcaaaatagaaaagattgaccaaaatagaaagaaacaattcaggcagaactgaattcacttgctaaacgcaaagtattttgacctatagtccaaacacctgaaggtgtgaaacccgttgaatacaaatgggtatgtgtacgtaaaagaaatgagaaaaataaagttgtgagacacaaagcaagacttgtagcacaaggtttttctcaaagaccacgtgttgattatgaagaggcatattctcctgtgatggatgcaataacattaagatatttagttaacctgactgtgagtgaaaaactcgatatgcgattaatggatgtagtcacagctt

SEQ ID NO: 367881 - DNA, 597 bp, Cannabis indica
tacagatcttgtgagcgatcttaaaagtcctcctcaagctgataaagaattccaggggaaggttggcatggttgcagatgaacctgggaagaaacttagcgcgatttcttttagagaatctagccaacccaagacccaaacctacgccagaagacctttgcaccatcctctttctggtaattgaggaatttcctgaggctgggaaagagatctcagcttcagggaatgggatcctccgatgatgaggataatgaggtatgtgcagtaaaatcaaggctctctacatgtagccagtctttctcaagcaatgtgtagtcggtctttcttcgagctacgtgtagatggtactttctcgagttcatcggcttcccctctcatccttggtttaggaagatgacttaagggtttgccccttgtggcatttttgtacagacaagtttgtaacccaacttggattttttttttttatcttaatgccttgtactattttcattcgtaacttaatacgaattttgtttacttgcatttttattcacaatgtaaatagctatattttaaatcaaatgtacagtactttgggtttttccattgctcata

SEQ ID NO: 367882 - DNA, 639 bp, Cannabis indica
aaatcaaagtggcaggcagggaaagacataacaaagaaagatagcaaactttggaggcacaagtttaattagttagctagatacatacaatggctttaattaaggttgaaatgacaagagatagagcggtgtgctgtggctggtctttctcttcacttcttcctagagtagctacccaagaatttttaaagggaaaaccaattataaccttcctatatatcgtgattcatgacctccactttctattaagattatgacatcgttgaataaataatttctttttttctttgccatattaagggtctttaaagaatcaaaaataacaagatataatatgggaaacttctacaaatgtagccacttacaaagagtttgatgcacccttaactatttcgatatttgagaaacttttttagtttgattttttcatagtcgtctacgttctagttatttaagatatgttacaaatttttaaatgatttagaaaaatttaacacgagaaaaacaggatttaaacagacgcaagactcttttattttatagcatgtgaaatagattgtttaaaccttattttttgatgtgttaactttttttaaatttcttaaaattttagcaaaatgtcctaaataactacaacat

SEQ ID NO: 367883 - DNA, 731 bp, Cannabis indica
tccaattcaaggtataatgcttagccgtctttagctcaagataagttaattgcatgattttagtgatttgaggttctgtagtgtgcagctagtttgggtttgaattctggggttaagataggtttttttagttgattttgtgctgagatagctagttgtgctacagattactcaaacttgaagttagagagcttaagttggctctctaatggtgtttttaatttctgagctatatatttgatgtgttttgttgcttgaaatagatttagtatagtatatgtaggtgttctagagagtatggtagagtttgggctcgatttgagttgtggggaatatttttggggttccctgcactaaaccggtcgaccggttcaggggagcctgtaacaactggtcgaccggttggtccctaggaatcgatcttccggttgggcaccggtctgccggttgggccttttttagaaccctagtttttctaatttttatgttgtttgaaacattaccatcctattatcgatatagttattcatagttttgattttaggtccccaataagtgtttagcgtgtctcttttttgatagacaatatattgttcttgctgcattaagatcaaatattttatttggtgtagccatccaatcttcatcagaagacataaaaaaaaatagaaatcaaaagaaaaataagttgtacataaaataaaaaaaatataataatgatacaataatat

SEQ ID NO: 367884 - DNA, 605 bp, Cannabis indica
aattgaccattttacccctagctttagaaatacctaagttttatgtgtaagggcattttagtcatttggtttaatggtgggataggtggctgccttagcttggtgacaccttgcaagtcttttttcatccaagattaagtaattgatttacttagttagaaaagagattagaaaaataccaaattttgaaagagaagctctttcttctctctctctctctcttcgaagccagcaagaacaaggggaaggggctatgattttcttgtattttcagccaaagattcaaggggaatcaacctaaggtaagctctaatgaaacccttctttagttttcaagttttaagtttaggttgaatatgtggaattgtaaatcaatggctgttagggttagagttgtttgaatttcgaattctagggttagtttgagttaatttaaattcctagtagctagttttaatggttgttgttggttttgtgcaactttgaacattgagttcaaagctttgagctttaatggcgaattgattttgattggtttattctgtgaaatactggctgggttttattgtttatacattaaataggagctctggaaggtttcatgg

SEQ ID NO: 367885 - DNA, 621 bp, Cannabis indica
gagatttttccggtgacaatgccaattctgacgacttttctgacattgacagctacttcagcgacttttccaacaccaacagcaaacttcgaaaaagtcatcagaattgacatagttgctgaaaagaaatcagtttcgtgatgaagaaactagttacttgatgaagaaaccagtttcttggtgatttttctaatagcaacgccaattgtgatgacttttctagcgttggcagcaactccaacgactttttcgatactagcagctactctggtgactttttcgataccgacagtaaaatttgggaaattcttcaaaattggcattgtcgccaaaaaaattaccggaaaaattactaagataatgccaattccgatgactttttcggcgcggacagcaactccggtgactttgcggtgccggcagcaactccggcaactatgccaattccggtgacttgtttcagtttaactttattatttagcatttatatttcattatgatttttcatagtgttgaattaggtttcacagggttcataagttcgaaactggttttacaggttttaagggttctgtaaatgaggttgctctattttataatgttattgtatattttttattt

SEQ ID NO: 367886 - DNA, 320 bp, Cannabis indica
atattctattaaaaataaggtaaatactattttagacttatattttacaaaagttactgaatagactttcttaactgataaattagatattgtatttttttaaatagtactaaataatgtcttgaattaatttaattaaaataaaatttaataataactcaatataaatgtattataataaaaatgtatatatttttctgtttgtattaaaaaattaatctttaaattaattatattaaaaaaaattaaccaaaaattaatttaaagtcttacttatactattttaaaaaggagttttttttttttattttttactactt

SEQ ID NO: 367887 - DNA, 564 bp, Cannabis indica
atgtaaatttttcaaaaaattattcctatatcattgttattataatttaaatttataaaatttctatgatgatatagagaaattataatttcattttttcttatatgataatgtatattaaagttatattatatattttgctattttcaaaaaatttaaaatagtttgtacagtcaaaaataaaattcaaaatatataatcaatggtataattttattttatatttattatataaaaaaaatctagtatgcacacaagtaattatttcaatcttatttttaataggcgaaaaatttaaaattttaaaaaacaagtgaaatgctttataattgagtttttagcagctaaactttcataactgtcattttacttgcatttaactctctaattttaaattttagcagtaaaaccctccaaactactgaactggtagaaaatttaaggtgccacctggttaactgtcactatggactgcttatgtgtatactcttgtacacataacacgtttatattggtacacctaatattattatttaaaaattattttcaaaataaatttttaaa

SEQ ID NO: 367888 - DNA, 515 bp, Cannabis indica
atattaggtgtactaatataaatgtgtcacgtgtataaaagtgtacacataaacagtccatatggacagttaactgtgaaaaatcaatattaccttaaatttattaacagtttaataatttaaagagttttattactattaaaatttgagcttaaaaaattaaatataaataaaataatacttgaaagggtttagcggtaaaaaaactcaaataattttttcttcacaatacaatgtattatgtaaagtaatatgacatttgtgctgaaaataacaagtgacaaccacaaatattgtcaatttaggcccataattgacttcactatatatgttactgtctttgctagtaaatgggctactagcagaaaaagagatgggccacttggcagatgttgaaagaaaggcccacttgtcattttattaaggcccacttgtcattttatgttggcagaaataatagggaatttacatggtatactaaacttttgccatttttttacaaaaataactgccag

SEQ ID NO: 367889 - DNA, 735 bp, Cannabis indica
cctcagctcgcagtgccttctccaccatctcagcataggtggtcttgtcgtctgttgtgatcattaggtcatgcttgatcttcacatttaatccatccagatatttttccttcttactgaaatcggttggcacaattcccgaggccaacctcgccaaccgatcaaactgagtagtgtactctgtcaaactcatattttccttctgggtcagttgtgcgaactcttttcttttggcacttctaatggcctcattatagtattttgcgttgaagagctcctggaacctttcccaggtcatggtcgtaacatcgtcaatctgggacaccatgtcccaacagactaaggcgtcctcttgaaattgaaaggtggcacacaccaccctgtcattcccggtgacacccataaagttcaaaattcttgtgatcaccgttagccactgctcggatttcatgacgtccagacctcccagaaaaaccggaggtgcctgcttctggaacctttcatacaagggttccattctgtttctcgctaccactatttcgggttgagcaacaggggcaggtgccacaggagctgctggcaccggcactgcaggagcaccctactgcctcaatctctgaatctcatgatcttgctcctctattctgtcttgcatttcagcaaacctagtttcccaattctaggcttcctgattggcttgagcagcctgggaagcctgtggcaggttatcatcac

SEQ ID NO: 367890 - DNA, 582 bp, Cannabis indica
atttgtatttttttttaacaaaattagtttaaatttactaataagaaaataacacgtggataatgacttgatatttaactgtcttccagaaatataagttatgtattattaccaccaaaaatttaaacttatgtatttatttgcaaccataaattaaacttaagtatttatgccacaaattgctcttttttttacataattatgtgaatacataaaaagcaaaaaaaaaaaaagggggggggggggggggggtgggggcgtataggtcccattaggaatgcacacgagacgggaaattactgtggactgctcccccatttccattaccattaacgattttaatccccatcccctaatggggcagggacggaacagggaatctcctaatataaaataatggctaattagtaatttttccccctgaactttgacatgtactaaatcgtgtctcctgaacttttttggccgttaaaaattcccttcgaactattgagattgttaaatttaaggacttatgtctaatttcattcaattttactgtttcagtaattgtttatgtactaaaccatgctccccagactt

SEQ ID NO: 367891 - DNA, 580 bp, Cannabis indica
aaataaaaaataaaataatataatattattaaaacaaattatgtatatcatattaacaatattatatatcacctttatatataataaaataaaaactaaacatgtattatctaaaataaaatgatatactatataataaattttatataccatataacagaaaatatgtacttacaatagaaatatgtatataataataacaataaataaaaataaaaatatatagcatgctaataaaattatatataatgtcaacaaaagtacaatagaaaatagaacttaaatattttgtaaaaaaaaattatatatcgtataagaaaaaatacttataccattcatcaaaatatatatacaaaaaataataataataaaaatatatattactaaccaaattatataccacaattaaaaatgtatataccatgataaaaaaaaaattatatactacccttgtatataataaaataaaaactaattaaatattgtttaacataaataatcatacaatcaaaatatataaaaataataattaaatatatgtagcatgtcaataaaattatatacatacattaaaatattt

SEQ ID NO: 367892 - DNA, 592 bp, Cannabis indica
atggcttttgcttcatccattggcaaatcatccacatctgcctggcattcagaaaagtgatggagacctctacatatctcatagaccacttgagcttgtttggcttgcactgcaatcagctttgttagggcctctacctgggctgtcagctttgtaatggcatccacctctaactttctagctaccttctttgtttggcttctttcagttggccactgctgattattcaaggccatctccaccaacagatcataagcctcattcgcactcttcctcataaatgctccaccagctgcaacatctataagagttctagtgttcccaccagcccgttggaaaagttgtgaactagcatccacttctcaataccatgatgagggcactttctgattagatccttgaacctctcccaagactcatggagagactcattctcttgctgaaaaaaattgttgatttctcctcgcagcttagcagactttgctagaggaaagaacttagacagaaatttagtagccaagtcattccatgtagctgtagaatttggtggcaaggagattaaccaactcttggctctttctctaagtgagaa

SEQ ID NO: 367893 - DNA, 673 bp, Cannabis indica
cacagaaccagggtcgggacctagaaccgcaccccagtctcgatcctgaacaaaaactcataatgggacctgggacctgaaccagaagtagactgagacaaatgacagtgatccagatcttgactcgggattcgggtaaaggggccttgaacagaccagtagtcggtgtctagatctaagactcaaactaggaccagaacccagacgaacaaccaaacccgaacccagacctagacctggacccaaaattagaacctggaaaagaatcgatgaaccaagaccctagaacaagactatgaccgtgaccaggacccggacacagacgtagaatcaaagacagacctagcctcacacccaaactgagactggaacttgggcccagaaacggttgtgttcccagaccggaactgagacccggacctggacctaaatctgggacccgatcctgaacatagacttggacctaggtagggattcggataagaacctggactcggaccaagacccagactgggatcgaaatggtggacctacatctggactgagatcctgacccagacccaaacttggactcgcattggggaccccaacttggacctggacccgaacctagacccaaatcagggtccagacctggacaacaaacccgaacacagacttggacccaaactca

SEQ ID NO: 367894 - DNA, 592 bp, Cannabis indica
atatatagaaaatatcatttttaaactaataatttataaataattaaatatttaacaaaataacaaacttttgaatttgaaaatattatggtaagtatatctataaaaatatctatgttaatttcaaatttattaattatttaatttgtcatataagataattttaatataatattttaaataaaaagaaaaagttatcttttaatttaaaatatgttaaatatcaaaatatctaatcttataattaaataatatataaatattaaagaagttaacaaatttttaaatctcaccataataggaaatatttcaaattggaaaaatttcaaattggaaaaatcgaatttcgggaaacaatcccataaaaaatcagatttaggctgcatgacacccaaaacgcgcgcggagcagggagattgcagcctccttgtgcggcaaacatcggcagatgcagcataggcacgggcggaaagcaggggtgacacgggcatgtcacgcgtgtggatggggggttgtccgagggtctggtgcgcatgagcaccaccctcgacaccattgaaccccgatttttccaaaattcataactctttca

SEQ ID NO: 367895 - DNA, 714 bp, Cannabis indica
tatgcctctcatcagttgaaagattatgaacagcgatacccgactcatgacctagaacttgccgcagtagtgtttgctttgaagatttggcagcattatctctatggagagaaatgcgaaatttataccgaccataaaagtctcaaatatttctttactcggaaaaatttgaatatgagacagaggtgttggttagagtgggttaaggattactattgtgagatcctttacaatcgtgggaaagccaatgtagtggctgatgccctaagcagaaagggtcccgagcaggtagctagcatggttcaaatttcgtctcagctagcagaagatatggtcagatcaagcatcaaattttttgtaggaaaaattcataactggacggtgtaatctgatttgttagaacgtattaaagttgctcagttaactgatcccgagttagtaaaagtcagagaagaagtttcagctggtcaagccaaagactttacagtctcagatagtggaatgctgttgtttaagaccagagcctgtgttcctaatagtatggaactcagaaatgaaattctcaaagaggctcataatactccatattccttgcatctcagtaccaccaagatgtgtcaagacttaaaccttacttctggtggagcgcaatgaagaagaatgtggtagaattcgtctcgagatgcctaacttgtcagcagattaaggctgaac

SEQ ID NO: 367896 - DNA, 502 bp, Cannabis indica
ctaagacgatataaaattttgggccccttaataaataaataaataaataaacctaagaaaatttcatgctacatttcatgacacaaaagtaaaaaaaatattaaaaatttgaaataagttctaaagtatcataaaaattagtagatttgtattttttaatttgctctatcatccatagcaatatttttatcttgccaaaattttaacatacaataaatcaaattaaaaaaataaaaggaaaaactatctagtctatagttacttatagctaaaaccaaaatatgaatttctgtggtttcgaactcatgtcccctctgccaagaggcataagccttatcaatgtataggctgccactatgctggacctaatttagctataatgaatgttaattttaagttaatatagtagttaaataatgaggtcttaaaattttaaaatgggcccctagaaagagtgggccctaggcacgggcctagcccgcctatgcctagggccgggcct

SEQ ID NO: 367897 - DNA, 461 bp, Cannabis indica
gggacctcaacgaatgagtacccaatacacaagctgacaattgtctggtgcgctgggttttgcttatccgattctaattctgtttcaaccgtccgtctagttttttacaataactaagacccatgcagttagagaagtcaaattcacaatttcgcattcctcattcccaacatgggaaacttacctaaaagtgatgagtttcgagtctctcatttcggcaaaacaataatatctccgagaactagtgaccaacttcatcagaacatagaaatagactaagtgatgtcaaaatataacttaggcaacgtaaagtatatcccttggatatttttacacttaccccaacgtccaggttgatgccacatgtcaacctaggtactgagatgccaacctgaaagctaggtcattaattgccttcagtaaaatagccataactcactcaatatttgacctgattattg

SEQ ID NO: 367898 - DNA, 506 bp, Cannabis indica
ttattttattaaaaaaaaatagaagataagtaataagaattaactctattataaaggtataatacatcaaaatttgagagagataaaacaaattataaatatagcattgttattgactacatgtgagcattttttagaaatcacattttacgattagttgatgacattttataaaaatcaccagatacctaattataccaacagtaatacatgattaaaatactagacacaataatatcttttaacatttctcttataaatatatgtggacaacaaacctaacattaataatatgctaaaaaagtggctaaagttaagaatttttaattaaaatacttatttatttttgaatattaattgtatttatttttatagcattgctattattcactagtagtgtagggcaccttctagacgtatcaccttatgattggctagcgatactgcctaaatgttattatattaaattatagggattatttcacaaaaacataaaaataacaaaa

SEQ ID NO: 367899 - DNA, 830 bp, Cannabis indica
ttagtatcctcttaaaagggtatggcatcgatgcatttctatctgtttttagtatccgaaataatttttcagtcaaattttttttcatgatcatgtatattatagttatttaagacattctacaaaatgttaataaattccaaaagtttaacacgccaaaaacagggttcaaacagaatgttgtcacctgtgattattttatttatacgcttgtaaaatagattttttgaatattattttttttttttgaatattattttttatattgtaaattattctaaatttttcaaaattttgtaggatatcttaaatagttataatgtatatgaatatgaaaaaaaaaatagactataattttttttttgaatgccaaaacaagtagagagtgtattggtacattccttttacggaagtgcattgtagaatcacccattaatttatatgggacccaatactaaaatgaactaataatgatacatcatgtcttgtaatgtttggcattttaaagtacatcttagcatattccttattatttattaaagaaaatttttgtttcatgcgtggctaattggatggagagaatagtcaatgaaaattattaggagaatcaattatatactattttttaatatttttttattttttatttttacggtttagattgcttgatggtttctttatagtttactatgtggattaattgagttataatttaacttgctctgttagttactatgtaggttgctatataaattttcggaaaatatatatatatataaaaagctgctaaaaatgaaaaaaactcgtaatttttactaaaattagacaaa

SEQ ID NO: 367900 - DNA, 783 bp, Cannabis indica
tcttcaacctgaaatcctttcagatctgatgacgaagttgacactgaactcccttcagttagaactcagcaattccaggctctaatctttccgccattgatgaccatcttcaaactatgcaatcagacctgtagatacaacaacaagaatagcaagacacgacactaactcccacgaagacaactgaaataacaaactaatacgatttaatggataaactgtttacagactaaaatcgactgtatatatccacaaaacagtccacctggaactaactaacacttaacaataaccgacttaacagaactctagtgcagatataacagataaaaactccagacacgactagacattgtacataactaaactctcacaaaataatgacacttacaagtgtgtatagtttcttcttcaagtaaaatttatttgtgaaggatttcttcagatagattgagaccaatttctcccgtaaaccgaatgttgtttcttcacttgacacttctctcagcacctcaaacaagtatggcactatgtgcttttgtctcaatctctatgatcttcttcttgtcatttcccaattctttttactcttccttatcaatggcttgatagatttcttgatgaacagaaaaggccttcatttttcttttttgaacaaaggatgattatgcattaaaaaaggcctcaaacataacaaacttttgcaaagcagaatgagcattcagctcattgaaaatacaatctggcgtaaaacaagaccccctagcaacacaatgggcgacc

SEQ ID NO: 367901 - DNA, 802 bp, Cannabis indica
gactactgatgcctctcgagcagatttttccaattttttgccagtttgtccagctttttcaccatttggctgaaattgaacttgacacccgggaacctgaaacataaaaaatcaagcgtaaaacagctccaaaaagacaccaatagacgagaaaatgctaactttacagacccgaaacataggctaaatataacctaacagctgtcacagaacatgctgtgagtgctgtactaatcagagaagagaatagcgtacgacacccaatctattccatcagtaaaagactcactaaggccgagggtcgatacccgttaatagaaaaactcgcttactgccttattctagcaacaaggaagttgaggccctatttttaaggtcatcctgtttgggtatacaccgaccagccactacgtaaaatactacaaaagtcagatgcttctggacggctactcaagttgggccagtacgaaatcactttccaaccacgaacaacaatcgaaggccaagccttggcagactttgtggtagaatgcacaggcaaaaaagaaagcataccagagagcaaccccgagccggtacaaacacctcagccaagtcataatgaagacaagccgacctggaaaccacatgtagatgggtcagctacagatcaactatttggtgcaggaattgcccttgtgacgcctggggggcaacacctgcacgctgcagtcaagtttggattcaaacatctaacaaagaagccgagtacgaagctctaatcgctgggctaagactagcccaggagatgaaggccgaacac

SEQ ID NO: 367902 - DNA, 533 bp, Cannabis indica
agtaaatcttgatcttggtaaaagatattccaacacttagtacctctagatatgttgccttgcgattggctaataacgatgcttgccaaaagttattatattaaactatatgggacccgatacttagttaaaccaataacgatattgtcacatagaagggtgttagacaccactggtgtcttttagcatttctcaattaagtatgcaatatgagggtgaattctctatcaaaatttcttgtctattcctctgtctaaccaataaaaagaacccatattattaagggatgtgcaataaataaatcaaatccaatgacaaccgaccaccaaactattagatatccaattctgatcgaaatctgattagatgtaatttttgaatatctgattggatcagatcggatattggatggggtgtgcgaaaaatctaatacatccaacatccaatcgaactaattagtattttgtttagtttgaataagtaattatatttttatattgttatacgtaaaaatatttatatatatgtatata

SEQ ID NO: 367903 - DNA, 613 bp, Cannabis indica
atattagtataacttaattagattgtaaagagttttatttagggcataaaacccaacagattgtacatgtcgaggcaacgtgacctgaagtgttcagtctcgggacatctgaggttgtattttgtagtcgttgtgcgtctactttataaatgtattttgttaacatttgtaaaagtttaactcaggatcccgactatgtaaatatatatacatataagtttataatatttcacaataatttggcacaatattcaaggaaaatcctttgattagcaaaggtggcacattaattaaaaaatcattgtagcgcacctaagtattatggcgttacaattttggtatcaaagccgccaggtttgtctaccgaagatcgtctagacatgtacaatcatcgtcaaaaaaaagtttggctcacggttcagtaagcctttatttgtttagaatgtatgtcattagcaaaggatgtcagcaagcatagtagtttataattatttattttaatgcattgccttaaaatccataagagaggtataagcctatgtgatcgatgtctgacctgcctgacttgtcccattaaatggacacccagcgaaaaactgttgggttttatgcc

SEQ ID NO: 367904 - DNA, 384 bp, Cannabis indica
gttacttttttttttagaaatcaaagtacattatataataccttcaccattgtattactaattaagtaattagtttcataaaatatatatatatatacacatatagtattattaaataactccatatatagcttatacaacgacaacaaataatgttgtcctagttgtttttattgggttttttttttttttttaaccatttttctattcatttacatttacaattttttttagcaaataattaaatttggaagttttactattttgaaatgattttaaccataaacagctgtaatgtcataatcttcaagacaaaaaaaaaaaaagtcattatcggtcgaattgtttaaaattaacaatgatgaaccttctcgaaacaaaata

SEQ ID NO: 367905 - DNA, 473 bp, Cannabis indica
tttgttttttacggaactcgacttcgataaaaattgaaagaattgtgaatttttgaaaattaggtgccatggttgttgagtaggtgcatcgagtgcaccaggcgcttggacacacacgcctacgtgcgcgcacgttcagacaactgcacaggggatcctgcacgtccgcccagatgaatcctgcaccacgctgagcccagcttcacgtccaaccttgcaaatcctccttccgcgcgcgcgtcctgggcattttcatcctcttggggctgcagcgtgcagcctagctgccagcgcacccactcaacccgatttttgtgggattttttccaaatttcagattttttcaattttcaaacccaaaaattaaaatagaagattatttttaatatatttaaacttaaagatcattttttaaattaataatatttattttttaatatattattattaattttgatattttgaggtttaaa

SEQ ID NO: 367906 - DNA, 506 bp, Cannabis indica
tcgttgcttgcaaatcatcactagtagtaaattaatcgccattgaaagtccgttttcataatgactggtggcattttaggaaggcatgtacgatctgttaatcaaccctgatcatcccagcaagactactagtggattcactatagttgactagaaccgatcttggtgaaagttactcgttggttgcaaatcattactattgggtatcaatcgtcgttgcaagtgagtttccataatgactaggagcgttttagaatggcacgtgcgatccattatgcattcccgatcatacatatttggtaccctagatttaaatttgtttaaaaaaatttatcaatacaattaaattgtctaaaattttacaaattttaaatttaaatgtaattatttgattacttataagtaagatttgttagttaaattgataaaattttattaattaaattttactttaagatattaaatatgtacaatttaaaaatttgaggtaccaattaagtattatt

SEQ ID NO: 367907 - DNA, 567 bp, Cannabis indica
ttgaataattttctaaatattttctaatatattttcttttagcacttctgactgcttcattgtaatacttaacattgaaaagttcctggaatttttcccaggtcattgttgtaacatcgtgaatcgtggacaccatgtcccaccagaccaatgtgtcttcttgaaattggaaggtgcacaaaccaccctatcattacgagtgacgcctataagattcaaaattctagtaatcactattagccgttgctcggctttcatgacatccgaacctcctagaaaaactggaggtgcttgcttgcggaacatttcatacaggggttccatccgattcactgccaccacttgttcggcctggacagcaggggcaggtgccactggaatttctggagcaggcactgcaggagcaccctgctgcctcaactgtcgaatatcattatcttgttcattgatcctggcttgcattgctgctaacctattttcccaattttgggcatcctgagcagcttgggcagcctgtggcgggttaacatcaccccggccacgtgccctacccctgggacctctacc

SEQ ID NO: 367908 - DNA, 1619 bp, Cannabis indica
cgatgaaaatggggttatgtctacttttatttttattgattagattcgacacagtagatttatgttcttaagagtgtgtagataaaagtacaacaaatgatccaaaggctgaggttcatctaggggtttatgtaggggtatttagggttaaataaatggctaccggttacttttttgaaatttaaatttgtaaaaaatagaaaagtgaaaagtgacatcatatcaatcaaatcatatcaaccgtcgtccattttctttcatttccttcttcacttcatttttattttttatttttcattttgtcatttccatttttgtctttgctagggaaaaactaaagttcttccttttccattttctttttcattttccattttgttttttcattttccattttcgtttgaggtggtaaaacccatattgtacatgttcactgtggtgtacattactcgaagtctgccattattggagttgttacagggggtgttgatggtgggttgtacattactctgttctactttacatacattccattctactttacatacattccattatttacagaaaaaaaatatatttttttagggaatgtggtggtttctattttcgtgtacttaatatcttctattttatctcaggtgttgacggtgaggtgttgaagggagtttgcatttctgtgttgaggtatttctttctctctctctctctgtctctggttctgtgttgaatgaaatttgcatttctttctctcggtctccccccttgcatgtgttgtggttcttagtgtggaatgtgttgtaatgtgttttgagtttttcatttttagttttttatggatctgtgatttggtattttgaattaggttgttgcaataaagagttgcattgtttaaattgaattggttgcattgtactgtaatttaggggttttgatttaggtatttatggaatgtgttagttgatttggttgaattttgaatatttgaggattggataaatggagattttttgagtaatatgacaaaaaaaaaaattatgagttctataatattaggttggatggtcttttagtgatcttatcattgtggaaatgatttggttttatttcttgtttttggaataaaatatgaaatcatcgagtattggtaagtattgtactaattttagaggcactatactcattgcaatgataactttattgataatgagcataatgtcatacaatttaaatatcgtaatagaaataggagatattatcaaaccaagcagcaagagcgattatctgtttctcattaaggccaaggactataggtttgtcccgttactgtacggacacggattccaatccgtgatgtactgtaaccgtcgaatgggcagttactttgatcaaaggctggggttcatgtaggggtttatgtaggggtatgtagggttaaataaatgggtaccagttacttttttgaaatttaaatttattaaaaaatggaaaagtgaattgtagcatccatcaatcaagtcctatcaaccgtcatccctctccactaaccatttcattgttatttttattttgttttttattttccattttgtcatttccattttcatctctgctagggcaaa

SEQ ID NO: 367909 - DNA, 712 bp, Cannabis indica
ttttgtccctatgcaatgtaaatcatctatagtggatcattaattatagggattataacaatggataattaatagcctatctatatcgtggaacatatagagcgttctatataactgagagtgcaattcaaagttctatagtggttcaacgaggaattaataagttagtgaatttacttggtaaattctagatctgcttattggaagctcggttatctaggtccatggtccccatactagttgagacaaactgcttgtaagactcagttcattgattttaattaatcaatttgaattctaaaattagactatgtctagtttatgaattttcactgtgttacggcttaattgtgaagaaatggtattttagggttaatttattaattaagagattttgtggagtctaattaataaatattataaatgaaaattttatttgataattacatttatagggttgaagttgcaaaaagtggtttttgtgaaaatagataaaatagttgagaaatatggcaaaaaccaaacttatgtggggcccatattatggtcggccactaaagggttttatgctccattttttttatcaacttttgattctagattaatcaaccctaaccctatggaaattagtataaaaggacagataaggtctcatcatccaactaatgactccaaagctaaaaacctagctttctctctaggtttgatgaga

SEQ ID NO: 367910 - DNA, 1334 bp, Cannabis indica
aagaagaaaaaaattatatgtataaataaatatttgattttgattttgatttagattatatttctttataaataagaaagaaatatacattttattggaatataaacttgtatcagatatatttttgttataaataagaatggaatatacttatatctagtatgttttgaaatatacttttatatataatatgtattagatttttaaagtactatattttacattaaaatattaattttaatattttaatatatttataaatatgtgtagattgaatttgatcagttacttttacatgtcaatcaacattaatgcgcataagtacgaattttaaattttctaatcgatccaatctgcataaatacaaatatttacactttacaaattagattagattaaattgtgtaaattgaattaaattaaattaaatatttaaattaaatattaaattgtagaactattatgataattaagccagattattattagttattacatacgtatttttctaaagtagtgtagtattgtcaaaagaaaataattaagaagatagctagtagaaacttatatatcatattgttgattagttcaataataaatttgtattttaacttttatattgtaactctgttagtttacataattttttcccttcttcgtgctatgtatgtcagtaatgtattctgacaaaatttcaattgggtaagaatttgtagttatttttaaataataaagtctcttattataagcacgaataaaaattcattagaccagttgaaactatataggaatatatatatatatttttatatttttacttatttagaattagttatattaaggatgtaatcatgtattgtatgtaatgtattagctgttttttttgaaaggtaatgtattagctgtttttgttatgtttttattgtatggtgtaattaatgaactgatatatggaagctagcgaaagcttaagcaaatctaattaagaattgtgaaacttaattaattatcaactcttttggggagacatataacatcatcaataatatctataagcatctttcagatttgataactacttcatttccaatcaactcaaacataaagatgatctaaaagcatatctgtaatttgttttttcttttaaaaaaaaaatctaaaagccaaaatatgatttgttaaaaaactatatgcacatatatatgcactaaatatttcgaacagtgataatatttttatctcagttatatttgttcaaaaattttcaaaaaaaattgatataattaaaaaatatatcacgtttatagtgtgttttttaaaataaaaattagtgc

SEQ ID NO: 367911 - DNA, 554 bp, Cannabis indica
atgtatgtatatctattctatataaagtgtgcctatataactgaattcttggtttatgagaaattcaagggtgacttttatttatatttaataaaataataaactgttatttatatataataaaataataaaataaaaatagaacaaattccattaatattgggtgactttttttaaaaaaaaatatatattaaaaaataagagaggttaactctcacgttaacttcaaacaaattgaaattaaaccctttaaccaatccgaataattgatatagttaatagtaattatattgagaattttttttgcgtacaaatccgaatatagtgatatgcacatatatatgtagaagatgttgctgttatctaatctcttcttcccaatattatttaattgaatttattttatattaattaataaataggtgggtcgatttcaatcttatttaatcgatagatgagtcgattcccaatcaaacaatcgattctaggtgggttgcacatactgcttagatcttatttacataatataatttttatttactattttcttaaat

SEQ ID NO: 367912 - DNA, 765 bp, Cannabis indica
gtaaagattaaaagttataatacattttatttttagttttttttttaaaaaaaacatacttagcatacttagcatagcccataacttcaacataatgtatttattaaatatcgaaatattcttcatattgttcatcttttattttatttttttaagtttggtcacttgtttgagcaaaaattaaaaaaaaaaattaagtcatttgtatttctttttttgtatttttatttaaaattttgtttaagtttataagtgaaatagagaactaatatgcgttacgtacggttaattgtaatttttttaagttactaaatattttatccaacaagtaatataatataaaatatgacagttatattttttctattagctcttttgcaattagtgtcttttaaaaatagttttctttcatattttaatatttttattttgttcatgttgcgttttgttaacttatatttttgtaagtttatagagatgtgacaattttaaaaagattttttaagaatgatttaatgttgagctaagtttttgttccactttcaattattatattaaaattttactttttaattttttatttcttattattttatgtaagaaaaagtatattttacctctatttattattttttttctttccgttgtgttttttaaatttgttctattatgttgtcactttggcttaatgcttagagttggaggaaagatttattccacactgcctccacttttcttttcgtaagtcgtttgttttgttttagt

SEQ ID NO: 367913 - DNA, 559 bp, Cannabis indica
atacatctgatactagcatatttgccaatgtcctagaagagacatacttatctaaggtgtaagtaaactttatcgttgattatcatgtcagtgtaaatccagtgtactgacaaatcatgggactaaaactttaaagcatataatcatgattatttttcactgtgaagacaacactataatcatgaataactaactatatgttcaggatttaatagaatttatacattatgaaagtaatcatgtgaaccatacaacataaaatgatttctactcttttattaattagtaaatctaattattttgaaatggattttatttaggacataaaattctaacagttagatatcactagattcgctatgtgcttaagatgaaagaattacacttataaaaaagttcataccagtgagattggttgacaagaattttcctaaaaagaagcttaaagcttgtaggcaaagagcaggcttagtggagcccactaactgaggcaatgggggaggatttgttaggtccaccacaaaaaaaaaacaaaaaaaaaaacgaaaaagaagagaga

SEQ ID NO: 367914 - DNA, 544 bp, Cannabis indica
tttaaagttttacccaattagttttgagccaatgctagaaattcctgaaacttctcaaacgttttagatttcttatgcataagttaaatatgaccatatctaatataatcgtcaatgaaagtgacaaagtactcataacaatctctagctttgacattcagtggtccacaaagatctgaatgcactatacctagtggttctttggcacactctccctttgcagagaaagaatgttttctcttttgccttctaggtaagactcacaaacaggaaattcacctaaggtgacgtttttcaatggaccaactttggttaacccgtgaagtctattatagcctatgaccaagacgtaagtgtcatagatatgtttcatcttcattatcaatcttttgctttttgtggtttctaagtttagctttcttaaatagtttgttattaagcgcaaatgattcatctggtctaagaacataaggcctttgttccatagattcaacacaaaatttgaatgtcatttcgagaaatgatagaaccagaattcaaaaaa

SEQ ID NO: 367915 - DNA, 739 bp, Cannabis indica
tttgttttatcatatttgaggtactgaaaaaatttgggtccaaacggttggacaaagcaagtgttagagccttttcggggaatctgcctcctacacaaatcggttgtgcatacctggtaaatcggtttcctcgctaggcacgattccaaggctgttttagtctttttcaaattgatttttttgctataaaaaacccactaccgacattttgactccccattcagatactttaaccctaaatagagcctcaaaccctttttctctcaaatttttaccctctaatcataattttcttattctcttcaacctcctaccaccatggcctcttcttcaagaccaaagaccaaagaggcaaagagtgacaatgcaacaaagggagcaaaagaactaaggcaaggcatgaactcttctcacatggaaaatataaaaaaaagttcaatgaagatttctcacaaagggatgtcatcaatggtaagggatgtgatctccaagcccttgagtatgtcaatttttattttcttattgaacgtatgggatgggaaacattgttagaaaattcaaacaaatatatatcctaggttagttagagctttctatgcttccattgagtttagttgtgatccatatactcgcttaatgatctccttaatgcacctaaagaaggcctcttgcttgaccatagacctcgccttacaaatcgatgcctctttcaattttaaccttttcaataatcatgtgt

SEQ ID NO: 367916 - DNA, 652 bp, Cannabis indica
catctccctaaagcattcaaaaataagatgttaggagagctaccgttatcgatcagtatacgtttagtaaaacaaatcgaaataaataaagaaatgactacaacatcatggtgaagattaagcaaatctaaagcttcgtcttccacgaagctgatggtttggccgctataggctgctggttgtttctttggtctaccttctgtcccgactattttgcgtgcatgcctctttgcggctgagtatgttacgccgcaaacctctgacactctagagatgacattacatgttcgggtgtgctgaggtgcctcttgtaacgccctaatgctaaggcacgctacagctttttcaattacagtgttgtctttgctaatcaaagagttttcttgaaaaacgtgtcaaattaaaactttaatattaattaataaactttataatatacaaaactatttacaagtaccgggatcccatttacaaacttttaaaacagaatatttcaaaatacatattattcaggtcgcacagcgactacaaaatacaaccccagacgtcccgagaccgaacactccaggtcgcgctgcctcgacatgtacaacctcatcttgctcatattcactactcttcagcttttgcctttcctttacctacacataga

SEQ ID NO: 367917 - DNA, 444 bp, Cannabis indica
tttttttacaaaaaatattattttatctaattattcctattctaaatgggtatttttcaagaaaaaaaataaaatttatttttatatggtatattaaaaaaaaagaaaaaaaaaaaaggagaatcaccctatgcacggtatattttagtttattttttgtttttatgtgatttattatgttagtttatttatatatattcatttttctagtttttcgttaataattattgtacattttatttatacggttttttatttaagcatgcacttttattcttgttaattatctttcctttctactttccatgcatatttattaggacaaagttttaatacatggacaaattttgattaaatagaatatataatattttttattgactatttttaaataattaaaaaaatagactaactaatgttatattatttataataatataatat

SEQ ID NO: 367918 - DNA, 553 bp, Cannabis indica
agcaccctatgtctcaagcgtcggatctcttcatattgttcttaatcctagtttgcatttatgcaaacctgttttcccaatcctaggcagcttggggagctcgagcagcctgtggctggttagcatcaccccggccacgtgccctgcctttaagacctctccctcatcctcaaatattaagggggatatgaactccctaacaacaactagatccaaccgaattaccctggctcttggtgtttcgcctggcgtccatactatttagaacaacctggataaccaagagctagtctggtaaaattgtgatcaaataaaaacttactaattgccgcttatttggaaattaaaaatatacgcctattctaatattaggctactaacatgcttcctaatagggttttcttaaatcatactagtaaaataaattactaaagtaattaatgcttactgaaccgtgaaacgagatgatccttgatgatgattgtgttggaaattattttattgaggtatcacttgctgtgtgtgggcactactcatacactaaggtagttcg

SEQ ID NO: 367919 - DNA, 886 bp, Cannabis indica
gaagtgcaagctgttgtccgtcatcaactttcttagtctttgaggcttcttccttgaacctctttaggaaatttttcaatgtctctgtgggtagttgcttgatgttagttagggcactgacttcgagattaatctttctcgcagcgacaaactatcttcggaagctaacttgcaacttgttccagcagtccaccgatcctggttccaacttcttgaaccattcctctgcgggtccgcttaacgttagtgggaaggataaacacttggcgtcattgctgactcttatgaccgtcattactcggttgaaccgagacaaatgatcgctggggtccgtgtccccggtgtaagctgccatttcgggcatcttaaaatttttggggagttctgcctccaaaatgtgtctggcgcacggctctcggtcctcataatcagagtctgagtcatccccttttttttctctgggagactcgagcaatatctttgcgcagtatggctagcttagccataattccttcgttcagcgttcccgcagagattgtcggcgcgtgtttctttttctccaagtgatcctgcaaatcaccatgcttctcgttgatctgatgtctaaaatcaacgggagggtatctccggctcctccctcctttctcttcgggttcttggtgcacagaaacgctctttcggtcctctcgatcctgagggccaagactccctttttggaggttgcccctctgcggacctttccctttcgagaaatctgagcggaccttttcgtggatcctgtacctttttctttttccccgagatggaagtaggatttttccgttgctttccttcaaagggataccgtatggggctaggctccatggacttatgcttctaagtgctt

SEQ ID NO: 367920 - DNA, 633 bp, Cannabis indica
tgagtggaacgaactgcacgacggtttacaggctcctaaaccataacaatcacaacactgataagtgatacgctaaatcacttcccggggacttaaactagaaactaaaagattccttatcgataaaaagcatggcaataccctaaataacataaaaacgaggaaaactagggttcctgaaaatctcccaaccggcagaccggttttgcaaccggaattccggttctgggaattcctgaaccccatccggaattctggttgcacatccggaattccggttcctcgcaggaatcattcaaaaaattcataactcaatccaaacaaccccaaatcataccaaaatttccagacctgttctaaatacccctaagaacaaattcaaagttaaagaaccaagcttcaatcatagaaactcatttcaccattggaggttcaagattgagttcaaaaactcaaaacttgactaaacctccaaacagccacaaaatcaagcataactcaacctatttcaacatcaattaacaccagaaaacactacacaaaatttgctgcaaccacaacaacgaaaatcattaatttactttgaaaaccatagcttttgaaccaaaatttctcaaacttaaacaagggtaa

SEQ ID NO: 367921 - DNA, 1023 bp, Cannabis indica
aaaaaaaaaaacttgctgtttggcttagtcgcgaccatgaaaaagggtcgcgaccatggaaagtggtggtcgcgactactgaagcaaaatttgacagcttctgcatctttcagtaaaatgtgcataactttcacatacaaactccaaatgagttgattcaagatgcgttggaaagaagaaaaagaaatctaaaacttttatgttttgactttttgtaaaatcggatcagaacatagtaaaatttaagcttgaattttcagctttattttcttgtagaattttctctattctatagatagttgttttccgaaatttgatcaatttatacattccaagtgtgaaacctgaaaccaaagaaaacaatcgtaattctattccaaatataataataaaaaaggaaaacaactataaaaagcgacccaaaaagtaagctaaaaataacctaacaaattcccccaaactagattcttactcgtcctcgagtaagactaagactgacactaaaaactcgattaactaagctatcagataattatattactgctggctcatgtgaaatttccttcaattaactaaactagattttttaattccaaaaactcgaacaattaattaggatgctcattttatcacacaatgtagagatacaaaataacttcagtatcgaaataatgtcataatggtttcactccatcaaactagtccacaaaccaatagccaatattcttgcatgcttacctctctccactaatgttgacaacattcttttcggaatcaaaaggacttcttaaggttagaatttatggcttagatatttggaaaataaaagacaattttggctaaagatatcataagcacaaaagaacccacaagattcttatagttttaaaatttcccgaagtgttcccacaactaaccatgattgagatttttctactttttttccaatcactagacatcaatgaaattttcttttatttctgatttttttatttttttttcaagtgatgccgagttacaatt

SEQ ID NO: 367922 - DNA, 538 bp, Cannabis indica
aaggggtatagagtgtaatttcctcaagattatttcacaaatacatccaaacaacaaaaaaaaattacaaaaatagtctttttatattatatccctacaaatttattgttaaatttttattatctgtatgttattttttgttgttattttaatattatttagatattatttttcatattaatttttatgtaattttcttgttgtttctataaaaaatacgtaaaaataaaaaaaaaaatcctttaaacataagtataatttctttttacaaaaaatagtgtcttatgtaattaatactcccttttgaggaaagaaacgaattattttataaatatttaaaaatatttcaaatttatatttttacagatttaattttttttttttacaaaaaatacaagagactatttcacaaatacacaaaaacaataaaaaaattacaaaaatacggttttacgaagtttttaatatttttacgatttttttaattttatttacagaaaatacggtatttttatgttgtactcttattaatttgttg

SEQ ID NO: 367923 - DNA, 614 bp, Cannabis indica
tactgtgaaaagaccaattgtcataactagaaggatggaaggtaaatttgaagcaaaatgggaaggaccttatgttgtcactaaggtcttcctaagaggggcatataaactttcaaattcagaaggctgacgcatttatccgtgtgttaatgggaagttcatcaaaaagttctacacttaaacaaaaaggtatttacccattgtgtagacagcgcacttaaaaaaaggcgagtgtgcaatgaactacgtaaggcttgatcccactccgggtacataggcaatctagtttataactaggcccagccacacaaaataaaaaaagttatctcctaaaaaaaaattgtaaagaactacgagtggcttgatcccttaaaagggtacgtaggcaatatgaacaaaattggatgctgccacaaaataaaaaaaaatatatatattatttattcctcctaacaaaagaatcaaaattctaaaaggtctaaatgacaaaatactataagtactcaaggctaataaacgaaagaaaaaagctaacaaaaactaaaaactaaaactaaaaatttttagaagcaaaatcataaaatctttagtccatctggagaaacaaagttaaa

SEQ ID NO: 367924 - DNA, 511 bp, Cannabis indica
tgctgatgaggaaattgtgaaaacatagtggacaccaacaaaggggaaattctgtataggctcggcgggagaagcatcgaatcctggaagagctactactcgtagaagaaaataaaagggaaaagaggttaatcattctactaaacgatcctcaggagtaaaaactagaagtggtcgaagacgggaaattgatgctgaggataaagccggattagacaatattaatgaagctcttaataactgtattgaggttaacatcaaatatggcagctgtaacgccctgtccaacagggacgccacgtgtgtgcaatttaataaaatactgatatttatataatatgtaattatactaaaagtgtgggtaattaaattttgataaataaaattcaacttttaaactgtttaacaaaagataagtaatatggactacggggttcccctgtttttaaaatattcacaaactggtttcaaagtattttacaacataaactttatacttccaaaatacaat

SEQ ID NO: 367925 - DNA, 568 bp, Cannabis indica
gtggtatatcactcagttgtacttagggtacgaagcaaaccctaccaacagtcgtacaatgaggtacgtagtgtatgtggtatagagactgtaccctagtatggaacgttcttactcatatgttaagccttgtaaataggtgtatgggctcctagatacaagttggtattatgtgatatgttatatgattttcttactgagtccgtcgactcatagttctacttccaaaggaaatgcgaaagctgaacaagagtgagcactgagctgggatgaggttgtatatgtcatggcggggcgacttagagtgttcggtctcgagatatctggggttgttattttgtagtcgatgtgcgatctgaatattgtatttcatatattttatataaaagtttagaaacgggatccagtacatgtaaatgattatgtaaagtttataaagtttaatatttaatataaaagttttaatttgacatgattatcgagaaaaaaattttattagcaaagattgtactataattgaaaaattcactgtagcgtgccttagttttagggcattacatatatttta

SEQ ID NO: 367926 - DNA, 739 bp, Cannabis indica
tagaaacaattgaagtcgaagccctagttcttattaatcattaatttccttattagtttaattgcttattcttacactatttttattttctaataattttgatcttttcttaatttctactcaaccaaatagaagtagaagtttaattttaacgtagttaactacaatccttgtgggatcgacctcactattggtgagtttactacttgcgtgtgcaaaatatcacaacacctaataagttattagaatttatttttcttcccctagtttaatttttgaacccattttataaaaagagaagctaaagggtctgaaaatacccgcctattgaaaatttaccttcagaggcggtttaggtataaaattggagtataccatttagaggcagtttggaatcaaacgacatagggtttgataggtaaaccctatgccgtcggttggtttatataataaccgacggcatagggtacacctgaaatttgacacgtgtaccctatgccatcggttattctataataaccgacggcatagggttatataaaaaaaccctatgtcgtcttcctcattctcctcacgcgaaccaaaccagagagcacagccaccaccagagagaagagaaaaccctcgccaaccacccctccgccagcccttttctcccccatttctcaaccatttgagcccatttttgttgcaaaatcttctattttcgatacttaatcctatacacccaaaaagtttt

SEQ ID NO: 367927 - DNA, 547 bp, Cannabis indica
gaagtagttaagtcttgatacacgactcagagaggtaacttcactctttgctcggatcattcgccctttgccctggtgggtcaagcagagtttgggcgtgtagatgtgttgcttgaagtttgttcggaacatttctccagcaaagtgtaaagattaaccgacacatgtcactagtacatacacatcatagtgcaaaaaatgggatagcaaatgttaaatgtgaatgtgtatttgtaagaaactatttgtgagtatttttgtgtgtcattgatcgataattacttgtaccttaatagtaatacgtggagaaataactgttagcaaaatgtgtatacaactataatacaattgttatgaaacattaaaaattaaaacagtgtttccacgtacgtaactctatctacatgtctcttcgtgatttaatatgaataaattcaccattaaaaatttggaaaacaacgaaaatacactaggataaacatttgactatagtatcgatgtatttcttttttggattatacttgaggcaaattgtttgagaactcca

SEQ ID NO: 367928 - DNA, 768 bp, Cannabis indica
tggtttgtcgtatttcccccattaaggtctgtacgagccctcactctatgggttcgggaagaatgatggtgattcctcgcaggtgacctacgttccccaggttgagtcctagggtcttcctcatttccatgaggaatttcttgttcatcgatttcgggttgcctcccattcccatttctatgagaggattatggccgatcattcaaattttttagggggaaactcattttccccaggttgttcttcctggacattttcctgtctcctggttcatgagccacgaggtctgcctcatggtcttctcactccaggttcatgttgattttgagcgtcagtcccctgtgccaccctagctgcggccgcatcacactctaattcagtgttccgccgttgtgcctcctccaagcggcgtctaaggtggcagttttctgtttcataagtgctctctcccataggctgagtacctccacaattgggtccctcatcctttattccaggattttggtcattcccacgctgagttctcctcgagcatgtcgttcacgtactggggcaaacatcaggctgggtcctcctagaacgagtggtccgagtgctggggccacccttaggctgagtcctcctagagcgggtggtccgtttagactgtgggttggaggaccttctagagcccatgggctctttcccagaacggtgacaagtttcttcgtgtggtgtattagtgttttttgggttttcagccatggaggagatggtttttctttaaaa

SEQ ID NO: 367929 - DNA, 612 bp, Cannabis indica
cacttaaatatcttaatattgtcccaatatacttataattttaggtggcatcttaatctttttacattctctattatttattttctcgattaagtcatagtctaaaaatttatgtatttcatcttatttactttcatattgattttaatttattatttctcatctaccataataataataataataattttattcaaatctcttatagcaccccaataataacttttattaatatatgattacgttacttttttaaaaaaaaaaaaattaatatacctttttcatttgattttggattacaatattcactaacaacattttacattataaaaagtataaggttaaattaagatgcaattattctcaattgattatgctaaaaagatgtgaagaacataaaaaattataagtcatgcatataaaaaaagaattaataagttttttataatttcaataggtggtataaaatatctctcaatttttttatttttttaaagtttattattttaaataaattactaatttttgaagggaatatacttatttggtaccttgtattttacataaataaaactttggtaccctctaatatgaaaaatgtttattaggtac

SEQ ID NO: 367930 - DNA, 511 bp, Cannabis indica
aatgctataaatctaacttaaccctaagtggtttcctataaataggtagtgatgacttcaaagggaaaagatgatgcgactcattccttcagtaaaattttgagccaccttcatcctcctattcgaaatcttctttctctctttctctcttcaaaaccgaagccatatagtgaaaagagtgagtgcccacacacatcaagtggtactcattcatagtgtgtaaggttgtgaagaatccagtttcaagagaaggagattcggactcggatcttggggataatcttctacagaaaggatataagggttagagatcttagtggaaggagacattatgttcccctgtaagcactgtaaggtttatgatactttatatgtgtttatttcatatcgttttagaagttcatgtttaggaagttaataacatacttgttagtaaatctagatcgtggtaaaataattccaacaactggcctcaaagacatggtaattgatttactttcaagaaatttgg

SEQ ID NO: 367931 - DNA, 675 bp, Cannabis indica
attgatttactttcaagaaatttggacttaaaaggatatatgtttgatttggatgtgattcatgttgatctatgtgtttttgatgattgtttgatgtttgcaattttttttacgaaaaacaatttgagttcttttctggaattatttttgcggttagtttaggaaaaattaagcaattcacttttttacagaactcaatttcgatttaatttgaattagttaagatttttttgaggttttgaaaaaggataggggtagtgtcaccccatacgcgcgcggaactgagtgatcactcggtcacgcgcgactcagacatgaggttgttcgagttttctcggtatgaagcctcgatttttttctgaatgttgggcctccgcgcgcggtcgagggtgctgggcaacctctctgggcgaggtttctcggccatgctcaccttcctgcgcgcactgcataccatccacatcaaatccaattttttcaattttcttcatattttcaagctttttcatggaattaatttcgaatgttttgtgtaattttatatttatatttttattttttatatttcaaatctaattatcagaattaaattaattagtattttttaaattaatttaagatattagtgaaatttgaaggttgaaaataggtaaaaatttatctttttgcttaatt

SEQ ID NO: 367932 - DNA, 700 bp, Cannabis indica
ttaaaccaaaaaaaaaaacattaatcctattatttttatttccacgtcacaataatttatgacgtgtcgagctgctgcttacttggattgagtcacgtaggcacataacggggtcaggggaacggaagtgtgtttttgatagcagaatagtggttctaggggtttacccgcagaaatttgggttgtgggggtttggcgaaaccaaaaccaaagtattgggggttttgccgccatttaccctttttttatttggtctgtatatttgtttatttggccaactgaaaatatttttgtaatattgttacgttttttggttaaaactaaaaaaatcccattaaataatacttaattaaaataaattttaaaaattaaatatcccacaaaatattattttgtcttaattatttttagtttaaataacaaaatattttcatgatttaattaacagacgacaattgtcttaatgttaattaaagtagttacaaatattgaatttgaatttcaaatgtgaaactaattaatatttattttgaattcaatttaatttgaaaataaatatcttaacaaaaataattaaaattattaataaaataatataaataatttataatgtatatacagtatatatattataattgttgggttttgtgccctaaataaaactcatatcaatataatcagatttactagttaataaata

SEQ ID NO: 367933 - DNA, 645 bp, Cannabis indica
aaaataaaaggtgattcatttggctagacttgtacatttgcacatataaaactcgtttggaacgtcgtattaggtcgtattgtattatattgaattggattatatatcatatttttatataatactatgttaaactttaatttatactaaaatattatatatttaggtgcccgtaaaagttaatactacatatagttttacataaaaatattgtataaaatacaattcaatataatattatacaatacaatacgatgtaatacagcataccaaacgaacccatattaacttagataaatttagaaaattgattcaaaacagtatggtttggttattaaattcaaaactataaatcacactacaccttattgtttggtaaaaataaaaaccacaattgtattgtaactagttttaaaccgtattttttatagggtgtggtgtggtgcagacagtttgtgcagtgtgagcagtttggtgaacactcctaatttttcagcattgttaactattcaaaattttctaaaagatttacaagtagtcttaaatagctacaacgtacacaatcataaaaaaaataaactaaaaaactttctcatgataccaaaacagatagaggtgtaacaaagtacttatttaaagagtgtg

SEQ ID NO: 367934 - DNA, 564 bp, Cannabis indica
atggtatggggcatgcaatggtgtgaatcagaatgagccacgcgaactgatgtgattggttgagtgaatgagacaattataggccaacaacccacgtggcaagtcgctttcagtcaataatttcagtgggaaacataagtcatcaatttgggtgagcacatttattatgcacttggagcatggggcccacccacgaatatcgaagccacatgtgtgacttttgctgggccgttttggttaatatgacgtgtcaatgaaggacgcagatgtagaataccaaaatgtggaagagcccctaggagtagagtaagaatagaaatagaaattataatgtaatagaataaaaaaaaataataggattaagttgtttggttaaatgtataaaatattatttttttttttatgtttggttgattatagaatggaatgaaataaattaattttagataaaaatactattatgttttaaacatgattaataaattaaggtaacgtttggtattatttttttaattaattttttattttttaaattgaaaagataaaaatatttttcaaaaacat

SEQ ID NO: 367935 - DNA, 523 bp, Cannabis indica
acgtaagttgattgagttatagggattgagctggtgactcacgatgcgtttgattgacttcgctaagtgttgctcattctgcatggctcgttgagtattccattatggacatgcttgcgaggcatcctgctcggcatgttgatccgaacagatgctcttagtagagtccacgtgtcaccattctcgtgatgccacgtcagagtgccaaatttgggataatacctataaatacccacagtattgggacataaactcatttcatcacccttctttgctaagtaagcttcagagcaaaaagaaaatttcttggcttcaaagtcgccgaagtgccttcgtacaagctccttgttggatagacgctgctcgaacccagacatttgaatcttgagtaagtttctgatttcctttatgcttatctttgcatgtttacattttgaatgctccttttataatatttgtttggactttgtcatttttctcaactattttatctatttttcatatataccactttttgcacttt

SEQ ID NO: 367936 - DNA, 502 bp, Cannabis indica
ttctatttttgaaaatattttatttggattccttgtgaaaaattaagcaatttttgtttttaaagaacttaattccgataaaaacgaaaaagatatgaattttggaaaatcgggattgaaggcttttgagtgggtgctcgtgagcaccaggcattcggtcaggcccccggtcacccccccccccgcgcgcgtgaaccctgcatccacccatgacgaccctgcacgatgccgaggttcctcgcccatatccccttctccgcgcgcgtattgaggttgcgtgcagcctcctggggctgcacgtttaacctgtcctggcaccctacccaaaaaattgcgatttttttgggttttttacccaaaaatctaattttttacgcgattgttttctaaaatttaatttttccaattttagatttttccattttgaaatatttccaattttaaatatttccaatttgaaatattccttttttttttaaatatttccaatttagaatatttc

SEQ ID NO: 367937 - DNA, 901 bp, Cannabis indica
gtggcaatattgtttgagtaatgcatgggatatgtggcaagtaagctagatgtaggtgttaagcattcaaaattcaaatttaaaaacctagtctcaggagaatatacgtggaggcctttgtatttatagagtaaatagccaacaataaatatatatatatatgcttatattaattatgttttcgcaatgcatggagataaacactcctttatcctagtcttgaccgattattaggtgagtggttagagctttatgtggtttagttaattattttcaaatcattacataagttagtaaagggccaccacatgggttagtaaggtgtgatatagttaagttctaggcttataaatagatctatatttctcttattcctcatccaatgaaattaaacctctcaaacattctccctctcgttcttgccaaactctgctccaaagtcttgttcttccattttattgttctcatttgtttcatctataaccaaaaccttaccccacaaatattatatcattataaactacctcaaactatatccatacacaactataattatctgatatatataaatatatatccttcatcctcccataaatatatatatacatctcctacattatatcaacatcaccactcctacatcatatcaacatcaccactgccaccatttctgtataggtttagtgctcaactagatatcgggaactaaggtatatatccttttataattttgggtttctagtttcaaagttaagatttcatatatatatatatacccttataatatgttctaattactaaatgtaaaatctaggtttgtcataagaaaattattgtttcacaaggatcactcttattgcaattaggttaggactccacattcgaggtaaggaaattaagt

SEQ ID NO: 367938 - DNA, 696 bp, Cannabis indica
cttcaagaagacaataagaagctaaagcaagatgcgtcttccaaggacaaggagctcgaggaactccgcaaggccaaggaggtggtcgagctcgaggccaagaatgctcaaatgaagatcgaggagatgtctcgcgacttggaggctgagaaggagaatggaaaaaggcagtatgaccaggcggtctcggactacatctataccactctctctaagattccagactttgacttttcaatccttggagcagaagccgctgaaatggccgaggcttttcgtgccatgtcgcccacaccaactcaaggtggtggggggaatcttctcgacgaggctgaggtcgtagaggtggaagaagtcgagaatgaggctgtcagcaaagtcgcggatggatctgttcctgctgctcccactgcttgacttttcctctaatattcgcttgtattaaacttctttctctttttttttgtttaagcggtacaggggtactcgcaccttgtacttagaaaaatttatattttactttgaacaacttttatatcctcgcggggatatctgttttcagtattttcgcagcacacgggtactcgcgctttattatctataatattttgattttaattacaacttggtgtaatgagtagagaatttcataaaacttgaaaaatactcgcactttgaagaatttcctttatataa

SEQ ID NO: 367939 - DNA, 1015 bp, Cannabis indica
aaaaattttataattttttatacaataaaatataacaattgcacaatataattgttatcttaaattttggccttgatgacgtgcgaaccaaatcgtaactgttatttgcatttttggtattggtcacgtggactccaggtcaacaccggacctatcagtgggaccctcagcaaaggagaagtgggccaatcccacctggatatgtccttccataaacaaatcttagtttcgcactcgtaaagccttccgccttcagtaatttgtacctgaaagacatgtccgataccacgagacgggagagataaaaccgtgtgttcccagaaggcccttctgattttcctttatattccaacacataaagaaagaaactacagttgttagatcaaaacagagtatcgtatcaaattaaagggaaaacttcctataacaaatattagcaactagaagtaaccaaacttgtgataactaggagtaaccaagcttgtggtacttggtttgattcacataggacaattcttatagattttttttttaattttgtaattgttgtatacaataaaataagacgtgtgataagacattaataatatttcttatacattgaatccaaaaatatgaaatctgcacttagtgcgaaatggtttggatgaacacccctattaagaataataaagtggagataaaattcttaaaaaaaatgaaataaaataaaatagaaaaaaattaagtgatataaaatcatcaaatgaaggttacaaggattgaactcaagtcacttaacatgagttaggacaacttaccatatgtgctagaataatttattgtataatttgaatcttatagatttatatattgttgtgtatagaatataaatatacacatgtgttttctaatgtattttgtatttactttttccaactatatatattgaactcatgacattttaatattttaagagtgattattataaaattattataagttgaatatgttataggtttttataagtataatt

SEQ ID NO: 367940 - DNA, 489 bp, Cannabis indica
ggtgggttccctttaagttggtattaaagtcaactgttataactcgcaatagctttcttcagattcatctgatgagcaaatagatggacatactgacttgacaggttaagtgagtttaatcccaacaatttcacctaattagactcacttaatctgtgatccaaaagaaataagtgaggacattaaatgtcctgaatgctcaacaagtttagacagtgcctaaacttgtctctagttacacttttagtgaaaatatctacagagttatcatgtgtgcttactttcttcacttgcaccttcttggatgacacaatatcccttatgaagtgtaacttgatatcaatgtgctttgacctttcatgaaacattggatttttcatgagatgtaaagcactttgattgtcacaataaactgtgatattctcagatctgaaatctaactcctctgtcaaccccttaagccatatagcctccttgatggcttctgta

SEQ ID NO: 367941 - DNA, 665 bp, Cannabis indica
aatttatcacgagagtagaaaaattgcctgaaattgaggtttatatatctgaaaagactataaattaccttagtgaacttgttattgcatagaataatttagtaataggaatagaatcatgttaaaccataatcaatagatgcaattgaaatcaaaagccctaacttttaatcatcgttaatttccttattgatttatttgcttcttattttcattgtttctttattgttttaataaattaaattttctcttaattttgacataacctgatagaagtaaaggtttaattttaaagtacttaactaaaatccttgtgggaccgacctcactcttttagagtctattacttgttaacggtacgtatacttgcgtgctgaaaataccacaacaagtttttggcgttgttgttgaggattgttagttaatattaataaaaaataaatcttgttctaatttggtttctttttatttttactaatattttactgatgtgtttgacctgcaaggtaaattcagatgatattccttgtggattttgtccaacaatacaatgagccattctattctgcttaggggagatttaaatagctcgaaaagagatgttattctaatttctcaagtgggtattttacttggctcttttataatggacttgatgatgaaac

SEQ ID NO: 367942 - DNA, 827 bp, Cannabis indica
gatcgtttgaaaaggggcgagatgcagagttggtgatggttctcgaattaatatagttttggatccgtggctgccgaatgaagataatccaagagtaacttcgaacaaacccgccgttattgatcaaaatgttaaagcacttatggaaactgatacgttggcttgggatgttgacttggtgcatgatatgtttaatgaaagggatgctaacttgattcttagtatttccttatcttcaagtcgtttatgtgatgttttgtattggagttgggagagctcgggccatttctcagtaaaatcagtttataagttcttacagttgagcaaagagttaggtgcacaggatgataattccgtcttttggaatactctttggaagctaagtgttcctctgaaagtgaaagacttgttattgcgtgctaccactaactgtctgcctacaaaatccagacttcgttctagacatatgcctgttgagaccatctgccctgtgtccaaagtaactgatgaaaccatctaccattgcttggtggattggtcttttgccaaagcgtgttggcaacagttggctgctagtgttaatttaacggcagtttgttcttttgccaactggtttgctacggttctacagcaaacggatggggagaaaaggaggttgattgcaatgacatgttgggaaatttggaaacatcgaaatgagctagtatggtctgataagtcccctactggtgcgagtgttgctcacttagctcaagctttattcgcagattggactcgggctcaagattcaacattcaatcctacgactgcattccttactgatgtcg

SEQ ID NO: 367943 - DNA, 999 bp, Cannabis indica
gttagatccttgagttggagtcccattttttcgtaagcagttttgaacaaaatgttggaagaggctccattttcgatcatagttctggccaccattttattggctatctggacctccacgaccagtgggtcgttgtgtggaaatttaactttgacagcatcttcaccgttgaatgatatggttggctctcctgctcgtggaactttgggcttcctttcttccacggccaggataacttcttcttgtacgtgctgtgctgtttgggtatacctctcccgagctttgccagaatcttcagcgatgtgcaggcctccaacaatgacttgtaagtgtccatctactggtggaggtagcaaatcttggttgctcttaccttggtcagtcttgacatacttttgcaggtgtggattgtttttccttattaggaattcaatttcccgctttaggctgtagcattcgttagtgtcgtggtcgtagtctctgtggaactgacaaaactttgtcatgtcccttttgttggagtctttcttcatggccccgggtttcttatacgggactagcgactgagttgccatgtatacactttctatatctttggtcagaatagtgaatgcagtgtacttggcatgattctcatggggagtctgttaggatttgccagtgaactttcctttcttcccgttcccttgcttgtggttgttgctggaacgtttgccacttgagcttgaattgtttgagtagttgggaagttgagcggatgttctagtggaaggagcctttgacttgcccggcttttgttcaccttccgcttgttgaatggcttcttcgagcttgatgaagccttcggctcggtcaaggaaatcactcattgagtctaccggcccgttcttccttatagccttccaaagttcaccgcgaacttcgatgcccccaatattgcagataactttccatcctcggttacccgcgaaactttggtcgcttccgtcatgaatctgc

SEQ ID NO: 367944 - DNA, 658 bp, Cannabis indica
aattcttagaagaataagaaatggtgcgtccattgaaaaaagagataattacataagacacaattttttgtaaaaaaattatatttttacgttgtaaagaatttttttttttatatatatttttatgatttttcatagaaacaacacgaaaacagtaagaaaattatataaaagtaacacgaaaataacatctatataaaaaataataaacaaataacaaaaaaatcaataacaaattaacaagattacaacattaaaagactatggtgtcgtttagtaacacttttgttttttaattttttaatcacaaaatgaaagtaaaatttttattttgaaaagatttatttgtaagaaataaaaatgtattctctaactacttttgttttttaattttaaaaacagaaaataaaagtgtgttctgtaaagtttatttttattttattttttgattttatttaagtcgggtcaagatccggggttggattcgggttcgggtcagaagccgggtttatcgccaagacggtgaggaagggatttgggtccgggtctggttgtaatctaaaagattgattaagaaaaaaaactgtttaaaaaaatattaaaagtaattttttttatttttaaaattttgatttctaattataaaattgaaaagtaa

SEQ ID NO: 367945 - DNA, 690 bp, Cannabis indica
ctaatcagattgtaatgagttttatttagggcataaaacccaacaacctccaagaagcattgtcttctttagatgctaacctttggcaagaggccatagatgatgaaattgactctcttgtgaccaacaaaacctggcacgttgtaaacttaccacctggctggaacgctataggttgtaagtagatttcgaaaaagaaattgaaacttgatggaactattgacaaatacaaaacctgtttagtagctaagggttttagacaaagagagaatgtagatttctttgacacatgttcaccaatcagtagaataatatccattagagttttaatttcactagtttccatacacaacttagttgtgcaccaaatggatgttaagactacgttccttaatggtgaattaaaagagaaaatcgacatagatcaacctgaagggttcgtgatccttggccaggagcataaggtctgcaagttggataaatctctatatggtctaaagcaggcaactaagcagtggcatgaaaaattcgacactttagtcattttaaatggcttttaagtgaatgaaagtgataagtgcttctattacaaatccaaaaataacatatacacaatcatatgtctatatgtggatgagttactcatttttggctctaacattcatgtcgtgaacactgtaaaattaatgt

SEQ ID NO: 367946 - DNA, 359 bp, Cannabis indica
ctctctcatcatggaagctctcccatcaaggaagccctcccatctcggaatctctcccatcatggaagctctcccatcccaaaagctatcctgtcatggaagctctcccatcatgtaagctctcccatcctgaaagctctcccatcctgaaagctctcccatcatggaagctctcccatcccggaagctctcccatcgtggaagctttttcctggacagcaagggctcaaaaattcacaacttttaggccccaaaactgttggaaatattttaccaggatctagatttactaacaagtatgtttcattaacaacctaatatgaattctaaaacaataaaaataaacacataagagttta

SEQ ID NO: 367947 - DNA, 503 bp, Cannabis indica
tgcttggtatcaggaactaagaagtggccaagcttgctgttgaagccttcaggttagagatggagattgagaacgagcgtcgggaaaagcaattttatgcttaatagatttattgcttagttaaaagagttaattattgagcactttgccttgattacttgtaatagggagattgggataattttctgctttagcgttgtctgctggattaataatatgattggaaaatttaaatatcattcgttattagtaggtaaggatgattgttgagggtggagattaacctttaactatttcttgaatatcgtagtatcgcattttatttactttcttaattttatttgttaattttgttactaaaaaaaataaaaacaatctccatttttattactttttaattattgaataatagagtaaacatagtcctcgtgggatcaacccgtacttgcttttatacttaaataattggaagtatggaattaaattaattagtaaatttgata

SEQ ID NO: 367948 - DNA, 511 bp, Cannabis indica
accccacaaagtaaaaatcctgggtccgtcactgactcctacgggtaagctggtaacaaacaagttaaagaacccgtatagtataattaagctagaatttaatcattcaggattgagatcaattgacctaagatcaactaagggacattgacttagaaaatacatagcgataagtttatgaaatattttccactatcaatatcagtccagtttgatgtatagccaatacattagatacatgtttactttgctaatgccctgaaaaagacatcccacttatacaagtataaataaaccacatcgctgattatcacgtcagtataaattcagtacactaataaatcgtgggactaataatagtttgaagaatataatcatgaataatttctatattgtagacaatactataatcatgagtaattatatgttcgagatttaatagaatttatatattaaacatataatcatgtaattatgtgaaccatgcaacataaaatgatttatgatcttt

SEQ ID NO: 367949 - DNA, 672 bp, Cannabis indica
gacatttttatacttatccatcatccagttgacatcatatgtcaacttaggcactgggatgtcaaccttgacactgggtcatgaactgtcttcagtaaaacagccataacccactcaatattgatccaattgacgcgattcaatttgtgttttgaagataagtaaatgctctattaagtcacatatcagattttaatcgcaattctgaagccgtcgatcttaaaattaattctcaagggagttacaaaaataagctccgagttacctgtagcaggtcccgcctaggcaccaaaaaattggctatcaccactagaagctaaatttcaccattggatcatcatctacggtcaaaaaatcaaattttttttctcctatttttgtcggcatccttcacctgtaaacggagagctcccttagctcattttttactttcaaaaactaacccacaagatcaaagcatctctctccagaaactaaagcttacgtacacttagcatttttctgtattatcatctcgtgagaaataaaaactcaaagtagacgtagctctattactattgggacatgaggagtaaactactataaattgtgtatatgtctctctaaattatttttaattttacatttattattcatctcgtcaatctagcgagctggtgttggctacgtttt

SEQ ID NO: 367950 - DNA, 622 bp, Cannabis indica
tcctattgtacaatttaaaaaaatacaaggttcattttatcatttaacaaatcagatgatgcaattagtaacttttgcaaaacacaaaattaaaatgttatttacctaataaacaactaaaattgacgaaggagaaatatggattactgagaagagtttatatcgtgtgcgaccaagtaagagtttgcagaggtggatgattgagaggaatccacctcatgaagtgatgatcaatatcaatggaactcatcacatggttatgttctctaagccactcaagctcttttttcccacctacaacagattgcacacaaatattattaatttattatatatataataccatgattgatcattttagtatttgtgaaaagttctaataagtccaatataaatttttcgtattttttaattatttgtatataaagttgtaatcgatcttttaaattttggacatttggcttgggagatttacaaaaatattggaaaaatgagaaagtttggattcatatgacatgtaaatttaattaatgtatcaagtatgatattttttttaaaaaaaaacttaaaaatatggaatgataaatcattatagtttttttttttttgagatgaaatatca

SEQ ID NO: 367951 - DNA, 772 bp, Cannabis indica
tctataattctgaaattacgtttaacaggagaaactattaaataccaacaaatttagccagccataaatgagacaacagcaactagaaatgtatctaatatacaatgaattaaatggtattaagatatgaaagaaagaacactaaaccctaaagaggaatactgttatgatctgatttatcctgccttttcaatactacctgatgtgaataatatcacatcaacatggtagttacgaacttcaattggtaagttgcttcgttctgttccagtttcttgtttggaatttggtcttgatagacttgacttgcttctatttttctaggttatctcccagtgatttaggggcggtgctttgaggcactcttttaaaatcctttcggttatataaatgaaatctttttattctaagaaaaagaagtgaaattacagatatgaagagacaaaccttatggaatatgaacttcaactaagataaattatgaatcaatgtgcataacgagccgtgacatagcattttagcagaagaatcttgtctaaattatgcaaaaccaaccagtattctggtctcttaagtttcagattattatacaatcaaagttacataattaagggaaccaacctccgtcgctgaagttgaagttcagtttctccagcaccactaataaacccgcgtccaccacttcctctcctgcaagcaaaacatatcagatcatagtcttgcaatgctttaaccttcttttttacagcttagaaacagggcgatgtattta

SEQ ID NO: 367952 - DNA, 481 bp, Cannabis indica
tgtttttcttcatggagatcttgaggaagaagtgtatatggagaaacctcctgggtttgttgcttagggggagttagaacgagtttctcgtcttcgcaagtctttatatggtttgaaataaagtcctcgtgcttggtttggtaaatttattcaggctattgagaaattttgtttgttgaaaagtaagtcaggtcattctgtgttctataaaagatcaactattggtagtattttgttggttgtgtatgtggatgatattgttattactatagatgatacccattttcacacgaaagatttaggggtgctcgagtatttcttaggagttgaagtcactcggagtagacaagatatttatttacctcaaagtaaatatgtacttgattcgttaactgagacaaaaaattaggagcaacaccttcttgtactccaatgaatcctgctacgcatctaatgtgtaacaccctaactatcttaggcg

SEQ ID NO: 367953 - DNA, 614 bp, Cannabis indica
gccaccttaaaacactatcaaggagtgataaaagttatggaagttcaaaaaaatctattttgaattgtcaaaatagtaattattttattttgtagtaaataatttattttaaaattaattaaataggaaaatgacaaaagttgctaggactaaaggcacattctctctcttaactaagacaaaggagacacgacctacactatgtccagatatagtgtatgcgcattgtaaccctattagttttgtctttttgggtttattaattaattcaatagataaatatttaaatttaaaaataattgagatattctctcaactggttgataggtttcctcaatcagttataagatataaatatctataactgaatttcattatattatttattcaaataattaattaagatttaacgaaaattttgaatttaaataattaattaaatcaaacttttactgggtttatttaatatgccacataaaaaaaattctatatagtttttgaaacagaagaatttgtacgtaacgtttctaaaagcctaaaaatgattaaccattagggtaaatggcggcaaaactcccaaaactttcattgtggtttcacttaactcctaaaac

SEQ ID NO: 367954 - DNA, 1130 bp, Cannabis indica
cgagcctatacgtgtcgggggtacagttctgtaactcgtatggaccttccaactttggccccaatactcctactgtttgggctttagtgttgggcaagactctgcgtagtactagatctcctaccttgaagcttctttccttaactttggaattaaagtatctagctactttttgttggtatgctgctaaccgtatttgtgaggcctccctacgactttccaataggtccaacgattcattcatcagctggtgattactgacttggttgtatgtcgctcgtcgataggagggtgggtctagctcgactggtatcatcgcatcatacccataagcaagggcaaagggggtatcaccagtagctattctttccgtcgtcctatatgaccacaaaacttcgggtaattgctctggccagcctcctttcgcttcttcgagtcttttcttcaaggtgtcttttaaggtcttattgtccgcctctacctgcccgtttgactgggggtgtgagaccttcgagaagctctttactatgccatgcttaatgcagaaatttgtgaacaggacactgtcaaattgggtaccgttgttagataccaatttatggggtaatccaaacctacatataaggttcttgaccacaaagtcaagcaccttcttggatgttatagttgctagtggttcggcttctatccactttatgaaataatcgactgctactaccgcatattgcactcctcctttgcccttaggcaactgaccgatcaagtctataccccaaatagcgaagggccatggactctgcatttgcgttagctcgttgagtggagcccttggtatttttgcaaacttttgacatttttcacaccttcgaacatactccatggagtcttctatcatggttggccagaagaatccttgccttagtaccctcttggataagctttgcccccagcgtgattaccgcaaaaaccttcatggacttcttccattagtcgttgggcttggtcttgatgtagacatcgtagtaggggcattgagtaccctcgcctatacatgacgccatcaatgattaggtaccgggtggccttccttctctattttctttgcctcgtttttgttgtgggcagtgtcc

SEQ ID NO: 367955 - DNA, 671 bp, Cannabis indica
ggaacactttggaataaaaatatctcctcctattttactttcagatttagtcatattcttagaaaattagtatttgttgaaacaaacactaccttatcttaatgaccataggatgtccacccctaatcacattagaatagctatcaaacttgcaaacttaagttaataattctagcttttcttatgttcacaatcaggacatccatgattctagtaatggtatacactaagtatataacaattctatcattttgaagttttcttatcactagggtatttccctagaaggacttaggcagctaccagtaactaatcataaatctttcactttcatcaatatgtaatctgaatttctaaggaggtaagtttgaatactattaaaagttaaacttaatgatttttgaactgcataaccaaatatttttcacccctatcaattcgcaagatctttaaccacttaccttaatatcttttcaccaatgctagaaattcatgaaatttctcaaacatttaaaatttctttgtataaggtaaaatatagagtgatcgttgttgagaatttaacgataactcatatccaaccctatatgtacacccatatgtttgaatacagatgatcctacttttgagtggatataggcatattttctctttatagagattgatcttgt

SEQ ID NO: 367956 - DNA, 541 bp, Cannabis indica
ctgacccaactcctggccaaaagaatacgcagcctgcgcttccacgaactccatctttcagattcaagatattagcattgctatgaccgcggtaagtctttgtaaattttttctggggttttactctgtggcatttgatctctcatacttaactcttttttcttcatttttctagatcgctgaagagatcggtcgcctctcaaagactttaattgatcatgggtatgtcatgttcgagtttaggggcatggacgaggccatgaagtgtttgacagatctggaggctgagaggaaggcgttccgggaggaagcccaatagcaggaggctcaggcagagaggaggcatcaggaggtgttgaaggccaaggcagaggggctgaagacccgagatgaggctgtggaaaaggcaagacgcaagctgagggaggccaaggaggcagttaaagatctgactaccaggctgaagtcaatggaggagctgcatcaggctgacttgcagacgacgaccatcttgaccattgaggtgaaggagcttagggat

SEQ ID NO: 367957 - DNA, 672 bp, Cannabis indica
gtcattcacaattttttattttcttttctcgtcagaaagattctttaatcaaaaagctttaaaaattttgaaaatttttaaagttatgggtttacaatatatcatgtatttccagataaattttggttaatcatacacatatgcccctcaaataattttaaagaataacactttgtaattacttaaaaaatgattaacttcattaataattaaagttcaaatattatatcaaaaatatgagttagcatcagtttacttgtaatagggtcgcaaatgttccacgttatagtagttcttcatcaacgagccgttcagccgagccaatttgtaaaccccagttcctactatcgctttgatcacataaggaccctcccagtttgggttgaatacttctgcagatgcatctctcttgcaaatactcgccttagcatcaagtctccaacattgaagagcctctttttcacccttttgttgaagtatcttattactcggtgttggtatgctacattcgtaatctacgactcaatacatttttaatcaagtagatccaaggacaattttaaaagttcttagttttcttcttgattataaactctcgtttgtgagtcgagatatttacttctacaggtaacattgcctccgagccaaatgctagcaagaatggagtatgtc

SEQ ID NO: 367958 - DNA, 587 bp, Cannabis indica
ccagtctccttcccggaactagaatctgactaggaccaacgacccacgacccggaccgagacacgaagccgaattaaaactcagatcgggactcaagacaagaacccgaacctagacacgaacttggacccaaacccagacgcacagcccgaaccgggattggagactcagacttggacccaagtcctagagctagattggggaagcaaacttaaaattagaaccaaaatagggacccaagagtgggattgggacccaagacctgaccccagttttagtcctcgaccggactcgaacccggacccggacctggacacggacatggacccagacacgaacacagacacagactaggacccaatatccgaatcggatcgagaccaggttccaagattgggatccaaatcttgacccacgacccggggcttggacctaacccgtagtcagtttctcgatcttggaatcgtaccaagacccaaacctggaaccatttctagaccaggacctaaatctagactcggactcgggacccgaaatcagaacaagaatcggaatgaggaccttggaactggaattggacctagacc

SEQ ID NO: 367959 - DNA, 668 bp, Cannabis indica
tacaactaaaagggagtaggctattaccatcatcaaggagacgaacttctataattctggtgttctctttattttacattattcatatttgttattttaattattcttaaatcactttaatttaactcactgttgttggctaaaaacaaggtgaatattttggtactttcattgagagcaaagaaacacaagtttttgttttaagtcttttcaggacccaaaatggttgtaacaacacgaaaggaaaatcaaactagcactacggatctaatggctttagatccaaacgtgcagacacctataaaccccagagattgagccaggacagaccctgattcgactaattctcagccaacaacatgcccacaaacagtaggataaggagtgactacccctctggctgggttcactctaggcgtgcaagaaactggaaccactagtactcggaccaagcaaaatgctcccgatactagaatcccatctgctataaattctcaaaggtcaatcagtgatgacaccaaactacaaaacttacgagctgcagtagggaatagggctgagcataaaatccgaaaaaccgaaaaaaccgttcaaaccgacttaccgaacaccgttaaaaccgaaaccgtttaaaccgaaaaaaccgacaacggttaaaaccgccattg

SEQ ID NO: 367960 - DNA, 732 bp, Cannabis indica
taaaataatttccaatagaaagtccttagcatgcaatgaacaaactaagtataaaagtcagatcggctcaagagcaagtaagcgaggtgactgtctcgctatgggaagacttcctgtagctttatccaactaacggttacacgacttacaaccctagcgagtcagaagaagtctttgcaagtaagagccacgatcgacaccagacctacatcgtcgacctcgaaagaaagaatgaccccaggttgctattgggatcgctgtaaccaagtttctatcgagacatctccagacacaacaatgaaagatgtatttaatacacgattgtcttgacccagtaaaagaaggaaaatcacagttatacgattttgaaatcataaactacatttacactacatgatatgtaattcaaatcccatgattttagggatgattgttgtaaacatattatggtcaactttataattaactatccactatataattttaaataatggtagacaagctcaaaaaaaagacgaaaaactctcatatgagagaggccctaaaaaaacacacaatcagaaatctaaatacgattgacttgtggactatgcagaattttaactgcaaaaccacgtaaaatcttgtgttcatatgttattcttctatagcttttattttttttttgtgtggaattattatcgtgaggctcaaatttacttaacgaaaatatgcgttaacagtttggtgctt

SEQ ID NO: 367961 - DNA, 930 bp, Cannabis indica
ttctagatttactaacatgtatgtttgatcataatctataatctaacatcctaaacatgaatttcctgaaacaatgaaataaacacataagagattatgaaatccttacattaatggcagcggaataataatgactcctcccatttagattactagcccttgattcctttctgtagcagagtattatcaagatctgaacatggatcttctcttctttagtttggttagacacagtcttccacactatgctaggtattgctttgatgagattgggcatactctcaatcacaatggctttgaattattcagtatagaagaaaaataatttcgaaattggaagaagaagaagaagaggctctctctttagtttctacttgtcttacagaagagactgaagtcaattgttatctgaaaataagagctacacttttcatttcatagggattcaataggtttagggtcagagctaaatgggttgatttgaaagatccaatggcttaaaatcctcatcatggtcgaacccttttagtgaagcccatgagttagaatttttcattattttgtgttcaccccaaaacttagcattcttaaagtttgagattatggtagtctaggaatcaggatacgtccgtgctatcccgaaaggttacctcgtgactctaacaaatatacatgtgcgcacacatggaagacccgcatacaagtccatgttcaggccccgggggccaggtttgctagggattatgttaccaggatctagatttactaacatgtatttttgattaacaacctaaatatggattttctaaaataatgaaataaacacataagtgattagaaaaccttacaaagataatattacatactacacttgatttggacatcaaggtgttgagattaattgaaatgcccttttagttttatattagt

SEQ ID NO: 367962 - DNA, 518 bp, Cannabis indica
tgtcctcttttatttttaccatcttttttaaagtttatcattttacctattttttaaatattgtaccaattttgtccctgtcacttcaagatactctctatgtgactctcttatgtcggggtattttaagtataatacatatgaaagaggtatgtttaaattaaatataaaattagaggtaaatttaattaattgattaataaaaatgatatttttcaacttacacttacgcatgtaaattccccttattttttccatatatatagggattaccccttaccataaagcccagttttatttcggcccataatgagaaatcaaattaacgggcttggtttctctggcccattggtgaaatcacgttcccaaatttcgcagtctctcctttcagttccaatttcccaactctccattgaagccggagctctctctctctctctctctctctctctctctctctctctctctctctctctctctcgtctcgtcgtcgtcgtcgtcgtcgtacgtacgtacgt

SEQ ID NO: 367963 - DNA, 656 bp, Cannabis indica
aaatgcaagaatcaccatcagggtgaatgtcgggccaaggctgtgtaccatatttagtatggattatatgaatcagatgttccaggattacctggacagatgtatgattatgtttatcgatgacatatttgtttattctaaattagaagaggaacatgagttgcatctcaaatcagtattgcagcaattacgagaccacaagctatatgctaaattccaaagttcgaagtctggttatctcgtgtttctttcttaaggcacatagtagataaacatgggatcatggttgatccgaccaagattgaagctgttcgggattggccaacaccaaaatcagccactgaagttagaagctttttgggcttagctgggtattatcgtcagttcgttgatggtttctcaaagattattgcacccttgacggagctgacccgaaagaacttgaagtttttctgggctgattggtgtgagaaaggttttttggagttaaagcagcgcttgattaccgctctagtgctaactcttccttcaaataaggaaaagtttgttgtttattgtgatgcctcgagacaaggtctcagctgtgttcttatgcaagcaagaaaggtaatagcttatgcttctcgacagttaaaggagtacgagtagaggtaccc

SEQ ID NO: 367964 - DNA, 751 bp, Cannabis indica
gggcacaaaacccaacactatgacctacatagagtcatattgtcccgtagtcctaggtaatccaaccacgaattccatggcgatgtcttcccatttccattctggaaggttcagtggctgtagcaaccctgcaggcctttggtgtttagctttcacctgctgacaagttaaacacttggcaacatactctgcgatatcattcttcattccaggccaccagaacatgaccttaagatcttgatacatctttgttgtcctcggattaacagaataatgagtcgtgtgagactcattcaaaatttccctcttaatatcatcatccataggaacacagacacagttcataaaccgtaacattccaatactatccattgtaaaatcactagtctacccagctaaaatcctatctcgggatttcactaagtccagatcttgcaattgtgcttctttaatctgttctagaagagtagattgcatggtaatgttagctaactgccccacaaaaaactcaatagctcgggtcatttcctctgccagttgcttggagatctgtttcattatattcatctggttcttacctttcctactcagggcatcagctataacactggccttctcaaggtgataaaaaatttcacagtcataatcctttaccaactcaatccaacgcctttatctcatgttcaggtttttctgggtagagaagtattttagacttttatgatcggtgtatatctcacatttctcgcca

SEQ ID NO: 367965 - DNA, 513 bp, Cannabis indica
cacaggtcgaggtggcacaaaatttgttgtagtcgacttcttcacaaaatggacagttgctgaacctttagtatccattacatataaaaaagttcttgattttgtcatcaagaacattatttgtagatttggcattccaatgaagatagtatccgacaacggtactcagtttgatggaaatttatttactgagttctgtgaaaggaataaagttattaagagcttctcgttagtgtgaagacctaaagcaaatgggcaagaagaagcagttaataagaccttgaaggatactatgaagaagaagttagacgctaccaaaggaagatgggttgaagagctaccacaagtgatctggcctataaaaccatggagaaaacaacaacgggacacactccattttcattggtgtttggctcggaagcaatgttacctatagaggtaaatattgcgacccacatgcatgaattctaaaatcaagaacaaaaccaaaaacttctaagtatgtccttggat

SEQ ID NO: 367966 - DNA, 518 bp, Cannabis indica
cggctatttctctgcgaattgcgtcgagtgtcggtcgagctggtctatctgcgaggacaagaaagagcgagttaacataagatctcagaataaatcagaaaatgcctaagttaaaaacacgcgacatactaggcctgcgattaaagtcagttctaatcccagactttaatgacgtagaaccacttcgatttccagtcccccatgttcgacaccattccctctactccattgatctcagaagtcgcccatttgctaaaacagtagaagccgttatgaagaactacgctttttatgtcgtagaaatagctgaactcttctactgaggaagccctatgaacatattccatgtacatcgcatagaaggctagggcagtgcgataactatttggagttagttgaaaaggcgatacatcgtatcgcctgagaatagctgcgatgaaaggatggaaggggaccgatgccccacactagagaatgggtattgagactaccacatcctctgtgggaataatcgcagg

SEQ ID NO: 367967 - DNA, 501 bp, Cannabis indica
aattttactcttaattgaagatccatttttaatacgaatcaaaacaaagaacaaagcaacacaaacagactatttcatttcagtattcagatttagatataatatcttaatacattttaaaagttcacatgtcaagtcatagtttttttttggtgtaaataagtttgatctctcaacttttggctatttcaattcaaaccttactttaattttttgctcttctttattgaaatttataatatttttgtacattgttttggttatggaaccaaaattagataaattgttgtatcatagttatttaagtttaaataaattagctgatcttatagtgaacatcttatgtctttgcagggtcgtcttaaacattttagaggccttgttctaatcttaaaaatttggcccttactaaaaataatagtataattaaattctaagttcaatttatttatttatttttttaggtagaccaagtttaaaaatttacttctagaagtttta

SEQ ID NO: 367968 - DNA, 630 bp, Cannabis indica
gagcattcttctatctcatccggaaatctcatagcattgaacacattaaaggtgactttttggtcattcaccctcattgtgagctccccattttgcacatcaatcagagttcttccggtagcaaggaatgggcgacccaagataataggcacatctctatcagcttcatagtctatgatgatgaaatcagctggaaaaataaacttgtcaatctgtactagaacatactctatttttccttctagatgggccatggacctgtcaacaagttgcaatgtaacagctgtaggacgtgcttcaccaatacccaacttcttaaagatcgacataggcatgaggttgatgcttgcacccaaatcacataaagctcttccaacatcccgtcccccaatagaacaagggattgtaaaactaccaggatccttcaacttcggtggaatcttacttttcaacatggcgctgcatccttcggtaagagctacagtttcaaactcccccaacctccttttcttcgtcaaaatgtcttttaagaacttgacataattcggcatttgctccaatgcttccaccaagggaatattgatatggagctgcttcaacacatctaaaaacttcttgaattgcccatct

SEQ ID NO: 367969 - DNA, 658 bp, Cannabis indica
atgtatttctagatgaatttcggttaatgataaacacatatatatatgtactcctcatgtaattttaaagaatgaaactttgtaattacttgaaaaatgatttgacttttttgataatcgaagttcaaaatattacatcagcaatagagattacaacatcattttactggtagtagggtcgtaaatgttccatgttctagtagttctttattagtgagccattaagacgagctaatttataaaacccgattcttactattgcctcaatcacataaggaccctcctagcttgggttaaatactgctgcagatgcatcccccgttccttagcaccaagtcaccaaaactgaaaagcctcttcttcacttacttgttgaagtatcttgtcactcggtgttggtatgttgcattggtgatttgcgacttagtacgcttttcgttaagtagatccaaagacaatttcaatagttcttggttttcttcttgattatagaaatctcgtttgtggatcgcaatattgacttttactggcagcattgccttcaagaaaaatgccagcgagaatagagtatgccttgttgctattttctctattgttatgtgagcccaaagtacttgtggtagttcatcgacccatctacctttggcagcgtctaact

SEQ ID NO: 367970 - DNA, 672 bp, Cannabis indica
attattataatccaaatagtcaaaaattctctatagatgatctacatcgagtaaggacaaatttaaagttctacctttcaatgtattttaaccttaaaattctttagctacttgtaaataatatttcaataaactactataattagtgaaaggagcgctcaatacattatcgcattaagccaagcttgaacgaaatcatcgtttcacttctagaagttacagaagctattgattctatatctatgattagtgctcccactcaattgtactaccatgttcccaagatgtatgtattgggaagatccacttggttaactttaatgaacaagtcgaatgacatgaataatacatttaagacagaacctaaccatctcaggattaaaatctattgacctaagatcaactaaatgatattgacttagaaagatataatggtaagtttatgatatcttatctaatgtcaatatcgatccagtcttatgtatactccatacatccgagactaacatactttgccaatgccctggaaaggacattccacttatccaaagtgtaagtaaactttatcgctgattatcatgtcagtgtaaattcagtgtactgacaaatcatgggactaaactttaaacatataatcataattattttccactgtgtagacaacactataat

SEQ ID NO: 367971 - DNA, 830 bp, Cannabis indica
aaaacgggaaaaactagggttcaggaaaaattcccaaccggcaggccggaaccccagttcctgggtaccaaccggtcgaccggttgctagaggcttcccagaaccggtcgaccggttcatagctgggaacctcaaaaccaacccccacttcacaattcaatcccaaactttgtaataacttccagaatacctgtacacattattctaaaccaatcccaagcagcaaatcacaacaattcactcaaaatccaaaaacaccattaaagacctaacttaggttttctaagctctaacttgagtaattcacaacctaaggcttaaatctaacttaaaacagtaggaataactattattcaacttcagcaaatgaatccaaactgaacatacatatacagcccccaattcaaacctaatttcacttatttcaactcaaaactcaactaaaactcaaataaaaagttatgaggatataccttgattcaaagtgttcaatatctggttgagattaaagaatttcagcaaagaaacaatcttctccttgctgggatggtggttcgaaagaaagagaaaggaagaatgaggagttgctttgaaatttctaacttatttcacaataaatcctttccttcaagctttatctattaattcaacataaacctatggctgcttctagtgctcactacaagccaaaataaaaagaagaaaggacctaaatgccccttaacctaaataaaatagttataaccccccaagggcaaaatggtcaaatactaatccccgaaaattctaacgcctcctatagccaacgataatacctcgataatattcta

SEQ ID NO: 367972 - DNA, 658 bp, Cannabis indica
cttcagtatcataatgcatgttcttaacaaaacacaagccataagcaatccgtacaaaatactagcatgttcaatacataaataacaaactcccactgagcttaacaagctaggcttccaacaatcccattcgggcaacatgctccaaaaatacacatatgggtaagcctttcgttagtgggtctgctaacatgccagtgctaggcgtgtattcaatggaaataagagactctgtaactttctctttaacaaaatagtactttatgtcaatatgctttgagcgagaagtacttctagtgttcttagagaaagctactgctgcagaattatcacaatataatttcagcggcctcgtgataaaggctacaacatctagtgctgaaatgaaattccgcagccatattgcttgacaagtagcctcataacacgccatatactctgcctctatcgtggatgaagctgtgagtgtctgcttgacacttttccacgatacagctcctccagccatcatatgaatgtagcctgaagtggaccttattatcgtccacgcatcccacacaatcggcgtcactgaacccaactatatccagagtgtcagctcgccgataggtcaacatatgatccttagtaccctgaagatactgcatgaccttcttag

SEQ ID NO: 367973 - DNA, 613 bp, Cannabis indica
ctagtttgatcacatgggtaagtttagaaccttatttcttagtgagatatatattagagaaaataaaataccgaggttgtgcagggttatggtttttgaccattttacccctaggtttgaataggctaaaaattaagcattaacatcattttagtcttttgccaaaagaagagataggtggctgcctaggttcatgacacctagtaaatatcatttcagcaagattaaatcatttaatcttttatcacttaaggaaaaataaaagaaattagaaagataagtcaagtgaaggaaaaccctctctttcccttctctctcttcgaaccagccagaaaaccagggggaaaccattcaaaatcctcatattttctagaatcaagctgagtatcaagtgttcttggggttgaggtaatccctagttccatgttcttgtgtttttaagctttgaatttggtttcatgttgtgattttaagtgttgatggctgttagggttagaaatttttagggtttggtttttatgttcaatttaagttgattgagggttctggtagctggttttattgcttggtgttacgatttcacaagtttgtgctttgaaacctaagctttgat

SEQ ID NO: 367974 - DNA, 813 bp, Cannabis indica
attttagatcaacttaaattataatatttttcttagatattaaattagaattaataattaagttgatcttattcaagatacttaattatttgtttcttatacttaatacatttaattaaatagaaaattaaatatttaagttgattttattctagacacttaaatattagttattttaaaagatatttaattaaataaaaaaattatatttaagttggaaattttaacttcaaaacaacttaaattagaataattttcaaaatatattttattttattttattaatcattttcccaccaatttcataattgcattatttaatgcagataattttgaatttttttttttgaaaaatagattaaagttgaaaaattaattattttaaataagtttagatcaacttaaatcaagtaaatttttcattaatgattaactaaaataaatagactaaaatatattatattttaattagaaaataagtaattaattagtgaaatatctaaatagttatcttctgtttgcttgaagtattttctagttatatttaattaaatagaaatttaatatttcagttgattttattcaagatacttatatatttgatatttttttttagaaatttcattaaataggaaaattatatttgtgttgaaacattatttattaatttaattttggaccaacataaattagaataatttttcgggatttattacattttattttatattaaattttgaaaatgtatttattttaaatacattggatttcgaattttgctatatatatttatagaaaattaaatttgagttg

SEQ ID NO: 367975 - DNA, 492 bp, Cannabis indica
tctaccttctctctatagccgaccctcctctttctcttttcctcttcacaatttcgaattaccctagtgaaagagtagtgcccacacacagcaagtggtacctcgatcatagtctggaagatcgtgaagaatccaaattaaagagaaggatattcggacatagatcttgataatacttaaaataatttccaacagtaattgactcaagcagacccaaaacatttgggccttaggtagtcaaagtggttaaagactttctcgacgtgtttcccaaggagttgccgggattttcgccacatcgagaaattgactttgtgatcgatttggcacatggagcggaacctgtttctaaagctccatatagaatggctctagcagaactcaaggagcttaagctacaacttcaggggatgcttgatattgggtttactcgacccagtgtatcgccctggggagctccgatcttgtttgtgaaaaagaaagatggttccc

SEQ ID NO: 367976 - DNA, 808 bp, Cannabis indica
acatattttgtaattgtatatatgtatgtaaatgtattgtattgtatatgtatacatacaaatattatacttatatattttatatttttttatgtattgtatatgcatatattgaatattttaaacaaatagttttgctatatattgtgaatgagaatgacatatgtgagtattaaaacaaaaattgtaaaaattaatttctaaaaaattagtttataaattaatactatttttatcgttttctttttttttattatatatattttcaattttattcatgtgtttttattttttagtagctagtaaatagttacttataactacttaacaagttactaatttttattcctattgatgtatttttattactaactagttattcatattagtaactagttagtaactagttactcattaattatataactaataagtagttaaataaataattttttaattttgtagtatttttttacattgtaggttgtgattgtcaatttgtaaggattcaacgtacttagtgttgatcggtttctgataactctatgaaaatagagttatttatatctttttgggcattaaattagttttgttctcaagaatttttagtttattttagtgacttttatttggttttctttaattttgcataaatattaattttagtattttgaaattagttttaattaatttttttaatttttatttgtttatttagtctcccaattaattaaatacaattgtgtgtgatgttgtaggaatttaaatgcaaaattgatattaagtgttatgggccatgatgttgggc

SEQ ID NO: 367977 - DNA, 675 bp, Cannabis indica
tcagaaaccagaaaaaaaaatacggtcgtcgtgggttgtcttgggtgcttctcgtgggtcgtcgcgagtcgtcatgggtcttctcggtcatgggtcctcttggtcggtcggagctcgtgacagtcggggctggatgggaataacagagagagaggggggaagttagacagagagagtgggagaagagagcttttgaatagtaagggtaattttggggttttaggatgtttggagaatatttagagtgtttattcaaaggtggtatattaaaagaatagtctaaatttttaattatattttaacaaatttcccttctattattactccactataaatatagaattgtactttttgacaatatagtattatatttacagaattcttactattagttaattgatataatcaatataagtaggggtattcattggatcacatccaagacattcaggtctattcagattcggtccaattatatattggatgatagattttaccatctgatccaatctaattaatttcagtcatccaattgattcaacacccaatggatattagattagattgattctatccattcgatatatttcatgtatatctattagttttgtgacagtcagtagtcccgtgatccgtaaggggaaataccgggtaagctgtgcaatcccacaccgc

SEQ ID NO: 367978 - DNA, 987 bp, Cannabis indica
gtttattatgttatacttttcttactgagtctgtcgactcacagtgctattgctatgtgtaggtaagggcaaggctaaagctgaggagccgtgagagcgagcaggtgaagattgtacatgttgaggcggttaggcttggagcgcacgatcctcgggacatcagggcttctgttgtttagtcgttgggcgaaaaatcttttgtaaatgaataacaaacttttgtaattgtattttttaaacgggatcccagaattttataagtataatatgttatgttgtaattaaaaagcaaaattttaattattcacatttttccaataacctcgttgattagcaatgagctgcacagtatgttgaaaatcatgttaacacgcctatgctagttacggtgtttcatcttacctgttcgaacgaacttctccattgatcagtatgctgagttatatgttagagaaattgtttgtcttcatggtgtctcaaagtccatttttcggatagagatttgaagttcacatcaagattctgggagagtctacatcgagctatgggtactcagttgaaattcagcacaacatttcatccttagacggatggacagtccgagaggactattcagatcctagaagacatgcttcgggcatgtgtgcttgactttgaaggatcataggtaaggtaccttcccttgatcgagttttcgtacaacaacaactatcaggcaacaatcgggatggctccttatgaacttttatatggaagaaagtgcagatcacctattcactgggatgaagtgggtgaaaggaagttcctaggtcccgaggctgttcagagaacaagtgaggcagttgataaaatcagagcgcgaatgctcgcagctcagagcagacagaagagttatgctgatccaaagcgacggaacattgattttcagattggggacatggtatttctccgagtctcacctatgaaaggtattaaatgctttggtaa

SEQ ID NO: 367979 - DNA, 620 bp, Cannabis indica
gtcaccatctgtgggattcttgcacctgactctgtcaagggaaacttttggggctttcttttttggcaagtgtccggagggggcctctttccagcggttaggggacccccattccctttttgaaatagggtttggtttggggcctgactgctggattttttcaatctttttcagaaccaaaaatgtcttcttcagcatccggttctaagtcatcaaagaagggagagaagcgtgtggccaccctggaggaggtcatgaagggtcccgtggcccaagaagggcacaagtcccgtgccaacgggtgggaagcggctgagcttcattctaccctgacctgggcccatcagctggagcatattgtggttgtggcaggcatcaagccttccacctccgggacctaccaccggctgccccgggacgaggagacgcccaaccacaactatgggggtttcgaagcctggagccagacgcatcttatggccggggccatgctccctctccaagattatttcattaatttccttgtatttgtcggccttgcgccatatcaacttatttcccaagctcaccgcctgctttcaggcttgttccattttttatgctgcccggagctggggctc

SEQ ID NO: 367980 - DNA, 530 bp, Cannabis indica
taactaacttaaccaactcttctctgagcgagatctccacatcagcataagtcttagtgcatccaggaacaaatgtgagcttttagggtcacggactaggggtgtttacggtccgggtggtgcgatttttgaccattttttttcaaaccaacccgcacatgcagttctgctaattttccaaactgcacccgcactgcgaaactaaaagaccgtagaaaccgcaccgcaaaaaatggtgcgatgcagtgcggtttttgtagttttttgcaatttggactatctctaaataattaaattatcacaaatacaacaaagcttaagcaacacttgtcaaaataccatataagacttgaaaataaatatgaaaaaaataaatttcaacaatacaataattagtgggctttgggttggacattcacatattagacctaaataaatataaaaaatggtatttttataagcggtatggtttgaaccgcatattaacaattcaaaattgaaaattgcaccgcatcgcgcggtttggaaaa

SEQ ID NO: 367981 - DNA, 537 bp, Cannabis indica
agtgctccttaggagtcagctcgtgtaagtttctgggctttatattgttaatgcccgaggaattgaagccaatacagagaagattcaagttctcctggatatgaaatcgccaacaagaaccaaggaagtacaaagttttactagtcggatctccgcactcagtagatttgtttcaaaattgatagacaagtgtgttccgttcttcaacatcctgcgaggaaacaatcaatttgagtggatagaggaatgtgaaaaagcttttcaagagctaaaaatgcaactcacaaaacctcctgtactctcgaaacctctggatggagaagaacttgggatatacttggctgtaacgaagcacgctgtgagtgctgtactgatcaaggaggaaaacaacatacaacctctggtctattacataagtaaaagactcattgaggacgaaggccgatacccattgatagagatcctcacttactgcctgattctagcaacaagaaagttaaggccctatttcaagctcatcttgttcaggtgtacact

SEQ ID NO: 367982 - DNA, 622 bp, Cannabis indica
catgtcaggattaagatctatagacctaagatcaaccattgatattgacttcgaaagatataacggtaagtttatgatatcttatctaagatcaatatcggtcccttccaatgtattctccatacatatgatactggtaaacttttccaatgttctggacttaatagaatttatatattaattataaccttgaaataaatcatgtgaaccatgcaacataaaatacagtttctgatctttattaattagtaaatctgattatattgaaatgagttttttttagggcacaaaacccaataagcttccacttgcaataatataaatcaaaaagtgcatttcaattaatctcaacaccttgatatccagatcaagtgtagtttgtagtatactctctgtaataggatttgacaggttgtattcaatacaacctttcctccacaattacatttcattaatcacaaaatccttgatattgggaaattcctctctatatgtctactcctctagggatacaggattctttactttttgaccactacttttgtgttagtcaggaagtaacactagtaattcataaatattggtaaaaatttcaaaaactgtatagaactttccatagact

SEQ ID NO: 367983 - DNA, 614 bp, Cannabis indica
gcccatatcaagtacgaaaagcaattttgggagtatcctcttcccgaatccttaactagtgataaccagatcgaaggtcaatcttggagaagatggtctttccttgtaattgatcaaacaaatcatctatccttggaaaaggatatttgttctttattgtcaacttgttcgattctcgataatcaatgcaaatacgtaatgacccgtccttcttcttgacaaacaaaactagtgcaccccaaggagaggtactcggcctcgtgaatcgtagatcaagtaggttctgttattggactttcaattccttcaattctgtcggtgccattctatatggagccttagaaactggctcagcccctggtactaattcaatctcaaagttaatctctctctttggtggtaatcccggtaactcttctgggaatacatctataaattcacatactacttgaacctttttcggtccctcaggtgtatcttttgtggtatccaacacactagccaagtatcccatacatccttctcttaataattcccaggtcctaagtgccgatatcattggaatctgagatccctgcacctttcccataaaaacaaatgggatctcaccctct

SEQ ID NO: 367984 - DNA, 550 bp, Cannabis indica
ctctcaggtctgattatccttgcaactaggactcactcaatttaggagcttaaaaattaatttttagtttaattaagatttttttctcctcgaatttagacatgtattaaatcatgttcattgatttagaatgttaaaaattcttcttattctattgagatgagattgttagatttaaagacgtttgtctaattttagtaaaaaaattctaacatagatgaaagttcaaggacataatttagtacatatcaaagtttagggagtatggtttagtacataaacaattactaaaacagtaaaattgaattaaattagacaagtccttaaatctaacattttcaatagttcaagaagaatttttgatggttaaaaaaatacaagaaacatgatttaatacatataatatttatatatatatataaatatatatatataaatatttcataactttaaaatgaaaacttcttttgacagtttgtatttatatgcattaggatctttcaattttttttttttttttttatttttgttagtatttagaattgttgtt

SEQ ID NO: 367985 - DNA, 624 bp, Cannabis indica
agtaaccaccacattgcttttccacttctgagaagtcataggagaagtcgctgctgtcccaggcttcagctcgcggttaagaataggagcaaacttcaagaaagtcatttctgcggttacaaagaaaaaataagggttaatactaataaggatgaaactctaatgcactagtttatgtatgcgataagctacctgatgatggtcgaggagtttgcttgaaaagacgtttatcagttcgctcttgttgctttttcagaaggttccttatacactggctctctccagagactcgcgttctcagggatcagtttgtgttctcgcagtttagcagtcatacacaataattgccagtcgcgatcttgtataggaatgctcccgagaattttagctgtctctctacgagttgcgtcgagtgcatggcgagctggtctatctacgaaaacaaagaaaaataacgagttagcttaagatctcaaagtaactcaaaaaatgactaagtcaggaaacatgcgacatactaggtcgatggttaaagtcagttctaatcccggggactttgaatatgtaaaaccactttgatttccaatctcccatattggaaaccatgccttctacgctgttaat

SEQ ID NO: 367986 - DNA, 665 bp, Cannabis indica
tgataatgtgtatggtttttccgtttaagcatgccatgtcaattctcacgggccacttatgtttcaatgcttctaacttctctttcatttgtcaaatctagtcctaattttactatgcaattatcaagatgcaatgttttaatattcgaatttaacctctaactacctaaactaaactaacctcaaatggcatcagcttatattctattatcaattccccaatccccacttaccaattttgctacaaagtatattccgtttggatataataggtcaatgatgatagtatgaaatatgaataatgagttgtggcatttataaactttagaataaggttcctcttaaggtaatttgaatattataaaaatgttaataacagatttggaccaagtaatccctagccatttttttccctggcttctttaaagcaatgagaatgtgataagagaagtttgaaatacgaaggtctttctttacttctctcatatatcatactacaacaaatatcctagaagaacaatttatatttttgccgagcactcctaataatttctctatcttttaccataagatttattttttattttttttaaattttatctcacatatttatattacactatacatcaatttctctatatttttttacatatattttattaatt

SEQ ID NO: 367987 - DNA, 956 bp, Cannabis indica
tcgcaaggcctcgccgtcatcttctcttacggcctctcttcgttttttgttgtttctttcttctggtttacttagttttttattaatattttgcagtatttagcgatgtatttgcaatgatagaataaatatgaggttagggatggagtttagcaattatttgtgatatttagcgatgatatatgaagtttagaaagaatagtctaatattattaaatatcattttaattcataaagtggatatatggagtcattccatgcgggactaagtatatgtgtcctgacatgtttggcgtgtcactaaagcctcgtgatagtcatttggttttagtgacgcgctaggcaggttaggatacggattctcagtcttgcatggtgtgactctaaaggttttcatattttagtgacccaaattattggacactagtaataaaattttagagactaattgtgcatgtcactaaaagttagtcctaatcctttagtgatccacacaaatatgtgggtcactaaacagtgtcactagaaggtaaatttttagtagtgggatagacatgtagtaaaggtgatgtatataattcgattatgcatgactagaccgatatgtaataaacatctttcattaacatatcatttaccatgaaagagttattcatatcacaatggtgattattagcagatcaacctaaatcctgagtatacatgaactcctgtatatgttcattgagttctctgattcacttgttaaaattttttaaataagatgattcttacaacttctgttttgggagcttaataacatgagtggctgggaacatgttatacaataatggaattcaagctttcttaacagatcgaatattagttcccttatattgttaattttaggagtgctaacagttagatccaagtctataataagttatagatgaactgttcacattgaattaatagta

SEQ ID NO: 367988 - DNA, 769 bp, Cannabis indica
taatttataaataattttatatttatttttaaatgtcacatttttttttacaattttaaaaatcactaccgtataaatacatagattattataaattctattaaaaaatttaatagaatacacacatcaaacatggccaatatactatatgtacaattataataattctatacaaataaatgtatatataaacactataatataggagtttttacaccacatattgaaatttctaacttttttactgtggggcggatttatttcaaacatacagtgtactgtgttaagttttcactatttttccacggttattttttagttgttccattgttgttttaattgttttgttttgttgttttacggttattttataaaaagacagtatttttgtaaaaactcctgtaatatacatactcatctcagaaaataggactaaacaaaagtcataccactaattaattcactttgatgaatttgcttatcaagtcaaatgttaaaaataaataatcctttaaaaaaacaaaataaaactaatcgcctttaaatattacatttagatatatgattatctatattatatataaattttattatagtaataaagtaatataattaaatattaatatttaataataatgatgaaaatatttatttagtgtgatttttttaagacgattagaaatttattcttctaattattgtatgttgcaattgaattaaaaaattgtaccattttaaaaacgaaaaaaaaatataatttttattaatg

SEQ ID NO: 367989 - DNA, 795 bp, Cannabis indica
ctagacttgctaaacatcctcaattgctaagagaggattcaagtcaagttcagtccctgttcatcatcatgttttttcttttaatgaccaaggtggataattgttgagtttggtcactaataaagatctacttatttggctaagaagttagcaactaactccaactaatttacctaactgtcagttatgacagttaggatcaagactcaaagccaaaggctatatatagccattagttacaatcttttgggacaggttaagagaaagatctttgagagctggtttaggttgaaaaacagtgagagagttctggtgagatgagttgtaattgaagctttgcttcgtgagtgtatgtgttcatgaacaccttgtaaacaacttgtaattctctctcaactagcatcaataaagataaaaagccactggggctgttctggccgaggagtaggcaagtgattaacaatcacttgttcgaacctcgtaaattcattgtgtttgatctctttctctacttatcttgccattgattgtttgcctaatactgttaaactttagttctcattactggtttatgtgttactggttttattgtttctgtccacagttgagttgtttaatttttcaattgtttagctctgttcttgatcaagttctttgtgttgtgttatttgcgaggtgattgatcatgcattgatcacatcaaatggtatcagagctcagtcgaagggcatcatcaaagaactaaaacaaggacatcaagaacttcaagaaaagaaccaagaactgatctgctat

SEQ ID NO: 367990 - DNA, 657 bp, Cannabis indica
ctcaacatagagtacaaaaagcgctagcacccacgaccctttttgggcgtgatctcccagcgttcttcaatagtgacctttgctttattaggcgagcaggggaagccacttaacatccagaagctaattttgtgtaatataagcttgtagattcaatttatgtaagttgtacaacaacaaagaccaattaatgaataataaaaatatttatattttatttattgtgtctatgaaccacttgctcatagattaacttcttaaagttaatcttttagttccacatgcgtactatggtaccctcgcaagacagaactcaaacgaagtctgtaaaacttggtgaatagcaagtgaccaagagactagtctgtatggtcacttgggggcacccatgctgtacaatgcatcgaactagcacaaaaaacttatgtagagaaattttaacacttagtattagctactaaacctgcctctaagtcgtgcaggcatacctcgacttagcaaagtaaatccaaacccttacttgtgaaggccataagaagacagccaagattaaagattgtctggtcggtcacacaatccatgataataaagtaacatggccaaagactagtagtgttcaaaaatagagggcttatggccaaagatacgaacatgaag

SEQ ID NO: 367991 - DNA, 1694 bp, Cannabis indica
gacagcagccttgcaaactgaggctcatgtagaagaggatgagaagaagaacaaaagcagagaaaaaggaaatgatcgaaagatgaccaagaagaatcaaggacagtggccccaaggacaacaatttagtgggggcagcactggtagtggttcatctagaaagactcatagtagaccatatgggtggttcagttgtggtcaacaaggtcataagcataaagattgtcgacaacgacaataaagacttcaagcatctcacagaggacccatagggagttatgtaaagtctactccttttcatggacaacccaggacaagctagtctcagtcttcatcctgggattttacacccaatcaggccaacagtctcagtatcaacatcagtttaggccacaaggtttagggttcaacatggggtactcacaaggtttccaaactcctgctcctagtgggagtcaaagagggaacaatcaaggtggagggtctggtgctagtataagccatcctagtcaagaaaagggaaaagcaaaagcaaagtcgtttgctcaagcctatgctcttggggttgatgatgtacagggcggtgcagaccaaggagttgttgatggtatggttcttatctcacactctagggctcatgtgttgtttgatactggtgcatcacattcctttatatctttattgtttgctagtatgttgggtttgagttggaaaacgtttagtcctacgttacatgtgagtgtactaatgggaggcacggtgaggtatccaccatatgtaggtcagtttgtattctgtttgagggatacaagttgtctggaaacttactagtgttgtctatggggcaatttaatgtaattcttggtatgaattggttgtctaaataccaagctattgtggattgttcacgcaaaagagtgagtcttttaacccctagtggtgatttcattgtttaccgagccaacatgagcacagtgagacaaaatcctatcataagggcatgcttaggtggaaagagaaacttagagtgttatgggaatctttttgcgatcgaggatgagtttagagatttagaccaattctcttagatattagtgattagtggttttttcggatgtgtttctagaggatataccagggttacaacctgataaggagatcgagttttgctttgattttattcccggagctcaaccaatttttattgtgccttaccgcatgacacctgcagagtttgctaaatgaaaaaacaattaggggagttaatggataagggttacatcagacatagtacttcttcatggtgagctctagtcttgtttgccaagaaaactgatggaactttccgactttatgtcagctatagaaagttgaatcatatgtcaattaaaagcaaatatcctttatcgagaattgatgaattatttgatcaacttggttgttcaaagttcttttcaaagattgacttgaggttaggctaccatcaattgaggattagggaagaagatatccctaagactactttcaggacacgttatggacactttgagtttttggtgatgtcgtttgggataacaaatgcacctgctgcatttataaatctcatgaatagagtctttatacctttcttggataagtttgtggtggtattcattgatgatatcctggtatattctaagacacgtgaggatcat

SEQ ID NO: 367992 - DNA, 676 bp, Cannabis indica
attgatttactttcaagaaatttggacttaaaatgatttgtgtgtgatttggatggtttcatgttgatctgtgtgttatatgatgattgatagatgcttgtgaaattttatgaaaataattgaattttcgtttctcgaattatttttgttggatagtttggaaaaaattaagcaattcatttttttatagaacttaattttgattttatttgaattagttatgattttttgaagttttgaaaaaggatagggtgatcaccatcatccccacgcacgcggatgacccatcccctcggtcaggtgcgtgttcggacaaggtgttgtccgagtgacatgcccaaggatgtctgaatccctctctgcgcgcgcgaaaatcatgcaagggaccccttgcaccgagttttctcggctaatcaccttctgggcgcgcgcggatgagtacgcaatgcataccatccgtacagctcacaaatttttgaattttcttcgatttttcatgctatttcatggaattaactttcgattttttgtgtagttttgtcttttgatttttacttttcatatttcaaatctaattatcagaattaaattaattggattttttttaaaaattaatttaagatattagtgtaatttgaacttgaaaataggaaaatatctatattttttttgctta

SEQ ID NO: 367993 - DNA, 464 bp, Cannabis indica
agaaaaaaaaaattgaaagtatgaagttgtaacaacaaattttatgaaaaaaataatgtagtagtacaaaaagataaattaagttgtcaaaactaagtaaaaaaaattgtaatacaaaaaaggagttaatattattttacatattataattagattattttttgtttctttgtagttatctttttgttgttttcatttatttattaagttgttctagaattgttttttagtttttctttttattattttacttaaacacaatatttttataattttaaaaatttaacacagtatttataaaaacttggtacagtaaaaatgtaaaaagaaaatagtgttatagtaaaagtgataaataaaatgggtatttttataagatccccatttttgtaagggattattttacaaatacacaaaattagcaaaaaaaattacaaaaatacagttgtacagaattttaaaca

SEQ ID NO: 367994 - DNA, 561 bp, Cannabis indica
tacttctcaacattttaacctagttcggtataattccaatatcgtgacatttgtgaccacttcatcgagttccacagttgccaggcccaaaaatattttattcgaattatggtatctacaatacccacatattccaatacaatctccgtaattaataacttatgctttattatttatttactcatgtttccctaatcaactcgtaattagtttaagtaggattataatcctactctaatgcccacttaatcacatatttaataaaatatgtccaattaaaatatcaatatattttctgggatattacatggcagctgcgaacgagaggaggagaaaattatgttcgggttttttttttcatgttaagtggctaatattgcttagggttttttcattatatatcactcttaaagttaaaggtgattttttttaatttatatattattttttaataaagctgaaacaaatctaataaattaagaaatagaaagagacacgtctctaaaaaaaaaaaagaagatacgatggaaaattttatttatttattattatttgtttttt

SEQ ID NO: 367995 - DNA, 872 bp, Cannabis indica
agccctcaataaagtggataaagttctattaactacttctgtttgaccatcggtttgaggatgacaagtagtagaaaacaaaagttttgtcccaagttttccccacaatgttttccaaaagtaacttaagaacttagcatccctatcggatacaatggttctaggcataccatgtaatctcacaatctccctgaaaaacaaatctgcaacattagaagcacatcagttttatgacatgggataaaatgagccatcttagaaaatctgtctaccaccacaaaaattgagtccctcccacgtttactcctaggtaaacccaacacaaaatccattgagatatcaacccatggtgaactaggaataggtaggggtgtgtaaagaccatttggctgaaccctcgatttagcttgcttacaagttacacatctaccacaaattcgctcaacatctcttttcatgtggggccaaaagaagtgttcttgtaatataactaaggttttagcaactccaaaatgtcccataagccctcctccatgggattcctgaactaacaaatctcgtaaagaacaattaggcacacacaacctatgctccctaaacaagaaaccctcatgcctataaaacttaccttcaccagatttttcacaagcaccataaatctccccaaaatcatggtcatcaggataaagttccttaatatgttcaaaaccaagtaatttagcatcaagagtagagattaaggcatacctgcgagaaagggcatcagcaaccacattctccttaccttgtttataccgaatgacatatggaaatgtttcaatgtactcaacccatcgtgcatgtctcctgttgagcttgtgttgccccttcaa

SEQ ID NO: 367996 - DNA, 554 bp, Cannabis indica
aaagccgatctacttcttctttaagcgcttggtaccttgcggggtccattttgtggcacttttgtcggacacctcgcactttagggtcaatgtttaatcaatgacacatgtcctgcagtgatatcccgaccatattcgaatgtttccacacgaaaacatctagatttgtttgagaaaagtgacaagcctttctcgctattgaaaggttaaattagaaccaatttttaaaaatttattatgattagaaggatcgattggtaccttaattgtatcctctgcagcatgtgcggtgttggtataatcgaggatccttggatccggatcaggtttctctatgtgcggtatcttctcaattctaataacttcttgtcgaggaggtggtgcttccaatgatatattacattaaccgacttcttcttttttgggagttttagtgctgcgttatagcactctcttgaatccgattggactccttgcacacatcctacactagcaggggtaggaaatttcattgtgagatggtagatggaggtcacaatcttcatctccttcaa

SEQ ID NO: 367997 - DNA, 850 bp, Cannabis indica
tccatattttgtccgatctggtctttgaacattttgtttaccaatctttggtatgtagctctggcattcttgagaccaaatggcatgacttaataatagtacagacccatatctgttgggaaacttgtatgttcatgatctggtggatgcatcttgatttgattgtaccacgagtaggcgtccatgaagcttaatatctcgtgtcccgctgttggatccactagttgatctattcttggaagtggaaagcagtcttttgagcacgccttgttgaggttggtgaaatcaatacatactcgccatttcttgttcggcttgagtactagtacgggattagcaacccaggctgggtagaaagcttcaattatgaaattatggttgcgcagcttctccagttcttcttttagcgcaatggctcgttctttatctaacaatcttcttttttgttgaacaggcaagaaattaggatcaatattcaggacctgtgaaattatagaaggatcgattccaacatgtcctcatgtgaccatggaaaaatgtcaaggtttgctcttagaaattttatcaatgttgattttacttccagcaggaaatctttcttaattttgagtttcttggtcggaacattcaggtcgatttcaatttcttctaattcttccactggacaaccattaatgcaaaatatgggattttgtttgtttggatggaaataaactaaaggaaaagaaaagaaaagaatttgaaaggggtactcaattgtttgtgcacgcccaccattaatttttttttttctatattttttgttgatggttttatgtgtcagatattaatggggttgtttggtaactta

SEQ ID NO: 367998 - DNA, 603 bp, Cannabis indica
catcacttagcttgtaacgtgccatcttggcaagcacattacattctcccccacttcaacatgttgatgccctctttgacggaccacaagccaatcttcctgatctcgactcctaagcttactccaagcttcatccggatcctaagtttgcacttgtccctaatctaccttcatagagccacgctcttggtgacgatctccctcgctcacacttggacttgatcaaagaacatgtgccactgtcactattcataatcacccatggagtagtgcctccgcagtagaatacttcccccacatgaactcctccgagtccttcacaatgtccctccagtcaaccaagtagcccttgcaacactgacttgaagctaacacatcctttgatagtagttcactcaccaatgtccaatgcatactccttttgacaaggactaagtatggtgcacccctcggggtgaggttcgcaaaccaatcgtacccaacgacacctacagaacatgcttccactgaagccaagtccctccaaaaacttcacatgccaactccttggcacaccatcctcctgatggcaatcgagcaagacactcctaccgcatggtaaaa

SEQ ID NO: 367999 - DNA, 620 bp, Cannabis indica
taaattattttaatttatattgattgatctaaaattaaataaattaattttcaacgcaaatattattttcctatttaattaaatctcttacgaaaaatatcaaatatttaagtgtcttgaatagaataagctgaaatattatttttctaacttaattaaatatatctagaaaaataccgaaaggtctacctagaaaatatatatctcgataattcataaactaattatttaatttctaacaaaaatataatatatatatttatatttgtctatttattttaattatatcattaatgaaaattacttgattttagttgatccaaaattaattaaaattaattttcaacatctaattttgaaaatatctacaattaaaataaatgcatttcaaaatctatgtgggaaataattattaaaataaaataaaatatattttgaaaataattctaatttaggttgatctgaaattaacaatttttcaagttaaatataatcttctatttaattaaattcattaaattagaaataattaagtatatagaaaaaaataatttaattattaattctaaattaagtgctaagaaaaatatcttaatttaagttgttctaaaattaattaa

SEQ ID NO: 368000 - DNA, 605 bp, Cannabis indica
tttgctgaatgaatctccttaagacaccaaggttttgaagtctctttcaaattatttgatgaatgcttgtagaatatatttcgaagataacagtgcttgcttgtagaaatcttctcccgaagatagcggtgcttacttcctcccgaagtaagacttgtagaaatattctcccaaagaattggtgcttacttcctcccaagataagacttgtagaaatcttctcccgaaaatagcagtacttacttcctcctgaagttagacttgtagaaatcttttcccaaagatagtggtgcttacttttgcccgaaataagacttgtaaaaatcttctcctaaagatagtggtgcttacttcctcccgaagtaagacttgtagaaattttttcccgaagatagtagtgcttgcttcctcctggtgtaagactttgatgaattttctcctgaaggttgttctttatgttctctacattgaaatttacttcacataaaaagtaattacaaagacacacaaactcacaaaagaataacagaacaactatctcttacaaaaaaaaaaaaaattaaataaataactctcctaaaaatataagaaattaagaagtgaaa

SEQ ID NO: 368001 - DNA, 554 bp, Cannabis indica
aaataatttccaacaacatctaagtgtattgagtgattgctattttcttttattattacattattgcacaccattgtttgggtaaatgccaaaaagaattgtgtttctgtgttgatgaatgtgttcacacataatggatattgcgtgaaattagttttcttagttaataactttatgtaatacatcaaacttttatcatccttgagttggagtggttgacagcctttcttcaattggtattttagttgtatttgagttgtttcactgttgcattgtagtttctctatcattatctgcactggtttaacaaaagtgcaatctcttaatattagttctccacttaattcgtaatcagcatagttcttattgtcatctcaataactattgctctgtaccgaaatttgcagaggtttcataactaaaactaatgtaccaatttttcaattttgttaagcaactattttaatacatgagaataatgtataaacaactcttccgtgacattaatcaattaaccttaaatatatcactcatctctctctctctctctctct

SEQ ID NO: 368002 - DNA, 775 bp, Cannabis indica
aaatttatccctactcgatgtagatcatttatagaagatcattgattatttagattgaaataatggataataatagcatatctatatttggaacatatagagtgtttatataattaagaatgtaattttgaatctatagtggagtcagaaagaattaataagatgtagaatttacttggtaaattctaaaactacttattggaagcttgatgatataggcgcatggtccccgtactagttgatataatattggcttgtagacttagttggttggttttatttaataaattagaattctaaattagactatattttatttatgaattttcactaagcaagggcttaattgtgaagaaaagaggttttagggtttatttattaattgaagtgaggccgactacttaagcataattgagccatcattttatcttttttattccatataatttaaatcctaaccctagttgaaatcctatacaaggaataagatggctctcattctcataacctaagaagctagttttctaactttgttcgacaattaaattgagacctccttctatagaattcgaaatccatctctttctctcttcatcaatttcaaaccatagtgaaagagttcatgctcactcatatcaagtcagtactcaacatagtgttgaagattgtgaagaattccaacacctgaaggagatccaggttcagatcttgttataactctacgacaaaaaagaacaaggattaaagatctaaacagaaggaaccataatattct

SEQ ID NO: 368003 - DNA, 844 bp, Cannabis indica
attggcaagattggagcgtgttgagaaggaacagcttgctttgaagcaagggcagactgatattctgaaagggcagacagagatattgagttacttgaagaccctattggcactcatgggagatccgagaaggcccaatgtagaggcagagccacaaccagaccccgtctctccaagagatgagttcattcttcccaatgactacagacctaatgatgtggaagatgtactccatacaccgcagaacatgtcgatcacgtccattggagatacggaagattcaaaggtacaggttttagaggccgttccaacaccggtggagaagagaccgaagaaaaggccaaggtggtttgacgagtatatcgaaatgaagaagaagatgaagccattgatagccaatgtgaatgttgacccacttcgacccgttgatgagaagttactacatagtttttgaaattggaagtattcgagggacgtcttcaccggtgtacatgccgtgacttggttccagaagctactgacgaacaaagaatggctttctgatgatgtaagtttattaactaagtattatgatttgttatttactgttatttaccgttgttatttgttttttttttagtgttctaatgtggttgtgctgacttatttgtatgtgttgtgcagcatttggatgtggctttccatatgatgaggaggcggcaacacttcttcccagagttgtacccacgtaagtgtactgtcatgacatcttggtttgcttcatcgttgaagggtcggtgggacgcttggaagaccaatactgaccatgctggctttgtctgggatgagtccctcttggaactcg

SEQ ID NO: 368004 - DNA, 578 bp, Cannabis indica
aatttcaaaagggaaatatttttgggtggccctgggctaggtgggccctaggcacaggcctagcccgcctatgcccatggctgggcctgcgtagaggtggctacaaactctaaaagtttgagtgtttgaattgtcattggtgtatttattgaatttgtgcctgtgtggtgttactacttataagattatttgcttggaaagtataaatagcaattaagaaagtacttttaatgtaaatcaactatttaattttcttgtgggagtacttttgctttgtttccctcatgctactaaaaagttttagtttgtctatctcttgtttgtctatagatccagcaacaattcgaaagtacatgtaagaccatatattttcaaaaaattgtgttgtagtttctttaatagatttgagtgtcatatgagtaaaattagtctcaccagttcagtttgaatgagagattataagacaaatcttcagttaaaggactaaggttgttcacttttaaagaacttaagaaatacagttgttttttagttgcgaatgacaatattgaattctgaggatatggagaaggttaatt

SEQ ID NO: 368005 - DNA, 736 bp, Cannabis indica
ccattttatctacttgtacctaagcctatcattacatgtttagaaaaacattttgattcttaattatgtatctatttttattagtggagcatagtgagtacagcaagcttatggagtatattgagttagtggatcgatggttttatatggcatgcataaattgttttaactgttagttaagtgctaatgaactgaaagaaaagattgaggatctctaccatatggaatataagttagagtcaaattatgtatttatttaagggtgttttcactttatagtttggtagaaaaaacctaggttctattcgggcattagagaagtgttctagagtaaacacttatcagttttacattgtgacatagggtcactgttcatcgtgtgaatatccattcaagttgaccgacacacttgaattagaaaacaaggtaagattagtataaaacatgtatataaatatgtgtatgtatgtaaattgcatgttgtgtatgtaattcgtatactaccaacactagtacggtagcagtacggagtatattggtacagtatatgatgttcaaagagtacgatctgatgttactaacactagtacgagacgattaggtagtgtatgtggtacaacacttagtagtactcagtttagccatactgacactattacgggacgagtacttagtgttggaaatattttaccaggatctagatttactaccatgcatgtttcattaacatcctaat

SEQ ID NO: 368006 - DNA, 528 bp, Cannabis indica
ttttctcgctgcttctattttgtcatcgggcaagatacccttttccaggtaggcaattattagagtcatccaagtaacttctctagcaacatctatttccatcacttcttcctgactcaccgtcgggtgagccaacacgtcaacagggatcacatcgagcaattcagcttctcgagttgaggccaggcgggccaaagcgtctgcgtgtgagttatgagtacgcggtactcgggagataactactttcttgaatttctgcaacaaatcgcatactatggcgaggcacttagccaaacgcacgcctctggccagatattctccatttacctgcaatcaaagcctcattgttaggactaattcaaataaaatcgaaattgagttctgtaaaaaaagaaattgcttaatttttaaaaataattccaaaaacgaaaattcaattatttttcataaaatttcacaagcatcaatcaatcatcatataacacaccgatcaacattaaaccatccaaatcaacacatatcatcgtt

SEQ ID NO: 368007 - DNA, 728 bp, Cannabis indica
ctaaatcaattaatattaaacatattgtatctttctttttgtttgttatattttatttttttaattatataaatactaattaatatgtaattaactaactataactaaactaagagaaaaaaggtttttttttccttttaaaatagaaataaatttataacatcatactactaataaattttatatttaataatataaataaaaactgagatttttttaaaaaaatacaactaataagattaatcaaataatacaactattttaaataacagctaacaattaagagattagcattattatttcaaaataagataaccatttttttaattcattcaattttttacttatgaaattcttttaaatagattttttttcactaaattcatttaaaaaaattaattgaaaaaaataactatcactattattaaagctaaaataaaattctaaaatatgatctgaaataaactacaagaaaacatagtcatgaacaatcaaaaaaaaaaaacaaaaaactagagattaaaaaactatagattgtgtagtttttcatttctttttaaaattatcatgttttatctattgataaaatcctgtcaaagaactttgcatttaaaaaaagtcattaaaactctgtcaaagaaatagttcttttcttaattattttttttaaaaaaaaacttttagcatttaaaaaaaaaaacgtcaattaaaactactctcaaagaaaa

SEQ ID NO: 368008 - DNA, 596 bp, Cannabis indica
cagactgtaggccagcaagcgcctagcgtcattccctcgggagaaacggaggatcactcgatgatgaatgcctcctagacaactaatggtcagccgtccattccccggtcacgagttccactcatcagccaagacataggcgggcagaccttgtctgcgaattcttcaggaggagccatacctgatggatccaatcagaataatggagttattccgcttgtaaaccaagcgaacccatcgctaaggcaaccaggctcttctatgttcgataggctgggaacgacccatgacctaagggacgatctaaacagaagaaggggaatagacgagcaaaatactgcaacgatcgtgcatctcagagcccatactcaaatccccgctcagatagacgctgacgtaacccaagccgggcaaaacagcaataaagtcagtccagccgtacaggcccagcttgacaagttgaagaatatgtttcatggcatggccggacagcgtaacaatgatcttaagctagaccgtgctcgtggaactcccttctcaccagagatcaatctcctaccactgcccccacaagttcaaaatgccaacatggaaga

SEQ ID NO: 368009 - DNA, 956 bp, Cannabis indica
aatcactaaaataagcactctataatttatctttattaagccaagttcgaaaaaaattatcgtttcacttctatgtccaaatagaagttatagattccgtatctatgattaacgctcccactcaattgaactaccatgtccttaatctatatgtcacgagaagatccattagtcgactttaacgaacatattgaaaaacacaaataatacaattaaattggaacctaactatttgatccaagttcaatatcggtcccttccgatgcatactccatacatccaacccaagcttactttaaccaataccctgaaaaggacataacacttatccaaggtgcaagtaaactacattgtagattatcctatcagtttaactctgtgtactaataaatcataagaatacatttaatcacacaatcttgattactttccactgtgttgacaatgtaataaacaagaatatcagtgtgataaggatttggatgaatttataaatcaagtaaacaaataaatgatcacataaaccaaataacacattaaacaagtaataaaattaaatctctttctttattgataattgaatagaaaagattacattaaaatgtaattttatttagggcacaaagcccaatagctatgtgtgggcatgtactcaatcactaagagggatgaaattttttgaagaacactcaagggatttcgaaatagaagaagaaagaagaaggaggtctcaaaaactctctagttgtatgaaaatttgtaaactaggttatgagcattcgttggataatgagaccatcctattcgttttatactatttcacttagggttagatttaaattatatggcattaaaaaatgataaaaattgggctaaaaaatcaccttaaatggttggccacatagtgagccccactaaattggaattttgcaattttatacaactatttattattt

SEQ ID NO: 368010 - DNA, 535 bp, Cannabis indica
agatgtcccaccgaaccacactgaaaataggctctccggttacaagtctcggggtgatgcttcttgcaacgcgggcactcaggataggagtaagtctgacgtccctctttgttctagtttcctcgaaaccttttaccttgtcctaaacttcccgaaaatggaaaagttattttcttttgctcaaaagtggaatctccactttcttttccaggaccagaaatagggagagtaacaaccccaccagcattaggaggctctcgggtttcttgcaaaaacttaactgcaccttcagctcgaagagccttatcaaccatttctgcgtaagttgtggttcattcgttgtaataaccaggtcatgcctgatcttggcattcagtccagccaaatacttttccttcttgctaaagtctgtcggtacaattccagaggctagcttagccaggcgatcaaacttggttgtgtattcagtcactgacaaaccctcgccttgtaccaactcaacgaattccttctgctttgcactgcggaccgcctc

SEQ ID NO: 368011 - DNA, 734 bp, Cannabis indica
gtaataatagaattaataaaccgagttattgatgagttcaatagtaatttagagtttattggagcttcaaatataggttcatagtcctcggatcatgtttatagcaactatatggggcaaggttttatttgaggaataaattaaaaaaaataatttctatgagaataattctggaggaaaaataataattttgaataattattattttatataattatttagctataaatttattaattaaatagatttaactatttagttttattcatataaaactatatactagttaaatataatattattgctaaataatattatgagagagaactatattattttagtggaaaataatatttaattattatagaattaaataagagattaataagaattaatcaattattatttattgaaaaataaataataaatcttatttaagattaaattggtaaaataattttatgcattaaaatatggctcacatgtgtcagcctatggctggctatgctcctactagggtctggtcggccatgtgcctgctaaggttgggctggccatgtgcctgcaagggtatggctggccatgtgcctgccaggatcttgcaagtcatgttcctgccagcattggcaagaggaggccagccattgtaggtgttggccagccttagtaggagatggctcgccttggtgatggccaaccttagtggtggcaagcctctatagatggaagccagt

SEQ ID NO: 368012 - DNA, 670 bp, Cannabis indica
aataaataaataaattaaatatatgagaataaaattctacatatttgtccaataatgatgtcgtagactccgagatttgtaactacattctgtggaggatctcgttcataagacttacccagaatagtcaaatgagatacaacatctataagagttataaaacatacaacacttacttttagtgcgagtggaaaattattgagatttatgccctagaagtaagtgattaatagataatatattacagaatatatgaaatacaattataagataaatgaatacattaattataaaagtaaaattaataaatatctgaaaattccctattcatatagataaagtataatcttctaaggatgtacaagagaattaagattgtatgatatcaataaaactagttggtagtgtattaaagtaaaaagaatctttaatatggaactactaaatacggtttactatacactatattctagtgtgtgtgtgattttgattcagatcatatatgtggatagacatgtagtaaaggtgttgtgtatactttgattatgcatgactggaccaatatataataacatctttcattaatgtgtcgtttaccatgaaagagttattcatattacaatgataatcattagtagatcagtctaaattctaagtatacatgaactcc

SEQ ID NO: 368013 - DNA, 789 bp, Cannabis indica
atataatttttttaataataatatattattttattttattttttattgtaaatatatattttttgttgtatggtatatgatttttgttgtctatagtatatatatttaacataatatatactttttgagtattaatttagtattgttataatttgtttgtggtatataattttattactacaatatattattttcagtgatacaatatatattaaatactattgtatatatttaatgatctaatgtatttatttgtttttattacaatataataatattaaatactaaaaaaaaataatataattaattaattattatatttaaaaataataatatgtaataagtatatttttataatttttattagttaatttattatatttagttattttcttaattatttttaaaaaaaaacatttactaatttagtttttaaatttaaagtcattttacatctcaacactttatgttatgcaccctctaagaccaactttcattgcaggtcaacaattgaacctctttagaaaccccatatacaatctaactcaaagctcaaatctaactcaaggactgagtctaaagctcaagttcaattacacaacactactattatctctcggtctttagcacattctacattcctatttcaatgtagtaatcggttataataagagcaataatcacttctttggtactaatttttgtatgattgggcctttgcttcactatagtttgtttttctttcttcgtgagagctgtctgtgctaaatctctgcatgtatatacatc

SEQ ID NO: 368014 - DNA, 601 bp, Cannabis indica
ctataaacattcatccttaaacataccctcatacacactcaaaacccagaaaatatagtccccactcaaacggaaaacgaagcatggtgaagattcaaaaactaaccttttactttgataaatctgtttccacgaatcgcccttgatagcaatgaagaatccagaggaacccacgaataaaggcaaaaatctgggcaatttacggagatttttcttagaggtttttctgagagtgaaggaacaaagaagttaagggagttgaaggaaaatagaggggaaaatggggattttcgagttcgaattagggggtttaaatacccaaatccctcattcattgggatcatgacacgtggcagttggaatgcctagagtcgcccaatccaacggccagagatggccacgcctacacagaaaccgaagagtttgtgacgtggcaccataaatgcaataaaagtaatagccatcatttttcgaaaccctcgaatggacaaccaaaggtcacctccttgtgacaacctttcacctgtctctcgaatgtagtttcccttgtgactgcacctgtcacatcgcgaaactaggggcatgtgttatagtgagattt

SEQ ID NO: 368015 - DNA, 537 bp, Cannabis indica
aaaatacagggtccatttttgtcatttaacaaaatacatggtccaattggtaacttttgtaaaacagaggggccaaaatggtatttatccaaattaaaataagaaatacaactctatctatgacaagaataatacaaagacacaaatataaattaaataatattacaactttgttgcagaaatatacataaaatagaagatatatttggacatgaagagaaataccacataatataaacaacatgtaattaaactagaagataataaataacatgtaattttcatctactagcacttaaagaagagaataaatagaaataattttcagtatttatcaactctatataatttataacaaagtattattaccgtatacaatcaattcagcacaatgaaaacatatataagagtaattaggcttgaagattaagccatatgaccaaattaatgtacatatattatatatactgtttaattagttcattttgttataaatattaataattatgtggatgtccaaatcttttatttattacc

SEQ ID NO: 368016 - DNA, 663 bp, Cannabis indica
ctgatccaatctgcacttttgtaaattggattggattgaatttgagctactgtacgaattggattggattcaaaatgttgacttcagatttggtcaactgacagcggaaccttatttatgatcaaaatcatcacgtgttaataattaaagcaagtaaagaaatggacacggaaatttgtagaggttcgcccccttggttaatgagtgatgatctactccccttttagttctattgatttgagagataataccactcagattacacactttttgtaaagtctttttttgtaaagaccgcttagtttaaatttggaaattagcagataattaagatttaattatgaaattatttatggatatttaaataattatttatgttggtttatttgaattcagaatgtatttttatgtcatatagtgaaaattcataattttgcattttcggtacccggcaacatggaacgcggtgtatggctcagtagaatcacaatttaatattttagtatagtgggacggtttatttagacattgggaatgtcgggattagtcgggaatttagaataagcttaatgagcttccaagtttgaaatccaacaaacacttttcacacactttgagtcaaaatttgtgtttattcatcttgagtgtgcttgcttttcactc

SEQ ID NO: 368017 - DNA, 547 bp, Cannabis indica
aaaagattgctatctattttttttgggtgagaaataatagtaaaggattcaaaaacatacgactatgtagataaatattcttattttaaaatttatagtgaaatgatgattttatatagtctttattatttaaattatcttttgtcatataaaatttttatggttttatttggaaaatttgattttctatacttatatatacctaatattttatccctaaactaatacatatcaccattgaaaatatatgaccactttatttaaaacccaaaaatacccctctcaaatataagcataaaaaaaatcaaatttcccttctatttttaataataatcaatttatatttttttaaaagtgttagaaacatagaacttaaatataatggtatatccatattagttttgttaaaattatttttattttaaagttatgttgatttttctctataggttattgttggatatcgttggtataatattttgttttacagtatatttctttttttgtttgttatgatatattattattcttacatgatatttatttt

SEQ ID NO: 368018 - DNA, 465 bp, Cannabis indica
tacaaattcaatgaagaggaaaagaagtggattcccaccaatccaatgtcacatgccaatgaggaagaacacttggtcccaagtgaagatgaaggggaagagcaagatatccaagctcaaaatgaagaggaagtgccgccaataccccaagctcctcacttcaaccttgaaaaagcttttgccaaccttaccacctccatgacttccaatttcaacaacttgagaggtgaaatgaacaaccaattttccactctttaacatgagatgacaaccataaggagtgatattaccgcattgagaggagacatggagcaagggtttgacaacatgcaagtggaaatggcataatggaggacatacatggatcgttttggacctccaccacattagtttccttgcattttttttagcatcttcactcttgttttattttattttgcttttgtgcaaaggcttcatgccttt

SEQ ID NO: 368019 - DNA, 396 bp, Cannabis indica
tttaagaatgattcttttctaatagtagaaaaaataattagagaattttaaaacttttattgatttatatatggtagttttttaagtgcatacacatcaactatttgataagaaagaatatttgcttgaagtgcagaggaattattctatagcggaaatattttgtgtaagtgttgttcataaaaagataaattatcggttcacatgtagtagaacctctattcaagaatacacttgggaccaagaaaataatattctaattgagaggttataactaaatagagttacacttgaaaaaaaatcaataaacaattctaaatactatactatattagaattattttaaagtacatataatatttatacatgtactataatttgaaataaaaattaatt

SEQ ID NO: 368020 - DNA, 671 bp, Cannabis indica
tcataattagttctgttcaagttactgttttacccttctaattacttctttatctttagtaccattaattaactagtgaaagtataatttagatcgaatctatatttttgcacaacttttcagttctagaattaacacataaagggaaccaacattcaattattaggaaacttaggattccataattgcagatcatgtcctcaaccatccatattattaaattctctacataaaagttgtaagaaccatcttctcaaagacgctttagcgagctttagcgagtgaatcaaagaaactaataacatgaaaaggcgattactcaagattgaagtcgatctataattaattgatcatctttatgatatgaattttgtctttcaagtaaacgacatgtttcataaagagagcttaattacatatcggtccatgtcatgtataaactctattatacacaacacattcacttacatgtcatactacataatcaatccaaatcaagatttcgtgcactgaataatggtcattagtgaaccgcactagcaaccattgattgaagattgcaaaattttaatatgtttctcactattttatttatggttaagtgatcttaattctccgtacattaccgtcataacctaatatatgaataaggaattttctaatatttatat

SEQ ID NO: 368021 - DNA, 920 bp, Cannabis indica
tacaatacaatacaatacgacctaataccgaacgttccaaacgagtcctaaaagtaatttttttgagttgatcaatggtaattaagttaaattacatataatgagtaaatgttacaaattcccaacaactacttttttttaagttgttttttctctatttctcatcatttacaaaaaaaaaaaaaaaaaaaaaaaaaaaagaaaatattacgtctctcccaccttaaattttggatccaccactacaaattatgatatatttaaaaaatttgaagtctcacaacaaacaatatatcccacatttaagaagatcatttccttataaatatttacctattccaaacaaccggaatatacattactttttcaaaaaatatactttatatgttatttttttttaaatatatatattttttatattggataatattactttaagtcaatttaaaaccaatttgttttttttttttgggaattcagcaagtatattcattcactataccaatttacaaccaaagagcatcttccaatagaagacctcaaaatatcaatgctttttacaatgtatgaaaccatgttgtatcaattctactaactttttttggccatacaacaaatattctaccttttgtagtttccttgactctatttacaacattctctacatcatcacatttatcattccataccttgttatttctatttttccatacatggtatatcaagcttgccaatgccgccgccattactttcttcctgaatttactcaccttggaccgtgaaatccatcttgccaaattggttgctgaaacggtggtagtgtgccaaagcatccaattcttgatttcctccaaacaagcctttgaaaaaggacactcaaagaataagtgtgcatttgattcctcttgaccgtggcaaag

SEQ ID NO: 368022 - DNA, 738 bp, Cannabis indica
ttgtgttttcatgaaaaatatatttagtattctgtgtttttaataatacttaagtgatacctcatatttttaaattgtacatatttagtaccctaaagtaaaatttaatcaatacaattttattaaccaaatagatctcagttatatatgtaatcaaataattaaatttaaattcaaaattcataaaattttaaacactttgatttgtattgattaaatttattcaaaaaaaattaaataagcattattgaaaacacaaagtacctaatttgtatttagataaaatacaggatatcaaatgtgtaaacagtcaataaacaattatatgaaattttattagaaagaaatttaaaaagaaaattatacatgagttaaaaaatatataaaataaattaaaataactattgaaattaacaaaaaattatgtaaaaaaatcaaattagaagatgttaagagtgattttttaaaattaaaaaaaatatatatattaataaaaaaaaaagttacatatttttgtctaattttgccttaaaaataaaaattccccatataattgacaatttgattaaaattcaccatatttttctttcctttgggaggaatcattgctttcattatttataatacacataaaaaaaatgcagggcaagattttcagttataaactaaaaaatggcacaatttcaaatccaatggaaaccatatcatttagtagtatggaaatttataccgcgggtc

SEQ ID NO: 368023 - DNA, 204 bp, Cannabis indica
gtacttgtgcaagggcatcaacgccccttgctgaccatgagcccccgagcaggcgcacatcccctcactagagtttgaagcgcgattgtcgtgggcaggaatgaagcagtccagctcgcccaggtctccatcctggtcgagagtgcagaggcgtgcctccgaaatcttggacgaaggactcacccatctggcgcccaaggcacc

SEQ ID NO: 368024 - DNA, 528 bp, Cannabis indica
tctaatctactcaaattaacatgctttaaacctaaaaaacaacataaaatcacagcaacaatatcaacccaaactaagcatgcaaaccactttcttttcataattttcaacaaattcaagagagaaagattaggagctaacctagcttgattagaacaccaaaaagagtttgacttcacaagaaaaattcaaagatccttgctgctcaaggaggccgaaaatagagagagagagagagagagagaaaatgcttttcaccaatttttctaacttttccaattttgtaaaatgaaaataaaaagtttccattacttatttaagccaaacaaatgccacataatcacataatttccaattacaaagtcctctaaaggacaaaatatcattggggcaaaatgaccaatttgcccctccatactaaaataacataaagggcactaaagggggtattttgggaaattctaaattcccgaccaatcccgacattcccaatgtctccaaaactttcccaatatactaacatactaa

SEQ ID NO: 368025 - DNA, 577 bp, Cannabis indica
atttttagagacaatttaatataatgacttgtatgagtagtacatatcttatgatgataaactttaataaatattttttttgtattgttaaactttattaggtagattttaaatgatgatagtgtaagtctctcaaaccgcaccgcaccacactgtatttcgcagtgtggtttttgtaattttaaaatctcgcggtgcggttgcagtttgagaaagtacaagaatcgcatatgcggtttgatttcaaaaaaaaaaaaaagttaaaaaatgcaccacccgcaccgcgaacacctataattttacttgtgataaaattacaactgaaggtgctaaatcttatcaacaatactttaaataatcaaatagatagcaatgacaagatttaataaatcaagaacaataattggataaaaacaaggatgaatagagtatggaaaactagaagcaattaaagcagtacaataatataaatcaacacctagatatatactggttcaagtccgatagatcgatgtgatctatggctttactccaattatgaaataagaataattacataaggcaccattttttgtaa

SEQ ID NO: 368026 - DNA, 637 bp, Cannabis indica
tccattcatcatggctagccaagcagttcaagttttttacctcgaggtaatcggacgttggggtaacccaagtaattggatgtcacgatactccacctggtaacacagtatttttcgttaaccaaatttgagcctaacagtgacaatctcacacagaaaaaataaaggctgaaaaattaagtatgaacacacatgactttttacgtggttttgcagttaaaattctaaatagtccacgagtcaatcttattcagattactgatagttttctcagggccttttttatataattttttctcccctttttgatcttacctgccactatttataattacatagtagacagttaattacaaagttgactgtaatctttttacaacaattaccccctaaaatcatggggtttgattacatatcacgtagtgtaaatgcggttattgtgtgaaaatcatacagtgtgattttctcgcttgaactgggtgaaaatgatcgtgtgttttaacacgtctttagttgttatgttcgaaaatgtctcgataggggtttggttccagtgactgtaatagcgagttggagccttttttctttatccttccgaggtcaacgaagtatgccttgttgcttctttgtgacgatc

SEQ ID NO: 368027 - DNA, 1051 bp, Cannabis indica
aaagtctacccccgtacccgccccattaggggcgggtacccgcgggtacccgaacccgcgtgtataattgccatccctagagatcaatatgttttcaagataaacaccatcttgtaataattattaaaagtggtgcccaacactgtgtgctggaattacatgccctaaataaaaccaaatttaatgtaatcttatttattatcaataaaaatcagaagttatgtcttgactttgtcatgtgctttgttcacatgtttattacatgattttaggtttaatatataagttctattaaattccgaacatatagccattcacaattatagtaatgtcaacacagtgaaaaataattataattatatgcttcaaattatatagtcccgtgatttattagtgcaccatatttatactaacgtgataattaacgatgtaatttacttatacttggataagtggaatgtcttttccaagacattggcaaagtgaacttgtataagatgtatcagctatacattagactagatcgatattgacagtggaaaagatatcttaaacttactgttatatcatttctaagttgatgtcacttaattgatcttaggtcaattgatctcaatcttgagatggttaggttctagcttaattgtactatacatgttctttgacttgtttgttaccagcttacccgtagcactagcccatacttacatcttaggaattcggtggtgcaattgagtgggagcgttgatcacagatatggaatctataacttctatagctattttgaagtaaaacgatagtttccttcgagtttgggtaaacgcaataaatgatagagcgctcatttcgataattatattagtctttcgaaatatcatttagaaggagcttaatgttttaaggataaaatacattgaagggtaaaatcgtagttttatccctattcaatgtaaaccatctatagatgatcattgattattatgattgaaataatggataattatagcctatctatatttggtatataaaacattctatgtaatcaagagtg

SEQ ID NO: 368028 - DNA, 593 bp, Cannabis indica
aaaatttttaaaaatattttctcgagcaacatcaaacaactgtaagacaatgcttcagcgaagatatctttcgatttgaatcttgcatagtgaatacgatttagattttactagagtgactcgaagtcttgaactctatctctaacgtcgtaccgcgcaccaatctttcaagggtgtattcaaataagcccgtgcgttaatggctagtcacgtctatcccagtatagtgaacgctctagaaattttgccccaaatttcataggaagcggccccactcccgcattcacatgggtgagtctatcaagagtactcctatagctcggtactccactccacatagagtatagatctcattaagagtttctattaactcatcctcttatcgcttcaggacttcatgcttctcgtataactatcgcatgattaacacatatcacctcataacttgttattacccgttgaacctaattcttgggatctccagtcattaggttgggttaccattatgagtgactcatctttctaagggcaatagtcccattcctttcgaagttttatagactttctctctagctagtcctttcgtcaaagga

SEQ ID NO: 368029 - DNA, 473 bp, Cannabis indica
agtgtttgcttttgaaatcacattttggctatcactgcctgagatgttaggcagaggccatcattgaagagcgatgggaggccataccggaaaagcaatgggtactatctctttcatatttggctacctctgctgagcttaccatgcaaatgccatcactgaagagtgatgggaggccatcgctgaagagtgatgggtgctagctcttttgtgaattcttgcacggtgaaatgttagaggaaccactattacaagttggctagtgagagcacttaccaagatgttctctattccagtattttggtaaaagagctaactccaagttctcgttatactcgctaggcttgtatgcacctttattgttatcttgtaacttggtgcgcgcctttttagttgggtccaagcatgcttgttacaggatctttgttcccaaagaatattcttccaggagtaagtctctgttgggttttatg

SEQ ID NO: 368030 - DNA, 599 bp, Cannabis indica
agcaaagctcttgatacaaggaatgaggaggggccatatttatgttatatcagaaaaatagaatataacttgtaggaatatcttgactttccaagaatgcccctacatcaactcaagaactgataaaaaaacgacagggacaaaattgtcccaaaaaagttaatacacaaatttaacaaaacgaccaagaaccaaggtcgtttatccctgcacgacaaatcgtttagccaaaacgatttgtcgttcttccttgaacaaaaccaagcacaaatgagctaaccctagcccagaatccctaagaaccttcgagagttcgacagacctctctctctttccttctctccttctttgattctcaaaccctagaatcagatatccttctcgatcaaaccagatcgatttcccagaaattttccccagaaaattaccacaaacacaacaaacatacatgatcaaacataagtagtgaaaagaaatagagaaaccaaacacagagattatagaggttcgccctaaatcaggggtactcctctttcgagctcgccttgaagacgatctcaaatctgcactattgaagaagaatattacatcaggtgaga

SEQ ID NO: 368031 - DNA, 622 bp, Cannabis indica
gagaaagaggtggacaagctattaagaagtggcatgatccgtgatgtttactaccccgaatggccagccaatccggtcctggtgccgaagcctaacgggacctggcgagtttgtatagacttcactgatctaaacaaagcttgcccaaaagactgtttccctctgcccaggatcgaccagatggtagacgccacctccggattcaagctactgtccttcatggatgcgtacgctggttataaccaaataaagatgcacatggcagattaagagtgcaccagcttcaggatcgataagggggtatactgctacctcgtcatgcctttcagattgaaaaatgctggtgcaacctatcaaagaatggtcaaccggatgttcaaaggcctccttgggcgaaacatggaggtgtacgtagacgacatgttagaagaatgtttcgaagtggtctggggataccaaatgaagctcaacccaaagaaatgcaccttcggggtcaaataaggaaagttcctgggcttcatgtcagtcagagagggagttgaggcaaatcctaaaaaaaagttcaagctcttctgagcatgccatcccccaagaaacagaaagacgtgcagagcctaaccgg

SEQ ID NO: 368032 - DNA, 503 bp, Cannabis indica
ttttgagatagtgcataacctcaaacgctatcataatattatcagtaataaggcgacccgggatgaaagcagattggtttgaagatatgatctgaggcaacacttcttttaaacgactcgcaagcaccttagacaatatcttatacaagacgttgcacaaggatataggccgaaggtcacccatcgaagtaggttgtttcttcttcggaatcaaaataatattcgtatcattcagtccatcaggaatactaccattcgcaaagaattgacaaacctggttcacaacatcgctcttaactatttcccagtatttttggaaaaagccgggggtcataccatcgggactaggagatttatcaggatgcttattaaacagagcacttctaacttcttcttccaaaaccgacctaagtaaagacatattctgatccatggttgtaatgaccgctctagtatatggattagtaaaggcaattagcactaatttttattattttactatt

SEQ ID NO: 368033 - DNA, 547 bp, Cannabis indica
taaaaagtttaaaaaaccgtgtattgacaaaaatgtaaaaaagatgccaaatttgacaccaggtgtaaaaatctctaatttaatttggaaattagcagttaattatgatttaattatgaaaattatttatagatatttaaataattatttatgttgttatatttgaattctgaaatacattttatgtcatatagtgaaatttcataattttgcatttcccgtgcccggcaacatggaactcggtgtttggctcagtagaatcacaactaatcatgttagtatattgggatagtttattagacattgggaatgtcaggattggtcggtaatttacaatttcccaaaatacctctttttatccttttatgttattttagtgtggaggggtaaaatggtcattttgccccattgatattttgtcctttagtggacttagaaatattttttcagcagttatttttaatttttggctgagataattgttaggctaaaattagtctaagttacgtgtcatattttcggttagttttcactctttgtttctagt

SEQ ID NO: 368034 - DNA, 602 bp, Cannabis indica
aataaggaaaaaagtaacttttaaaactcattttattcaaaatagaaaaatcaaagaaaaagcaaaattccattttctctcaactctctctatattcggcgcctccttgagcagcaaagacttggctttttccttggtaattcaagctgattttaacaagatttagtgatctcaagtggttagtaagattcctatagctttcttttaagtttcttgaatttttgagaaaatttgtgagttgcatgcttagtttttgattgttgttgctgctgttaattgttgatgttatcttcagaagtttaaacatgtttaattgagtaggatagagctggttgtgatgcatgttggttgcttttgttcaagtttggaattttgactcaaaaccttgattttaatggtgaaacgatgaaatctgttgctgtgcgtgttgtagttgattgttgttgttttcagaggttatattatgcatgtttgagtagattcaagcaggtttggatgcatgttagtggggtttagctaagcctgagttttgaactcaaagcttggagctttaacgacatttttcatatctgtgatttctgggttgttttgatgctttgaaa

SEQ ID NO: 368035 - DNA, 589 bp, Cannabis indica
ggacgccgagacgaatactaggagccagggcaattcggttggatctaatgctggtcacggagctcagattcccccaaagcgtttgtggccgaggtagaggttccaggggcagggcacatggccagggtgatgctaacccgccaaaaggttgcctaggctgcccaagctgctcaagatgcccaaaattgggaaaataggtttacagcaatgcaagccagaatcaaggaacaagataatgaaattcaaggattgaggcagcagggtgctcctgcagtgcctgctccaaaaattccagtggcacctgcccctgctgtcaaagccaaaccagtggtggcagtgaatcagatggaacctctgtatgaaagggtaccaaagccgagcaatggctaacagtgattactagaatcttgaattttatgggcctcactagtaatgataaggtggtatgtgccaccttccaattttaagaagacgcactagtctggtgggacatggtgtccatgattcacgatgtcacgacgatgacctgggaaaagttccaggaacttttcaatgctaagtattacaatgaagcagtcaaaagtgctaa

SEQ ID NO: 368036 - DNA, 592 bp, Cannabis indica
ttctttacttgtcccaattcttttatgtcaaattctaccttgagtttatctttaattcctttgattactgtattgtctttgcccattattaatatatcatctatatagagtaaaagatacacaactgttgactcttctaggtgcttgaaatacaaacaaacagtgatcaaatttaaaccttgtaaaaccaatatataccttatttgcacagccatataagagactatacccatcatgtattttttttcatttatctttttatttcaaaattatgtttgtttggctgcactgttactgtagctataaccaattaaaagagattaaatatatataaatatatataaatatatatatatatactagctaatattctaatattacatgtatacttgcttatacttttagtttaaattttgattatatatatttttaattgtataagttatatattataaatactttttttattttattattttaaaaaacattaataataaaaatatttttaaatatatacaagaagttttaaaaaataataatagaaatatttttttaaaaaaatatatatgaaaaagtaatataaggatatatt

SEQ ID NO: 368037 - DNA, 574 bp, Cannabis indica
atatatgaacgatatgtaatgccgaaaaagtacagacatatcaaaattatatatgcgatgaaaggatcaaaataccaccagccattgatgtttgtgcttcaatcccacataagctttgatctgcaaaggaaactgattgatgtgggtaatcgggcttccaagctctctctactctctttagatggatttactattatcacaaaaatagtagtgaactcggggaccgagaccctatatgtatataggtaagaccttccatcaaaaactctgccacaattaattgtcagaatattttgacaattaattcaggaaattaaatcggcaaatcaaatattcgataaattataatctgaccatttatagaatatcaatgaattaattgcatccagattcaatgaatattttataaagtaatttgtggcataaacacctaagtttaacttccagttgcaaataaatacctaagggtgcgtttggaaagccacaatgtaattggatttgtgtgtaattggaggtaattacacaatttagcatgtttgtctgaccatgtgattacactgtaactgtgtaattg

SEQ ID NO: 368038 - DNA, 506 bp, Cannabis indica
agataaaggccaagaaaagaattccttcaggatcaacagtgagaggtctcttatatgcattagatcaaacacctgctgttgagtgggagttatgagtaggtatcagattaagccaggaaaggaatattggaaaacaatcaaacaaatcttaagatcaataagagtaactatatgttagtcgatatgggtagtattttaatactcttagactacaccaaatcagatttctagacttgcgttaatgctataaagtctactaatgagatggtgattactcagggggtggagcaatgatttttgttgaagtgtaaaaaccaatctggagtctctaactctgccagtgagactaaatgttaaagttgcatgaaggatacttatttagcctatggaatgttctatacagcttttggcattataccaataatgaattaactactagtgttgcttcctaacaaacacagaaatagttgccaaaaagtaaagaatccagtatccttagaggagta

SEQ ID NO: 368039 - DNA, 565 bp, Cannabis indica
cccctgaacccctgatcccaaacacctacccctacccctaccgttaaccctgccccaaaccctaacctctaacccctaaaccccaaccttaacagcaaccctaaaccctaaacctaaaccccaaaccccaattcccattcccattcccattcccagacccattcccactcccattcccattccaattcccattcttattcccattcccattccctttcccattcccattcccttcgcattcccattcccattccacagctaactcctattcccattccatggccaattcccattcccatttgcattcgcattcctaatcccattcccattcccattccaattcacattcccaatccctttccctagcccacgcccatttctatacccattcccattcccattctcattcctattcacattctcattcccattcccattccctggcccattccgattcccattcccattccaattcacattcccatccccattcccaatcccattcccatttgcattcccattgccattccccgacccattcccattcccattcacattcccattc

SEQ ID NO: 368040 - DNA, 526 bp, Cannabis indica
attataaatcatttggtctagacagaaacatagtatcaatcacttctaaatttttttttattaacaaaaattacaattatgatgctaaaaaattattaaattatgctagttacaaactcaaaactttaaatatcacaattgcccctaccaatgcaataacactattccctagtttagtcactcactagctagtcaccttagcgcaatatatatatatatatatatatatttgaaataatgtcaaatttatcaatatatcttatagcattttgaatacatagggttttgcaactcaaccgaaataacaaaaataaaaaatgaatacaaactaaaagtgtctagtaacataatgtgttactcaattttatcgtctaatactattagattaaaatagctttcacagagaccatactattttaatcacgcaatactggccaaagttattttagttattagattaggggcatgattttatcccgttattgtactttcacggaatgtattccgtgatgtacgacaaccgtta

SEQ ID NO: 368041 - DNA, 546 bp, Cannabis indica
gggataggtgttgggtttttttgacccttaaataaaacctaatttcaatgtaatcattacttttatttgtcaataaaagaatataatcattaccatttcgtatattacttggttcacataattttttcttgatcatatgtttgatatataaattctgtgaaattcgtatcatattactcttcatgattatagtattgtcgatacaatagaagtaataatcatgactatatgatataaacctttttagtcctttaatttatcagttcacaaggatttacaatgatatgataatcaatgatgtaatttaattacacatgtttaagtgaaatatatttttcagggcattagcaaagtaaatatgtatcaaatgtattggctatacatcagactaccgatattgacaatgaaaaaaatttatcaaatgtaatttacttacaattattttagtggaatgacttgtttgctactttcttacctgtacgaatagcctatacttatatcttgaaaacacggtagtacaatggagtgggagcattaatcatagat

SEQ ID NO: 368042 - DNA, 503 bp, Cannabis indica
caagttatttatttttctgcaaatattttatattctgcctgttccgttttactgtagcagaattactttctgcttctgcaaacgcttccagtttttatattttcttatatacaactgacatttgcaaaaacacggtttttcagttatcaccggcaatgagtatagtgcctctaaaattggtaccatacttaccaatacttgatgatttcatattttatcccaaaaacaagaaagaaagccaaatcatttccataatgataagatcactaaaagaccatccaacctaatattatagaactcatgaattatatttttgtcatattactcaaaaaatctccatttatccaatccccaaatattcaaaatctagccaaatcaactaacacattcaaaaaaataccttaattaaaacccctaaattacagtacattccacactaaatcaaaataccgaattatatattataaaaaactaaaacgaaaaactcaaaacaaattacagta

SEQ ID NO: 368043 - DNA, 626 bp, Cannabis indica
tcatttggtctactccatttggcatgctagaaatgaccaaatttggaatagtcatatagaaagtaaagatgtaattgtacaaagaatcaaaaatagtgttaaacatagaataaaattattttggctaaacaaaattggtcaacaagataaagattggttccattcattgtaaaaaaagaagagagatatgttgttcatgaggtctttaacataaagatgctctttcattgtaaatgattgtacaaagtgttgtggattaataataaacttgctgatttatcaaaaaaataacagaacaaactataaattttctctaatgtcttaaaaatgttaaaaaatgtttaaaattcgagatgaaatctaagattaagatataaatttgggaaatatatataatagtgacaactacaagtaaaccacagcaatgacaagggatgtgatacaatgatgacaacatgtgagatacaacgataaaaataagtgagatataataataacaatatttttgaatgaccgagatatgaaaataatgcattatggaaaacacagtaattttaatctacactaccttatttatttatttttataaaaataatttcttttaacaaaacaatttaaaatactac

SEQ ID NO: 368044 - DNA, 696 bp, Cannabis indica
atttacactatcaaaaagaactttcaaaattcataccaaaatgacttgcacagttttcaaaagaattatctttgttcagcatgaaatcatgtgtgacagaatcaataaaatttacctcatatacatcatcgcaatcaacagatttattagcaacattaaaaacattcaactcaacagtcatatttccaaatgataatttaagaacaccattacgacagttgatgattgcatttgatgtggctaaaaatggtctacccaaaatgatcggaatttgagcacttatgtcttcaacaaaatgagtatcaagaacaataaaatcaacaagaaaataaaatttatctacctttatcaaaacatcttctatgacacctctaggaatttgcacagaacgatcaactaactgaagtgttaaagatgttggtttcaatatcaactaacggaaatgttaaagatgttggtttcaatatccctagaccaagttacttataaacagaataagacaataaattgaggaaattacactgcataactcttttaatttaatgcctttaatttttactctcactttcaaaatctattatgtatatttcttctttcaatctttttactaattttacccctatcacttcacaatagttttcattcttctttaattaaaattttgtccaaactttcccataaacctaagcatccatt

SEQ ID NO: 368045 - DNA, 550 bp, Cannabis indica
tggttgtatccatggccctatcttttcacgtactgtttaaaatggccttgagcgatgagactctctatctcatctttcaattggtgacattcgtcggtcgtatgccaccatccttgtggaatttgcaatacttgttaggatctcttttgctcctcgaattcctcatgagcttgggcttgccaaaggtaaccttttgcacatgtgagaggtaaatattctcccgagtttcattaagctcgatgtaaatagtatacactggcacatacttatcatgcttcttctgcttttttttatccttcgacggttccttaactccatcctttctcttcgaactagtagcccccgagttatcaattctcgtggaaacagtacttgttgaaacattgctgggtttacttcctgagcttgttttcaacagattcatttccttggggtcttcttccttccgaacaaacacctgagcccgtttgttgaactcagtgatgcttctcactggatgtccttataaatcatcccacaactcgccccctgcggttaatggatcagtaga

SEQ ID NO: 368046 - DNA, 614 bp, Cannabis indica
cccagaaattcaatttgcatattgataatagtataaggtatgtgattagttactaaccgttgcctaagtccttctagggaaataccctatagtgataggaaaactttagagtgatggaatggttgtgtacatgtaaagaccgcttagcttaaatttggaaattagtagataattagggtttaattataaaaattatttttaactctaaattattaatttatagtgatttatttgaattcagaattccttttatatgtcatatagtgaaatttcatatttttgcatgttaggtgcccgacaacattggaacgcggtgtatggcttagtagaatcagatcttagtactttagtttagcggggtgatatatttagacattgggaatgtccagattagtcgggaatttagaatttcccaaaatattctttagtggttttagaatgtttttgtgaggacaagggcattttagtctttttgcctatagtgtattttgtccttttgtgaggtttttagtttattttaaatcaggttttctattacttttagtagctgatttaatgcaaataaaaccaattttataatttccattttacaaaaaattaagaaaagaagcaaa

SEQ ID NO: 368047 - DNA, 761 bp, Cannabis indica
aggcagtcagttgttgcgaaattcagtgtaacagtagaagaatatttacctttttcctaaggtaatagaatatagtgttcatatgctgaaacaaaacaacaaagaaagacaaaagagaaagttaaaaaatattttaaaatcttaattacagtaactaaactaaaaaacaataataaaacaactgtaaaacaactattaaattttttaaaagaaaacagactttttaccgagtcattgataaacatgtcacaggtagccaaatgataaaacaaggttttatcttcaacataatcaacacctaatctaaacccgggggaaaatttcttcgcaccatcctcataacaattgtaatgcttaaaacaacaaataaacaacaaaaaaacaatattgaaatcaaataattgcaaaaataaaaacagaattcaaacaaaaacaaaatacaaaacagaaagaataaaatagtcacctaggatgttttaacaaaccttcaccaacctaagcatcaaactttgcctcaatttcaggagagacgggatcaacatatgaatcgttaagagcgtaaaggtacttcacataagtaaccatcttaaaattcctctcatctcctcctgattgagaacctgatgacattacctgcattggagtgctcctcacatcagccgacccaaaaataaaacaaaaagaaaacaattaaatgccagcgcacgctttctcttatccaaaaagaggagtatcagaaatagtgtcatcagcttcttcat

SEQ ID NO: 368048 - DNA, 520 bp, Cannabis indica
tatctgttgcgagccaactaatattaaaccacaaaaaaactaataatttcacatatttattacaagcgaatattacaacaatcgtgttttatctgtttagatcttgtagttgacaattctgagccctgtttttataatacagtgatattgtagtagcaaaactattattgaactaacgtgcaacttaattgcaactaaaaatattaaatgtgaattaatatctataagaaactatttattaatattttttttgtcactgatcgatatttttttgtaccttaatagtaatatgtggagaacaactgttagcaaaatatttatgcaattgttatgaaacattaaaaatcataacagtgtttctatgtatgtaactctatctacatgtttattcgtgatttaatatgaataaattcatcattagaaatctgaaaaaacaataaaaatgcacttggataaacatttaattatagtattgataaaattatttttttttctacataactaacaacaaaattaaata

SEQ ID NO: 368049 - DNA, 1063 bp, Cannabis indica
atattgtttattaattacaaaaactttctatgtttatggtgtaaattaaggtaaggataagtgtttaagtctatagctcataatatagattttttaacaaagaataaaattagaaaaaattaagctcaaaataggacaacaaaggttaatgaatcaagattagctttttgactcaaatgattcaacaaaattggccttaatcatatctctacacaaccaaaatttaggatttcgcttcaacaaattaataatacaagttatagtattatctgaatatcaaccaaatcaaaccaagtctacatatacatacaaaatcacaatatatattttgaacaagtagaacgatacataactcatataagaatatcaaaagcaagcataacaggttaaaaacacaatccacaaattttttgcacatactaaatgatatcaaagagtttagcataagttcatcatcaaatttcataggtcaaactttagtatagtcaccaatagtattaaagaaaaaataaaaactacccagagaaaaaataaaaaactaaaaattgaaaacatacaaattgtcttctcccccaaaccttaaaacaaccgagtctctccattgtgtaataaaattaaggggagagaacaaaactagagcaactagactatggatccatagctatatcatcgccatcagtagcggctccaccccacttgtaaaaaaattactagtagccaacacttgatcgatagtagagtatttcattcgaaccaaaaaaagcaggtggtttgggaatcataaagatagaagaatggaataaagcagctacttgtaaatacatttgggccatatctaacaagcgggacagcttatggcaaaggtggatacatagtgtataccttaaggatcaagattggtggaactacacagcctctatccatgccagctagtattggaaaaagctggtagccatcaaagaacagttgaagctgaagtgtgatacagcagcattccagcagaggcaatacacaattgcagcaggttatgtactcttttctcctcctggaactaaacagaaat

SEQ ID NO: 368050 - DNA, 606 bp, Cannabis indica
ttttttttttaattttacggtattatataaaaacataataaagccacataaaagtaacagaaaaaccacatcaaaaagaacataaaaaattaatacacaaataataaaaaatcaacaacaaaatagtaagagtacaacataaaatatatcaaaagaccgtatcttttgtaaataaaattttaaaaagtaaaaatatttaaattttgtacaatcgtattttctttgaaattagggataattttagaaaagtacaaaagcaacaaaaaaattacaaaaatatagttcgtagggagttttcaatatttttactttttattttatttacacaaaatacagtcttttgttgttttttttgttgtattttatgttgtactcttgttattttattattattttttgttatttatatattattttttatgttgttttgatgttatgtttttgtgtctttatagaataaatgtaaaaaagaaaaatttgaacctaaaaatataaaatttcacaaggggagttatatttgcacccataaatttataaatacaccctattattaaaaaaaaaaacaataaacttaaatattttttaaaaattaatcttaatattttt

SEQ ID NO: 368051 - DNA, 716 bp, Cannabis indica
aaaataaaagacaaaaatagactgtaaaaaaagtaaaaaaaaaaaaaaaaagagataaagaaaaatcttggttgaaatgggctggattcgaaacggcctaatcaatgcgaggaggaaggtgaggaccaatgcgcgcctcaagcatggcgtcaagcttcttcttcttctcccaggatttggcaatcatctccgtaggttttgggttgaagtcaagcttgatactctggccatttgtcgaccaggccatgtagacaccatcatcgaaacgcttgatgcaacggctgcaagagataggggagaggaactcatctttcttagcctttttcaaggcttggtctttaaagtccttgagcgccttcagctccacggccaagttagccctggactccaagtccgcctagtgcagttcctctaaagacctcaccttggcggccatctcgtctaaggcctccttggcctcccgaagctcgcgtttggccttggcgacagcctcaccctccgccctcaacgcttcccggtgcttcgcctccagcctatccctccgaaggacctcctctcggatcatctcctctgcatgggcttcccttttgcttagcctcttcctcgaacttggccttagcaagagcctcctgccgcgcagcctcctcttggacgcccgcctttcagcagcaggtcctgcaggatctttacgagtttgtctatgcccccaaattcgg

SEQ ID NO: 368052 - DNA, 702 bp, Cannabis indica
tggaaccagactagggacacagaacgagggtccaaacctagaaccgcaccctagtctcgatcccgaacccaaactcagaaatgggacctgggacctgaaccagaactagaccgagacccgtgacagtgatctagatcttgactcgggattccggtaacggggcctagaacagactagtggtcagtgtctagatctgggacctagacctgaacaaggatcccaaaaccaggaccctagaacaagacaaggaccgtgaccaggacccggacccggacccagacctagcctcaaacccaaactgagactggaactcggtcccagacaaggtcgtgtacccagaccgaaactgagacccggacttggacctaaatctgggacccgatccccaacacagacttggacatagatagggatccagatacgaacttggactctgaccaagaaccagactgggatcgaaatgctggacctagatctgtaccgagatgctgaccaagacccaaacttggacccgcactcaggacccgaacttggacctggacccgaacctagaccaagatcagggtccagacctggacacaaacacggacacagactctgacccgaactcaaacccacacctagaattagacgcaaagctagacctggacccggacaaaaactcgaacccagaccaggatcagaaccaaggacttagaccca

SEQ ID NO: 368053 - DNA, 666 bp, Cannabis indica
taatatgtgagaagtatatatctttctcctttaaccaaagaaaatttccaagatcaaatgtagtattttagtttcttttatatttttttaacaaataaataattaatctttaaacttaaacaaaatttatgtatcaacaacttaataggttactaaaaagttttttattttttttattttatctgttacaagattaaattataaataaacatatgttataaaactattttcatagatgtataaaataacttgtaaataaaccaaatagtatcttaaatatcatataagttacactaagtcaaacattaaatttaattagacaaaattaagtatactaaccaattccataagtttctaaaaaattatttttttaatcattaaaagtaactaaattgtattttttacatacttatttttatagaacaattttgataaattttaaaatgaattataaagaaatcatatagtatctatttattttaaaaaatataaaataaaaataagttatattataatttattaattctaaatatgtgtttaacgcccaaatgtgacttccactagcggtggttgtagtatagatcgggcggtcgattccacaggaaggtgattatggacaaaagcgttagtagaaaaatagaaacaaaaggttaataataagtgata

SEQ ID NO: 368054 - DNA, 635 bp, Cannabis indica
cagctcaagtagtgatgaaatgtcattaattcaaagctttggtttagttattttgtttctctatggctcccttaccctttctttctctcaagcctaacactatattggcttttttgggattcatactcacaaatctggcccttctttcaggtctctctctttaaatctaatcatatataatatattgttgtaggttttgtcccaatgagctaatgccaaatcatcattctattcaactattgactttggttagttaagttagttatctagcttgacacctaagctctacctacttgattcaaccattgcctataaaaggaagcaccaagacctcattcaagtagagttcaatccgagcctctcaccaagaattctctctctctttctctctaatttctgtacaaatcttgtgagtgtttaggagggttgtaaaagtagaattgctcatccattgagatgacttctaccatgtgaggtttgatatgtaatgtgttctacacttagactcaattgagtgcatgaatcggattgtaaaggtgctatacatttgaataaagttcatttgtttcaatgttaagtctcactgaatttttcattcatttctggttttagttttctgatttgttttaatcttg

SEQ ID NO: 368055 - DNA, 840 bp, Cannabis indica
agcaactattgacaagtacaagaaagcatgtagtgattctacaaacactggatctgttgctgaagctaatgttcaggtataatcaatataaatatataaataaatattatatatgttatataagcacacagctagttttttgtgtttggaaaatatgtttaattaaactacttaaaatacttaaaaaaaaatagggatcttttggaataatattatcacattcacaatcatctatatttttgtatggattttatacatgcatgcatcatcgatcagttattaaaggtactccaaaattttggtgagaaaaagaaggtcaaagaatatatttttcctctgaaaattttgctatatatcattgctatcatcacattttgcaaataagtttatatatatgaaaaataatatatataatcacttcattatatataaatgtttgtttttcattataactatatatgttgattatgatctagatatcttctcaaaattattaattgtagagactatttttatttgaacctggctagaataagtaattaattagttaatcatcatacttataggaaaaataacccgaattatatttcggtaggcataatatgttcctaaattaatcttaagaacaaaaatcagtgcttttggtgtgtatcattctgtttctttttttcttttccaaattattattttaaatgttttgtaaacactataatatctctattgtcttttgtttggtatttatgtctctgtataattattctgtgtacctaagaaacatgctatgtgtataatatctgtctatatatagcctttgtattattttatttttattatattttt

SEQ ID NO: 368056 - DNA, 706 bp, Cannabis indica
gataaatgagctggaggacaagtaggggaattagggaaactaatgggatacgactctgacgaggagcttgagccgtatcatctaactataatgaataccccttttattgggattttatgccctaaataaaacccatttcaatttaatctaatttgttataaatataagattagaagtcatttatgtatacatgtagttttcatattttcggtttaatgtgtacaaaatctgttaagtccagaaaatatagttattcacaattacagtgatgtcaacacagtggaaggtaattgtgattatatgcttcaaaagataatgtccccttatttatcagtgcacgggatttacactgatgtgatagtcagcgataaagtatacttacaccttgcataagtcctatgttctttccagaacattggcaaaatatgctagtttcagatgtatggagtatacattggactgggaccgatattgatcttggcaaagatattataatcttactgttgtatctttctaagtcaatatcactagttgatcttagatcaaaagatcttaatcctgacaaggttaggttcgatctcaagagtgttatttatgttctttgatttgttagttaagcctaccttttggtctgggtgatacgtacattttgggaacatgatagtacaattgagtgggagcactaaacatagatatgaaatctata

SEQ ID NO: 368057 - DNA, 496 bp, Cannabis indica
gaaaaggaaatacatgcaaaatccctaagttgaccttcggtctctaaaaaccctaacagaaattagttagaatggatttggttaatccacacctaactaatttctgtaactacctaactaatacattcagaagcaaaaatagaaaccctagatctatatatacctcaagcaacaaccagatctgggaagttgagtaagttcttcaagatccagggtgagaagacttgaagaaggaagaatccaagctcgtacatgcacagaaacacaacagaaagttagatctagagagagagaggattaaacactaaatacatgtattaaatagagattaccagtctaaaaattgttacctgtgacttggaatcttcattgttgtatgtctgaaacattttgatagtggaatcgagctctcaaattcgaggagcagctcaaacggagacgtagccaatttattggtgaacttcgggaaaaatttggtgttctctaaccctaatct

SEQ ID NO: 368058 - DNA, 540 bp, Cannabis indica
tgttatctatatatatatatatatatataaatatgatccgcatcaaaatcacatgtactagagtatagtgcatagcaaaccacacttggtaattccatattaaagatttcataatttaatacacactaccaacttgtttaattcatattgtatgatcttaattttcttatactaccttacaagatcatacgttctctatatgaatatagaatttttagatatttattaattatgcttctataattaatttattaatttatcttattattttatttcatgtattctataatatattatctattaaatactttcttttaggacataaaccttaacaatctcccacttgcactaaaagtaagtgtaatgtagtctacaactcttatcgatattatttctcatttgattattcatactaagtcttgtgaataatactctccacataatgtagttacagatctcggagaccactacatcatcatcgaacaaatatacaaaacttaatttttatatatttttcttatttattcttttattttcttc

SEQ ID NO: 368059 - DNA, 552 bp, Cannabis indica
tggaattgaacttcacctttgaaagaactgtaattctaaaagatgtgatgcaaactctagagatgagaaagaatttggtcttgggctaccttctcaacaaggccgggttcacataaactataggagctgatttgtttactttaactaagaatgggatatttgtagggaaggggtatgcaactgaggaaatttttaaattgaatgttcatgtcaataaagttaatgcttctgctttaatacttgacatgctagactttgtccgtaaataaacgcataatcaagaacatgagtagtttaggcctaattcctaaattatctttaaataactttgaaaaatgcaaattttgtagccaagccaagattactaaaacaccacataaatatgtgatagaaaaggaaaccgagcctctacatttaatccactatgatatttgtgaacttgatggaactttgactagaaatggtaaacgctactttatcacttttattgatgattgttctaactttaccaggtgtatttaatgaaaaataaaagtgaagctcttgatatgt

SEQ ID NO: 368060 - DNA, 554 bp, Cannabis indica
agaaggctattactgaactgctcgaggctgaacctctttaaaaaactctatgtcctatatttatttttacgatattacacgtttattatatcacttatcgcttacattaagactcattgcgttggctaaaagtgaggtcaacattttggtactttcattgagagtaagggtcacaaactggctctatacttcaaatttagtcataaaacacaatggtggcaccgactcgtagaggtgtggtcgatccagcaaatccattggcagtggatcccgcactgtagaatccaagaaaaatgcaagggttccactagccacaaatccagaacaactgccaaccgtaggttagggtgtgacaactgctttgagtgaaatcgcacctagtgtgcaagagactggaaataccagttcagcagcgagtcagggtattcccaatactagagtttcgccagtaataaatgttcgaacaaccgtgggagatgacaccgagatctagaacctccgtgctgctcttggactcatgcaaggtcatagtaataccttgcatcatgaccagg

SEQ ID NO: 368061 - DNA, 520 bp, Cannabis indica
cattcctctgcggacccgcttaatgttagcgggaagcatagacatttggcgtcattgctgactctcatgaccgtcattacttggttgaaccgtgacaggtgatcgctagggtccgagttctcggtataaggtgccatttcgggtatcttaaaatttttggggagctccgcctccaggatgtgcctggcgcatggctcccgatcctcgcagtcagagttggagtcgtcacctttttatctccgggagacccgagcaatgtctttacgtagtatggcaagctcagccatgattccttcatttagcgttcccgtggagaccgcgggcgcgtgtttcttctagtctaggtgatctcggaggtcattgtgttttctgttaatctgatgtctcagatcgatgggagggtatttttggccccttcttcctctccctctgggttcctggtgcacaaaaacgctctttcagtcctctcgatcctgagggccaagactccctttttggagtttacccctctgcggacctt

SEQ ID NO: 368062 - DNA, 730 bp, Cannabis indica
ttgagctatttctaaaaaggcatttagacatgactttaatggttgttgccctgaagagttagtgaaattttcttatgagatctcaaaaaatgtcaaggcttgccacttgcaataggggccatagctggttattatctagaaaaagaaaagtccaatctgaatggaaaaaagttcttaatgatattaattttgagttaaaaataaatcctcagctcgtaggaatttttgaaattctctctctctcttatgcatgatttgcctttccaccttaaatcttgcttattatattttggaacttttccagaaaattattcacttccgaaaagaagactgtgtcagctatagatttctgagggttttgttcaagtaagggaaggaaaatcattaaaggaagaagctgaaggaaaatgaacgtaatctttcacatttgtgaaatccaatattttctctcttctttctcaccataatctatcacagtttcaaaccatccgccattaagtccctctcttctttctcaccgtaatagattttattttttactttttaaatatttaaataaaaaaattaaataattaagcgtaaaatttttaaattaaaattttaattatgaaattatatgtgtataattctaaattttaaagagttttgttctaaaaatttaaataatttagaagtgtaaaaaaaataaattgctaaaaatcttatttaataataaattaaaaaaattaat

SEQ ID NO: 368063 - DNA, 1231 bp, Cannabis indica
ttggtacactaggccaagtttgcctgagggacatcgtaagccacaggaggcgcttttgttgaaaaggaatcttgttggcaggggtgtggaagtagtgcagggaccgtcagaatcttgttagtcacgacagaggtcgagagttgataactgagatggtttagattgggaaagacatggaatgcttgagttgctacatgtgtttgtcaagagggacacacatggagaccaagggggaagaggccgcaatcgtcagaggatggttgtacttggaggtgttcgcatgtgagttttatttgatccatatagaagcaccgaggcagttgagtgggatgtgtgggcttctaaaagcgccagagggcgtaagtcacacaaagacatcgatagagtgtggagttgtggaatgaaagcatcaaagaagccagcagggctacgaagaccgagcgcaagcgttgagatggcgctagagtttgtatggaagccagagggctgtgcgagtgagacttagtagtcatgcttgcctgcgaaggtcgagaagggtgctagagttgcatgaaggccagagggccgcatcattggaacttagtacattgtgggagccagaagggtgtgatgcaagtgtgaatcagttggatggttgagcggactttgcatgcatgtagaaatcgacaggggtgctatatgagatagttgacttgagagtcacatcctgcgagatgcacttttagatggcatggtgtgcatgaagagttggggcagaaaggcatctgtgtgtgggcatgttgtcgaggacgccaacagatgaagtgggggagaccttcacggttcactcaatagactaattattcattacaagcatcgagatgagtatcatggagagtgattgttgtttaggatgtaaagtcaagaagactcgggacacaagcagtgccagttatctagggtgaaagtctgtgggactcaggtactaagataacaccatggcaatgttggcctaaggtgaaagtcagcaagactaaggtaataaggcaacattaaaatgtcgaggggcgaagagtcagaatgaccgaggcattagttcaacatcttcatcaaaatgacatgtggaatggaggaaccgtatgtgagtatgcagttagcttgcgagctataccttgaggggtattcctctaagagagaagttgttcccaagtttaactgggggagcccactaattcatgtgtttgaagaatca

SEQ ID NO: 368064 - DNA, 774 bp, Cannabis indica
caagactatacgggcaactttaagaagaggattgctaattgtaaaaaagagatccgaaggcttaaatggtgttctgatgaggactctattgctcagtataagcggtctgttgctgctcttggtgaagtgtatactcagcgtgaagtcttttggcgtcagcgatccaaacaactttggcttcgtgagggtgatcaaaatagcaagttcttccatgcaaaggcaactgctcgtaagaaaaacaactccattaactctcttttgaataattcaggtgtgtgggttgattgggaagggggtctttcagatgttattgttgattatttctctgatatatttacttccactagctctaactttgatcctgtggtaagtggtattcggccgactattactagtgctcagaatgactctctgttacaacaagttacacctgaggagattagaaaagctttgttccaaatgcaccccgataaatcaccgggacccgatgggatgacacctgggttttatcaaaaatattgggatgtggttggtgtggatgttatatctcaagttgttgacttctttgagacttgctcatttcgtgctgatttgaattaaaccaacattgtttctcattcctaagaaaaaacatgttacctctatgagtgacttaaggcctatctcgttgtgcaatgtggcttacaaagttgtttctgaagtgctcgcaaatcagctcaagatagttttgccttgtgttatctctgaaaatcaatctgctttcatctcggggcg

SEQ ID NO: 368065 - DNA, 846 bp, Cannabis indica
attagttttggcatttaaatggttagaattagaaaataggcatttttgagaaaattgaaatgaaaattgtcaaaattacaaaataccaagtggggcccattaacactatggtcggccacttgataaggctttttccaattattattttcattattttaatgccaagtaattcctaacctaaacctagtggttacctataaatagatagtgatggctcacacttgataagagattaaaaatcagaaattttgccttcagaaaaaaatgagtcactcactatccttttatagccgaacctgttctccctcttttcttcttcaattttttcgaaaaccttgagtgatagagtccaatgtaaggtttcctaaagtttatatgtgtttatttcattgttttagaaattcatgttaggattttaatgaaacatacttgttagtaaatctagatcctggtaaaacatattccaacactaaccctatagcaaatatcacttcttatacatatcattaggtacataataattcccactattctaatatagggtactttgtccatgtaggcttcttcatctggactggagggagcttgagtattagaaaatttgaattgttggccaattgttgttaaaactagtatgcagtcttcaaaaccaaacttcttcaggatcttcagaaaataccctttttgagataacacaagtacccttttggagttgtcccttataatctcaattcctagtatcttccttgcactacctagatctttcacttaaaattctttgttcaacaactccttgattttgttaatctctattctttctttgcttgctaatgtcatatcatcaac

SEQ ID NO: 368066 - DNA, 561 bp, Cannabis indica
ttttgtcttctcctcatttactcctgatcccccaaatcttagctcaaaaaaatacccttgaagattgcaattttgaggcggatgatcggattcccgaagttgttcaactcctcttcatcattgtagcttccatggatgccactagggatgtgactagggcgggtttgagacgagttcttcgtgggttttggtttttcttatatataaccaagttcaggtatttctctcttcactttcccacttcgattttaactttcttttctgttgtttctggtgtttttctttctactatcatggatgagtttttgaatactgtttctactgtcttagctcttccccctgataaaaccaccatttttacttatgatgctctggttcttccagttcttctcctactaccattagccttcttcttaagcttcacaccattcgaccctacaatcgtccttccctcatgaaaactctctctgcatttggtcattgcaatgtcactttcctgtttttgtgtctgaacatgctgatggcatatttttggttacttttggctgtgagggggataag

SEQ ID NO: 368067 - DNA, 516 bp, Cannabis indica
atatctcatcagttaatgtcatacatatacttaaaacaaaataattaatatgtgaacggtattggaaaaggttaatatttttatattaatttggattacaatatttatataaataaatcaatattaatgtgcttggatgtaaattttccaaataattatgttctaataatgacaattttgtcaaattaaagcattctaattacctttattagttatgtaaacaaaataatataattctgattttctttctgaatagtttagtaaacatcataataaagtatcgtttctaattaatttagaaaccctaaatttttttcctctttcaaaattacacatttgttttataaatttaaaaaaatagcaatatttttttttctttatagcttattaaatttccaagactaacctttagcgtaatcataactttactacacataactactgcaaatcttcgcagattagaaaagtaaatttatagctatagtaacatcagaaagaccaactaaagaagcgaat

SEQ ID NO: 368068 - DNA, 664 bp, Cannabis indica
ggtcagccagacatggtggtacagctccttaacaactcgtttaacttctttcgcttgttgcttgacggttttgccataccttgtaaggagactttatcttgctattggcaaaattatattccacatgtactttatcttgacttacgtgaacataccatatcagtggacaaatttgagataacagataatagatatataaacttgatggataaaatgtagatggacaatatgagatatgaaatggtcttatctaaaaaaaaaaaaaaaaaaaaaaaaaaaaaaaaaaaaaaataataagtcgttgtaaatataaaccgttaaaaaatatagttgtgaatatagcaattgtaaatgtagacgagccgttaaaaatataactgttgtaaatatagttgttacaaatattaattttgaagtaatataattaattgataaactaatttatatttgatattataaattttaaataaaatattaaattataaatgtaagctaaagtagagtggttgaagtgagatgaaaaaatatgattctctaattaaaatagctaaagagtaactaaaattagagagcataattggatatgcttacattactttttagggtaaataccattttggaccctctgttttacaaaagttaccaattggaccctgtgttttgt

SEQ ID NO: 368069 - DNA, 917 bp, Cannabis indica
ctcaaaatatcaaaaattaataataacccattaaaataaatattattaatttaaaattgatatttaagtttaaatattttaaaaattaatattttattttgattttagggtttgaaaattgaaaattcaaaattcggtgaaaaatcccaaaaaaatcgaatttttgggtttgagatgcaccgtgtccgagtgccagggttccgtgcaacctcattcgcgcgcgcaagaggctgctggcaacctcctccgcgagcgcagggggctgcaatgcagtctcaacttcggtacatgagtgcttcggacacgggtaggcattagcttcagacaaaatttgtcccccagcgcgcgcacgtcaccttgtccgagccctggtgcgtgcgtcgtgcaccaattcgacaccatatgcacctgatttttcaaacattcataactttctcattttttatcggaattgagttccgtaaaaaccaaaattgcttaatttttcacaaggaatccaaataaaatattttcagaatgaaaataaaattattttcatggaaaaatttcgtaaatcacattcaatcatcaaataacacataaaccaacatgaacacatccaaatcaacacacaaacaatattcatcgttttaaatccatatttcatgaaagtaaatcattaccatggctctgaggccagttgttgggaatattttaccaggatctagatttactaacaagtatgttgattaacatcctaaatatgaattctctaaaacaatgaaataaacacataagggtttaagaaaaccttacattgattgcagcggaatataatgactccttccgttcaagatctctagcccttgattcctttctgtagcagagcattatcaagatctgaacctggatctctttctctccttcgggtttggtta

SEQ ID NO: 368070 - DNA, 510 bp, Cannabis indica
aaataaaaagtgatacttagttttttacgtatttttctttatatttttaagctaatattgaaatttaggtgtgtaattggatatccaattaaaaacccgatccaatccaattagtaattggattggattggattttgaggtctaattggattggatcggatgatgattttccaaatccaattactaattggattggatcggatgaggaaaaaaaatgttggattggatcggatgcccacccctaggtaaaactataatgaacccttaattaaatgggtgtttttgtgtatagtacaataaaatttttaatttttagtcacaataaaatttatgactaaaagtaaaaaattctgactaattatatataaattattattcttatgttagaattaaaaagttcgtgactaaaggtattagtcacaaaaattacaatttattgtcactaatactaaatatgttttagtcacaaataactttttattgtgactaaaaatcacatttaatcataaa

SEQ ID NO: 368071 - DNA, 685 bp, Cannabis indica
aatttttattttttcggtattttttttagttttaaaaagtttataatacataagtaacaataaaaaactattatcgtaacaatataaactcaatatcaatattctacttataaaagttattcccaaatatcaaccttttatcaaaaaagaaaaatatatatgagtatatataataataataataataataataaggatttgtttggtttgaatcgctactgaaattttaaaaattgtgactgaactagagaatttaaaacagttcaaattgatcaaatcatttacaccggattcatttggtttgatctcaaataatttggtccagaattagttagaattagggattatatgaacaccctagtacatctatataccattacaataactttcgattccttacatctctatatgcatttttaatgatctcataattatgaaaattaaagattaatacagcaaaaatatataattatatatattaagttaatattacacgtatatatatacataattatattaattttattttagctgtgtatattaattcttagttgtataatttattttttttttctttttgacatgtgaattggataaaaaattaataatagaataattttttttagggatttttacccccatatactgaaattttttcaattttttttttactgtggcgcagaat

SEQ ID NO: 368072 - DNA, 738 bp, Cannabis indica
tgttttcacagtcgatatgcgtcactatcgtctacccagatgtaacagagttgatgtcatcgctttatacatccaatgacatatggtttctcgttaatatactaaacaacagtttgtacaccctaccctcacataagcccttatagtcagcgagtcgcaagtatactctattacttacgtaattaatgagttattccattaaaagtcatatcatcgatccatattccctttatcttgatacgtgtcctccactgaaatggtagccgaatttcgggtataataatgacataagaaaagtgtgagattgagagattccactaattctatgagtttcatttaaagagaatcatattactttatgagtgcttatttgattaacattgaatagagatatcatgttagttattctaagttaaatctatcatcgctcaagagaggctaataggttaaattaagattcttgaaactacaaattataggataaattgggataatcgataattggagattcatagttttaaataggaaaattaatgctctaggtttttactttctgattaaaaatcgttgtttgtttatttatttttctatttatcttatcatttgtttcttaattataatttactttgtgttatctagttaaagtataaatttaaaaagtataataattagtaaaatttaataatcaatccctatgggttcgacaacctttttagtattaaaactttactataacaa

SEQ ID NO: 368073 - DNA, 635 bp, Cannabis indica
aaatcagttaatactgtttacatgttgctctgaatctgatacaatactacatttcgactcaaatttagtacattgtttgagaactaatttcttgaaaaaatactaaaatatagtagtacattattattttagcatttcattaaaaatgctcttagagatatcttttattaatggatttttgttttgagtttattgtatcttatatatttttttttataaattatttttgtgtttagaaataattgtgtaactactgtgtaattattaccttcagatacagtgtttattaagatgtcaaataataattacatataagttctcattttcatgtttgacaataaattattaattatatacaaaaataatattaatcatggaccaaaatagtaatattttatgattatatgatgtattatttatatatggggtaaagctatatttgaagatgaaggtcgttggctcattagtgatggaactaatgttttcatccatcatgattggtggatccctaatttggatggtaataagtctttctctccttgttgcttacgtgatgatgctactgttaaggatcttttgatgtctaatgggtgttggaatgcatctctagttaagagtgttggaaattattttac

SEQ ID NO: 368074 - DNA, 489 bp, Cannabis indica
aatatataaatattaaaaaaaataaaaaatgtttaaatcttaccataattaaaaaaataaaataatcaatttttaaatttaaacctcaaaatatcaaaattaataataatctattaaaaaataaatattattaatttaaaagatgatatttaagttcaaatatataaaaaatattttgggtttgaaaattgaaaaaatccgaaattggaaaaaaacccacaaaatttggaaatttgggtgaagctggcagctagactgcacgctgcagccccaggaggctgcaaatgcccaggacgcgcgtgcggaaggaggaattgaagggtgtctggggcagcgaacatgggcggacgccgcgtgtaacaccctaactaaaataggcgtattacgttatttttcaacatgatgtgcagctcgttgctaatcaacgaggtttatggaaaacgtgattagttaaaagttttgctttttaattaacttataaataatatt

SEQ ID NO: 368075 - DNA, 1388 bp, Cannabis indica
ttgagtaaaatatttatcgctcactctattttctgttttgatgttgtaaaattttactattgttggtaatcttagttttttacaaccatcaaacatgggtttatctgcatcacttaaaaaattatcgaattttttaggatcaataagaaatttcacctgtgcttcgtcaaacaagtccaatggatgatcgtcgaaatcattaccctcaataacatttacctcatgcttccttaatggatatggatcattagctaaatgttcgcaatgtcaataccaaatagtataatttctattaaaacctctcaaatacacataatctttaatcattgtaatatttcttttgatctattataacaatctgcacatggacaataaatacattcaggatttctacaattctttagggaaaactatataaatgcattgaattctgcttgaaatcacagtgtgtctctctcctcacgcatccatgatttgtccataacaaaaatcctaacaaaaaaatttcagtatttagtaattaagtataactagttactacttacataatgaaactaactagaattcccacaattattttatatttatatattactataatactgattttagtttagttcttgttattaaattactcattttaaatattggcatgataactagtaactaattctaaatagttactaattatataagttgtaattaactaactaatttcttacaactagctagtaattaactaattatttgtgttatgcataacgctttttctttaatatatacatgtgtgtatatttagtaaatatattgcagaacctttttcactatatgaatgaatatttaagatattcacacttcagtaaacattagggctgttcatataaaccgggaaaccgcggtttaaatccggaccactacaatccgaaccattataaaccgtaaccggggaaaccgtttttggtggtttggtcaatccggaccgtttacgtcgtaatggttcggttgcggttcgtaataaataattaacggttaaaccggaccggaccgtttataataaataattaatttatatatttttttatatatgactatatgtataatttaaaacttttttgtgtgtcaagttttttattgcatgaattttagatttttatgttatgtttgacttttgagaatgtttttatatcattatttatatcttatagatctattacttatcatgttaaatatatattttgaaaaataaaattaaaaacttagtaaaaatagtacaattactaaaaaaatatgaataattatcaattccacataaaccgtggtttcgaaccaaaccaaaccgttcttaatggtttggtttggtttgagaaattttttggtctggtttggtt

SEQ ID NO: 368076 - DNA, 505 bp, Cannabis indica
aaagtcaacatttaaaaccaatatataaagataaaggccccgatggccaagtaaaaagattaaagacacaaatgtctcaaaagtaaagttacgggattaaagactgcccggacagtcatgaatctctgaagagtactaaccggcagtccttgccattcacagtcaactcctccacatattggagttgggtctcggtgagactgctagaaggggccacaaagggggtctgcttagtcttgcagcgggaagtgcgaacttccttaagcactttaggggcgaattcactgattttgagagtggctggttgggaacccttggttgtttctttctctttggcggctttataaagggtattcttggcttcctcttccacccatttctcaaactctttgactatctcctccatggctccatcggcagaatcagcctcaacatcgtcagataccctccgtttagtaacgacttccgccgtatgggaactgtcagaagagctaacccgactctt

SEQ ID NO: 368077 - DNA, 562 bp, Cannabis indica
aggcaaagtagtggtcattataaacataataaacagaaaaatgaaatcaatttatcagtctatattaaacagttcagtgaaagagaaatccaatgatacataaattactatgagatcatctccctgaaattggacccaactttttttcagggataaatttaatcttactccaatctgcacctttgcccacttccaatctcctcaataacatgttacagtccttaatttcaagtgtctgaatttgaactctactgaaattttcaggtagttctttcaaaagggggcatacaccaaacacaagtttctcaagctttttgaactttgtgatccaacttggaatttctttgataggacaccgccaaacctgtagttcttgtaagctcaaaacatcttggagcttagatggaagagtatccagttccttaatgcagtcaaatctcaagaaccgtagtttattcaaagtcgaccatggaatatcatctttgaagtcttcaatgtctacaatacatatactttccaaattggagaaaggattaagggatgttgttgctgctgctgttgt

SEQ ID NO: 368078 - DNA, 527 bp, Cannabis indica
tctagtgtggcatcttatattttttccatctattttttcaatattacggcacatcttccacatcgtttagattatttttaggtgttagatatgtaggttataaatatactttatttatgtttttttccttagtctaagagttttttttatattttatgggtgattgactattatcttatccaataagtattttattaatattttatttttaataattttttttattatatatttattaaaataattttatttgtagtattcactattcttatattgttatttgttcaagttaaaaatgttctctcttaatttttatttgatcaaaagttaaaattttattttttattttgtttattaaaggtgattgtcaatgtcatatatgactatttgaacactcttcatcatattttgttttgttatgttttttgtaattattttaattttagaatatagagcataactgtaatacccggaattaagaaatggattagcaaaacctaactagataattatgtataattgaggaa

SEQ ID NO: 368079 - DNA, 515 bp, Cannabis indica
caacgaatccagttcgacctaggtttgttaatgtgacactcaaccattcgtactactcacactgtgacttgcggtgtttacgggcccggtgacacacagtatgtagtcaagttagctttggggtaccggagtcactactctcctaacgaactcaccgaatccagttcgacctagggttgtacggagtgacaccgatgcactatggcagaagtcgcattatgaatttaggttgtttgggctgagtatgtactcagttcatcatgaagcgtaccagagtcactattctcctgactttattactacagtcactttttgtctcaaactactattgtattcataacattaaactgtttttttattaaatatctatatttgtatagtattcaaaaaattattataatcttgattccaacgattaatacgttaatgtaatcttacaaaaattattgcaatatttattccaacgaataatattttaatgaaatattaaaatcgaattaaaaaaatattgagtt

SEQ ID NO: 368080 - DNA, 868 bp, Cannabis indica
tttaaaaaaataataattaaaaaaattataaaattttaattattaatattatttttttaaaaaaaaaaattaaatattattataatatgtttaaaagttttaattgtatacaagcagtcctatcataagagtatacaccttacatcatcctaccggtagggaacttttgctaggtcctaccatagtcttgccctatatatatattaattattataaatgcagggagaaaattaaaaatatcaattatatatatgagttattatttaaatggtaaacattaaaaatgcaactataataattacatttttatatggcctgctataacaggtttgtaataggtcaaaattctatttttagactcaaaataattataattaattataggataaataccattttaaaccatgtgttttgtaaagttaccagtttgaccctttgttttgttaaatgacaaaatagaccctgtatttttcaaaatggtaaaaataggaccctgagctctaattttttaacaattttattttttaatataaataactttaagatactttctaacacgaacagatacagaaaatataactatttttgtcataagatctctagatcaaattattattaagttttattttcacaaaaaatcagttcagggtcctatttattcaattttagaaaatatagggtctattttgtcatttaacaaaatagagggtctaattggtaacttttgtaaaatataggatctaaaatagtatttacccttaattatatacttaaaataaattaattttttaattaaaatatttaataagacatttttcacaactaatgtttataaatatttttatttttatttataaataaataaata

SEQ ID NO: 368081 - DNA, 627 bp, Cannabis indica
aaaatatatagaaatttttacatcaaaaatacaaaatgcaatctttattacataaatacatacacacgggtaaagcaatcttaaatttattacatatttaccacatgcaaacacaattcttgctttttgacacgtcaatgattgatgtattacatcaatcactctagacattatttccctcatttttctcttctttttccttttattttctatttcttttctgtttttttttgaatattaacctccatagctgaacacttccccctccacgatcccaactccattttccctcttctttttgttcttcaaagtttttttcaactcccattaaccgaatcccataactgttttccctcttctttttctcttaatccatatataaatatggttgtaactcgttcttcatcaactccttcccctgttcaaaagaaaagttctaaaatggggttgaaatctttagctaatagaaacaagggtaaacgatctgttgtcgaggaggaggactctgattttgctcctccattgtcataacgtgggcgagctccttcaaagaagatttcgaaggtggctgcacaggaaaaaatacctcaagatgatgctcaaaaaaaaagatcaagatggagttgg

SEQ ID NO: 368082 - DNA, 826 bp, Cannabis indica
ctatgtttctccatagctattctacatccaatttcgattttctgactaaaattttgttgacgagtttcaccatcaacatatgtatattgtgaatgtatggttaaacgatgatcattgtgtaggaattattttattttcttagaaattttaaaccattttatggggcataagattttgtgtattttatttttctcaaaaattattttacgtaaaatattatgttgtaacgctcacgagcatgaaactcaagtttgattgaaccccagtcgtgtaccacttggaccgtcagccaccaccgcttgagcatttcaggtgtcgttcccagctacctcactcatccaagttgtcaacagtccaaggcaagtcttcctaggatttcaacccaggactcgtcgacctatttccatcttgtctggttctctttctagcaaaccaccatgcatggccgtcatggccaatcgatgtcctctggactttttcgtccaagcagcttcgttcgactaaggccaaattggtcctattggtctcgacccattcaaatgagagccatgggcttagtattttctagcgagttgcatgtttttgcatgcacatggactcgcgtccattgtcaccataactagaggacccatgtaattgagagccctttgttcagcaatggccactattgccatggtggctcctcctggagtcgtcggccacatcaatggtctttggtagtcgagcattagatatatctattctatataaaatgtgactatataacagaattactggtttatgagaattattgggtgatttttttttaaaataaaaaaaataacaa

SEQ ID NO: 368083 - DNA, 734 bp, Cannabis indica
gtctttacattgctttactatatatcaattgcaacaaatcacttatcccttactaaataagactcactgtcgttggctaaaagcgaggtcaacattttggtgctttcattgagagatagaatcaagaatcgttcctctttcaaaatctaaccacaagtacgatggtggtacaaactcgtaggggcctggttgatccagtcaatccacagacgatggatcctgcattgcagaacccaggaaacgccagggttccgccagctgttaatcctaaacatctgacaaacgtgggtcacgtcgcgcctgctctgcaagagactgggaataacagttcagcacccaaccaaggcattcataacacagtcgttcggcttgttaccaacactcaaatgaccgttggagatgatactgagttacaaaacctccgtgctgctcttgggctcgtgcagggtcatgccaataccgtacatcatgatcaggaagatctccgtgctgcgataaacttcgcgttcgaggaacaaaggcgtatgtttaccgagtggagagacagagagatggaagcattaagggctcatcatatagagattgaaaatcgtagtcggcaagctactgtgctgatacgaaaagcctaccaaactgtaggtcagcaatctccaagtgtcatccccctgggcgagacagacgaagatccaacgatgaatacttcctagactgcgaatggtcagccgccaaatccc

SEQ ID NO: 368084 - DNA, 563 bp, Cannabis indica
gggatttactttctgtcgtcctagtttgagtatcaatggcacattcttgaagatgcagtatggcagtataatgttagtaactgttgcgtacatgttacgtaaattatgaacaactatgcaagtgcacgtaatcaagtagtactcacacaggtgaggtcgatcccacaaagaattgaactaaataacactacattggacttgtatttctatttggtaaccaataattttgatgcaaataaaaataaagaataaccaaaaaataaaattaagcaaaaaaaagtgtttaatcaaggatgagaaattagggaaaagaatcctattgctacaattatttatttgttaatgctaattagaattcctctttcttaatgtgaatgaaagattataaaaattaacctaatttttttagatcttttaggtcctaaatcgtgtgttatctaatcatctcagagatagacaaacatatcatccgcattaaacaataatctaaatgtcacaaacactatgtaaatacttttgtttcacctcaaaacttagtttatccaattttagcattcccaaaa

SEQ ID NO: 368085 - DNA, 738 bp, Cannabis indica
atatcatattacaatattttttactatcttagtgaggtgatacttttaatgatatatataccccttaaattaatgagaaaattacctctgtcaacgtacatttaaattttattataaatataacaatgattgttttattaccaaaagtttgtgagttaatttagtacacgtgtatactaatttcttatctcaagtgccgagttctggtatagaggtttttttttatggttcattaattaagatgaattgaaacctcttttcaaaacaaaaaaaaaatcatgcatgaggtatcttccttttttttctttttctacctatataatatatttttaatataaaaaattacttatatttatttttattctttcatctcttaaaaaatattttggcttaaccggtaattatttgatatcaagagttatacaacggtgatctacactttgaagtgatcattttgatatgtggaaagtatatatttttcaaccatcaccaaagaatgactagaaccaaagtaacattttagtttctttcttaatttgttaaagcaagtaattaatttttgaacttaaacaaatttaatatatctatcaattttataggtttgtttttcaaaataaaaactttattagttattaaaagtattttcttatttaccatttagattttatgagatatattctaaataattttatattatataacaattttagtagttcataaataatttgtaagaaaatc

SEQ ID NO: 368086 - DNA, 749 bp, Cannabis indica
accgatcagtataccacaatccaagaccagctgcgcagcctacaatccgagatagatggacagaacagggcccgacgtcatcctcgagcacccactgctcgcacagaaaaccctcaggtaactaactctagacgtcgtaataaccgtactcgcagggaacgacggaccaacccagaaggactcgacttgaatcaaccaacctcgagggaccaatctgcgagatatcccaatcaggaggcacagactgaggaagatcctgaacgatgcaatcctcgtagcagacctcagtcgcgagacaatgacgtggaatccgcctcctcatcctcgcatggtcgcacacccagcaggtatactaggtctagttctgtggagacaccgcagggaggacgatatcacgttcacaagggtgatctacgttatcaccttaacgctatttttagagcacgctcccagtcacctcgtgacgttgaagagccccgtgatccccgaatgggcgattagggtgtaaataattgcaccaatctacctaacacaccagctacgactactggggttaatatcccagcaaacctcgctgcaatagcaacagcacctgcagcagcaccagtcactgctcccttagccgggaatattgatcaaagcatccttttacaggctttgaaaatgctcgagcagcagagaaagcccatatacaagctgcatgggacctctccttttactgcagaagtacaacaagctcaactccccaa

SEQ ID NO: 368087 - DNA, 586 bp, Cannabis indica
ttattgttattattattacattgatattttttagttttttaattttttttctagtataactctatttagtcataacatctcaattaaaatttacttgatcccaagtgtattcttagatagagattctactgtatatcattatagtaatttcggaatatataagagttttgatacactttttatttgttttgaactttaaagaaaaaaaattagtgaaaaattatgatcatgttcaactatattatatttgtttaaaattatttgaaaaattttagaaagttttaaatagcttatattatcgaaagtaagatttaaataaatacttatcacaagtataagaaataacagtattgtagtaaaatattttaatttttttttactaatattgtaaactatttaattttcttaaaaaaattacgaataattttaaataacaataatgtacattattataaaagaacaattaaaactaaaaaatttgttttggaattgtcgtaacagagtaacaaaatcaactttttcttagatgtgacagtcagtagtcccgtgtatccgtaaggggaaataccgggtaagctgtacaatc

SEQ ID NO: 368088 - DNA, 680 bp, Cannabis indica
cctctaaaattaagaaaaaaaggcttaaccacagagtacatagaaaagacagtcttttggtattttattctagttttgtattattagtttggtttttttcgtttttgtaggtcttacggtttttaaacaagtcggttccttctatatcagtgttatgtctaaacgctcatatggattgtgttaggctactcgacccaaagaaacccaaaacctcaaccaacgcgttaggtagtttagcgtaagagatgatgtagtttttttttgggtgtttggttggcatccaaaaatacaaaaataaagccattaggtttcttggtccacttgttatgattatttataaccacttctttttttatttttttattttgtttttctaatgacttaaaaatacaccattttccttacacactcgaaatgtttcaggtagtagttgtaacacgcatcacaaatataccattttgatcatatttgacttaggataataagaatatcaagattagaccgtctgattaatttgactaaagatattctttactaaagcaatcaaatggagggttttgatcattatacaatagaacctctatttaagaatactctattcaagaataacctttaatttgttataagaaaatcaagtcccgatttgggccagttataaataagaataacctctaaattgt

SEQ ID NO: 368089 - DNA, 584 bp, Cannabis indica
ttaaaaataagataaaataatcaaatttaaaaataagacaaaaaattaagcaaaaagatagatttttacctattttcaaattcaaattacactaatatctaaaattaattttaaaaaattcaaattaatttatttctgataattagatttgaaatatgaaaagtaaaaatcaaaatacaaaactacacaaaaaatcggaagttaattccatgaaatagcatgaaaaatcgaagaaaacgaaaaaatttgcaagtggtacggacagtatgcaatgcatactgtccgcgcgcgtatgcagggaaggctgaccgaggtccctcggcgcaggaggctgcatgcagcctctccgcgcgcgcaagggacgatttcagacaaaatcgtgtcctaaccaaggaagctcggtcgaacacttgtctgagcgcgtgcatccgcgcgcgtaagtgggtaacataatcctaaatatttttccgattttcaaaaattcataactaattcaaatgaaatcgaaattgagttctgtaaaaaagtaaattgcttaattttttttccaaactatctgataaaaataattctagaaactgaat

SEQ ID NO: 368090 - DNA, 629 bp, Cannabis indica
ttgactactttacaaatatcactacatgagcactctagttaataaaaattttgtactactcaattgaaaacgacgttgtgtttgattgtgatgataagttgagggaaagagttacgtcgggctttaatgattgtaatgaacgtaatgaactcattattagaactacgtgttaattaatcaaggagagcttaattctctttgtgtgaatataagtggggatgattatttgtttatataatctatttaggattgtggtaaaggaaatatcgttgtgatcagatcttaaaattgattttttgctcttgaattatgtgagagttctagatgaaatagtacaaagaatatgttcgtgttactgataataataagaattatatggattcatattatatattgctactttgacttttttttttttggctttcttcgttaaatattcaccgttttagttgttgcggatgtttttagctaagatttctctcttttcatcttagtttttttggccttattagtttgatttctttaaatatcagttcaaatattaatggaatttgttttattattattttattatataattttttttaaatgggttgtgattctcgaatatttaatatcagttcaaatat

SEQ ID NO: 368091 - DNA, 531 bp, Cannabis indica
ggaatatttaatgaaatatttaaataattaagcttcagaaagaatctaattagttattaaatctttatttaattaaatacagaaaaaaatacatttagtttatattgaatttaaattttattaaactaagtgtgtttttctaaattaatttcaaaatattcaaatgaaaaattaatttcatatatttcgaaattaattatgttgctaatcaaatttattacgttaacctagtacagttattcaaatcaggaaaatgggcattcacagttggggttgttaatgtgagggagggatgggttcagtatgtcgtacccactgctatgacccgcttactctcacacaaggcccaaaagagaggaatttaaccttaaaatgaaccacttttatttactgaataggcccaaatactaaataagcctaaataaaatatatcatggtgtgacattttatttagcaacctagtccattttaattacaaaattaaatgggctacctatatgcatctaagccgaaagcaaacatataagctca

SEQ ID NO: 368092 - DNA, 540 bp, Cannabis indica
tgcttttcttatgtaagttaggctattaatatttgatatatttattatattgtatgtcgtttactgcattcggccaatagtggtattttgtcgatttatgatatataatatgatatgctgttaaatagaagtgagattcaatttattcaagagtaattaatttgtgcttttaacatatatatcttccagttgtaattaatagtgtagaattgcaactgcgttctgaattaacatataggatttgcataactacatttctacattaccaagctctttatctgatcaactttctcatctccattttaattttgcttcttaatttctcctattgcatttattttatatttactaaactaatctttagttgtgatttgcttccctgtggataggacatagcccgtttactaccgcgaccgcggtgtaactaattgggcgacatcatctcccagcatgtagacttggtttatttattccctcttttttaggaaatggccctttggccgagacaatggttttgcccctagtgacactttttgtaaa

SEQ ID NO: 368093 - DNA, 1319 bp, Cannabis indica
tacccacaaacaccgctgggttagcactatcgggctcaaacactaccatcttccgtttacagtcaatcatcgctccatacttagacagaaaatccattcccaggattatgtcaaaatcagataattgtaactcaattagattggcggtcaactcacaaccgtcaatccaaaaagataaagaccgaatccaccttgtggacactatcaggtctcccgagggtaacagggttccaaaccccgaagcataaatatcacatggcttatgtaaactttctatcactctactcgatacatatgaatgagtagctcccgagtcaaataacacagtatatgaacaaccattaatagacaactgacctgtcacaactgacggactagcatcagcgtctgcctgagttatagtgaaaagtcgccccgggttctgagcagtattcttcttaggctcttctttcttggcttggggacagtctctgataaagtggcccaccatgccacactggaaacatgccttggctcgacactcaccaggatgatgcttcttgaatttaggacactcaggatatgaccggaatgaggacccacgaccctaatggccacctctatttccctgaaactttctatttgcccatgatgctccagaagcctcagccttccgcttgtgctcggggttgccactgttggtccccttactgacattaccactagcaggagggtttgatgccatgacggcatcctttacagcctgctctttcattactttttgctcggcctcctcagcaattaaggccaagtctaccactctcttatacatagtgtcatgtgatgtggtaattttcaagtcccgactaattgtagcattcagtcctcaaacatacttttactttctggtgaaatctgtaggcactagatcaccagcaaatttagataaccgatcgaattccagagtatactcggccacatacatctttccctgagtcaacttcacaaaatcttcctggtgtgaagtcctcaatgtaacgttataaaacttttcctcaaaaagtttcttgaactcttcccatgtcatcacactgacatctcgagtctgatacactatatcccaccagacatgagcatggtcttgaaacttaaaggttgcacaattcaccctctctgttcctgtcacccccatattatcgaggatacgggtcacagtgctcatccactgatcggccttaataatatcaatacctcctagaaaaacaggaggttggagcttcacaaaccgctcgaacacagagtcccggtgcggcataatatacccttggttacccaccact

SEQ ID NO: 368094 - DNA, 562 bp, Cannabis indica
attttgaaatacattttaagtgtagatattttgaaaattggattaaagttgaaaattaatttattaattaattttatacaacttaaatcaagtaattttcattaataatttattaaaataaataaactaaaatatatttaattaaaaaatcataattagtttatgaaatatctagatatagttatttctaagtagacttatggtatttttctagatatatttaattaaatagaaaattaatatttaagttaattttattaaagatacttaaatgtttgatatttttcttaagagatttaattaaataagaaaattatatttatgttaaaaattaatttaattaattttagatcaacataaagtagattaattttttctagatttattttattttaatggaattcaaaaatgtattttctttaaaaacattggtttttaaatttaattagagatatgtttatagaaaattagatttaagttgaaaattaattttggaccaacttaaattaagtaattttcataatatttattggaaaattaatactaaggatagaaaataaat

SEQ ID NO: 368095 - DNA, 597 bp, Cannabis indica
ggtggtcgtggttctggtaagggaaaggtagagacaaggtggctatgagcctatggtggttaggacagaaaaggaagaaggtgagaaaatagggttttctgagagaaggaaatttagggtatttgagactgttttggttaggatattatttgaaaaattatgttttgattttacttttttctctaaaaattccttcacagctcgtaaagaatcctaacttacacatgttatagcaatatttttgcaaaaatccagcaaaaatattgttgattgctcatttaacttgtactacttatgctaaaattttactagaaaattgctacagcatgtgaacttttccaaatcaacgacaaaagccttttgttcatgcccaattttgatgtagcaaaattcaatcaaaaatctagcaaaaacttcaaacttccaaatcacattcaaaactccaaattatgctctaaaaacacctaaagcattaaactaagtgtaaaatccacttaaaaactaaaaataaaaataaaagtgaaataaaataaaataaaaataaaaataaagcaagggatagaaaaaatgtgttttaaaaattttaaaagcatcaaa

SEQ ID NO: 368096 - DNA, 561 bp, Cannabis indica
accaccatcatcatctccacaacctcccgattatcccctaccactatcatcatatccaccctttttcttttctctcgccttgtctccatcttctctttgttaaaaaaaaaataacagcaccactgcgctactgtcgtgccctaactgctgcctccgacgtcccctctctcagtgaaggtaagtattaatttttatttgggtataaatttgtgtatatatatgtctatatgagtatttgtgtgaacttttatttatgtatatgtatatttatgtgtatgtatatatatgtgtatgtatacatatatgtatgtatgtatgtatgtgtatatgtatatacatatgtttttgtatatatgtgtatgtatatataaatactagcaaaaaactacgtgcgaggcacgtatactaaattttatgctaggttttttctatgttatttgaaagtgagattattattgaatactgaatgcaatatattagtgtttaagaaagcttaatgattaaaatatgttcttaagttaatccaaaaaataaactaaaaattgatgttccaatacttaa

SEQ ID NO: 368097 - DNA, 607 bp, Cannabis indica
aacttcattcaaggttaaataaaaatcgaagccctacatgtctgacggataaagaatcacataatctcactaagagatgactttaaatattggtcaaccacaccgataaacaaaggagcaaaaagctcaaggctcacgtaggagcatagaaagggataaaccccccacaaaaggcttaaagccaacgccactaaggacataaagtggacaataccaaacaaactaaaatatacaaacctaaccaacaaggaacaaaaaacaactttaaagatcttccccctaatgcacaggaggctacacaaaaacccgaagcaagcagaccaaaagcaagcgagcgctgccatctttcgactagatatgtcaacactcgacttcctaatgtagttctgaacggtgaagttgaagggataagggaagcacatcccttttgataaaacttgattctccacctctacatcaatggaactctgaagactcaacacgagccaatgtgcaatagagccatgacgcctgaatagtaacctaatagaatatgacgagatctaaaagaaatagaagagaagcagcactccaagtgtttggttttatgccctaaataaaactcttt

SEQ ID NO: 368098 - DNA, 559 bp, Cannabis indica
gagggaaggtttcccttttgcttgcaatatctataattggtaagaacacacattacatatttagaatacatagattgggggattcagacggcttgccatattcctttgatacgatccctggattgtatggattgcttttgtgcttcacgatgtaagtatcaaaactgctaagtcttgatacattgtatggatcgtctacccttgccctgctcggtcaggaagactatattcgtgcagatgtatgctgagctctgttcgggatatcctttccactaaatgtaggaaataggagccatgtgtcaccagtatgtgttgccacatcatagtgcgaaaaatgggatgacaagtacttatccctgattttggaaaagataacaaagaacaacaaatttagttccatctgagatatgagagtttggctctttaccacctttgtgttgcagatgatcttcttttgtttcgtaaaaagtgattatgtaacgcccgtattttaataataataataaactcggaaattaactttaataatttatattaataaccatatggatcgggatcc

SEQ ID NO: 368099 - DNA, 803 bp, Cannabis indica
tttctactttgtagtccgtgaactcgtagagcagccccagactattgttacatatgcggccattcgctcgccgcgcgtttgatactctcctgatatctaatttacaaccagttgggagtcactgtaaacttctactcttttggcccctacggccttcgctaatctcagccctgctatcaaggcttcatattcggcctcgttgtttgaagctgagaagtcgaaccatagggctgcctggagtcgaagtccggtctgggatatcatcgcaaccctcgctctagatctattttcattggaggctccgtccacaaacactctccatgtggggatcgatggtatcggcgcattcgcggttgcctcggcttggcctcttatggagatgcgggggatgtagtgtaagtcgaattgacttaactctattgcccatttgaggagccttccggacgcctctggcttttgcaggacttgctagagcgggtgattggtcaataccttaattgggtgcgcttgaaaatacggccttaactttcttgaggccattaagaggcagaaaattagtttttcgatgatggggtaccgcgtctccgctcgtatcatgcgcttgctgacgtagtatacgcgatgttgagttttctcttcttcccggactagggcagcgctgaccgcgtgatcggagacggccaaatataggaacaggtcctctccgagaacgggttttgacaggattggaggcttggccatgtgttctttcaactttttgaatgcctcctcgcactcgtccgaccattcaaacttttggcact

SEQ ID NO: 368100 - DNA, 593 bp, Cannabis indica
attattatatattttttattttgtgtacaacttatttttcttttgattttagatgtcttctaatgaagattggatggcttcaccaaataaaatatttgatcctaatgaagcaatacaacgtattgagaacactatattttccctttaatcttgatacgatactctgttgtgatctaacaactgtagttttcttatttgtgtgttagaatataaagggaaatcggaagggccttctgggaatgcacggttttatctttccggtctcgtggtaccgaacatgtcttccgggtacaaattactgaaggcggaaggctttacgagtgtggaaccaagatatgttcatggaaggacatgtccaggtgggattgacccacttctcctttgctgatggtcccactgataggtctgcagtgcttaactggagtccacgtgtccaacaccaaaaatgcgaataacagtgacagtttagtttgcacatcatcaaggctaaaatttgggataacaattatattgtgcaattgttatattttattgtatacaaaaattataattttttttaaaaaaaaagtgtataagagtttcccataataata

SEQ ID NO: 368101 - DNA, 507 bp, Cannabis indica
acaatatctatcttgttgaccccaatttcactagatacttgtaaagagagaagacgattgaatgtgagagtttggggattgtgtaagaatctgtcaaaatttccatccacacaaattcgtaatttcttgagactctccaactgtagaagatcactcagtagaagatccgtggtacaaatagataccaatgtttgtaaatttctagacttagttgacctcaagaaattaccaaattctatgccaactggagtgaaatatagatgcctcaattgctccaacttccacattgaacttggtattttaccactcttggtccttactctcaaagtctgcaagcatcttaaattggcaaaacaagatggaatacttttaataaggcaaccaagcatacttaataaccttagatggatcaaattcccaatttcttcaggcaatttcaaagtagagactgggatccacaggctacatgaacataatcaaaactctaagcttcaaaaagtgattgca

SEQ ID NO: 368102 - DNA, 508 bp, Cannabis indica
tttgtaatattgttcctttttttggttaaaactgaaaaaagctccttttttctatgtatttaaattttattctattcctattcctattctcattctcattttcatttctatttttatgtttccattcctcccaaccaaacactaccttatgtgatatttggttagatgtaatgaaatgaaatagaatggaatggaaaagaaacaatcttcatttcattcttttatttggttgcctatatagcatgtttactaataagtaataggaatcaatgataaggtaatcattctcttatatttgcttacttacattattaaaattaggaaatgaagaacttgattaaataagggagaaaagaaagggagaacttcccccaccaattttgtaaggaataccattaagggtaatgaattttaattatttttattttattttttaatattaaatatataatgacaattttgtcttttaaaatatatcttacaaaataactaccatataatatagttt

SEQ ID NO: 368103 - DNA, 719 bp, Cannabis indica
atatatatggaagagattttaatagaatattaattaaaaataaattataaattatttgtaatttaatactaattttattttatttattaatatattttgtttctttataaataataattaagattaattttttttggacgaaataattgaaattagttattaaacaaaaaaccaaaaaaaattataatatattctcacaatattcactatttctctctttaattattttgaattttccaagtgcatattaattacaatatatatatatctcatgaggacaaatccacatgacacaagaagtggccctaagaaaaccctaaaataacttggatccttatgatcatataatgaaaaagaaaattaattaatgatcaataatatatataattaataatttactttttttttcccacagattggtagaaaattaaacattataaaaacacattgactgactgatccacatatatatttatatatatatataaatattaaaatatgtgatgtgctttcatttcatcacacaaaacttggatatacttaataattacttgagagcattattaattataaattgattatgattttgaatcaataattaataattaataatttaagtttttgtacttgaatttctccaaatttgctccaattcagaagcaaaagctttctggcgaccaacaacaatagtaatgtgtatcttttttgttgattacttt

SEQ ID NO: 368104 - DNA, 649 bp, Cannabis indica
catgatttgttacatgtcaaagtgttaacgcagataaacgattatgagcctattttcgtaatagattcggtacagaaattatcagagatctaagtaagaataatagaaacagaaataacactaggtttttacgtggttttgcagttaactttgcatagtccacgagtcaatcttattcagatttttcttatatagaactagggttcttgacaaccagtgtattcctctctctctctaagattttctgtccctttttttgtataatctacccctatttatagtaatataggttgacagttaattacatttaattttaaatcccacaacaatatccccgaaattgtgggctttaattatgctccacgtaaataaatacagttattatttgaaaatcacacagctgtaatttaatccgttttgaaggaagtcaacgctgacgtggattaagacacgctgccaagggtacctcgctgaggtgtctcgcctagtacataaacaacttttttattcataagtcttccagcaatggcatgagcaccagtgtactgggaaaatttaagaattgctctttgaccataaggccttacagactggacaatcatgtccttcaagctattacacttagaataatgtatattacacgctaagt

SEQ ID NO: 368105 - DNA, 1152 bp, Cannabis indica
gagttgaatctgacacgtacttccacagcatcgacacatgaaaaaaaaatgttatgcactactgatattgcttaaggcaaggctagatgataagatactaatacaaccttctcgagaatctcaaaaggccttgtaaacctagggcttaacttgccattctttcttaaatgcttcaccctttcattagtgatactcgcaggaagacatgatctcttacatgaaactatatgtctctgcgccttggatctgcataacttttttgcctattttgagaagtaatcatctcgaccttgatcttctctatagcctcactggtccattgaactaattttggacctaaatacttcctttctctgattttatcccaataaaccagagaacgacactttctaccatacaacatctcatagggagccatccttatagtactctgataactcttgttgtaagaaaactctatcaaaggtaaatacttactccacaaaccttcaaaatccattacataggctcgtaacatatcctccattatcactattgtcctctcggacttgccatttttctgagggtgaaaagttgtaataaattttagattcatacccatggccttttgaagactttcccaaaacttggaagtaaactttggatatttatccgaaacaatggacttcaaagccccatggagacgtattattttcttcgcatataacttcgcgtactgctccactatctatgttgttttcactagtaggaaatgtggtgacttggtaaaccaatctactattacccatatcgaattgtacaaacacatagtccttggtaaactgtaatgactacatagttgaatcgtgggaattagtagataattaaggacttaaatattaatttatgattatgtgcctcttagtaaaaattagggcttagggggctattatagtagggattgggtgttttacctatcaatagggatagtaatttatagcccttgatttaatccaatggctcaaattaactcttgaatactacaccataaataatattttcttttaatttataattaatcttgaatactattaattgtaggttcaattaacaaactccaaacctaatttttttttttttatcttttattttatttctatttaaaatttagtt

SEQ ID NO: 368106 - DNA, 767 bp, Cannabis indica
ttagtattttttttttgtaaaatcctttttagagtttggaattagaggtcggtgcattacatatgtaattactaacttggctggtgtattataaatgtaattagggtttatccgacccagtgtatcaccctggggagctccagttctgtttgtgaaaaagaaagatagttcccttagaatgtgtattgattatggggaattaaataagttgacgattaataacaagtacccgttgcccagaattgatgatttgtttgatcagcttcagggaaagactgtgttttcaaagattgatcggcgatccggttatcatcagcttagaattcaggaagaagatataccaaagactgcattttgaactagatatgggcactatgagttcatggtagtgtcattcggattgacaaatgctccagcgacctttatggatatcatgaacagagtattgaagaattttcttgataactacgttatagaatttatcgatgacatcctcatatactcttagttagaagaggagtatgagcatcatctccgaatgatattacagcgactcaaggatcataagttgtatgcaaaattcaaaaagtataaattctggttgtcagaggtgtcttttctagggcatattgtcggtaaagatggaattatggttgacccgggaaagattgaatcaatgaaaaactagtcgaggccaaaatttgtgatgaaagtgcaaagttttctcagtttagcagggtaatatcgacgtttcgtcgaaggatttt

SEQ ID NO: 368107 - DNA, 563 bp, Cannabis indica
agaggtataaggcagggtgatccccgatcaccatacttatttattctttgtgttgaaggttttaaagctttactgcgaaaatatgaataaaaggatggcttcatgggtgtaaagtggctaatggtgctcttagagtatcccatatgctttttacagatgatagttatttatactgcaaggctactgaaattgaggctcgtcagattcttgaagtgttatccaagttcgaacttgcctcaggtcagaaggtgaacctctccaaatcttctatcttttatagtgctaatactttgaattccatgaaagatagaattaataccaccttaggtatgaccacggctactgaaggaagtttgtacttgggtttatctagctccgtgggaagaaataaatcggctgctctgggcttcttgaaaaacaaagtgaaaaatagactcctgggatatggtacaaagtttctttcaagggcaggtaaagaaatattgattaaaacggttgcacaagcacttccaagcttgccatgagtgtgttcttaatcccgcaagaggttacaagagatattg

SEQ ID NO: 368108 - DNA, 493 bp, Cannabis indica
accatttaacttttccacctcaaaccttactgaagccattaaaaccagttcttgattgcttgaatctgattcttgaaagttcgagtttgattcttcaaatgatgaagatgagtcttgattggttgaatgtgattcttgaactctaaatcctgagctctgataccatttgtggtgaatcctcaccctcaaaacaagttgttacagtagtaacaatgtccaagaacacaaatcaaaactaaaaccaatcacaaaactaaaacttgaacttaattgaaatacgacaaagaaaacttaacttgataatgaatgaatgatggatctttattgaataggaatagccagtagcacatagtagaatgagtccacgattacaactcaacacagtaagtaattataaagaaatgcctcacaatgagggaaatcacttcaagaatgatactcccttttacatccctccacacacactcactatgatcttggactttctctctct

SEQ ID NO: 368109 - DNA, 778 bp, Cannabis indica
acgctatttatagaaagtgttgagcattatttctacccaataatattattctaaataaaaatggttaaaaaatattattagtgcttaatatatactcctcaatatcatattacaattaatagatataaaatctcatataacttaaaagaaaaattaaaatatatcgttaacacaagaggttgcttataaaaaatactgaatagtggtgatcaatagaaatactcctcaacaaatatatttagacattaataataaatgtagtattttggtgtgtattgtgtgtagaaggcgattagtattagtgattatggaggtgtgaaggaagatgagagtgatgagtgtggtccagcatggcacacatcggacggctgcaagtggggccagtgccacgataatccaacctagaaagcatcaacaagtgggcccaagggagattaagggcggtttcttaaagggttcagttgagggggcttcattggattggcttaatcaaagggtcaccaaaagtttttcacgccatcctttttattatatatttatctacgtggactggagaccatagataggctgatgaatttgacggtaatgatcgcagttagtggtgcatggtcccacttcatgcaccgccttcgacccatacttggctttagtttggtttatgtctttattaacatcatttgcactaagaaataaaaagtgatctcagtgaattaatgcaaccttaaaaccaactttgggtaaagctcactttcaaaaacaaattcaaaaaaaaaaaaaa

SEQ ID NO: 368110 - DNA, 460 bp, Cannabis indica
taaaatatatccaacaactggcctcagatctatggtaatgatttactttcatgaaatatgaattaaaacgatgttatatgttgatttggatggtttcatgtggtttatgtgcttatttgatgatagtttagatatcgcaatatatgttactgaaatattttttatttcgatctgtgattattttttctggacagtaatttaggcttttacaaaacctaatttggattttttataaattagttatgattttttgaatttgaacgaaaatatcaggattcgaacgcacacacgcgcgcgcaccctgggacagtgcccattcggacaaaaccctgtttgaagggctgcagcgcctgggccaagcttccccttccgcgcgcgcaggggtatgcattgcatacccctgtgcctcaaatcttattttcgtcataacttttgagttaaaaatcgtttttcattgaaa

SEQ ID NO: 368111 - DNA, 955 bp, Cannabis indica
tattctcactgggcaagggggtcgagggaattatctaagagaggatacttagagatattattgtaagagctctcagagaagaatcattgtgttctttgttcttaagtcaacacaaatcaaggggagtaggctattaccgaactactcggagccgaacctctttaaaaactctatgttctttatttatcttatcatattacatctaaattatatcacttatcgcttacaattgcgactgattaccgtggctaaaagcgaggtcaacatgggacaacgccagattctagtcttgatcgaataaaaggctgttagaatggtatccatattagaagaggtgactctattcaatgaataatatatttgactctcgccgaaacgggacattgtatcaattttttggaaaccttggaaattaattaagatgtgtttgttatgtattttcacatgtctttcttacttgctaaatgtatgataatttctaaatttgtatgaatttatattgaatcatgttgtttttctattattaatgttgtaatataatttcgaatcttcattgttgatctaacttagtttgttgtttttagtgggacaaatcccaaaggattgcattcgttagacaaacataatagtgttaaatctcaacagataagtatttgtaaatgcaacatctagttatacatctaaagatgtcaacttagattagtgtttgcaatatgaaacagtgaagagattctaaaataagaataacttttactttcgccaaaccgggacatcattggattcttattttattcgaaattatccattactttttcctcttagcttattaattttgaatttgattaaataatatatcattggatgaatggtttataaatcatcttcttatgatgtcattctaatttctcttatgaaattaaatggcgtagatgactatattcccgaaattctatcc

SEQ ID NO: 368112 - DNA, 569 bp, Cannabis indica
gccaaaaatgtcacaacagttttagttagaattattgatgaaattattatgataaattgattttagaaataccaaagtattttggggtactcggaatcaaccaattaccttagaaatatagattttttaacggctaagaaataataagataactactaataataaagtttttattaatattattattaataatattatattattattatatatataaacaaaacgttgtcattttgattattatatatatattaagttttatatataatttaacagtaaaaaaacgaacgacgaacgaaaccctcgttcttcctcattcgataaaactttcttcccctatatctatttttttttcaacccgaaacctagtgatctaaacttcggtagtagcaggatagcaaatctttgaaaaagagaaacttaagatatggtttaatttcgtttaagtttaaaaacaattggtttcatatagaggttttttgaattagaatgttatgaaggttctgactttataggattattcttgggtagtcatgagactagttctgatgtttacttgttgaatttga

SEQ ID NO: 368113 - DNA, 534 bp, Cannabis indica
tacataatcaatcgaacactacttaaaaatgatgatggctcttttgctcaaaaatgaaatgtttcaattgttcctgtaaattcttactcccattggaccatttgtatctatatgcattaagatcccgattgatggatctcttggttcgagaaataaaaaaaagaggatcgaaccatttcttctgactctttttcaaatttgagaaatgttggttaatcatatatttcattatagttctattattcaaagtatcgtttcctatttgatccctttgaattacatatatgaagttgcaatcgtatctattcattaaaaataattgattcaatacatttcttatgtacccataggtgctatattggatttgaatcaaatttcgaatcaatctatattgattaactacctcgattatgttgttgctagaaaataccataatttttggttttggatcttcaaaatcattctgcgggaggttcggacccatttttttttctgatccttcgataaaaagattcattttcttcataaaaaata

SEQ ID NO: 368114 - DNA, 556 bp, Cannabis indica
aagaacaagagtctggtgattggaagctgatttctatagcatgttgaatgttattatttatttaattgtctgtttttttaatgctagatgttaggacttggttattcatgttatagttccattgttgttttttctttttatttatgaattggatatcagattgttatctattttcgagacaatatataattttgagttataatgcatatgtttttgtgcgactttcttgtttatgttgatatataaaatatttgattcaactgtaagacaatgtttattcaacatgtcttactgttatatctatgaaagtagttagagaattcacttgaattttttgaatatgtgttatttgtaacacctactatacaactatcattcaacgctttggcaactattgaataaccaacatgcttttcaacgtaataatttttttttaaaacttctaattaatgtttcaaatatggtgttgctaatgctttacatttatgataatatgttggatctagcattcaactacaaaacaactattatgcaacttttttaaaaccaataatgt

SEQ ID NO: 368115 - DNA, 775 bp, Cannabis indica
tgctgacaacactataatcacgaacaaatacatatgttctggacttaatagaatttatacattaaatataaacatgaaataaatcatgtgaaccatgcaacataaaatgatttctgatctttattaattagtaaatctgaatatattgacatgggttttatttagggcacaaaacccaatattttcctcaaaattccacgcacaattctcgtcctctcgtcaagtcccattacatatagaagaccaagtcgaagtaaagcaaagaccagtagagcccctcagagcctacataagcatgttcatgatagaggctacaaaagtcgcaagattaactgaagaagggaggctggccaccatactgggggccatcgaggtactcgaagaactgtgaaaggacattaaaatatgtggccccgtagggtctatggtggagtttctagaccgagtagatgggtttatcaagctcgaagaggctattcagtgagcaaacgtcgagcttaaaccggcccaaccacatgtccccttagcaggagcacctactcagagctcacaataccctaacaactcaactcatagtggaaaaaggtccaataacaattgcaagcaaggcagtaggacgaatgaaaagttcacaggcaaagttgaacacacccctagagaaaatgcctccaagttcactgccgtttctgtcctaactgacgacctagagacaatatacacgataacccagtctatggtcccgtacaaaaaacctactcccatgaagaaggacgta

SEQ ID NO: 368116 - DNA, 528 bp, Cannabis indica
aaatcaaattttcaaaattcaaagcctactaacatctaaaactaattttaattaattaaaaaattaattttattctgataattagatttttaattgaaaatttagattctacacaatattctaccaaaatttgaattttgttaatgaaaaataatttttgaataaaaaattatgaagaaaacaatttttgtgcacatgggtatgcatttacgcgcgcggaaggggagtcatggccgagaaacaaggctgtacgcagcctcagatgccgagaaaactcagcgtgagtagcccttcagacagggctgtgttcgataaaactcgatcagctcctgtctgaagaggcgtgctgtccgagcgacgcctagggtccgggagcgcacatgtgtgcacccgattttagatattttcatctaaattcaaaaaatcattattaattcataaaaaatccaaattgggttatgtaaaagcctaaattcattaatttttagtctacttttcagtaaaaatatttccagaatgaaacaaaaa

SEQ ID NO: 368117 - DNA, 974 bp, Cannabis indica
cccaccctagaatcgaactcgaacatatccccagaccgaaactgtgacctgaagtcaggccctgacacatcgtgtacccagaccaagactgagacctagaccaaaacccggatccagaccaagatcgaaactcggaacctagatctggaacgagaccctgacctaggcccagacctagacccgcacccgggacccaaacttgaacctggacctaaacccagacccagattgggatccggacctggacccagactcagactcagactccgaccaggaatcagacctcagcccagacccagacccaaactcgaacccagacactgaatcgaaattgaaattgggactaggacccaaactggatcataggactcggacctggattggggacctggacctaagccacggaacccagaccaaaatcggaacacggtactcggacccaaacttggacatcggggccaaactcaggacccaagaaccaaactgagacttgggactcaaggcccagacctagaatgggattgtgacccatactcggaccctaacccaaatcgcgacctaaactcggaccaaacccgaacccgaacctgaacacgaacttggattcagaccgaaacctaggacctgaacatagatggtggacctagacctgggaattgggcccccgaactaggaccagaaattggtctcagaaattggatcgggatcaaggactcgaccccagacccaaacctggacataggacccacctcggaacctgggctccgggactcaatgcttggacccgaccagtactcagtgtctggatcaaggatatagaccagaactcgaacccaaactcaaactcaaactaagacctggacacatacgaagaccctgacccacactcaggaacaaaaatcgaaacatgaattagaatgggaccaagatctttgaacgggaccgggacctaggcccagacccagcctcgaacc

SEQ ID NO: 368118 - DNA, 789 bp, Cannabis indica
cattttatatagaatagatttaacccaacttaacctattttttgaaggaccttccaaatttaagacaactttcaagtataaaatatattttacattcacaaaatatataaaaatttatattttacatttgaataaataaattatatttatatattacgataaccttaaaaaattgaattgactaaaacacatcagtaacacgtaattcatggttaccatactacttttacaaacaagtttaacgtgagaatcaatcacacgctattattgacacccaaacaatgataccaccaccaccttagattttttgaaagtactatatttacacacatacatatacatatatatatatccactataaaaatatttactttttgtcacaataaaacttgtgactaaaagtaaaaaaagttgtgactaattataaattatcatttctacattgtgaataaaaagtccgcgactaaaggtattagtcacaaaatcacaatttgttgtgattataaatgtgtttttagtcacaatatatacttgttgtgactaaaactaaattaataacaacttgtatcggaataccatgtttatttatggtagatttataaaaataacattaattccttgcaaaatcaatgaatatatgattagtaatttttttaatattatacttaaaattgattttatttataaaaatacttttaaaaaaattacgtgtaaaaatattgttgtgccacgttagcatacataccgaaaatcaaaataattaccgaaaatagaaaaaactagaaaaat

SEQ ID NO: 368119 - DNA, 756 bp, Cannabis indica
ccggacccaaaaacctagagaatcgaacacaaacctagcctcagacccaaactgagactggaattcgggcccggacacggttgtgtacccagaccgaaactgagactcggacttggacctaaatctgggaaccgatcccaaacatagactcggacctagatagggatccggatacgaaattggactcggaccaagacccagactgggaacaaaattctggtcctagatctggaccgagatcctgacccagatccaaacttggacccacactggggacccgaacttggacctggaatcgaacctagagccatatcgaggtctagatctggacacaaacccgaacacagactcggacccgaactcaaacacccacacctagaatcaaacccaatgatatactcggacccagacccaaactcgaacccagaccaagatctgaaccaaggacttagacacaggactgaatccaggcccagatcgggattggaaattgggactcggacccaacctaaaccaagacccaggacgcgaacccatacccgaagcctgatctggacctagactgaactccggacccgaacccatacacggagcctgatctggacctagactgaaatccggacacgaacccaaactcagaccaggactcgaactccgacccgaactcaaacccaaactcgaactcagaatcgcaaatagaactagaattgaactgggactaggacaaggacaaggacctagacccaaatcaaaacc

SEQ ID NO: 368120 - DNA, 688 bp, Cannabis indica
gggttatttactaccatttctttggataatttgagttgaattgagaatactgaaaattagaattttgggggttgttaaatggagaattatggttaaattgagaaaatagaaaatttggattttgagagttggtatatggaaaattttggataattcgaaataattgcaaatttgaattttgtgggttggtttgtggagaactttgataactttggttggattgagaagattaaatgattgaattttgggagttggcatgtggagaattttgggaatccattatgaatattatgaattttgggaattttggcatgtggttagagtaaaaaacaaatcctttaaagtataatcaataaaatccattgatttgacctggctggaaaaaattctttcattacagtattgaattaattattatgatatgacatccacttattatattaggaaattatttaataaaatttgacattgcaatttttgttggtaacttattcgaaatagtgaaactcaatgccacatattcggttaacatagttctattccaaataaaagttaagtttatagttagaaagacatacccaatagaacacaatttgtacataacctttagtcaacttttgctatgtatacccttggaaatgaaaaacacctcaaaataccttgtgtttccaataaactttttaaacaa

SEQ ID NO: 368121 - DNA, 833 bp, Cannabis indica
tcctatgtaactataaatatgagaaggatacactgaaaaagggacataaaatccttttgaggaaaagccctagtttggtatcagaaatctaataagatagactcgtggactatgcagaattttaactgcaaaacatgtaaaaaagtttggtgttatttcttttccttttaatgctattatttctgtgcaaatccatcacgaaataggcttgaatttagttaacaaaaatatatacgttaaccaatttaataataattaagaaagctatagggaattaatgagagagatttttacgtggttggggcattaatgagccttagtccactagtctgtatatttatgatagtatttattacagagaatgttcttggtggttttttctctctagttcttatgagacccagaattctcaacccctgccttaatgagtttggggggtatttatagtgttttcgtggggtgatccctagaattgaggtacatgtcttttagtaattctcagtaaaggcgcacattcccaatggatacatcataggaaacgcatggtctaatccctaggctttgtaggggtttaatggacgtagtcctttatccttcttgactgatgtgattcctcataaagtagacatcactaggcttactaatcatagcgtagtagctgcgagaaagggggttacgccgtcagactttaagacatatggcattttcaatacaccttctccccatgcggcattaaatgcgaggtgactgttcagataggatctgacaacctcctgaagaggctttggtgtagctttgctctccggagcatgtgagactcacacgtcttctcc

SEQ ID NO: 368122 - DNA, 642 bp, Cannabis indica
agatctctaacccttgttcctttctagcgcagagtaataacaagatcagagcctggatctctttctctcctttgggttggttaccaccgtcttccgcactatgattgagtactttacttgctaggtgtgggcatgatactctatcactatgggccaaataggtgaagaacaataaaggatgcttgaaatcactatagaaggtatctctcatctactagtttttgaagaatgaaaactagctttagcttggttgaagtgaattactggatgagatgagagcatcatgttccttttatagtaattcaactagggtttaggtttgaattatatggattaaaaagaataaaataatgggcaaaattacaccactagtggccggccatacatgggctttactagttataattttgccactttatttcaaccacttatttttctttcaataatgccatgttttgtaatttcaatcctataaatgtcaaaactatttattaaataattataattaattatcaaataaaattaccatttatattatgtattaattagaccaacaaagtctcttaattaacaaataaactccaaaacctcttttcttcacaattaagcatttacttagtgaaaattcataaataagacata

SEQ ID NO: 368123 - DNA, 581 bp, Cannabis indica
gtacatactccatgtacatcgcataaaaagcaagggctgtgcgataactgttgggggttagttggaaaggagacacatcataacgtttgaggatggccgcgataaagggatgaaaagggaccgataccccacatcgaagaatgggtattgagactaccacatcctctgtgggaataatcgccggattggtaaaggaaaggtgcaccctctgagtaggtttaggtcgcaatgaagcgagtcgcagtaggttcaaccttgtaaaagtagtaaggtccgatttggtgaccctcaagaccaagtcctcgcattagaagggctcgttcagctgagtgttgtccaccgaatcagtcccactcccttctgcctcttcttcttcctcgcctgactctcgagctggggccgcccaatcgtcatccatctcctcgacctcgacgtcaggggcatgcttggaatggacgagataatcgcgtgctgacaccgtagactggctgtctcgaatctcaatggcccctggttcagcgagctcctgcaccattcttttgatgtctgcgaagacatcagacctaattctatacctccag

SEQ ID NO: 368124 - DNA, 580 bp, Cannabis indica
ttaaatttaaggacttttgtctaatttcattcaattttactgttttaggtactaaatcatactctccagactttgatatctaccaaatcatgctcctcaaacgtttatatgtattaaatcatgtcccctaaactttcatccatgttagaattttttttactaaaattagataaaagcccttaaatttaacaatcttaatagttcagagggaatttttaacggccaaaaagttcagggggcatgatttagtacatgtcaaaattcgggggggaaaattgctaattagcctaaatgaaatataactgattctgaaatattatgaataaaaataaataacatgaaataactcaaaccggctgtaactaaaatagaaacagttatatagcataatgaatacaaacaattaacacgcaataactcaaaccgattacaattaaaaaataaagaaaaaatcgattcctaaaacactgaaacataaattaaaaacaaaaatagttccataacaaatacctcataacacataatacctcataaaactgattataattttttttttaaaaaaaatggggatcacttccaa

SEQ ID NO: 368125 - DNA, 763 bp, Cannabis indica
aaataatatacactataccaatacactctataccatttccgtacaagtgttggtagtgaatcaaccataacaagtatgcatatacatttcacacatacatacattcacatatatatcacatattatacgctattcttacctctttttcgaattcaagtgagttggccgacctgaacaaaatgtctcgtgctggatggatgtcctaatcacataataaaatggggtaaatatcacaccaaaaccctaatccgggaaacctgaacctccaacttaaggttctactattactaattggaactacaatctcctaggatatagagaatcacccaaccaaggcactgaaatggacacaaattaaggaaaatgaattgttcaggaaatttaccaaaaccagttaaccggtttgtaccaggtttccccaaacaattccaaacttcctcaaaacttgtccaaataccaccaaacttttcagaacatctataatgaccttccacaatatatttaaatcaatagaaaccagaaaaacaccctgaatcgaaacatgccattgatgactcgagtttgacttttcaaactcaaacttggtcatccaccataatatacaacaaaactaatagcaagaacctatttctagcttaatttaaacttagaaatcgaattataacacaaacaaaccctaatagcccctatatctcaaaattgcataatcaagctaccttcaagttaaaaaaactaaagaactagggtgctagagcttacctcc

SEQ ID NO: 368126 - DNA, 671 bp, Cannabis indica
gctctgtttgtgagaaaattaagactaaataagtagaatcaaaataacaaaacttcaaacaattagcaatgacaagatcaacaatcaagaacaacaatcggataagaaacagtggcaaacagagtatgtaaaactagaaaacaataactacagaaaataaagaaatcaacaccaagatatatatctgttcaagtccgatagatcgatgtgatctatggctttactcaagttctagaacaccgtcgttatccttctttattgattgagcaagaataggtataatatagtcgagacgagattctctgttgagttctcacaaagtgtttcagctctcacactttacaccaagaatcttcttcatctacagaagattcttcttacaaaacctaaacccaatctctctcttttctctgcacctctctctacctctcaatcttctttctctccaactctgaatctcctctgaagttctaaatcttatatattgttcaaacgacaacattaaggcggtatttataggcttaggatcaagatcccaaagttggtgaccgtaagaaacgaggttgttaaatttgttagaaataaataacttaaccaactcctttttgagtgaagtctccacgttagcgaaggtactggggcctccaggaacataaatgagctttcggact

SEQ ID NO: 368127 - DNA, 646 bp, Cannabis indica
gaatggaatggaatttttattcttttgtttggtaaagactatggaatcaacaacggaataagaattatcatgtttggtattgtatggaatggaatagaacttttattattttgactaaattaccctttactcttcaaaaattatatttattttattaaattaccattattttataaattgaacaaataaataatattcttagcaaaaaaatatatttatcatgtgatggaaatgtgcacattctcaaacttaattattaaaaaataaaataataaaattacatataaatattaaataattagtaatatgatggtaacatccaaaaaagtgagaagtggaggaggattgatagggtaaaatagacttttgttagtatggaattagctttcaagtgattttatagtggaaaagtaaatccttagtttaggtgaattgtaattcctttggaatgggctttcaagttctaataaagaaaccaaacacttgattgagctttcttaaggaatagcaagtccattccaatgctcattcatgtgaaccaaacaccacctaatttaccacaaaataaaattaaaaaatatattcaaaagatattgaaaaatttagccctaatttaataagaagaagaagaagaaaagttgttgta

SEQ ID NO: 368128 - DNA, 546 bp, Cannabis indica
caacagacatcacaaacagagtaaaatccacagactactcgagaaagacattgaattaaaccaatatgttctcgtattgtgtttgtcagttttgaacaaattgtgtgtttttgttcactttttctccccccatgaatctctccaaggaagcaaagaaatctccgaaattgtgtaatcctaaagaacttcgattgaaaccagtaagagattgagcagttaagagagaaaaagttttcatttagtagctattattatcaaagttaaattgtaaaaattaaaaaatagtagaaaataaggtaagaaaattgagttgaaatacacattatttactccatttccgaaggaaaaaaaaactattttttacagttgaaaaaccaaagtcaaagtcaattatgtcttcaaattggatgggccgggcttgaaggtaaagtctctcagtctattcattagtctaaacctaagcttacccttctcagttctcactctacactgctcctccgcttctctgagtcactacacaccattactactgtgcagagtcagaga

SEQ ID NO: 368129 - DNA, 666 bp, Cannabis indica
tcttcttaataagatagatacttaattgactaataatactaatagcttaattgataaataataacatatatactattttgtttttattattttgttcatataaaacaaaaccctaaacgcgttttcatagaagaagccaaaaacaatattttaattaaaaacttaaaaaataaaataattaataattacatatataagtttcttaaagagaacgccaaattaattagcttggctttaataatattataattatgcatgaattaatgttatctttgaaaccctaaaaacaatgtttaacttaatacatttgctagccaatgaatgagtaagttctaaataatattaatcactaaaaatttatgcaagagataatattaaaaaaaaaaatgtaggttttcaaaattataagttaattaatacaaaaatgaaaacttagtcaaacatttttagatggtcaaattattaatgtggtgttggcctaatattattattattgaatattattttgtttctctctataaatgtgttgctcttgcattggttcctatatatctaagttaaaggatataattaattaacaccttaattagaccacaaattgtgtaagtcattaagtagtatatatctttatatattaaaagtgtctatctaacggcatttcttggt

SEQ ID NO: 368130 - DNA, 1020 bp, Cannabis indica
attattatcttttaattaataaattatctagtaatatatttaattcaacaattaaaagataattaattaatttgattttgattttattttaataaataaaataatcaaacaaaattatcatggatctttatatttcactatacacgtgtgggtcatattttaaagtctgaaattgatttttcaattttaccacaaataagatttactattattttgtcaataaataataattggttaattctcattaatctcttatttagcttggattaaaataaatattatttttactaaaataatacatttatctctttattattatttaagaataatattatatttaactaattaatataattttatcaaataaaactaaatagttaaatacaattcataattattacaattattcaaaataataaattcacaaattgctatttgtccttgaaaatttatttctcatagaaattaattctcactcaaatttcctcatcaaatcaaatctttcatgtatagtattgtacaggatagtactcccataattaacacaataagaaaactaatatttaatccttttagaaagcttggattctattattgtataacatgtttctagccactcatgttattatgttcctaaaatagaagttgtaagaatcatcttttctgagaaactttaatgagagaatcaaagaacttaatgaacacaaataagagttcatgtatactcaggatttagactgatctactaatgatcatcgttgtgatatgaataactcaacaacatgttaacgaaagatgttattacatatcggtccagtcatgcataatcaaattatacacaacacctttactacatgtctatcacatatgcgattcgaatcaaaatcacccacactagagtatagtgtatagtaaaccgtacttagtagttatatattaaagattcctttactttaatacactaccaactagttttattcatattgtataatcttaattctcttgtacatccttacaaga

SEQ ID NO: 368131 - DNA, 827 bp, Cannabis indica
acatagagagccttgatctctgcacaaacctcattctcctcatcatcagatcccatttcttgaagccgagacctcttagcctcaagaaattcctcgataccagaaggaggttggcgcaaaggttttctggcccaggtttgggtcttgggttggctggattctctaatagaaaccacgccaacttccttccaagattcatctgaaaccatgccaactttcctctggaattccttatcagcctgaggaggacctttaagatcgctcacaagatctatgccttcaaggatcacttgtgaggatctctcatagcgggctatggggttcccctagtttggattggtcggaagctcctcggccttggaatccatcattttcagttccaattgaggcttgaagttcttgggaacgaatggaaaatggttggtgcatcctggtattatgagtttaggagagtgaacttctgaactcagaagggacattctagtaagaaagagataatccattctgaaaatggatctcactaaaaagctagaggtttgtgaaaaataataagcttgagccgcccttttatacacaaagtccagtgacaagaaagctaagtattgagaaatccaacggttgagagaagggcagaatatgaagagatgactcataatgacccttgaaaccatacaactgccagaatcgaagggtgcgtttcttccaagaaaagatcttcacgaaaatgccctctataattattaaaaagttctttttactaaaaaagaactttttaagggtcaattgtatccaaaaaattagggctggatgacacgtgtcaagataaa

SEQ ID NO: 368132 - DNA, 510 bp, Cannabis indica
aaaatgagaaaatggcaaaaattgcaaagtggggcccaataaccatccatggccggccacactatttaatttaccatttattttgtattattttaatgctaattaaatctaacctaaccctaagtggtttcctataaataggtagtgatggcttaagggaaaagatgatgcatctcattctttcagttaaaattagagcctatcttcctatacctagccgaaaccattatctctctcttcctctcttctaaatcgtagcccatagtgaaagagtgagtgcccacacacatcaagtggtactcaatcatagtgtgtaaggctgtgaagaatccagtttcaagagaaggagattcggactcagatcttggtgatactctacaacataaaggatacaagggttaaagatctgagtggaaagagacattatattccactgcaacaactgtaaggtttctaatactttatatatgtttatttgatatcgttttagaagttcatatttaagatgtt

SEQ ID NO: 368133 - DNA, 1356 bp, Cannabis indica
attcaaaattcgagtgattacagttacccactgtttggctttcataacatctggtcctcgcagaaaaacttgaggtgcctacttttggaacctttcatatattggttccatttgattcaccatagcaaccgaccctgcttgataaatccagtgtactgataaatcgtaggaatttatacaatcacataatcttgattgctttctactgtgttgacaacacaataatcaagaatatcaatgtgataaggatttggatgaatttataaatcaaacaaatgatcatgaaataaacatgtgaaacaaataacacattaaacaagtaatgaaataaatctgtatctttattgataaatgaatattcaagattacattaaaatagagttttatttaggacacaaaacccaacagtataattattgagtcctacataacttaagataataattttttagaaaatatcgctaatcaatcgtagggcgctatctataaaaggtgttaggcaccgcctactacaatattcaacaatgtattgatccaaacattgaactcttttgtttgtttgttttgttttattatttattattatttattattatttattattatttattattgactaggttattgttacgtgttgtacacgtatacttagtttatatttttagttttgtatttttatcatttgtatttacaaaaaaattataaagtgaaggaaatcacttattaattttttatttttatttaaaaaatattatttaatgttttaaaaattttagaaaaattaatataaagcttaagattattaaaattgaacatactctcaatattaaaaataaaaataaaaaataataatatattaatatttatatatatttaaattaatttagcattaatataagttcaattaacttaaaataaatgatattaatacttatgtatatttaaattaatttaaaataaataatattaatatttattaaactaactttactaacacaacacagttaaatttaatgaaatattctaatatttttaaaatattttattaaattaacaaaaatgattagataacgagattttgtatataaaaattattatatagaaattaaaactaaaggtactgcctttagatattccactatcattgaggttttcaaacaaaggctgcaaatatatagattttttgagtacaaaatcaaaccattaaaccatttagtggaaagcctcactatcaagtgaagtgatatatttctctatgtcatgtttactcttatacaatcatcttattcagtcaagaacaaatgaataaatatattatttttaatttatcatagtcttacaaagtttatctagtgg

SEQ ID NO: 368134 - DNA, 594 bp, Cannabis indica
aacttagcataaaatttaatatacgtgcctcgcacgttggtttttgctagtataaatatatatatgtctcaaaatcttatggaataggtaatgatcacactatgtgggattgagaatgcatttttgcaaagttgtatatctttaactaaacaatatcgtttgctaaatgtaacccaaacatttttctctattgttataattctcacaatactatcacatgctatgactaaactatttaattagttgacctttcatgaagctgaagcttttaaggataactttcaattaaattttacccttagtgtagctctataactaaaagagtatcatgtaatatcaataaagtagattttacgttgtttgatgatgaagatgtactcaatcggaacaagttgataggatttccttttttacgtttccctactgtccctccacgtgtggcgacatgagggcgataaaaagaaaagaagaggaagtgaagttttcttctacgactaagttaagcttcggtagcttaaactaggtcgatcaagtatttagaattccttggtcgcgaatacattccttgtagtctggcttattattctaacttgt

SEQ ID NO: 368135 - DNA, 678 bp, Cannabis indica
gaatgatcttgtcaaaaccactatgaacaagatacaaatgccatagatttattaaatatgtggttgtggtctttcgatgacttagatctagttacaagataaggttcttagaatagtccaagtggatccttgtcacagaatactaaactcaaatccacaaataaacatatagtttgaatccattgatagaaaatggatattaaataaaacttgtgaaagttatactgtaatgtgtaatgggttgtaggaaatagaaatataaaatttctatttggtatctaaaatttaaagtcaaagacttaaatttaaccaaatataggtgagtaattattctctcttggaccaccactactaatctaactctaagtttaaattgcctataataaacatatatgcaataggagattcaagatcgaggatttatatcatttcgggatagaatgtcgggattataatattatttgacatcataagtgaatgatttataaaccattcatccaatgatatattatttgacctaattggaaatgagtaagctaagagaaaaaattaaaggataatttcaaatttaaaataagactccaacgatgtcctgattggcgagagtcaaagttattcttattttataaacttcttcattgtttcatattgtaaatacttgtctaaggtgtcatctat

SEQ ID NO: 368136 - DNA, 540 bp, Cannabis indica
actgagttaataagtaccacacgaccagcaaaagatgatcgttattttattttttaaattacattaaattttttattttttttaccatatttaattatttatttttattaagtgtctaatttaaactttcatttttttcaaaaattatattatttactcttattttgtataactaagcttttgtttcgtgcattgcacacatatttatttctatttttagtttttatttttataatatgtattttaaaattttataaattaaaaaaaatcacttattaaatttttaaatttttttttgaaataattaaagtttaatttttttttaagaaaatataaagtttaagaatattaaaattgaacataccctaaatattaaaaaaaaaaaagaagaattaataaaactaaccctactaataaataattttttttctttagatttttacacttgatgtcattttttaccttttttttacatttatatttattttcggttatttaaacttttttacattttttatttttcaattttactttttcaaa

SEQ ID NO: 368137 - DNA, 710 bp, Cannabis indica
gatgcttgaactcgtagaatcaaatttgtaataggattaaacggaatttggagttctaactttagaatttaggcaattttagaacttacataagtttttttatggttattaggacaatttgtaaaaatttaaaaaattatacgcgcacagattgtttgatcctgtttttggatgttaaatttgttcaaatctcttaaaattttgcaaaatatcttaaataactataatatagacaaccatgaaaaaaaaattgaactaaaaactctctcaaatgctgaaaggatactaaggtgtctaacactactatgaagtgacaccctataattagttagcaattttcagtaatcttttgatccaatttttgaattatactaataaaaaattacacccgggtagaaacttataaccatttattttttaccgcgcatgttgtcattataccccttccatctattgtggacattgtcccacatggaataaatggtagagaattgagccatatataagaacatgggctactccactcattgccaattggttttgagatggaacctcatgattctcaacactggtatcagagccatatcccttgcgggcaagtgatcctatccgatccgcacctatacagatggtgaccatgtccactctaatacggttcgagattgatgagaaaaaatagctatcattttgagggggaatattgtggacat

SEQ ID NO: 368138 - DNA, 490 bp, Cannabis indica
aaaccttatgattttaaaatatgatatatatataacatgatagtaatatataattattatgtcaatatctatactgcacattgtgtcaactaaaaacgaaaaaaaaaaattatcattgttataaaaaatgtgttaagaaaataaactaaatatatgtatctatatttacaaaggaacacacgtacaacaaaaaaaaatttaaggaataaactaaaaatatacaccataaaaaatacacatgaataaaaaaaaacaactgttcaaccaaaaaaatattttaaagactacttaaaataactaaaaaatagcaaaacaaatgtgcgtatatacaacaaaaaaattatctaaaataaattaaaaaatatataccataaaaatacacataaactaaaaaataattgtacaaaaacaaaaaaaaaaaacaaactatagaacacctacataataacataaaaaaaaactaaaataaactataaaataataaaaagat

SEQ ID NO: 368139 - DNA, 1079 bp, Cannabis indica
atgtgtattgctgttgttgctagagatcatcttggcagagtgattaatgttcagacggctcgggaggagttctcggatgctctgtgtggtgaagccgcggcttgctgcttggctgtgtcagttgcttcagatttcggctataagtatgttattgtggagaatgattcgagagtggtcatcgacgctatcaatgggaacggatctcgttgggccttagagaactacgtctcattttgtactaagtcatctcctttatttaatagttgttgtttttcttatgttagcagatcttgtaactttgccgctcataatgtggctagatgggctttctcccatcagttgtatggatctatcccggtcccttctataccggatgctattttatgtaatgaccgtgaggtctaaactcagtttaatttataatataaacgcctttcctaaaaaaaaaattatatatttatgttgcaaattactctaaaaaatatatggttgacgagcatcttttccattgcacctacaagcttctcattgacctcatcaaattttagagtcaacttcttcacctttcacttctggagctcctcttcaacacatgccccagtataggcctgtcttaccccttttccttttcctttatttttacgtgtcaggcctgctgaagagcttggaacagacaatacaatttaaaaattaaaaatattattaataaagtaaaatatattattatatttaagattagaaattaaacatgacgtgtttgcgatgcgggtggtgcggtttttgactattttttcaaaccaacccgtacatacagttttttcaatttcccaaaccgcactcgcaccgtgaaactaaaaaaccataaaaatcgcaccgcaaaaaatggtgcgatgcagtgcagtttatgcggtttttatagtttggactataactaaataattaaactatcacaaatacaataaagtttaagcaacacttgttaaaaataccatacggcttgaaaataaatatgaaaaaaaaaaatcaagtttaaacaatacaataatagtgggcttaggttggaccttcacatattggac

SEQ ID NO: 368140 - DNA, 648 bp, Cannabis indica
ctcacctgtgtgagtttactacttgattgcgtatacttgcgtagtaattaataattttcgcaacaacaatctcaatagttcagaggcattttaacgacttaaaagtttatggggcatgatttggtacatgtcaaagttcacgagataaaaatcctaattagccaaaaatatatattactaatatatatgtatactatattaactacattatatatcataatttaaatatatataccatgacaataaaattatatacgtaataataaattagaaactcattaaatattatttaagataaataatatatcataaaaataaaatatataaaaataataattaaatatatgtagcatgccagtaaacttatatacatacattaaaaaatttgtattatactaacaaaattatataccactataatacatcgcaaaataaaaagatatcatctaagaataataatttatcatacaacaaaatagaaatatattttacaaccagggacagaccaattactatcaatgagggagctatagcccccactaacaaaaatattgtcttttaaaaaattaactgtaattttttaatttgataattatagaccaaaataataataaagtccccacaaaattaaataaatctagtaagagt

SEQ ID NO: 368141 - DNA, 518 bp, Cannabis indica
atgctattttcaactattttcatatattcaaaattttcatttcataaattttctactaatatttttcaatcaatgaaacgaaaagacaaactttaattcccgatgaaaaataaaactttcaatcctaataatcaatagaaacaacatcaaatttcaagttctcaaaatttataaaattaaataaataaataaataaaaagcagatatcataaacacaaactcaaacattagaactccaataaaacactaaaacttaaacattaaaaacatacacaataaaattcgaactcagaacttaacacacacatcagaataaaaattaaacaataaatgaggatttatgttactatttttcgaatttctgtaattattagcaacaaatttaatattttaagtatttatgttacaaattttttaatagtaaagttaaaattttaatataattttattaagtcattattattaattaaaatacacaatttattttttatatatgatttaaaatattttatatatcc

SEQ ID NO: 368142 - DNA, 769 bp, Cannabis indica
atagaaaaaaaatagagagaatattgacaataattagtaatctaatgtattataaatgatagaggaaagagatcgaaatactaatagaaaattgagggtaatgaataaattatgaataatttgaagttgtcgatataaaagaaaagtcggtatgtctccaagaatattctgttaaacaaaaaattctgttacaaaatcacattttatatagaatagatagatagatttttttttaattttattttttttttaaaacttagttgttagatatttataaagtttttttaaaaaaatgatcttgaattacacgatttataagtcttttatttgcgatacaattaaatttagtgttagttttaatagttttgatttataattgtatataaatattttttattaatctcaattgagagaattagataaaaatatattgactaatttttaattgtatatagatatatagatagacaaatttttttcaatttttcattttttttttaaacctagttgttagatatttgtaaagtttgaaaaaaaattgctatggtttttatttaaaaaattagaaaaattaataaaaaaaatagaaaaaagtaagaaaatggataaataagttttaaataattagaaaaaattagaaaatagataaatggattttaaataattagaaaaaaaaatagataaacagattgtaagccattttatagtgtcacgtcactgtcttatacttctcctttatatatatttatatatagactagcaaaaaact

SEQ ID NO: 368143 - DNA, 581 bp, Cannabis indica
cccatccattaatttttaactgtccagcagccggtttggactagtgttctcttgtgtgagtgctattagagggcatggaaatcaagtccatcctcttagacttagcacacgtccattgtcaaagagtggtacgggccatccaaacaacatcagcagcactacaacttttaccattccaaagcatatcattccgagccttccaaattgtccaaccaaccatgacagcttcttccacaaaccacatattgcctactgccaacacttccataaaccaatcaaaaaaattggtagctacagaatggccaacacaaaacgctgatcagagccaacaagagcgagcaaaggagcattgaaccaatacataaaaaattgactcttccctataattgcaaaacacacaatgtaaatccacagggacatgtttactatgcaattgagaacgtgtaggcaaacaacccgaaagagcttttcaaacaaaatgtaaaactttaggaggggctttaattccacaacatcttccaaacatcctcctccatggatgagttccaattaccattgaccgactgtaagtgagtataggc

SEQ ID NO: 368144 - DNA, 777 bp, Cannabis indica
cgcagagcatgctttgccaagccatgggccgctaaattctcagagcaagccacatgggacaaactgcccccggaaatttagacaataaagctataacatcttcaaacaatgctcctagctcattgaaatacttcttccctttgttaatggtcgtcaccaaagctaacgaatctgaataaactgcatgaatttgaagaccacacacatgagcccaattaagaccaaccaacagggttaaagtttcagcctgtaacactgaaattccacttgaaacaacatcagaccaaaaaattgtaattagaacattaccaatctgattaaacacttaaatccaaaaaatttaactacgtccccctatgaattactttaactagccaaagggtggcaagtagtaacttaactcatgtattttacttcgtaatcaccttagctttactattccttcctagacctaagtattttatatgatatctagaaattacaatatctttataattcacccatacctgaactatcaacatttcttttggaattataacactaataaaattcgcaacaaataatatttaaaatacccaatatgactaacctttgagtggtttacttaacacagcgtgaactctattatcttctgagaatacaaccgcacctaatccaactatactcgtggtgctcaatacagctgcatccaccataagtttagagtataacctctgttcttgagcacttgtagaacttccagctgacgcttccgtactccttccattagtttgggaa

SEQ ID NO: 368145 - DNA, 635 bp, Cannabis indica
gtaataatatttacttatgtatatacttaattattaagtgccaagtcaatagacacatcatagtccttgattagcccaagtcattataaatttgtatttttatttaaaaatttatttaaatatactagtaaaatgacatgtggatattgacttagtagttaacaaacaagttcctttaaaagttctagaaatataacttgggtatcattgccatcaaaattaaacttaagtatttatctacaatcaagagttaaacttaaatattttaccgcaaattactcatacttttattattttattcaatttaagtatattatataattctctcctaatattcaaaaggcttagcttggtatcggtcgccatatagatctcacccaaatatcgtagtttgcttatattgactaattatggggtattattgttggaacttattttaccacgatctagatttactaacatgtatgtttgattataatctataatctaacatcctaaatatgaatttcgtaaaacaataaaataaacacataagatattaagaatccttatattgatcgctagggaaaatattaatgactctttccattcagatctctagcccttgattcctttctgtaggagagcattatcaa

SEQ ID NO: 368146 - DNA, 773 bp, Cannabis indica
agagctatcaccatcattactttcttggtccaaatattgatcaatacaattactccaatgctcatttatcttattatggattcttttcaatttatctttggaaaccttactttcaagatcctctacctttgaatgaaacactttaataaagtttttgatctctatagggatgaattcaggactaaaaaagcttacctcgaaacgaagaacttcattgatgatatgctgaactaattcgtcttcgatttcatcattcaaataaaatattgtcttcttcctttccttcttattcgtctcgttatacaaaaatggtccaaccaactccattactttttttaaaaaatcgcaataaagtatcagaaccatctattacaaaagacttgttacgattctcttccacatttaagcattggattaaagttataacctcatcaagaaacaacaacaatgttgaaaatattaaacattttgaacactttgaaaagtagacgttatgttgaaaatatttaaagaaatgaatcttatattcagaattgagaaagattggttgaaaaaggaagagagactaataaagtagttcaatgatcaaggaaaacgttagagaaggtgttaaataaggagtcatttataattactattatcatatataaaagaacaaatcatctctacttttatttgagtaggtacgtatataaacatcaattatggttgtaacctgaatttattcgacactttatgtaacaccctaactagcataggcgtatgacgtgatt

SEQ ID NO: 368147 - DNA, 754 bp, Cannabis indica
gaatatgaattgaaagaaaaaagttaaaaaaaattagtacaattaaaaatataaattttatataaaataaaaattatcaaaatggggtgtctttagaattttttggggtgtaaataaaatttcccattttcaatattgtacaagtattaatttaggaaaaaaacttaatccccttaatgcatgcattataaatttaaatttctctattaaaaattacatttaaaacgtccccatattaaacttctttaagatttctcaaatattttacatgttttaaataatctcaaaatctcaaaccatgtgtcctctccgtccaattaactaataaaaatattcagaaaaaaaaatgaaaattagaaagaagtttttgcttttaattttggattggaaattatactttaacaaaattggacggcgggagcgtgtaagtcacgcggccactaactacgtgaaaaaaatgaacgttttctttttttttttctctttcaaaaaataaattaaacttgacgttttatcttattattattttttttataactaaaatcgacgttttctcttgccttaaattgacgttttcctttttttttttcttttttttttttgttagggtaagtgacgttttccattttaattttaattttttaaaatttagatgttttctaaaaaaactaaactacactatactttaatatttggtacgatttaattgtcatgtcaaaaaataatagttaaaattacttaatattcacaatcg

SEQ ID NO: 368148 - DNA, 1322 bp, Cannabis indica
ctaggtcccgttgcccagggaggggtataagtctcgggccaccggatgggaggcggcagagcttcactccaccctaacctgcccccatcagctggagaacatcgtggaggtggctggaatcaagccttccacatccgggacgtaccaccggccgcctcgagatgcggagacgcccaaccataactatggcggcttcggggcttggagccagacgcacttgatgtccggggccatgcttcctctccaggattactttgttaattttttagtttttgtcggccttgcgccataccaactgattcctcaagcataccgcctgctctcaggcttatttattttttactccgcccggggatggggctctcccagtccggcggagattttgtatttttatgaactcgtttctgtccccaaaaagggggacaaatttaaagatggtttttatggattccgggcccaccctgccaatgatggggtggtcccttataataggcaaactcatgttaaggagtatcgccaccgtttcttcttctcctccgggttccgagcagtggagcacccggagcttctcacggagtgggtcaggattcctccctatgagcggaccgcgcctactcaggtctttctccggagggcccaggtctttgcaacttatgaccgggcggaacttgacgtcgggggcctggtcacgacggagaattgccggaaggccaagctcatcctgccgcaccaatcagtggaggactctaacctctccagggttatctgtccaaatgtgagggcgcctgccgcggagaagatcttccgggacgaaatcatcgccaccgccgagaagaagtaccaggagtatctctaccggaaggctcaggagaaagcttactccaaggctcaggcagcttccgggaggccacttcgcgtggggagcccagtcgagaggagaagccaggcgatcgctgggaagccccttcgcattggggactcagctgagagaagggcttccaggccaaagccttcggctcaggagccgaacactggggctcctggcgccagcacttccggctccggtaagtctcctttagcagtacattacgtcccttctgttggcgaatatgccagtcttaggcctgtagggttcgatgagcgtcttcataggtttaggatgccctcgacccggtggggagaccatatgaaggaattttatttttccaacttaggagatttcctaggtcggtcccggatgggttctggtcctccggagcccgttcccttagacccttcggcttatatttcatccagctggttccggccttcggacagctatc

SEQ ID NO: 368149 - DNA, 502 bp, Cannabis indica
aaaagtgataaaatttaaactttaagaaataaacatataccgtattgcatttataaaatctaaaattccgtattacattttccaactatacataatcaaaagatgtcacacagtgactacaaaattgtgagccctagttgtcacgaagatccaacactccaggtcgatctgtctcaatatgtaaaatcttcatctagctcaaaactcactgtcattcaaaaattgctttgcatttacctgcacataacatagcatctgtaagtcgacaaactcagtaagaaaagcacaaaacataaatatataaccgacctacgactaagtgcccatatacctatcaacaagtcataaaccatgcaaacatgtataattgagtctcgaacgttcttgaacatagtataattgaccataataccacatgcacttagtactctaatcgtactagtgttggtagcatcaatccacactataagtacaactagccataacaccacatgcactcagt

SEQ ID NO: 368150 - DNA, 711 bp, Cannabis indica
gttttatctctgccatctgtgtaaacattaaaccaatgaaaattttcttttcgagtttaagaaatcaatgaaggttggttggtagagcttacaaacctctacaatgagttgtacattggcatagttattattgttagttccaccaggaacttccacaaactgatcagcaattctaatatgttcagcattgattctcatgtcctctggtgtagccatggcaaccaacttgattgccttttccgagccaaacgtttcatacgcccatgtcctcacactacgaataaatttcacagctgccataccattgtttgcaatcaaaatactatgaattggtttcttcccaccaagtgcattgcagaatttatcaacttcagccattgttttcgaactctttcggggttctaacatactgcaacgacagaattattcgttcaagaattgattacccgaaacatagttgatgcaacattagaaattctttgttaacaatatattttctctaatgatttacatataacaacttttttcactaataaaagtagattaataagattcctaatccacaacaaaaaaatgacaagcctcaaaagatgtaatctttaacaataaggctgtgtttggttgtaggtaatagaatggaatggaaatcgattaatttcattccattcttttgtttggttgcattttaaagtattagaatatcatttcaat

SEQ ID NO: 368151 - DNA, 606 bp, Cannabis indica
gaggaagacctctaattgacactatttgaacaatccatgatatggaaatctcattagaaatgtcttgtatctatgcttcataaaagggctcaaagtcatattgaacaaaattcataaggacttgtcgatgagacatcttaagtaccttgcaaaagaaaccaaaagacaaacaaaacgtaaaatagaacaaagaaataaaactaaaaaaataaaaacaaaaaaccaatttgatagtaaataagttccataaacaaaatttcactaaatcaatccccggtgtcatgggctcaccttttcaggcagcagaatacacgtgcggcaccttggcttctctaagccaaggtcacccttccaaccatccgagtaacaatgagctcatttttcacgcgaccgtgttcctcgtgcacacttccgtctctcgaacaactcccaccgagtcatgctcgtaagcatccatgagtgcatccatgcatcgaggctctctagccaagatacttgcactatccataggttctcactaagataagacaaatcccaacaccgacgctcacctagtcactcgtgaccaaggtagcatgtgtggcaagatgccaacaccaagctgac

SEQ ID NO: 368152 - DNA, 1016 bp, Cannabis indica
cccttaaggaagttaatacggtacaattagaatagttaaagttttaaaaacgggaaagttaatacggtacaatgaaatgtaaaatttaaaacggttttataggtttaaatgatgatactatttaaattagaataaaaatttaaataaatttgaaaaattataaaagagagatgaggatagaataacgtataaacttccataataattcagaaaaatgaggagaagagagattaaggaaaaatgctaattaggctgccacatggattcctttaaacttttcctttatatatatatattgactagggaacacttcgtgcggatttaatatattctttttaaaattatatatagcaaatttaatattttatttaattatgaaaaaaatatcaaatctaattctttttttttatttaataaataatatcaagaattatatactatatccagaaattttaataattaaaagttgtatatataatgattataaatttaaattctccaaatattaataaggacacaataagttgtacatgcaatttaaaatatctttctattttgtatttatccattaattattataacaaaatcttatatatgaataaagtataaatatatcccttatatgttttattagtcatagcattttataatataaataccgaaaaaaaaacaaaaaaatatatatatatctaaatttatatataaaatttattatacaagaagagaattttaatttgtgtaaaaagaagtttaatttttgtaagaaaaaaaaataaagtttcatagtaaataatataattaaaatgcttaactgttaaaataattatagtaggaatttatataaaaaattattcataattattaattgctaaaagagatcttgttaaatattgaaataattatttttaaaaaataattaattataattaattgattctaaaaaagaaagttgtacctattggtaacctgctattataggtaaaaaaaaatgtaatcataataattataataaaaat

SEQ ID NO: 368153 - DNA, 833 bp, Cannabis indica
ctattcttatacttgagatttgctaactctgattcatacattgtaacccttagagagctactgcagatcccatcactatagtgatttgagtagtatttctctcggtatcaatataactaaaaggggagtaggtcattacccactaattaaggggggcgaacctctataaaatcctatgttcatttactttattattctaatcatgtaacacgtgacaagcatcaatattacattccttaggaatcttaaagtatatcccttggacgttttaacaattactaagcgtctaggttgacgttatatgtcaacttgaccgctggaatgttagcctgcgtactggatcataaactgatttcagtaaaacagccataactcactcaatttttatttgattgatgcgtttcaacttgcgttccgaagctaattcaatatcctatcaagtcttttatcaacactaccaatgtaaatctaaagctatcgtcgtcaaaattcactcccaagggagttacaaaaataagctccgcgttactcgcagcgggacccgccgggctctgaaaattgaccatcaccaccaagagctaattttcaccgttatatcatcatcaacggtcaaatatcttattttttatttttgtgggtctccttcacatataaagggagagctccataagctcattttttacattcagaaaactacctacaaggtcaaagcttctatctttaaattttctctctctagaatttggagcttctgacacttagtctattgctttaattaccatctcgtgagaataaaaacttgaattagacgtaactctattactattgcaata

SEQ ID NO: 368154 - DNA, 1200 bp, Cannabis indica
tgggtttgagttcgggtccgggtgtacgggtctgattttgggttcggttggggttcggattttgtcctgttatgggttcatgtccaggttcttctcctagtttgggtccaagggaggatctggtctgggtctgggtccgacttcagattcctatgtctaggttacgtcctggttcaggttcgagtcccagatttacatctgggtctgggttacggggcctagctccctggtcctggtctcccatcaaagactggttcctaggtcctagtctgggtcctggttcgggttcgggtgccgagtgatggttttagtccaactcccagtttgggtttgggtccaggtctcggtcccaattttggtctaggttcatgttcgtgtccttgtcagggtctagatccttgtctggctcgcgggtctcaagtcccagcgagggtttaggaccaggttaggtcaaagtcccagtctggttcccggtccaggttcgagtcccaggtctcaggtctcagtcctagtcaaggtctcggtctagcttctggtctcaggtctcaactccatgtcctagtcgaagttacagttttgattctgggtccgggtttggttctgagttcaggtctaggtcaaggttggggtccgagtttttagtcctagtctgggtacgagttcttcggatctcggtctggggtccaggtctgattttgggtacttagtttgggtcccaggttcgggtttgggtctgcgtctgggtccgggtccaagtcctgtgtttcgatcccggtctgggcctgggtctgggtcggtattcgggtctaagttcgtgtcaatatccaagtccgaatcccagtttaggtcaagagcgtggtctgggtccgggatcgagtcccgagttcgagttcaggttcaagtctctgtcctagtctgggtccaggactgggtctgggactggatccgagcctgagttccgggggctgggttctggtctagttctgggtcccagtccacgtcgaggtcctgctcacggtcatgatcctgttctaaggtcctggtcatgttctggttcaagttccagttttgggtcgcaggtctgggtcagggtttgagtcctgctctagcttcaggtccttgtctgagtcccagatcaagacagagactatgggtcttgtccaagccccggttctcggatcccgagacaagatctggatc

SEQ ID NO: 368155 - DNA, 507 bp, Cannabis indica
attttttattatacttttgttgatataatatataattttattagcatcctatatatttttatttttatttattgttattatatattttttaattgtaaggtatatggtttttgttatatggtatataagttttattgtatagtatataattttattttagaacatgcatgttttatttttattttattataaataaagctgatatataattttattaatatgatatatacaatttttttaattatattgtattatattattatatttttttattgtaggtatatatgttttgttgtatggtatatagtttttttggtatgtagtttatcatttatttaagataatatttagtttttattttattatacattaattttttttattatgtatacatatttcaatagtggtatatacaattttattactatatattaaattttagtgtatatgacatatcaaatactgttgtatatatttaataatctaacatatttatttatttttatt

SEQ ID NO: 368156 - DNA, 634 bp, Cannabis indica
agataatccattgaattttaaaacatcctcaacatttaaagagtggtcttttagatcatcttcatccaatgctttcagtttcttcatgctaaacaaaaaaccaaaaatattttcatacacttgaaattgttcaaatctagttttaagtgaacaaataatttggtcaatcaagtaaagaaaataatcaattcgaaatgattcttcagcagatttaattacatcaacatcaacattttcatcaaattgctttttcctacgaattaatcgcttttcagaaaatttaggctctattcccatctcacttgcaattttcttagttgaattcatagcagttacaaatccattttccctataatcttcaaaataagaaatgagaccatttaaatcttgtatagccttgtcaatgtccatgtttttactttgtaaatgtttacttattgaatttataggaaataaaatgtcataccaaatggtcatgcccaataaaaattcaaaattctctaattcataatttactagacttgtagcttcactttttatttttggatcttcacttatttctgcaagttcaaacaaagcatctcttattggattagatgaaatatcaacacacctcatgttgggttttatgccc

SEQ ID NO: 368157 - DNA, 663 bp, Cannabis indica
atcgtaaatattatttaattttttgggtttaattattgggtttattttttgaaatttgaatttaaccgtgtaaaaaaatttcaaaaatggttgttagagatatgtgggtaagatatttttttaatttaaaaaaagattgtttaattttttgggtttaattattgggtttatttatttgttaacatttaacgttaacagtctgttaagttaatcgtgtaaggctaaataaaaaaggaatcgttaaaccaagaattgccgttagataggcacttttaatatataaagataagatgtacattatattaagagaaatactaaaagacaatggtgtttaacacttttgtaaggtgtaatattgctattggtacaactcaatattgaattctacttatttcttgaataaatattattaataattgttaatcaattatgtgacaacacttcatcatgagtgctagacactctatactactacaaaattggcttttcccaatagtttataactgtcttttatactttttccatcggttcctaaaaccgttggctatgtgggtgtcataaaaatacggaactttaaaagacagtttataactgttgggaaaaaccactttaaatgacagtttacaaccgttggaaaaaatcactttaaatgactgtttataa

SEQ ID NO: 368158 - DNA, 648 bp, Cannabis indica
ccacctgttccacccgcttcatctcctacaccagaacccgtgcctagaaggactactagagtgtcacggccacctcgttacctacaggatttcgagtgttacaacctgctagaagataacacttccacttcttatcctatttcaaaatatgtttcttattccaaactttcaaaggcttataaaatgtttattcttgcagttacagccgagttcgaacctcaaaattacaaacaggccatacagttcaagaaatggctccaagccatggacaatgaacttctagcactcatcaccaacaaaacttggtccgtggtgcctctcccacctaacaagcgcgccataggatgtaaatgggtgtacaaaattaagtacaacagtgatggaagtgtcgaaagactgaaagctcgtcttgtcgctcaaggatacactcaacaagaaggcttggatttttttgacaccttctcacccgtggccaagatggttaccttcaaactcctacttgccattgtcactattaaacaatggtccactttacaacttgatataaacaacgcattcctcaatggtgatttggatgaagaagtctacatgcaaatacctcaaggactccaacttcccccttctatctcgggtgacaatcttgtgtgt

SEQ ID NO: 368159 - DNA, 554 bp, Cannabis indica
atcatgcatctcatagtaaaaacgaatatattagaattgttttatgcgtttatgtgaaactagaagcatgtaaactaactaagattaatttagaattaacttaaaaatttaaaattaacctaatttatatttaaattataaatttaaaagtgttttaaattttatttaataattgtgacgagaaatttatttataatttgagacttttcttataaataaattaatcaaaattattaaaaggttaatatatattaagagtgactatttaatggttatatttttggaataattatacaaggcaccagtttttgtaaaaaattaaatttttacgtttaaagatttttttttatatttttacggtttttcatagaaataacatgaaaacaataagaaaactacataaaagtaacatgaaaatgacatttaaataacaacaaaataataacaaaaaataacatacatataacaaaaaatcaacaaattaacaacataacaacataaaaagactgtattttctgtaaataaaataaaaaaaaaaaacccataaaaatatt

SEQ ID NO: 368160 - DNA, 672 bp, Cannabis indica
tagtgaatatgatttagattttactagagtgacccgtagtcttgaactctatctctaacattgtaccacgcaacaacctttacaagggtgtaatcaaaagcccgtgcgttaatggccatgcaggtctatcccagtatagtgaatgctctagaaattttgcccaaaatttcataggaagcggccccactcccacattcacataggtgagtctatcaagagtactcccgtagctcggtactccactcaacttggagtatagatctcattaagagtttttattaactcagccttaaattgcttcaggagttcatgcttctctttttcgtataattatatcatgatcttacttttatcacttcataacttgttcttacccattgaacctttttcttgggatctccagtttataggtcgtgttgccattataagtgattcatcaatctaagggcaacagtcccatttctttcgatgttttaaggactttctctctagctaaacctttcgtcaaaggatcagccaagttattgttaggctatttttagcctaagtttcgggtcacattttatagttatttttcttcttaattattgtttttggaatagaattacgcttgttttctttggtttcaggtttcaacacttggaatgtataaattggacaaatttcggaaaa

SEQ ID NO: 368161 - DNA, 700 bp, Cannabis indica
tgttagtgtccaagttatgttattttatattttgaagctataatgtacgatcagtatttgttatgaaatctgtactttggtttattttggagtattaatgtcactttcctcattaattaattgtggaattaaaagtgaagtgaatcattgtgaaatcacaactgcaaacagaaagaaaaaagacttaaaataatatagtagagttacaaacaactagatatataatggaggtaagtgcttcaatctcattaaatggcctaacaaaaagttgattcaacggccatatgagatgagttgtaacaaaagtacagtatatatatatataaaataccacgattgaaaccgaacggatgttcaatcaagttctataacttgagggaacttccgttgagacggagggctattgtctctgaacggggactttggtcgtgaaggactttctcttggagtagtgcttggtgattcttgtttcacatgaagtgggtagtggggaatggacacctcggtgtagtcgagaatgtcatccatgataccctctaatttttctcttgaagtgttggcttcttgcatggcgtgggctgaatggtacagatgttccgcgagtttgtatgactcttgcttggcctccgtggctcgtaaatgagccttctttataattttttcgtgttcgtggagaacagactcgagccttgcacagtta

SEQ ID NO: 368162 - DNA, 858 bp, Cannabis indica
  modified_base (775)..(775): a, c, t, g, unknown or other
aattggaatccctcaattacttccatttacacagttacagtgtaattacatggtcagacaaacatgtcaaattgtgtaattaccttcaattacacacaaattcaattacattggggctttccaaacgcaccagtaaaaacattcaatgctaaacaaacaaagactttaaaagaaaatggagattaagtgatgcatctactaattttgcccaaagatagtttggccccaacaaatcttttctccaactcttgcattaagtaaagtaaaacatgatgaacaacctaaaaaccacaggcaaaaataaatacatgtaagaatatatatatttttctaaataaaaataataataaataaaaaattaaaatgtaaaatgttatataataattaaaagaataagagaaaatttagctgtgtaatctaatcattctttcataatcttctaaaatctctacatcttcataaacttaaaataacataacaaaacgcaacactacataaacataacattacaaaatgcaacattatacatatgaatataacttaacaaaatgtaacatcatatgaacagaatttaatataacacaaaaaataaacatatattttttaaaatagaaaaccttctacaataatgtgtaccatgtcacaaaactcctaaaaaattatggccaagccataattgatgtacccataaaaaccaaacaactatttattataaaataatcaatttttaaataatactatactattttgtttgttttttatttataggtatatnttattgtatggtatatatgattttttgtgttttatagtatattattatttttaagattgatattaattttattttttatacta

SEQ ID NO: 368163 - DNA, 589 bp, Cannabis indica
catatttaatctatatattatattatttaataataatataacaatccctcactagactaaatattctctttagtacaaataccaacaagttaaaatttattttatatttatgagttatgaattttagaaatatcttttcgaaaccaaaatctttaatcctctagtttatattattttatttttcatttttgtgccacagattgtatatacatacagtatgtgaatctagataacactagtcctttagttttagattcattaagattgtttgtagttggtttgtttgggaatttatgctggtttctttttgagttagtgaaaggcctatagattttagaatttttgcttaaatgtttgcacagtgtgatgaagtttttgagttaaattttttaaatttagttttgagcctgggagatctcggtcagtgtcgtgttgggttgaaggctgaaatggtggatagttgattttatcttgttgtttgttattgattttgttcttttttgggtgagctgatataatgggatatactgttaattttgttataggtttgttttatattgattttgttctattttgtgccattatttat

SEQ ID NO: 368164 - DNA, 781 bp, Cannabis indica
taattaatctcttaattaaactcacatgtaatcaacattaagtaataatctaagtgtcacataggtcatgcaaatactctcgtttcacatagaacctcgattatccaattttagcattctcaattctcacctttcagattttgaattgagatcatagaacatgtagaaggtgatcaagcttacacatggaattaaacacaaatatagataatttcacaaatcaagattgaaggaatggcaattattcattaactaggcaaaactttaaacaacattcatcatcctccctaaatgggaaatttagctcataaaaataatataaacatccatgattaattctgaaacaaaaatagacataaaagagaaatagagggtaaaagaaagaaactagatggtgatatcgctccgggtcttcaagattgcttcctctcctccttcattcacttttcgggccaatttctgcttctcttggccttctgaatcgtatcccttatataggaatgagaggtgtgcctctaattggaaaaaaaaaattagaattaggtcaaaaatcccgtttttcgtgcctggtcgtgaccacaggcaaaacttgaaaaactgagtttctgccaaaaccccaagtcgcgaccatagtcgcgaccagataaaagggtcgcgactaggctgaatgctggtcgcgactactgactcccattgagcagctttggccaatttttcaccagtttgccccttattttcgtcaattgactgaatttgaactctaacgcaccgggaacctgaa

SEQ ID NO: 368165 - DNA, 723 bp, Cannabis indica
aatcaagcttccaataagtagctctagaatttaccaagtgaattctctagattattaattcctccttctgccactatagatttggaattgcactcttaattatatcgaattctctatatgttccatgatataaatacgctatgaattatccattgttataatcctaataatcaatgatcctctataaatgatctacaacgagtaaagacaaatttatcgctacaaccttcaatatattttatccttaaaaaccttagctccttataaatgatatttcagtaaactaatataattattgaaattattactcaaccatttatctctattaaggcaagctcgaagaaaatcatcattttatttctatatccagatagaagctatagattttgtatctatgattagcgctcccactcaattaaactactatgtccttaacctgtatgtcacgagaagatctattggtcaactttaacgaacaaatgaagagcataaataatacaagtgaactaaaacctaaccatctcaggattgagatcatttgatctaaaatcaactaggtgatattgaattagatagatattgcggtaaatttattatatcttatccaagttcaatatcggtcccttccaatgcatactccatacatccaacccaagcttactttaaccaatgccctggaaagggcatagcacttatccaaggtgcaagtaaactacattgtag

SEQ ID NO: 368166 - DNA, 657 bp, Cannabis indica
atataaagttaatatcatcagtatatcttatttgtgatcatcattaatatttttgtagtaagtttatcttgtacataaaataaattaaacaatgatcgataagtattcatttttatacataagtgaatcattctgttataaataaatttagtgaatcattagttatcataaaagagcatctccacatgaaggatgcttaatgacatagatatattgtttagtattttttaattgatgtttacgattgaaatgaaaaaaatgctacaaaagaatgacatatcatagcatcttttatatcttctccttcttatttttttattattattttatcataagaaaatttatttatttaatatatattaaataacaatataatattattttaataatttttaaagatgcttatctttgaatattatttttgaacaaaaagtgcaaaaaatgacgtggaagagagataaaataaaataatatatttttaagtgacatgaaaatttttgacactcttaaagaatgtcatagatgctttaaggttctataatttatttatttttattttttaattaattaatgatctctaatttttattataaaattaatgaactctaattaaataaaatcgaataaaataattaattaataatttctaattaaata

SEQ ID NO: 368167 - DNA, 896 bp, Cannabis indica
tgcctctgtgaatttcgaacacggagtacagaattgatatactttcatgaccaagttttttgggtctttattttacaaaactaaattttataatattgtctaaaccaattttttgtaatggaaactggaaagtatgactattctttaatgttttgacttagggaaattgagatcttttaagactcatatatcctcgtatgcttttgttcttgtgttccacgaaggaaatatttctaccttaattgaacaagtaactttctgacaacacaatattattaataaagtcatgcgttatttaatcttttttaggtaaaatataatgatgaggttactagtaaactttcaaaggatggagctacttcaacaaatgaagatgaaattttctcatctgctttaagttcagaaaagtttttctgtttacaacaatatatttggttcaactcggaaggcagccaagaaacaagaaatgcagaaaataaaataagaaatgaagtcaagtatggatgaacaattaagtaaaataacaacacattatgaagccaaatcatgtgatgctttgcaagtgaaatgggaggcaatgcaactaatgtttgaaaaatttatgagagaaatgaatggttctcgatcgcaatcacacaatgactcaccaaattctttatttgaggaggatgtttacagaagacttggtctatacttaatgggttagtcttcgtacttgatgattttttttttgtttatattattctataactttccttattttctttccctttacaaagattaacttaattagtatcttgcttatcttatatatcttgaacgtgactcatatctattttacttgcttttacttaaacttttgcttattttattacctaagctatcataagttgttt

SEQ ID NO: 368168 - DNA, 527 bp, Cannabis indica
actcaaaaatgggacctgggacccgaaccagaactagaccgagacccatgacagtgatccagatcttgactcgggattcaggtaacggggcctggaacaggccagtagtcggtgtctagatctggaactcagactaggactagaagctagacgaagaaccgaacccgaacccagacctagacctgggacctaaaattagaacctgaacaacaatcgtcgaaccaggaccttaaaacaagactaggaccatgaccaggacccgaacccggaccttgaaccgaacacagaactagactcaaacccaaactgagacggtaactctggcacggacactgtagtgtacccagaccggaactaagacccggacctccacctaaatctgggacctgattcttaacacaaacttggatcgaaatcatggacctagatctggacagagatcgtgaccaagacccaaacttggacccgcattctggaccccaacttggacctgaacccgaacctagacccagatcggggtccagacc

SEQ ID NO: 368169 - DNA, 965 bp, Cannabis indica
gcatgccgagttgccaggagttgttttgggctggctgtatctgttgtgtattataatttttttgtttaaatggttttctttactaaaactttttataacagggatccccggaacacgctttttatgacgttataatgtctgtttttagtgctttaatttagtaaattttttaatattatcacagttttttaataattaattattctattagcatttaaacaattttataaaatcaaacacgcggcgtccctatcgattagggctttacaggatatgttttttttaactgaatggatgcacaatcacttggaaatcaaatctacaatctatagtggcattgtctacaacagagacagagtacataccatgcactgaaactgttaatgaagcactctggctaaagggaattacatcataacttggtatcaattaaagaacaatacatgttctatgtgatagtcaaagtgccctccattttagtaggaactaagtctttcataagagaacaaattaaacatattgatgtaaggatgcatttgattcgagatataaccttgggagaaaagattaagctactcaaagttcctattgaaagcaatgcagcagacatgctcacaaagtccctgcctactgctaagtgctaagtttaaaaaatgtctccaaattctcaatgttcactacaagaaaatcatcttttgccggcgcattgttgcgccggcaaaagtaccctaactgcgccggcaaagctttgccggcgcagttgtgcgccggcaaagattatctgggaagcttggtcggtaaaggactttttaccggcgcgtatagtaactgcgccggtaaaacttccttttaccggcgagaaataacgccggtgaaaaataagcgccggtgttaaaaaatggccttatccgccatgaacctgctatgataagcttttgccggcgcaatagtgcgccggcaaaact

SEQ ID NO: 368170 - DNA, 613 bp, Cannabis indica
aaaaaaaatattcaaatcaaatacaatctaaaaactattaatacatctaaaataaaataaaaaatacacatattaataaaaatatacatttcacaaaagaaattttgtgtacaccttcttcaagctgctaaatatctagctatccttttgcccaatctgaaaataacaaaaataaaagattttcaattacagaaaaaaaataaaaatatagaaaatatataaataaataaatttaaatataactatatacacaaaaattaatatatatatatatataaacagaacaaaaatatatatacattatatatatgtatataaacagaacaaaaatgtatatacattatatatataaataaatttagtaaaccctaaaagtaatatatatctctaaaatctttaataactttaaaatagatctgaaatttttaaaaaaaaaaacaatagaacaataaaatataggggtttttttcaatttttactacttctaaattttagttttttttttttttttttatttttttttttttgcatttttatggaaaattgcaacaaaaaatcgtataaaaacccctattgcaactagcattgcaaccactttagaaactcaaaccgt

SEQ ID NO: 368171 - DNA, 1005 bp, Cannabis indica
aataatttaatacttttttgtaagtgttcaaaataatttttatttataatttttcatataattttataaaaaaaaattaacaatactaaataattataaagagtaaaatacacatatatatattgacccagcccaacacaatatctctttagcacgaataatttaaacaacaataaaagctctttaacacataataatatatcttaaaaatattggttaaaatcacttaaaaaaacaaatattgattaaaattttaaattctaaaagtttgcatattgtcaacaagccaaaataattcgacactgaattttgacaggatagtatgatcgacctctaaggattgcccatcgtccctttaatagtccgaatgctctctctactacgttccgagcagaagaatgtttcgtattgaaaaattcagcaggagtagtaggtgggacatccaaatcgtttaaatgatatcactgtcctctatacggtactaagttgccttcaccattaggtatccagcatcacataaggaataatatcctgtaaattgattgacgaaattgtaaacctattatgaaattaacttgtatctgtatgatattacacatggaagaaaaaaatatacctcgtggaactttcaatccatttgaactcaaagtgaaatataaatggctacttagtgtatgatagagtatttaaaatgttaagaaaaagaataataataataaatattgaaagttaatattttaaatatatatgcactacttaatagttacatcaaatatgtaactgttgactcagaatttggtcaactaacatagccttatttattactcacaatcaccacgtataaataagaatgataaataatataaatgacaattttatttgatgattagttataattattaaataaatagttttgacatttatagaattgaattagaaaacatggtattattgaaagaagaataagtagttgaaataaagtggcaaaattgtaattagaaagtg

SEQ ID NO: 368172 - DNA, 629 bp, Cannabis indica
ggtgaagcttttttgtgttgcattaaaaatgtttcggacatattctctcctataaatataaaatgattaataatactatagtttacttcaatatcattgtaactttcctttttattaatattatttgtttttaatgaatagttcaacaaccatacatatatattgtactacaaacaaaaaaaaaaccctgaaacatcacacatgtggttggaaaagttttttgactttatttattattttattaattgtcgacttagatatgacccactaacgtctgtaatttttttttctttttcatgaacaaacttgtatatggtaaaatatttatacataaaaagaaaagatacatatattatagttttatgttataatacgacctgtggatattttaggaaattcggtctatattaatatgaatatgaatgggaaaattttatttacaccccaaaaatttattagtacaccctattttaataatttttattttatataaaatttatatctttaattctactaagtatttttaacttttttctcccaatttatattctttaaaaatatacctatcaaataaaattaaattatattttaaaaattatgacaaaaaaattaatataaaaaattatatg

SEQ ID NO: 368173 - DNA, 834 bp, Cannabis indica
aagaggcaacctgggaactcgagatggatatgcagcagaaatatcaagagttgttcaggtaaatttcaggacaaaatttctataaggaggggataattgtaatatcctgagattaagaaaatagattagctaaccctaactagttaaatgtgtatttatatgtgaattaaattgagaaatgacatgttaagaccctgttggtgagccaaggtcatttttttaattttgactcgagaagggtaaaattgtaattttaatgttgtgatgtgcttatggactatattattatatagtatacttattgtgtccttttttcaggtgtattctgacaagtcagcgcggtatagtcacaatcgggtattatataatatacttgttgtgtcctttttgccacttaggacagcttgtgaaatgagcttgtaatattttgtgaaaatatatatgggatcctgaaacgtgtattttttgtttgtttgtaaagttaaaagttattacaagtttaggtttcatactgttgtaaacaaagtttaaattttcctgggcttacctttctagtgttcccagttcagggtatgagggtttcataatcagttgtcgtgatgtgcctaagagttagggcgttacactatgagttgggaatttgacgtgatctcaagagctttgatattcatctctttggcgaggtcgagcccagcaaggagcacttcgtacttaatttcattattcgttcctttgaaatcacacttgattgctcattgaatgacatctccttgggggtgaggtgagaacaatgcctaagccacatcctctgttgttgcttgagccatctactga

SEQ ID NO: 368174 - DNA, 540 bp, Cannabis indica
ctactttaattacgccttctaatctaaatcttgctgtaaaatacggtgcactttaaaaaagctttgcattattgacagaaaaaaagattaactgcttcatattttattgacataaaaggaatattcacgtggtttattctgtcagtatattttttatcctttgaatccaaatgctgttttaaagtagccactcatcacttcaaacaaaaaccaaaacaaaatgtaccctacagctacaaagtagtaaaaaatataggaaattagaataattaattacatgtcaaacttaatttattattataatagcatactactagtggtttaagatcttattataagtgtatcaatttatatgcatttttggataactaatctatatacattttgttttactataaatcttattttgatctatataatttaggcaaattaatattttcgccacttaattttaacatataccaaatcatgtctttcgtatttttcaagttgttaaatattttttcgaactatattgagattgttgaattcaaggagttc

SEQ ID NO: 368175 - DNA, 686 bp, Cannabis indica
taggaggcaaaagaccaatttttcaatgacggggtatcgcgtctccgcccctatcatgcgcttgctgacgtagtacacgggatgctgagttttctcctcttctcggactaaggctgcgctgaccgcgttctcggagacggccaagtacagaaataagtcctctccgagaacgggctttgacaggatgggaggctttgccatgtgctcctttagttttttgaatgcctcctcgcattcgtcagaccattcaaacttctggcacttcttcaagatcttgaagaagggaatgcacttatctatagaccgggagataaaacagctcaaagcagcaaccttcccagttaggctctggacgtctttgtgtttcatcggggatgcaatgttcaggagggcctgaattttttttggattcgcctcaatccctctctgactgacaatgaaggccaaaaacttcccttacttaaccccaaaagtgcatttctttgggttgagcttcattccatatctccggaccacttcaaaacattcctctaagtcgtgtgcgtggctattgcatgcctttgacttgaccagcatatcgtccacgtacacctccatgtttcaccctaggaggcctttgaacatccggttaaccattctttgataagttgcgccagcatttttcagtccgaaaggcatgactaggt

SEQ ID NO: 368176 - DNA, 695 bp, Cannabis indica
tcctctgatgctactccttcctctggcaatcctaattttgtttggaatgggaaggagttacctgtcacagttctctcagagttttacaggatcctccataaaattgctatgtccaaatggtgggcaaattcacatatctccacgatcaactacaacacagctcgatttctgtatgccttaggcactggtgtgagcattgatcttccaactctcatgtatgatcgtattatgagttctgcctctgccaagagtatcaagcataccctgccttatcccagcttgatcaacagagtggttaaacgaggctctccagttgtttatgagcaagacaaatgctgccagtcccatccattggtaagtcgtttaatcctgtgcatagcaaaccacttccactgtcagtcatggatgtatctgctgttggggcttctctaatggaagacttaccttctgctccaactgctccttcaacttctcgagatggggctgcttccacttcctggcaatctcagttgatcacctcagttactgatctggccacctcctatgctcgtgatcaactcaggcaacgtcgctttgaaaaatcagtcattgatgttctcactgctatggcaaatgtcctaaaggaatctgaagcttctccagctgttcattctcaggggattgtgtctagctcctctgctgatgggtctgaccag

SEQ ID NO: 368177 - DNA, 739 bp, Cannabis indica
ctccataatcaacccagcttcttatttcatcatgtacattataaaagacgccacgtaaaacataccacgttagagaaagtggggataacatctctctacaagctctttaaatcttcctccaagaagaattagaatagctcattataatgttggacaaaatcctcaagattatatcatctggatttaccttgcaggtcaagctcatcaataaacattagtaaaaaaactaaattagtactaaaaataaaatttgaaacaacaaagttagtactaaaactgagaagaaaaatcaaattagaaaaaatttaatttttaataatattaactgacaatctcaggcaacggtgccaaaaatttgttgtggtatttttgcacacctaagtgtacatatcgtaacaagtagtaaactcaccaagagtgaggttgatcccacaaggattgtagttaagtactttaaaattaaatctttacttctatttggctacataaaaattaagaggagattagaactagaaaacaataaaaacagtgaaaggagaagcaattaaactaataaaggaaattaacagtgaataaaagttagtgctttcgatgtcaattgtatctattgattatggactaatgtgattatcttcctattaccaatttttatgcaatatcacctttactaaggtaatttatagttttctcatatatatatatatataaacctaaattacatgcaaactttctactctcg

SEQ ID NO: 368178 - DNA, 1385 bp, Cannabis indica
ctatttcaatgtaatcttttctattcaattatcaataaagaaaaagatttaatttgattacttgtttaatgtgttatttcgttcatgtgagcatttatttatttatttgatttataaattcatccaaatccttataacactaatactcttgtttattgtgttttcaacacagtgaaaagtaatcaagattgtgtgattaaatattttctatgatttatcagtacacagggtttaacaaatatgacaatctacaacgtagtttacttgcaccttggataactgttatgtcctttctagggcattggttaaagtaagcttgggttagatgtatggagtatacatcgaaagggaccgatattgaacatggactaaatatgataaacttaccgtaatacctattcaattcaatatcatctagttgatcttagatcaaatgatctcaatcctaagatggttaggttctagttgttatctctcaaaaaatccaaattaattgtgtatgaatttttatcctagatatagaggtccaacaaggtggagcacattggcaaaagaggagctcattagctaaagaggagctcattggccaaagaggagcattgtggccaaagaggagcattttgcccgcactaaactcctgactccgtcaggtgctaaggtgcaaagagctcctcagctgccaaattatctcaaggacctgatgggcacgaaccaacccaattggctcccctcatgtacccatgaccatttgggtccgctaaatacgagagacacgtgcttttagagttgttccgaaaatatagtcaaaaatgataagtgaagagatatttatttttgatataattattttactgttattatttgtatcttgaacctaacccgactataattacgggaaggtatgcctatgtttaagggattttaaatcctatatgaatatctatataaggggggtgaaatcacttatagaaaggaccctgaacttgagactcacgagatcatactcttgagcccccactctcaaattctaaaaactcacttgaggagtgaactcttgtagaacataactctagagaactctcctcaagcattgagatcaataacactccaagtggactagcatattaccgctgaaagggggtgaaccactataaaattcttgtgttcatctttagtgaatttactttggcaaaccagtttattttgattcactattgcttgtgttcatctttcttattttacgatcttcttagatccgttgacgaaaaaccgcgccaacagtttggtgctttcattgagagcagtgaacacaagtgttaatcaccttttaccatcatggtgagtacaagacggaaaaactatgaggaggaggaccatgatgaccc

SEQ ID NO: 368179 - DNA, 561 bp, Cannabis indica
aatttcttatatttttatggatgaacaatcaataaatttttaagaaatttatagtaatgttcttgttattcaacgtcattcttcaaagtgaatgtaatactactttttgttttgttttatgtttattaccattttatttaagttattataatactttttcaattgtgttatattggtgtattatggaaagtgatatatatacttgagtatttaattattaagtatttattaattaagaataaggaattatgacatgtaattattgttgaccgaggttttcggaaaccaataaaataataagagtttagagagctgtaagaaattaagagagagattttttacgtggttggggcgttaatgagccttagtccacgagtctgtatatttatgagaatatttaatgtagagaatgttcttggtgagtatttactcttcttgcacttatgcaacccagaattctcgacccccattaatgagctttgagggggtatttataatgtttttgtggggtgatccccagaattatagtacatgtatttctgccactatcaataaagatgc

SEQ ID NO: 368180 - DNA, 778 bp, Cannabis indica
tctctctctctctctcctctctcttctctttttttttttcgtttacttagtcatgcttgttattcctttccctttgtaaagtattagtcttaaaggtctaaacaaattaatgcaagaattgactaggtttgaaatcccgatttttctgtagtagtgctgcaagggtttggggcttcattagaaatgatttatctgtttccaggtgctatcattttttctttttgttatgttttgctcttaaattgggtggaagcatgatataaggttgtgtttgcttggaggtaatgcaatggaaaggaatcaagtttcattccatttgtttgattacattttaaatattggaatgtcattccatttctaatgaaataacttttccaccattttggtggaattactattccattttgaaatggaagaaagaagactatttcaatgcaatgttaataatatttttttttatgcatttttaaattttattccatttctattcctattcatattcttattaatatgtttcattcctcccaactaagcgcaaactaaggtggcatttgggttggaaggaatgaaaacatacgaatagtaattggaatgagaatagaaatggaataaaatttaaagtgtataaaaaaattgataaaaaattattaaattttttttcatcattcgttggaatggtctttccttctatttcaaaatggaatagttattccaccaaaatggtggaaatgccattccaatactttaatatgcaaccaaacaaaagaatagaataaaa

SEQ ID NO: 368181 - DNA, 546 bp, Cannabis indica
tttttagacaaatatttcaatttttataataaatctgaatgtgttggaaatagtattttgtttgatggtctttacagccttaatttataattccactaataatgtcatgcatgttcatgctagcactaaaagatatgttatgaaagaggattcctgtacattgtggcactagagactggaacatgtcttcattgatagaatgaaaaggttggtaaaagatggggtactcaataccttagattttactgactttgatacttgtgtggattgcattaagtgaaagcaaacctccaagtctgtcaaaactggtgtccataggagttctgaaatattagaaatcatacatactgatgattacttcatctcattaatagatgattactcacgctacatgtatatctacttacttcataataaaattgaagcattagatgtctttaagatatttaaagctgagtagaaaaacaatgcaacatgcaaattaagatagtgagatcagatagaagaggtgagtattattgtagatacacagaagatggacaagca

SEQ ID NO: 368182 - DNA, 584 bp, Cannabis indica
tgggcggtggagttgggccaataagaaattactttccaaccccgaacagcaatcaaaggctaagccttagcagactttatggtagaatgcacatgcaagaaagaaagcataccagaaaggaaccccgagccggtacaaacacctcagcaaagtaacaatgaagataagccgacctggaaactacatgtagatgggtcagctacaaatcaactatctggtgcaggaatttcccttgtcacgcctggggggcaaaacctgcatgctgcagtcaagtttggattcaaagcatctaataatatggccgagtatgaagccctaattgccggattaaaactagccctggagatgaaagctgaacaaattgaaatctgaaaagatgataccatatctaagcaaaatgcatgatcttctcgcacaattcaaaagctatggtctcagacaaattccaagggaagaaaacacaactgcagacgcgttagctcgattggcatgcaacaatgtatgtgacaaggcgaacttggttcctattcagtttctggaagagcctagcatcactggcacggaagagatcgaaataattgata

SEQ ID NO: 368183 - DNA, 573 bp, Cannabis indica
ttttttacaactaaaatattttctcttaatttttatttgttcaaaagttaaaattttatttttaaatagcgattgtcaatgtcatgtatttatacaaattgattttttttattttagcatttttgttattatttttttttgtaagtttagtttaaattatttaaatggtcaaatcggagataaaaatatgaatttttcattctttaccttaataaaggaaaataaaaaaaatgattttatattttttagttctatttttaaaattttatgacagtttcatatcaatgtatcaatatcaatatcactatctatacatatatataaatggaacacttcttaatgggtattacccatgaatggttactaaacaaatttaactataaatattaattttaaaaatattaaaccatcgaattttgatctaataacgaaaaaagaaaacaaaaaattggaatttctatgcttaatttaactacttaattaaaaaaaataattaaaaaataatctctttttactactatattaaaaataatgttcatacaaaaaaaatttaactcaaactcaactttttct

SEQ ID NO: 368184 - DNA, 506 bp, Cannabis indica
ctctctctctctctcttttgttccacccttggagcagctagggttcattttgtctttaattattcaaggaaattcaacagggttttaagtgattttaatcaaggtaaaggttcttagctcttctctttatgttttcttgaattgtaagaaaagaaattttgcatgaaatgatgttttggctactgtagttgttgttggtgttgattattgttttctgcagtttagatatgttagattatgttgttttaagcatgaattggtagttgtttgaaggtttagccaagttttgagttttagaactcaggtttgaagctttaatggcaaaaattgattctgagctttgattgttgttttgtgaaaccggttacccagatattgcagcatgggggtgaaaatcagtttttcagcttgtcgtttcgtgtcagtttcaggtttctagttagttgattccctgctaggttgggatattattatattaagttctagtagatagggttttggtttta

SEQ ID NO: 368185 - DNA, 574 bp, Cannabis indica
gggcggacccacatataatcgagaaggatagtggcctctcctgaaaaaaaaaatgggaaaaaaatatatatacaatttagttagttacaacatatatttgtaataaaagataatatttataaacatgatattaactttggtgtaatggttaagctacttagcgtataagttagagaacaatgatcctaatcccattatttatataaaaaaaaaatgatcctaatcccattaaatgtttttttttcttttttaaatttacttttttgcctcccctcacttacaaaaaaaaaattacgcccccctcactttaaatcctaggtccgctactgaatttaggattgtacatcggtcggtatgggtggtttatcttatatattttctaacccaatttaaaatttggtttgcttaaatttaagtgcaacctgcctaattaaaaaatatatatatatgtaaaccgaccaacggtttgggcggattggtcggttaatccgcccgaaccggccaaactttttttttttggttttcaaagtcaaaatcaataaaaattaaaaagataaattaaaaatatcacatt

SEQ ID NO: 368186 - DNA, 910 bp, Cannabis indica
ccaactagggttttagttttcgcgactatcttagtgcaaatgagttaaactttgcattgggacatcaactagacataccacggacatatttgaggcatcataatcagattcgaagtaagttcattttttagcactcagtgcctgagcacccagcacccaggttgacaattgatcaatctggacgcattccgagtaacagattgacgacctgacttttgtatcttcttcatctttatgaaaaatagggaaataggtactttcgaggaaggaacaatacttcttgggtgtcaaaagcaaggcccagcgcccaggttgacacttggggctggcccagtgcctaagttgacattttgtcaacctgggctgattccgataatgttttctaagaactctttcagacatcttttctgtttttaaaaaagatttaagttttaactattttcgaggaccatccaaaactttctaagggtcataactgcgacccagcgcccaagttgacacctgaaactgggcctagcgcccaggttgacattatcaacttgggctatttccaatcaagttctcaaaaaagtgttctaagcattttttttgtcatcataaataatgaagatttaagtaaattcgggtagaaaaccataaactcgagcccttggaaatagggctcagtgcccaggttgattgattgctcaaatgccaaatctatttcgaccaatgaattcggaatggtcaaaaataggataggagaccttgtcctcgagttcaagaaccttggtatcaaaatgagatcacgtgagctcgggaatgagtacccagtgcccaggttgacaaataacctggtgtgctgggttgtgcttatccgattttgattctatttcgattgtctctctaatttttcacaataactaagatc

SEQ ID NO: 368187 - DNA, 511 bp, Cannabis indica
gaatacgatatctcataatcttcagtacatgttttttatcaaaccctaaacgttttattttttttctctccaaaccaattagtcaaagcctcattcttcttcatggttgctcctctcaaaccttccacacttcttcttatttttctaccttcattcttaaagttttagatttataatcaaggcttgcgggcttgagacatcaaatagaaagttgtgaagaggtatgaaatattttcttgctcaataatgctaaatgttatctaaggttcggacctattatatttttcgttttcagaaaaaaaacaagtttcagtaaagtgatgatatctctcttgatattgatccgtttttagagatttttgtatcgttggaaagcttattcgatgatctaaaatttttatcaagaaactattcaccaattcggtgttcttctaagtcgaaaattatcatctttctgctattgttgtaattcgttttctttatatttccagaaaaagtactttcacttaaa

SEQ ID NO: 368188 - DNA, 640 bp, Cannabis indica
gagaaagagctcattcaactcaaccgtgagggtaagttgaagggagacgactgggccaagcaatatgctcaagaatattcagagcaggagtagtatgctcaagaatattcaaagcaggagaagccaagcaagaagaagaagaaagccccccgaccgaccaagcaccagttgaatatgctatcacgattagggaacctgatatgcctactcggccatctacccctatagagggaaaaggaaaagctgtcttggtggagcaggaagactcttcagacgatgatgtcccatctgtacttgtttgggaaaatgcccctacccacgtgtaggctattttgacttgcacttacttctataatattgtgctttcacatatattatatctgcttctaacagtattgttttatccgtgcaaaaatgtctcagaagatactccaagccctaaagaagagagtaggtgatagctcgggcctgtcttctccagccaagaagtctaaaggcggtgagactccatccaaggagaaggcactagttgatgaggtcattgacatttctgtggagtgacctattatggaccttccagttcagaaggtcccgaaatcaaagagttatagagggggagctcgtgttgggttttgtgccc

SEQ ID NO: 368189 - DNA, 529 bp, Cannabis indica
aaaggatgcttcaagagcaatcggagacaaagttacactttaccgacgacaaaaccgacgagaacgccggcgatcacgttctgagcgtttcggaggatcttgttctcaacaaggaaattcgttgaggtgctcgaggtagcaagtgtggtcttagcaactgaggtaagaagagtggacatctgtacacagggtgtatgttatgcatacaacttgggttggtttgctatttaatttgattgtgttgtgatttccttatattttgtgagcatcgttagcatgagaataatattagggtcttgctgcttgtgtgagcataacacttgcaggttataacattatcatgggtgagtacaacttatggtaattaattgccctgttggatgccaagtgtgagaataacacaaggcagggtaggttacctcatgtctgatcaacatgagagaatagttgattatcgtatgtgagtataatgtgcggtatgagacttgatgtgtgcatgtgagaacaacatgcgttgtggatatattta

SEQ ID NO: 368190 - DNA, 692 bp, Cannabis indica
tatttatttagtttatttttttttttaactcaaactataaatatatcaaatgcaactctatttttagttaattttcattcaactctttaaattgaatttaaatattatttacttttacctaatatgactaataaaatatttttattataataaaatattgtctcttatttattttttattcataaatgcataagtttgaagatctatcctttaataaataatttttatttatttgatttgtatcaacattatattcaatctatcgtatgatttaatttatattaatatgaatatattagatttgatatgattaaaattatgtttaaagtatactttttaattagttttttttttaatatactttttaattagttgatttttttaaataaattacaaaatttatatttattaaataagaatagtataaaattattaatgaaaactagaaggtggtaaatttttattagtctagcacttattattaaattaaaatttatgtaaatgaattcttttactttatatcaataaaaaatcatataaataaatatctttataaactactttaaatatttaataaaaatacaaaattaacatttaatcatatatatatacacgtataatcaactcttatatatatatatatatatatagacatatatatactagttatacaacacgtgtgtatcatatta

SEQ ID NO: 368191 - DNA, 775 bp, Cannabis indica
attaaagaacaagaatgttacaaagaaaagtcagaactcaagaagtttgaaattttctcgagttagggcaaaaaaaattcattgaagcttagaataagcaagatggaagaccggaacaatgcaattcagaaagaaagcattatgaactgtaaatcgcatgaaatcgtggcaaagaagaatcacagagtttctaaacctagggtttcctacgaatgttctacagcaaagccaaaggtgcatctgaaatgtaaacatgcaaaaataagcataaagggaatcgaaaacttactcaagagtcagatattttggttcaagcaacgtgaatccaacgagtagctccgatgaaggcacttcagcagacttgaagcaaaaaacctctcttttcgctctgagctcatgaagggtagtgaaaatgagtttatgtgccaatgctctttggtatttataggcaagtcaagaaaaaggggtactcattttaaagaaacctcaaacgcctcggttcccccctaaaagcgaatatgggaaatcaaaaataatcaagtgcagccgtcaaccgtggtgagagaaaaccatatttcgaaatgttaattgtaagagcattaattagccgaaaactaaagggacgcccagtcagcctcacgtcgagactcggacagacgggcccaacacgtgtccccatccaaaggccatagcatctcggataaagtctacatgcaacttcggaagtcccgtatagacttagggggaaatggtatcccaatttttgcactttgac

SEQ ID NO: 368192 - DNA, 858 bp, Cannabis indica
tgtgccctgtttgcaatcatgctgctgaatctgcttcgcatatattacttagctgtccctttgcaataagttgctggcaaaaggctgatattgttacccatgctaactttgttggaaccattggacactttcttcatgatgtgttcaatggctttgatgaagacatctcttgccgtgttgtgatgctatgttggtcgatttggaaggcaagaaattctttagtttgggacaaaaaagcttcttcaccttctcatgttgtttcttcagcgtggactactcttgatcactggttaaaagctcaagataaaacaagtttgttatcctcttctttgataggagatggaaacaactttgagcattggactaaacctgcttataatacgatcaagatcaacgttgacggggccatctttgagaaagacaatgcctatgggtttggtattgtagcttgtgattcagaaggcaaggtcattgacttcgtggccaagtactatcatggctcgttctcggctgaggttgttgaggccttgggggtcaaggaagcactcagttggctcaaagataaaggttggaatatggtagaggtggaaactgatagtctactcactgtccaagcaatctctagtaatcaacaaatgtcttctgtctttggtctgattactcatgattgtaaaattctcttatcctctctacctaatgttagtgttcgttttgttagacgatcagcaaacaaagttgcccacttcatagctaggcgctcttatttctattctgatcgtagcattcatgatgttgatgttctggcagactttcatgccaatttgtaatttgaatgctttatttcaatgaagttgatat

SEQ ID NO: 368193 - DNA, 611 bp, Cannabis indica
tcatatcactaaaagtatatatgaaaaatatatagttaaggagtcttattattcttaattattgttattttgttttttttttaaaagagaagccttattattttaataaaatatgataagaaatttgaattcaatttataaaaaaattataactaattgggtaaggtgaagttcatcaatcacccaaataaattatactaactttgtcacaaactaaaatcgaagaatattgaaatatttaatgtaaaagtgtatcacccacaataatctctaaatcatgtggaacttttgtgaagtgactgtcatatgactaaaagcatacaaaatgtggaaaaatgaaaaaataaagatatttttaacaaaaatcaataatataaaataaaaattttaaaaatatatattatttttactcgttaaaaaactttaaggttttttcttaaaaaaaaattaaatatttgacaaaaattaaatagtgcaaaaatatgtgaaaataaataatattaactttggaacaaatataatatatttaacctataaatttaacatatagttttaattatttaaatacattaaaataaagaattataaaaatatactttttatacgaaaaa

SEQ ID NO: 368194 - DNA, 468 bp, Cannabis indica
ttacgccccccctcactttaaattctgggtccgccactgggtgtaaatattcaatttttgttgttatatatacatataaaataataggcagtcgaacagcaaactatttcaacaatattgtaattttttcaaaatttcttaaaaaatttagaaatggtctacttgagcacaacgaacacctatatatatatatacaaaaaaataatattatattttaagtatttcaattagatcgtaccccactataaaagtattttttttgtatatcaaattagattaatgactccatatgcatttaataaaatattaattatactatgatagacttagagtatggtgtagaatgtatttacataatgcacttttttttttgtaaaaaagttatatttttacgtttaaataattttttttatatttttacagtattctatagaaataacacgaaaacaataagaaaactaaataaaa

SEQ ID NO: 368195 - DNA, 242 bp, Cannabis indica
ttaaaactaattaactgagtctacaagcagtattatctcaactagtgtggggactatgagcttatataatcaagcttccaataagtagttttaactaaaccctctaacttactaatttctcctgagtccactataaattcataacaggcccggccctgggcataggcgggctaggcctgtgcctagggcccacccatcccaggggcccaaattttttttttctcttttaaaattatacaatt

SEQ ID NO: 368196 - DNA, 482 bp, Cannabis indica
actatggaaggttatctatgaaactaaaacccaagtgataatgaaagattcatctttaggggcgaaagtgaaacatatacagatgaggctagctataaggatattcaactatgattaaagactagttattttggatttggaaaaaacttatacagtatcatcacctagatgagttttagttttgaattccattttgaataattatgtcattctcattcatttagaatttgaaaaattagtctttttccaatatttaatattggttctactagttttttaatttataaatttattgaaatttgcctcatataaagaaaccttataatttctcttctggtacaaaacataaattgaattatgagaattctattatactttggtataagtattaagattatatctcccaaacggaaaatagaaagacttatttttaatagtattctagaccccttgatttaataaattttagatttggtaaaggg

SEQ ID NO: 368197 - DNA, 545 bp, Cannabis indica
cattagtaagctctctttgatcatgacctgatgtgccaactcttggtttcgcaggcggttcagactagatggacgccaagtggaacaccaggagccaaggcatctcagtagggtcaaatcatggtcagggagcacagtttaccccgcatggcaggggccctagtagaggtcccaggggcagggcccgtggtcggggtgacgataacccgccacaggctgcccaggctgcccaagccgatcaggaagcccagacttgggagactaggtttgctaaaatgcaggccaagatagaggagcaagatcttgagatacagagattgaggcagtagggggctcctgcagtgcctgtgccagaagttccagtggcacccgcccctgttgcccaggccgagatagtggtagcggcaaacagattggaacccttgtatgaaaggttccgaaaataagcacctccaattttctgggaggtccagatgtcatgaaagccgagcaatggctaacggtgatatccaagatactaaattttatgggtgtcaccggaaatg

SEQ ID NO: 368198 - DNA, 419 bp, Cannabis indica
ataacattatatatatgatatatataataacaaacaatttaagaatagaagtgaatttcgtgttatattgtttataatatagattcaatgtgtgtaataatataataatatgtaacatatgataatatatattagttatgagtttgaatttcaaatggggaaatttgaaattctatgcttaaaataccatttaattttttccctatatgcatagttattaaaattggtcctatatgacaacttttctaattttactaaactacccctcacatttcaaacaatcatcctctctcttcctcttgctcagccgaaccctcccccacgaaacccatctctcacagccaaaaaattttcaaccgaggctcaacccatccctctcacagccacccagctccgtctctcttcgtctctctcggacc

SEQ ID NO: 368199 - DNA, 501 bp, Cannabis indica
gacgagaagctcttgataattttgtcctttaacgaaattcagtgaacaagtcggcatcaagttgtgttccattatcggatactatcttcatgggaattccaaacctacagacaatgttcttgaggacaaagtcgaggacctttttgcaggttatggaaacaaagggcttgtcctccgtccatttagtgaagaagtcaactattactaccgcatacttagctcctcctcgcccagtgggtaatgccccaattaagtcaattccccatatagaaaatgggtagggcgaggtcatcattcttagttctgttggcggcacgcgaggtatatgtgaaaacctctgacacttatcacatttcttgacaaactcgtgggtgtccttattgattgttggccagtaatatccttgtctaatgatctttttagatagactttgccaacctgcatgatccccacaaaagccttcatgaatttctctgatgatttctgtaacaccctaactaa

SEQ ID NO: 368200 - DNA, 541 bp, Cannabis indica
aaaatgtcccttctgttcacaatcagaacattaaataatatgtatgctaaactattcttgaattgttcttattgctggttcaatctgttgtaaaagataatctgagaaagtggaatcactttctctattcttctctattgagcctgaagtagttggattgtcggaggaatcattctcaatatcttcagctttcttttcacccttatctgcattacttgagaaggacctctatgcaagtgacaatgtccattcataagcacgcaattcagcgtctagcttgtcaatgtcgaacgagttccaattcttaacaacaaattgattaaactcaagcgataagctattgagaacaaaatgattcttttctgtccagataaaataattactagcatagctgctttctggaatttcatgttcatcatgggcaagtgtgaagtgatactttgacaagaagtcatcttcacactttggagttcattcctaaaggcagtatctagatgaggattggggtgtgggttgtacattttgacactcaaatatcaat

SEQ ID NO: 368201 - DNA, 795 bp, Cannabis indica
tcaagggctagagatctgaacataaggagtcattatattccgctgcacccaatgtaaggtttcctaaactttatatgtgtttatttcattgtttcagaaattcatattaggatgttactgaaacatacttgttagtaaatctaggtcctggtaaaataattctagcaattggtatcagagccatggtaatgatttactttcatgaaatatgaattaaaacgatattatgtgttgatttggatggtttcatgttggtttacgtgttacttgatgaatgtaatatgttgtactgtttttttccatgaaaaatatttttatttacttttgaaaatattttatttggattccttgtgaaaaattaagcaattttcttttttactaaactcgattccgataaaaattgagaaagttataaatttttgaaaatttggtgccatggatgtcgagtgggtgcatcgatgtgcaccgggcactcagacaacacgggataacgcacgcgtacactcagacaagctgtgtcttcagacgaagcctgcatccactgagattcctcagcgtcctcctcttcctacgcgcgcgtagactcgttttggagcctatttaggctgcacttgcagcctattggcagcatcacacaaaaatccaattttctagggattttttcccaattttcaaaccctaaatttaaaataaaataatatttttaaataaatttaattttaaatatcatattttaaattaataatgtttatttttcaatagattattattaattttgatattttgaggtttaaa

SEQ ID NO: 368202 - DNA, 759 bp, Cannabis indica
catcatatagaaaggagtgtagtgtgctgaatagaatccaaaaataagaagttagaaagagacatgataaaattgcttgaggtaatagcttatgaaggtatcttaaacactaagagataaacagagcattaacaaataaaagattaccgaaggaaagttgtaaactttaaactcaaggtcatctacttggtggaggagacaatagagtaaaatgtgcatggtttcgacagtgacattttcaaaggagaaagactaagaaggtctaggcacgactaacaatttgggtacaacatgaaggagagacaacaagaggacaactacttggaacaggtcacaattgcacaactaatacattgtgaatacaaatttatggtgggtggtacaacaaacagctatagagaggagatcacaaattcaaaagaggaagaagagaaattaactttcacgagtgacatacttagattctacatacccatcgacacaacaatagaagggtagtgcatagcttgaggagaaaacgttagggaagactccctaatattagagacatgggaaaagtgagacacatataaggccaaagtgacgtatcttaaagaatttcatggcatgacaagggccatacgagtctttgagaagtgttgggattagaaaatgctcatgaaacgtaaatggattcaaggcacatcgtaagcaaacaaaactacaatccactcacaatttgctttatggacaatagtataagtatgttggagtgtcatc

SEQ ID NO: 368203 - DNA, 712 bp, Cannabis indica
acttaataagaataataaatatataggtaaaaaatagaaacatatccttaaaaatttaaaacaattaaatctaaatccaagtatatacacatattctttagaaaatatgtaataaaaaatataaaaaattaatataaatacagatagacaatatctttttaaaatcaaaaataaatataaatgtttacatcatactttaaaaagaataaataaaaataaaaatcaaatctaaatacatatataaagcatataattaaaaaaaatatacataattagaaataaaaactaaatctaaatacataaaccatactcaataatatagaaagtaaatttaaataaatatatgatttcttttcccactttcacaaagtcatatatatttatataaaagagcacatataacaaaacatatatatcatatcaatataattttatctatcattgactagtaaattaagatgagttcttttaacaccatcaccatcataagttttatgtgtattgcattgttgctagtttcgggtaagctttcaatcatttttaatttattggttaattaaatttaatatatatatatataacatattatatgtatatttttttaatctaataaatatgggaacttcaatggtaggagctttatttttctcctatatcaggttttaacaaattatgaataattaacaatgccaaaattaaagtttaaatagtt

SEQ ID NO: 368204 - DNA, 749 bp, Cannabis indica
tcgacctgaagtctacccccaagcaaggcaggtcggggtatttttacttctctcagccaggcttcaagtggttgagcgggacggacaataaggccatcagcaaaatagggcattttgttgatgagtacttcatggtgaaggatccgaacatcacccggactcggttttagcagattccgacatatcaccatcctcccctcacccttacccttagggatagggctcagaagcttgcccggttgccggcggaagatagggatataatccagttgacctctgatgcaaatctggtgcagtacgggctctacccagaggaattttcttctaagttcgtgacggggaagaaggggaaatctgctgctgctcggcctgaacgagctcataaggagaatgagctgattcaacttaagcgggaggctaagttgaaaggaggtgctcgggcagagcagtatgctcaggagtccatgaatcctgaagatgaagctgaggctgaggctgaggctgagcaggtgactcctttgaggaggaagaagaaactctcggccacgcccaggcccaggcccgtagaacacgacattcgcataagggagcccatttcacctgttaggccatcccatccctatgctggaaaagggaaggccgttatggctgaaataaagtcgatgtcaggtgatgatggacttctgactttctggagggacagtcactctgcgctttacttctttttcagcttcttgactttcatactt

SEQ ID NO: 368205 - DNA, 694 bp, Cannabis indica
tagctaaaataataatatacaatccaatcagaatatctctcatgttggagacacgatcatgattagaattaaaaaaacgagtcaaataatcaatagcttgatttttcagatcgtttcacataaaaactaaaaaataaaataagatgaaaaaagactgcaacatcacagttaaccttaaaaatacttatattcagttttatctaccgctcaaaagacataacaatagaaactattgcagtaggttcattcaatctcatagctcgagcactcaactattgtgtgagctaagtaattgtactactaacaacccattgagtcacagagaacttgttattcccaaccactaacagcgatttgatggtgagccatcgaagaacaaagaagaaccaacaataaaacaaaattatgtcacacaataagtttaaaacactcaaaactatgtcacaaagataagactaaaaaacttaaaactatctcacagagactagagtaattgaagtagcaaaagttgaatcacattagcaaaacacaaccctaaccaagttgtacctacgtccaggaaaggttggcaggcctaaccaaaaaaaaaaaaaaagacaaccttctatagctataaatcgagaaattttaattttattttttaaaattaaaaattcttaattaggggtgttcatccgatccaatccgcactttt

SEQ ID NO: 368206 - DNA, 480 bp, Cannabis indica
atttttcttagttaactctgtcagtggcatagatattttagagaatcccttgataaaacatcgataatatccttctaaaccgaggaaacttcgaacttcagtcacatattttggcctcggccaattcctcactgactcgatcttggttggatcaaccataattccattctttccaacaatgtgccctaggaaagtcacctcagacaaccaaaattcacactttttaaattttgcatacaacttgtgatccctaagctgctgtaacaccattcgaagctgatgctcatgatcctcttctgactgagggtacacaaggatgtcatcgataaaaactatgatgcagttatcgaggaaatccttcaataccctattcatgtgatccataaaagccgcaagagcattagtcaatccgaatgacattaccagaaactcgtagtgcccatatctggttcagaacgcggtctttggtatgtcctcctc

SEQ ID NO: 368207 - DNA, 675 bp, Cannabis indica
aaatcaaaatgcatccaccagaccaagaacatacaagtttccgaacagatatgggttctattgctacaaagtcaggccgtttggtctaaaaaacgctgtggctacgtaccaaagattggtaaacaaaatgtttaaagatcagatcgggcaaaatatggaagtatacgtggatgatatgctcgtaaaatccagaaaggcttgggggcacatagacgacctggacgaatgcttcaaattcctcagaaaataaaacatgaaactaaatcccttaaagtgttccttcggagtcagctcaggaaagtttctaggcttcatcgtcaatgcctgaggaattgaagccaatccagaaaagattcaagccctcctggatatgaactcgccaacaaaaaccaaagaagtgcaaagcttaaccagtcggatcgccgcgcttagcagattcgtttcaaaatcaacatcctgcgaggaaacaagcagttcgagtggacagaggagtgtgaaaaagctttccaagggctaaaggacaacttgcaaaacctctggatggcgaggaactgggaatatacttagctattacggaacatgccgtgagtgtcgtgttagtcagagaagagaatgatatacatcacccagtctattatatcagtaaaagactcattgaggccgagggccgatatc

SEQ ID NO: 368208 - DNA, 663 bp, Cannabis indica
tatctttctcttcttctctttattttctgttatccgttttcttcctctatatatatatatattattttataatacgttatcaacacgagtctctgctcaagataaatattatttgttaaagttcttgaattattttatagtcatgatacattaaatatatttttatatatttcactacaacaaaaaatcacaattagtaatattttttttacaaatatatcacaataataatagtttaatgacatttattaaaaaaatgtaactatagtaagaataaatgacattttaactagtgacattttaaaaaaaatgtaagtattaatatattttagtgatattttgtcgaaattgtcattaatttgtgaatatttagatttgttagtaacgttataaaaatgtcactagcataaattaatagtggcatttgtaaaaatgacacaaaatattagatttaattattttaaaagttcatttaattaggtactattattgacatttcacactacaaaaaactgctacttttagtgacaattttttagtcacaacataatttttttgtgactaaatgtgacttttagttacaacaaaatgttacttgtgactaaaatatagtttttagttacaagttgtcactaatttagttttagtcacaacaagtattgt

SEQ ID NO: 368209 - DNA, 578 bp, Cannabis indica
ggggtaccagtggagaaaaaactagtaggtcggcctaggaagagcaatgcaggtagaagaccgatgaagcgttgaccgtctagtggtcaggtggtagtggaacctcgtcattgttcgctatgtcacggtgcagggcacaatagagctacatgcaaagcttgagtttgaaccgtttctctaatatttaaatgaatatgtcttgtattgctggttgttgtttaacaggactatagcttgaatatttaacaatatgcatggatatttttaatgtgtctgcgactttgtgcgacatttatgcgattcttgtgcgattttatctcatatttataactgctgtttttgcgcattttgtatgcgatatgtatgcgacattgtgcgattttctgcactattttaatttttttttatttgcgatttctagcgacttttggcgatttcactggtaacatgcctaatatgctatgctgtctacttttcacgatttctatgcgatgtatgtgcgacattttttttttttaaaaaaagcaagatttcattactccaaacatccatttagcatctcattcgagacctgaaaa

SEQ ID NO: 368210 - DNA, 594 bp, Cannabis indica
agtagaagaggtctcgggcaggtgtgcaccaaggttatgatagcccctcaactagcttctgagatggttagtgcaggaattgagtttgtagttggaaagttgcacaacttgacacttcaatctaatctattagagagaatcagaaaagacacagttagaagatcccgagctagtcaaagttcgagatgagatgatggctggtcggcctaaagactttttaatctcaaataatagaatgttacggtataaagctcgagtttgtgtttctagtgttgttgaacttaaaaaagaaatcctcggtgaagctcataccacaccttattcagtgcatccgagaaccaccaaaatgtatcaggacttaaaaccctacttctggtggtatgggatgagaagagatgtggtagattacgtgtccaagtgcttaacctgccagcaaattaaggttgaacatcaaaggccggcaggtttactgcaaccattagcccttcctgagcgaaagtgggaggacattgcgatggatttgtaactggtttgcctagaaccacaggaatgtatgatttagtatgggtcgtagtggacagattcactaaatca

SEQ ID NO: 368211 - DNA, 603 bp, Cannabis indica
cagccacactacttccctctctacaaatttaatcttttcaaaacacttcttcttcaacctaacggcagcagccacacaacatttagggttagagttttctaacaatattcaatcttttctcttctactctaacagccgcacaccaatagggatttcaagggttatttcaagtttcgtctttttctcttctaatggcagctagggttctaaaggattcttctaatattttcttttttcctcttctattctaaatggcacaacattatgatcaattttcgaaatcgtattgtttaagaaacgattccaactattctgaattatgattatgaaacattatttatattattagttaatgtattttcttgtaactttttgaagagtcacaatttattttatttatgatttatgagttgtgtgaatgaattggtgcttgtgcaaatgacgaaaggttgtattggtctgcataattttttgtaaataaaattggtttacttaatatattgaataggtgtctcttaaagttaatttttttgtggtatattctattaagttttttggtatattctcttaagtgcacaacaaaaactgttagataggcatttt

SEQ ID NO: 368212 - DNA, 650 bp, Cannabis indica
gagactaagagtttatttttacttaatagttagttatgactattctaatgttattacaattgtgtacattactacttctaatataattattttactaacttttgttataaaagaattaattacattaagaataatcaattagaaaaaaaaaaattatagttaaagaaataaaaatagtaaaaaaaaacatttacatatatttttaaataaaaaaaagtaacaattaatatttatataaaattgtaagtttttttttttttttaagaaattatgcaatataaaacttaatacaacctaaatcttttttttttataaaaagttaatatttttttttcagattattatagttatattatttatcaaaataaatacaccaataaaccatccaatatatttatatatgtaattgaatacttttatttatttttttggtggtatttacatgattttttttttcatatagagtattgcatatatatactattagaatagacacataccatgtggtgtactcatccttattttcttattataatttgatatatagtaaaaataagtatacatataaaaatataaccattgaaacatatatggaagaggtttcaatggttacatttttattgtgaccatcatggttacatttttttaag

SEQ ID NO: 368213 - DNA, 570 bp, Cannabis indica
ttaagtgatatttgcaaagaaaaatatatacctaaattatgactttttaagtgacatttttttaagtgcatgcaattcgtgcatcgattgcattgaaccatatgtgggttcaaaaaagtttagcatgctatatatatgaatatataaatgtttattttcctactttggcatatatataattaatatatattttgtatggccgtttttttttttttttgttagcttttaatataaggggcttttttcataaatgtacaacaaaaaataaaataattacaaaaaaaatgtgcaaaaaaaaaattattttaaaaatttatacattttgaaaacttattacataaaaccatacatttttaatatgtttattaaacctcaaaataaacaatttcgtaaaattaattaaacggttttataaaaataaacaagttaaatatttttttattaaaagataaatgtttattatctattttagtatgaattattataatttaataagatttttttaataaaatataatatcaaaattataaacattaatgtatataaatataaatcaatacttaaaattac

SEQ ID NO: 368214 - DNA, 551 bp, Cannabis indica
ttattttgagacaccaagcatgtctcaaaaatacaaaaatttagttttagacaccaagtatatctaaaatttctcatattggagtatgcacccccacattttcatatttcattatcaagagaatatcttgattttaaaatatagaagtttgtcactataactttttcttaaatttaatttccttcttgaaattattttcacaaaatttgacactaaatatatcaatattttcacatatgcacatagccaaacttgatttagaatttgaattcaaaatcaaatgaattaatcaacaatgtctcatcacattttgattaagtttgtggctcacccccacatttctaccataaagtttatataaaatatcacttttatgtatttcctcttgaaatgactttataagatcaccttaaaaattaccatttgatatttttagttttctacaaaactaaaatactaaactcacatcaccacttattaaataatgtgattatttttactcattattttaaagttatctcctcaatgagattaactcaaatattacacta

SEQ ID NO: 368215 - DNA, 558 bp, Cannabis indica
agacaaaattccttaaatttaaaatctcaatagttcagggggaatttttaatggtcaaaaaagttcagagggcataatttggtacatgtaaaagttcgggagaatcctaattagccttatttttaatgattgttccattatgggcattagctattgttacagatgtttagaattcttaggtaatcccttagcttgctaatgcgaacccctctagtgaacatgtctgcatgattatctttagtgtttactttactaacttgaacctcatttctggcaataatgtcttggatgaaatgcatcttgattcaatgtgtttcgacctctcatgaaatatttgattcttcatcaagtgcaaggcactttgattatcacaatacactgtgatgttgtctggcataaagtcaagttcattagttgttgcgaaaattattaattactacgcaagtgcacacaatcaagtagtatactcacgcaagtgaggtcgaaccacagggaattggattaattactactaaactatacttataattctatttggcaaatcaaaagtatttatga

SEQ ID NO: 368216 - DNA, 799 bp, Cannabis indica
caccaagtggtggcagttgtgtattgcctacaggcgaggctgaggacgaggaatgttgcccaatctcaatctccttttgtcttatattatcttgatgagataattgtgttgagagttgggctacttcttcatcccgctcagccaataatctttgtagttcctggatcttctcttcattactgattgccccggttattaacactggcatatttttatcagtgccaatggttagtgcttcaaaatgagtaatgagatcagtagacacccccttactgtgttcgataaagggagtgtcttctaaagagtgttcagatttgtaactattaaaaatattttaccaggatcttagatttactaacaagtatgttgtttaacatcctaaatatgaacttctaaaacgatattaaataaacacttataaagtatgagaaaccttacaatggttgcagcggattaatgtctccttccactcagatctctaacccttgtatcctttctgtcgcagagtatcaccaagatctgagcccgcatgttcttctcttgaatctggattcttcacaatcttccacactatgattgaggtaccacttaatgtgtgtgggcactcactctatcactcaagggttcggtttcagaagtgaagaagagggagagggagtagcgactaggtttaggtagaaggcactcagttttctctgaaggaattgagatgcatcatctttttcctgaagccatcactacctatttatagtcaaccacctagggttaggttagatttatttggcattacaataatgaa

SEQ ID NO: 368217 - DNA, 538 bp, Cannabis indica
cctagttcggttctagttccatttgcaattttgagttcaagtttgggtttgacttcaggtcagagttcgtgtcatgatctgagtttgggtttgggtctagatttcagtctaggtccagattagggtctgagtgttggttcgcgtcctcggtcttggtcttggtagggttcaagtcccaagttccaatctcgatctgagtctggattcagttctgggtcttagtccttggttctgatcctggtctggttcaagtttgggttgggtccgggtctagcttgtggtctgattctaggtgtgggtgcttgatttcgattcctagtctgtgcccgcgtttgtgtccaggtctggaacccgatctgggtctaggtttggctccaggtccaagttcgggtctcgagtgcgggtccaagttttggtctgggtgaggatcttcgtccagatcatggtccagcatttcaatcccagtctggatcttggaccgagtccaggttcgtatccggatccctatctagatccaagtctgtgtttgggatcgggt

SEQ ID NO: 368218 - DNA, 967 bp, Cannabis indica
gctcgggccacaacattgtcgatattgtcaaagcagagatatattagctgatcaagggccccctggtcatcgaaattgtatatgagaggtggctcgttgagggaaacaaactcctcagcataaatttctggtcgaccctcatcctcacgagcgtattgttgtggaacagccacctttccttcttcctcttgttgggcaatgtttttcttttgtttaagggatttgattttggcttttaatttatcaatctccttctattgccgagccacaacatcaaaaacttcttttttcttcctgccaaacaatttagatgccctagtaaggaacctgcaaatcattaaataaaattagctatgatttattttgcataactaaggaaacaacatttctcacgtactagcatatctagcagccctgatatgtccaggatgctctggtatcccgagcgccttcgtcaagatattgttttggccatggacatgaatttttccctgagtaagttgctcctctaattgagcctaatgcacatattcaagcaattagtatatgaattatatatactaactcattagtagtattcaatgaaggattaatatatacttactatctttttggaaattttcttgtcgtagtccgagattggatccaaacacggtggcgtgggggatcttgaacctcaaggtccttttcctacattattttataacaattaaatgagtacaattatattttgaagcacattattagaaatcattgattacttacaacatcttcccttacgttcaccattccactccgacaacttcgatgtctggattggatttttgctgaatgttcccttagcaccatactcaattcctacaatgccaaaaaaatacatcagatactagtacttgtatttaagattttatcttagtacaaatataattagcacgtgaaatttaggagttagtcgactttcaacaaa

SEQ ID NO: 368219 - DNA, 692 bp, Cannabis indica
gtatgattcaagcttctatcacttttggttgaaaaatttctcttttattaatcaattaactaaatttacttttaatttttatttaattaatacatctttttataagtactgtacttaaaatgattaaaaaaagagataaaaatgatacactttaaaaaaagtgaataaaaataaaagagaataatataaaaatagtatagagtctaagagcatatttggtattattttttgttttcaaaaaattgtttttagaaatgagaacaaaaatagtttttgaagtttttaaaacaagtcatgtttggttagtgttttttaaaaacaatattgactaaaagtgaattggtttttaaaacagaaaacaacattttgttgttttcaaaattcttgttttttgtaactttgttttctgaaaactgttttcaaaaacaaggccaaacaagccaaattatttttttcaaaaaacaattttctgtttttaaaaacaaaaaacagttttttagttatgatgccaaacatgcactaatttcccctacttttctcttaaactataaagtatcacttttctcaaaactataaaagtccaatccatcatgttttagtattattatttattaaagtttttcttttattagattactagggaattaagttgcgattcgcgcggtgttgcttaattttttataatttttttt

SEQ ID NO: 368220 - DNA, 515 bp, Cannabis indica
tagaacaccagtaaaacacagtatactgcagtatgaaacttttaaaaagacagtaaaaaaaaataaaaaataccgcctggcagtatttttgtaaaaatggcaaaagttagtataccatgtaaatttcccatttaatatgccatatatatgtaaattagatttttaaagcccatatttaatttttttatttatttagacagtttaatttgttattggtgtcggaaaagttaccgaagtttaatgtcggcgttggaaaaattttcagagtagttgcgggtgtcggaaaagttgtcggagttttctagcaacaatgccaattgtaacgatttttccagcgctggccgcagctccgacgatttttccaacaccggcagctactccgacgataaaaaaaaagacgctaatctaaaaacccataaaatctattaatcaataaaatgaaagaaaaatagagatttccactccaactactgatgtttttattgtaaattctgaagtgatccaaaatcattttg

SEQ ID NO: 368221 - DNA, 537 bp, Cannabis indica
ataatagtatttttaaaaattattattttaatatatattttattaatttaaattataagataatataaaagggttagttttgatattttatcttattagatacttgtcttaattaaaatttatatttttgttaaaataacatgaaatttttgaaaagttgttaattttggttgtaatagatatttagggttttcgaaccataaaattttcaaacttaagctatttaattttatttattttcaaataaaattgataatatgctaaccataaaaatatcatattttcaaattttttattagattaaaagttaattcatgaaattataatatttgaaaaatctcaatttttaaattaagatattatactatattatcttattagatatttaatcaatttaaattatttaaataaaatgaatatttgaaaattagttggatatttgaatttcaaatttaaatttaagatattttagggtctgttagattttaaatatttttcaaatattttttctaaaaacctaaatttaaattgtagtta

SEQ ID NO: 368222 - DNA, 618 bp, Cannabis indica
ttgatcttttgggtaggccttgtgatatacttgaaagagggcttggaaccctaaagcctagcagggagttggttatctctaataggcgcattaggtctatgccagttaggatcgaggataggaagttaagtgctgaccttatagaacataaattaacagagtttcacattatacttgggatggattttttgtccaagtattcggccagtatagactgtaagcaaaaaatggtgacttttcagctagaaagtgaggatccatttgtttatgttggatcagttcagggttctcagatcccggttatttcagtactaagagctagggatctacaacacagtggatgtgtaggatttttagcggtggtgattgactctagcagacctgaaacatttggggctaaagtagtcagagttgttaaagattttctcaacgtgtttctcgaggagttttcgggattaccgccgcaacgagaaattgattttgtgattgatctggatcctggatttgaacctgtttctaaagctccatatagaatggctccagcaaaactcaaggagcttaagctacagctttaggggatgcttgattttgggtttacccgacccactgtatctccct

SEQ ID NO: 368223 - DNA, 660 bp, Cannabis indica
atgcatataaggagcccatttaattcttgtaattaaaattgactaggttgctaaataaaattgtcacacatgatagattctatttcggaccaattagtatttgggcctattcaattaataacacttgttcatttaaggttaaattcctctcttttgagccttgtgtgagagttagggggccatagtagtgggtacgtcatactgaacccagccctccctcacatgaacaatctcaattgtgaaggcccatttgcctcatttgaataatggtactaggttaattaaactagtttaacctaaaacaattgattagcaacataaataattttgaaatagatgaaattaatttttcatttgatattttgtaaatttaagaaaaacacacttagtttaatgaaacttattcaagataaactatatatatttttcttgtatttaattaaataaaaaagctataacttattagactcttctagatacttaattatttaatatttcataaaaatatatttaagttgaaaatcagttttttgtaactaatttttgatcaacttgaatttgaatattttttgaaattaataattaagtttaatttttctagaaaattagttatagagatattctttaaatattgttttaagttgaaaatttattaatttt

SEQ ID NO: 368224 - DNA, 689 bp, Cannabis indica
aacaaaagcaaacgaaaaatagttataattaagaatttttcttttttaaaaaatgtattttcatttttataagtcaaaaaaaataaaaaaataaaaaataaaaaaaatttagcaacactacacttcatattatacttctgtagttatagtatatatgtattatcactataaaaaattttacttttagtcacaacgaaatttgtgactaaaagtaaaaaaaattgttactagttataaattatcattcctacgttatggttagtccgtgtctaaaagtattagtcacaaaaatcaaaatttgttgtaactaaatgtgtttttagttataatacttgttgtgactacagctaaattagtgacaacttgtatctaaataccatgtttagtcacaagaaactttttaattttgttgtgactaaaaattacatttaatcacaaattttttttgttgtgactaagtcactaaaggtagtcattttttgtggtgtatatatgtatatatttattatgtatatgaatgcagtggagatccattattcttggagccattctggataaaaaatgcagctagaagtgcaatattggtatctggttggcatagaatgagttattacttcaaccaaacaggttacatgtctaaacaactcgaaaatcgaattcgaaatttgcatgacattgttggaaatgca

SEQ ID NO: 368225 - DNA, 779 bp, Cannabis indica
aatagcaattaataagctttttgaaggcgaaccaggatcaattcgcctggagtcatggggatatgatagggatcgaccctaagattatctgtcatcacttacatgttgatccaaactacccggcaaagagataaaaaaagaggcccctggattccaagaggcaaggggcactaaaacaggaaattgacaagttgttagtcaacgattttttacgcgaggtgttttatccctcgtggatagccaattatgttctcgtcctcaaacctaacagaacttggagaacttgtattgacttcttcgatctgaataagacgtgccaaaaagactcttttccacttcctaagatcgaccagttagtggatgcaactgctaggcaggagcttatgtcatttatggacgcatattctggatataaccaaataaaaatgcacgtcccagatcaagaacatacaagcttcgtaaccaacatgggactctattgttataaattcatgtcgttcgggctaaagaacgctggcgcaacgtatcagcgactagtaaacaaaatgtttggaagccaaatagggcaaaacatggaggtttacatcgatgatatgttggtgaaatcgataaagagtaaggatcatacctcagacctaggggaatgctttaaaatattaaaaaaaagtataacatgaagctaaacccgaaaaaatgttcctttggagtctcctcgagaaagtttttgggattcatagttaacgcgaggggtattgaggcaaatcctgaaaaaatcaagg

SEQ ID NO: 368226 - DNA, 590 bp, Cannabis indica
tccatattcaaatctacaataggatcgttattgtagaaggttgtatcgaactcctcaaactgatgaaatcttgtcgcttcttggtcggaacctcctcattcacaccaatcccaacatctgtttcgggaatgcaagaccctaccacactctaagggagaggattagtaggcggtgtaggctccgaattcctaactttcctcaccttggtcacgaataatggcataaactctgtatttgatattgttgccctcatctgtaagaacgttctcagttggcgttctttcttaataacctctggcgggaccatttgtcccttcatgtgcaaggaacaaatcttcaactttaaatcatacgccaaaggatcaacctccaactcttcatataaaacttagcgtagttgttgtagggttgtgtcagttgtaactgtcaacatcaagctgccttctgctttgtaaatccaattataattctcacataaccaaacaccatcgtacgatacaacaagaaatactgtcgatcctgcaattttaaacaaaacaaggtcagtacagaaaaaaataccaaaaaataacaaatatcgacatcccatc

SEQ ID NO: 368227 - DNA, 752 bp, Cannabis indica
agagtacacaaggatgtcatcgataaacacaatcacacaaatatcgaggaaaaccttgaataccctattcatcaagtccatgaatgccgcaggagcattggttagtccaaatgacataaccagaaattcataatgtccatacctagtacggaaagccgtctttggaatctcctcctctcagattctcaactgatgatagcccgatcggagatcaatctttgaaaagaccgtcttcccctgaagttgatcaaaaatatcatcgatcctaggtaaaggatatttattctggattgttagcttattcaacttttgatagtcgatgcacattctcagagacccctctttcttcttgacaaacaataccggagctccccagggtgacacactaggccgaataaaccctatgtcaagtaacccctagagatgaatttttaattctttaagttcagctggagcgattctataaggagccctggagactggttctactcccggtgccaaatcaattataaaatcaatttcccgctgaggtggtaaacccggaagttcttcaggaaaaacatcttgaaattatcaaactactttgatgtcatttggccgaacaaagtctggcctagtggtgtctaataccacggccagaaaccctagacatccatcacacaacaattctttagctgataaggtcgaaatcaccgggatctgagatccctaaatcgaaccgacaaaacgaaacagttcttcaccttctggtt

SEQ ID NO: 368228 - DNA, 538 bp, Cannabis indica
ttcagattcttaaaaacaaaaaaaaacaagatctgattctaattaaggaaccacatgttacgaataaggctgtttttaattttgtgcgttgccttacacttgtaatatcattttaaaatggtttgcaaattatgaaggagtgtcatttgacgagtacaaaaaactagcagatatacaaggtacgatttatgtaaatggtggcaaattagttttatattagttggaaattgatctcattcaaataaacatgatgaaaaggaacaatgacagcaactatattaatttgagtaaagagtagtggttttttagttgatttacagttgcataatcattttataatagtttaatttcattttttgcaagaattcattttgggaaaatggaaaaggagaaaacactttgagaaatggttagtttctcaaatattttttaacgtttcttaatagtttaattttagtttcctaatagtttattaacatcaaaaaaataaaaaaaataggcaaaagcaggaatcaggacagaaaatacaatgcttgaa

SEQ ID NO: 368229 - DNA, 632 bp, Cannabis indica
aattaaattggctagtagagcatatgaatgtgtgtttactggatatgctattaatagtaaaacatatatagattttaggatttaaatacacatgttattttggaatctaatgatactgatttttacggacatagatttccatttaacatagtgggggtgcatcatctagtaacatgtcccgttattagggataacgagcatgaagatagtatagaaactcaacctagaaaaagtaagagagctagagtcgctaaaaaatttagctctcatttttgtacatatactctagaggaggatccttctaaccttcaagaagctttgacttcactagatgttgatttgtggaatgaagctattacactatgtttgatgggagggagaagtgggtggatggagaggagaggagggagagagataggaggagacaacaaatccaattgtttggcaagagggattgggggagggaagggatagttggatggagagcaaatccttccaaatccctaatttaaaatcattctataaatggaaggattcacactcttcctctttaattatttaaaattacaaatataccctcataatatattattaaaaaattacatctatggacaatataataatttcataaa

SEQ ID NO: 368230 - DNA, 809 bp, Cannabis indica
atgtatactccatacatccaacccaagcttacttaaccaatgccctggaagtaactacgttgtagatcatccatcagttaaaccctttgtactgataaatcataagagtacatttaatcacacaatcttaattactttccactgtgttgacaacacaataaacaaatattaatgtgataaggatttggatgaatttataaatcaaataaataaataaatgatcacatgaaccaaataacacattaaataagtaatgaaaataaaactatttctttattgataattgaaccgaaaaaattacattaaaatagagttttatttagggcacaaagcccaacaagaatcatattctctgagaaattttaacaagaaaactaataacataataaacatgagttcatgattagttagaattcaggtcgatctactattgatcatctttatgatatgaattagatttttatagtagacaatatgtttgataaaaacaacttaattatatatcggttcttgtcatatataatctctattatatacaataccttcacttagatgtcatactacattaacaattcgaattgagattacttgcaccgaataacgaacatcaatgaacggtactagcaactgttgattaaagattctataactttaatatgacgttgactgtttcattcatgattaattgattttaattcttcgtacaatacaagtcacagtctcgtgtatgaataaggaatttttcaatattaaatattaattaacatgcattcaagcatatatgaaaatgttcaacttatatttataaa

SEQ ID NO: 368231 - DNA, 826 bp, Cannabis indica
tgctcgcctaccgctgggcccactgagcacaggcctgttgagcatgcaattcgaatcaaggagcccaatctacctactcggccatccactcctgtactaggaatggggaaagctgtcctggtggagataagagacttgtcaggtgatgatgaaccttcaaatcttgcacaggcaaatgcttcgcgaaatactccgtcttgtttttaatcttctcgattattatgctttcatacttttagtacttttctcttaaccatgttgcttttatgtcgtccagacatgtctcagaagatgcttgaagctctgaagaaatgagttgggggaagctcaagctcgtctcctccggccaagaagtctagaagcggtgagtcaacgaagtccagagaaaaggcaccggttgaagctgttatcgatctatccaaggagctaaccgtggtagatccttctacgccaaaaactgctaagcccaaggtctctcgaggaggaagctcagacaggcccaaacagtcgaagggcagatctgagaagatccgggctcctaccctatctccatcactgcattcggagatcaaaagaggcaaggagatgcttacccactatatgaatcggtcggcccttgaagggaatgagtagctggccggagctgacaacgagccttctttggagttgttgatgggaggagtcctgaaggagtttatgaaggtgagtctttcctgacactttcctttaatccttccttacttggctcagattctaacgttttttctctgtgcagactggcctgaataatgagggcggaagttgatgttgggttgtatgccctaaa

SEQ ID NO: 368232 - DNA, 526 bp, Cannabis indica
gtttctgagatgttgttttgatacttccaaggttatagaacttaaggatgaggtctcctatcccatttttgacaattttagagacaatgctcgaagaaaaattgacatttgaatgatgaaaaccaacgaaccaggttgattgtcaacctgggcgctgggccaagcaccaggtcaacctgggcgatgggctcagttttgatgcccttgtgattgtggttttatctctgagtttgcttgtattttcattatttttgatgatggaaaaaatgctttgaacattttttcgagaaactaattcaaaatagtcgaggttgataatatgtcaactagggcactggtccagcaccaagtgtcaacttgggcgctgggtccaatttcaagccacctgaaagtttttcttggtccctaaaaatagttgaatcttaatctttagtgaaaatggagaatatgctaggaataatttttggaaaaaatcctcagaattggtctgggttgaaaaaatgtcaacctgggtgttgggccagcc

SEQ ID NO: 368233 - DNA, 611 bp, Cannabis indica
gtttgttagataaaagaaaaaagtgacgaaaattaaaaacctaaaaattttatgaaactaaaataagtgttacaattcatttaattatttgtcaaagacctttcacgcgatagattatcttaggactcgataggagagagatccattacagagagatattgctatataatatttaattatggaattcaacatatacctgttgttgcccctgattttgtccaaaatacgtggaccaatttgactgtgacacatggactgaagaagcaagactttgagataaatcgactaagtctccttaaccaaaaggatcagcatttaacatgcctcccggagaaggtatgaaagtttcatatactcccggagagcaagactacaatgaggcatctctgggaggtatcgaatcctatctgaacagtcacctcgcatttaatgccgcatgggaggagacgtattgaaactgccataaatattaaagtctgacggcataaccccccttctgcagctactacgctatgattaatgagcctagtgacgactactttataagaaaagtcaagaaaggataatggattacgtccattaaacccataaagagcctagggattagacca

SEQ ID NO: 368234 - DNA, 691 bp, Cannabis indica
caaagacttaaatttataacaaatatacatgagtaattctttcttggaccaccactacttcttcccatcatacactataattgtctaaacaggtaaggcaatagcaaataacaaaaacacttactataccattagtcgacttgtcctcgcagcaaatgtacatattcgaccagtcttcaggacatttaaaccatggtcgttctgataccaagttgtaacgccctaatctataggaacgtcacgtgtgtgattttataaaactagtttaatactattatattaattaattattaaaaattgtgaggataatcaaaacttgactaaaataaaacactaaaaacggacattatataaaggcagtaaaaaggagttccggggattcgtgttataaaagatttatccaaaagacgatatacaacaataatttaaaacacaattcaaaatacgacagacacaaccagtctaaaacaattcctggcaactcaacacgcaggctggtggggtcaatatgtacattgctggagaagaccgccatctcagggttgttctaattttgccttgcccttacctgcaccacaaagcacccgtgagtcacatagactcaacaagaaaagtaataaagaaggatacattaaatagctaattatacgtttcattatcacaaaataattaaactataacattcaatagt

SEQ ID NO: 368235 - DNA, 679 bp, Cannabis indica
ttataaattactcttatttatccacttatagaaaaatttataatttatgctaaattaggttaataagattataattctacttattatcacctaattaattcataatacataataaatcttaattattcataattaagttttcgggatattatagtacaaacttggtttattttaatcttatatggttcaaaatagcatgcttcataaatttcttgtgttgatacttgattcgtgttcaaaaatgtcattttattgatcttaaagtgcaaaatgaattgagtttaaattaatattttcataaaattattgtgttatatttatatattggaaatatttgatttgaatttaatttatgtcatttttgtagaaaaagtgccaaaattgtagaagaaataaatgaaatggcaaaagagaaggaagcccaaaaatgaagctcaattcatttggcttagaccaacatgtgcttacttttttccttgtaaattggattgaatcaaagacattaatgctccatttcacgcacacatggctcccactcggcaaatctttttcatgtgataaagtcaaaacatcataaaggagattggaaaacatatgaaatgctccagcttgtgctatcgtttcaattttgcattaaaagtgtattattttcaattactcgaaaatgttcatatctata

SEQ ID NO: 368236 - DNA, 551 bp, Cannabis indica
tagctttaaaagttttgactttgcctccagtgcctcttttcttcttgtagacccacttacatccaattggacaatagtcatcgggtgtgtctacatactcccagactttgttctttttcatggaatccatttctgaatccatgccggctgaccattatttcttttcaggacttcccattgcctgtttatatgttaatgggtcatcatatataccgtctccaacaaccatattgatttcaccatccaagccattacgagatggtttagtagaaaccctcccactacgacgaggagcggtgaccttctgaacatgaacttttgtggtagttctctcagttgtatcatcttgtgttgtttcaactgagggagtgggattatcctctacttgactagaagaggatggaacatcagaaggtgttatacctgaaagcatttattctagcaccactttacttttcggcttaaagtctttaatatagtcatcttcaaaaaaggtagcatttgtagaaataaacactttgtcgtccttgtgactataaaatagtccaccc

SEQ ID NO: 368237 - DNA, 920 bp, Cannabis indica
gaaatcagaagatgattagggtttaattatgaaaaattatttattaattttgaattattaatttatagtgatttatatgaagtcagaatgcattttatatgttatatatagaaatttcataattttgcatgttcagtgctcggcaacattggaacgcggtgtatggcttaattgaatcacatgttagtattttagtttggcggggcggtagaattaggcattgagaatgtcgggagtcgggatttaagaatttcctaaaataccccttagtgttctttttatggcttttgtgtggaaagggcattttgatctttttcccacttagtaatttgtcttttagtgtgatttcttttagattattctaatctatattttattaattcttgcctgattatttttgataaaaccaaccttttgttaattcattttacgaaaaatcaagatttagacaaaaattacgtttccgctcaatttctctctctctttcgaattcacctagaggtaactagggtttgcttccatttcctctcaattcaagcaagttttcgcaagattttggagtgcttaagctctaagtaagcttttgactttgtcctcttgagttttcttgaattttaagaaagtggatatgcattattttgtggtttatgttgctgtagctgctgttagggtttgatgttgttttctggaagtgacatatgttgtttaatgttgagtttagcaagctttgagttttgaagctcaaacttggagctttaatggcaagttttgattttgtgcttgtagctgtgttttgttgcttggaaaatgatctttaggatgcttagaacaggtctggaaggtttcatgtggattggggttgttttggttgagatgggaaaattttggtctttcctgcactgaaccgaaattctagttca

SEQ ID NO: 368238 - DNA, 606 bp, Cannabis indica
ggtttatgtgcttatgtgatgaatgtctgtgttgtacgaaatttttccatgaaaaatattttttctatttttgaatatattttatttagattccttgtgaaaaattaaacaattttattttttacggaactcgattccgataaaaattgaaaaagttattaattttggaaaatcagaagtcaaggctgtcgagtgggtgctcttgagcaccaggcactcggtctggaggccctcatccgcgcgcgtgacacgcccgtgtgcaccctgcacactccgcccagacaaccctgcatccgcccgtgtttcccctgccagcgccgagttttctcggcatcaacctcccgtccgcgcgcgttttgggctgtttgcagcctccttggctgctgcatgcagcctctcctggcagccaacccacaaattgcgatttttgtggtttttcccgaaaaatccaattttttatgggattgtttcccaaaattcgttttttttttctaattttagatttttccaatttgaaatatttcctttttttttaaatatttccaattttaaaatttcctattatgatcagatttaaaaatttgttaacttctttaatatttatat

SEQ ID NO: 368239 - DNA, 618 bp, Cannabis indica
agtctattttatttttttacctttctttttattatttctttaatttatacgcatttttattaggttatattctcattatgtgcattaggagctttaattttaataagttatgtgaagctatatttagtactttgattataaaaaagagtatttatcaattaaattaaattattttacaattatgtttggttaattaatgactaataaaaaaataattactcaacttatcccacttttattactctctctaactcaaactcaatcctttttacatttctctcttagcttgataaaaaaaatctcaaatcatataatacaaaataaaaaaaaaatctttaattaaataacaaaattaagtataaaaaactcaatttttcttaataatacctagatgatgagtaatactatactatacataactttctactattttacacaaataagcatcatacaaaaagtcaaagtcaaaaaatttatgggagatgttgaagtgttatggagagttatttcatcttataccacttgaggttagctcaagtggccataggtgggtgtgcgagtgttggaggtcttgggttcgagtcccaagtaaaacatgattataatatataaacgctt

SEQ ID NO: 368240 - DNA, 1091 bp, Cannabis indica
aggagggcttggatttttttcggattggcttcaattcctcgagcattgacgatgaagcctagaaactttcccgtgctgactccaaaggagcatttttggggatttagtctcatgtcgtatttcctaaggactttgaaacattcgtccaggtcgtctatgtgccccccagcctttctgaatttgatgagcatatcatccacgtacacttccatatttctgtcgatctgatctttaaacatcttgctgaccaatctttggtatgtagctccggcgtttttaaaaaaaaatggcatgactttgtagcagtagagacccatatcagtccggaaacttgtatgttcttagtccggtggatgcatcttgatttgattgtagctcgaataagcgtcgatgaagctttatatttcgtgcccggctgttgcatcgaagagctgatcgattatttgaagtggaaaacagtctttaggacacgctttgttgaggtctgtgaagtcaatacagactcaccatttcttgttcggcttaggcacgagtacggggttcgcaacccaagccgggtaaaaggctttaatgatgaagtttttgttgcgcagcttttcaacttcgtcttccagggctactcctcgttctttatccagcaatcttcgtttttgctgaactggccggatgctaggatcgatattcaggacatgcgaaataatagaaggatcgattccgaccatatccgcatgtgaccaggcgaaaacatctaggtttgctctcaaaaattttatcaattccgattttacttcgagcaacaaaccctttctaatttttagctttctggccgggatagctggatcgatctcgatctcttctaattcttccacaggtccaacattgttgcctgggtccccgagtcgaggatccacatcttcatcctcgccttggggagtttcctacttgggaatatttattcccttgtccgggctctgagtggaggaaacttccttcttagccttggccactgtaaggttttaacattctcgagcagattgctaattccctctaagacaccctatcccgttttttgttggaaacttcaggcacga

SEQ ID NO: 368241 - DNA, 638 bp, Cannabis indica
agaaacaacaaggtcgaagaggcgacatgagagttagagtctgatatgagaaagagatatctcgagttattcaggtaaattttgggacaaaatttctttaaaaagagaataattgtaatattttagaattagtaaaatagcaaccctaattaaaatgaattaattataattgtgtaattatattattatataattagttatatgaaattatttgagaattattgcattgaaggtcctatttatgagttaggggccttttttgtaattttgacccgagaaggataatatcgtaattttattttattttgtgctaaaggactatattattatataatatgttcattttgtcttattggcggtgatttttgataagttagcgtggtatagttacaatttggtattttggattcgaattggattcggggtctaaaattatttaattatgtagttatggtaaataattgggatatgtttgaaattataaaatttggttgtgatgtgaaatattagaaatacccttttaggactcgtttggaatgctgtattaggtcgtattgtattgtattgtattatattaaattgtattttatacaatatttttatgtaaaactatatgtggtattaacttttatggacac

SEQ ID NO: 368242 - DNA, 631 bp, Cannabis indica
gtcctagtcctagttcggttctagttctatttacgattctgacttcaagtatgggtttgatttcaggtcggagttcgagtccaagtctgcgttagggttcagaatcggatttttgggtaggtccagatcacgctccgggtgtgggtttgcgtcttgggtcttggtctaggttgggtcggagtcccaagttccaatcccaatctgagtctggattcagttctgggtctaagtccttggttctcatcctggtctgggttcgagtttgggtccgggttcaggtctagctttgggtctgattctaggtgtgggtttgagttccggtccgagtctatgtccgggtttgtgtctaggtcttgaccccgatctgggtgtaggttcgagtccaggtccaagttcgggtcccgagtgcggttagaagtttgggtctaggtcaagatctccgtccagatttggtccagaattttgatcccagtctgggtcttgatcctagtccagcttcgtatccggatcactatctggttccaagttatgtttgggattgggttccagatttaggtccaggtccgggtctctgttccgttctgggtacgcgaccgtgtccaggcccgagttccagtctcagtttgggtct

SEQ ID NO: 368243 - DNA, 549 bp, Cannabis indica
ttattgaattgttgtatgatattttatctctaaaggttcatatttatgttattacttttctgtttcatgtgtcgacgtgtttaattttaatgtttaaatgtatgtaatgcctttattatgtactattaaagtactttaattttataatgttctattgtgtaatgtaaagtatgtgtattcttaattaataagaatatgatgtctagtgtgtttaattttaattttattgtgtttaaatttgtaatattttttattgtgtaattttttagaaaaaatatataataaatttttacttaaatcataattaaaaatataaataatcatggtattcacatttaaatttacacaaaataaattataaggtgtttttacaatgtacccttctaaattttttggtgtgtttaatttttttaaagtttacaaaattttacaagatgtcttaaataactataatgtacatatctatgaaaaaaatagactaaaaagtctctcgagtgtcgaaacaaagcatatcaatgcaccacttttaaagatgtgcattattttcgg

SEQ ID NO: 368244 - DNA, 593 bp, Cannabis indica
atataccaaaacacaatctttgtataaattaattattatgattttatttaaatattagaagagatagaaaaagaaattagtgtgtaattttcattatggtattaacaaatgcatcataaacattgatcctagcacttaacaaaagaattatattaatttattttaagtaaaatagcaaaatcaaaaaaaaaaaaatagtgaaaagagtgtataacatgaatttagtatacaaaacaagattatttaagaaaaaaaaatggttcgccaaaccgccataggctgtttgggatgcgtagaacgcgagaaaatacccaagttcaaaaaaaaaaaatcacctcaaacaaacaaccagatcaaaagttattaatatttttgaaaattttcaaaaaatttcatacaattaaagtttaaccctttctctgattttttatttattctggtccttatattattatttcattttattggtcttgaaaaattatataaaaacaagtaatcacattgctaaattagttaagaaaatgagaaagttaatatatcattcaaaagctactaagtgctcttcactcacctaactttcggcatcccatcac

SEQ ID NO: 368245 - DNA, 859 bp, Cannabis indica
tgcacggaatgtacttccagatctttctttgcctactattggctttttcaagactaaggtattggaattattatagccttgctcatttggaacaatctggggattattttgacattgattcatgaagttcaaggccatactcatcccaatgatttagtctagttattaaaaaaggattgtctaccttcaattttatctgttgtattacattttgtttgaatgattaatataacagtactttttctcaaaaaaaaaaaataaaaaagcttattttttaaatattatattttataaaaagttattgaatgaactatttattttgatacaaaataatttagactatatattttttaaaatagtatcttgaactgattttctattaaaataaaatttagagtaattggcagctaaactctctaaactttcattacacttgcattgaaccctccaaatttaaattttggtggaaaaacctaccaaactcatattctatttgtattttgaaggtgtcgttccacaatctttattagtttgtcattttatctacgtggctaatgacacatcactattagaatctaacgtgattgccaaattgtacatatttatacaaatgtccaattgatttaattaatttatattattttaaaattaaaaatttattaaaactaagaaacattttaattttgtattaacttttaataataataataattgggaagcataataattaataacaataaattttcaagataaagctaaacatgctcccttcctcttaagctatgaaaaatgttactctcatttccaaacaaaattccaatagagaacaaaataaataaattagtgtttaaaagcaaaa

SEQ ID NO: 368246 - DNA, 588 bp, Cannabis indica
gtttttatattttcttatatacaactgacatttgtaaaaacacgatttttcaatctctctttcactactacaatttacttctttcatgtcctacataattagtataggtcttgaaaggatttgtgagaattttttatgaccatcaaaatcgggcataaaatatattttatgatgtccaatattaccaggcatgaagaacgaaatgtgatatataattattaatatatatatatattatgttgccaccaatgtaaggttttctagaatattatatgtgtttatttcattattttaggaaattcatgtttaggatgttagattatagaatataatcaaacatacatgttagtaaatccagatcctagtaaaacaagttccaacatggaatttctcagaatgggggtgtttttatgtttaatatcctttccccccgtattttatggggggatattagcggtaaaactacctgaactttacatctttcaacacttaaccacaaaaattaaaattttgatgataaaacctactgaacccaagtttcatttttctcattacacttccgtcgaaaaatctcagttaagtgtcaca

SEQ ID NO: 368247 - DNA, 603 bp, Cannabis indica
aaaaaaagattgaaataatgtaaatatggaataatggccaaaccaatctatttatgaataaaaaaaatcacctgaacaaagcggcaaacattgtattgactgttccaagatttgacaagtcaatttccatgtccatgccttcagcatcaagagcctgaaagaattaaggaagaattagagaataattatatgacaagcttttggtaacttcaattacttaagaatatatgagcctaatcaaacagttccttcctacaaattgtacatatgcccacataggcatgctttaataaatgatcatgtcagaggttagtatattagcaataatgatcatgttcatgttaagaaatgaaattcatacaaattaaacggtaaaagcacctcgaaacctgcactatcatactgtcttctcttctctggatcagctaatatgctataagaataagcaacctccttgaaaagttcagaagcttcaggattgctagcattcttgtctggatgatacctatccaagattcaagtaacaaacaattaaagaaataaaaataaaaggagccacaagaaaaagaattcaaacatctacacctactattttcactaatt

SEQ ID NO: 368248 - DNA, 486 bp, Cannabis indica
attacccctagatcaatctcaaccgccagatcaaataagtccctcatctgacggctgtcgtatattacgaaatgcattttgtaaaagtataatttcggaacaaaattatatccctatatatttatggctaatggctcctatatgaaatgtatggttccatagatatgcaaggttatttctgatcttaaaattcatatatacatggacccaatcgaatatgttcgatctttacagaaagtaaagtactttatttatattccactagaagtctgtcgcaccacgttttcaatttttcttttctttccatccacataacttaacatctttcaaaaatccagcttacctcctatatatatatatgtataatgtatatatatatatattaaaagtgaaaatttggtatattatctgaaaatggttttataatctgaagatgacatttcaatatatatgtaagtgacttattatatatggaggttataaaat

SEQ ID NO: 368249 - DNA, 743 bp, Cannabis indica
catctcattgtttcaaggtaatcctactaagggatttacatcaagcctaagtccataagaaatgatgcaagtagtgggtttaacttttcacaattgaactcgtacacattgtctaatggcataaatgaatggacttcaagagaaaaagacgaaggaaggtgggaatgtcttcatggttttaataccataagaaccacttctactataactagggcattaaggaataaaccaaaacagtacataagacaagtagcatgctcaaaactacagcctgtacaaaaatgtttagtttatgagtgccccagtttcttagcagttcaatccaaaagttttggtaaatgctccaatgactcatatcgtgatgttccatctataaataatgagaagactttcccaagaaagttagtgaaatgtaacaaaattgaatctgatagtatgccagtgtttgttattggaataatgagtttggaggaacaaattgaagagttgcaaagaaagttggcggagaaaaacgctgaagttgaatatcttgcatcacaattagctaaacaagctagtttaagtaagcaaaaaccagtggaataggggcaagtgtcatcaactttgccaacacaaccttgttcaaaagagcctacaccatcaactttaatacctcatcacgaattgaaagcattaatcatggaaagcatccgagaatgttatgaaacaacaaatattcccattcttggataccataaaccata

SEQ ID NO: 368250 - DNA, 985 bp, Cannabis indica
attttagattaagtttagtatatttttaatttagttttaatcgtattttgagcatttttatgcttgttatcttttatttttgtagagttaaaatagatgaagatttgaaaaatatcaacagaaaaagataaaagatcgcataaatatcaatgtggaaaaaaaaaacagaatcctgcccagaaaaagatatttcgcgtggaaaacgaaggctttggaccacacgggttgcgacccacgaatgggcatgtcgcaacccgctcatttgataaacaccgaaatctcgtgctgcaaaacaacacgagtcgcggcccagccattgtggcgccacggcccgcccctatttctgcagaaaatataatcttttcttccacgtgagtttttggtggtttcccaatttgaatctaaataggaatttaaacttgtgcttttttatatcttcttagtccctcagtgcctatataaagagtgaactggagatgatttcagtcaagcaattcagaatgaaaaaggagtatgaattttagagattgaagtcaatactggaggcagtatgcagagagttttcaacattattttctattttcttctcttttcttaagataatatgtgtgattttgcttccatgaacatgagtagctaaacacttgattagggtctagatggatgttatttgacattgctttatggttttaatatgatttatttttccctcatttctatgtattctatttcattcgtgcttaattacttttaattgtctggtcatcaattaattgttttatgatttcgatgcgagatctgagaagtgagtgtcgattatgctatagtgaaatagaactgaatttcgatataggacaagagtacctatatggtttagatagcttatagggtttctatgtttaatgcatgttacatatttaatttatcgcaagagtaaaagatttgtatgtaattgagatttatatatctgagaatataaattacc

SEQ ID NO: 368251 - DNA, 890 bp, Cannabis indica
atgtgttactcaagaagaagttgaacgacttctacctgaggtgcacgatggatcttgtggaaatcatgccgccgggcagagtttatctaaaaaaattctaaggcatgtttatttctggccgacaatgattgaggattcaaaggcctatgttaagaaatgtgacaaatgccagagatttttgaagatacctcgagctccgcccaatgagttaactcaaatgcaaagtccatggccttttgccatttggggacttgacctcatcggacaattacccaaaggcaagggaggagtgtagtatgcagtggttgcggttgattacttcactaagtggacggaagccacacctctagcaaccattacatctaaaaaagttcaagactttgttgtgaagaacataatctgccaattcggattgtcgtacaaaatagtttcggacaatggcaaacagtttgacagccagtccttcactgatttttgtgcaaaccatggtatcatcaaaagtttctccgcagttgcgcatccctaaggaaatggtcaagttgaagtagtcaacaagaccctgaaggatacattaaagaaaagactcgatgatgctaaaggaagttggtcggaggagcttcctaaagttctatggtcgtaccgaacaactgagaaaacaaaaaccggacagactccatttgccatggcatatggatatgaagctatgctgcctgtagagctcaaacaaccatcccacagaagattgacgtacaactaagaagaaaatcatgtactcttggccgaatcacttgatgaaatcgaagagaagtgaaccacaacaaacttaaagttggtagcccatcaacaaaaagtagctcagtatttcaataaacaagtgaaggctcggaaat

SEQ ID NO: 368252 - DNA, 724 bp, Cannabis indica
aaaataatttccaacatccccaatctaggtctggttcctaattctaggtctgagtctcctatcccggtctgggtccttggtccgagtttgggtccaagtccgtgtcagggttcaggttctgtcctgagtccgatatgagtttgattcgggtctgcgtcccagtctgggccttggtctaggtcctagttagattccagttcctcgactcaaatccaaactcggactcggacccaagtttggtgtacggatctacgatcaggtcaatttcccaaatggcaaaaggccaaggactttgcatctgagttaactcgttgggcggagctcgaggtatctttgaaaatctctgttatttatcacattttttaactcaggcctttgaatcttcgatcattttcggccagaaataaccttgccttagaattttcttagataaactctgcccggcggtgtggtttctacaaaatccatcgtgcacttcagacaaaattcgtgcagcttcttcttgggtaacacatctaaacaatggcatggagaatcctcatctgtacataattccctctactatgatgtaccgttcaaccttccttctcatcttttgagattcatttcgattatcttggagttccccaatgttgaggtagggttctattgacgtcatcaagtttggggaagtatcaatcatttcaatctcttccgtgccaatgatgctaggttcttcgagaaa

SEQ ID NO: 368253 - DNA, 522 bp, Cannabis indica
attcaataacttcctgggagtagatatccagggattttaagaaatagttccaggttgctagggatagacgacccaaagcgacctcgctaaccaatataaagcaacaacccagtgagacacttaaggcgtacttaagtcgttttagcacggctgcagctagggttatgaatttggatgataatacacaacttacagccctacaggcagggatctctacgaatccatcaatcactgagggcgagttgtgggacaacttacagggtcgtccagtaagaaacatcactgagttcaacgaaagggctcaggtattcgttcgaaaacaagaagtctgaaaagaaatgaatttttttgaaaacaggctcgagagacaaacccaaaaacgtttcgacaagtagtgtttcaataagaatcgataacttggggggcttctgggctcaaagagaaagggacagttccaaggaaccgtcaaaggataaaaagaaacaaaagaagcacgataagtacgtgccagtgtatactatt

SEQ ID NO: 368254 - DNA, 615 bp, Cannabis indica
ttactaaaaataattgtaataagctataataatttttggttgaaacttcagatcaaaaaataattttggttgaaccatgactttttcaacgtattttttggggccaaaagattagtagactgtagaaagtatggtctagtttacgtgtttttgattggttgacttaataaatgtttctcactgaagaattttaacgtggtggtcctggtcacctatgtcacggggtattaagaaaattctatatattattatccctatattattcaaagttgtgatcaattaatccttttaaaaaaagttggtcattaattttataataattaatactcccgttacaatctgttatactatcataatatatcttcaataataaattatataaaataaagttacatattaatcaaatttcaaactaatagtcccgttccaatcattcaaaatatctcttattattgttaattgatccatttaatcaagacttatttcattaccagctggctgctatttgttacccaaaactatgtcaacccagcaccgtggtcaaaataattttactttcgtcaattgaaaatagatcacaaaataatgagaaatgcaagtaccaggaaaagagag

SEQ ID NO: 368255 - DNA, 559 bp, Cannabis indica
aacatgccaaattgtgtaattacctcaaattacacacaaatccaattacattgtgactttccaaacgcaccctaagtgtgttttaggaaaaagaaaattaattaaaaaaatatatatatttaaaataattttttaaccttagattagatgggctttagaataattagcaattttatccttaaaatatttacattttaaagctgtgccctaatttattaataatatctttcgaaatataatctttacactaacataattctttcatcatatttttttttttaaaattttttatcgtaaaaagaaagtaatggatgataactaataaataaatacaaattaaatatcttttatcatttttacatttttttataataactttatattgttatttttagtttttttaataattaaagtaaaatagtgaaaaatatttaatttatatctatttatcaactatcatccatcgtcgtcactcggattcatgataaaaattgaatataatatgatagaagaatcgcgttacaatttaatagtgtaaaaagtaaaaatattcattatt

SEQ ID NO: 368256 - DNA, 1681 bp, Cannabis indica
aacagtttcgtgctttcattaagagcctctgtgaaacaactcagaaaaggcctcctgacctaaaagtaatggatgacaccgaagatgataatcgttaagaagaaatcagtcatcaccctgaaaaagacccattgactcctcagggatctattgagtcctcacatgaatagaccgcaagccccaggaaaacccagtattggggtgccccacttgatggaccttgggtaaacaacaatcggccacttcctaaccaggttgaacaggatggtgcctactaatgacctcgcttttagccaacgacaatgagtctaagttagtaagcaacaagtagtttataacgattggtatataatagagcaatatatggacacaagaattttatagaggttcagccccgagcagttcggtaatagcctaatcatcgttatttgcattaactcaagaacaaggagaaaggttcctttccttatagctcttacaaaaatatttcgaccctttgcccagtgaacatgaatcactatttatagggctatgagcttggaggagaagtatttcccttctcgtcacaatgtatataagtagaaagattgcatagtaaatgtggcatacactgatcgtaggatttggacaacttgccatatctttgcaatctgatccccaagttatagggatttccttgataactcacgatgcgaaagctgaattcgctaagtgttggttgcgctatggggattgctgatcgcttggctttgagcatgaatatgaggtatcctgttcggactatatcttgcgagcagatactcggagtcaattccacgtgtcaccatcatgtgatgccacgttagagtgcaaaaattgggataagatttgcccccgaaggctgtacggggcttccaaagttgcgtctagacttcatccaagctgtctttgcgttggaatgggtgacacatgtcaagcgcgtctgttcacgactcgatgtgaggctgaatgggcggtccttcaattttcgactaataaatgctctgacaattaatatttcaaaatctaattttctctcaccacagttgacagctacacttgattacttttgatttcctatattcacttttaggggggaaccgaggcgtctgaggttcttttgaaatgattacccctgttcattgtttgcctataaataccagtgagcatttgtacacaaactcatttttaccatatttccttgctaagtaagtttagagcgaaaagagaggtttttggcttcgagtttactgaagtgccctcatcaaaactgctcatttggcttggcgtattctgaatcctgacttctaatccttgagtaagttctcgatttcgtttatgtttactttgcacatttactttctgaatgtaccttcgactttgctatagaagatatgtaggaaaccctaagtttagaaagtctccaattttcctttgtcgtggttcatgcaatttcactatctatcatgcttgatttttgaactgcataatgcctgtctttcatctagtttattctaagcttcatgaaagtttttgccctaactcgagaaaatttcaaacatcctgagttttgacttttttgttaaatattcttattctttaatctgtagagtactcctggtgggcatatttgcttgttttaatgttcgatattctgaccaaa

SEQ ID NO: 368257 - DNA, 519 bp, Cannabis indica
tatgagttatttgtgaaaaaaaaagtatttttagattcggcgaccctggaagacccgattgaaggccaaaaaatgtcacaccagttttagatagaaatattaatggaattattgggataaattgattttagaaataccgaggtattttaggggactcgaagttggctaaatactttagaaatagaaatttcttagtgactaagaaataataagataactattaataataaactttttattaatattatcttattattatatattattgttataatattattttaatattattaaaacttatcagttcatacaatatatatattatatatgttatatatttatatcaaatgaaaaaaacagtacgaaactttcttcctcattcttcaacaaaactttcttctcttttatccattttctttgatttttaacttgaaatctagcaatttatactctagtaatagcgggatagcaaatccttgaagaggaaaaacttaaggtatggtttaattacgttttaag

SEQ ID NO: 368258 - DNA, 423 bp, Cannabis indica
aactcgaaactagaagtttccctatcgataaataacatggcaataccctaaataacacaaaaatgggaagaactagggttcccaaatttgccccaactggtagaccggttcctcaaccggaattccggtactgggaaaaattcctggaagccaaccggtagaccggttcctacaggcctccctgaaccggaattccggttcagtgcaggaaattttcaaaaatttatttctcaaccaattcaacgccaaaccacctaaaactttccagatctgctccaaatatcccaaagaacatttctaaagcaataaaaaagtcacccaaacacaaaatcaaattctaccattaatgagccaagcttgagttcaaaactccaaagcttgctcaaacaacaaaacaacaaccaaatcatgcatagatcaaca

SEQ ID NO: 368259 - DNA, 892 bp, Cannabis indica
acagtgacaccctataagggtagctattatttttatagtctcacaaggtggaactctaaaagtctaaagggacgctccacgagggactctaaaaagttttgagtgaccaacattcaagggtcattaaatattgtctttccagtcactcacattagtgatgaacagtgaagtgtcactaaaagtttttagagtccctcggagtgcgtcactgaaatctatttttgtagtagttaaccctaacccccactattcagttttctttaatttttaacccgaaacctagtatttcaagctctggtagtagtaggatagtaaatcattcaagaggaaaacctaaagataaggattggttttgttttaagttaaaatgattagttttatatagtgactttataatttaaaatagttatagagattctgactttatagaattattcttaagtagctatgagactagttttgatgtttacttgttgtttttaaggtgattttgagttagaaattaagtttggaaccttttaaagcttaagtccgaacattagtgacgttttctatttaagggcttgattttaatttctattacgtaagaatagttgtatttatgctatacatgcgctatgtgaagtttggaatgaattggataggtttcaggaatattttgatgagtgcaaaatttagaatttttgacccctattgctaccgaaccaatccatcgtttggcccaactagttaactagttcgttgagaaacatttaaccgtttcccaaccggtttaccgtttctggaaatttggagaaaatcaagaatcatatttttgtcataacttttcacttgagttgtaacaccctaactagcataggcgtattacgtgaatttttaaacatactgtgca

SEQ ID NO: 368260 - DNA, 522 bp, Cannabis indica
actaattactatatatatatatataattctatttctatgcatgactagtcctcatcacgttttaagagtaataattggtcttttcaagaatataattggttttaattttcgtcacattggaaattgctactggaattatatattgtatatgagtatgaggatttcgaatttttgtttatatatttatatatatataattacgtcgtacaattttgatgatgttaaagcttgacttcctgctcccatatgtatataggttatatatgtggttaattagaagaaatggtaggtagaggaaattaagcaagctagatgaagaatatattaggtgtgtggtcgagctagtgggtcttattttaaatataaatatagtatgtaatatcataaatatatatttggacgcgtttagaaagctataatgtaattagatttgtgtgtaattggaggtaattacacaatttagcatgtttgtctgaccatgtaattacactgtaactgtgtaattgagaagttccaattaca

SEQ ID NO: 368261 - DNA, 636 bp, Cannabis indica
tttaacaccggtgagttttgtggatgagaactcttggatgaggttgttgaataaagatttatccgaagtgtcaaattgctcatccatcactttgataaaatctttgacctttttaggtgtgtccgccgacccacacattcccaaaagaattttagacatgatgaacatgatgcagagacgattggattgttctcacttttcacgtagtgcaatctcagcagtagtgctagtttcagtgacaacagctggtttggctttccttattccatagtccgtgtcaatgcaagcaaggtggagaagaactcgttccttccagattttgaaattgtcactcctaagctcaaaaattttgctagtgatttcagcgtatttagagttggatgaaatagttgtaagaataggattacaaatttagatgttataaaaattgaggctttaatgaattcatgttttatcaatgtagaaacatgatgaaaataaaaattttactaaatctaaaattttctgtgggttaaattttaaatctaataaaattacatgaactttacgatagatttaataaaatattttatttaggaaaatgaggaaataaatttatctaaattaaaatttgtgataacactattaaattaaatc

SEQ ID NO: 368262 - DNA, 770 bp, Cannabis indica
ttttagtataattacatattatataaatatcagtattttattaaattgcacacacgtggcgtccctgttggacagggcgttacagtttaagattggccaaaaattaacattcaatcaacatttcatcacaactaattgaactaaaacaagattacttaatcattgcaaaatcaaaatactagtccatacaagggttcataaccaccgaaatctcaaaaagtttagttcataactgaaattaaaaactcaaaaccagaaaatgaaatgttcatggaggttaagagtaaactagagagtagaatatgattcaaaatgaagaggagagtaagagagatgagtggtgagctcaaatcctttctttggaggttgccttcttctccttcttctcaaccttcttcttctattctttttttctctgtacgtttcctttttctgctgtaggttttttgtaccctctattcaaagtgcagccaccatattcttctatgtccttccaccttttttgctccccaattagggtactaaagtttaccctaattggaaatccaagtcatggtccacgtgtccttcattttccacatatatgttgagtcattagccacagtttgccacctcagctcctttctttcttcattaaagccaactggactttctgccaaaatatacttactgggctgacaattcctacgcgatgattgctatagcaatgccaatcagcaataggcatttttctgctcctttttctccttgccccaaatatttccaaatac

SEQ ID NO: 368263 - DNA, 611 bp, Cannabis indica
cttggttggtcttgacatacttctgcaggtgaggattgtttttctttataagagattcaatttcccgcttgagattgtaacattcgttggtgtcgtggccgtagtctcaatggaaccgacaaaattctgtcatgtccctcttgttggtatctttcttcatgggcccgggcttcttatacgggatgaaagactgagtttccatatatacactctctatatcttcagttagaatagtgaatgcagtgtgtttggcatgatcacgaggagtctgtccggatttatcggtgaactttcctttcttcccgtttccttgcttgtagttattgcttgaacgcttgccacttgttggaatagttgggaagttgggggaatgttccaatagaaggggccttcgctttgcccagattttgctcaccttttgctcgttgaatggcttcttcaaggttgatgaagccttcggctccgtcaaggaaatcactcattgagtctaccggctcgttcttccttatatccttccaaagttcaccagggacttcaatgccccccagtattgcggataactttccatcctcggtaacccgcgaaactttggtcgcttccgtcatgaatct

SEQ ID NO: 368264 - DNA, 1031 bp, Cannabis indica
gcatgatcaatgtataagtattgttacatcaattctttgagcatcagtaaaactattgggaaactatatgacaatgatatgcaatgcaaatatcaaaattaggttgccaatttcatgacgcgagatgaacgtaaatctagtttattgtcgtgattggaattgaataatcttgagattgaagttccaaaaaataacattgatgcaacaattataatttagatattgaagtgataagtattatatggatgatacctaatttatatcaattgaaaaacttaagatctacttcttatctgtctacatcttaagaatttataaatttaatttacaataattaaatttttggaatttgaattaattttcaagattgagtttacatttcaaacccattttctgaaaaaatttaatcaatcgatttgggttactttttcatttgagattctatttttttcaggtcgcgattcaccagaattaatggtgtcttggtcgctagaattattggtgtcttggtggtcggagttgtttcatcatagctgaactcttatcatcgctggtttcatttgtttctctggtacgatctgttgagttttgtgccctaaaaaaaaaccaatttcaatataatcaaatttactaattaataaaagattagaaatcacttttatgttgcatggttcacatgacttatttcatgattatgtttaatgtataaattctattaaacccagaacatatataaatatacatatatatatttattcatgattatagtgtagtcagcacagtggaatatactcctgattatatgttcaaaagtttaattcccatgattaaatagttcactggatttagactaacatgataatcggcgataaggtatatttacaccttggataagtattatgtcctttccagggcattggcaaagtttagcagtatcagatgtatggagtatacattggaagggatcgatattaatcttggataagatatcataaacttactgttatatctttctaagtcaatatcaatag

SEQ ID NO: 368265 - DNA, 707 bp, Cannabis indica
cttcgaagtgttattgaaagaacatttggagtatggaaaaaaagatggaaaatattaagagatatgcctagttatccataccagaagcaagtaaaaatagttattgcatcaatgaccttgcataattacattcgaaagcgagctttgaaagatggtgatgcttggattctgtgttctttgtagctgcttcttcttcatcttcttcactttcatcttcacttttgacaataggctcggtttgagagtatgcttcttctgcagattgagccataaaataagggggtacgtcatcatcagaagtatccgagtctttagactcgtcactagtacccgaatcttgggactcgttactagtatctgaatcttgtgaccaagtttcagaattctcttcagaattttcttcttggtcagaagaagaagaagaagactgactatcaaattcttcatctggttggtggagcatggcagaaataggattatgttgggccatgaattgctttggctctttttcggataggaaggatgctcgtggaggagaattgtctaggctttcctttttcttcccctttttggttttttgttgttgattttcgtcaagcattcgtctaagtcggagaagtgagtcttcttgcgaagagactgagaagggtgatgttggagaggtctttggcatggttgagaactgccatggtactgatggtgtattt

SEQ ID NO: 368266 - DNA, 611 bp, Cannabis indica
tgtatttgctgatctcctgtgtagtccgaggtgtagattaagttttgaggattaggagtgaggtgatgagtggcacctgagtctggataccagctgttgtcttgaaccacttcaggagaagcataaagatgagagcattcaacaagattggcactgcctgaaaaaccttgaaaggtttctggaccagtgaaggttttatcaaacctgtaaaaacacttttgagccgtgtgacccattttgtggcacagttggcactgaagtttttgtccccaagcagagtattgtccttttgtagacacattgggtcctttgttctgagacatgttgccacggccaggctgataaccacgagcttgaccattgttttgattagaaataaaacctggtggaggatgagttgtagaaaaagtgccaggtggtccatagtggggataataacccctaaacataggattatatggagaagaaaccgaagagggataatgaggtgatgagaaagtacctcgaccacctgtgtatggcttagtgtgagccaaattggcttctggtttgttgatgtccagatcagtggagtctttttcgagcctgacttcttgagccatgagtaaagc

SEQ ID NO: 368267 - DNA, 639 bp, Cannabis indica
aactcattaattgcgtaagtatcagagtatatttggaacctgctgactgtaaggtcttaggcgaggaatcaatgtacgaacttgtacttagagtattaacgagaaatcatatgttgccaaaggagaataacgaggcaccggagaaaagaaacacataccttagcttataataagcaaactaagtgtaaaagttggatcggtttgaagaacaagaatgcgagatgaccatctcgctacgagaaaacttcctatggtttcctcgtagctaacaggagcgaggctcataaccctggcaagtcagaagatttctgtatacccacgatcgacgtaagacatatcttgtcgacatcagaaagaagaatagttccagccattgggatcagtacaatcaagtttttgtggagacatctccaggttcaacaattaaagacgtgtttaatacatgatactcttgacccagtaaaagtggaaaatcacagctatatgattttcaaaatcatacaccgcatttacattttgtgatatgtaatcagattccataattttaaggataatgactgtaatcatattttggtcagctttgtaattaactgccactatgaaattataaatagtggcaaataatctcaaaaaagggac

SEQ ID NO: 368268 - DNA, 565 bp, Cannabis indica
agtaggctcatgggcagagattctaggcaaacatttttatatttggaggatatgatattaaagttccaaattgtctccaccatatcaaataacctaagaaattcaaggcttgttctggctaatcgctggctgcctaaaagcacttccattaatttttctatactatcttttaaaataggctaattagaatttttgtctcctggactttgacatgtactaaatcatgccccctgaatttttaagatcgttgaaaatgcctcctgaactaattagattgttggatttaaggacttttttccaattttagtaagaaagtctaacatggatgaaggttcagggaccatgacactgaaatagtaaaattgaatgaaattagacaaaagtccttaaatccaataaatctcaatagttaagggggcatttttaatgaccttacaagttcagggacatgatttggtacatgtcaaatttcagggggcaaaaatcctaattggcctttaaaatatatcactatttttttacctcaaatttttattttacaccatatattaacttctttaaaata

SEQ ID NO: 368269 - DNA, 836 bp, Cannabis indica
atgcggcaagggtattactgggcgacactgcgacaagacgctttcaacttcgccaagaaattcgacaagtggcagcagatagccacatatgtcaaccaatcttcgagccacttacactccatcacgagtccttagcccttcgcggtttgtggcatcgacctaatatgggagttacccaaaggaaaaggcagagtcaaatacgccatggttgcggttgactacttcaccaagtgggctgaggcaaaggcacttgcgactattacagtagccaaactacgcgagtttgtctataactccataatctgtcgatttggcattccttataaactcatctcggacaacggaaagcaatgcaattgtaagaaaatgcgacaattgggcgatgagttaggaatcaaaaaggcattttcagcagtcgcctatccacagagcaatgggctgacagaagccgtcaacaagataatcaaacataccatcaaaggaaaaattgaagagcgtaagggggtatgggcagaagaactttcgcaagttttatggtcatataagacaaccctccgatccacgattggtgaaactcttttctggctctcctatggatgcgaagctatggtaccagtcgaggttgccgcaggttcctgttgggtttcatgccctaaataaaactccatttcaatgtaatccgtattattaaagatcaataaagaaacggaagtatttttcattaatttgtgtatgttttggttcacattatcaattatttgtctatttgatttataaattcatccaaatccctttcatattctttttcttgtttattgtgtcgtcagcacagtgga

SEQ ID NO: 368270 - DNA, 700 bp, Cannabis indica
aaaataattatactaactttgtgacaaactaaaacaaaagaatattgatttatttaatgtaaaagtatatcacccacaataatctctaaaccatgtgggacttttgtgaagtgactctcatattagtaaaagcatacaaaaatgtggaaaaattagaaaataaagatatgttcaacaaaaattaataatataaaattaaaaaatctaaaattatatattatttttatttgttaaaaaactcaaggttttttttttaaaaaaattaaatatttgacaaaaattaaaaagtgtaaatatatgtgaaaataaatactattaactttggaacaaataaaatatatatcacctataaatttaacctatagtttcaattatttaaatacattaaaataaagaattataacaaaaaaatactttttataggaaaaaatatttaaatgatttttataattatttttaaacttgataaagattgaaaaatataaaaatataatttgcactcacttaaaaaatatataattaattcggtaaaattaagtttatcaatcacccacatagaaaataaattatgataactttgtgaaaataaaaataaaagaatattgatctatttaatgtaaaattatatcaaccaaatagtttctaaaccatgtgggacttttgtgaaatgactctcatattactaaaagcataaaaaaat

SEQ ID NO: 368271 - DNA, 585 bp, Cannabis indica
agatcatggtaaaataatttcctacagttcgcgcttcgcgcggtttcaataattgtttaaaattatctattaaaagagtaatttgcggcataaatatctaagttagggatgttcataaaatagtcgatcgaatctgcaaagtgcgaatatctgcacttgtgcggattggattggattggaaaattcaaaatcggcacttgtgcgaattggatgttgattgacatgtaaaaataaccgtccaatccaatccacacattttaaaaaaaaataaaaaaatatatataaataatattttaatgtaaagaaaatagtaattaaaaaaatctaatgcatataatacaattatattttttcaaaacttaataaatcaaatgtatattctattcttatatataatttttttttctcaatacaatttaaaataaaagtaaacgtttctttatacatacatttttttcttcatttgaattcgttatttgttattttatttattttaatgtattgttggagacataaaataattataatttattttattttgttgctagttatgtgaaaaaaaaaatattttttcataaatattaa

SEQ ID NO: 368272 - DNA, 1372 bp, Cannabis indica
atttttgttcattgaattttcgacactacctaatcttctccttaaaatatacggcttgttaaaaattcctcataaaatataacaactacataattatgcttttttttttattaagtttcatttttttaccgttaaaagttagcatttttatcccatgaactttgaccaatacaaaattttgccctcttttattaaaaaaataaaataaaaaattataatattctattaattttgagaaaattcataaaaattgttaaaaaatctgataaaatattaaattaattaaaaaatattaagtttatttagaaaacctaaattattcttaaaaaatatattttcaaacttttacttataaaaacgaatcttaaaaaatcaaactaaaattattgaaaatttaataaataaattaaacaaactaagattttttcaaagaaaaaaattaaatttatttatatttataaactcatattttaaaaaaataaaaaatataattaaaaattcaataaaaatataaatctattttgaaaaaacgttagaaattaaactaaaaaaaatgttatgtttacttaaacaaatctagattttggagaaaaaataaatttaataaaaatatctaaatgtatttttaataataaataaataatttttaaattgcttaattagttttaaaattttaatttcttttttaatttttttaatcattcgaaataatttttttaaaatctaaattaatttttaaagatttattaaaaaaaaattaaaatcgttctcatttttattttgaagggtacaatttaatagttgtgaaagttaaaaggacaaaattgttaatcaacaaaaatacgtcaatatttaaacggaataatgcgacgaatttaacagaaggactaaatttctataaatgcaaaagttcaaggagaaattcttaataagccgtatattttaaggaacaaaatcagtattatcgaaagttcagagggcaaaattgctaattattgtaattagcaattttttcccccgaactttgacatgtactaaataatgtccccctaaatttttttggtcgttaaaaattccccttgaacaattaagattattaaatttaaggacttttatctaattttaataaaaaaattctaacatggagggacatgatttggtagatataaaagtctggggagcatgatttagtacctgaaacagtaaaattgaatgaaattagataaaagtctttaaatttaacaatctcaatagttcaggaaaaattttaacagccaaacagagacatgaatttggtatatgtcaaagttcaataaaaaaaattactaattagccttgctaatttatgaatgttcccaaacaaaggattaga

SEQ ID NO: 368273 - DNA, 511 bp, Cannabis indica
ataaaaacttatgagaaatgctatagggcatcagtagtatttagtactcttttgatgtgtcagtatcgttattggttcaactaagtatcagatcccacataatttaatataataaccacaacgtgacatctcgagaaggtgttatgcaccattggtgcttaatagtaatgctcaaaacttatttgtcagaggagaaagaaaaatgaagtattaattagaaagcgtttaagagatatataatcagggtttgggtctatattaagaggagttaggtccgcatctaagacttaccgggcaaaaaaaaatatttttacttaaaatatacattattttagtttttaaataaaagacaatattttttcctaaaacgtcctaaatcttaaaggccgtttgtattactagctagaaaaaaaagttatcaggagtaacatagataataataataataatgtataactttctttggttgttcatataatagatccttttttattcattttttttaattttc

SEQ ID NO: 368274 - DNA, 722 bp, Cannabis indica
gaaagtgcattcaatttcgaggtcaataacagcaagttcaaggtcttcttcttgctcattcatacactagattacacctgaaaaacaaaaattcacgcacccaaaatgggattagaacctcaaaccagaaaataaattgcaaaatagttgctaatacacaatttttagtttcaatccccgacaacgatgccaaaaacttgttgtgaaaattatgtacgcaagtatatgtagtcaaacaagtaataaaatgataagtaagatcgtctccacagggattgcaaacaaaaatatgttgtaaaaccaactaattacaacttaaagtaaaactaaaaaaaaaaaaattgttgagcaatgattcaaaattaacatgacagtaaggacttgctaaaattaatgctattgtttctagaaaaaatgctttcaaaaagtgtaatatggtaaaatgtggcttgaataaccaatctctctgacgctcgtttttcccagatgttatagcattacctcagcattcctgccagtgataacataatttttatgtgtttatgagaattttttaaaactcacaatttaagttctaccatctagattcgcatattcctatatcaaaccagattagagaacactagttatgcaaggtaaatgaaatattcctattacacttacaaagtaaaacctaaatctaggatttctcttgctccattcaagttgaactactagatcta

SEQ ID NO: 368275 - DNA, 530 bp, Cannabis indica
aattttgactcaaaactatgatttttatggtaaaatgaggaattagttgctgtgattgttaattgtgcttggatttgttttttggtgttattatatggttatatatggtgaattaaagtaggtttgatgcatgttagttcgatttaaccaagcttgagttttgaactcaaagcttggagctttaatggtggtttttgattctgtgcatgctgggttgttttattgctttggaattgttatttggggtatttagagcaggtctggaaagtttgaattaatttggggttgatttggtcgagttatggaattttagaaaattcctgcactgaaccggaattccggttcagggaggccattagcaaccggtcgaccggttagggcttccaggaatttttccagaatcagaattccggttgtagaaccggtctaccggttgggacaattttgggaaccctagttcttctgattattgttttgcttagggtattgccatgctttttatcgatagggaaacttttagtttctagttt

SEQ ID NO: 368276 - DNA, 173 bp, Cannabis indica
ataactatttatttcaataagaaaaattatttctaacttatacaaataatatctaatatcaaaactaaacatgcatatcatatattgtaatacaatatttggttacatttggttcaagtcttacatatacaagacccacaaggtagttacatatacaaattatatgattgctt

SEQ ID NO: 368277 - DNA, 664 bp, Cannabis indica
gatatagtaagactaaaaaaaaaaaataatcaaaaaatagtctatggggatttgaacttgtgaccaaaaagatagattgataagtctttaccaatataccaaaacacaatctttatataaattagctactatgattttatttaaatattagaagagatataaaatgaaattaatattgcacatttcattgtagtagaattaacaaatacatcataaacattgattctaatacttaacatcagaattttattagtttattttaagtaaaaaataccaaaataaaacacaaaaaattaggtgaaaggggtgcataacataattttagtatacaaaatagcattttttttggacaaagtggttggccaaaccgccgtaggctgtttgggatgcgtagaacgcgaaaaaatactcaagttcaaaaaaaaaaaaaatcgccacaaacgtacaatcagatctaaagttattaatattcaaagtttgcaaaaaatttcatgcaaagtttagccatttctctaatttttaccatttattctggtccttaaattattattttattttagtggtcttgaaaaatttaaatgtataaagatattaaattacataaaaattaaagtattacacattatttattatttaatatactaattattatacaaacataact

SEQ ID NO: 368278 - DNA, 773 bp, Cannabis indica
ggacatgtgtcaaactgggaagaatatgaaccaacacacgtaattacatgtgaggtggaataactcgttaaaagcaaaattgacagagtatatttacaacttggttaactgaatagtcttatgcgagataaagatatacaaactgttgcctcgggcattaacgagaaaccatgtaactttaggtgtacaagacgaggcattaacctcgttacgcattagaaaacgagatataacaattaatgagacacttaatgcataatacacggtaagatagtcgtataagcacatacaactgatagtgaggtatccatctcactataggaaggcatgctcgtggtaccttcactaatcaactccagacatctttcaatgagattcacagccccattgagccagttttctcagatagaagctaacattttaaatgatgttgactgttgaagttcacctcgtcaccaagaactacgattgccagatggagtgttatgtcttcagcgcaagagcaacaagatttacattatcaacctcgaaaagatgtgggaaaagctctagctcgctgccagagttcttgttgctatgttcttggtgagacgtcccagaacgatatgagttgcaacgtatttaatacacatttaccttgaccccgtaaaagcagattaatcatagctgtgtgatatttaaatatcaaccgcatttatttttacgtgatatataattataccccacgatttcaagggataattgttgtaaagatatcagtcaactctgtaatt

SEQ ID NO: 368279 - DNA, 724 bp, Cannabis indica
tttttatcttgcaacaaatttttctagcagcagtagttttaatttagcaagtttaattcatgtcattttaattttgaattattactcaaccatttgcatgttattccctcttactttaagttgaaattatttggttttacgtcaaactttgtttgcaatccctatggagacgatcttacttatcactttattacttgcttgactgcgtatacttgcgtatataattttcacaacaagtttttggcgccgttaccggggattgaaactaaaaaattgtgtattatcaactattttgcaacttattttctagtttgaggttttagtcctattttggtccgctgaatttttctttttcaggtgtaatctagtgtatgaacgtagaagaagaagaccttaaactttctcctattgaccccgaaattgaacacactttcagacaaagaagaaaggaataaaaggctaaaagacgctgcaatatggccgatgggtttgaagtttggggtgctcataatgatgctaatcctattgctttggccgatgatagagcccgagcaataagagagtatgcaacccctatgttcaatgagcttaatccgggtattgtgagacgagaaatccaagcacctcactttgagcttaagcctgtcatgtttcaaatgctccaaacggttggtcaatttggtgggtcgccaacggaagaccctcaccaccatattcgctcatt

SEQ ID NO: 368280 - DNA, 520 bp, Cannabis indica
catactcatccattgctccgccttaagaggatcagcaccaccctcaaacactggcgggttctgcttccggaaccgctcatacaaaggttctaaacggttccctgcatccaatggcactaccagaggtgccggaggatcaggattagggtttagagcaggctgagctcgctgctctctcagttctctgatttgctcaccctgctgccgaatagtctcttgcattgcagcatataactcttcccagtttggtggtggtggagggttctcgccctcaccaggagccccgagcccagctagctcgcgggtacccctaccagttcgcctcgggtgcatattctatacacttgtggtcacattccaggtataaacaatactaataagtatttccaattattatagtcctgcccacaccattctgatatcaacacaattcagataatcaggcaattagaaaattagcaaactatcttttaactaaaagcttactgaaccatgagtcaatcaagtccttgcagccaat

SEQ ID NO: 368281 - DNA, 540 bp, Cannabis indica
tttctattttcatcctaagtttctagccattgtaaaatacatgacaatttgaagaacaaatgattgggatgggtgaaagaataggcaaattatactatttgatttctggtgtaaaacgtgatgttccttttgctttatctgctatttcagattcaataataagatatgacacagtctggcattacagacttggacactcttcttatatcaaaaatcactcattgaataaagctttacattttcacttaagctcttccaatggtttccattactctgtctgtcattatgccaaatagaaaaagttgccatttgtttcgaatcataacatgtctactacaccatttgatttaattcatgtagacatatagagtccttttaataccctaaccatagatggctgcaagtactgttgtgttttgtgccctaaataaaactcattttaataaaatcagatttactaattaatatatgatcagaaatcacttttatgttgcatggttcacatgatatattttatgattatgtttaatgtataaattc

SEQ ID NO: 368282 - DNA, 543 bp, Cannabis indica
atataatattttaaataaaatgataaaactatcattaatttaaaatatacctaatattaaaatatcttatcttataattaaataatatataaatattaaagaaattaacaaatttttacaatctgaccataatttaaaaaataaaataatcaatttttaaatataaacctcaaaatatcataaattaataataatctattaaaaattaaatattattaatttaaaatttatatttaagtttaaatatattaaaaataatactttattttgattttagggtttgaaattgggaaaatttggaaaaaattaaaaaatcccacaaaaatcgagtttggggtggctgcccaggaggctgcatgcagcccttgtgcgcgcgcgggaggggctttagtagggtatcacgccgagaaatctcggcacctgcagcctaggacacaggcgcttgcagcatcacgtgggcgtgcgttcagataatctgtgtttgagatccgcgcacccaattcaacccaaacttcaaactttcataactttctcaatttttgt

SEQ ID NO: 368283 - DNA, 533 bp, Cannabis indica
ttaacgttggcagcatcgtctccgagatagctgtccgaaggacggaaccagctggaagaaatgtaagccatggttggtgtccgagatagctgtccaaaggtcttctccgcggcaggcaccctcacattcggacagataaccttagaaaggttagagtcctccactgattggtgcggcaggatgagcttggccttccggcaattctccgtcgtgacaaggcccccgacgtcaaggtccgcacggtcgtaagttgcaaaggcatgggccctccggagaaagacctgagtaggcgcggtccgctcataggggggaatccttacccactctatgagaagctccgggtgctccactgctcggaacccggaggagaagaagaaacggtggcgatactccttaacatgagtttgcctaatataagggaccaccccatcattggaagggtgggcccggaatccgtaaaagccgtccttaaatttatccccctttttggggacagaaactagttcataaaaataaaaaatctccgctggact

SEQ ID NO: 368284 - DNA, 1161 bp, Cannabis indica
caatataaaggatagcataagaggagtctatgttaacattttacatttttttcttcctattttttctaattatatgacactatcttttttattttgttttgaaaaataatccacactatataaaataaaagtctcatatcgtttaaaattttttttaggtattatctatattggttataaataaaattttagtttcgtttatttctttaaattattaatatttatttttagtgattaattttttcaataaattttttatatatttattaagataattttattttaagaattttatttgtattgttcaatattcttatcttgttatttgttcaagttaaaaatatttttttacaactaaaatattttctcttaatttttatttgttcaaaagtaaaattttattttttatttcatttgcaaaaagtaaatatcaatattatatatgactgtttgaacactcttgattacatattttttcgttatgtttttttattgttttaattttataatattaaaacgtattgtttctacaaatttttttttttatttttagcagtttcgctattaactttttttgtaagtttagtttaaactatttattttatatggtcaatcagagataaaaataagaatatatatagatatatatatatatatatatatatactacatattatttttttttatatatttttattttgtttttttaaatattagtaattttactcatcacctaattcttatgaaaaaattccacatggtttaaatagtgtgttgcatcataggctttatatagatgattattttcttctctttattttgtcacaaagttagtcacattattttttgtgtgtgattaaagaatttaatcttgcctaattaatttttttaagaagaatgtaacatataagtctatgtgacatcttacattttttttcttcctatttttctaattttatgacacatcttcttattttgttttagaaaataatacacacatacaaagtgaaaatcccacatcgtttaaaaagattttaggtgttatctatgtaggttataaataatactttagttatgtttatttccttagtccaagtaattgttttttttaattcttttatgagttgattgactaatgtcttactcaataagtaatttatt

SEQ ID NO: 368285 - DNA, 480 bp, Cannabis indica
ttatgagtttttttgtttttttacatttatataggttttttatgtcataaatttgtaaaaaaaagatctcatatttgtaaacaataataagttttgtcggaaaagtcacaggcgccggagaagtcaccggagctgacaatgtcgccggaaaaactattggcgtcgaaaagccgtcggaaaaatcactgtctccggaaaagtcatcgttgtcggaaaagtcaccgtcgccggaaaaagtcacaagaagtagatgtctcaaatataaacaaaaatagaatcggttataattgaaatataccatgttctgcaatacaaggaataaaaacaaataaaacaaaataactcaaactaattataattaaattataaccggttataactaaaatataaccatttatataatataatgaatacaaacaagtaacacacaataatctaaaccgattacaattaaaaaataaaggggaaaccagttcctaa

SEQ ID NO: 368286 - DNA, 470 bp, Cannabis indica
aactaaagcataatttcaaacataatagatttgtgttccttgtaaatcgatgtgtagatttgtcaaaaagttagagcaaattttgacttaagaaaaataaaaattatcgtaaaataattgagaaaaaagctaaacataatagattttaaaatagagcataacaattaaaaacatcaagttaaaagtgttataaaataatataaaataatataaagtagatgagaagaaagaagaagaagatgaagagagaaagagaaagtgaatgagaatttctgagttgtttattccaatggggtgaacccctatttatacaaatacaagagtgagatattaagaaactaagaaaaagggaaactaaagaaaagaggaatgttgattacaattcatggtaataaataaaagaatttggacatccacataattattaatatttataacactcccccttggatgtccatataactgcctta

SEQ ID NO: 368287 - DNA, 976 bp, Cannabis indica
caagaaattagtttcttcatcaagaaactagtttcttggtgatttttgcgataatttttccagcgacaatgccaattctgacgacttttttggagtttgctgtcggtatcagaaaagtcgtcggagtagctgctggtgtcgaaaaagttatcggagttgctgtcagtgccaaaaaagtcattaggattggcattgtaatcagttcttgatgaagaaccaatttctggtgatgattcggcgacgactaggccaattctgacgacttttttgaagtttgctatcagtgaccgaaaaagtcaccggagtagttgccagtgtacggaaaaatagtcagaattggtattgtcgaccgaaaaaatcatcaagaaattggtttctttctttgtaattttttcggcgacaatactaattttgacaatttttctagtatcggaagcaactccgacgatttttctagcaccgacagctactctagtgatttttccagtaccggtagcaaattctggcgacttttctgacatcaatgacaaataaaactacctaaacaaataaaaacattaaatatggaatttgaaaactaaatttacatacatatggcatatcaaataccataaaaatacctaaagttaaaaaattaccatataaattgatcaaacttaaaaatatcatatttaaccaaacaacttttaaaatctcacaatgggtgtaatttcttcttttattgcctccaaccaaacgctatttaggcattggggttgggttgtgtttccaagcctggtctgggtggtggagtggagctacatgcttaggcggcttttggtgatgggagcttcgtttgcgtcgaggtgttggggtgtgtctaaggggactccatgggagaggaagatctcaaaggcttcagtttggcatttggttaatgcctttttttttattcgttgctatttatgttttagttttttatttttatttatatttt

SEQ ID NO: 368288 - DNA, 641 bp, Cannabis indica
actcgaaaggaattaaagcgctacgccggggccgttaaacacagcgaggtttgggaagttacttagctcccagctcaaaggccccaactcatggatcaaccagttacattcacggaagaagacgcaaagatggtgcgttttcctcaccatgaccccttggtcatagagactcccatcgccaacacgattgtggatagaatacttatcgataatgggaattttgtgaatttattgtttaaagaaggcttcacggggatatgcctcacagaccgggatcttttgccaagcggttcccaactcacgggatttaatggaactacacttatctcgatgggaaaagtgaggttgccggacaccttgtgtccgaacacaccccggagcacttttaaatattacacattcgtggtggtagactgcccaactgcttacaatgcaatcctcggccgaccggccctagtggagttcggcgcagttacatcaatccggcacttgtgtttgaaattccctactcaggaagctggagtagggaccatgaggggtaatcaaggagaggccaggcaatgttataatgttgcggcccacttaccaatcttgatggtccgtgaagttatcgagctgggaatggcggaagaagatgagtt

SEQ ID NO: 368289 - DNA, 691 bp, Cannabis indica
aaccatgcaacataaaatgttatttcttttctttattaataagtaaatctgattatattgaaatgggttttatttagggcacaaaacccaacagatcaaactcacttgagttgtctgatttataacagctccatgattcttagcctcttggaagtaactagtcatctggagtaggtgatcacgcaagttctgatgaggcttcatccgtgcattgattaaattcttagtcgcctcaaagagggcttgaattgacgccatctcgaacagttcagttaattggttcatgatttttacagtcctgagagtgtttgtaaaccttgtgttcaaggtgtcgaccatgctagacaacataaagtatcgagctttgctgttaacattctgccaacactcgaacttttcctttactgccttgggcttggctgctcaggagcctcttcagtcaacacaaacagggaattttcaccaatgagagcaatactaatgttctctctccatttaataaagttagctccatagagcttgttatcagtcaatagtgacaccatgggaattttcatagtcatgttggatactacaaatgccaataaatagaaatcaagtagtttaacacaaaattttattcagttttattagcaattaacaagtaggaatgacaagtgaaaatactaaaacatacaaatcctaaaactaa

SEQ ID NO: 368290 - DNA, 514 bp, Cannabis indica
aatagagacacaactaaatgtggagaatgtgcacatagtctgtgaattttgagaggtctttccggaagatctaccaagactacctccagatagagaggtggagttcgtcattgaattagccccagggactaatccaatttcaaaggctccatacaaaatggcacgtaatgagttaaaaagagcttaaaatacaaccgtgagctcaacaaggtgcccatcaagaataagtaccctctgccaaggattgacgatctctttgatcaattgcaaggctcgactatgttctcaaagatagatctaagatctgggtatcaccagctaaaaggtccagaaggaagacatacccaagacagcattcacattatataattatgattgttatgttatttaaataatgtatagtagtttggtattatttaaattaggtagattataatttatgtgacatggtttgaccgagaagataatggttaaagttgactgttgggtctgtatggtagatagggggccattt

SEQ ID NO: 368291 - DNA, 452 bp, Cannabis indica
gatgattgtacatgcgtgacgatctcagaagacaacctggcagctctgaataccaaattgtaacaccctaaccagtatagacgtattaacgtgattttaaacatattgtgcagctcgttgctaatcaacgagattaatgaaaatcgtgattaactaaaaattttctatttaattaaaacttataatattacatacaaatattttgggatcccgtttacaaaatactttacaaaagtttgctagtcatttacaaaatatttgtcgccaagcgactaacaacaaaatccttgatgtcccgaggatcgtacgctccaggcctaaccgccccgacatgtacaatcttcatctgctcatcctcacgattcctcggccttagccttacccttacctacacatatacatagtactgtgagtcgacagactcagtaacaaaagcataaattatatcatac

SEQ ID NO: 368292 - DNA, 864 bp, Cannabis indica
ttatatacccacattcaatggcttgtgatgatcaatgcaacaataatcaacctaaggaaacaatccatcgtcttggcaaagagcccatgggatctcaaagacccaacagttttgaaataccacgttcaaggaggaatgatggtaacgatggtcaaaactcaaaaaggagaaacagggatgccaatgactctaccagatacgtgcctaaaagtggggatgcttatgatccaaccaggtgttggggattattttaccaagatctagatttactaccatgtatgttgtttaacatcctaaatatgaatttctaaaataatagaatttaaacacatataaaatttaagaaaccttacattggttgcagcagaattaaatgactccttccactcagatctctaacccttgttcctttctatcgcagagtattatcaagatttgagcctgatactccttcaggtgctggattcttcacaaccttacacactatgattgagtacttacttgctatgtgtgggcatgtactctatcactagaaggacgaaaatcttaagaggaagagagagaaggattcgaaatagagagagaagagagaaggctcaaatttcattgaaggcttaaaatgcatcaactatcagttttggactatcactatctatttataggaatccttctagatttaggtttaaattatttggcattaaaaaattgataaataaatggtaaaaagaccttaagtggccgaccattaggatgtgggcccatcatttataattttgccatttttctcaactatttatcattttctttcacaaatgccacattttctaattcaaccacttaaatgccaaaactatgtatttaata

SEQ ID NO: 368293 - DNA, 811 bp, Cannabis indica
aacgtgttcttctgagacccatttgtttgaggggatgtagagtttgttaggagtattttatgatttgttattagtgtctgatatgactattgtattttgggataaatcattcttaattgtaatcactttaaactcttgatatctcattctataaagaaaagatttttgtgattaagctaattatcttttgtcgttagaaattgtagtcatagtcagtgtaggaattttcttggtgtgaatttccaagtttgccctacaccaactcaagcaacctgtcaaaacgacagggacaaaatcgtcccagaaaaatcaatttaaacaattgactcacacgacaaagaaaccttggtcgtttctttcacacgacaatggaacttgtcgttttcacctgcacgacaaatcgttttaaaccaaacgatttgtcgttctgtcttgaacaaaactaagttcaatcagagctaaccctagctcatttgcaccttcgaacattcgagagtttctcaaactctctctcttcctttcctttctctctggttctcaaaccctagaaccagagatctcactcgatcaacagatcgatcttacccagaatccatgctcaaacaatcaccataaacacacaaacacatagatcaacaaacacacacaatacagagagaaaataaagagagagaacacaaagtttatagaggttcgccctaaatcaggggtacatcctctttcgagctcgccttgaagacgtttctcaggatctgcactatattgtagaagagtattacaaacaaggtgagaaatccaagtcacaatctcg

SEQ ID NO: 368294 - DNA, 1067 bp, Cannabis indica
agtatacccccttatcggttctgaagcttgtgcactcttgatctgccgtgtgcatctttatttggttgtaaccggcgtacgcgtccatgaaggacagtagcttgaatccagaggtggcgtctaccatctggtcgatcctcggcagagggaaacaatcctttggacaagctttgttcaaatcagtaaagtctatacaaactcgccaggttccgttaggcttcgataccaggaccagattggctagccattccgggtagtaaacgtcgcggatcatgccgtttgttaagagcttatccacctccttctctaaggcttcgacttcactgagtcgaggggacgtcacttctgctggaccgacggcatgtccaggttgacgttgaggacatgggtgatgacgtggggacttatgctagtcatgtcctcgtggcaccacgcaaaaacgtcaatggcacccttcagtgtcttaattattttttctttctcctccaggtctaggctatttcctagtcggagtactttggtggagtcgaggtcacacactgatatctcctcgacatcctccattggttctacaattttttcggaccccacgcggggatccaactcgtcttcttcagccgtttctggctcaatagtttctcggaccatcagcactggtaggtgggtggcaacgttgtagcattgcctcacctccccttgatttcctctcaccgtccctatcccagcttcctgggttgggaacttcaagcacaagttccgtattaatgtgactgcgccaaaatctaccaaggccggttggccgaggattgcgttatatgccgtcgggcagtccaccaccacgaaagtacagtacttgaaagtgctctggggtgtgtccgggcacaaagtgaccggaagcctcactttccccattgggataagtgttgttccattaaaccccgtgagttgagaaccactcggtgagaggtctcagtccgtcaggcctattgcagtaaaggcctctttgaaaagcaaattcacggaactcccgtggtcgatcaggctctggccaccactttattggcaat

SEQ ID NO: 368295 - DNA, 685 bp, Cannabis indica
tgaggatatagaaagtgtctacatggtcactcagtcgctagttccgtacaagaaacccgcgcccacgaagaaggatgttagcaagagagacatgaccaaattttgtcgatttcacggagactacgaccaggacaccaatgaatgcaacaatctgaagcgggaaattgaattcctggtaaggaaaaataacctgcacttacaaaattatgtcaaagccaatcagaatcagaggaacgataataaccaagacttgctacctccaccggtagatggacatctgcaagtcatcattggaggttcgcacatagctggatattcgggcaaagctcgggaaaggtatgcccgaacagcacagaacgagcaagaagaagttatcctggccgtagaagaaaggagacccaaaatcccacgggcaggaaggcctaacataaccttcaacgacgaagatgctgtcaaaatcagatttctgcacaatgacccgttggtcgtggaggtccagatagcaaacaagatggtggccagaaccatgattgataatggagcctcttctaatatcttgttaaacatttcttatgaaaagatgggacaccagctcaaggatttagccccatgtctcctgcctgtctatggtttctctggccaaggagtcgcacctataggacaaattcgtctacccctcactgtt

SEQ ID NO: 368296 - DNA, 688 bp, Cannabis indica
aaacaatattcctaaacactcaacaccacaatacaataataacaaaccaatatcaacaatatttttccaaaacacacaattattatcacccaaaatctataacaagtgaatcaaattccttaaagattgaaggaagtgatacttacaaatccaaagaagctttactccacctccattgttgaatgttcttgaaagcttgaggttgaagatgaagacaatggtaattttcgaatttggggttttatgggtgatttttggtatggtttttgatggtatgtgtagattgatgagtgaaattgggtttttaaatggattgggtttaagaaattgaagaaaagatgaaaagattgaagatttaggaaggaaaatttgaatttttttggaatgaaagaggctagggtcggctgagaagaaagggtgatttgaattttttgtgtaggattgaatggggggaaaaattgggatatttatagaaaatcgttagctagtcgcgacttgtggtaaagctagtcgcgactagcttaaaatcgtattttaggcttttctggaaaagggctaataggtcgcgacttgacatatccctagtcgcgactactggaacaaaaaaatttagtcaagtttctgtaagttcccaggtcgcgactaccaaaagggtcgcgacccaagaacctggtggtcacgaccactg

SEQ ID NO: 368297 - DNA, 707 bp, Cannabis indica
gtttaggtcgttacgaaaggtttttaacgtttttttcgttttttaacttttactactactaacaatttagttcgtaataaaataactatttttatttgtaattagtagtacatgaactaactaaacttaagtacaaaaactaaaaaaaaaaaaaccaattattgttttttattctctcacagatttgaagctcaatttcatttagccagccataatgtaacattttgtttgtgttagttatagaggaaggacgaagatttacttgcacaacagaaagtaccaaatgattagagggaggagatgtctcagttcaatgctgacacgggatgatatcgagtccttacatacacattagtcttcctcataaaaggaaggttaccctggcagggttatcaggtgagtcgttgctttacgaaacgtgcttaaaacttctgatacatgatcacactcttcctagctctaaatctgcaaggtgagaacaaaaactttctggtatgtaagaaaaagatggctatttcccctgagttgatgtgctgcttttgtccagcaccattcaagcagtttcttgaagctgttacaaatatgaagtttgatgaagagccaaactatgccaagctgatatcatattttgatagcctgatagagccaatagtaccattgagaccaattagaatagatggtgctcttaaggtaatcaaaatatattt

SEQ ID NO: 368298 - DNA, 594 bp, Cannabis indica
acttaattagtgccttgaaacccgatttttctcatcacgttttgacggttacacttgattaattttgatttcccaatatttgcttttgggagggatcgaagcgtctgaggcattttgaaatgattactttttttcaccatattgcctataaataaggttgattcttcctcataagtttacttttactaatttcttcactaaacaaattgaaagcaaaaaagatttttacttcaagtctatcgtgagattcccaccaaaggcatccgagcagctttgtctagactgaacttaggcgtcaaacagtgagtaagtttttcaatcttcttctctttttacttttcatgtttaatttttgggtttcatacatgcattcttgacttgttgtggaagatagatagaaaatctaggctcaaaactttgtgattttctttgtaatagtctgtacggcttcacggtttacgacgtttgcctttaatcacaaattgttcgtctttcacctagctcattcaaagcttcatgaaatttaaccctaaacccaaaaattttaaacttctgggttttgacttgttttttgtacatttttcatccttttaa

SEQ ID NO: 368299 - DNA, 884 bp, Cannabis indica
gctcacttggggggcactcacacggtttaatacatcaaaatagcgcagataacttacgcagggaaattttaacgcttagtataagctactaaacttgcctctaagtcaagtgtaggcgtacttaaccttggcataaagaaaagtaaatttggatacttacatgtcaaggcaataaaaagatagacaggacggtcatgtgtcaatagtaaaaggatttaaggctaaacaatagtagtgtttgaaaatagagtgcatataggccaaaactaagaacatgaaagccttaaagctgaatatgaataaaaaatacagtacaaatgcataaggttaaggccctgcaagaaccctgcggttcaaaatgcataaggctgaagccccaccagaattgtacagctagagaagaactaaacaaagttcctacaggaaccacgtaccaggctaaatctctaaggcaaggcagagttcctagcaggttccaagccaaaaggtagagttccttgcaggctccaagccatagacaagactttggtcaactgtacccaagggtacttgccagataatgtcattgtagaaggttgggtataagcaaattacggtttcaagtgtaacagcttggacaaatattgagtcttaagttaagcattcaactataatagactcaccattaagtttcatacaaagtttctaagggaaccacgtatgagactaaggttgtatatgcctacaaggccatgtaggaaaccttaccttgggtgcagcagaatattatgtctccttccactcagatctctaactcttgtatcctgtctttcgcagagtatcaccaagatctgagcccgaatgtccttctcttgaatctggattcttcacaatcttccacacta

SEQ ID NO: 368300 - DNA, 708 bp, Cannabis indica
agctctcttcgagcaattcaagctcatccggaaggagatcgaagtccatatccatggcggcagaatcaaacgggtgagaagagaaggaaaatggggaaaattatgattctgccgttttggcgggaaagctattgcaaacaaagcggtaaagtcggttttattttatttttatttttgagtgaaacatacgttttttttttttcttttgttaaattagatttttttccgagaattttgacatgtattgaagtatacctttgaatttttaagttcgttaaaataccccataactaggagttgctaagagtaaaattcgagaaaaagagccgtttgtatgggaaataattcaagaagttatgcaaggacatcccgtattgctgaatacggcgcccactctacatagattatgcatacaggccttccaacctattttagtagaaggacatgctatttgtttacatccattattttgtaagggattcaatgtagactttgatggggatcaaatggcgaatttattgaatttaaagacttttatctaattttagtaaaaaaattctaacttggatgaaaatttagggagcatgatttagcacatcgtaaaatttgaagggcatgatttagtagatatcaaagtctgggagtatgatttagtacataaacaattactgaaatagtaaaaattgaataaaattagacaaaagtctt

SEQ ID NO: 368301 - DNA, 569 bp, Cannabis indica
gaggcggctttaccaagaggttgtgagcgtcgggaggccgttgccaaagctaatgaggaagaggctaagcggagggaagcccaggcgaaggcgatgatccgcgaggaggccctgcggagagacaggctggaggccaggcaccaagaggagctgagggcggaaggcgaggccactgcaaagaccagccgggagcttagggaggccagggaagccttggacgagatggctgccaaggtgagatccttagaggaaactcaccaggcaaacttagaatccagggccactctggccgcggagctgaaggagctcagggacttcaaggaacaagcctcaaagaaggcaaaaaaggctgagcttctttctcccgtttcctgcagccgatacactaagcgctttgacaatggcgtcttcaaggcttggtctaccaatgacacgaatatcaagctaaccttctaccccaaaccttaggagatgatcgccaaacttcgggcgaaagaagaaaaagcttgatgccatgatggaggcacgcatcggacctcgttgttgggaatttattttaccaggatctt

SEQ ID NO: 368302 - DNA, 1025 bp, Cannabis indica
cccaaaactggggttcgagacccaaaactcaacgccaaactcgagacataggacccgaccttagacccgaaacccaagacctgactaccgggacacaaccccaaactcgaacccaaactcaaacttaggactcggcccaagacctgggacacgaacttgaatacgactgggatccaagaccgagatctgaatttgaacctgaggcttcgacctgacccgtaatcagtctttatatccaagacacggagctagattcgtacccagacctagactcgaaccgggatcaagactcgatcttggacccacaatcagaatcgaaccaggattggaacgagaaccaagacctgggactgtaacaggacacaaacctaaacccaaactcaaccagaacccataccgcgacaaggaccagaatcgggacctgtgacttaggacctaaactaagaccgagacctagaaccagtctgggacccggacccaaacccagaccgaaaaattagggccggaaaccaggacccaagaaccaaactcggtcttgggacccaaaacctggacctaaactgggactgggactgggactagaactcagacctaaaccctaaccgagacctggacccgggccgagaacccgagacctttacccaaactagaacacaaacttggacccaaactaggacctaggactcgaacatagattggggacccagacccgggaaacgggcccccaaactaggaccaaaactggggccttagatccaggtccagttacagttctaggtccaagtcctagttccggtcctaatcttgggtcctggtctacttccagtttcggttcaaattttgggtcacaaggtatgggtttgggtctgggactgggttcaagtttgggttagggactggattcaagtctgggtctgggtttgggtccggaggtgtgtcctagatccaaacactgactacaggttcagtccatgcgtcgagtccagatctggatcccaatcttgagtcccggtcttgttccattt

SEQ ID NO: 368303 - DNA, 801 bp, Cannabis indica
ctaaaacttctgcgatacaaccttttatcgtacatgacatatcgggcagctcgttgtcgcaactttcttgcttctaacttatcatcgggtaaaatgcccttttccaggtatgcgactattggagtcatccaggtgacttcttgagcgctatctatttccatgatctcttcttgatttatagttgggtgagccaatacatctaccggaattacatcgagcaactcggcttctctagttgaggccaaacgggccagtgtgtctgcgtgcgaatttcgggcacgtggtactcgagacacgaccactttcttgaatttctgcatgagctcgcatacaatggctaagtacttaaccaatctcccacctctggccaggtattctccattcacctgacataccacgatttgggaatcgctaaatgcctgtagatactcgattttcatctcgagagcgagcttcaaccctacgattaaagcctcatactcggcttcattgttagatgtagaaaactcaaaacgtaaagcagcgtgtaccttaaaattgctaagactgattaataagatcccgcctccagaaccttcgctatttgaggctccgtcgacatacaatgtccacatctctttatccttgcccttctccttgcccttctccaactctgccagagaattctcgattctcttataaggttcggccatggcgaagaattcgactagcgattctggtcttcgagcttgtaactccttccagaattcggtcctcggtaaaaatacctgttatcaacatacaaacaagcgaagactcggg

SEQ ID NO: 368304 - DNA, 598 bp, Cannabis indica
tttcgccttcttcgctctccaccaacgcctccactgaaacgagggtttgtaaggttgtggctctttatatatactcgcctatttggggctagggttttgggctcattttgtcttgtcaatggctatacgacgccgtttttaagtcacacacatttcatttttatttatattattttttactaatttactaattttatttttttaaatataattttggaaaaaaattctctatactcttgcacttagggatgaacatttgaacccgaaaacttacctagccgcccgaaacctagcaaactaaaaaaaataggttttaaaaagtagaggtcaggttcgagttacacctagttatctaccaagctgcattcgaattttattattctaaaatttaaaaaaaaattgagttacacctgaattcactcgaaacccgtgtatatatatattaatttttttatacatcttctaaaaccaatatcttaaaaaaaatctaattctaaacattgatatatcatttttcttttctttttcttttattttcttttttttcattctctcttttttaatgaaaaaatatataaaaaaataataatttttcaaa

SEQ ID NO: 368305 - DNA, 450 bp, Cannabis indica
ttctacattttattaaaaataatattctttaattttttatatttacattaaattatttcacatttaatgcttagaaattataattttaaaagcaaaagaaaatctattttttgttagaaaataattggtttgattactaattaaattatgagaactaatataaacataaatattttatatacacttaagtgaattctgaacccttaataatatccctaaatatgattaaaaatatctgttactgtcatttttatcgttaaaatactttcttttattttattaccaaaaacctcaccatttttaaaattagattagagttttaacagtttaaattaaataagtaatttttttttatctcacgcaattttcatgggttcaaccgcgtccttcacaatttctatactacaataaagattcgtgcacttgcgagttaataaatgtaaaacatac

SEQ ID NO: 368306 - DNA, 606 bp, Cannabis indica
gctgagtttgtgtcacaaagtccttttcaatctcagtttgcttcttttcttccccttcattcatgtattattttttatacacaaagcaaactcaaaaattaaccctaaaaatcacaccaatgctatttttcaatagtattaatttttatgaaataaactgtacatttatattttttccaggagaaaattaaaaaaaatcaaaccattatatactgaatcactctttgtttttttttttcttatttaataacatataagaaaaaaaattgctttactcaatcaaaaatatattataaataaatggtcttaattatatattttatttggagatatttcaagatgatttggattaggttgagaatagtgaatggataagatcttaaaatattctatatatatatatatattaataataatatagggtaagtttagtgcgtttttagatagatgttttgtatattcttatttattttgaaatataaaaaaaaattaattcaattttttttattatcgtgtacgttataattatttaaaactaattataaattttaaaaaatttaaataatttataatattaaaattaaatttatatattatattgtatgt

SEQ ID NO: 368307 - DNA, 596 bp, Cannabis indica
caaaaaaaacaaaaacagaaaattaaaatgcagaaattaaagtgcaaaaaatttttaagtctctccccccaaactaaatattacattgtccccaatgtatacagtaatatgcagagagaagaaatttacttgagaccctttcagaaagggttgggtggtggcggctggtcatagggatagaaccgaggaggttgtgcgaaatagttcgggtcatcaatcccaatagttcgggtaaccgcagagttctgtgataactcctgccaaaccaaaaccacctcccgtggctccttgcatgatctgctcaatgcttttccttatgacttgtccaatgttaatgttgtaccccttcattttggcgtacacatatttcaggcgatccatttggacatcggaaaaatgcttgttcggcactaaccgagcactcacaaagtacagccatgtttttgccaccaggttcagctcacaccggtatagaatatttggcgacccctcggtgccaccattgtcatggaacctcaacccaggaaatcccactgtctctgccacatccaccatatcaaactgctcttcctcctcaataattcggaggcgttgtt

SEQ ID NO: 368308 - DNA, 530 bp, Cannabis indica
cagtgtgccctcagatggtggagtaagcatgtatatggtgactgtgatttgcgaatcaaggagttggagttggagcttcaagctcttcaatccaaagaagctcatgaggctgatttattggccgagaatatggttcttaatagcttgggagatctatggaaacgtaaggaatctatgtggaagcaacgatctcgggaaatttggttggcaaagggtgataggaattcttcttttttccatgcctctactatggttcggaggaagaggaatcatatttggaatattaaagacccgaatggcagaattgtttccaaggaaaatgaaattggtggtatttttctagactacttcaaagatctttttgcatctaagggcatgtcgtcctttgaaggcttagaatctttgatttctaataccattacggatgatgagaacttaatgttaatgacagtacctgacatggaagaaatcagagctacagtctttcaaatgcaccctcaaaaagccccgggtccagatggtctctcggg

SEQ ID NO: 368309 - DNA, 605 bp, Cannabis indica
aaaggttaattaattcttttatgtattattttgttatattataaatgcttttaatggatgcttaatcaacaattgattttaaatatttgtagggtttaattgaggctgtgacaaacatcccgggtgctaggcatcgtttttgttgttttcatttggaaaataacatggtaaaaaagtttggcacatcacaccttcaaggtctcttttgggcagcagctgagatagccaatttcgagaattttaagataataatggagcaaattaaagaattcaaccaagaggcacatgactggctaagcgatattgacttcaagcactggacaatgagtaagtttgatccaaatgtgaaggtagaacatctcacaaataattttatcgagtcattcaacgattggatagaagatcatcgatacaaggccccaattgagttgctggaaggtataagaatgcaacagacagccatgatgtatgcaagaaaagtaacagctgacagatgggagcataagctcactccaaaagtccatcttaaggttcaagaaattaaaaaaaagcacgttttgcattggtgacaagagttggtaatgaagaatttcaagtggattatg

SEQ ID NO: 368310 - DNA, 610 bp, Cannabis indica
tcctccaaaggaagtgtatgattagagtcttaacttttttttttcaagtatttagatgtgcagtaggttcatgcaacaagtcacaactctacagctcccagtgcaccagcaccaccaattgaatcgggcaacttcagaattttcactgatgcagccattgatcctaagtgcagaatatatagtgttggagtagtagtttttgatgcttgtaatctggttaaagcatgtttttctactccttttactgggcttgtttctcctgctgttgctgaagccaagaccatatatcaggccatccagtgggctcaactgattaaactacttgtggatgtgcttatgactgattgtaaatcgattgttgataaacttagctcttgtaattggaataatagtgttttggatgatatattaagtaacattaagaacttgttatccttcagtccaaggctagctatttgtcatgttcatagagaatacaatgtgattgctcagaaagtagctaagctaggtcttggattagataatgagttagtttggaatggttctctaccttccttgtaacttgctgctttgtactctttcttctccatcttaatgaagcacaagtttc

SEQ ID NO: 368311 - DNA, 550 bp, Cannabis indica
tatttttatttgataagtatatttttaagaatatgaaattaaaagaaaaaattaaaaaaaaattagtacaattaaagatataaattttatataaaataaaaattattaaagtaaggtgtctttaaaattttttggggtgtaattaaaatttttcttttacttttctattaaatattgttaatgcactaatattatttcacatagggtcataaaagttagaggatttgagtttgccttaaatgagtttagatcgtattttagttgactcgtctaacccatttaataaacggatcgtattcgagttgacataactaacacaaaattgacatgttaatgacatatttaaaattaatttaatacttaaacatgtaataataggtcataaatgtgttacatatgttataatatattaatgggttgacatgtttaaataaaatatatttataaacgggttacacagtcgtttcgtgtcaatcctaaacgggtcgtgtttgagttttatttttaacacaattattgaatgggtcgtgttcgggtcgaacatatactt

SEQ ID NO: 368312 - DNA, 650 bp, Cannabis indica
gagagagagagtgacttttcaaatgatgagggggtaaaattgggttttagtaaaatgtatcctactttacaaattatgtctactattgtattaggtatccaattttattatttattaagtatacaatttcaaatttcccttattattattgttgttttatattattttaataaattattaagttagtattaaatgagatattaaattttgaattaagatttacaattatacaattaaaaataaaagtacaaattaatgtaaaaatatcacaaaattattttttgtacaaatataatttaatttttacacctcctattaaaaattatttaacgtcactaaattgctgagtctccaatttcttgttaacttcgattatgttaataatgatgatatgagggattatcattatagaaaatgaaatataaagtttgactaccgatgaattattagtcgtattaggtgtattttggtttgttttcaaatcgaaggtttggtaggttagctagctagcttcataaataaatatatagagataatatttttaataaattaatatagtggtcaaagttcacaaacgaaataaccgaagaagatccatgtcaattatcaatgggaaatttgattttctatgcttagaaaatcaaaaaatt

SEQ ID NO: 368313 - DNA, 603 bp, Cannabis indica
aaccactacctcccctgctaaagcctgatgcaggaggggtaggagccccgccactccctggagtactagccgactccgacatacatccaactgcgcccttagctcgcagtgccttctccaccatctcagcataggtggtcttgtcgtcggtggtgatcataaggtcatgtttgatcttcacatttaatccgtccagatacttttccttcttgctaaaatcggttggcactattcccgaggccaacctcgccaaccgatcgaactgggtggtatactctgtcacgctcatgttttcccgctgggtcaggtgggtgaactcatttctcttagcacttctaactgcctcattacaatacttggcgttgaagagttcctagaacctttcccaggtcatggtggtgacatcatgaatctgagacaccatgtcccaccagactagagcgtcttcttggaactggaaggtggcacagaccactctgtcatttccggtgacactcataaagttcagtatcttggttatcactgtcaaccactattcagctttcatgacgttcggacatcccagaaaaattggaggtgcttgcttccggaacctttcataca

SEQ ID NO: 368314 - DNA, 500 bp, Cannabis indica
gctgaggtggaagcccttaggagggtcttgcgggttgagatgcaaaacaccatcaacaacccggaataccagaatccgtgggacctaaatttggaccccctgtcggactggttcggtcgcttccttgggcccaccttagctccctttgctgcggagatgactggcgagtttgcgtctcagcttacccggtgtgcacctaagcggttcgctgcttgtgcatccttgaactccatctaccaagtccaggatctcagccactccctcactgtggtaagtgttttgtagtttgcttttccccttattgttttcttttttggagattcttacttatacttgcattattttttagcttgctgctgaggccggccgtctctccaagaacataatcaaccatggcttcgtcctgtctgattttggggacatggacgaagtcaggaagattcttcaggatcttactgctgagaggcagctttatcaagaggctgctgagcgccgggagg

SEQ ID NO: 368315 - DNA, 686 bp, Cannabis indica
gttgaagcaacgtttgataacagctctggtgttagctttgccatcagatcaagagaaattctttgtttattgtgatgcatccagacagggtatgggatgtgttctgatgcaagctgacagaattatagcttatgcttctcgtcaattaaaagattatgagcagcgctatccaactcatggcctagagcttcctgctgtggtttttgctctaaagatatggcgacattatctctacggcgaaaaatgtgcgattcatactgatcataagagtctcaaatactttctcacccagaaagatttgaacatgaggcaagggaggtggctggaatttgttaaagattacgattgtgagattctgtatcaccccgggaaggccaatgttgtggctgatgctttgagtagaaagggtccagggcaagtttgtaccaaggtgttgatagcccctcaactagcctctgagataatttttggttggaaaattgcacaatttgacacttcaatttgatctgttagagagagtcagaaaggcacaactacaagatcccgagttagttaaggttcgagacgaggtaatggctggttggcctagagacttttcagtctcgaatagtggagtgttgctatataaagcttgagtttatgttcctggtgttgatgagcttaagaaagagatacttgatgaagct

SEQ ID NO: 368316 - DNA, 713 bp, Cannabis indica
gtagaaggttgtccttgtttgaaatttacacctttgtttttattgagagaattttctttatcagctgggaaatttcgtctatagttctttttcaaggattttgcatagtttctcgttaacaaagcaacggtttcgttagtaatgccattaaattcctctagaaccggtttcttcttttcttgatgaataagtgcaatactcgcatcaaatttgtccttcactacatccttctgtttcttggttttcttccacctggacagtgacaactcataattttgcaaggacccgatgagctcatcaagatcaagttccttaatgtttctcatttcttcgattgaggtaactttggacatgaatcttctggggagaacaccaagaacttttcgaaccaattttgaatttgagtaggttttccccagagcataggattcattggagatatcacacaattttgcatgaaattctgctacggactcatcctcctccatggtcagattttcaaaggccttggccaaggcatgcaatcttgatctcttgacaacatcagttccctcgtttttaattttcagcttctcccatgcttcttttgcaagttcacaattggcaatgaccttcaactgattcgtggagacagcattaaacagagcatgaagggccttcgagttgaaattagctctttccatttcaattgtggtccattggctcataggttt

SEQ ID NO: 368317 - DNA, 671 bp, Cannabis indica
ttaggttcaatcttaattgtattatttatgttcttcaatttattcaataaagtccaccaattgaatcttctcgtgacatacagattaagaacatgatagtataatagagtggaagcgctaatcataaatatgaaatctataacttctataactatttagaagtaaaacgatgattttcctcaagcttgacttaatagagataaataatttaggcctcattttagtaattatattagtttactggaatatcctttataagtaactaagtattttaaggacaaaatatattgaaggtagaacggtaaatttgtccatattaaatgtagatcatatatagagaatctttggctatttggattaatgtaaccatagataactcataacgtatctatatcttggtacatatagagcattctatataattaagtgtgcaattctgaatatatagtggtgcaaggaagaattaataagttagagaatttacttggtaaattctagatctacttattggaagcttgattatgtaggcccatggtccccacactagttgagataatgctgctcgcagactcagttaattggttttaattaatcaattataattataaaattagactatgtcttatttataaattttcactaagcaagagcttaattgtgaagaaaagagg

SEQ ID NO: 368318 - DNA, 976 bp, Cannabis indica
ccacacagaaagcatgtcttccggttgcactctcccgggtgatgtttcttgcaacgaggacactcagggtgagagtaaccctggcgtccacctctgccttggtttccacaaaaccacttactttgtcccgaaccaccaggtgctggggtgactttccttttctgctcattggtggagtcaccaccatccctaccatagacaagagtaggaaaagtgggggttccaccaacgctcgaagtccctcagggttcctgaaggaatttcatagcaccctcagctctcaaagccttttaaaccatttcagcatatgaggtcacttcaatggtagtgatcaccagatcatgcctaatcttagcacttaaactggccaaatacttttctttcttactaaagtcagttggcacgattcccacggcgagcttggccagacggtcaaacttggtagtatattcagtaaccgacatcccctcggtttgcaccaactcagtgaactctttccgcttagcactgcggacagtttcattgtaatatttagagttaaacaaatccttgaattcttcccaggtcatcactgtgacgtcccgagtgagggttatcaactcccaccacacgagggcatcctcctggaactgaaaagtggcgcaagtcacctgatcattaccaaccactcccataaagttgagaatacgctcaatcactgtgagccactgctcagccttcatcacattaggacctcccagaaacactggaggtgcgtgcttacggaacctttcgtacaacgactccatacggttgccaacaacaggtgttctgctggcgccgctcgaactgcaatggcttgagcaacttgctaaggaggcacgacaggaagaccctgctgcctcaacctctgaatctctttatcctgctggcggattcggtcttgcatttctgcaaatctctgctcccaatccggaggagcttgtggtggatttac

SEQ ID NO: 368319 - DNA, 1278 bp, Cannabis indica
tgtttttgtcaaaacacaacggaagtgggtcccacccacccccacccagagaatgagcaatggaattgaattgatgagtggcactagctaggtgctgctgtaatatatgtacactcataattaatttgatctggaagactttgttggtgtgtagtacttacactgtttcagtatatactatatattcaccatattatatatggcaattattttatctttttggccaccccaaactcaaactatacgcgtcttatttattaatcctatttcctataaaatatacttctgttttctatttctgtaaatgtatgcagtgttgtactcacactttcaaataaagttcaaacatttttctaaatgaaaaaaaataaaaaaattgatgcataatatatatctatataattatggttatataataaaaatattcttatttttttttttaaatattactattcaatttaaactaattttattttatattaaatattattttttaatattataattcaaatttaaactaattacatatttaaaaaagagattactattgaatgccggtagtttgaattattttttataagaagtgactttataattgattagaaatattcattaaatgtactattttaattaagaccgtatgacacagagaaatactaatcttgtacttttaacatttttacctaaaaaaatatatttactattaataaaaaaaaattattatacaactaaaatatatataagtaaaataaaaattaaaatataataatataaataatattaatctaatatatatatagaatattttccctttcaaaaaaaaaaaaaatgtatatattctttttcatataaaaaaatggcaaaaaatttatacacaatttttttattattatttttttttagtaaatcagatgattatattactacaaaacatcaatacaacctaagtagcatcacaatcaaaaaaggtccccaatgctctacaactcttcaaaccgaatttatcttttcgaaaaaaaacttttttttagtaaaaacgcctctaattgtattacaatacaaataaattgaataagttattagattcaaagagctaattcattcctatattgctggtaaacaaccgctacaaaatatcagagatggaatgaactgagttgctccactttaaccaaacacatatagcagtcataaatattggctctaaaagaaaacacgttctctagtttctctctgttcaatccacaaaggacacaattctcatccaaactattaata

SEQ ID NO: 368320 - DNA, 874 bp, Cannabis indica
atcgtctaatcagacgagcccgtacctatgcccggtacttatcatatgtcattgacgctcgtacttacgctcagtacgtcgccaggaaaatcgcatcacctaattaggtgagcccgtacctatactcggtactcatcatatatcactgacgcgcgtacttacgcctagtacgtcgccaggaaaatcgcatcacctaattaggtgagctcgtacctatgctcggtactcatcatatattactgacgcccgtacttacgcccagtacatcgctaggaaattctatcacctaaaaagctgagctcgtacctacgcttggtactcatcatatatcactgacgcccgtacttacgcccagtacatcgccaggaaatcgcatcacctaaacaagtgagcccatatatcacatgcataatatcataacataatcgatactcaactaatcaatattttcattatataacaatattaactatatctcaatattaatcaatgcattgcaatactaattgtattacatataacgtactatgcagtacaatatacttttcctacctttaatccaggttcatacgtttcggccaacccaagtggagaactatccccgatgatctcagccctatgtgacaacaacgataaaccaataagtgcttaccccaaaatactgcttatattcacataagagaatctagagttttctaccaaaagccgcagtataaatatactaatataaaacttatattttggctctaaaacatacaccattttgtagagctcgttgcaagcttcgaaacagtatatagaatgtccacaacagacacccgagtcaaaatttatggcaaaaatacgatttgtgatctcttaggaatttctaaaa

SEQ ID NO: 368321 - DNA, 731 bp, Cannabis indica
catatttgtatgtcactgtataccaccttatatatttttataaagaatattcactttttggtctcctcataaaaaggagaaaaggagagtcccacttataccaatctactcaaatgatatattctcttatctttatctttctcaactcatcacttctcttatttattaactcttctgtttataatttttctttatttaaaaaaaaaaattcttaaattacctactaaaaaaggattctgtttaaattttccaaaacatagattattaattcttacatcatatgggctctgccttatttacatttaaatgttaattctcttgtgtttaatcatttatagcattttttagttttacacgtgattcatagatttataatagccatttgatgcttgtctaattccaccttcattttattaaattaggcgatttcatgctattaaaaaaagagttcattttattaattaagaaaaacttattagggtcatatttatatatctctaattttactctatttatttggttttatgtgtaaaaaacaaacaaacgagctaaagttgaaatctgggcttttattcaaaatgaaaaattcaaatctgggccttgtttccaatccaaaaatgtgaaagcccataataatattttgaattgattattgcattatttcaaaaaaaataagtgaaaattacattaaatatgagattttgtaaaaaaagttacaaaaatatgacatt

SEQ ID NO: 368322 - DNA, 833 bp, Cannabis indica
agggcataaaatccaacagaaagaagaggcaacttctcagccagtcctagaatcttgaggagaggagtgatttaggagagtggtggcatgctggcagtgctgtaacgccctaacaattaggcacaccacgaccactagaatatgaaaccctaatcccctaaattgggattactagaaggataagtgcaggaaatttaaactttatttaaaacataatgaaaatgaaaacttgtaataactttaacattacaaataaccaaaagatacatgtttcgggatcccgtaaatatttttacaaaatattacaagtcttcttcacgagccgacctaagcggcaaaattagagttacacaatacatcattgatagaccccaacccgattggtctagtgtggctcgaacatgtacaagcatcgtcaagtcctcgcactcctggctgatcagtgacatatttatcatttcctgcacagtagagcacctgtgagccaggcccagtaagacagtataaatattaatattcataattctacatttcacatacattataatcatgccagtacacttattgtctatttggcatagacatgagtgttacgctcacacgcctatttatgtctatgtggcatagacccacgtgttacgctcacatgtccaaatacaataaggccttagaacggttcatctcgattttagttaccgagtccaaccagattatgccttaaacacataatcctttaatctcaatatatataacatggcatagtatttcacactaataattactagggtaataaccctaggccattaaaccgctcactttagggtaataaccct

SEQ ID NO: 368323 - DNA, 382 bp, Cannabis indica
ttcttatttttaattcatattataaattttataatttaaacctaaaacaaatagaaaacaagtgtaattatgcacaaaatgaatataatcaattgatacacatctctaaaacactaccataccaatcactcactaccaccgccaccactgccgccaccaccaatgcagcaaaatttcgagaaccccaaaactccgagaaccctaaaacctagaagtttgaaacccgagtatgtcgagaacccctctccctttcgcatgagtctctctcttcgttccccagcaaaaatgtaacaccctaactaccttaggcgtattacgtgatttttaattaaacttataaaacattattacaaaagactcggatcccgattataaaattatt

SEQ ID NO: 368324 - DNA, 496 bp, Cannabis indica
ccattctgacccacaagaaactctgggggctcccccatggccgagacgaagagtttcagtgtcgatgtgagggctcccccatggccgagatgaagggtttcggtgtcgatgtgagggctcacacagtcgaaatccatcctggggttgtggttagaggaagtggatcaatggagttgtccttggacgagctcgaactcgacatgtggaggtttcgattgctagagacgatgaccaaagctcactagggtggtctttgttgacggcgagctcatagtgacggtgacgaagggggagggcattgagaactcggagcacggaggcaatggcggtggagaattttggggcgatggcactggaaatcggaataatttctgaggaggtatgggacctaaacgacaacaatggcgagtgtttgctttgcacttgaacgagatgtggggtctcaattcttgccccttcagtgagcaagcttctccactgtctcacctctctctct

SEQ ID NO: 368325 - DNA, 502 bp, Cannabis indica
aaaaattgaaattctgctgattgaagttttattttaggaaattttctagtgggctgtggtcttgttcagaccgtgtatgagttgtcaataaggtgtatattgattataaatacaccttatagcagctaggtttagtatctctttcatacactttgaattgtattcatatcttaagaaaagagtgtctttgttttgtagagaagagcttgttcgactcttactctatttatttatattttgtattgtctagagcttgtcttcaagtctacaaagaagaagaacaacagtgctacctttgggagaaggtcttacaaagcttctgagagattgctttttaaatcttgcatcgggtggaagcaagcactcttcaaggagatcgaagggagttcaagctcttgaagtttcaacaaggttcgggtagaaggtggaatacatcaagattgcgacatataataagagggagtctatttatgcataagttaattactttgtatttttgaga

SEQ ID NO: 368326 - DNA, 1015 bp, Cannabis indica
tattatatagtatactatatatacatatttattggtagttgatggcattttgtgcctcctacctatttgttagttgagtgcatttttgcctcctaaccttttttttttttcttttagtagttgagtgcattttgtgcctcctacatacttgatagttgagtgcatttttgcctcctattatatctcctctagtgatggcattagtgcctcctagcttttatttttgtttatcattttagttgatggcatcttgtgcctcctaaaatcttattattattactactactactattattattatagttagttgatggcattttgtgcctcctaactttaatataactatctatcattattattgtcatttttttattgtatttatttagttgtaattttatttactttgcttaagaaaatacttgaaaaaaaaaaattaaaaacaaagcttgttctttcaacataagcaatttttgcttaaaggaaatttggcaaagttcccatccacacttaataattaaccccggggagttgttattaagtcgtgagtaagtggaatcaaataggcctgggaacaagtcaaaccaaaaaaaaaattgaaaaattaaataatttaaaaaaaaaatcataatctctttgtgttataagtatgctctgtggttgcggtttataactgatcttccacatcagaaatttgtcttcttgagattattgtgtgttatttgtgtttctttgtgaaatttgtgacattgcatgcatcattggcaacgtgattctaaaaatcgtttggtaaaaagagtagtaactttaggtgaaattgaaagtgtttttgaaaaattaagcataatggaacaagaacctaatattgcgcaagaaaaaacactacttgaatatttttcacctatttcatctaatgctccatcatgcattgttttgcctactactaatgccactcattttgaacttaaaccatcaatcattcaattgttgccttctttttatggttttagaaagagaa

SEQ ID NO: 368327 - DNA, 687 bp, Cannabis indica
ttaatacttatggcagcaatacgacttctcccatgcggcattaaatgcgaggtgactgctcagataggattttatacctcccggaggtgctttgttatagccttgctctccgggagtatgtgaaaccctcatgccttctccaggaggcatgttaaatgctgatccttttgatcaaggagacttagtcgaattatcccaaagtcttgcttcttcaatccacgtgtcacagtcaggttggtccacgtatttttgacaaaatggggggcaacatttgtaatagtaattaaaaaaaattattattcgtcctaaatttatcttcgaaaataatgaaaatgatcatatcgttaaactatcaaaacattcaaatttaatttaaaataatatttaaaatttaactaattctaaatataaaaatttgaaaataatttttaatacgaaaataaatatgaacacatttattattaattgcaacactttaggtggattaattatatttaggtttaactaactacatggatgctgacgtttacgtggcaacatctaataatttgttatttttttatttaaaaaatagagtcacccaataatttctcataaaccaagaatgtcgtcatatagccacattttatatagaatagaaacaacaagatacaaatcctttataaatattaataattatgtggatgt

SEQ ID NO: 368328 - DNA, 567 bp, Cannabis indica
aaaagacaacgcacaagatgagtatttggtcgggatatcgagcgttaaaacgggcaaatatgtcgaccaggagtacgcaacagattaaagaataagaatattcaacgaaaagtcaaaactcgggaagtttgaaattttcgcgagttagtgcaaaaaatttcatgaagcttaaaataagcaagatgaaagataggcattatgcaattcaaaaagcacgcattacggatgatgaaatcgcatgaaccgtaaaacaggaaaatcgtagagtttttaaacttagggtttcctacatatcttctacaaaaaaaatcgaaagtgcattcagaaagcatattcaaagtaaacataaaggaaatcgagaacttcctcaaggaatcaaacgtctgggttcaggttacgtcaagccaaacgagcagttttgatgaaagaacttcagcaaacttgaagccaaaaacccctcttttttctctaagcttacttagcaaggaaggttggtgtggacaaacgctcactggtatttaaagaaaacaacgaaaaagggggtaagtcatttcaaagaacctcaga

SEQ ID NO: 368329 - DNA, 455 bp, Cannabis indica
actctaaaacctcttttcttcacaattaatctcttgcttagtagaaattcataaataagacatagtttaattttaaaattataattaattaattaaaactaattagttgagtctacaagcagtattatctcaactagtgcggggaccatgagcctatataatcaagcttccaataagtagttctagaatttacttagattccttgctccactatagattcgaaattacactcttaattatatagaacactctatatgttctaagatataaatacgttattatttatccattgttaattttggggtgtttataaaataatcgatccaatccaatccgcaaagtgcagatatccacacttgtgcagattagattggattaaaaaattaaaaattcacacttgtgcagattagacgttaattgacatgtaaaagtaaccgatccaatccaatccaccc

SEQ ID NO: 368330 - DNA, 1148 bp, Cannabis indica
ggttcgtaacctaatctgagtcccctatccagacacctactatgggtctgttccagccctgtttcccaaatctcgagtccagatctagatccttgtcacaggtcctggtctggttctggtttaggtcccaggtctgagtttggattcaagatcgagaatggggtttggttctaggtcctggccccagtttgcgtcccgagtctggttccatgtttgggtctgagttcgggtcccaagtccaggtttgggttgggatctggttgttggttccggtttgggtctaggtttgagctggagtttaggtcctggtcaagttacggttctgggtctacgtccatgtacgattatggttccaagtccaagtcctggttttggtcccattttttggtccccgtctacttccagtttcagaccaagacccttgaacaagactaggacagagattgtggtccaattctcgctctcgatcccagttttgggtcctgagtcatgttcaatgttcgggtctaagtttaggtctgggttcaggtcccgagtccgggttcgggtttgaattcaggtttggaaccaatcccagggtgggtttgtgttcgagtttggatcctggtccggttacagttttgggtctgggtccatgtcctagtcctgctcctgttcctgggtcctaatctgcttctagtttcggttcttgtttcaagtcacgaggtacgggttcggggcggaggttcaagtctgagtttcggttctcgagtagggttcgaggctaggtttggtttcgggttttgggcctgggtctagttctcggtcccgttcaaagatctcggtccggttcaagtttaagtttcagtttgtgttcccaagtgtgggtctgggtcttggtatgtgtctgggtcctgatttgagtttgagtttgggttcgcgttctagtgtacgtcctagatctagacaccgacaacgaatcggatccaaccatcaagtcctggatcccaggtcctgtggtgggtcctatgtccaggtttgggtcttgggtcaggttcccgatcgaaatccaagttctaaggcccaagttctaggcctagttttggggccgaaattcttaggtctgggtccccccatctatattctggtcctaggtcccggtctgggtt

SEQ ID NO: 368331 - DNA, 648 bp, Cannabis indica
ttaaatttgagttaaataaaaaaagatattaaaatttaatttctaaattgttgataggtgaagataacacgtgtaaaagttgcaaaaaagaaaaataaggatactcttaatggttggattttaattttcttttgcgagacaacattgtaatatttgtattttgtacttttcattctagctgaatctgctcgacaaagttattatttttcatgtaagatggtaagatatagtgtcaataattaatttaataaataaaatctacttatgatactcaagtacatttattttatttatgtaaaactatatctatagaattcttcaaacctgaattggtgactattgatgaaatagaggaagaggaagaagaatcgcaacagatgaattgttgtcatagaagaaaataatagcaatgttctatttctatattagcaaaataaaaaaaatacacaaaataataattacaatttagaaaacaaatgacctcttctaatgggtaacttttggtcacctataataaattagaaggagagtctggtgtgtttagtaattagtttatttttacattttgttttaaatcaagatatttttaattagtatatttttaaaaagtgacccatgaatttctcataaattattttatttttaata

SEQ ID NO: 368332 - DNA, 479 bp, Cannabis indica
agtatttgtacgatattgatggccatcccgagcctgaaagagtgatgcgaattctttatcatgagatgaagagaagatattctgagagaaagaatattaggcacacatggtttcaggaacattattttggggatccaaatgatttggcaagtgttattgaagctgtacctgatcactgcactacagagagctggaagcaaatcattgacttatttttgagcccaaagtttattgcgcaatcaaatcaaaacaagaaaaatagaggggaaatgcagtatttgtccacgcaaggctcaaagtcgatggcagcatcttgtaatgaatttgtaagtaaaattattaactttctattagcaatttcttttactaaacacaaactaactctatttttgaacaggacgtccctgaagactacgcaattcatacttggaaaaaaggccaccttagaaaaggaacagaagacacttggattagcgaga

SEQ ID NO: 368333 - DNA, 503 bp, Cannabis indica
tttgcatagaacacttaaacttaaaaccataaaaaattaaagaaataagaggggaacttcgcttaccagggatttgcaaccctcaatccctaagaaaatcctaagagaaactctgagaaaattgcaagaaaatccagctactaaagctctatgtgtgatcgacccccaagagagagagaaaaagagacttttgaattttctttttatctttctaactttgattttcttgaattatcaagtttcgttttcaacataatgcatactcactagagacaaaaagaatggattaatactaaaaagtatgttctgaaaagtttatttttatttttaattttttatttttacttacgtcgggtatatgtccaggttcagattcgggctcaagtcagaggtcgcgtttagcgccagggccgtgagaggatttgggtccgggtctgattgaagtctaaaatattaattaggaaaaaaactgtttaaaaaaatattaaaagttgttttttttt

SEQ ID NO: 368334 - DNA, 779 bp, Cannabis indica
aaatttgtatcaagtattttacgtggcaatattatttgatatcttagaatatcgaggtttaacgaaataacagaattgtaccattttacccctaggcttacgaaatgactttgcagggaaataggggcattttagtcttttcacccttagagcttagtcactcttttttgaagagataggtggctctggctcatccttttgacggtgaccagctgcttaggaagcaaacaaaaaggaaaaagcaaaataaaaggaaccaaaaagaaaaagcaaagtcaaaagcaaaaagaaaagtaaaataaaaacaccaaatcaccttctccttctccctctactttgtggcttctaaactagggccaaaactcagagttttccaccattttcaagcctcttcgtagctggaattcatcaaggagttcaatccctagatcctccaatcttctaaggtaaaacctaacctgaaattattggttttctagggtttttgttagttttctgtggctgtttatagtagaacatgttgaataagtttaggaaggttatgaaataattattaaggttatttaggactgtttataagtagtttgaattgttttgggtggttgtagcaaaagttatgcaagtttgagtttaaagaactcaaacttaacttggttgcgataacttgaatttgcaaacttagttcaggtttcttcatgaaatatgttcattatgatgtttttagatgctgtgcaaaatttggtaatgtttggatcaggattggatgagttatgggattt

SEQ ID NO: 368335 - DNA, 506 bp, Cannabis indica
actgtcggttgaccaaatctgagatcaacagtttggtgctttgagagcgatttatcaatttattttatcaaacaccatggttagcataaggagaactccggctacaacttctgcctcatcgggtcttccacaagaccctatggcagctgatcctgatgtccgtgttccagacacaactgtaatctccatgaagctgatagactagtcaggtggacactaccaaccctgttggtcttaatggccaacctttgctgccccgggaggactctccgctggtgcctcgtactgaaggaatggccaatgtggagcaacccccaagcaccacgactggatctggtccccggtattatgttggagagatggggtcaggaattggcaagccagccattggcgagccccatgtagacttgggagaagatcttgagtcagccagacttagaaaggtcgtctgtcaagtcagccaaattgaagaaccacgcgttgttggctacgatgtattcgtagaa

SEQ ID NO: 368336 - DNA, 545 bp, Cannabis indica
tcttatttaagaattttcactaagtaagggcttaattgtgaagaaaagaagttttgggatcaatttgttaattaagagaccttgcactgtctaattaataaattatataaatggtaattttatttagtaattaattataattattcaataaatagttttggcatttataagtttgaattggaaaatatggtattattgtgaagaggaataagtggttggaaaaagtgataaaattataactagagattggctcatttaatgtgtacagccaagtgtgattttcggccaatatttattctcttttaatccatataattcaaccctaagccttagttgaaacactatgaaaggaacatgatactctcactcatccaacttttgtcaacttgactattcaaccaaacctagatgagagagttccttccttagtgatcgtcagttattcgaacccttagtgatgagcgccatgcccacacatagcaagtcaagtactcaatcatagtgagtaaggcggtggtaaccaaacccgaaggagagaaagagat

SEQ ID NO: 368337 - DNA, 568 bp, Cannabis indica
attttaaattaggtgttttacaaaatttatttagtctctctgttttgttaaatgttatattggattttatattttctaagtagtatatcccaagttattattttatcaaaataaaacttaataataattctatctagaagtgttacgacaagaccgattacaattttcacatttgtgcttcatgctaaaaattattttcaagttgattattaaaaaaaaattgttgaaaattgagctcagagtattattttgtaccattttaaaaatacaaggtttaacttatcatttaataaaatagagagtataattagtaacttttatacacaaaacacatggtccaaaatgatattaatcttgattattcactaagaccatttccaatggttacactaatttagtgtagaatcttctactatttgtgcaataacttcaatgattcacatcaaatatctcactaaataaatatattttacttgaataatctcgtattttatattatttgcataacctaaaatagttaatttatgatataattttatcataattactagtaaaaatttaaaatctt

SEQ ID NO: 368338 - DNA, 736 bp, Cannabis indica
tgcaaaattttaagaaatttggaaaagtttaacacgccgaaaactatgttcaaacagtgtgttgcactcgtcacaattttattttatacgcgtgtaaaataaactgtttgaacattgtttctatattttaaattattccgaatttttcaaaattttgtaggatatcttaaatagctataacatacatgaatatgaaaaaaaaattagattaaaaaattcttctaaatgccgaaataaattaagagtgcatcagtacatccctttcaagggagtacattatagaatttccctacatataatacaacaaccccagtacttaaaatttacagttacaatcacacactctcacaaactttaatatcccaccactaacacgtactaaatattatataatacattaaccatcgatccttcactagtaaagctgaaatgcagcttctctctcaatctcataggtacgtatgattttttgcaattagatctgcctctcttgattgttatcattaattctcatttcacattgatctcttatttatattaaaattttgtattttaatattccttgttttattatgtaattaattacctaattaaatgcagaataatgaaactgatactaaaataatttttctgtagctacagtagacaattctgtaactccagaagaaaccaaaaaaacaaacaatgcagttgagtaaaaaacacacaaggtttttgtacgtggtttcaacaatcc

SEQ ID NO: 368339 - DNA, 1484 bp, Cannabis indica
gagtcccaagtctcagtttggttcttgggtcctgagtttggccccattgtccaggttcgggtccgagtaccgtgttccgattttggtctgggttccgtggcttaagtccaggtcccccatccaggtttgagtcctaggatccggtttgggtcctagtcccagtttcaattttgatttagtgtctgggttcgagtttgggtctgggtcagggttgaggtctgattccttgtccgagtctaagtctgagtctgagtctgggtccaggttcggatcccgatctgggtctgggtttaggtccaggttcatgttcgggtcccgggtgcgggtctaggtctgggtctaggtcagggtctcgttccagatatacgttctgagttttgatcctggtctggatccgggttttggtccaggtcttagtcttggtctgggtacacgatgtgtcagggcccgacttcaggtcacggtttgtgtctgggcatatgttcgagttcggttctatggtgggtccacgtcctactcacggtcctagtcttgttcgagggtccctgtgttgcggttcttgtttaggttctagttttgggtcaggggtcgggtttgggtcatggtctgagtcccaaatctagttccggacaaagattggggttcggttctaggtctcagccccaattgtgtgtccctattttgcttccatgtttgggtctgagttcgggtgcaggttcggcatcgattctatgtttgggttgggatccaggtccgggtttcggttcggttctaggtctaggttgtagttcgggtcctagtccggttacggttccaagtctaggtccaggtctgattacgtttccaggtccaggtccacgtccaagtcctggtttctaacctcgttctgggtcccggtctacttccagtttcagttctaacttcggctcacaaggtacgtgttcgggtcaaggttgcgatttgggactgggttcaagtctgggtctagttttgggtcctggtctaggttcgagttcggggctgagccccaaatccaaacaccgactacggattcagtccaagccccaagtccagatctggatcccgatctcgggtctcggtctggttccatttcgtatgtcgagtaacgagttgggtcctagaattaagtccgggtttgggtttgggtcttgggtcccggtcctagttccgttgcccaagtccgtatctcgattctgggtccaggtcccgatttgggtcccattctatgttcgggtttgggtcctagtcgaggttcgggcttaagtctcggtcgggtttgggctctggtctgtgtcttaatcttggtcctggtcctagtcctagtccagctccagttccagttgcgattccgagcttaagtttgggttcgagtttgggtcagggttcgagtcctagtttgagtttgtgtttgggtccagatctcggtctaggtctgaatcaggctccgggagtgggttagggtc

SEQ ID NO: 368340 - DNA, 801 bp, Cannabis indica
tttgaccattttttcaaatcaatccgcacatgcagtttttccaatttcctaaaccgcacccgcaccacgaaactaaaaaactgcactgccaaaaatggtgtggtgcgatgcggtttctgcagtttaaactatcaccaataattaaacacagatacaacaaagcttgagcaatacttgtcaaaaataccacaagacttgaaaataaatatgaaaaaaaattaagtttcaataataatacaataattaatgggctttgggttggacgttcacatattaaatataaaaaattgatatttttataatatacggtggggtgcagtttgaaccgcatattaacaatttaaaaccgcaaattgcacacaccgcacggtttaggaaaaattcaaactgcgaccgcaccgtaaagaattttaaaccgctagttttttttgcgctgcgggcggtttgagcagtttgatgaacacccctaggcatagcatctcaatattttgccacataatatgtccacttcaccaaacatcctctaaaattttaccattggagatgcagtttacaaaacttaatataataaattaactctcttttattacttaaaagaaaattataatttcctacaataattaagttattaaataatatatctattctatagaaagtgtggctatgtaacagaatttttggtttaacgatactttttggatttctatgttaactttaacaggatatcctattaattaactgaatattctttattaattttatagggatacgattttgtcccgtgatgtactttcacggaat

SEQ ID NO: 368341 - DNA, 762 bp, Cannabis indica
aagaaaaaaaataatttaaaaacaactacaaatcacctacatatcaaccaattgtattacaaaaattactcaactagaaatcaaccccaaaacacatggatctaataacaagcatatataatcattttttttttggcaactctgaaatatttttaacaaattagcatgatatatatgtatatatgttaataggcatgttaattttaaattggttctaacaagcattttaacaaacacattatatacaagcatattccaatatattttaagctataactaaaacataattttaatcacccaattgaagtaacagataaaaaattataaaaacaaagataatttaaaaggcaaacaaaaagacccattcatcttttggactaaaatttcaaaaaaaagtatatatgtatgtgtttgtagacacatgtaaaagagtcaataatatgtgtttgtagacacacatatataagtcaacctctttgttcactcgtaccattatcagagaaagaataaataaatcattcaatatatattatatttcttcataagtaaagatgcaaaaattcaagtcaaatggacctccatttctccaaccggtaacaatggcagattgttgatggaggccctagctctctttctgtttctctttctcagctctacagtctacgctcgttgctttgtgccgtgagcttaggcgaacaccatccccggaatattcaacctctgaaaatcctagccacgttctcctctaactctctctctctc

SEQ ID NO: 368342 - DNA, 1014 bp, Cannabis indica
gtgcattgtaaaattttcctaaaagacttttgcttctttcgtccagaagaattaacggtttcctaaggtgatagattttatggtattttttattaattacttatttttatatttattgattgaattttcaaaaaaaaaaatacatagtcctaataaaaaaaattaaccagaattgtaataaatattaataaaaaatatcgaaatttaaagagatttagctccaaatattaataatagtctactcaccttgtattttattaatggtggttgtaaagttaagaacaaactcttaaatgtaaggaataaaaatggcagagtttctactcgctaagtgttgatttttgaatcctctccccaaatcatgtgtaaagttctaacctttaagaatgtcacgtgtgtgtacttttataaactaatttataataataaactcatagtttaatgggaaatagtagtaaatggccttttatttatttttattgaagcttaatgtcattttttttaaataatatagcaaatgacctttattattttttagtatctaaaatactcttagttatataagggtattattaacattatatttattctccaaataaaaacagaagctttgctctaaaatttaaatgacaaagcctctctctccttattttttccggttagtttggatttcttcaaatatttttggtaaattatcgtgatttctcccaaaaggtgatgaaatattaatctctcatccatttattcgattcattcgttggatccaatcattttccttaattcctcacaatcgaaagcgacgaagctctgctcattttcttcttcttctagttttctcacatctccaaattacaatgattatccccaaacaacgaccaaagtctcagtcaaatttttctgtcggtggttgttgcccctgatttttctcaatatacgtggaccaaccgaataaggacacgtggatcaaacaatgtacaatccaaaatatttgctaagtctttatgctgaaaggta

SEQ ID NO: 368343 - DNA, 611 bp, Cannabis indica
atttttaatgagggtggacatacaatattttagtaacacttcacttttttgatgtctataataattgctcaattaaaaaccttacgagaaaacttaagataaaacttggtaagagtatcatatgaattaactcttctcatttaggtattcgtagaaattttctaatctataaattccgatcttatatatcgtcttctcgaatgtatttaaattatattttcttcaatgtatcttccttttagttgaacgatgctagctgtattattttcataagaactgttagtgttgatatttttttaagtgtaatccatatgttttcccaatatgttatgttaagatctcactcccacacattctctatttgcttcctaaagtgcaagtatattagcataatttaaagttacctcgttaaaaatattgtcaggaaaacttagcgggacaaaacctgagttaagagaaaaagagtataatatatatttcatattcataattatttacaagttgccttgttaaaaaccctaccaagaaaacctagtgaaacaaaacctgagctaagagaaaaagagtgcaacatgaatatgtttccccctcatgcacatatgatccataat

SEQ ID NO: 368344 - DNA, 556 bp, Cannabis indica
ttttttaatctataatttgttttgttgtgaattaaatcaatccttataatagaagctaaggtgactacatacagtaaccttagagaaaagtattttagttatggctagtaaagtaaattgtaaaaataaaatggagaaaagaataagagttttctcaattatgtaattacttaatgtaagatcatatattaaaattaaatatatagtggggcatttttgtaagctaaattttttaagtataaaaatatcttttaattttaattataagaaattaaattaagagatattattttacatatatacatatataattttataggatttaccaattatctcattccatattttatttgataaacttagaactttattaactagcaatcgttaataacaatagaacgcactttgtcggaacaatcatcaaactgaagcacacgacctgtagagagacaagaatccctggctaaaacatgggtcaacttgtttgcagatcgtttgacaaaacacaactcaacattatttagagataagagaagagtacgaacatcatgaacta

SEQ ID NO: 368345 - DNA, 464 bp, Cannabis indica
agactatgtcttatttataaattttaactaagttagggcttaattgtgaagaaaagagattctagggtttatttgttaattacgagactttattaagtctaattaataaatatattaaatgaaaatttatttgataattaatgttaattattaaatatatagttttggcatttaaataatggttgaactagaaaatatggcatttgtgaaagaatagtataaatagttgaaaaatggtaaaattgcaagaggtgggcccacatcctatggctagccactaatgcttgattttaccatttatttatcaatttttttaatgtcaaataattcaaaccgaaacctagaaagattcctataaatagatagtgatggactcaaaactgcaattaatgtacttaagcctttcagtcaaattttgagccttctcttcttctctctatttcaaatccttctctctctctctc

SEQ ID NO: 368346 - DNA, 725 bp, Cannabis indica
caggctgcccaggctgctcaagccaatcaggaagcccagaattgggaaactaggtttgctgaaatgcaagccagaatagaggagcaagatcaggagatacagagattgaggcagcagggtgatcctgcagagaagttcctgtggcacctgcccctgttgcccaggccgagatagtggtagcgacaaacagaatagaacccttgtatgaaaggttccggaagcaggcacctccggtttttttgggaggtcctgatgtcatgaaagccgagtagtggctaacggtgatcaccagaattttgaactttatgggtgtcaccgggaatgacaggatggtgtgtgccacctttcagtttcaagaggacgcgttcgtctagtaggacatggtgtcccagattcacgacgacacaactatgacctaggaaaggttccaggaactcttcaacgcgaaatattacaatgaggccgttagaagtgccaagaggaaagagttcgcacacctgacccagaaggaaaatatgagtgtgacagagtacactactcagtttaatcggttggcgaggttggcctcgggaattgtgccaaccgatttcagtaagaaggaaaaatatctggaaggattaaatgtgaagatcaagcatgacctaatgatcacaacggacgacaagccaacctatgctgagatggtggagaaagcactgcgagctgagggcgcagttggatgtatg

SEQ ID NO: 368347 - DNA, 636 bp, Cannabis indica
gcataaaacccaacactacctaccaaaggttagtcaacaaaatgttcaaggaccagattggacgtaacatggaagtatatgtggatgacatgctcatcaaatccaggaatgttgggggcatatagaggatctagatgaatgcttcaaaatcatcagaaaatacaacatgaaactcaatcccttaaattgttccttcggggttagctcgggtaagtttcttggattcattgttaatactcgaggaataaaaaataatcctgagaaaattcaagccctcttaaatatgaaatcgccaacaaaggtgaaagaagtacaaagcctaactggtcagatagtcgcactaagcatattcgtttcaaaatcaacgaacaaatgtgttcctttcatcaacatccttcgaggtaacaagaagtttgaatggacagaggaatgtgagtgcttttcaagaactaaagaggcaacttacagaaccctccattctctcaaaaactctagatggagaagaattatgtatctaccttgcagtcacctgtaagtgttgtgccgataagattggagaataatgttcaacatccagtttaccatatcagcaaaagactagttgaggctgaagataggggtgaaatcggtcggtta

SEQ ID NO: 368348 - DNA, 1073 bp, Cannabis indica
taaaagataagtgaaaaaaaaaggataagtttttcctctttttctttgttaattaattttcaataattcgcaaggactaagcaagggaatcaaaagtcctaatttaattgggaatgagaatctcctaagatttttaaaattgatgcccatctagtatttttaaaagaaacgagcttagttcacgtcatctaaccaactacacacaagtgtaaagttgacttgggggcaaatgttaacctagaaacttttcctagtgacattgacatcattgtttgacacatggaaagaaggatgatgtcacggtgttgagtagacccaagtcataacagtcgacctgggaggggaccctagccctgtgcgcaggttgactttgggagcttcgggatggaatttcggacttcaataacttgaatacaactcactatcttttagtaatctctactatgaatacatggagcaatcaaatccaagtcctaggagctgaaattacacgaacaagcactttggaagcccacctagtcacctagggtttcactcagcgcccaggttgacattcccacctagagtttccgttttcaggaccatcttagggaaaatgagtcaaactttgattgggatatcaactagacatactgtaaaaatatttgaggcatctagaatcagattcaaagcaagttcatttttgagcacccagggttcaggttgaaaatttgtcaatctggatgccttccaagtattagatcgatgacctaatttttgcatcatcttcttcttcctcaaaaatggagaaataggtacttttggggaagaaacaacaccttttgggtgctaaaagcaaggcccagcgcccaagttgacactttatcatcttgggctgatttcgatgatgttttttgagaactcttccaagcatcttctccattttcaaaacatattaagattaaactatttttaacttttgtaagggccataattgggacccagtgctcaggttgatttgatgtcaacttggctatttccaatcaagttctcaaaaaaagtgttacagtaatttttttctatcattagaaata

SEQ ID NO: 368349 - DNA, 758 bp, Cannabis indica
agtcattctcacaatattctaaaaaaaaaatatgagaaggaatagacaaaataagactaaaatttactatagtttttgaccaaaaaaaaaaaaatacacactccaaagaaaagttcccctcaatatatagcattatgacatgctataaccgttcaatggaaaaataaaatcctaattaattgagtttgattcttacattaattaatttaaaaaaataagaatggaaaactaattataggaaattgatttctctcatttagtcaaatgtgagggagatgttgaggcctttgactgcggataaatgaagaagctgataacatttccttcccattggttcacataagagataaaacaaaatcaattaacattatgttgataaaaagtatctctagctggctgccaactttgatgcatgaaattgattatgcatatgctcttgtggcgtacgggctcacaccaagaagtggtcttacccactttgtcaactttacttattttgtagtattttattgctatcttttttatcttttctttgaccataccaaaaatcattttatttcctgcaaaatgaacataaactaaatttaaaataatattttcaattatataatatatcatattaatttcatgaaaaatattaatcaaaacttaatttaattcaaactttaacatcaataaaataaatatttttgaccactaatcacatggttagtagatccagaatcaacaatccaaaaagatttgccattctctaaaac

SEQ ID NO: 368350 - DNA, 625 bp, Cannabis indica
gaaaaaaatcatgtccacatttagaaagaatcaagacatactgatgtggagccgcgctgatatgactaagctcaatccaaacaccatctgccaagcactggacattgacaaaaatgtgatgccagtttgccaaaatagaacgctgctggatctggtaagggcataaatagtgaaggcagaagttgacaagttaaattctattgagtatcttcggaaatcactataccctatttggttggaaaatccagtgggtttttatggtactaaatcaaatacgcagcgaaagggtttcatattactaattatcattgtaccatatctcaacggatctccagatgtgtgtacattaaatcaaaaaataaaatactagtttagaatatgcctcttgaagactataagggtatcctcaaaactttttgtatgttgtatcccttaatccagatgatcaggatgatgcaactggactcacaccaatgtcttccaaatcgtttcaccacacacaaggaatggtgtgacctattaggataaaatatataggtttgttcttgttgagttctcaacacatgaacaagaacaattgagagataatttttttttctttttctcctcttaatttcaaaaatta

SEQ ID NO: 368351 - DNA, 508 bp, Cannabis indica
cctggtccttttcctagtcctagttcggctctagttcctatttgcgattatgagttcgagtatgggtttgagtttgggtcgtagttcgagtcatggtgtgagtttgggtttgggtttggctttcagtcaaggcccagatcaggctccgggtgtgggttcgcgtcctgggttttggtctaggttgggtccgggtcccaagttccaatctcgacctgagtttggatttaggtctaggtctaagtccttggtttgtatcctggtctgggttcgagtttgggtccgggtctgggtctagctttgggtctgatttcgggtccaagtttgtgtctgagtttgtgtccaggtttggacctcgatctttgtctaggttgggtccaggtcgaagttcgggtcctgagtgcgggtccaagtttggttttggtcgtttgtttgggttatggtcctagtctgagtcccagatctagacaccgactactagtttgttccagccccgttacccgaatcccga

SEQ ID NO: 368352 - DNA, 511 bp, Cannabis indica
ttaggtatttatgccgcaaattagtgttttttttttatttatttataaaatatatatactaaagtgctacctcaataattaattgacttaaaagcatccctataaatataaaaactaacattattattatgagttatgacgacttcctcttctctttatacagatctctcacacttgaaagagaacaaatgaagattcatatatatgggactccacaagtttctaaattattatgattatcattatttcttttgatttgaatgttgttgaaaattgaaatatataataaccaataaataaatatgtgtgttgatcatgaacttatttatttcatcattataaagtttctgggatttgatcttgtgggtttcaatttcctttgacgaaattattagttgatccatggcttgttgaattgtttttcctatacatggctttctatgttttgcttcttattatataaagtttgattttttaattacaagtgtttttattattttaaatatatttt

SEQ ID NO: 368353 - DNA, 413 bp, Cannabis indica
aataaaaagactactaaaataaattaaaaatacttaaaaacaaagctaatttaatgcacaaaaagagctaaataactctattttcatagagttatcagcaataataagtccagagctcggggatgattgtacatgtcaagatgtttcaacttggaaaattcggtctcaagacgacttggactttattttgtagtcgttgtacaatatatttatcaagtgtattttgaacatgaatataattgtagaaacgagatcctgagtttttatatggatatatgtatatatatatttataaaagtttaaagtttatcataattttttttaatttgatatgatttttgagaaattctttgattagcaaaaatatgtgcagtaattagaatgtcactgtaacaccctaactatcttaggcg

SEQ ID NO: 368354 - DNA, 855 bp, Cannabis indica
aaacatgtaatcaaacacaaatatggataaattcacaatcaagaaaagagaaataacaattatcattaaccaaaagtaatttcaatcaacattcatcatctctctaaataggagtttagttgataaaatccataataacatccataatcaaaactaaaatagaaattaacatagaaattaagagtttaagaaagaactagttggtgattgcattccagatcgccatcattgcttcctttgcctcattctttcagttttgggtccaatttctgcctcctttccttctaaaacacgagccccttaaatagaaaatagggttcatacctttgaaaaagtaaaaaaactggccaaaaatctcgtattttgcccctggtcgcgaaaatcccgtattaggtaaaatacgaaaaataaacttgttgtctggcctcctagtcgcgaccatggaaagtggtggtcgcgactactgaagcaaatttgacagcttcagcatctttcagtaaaatatgcataactttcacatacaaactccaaatgagttgattcaagatgagttggaaagaagaaacagaaatctaaaacttctatgttttgagtttttccaaaatctgatcagaacatagtcaaatttaagcttgaagtttcagctttattttcttgcagaattttctctattctatagattgttgttttccaaaatttgatcaatttatacattccaagtgtgaaacctaaaaccaaagaaaacaagcgtaattctattccaaatataataataaagaaggaaaacaactataaaaagtgacccaaaacgtaggctaaaaatagcctaacagaagttgatcaaacaagtcatca

SEQ ID NO: 368355 - DNA, 786 bp, Cannabis indica
gaaacagagttttatttagggcataaaacccaacaagttctgcatctaaggttgtccgaatttacaattaaattctgcctcgtacaatcgagctcgccgacttccactattttccaccaaaatatgctaaaatccctccaaaagactctaaatgcatgaatagtctttaaaatagcctaaaaaattaaaatcacactaattaataatttgacgaataaatttaagaatattaataaataaattagttatatatataagacaaatatggattcatcacatatctttgtgatacgatcccagatttataggaattgctcttgtgcttaatgatgcaacttctggaattactaagtgttgatatgctgctcggagtgtccgttgttcggctgggaggacctcgtccttgtaggtatatgcggtgttctgctttgaacatctctttccggcaggtatggagaatcaaatccacgtgtcactagcatgtgatgccacgttaaagtgcaaaaattaggataagatttttcccccaagtctgtatgggacttccgaagttgcgtgtagacttcatccgagctgactttacatttgaatgggtgacacgtgtcgaatgctgatgtgtgtcgtaagccacaataaatttactatttttttaattccaatacttccaatgattttagtataatcgtaagtaagggtcgatcccacgaggactatatttattcaattattcacaaattagtaagaattaggaaaaagaggggttttgaagattagaataaaaataaa

SEQ ID NO: 368356 - DNA, 427 bp, Cannabis indica
tttgatgacgaaccttcctcatcatgcctagttctcttaggagccattttttttctcttaaaatgtttttttccatttctattttttttctctttttttttcggaatttttcttttttttttttctgagtttttttttcaaaaaaatgctaagaaaaattgggcagcacctccccttaattttctacttcccaaaatttacaatcactcaaacaaacccaacaataacacaatacaattccaatcacaacaaatccacacaatatgtcactataccacccaaaactttataaaaaagtaaaatcaaattccttaatatggtaggaagtgatacttacaacccaaaagaagtttttaactccacctccattgttgattgttcttgtaaagcttgagttgaagatgaagacaatggtaattctggattt

SEQ ID NO: 368357 - DNA, 888 bp, Cannabis indica
accgatattgacagtaaaataaaaaaaatatcataaacttactattatgtcttttctaagtcaatgtcacttagttgatcttaggtcaattgatctcaatcctgagatggttaagttctagcttaactgtactatacgtgctctttgacttgttcattacagttgccaatagggttggcctaatacttgcatcttgggaactcagtggttcaattgaatgggagtgttaatcatagatatggaatctatatcttctattagaaatgaaacgatggtttcattaaagcttggcttaatgtgatacatgatagagcgctcattttagtaattatattagattactgaaatatcatttataagtagctaagtgttttaaggataaaatacattggagggtagaacggtatatttgtccatactcaatgtaaaccatctatagaagatcattgactatttagattgtaaataatggataattcataatgtatctatatttagtatatagagtgttctatgtaatcaagagtgcaattctgaatctataatggagtcaagaggaattaatgagctaggaaatttaacttagtaaatttcggtatctacttattaggagcttggttacataggcccatggtccccatattatatgagataatatcatctgtagactcaactaattgattatatcagtcaattagaattacaaaaaaaaaaaaaactatgccttatttgagaatttttaccaagtttgacatttttaagaagaaaagagaaataagggtttatttgttaattaatacactttgtgggtctaaattataaatatgtttaaattatattttatttgataattatttataattattaaaataaaatttgtatttaaat

SEQ ID NO: 368358 - DNA, 651 bp, Cannabis indica
tcgagggagaagagtctacaacagcctccaaaaaagcagctaaatggtagcctattttgactgtataaatcccagaatgatcatgatgccaaatcagcaagtcacttcttggaaaaaaaacttaaaggcagggtcaaaatcctctcaacataaaggtacgttccattagcgttcttcggtgattaaattggcatccagttcatttggaggaactaaataccgaagaggattgaaagaagtgtgacctggtatccacgggtctttaccactccagattaacctcccttctccaactttctaacggagtccagtagttaaaagttctcgatcccatagaattccttgccacgttaaagaaggtgtatgccctggttttgagtcgagaatattagaatttgagaagtaatgactctttaacaacttactgagtagcgagtttggagtttgcaaaatccgccaagcttgtttcgctaacaaaacttggttgaaatgaacgaaataacgaaaacccatgccaccatccttttttgttttacaaagcaagttccattttctccaatgaattttaaatccttttgcatttgaatcccaccaaaaattagccatcattccttcaagttaggggtgttcatccgatccatccgcactttt

SEQ ID NO: 368359 - DNA, 431 bp, Cannabis indica
taatcagattgtaatgagttttatttagggcacaaaacccaacacttctaacatcagggaatggttttcaagctccaccaacagttttcagggaaaagttcttaattcaattgtgttggcgactttgtacaatgtttggatgaatagaaactgttgtatctatgatatgaagtgtaaaacagttagagctatgagtaaggagataaagttttgtgttaaaactagatgtttaatgggttgtaatgggggaaaagggaagcttgatagacatattgtcaatgtaattgcaaggtggccgtgagggctgggtttgcggctgcctgttgtggttgctctgttctagtggttgttgctgtgttttttttttttttgcttgtttgaataaagatcttccttcttgttcaaaaaaaaaaaaaaaaacgaaaatactt

SEQ ID NO: 368360 - DNA, 1252 bp, Cannabis indica
ccaattctgcctcgctatagcagttataatcttccttaagcattacttaaatatactttaatggttttataactttgcaatatttttaatttgctcatatgaatagttatattatctatccattttctaagttcaagtacttttatcaaggcaccgtgatgcctcgttttgttctttcctagctcgcgagaaccgttagtattcagttttatacacgagttataacttttgattttcctttcccgtcggataggttttaaataaaaaattatagttgtttgatcccttcttcgttaaaaaggtttgattaaggtgttataacgattcgacccctctctcgtcaaaaaggtttggtcagggagttataatagtttgactccactttcatcaaagaggtttagtcaagaacctttgaatttcaatttttttttttgaaatggagggttttcattataccaggtatttcaagatgaattctagttaatcatacataaatgccccttaagtaattttaaagactgaaactttgtaattacttaatataaataattctctttattcataattgaagttttaaatttacatcagtaatgcgagttacatcatttatttattgatagtagggtcaaaaatgttctgcgttctagtagttttttattagcgagccatcaggtcgagccaacttatagactctgactccaactactgcttcgatgacatatggaccctcctagttcgggttggacactcctgctgatgcatctctcgtatttgcaaagactcgtcttagcaccaagtctccaacattgaatagtcttttcttgacgttttgttgatgtatcttgtaactcgttgttggtatgctgcgttggtgattttcaactctattcgtttttcctcaagtagatctaaggacaattttaaaagttcctggttttcttcttgattataaaactctcttctgtgagtcgatatgttcacttcaacaggtagcattgattccaagccaaatgttagcgagaaaggagtgtttctggtagctgtcttctcggtagttctatgggcccagagtacctgaggtagctcgtcaacccatctgcctttggtagcgtctagcttcttcttgatggtatccttttatggtttttattcacagcttccacttgtccatttgcttgaggcctggaaactgacgacaagattttgataatttatttcctctcgcagattcagtgaacaagtcaccatcaaa

SEQ ID NO: 368361 - DNA, 545 bp, Cannabis indica
aaaaaaaatataataagaaatgacattgagcatccaaatctgggtcaataccagcaaaaacatccctgaacaaagttctagcaccatgccaatggcacgtacttatcgtgcttcttctgtttctttttatcctttgacggttccttagaaccgtcctttctctttgaaccagaagcccacgagttatcgattcttgttgaaactgtacttgttgaaacgttgctgggttttcttcccgagcctgttttcaacaaattaatttcctttcggacttcttctttctgaacaaatacctaagccctttcattaaaatcagtgatgtttcttactggatgaccttataagtcatcccacagcttgccccctacggttgatggatcagtaaagatccctgcctaaagggttgtaagttgtgtattgtcatccaaattcctaaccctagccggagctgtgctaaaatgacttaagtatgccttaaatgtctcgccaggttgttgccttatattggttagtgaggccgctttgggtcgtctatccctagcagc

SEQ ID NO: 368362 - DNA, 723 bp, Cannabis indica
agcggagacaacaaaagacccttccttccttgagtaaatctatactgatcaagcatgtttctagctgatgcaacaatatttgatgcagactaactcttctttgccaaacaaattcattctgcgcgcgccaaacaacccaactcaccacagccacttcctccatttcaccttcgtgccctctgccgaagatccccaacagtcagcttctgaatgttgcagccccagccccgacattgaccatgctgtgattccaagcagctttagcaaactcacactctaccaacgcattttgaacggtttctgcatgagcgttacacagcggacagtcaacattgacgggaacatgaggtttttggagctgaaaacaagttgggagcacattgaaagcagccctccataagaagttactaatcataggaggtatttgtaatgaccaaaggcgctttcaaaaatcagtattggcatcacggcacccagcacctttcgattcttgcaaaaatttataggcacttttaaccaaataattcccacaagtctcaagtctccagttccaaccatcatttacggttgaatcactaagctgaatggaaaaaataggtcctgatcacgtgaatcaaacaagtctctcactatctcctcatcccaagcgcgagtgtcaacttgaaagaggcagctgaccgatttgttcacaagagcagggtgccttgtaacgacatagctgtt

SEQ ID NO: 368363 - DNA, 822 bp, Cannabis indica
tcctctgttgttgcggccccgaggtgtaggccgttgttgggcatacgactacgttgcggcagtctgagatcctgataagtaactatcatctcgggtgagtggggtcgcgcacgctgtggtctaatctccctgggtgctggtcttggacagacatagttatcacgggagatggtgcgtcgtctttcccgtccatgtcccctaggttgaggtacatgtcgagcatggttgtctcggtagtcctcttgcccgttttgagggggtcgaggcaagtcttgacttggaaggcgactgggaggtgcttccctctgtcgtgacctctcccttggggctggttgatgtggtgctggtgcattagtacgtggaggctcaggatgccttattggtgatggggggaacctgattggtgaaggagggttccgaacatgatctcttcccctctcgtccacaccaatatccctaggtgctggaggtggttgagatggtgggatcccattattgtgtgttgtgcccctctcctcacgggagtctcctcgtgggggatctacagcattgtcttgtggggcagtaggtcctcgtgcatccctcctagtttgttgctgtgtaggagggcgtacattattcctcctattctcacgacctgaggttgttactcgtggtctttgttgggatggagggcgctcgctcctcccaccatggttgtcgttctcacgagaaggtcgttgtggtatggcactagcatcacgaccttgggttgttggtgacctagatctctcttgaccttcgggagggtaacgtgttgaacgactcccacggggtcgtccc

SEQ ID NO: 368364 - DNA, 808 bp, Cannabis indica
ttatatgacataaataaataatgcaaaaagatatgagattaaaataatcaaactttaaatgagaaaaaaaaagaccatagataaatttgataaaacttctaataacaaatatcactagaaagtcaccagagaagacaccgacatcaaaaaagtggtcgaaaaaattatctaaaaagttaacagagttgtgtcattgttgaaacagtcaccgaagttacatgtctcagatataaattaaaatagaatcggttctataacataatgaataaaaataagcaacacgcgtaataattcaaaccagttataattaaaataaaatcggtactataacataatgagcacaaacaaataacacagaataactcaaaccagttataattaaaaaaaaataaagaggaaataagttcctaaaatattgaaatataaattaaaaataaaactagttccacaacaaattgagtaaaaacgaataacacataatatctcataaaccgactataattaaaaaaaggtgggtatcaattttaaaaaaaaattaaggcataaatctaaattgaaatagttttataaaaaaaaaaacacacaataactcaaaatataagataaaaattaaagttattaaataaatttttatactgtaattatactataatttacagctaaataagcaaattactatgaaaaataaataaattagtaactggaatgagaatatttgtaatgatttttataatttaagaggaattttacataattgagaaaatttaagagataaacaactacaagaagtcgtcatacgacaaaaatc

SEQ ID NO: 368365 - DNA, 582 bp, Cannabis indica
agaattaatttctatgggaaattaaattcttaagggctaaaataataatttgtagaaatttattgttttaattaataatggctgaattgtatcattaatattatatcaattagttaaatataatattaaatagagatatattattttaaagaaaataatatttattttaatccttgtgaaataagatattaatgagaattaatcaattattatttattagtagaataaataataactcttatttgtggcaaaattgagaaattaatttttgaccttaaaatatgacccacacctgtaggcccattctacacgggtagggtgacatataaaggtccatgattaatttattttaattattttattaagtttaaatattttaaatcaaattaagttaattatcttttaattatcaattaaatatattattagataattgcttaattaaaaggataattattattaacgtaaattttcgttaaccatatttgagactcacgatgataattcaacacataaaaataaaagctatagaaaaataaaatatgaacactacgtttttttacgtggttttgtagttaaaat

SEQ ID NO: 368366 - DNA, 505 bp, Cannabis indica
acagggtccaatctgtaacttttgcaaaacacaggatccaaaatggtatttaccctaatatttattaatatctctttaccgtgtttttcaaaaactaattaaatataaacttagagctaaacaaccccgagctacccttcaagtcttcctccttgatgtccttcttggtcatgccctaatacatcaagttgttatgagggaatgctttgatggacctcttagttacctataaccttcgcagagggagggttatcttgctcactactattattgttcttagagacaattgatcacttgtttagacatagtaatattattatctgggtgggaaatttacatggtatactaatttttgttatttttttactaaaaatactgtcaggcgatatttttacttttttacttgtatttttttattaagtttctatgctgcagtatactgtgttaagttttcactggtgttctactggtatttttagtttgtttctactgttgtttttgagtt

SEQ ID NO: 368367 - DNA, 459 bp, Cannabis indica
ttgttttatcacttagaaaatgtttattagggtctaattagcaggtctggaaagtttggttgagtttggaaacgtttggttgggaattgatttttgttgattttctcggtaaaaccagctaactggttttacactgattgtaaagccggttacctggattttgtagtagggtgtgaaaccagtttttctcaacttgttgtttcctgctagtttcgggttttctggcagattgttccctgctagttcggggtatttttgtattaaattacagtaggttaagtttggtttttaaacctttgtcccggttgtgatttagcgtgtcacttaccggtgttgtgatttttacggtttaggagccagtaattcgccgagctgatagttccactcaggttgaccggcacacctgaattcggaattaaggtaggattagtataacattatgcatatgtattacatgtt

SEQ ID NO: 368368 - DNA, 714 bp, Cannabis indica
ttaagaaaccttacattggtgtcagcaaaataatatgtctccttccactaaagatttgagcgcgattctcctttaggtgttggattcttcacagtcttccacactataattgagtacttgacttgctatgagtgggcatgtactcttccactataggctcgaaaattatgaagagggagagagaggatttcaaaatactataggaaggaggctctcaaattctagttgtccaacaaagttagaaaactaggttattaggttgaatgagaatgagagccatcttattccttatataggaattattttagggttagatttaaattatatggaattataaaaaagataaaaactggctaaaaattctccttaagtggtcggccatacaatgggccccactagttagaattttgttattttattcaacaatttatcttttctttcactaatgccatattttctaattttaatcctttaaatgtcaaaattatttatttaataattaaaattaattatcaaataaaattgttattcaacttatttattaattagaattaataaagtctcttaattaacaaataaaccctaaaatctcttttcttcacaataaagctcatgcttagtgaaaattcattaagaagacatagtctaattttagaattatgattaattaattaaagaaaattaactgagtctacaagcagtattatctcaact

SEQ ID NO: 368369 - DNA, 598 bp, Cannabis indica
tagtagtttattttaataagtatgataaaagaaaaagcctgtttaggaagcatgttagtagcctgatagtagaataggcgcatgtttttaatttccaaataagcggcattagtaagttctcgttgatcatgatctgaccatgctagctcttggttacgcaggcttttcagactagatggatgccaggcgaaataccaggagtcagggcaactacggtcgggtcaaatgaaggtcagggagcttagtttcccccaaatgctcggggccgagggtagatgtcccaggggcggggcacgtggtcggggcgatgctaacccgccacaggctgcccatgtggcacgggaagcccagaattgggaaaacaggtttgcagaaatgcaaaccagaatcgaggaacaagataatgaaatctagcgattgagacagcaggttgctcctgcagtgcctgttccagaaattccagaggcacctgcccctgttgtccaggccgaaccagtgatttgcagttaatcggatggaacctctgtatgaaaggttccgtaagcagccacctttagttatattgggaggtccagacgttatgaaagtcgagcagtgg

SEQ ID NO: 368370 - DNA, 567 bp, Cannabis indica
tcctccaaacacacactacacacctcattactatgataatctttgttttctgatttataatattttaaacttttaagtactttttgagtacttttttgacgtggcactatcaactgatgtggcaaaaaccctgacaaaggtagcgtctctggcggcagtggtagcgaagaaggttgagtctccgactgtagaggcggcgacggcgacaatgaaagcctatggatcatagtacttcttcttctattatttagcaactcatgtggcatgaagaaccttgtcattttattattaattttctctataaattaatttaattacaatgtgaatatgaggtatgatttactattacttatataaaaaaaataaaagtgagttgtaatagaattaggaatgaataatgttcaattttaattttgaatttccaaatatataaatataatgattattgatataattgtatagctaggtcgtataagatatacacttgatattttatcatttaattttaatttttttaaatttcaaatttattattattatttaaaaaaatatatataactcatttaa

SEQ ID NO: 368371 - DNA, 451 bp, Cannabis indica
tatgttaggcaaatctatagccatcagattagcatatcagggcatcactgaggtgtacatagagttgcactgagataccaacagatatatgctaggctatcagatagtatgatttatctgctaccacattggtacgactagagtactgagtataggctggattcccagttagtcatactttgtcaagaacgttcctgactcagttaggattatggtttcgtgtataggcgcctgattatattccatgttattattatgtttgatgttatgcttttcttactgagttttttgagtcacagttgctatttccatgtgtaggtaagagcaaggccaaggctgagcagacgtgagagcgagcagatggaggttgtacatgtcggggcggttaggcctggagcgtacgatctttgggacatcagggcttatttgtatagtcgctaggcgacagact

SEQ ID NO: 368372 - DNA, 611 bp, Cannabis indica
gtattttggccataactctcttgatattactcagagttagacgattcaagatgttctagaaatctaagaacgagatctaaaactttcatattgacctctaagtcgaattctgcctctaatattgtccgaatttgcaattaagttccgccttgtacaatcgagctcgccggcttccactattttccaccaaaatatgatcaaatccctccaaaagactctaaatgaatgaatagtctttaaaatagcctaacaaaataaaatcacactaatcaataatttaaagaatcaatttaagaatattaataaataaattagctatatttataagacaaatatggactcatcatgtatattgattataaatcaccttatagcagctaggtttagtacctctttttcatctttgtatttaactcatatcttaagaaaagagagtccttattatgtagagaagagctaggtttatttgtattttgtattgtcttgagtctatattcaagtctacaaagaaaaagaacatcagtgctaccttcagaagaaggtcttacaaagctttcgggagattgctttttaagtcttgcatcgggaggaaaaaagcactcttcaaggag

SEQ ID NO: 368373 - DNA, 661 bp, Cannabis indica
ttataataataattttttattattttattttcttaattattttagatattatttgccatctttattattgtttattttttaaattatttttataccaggtttctctctattatgtcaactttaaaatttttaggtaatgattgactaaatcacgattttaaattttgtcttaatttcatgtcatttagttattattacaaattaaattaaaggttttaaatgatagttatatttagaaatttttagtattgtttttacaattcaattttttcagattatttatatttacttctaaatttttattttgtttttatacttttattagtactttattagtattgtttttgcacttatttttataatttggattgccttttatggcttttgtcccatctttatgacttgcctctaattgtttagagtaaatttgtagtttggtagtcgtggcttctgcaaacgacttttgaaatttgacagataagtatttcaagtcttgatattattatatgaattgttttacaatctttattcacattacatacaatcttgatattattagtatttcagtaaatttatctttttattaaaatttctttaaactagaattctaaattgcattactgagacaaaaaaaaatattttaagctttaagctgtaatac

SEQ ID NO: 368374 - DNA, 469 bp, Cannabis indica
aactaagcggtctttacaaatcatatcaggattgagattaaatgatcaataattaactaaatgatattaaagaaaaaaatattacgataagtttataaatttgtttcgctgtcaatatcaatccagtctaatgtattgctgatatatccaatattagtttattttactaatatcttgaaaaagccgttccacttattcaagtgtaagcaaactccatttttgattatcacgtcaatgtaatattagtttttaaaatctatatcatagttagaaaagcagaaacgactttaattaaaaataatttaatctaatataaactaaaattaaaaaactgagacaccaccatttttggtgcaaccaaattgctaaagttgtttaatttcttagacaattttacataaaaagactatatgttaacaaaattaagaataaaaattggtattttacctcttgaattttggcccaaaaa

SEQ ID NO: 368375 - DNA, 1119 bp, Cannabis indica
aacttaattacccttttcggaagatgaagatggaattacagtctctttttcagtcataaacacagagtgataattggttttttcattctattacaataaacaaaataagcattaataataccgaaaagttaaaaccaatattaagacatgtatagaaagaatataagcttaaacctcttttaccgaaagaattggcttatgattatgatgataatctagtggagtttcatatttgttagatggtctccttaaggttgattttctttcggtagaattttctatttcatattttgcagctgtgtaatttgagttggaacacaccaacttcttaacaggaagagctttcttcgaaggacattctgaataaaaaagatatatttattaataactatttatgcattaagtgaataaaatatacaatataaactaaaaaaaaaaatcaaaataattgagacaaattaattacttttttcagaagatgaagatggaattacagtgtctttttcagtcaaagacaaagagtgttgattggttttttcattctgttacaataaacaaaaataagtattaataatactcaaaaagtgaaaattaatattaagagattattaataacataattaacctttgttgatgtgtgacgcttttgcaacttcgacttgatcaaaccctaatccactattaatcctcataatctttctttaaactgtaattatatgaaatcatctacttaaatttttaaaaaacatatatgtaattttattattatatttatattggtcttacaataatttatattattattattatttattataatttttttcaaaaaaaaaaattattaaataaagtcttataataaataaatgaaaattgctgaccttattaacaatgctcgaagaataattaaggaaggaatattaagactaattaataagtgagaccttaattattttgaactaattaaaaacaccaaaacgtaataagtatagacccaacacacttacacagatatatataggcctatttaattataattctaatattattaggattagtttaatttaactttgatttttagaacctgaactagtttaagtaatttgtttttaatttaaa

SEQ ID NO: 368376 - DNA, 916 bp, Cannabis indica
attttggctaattaaaaaaaaaaaaaaacggaaaggactcaaaagattgaacactacttcaccaatttttttaattattaggtcaattaattatgctcatttagaagctgtaaagttaaaagcttttatcttttttttttgctttttgaaaaaacatgttgagtttatcatgatagggtttcggtgcatattatatctagtaaatatcaagttttaatttcatgataagattttggtaattaaataaacggctatatttttatctgtaattagtatatgttttgataattagtgtgaaaaaaaaaaaaaattgtatgtctctattttcgtctcatatttttcgtgtgtgagtgatttatgtatgtttgattttttattttttaaaaatatgtagagataaaagctttggtgagtaaataaaggtgatttatatgctaattataattttttattacaattttttccttaattttttgattgaaaatacatatattagaatatttttatatgatgatatttgttatagatataatattattttaataaatttttttaaaatattataaataatttactgtcttgaaaatatattttacattataaattaaaatatcaagaattttataaaaaatgatgtaatgattttgaaaaataaaaataaaaatggtaacatcttttagataatattttttagttgattagaaaataagattgtgaaattaattgatagtagttgtattttaaatttaattttataattatgataaatcatgaaagtactgaaaatgacaaataaaaatcaaactaattaaaacaaaatacatgaatcaatactattaattaaaagtgtaggttgagcttatataaatgctatatatatatattatattatatatattacctataaaaattagtc

SEQ ID NO: 368377 - DNA, 330 bp, Cannabis indica
gggagtgtgctgccgaggaggctgcacgtgcagcccaggaaggctgcacgcagccttgggtgcacgcggacgaggggatcttagccgaggaacctcaacatttgcagggtgtcaagggcacgggctgcaaggtcctgaggtgtctgagcgagtgacatgagtgcgttcagacaatgaatttcccttgtcacgcgcgcggatgtggggcttgtgcgagtgactggtgcactcgatgcacccactcgacatagctttaacccgaaacttccaaattcataacttttgcaatttttctcggaatcgagttccgtaaaaaacaaaattgcttaa

SEQ ID NO: 368378 - DNA, 656 bp, Cannabis indica
ttcctaagcttcacgttctcaagattaaacacaattaacttatctaaaatggtccctcaaatcgttcattgctagcagatctgttcgactgtaatagaattttttttaaaaaaaaataacataaaaataataccccataatttgtgtttacatttttgctgaaagaatcatacaatgtcattgattcaattcaaaagaataccaaacaaggtatgaaatccaatgaacttttggtaattaaattccatatcttatatacaaatcaaagactatcaggcatggatcatagagaaagaaagctaaacaaataaccaaatctgataataataacacaaacacacattcagattcggataaaaaaattcaattcagaaacacaaaattcacatataaactcagatcatacatataacattattagaactcactgaagccattttcgacgaggtaattgaaggtatgaccatcacaattataagtaaacttattattcgaagcaggaagcttctgtagacattgagaagcgatgctggtaaaatttcccgtaaactccgtgtactcagcgagaaccaccgtacctcgagcaacgaagctgtaaatcaaagactgttgccccatctccaacaacaaaaaacaaacaaaccctaaccctataa

SEQ ID NO: 368379 - DNA, 542 bp, Cannabis indica
gtttgcttttgcttgttggtagatggtaggtattttggtgatagagattggtgacaactcttttgggggatgacttcatgataaattttagtgttggaattctgtcatgagatatagagttgttatgctttgctaggcgttgtggtgtgtgtgtgcaatggcaaggtgtggaatgataaggataagaatgttaaagaggtggttttgttggctaaggtttttgatcaatggagttgtgctcaagatgaaaaaattgattcctctttgttttctttacaagacggcgaagggcacgagcacatgattgtactggttagtaatacgatcaaaatatcaatgtggatgcaactatcgtcaacaatcaaaatcagtatgactatatggtcaggtggcacagaactctcctagtcagcttattatgactcggacagtaagtcagatgggggtggttaatcctgctcttgctatcaagattaaagaggtgttgagctggttgaaaagaatagggcgacatgaatgtggtggtggagtcggacagtttg

SEQ ID NO: 368380 - DNA, 496 bp, Cannabis indica
gttatgaattgaaacacattgattgaaatgttaactatttcttcttctagtctcttcactaaagttgcaactaaaaataaagttttatattcacttgaaaattgtctgtactcacatgtagttgctacaattttcaaattttgcagtataaataatcttcactcaataacttcttaaacttataaactaaattttttcttattgtcgcatggattagattttcatgtatgataaatagtagacacattgagtatttaataattcataaattgataaaaaaaaaaagaataatagagaaaatatgaataaaaataaaaattaccttctcatcaataaaaaacatattgagacttatgagttctccattattctttgtaatttgagagagtcctaccttctataaactctaatttttatattttaagtatgagaaaagaatactctatcattagaaaagaagaaataactaaaattaaaaaaaaaaaagtaagaagat

SEQ ID NO: 368381 - DNA, 1062 bp, Cannabis indica
tatctgtggctcaagcaattaggagtgatcttccgttattgtcatattttgggagtattgtttctgattgtaaaatgtttttagaacaattgagtggtgtttctgttatttttattagacggtctgcaaatagagttgctcatgcgttagctcgagcttcctattttgtctctgatcgtactcttttgagcaatgaggtgtctaccgatttgctttttgtaatcatgaatgattgcatttaaataaagttggatgatttttttctaaaaaagtaagaccgtaccctctattgacaagagtttgatcccaagaatcacagatgcttaactcgattatgctgactggattgtttgtttcgatcgaaaggagcctccgagttgttagctaagcaacctacggtattggtcatcacttcctctagttgacctcctgtttctattgttatgctaattgctaaagaatgaaaaattggacatcgacctagtaagaatcaatctaagcttagtaataaatacttcatgatcaacttcctttcgtagtactcttaccccaagggaagtcaaatccctgctgtcttcttggatgagggatgtcctaaattgctagacaatgggggtagccattaggcgattaattatcgtaacttgaaacagatttaaaagaacaatcatttgttaaatattcacatagattatgagctatccaaacacacattaaacattattacttatgatcattaaatccaagatcaatactttatttagagcatcacaaaacacaaaatatgaaatacacatgcctcccatattggcattttccattgttgctatgacaccaaaatccttcaatgtattcccaagatggtagaagaggaactatgatagcaaaccctattccttatcaccacacacactcaccttatactaaacacatattagccccttttatatctaacacctaaccctaagaggttttattgggcttattgggctaatgcgtataattagtggtggactataatttaatgggccaattatagttgtgaaaattacatcaaatatg

SEQ ID NO: 368382 - DNA, 685 bp, Cannabis indica
tcacagaatgactaagctaacctgaaaaagacctaggttcagaaggttcagcacctgccataagacaaagcaacctccaggacccaaaagccttcccagccttccaggactcggagaagactaaacctactaagtctatagagagataattggaagccatctgaagagtttgagacgggcatcttgtgcatagagaatactggaagcctactacgaagtggaagccggacgtctcccttgacgtgctacctctctgacacaaaattagattttgtcccctgtgtcagacaatgggtgcgcacaccttttctgaatacccagttctgtctgacggctcctctgagcactttcaggcatgtctttcgcctgacacgtgccctacaccaacagtggtcccaacaatacagaatcgtcaccccacgggaggaattcttctaagggacacaatagtcatgtatataatgtattttgccccaatagtgggtgggctttttacaaaaaaccctaaacgggtcacaggtatgctcaaacatgaactttagcctatataaaccccttcattatttcataaggggagagagaaaaaggatagccaaagcttttacacctcaaaaatttctaaagacaccttattttaataatttttattttatataacatttatatctttaattgtactaagttt

SEQ ID NO: 368383 - DNA, 598 bp, Cannabis indica
gtttttacttttttacactgtttgttaaactcgtttattctggagttacagagttgtctttcgtagctacagaaaagctatttcaatactagtgtcattattctgtatttaattaaataataaattgggaatattaaaatacaaaatttggtatcaaagtggttcactaaaatcttagtgagatcatgagattattctgtttaattttttttttgtgtgagatatctttgtttgtagaaggaagcttcattacacgaccacctctgttgaatgattcgaattatccatattggaaggtcaggatgagagcattcatttagtcataagatgagaaggcttggagagctatacttacatgcttgtcacaacctactgaaaataatgataaaggtaacgaaggtaaaacctaaactcaattggactactgaagataaaaattatctggttataacaataaggctttacatgctatttataatgggtttggtgaaggctttatcaaattaatttcatcttgtgaatctgcaaaggatgcgtgggaaatccttcaaacatagtttgagggtaccgctgatgtaaaaagtgttgggttttatgc

SEQ ID NO: 368384 - DNA, 636 bp, Cannabis indica
ctagccatgatcttgttggcgatgggagtctctatgaccagaggatcatggtggggaaaacgcaccatatttgcgtcttcttccgtgaaagtaattggcagatccatgagtcggggcctttgagctggaagctgagtgacttcccacacctcgttgtgtttaacggccccgacatagcgctttaattcctttcgagtggtccctctaacatggggcccaccagagatcatagtcactcttccgttgggccttggcggtaggccaggggtcttctaaggtcctctcgagggtgcagttggtgctagtgctccgggcgcaccccctggcatcccctggggcaaaggaccccctgctggaaccgggttgagatgggacaaccagttcttgatccactcatagacgtggcccaaccggatcaaattttcgatctcatctttcaagtttttgcactcattggtgctgtgtccaatgtcgcggtggtactcgcatcttttgttcggatctcttcgggaactatctccgtacaggggaggcagtctccagtagtgcgtattttgccttgtggcgaaatacacgcgctcttgtgagtccgtcagctctgtgtactgggtgtattggggagtatacccccctttt

SEQ ID NO: 368385 - DNA, 764 bp, Cannabis indica
ttgaagaggctcacaccactccatattccctacatcccggcaccaccaagatgtatcaagatcttaaacccaatttctggtggagcggaaggaagaagaatgtggtagaattcgtatcgcgatgtctaacctgtcagcagatcaaggctgaacaccagagaccagtaggtttgttacagcctttaaccctaccttagtggaagtgggacgatatcacaatggtctttgtggttgggttacctacaaccacgggtttatttgattcaatttgggttgtggtagattgattcaaaaagtctgcatattttctaccagttaagacaaccttttcactggatcagtattcagatttgtacgttaaagagatagtaagattgcctggtgtaccaaaatccatagtttcagatagagatccgatgcttacctctaaattttggcaaagtttgcaatgggctatgagtaccaaactgaagttcaggtacaactttccatcctcagactgatggacagtctgaaaggacaatttagatactggaagatatgttacgagcctatgttatggatttcgaaggctcctggagtaagtacctaccgttgatagagttctcgtacaataaaaattatcaaagtacaatagacatggctccctatgagttattatatggtagaaagtgaagatctcccattcactgggatgaaacaggggagaagaaatacttgggtccagaatcagtacaacagaccaatgaagcaattgagaaaat

SEQ ID NO: 368386 - DNA, 717 bp, Cannabis indica
acttaagtttaatttttggagataataatatctaagttatagttctgaaacttctgtaggtatctggctgctaattgttaagtaaattaccaagtgacaatccctgattggtcaaggtcattaaatttttatttttaaaaaaaaatagtttaaatataacaataagaaaatgacacgtggataataccttgacatttaacgaccaggaatctacaaaagtttcagaaatataacataagtattattatcaccaaaaattataattagctatttatttgtaactgggagttgaacttaagtatttataacgcaaattactctaaatctaattacactgcggttttccaaatgcccctttagtttctaaaaaaatcttggtataactaataaataataatagttacttatttggtaaaattaaatatactcccaatattaaaaataacaataaaaaataatgatattacaaataatattaatatttatatatatttaaattcatctaaaattagtataagttgaattaacctaaaataaataatattaatatttatatatatgtaaattaatctaaaatgaataatattaatatttatatatatttataaaactaaccctactaacaccgttaaatttaacagaacattcttatattcttaaaatattctgttgaaccaacaaaaaccttaagtattagctacattttatatataaaaa

SEQ ID NO: 368387 - DNA, 557 bp, Cannabis indica
taaacaaacagcaatttcagactgtaccatgaaggcagaatacatagctgccgcggaggctgctaaggaacttgtctagcttagaaagttcttcacaggactcggtgttgttcctggaatggaaaaaccactagttttgctttgtgataacactggagccataggcaatagtaaagagcctcgaagccacaacaaaagcaaacacatagaaaggaaatatcacatcatcagagagtatgtggcaagaggggatatattggtggaaaaattagacactgaggacaacctagctgatccattcaccaaagaattggcaggaactgcatttgaaaagcacttactgaatttaggattaattgaaatgtactgactgttttagattagtgcaagtgggagtttggtgggttttgtgccctaaataaaactctatttcaatgtaatctttatcatttaattatcaataaagagacaaaagtatttctcatcacttgtcatttggttcatgtgatcatttatatgtttatttgatttataaatttatccaaatccttatcaca

SEQ ID NO: 368388 - DNA, 626 bp, Cannabis indica
aagtttgttgtggttcgtttttcttcaacttcatcaagtgattctacaaggagtacatgatggacctcttggttgtatgttaatcttctatgggatggcggttcgagttctacgggcagcatagcttcatatccatatgtcatgaaaaatggagtctgtctggttgttgttttctcagttgtgcgatatgaccacttcaggaagttcttctggccaatttcccttagcatcttcaagcttcttctttagggtgtccttcaatgtcttgttgactgcttcaacttgaccatttgcttgaggatgtgccactgcggagaaactttttatgatcccatggttcgcacagaaatcagtgaaggattgactgtcaaattgtttgccattatccgagactattttgtatggtaatccgaaccggaaaattctgttttttacaatgaagtcttgcacttttttggacgtgatggttgccagttgctcgacctccgtccacttggtaaagtaatcaactgcaaccactgcgtactgcactccgcctttgccttgggcaactgtctgatcaggtcgattccccaaatggcaaaaggccagggactttgcatctgagttagttcgttgggtggtgc

SEQ ID NO: 368389 - DNA, 879 bp, Cannabis indica
caggggccatagaatgtagagcactctcaacttcagcaggcagaaaaggtttggtgagttcgtcattcatgtcatgagtaaccatatttggaattgcatccaaggtttgggaaagagaagcttcatcaatagtatcagcaccaaagatggaagcaaaataatcatgaattgttgcagccatgtcaactttggaatgcacccgaaccccagcttcattaataagtgatttgatcttgttgttggactttcttgccgaagctttagcatgaaaaaatttagtattgcggtcacccgaacttagccaatccacccttgaacgttgttgccaataaatttcttcctgctctaatagatcatcaagaatagtttcagcccttttcagctcacgcatattgtcattatcccgatgtgtgaggttgttgagttcatttactcgagattgagttgctgtgatgtttttcttcatgctgccatatttacgttgatgccagttttgcaaagaagtagcacaagagtccaaactggacaataaggcctgaaccgggtcaatgttggtggaatgatcccaacacttggtgattaactctttgcattctgggtctgagagccacagcttttcaaaacgaaaccggcttcgtctttttcttgctaaactgaggtgccgactggtgtaaccatgactgaaatggctcggtgatctaagctaaaatagtccaagtgatgcaccgtaggggtgctgaaagtattgtcccaaagattgttaacaaaacaccaatctaacctttctttgatagtattctaagccaagcgattcttgatccaagtgtaaggttctccctcaaaagaagtttcatgtagtgagcaatgatcaagagcttt

SEQ ID NO: 368390 - DNA, 476 bp, Cannabis indica
gagtccccaatacgaaggggcctcctagcgatcgcctggcttctcctctcgaccgggctccccacgcgaagtggcctccgggaagctgcttgagccctggagtaagctttcccctgagccttccggtagagatattcctggtacttcttctcggcagtggcgatgatctcgtcccggaagatcttctccgcggcaggcgccctcacattgggacagataaccctggaaaggttagagtcctccactgattggtgcgacaggatgagcttggccttccggcaattctccgtcgtaaccaggcccccgacgtcgaggtccgcccggtcataagtggcaaaggcctgggctctccgaagaaagacctgagtaggcgcggtccactcataagggggaatcccaacccactccgtgaggagctccggatgttccaccgctcggaactcggaggagaagaaaaaacgatggtgatactcctt

SEQ ID NO: 368391 - DNA, 540 bp, Cannabis indica
accaagagcagaatttttctaagcagctccagactccattagcttcaactaaattagctctgcccaccaaaattaagtcatccgcaaagaaaatgtgggatagcacaggaccacctctactaagtttaatacctttgatagaaccctggtcaagggcatcatgaattaatcttgaaagaacatcaacagcccagatgaaaagataaggggaaagcgggtctccctgacgaagcccacaggaagggttgattttgccaacaggacccccattaagacaaatatttagggttgtagtagaaatacattgcgatatccaatggcggaattttggcggaataccataacactccaagacatgatcaataaatttccagctcaacctatcgtatgctttaacaaggtcaatttttatagcaaagaaaccctccttacccttctttctattaaacgagtggatgatttcttggacaatgacattgttatcatggatgtttctacctgggacaaaagcagcttgcgttggacagataatggaaggaa

SEQ ID NO: 368392 - DNA, 641 bp, Cannabis indica
tgggagaattttaaaattccaagcccatctttatttggatgacactagtgataaattactatgttatgatcatgataagaactgtagaatataactgagaaagtaaatgtaaccattcctatggatagaaataacttatcgaacaatgacgataagataggagaattttggcaaagtctattcgaatgacttaggcaaaatccctagtcctcatgaaatgttttatggtatctctaatcattacttaatcttaagcaagtatttacattaatgttaatactagaatgctatgttgatgacttagtctagaaggaacttataatttcagactaagacaatatgtcacaataagatgtccctgagaaccaatagtaagaggttaaatgtactccatgtacgaacttaaccagactcctactgttgagtgggagccatctaagatgtaatcaaacaaggagacaatcaagaaagaatctctaaaagtgacctatatgttagatgataagggtgtacattagaatccttatatctacaccaactcggaatatgaaagatggtggttactctgggagtagaggaattattctagaaggatgtaaaaacccatctataataatttaagctccatcagtgaagctaca

SEQ ID NO: 368393 - DNA, 615 bp, Cannabis indica
tttaaaattagaaaaatactcttttatcaacaaaaagtaagaaaacaactaaaaaacaacgtgaaatcaacatcatgacaactatgaaacaatcataaaaaaactacaaaataaccaaaaacacccaaaaaataaccttgtggcagctacaataaaactttaaataaactataaaacaacaaaaaattattatttttactaaagtacgtatttttgtaaataaaaaaattcaaagcataaaaataaaaaaagaaaaatattcgtgttaacgtatttttgtaatttttttgttaaatttttggtctattatgcaaaaaattcttttgtttatgttttgcattgttttcctttcccttgtatgtttttgtgattatagaatgttgacctaatttaattcgttcatatttttattttgtttctacttagtaatttatcattttttgttgttgttcagttttattttatcactaagcaaatttggaggtatttttcgttgttttttagtttttaatgttctgttttaagtatgatatcccgagtttctttggttgggctttagggttagtgtaatgtttttaaacattattgtaacgccctaatgctaaggcacgctac

SEQ ID NO: 368394 - DNA, 452 bp, Cannabis indica
gttctttagctatttctctttttttttttttgttagtttatttttaattattataaatatgtattttctgatcaatgatcggataataatcatttaaaaaaataataaatatcacataattattgtttattgtgaggattgaactcaaccacaaagatctatttcaatttaacaaacctaaattattgtcttttttttttaaattaaaaacataaattattattattgtaccatgtacaaagtaataattgaaaattctacaatacactactttaaaatgggaaaatgagtgtattgatgcaactttatttatttcgatatctaaaaataatttagtctaaatttcttttatggtcgtatatacgttgtagttatttaagacatctgataaaattttaagaaatttgaaaaaaaaaattaacacgtcgaaaacatgattcaaacagtctgtt

SEQ ID NO: 368395 - DNA, 832 bp, Cannabis indica
ataacgtgttctgatgattattgcatgtgcatatttttaaatcaaattaattatcttgatcaaggtgggttcctcccgaaatatttgatcattgataatgttcttattggtttagagtgcattaatactttaaagaagaaaaagaaaggtgatgggttatgtgcaattaaatttcttgagagaatcatgttgcttgaaatttttgtgaattggattagtaaaattcttgattgtatctcttcattggaataatctattctcttgaatggggtaggttattgtattttattactcatcatcgtggccttagaccaagacgaccccatgtctccgtacttattcttgtctttgtacagtattgtttgtctagtttgataaatcgtaattgtggcaatagtttattaattggtttttcttgtgggagaggtggtttggtgatctcccatcttttgtttgctgacaatagcctcttctttcttaaggcttcaaaagtgttttgtctgagattcaagcaacttctgagttggtatggtaaagttttgtggcaactagttaactttattaaatcaacagtgtgcttcagtcccaacgttgcgagccttgagagagaaagattggtagcccttaaggagagttgtcagagtagattgtcatgagacttacctgagtctctcctatgttgcaggtcatagcaaagctagcttgttcaactttattcgagatgaaatttagaataatttaatggttggaaatccaaaaagttttctatggcgggtaaagaagttttgatcaaggctatcattcagtccatccctacttataccatgaactt

SEQ ID NO: 368396 - DNA, 875 bp, Cannabis indica
cctatggcgtcggttattagctcataaccgacgccataggggtacatatggcgtcggttcatataaaccctttagcgtcgccctgatcagtgtcggtagtgaatttcgcaaaaaccgacgctgaaagggcttaaaaaccgcctctaataggggtttttgtagtagtgaaataaaagaaaatatttttccttgaaccgtgtgttagttttatgtcgtaaaaaataacctctaaagacaattttgtttataaataagagttgagtattttttatatatgtttaaattttaaattattaatatttaatatttaataatttatatataaataataaaaaaaaattcttatttatacatgaggttgtcccttgtattgtacggaaaattaagatcatttagccatgaataaaacagtcaacaacatattatagttatagaatctttaatcaatggttgcttgtatggttcactgatgcccgttattcggtgcaagcaatctcgattcgattgcatgatattgtatgacctctaagtgaaggtgttgtatataatagagattatatatgacatgaatcgatataaaattaagttgttgttatcaaacatgtcatttactataatgatcaaattcatgaactcctgctcatgctattagtttctttgattcactcgttaaagtttctcagagaagatgattcttacaatttctattttgtatggatggttgggaacatgatttacaatatggaatcctgattctcctaattgattggttcccttttaagtgttaattctggaactgaaaagttgtgcaaaaatttagattggatctaaattatactttcactagtgaattaacagtactaaaggatataaaa

SEQ ID NO: 368397 - DNA, 735 bp, Cannabis indica
tctgataaatctaggaattctttattcacatagtcatgtttactttccaatgtgttgacaacacaataaacaggatacagtatgtgaaaagggtttcagatgaatttataaatcaaatcgacaagaaattgacaagatgaaccaaaacatgcacaaatgaatgaaaaatacttatgtttctttattgatagttaaataaaaaggattacattgaaatggagttttatttagggcataaaacccaacagatgagccttcaagtcttgcttgggcaaacgcttagcaaaatactccgtcttgtttttaaccttcttgattattatgctttcatacttttagtgcttttctctaataaagttccttttatttcgtgcaaacatgtctcagaagatgctcgaagctctagagaagagagttgggggcagctcaggctcatctcctccggccaagaagtctaggggcggtgagacaacaccatctagagagaaggcaccagctgaagctgttatcgatctttctgaggagctaaccgttgtggacccttctgccccgaaagcttctaagtcataagtctctcgaggagggagctcggacaggctcgaatagtcaaagggtggatccgagctggcaaaaagtggatctgagcagatccaggctcctaccccacctccatcactgcatccagagactaagagaggcaaagagatgttcacccattacatgaatcggtcggtc

SEQ ID NO: 368398 - DNA, 1019 bp, Cannabis indica
aataagaaatcagtttctaaaatactgaaacgtaaattaaaaacaaaactagttccacaacaaaatacctcataaaactaattataattttttttaaaaaaaaaaagtgagaatcaagttcaaaaaatattgaggcataaatataaaaagaaccggttctataacaaaataaataaacacaaataataacacacaataacttaaatataatagaaagaaactggttacatttatcaactacttaaaaatttgagacaaaaaatctagttccgtaaagtaactaagataaaaactcgcacacaaaaccagttaaataaaataactcaaataaaaatattcattcaacaagctccaacccaccaaataattacactcataccatatctactccaaaaatatccaattgccaaactctcaccacactcagtagtgagtcagcccaaaatcattctcccaaaaataatattaaaaattacaacatttttttgtttccttttctttttggaccgaaatagaaaatttacagagactaacctaaaagaaagataaaaaaacaaaaactggaaaagaaaaataataacattaaaacttaaaaagttattgaatttgcaccgtgtaacatatgcatattctttccagcaccaccaacttggtaccttgacccagcgattctgctgccggagtcaatcgcagcttcccaatcaccttcttcatcttccccttcatctctcattctcatcatctgaaacattctcttagccttctctctagccctctcactccctctctcctcaatttccatcaacacctccacgcaagggcggagccaggaagggatgtttgggggggccaaaccatatgaaaatttaagtgataaatattcaaatatatttaaattgataattaagattaaaatattgaatgtctctcttgcatataaaataaagcttaacatgatcacactagttacaaaaatagtggtcgttattacttggtttgaaatgagaaagaaaaaaaaa

SEQ ID NO: 368399 - DNA, 344 bp, Cannabis indica
attagtaaaaaaaaaaataaaaaaaaaaaaaaaaaacaaaacttttttagatgtattgtgtaaatttcccaacaaaagtccatacccaaaaaaaatagttttttcataaatatggaaaaaataatggagtttacttttatatatggtagaaataaataatgttaaaaaataggaaaacttacaaaaatactagaatttaaggtaacttttacaaaaataatatcacacggaaatcttttcaaaaatactgtgtttttataaaacaccagtagaacacaaaacagaacaactaaaaacaacagtagaacaactaaaaaacaacaatagaacaacagtgaaaactt

SEQ ID NO: 368400 - DNA, 476 bp, Cannabis indica
atgggaattaaacttttgaacatataatcatggttatagtccactgtgctgaaaacactataatcatgaacatatatacatatgttctgaaccatgcaacataaaataatttgtaatcttttattaattagtaaatctgactacattgaaataggtttaatttaagataaaaaacccaacagaggtatgaaacaaacataatactagcaaatagtttgtaaccattcttgatgctccacttaatacctcattcagttattttttggttagtagtccgaaatagaatcaaaacaagggatcgtttggaaaaatttggcacagtgcaagttcaaaactgtatgatttctattgtggatacacaaattattcaccatctctttttgattgcccggttagtttgagatgtttacaagctattaaaaagtgggtatgtaaagactcagtttttgaccgagtcaaacatatatatatacaaa

SEQ ID NO: 368401 - DNA, 827 bp, Cannabis indica
tcaagattgagttcaaaactcacttgaccaacccttcaaaaaacccctagttcatgcattaaacaacataaaaactcatatctaagactctgaatataacaacaaacaactacagcaagctaaataacatttcactcattaaaaaccaaagtttgagttcaaaactccatacttgcttaaaatcatcaaacaaccataaaaacctgcttgaatcatcattttaaaacataactaagcttcaaaaatcaacaacaaacacaaacaacagccacagccacaaaattctcaagcatgcgaaatttctcagaaaacaaagaggagcttgatcaaagattacctcaactaaaataacaccaaaacttgatgaaaacttgttgaattgaagaacaaaatcaaccctagcagcccctaggattttcgagagagagaaagagagcttgagagaggaagacttgagagaaaatggaatttttgctttctttttttccaatttttataaaatgaataataaaatggtttttacttaattacttcagccaaataccactaatacaagctgaataaaaacacaactaagtccactaaaggacaaaatacaaatggggcaaaatgaccattttgcccctccacacaaaaataacataaaaggggtactaagggtattttgggaaattctaaattctcgaccaatctcgacattcccaatgtctaaataaaccgtcccactatactaaaatattagattgtgattctactgagccatacaccgcgttccatgttgccggacaccgaaaatgcaaaattatgagatttcactatatgacata

SEQ ID NO: 368402 - DNA, 683 bp, Cannabis indica
aacgaggattaggctattactgcactgctcgggctgaacctctataaaatttctgtgtcttcttcttattattattatttgctttattacgtattcttattacgacatatcatttatcacttatcaaaagactcattgtcgttggctaaaagcgaagtcaacacacactatattgagaaagtgttgaataagtttagccatctaaaggcgaaagaggccaacacaccattcgatcatagtaaaccattagttaaatatagtggtagggtagtggctcagttggagtatgcaagtgttatagggagctttatgtacgctgcccattgtacaaggcccgctatatcatttgcggtgagtaaacttagtaggtttactagtaatccaagtgtggatcattggaaggcaatagggagagttttgggttatctaaagaaaaccaaaaacctatgccttcactactccaaatttccttcaattttagaaggatatactgatgcaagttggatagccaaccttggggataatttgtccacaactggttgggtatttaccctaggtggaggggcggtttcttgggggtccaagaaacaaacttgcatttctcattccacaatggaagcggagtttatagctctagctgccactgggaaagaggccgaatggttaagagatctcttaactga

SEQ ID NO: 368403 - DNA, 669 bp, Cannabis indica
ggtggttgtctgtgtaggcggtgaggggtaggttcagttttggtgtgggtgagatgttgagagagaaccgagagagatagaggaagagagaaagagttgaggtttaaaaatgataagggtatttttgggtttattataaagtggtcatattttttaaattttgaaatgtattagttttaggcataaaattttaggggtatttttatgatattttttaaaaaaaatttctattacaataatgatcattagttgatcaacttgaatcctgattatacataaatttttgtttgtgttttcattcctttcaaattgacacaatcttatttttttttctattttcaaagcaattcattacatatgataatattagacttcttaattataacttgtgttcatacttgttaccaattttttaaaactaattattgtttcataaaaaaattaatcaataaagttagaacatgataatttccatgtactgtgctgcgtgctttaatgaattaattgtttgacaaaagaaatttgaaagtcatcctcttaatatatgatatagataaaaaagaccattataagaagacttattggttagaacatgctagttccatttttctatttaacacaatttcgaattttcattttaattccatgtgcgtaagtagtttaattaaa

SEQ ID NO: 368404 - DNA, 684 bp, Cannabis indica
caccatttaaattatgcttttttttgttctttttcatatcagtagccaaataaaaaaaaaaagaaaaattaaattggcctccatttatcaaagtcaatgttagatataagttagttattttattgattgcccataattattatgataatcagagcactatatattattagatttagatattagaaaacttaaatatataatgctggtgtgaccttgaggcagtagataatttaaatttatttatataacaaatcataaaaatgtataaaaaaaaaattattattatggtagtggacccacatctacatgtgataagaaatgaaatgctcatggaagataaacaaattaaaagaaatatgagaaactcagttttttcacaaacagctaatttttaaataataatcactacactataggactttgttccattttattctcaacttttagagatgagagaaaaaaaaaagttatggaatgatctgaaaaatatatataaaaaaatagggtaggtataagagattaagagcttctatcatccctatatggaatgcaattagaaaaaaaaactattttctttgggagttaatgttttttttttttctttgatagagttttaatgacattttttaaatgcaaagttctttgacatgattttattaatagataaaacatgataattttaaa

SEQ ID NO: 368405 - DNA, 504 bp, Cannabis indica
ccccaaaccctaaacctcaaaccaaaaaacccaaaagccaaagactctaaacacaaaaccccaaaccccagaaccctaaatcccaaacctaaaaacccaaaaccccaaactcaaaaccccaaactcaaaaccccaaactcaaacccaaaccccaaacacctaatgtaaaacaacttaaccccaatcccccgaacccaaaaaccccaaaccacaaaccccaaatcctaaacccaaaaccctcaaaccttgaatccaaaacaccaaattgtaaaccccaaacaccaaacccagaccccaatagaaaagttattgacaacggtcttggcttcatccctatgaaatttcaaaaaattttaagatgtctagggtgagattttgaaagaacactaacgactgtaagatgaaggaaaaaccttgttgaaatttatcctaaacaaaagaatatttcaatttttgaaataggagtcattttaacaaaatttaactttaaaccaatcttcatat

SEQ ID NO: 368406 - DNA, 588 bp, Cannabis indica
gtctggattcagttctgggtctaagtcattggttctgatcctcgtctgggttcgagattggatccgggtccgggtcaagctttgggtctgatctaggtgtgggtgtttgagttcgggtccgagcctgtctcttggtttgtgtttaggtctggaccaagatcttggtctaggttcgggtccaggtccatgctcggggcccgagtgcgggtccaagtttgggtatggatcaagatctcggtccagatctaggtccagcattttgatcccagtctaggtctttgttcgagtccaggttcgtatccggatcgctatctaggtccaagtctgctcttgggatcgggtccgagagttaggtccaggtctaggtctcagttccggtctgggtacacgaccatgttcgggcccgagtttgggtctgaggctaggtctgtgtgcggttctaggtctgggtccggatcctggtcacggtcctaatcttgttctagggtcctggttcggtgattcttgtccaggttcttattttgggtcccaatatgttccaggccttgttacccgaatctcgagtcaagatctggatcactgtcacag

SEQ ID NO: 368407 - DNA, 875 bp, Cannabis indica
tttaaattctgtgctaattttattagtaatcccggttaggggattaaggcttcataagtatcttcaatagcgtgcctaattatttaggatgttacatataatttcttccattatggcagtagaattcgtagcatattctgaggcatcaaattaaggaatatggctaagaaactttatcactaggctgcatattttggagaatgtagaaagacaatttaagttattttgtgataataaattagaagtgttgtatttcaataacaatgggagctcatccaagtcaaagcatattgacataaagttcctagttgtgaaagaaagagtgcagagtggacaaatatccatagagcacattgggataaactccatgatagctgtaacgccctaccaattaggcacgccactacaactaattatgaaaccctaatcccctaaactgggtttactagaatggtaagcgcaggaaaatttaaactttaattacaacagattgaaaattaaacttgtaataataataattttacaaacaaccaacaatacaagtttcaggacaccgtaaatatttttacaaaaaatattacaagttgatttaacgagctgacctaagcagcaaaaccagagtaacaaaatacatcactggtagaccccaacccgcttggtctagtgtgacccaaacatgtacaagcactgccaagctctaacactcatggctgatcagagacagatttaccctttcctgcatagtagagcacccgtgagccaagcccagtaggacagtaataaatatcaacaattataattaacatatcacatatacaataatgccattcatatttgtctatttaacatagacccgcgtgttacgctcacacacc

SEQ ID NO: 368408 - DNA, 493 bp, Cannabis indica
gtgagtgagaaaaagctgataggtgatcctctcgaactgagtataattgaagatgatttgacgagcaagagggacaagatgtaatgggttatttgaaatggcttgattcctatgggccattgaacagaaggtattatgaggagctaggagtggtgccgaaagagcttgtgccatctactgagaaacctccaaaacttgagttgaaggtgctccctagtcatctgcggtatgagttcttgggagaagataaaaagctgccagttatagtgtcagcttcactttctgatgtggaaactgatagattgctgagagtacttcgggcgcacagcaaggctattgcatggacactgggtgatgtcaagggaatcagtccctcaactgtgatgcatcaaattctgatggaagaaaatgctaaaccaacaattgatgctcaatgtagactcaatccacctatgaaggaagttgtagaaaggaagtggtcaagtggttggat

SEQ ID NO: 368409 - DNA, 1160 bp, Cannabis indica
ggatttcgggcccacccttccaatgatgaggtggtcccttataataagcaaactcatgttaaggagtatcgccaccatttcttcttctcctccgggttccgagttgtggagcacccggagcatctcacagagtgggtcaggattcccccctatgagcagaccgcgcctactcaggtctttctccggagggcccaggtctttgcaacttacgaccgggcggaacttgacgttgggggcctagtcacgacggagaattgccggaaggccaagctcatcctgccgcaccaatcagtggaggactctaacctttctaaggttatctgtccaaatgtgagggtgcctgccgcggagaagaccttccgggacgaactcatcgccaccgccgagaagaagtaccaggaatacctctaccggaaggcccaggagaaggcttattccaaggcccaggcagcttccgggaggccacttcgcgtggggagcccggtcgagaggagaagccaggcgatcgctgggaagccccttcgcattgggagctcggctgagaggagggctcccaggccaaagccttcggttcaggtgccgaacactggggctcctggcgccagcacttccggctctggtaagtctcctttagcagtacattacgttccttccgttggcgaatatgccagtcttaggcctgtagggttcgatgagcgtctccataggtttaggatgccctcgacccggtggggagaccatatgaaggaatattatttttccaacttaggagatttcctaggtcggtcccggatgggttctggtcctccggagcccgttcccttagacccttcggcttacatttcttccagctggttccggccttcggacagctatctcggagacgatgctgccagcgttaagattcggaactttgctagggccgaattagagagtcagggtaggactagcttgattgctttattcgagtgtttactgttttccatggatattctaacacttgccttttttcttttgttgtagcaggtacttccatggatgccattttaagggcaaggggttttgggagctgagattttgtgttttcagcaaaggattcaataggaatcaaggcaaggtaaccctagttcttctcccctttaagtttttgaagttttagt

SEQ ID NO: 368410 - DNA, 430 bp, Cannabis indica
ttcgatacaatctcctacatctctgccacaaactcatttctctattcaattagctacagttagatttctccttagtttttaataattttcttattattttcctacagttatgcttatgtgtaaaaaagaagcaacaaattcaattaattggtaatctactctgataattatttttacaatcattcgattgatgaagatgctttcaacgagaagcgaaaatagttaatgatcattaaaactaaataaattgaactaattttggactgacacactaatttggcacttaaaggtgttaaaaaataagattgagcgtaaaattacttctaaaaagaggtcattcatactattttttattaattaaggttatttatataataactttatattataaggagttttgttgcaattatttcaattatttaagttaaaa

SEQ ID NO: 368411 - DNA, 734 bp, Cannabis indica
aatcacgtaatacgcctatgttagttagggtgttacacttgtccccatcttgttctggttaaaaccaaggtctcaatacgagtcctaggaccgggtctaggtttaggactgagaccagggtccagtattgggtccaagtctcgattttaggtcttgagtctgattccatgttcgggtgtgagttcaggtctcgagtttaagtttggattttgatcctgatccgggtcctcattcgggtcttggtttgggtccgagttagagtcctagtctggttacggttcaaggtccaggtccaggtcctggtatcggtccaggtttgggtctgggtgtgagtcttggcttatggatccggttccaatgtcgggtttgggtccttgtctgggtttgattccaagtgcgagttcgggttttggttcacgtcctagatccaaacatagacaacaggtcggttcgaagcctcgagtccagatccagatcccgatctcagctcctactcttgttccagtttaggtgccgagtcctaagctgggtcctagatctgggtcggggtttgggtcaggttctgggtctcggtctcaatattgtcgcccaggcccttgtcctatttctaggtctgcgccccaattctattcaaggtttgggtccaagtctgggtctgggtttgggtcccggtctgggttctggtctggttttgtttcgagtttgggtccaagtgtgggtcttggtctgatttc

SEQ ID NO: 368412 - DNA, 797 bp, Cannabis indica
ccgaatttcaggtataataatagttatagaagctatattccatatctataattaacgctcttatgggtaagcttgtgatgaacaagtcaaagaacttgttattattattttatataatataatatttagattaactaattaagtgtgaaaaattattaattttgtcaaattgtaacatacattgtggagttacaaaatgtgtgtataatgatcacaaaataggagttgcaaatcctttaatttgatgatcacttgaatatgtaactctcatctctttttcactctcaaataagtaaaaaaaatgtaattaattgtttatgaatgtgaatgaatgataggtatcgaaaatatagctgttggagacgtaatttgttcatttataaggtgtatatatggttcaaaatcatgtggaagtgatttggaacactttggagaagaattggccaaaactaaaaaaaatgataagtagtaactagttactgtttttttcagcatacaagttcatacgttttgaaagtttgtgagtctttttaacagcccaaaactcctcaaaatcacccaattaataccacaaatgccaaattaatgattggtaacatccaagggctttatagtggtcatttatgttcatatgagagtgaaaaactctataaatagaggccattgtgagagacggagttaaactcctttgttgttgtttagaaccttgtgaggatatgctcatctttatacactaaactgagcatatgaggcttgataaatccttaagagcattttctagagtttccctaagtgtc

SEQ ID NO: 368413 - DNA, 821 bp, Cannabis indica
ttgatgtgtttcttgcagagctgatgaagtgatcttcaatttgaaggtacctcagaagtcgtgcgatcctgtgaagagttcagatcttcaagctgaagaagagttcagctgaagagaagcaagggaatcttgcctactgaagtccaaggctcttggatgatatactgatttgagtgtgttcaaatcatttgggtaatttctgtatgaattagtttcagattgcttttggtgtaattgtaattgaaactggaaagtgtatctttgattcataatgaaagttattaccctggttcaagggaacccaagcactagtcgcctgaaatgagttttcagggtccgacgaagcttgtaaatctgagtgttttctggttagtttcatgcattctacattcagtataaaagcattttattatacattaagaatacaacactgctagacttttcatttggtatcagagctaatctttctcaagttgagatcgagatcttggtgtgttgttttctctttctgtgtgttgctctgtattcttgattcacagtatttgtttaccttgcttcctctggataattaacggacctcaagttctttcttgaggcattaccccttgtgtttctgtgttggttgtgatcttttacaggaaaattaggtatggagatgtttcgcgaaggaggctccacctctcggccacccatgcttgaaggagcaaattatccctactggaaaaccaaaatgagggcgttcttgaaagctgttgatgaaagagtctggatggctgtgtctgaaggatggtcccctccctcggttactgatgaagagggag

SEQ ID NO: 368414 - DNA, 812 bp, Cannabis indica
attgctcagatgtgttactcaagaagaagctgcacgacccctatctgaggtgcacgacggatttccggggaaaatcatgctgccgggcaaagcttatctaagaaaattctaagcaaggttacttctggccaacgctgattgaagattcaaaagcctatgttaagaagtgtgacaaatgccagggattttcaaagatacctcgagctccacctaatgccagggatttggggaattgacttgatcggacaattacccaaaggtaaaggaggagtgcaatatgcagtggtagcagttgattactctactaagtggatggaagccaaaccactcgcaaccattacatcaaagaaagttcaagactttattgtgaagaacataatctaccggttcggaatgccgtacaaaatagtttcagataatggcaagcagttcgacagccaatccttcactaagttttgtgcgaaccatcgtatcatcaaaagtttccttgtagtgtcgcatcctcaagccaatggtcaagttgaagcagtcaacaagagcttgaaggatacactaaagaaaaaactcgaagatgccagaggaaattggccaaaagagcttcctgaagcagtcaactgaaaaacagcaaccggacagacaccattcgctatggcatacgaatatgaagctatgctacctgtagaactcgagccatcttcctacagaagattgatgtacaatcaagataccaataacgtactcctggcagaatcacttgaggaaatcgaagaaagacgagccattacaaaattgaagttgatggcccatcaaca

SEQ ID NO: 368415 - DNA, 769 bp, Cannabis indica
acatgtacaagtgtgtacacgtggacagtccaccgtgacactaaactgtgatttttggacagaggtgtgtagagcaaaacggaacgaggatttaggtagtctaaccgccaaaaattcagtttttgtggttaaatgctataaaccgtaaaattcaggtggtttagccgccaatatcctatattaaatttgtagttttttaaaaacttttaaatagttagaatattgataataaaattcttgatattttagtatatgtttaaaattttttaaatttatatttaatattgtaaccataataaatattgttataatttttttttgtttttctgttaaaaaaaataataagtctatgtatgtttttgaagtgaagactgagaaaaatattgtaataagaaattgtaattctataataatttgtttcaaccaatctatgttttaataaataatcacattgtgagattacatattattattctaattattttaggaaaatttacaccctttactaacttttttatttttctttcaaatatactgtgacacggcaaagttaacttttctaccgtttttatttttttgtttatttcggccttggtcttggttcaatttgtcactttcattatagtgccttggtcttggttcaatttgtatatataaaaagtttacaagaattgattgatgactctcatgtcactttcatttcatgtcaaattttttttatttaaatttgaaattgattgatgactctcatgtcactttcatttcatgt

SEQ ID NO: 368416 - DNA, 628 bp, Cannabis indica
taaaattcttgtgtctttactttataatatttcaatcgtattgaactacttgtcgcttacaaaattagactcactgtcgttggctaaaaagcgaggtcaacatttggcattaaaaaaatgataaataaataataaaaagaccttaaaaggtcggccattcggatgtgggcccaatatttataattttgccattttttctaaactatttattcttttctttcacaaatgccatatttttcaaatcgaccacttaaatgtcaaaactatttatttaataattaaaattaattatcaaataaactttctatttaattaatttattaattagacttaataaagtctcttacttaataaataaactctaaaatctcttttctttacaattaatccctagcttagtgaaaattcataaataagatatagtctaattttagaattataatcgattaattaaaatacaattaactgagtcttacaaagtagtattgtctcaactagtatggggaccatgggcctatataactgagcttccaataagctagatctagaatttaccagtaaatttgctaacttattaattcctcctttccaccaactatagattttagaattgcactctcaattatat

SEQ ID NO: 368417 - DNA, 818 bp, Cannabis indica
gcataccaacaccgagtcacaagatcaacaaaaaagtcaagaaaagaatatttaatgttagagacttggtgctaagacgagtgtttgcaaataagagagatgcatctgtaggagtgttcaacccgaattgggagggtccatatgtcatcaaagtagtagttggagttggaatttataaattagctcgactcaacaactcgctaataaagaactactggaacatggaatatttacgaccctactaccagtaaataaatgatgtaactcgcattactgatgtaaaatttaaacttctgttatgaataaagagaatcatttatattaagtaattacaaagttttattctttaaaaattacttaaggggcatttatgtatgattaaccgaaattcatctagatatacatggtataatgcaaacccaccatttcaaaatttgttttgaaatttaaaggttctcgactaaacctctttgatgaaagaggagtcaaactgttataactctctgacaaaacctttctgacgagagaggggttgaattgttataacatcttgatcaaacctttttgacgaagaagggatcaaacaaatataattttttattaaaaacctatctgacgggaaaggaaaatcaatagttgtaactcgggtataaaattgagtactaacggttctcgcgagctagagaagtgctaaacgaggcatcacgacgccttgataaaagtactttaacctagaaaaattgatagataatataactattcatacgagcaaattaaaaatatataaggtgataaaatcattaaagtatatttaagtt

SEQ ID NO: 368418 - DNA, 699 bp, Cannabis indica
aaatttcaaaattaaccataaggctagtttgtggaaaaatcaaattttcaaattcaaaggctactaatatctaaaactaattttaattaatttttttatgataattagatttttatttgaaaatttggattttacacaaattctatcaaaatttgaattttatttcatttaaaaaattattttagaaactcaaaatatcacaaaacaaatttggtacaggaagtatgcaatgcatactccctctacgcgcgcatgggagcaaatgggatgaaatgaggctgcacgcagccttcatgacgggcaaaactcagtcagctagggcttaggacagcccttgtccaagaaaactcagtgatgggcttgtctgaagcagtgtgaaggccgagtgatgccttgtccgcgcgcgcacgtgtgcaacaactttgagatattttcattcaaacttcaatcaatcataactatttcaataaaaatccaaattaagttctgtaaaagtgtaaatttattatttttcatctactttccaaaaaagaatgttttagagcaaaaataaaaatatttatcatcgtaaaatcataatttctatacaatcatgaaatatgcacataaaccaacatgaacacatccaaatcatcacaataaataaattcatcattttaaatccatatgtcatgaaagtaaatcattatcatggctctg

SEQ ID NO: 368419 - DNA, 716 bp, Cannabis indica
ctcacgggtgctcgatcagaattgaaaccaggagagagtcttcaaatcactcatctcacttttgctcatgcatctcttatgcggtttgctctaagaaattgggttcctaactccaacaagaccgtagtgtctcaagatgtggcatcattcttataccgcatcacctctagaacttcaattgatttggcctcacacattctgaaccagattgtctccttccgaagaggtaaaaagccaacctttaaacttgtatttccaaatctattctataagtttttatcttctcagaagaatgtggcccaatcacatgaaacacttgagcctcctatcattggacctacattccaaccctcagaatactttgatggtgtgttacaaaaatggccaaaggctggagctactgctgctgctgctgctgctgcaagttcaagttttgctgcagcagaactcctggaagaatcgtcttgcagaaatggaagaacttcagcatgagatgtccaagcaattgacttctttggttaaactctaccgagactaagttgttgtttttttctttgcttttgattgaacttatttctattttttctttctttgtttactttggcgctccgataaacaaaagggggagaaatatttattttttaattagtttgtttgccctaactctggaccggtttttcctagggggtagttgtggttggttagtacttgtgaac

SEQ ID NO: 368420 - DNA, 526 bp, Cannabis indica
tttttttttttaattttttacacttcaaaaaagagttttttttttgtattttttacaaaaattcacatataaactaacatagcaaccaactgagcaacctaaatcgtaatcaaaattcacatagcaacccacatagaaactatcagagcaactcgaactgtaaattttttttttttactaaaaaaaaaaagagttaaaacatggtatatgaggtaattcttaaaaaaaaatgactaaaaaactctagaagtcgaaacagataagtagtcacccttttagtggtgtgttgtagacctacccattaacaaattatatatcttagaaggtataacttaatagtgtaaaaagtatagcaagaaaaagataactgctattttggaccccgtgttttacaaaagttactaattggatcctctattttattaaatgacaaaatggaccatgtattttcaaaatagtacaaatatgatcctgaactgattttttgtcaaaataaaatttaataataatatgatctaaaggtgtt

SEQ ID NO: 368421 - DNA, 368 bp, Cannabis indica
attaaaagctgctcggtcaacccattgtctgtaatatgaaaaataattccaagtttaaagatcgcttggctagtcatgatgtcttaaaaaaggccttatggccgaataagatacataaaaaaaaaagaagaagtatttaaatagctggagtcctaggctctcggttcggatcttctgggccggtaggagctagaggatttgttgtttgaacaggaggtatatcagcattttgcccgaaggtagaagtagctgttggaaattattttatcactagggtaagttcgaaaatcaaaggaagaagagagagagtgagtggcggctagggaagagagataggaggctcaagttattctgattcagaaagtgtg

SEQ ID NO: 368422 - DNA, 603 bp, Cannabis indica
taaagaagagtatatatcgttccaaacagcattccctagttgccgatgaagtcacataatgcaacatgctgcaaatcctctccaaataacgtgatctgggtacgtggtgttatgatcctcggggcaccggaattgtgattatatcacgtttatctttgagtttcagaaattcagcaaccatccattttagcgatttagggatcgaatccatgacctttcgcgagaataattcatcttcttcatcatgaccgccttgcggagaaagcatgggagattttcccttcaacgcatcacgtcttgaaggcggttaaacgagtggaccctatacaaaacacaccataatatatcaaatttgattataattctaccgaaatttccacagcataatggctgtaattgaatgcccccaaaaattttaaacatgcctgtataatgacaaataacacagatataatagttgtttattcatccatcccaccgcaacacatatattcgcagaacatacttcactatggttaaatattgaagatattcaaactccactaatcactaataattaatttataaaaaaagttacctcgggtgttgcaattaggtatttag

SEQ ID NO: 368423 - DNA, 526 bp, Cannabis indica
ctgttgtggcactatcaactacaaaagctgagtatgtggccacaactgaagctataaaggaagctatatggttaaaagggctaatgaaggagctaaatctacttaaaggagtacctactgtgtactcagacagccagagctgcatatttctatgtaagaatcctatgttccatgacagaacaaagcacatagaaataaagtatcactttatcaaggataaagtgacacaaggtgaaatagacattgagaaggtgcctactgaggataacccagcagacatgggaactaaaattgtgactcttaacaagttcacacattgtatgaacttgttaagaatcgacaaaggagactaagagtaggacctatcaagctaagactctcagagataatcaaatagactctagaactgattataagaggaattcaggtggaaattgttgaataaattccacttataaccagtcctgtatacttacagatatccacatcagcaaagtaaaaacagaaacaagcaaacagacacagt

SEQ ID NO: 368424 - DNA, 974 bp, Cannabis indica
ttaattattgggtttatttgttaacggagatcaaacctaatcgtttaaatatattctgttaaaccaagaaatgtcgttagatagacactagattccaaaatctgtttatctattttctcaaatttttttaatatttttaataaaaaaataatcatcaatctatatatctatttataattctctcacttttataattttttaataaaaaaattaaatcaccattcctaattatctattttttttcatgtttttaattaccaaaagacttaattaacaattattttttctaaaaaaataccgtagaacttaaaaaaaatatccacgtattgattttttcaagaaaaaaaaaaaaaaacttaaataattctaaactatatagatatattttaacattgatattttagtatcaaacatatgctatataatatatataacctagctaatatatttatctaaatctctatttttataaccatgaacaagcaaaactcttttctcaagcatccatcttccccatgtctttccacatctctaaaattgagttcgatgattattttattagttatttttttaatctctctcatggtgccctcaagtttttctaagtaatcaagtttagttttctcattgttgtgaagaaatatgtgagaaggattttttgaaaaaatgaatctactcttttttgtttcaatttcttttgagtgtaaatttaaaattttttatttggattttttgtttttagaaacaatgaacccccggtacttttgttctttctttactaactttcaagtataaatttcaaataaaattttttgaaattttttgtatatgtatatagtctattattactataataatgatggtgatatatagtgattaaaattacaagtaatggtgtatatggatcctgtagttttttttttttttcttatttttaatggttatcgaaatactttaatttattattattatta

SEQ ID NO: 368425 - DNA, 469 bp, Cannabis indica
aatcaactaacattcatcatatccctaaattgagaaattaaatagagaactcgatcggatcgtcaggctcgcttcccaagtcttcttcttttgtttctagggttctatttttgaatcaatgactaaaaaaatagaaactctcttataaaaatctgtttttcacttcaaaatagcaaaataggagactgccccaaaagagtttaaaaaccaatgagctgataaaatagcatttttatttataaaagatagcacaaaagagttcctttacattaaaaaaactatctcctgcaattaatatctctcttcttttcacagtggaagaccataggaagagatgaaggtcacatgtccacgagcgacctaagtttattcatagccctcacttaattatggctgaggaaaaccgtgattacatactgctagtctgctacgctagatgtggcgtgctgtcccatggcacacccacaat

SEQ ID NO: 368426 - DNA, 738 bp, Cannabis indica
cgaggaagtggaaaacctgcaattggcggctcagaatcattggcaacacttcttaggaggtaagatcttaaatactgatgctaaattgacatatactgaaccagtgattaaggagggtaggaggatagcccatatagaaatggaggaggtgaaattgaaagaagaaagttggaaatcagctgtaatttgtatggttttgggtgctaatgtcccagcagtggtgtttgaaggctttatttgtagaatttaggggcacttaggtattgttcagatagctagaatggctacggggcttacaatggttaaattcaatgatgaagcaacacgaggggaggttcttgaaaatggaattatacaatttgatagcaaactggtcattgttagaccttggacaacagatttgaatgttgttaggattgtgaaattggttcctctttggattacgctacctaatcttggtcttcaatattgggggaaaaaaactttgagtgctctcattggcacagtggggaagccaattatggtagataagcacaccaaggaaagaacaagagttcagtttgttcgtgttcttgttgaaatggatgtaacggagaactcagagcgctctttttggtttgttaaagaatatggacagctattaaagcaacaaatagaatatgaatggctgctagttaaatgtaaacattctagtgggtttggccatataatggctgaatgtaggaaggttgagaagcc

SEQ ID NO: 368427 - DNA, 684 bp, Cannabis indica
tctttagtttcttgggttttaagaaaatgaaatttttcatgaattagtgtttttgctgctgtggttgctgtagttatttagtattgtttttagaggtttgattatgctagattatgttgaattaagcttgaattgtgggctgttattaggtttgaggaagctttgagttttagaactcaagcttggctctttaatggcaagttttgtttcagtgcatgttgttgtgttttgccaccttgaatttgtttattgcgatgtctagaacaggtctagaaggtttcattgagtttggggttgaattggttgagttatgaatttttgtttgattcctgcactacaccggaattccggtttagggggacctgtaggaaccagaattccagttggtccctaggaaacccctcagaaccggaattccgattaggaaccgatctactggttggggcaggtttgggagccctagtttttcccatttttgtgatgtttagggtattgccatgtgttgaccgaagtttttggcaaccaatataacaatagtatttaggaaagctataaggaattaatgagagagatttttacgtggttggggcattaatgagccttagggccagtttggcatagctgtgctgtgggaaaaagcaactgtaactgtgctgtgagaaaaagcagctgtagcaaaactgt

SEQ ID NO: 368428 - DNA, 684 bp, Cannabis indica
ggtttaggatttaattatatagagaaaaaataaaataaatggctaaaatccactttagtggcaagccacacatgtgggcctcactatttataattttgccactttatttcataattcatcttttcttttaatagtgccatatttttcaatttcaatcctataaatatcaaaactatttatttaataattataattaattatcaaataaaattaccatttaacttatttattaattagaccttacaaagtctcttaattaacaaataaatctcaaaacctcttttcttcacaattaaacccttgcttagtaaaaactcataaataagacatatagtctaattaagaattataattgattaattaaaataaattaattgtatgcaagaagtattatctcaactagtgtggggaccatgaacctatataagcaagcttccaataagtagttctagaatttaccaagtaaaatctctaacttattaattcctcctagctgcactatagattcagaattgcactcttaattacatagaatgcactattaccaaaaatagatgtgatttgaattacccattattttaatctatatagtcaaagatcctctatagatgatctacatcgtttagggacaaatttactattccacccttcaatgtattttatcctcaaaatacttagctacct

SEQ ID NO: 368429 - DNA, 582 bp, Cannabis indica
ataatacattattttcatatctcgatcatttaaaattattattactattatatctcacttgttgtcttattgtatctcacttatttttatcacagtatttcacccgttgtcatcactttctcacatcccttatcattatcgtagttcacttgtagtcgtcactattgtatttcccaaatctatatcttaattttagatttcatctcaatttttaaatatttttttaatatttgtaaatcattagagaaaatttattagtttgttctgttattaattaatatgttttaaaaaattgattattattttttaaatatcttaatcaaaaaaatataaagaatgtgatattttagttatgagaaatgctaaaagaaaaatatagatatagatttgtatatatatttattgatattttatgtatgtatataaacaaaatttactattaattatatttgatttaagttttaatatttttttttaaatttattttttattttctaacttttttaaaatattacatagaaaaattattaaaaaaattatgctttttatatagaaaaattattaaaataatagtaaaatatt

SEQ ID NO: 368430 - DNA, 632 bp, Cannabis indica
tattaacgagaaaccatatgtaattgaatgcatatagagaggtatcaactccgttacatctgggaagacgaaagcgacgcatatcaaatgttaaaacacttagcctataatgtacaaactaagtataacaatcgggtgggctcgagacctaataagcgaggtgcctatctcatcttcctaagaaaacacattttgtaaccctactaataactccagaatattcctattaagcttcctcttcttcaagaggaacacggtggaaaggagttctagtccattgtatctctatttatataaacaattgtcggtcaatgagcctaataaaatggactcgtgtaaggatagttaacgcatgaaccacgtaaaaatttcttatttgttattttgatatttattctgtcatcatttcttaagctctaaaaaatattcagttaccgaaaaactcggtaaaaaaaaaaaacacatcttaaataattactaaggtttccaacttgatgatataagtgttccgtttagaccagattcaaatacattatcggttgaatagagttgtcagctcatataaaatagataccattttagcaaccttttattcgatcaaaataagaatccaacattgtccttttaggcag

SEQ ID NO: 368431 - DNA, 913 bp, Cannabis indica
gattcaagatcgaaatttttgaaaaaatcctcaagaaataatgtgagacagaatgaacaaaaagaataggggaattgaaagaagaaaaaaacctcgatatcaccaagaagaagtcccatgatctcttcggtctcggtagacaatgcatgagttagcaagtcaaccagacgtcctcggacattttcacacatgttaaagacatcctattcctcttctttctcaggttttggttacgaactttgtaccaaatctacttgtactcgtactctctctttctgtttctgtagaaacaagaaaccatcaaagcaactgtgctaagagctgtggttgaggatggagtgtggagagggatctgagttgtaagaaagccagaccacaccaaccaacaaagctcctcagtctcagtctcagtctcagacacgaccccttgccctttcgacccaaaattatttacttttcttaaatctaatatcgacccctacaaaacctctatttttctgtatcacgaccctactaaaatttcaagaaattctaataaacatcctgtatttttattttatttttcaatatgtatgttattttcttttctttcttttcttttttttttttccttttttctaaaaaaaaaaaaatgtgtaaataagtgcttctattttaaaaactatttattattgttattttgtgtttgatcatggtactggtacataataaataacaatggcacctaccctataatttaacattacataaacttaatattttaaactcaattttgatccttaaagacaaattcttcataaatttaaaatcggtttggtaatacttttttaatttattttttattttttaataaaaaataaaaatatttttcaaaaatatgttctataaagttgttctcacttttttaattttc

SEQ ID NO: 368432 - DNA, 425 bp, Cannabis indica
cgcacttgttattattattattcttattattatttttattatttatttttggtgttgtaaaattccttcaacaacaataacaactacattgttaatcattttaattaaaaaataatgccattatgacctactcttcaagttgatcattttaatgtgtgaaagtcatatatttttttacttttaccaaaaaatgtaaccaaaatcaaaagcaactactcagttttttttataatttaataataaaattgtaactaaattttaaattaaaataaaattcaatatatcaactaacttatgttactataaggttgtttgatatctcgtggtctattctattaaaatattttcgtaggtaaggaaactaaatgtgtaaagcccgcttagttaatttggaaataagcagttgattatgattatttatgaaa

SEQ ID NO: 368433 - DNA, 579 bp, Cannabis indica
aagtgttggaatgtgacttggatgctttgtcagccagccgtattgggaggctgtctggtacatggaggatgtcacccatggccggccagctaatggttcgaccaggaccctgcttgtaaagaccacttagtttaatttgtaaattagcagttaattatgagctaattatgaaaattatttatagatatttaaataattatttatgctgttatttttgaattctgaaatgcattttatgtcatatagtgaaattttataattttgcatttccggtgcccggcaacatggaactcggtgtttggctcagtagaatcacaacttagcatgttagtatattggggcagtttattagacattgggaatgtcgggattggtcgggaatttagaatttcccaaaataccctttagtacccttttatgttattttagtgtggaggggcaaaatggtcattttgccccattgatattttgtcctttagtggacttagtgttgttgaaatatatgttttatttgatgttcttggctgaataagaaaggacttaggcatttatcttcattttattcaaaagatagaaaat

SEQ ID NO: 368434 - DNA, 528 bp, Cannabis indica
gctacttgccctatcctctcaaggatcttaaaaggtccatgaacctcaggctaagttttcctttcttaccaaagcatttaattcccttcataggtgatactcggagaaatacaatgtccccgatctaaaaatcaacatcctgacgctttggaattgcataactctcctgtctgctctgagccacgagcattcgtgctctgattttatcaactgtcttactggttctctgaacagcttcgggacctaagaactttctttaacctacttcatcctaatgaataggtgatctgcattttcttccatataacagttcataaggagccatcccgattattgcctaatagctgttattgtacgagaactcgatcaaagtctaacatacatgcacatagcatgtcttctaagatctgaatggtcctcttagattgtccatccgtctgaggatgaaatgctatgctgaatttcaattgagtacccatggctcgatgtaggctctcccagaatcttgacgtgaacttcagatctcta

SEQ ID NO: 368435 - DNA, 729 bp, Cannabis indica
ataaatgtctaacagttggtatcagagcggattatatatctctgccttgaattttttttttttttagtttcatatatatatatatacatttacggggttcttcatttataatataaattatatatattttatatatacttttatattatataatcccgattatatatatattcatactcaatttattttttatatatacatatatattcatcttcatatttacgttcatatatatatattatatacattcatttataccatataatatatatatatttggatatacacattcatattatatttatttattcatcgatttctttccatataattaattagcatattctattatatatttttatgatattttatatggtttaatgtgtatatacaagtatatatatatacgtatacagtatcaatttttgtttttatatatatacattttcttttcatttaaaacgtatatatattcatatttatatatatacacttttatattcatatttcatactctatatgttcatatatatacacattcatatttatattcatatactgtgtatatacatataattttcatgtatatatgtttatatataatacaaattcttttatatttttattgcataaaattgtatgtaatactctcttccatacattaatgatgattttattgttaggttttatgtccctaaataaaaactctttacaatctgattagttatc

SEQ ID NO: 368436 - DNA, 539 bp, Cannabis indica
ctcggagctgtttggacggagttgggtgaagccaacaagaagcttttctccgcccagaagaaaatagctgagctgtcaaaggatcttgaggcttctgaccgaatcgaggagaccatcgagactttgtctactgaagtgaacagtcttcaggatgagaggacatctcttcgagcggacctctgtcgggtgaaggaggagaaggaagctaaggaggaggagcttatggccgaggtgacgaagctgaaagagaaggttcatgccttggagacagtcggtcttgagctcttctacgacttttggatggctaatccttaggcgaacttcgactacttggtagaagctaaggacatgtaccttgagttttgcgcttcccaagtggcttatggtgaaaccgaggcggttgcttatacctccggaaaaaatgctgatgtgcttcctattcaaacaacagatcatctagctcctgccggcccagaagacccgaaccaagagcctgggactccagctgcttaaacacatcttcttttatccttttattt

SEQ ID NO: 368437 - DNA, 589 bp, Cannabis indica
tgtggtgataataatggtcgatggtgtggtggtataattgaagaacaacgaagaagaaaagaaaaaaaatagaaaaaaaatgaagaaaagaaaataattaatttatttattttagattataattttatttatttttaatttatttttataatttgaaaatatttaataattaatattgtgtggacctttaaaaatttaccacatgtacagttgtgtacacttgggtagttcacttggcacttaatagaacatttaagatgaaaaagtaaaaaccaaaacggaatggtagtttgaaggggtttaccacgaaaaaatcgatatacgggattaagtgttacaaaacttatagttcatgtagtaatgtcaccgatatgtctttcaaaacttagtagattaaatgtatattttattcttattgataaggaaaatataatctaaaattaaatatgtttttatacacacaaattttctttttccttataatcttattttttattttatttattttaatttgctgttagagaaataaaacaacaataaattattttattttgttgttagttatgtggaaaaaaaatttaataaatat

SEQ ID NO: 368438 - DNA, 540 bp, Cannabis indica
atgttgagctcaacacttcaacacctaactatttatatctaaaccagtggtgttaaggataggtttacttcctactagctagaatggccagagaattctaagagaactttgcatgtccattcgaacaatgaaagcccctatagtgcattattttacgtattctgatcaatcctccatacttccgtgtccattccattgttccatataaccaagttgttgcatcaatggttatggtgatctcgtagccgatcaatctagtactttcgcatattgtgatcaatcatccatgctttgttaaggtgagcatgaacaccttatgttgcgctcaaaaactatcaacacctaaacgacttttatatcgaaatagtttaggtgttgaaagttgttgagctcaacacaaggtgttcatgctcaacttaacaaagcatggatgattgatcacaatatgcgaaagtactagattgatcagctacgagatcaccataaccattgatgcaacaacttggttatatggaacaatggaatggacacggaagtatg

SEQ ID NO: 368439 - DNA, 641 bp, Cannabis indica
taatttacatagtaatttacaaaaaccgggatccatttctaaactttatacaacatatgtcaaaatataaaaccaggtcgcacaacaactacaaaatataaccccagatgtcccgagactgaacactacaggtcacctggcgacgacatgtacaatctcatctcagcctaggctcactcttgttcatccttcgcctttcctttacctacacatggaagcagaactatgagtcgacagactcagtaagtaaagcatataacatataatataatactgacttgtatctaggcgcccatacacctatttacaaggcttatcagatgagtaagaacgttccatactagggtacaaccactataccacatacactacgtacctggctgtacgagtgttggtagtttgtttcgtaccccgagtaccactgagtgacataccgcagacaccctgcattttcccatactgctgctggtatcactatattgtactctcaaacaatattcactataccaatgcactctctaccataactgtacaagtattggtagtgcaactaacatttaagcatgcatatatacttaacacatatatacactcagatattcatattacacattatcctcagttcttaccttctttctaga

SEQ ID NO: 368440 - DNA, 636 bp, Cannabis indica
  modified_base (60)..(60): a, c, t, g, unknown or other
ctctatccccacgaatgagtttcgcaactccaactcaatgcttctttaatgcctatatcnctagactttcgggttaatacatccaatctcccctcttgaatgctctaccatagcaccatggtaattctgagctacagaacccatgccaaaagacaagactcgaaccagaaaaaactaaaaaatcatgtcaaaagacaagactaaagaagcatgtcaaaagacaagactaatggaaaaactaaattagtttcaacacataaacacgatcacagcattaaaattaattaaggaatgaactccctataattctaatcccataaaaaaatattaaatggtattaaactaataatagtaaattaataaatgaaaataaaaatctgaaacgtcgttgaaccgaaccgaaccactctcagacaactgctcttgaacccctcacagaagaagatgttgatgtgggaatgagaaaaactttggctttttagataatcttttctatctcatggtaaaatgccctattattaatctagtgagttcattacaaaaaaaattaaaaaatctagtgaatttttaacgataatgtttcaataaaatcaacatagtttgtcattaaaaatttataaataattttaaaataaa

SEQ ID NO: 368441 - DNA, 786 bp, Cannabis indica
cactttttatgtgggtcactaattagtgtcactaaaagtctaatttatagtagtggcgccaggttacaacccggtatattagtatgttatatgttatgcttttcttactgagtctgtcgattcatagtgctattttcttgtgtaggaaagggcaaggccaaagctaaggagccgtgagagcgagcaggtgaagattgtacatgttggggcggttaggcctggagcgtacgatcttaggggacatcaaggcttttgctgacagtcgctaggcaaaaaaacttttatgttaaactagcaaacttttgtaaagtattttgtaaacgagatcctagaattttatatatgtaatactttaaatttctaattaaataagcaaattttaattattcacgattttcattaacctcgttgaatagcaacgagctgcacaatacgtttaaaatcacgctaacacgcctatgctagttagggtgttacaatttggtatcagagctgccacgttgtctttcgaagatcgtcacgacatgttcaatcatcatcagcagtcagctcgtttcacggtccagaaggcctttattgctttagtagtttatcttctatagtatgaattaagacaagcctgtgaggaagcatgttagtagcctgatagtagaatagtcgcatgtttttaatttcaaaataagcggcattagtaagttttcttgtatcatggtctgaccaaactagctcctggtgacgtaggctgttctaaattagtatggacgccaggcaaaataccaggagcca

SEQ ID NO: 368442 - DNA, 507 bp, Cannabis indica
aaataatttccaacagaattttcaattctttaagctcagctggagccattgtataaggggctttagaaaccagttctgttcaaggtaccaaatcaattataaaatcaatttcccgctgaggtggtaaacctagaagttcatcaggaaaaacatctaaaaattcacgcaccaccttgatgtcttctcgccgaatagagttaggccgagtggtatccaataccacggctagaaatcctagacatccaccacacaacaattctttggctgataagaccgaaattaccgggatccaagatccctcaaccgaaattataaaaacaaacggttcttcaccttctggttggaagattaccatcttcctcttatagtcaatactggctgaatatttggacaagaaatccattcccagtatgatatcaaaatctgctaaactcatttctattaggtcagcacttaactccctatcgtcaatcctgatcggcatagacctaatccaccttttggaga

SEQ ID NO: 368443 - DNA, 593 bp, Cannabis indica
ttgagtcttggtctgagtttgggttccggtccggatttcactctaggtccagatcaggctccgggtgtgggttcgcatcctcggtccttgtctaggttgggtgcgagtcccacgttccaatcccgatctaagtctagattcagttctgggtctaagtccttggttctgatcctcgtctgggtttgagttttggtctgggtctgggtctagctttgggtctgattttagttgtgggtttgagttcgggtccgagtctatgtccgggtttgtgtgcaggtctggaccctgatctgggtctaggttcgggtccagttccaagttggggtccctagtgcgggtccaagtttgggtgtgggtcagtatctcgatccaaatctaggtccagcatttcgatcccagtctgggtcttggtccgagtccatgttcgtatccggatccctatctaggtccaagtatgtgtttgggatcgggtccctaatttagttccatgtccgggtctcagttccggtctgggtccacgaccgtgtccgggcccgagttccatttctggtgccgggtcacgagctgggtcctaggttcaagttcgggtctgg

SEQ ID NO: 368444 - DNA, 667 bp, Cannabis indica
aaatattgtggcagcagttgaacgagagctcaactggatgatccccatcatcgaatacataaccaaaggcgagttgccccaagagaggacgctgtccagaaagatacagtatcaagcgcaccgttatgtgatgatggataacattctctaccgaagaggactcagcacgtcgtacctaaggtgtgtatcggaccctgaagctaagcaaattatgttagaggtccatgaggggttctgcggagatcatacaggaggcccgagtctctcaaataagatactgagacaatggtacttctggccaaccatgaaaaaagactgtatagactatgtccaaaaatgtgatttgtgccaaagattcgcgaacataccaagaggcccccccaacgagattaccctgatgactagtccctggcccttcgcgatctgggagatagatcttattgggtccctgccaacggaaaagggaggggtaaagtatgccatagtagcagtaaactacttcacaaagttgacggaggcttagccaatgaagactataactactaaaaaatcactagactttgttatcaaaaatatagtgtgtcgatatggcttgcctcacaagatattctcaaataccggaaagcaattcgactgcaaagaacttaccgacttctgcaaccaacac

SEQ ID NO: 368445 - DNA, 1026 bp, Cannabis indica
atacatcagactggaccgatattaatcgtgaaaaagatatcataaacttcccataatatcttttctaagtcaatgtcacttagttgatcttagatcaaagatgttaatcctgagatggttaggttctggcttaactgtactgcatgtgttctttgacttgttcgttacaaggttaccagaggattagctcaatacttacatcttgggaacacggtagtgcaattgagtgggagcgctaatcatagatatagaatctatagcttctataactattcagaaatgaaatgatggtttccttagagcttgttaacaaacataaatggaagagctcttatttcagtaattatattaatttattgaaatatcatttataagaagctaagtgttttaaggataaaatatattggaggataaaacggtaaatttatccttactcgatataaatcatctatagaggatctttaattatttagattgaaacaatggataatatataccatatctattcttggtgattagagggttctatgtaattaggagtgcaattccaaacctatagtggagtcatgaggaattaataagatagaaaatttacttggtaaattctagaactacttattgggagaatggttacataggcccatggtccccacactaattgggataatattactttgtagtctctattaattaatttatttaatcaattaggattttaaataatgattgtcttatttatgaattttattaaggaagggcataattgagaagaaaagagaaataagagtttatttattaattaagacactatgtgggtctaattaataaatatatttaaataatattttatttgataattatttaaaaaatatataaataaaattcatatttaaattaaaaaaaaaaaaagataagtggtaaaataagaaaagaacacattgtttcatttaaataaaataaaagtggcataaatctaactctaaagcccatacgcaatttggctctaagagttgattcagcccaagt

SEQ ID NO: 368446 - DNA, 754 bp, Cannabis indica
aggcaaaagcctagctcccaaaaaaacttcaaaaatgaccccagatcgagttgatgatgggcgcacagatctgaaaaatccacctggccaagtataacgaaatgatgcaagtagcaagagtaagtgaggatgtcaagtgcttgtgcatctttctcaccctcatcaagtctgttgaagattggtggtaaagactggcttccggatcaatccattcctggaagaaattgaatcacctttcaaaagcagttcatagccgcccgcgactataacatggaaatgggatccatcaccaatagcaaacagcagacaggaaaaagcttgaagaacttcattcagcgaatgatggaggcggcaactaaagcaaaggtgactagcaacatgaagcttgtggccttacaatccaaacttgcagttggtccctattatgggaataaatgcaaggaagaaggtttgagacattgtcaaagttcaaggcgagaccacaggtctttaacaatttggaggatgcttattaataggctttcagagtccctccagcacctgtgccctccacatttactccaggggccgctccctaggtcattgttctcgaaactcagtatactcctactatctacgtaccttcttcgttcgtgcaagaacctacaaaaaccaatttttttgagtatggagcaacataaactggatatagtattgctctcggacagtcaaagcctcaagcaaaaattttgaaatagaatgtgagtcattccca

SEQ ID NO: 368447 - DNA, 899 bp, Cannabis indica
gtacaagtaaaatagggagtttttgtgcaactaaggatgttggagagaacaggctacctgaagtactaggttacctagtgtgaagttcagaattgtagagaactcactataaattgtgcctttaaggtcattgtaaggggtcttctattgaaaacagatcaatgaaacaataatttttctgagaaaagtttaagagtctaaagtttttctttgaatgttcttctattaagatcatagaatatcacttttagttcttaatattttgttgacgagttcttaccgtcaacaatttggtgttgtttgtgggaacgacaagttctagctacgttagttcttaaaccattcactataatcttcaagatatcaagaaattcccatcgtctctgaaaaatagggttcactcaagtgaaaccagccaaccaccatagtaagagaactttaacctctagttgccggagagagccaaaggaagagtaaccaaagtgtggaccaccactcaaatactcaaaaagggcccaaaacactacgtgactcggtaatgacattggtggctacgccatcgcttgaaatattcaactttttgggattttatgccctaaataaaacccatttcagtctaatctgatttgttatcaataaaatattagaagttatttatgcttacatgtagtttttcatgtttatggtttaaaatatacaaaatttattaagtccagaacatatagttgttcacaattacagtgatgtcaacacagtggaatgtgattgtgattatatgcttcaaaagacaatgtccctagttcatcagtgcactggatttatactaatgtgataatcagcaataaagtatgcttacaccttggataagtgctgtgttctttccagaacattggcaaagt

SEQ ID NO: 368448 - DNA, 713 bp, Cannabis indica
tttaggcattttccctggttcggtaatgaagtcgaaaccatatcgatttttatgcattcttcttactttgacccttgccagcatgaagttttaacttttttacaaaacccgacaaactaagctttaggaaatccactgtggtcgataagaagggattcaagggaatgttttttctcaagaatcttggccgaatatgcatttcatctccgaatttatctttaaattttaattttgaagaagcaattcaagcgtgttttcccttaagaaacgtggctgtaaacgtttcttgtttttggttacatatgcatgttgagctaatgaccttaacaaatgagtgtatgaaattgcagttaccaatgactgggcatataccccccaaatgagttgagagattttgggctcctccaaattctcaatcatttgcttaagacccaacgtggactactccttggtccccgaagaggagatccgagtgcgtgttttttagccaaacctcttctcaggaggcgtaactcatgctaacatctaggccatgcccttcccttctatggccacttggaggggaatctttctaaaagttgataaaggctaggataaattcggcagaagtctctcagcttccacgggggaaggccttttctcaactgaaattcaagccgaggtttcatatctagaattataggatacgaccaagttgggtggcagacttcaag

SEQ ID NO: 368449 - DNA, 1091 bp, Cannabis indica
aatttttgagttgggcgggttacgattaaatatttgcaacccgatatttatattgggttgaataaaaatatgctactaacccgaactaaaccgaccaacgtacacccctagtgtataagtgatatttgtgtaaattttttttatttgggctgtatatttatttatttggtcagctggaagtaattttataatattgttactttttttagttaaaaactgaaaaaagtctaaataaaaaaaaataagatatttaaatattctttattttattataattcttttattttaaaattttaaatatatattaaataagtaaatatatatttttagtttaaataaattcattatagagttttttttaaccatttttttttaaagttaggttgtatcagttttagcctttaactatagtttctctataaattctttaataagcagtttttgaactgtttaacatatacttttttatcacaacttttagtttttttttaaaaattgtgtcaaacggagtctataagtagttattagtagttttttatattatttattagggtaaataatgacataataataattactcaaagttttatgtttgtaagtgacataaactcaatgtttatttttagcagtataagtacctaatgtttgtaaaattatagtttttctctaattttgtgagactctcttattgtcttaaacaagccacatataataatgcctaaattctttatcgttgggtctagatagaaaatatgtagtatcagttacttctaaatgttcttttaataaattcaaaataaaatttgtactgatgaaactggaagaattttatagttttacaaacaatgagtacttatgctgctaaaaataaacatttgatttatgccacttacaaacataaaattataagtatttataatgctatttacctattttattaaattaaaatgagtaacattttatattaaattggaaggtgaccatcctattaacatttcaaataacatattatatatatattattatatgagctgtcaaatttaacgtcccaaccaaaaacaaaataatgtcagtgcaattccaattccaat

SEQ ID NO: 368450 - DNA, 1568 bp, Cannabis indica
acttaagtactaaattctaaacgttttttttttagaccgtaaaaacttttttttttagtttttttttttcagctgatggaacaatctcaactcacataatataaaaatgagagattttttgaattagatagaaaaactaagcataaaacctcaaattttcataatactacttatgaatgagtaatacccattaaaaatgcacccatatataaacaattcacctccatttctaaacaattcataaccagatttaaaaaaaattatcatcaaatatttgttttatatatgaagaaatctaaatatttgttttatatatgatgaaatcttttctaaaagattttctttcttttaaaaataatattttccctagacttaccaaataaagaataaatactataaataaaacatttattgtgataaggttgaatattttctctgattcaattatggtattttgctttttaacactaataatttaaagctcacatctatcatgtgattatttaaatatatgtacttataaattataattaatatgtatgcttccatcaactaataagttaatgtttttttttgctaaaacaataattattggttgtgtacaaatgatactttttttaaaaaaattatatgtttgcatgttgtaatttttctcttaatttaatttttgtacttatgcaaaacctgtcatcaaactttaaataataataagatctgttgttcattaaaaaaactttaaataataaattgtacttattttatattattattgctaatattaaaaaaagaaggcatcttcaaagaaaatgtaacgttgtgtgtttctttggttcaattattaagggtgtttattggaccacatgtttttaagtttatttagatctaatccaattatatattggatgatgttagactttactatccgatccgatctaattaattttagtcatcaaatcgattcaatgtggatgttggattagatcgattatatctattttaaatatatttcatgtatatctattgatttaattagtgtttatctaatattttggatttaatatttattagattggatcggattcatccaataatttagatccagtatctattgaattgaaatagatccatccaatccaaaaaaaaaaaaatgtaaaatgcaaatttttaatgttaatttatatatatatattttacatacaacaacataaaatctaattagttattcaaaacaaatgaaattattaatttattcgattaaatgttgtgtattaaatttttggacactttatccaacattacatctaatcaattgtgtaatgaccgcatcttaggacatggattaatgttacaaaaattattaaatactacgcaagtgcacacaatcaagtagtaaactcacgcaagtgaggtcgaaccagagagaattggattaattactactaaattatacttatgattctatttggcaaatcaatatttttttatgattcaaaaagaatgaaagtaattcaagaaacttaaataacacaagtgaaaatcgatcaagatgagataatagggaggagaat

SEQ ID NO: 368451 - DNA, 1426 bp, Cannabis indica
aaaagtagaacattctttgtaagaaatacttacctattaatatcaaagactcgtgaagtaaggctcattaatgtctcaaccacgtaaaaatatttgaatctactcttcttaaaccatctttattacattaattatttagttgccgaaaatttcaatcaacattttggtgctttcattgagagttgtagaaagctttactcacaaaacaacactatgagaagaaccaaggtacaacggtggagactagaaactataggcgtcatcctcgtccccccctcccaacgatccctacgaatccaagagacgaagaggcagcttcacgagtaaacgtagatacagaagaacaagacgaaacaaatgatgaggaatacgaagaaaaccaagaagaatacgatgcctatgatgatcggagttacaccgaactactggccttaaggcaaaaggtaggtcgatcacgaggccgacgctagcagcgtagaaagaacaaaataaggaaaaagcaagagataatggtcgccatgcaaaaagactatggagacagcaggaatccacgtgcatccaaaggctatgcctccaagaccatgcaaaacacaggaagagtcttgccaagtacccaaagacgtaaaatagggaactaagcctatcagatactccctcggatggagtcgcccgaaaagaaaaactacctacatctttacccgtaaaaaacgaataagaacggctcaagatccgacaaaaagttcgctctgatttcctgtaagaaaagattcgtagaggggcaggctccccaaagagagcactggcccttaggaccgagaggaccgaaaaaatgtatatgtgcatcaagagcccggggaaagaggtaggaaacatcacaagcatccccctactgacttaaggcaaaagctcaataatagacgcggtgacctcatgaatcatttggagaagaaaaaacaagagataccagtgtcggagggcatcttgaacgaagggatcttggccgaactagtaatcctctgaaaaagacattgccaagatctcacgtaggcaaaaaggggataattcgaagtttgattgtgaaaaccgggaatcctgtgccaaaaaaaatctggagatgaagctccctaaaaattttaaaatgcttgagataacgatatacgcaggagatacggaccccaatgaccacatgtctcgattcaatcgagtaatgatagtcatgagggttagtaatgacgcaaaatgtttatgtgttccactaacattaggcggattcgctgaagaatggttcaaaaaattagaaccaagattcgtagattgttggaacaaattacaagtcaatttttgaagacagttcatggcagctaagaagattaacctcgaggtgagtgccctacctaacatcaagcaactaccaacagaaacccta

SEQ ID NO: 368452 - DNA, 529 bp, Cannabis indica
tgggctcttgactgcacattagttgtagtattctgctcgtctgctccccttcttctgtttaggttgtcccttagatcgcggggtgttcacaacctttcgaacacagaaaaacttggttgccttagcgattggttcgcttggttggcaggtggagtagttccattattttgagtggatccatcgagcatgactcctcctgactaattcccagacaaggtctatcctcctacctcttggcccacgagtggaactcgtgaccgaggattggacggctgaccgttgtttgtctgtgaagcattcactgttgggtcatcttcggtttctccaaggggaatgacgctcggtgcctgctggcctatagtctgataggctcttcgtatcagcacagtaggttgccgactacgatcttcaatttctgcatggtgagcccttaatgcctccatctctttatctctccactcggcgaacatacgcctctgttcgtcaaacgcaaggtttaccgcggcacataactcctcctgatcgtgat

SEQ ID NO: 368453 - DNA, 943 bp, Cannabis indica
actggaactaggacttggacttggaatcataactgaaattggacctagatctagaaccgtaaccggactaggacccggactccaaatccgaccaagacccgaattgggagtcggacccggatcctaacccaaacctggactcgggacctgaacccgaacttgaactcagacccaaacatggaaccagactagggacacagaaccagggttgggacctagaactgcaccccagtctcgatcccgaacccaaactcagaaattggacctgggacctgaacaaaaccagaccgagaaccgtgacagtgatccagatcttgactcaggattcgggtaacagggcctggaacagactagtagtcggtgtctagatctgggactcagactaggaccagaaccaagacgaaaaaccaaagaagaacccagacctagacctaggacccaaaattagaacctgaacaagaatcgtcgaactaggaccctagaacaagactaggaccgtgagcaggacccggacccaggcgtagaaccgaacacagacctagcctaagacccaaacagagactggaactcgggcctggacacggtcgtgtacctagaccggaactgaggcccggaccttgacctaaatctgggacacgattccaaacatagacttggacctagatagggatccggatacgaacctggactcggagaaagacccagactaggattgaaatgctggacctagatttggatcaagatcttgacctagacccaaacttagacccatactggggacccgaacttggacctgcacccgaacctagacctagatcggggtccaggccttgacacaaacacggacacagacttggacccagacacgaacttgaacataggacccagctcgtgagccggcactagaaatggaaccaaactgagacccgagattgggatccag

SEQ ID NO: 368454 - DNA, 716 bp, Cannabis indica
tgctaacaagaagcgagcctccctgaccgttaatcttgaggtccctgaaattgaaactcagaattcgattcctcctccgatccctgaaagtaccgacaagcctcttcccaaagcgacccaagcttctacctcctcgagccaagccctcgaaacgttgcctgtcgaggctagaaaaactggcccagagtacattgtagagttttttgcagcatgcttacgtcatttcaaggctttcctcccccatgaatgggatttcatcaatcatggggatttgggggcgatgcttacaaggagttgttagaatactgtaaatctgtatatagccctaattaattcatgagaattaaacaataggattaaggaatagcggaagcgtactagagtccatagaatcgattttttaacgatccttaattgctgtatgatcttccaatttgcatcaaaacctttctctgaaactttttctcttggtgatggggatacaagagtgaaaagatacgatgcaaatggggaccattacctgttatattatccacagacaaaactgttggcaatatttttgactatttctattgggcccctcatcaaaatagaaattgtccttatgatatccacatattaaaatcatgacaatcatgcccttaagtcacaaactttattccaaaatagacaacatatatttgacttatttatttgatgacccaacacacatttta

SEQ ID NO: 368455 - DNA, 672 bp, Cannabis indica
tatgcaaattactttaacaagactaaagtaaacttatactatttgagtgtgtgtcgtcttgatgtagatgagctttctagcttgatttgcatgttttgatcaaaagttgactttttccctagagttgactttgactttgacttttaggttgacttttgactttgagcttttgaagtcctcttttgaatagagtcttgaattcttgatcccttgatgaatcttttgctcttatcaagtttatgatgtagttgatatacttgttgaatccacttagggtcataaaaatttatatatataaaaatattacactacataaaaattaaaatattatacattaattattattcagtaaactaattattattcaaaataaaatttgaatgtcataaaaagggtactaatatattaaaaaaattcaaacataaattacaaattattaaatattactagaaatataaaataaaatactaaataggtccccatggaggcgagcatggccggccctgaaaatatatgggcccaagatgaattaaattttggggcccaaaaaatatataaaaaaaaatatcaaaagaagagtgttatgggatttgaacccatgaccttggacattatgccatccacctcaaccaactaagctataaatatttgttgcttataatacacttaaat

SEQ ID NO: 368456 - DNA, 557 bp, Cannabis indica
cacgtgtccccatccaaaggcagaagtagcccgaatgaagtctacacgcaacttcggaaatcctgtaatgacttggggggcaaatgttatcccaacttttacactctgacgtggcagcgcatgaatcgaggcacatggaatccacttcaaacatctgctcgggaagcatagtccgagcacgatgcctcgctggcatgccctaagcaaagcagtcagcaatccgcgtagagaaacgaacacttagcggattcagctttcacattgtgagtcatcaacgaaatccctataagcgagggatcaaattacagggatatggcatacacacgatcccattatcagtgtatccaacatcaatcccacaatctttgtattcaacatagatcccacgatctttctgtatatacgcattgtgacgagatgggaaactcttcctctccaagcttactagccctataaatagtgatgcatgttcattgggtaagaggtcgaaaacagtttagctgagactataccctaaatatattatctaagaattatacattcagagatactgttgt

SEQ ID NO: 368457 - DNA, 419 bp, Cannabis indica
ggtccaatctgtaacttttgcaaaacacagggtccaaaatagtatttaccccataaaataatattgtagaaaaaatccctttctaaaagtcattggaattgcgggttagaatctctacatgaccaccctttctaagggtggctaactcaaagtttttcgcttgaggtttctttttccggcaggcttcgagtttattagattcgagatttgttctcccacaatggttgctctaacttgagtctgttagtgtttattacgttatgtaatttactagtattattgaattaaaaaaaaaaaaaaactttattaatattaattttattggtttcattagtcaactattattttattatttttaaaatataattaataaataccttttatttttcttttaatagtataatttactatattaattt

SEQ ID NO: 368458 - DNA, 470 bp, Cannabis indica
gccagctggcatttttcgtcccacttaaatttgcggtttccccttagcaagtcgtagaacggaaggcttctgtttgagagtttcgagatgaagcgacttaaggcggctatcttacctattaatttttgatgtctctcacggtgcggggctgtcctgtcgcttgaaatgcttctattgggtctgggttcacttctacccctcgtcgagttactagatgacctaagaactttcccgatcccaccgcgaaggcacacttgactgggttgagtttcattgagtgggcgaggaggatctgaaagcattctcacagatgatcgacgtggtcggcgccatctttggatttcactagcatgtcgtcgatataggcttccatagtaagtcccaattgttgggaaaacattttgttcaccattcgctggtacgttgccccggcatttttaagcccaaagggcatcaccttgtagcaatat

SEQ ID NO: 368459 - DNA, 661 bp, Cannabis indica
ttacacatttttttcttttttttcttttctcaatcttgcaagttcttctccctctaactgttttctcacactaaatattttttcttcccccaaactaattatgtagcttatgatatcatggataaaatggtgaagagaaaattaatagtgtggtgacaattttcggttcaatgggtgaaaaacataacaggtttaggctcaagagggttaactagggataaaaaattttatggtaggcttgaaaggctcaaactatccaacaaatgcctaaatcgtattccaattaaacattgtcaaggattttgcctcaaaagactaagcatgcaagttctaaactaccctgtcaaatcttaccacaaaccatagtaaaacaattataacaatttacacagattaacaaattgcattcatacacaggtttctaagcgtccaaactaatccaaagagttaacagaattaagcacacagttattttgcaatttcagagtacatcacactaagcagcagcatacaactatcttctagctcattgccattcctaactataacataaaaaaaattaaagccgaaaactaaaatgcagaaaattaaaatttttaaatctctcccccaaactaaatattacattgtccccaatgtgacattaaagaaaaagggaaag

SEQ ID NO: 368460 - DNA, 677 bp, Cannabis indica
tcccgggctaaatctgcccttccaagagtgtctctgtctgacaccttgagggcggagtcggacttggccaagaaggaagctgagaaggccagggcggagactgcagctgttcgtcatgagttgggtgaggccaacaagaagctgtttgccgctgagaagaagatcactgtgctgacaaaagacctcgagggtgctgatcgctttgaggaaaccatcgagaccttatctactgaagttgatcatcttcaagatgagaggatttctctgcggcaagtccttcttcggctgaaggaagataaggacgctcaggcgaccgaggcggaccgtttgaaggaaaaggtcaatgatttggagattatcggcctcgagctcttctttgatttttgaaaggctaatcttcaggccaacttcgactacctgggcgacgccaaggacatgtacctcaagtagtacgcgacccaagttgcctatggtgggaaagaggtggctgcttcgacctccgaccaagcttctgaccaggctactgatgcttctcttgctcgaacaacagatcctcctgctccagtcggctcagaagaaccaaacccagagccttggactccagccgtttgaacattgatctctctcctgtttatatatatatattatatatggccttaaggcctttaagacatcat

SEQ ID NO: 368461 - DNA, 650 bp, Cannabis indica
gctagaaacttagggcattggggtttccagtggcccttttgattgcaaaagaagcattttccttttggttttccctcgggattagcagcctttttctttttaactgttttcatagctttaaggctttttactattcttccaattcttcttgttgctgggtctcgaagcagggctatgtttgccttagccttggccgtaccattagcagtgccaaaactaggagctttagttccacctttctgtggtcctccaatcaaattttcaaatgtctgaaggttgttgattaactcgtggaagtcaagctccaacttgttcatgacataatttgatgtaaagggcagaaaagctggagtcaaactattcaagatcaaactcacttcagttgtttgatcaataacagctccatgattctcagcctcttggaagtaactagtcatctggagtaggtgatcacacacattctgatgaggtctcatctgtgcattgatgaaattcttagtcacctcaaagtgagcttgaattgatgccatcccaaacagttcagttaactggttcataatttctgcagccgtgagagtattggcaaaccttgtttccaaggtgtcgaccatgctagatagcataaagtatcgagctttgttgttagcatt

SEQ ID NO: 368462 - DNA, 676 bp, Cannabis indica
ttaataattaagttgattttattcaagatacttaattatttgtttctatgtcaaaaaatttaattaattagaaaatatatttaagttgaaaattaaattattaattaattttggaccaacttaaaatagaatattttcttaaatattaaattagaattaataattaagttaattttattcaagatacttaattatttctattttaatgaatttaattaaattagaaaattatatttaagttgaaaattatttcaatatcagattaacttaaattagaataaatttttagaatatattttattttttttaataatcatttttccacgtaattttgaattgcatttatttattttaaatgctaatatttcaaaatttttcaatattgaaaattagattaaagttgaaaattaatattagatcaacttaaatcaagtaatttttgttaatgatttattaaaataaatagattaaaatatattttaattagaaaattagtaattagtatatgaattaattagatagatattttctaggtagactttttggtatattctagatatatttaattaaataagaaaattaatatttaatttgatttgttcaagacactaattgctatgatttgttcaagacacttaaggtaacaccctaactaacataggcgtattacgtgatt

SEQ ID NO: 368463 - DNA, 632 bp, Cannabis indica
tttaattagaaaactattcaaactgaagagaatcaaccaaccaccaagactaagcaactagatctccctataaaatactagaactagccaaagggattaccctttggctagtaacaactaaattatagcattctacttcataaccttcataggatccctattccttacttttacccttttaaaatcaaacataaataaaattttccttttaatacccattattccttaaatattcaaaatattatatactaattatttcattttatctcttaaaaatattacttatttatagactaaaacatgtcaaaatccttaataagtcaaattatttattattttatttatagcgtaaaacatggtatctataatctttattcaacctaaattaaaccaaaattgtattaatatccttaaaacttaagattgcacttttcacattcaaaagtacatttttcctaataccacttcatcatacatttaattaataatattaaattaatattaattaatccaattcggtcaaattattataaaaatcattcatattagtattttcttatacaactaataaggcaataatctcaatacttcattaacatttacttctcatttatttcaatatcttcccaaaa

SEQ ID NO: 368464 - DNA, 977 bp, Cannabis indica
agctccattaatggtgatcaattgaagtgggccaaattcatattctagatatgtgataattaataataatagtgttcgtttgcgtatgccgtattacatcatattgtattgtatagtattatattgaattgtatttcatgcgatatttttatataaaactatacgtagtattgacttttatgggtacttaaatatataatattttttcattcaaaaaaaatatatataatattttagtgtaaattaaagtttaacatagtattatataaaaatatgatatataatctaattcaatataatacaatacaatacgacttaatacaacataccaaatgagcccaataataataataataataaaataataataataatcaatgttttaaaaggtgtttgaggcgtacgccttgaggcgtacgccttgaggcgtgtgaggcgttaattgagttgatttggacctttgttaaaaagtttcattgggcttttattaaaagagttttaggaggaaattacaatacatacctttttttaacttgatacttttaatttttaccctctttttcaaaatctattatatttacctctttttttaatcattctactaattttactcctatcacttcacaataatttaattcttctctaatcaaaattttgccccaactttctcacaaacctacacatccatctacaaagaacacaaatctattatgtttaaaattatgtcttagttatgtgaaagtgtaaggataatttgaatacaatactcataaaaagagatatatttaaattaaattttatgtggaggtaaatttgatttagtataagaaaatggatattcttcaacttctcccgagtttcagtggccattttcaaaagaggttaagtgagtttttttaaatttttcttacgctattttgagttttattttatagattttaaaagtccaaaataaaaaatcctaaacattcattact

SEQ ID NO: 368465 - DNA, 557 bp, Cannabis indica
ttaaatttctctcttttgggccttgtgtgagagttagggggccattaatagtgggaacgacatactggacccatccatccctcacatgaataacccgaattgtgaaggcccatttgccttagttgaacaattgtataggttagttacactagtttaacctaataaaatttattagcaacataattaattttcaaaatatatgaaatttatttttcatcaaattattttaaaattaatttaagaaaaatacacttagtttaatgaaatatattcgagataaactatatgtatttttctgtatttaatcaaataaagaagttataactaattagatttttctaaatacttaattatttgaatttacatagaatatatatttaagttgaaaattaattttttcaaattgattttggataaacttaaattagaatattttaaaattgataattaagtacatttttctaggaaattagttatttagacattctttaaatttttttttaagttaaaaatttgttaatttaagatcaacttaaatagggatattttttcaaatt

SEQ ID NO: 368466 - DNA, 519 bp, Cannabis indica
aaattgggcttcttgaacggttcaatttctaaacctcctatatctaatcatattctttacaatgcttggattcgtaacaataacattgtaatttcttggatcattaattcggtttctaaagagatttcatctagtattttgtatgatgaatcggctgctgcaatttggaatgacctcagagttagattccaacaaagaaacggggctcacatttataatctcaggaaagatttgatgaacttaaggcaagagaatcaaatagtaagcatgtatttcacaaagctcaaaactgtttgggagcaattatccaattttaggccgaattgcacttgcaatggatgctcatgtggaggagtcaagaaattacaagatcatcataatatggaatacataatgtcgttcctcatggggttgtccgatctttatgctcaagtgagaggtaacattcttgtgatggaacctttacccgagattaatcgtgtctttcatctagtttcacaggaagaaaatcaaagggga

SEQ ID NO: 368467 - DNA, 467 bp, Cannabis indica
gtaaaataattccaacaatttacacttaatgtaaatataatttttcttattttcagcatttccacctgaagtatcaacttcaaaaccatgtttccaagccggatcttttctatttccaagaccattattattattaccatcaacactaccactgccactagctcctccaacaccaatacgactcaattttaattttctattcattttcttatctacacaaaacaaagtaacaaccaaataataaatcaccacctaatgaacctaagaacaactaaatatggcttattaattaaataaactaaatgatattcaaatgcttagctatggaacaaagaaagtaataagcagaaactttagaagagttgaacaagcacctaactcggacaaggcagcagcaaccaacttaaggttttttttttttttttttttttttgtgatgagaagagggaaaaggcagcagcaaggtg

SEQ ID NO: 368468 - DNA, 717 bp, Cannabis indica
tttttgtagtagtgcccatgaagtaggacataagtaaaagagacacatccaagttttgtcgttttcatgcagagtatggccatgacaggaatgagtgcaataacttgaagcgagaaatcgaattcttgatcagaaagaataacccgcacttgcaaaaatacgtcaaggctgactagaatcaaagggccgcccaaacagacgatactcagaatctattgatgccaccaccagtggatgagcatctacaagttattattgggggcccacatccagctggagactcgggcaaagcttaggaaaagtatgcccgagccttacaacacaaatcgaaagaaacagttttggccgtagaagagagagccaaaaataccacgggtaggggaacccactataaccttcaatgaagtagatgctattcacgtccacttcccacacaacaaccccttggtcgtggaagtatagatagcaaacaagatagcagcccagaccatgatagacaatggagcctcctcaaacatcctgttcaaaacaacatatgagaagatggggctcctgctgggaatattttaccgagatctagatttactaacaagtatgttgattaacatcctaaatatgaattctctaaaataatgtactaaacacataagagttaagaaaacctaacattgattgcagcggaatataatgactccttccgttcaagatctctagccc

SEQ ID NO: 368469 - DNA, 677 bp, Cannabis indica
tcagttgtgcatgagtgtattgcatcgttggatcgataggcccaagcaattgtgggggctgactcctcttcttcttcaacacttaggctctcgtttgtccgcctacgtctttgacggtgcatctagggggaggctggccataaggatgtggctctttcagtcctgttgaacaaatgcgatgtccattttgtcaaagtggcaacaccgtgttgtcatactccaattggggaactttctatatgtccccgcagagtttctgttataactccttatacaatttgatcaatgcgatgccggatgacttgtccaatatttatgttgtaccccttcaaaatggcgtacacatatttcaggcgatccatttggacatcggagaagtgcttaattggcaccaaccgagaacttacgaagtacatccatgttttggccactgagtttaattcacaccggtataggatgtttggcgacccctctgtgccatcgttatcgtggaacctcaaccctagaaatcccaccgtctcagccacatccaccatatcaaactgctcttcctcctcaataattcggaggcgttgctcttccctagaataatcttggacacagaacatcacattaaaagcatcagcagtagcgggaaccttctttccacgcacctttacttccccatttcggcggtc

SEQ ID NO: 368470 - DNA, 485 bp, Cannabis indica
aattaattgattaataaaagaggcatttttcaacttacccctttatattatgtgaacaaattcaattattttctattgtagtaattgtgttaaaattatgaacaatttttatgattttggtatagtgattgtaattagcaaattatggttaaattactgcatatcccaatcataaatgacttcaagatagctttaagctttagtcttgaaagtccacttattttgaaaacttaggaggtggttgtcatggcttttagaaactatttttgaaaattattttcgaatttttgaaactttaaatagatttggagaattttcaaaaataccattttttatatattttatttataattttatgatttaatttttttatttataaaaatacgtttgtaaattttaaaattacaaaaatatattttactcagcacagagtaaaaaaaagcaaaaaatcaaactcacaataactataaaacaaccaaaaacaa

SEQ ID NO: 368471 - DNA, 1407 bp, Cannabis indica
cacatatgacaagaaggaccttgacgtcggggggttggtcacgacggagaattgccagaaggccaagctgatcttggggcatcagtcggtggaggactccaacctttctaaggttatctgcccgaacgtaagggttccggccgcggagaagaccttccgggaggagatcattgccacagcagattagaagtaccgagagtacctctaccggaaggcccaggagaaggcttacactaaggcccaggcggctgctgggaggccccttcgcgttgggagcccggttcagaggaggacccaggcgactgtcgagaggccccttcgtatcggaagcccggtagagaggagggcccccagaccaaggcctactgtccaggtgccgaatacgggggctcttgatgccaaaacttccggttctggtaagtctcctttaacaattcattacgtccctcctgttcgtgagtacgctagccttaggcccgtagggttcgatgaacgtctccttaggtttagaatgccctctactcggtggggggatcatgcaaaggagtatcatttctccaacttaggtgattacttaggccggtcccgaatgagttatggacctccgatgcctgttcccttggatcctttggcctatctttcttctagctggtttcgtccctcagatagcaatcttggggacgatgcaaccagtgctaatagggccgaattagatcagggtaggactagcttgattacttttttaagtgttcactgctttcacagatattctaacacttaactcttttctcttgttgcagcagctaatcccatggaggcgatcttggccactcttgctggagcccacagtcctgatgctgcttcccttcctcccacttcttcccagatggtcacccccatgaaggcttcttccagtgcccctccaaacactattgacttagtggatgaggaggaggtacttcttgaggaagctaaagaaggtcaagaagagcaatgggctcttcctggggaagttgaagaaagtgaaggagcaagaggttgctctcgtgcgcaagcgcaaaggcaagatggttgcagaggagtcctccaaacggccgcggagggtggacactccggccccgagtcatgattctgggatccctcccgaggcggaggagtttacagtgcctcacggcattgtgctgactccggtccccggagatgaggcgaggcaagagcttcggatagccaagtataattatgcccttgacgagtactcccgggggcatgctgaggtggaggccttgaggagggttttgcgagaggaggtgcaaaattccctcaacgaggagaactaccagaatccgtgggatctaaacctggaccccctgacggactggttcaaccgtttcctcgggcctaccttgg

SEQ ID NO: 368472 - DNA, 860 bp, Cannabis indica
ttcatttgtttcatattgtaaatactagtcgaagttgttatctttggatatacaactagatgttgtatttacaaatacttatctgttgagatctaacactattatgtttgtctaacggatgacgatcttttgggatatgtcccattaaaaacagcaagctaagttagacaaattatgaagatttgaaattaaactataacataataatagaaaaaaccatggttcaatattcatacacattccgaaattatcatacaagtagcaagtaagaaagacatgtgaaaatacaaaataaatacatcttaaataatttccaaggtttccaacaaactgatacaatgtcctgtttaggcgagagccaaagatatcattcattgattagagtagtcaactcatctaaaacggataccatgctagcaaccttttattcgatcaagactagaatctggcgttgtcccatttaggtcattctatcttatgagcttccaccattgtttcataccttgtaagtcttactcttagcagccactttagggtggactttactaagaatagaatacttacaataatacttatctttcgagattctacggcgataaattgctaatgaacgttcatccattagggatgattacttattaaaacaacaactatgcagaaccaacaatggagatcaaatgtccttataactaaagctcattattttaaagagttgtattttcaattgatacttattttagtatatatttatttaattaaaattactaatgtagataactctaaatataaattttaatttaaaatttataaaattataccctaggaagatctagaaaaataaaattattttccatccttag

SEQ ID NO: 368473 - DNA, 593 bp, Cannabis indica
ccctcactagttgagataatactgcttccagactcagttaattgaatataattgatcaattacaattctaaaattagactatgtcttattatgaattttcactaagcaagagcttaattgtgaagaaaagaggttttggggtcaatttattaattaagagactttatatggtctaattaataaataatataaatagtaattatatttagttattaattataactattaaattgtaacaaaaacgaataaatatattagatcattaaatttatataacagtatgatatattgtaccactaaaaattaatataccgtagtaataaaattaaataccaaaagaaaattttaacaatattaaattaatactcaaaaaacatatatcccgtcaataaaattatatataccactattaaaatatgtatacatatcaaaaaaatttaatatataataaaatagaaactaaacatcttcttaaataaatgatatactatagatatcaaaaaccatataccatacaacaaaatatatgtacctacaataaaaaataaaataaaataaatataatattattaaaaaaattatatataccatat

SEQ ID NO: 368474 - DNA, 696 bp, Cannabis indica
gcacgactcctatccgaagttcatgaaggattctttggaaatcatgccgccggacagagcttatccaagaaaattctaaggcaaggttaattctagcaaacaatgattgaagattcaaaaacctatgttaagaagtgtgacaaatgccagagattttcaaagataccaggagctccacccaatgagttaaaacagatgcaaagtttgtggccctttgccattttggggattgacaagattggacaattacccaaaggtaaaggcagagtgcagtatgcagtggtagcggttgattactttactaagtggactgaagccgaaccactcgcaaccatcacatcaaagaaagttcaagactttattgtgaagaacataatatcccggttcggactaccgtacaaaatagtctgaggtaatggcaagcagttcgacagccaatcctttactgatttctgtgcgaaccgtggtatactcaaaagtttctctgcagtggcacatccttaggcaaatggtcaagttgaagcagtcaacaaaaccttgaaggatacactgaagaaaaaacttgaagatgccaaaggaaactggccagaagagcttcctaaagttttatggtcatactgtacaattgaaaaaacagcaatcggacagacaccattcgcaatggcatacggttatgaagctatgctgcccgtcaaa

SEQ ID NO: 368475 - DNA, 848 bp, Cannabis indica
gtgttagtctacaagggtggtgctttaaatctcgtaggctataccaactcaaatttccattcttgtcttgatgataggaagtctacatctaggatggtatttactcttggggtggagcagttgtttggagaattgctaagcaacccgcaacatcagactccaccttggaggccgaatacatagctgccactgaggctgctaaggaactagtctggctacaaaagttcttcacaagacttggtattattcctgaaatggaaaaaccacaggttttactttgtgatagcagtggtgctatagccaacaataaatagcctcgaatccacaagagaagcaaacacatagagaggaaataccacatcatcagggaatatgtggcaacaggggaagaacttgtggaaaaagttgatactgaagacaacttagcagatccattcaataaaattttaactgtatctgcatttgaaaagtatagactgaatctaggattaattgaaatgtactgcctgttttatgttagtgcaagtgggagtttgttgggctttgtgccctaaataaaactctatttcaatgtaaactttatatttatttattagtaaagaaacatatttattttcattacttatttaatgtgttatttggttcatgtgatcatttatttatttatttgatttataaattcatctgaatccttatcacattgatattcttgtttattgtcttgtcaacacagtagaaagtaatcaagattgtgttattaaatgtattcctatgatttatcagtacacagggtttaactgataggataatctagaatatagtttacttgcaccttggataagtggtat

SEQ ID NO: 368476 - DNA, 1300 bp, Cannabis indica
ttggttccctagatttttgcctttgggtaattggcgaggattcctctggttcctttccaagtccagtagagatggctttaggatgcacgtggattccacctgcctccacgactttttgcatggccagcattacctcttgcatcttttgattttgtgctttttgggctgcgatttcagcttcatgatcgacagccttttgtcttaagagcaccaattccgagtagctaccttcatcgtaggcgtactcatcgaggtttccctcctaatcgccatcaagaattccttcttcttctttggaaccctcagtttcccttgaggccacgtgttccttatttgggtcttgagcatcttcaagagggtgaggttgacgtgtgcttcgagtctccaccactgttgtaatgtacttattgtgtgtttacaaaagctttcttcagctctcaatgaaagcaccaaaatgttgaccgaggttttaggcaaccaataaaataataatagtttagagagctgtaagaaattaagagagagatttttatgtggttggtgcgttaatgagccttagtccatgagtctgtgtatttatgatcgtagttaatacagagaatgtgcttggtgagtttttactcttctagtacttattcaacccagaattctcgacccctctttaataagctttggggggtatttatagtgtttttgatgggtgatccacagaagtaaggtacatgcatttctgtaactatcagtaaggttgtatcttcccaatgaatataccatgggtaatgcatgatctaatccctaggtgccttagggattttgtgagggcagtccttaatcccttttgactgatttgattcttcacagagtagtagtcgctagactttattggccatagccttgtaggtacagatcggaggttgtgtcgttagactttattgcgtgtggcagttccaatatgcctcctcccatgcgacattaaatgcgagatcactgctcagaggaaacctgacaccacccggggatgttttgatgccatcttgctctctgggagcatatgagaccttgcatgccttctccgggagtcatacctaaaataaagctttgctttatacagacttagctatttaatttatgtgctaaaccctttgtgtccgcgtctccttgtctggttggtctacgtatattgggcaaaaccaggggcaacaataattaattactaaataaaattgtcatttatgtaatttattaattaaaccatacaaagtctcttaattaaaaaattgatcccaaaacctctttcttc

SEQ ID NO: 368477 - DNA, 653 bp, Cannabis indica
tttgtaacaatatagacccatatgcattttgattttattataccccgaataagcatccatgaagcttagtattgcatcccctactgttacatccacgagctgatcgattcctagaagtggaaaacaatccttagggcatgctttgttgaggccagtgaaatcaatacacactcgccatttcttattcgccttgggcaccaatacgggatttgcgacccaagctgggtagaaagcttcaattatgaaattgttgttgcgtagcttttcttcttcttcctttagggctaatgctcggtctttgtccaatgcgttcgcttttgttgaactggccagaaattgggatcaatattcacaatgtgcgaaatgatagaaggatcaattcctaccatatctgcatgagaccaggcaaaaatgtctaggtttgctctcagaaattttatcaattgtgattttacttcgagcaacaaaccctttctgatctttagctttctggctaggatatctggatcgatttcgatctcttctaactcttccacaggtccaacattgctgcttgggtccccaagtcgagaatccacatcttcttccccgccttgggaagttccctacttggaaaggtctttttcctttgtttgtgctctggctggaggata

SEQ ID NO: 368478 - DNA, 385 bp, Cannabis indica
ctactccgatgacttttccggtatcgatagcaaactccggagaattcatcaaaattggcattgtcgccggaaaaatcaccaaaaaattggtttcttcatccttggtgatttttttgtgatttttccggtgccgacagcaactccggcgactatgccaatttcgatgacttgtttcagttaattttattgtttagcatttatatttcgttatgatttttcatagtgtcaaatctggtttcacatggttcataagttcgaaactgattttacaagttttaagggtttgtaatgatgttgctctattttatgatgttattgtattattttttattttaagttttctttttattgttttgtttcttggtttgaaactggttttcacatt

SEQ ID NO: 368479 - DNA, 941 bp, Cannabis indica
ctagggcccactttttagggcaaataaaaaattaccttttaaaaatatacatatatttttaataatttttaaaaatactatttatctatatagtaagggctcaaaaaatattttttagctatggctcatttcaactcagtgtcggccctgcctatattataggcgacagtttaaaatcgtcccctataaacagtttcttatagtatagggcacggttatgtatcgtcgcctatacctaagcataggcgacagttttaatccgtgccatatagtacaggtaacaattttcaagtttaaaatgtatatttgagcgacttttttttttcaatcattatattggaaaaatagggggaaaatgtaaattttctaccattttttctcctgcattaatttttaaattttttgcaaatatatagtaacaataattaaactaacattaatattatttaaatatatttacaaatttatgtagtaacaataattaaattaacattaataatcatctaaatatatttacaaatctatagtaacaataaattgagatctatacacggattaacaaggcaacatcgatccgcttccgctttcacgtaaagaatccaccgatcacgtataacatttatctcgtcatttgtgtacgacgtggagaaccaaaggtatatattaattagtaaagacctattatcatatgctatttaataaagaataatattattataatacttattaatttttttaccagttgtgtcaattctattattagatcttctacggtcatgaaactttcaatggatttcatgatgtagtatctgttgggtcttgtgccctaaataaaatctattttaatataatcagatttactaattaataaagatcataaatcattctatgttccatggttcacatgatttatttcatgattatatttaatgtataaattc

SEQ ID NO: 368480 - DNA, 831 bp, Cannabis indica
tggtgcaaactcgtagaggcctcactgatccagtaaattcatagatgctggatcctacatcgcagaacccaggaaacacaagggttctgccagctgttaatcctggacagccggcgaacgtggggaatggtgtgacagttcctatagatgaaatcgcgcctagtgtgcaagagactgggaataacagttccgcacccaaccagggcattcataacacaactgtttcgcctggaaccaacgcccagacgaccatcggagatgccactgaattacaaaatcttcgtgacgctctcggactcatgcagggtcataacaataccctacatcatgatcaagacgaactgcgtgctgcagtaaatctcacgttcgacgaacaaaggcgcatgttcgccgaatggagggatagagagatggaggcattaagggctcaccatgcagagatcgaagatcatagccggcaagctaccatgctgatacgaaaagcctacaccaaactgtaggtcgggaaccgccgaatgtcattcccgtgggtgagacagacgaagatccaacgatgaatacttcccagactgcaaatggtcagccgcccaatccccggtcacgagttccactcgtgggcctagcggtaggcgagcagaccttgtctggtaattcatcaggagaagtcatacctgatggttccaaccagatcaagggtgccattccacctgtcaaccaagtgaatcaaccgctaaggcagccaggcacttctgttttcgaaaggttaaggacaacccataacctaaggaataatttaaacagaaggaggggagcagacgatcagaatgttac

SEQ ID NO: 368481 - DNA, 985 bp, Cannabis indica
tttcggttgttgggtaaatagggtacaaaataataccccaaaaaatacgaaagcccaatcctttccaatccttgacccactaggtttagtcttcttccttccacagcagccagctagcgtactttgagtaactggtacataattgttgatgtggataagtgaaatttattttttaaattttttccacgtcactgcccaaactgcgcagaacgctatagcattctggcagcattttctcccagatttcagcttttatttccactttgcctttgcatcattttctttttcctagcaagttaattcttttttcccacagcaaacaagcaacatttaattaaaaaaacacaactaaaataacaatttttacaagacttaaaggttagcttactaaattaaaaataaaactaaaactaattaaaattaagcaaacacacacattcttactactcttctcacaataattttaatttaaaagcataagagcataagagcaaccaatcaaagcatggaaaattgtttcatcccatttttaccaacgcatttcacaaactgcactggcaaagagattaaagttttaccagcgtacatttgcagtggctaaaatccaacttttaccaacgcatttacgcgctggaaaaagtcatttttgccagtgctttttattttatgctggaaaaagttctaataccaatattgatttgctaacccccttttgccaacacatcacaaataaattatattttacgagcgcaatttcaaaaagtgatatttcttgtagtgtgactatatataggcaaataaaattgacaaccaacatgaaattcagaaagaattaatgaccgtaacattcggcagaggtatcttaactagtatttgaggtttttacttgatgaggatgatgatgattgcttggcgttgttctactttaaaatatatattaggatttgttataaatattattaattatgtggatgtccaaatcttt

SEQ ID NO: 368482 - DNA, 591 bp, Cannabis indica
atctgaatgtttccaggcgaaaacatcaaggttttgcttgagaaatgtcattagtttttctcgctgctaaaaagttagtttagaaccaattctcaaaactttattattatctactggatcgataggtacctaaatggtgtcttccgcggcttgggcagttgcggcataatcgaggatcctaggatccaaatctggttcgtctttatgcggcacttcttctattctgaagacctcctagcgaggaggtggtgcctctagcagatagatgacattgactgacttcttttctacgagcttaatcgctgtgttgtagcattctcacgagtctgactggattcctcgcacagaacctactccagtaggagtagggaacttcattgtgagatgatagattgacgtcacgatcttcatctcttttagaattggtcgaccgatcacaacattgtatgctgagtattggtcgattactgcaaagtcagccatcgacttggctactacaggagcagttcccaaggtgatagggagcttgatcatccctttcaatgcaatgacgtcgccagtaaaaccatatatactcgacgttacaggtcg

SEQ ID NO: 368483 - DNA, 551 bp, Cannabis indica
taaaagagatacactcatacatttttatctgttatcttaatctgttttattatccaaaataatttttagttaaattttttctcatggtcatataaattatacttgtttaaggcatcctgcaaaattttaaaaaattcgaaaaagtttaacacatcgaaaattgagttcaagcaatatgttgcacgcgtacctattttattttatacgcctgtaaaatagattatttaaacattgttttctatattgtaaattattgtaaatttcttaaaattttgtaaaatatgttaaatagtcataacatacatgaatatcaaaaaaaaaaaaataaactaataatttaattcattggacacattattttctatgttagtagctcccaataacaattgggatcaacattgttttcagggttcaggtccgattttgggtcggagattggtgttgaccccaaatcttttgtaaatattatattacaagctaaaagggaccatttattatgtattaaataatacaacatacattgtattaaaaaatttggtcgtaataattaa

SEQ ID NO: 368484 - DNA, 550 bp, Cannabis indica
gctaggactctaatggttggcatggctcctacccctcctgcatcaggctatagcaggggaggtagtggttcggccattgaccagaaaaggaaagcatccactgcaaccggtggctcaggttagaacaagaggttccgagggaaccagagtagaggcggtcgtcagggtagttctaagacccgatattcctacccagagtgccccagttgtaaaaggcaccatctgggtgagtgtagaggacaggggtgcttccagcgtggcatgccaggacactacaagagggattgccctcaacttagagtagaagcaccaaaggctccggcgagacccaatccagctaaggtgttcgccatttctcaggctgatgctgaagccagccctttagtggtgacaggttagctctcagttaacaattctttttactccgtattgtttgactctggggccacacattcttatgtggtagccagaatctttagtaaattggatagaccgcatgatagttatgaatcagggtttggaaccctattacctggcggagagttagtta

SEQ ID NO: 368485 - DNA, 619 bp, Cannabis indica
aattaaataatgtattttttttttaatttttgaaatgagatttaagattttaatttttgagattttttttaacttattggggcaacattagtgtatatatgcctcctaacaataattagtactttatataatcatgatatatcaagtttgacttaccttacaaatatagtttgacttaaaatacttttgattttgatactaaaaaataatttatataaattatatttcaagatcacgtgcctttaaaaatcatgtgaaatgcatcgatcgataaaatcataaaaatcattaggaataaataatataaacaaactaaatatgaccagaagactaattaaaatatttacaattaaaattttctcatacaaaatatctacaatattttaagtattttaaatttaaattaaaattttcttctataaaatatctatataatttttatttttaaatatatataataatattataaaattaataaagaatattccattaagtaatatgatattctgttaaagttaaagtagaatgtgttagacaatttatatgtataaactgaaacatatatgattaagtataaagtgcggaattaataaatcatatatgcactataatttaagga

SEQ ID NO: 368486 - DNA, 694 bp, Cannabis indica
gtaattttttactagtatatatatatatatatattaattatagtactctgcttgtaatataataaaggaaatttccatccatatatgtgagggtatatatagacaagaaaactatactgtagctatatatatattaggtataggtgtggaataatacgtgacacaagcacataactctactaataagtaatgtttggttttgagcgattcctcttcgcgcgagactaagaaaaccaccgaacgcctcgaccgttggtgatgtctcccaccgactgagctccgtcgctcaatccgcgtattcacgagccccagaaattcatagagaactcgagataattggatggcgttgtcgagatttttcaatcgattttagcagaaactctcgcttaattagtaaaggctttattattattattattattattatttacaatattattattaattaactaaaatgtcttcataaatttattttgagtaatggtactatataattatttttctattttcataaagtttcttaaattaaatatttttataaaataaattattatttatatatacattactatgactactttttaaaattcttattatttcaatagtataagaaatattgtattaatttcttattcattttggtttactgataatgttaatttaaatatcatgtctatttaatgagtcatatttt

SEQ ID NO: 368487 - DNA, 790 bp, Cannabis indica
aaagtctggggagcacggtttagtacataaataattacagaaatagtaaaattgaataaaattagacaaaagtccttaaattcaacaatctgaatagttcaggggggtatttttaacaaccttaaaagttcaggcggcatgatttggtacatgtcaatgtttagggggcaaaaatcctaattagcctttttttaattaggatagaaaaaatgaaaatgaaagtttttagtttttaattatttttacaatctaaaaataatattgaaaattattaaataaataaaattatgaaaaatgataaaaaaaataaatttgcggtcaaaccccattatattaattttccgactaattagaatttttgccccgtaaactttcacatgtaccaaatcatgctccctgaacttttaaggtcgttaaaaaatgtcccctaaactattaagattgttagatttacggacttttttctaattttagtaaaaaaagcctaatatggatgaaaattcaagtagcataatttagtacatgtcaaagttcgaggagcatgatttggtagatatcaaagtctggggagcatagtttagtacataaacaatcagtgaaatagtaaaattgaataaaattagacaaaagtctttaaatctaacaatctcaatagttcagagggtattttttaacgtcttttaaaagttcagaggcataatttagtacatgtcaaattgaataaacaatcagtgaaatagtaaaaattgaataaaaattagacaaaaagtctttaaaatctaacaatctc

SEQ ID NO: 368488 - DNA, 414 bp, Cannabis indica
gttgttggattgaatctaagagtcatatttgtctcaaatatttttttgggcattgacagcaggttcctcaggacgctcctcagtgaggacaaatttgtagtttttacaaaccaacatcgaatagagattagatttctacttcatgaaatttttaccattcaatttttcaagagctagtaaagcaataaggagatttggcattgtagacatgattgaaagaaataaagataacataataaatatacttgaataataaatatcattttggaatgattgtaaacataatgcatgagcgcatataagtaagacatataaaatattgtttaagttattccatgataaaactcttataaacaattgatcactgccttagggtctatatagagtcaattttattgagcatatgagacaatt

SEQ ID NO: 368489 - DNA, 469 bp, Cannabis indica
gagtcatctaaaggaatttttattcctatgtctttttcaagagatgataataatagcagtcttattcttactctagttgataacgctcccattgctgatgaatatattgctcctaatatataagatgtcgagggtcctattattgaagaagattttgttgttgatgagggtcctattatcggagaaatccaattgtggaatatgtcattcaaaatgatgatcaacaaatagaggttattccagaagtacaacctctatggagatctcaaagacaaaagaagtcaacaaagtgtcataataagtttgtttaccttggagaaggagaatattatatatatcattttgtggattttgtcacttatagtgaagcacttaatagtccataatcttcaaaatggataaaagctatggatgatgagattaagttcatggaaggcggaagttagttctatttgttgggttttatgcc

SEQ ID NO: 368490 - DNA, 1641 bp, Cannabis indica
caatccgaatgacattaccagaatcatagtgcccatatctggtttgaaatgtagtcttcggtatatcttcttcccaaattctgagctgatgataattagatcgtaggtcaatctttgaaaataccatctttccttgaagttgatcgaataagtaatgaattctgggcaacagatacttgttcttaattgtcagtttgtttagttcctgataatcaatacacattctgagggaaccatccttctttttcacaaacagaactggagctccccagggcgatacactggattaggtaaaccctatatcaagcatcccctaaagctgtaacttaagctccttgagttctgctggagccatcctatacggagcttttgaaacaggttcgctctaggtgccaaatcaatcacaaaatctatttctcgttgtggcggtaatccaggaaactcctcagaaaatacgtcgagcaaatctttaacaaccctgattacctcaggcccaaatgttttgggtttgctggagtcaatcacgactgctaaaaatcctacacctccactgtgtagtagatccctagctcttaaaactgaaataaccaggatctgagacccctgaaccgatccaacataaacaaatggatcttcaccttctagttgaaaactcaccatttttcacttacggtctatatttgccgaatacttggacagaacatccatcctaagtataatgtcaaactcttttaattccagcactataaggtcagcactcaactccctatcttcaatccaaactggcatagacctaatgtgcctattggagataactaacttcccgctaggcattagggttcaaaactgtctttcaagaaaatcataaggcctacccaaaagatcaattacccatgtagccacatatgagtgtgtagctcccgaatcaaacaacacagtataaaaggagttgttgacaggaagctgacctatcaccacaaaaagactggctaccgcattagcttgagtgatggcaaacacccgagcaggtatgggttttgcctctagcttctgcttttctttctttgcctgaaggaaatgtttcttgaaatgccccaccataccgtatcgaaagcatgtcttcggttgcactctccgggatgatgtttcttacaatgtgggcactcagggtaagagtaaccctggcgtccacctctatcttggttcccacggaaccgcttgtttaccccgagccaccaatgccggggtaactttactcttctggtcagtggttgaatcaccaccatccctaccatatataggagtaggaagagtgggggtcccaccaacactcacactcacacggggctcctggaaaaacttaattgcatctcagctcgcagagccttttctaccatctccgcatatgatgttgcctcattagtagcgataaccaaatcatgtctaattttcacattcaaattagccagatatctttcattcttgctaaaatctggtggcacaatacccgaggcgagcttggccaaacggtcaaactttgttgtatactcagtaactgacataccctcagtctgcaccaacttaatgatttctttctgcttaccactgaagattgcttcattataatacttggcgttgaat

SEQ ID NO: 368491 - DNA, 967 bp, Cannabis indica
aagcctgcgacctccgggacctaccaccggccgtccgaggacgcggagacgcccaaccactactacgggggcttcagagcctggagccaaacgcacttgatggtcggggccatgcttccccttcaagattactttattaatcttcttgtatttgtcggccttctgccataccaactcattcctcaagcttaccgcctgcttttaggcttgtttattttttactctgcccagagttggggctctcccaatctggcaatgattttgtatttttccgaactagtttccatccccataaagggggataagtttaaggacagtttttacggtctctgggcccatcctttgaatgagggccctgtcccttttaattatcagaagcatgtgaaggaataccgtcaccgcttcttcttctcctccagggtccaggctgtggagcatccggagcttctcatggagtgggttagaattccttcttatgcgcggattgaacctactcagcttttcccccaacgggccaagatcttcgccacatatgacaagaaggcccttgacgtcggggagttggtcacgacagagcactgtcggaaggccaagctaatattggggcatcagtcggtggacgactccaacctttctaaagtcgtctgtcgtaatgtgagggctccggccgcagagaaggtattccgggatgacatcatggccacggcagaggataagtaccagaagtaccacttcaagagggaacaggagcgggcttataataaggcccaggtgaccgccggaagggcccttcgcattagggccccagtggagcagaggacccccagaccaaagcccttggtctcggtaccgaatacgggggctcctgatgccagcacttcgggttctggtaagtctcctttaatgatacattatgtccctttcgtccgcgagtatgctagccctaggcctatagggtttgatgaac

SEQ ID NO: 368492 - DNA, 644 bp, Cannabis indica
attttcattgaattaatatgatatatttttgtgttgaaaatatggtaaaagtgtggtcgaacacttgaaatatggcttttgaagcaaaaaacaaaggcccaacaggaccaaccctgccggcccaattttctccttcggcagacaggtcatccacgtggcgcctccgtattccatcgggtcctataactgcagcagtcgcaggaggctctgcctcctctccctctcaagcgcgcatgtgacgcactctttcaccttagccatacgtgcattcaccttccagccgtgcagctggtactcctttctcagagtcgacccaaagcttctttcagcatgtgccaagtgtgcccaattgtcaaacttgttcaattttaagccaaccaacaccagacacgtggcagatgttaccaaaccaccaatccaaatataccacgtgtcacaccggttttaaaattaaaaataattacacttgtgcaatttgtaataaatttaattaaacattaatccttttacattattataaatagaagagtaatttgcggcataaatacttaagttttatgccgagtagcagataaatacctaagtcttatttttggcggtaaaaataccttccgtcactactctggaacttctgtaggtacctc

SEQ ID NO: 368493 - DNA, 470 bp, Cannabis indica
tttttttcttaatcaatattttgcacttcgattagactcggaaccaaatacccccgcggtcctggcgctaaacccgacctctaacctaaacccgaatctgaccacggacctatagatccgacgtaaataaaatcaaaatttgaatataaaaatgaactttatagaacacacttttgttttctgtttttaaaattgaaaaacaaaagtagttacaaacactacaacatttatcatcattaggggcggagccttccgccgctaatgatagcaaaatccgccggtaaaggttaatagcggcggagcccgccgctattaatccgccggtaatacccggtcgttaataatatgtattagcagcggactgacacacccgccgctaattataatgtcagattcgtaaactgacattattattagcggcgggccagtccgcctctaattgttttttttttatttttttaatattaaat

SEQ ID NO: 368494 - DNA, 871 bp, Cannabis indica
tggtgaaggatccgagcattacctggactcggttttagcagattctgacctatcaccatcctgccctcactcttgctcttagggatagagctcagagacttgctcggttgccgagggaagactggaatattatccagttgacctgcgatgataatcttgtgaggtacgggctttatcccgaggactttactcctaagtctgtggcagggaagaaggggaagtctggtgctggccggcctgaatgagctcataaggaggatgagcttattcaacttacgcacgaggctaagttgaaaggaggtgccagggccaagcagtatgctcaagagtcttcaaatcctgaagatgaagctgaggaagagtaggtgactccgttgaagaggaagaagaaactcctggcctcgcccaggcctgttgaacatgcaattcgcataagggagccaatttcacctgttcgaccatctcctcccgtgtcggaaaagggaaagtcgttatgtctgagataaaatcgatgtcaggtgatgatggtcttctgagtcttgtgcgggcgatcatcttgcatttcactttattttgttcttgagcttcttgattttcatgctttgtgtttctgatggctgttttctaaccatactatttttattctgtgtagacatgtctcggtatatgctcgacgctctgaggaagagaataggcagaagctcttgcgcctctcctccagccaagaagtccaagggcggtgagtggtcctcttttacagaaaagagaccttctggagaggtcattgatctttctcaggagttgactactgcaaacccctctacccccaagtctgccaagtccaggagtctggaccaccaacggctgggtc

SEQ ID NO: 368495 - DNA, 558 bp, Cannabis indica
aaaaaaaaaaaaacttcattacttcaaatgtgtacaaataaatattttttgctagtttttgaagtacgggagttacttctatcactatcactcattcactatgtaatttattttctcaattaaaagaaaaagtaattttcttttattaaatttaccatgtttcttgattggtgtaattgtttaaagaatattctctttagaaataggatatgccaaaagttgttctttcgttctgattggattcccacttgggttataccatcattgtaaattaggtctttcttttctggtaccaacattagccacataggttcccatcaaaaaacattagccacatagatgaaaataagtgaaggatttataaagggaaatttcaatttttgaccctaataatacaagccatttcaaaatttatacccttccttaatttgtacaaatttagtccattaattacatgaacttcccattttaccctttttttttttaaaaaaaaaaaaaaacgtactaaaatactgaaagtggtatttctctctctctctcttccctcttccctctctc

SEQ ID NO: 368496 - DNA, 1028 bp, Cannabis indica
agatcctggtaaaataaattccaacagggaagtggtgccctgatcttcagttttttcaaacctcttgagaggaggaaaatgtgcatcataatcaatggatgggctagaggtgatcatgtttgcgtcaggaagtgattgaactgattgttgaacagctggtgttggaaatttttctccatgcttcttcatccattttgcttgtcgtttgtaacaaggcaaaactatctcaggctgtgaatcttgtgaagcatcatctgaatcccatccggtaggttctggcataggctgattgtagctctttggtgcagagtatttgactatgtagtcgaattttcccgatggttggcctaatagaccgatggttttgtcgcctttttccaattttttctttagtcgtcttcctggagttggacgtggtgagggctcatcatcttttaaacaacttttgcagttacaaacatcccagtatttatgcccgtcggaggattcaaaagcataaattggctttccttgggaatcgaagtacaagatttctgcatctattgggtggattggtgtgatgacatattgggtgtgaaaacagctaggtgtttttgtttggcttctgtcaaaaataatttcgacagacccatcttcttttgtatggtaggaaggttcagttgtggtctgaaccacaggctgtggcttgtgaagtttttcatagttggtgacccacgacttgggtaagagctttgtgagttcttcagtggtcatttgctttgggacatgtgtgcaggtgggtacctgtttagaatcgacggagatgagtaaagcatcttgtgtttgaggaatgttaagatcaagagcatgatcctgaagtcgatatgccatctgatagtggagtgtggcgccaagagaggttgggtcttgttccactcctactgtctgtacttctactttaaaagcatcagtcagtcgattatctctgagagacatgttgaaattgggaaacagagtgacgaccactgttcctgcatttaaggtagttt

SEQ ID NO: 368497 - DNA, 1037 bp, Cannabis indica
agtctaaaggtggtatgggatttcgcaacttgcatgactttaacttgagtttgttttgtaaacaaggatggagattgtttagtcgtccagactcacttgtcaacaagatttttaaagctaggtactaccgtaatggtaccttcttaaatgctgagttggggagtaatccaagtttcatgtggcgaagtatttatgaaactcaagagatcgttcaaaaaggggcgagatgcagagttggtgatggttctcgaattaatatagtgttggatccgtggctgtcaaatgaagataatccaagagtaacttcgaataatcttgctcttattgatcaaaatgttaaagcacttatggaaactgatacgttggcttgggatattgacttggtgcatgatatgtttaatgaaagggatgctaacattattcttagtatttctttgtcttcaagtcgtttatgtgatgtttggtattggagttgggagagctcgggccatttctcagtaaaatcggtttataagttcttacaattgagcaaagagttgggtgcacaggatgataattccgtcttttggaatactctttggaagctaagtgttcctccgaaagtgaaagacttgttaactgtctgcctacgaagtccagacttcgttctagacatgtgcctattgataccatctgctttgtgtgcaaagtaactgatgaaaccatctaccattgcctggtggattgctcttttgccaaagcgtgttggcaacagttggctgctggtgttaatttgacagcagttggttcttttgccaactggtttgctacggttctacagtaggcggatggggagaaaaggaattgatcgcaatgacatgttgggcaatttggaaacatcgaaatgagctagtatggtctgataagtcccttactgttgcgagggttgctcttttagctcaagctttactcgcagattggacttgggctcaagattcaacatttaatcctacgactgcattccttactgatgtcgatggtgctgaaacttggccaaa

SEQ ID NO: 368498 - DNA, 683 bp, Cannabis indica
cacagggtgactggcaacctcacatttcccattgggataagtgtggttccgttgaatcctgtgagctgggaaccgcttggtgacagatcttggtccgtgaggcctatcgccgtgaaggcttccctaaacaataaattcacggaactcccattgccgatcagtattttggccacgatcatgttggcgatgggagtctctatgaccagggggtcatggtgaggaaaacacaacatcttcgtgtcttcttccgtgaaagtaattggctggtccatgagtcggggcctttgagccgaaagctgagtgacttcccacacctcatcgtgtttaacggccctgacatagcgctttagtttctttcgagtggtccctcaaatatggggcccaccagatatcatagccactatttcgttgggtcttggtggcaggccaggggtctgttgaggccctcctgagggtgcagctggtgccagcgctccgggcgcaccccgtggcgccccctggggcaaaggaccccctaccggaactgggttgagatgaggcagccggttcttgatccactcatagaggtggcccaaccgaaccaaattttcgatctcatctatgaggtttttgcactcattagtactatgtccaatgtcgttgtggtactcgcatcttttgttgggatcccttcgggaactatc

SEQ ID NO: 368499 - DNA, 565 bp, Cannabis indica
attgctttaagcagattgtctctcagtagtttttcagcatctgatgctacttcagtaaatattccatgtgcttcattgccatttttccacacccatttttgtacaaggcttctgaagcactcaatcattgttgttataggtaatgatcttgcagctaggatcgccgaatttattgattctgctatgtttgaagtcatcattgtgtaccttcttgtagggcagtggctcctggtccaaacctcatgtccaattttctcaaggtatggtcttattcgtttgtcgattctatctatctctgccatgtatctctcgaatgaggtgagcttgtacgtctttgctgcctttacaaagtttatggtcagatcgtctccatgcactccaaagtttgttttgatgttgtttagcaggtggaagatgcatgctccgtggaagtggtttgggtagacattgctcaccgccttctctatactcttatgcctgtctgatattattgtcaaacctgttcacagaaaccagtttttacaagataagtaggtatgttttggaagcctaatcaatttttttt

SEQ ID NO: 368500 - DNA, 558 bp, Cannabis indica
ttttcttatttggaaagtgtccggacgggggcctcctttccagcagttaggggacccccactccttttttcaaaaattagggtttggtttggggtctaactgctggattttctggattttttcagaaccaaaagtgtctgcttccgcatccagttctaaatcttccaggaaaggacgaggttcaactggccaccctggaggaggtcatgtagggccccgtggcccaggagaactacaagtcccgtgctaacagatgggacggcggacaagctccactccacacacctgtgctcaccagcttgaaaagattgtggtggtggcaggcatcaagccttcagtctccgggacctaccaccggctgcctcgggacgaggagacacccaaccatatgtatgggggctacggagcttggaaccagacccacttgatgtccggggctatggtccctcatcaagactactttgtaaattttcttgtttttgttggccttacggttgggttttatgccctaaataaaactcgttacaatctgattagttatcaatataagaaattaga

SEQ ID NO: 368501 - DNA, 730 bp, Cannabis indica
ttttgttgaagttggggataagatttattttattatgttttctttgggagaaagttgggtataggatagaaaaagagatttattttattttatacttctaaaagtttatgttcaaataaaagacaaaaaaaaaaaaaaaaaaaaaaaaaaagcaaatccaaaaatatttaccctatctctatcaaactcactattttccttccctattcatcatcgattttcaaaaattctataaacaaataaaatctcaaatccaaacaaatccataaatatctaaaactcagaaattacaaacaagccaataaatttcaaattcaaacttgttgcattcaaaccaattccttacaactacacagactatactcagatttatacacaaataaatagcaacatttcatcattgttcaatattctatttacagaagaaaaaatggccaaaaaaatcaagcaacctatacctctataatcttctcttctatttagccaaactcatatccagatctagcctcttttgtgatagatctcgtcttctcgcaagaggagcttggggatggtgattcctccattgaatccagcaaggagacaagagagggagaagttgagcagaggaaactcgatttgcggggttaggattttcgaaccatctaaacgatcttcatggtaacggtggatcaaggaataactttgtggtccaccattgaaaccgatgagagagagagatagagagaga

SEQ ID NO: 368502 - DNA, 199 bp, Cannabis indica
tgatcaatgatcctctatatgggtgatctacactgtaaagggattagattaccgtaacaccctacaatgtattttatccttaaaacacttaaccctgtataaatgatatttcagctaagtgaaatgagtactccaccatttatttttgtttggtcaagctcgaaggaaatcatcctttactttctatttttcagataga

SEQ ID NO: 368503 - DNA, 610 bp, Cannabis indica
acaaaccgcccaatctattaattaggtgggttgaaaataggtccaaccccgcccaattgaactgaatgacccgaccaacctaactttaggtttttttttaatttttagtttgtattatatataacataaatgattcaatatataataatataaagttatatacttaattgttagtttcaaagtcatatatatttttaatttatctttttaatttgagtaatttgcggcataaatacctaagtttatcattcagttgcaatttaatacctaagttaaaattttggcggcataaatacattctgttacacttttagacattctgtagataccttgctgttatcttgcacactggacaacaggtgacatgccacatcatttaaaataataccacatcatattataaaattgccacataatattaactattaaaataaaaaatttaatttgatttaaaactaatatagttacataaaattaattgaataaaattatataatataataaacatgaaataataatctgatacctaataataataataaacattaactaatattaccttaaaaacaaacaatgtacacaaaacgattgaactgttgaaaaaaaaaaa

SEQ ID NO: 368504 - DNA, 707 bp, Cannabis indica
ttttgtttttttttttttatgtaaaagtaactaatagtttattatcaacatcataagtaatcaaaattttacttttgaaaatccaaaaaaataataaaaaatcaaagtttaggattaatttcattttaggcatattattttagaattaaggtattttttaatgacgtggcaaggtgttattataattgagatttattaaggtatttttgtaaataatttatattttaagtatattattaaataaatcccaaaaaaattggccttagaaaaataggggccttgtgtaatagcccaagctgcccaatgagatgagacacgtaatgcagatgcatgcagtaaatttagaatgaatttattaataaacatccacatttctttgttctaaaaataaaaatcttcatatcattatatataaaaaaataagctatttaaatggtttaacaaaatatacttaaaaaaaaaaagaaatattctgttaagttaaattaacttaacgatattattagagttaattttataaatatatatatataaatattatttattttaaattatttgtaatattttttattttttattttttagggattgtttggaagtaagtgtataattactaggtagagtaattactagggtggtaattacacagtttagtaattacactatattttaaaatgcaaggtgtgtttggatatgaggtggtaatt

SEQ ID NO: 368505 - DNA, 1077 bp, Cannabis indica
atattgatgtgacagcatcgatcagtattttagccaacatacatttatcagtaattagtacaactctatgtatactatttctgctatcaatgtaatctaacaggcataaacaacatgcacgctaaacatgtaataacatatgcatgatattatactaatcttacctcaattccgaattcaggtgtgccggtcaacctgagtggaacaacagctcggctaaacatgagtgactcgctaaatcacaactgggactaaggtttaaaaccaaaaccctatctactgcaacttaatataataatatccccaaactagcagggaaatcaactaattagaaaccggaaattgacacgaaacgacaagctgaaaaaacggttttccccctgctgcaaaatccgggtaaccagttttacaagcagtgtaaaaccggttaaccggttttacccagaaaacctacaaaaatcaaacccctaaccaaaacgtttctaaactcaaccaaactttccagacctgcatattacaccccaataaacattttccacgtgataaaataactacccatacacagaaatcaacatcaccattgatgagccaagcttgagttcaaaaactcaaagcttgctcatccaacaaactagttaacaaaaccagctcaaatcaccctataccatcataatatagctactgaaaatataatccaataacagaaacaagaacagcaagcaaaatctcatttcatgcaaaatttctttttcttacaactcaagaaatcaacaaaaaggttgcaagaagcttaccaagaacttgagaccactaattccttgctaaaaccagcttgaaattcacaaagaaacaccacaccctagctgctctaggggccgaaagagagaaagagagagtttgaaagaaaaacctctctcttgattttctttttccaaattttcaattttttgagtaaatgaattaaaacttagttttaccacattaatctcagcttaaaacataggaataaaaatcagcttattaacttaattaaaaatcaccaaagacaaatacatatggggcaaaatgacctttttg

SEQ ID NO: 368506 - DNA, 484 bp, Cannabis indica
ctgcgttctgacgctacagtttgtgagtgtcagggaagtctaaatgctttgtccctcactcgcgtgtgagtctcactcgcccacatagccacatgtgtgtcacacatctctttgcgcatctgggggaatttatttactgtatttttgtaaataagaaactttgaaaatagtatatttgaaattaataaacaatataaatgtttatttttgcttatggcagtataaatgtttatttaaggtaatattaacccaaaatagaaaaaatcccaattttattttaaaaaaatatacttgcaaatagtgtgacagactaaaaaatttaatttagaaaaataaaattaaaatatttaaaatgtatgaatgtaaattggggtaagttgaaaaatgcctcttttattaatcaattaactaaatttgcctctaattttatatttatttgaaacatacctctttttatatgtattgtacccaaaataccctgaca

SEQ ID NO: 368507 - DNA, 559 bp, Cannabis indica
agtatatggggtatataccataatgtactattgattctataaagaaaattcttggaaattcttcaagtttaaattttccaagtcttatgacattttctacttattacaccaggttgtaattaaagtcgaaatattatagatattaaagcgcgagtacccgtgtactgcaaaattgttaaaaacagatatctacgcgaggatatagagttgttcaaaataaaatgcaaatttgtctaagtacagagtgcgagtacccctgtaccgcatagcaaaaaaaaaaaactaaaaaaaacgaaatagagtttaacaaaagcaaatattaaaggaaaagtcaagcattgggtgcaacaggaacagatccatccgcaactttgctgaccgcctcattctcgacttcctccacctccgcaacctcagtctcctcgagaagattccccccacaaccttcagttggcgtgggcgacatcgcacgaaaagcctctaccatttcagcggcctctgcttcaaggattgaaaagtcgaagtctggaatcttagaaagagtggtgtagatgtagtc

SEQ ID NO: 368508 - DNA, 622 bp, Cannabis indica
tctgcctccgccctcaaggtgtcggacagagccgtgctcttggaagtagcagatttagcccgggagtaggtataagccaacttcaagccgggttgcgtaaaggaaaaggtcagtataagaagctaagtatgaaaagctaaaagggaagtgtcgaaaagaaaagagtaaccctgttaagctcctttaagagtccacccaccaacacatccagagaagagtcgttagcaccaaccagctgctcaccgaccttaggaaccagccggttcaagtgatgggccatcacctctctgcccttcttgacctcaggcagcacgggtatgggtaaagtttgtgcttgcacccgttcaggaatcctcctgaccagtttggacccagatgttggtggcccagactccttagacttggcagatatgggagtggaaggatttgcagtagtcagctcctcataaagatcaatgacctagccagaaggcctcttctctgaagacccctctctgcttagacttcttggccggaggagtggcactggagcttctgctcatcctcttccttaaggcgtccatcatcagccgagacatgtctgcacagagcaaaaacatcatggttagcaaaaaccaacaaa

SEQ ID NO: 368509 - DNA, 600 bp, Cannabis indica
ccttatggatcacgggattactgactgtcacaattacaatccattgtgacagtcagtagtctctcgttccatagctcataatttagctaaattggttctctcttttttatgttgctatggtttagtgatatggacttcttgtttggattattttaccaggatctagatttactaacaagtatgttgattaacatcataaatatgaatatctctaatacgatgaaattaaacacataagagtttagaaaaacctgacattggttgcagcagaataatatgactccttccactcaaatctctaacccttgttcttttctgtcgtagagtattatcaagacctgagcttgaatctctttctctcattcgagtttggttaccaccgtcttccacactatgactgagtacttgacttgctatgtgtgggcatggcactctatcactatgggcgaattcatgaagaacaatgaaggagggttcgaaaactgtatatagggtgtctctcatctactagtcgtctgacatagttagaaactagatttggcaagttgaaagttaattggatgagataagagcatcaagttccttttatagtgtttcaac

SEQ ID NO: 368510 - DNA, 608 bp, Cannabis indica
aaattaatttattaataaattttagatcaacttaaatcaagtaatttttattaatgatttaattaaaataaatagattaaaatatattatattagaaaattagtaattagtttatgaattatctagatagatattttctatgtagattttttggtatttttctagatatatttaattaaataagaaaattaatatttaagttgattatgttctagacacttaaatatttgatatttttcttaagagatttaattaaataaaaaaattatatttatgttgaaaattaatttatttaattttagatcaacatgaattagaataatttttttttagttttattttattttattttaaggtgatttcgaaaatctatctttatacattggatttcgaaaatcagttatatatatttattaaaaattaaattttacttgaaaattaattatttaattctggaccaacttaaattaagtaattttcataatattttggaccaactaaagatggaaaataatttatttttatgtttgagatcttccaaaagtataattttattaatattaaattaaattttttatttagacttatctaaattagtaattttaatt

SEQ ID NO: 368511 - DNA, 537 bp, Cannabis indica
ggtttatgtgcttatgtgatgaatgtatgtgttgtacgaattttttccatgaaaaatatttttttctatttttgaaaatattttatttggattccttgtgaaaaaagcaatttgtcgtttttacggaacttaattccgataaaaattgaagttatgaattttggaaaaaatcgggggttcaatggtttcgagggtggtgcaatacgcacaagaccctcggacaagccccatccgcgcgcgcgtgacacgcccgtgtgcaccctgcatccgcccacatttgccgctcatgcaccctgcatccgccgagtttcctcggctgggtgccctcatccgcgcgcgcccaaggctgcgtgcagcctcctgggctgcattcaccaaaattctgatttttgtggttttttccccaaaaatctgaattttcatgggattgtttcccaaaatttgatttttccaatttgaaatattttttttttgaaatatttccaattatggtaagatttaaaaatttgttaacttctttaatatttatatattatt

SEQ ID NO: 368512 - DNA, 653 bp, Cannabis indica
cagtaagaaaagcatacataatatacatactaaatctcgggttataatcaggcgcccatacacctaaccataacgctaactgaatgaggaacggtcttgataaagtatgactaaccgcgaatccagcctgtactcagtactctaattgcactgatgtggtagcagttaatccatactagttgatagcctagcatatatctgatgtcatctcggtgcaactctatgtgcacctcactgttgccctgatatgctaacttgacggctatagattttccatttctaacggcaactaacatgtatgctaaacatgtataacgatatgcataatattacactaatctttccttgattctgaattcaggtgtaccggccaacctgagtggtacaactgctcggcgaattacaggcttctaaatcacattaatcacagcactggtaagtgacacgctaaatcactttctgaggacttaaacttgaaactaaaagtttccaataacatggaaataccctaaacaacacaaaaatgggaaaaactagggttcgcaaaatttgcccgaaccggtagaccggttccccaaccgaaattccagttctgtggggattcctgggagccaactggagttctggttcctacaggcccctctgaactagaa

SEQ ID NO: 368513 - DNA, 526 bp, Cannabis indica
ggagtactcatggacattatcgggctgacccggtagtgcgtctaagaagctgccagaggttaacgggtacgtttacattggcttgccggtatttcgcttgcacgagacatggcctaaacctccaagagacgttgtggtgtgccttggccacgagtctcaacacgagatgacacgggtagtcattcgtgggctagtttgcatacacgcaagggacggatgcaccatgctggaaagagacagaggtctattatatgcaactagtttggtggcttgtatcgagggcctaccaacatgcgtggaggcatggcaccttgaggattggtccatggacgtatgacagtctttgggcgatgagggagactgttcggacagtatcgaatggggcatgatagaagtgtttgcacgtcagcttggtgttggcatcttgccacacatgctaccttggtcacaagtgactgagtgagcgtcggtgttgggatttgttttaccaaagtagaacctatggacagtgcgagtatcttggcta

SEQ ID NO: 368514 - DNA, 637 bp, Cannabis indica
aatgctaaagtttttcctctgtgcaggctagtctgaagttggcctacacttactcccaggctaagtctgttgcttccaggaacatggctctgttcgacaccatgagggcggaggcgggcttggtcgggaaggatgctaaagacgccagggcaaaagtcggagctgttcgattggagttgggtgaagccaacaagaagctgtttgcctcccagaagaagataactgagctgactaaggatctcgaggtagctaaccgttttgaggataccatcgagaccttatctgtcgaagttaacagtcttcaggatgagaggacttctcttcaagcagttcttcattggatgaaggaggagaaggaagccaaggaggaggagcttttggctgaggtggcaaggttgaaagaaaaggtcaatgccttggagacagccagtcttgggctcttctttgaattttggaaggctaatcctcaggccaactttgactacttgggtgatgctaaggacatgtaccttgagttctgcgcgtcccaagtggcctatggcagaactgaggcagctgcttcaacatccggtcagactgctgatgtacctcctattcaaacaacagatcctccagctctagttggcccagaagaatc

SEQ ID NO: 368515 - DNA, 735 bp, Cannabis indica
cattgacgaggcacttgtaactatgaattgcatgaaacttatgccaagaattcacttaacacgatcgtgataagcaaccttcactacttgtgaatataagttcataacgattaggtgaaaatctcttatattctagcatcaaattcatgcatgcaaactaagttggccaccttaatcaacatacaagaataagttttgagtaaaacagttaagcgaattgcattcacaatttatcaaatctcaattgaaagtaatcaattcatattacaagtataatcatggttttgaattcccctctaactataaagaaattagttcctcatgttcgcaattaaacaaagataacttgaattaaacattgaaaacaaagatagaatacacctaaaaacactccagatggctcattcttctccttccttagctgcggcacaagaggattgtggtggatggtgtggtggatggatgtaggtgatttatggtagagggtggtggattaattgctgcacaaaggttttgtatttatagggcttagggaaacccacaaatttctgaaggaaaggaatgtgtatttggcacaattcatgaaggaaaaggactagggttcaccaaaaatctgaagggaaacggattgcacaatcctaagggaaaaaggagttgcaggttctagggcgttctagaaaagggtctaggcgccaaaattttaaggtgcttctgaaaaaagatgttttagcgacc

SEQ ID NO: 368516 - DNA, 780 bp, Cannabis indica
  modified_base (750)..(750): a, c, t, g, unknown or other
aggaatatggcaacctgttctaatttttttattttgtatatcataattatgtaatgaatattctttcttattttatatattataagcaaagtagaaacctttcctcatgcattaataccctataaatagtgactaagcttcactgtgaaagagatcgaaagaattgcttcagagagagatctaagagaattactcagagattttattgtaagagctttgagagagaaaaatactttattctttatctcaagttaatacaatttaaggggagtaggctattaccactcttagggagccgaacctttttaaaatcggatattctttgttacttatttatttttgctctattttcattatgttcttaatcatttaataattgactcactgtcgtcgcggctaaaagcaaggtcaacactttgtgtgactcatctctctttcataaaattgggtacctcttgggtgccaacccgatcaagtttgcaatatatacacttacaaataagtattttaaaacaatgtgagacttattcaaataatacgtttttatttttttttaacaattttcacaagatatggtcaacaagtgttgaattattaaaaaagatgggattccacgatcattcaaattgtaggtagcttcgatgatagtttaaaaaaagtttattgtctagtgatctcctgagatattcttaatttatgatcatcatgattcaattgtatcactttttttattattatcaatgaaatgcntttttttttttaaaaaaaaaagaaaaaata

SEQ ID NO: 368517 - DNA, 572 bp, Cannabis indica
tgtgtgtcactaaaaatatgaagagtcactaaagagtaatacccatcattttctatttttttatttaaaatgttaacttatagagtcacgccaagcgtgttgggacatgtgtattcaatcacgccaagcgtgtcactatatgttaaaaaaaattaaattattttaaataaatttaattatgatacagtaacgcgccagacgtgttggtacatgtgtatccagtcacgctaggcgtgtcactatatgttaaaaaaaaaaggcaaatcaaattttttttattagaaggcagaccaatttttaatttatttcactgcaaattttaatttattacagcagatttttaatttattttttttaattttatttatttacgtttggtataaaggaaaatgatgaaccctaaagcccatcacttttcatcttctaagtcacgagctctctgctctctattccctccatcggcggcagcctctccagccgttctccacgccgtccgactgccacgaaaaatactcgagcttgctttctctttctcgtcctctcccctcgcttatctctctctcgctcgctcc

SEQ ID NO: 368518 - DNA, 568 bp, Cannabis indica
ctgatgactagtccctgacccttcgcggtctggggattagatcttattaggtccctaccaacgggaaagggaggggtaaagtatggcatagtagcagtaagctacttcacaaagtgggcggaggctgagccaatgaagactataactgctaaaaaagcactagactttgttatcaaaaacatagtgtgttgatatggcttgcctcacaagatagtctcagacaatggaaagtagtttgactgggaagaatttaccgacttctgctaccaacacggagtcgtcaaaatcttctccgtggtggcaaggccacaaacgaacggacaagcagaagaggtcaataagatcctaaaatttgctggcctgcaaaaacaattggcctgaagaattgccaagagtgttatgggcctactggacaaccccaagaaccacaactggccactcgtcaatttcaatggcattcggctgtgaggcaatggtcccagtggaaacgctattcccatcacacaggagaacgacttatgatccaacaacaaacaaggctttattacaagaagtgttggatcagatt

SEQ ID NO: 368519 - DNA, 685 bp, Cannabis indica
cttaagatcgtcttttgaaaaaagtttaacgacttgggagaggtagggactcaacttgattattggacttcacttttatatgtgttgaataacattagacatatttcaagttttttatgatttgcaaattgtttgaaaaattaagaaaacttaatctgcatatttttttggacagttctaggacattgagtgccaaatatatttgtgtacaaataattatacaggttataatttttggatttattcaaaatatagtcgttatgctgtcgaatttttagaaaaataaaaagggaatatgttcatttgttattcttattactttgcgacgtgtttttggttatattgatgagagccatgttgatcatgatttgtgcatattgttgttccacgacctagtctatgtgtcatcatatatagattaggtgtgcactcacctgtaggtgaaagacctagatctgtacagggagtgaattgaatctgagccccggtataatggtggttatcaggtgtgactatacccagttttggatgtcattttctatgattggtatcgagagctaggggtctagtggacggtgtgatatgcatttgagcttgattttgtgattatttgtggtctttctactttgtttataaattttgataatggtgatgagatattttatttttaaaagctaaccatgca

SEQ ID NO: 368520 - DNA, 788 bp, Cannabis indica
tgaaactaaacactgagttttagtgaaacttacagagaggttgtcgtcacacaattggccgatgctgatgagattggctttgagtcctttcacatacaggacgttcgttaactgagccactgcattcacgttcacatcacctctcctagcaatctgccctttgttaccatccccaaaagtcacggatccccctttttcgtctttgtagttaactagcaatttcttatttccaatcatgtgacgagagcatccactgtcgaagtaccactacccttcaacaaaagcagacagggatagctttgcaaccaaaccaacaccaggatttggtttggactttattttccattctcgacgaggttcgtctatgtgacttatttggttgagggaaactatttggtcgattgatcattgctttcaagtaattctgcaatttgtagcacttgggacgaatgtgacctctcctattacagaaatgacatgtaggaatgaaattgtcattctgtagcagattttctgcatcagtcctccttccttcaaacttgagtttagtgggtccagttggaacctgtctcttctcagatgagtcagattcgttaatggtggttgggatgtcaggtaactcatcttccttctttgttgaatcgacattagagggaagagaattcttaatagacaggtcattaccttgtttatacagcatcttatatcctaaggaggttcgatcaccatagggcttctggagctgtagtgtttgattgatagcttttgtgcctgggggaatgaattgt

SEQ ID NO: 368521 - DNA, 660 bp, Cannabis indica
taatttccatctattaatatattcgttttacttttcagttgatagtttactctatgttatgtccccgagcgaatgagattgagtatgtgagttacatcactagtggtcaagcacctttatttgttgacttggaggaacttgtgttgggtgaggatgggcaaccaaaacaggatgctttgtgaagcaaggccgaaaatgcctcgacattggaagaacgagcggatgcagccagaatatttagagactctacaccacctccaccgtctccaccacgtgcaccgtcttcagtaccagatgagtctggcgttgccccatctgcagcgtcacatgatcctcctcatcgcccgtcaacttctattcccagcaccttagaggcttacgaaccagtataccctgccattttggcaaggttggagaccgtggagaggggacagattgctttgaaggaaggacagaccgctctgattcacagtcacaaccacagccacagccacaaccagaacaagaggctcagtcaccggaaaatgaaatcattctcccaaatgactatagactggatgatgatgatatgttctgtacacctgagaacacgaatattatcaccatcggggatactcaggattctgaggtacagattttggagacagctccagaactagt

SEQ ID NO: 368522 - DNA, 560 bp, Cannabis indica
tgaccattgatagttgttgctagctatcctttccaaaatctcaaaagcttcattgtaagacttggaaagaatggctccattagcggaagcatccaacaccatcctagatgccgcattgagaccattgtaaaatgtctcaagttggatacaatgaggaataccatggtgtgggcacttcctcaacaactccttgaatctttcccatgcatcactagtagtctcatcttccaattgttgaaaagacatgatctcgcttcgaaactttgcatttcttgttggaggaaagtactttctcaagaatttttcagccaagtcattccaattagtcaccgaatcgggaggaagagtattaagccatgctctagcccgatccctcaaggaaaatgggaacaacttcaatcttaaagcctcttcacttactccttgtagcttgaaagaatcactcacctccaaaaatgagcgaatatggaggtgaggatcttccgttggcgacccaccaaattgaccaaccgtttggagcatttgaaacatgacgggcttgagctcaaagtgaggtgctt

SEQ ID NO: 368523 - DNA, 827 bp, Cannabis indica
agctgatttttcaactttggaaattaacaactaggtattatgtacaataggttatttcgtagaaatgggcagcaaagtcattaaaatactatgaaaaaaatattagaatatattagtagtatctagcattttatatcgttatcgtgttttttaataattttttaatttaatttaaaagttattattaaatattattaattaattataaaatgttaccgataaatatgatattttatagcaatgtccaaatactaatagtcatttgactttactatatttttgtttgtatattacacgaatgatccaattaagtccagatttatgaatcattaaatgaaagggttagttgaactacgtttgattttattttataaaagattaaagtttttgcaaataacgtccttatcattttcacatttattgattcaatatgcactgttgattataaacttataaagaccttgatttggtagtatttgaatgagtggaataatttaagtccattttgataaatactctcatttggtagtatttgaagaagaggaatattttgaatagtatgatttgaaaaataaatggtcctagctaatgtcataaattaaacccttaactttccgtcacgaaggatgaaaaaaaaagataatataggaattaaagattcacggttaaaaattagtgttttatattgtgttaaatctatcaaaatttgacacatcaactaatttaatttatattaaatatgttaactatttttattgactttattagaggtttaattttttaataaataaaaaattaattgatgtgtcaaattttaattagtttaa

SEQ ID NO: 368524 - DNA, 581 bp, Cannabis indica
caaagtcatacaccactaactagaaagttctaaaatatagggctattaaaatacataaaatatgcatcaaaatcaaaccatatactcctcaaagttcagatttaacaacatctaaactaagctccaaaccaagagcctaaatccataaaactccaacaataaagacttgctcatccaagtcaaaatctcaagcttcaagcaaaataaattcagagctataaatcataatataaacactaaatataactcaattaatcacacccaaagcttacccaaagcaaagatcaagagtttaagacactacaagttcataacatcaagaacaacccaattaagacatacatgcaattcaagaacttgaaaatccccacatgcttcaacatcatccaacaacaataaattgggataaaaattagatttctaaacttgaaaaataaccctaaaacttgctaacaacataggtgcgaaatccataattaaacaagttcaagttacaaagaaatcaccattagctccccttttcaaccctcatgcattcaaagcccaaaaacattactctcaacaaatttcagcaatggaaa

SEQ ID NO: 368525 - DNA, 642 bp, Cannabis indica
ctattcatgattaatacccattaagagtgaacctatatatatatttaaatatatattatttttagtagataaatttatattttttatttattcataataaaaattaatttaaaaactcaaatctaaatatgtttcttttaatttattttcataaatgtttacattgattaaattttgttagttttttttttttttttatgaatgaattaaattttgtagttaaacacataagtatgatatcagttggcaaacacttattaaataaataccaaaaactacaaaaatcgtatatatactaagaaaaatcttgtaactaataaaattactataaaaaatattaaactaactctattacaaatttaattttcttttttattaaaactctatataggataatgcttaactaaagtcacaaaattacatagattttttttttggtatgtgtcactttattattttataccaataattaattaattttttttatattatttttaggggaattaccccatatactatttttttaacttttttttttttcaaaatttacgattcgggttgctaaagtggttgtagcgctagttgcaataggagtttctgtacgattttttgtttcaaatttagattgcagcgctagttgca

SEQ ID NO: 368526 - DNA, 830 bp, Cannabis indica
gtgctgagttttacgggaattgtactgcgagaaagccattttcatcattggaaacattaatcttcaacgacatgtcatcatgggagcaatggaattcaatgcaaactgaagaggcaacaacatatgggaagctcaaaacacttgagattaatgattgtcctaagcttgtcgtagatttgcctggcttgcttccttcattgataaggattaaaattaaaggttatccattattaagtctcccaagattaccacgtgtcacagaaatgtctgttgcgaatttggagaattcagagttgttgtacgaggcaataaagccaatgaatccttgttccactctcactccactctaccattaccctcctcttcaacagctttatttggagtcttgtggatcatcgtttagatccctccatatggatttatttcccaatctcaaatttctggatattgcctccagcgactactttgaagctatcacagtgtcagatgggaaatctctggaggaactaacatcattatatatcgtcgattgtgatagttttgtatctttcccaaatggtggacttattgctcccaagcttagtaacttaagcattgttaattgccctaaattgaagtggttgccagagaagatgacttccctctcatctttagagtccttgacaatcgatggttgtccgttgataaagagtttccctgaaggtggtctgcctgttagtttgtctagtcttgatttatcgtatgatgaacttttgaggatgaaatggaattggcaaacattaccccatcttaccactcttcgtattaatggatatggaatagaagaagat

SEQ ID NO: 368527 - DNA, 668 bp, Cannabis indica
tcatggtgcagtaagtattgagagtaaataatttactgttgtgtgatcatttgtttaccgctttccattttaggcaatatgcaagcatctagagtatgtatgtgttatgtgatgtcatgctataaatgctatttgtttatgtgaatatgtatgaggtgaattgatgagttagggtttaaggcaacaagtgcgtaagagtggggttggtgcctgactcgctgggtcgttgattattgggttatttgtagaatggaccctctttaatcatccagaccatagggcgagcttgtagagcatggtgtagaccaaaccaatccaccggcaccgcttccacctccgcagaattcggagggataatgcgggggttggcaatgctaatcctcctgatgattggcagcagatgttttaaggaatgtgaggtatcatacttcgtcaagcaaaaaaagagttgtgttgctcaaatttataaacactacgcaagtatacgcaatcaagtagtaaaactcacacaggtgaggtcgatcccacagggaattggattaaataccactaaactatacttataattctatttggcaaatcgaaaacaattctgatttaagaaaagtaaagtaattcagaaagcgtaaaacacagttaaagtttaagcaagatgagatgatagggag

SEQ ID NO: 368528 - DNA, 1064 bp, Cannabis indica
catcttaaaaaattgtgaaatttcatagggacgaagccaagagcattgtcaataactattctattggggtttgggtttggggtttggggtttgggggtttacaatttggggttttatttcaaggtttgggggttttgggtttaggatttggggtttgtggtttgggatttttgggtttgggggtttggggttaagttgttttaaattaggtgtttggggtttgggtttggggttttgagtttggggttatgggtttttaggtttgggattaagggttcttgggtttggggtttggtgtttagagtctttggcttttgggttttttgggtttgaggtttagggtttggggttttatgacttaggtctagagtttaggatcttggacctagtatttagggtatgaggttttaagtctggggtttggtgttttggttttagggtatggggttttagggtttgggtttggggtttgggatttggggagtttctaggtttgttgttttctggattagggtttggggtttagggtttgctgttttggattttgggattttacggtttagggttttggggtttggggtttgggatttgggttttagggtttgaggtttggggttttgtagtattggcgtttggggttttggggtttgggaatcgatatgggaatgtgctggggaatggaaatgggaataggaatggaaattggaatgggaatgggcatgggtaaggcaatgggaatggggattgggaatgggaatgggccagagaatgggaatgggaatgagaatggaaatgggaatgggccggggaatgggaatgggaatgggctggggaatggaaatgggaatataaatgggaatgggctagggaatgggaatgggaatgggaatagaaatgtgagtgggaatgggaatatgaatgcgaatgcaaatgggaataggaatgggaatgggctaaggaatgggaatgggaataggagtgggaatgggaatggggatgggaatgggaatgggattgggaatggggatgggaatgggaattggaatgggaatgggtcagggaat

SEQ ID NO: 368529 - DNA, 550 bp, Cannabis indica
tgtggcgcagatactgatggagtatctcacctttaaatatagggtctcagtccccgagctcttcactcattctgttcatagcagcaaaatctatctaaagagagttgagagagcgaggaagcccgattaccctcatatatcgatttcttttacagatcaagcttatgtgggactaaagctcaaaaattcaatagctggaggtatttcgatcctatattcatataatgtatatgttcatttattctgcatgttatatacacacacatatatttcattttatacatataaatatctaacagttggtatcagagcaatctatatatttctgtcttgattcatttgagtttatataagtatatgcttatatatatatttgtttggtttgttcatagcttgattcaaataatttaatgaaatagctacttcattgaaatattagtattcagagtacaagagagattcaagatcagaccatacattatactcaaaaaatactacgaccagagagaaaagcgagagtgccgtgaaacaacatgggcaactcgatttg

SEQ ID NO: 368530 - DNA, 815 bp, Cannabis indica
atttatttattacttgtgaattattaacatttgtagtaagtaaataagttaacaagaatataatgtacaattaataattcattagtaagaagtataatgaaaagtaggcaaaacaaaaataacaaaagaacatattgtttttttattttagaaaatctgacaacataacggctgtaatatgaatttagctataaatcataacctgcatgaatagttgtataaaaatttatttggcactcaatgccccaaaattttttttagaaaatatgcatattaagttcttaatttttcaaacattttataaatcataaaaattagaatatttctaatgttattcaacacatataaaatcaagttatataatcaagttgagtctctatctctttaggataatcaaattttctccaaaagtgacgcttctaagcccccaattcttaagttccaaacgttgggaatattttaccaggatattgattgcagctgaatataatgactcctttcgtttaagatctcaagcccttgattcttttgtgtagcagagcataattaagatctgaacctggatctctttctctccttcaggtttggttaccaccgtcttactcactatgattaagtacttgacttgctatgtgtgggcacgtcactcattcactcaaggttcgaatggtgaagaacaatgaaggaggtgagaaaatactaaggaatgaactctctcatctaggttgaaggcaatagtcaagatgacattagtttgacaaagtgtcaagtggatgagatgagagcatcatgttccttttatagtgtttcaacta

SEQ ID NO: 368531 - DNA, 637 bp, Cannabis indica
gataataatctttttttttttctcgttctctgtggttctgcagtattgtgtttcatttgcaatgttgtagttacatgtgatttcatctatatgcagacataataacatttatagaattggttttatttattatcaacaaaatatccgtaattttgctactaatttgtttatcaatttctttcttctttatattagagtggaggtactcaccaaactaaaaatggcttactaaaagtgcaaaaggcccgttgtttgcaaggtatatataacaaaaatgttcccttttccccatttttttttcatgtatattaaagaatagtaaaaatctcttaaatgggcagttgctgcagtttataaactgggtaatatctaaacacattcctctcgtttctcatctcttgtgatgagtctttataagtctgattcacttttttttttttaatgaatggtttggtttggaggaatgttaaggaatgttgggttattaggtagatggcgtgatatgatgagcaggcatgtcaaaaagatccatttagttggagcgggttggagctccgacccgacggatcatctctgatcggaaacattcggatacttattggatcttggatcatatccgctccgccccgcctaattt

SEQ ID NO: 368532 - DNA, 672 bp, Cannabis indica
taactctactccagtacattaacgtcgaaggaacaattggttacttatcagtaagtctttttttttttatctttctcgaaaaccattccttacctattaactttatcatttaatttgttaattcaaacagatacaatatggaggccgagtctcaagcagagaacatgaatgaggaacaaacctacgaatgggaaagcataacagcagagctaaacatcacaaaaccagtgaatgagattcaaatatgtgacgtcctaggcaagagtctcgacaaactgggaaaatgggaagcattctacgaaatgtatgcgaaacggatgggtttcggcacaagaaaagatgatgtacgacgttctcacggagtcatcgtaatgcgcaggtgggtttgttgttccgagggttacaaaagaatcacaataacggaaacacaaagaaaaaagagacctcatgatgtcactagaaccggatgtcaggcagcattacgtattttactcacacaaccgtctaacacttggaaatgcaaagagttcagcacaatacacaatcacgacctcgcttcatcaagtgaggtacaatttttgagatcataccgagtagtgtccgatggcttgcttgcccaagttaggtcgatgaactcagttggaattaaaactgccaacataatgtctcatg

SEQ ID NO: 368533 - DNA, 517 bp, Cannabis indica
actgcttggcttctttcacacgcccagtgatgtttcatcctttgatcttttcaagcaaagtcatcgcttgaattttatgcaactttaccctttcttcatagaagccaaagtttgcttcataaaaattcaacatgactctcccaggctcgtgtttttcatgcatgaaagatcattgagggtacgacacatcttcaaacctctttaatagaaggtaaggaatgattgaagtctctcacactcccagtgatgtttcaccctttgatcttttcaagcgaagtcatcgcttgaaattttatgcaactttacccgtccctcacggaatcctaagtttgcttcataaaaattcaacatgtgtttttcatgcaagaaagatcactttgggtacgacacgtctttaaccctccttcccagaagagaaggactgctagaagtctatcacacacatggtgacgtttcaccctttgatctttttaagcgaagtcattgcttgaatttttatgcaactttagccttccct

SEQ ID NO: 368534 - DNA, 561 bp, Cannabis indica
atgtaacttatgagatagacaattggcttttatagagaaaactagtagttgggaaggtgggataataaatgtaaaaattgaattacacaattgtacacatgtttgtcatgcacaaagcaatctgggcaattttcgcgacatgtcgcgacacagagcgacatgttatcgacatagtcaagtagttggttaggcgggataataaatgtcacattaattaccatttaatgtggaaacgtcttttgtatcgacgtttcgcgacataattgcgacatgttaacgacatcaactgaagagtcaaaacatgattttactatcgacattttaacgacatgttcgcggtgctttagcgatatgaaaccaaacactcagaaactaaaaattttcgacattaaacgacatgttaacgattttgtagcgacatgtaagtaaaagttttaaaattgaacacttttccatatataaaaactgtacagtactaaaaacaactatgccactatgtttgtacaattgtaatggagttcttaaaatacaaaaaaattacaacccttgtaaattatattt

SEQ ID NO: 368535 - DNA, 497 bp, Cannabis indica
caaatttgtcctagaggtgcgactccttgtccggagaaaccatatacaggcaggagacagggggttagatctttgagctggagccccatcttttcataggcagttttgaataagatgtttgaagaggctccattatcaatcatggttctggccaccatcttgttagctatatggacctccacaactaatgggtcgttgggcggaaacctaatttgacagcatcttcatccttgaaggttatggtaggccctcctgcccgtgggattttaggcttcctttcttctacgaccaggatcacttcttcttagttgtgttgtgcttttcgggcatacctcgcccgagctttgcccgaatctccagctatgtgcggcaaagctcagaaggggtatgcccgaacagcacagcacgagcaagtcttggttattgtcgttcctttgattctgtccggccttgacatacttctgtacatgcagtttatttttccttatcaagaattc

SEQ ID NO: 368536 - DNA, 572 bp, Cannabis indica
actaaagacctccaggcttctgatcaacttgaagctgccattgcctccttgtcaaaagaagtgaatagtctccaagaagaaagggaggttcttcgaactgtttttcacaggtcagaagcaaagaagatgtcaaaggaggaggagctggttgctgaagttgagaagtacaaggctgaggctgagcagcggagagctgaggttgaggagcacaaggcagaggctgcgcagcagaggtctgaggtggcgaggctcggagggtaggtaaatgccttacagacagcaggtctcgagattttttatgacttctggaaggctaatcccaaggcaaacttcgattacttgggcgattttaaagacatgtttctcgaatattgcgcttcttaggtggcttatggagaatctgaggcgaccacttctacctctggccagaacgttgacattgttgggttttgtgccctaaataaaactcatttcaatataatcagatttactaattaataaagatcagaaatcatattttatgttgcattgtttacatgatttacttcatgattataaattctattaggtcc

SEQ ID NO: 368537 - DNA, 713 bp, Cannabis indica
tggagggacaaagagatggaggcattaagggctcaccatgcagaaatcgaagatcgtagtcagcaagctactgtgctgatacgaagagcctatcacactctaggctaacaaacgccgagcgtcattcccctgggagaaacggaggatgactcgacgatgaatgcctcctagacaaccaacggtcatccgtccaatccccggtcacgagttccactcgtgggccaagaggtaggcgggcagaccttgtccgggaatttattaggaggagccatgcccgagggatccccacagaataatggagccattctgcctgtcaacaaagcgaaccaatcgctaaggcagccaggttcttctgtgttcgataggctgggaacaacccatgacctaagggacaatctaaacagaagaaggggaagagacgagcagaatactacaacgatcgtgcagcccggagcccatactcaaatccctgctcagaaagacgccgacgtaatccaacctgactaaaacgccaatcaagtcagcccagccgtacaggcccagctcgacgaactgaagaatatgtttcatggcatggctgaacagcgtaacaatgatcttgagttagaccgtgcacgcggaactcccttctcaccagagatcaatctcctgccactaccccacaagttcaagatgccaacgtggaagatgtacactgggagagaagatcctct

SEQ ID NO: 368538 - DNA, 542 bp, Cannabis indica
tggtaaaatatttccaatacttggtggggtcgaggtcgcatactagcacttcctcgacgtcctccataggttctatagttttttcggatcgcacacggggatccaactcatcttcttctgccaaatttggctcgataccttcacgtaccatcattactggtaagtgggtcgcgacattgtaactttgcctggcctcaccttgattgcccctcacggtccctactccagcctcctgggtggggaatttaagacacaagtgccggatagacgtaactgcgccaaagtctactaggactggtcggccaaggattgcgttgtaagccattgggcagtctaccaccacgaatgtgcagtacttaaaagtgctctggggtgtgtccggacacaggataactggcaacctcacttttcccattgggataagtgtggttccgttgaatcccatgagctgggaaccgcttggtgacagatctcggtccgtgaggactatcgccgtgaaggcgtctttaaacataaattcacggaactcccattgtcaatca

SEQ ID NO: 368539 - DNA, 929 bp, Cannabis indica
tatatatatatatatacataaagtatatattatcaagagaaatctcttatcaagttgttttaaactcaatgttgatgctttagtttggaaaaaacatgaagaaagtaggtgcaattgtgcagaatttttttggttatgaactctacaattgtggaagttgaaattgattcaaaaatgattgctagcaaaataaattctagttataaggataattcctcctaatcccattcctataaatagtcacatgatatatgtcatttactagactcacgtactggcttggtaaactttggaagactaatgttttttggtcaagaaccaatttgttccaaagaagaaaaataatattaataaccattaaagtacattaatgtcatattacccacaaacaaaacattttgtcctttccaccaaacattaataactaattaggtatgtaggccatctattatattattctacgaataaacctctctcttattgttattattatgatgggctccacttgatagcacgtgttttaatttgaaagtgagtaggtgtggtttagttgctccaaagttaattgaatggtaaactaattagcgtaatacgaaaatatttaaatttgacttttagttgcaaataaatatttaagtaaaaattttggcgataaaaatacattatgttaaggttttagaactttcgtagatacctagtcgttaaatgccaaataagtatctacgtgtcatcatctcattggtccaactcattaatttttttaatttatttaaaaaatcatttaaatacttaaaactttaataaaaattcatttaaaattaaataaatatattttgtttcttaaaacaaaatcaaataaatattgaatttttattgaattacattttttaaaaaattaacctctaaacaaagaagagagagagagagag

SEQ ID NO: 368540 - DNA, 533 bp, Cannabis indica
tatagatgtgagtagtttggcttctaaaggtagtgcaggaatggcatttcactggtgtgtatggggaaccaaataggagtaggcgtgtttttacttggaacctattacatactcttgctaatcgttctaatctaccatggtgtgtgatgggtgaccttaacaatgttttatctcatgatgacaaaagaggcagtaataggtaccctgattttttaatccaaggttttcaacaatctttggttgatagtggacttcaagagattgatttatgtggttattcatttacttgggagcgtgggcggggtactaataattggatcgaagtgcgtttggatatggggttagctaatcttacttggttgaatatgttcacttctgctaagctccataatcttgaaatttcaacttcaaaccatgctccgattcttatggtcatggttcctgctgctggccacaattttgtgaagcggattcggtttgaaaatgtgtggttgagggaacctctttttatcaaattgttaaagatagttggg

SEQ ID NO: 368541 - DNA, 762 bp, Cannabis indica
aattagacttaataaagtctcttaattaacacataaactcgaaaatctcttttctccacaattaagccctagcttattgaaaattcgtaaataagacatagtctaattttagaattataattgattaattaaaatcaattaactaagtcttacaagcagtattgtctcaactagtgtgaggaccatgggcctatataatcgagcttccaataagtagatctagactttaccaagtaaattctctaacttattaattcctccttgcaccactatagatttagaattgcactctcaattatatagaatgctctatatgttccacgatataaataagctataaaattatccattgttctaatcccaattatcaaagatcctctatagatgatttacatcaagtagagacaaatttaccgtttcaccctcattgtattttatcctaaaaacacttagctttctataaataatattttagtaactaacataattgctgaaataagagctcttccatttatctctattaagcaaaactcgaaggaaattattatttcacttctatgtccagatagaagctatagattttatatctatgattagcgctcccattcaattgtactatcatgttcccaagatgcacatattacccgaaccaattggtaggctttaactaacaactctaagaacataaataacactcttgagatcgaacctaaccatatcaggattaagatcctttgatctaagatctgttggaaattattt

SEQ ID NO: 368542 - DNA, 446 bp, Cannabis indica
tcagagaaagagatccaggttcagatattgataaatgctctaaaataatttccaacaataagaatatcaatgttataaggatttggatgaatttattaatcaaataaacatataaatgatcatatgaaccaaaagtcataccaaataagtaatgaaaataaatctgttcctttattgataattgaatagaaaagattacattgaaatagagttttatttagggcacaaagcccaacaagtacttggtcgttggtcgaccttgcatcctttgttttacctggaagatatccttgggtgtcgttggcttgaatatatttgtagcttagtcaggttgctcacctcccttatttcttccatgcagacagtgccgactgttggtttggggaggtgatgttggaaatattttaccagggtctagatttactaccaagtatgtttcattaaca

SEQ ID NO: 368543 - DNA, 1076 bp, Cannabis indica
ggatgttacaatttggtatcagaacgccaaggtttttaaacttcttataaaccggctgaacatgtacaattatcttcaaagacaagctcgactcgtggtgcagtaagtattgagagtaaatgcttaactgcttttgtgattacttgatataaattaatgaaaattacttgatataaattgatctaaaattaattttaaactttaatcacatttttaaaataaattttggaatttaaacatttaaaataaatacatttcaaaagttagagtaaaataaaaataatattttagaaaaattaactctaattaattcaaagttaaatttgaaaaaaattttcaaactcaaaatataaattttttataaattaaatgtattaaaatagaaaaaaataattaaataatcttgaataaaatcaacttaatagtttaatatcaaagaaatattctaatttaagttgatctaaaattgttaacgcaaattttcgttaacgataataagcctatttgcttgataggatcagcacaaaaattataagaaatctaagaaagaataataaagcaaaaataacaccaagttttttacgtggttttacagttaattctgcatagtccacgagtcaatcttattaggacttttttgatacagaaatgggttcttcaccaacagtgtattcttttttctctcaaggattttccgttccttctgtacactctgcccctatttataataacataggttggcagttaactacattgagatacgaatcccacaataatatttctccgaaattgtgggccttaattacgctccacgtaaataaatacggtttattatttaaaaatcacacaactgtgatttaaaccgcttttaatgggtcaacgctgacgtggattaagacacgctgcaaagtcactacaagaaaaggtgtttttgccggcgcatttcgtgacatgcgccggtaaaaattgtcgagagtaccaaaattgtggaattccaaatttattttgggtttacttttgccagcgcatttgtgcgccggtaaaacatagcaatgccggcgtagtcaagttaaatg

SEQ ID NO: 368544 - DNA, 603 bp, Cannabis indica
aaattttgttgagcctcagttatgacctagggttgaaaacagttattaccgttacgagtaattactcctgaaatcgtagataggtttcttacttatcgtttgcttcatcgggcaacgatagtgacatattcagctcgtagttaatgagtggtaaaggggtactttataaagtaccaagattgtgtgtttatgatattgtgtaaatgtgtaagcatattgatatgagattgaattgctgaacattattgattattgttttattcatttttcttgctgagtctctatgactcacgggtgctttatggtgcaggtaaaggaaaggcaaaggttgagcagccatgagtttgaggtcgtagcagcaatgtacatatcagtcgcagtggtacggcccaacgaataggatactctattttgaatgtattttggaaatgcaaaatttatgttgtaaaagcactattaaaccagtttgtaaatattttgaaagcaagggagtcccgtagttaatattacttagcttttattataaagaagttttatatggttgtttttaattatcaaaaatttaattacccacacttttggtataattatatagtatataaa

SEQ ID NO: 368545 - DNA, 567 bp, Cannabis indica
aaaccctgaaaaggagatgtgcgcctggcgggtgcccatggttagcaaggggcattgagcctttgcatcaatacttcaagaatgtggcggacttctttgaactctgcccgacccaattcactcctaaggggattaaatatctgtctgccctcttcgtcctctacgcttcctagaaatggggtatgccctctcctcatgaagtttcctggttctttgatttgaagtccaccctcgagcaaggcaggtcggggtagttctagttctctcaaccaggcttcaagtggttgacgggcacggacgactcgaccattagcaagattggacattttgttgatgagttcttcatcgtggatggcacgggcatcactcgcactcggttccagtagattccaacatatcaccgccctcccctcactcttgctcttagggatagagctcaaaagcttgctcgactaccgggggaagaccgaaatattatccagttgacctccgaggataattttgtgaagtacgggctttatcccaaggacttcattcctaagtccgtgacggggaagaagaggaaat

SEQ ID NO: 368546 - DNA, 405 bp, Cannabis indica
attataggatttgggggtgccctactcatgtcttgagaaagaaagaaggaaaactagaatcgcaaactgaagtttgcttgtttgtcagaaattctaaagagactaggggtggactattttatcgtcagaaggataacaaagtgtttgtctctaaaaatgctacattccttgaagatgattatattaaagaattcaagccaaaaagtaaagttgtgttagaagaaatactttcaggtacaacaccatctgatgttccatccttttctactcaagtagaggataatcccactctcttagttgaaacaacccaagatgttacaagtgagagaactaccacaaaagtttttgttcagaatgtcaccgctcctcgttgtagtgtgagggtttctactaaaccatctcgtt

SEQ ID NO: 368547 - DNA, 522 bp, Cannabis indica
ctttgtgtttttaagctttgaaatgggtttcatgtattaattttgtgaatgaggggctgctagggttagtaatgcttagggttctaattttaggttaattttaagttgattttaagctctggatattagttttgagctatggtgagggtattgaacaagcttgagctttgaatctcaagtttaggtctttaatggcataaattgatttggtatgtttttctgtgaaatactgattgaattatgttgtttataccctaattaggtactctggaaggtttggtggcatttggtggaaaattgagcaaagagtcaaaaatttggtgtggtctggtgcaaaaccaggtaaccggttttacacgtacgtgtaaaactggctaggtggttttggcggggttccccgggcttttcattttctcaattttcgtcatttcggtgccttggttgggtgtatccccatttccagagttagaataacctatagaaagtatagtagaacctaggtgtttgattttgggtttcccg

SEQ ID NO: 368548 - DNA, 864 bp, Cannabis indica
tcctggtctgagtttgggttggggtccggattttagtctaggtccaaatcaggctccgggtgtgggttcgcaacctgggtcttggtcgaggttgggtccgagtcccaagttccaatcccgatctgagtctggattcagttcttttgtctaagtccttgtttctaattctggcctgggttcaagtctagctttaggccttattctaggtgggggtgttggagggtctgggtctaggttcgcgtcctagtccaagttcgcgtcccgaatgaagtccaagtttgggtctgggccatgatcttggttcagatctagctccagcatttcgatcccagtctaggtcttggtccgagtctaggttcgtatccggatccctatcttggtccaagtctctatttgagatcgagtcccagatttttgtccaggtccgggtctcagttccggtgtgggtgccaacgatgtttgggcccgagttccagtctcagtttgggtctgaggctaggtctaggtttaccttgtcgtggtccttgtcatgttctagggtcctggttcgacgattcttgttaaggttataattttgggtccaatgtctaggtctatgttcaggtttggttcttcttctgggttctggtcctagtctgagtcctagatctagacaccgactactgtcacgggtcgggtactacgtgccggtcctaattctgtttcccaggtccttatcctgattctaggtccaggtcccgattattgtgtgggtttgggtcccagtctaggtcctggttcgagtcctagtctcggttagggtttaggtctctgtctgggttttgatctgggttcgagtttgggtttaggtcctggttctagtcc

SEQ ID NO: 368549 - DNA, 706 bp, Cannabis indica
ccaccgagtacggagtagttgaggtcatcccacttgaaatatacaagctagcacgttacggtgccaacacaaagttaatactaaagacttttcattaaaacagaaagcacctacaaatgtactaccaatataagttactttccaacaatgccttaggctggttggtgtacccgcaaagtataattccatagttgttcatcatacctaccaacaaagtttgataatgtaaaggcacgagtttcccactttggatgtaataaggcatgtttgcccattttattcataaaaaaaatgcaagttatttttgatataacaacgcagcttgtatgattattattgaatcaaattgcaagcctaactaaagtcaaaagtgtatgaaattatggtggcaaacccgtgacaataacagttcctatgtgaaagccctaattacttaacaagtgatcaagaggtgaacctacttagtcacttgggggccaactacgctcatacatggactagtaagcataaaacacactcacttaaatagattttacacttttgaaaatttattatcaaattctaaagtgtttgtgcattgctcaatgtcttgagcaacctatatgtggtacatgattaactataaaaaatgcttgcgcatagtgtggtacatgccagacaagttaacacatagcaacatatagtaatagagccacatagctccaaa

SEQ ID NO: 368550 - DNA, 663 bp, Cannabis indica
aaccaccttgacaaataccttgggctgcctcagtgttttggtagttccaagagttcttctttcaactcccttaaagatcgcatctggtcatatttgtctaaatggcatggcaaatttttatctaagggagggaaggaagttcttcttaaggcggtggtccaaactattcctagctatgccatgtcggtgttcaaacttcatgattctttttgcaatttcgtggagaaagaaatggcaaacttttagtggggagtggctgatggtaaacacaaacttcactggaagaattggaagtctttgtgtaattccaaaagtattgggggcttaggctttcgatctctcaagccttttaatcaagcgatgcttgccaagcaggcttggagaattcaaacaaaccagtcacctcttctcacccagctctttcaggccaagtatttccccagaacatctttcttagactcatccctgggacattctccctcttatgtctggcgcagcattcattggggtaaatctcttctcaaattgggccttcgcaaaagaaccgggaatggggccaacaccaatatctttgatccttggattcctaaccatcgattcattccttctcaaatcccatcttccctgactcatgtatccgccctccttctccccaatggggat

SEQ ID NO: 368551 - DNA, 561 bp, Cannabis indica
ttgtgttctttattatttattcgcttatactttaatcatatttcttattgcttattattggactcattgccgttggctaaaagtgaggtcacattttggtgttttcattaagagcaataatccaaacttgctctttacttcaagtttgatcagaaacattatggtggtaaaaaactcgcagaggcgtggttgatcaggtggatccactagcggcagatcccacactgccgactccagggaatacgagggtcccaccagccactaatcatgaacaaccaaacacgaaaccacctaccgtgggtcaaggtgtgacatcttcttttgttggaatcacacccggtgtgcatgagactggaaacaccagttcagcaaccgatatgggtactcccagcactggaatcccttcagcaacaaatgtccaaacaaccattggagatgacataaagatccagaacctccgtaactgctcttaggctcatgcaaggtcttactaatactttgcatcttgatcaggaagagctcgtgcggcagtgaaccttgcgttcaaagagtaaaaaggac

SEQ ID NO: 368552 - DNA, 671 bp, Cannabis indica
tttttttatttaattttttattgtctcatacaacagtgattgcaggatgcatgtgatagagcacatcgagcataaaatgctggaacttccgtttgataatgtgaacgatgacaatatgaagaaatttacagaacaatggtgtgtagatttgttttaccaaaatttagcatgaaaaaatatattttttttattggtatttattaagataacaatgtaactagtttttttattggtatgtttatgttcttttattagttcataataattttaggccttccagctatgccgcaaattataataatgatcaaaaaataaaataccatgaattctaatgtttaaaaaaatccagcatgaattcaataacaatgcataatagtacaacacatcacagtacgactaaattaaaaatttatttttaacctcggtaggtgcaagtgcttctgttgtgcccattggcaccacacttgccacaatttcatggtatgataatccttttaccattacaagcagtttgatttgacttaattcttccaaccttttgcttcttgggtcgccctactggttatttctcaacaggcactccaactgtgatgttctttatgtcatcaggcaattcccaatcattctcgtcaccaactagcataaatgtaccttcatatgtgctcctccaa

SEQ ID NO: 368553 - DNA, 616 bp, Cannabis indica
agatctttgctgtttatttttgtatagttgtatctgtttggtagtttgtttgttgtttgtttatagttttattgtagttttcctactgtattattcacgattaataatttattgtgttgttatgtttgatgtgtttttcgattttctttaggtttagttgtttgctgttattttttaggtttcaaaacgatttcagatctttgctgtttatttttgtgtagttgtatctgattggtagtttgtttgtagtttgtttatagttttattgcagttttcatactgtattattcacgattaataatttattgtggccattttggttattttgcaggtttgggactacaaatttagtccttctgatttctatagatctaagtgtgtatgcactagtgttttttctgtgatagataatattaagaacactttatctgttaatttgctttctatgtttcgtgaaactcagtttggccattttctagatatgcctgagtttgtttttcatccgcaagttgtccatagtttattactgagggaagttttccagcccaatcctaaagagttttgggctaaggttgctggccgttgcatacggtttagtgctgaggaattttatttg

SEQ ID NO: 368554 - DNA, 691 bp, Cannabis indica
ttttgataatatatattcaccataataattgagccaattgccaagcttgttcattatgtataaattcatattattgataatgtgacttgataataatgcatgcattttactgttgtttttttaattcattgcaggttgaattgtttcttcaacaacacacaaaatcgaatgaagacgattaattaatctttggagctagctttagaaacttcgagtatttagaaagaataaagtttttgaaaaaacagatattatgcacattttatataccctcttttctttaggaaagttatattacacttgttataaattcaaatttattataaaagctcttatcaaatattgtagcacactaacataatatattttgatcgtataaaaataaatttgaatatttaacataatcggattgtgttattactaaattaaatttatataaaattaaattttttattatgatataaaaatagattgtaaaatttgatgtaataaaattaaaacaatatttattttaaaaaataattacaatattttgaaataatattataattttaaaaataaataaatatatgacaacacttttataattagtgtggttatatatttttattaagttacaacatatagtaacacttttataattgttgccttatacttatatttttagcaacactctaggagacaacacttt

SEQ ID NO: 368555 - DNA, 746 bp, Cannabis indica
tcttttgtcgtccttcgtctctttttttttctttctctttatttttgcatttttatattttagttttttcttttttgtagaaaaacattttattattttagttttttttttttgttaaacattttatattttagtttgtatttatgtgtttttttttaattccaatcaaaattaatattaccgacatcattttaaaaagagttttaaagcatctttaatgaaaaattaaggaatatttacttaggtggataaataaagtatcaaaatattgagacgttatatcattggaggaaaaataatgatattttaggaatacgtgtgaatgctatacagaaacattgatgctatcactatttttttaataaaaataaaaaataaaaagttattgttgctaaaaaattaaataataacgtgtgagatcataattatagtatttttgaagagtgctatactgttggagtgattttagaagtaagagaccaaaaataatgtaaaagagagataaaataaaatattatatttttggataatgtggaattttttagcatccttactattggaaatgctcttacaatatatatataggaatacgattttgtctcgttaatgcatttaaggatatatattatgttagggaaatttcactatttgaccctaataaaataccccatatcaaaatttataccctccattaatttgtacaaaacaattccactattactcatttctacccaaaatacccctca

SEQ ID NO: 368556 - DNA, 858 bp, Cannabis indica
tctctctctctctctctctctctctctctctctctctctctataatcagtaataaactatgatgttttctctctctactgcattttttgcttttagctttttcttcccaaaatcaaaaagcctttgtctttataaaaccatttgttcatgtcctcctcaagtttttatccaattttttagtctccactaccataggccttcattgagagataatactctatggtcaagtccacacattctcagtggagagcaacctttactaacccttgctcaaagtcaaagcattaagattgacaatcaacggtgatattgataaatttgaccaaattttttcggccgtttttttgggaattgcggtaattcagcgaacattctgataatatacttgtgtcaaatctagacaagatccctttaattatttttaaggctttaaatgctaatcatattaatacaatgttttttctctttaaacttcaattctttatttttggaaggtacgtgatttttggacacaataataatagggtcatatttggaatgaaaattttgtccttgtgtaattaatacatattaggagtatttttgtccatttgggataggtacggactacgggcttatttacccaaaaagtaggcctgttcatcgaattcggcaattcggaccgaccgcgacaatccaaaccgttgtagaccggttagaaattatttttggtggttcggttaattcggacagtttactgcatagtagttcagttgcggtttgtaataaatagttaatggttaaataggatcagaccgtttataataataattaatttatatattttttatatatgactatatatataatgtatgtata

SEQ ID NO: 368557 - DNA, 652 bp, Cannabis indica
ttttcggtttgagagagaggaagagagccgatgggggtccgatgcggggtccgatgggcccgatggggatccgatacatatgcgggttaggaaaaaaatggggctgagttatgagaggggtatttttgggttttagataaaagtgtcatatattttttagtttgaaatgtattggtttaagaataaaatattaaggttttttaagtatagaaaattaaatttcccttcctcaattcactttcctcgtatctcttagtgctctaccttagctaattacattttcagttagtctaaacaactcatcattacaatgctacagtcggtgcttacaaatctattacaattagcttcttaacaaccattgtttatcctcttcagtaagcttggttggcaaccccaaaattctgagtttacattcttgttgtacccgttgtatgatgacctttgtatgccacagtttttgatgccaaaggacatcatttctggctttctagatgtgatacaccagcccagcaagaattgttctcaaaatgctcctcctagcagtcggtactgctttgttcttgctgatatactttgctaactgctgcatattagttgatgtcgatctccattgcagccaagaattaatcccctttaaacaacttcggct

SEQ ID NO: 368558 - DNA, 614 bp, Cannabis indica
aattacacttgttttctttaattttaggtgttgacacttgaaatgtataaattggtcaagttttggaaaatggtgacctataaaatagaaagaatttcgcaagaaaataaagctaaaactttaagcttgaatttgactatttctgatcaaacttttgaaaaagtcaaaacataaaagttatagatctctctttcaaatttccaaagcatcttgaattgtccaatttcaagcaatattgaaagagttacggccaaaacattattagtaagcttgctgccaaaaatttggagtctaatgcctcaacactagaagctagtgttgaggcccgaccccttgaattcgaaaagtggatattttcttatctttcttatcctttttctgatataaaaaggagtggacttttatatttttttactaagcaattagggagtacgaaaatcagagaaaataagtgacctagaaggcttttcaacaatttcttctcttttattttcttcttatcctcttatttaatgtgtgtcgattgtttacaatgaacatgagtagctaaacagttattagggtgttgatggagattgtttgacatctttttatggttttaatatgatttgatt

SEQ ID NO: 368559 - DNA, 599 bp, Cannabis indica
agttgcacgtagagttatgcgcgctggtacttatattgaaatgttatatgtgagtaattaaaaatcaagattagggttattaccctaacataagcagtttaacgatctagggttattaccctagggatatatgatgtgtaaatgccatgccatgttaacaatatgagtatattgagattgagggttatgcgttcaaggcataaatgggttggactcggtaaccagaatcgagatgaactgtgctaaggccttattgtatataaacgtgtgagcgtaacacgtaggtctatgtcacatagacataaataggcatgtgagcgtaacatgcaggtctatgtcatacaagcaaatgagaatgtcattaatgtttatatgggtatgataattatgtgtatcaatattttaaactgtctggctgggcttggctcacgggtgctctactgtgcaggaaagggtaaatttgtctctaatcagccatgagttctggagctgggcgatgtttgtacatgttcgggccacactagaccaagcatgttggggtctaccagcgatgaattgttgttactctattttgatgcttaggccggctagtggaaaaa

SEQ ID NO: 368560 - DNA, 1001 bp, Cannabis indica
gtctaggtctaggttctggtccgagtcatgagttccaatctgggtctgggttttgaggcccacgtctaggttccccatccaagtctaaggccttggtcccggtctgggtccatgtttgggtttgggtcctagtcctagtttcgatttcgattcagtgtctaggttcgggtttgggtccgggtctaggtcggggtctgagtcctggtccgagtttgggtccgagtctaggttcaggtccgaatcccagtctgggtatgtgttcgagtctaggtccgatttcgtgtcccgagtgcgggtccgagtcagggtctgggttagggtctcggtccgaatctaggtcctaagttttgatcccggtgtgggtctaggtctgggttcgagtctaggttcgtattcggatccctatttaggtttgagtctaggtttgggatagggtcccaggtctaggtctgggtccgggtctgggttttgggtccggctctcagtcctggtctgggtaaacgaccgtgtctgagcccgagttctggtctcaatttgggtttggtcgctaggtccgagtttggtactaggtctaggtttgggtttgggtcctggtcattgtcctagtcttgttcgagggtccttgtcaagcggtttttgttcaggttcctatttcgggtcccgggtctgggtcagggtctgatttgggtcttggtccaggttcgggtccttgtctgagtcccaaatctggatccttttcacgtgtcccgatcaggttctggtttagatttcgggtcccaagttcaagtttgggttcaagaccgagattgtggtgcagttctaggtcccggtcccagttttgtgtcttgagtcgggttccctgtttaggtctgagtttggtccatgttcgggtcccgagttcaggtctaggttgggagtacaggtcctggtctagttacggttccgtatctaggtcaaggtctagttatggttcgaggtccaggtccaagtcttgtttctta

SEQ ID NO: 368561 - DNA, 534 bp, Cannabis indica
aaaagtatatatgagatcacatgggttttttgcactattttttgatagttttgataccttttacgacttttgtgccttttttggcttttgtgccattttatggcttgtccctatttgtttagggtaattttgtggtttggtcaattggcaagagaagtgattctgctcatgatttctatttcaacgacttgttcttttttgacagataagtatttcaagtttaagtccttatattaaatatggatttgtttactattgttatttcacattatcttttcattatattgtgtggtaatagaattttattttgttattttgtaggttattttgtggagggcacctacaattacagagaattactgataatcctaattttaaacttaatttgtttgatataatttttcaacatttttatattagggtgctagtttgttgttactagccaaagggtaatacctttggctagttattcttagaaattttgttgattttttagttttttagtattgctgagagttagagttatgaagtgtg

SEQ ID NO: 368562 - DNA, 849 bp, Cannabis indica
attttcagaggaggatgagaagaacgtgagatatcctcacgtcgatccaattggtgatcactattcaactcgaccaataaaaggataaagagggtgttaatagataatgggagctctataaacatccttaataaggaaacgctaaggaagatggggctcaaaaaagccaaattgaagccttgcatggtagatctttgtggctgcactggcgacagtattgctagtgaaggaataatcgagcttgcattaaccttgggtgaggcccccctatctgccacagttatgcaagaatttctagttgtcgacctgccatcggcttacattatattgttgggtcgcccagcattgatcggactaagggcagttagttcgatcaagcacctatccctgaagttacaaacaccagaaggtgtaggagtggtgcgaggcaatcggatgttagcttgcgattgctatcgcatagaattgcagcatagaaaagtcggtcaccagctaatggtggttttggcagatgaaagcgaaaagaaggacgaggatcttgaccgtcaggttaaggatgaaagaaacttattaaaaccaattgaagaattggaagaaattattctcggcccaagaaatcccacaaactattttcacattgggaagaacctggacgagcagctaataagtttcttaagggcgaaccaagatcagtttgcctggagccatggagatatgataaggatcgaccctaacattatctaccatcattgaaatgtcgatccaaattacccaggtaagaggcagaaaaggagaaccttggattcttagagaaaaggagcactaaaataggaagtggacaagttatta

SEQ ID NO: 368563 - DNA, 732 bp, Cannabis indica
attccaaaaccatacttattgtcgctatcaaagagtgatgcatctacattaatgttgatagtgttttctgcgggtttagtccatgactcagcgccatcaccgatgttttctagacagattgatgacaatgaaattttatcctgaggtttattctagtgatcaagagctacttgtgccgaagtaagcacgtcattaatagaggattgtttctttttgaaaattagattaaagttgaaaattaatttaattaaatttagatcaacataaattaagtaattttcaataatgatttaatttaatataatagactaaaatatattatattttaatttgaaaatcagtaattagtttatgaattatctagatagatttattctagttagactttttggtatttttctagatatatttaattaaattagaaaattaatatttaagttgattttattcaagacacttaaatatttgatatttttcttaagatattgaattaaatagaaaattatatttatgtcgaaaattaatttatttaatgttagaccaacataaattagaacaatttttccagttttatgttattttattttaatgaactttgaaaaatgtatttttataatacattggatttcgaattcagttagaccaacttaaattatgtaatttttataatatttattagaaattaatactaatgatggattttttttttatttttcagatcttcctagggta

SEQ ID NO: 368564 - DNA, 690 bp, Cannabis indica
gaatccatctcctcatccatggcttgaagccatttagacttgtttccacctaaaatttcctcttcatagcttctgggctcttcaatttccatctgttgaactgccgctagtgcatatgctattaagtttgctttcacaaaccttgttggaggatgaatctctcttcgagttctattacgagccaacggataaccttccaaacctgtttgtctgaacccttccgacacctctgtttggtattcgttatcttctggctccacaacagcttccgtctgcgcattgtcttctggctccacactaacttctgtttgtaaactttcttccaagagtttcattccatactccatttccacacttgcagtgtctttgtttcttatttttcctgtaacacatggagacacactacctttcccggatgtcaagtgaggatatgccaactcattaaaaatatcatttttggcaatcacaatattgggtctatccttcttagaaatataaattctataccccttaattcctaaggcataacctagaaaagttcccttcatggatctaggttctagcttatcaatagattggtgaacatatgttgtgcacccaaatgttcttaagtacattaggtttggggttctgttgtaccacatttcataaggtgtttttaggtctatcactctattcaggcttttattt

SEQ ID NO: 368565 - DNA, 623 bp, Cannabis indica
ttttttttttgaaaataacttttgcatcttattacatggttttaattcaaccaaaaattaaagaaaatggttcctcccaaatataaataaataatccaacatattttcttaaacagaataataaaccaatacagatctacaacaataagaatgatgggcttgaaatctttgttgatatttagttttattgatttaaatgtttgttgtagatgtcatcgggaaagcacaatgtagatgaagatgacaagtcagttgctgagcgcacaaaggcctccgacaaagggaaaaaagtagttaccaatgaggtaaatttaacatgtatacgtaaatgtgtgctgtcacataattattattattgtattgtattgctagatatacttgatctatgtgtaaaaggtataaataatttgatcttttacattattgcaggaacaaagtataaacaactcacttgaacgtgcactgcaacgtctactaaaaaaaaaaagcatcaataattgcagggaagatcactgcaaaagaaaagattaaggagcaaatagtagagagtgacaatgacgatgatcgttgtagggtccgaatgtagatgcagtccagaacgattaagagaaaatgtgatcggt

SEQ ID NO: 368566 - DNA, 970 bp, Cannabis indica
cataatgtaaataaaaattaaaataaaaaataattattagagttattaacataagttattaagttattaagtattaacataatgtattttatttgtttaatatataacataagttattaagttattagagttatgaaattattgctcgtaaatttactatagacactgatcgtacttgataagttaaatcatttcactattgtattttttataatttctatatattgatactttattttgtttaactgtaaatgaaaataaagtataaatttataataataatatttatttattatttattatttttcatctcactaatgtatagtttatttatgtgcaattaaaacactatttttccttcaagctcttagaaaaaggatagcaacttttaaagcaaattgtgtaacgctgatgacattggattgtaatctgttaccaagatcttacaatcataatttatttttctaccagttttccctactctaataattttaagatcattgttagtagtttttacaagtttgtcattcagattttcaggagtgtccctaatttgtgttgctcacaaattagttgcgcatgctcttcggatggatgaagaacttgtttagctagatatgaagattcatgtttttgttggatgtttagtagtattttgataatcatgacatgtatagtatgtatttgatgaacatatcataactagcctgtatgatattattatatttttaatgaatttatttatttcctttcaaaaaaatatactaatttttataagtgagttgcccaatataccttcattctctatttaagtctagcatataatttatattaatctaaggggtctaatgggaatatcatttataaaagtgggtatatcttaaagaatataaagatgaaagtaaaaattaaaacaagtaaagtaaaataggtatataatgtaattttatcgaaaaaaatgatgtaaatt

SEQ ID NO: 368567 - DNA, 1059 bp, Cannabis indica
aactccaatgcaaccatgaaacaacacaaatacaactgaaatactaactgaaagaaggatgccaaccactacaaataaaggatgacaaaaatttgttgttctacataaagctattaagcaaagagactgatttcacacgatacccattgtgtgtgaacaaaatcagcaacatagcaacacctaaccaaacaatggtgtgcaacaatatgatactggcagcatatgacaacaactcagcacaggcagatttgtagaaacctggaaacaacccaacaacaacttccaaacaacaactaactggacacacaattggatcagttcaagatgatacatttttctagagacagggactgtgacgtcagagtcaaccatccaacaacctgaaaacaacaatgaaacaactctagcagtagatgaatattttgacttcactgactacgcaaagcttgtggctgcagaaatggtacagcagcttgaaaacaaccagaaagaagaagaagaagtcgacaacacagaaatgattatcataactgacaaacgacattaaacaatagaaaatggacaaatttacaaggacaaagatacattgataagtaccctatgctactttgcaatcaagaaaatatttcaatacaaagtagtgaaatcttgcacaaaagaatacaacatagtatatttggacacaaactacaaatggagtttaaaggcttcaaaaaatgaaaacacagaaacattcataataaggagctatcaagaagaatacacatgtgtggttccaataagatttggagatcaacgacaagcaacaacaaagttgatagcagatttcgtaaaaccaaacttcttgaacctgaaaacaaagtgcagtccagcaatataaagggagaaatgaaagataaatacaaaataaagatgaattacatgaaagcatggcgtagtaaagagcgagcacaaagccagctacatggaaatgctaaagaatcgtacaatctcttgccaagatacctgtacatgctacagaaaacaaatccaggtaaaggaaaatatttttttttcaaa

SEQ ID NO: 368568 - DNA, 1515 bp, Cannabis indica
ttttttccttttatttcattccatttcattacctccaatcaaacaccacctaagaggttttcttttgattcagttttgtcaaacaagagagagtctatagtcttcttcttaaatcaaaatccttaatgttctctttataaggattcattaggtttagggttagagctaaatgggctgattagaaagatccaatggcttagaatcctcctcatggcgaaccccttaatgaagcccatgagttagaatttttccattattttgtttccttaatgaaacaaatttgtatttcttcagtaatgccattttctgctctagctatttaaatactaattgtatctatttaataattataaataattatcaaataaaattactatttaaatatatttattaattagaccctccacggtctcttaattaataaataaatcttaaattctcttttcttctcaattaagccattccttggtgaaaattcacaaacaagacatagtcttatttagaattctaattgattaattaaaatcaattaattaagattacaaaaaaatattatcccaattgaatgtggggaccatggccttatgtaatcaagcttccaataagtagatccaaaatttatcaagtaaatttcttaacttattaattcctctcgactccactatagatttagaatttgaactcttaatttatatagaacactttattaccaaaaataagatgcaatttcaattacccattgtttctaatccaataagtcaattaagatcctctatagatgatctacatcgagtagggacaaatttattgttctaccttccaatgtattttattcttaaaatacttaactaagtgtaaatgtattttactgaaatgaggtctcaatcatttatcgcgttaagccaagctcaaaggaaatcgtcgtttcacttctaaaatttataaaagctatagattctatatttatgattaacgctcccattcaattgtactaccatgttcttaagatgtaagtattgtgctgatccaattggttagctttagcaaaaaaactcaaagaacacaaataacacatttaagcaataacctaaccatttcaaaattaagatctattgacctaagatcaactaagtgatattgacttagatagatataacagtaagtttatgatatcttatcaaatgtaaatataggtccagttcgatgtatactccatacatccgatcctagcatactttaccaataccctagaaaggacataacacttatccaaggtgtaagtaaattttatcgttgattgtcatgtcagtgtaaatctagtgtactgacaaatcatgggacataaactttgaaacatataatcatgattatattccactgtgttgacaacactataatcattaataactatatgttcttaatttaatagaatttatacattaaacatataatcatggaagcttcacatgaaacataaaatgatctttgatcttttattaattagtaaatttaatt

SEQ ID NO: 368569 - DNA, 624 bp, Cannabis indica
ccataaaaaaataaaaggaaaaacatattaatttctgaataaattgaagtaaatgtaaaatacttaatttacttaaagtcaataagtataaccctcacataatttgtataaaattattacttaaaagacattatttaacatttacaaaattataaaagaaaacacaatctcatcaaaacattaataaaacagataaatagtacaaaaattataaaaaaatgaaacctcatttgatttatgttttcttttatataaatatatagaagataaaaatatgagaaattaaaatatgagattttaaaaaaaaaaaaaaaatcacaaaatagataaattataaagtacgaattagaacatgtcacacatggccggccagagggtggggcagccggggccgaggccccaggccccacaattttggaggccccgaaaaattaaaattaatattatatatatataaaaataaaaatataatatatgtatatatataaattttggttcaacaattttcataaaaaaacttacagcacaattggtaagagagttatttattgttggttggttgatgatctttcttaaaaaaaataaataaataaatcatatatttttaaaaaataactaacaaga

SEQ ID NO: 368570 - DNA, 592 bp, Cannabis indica
tctgcgcttactttaagtttttcaaaaattatgctaaacgggtcttaattacttttagttgcatactatttagtaaattttcctaggaccataggtgcctttggaagaaaatgaataaacctaacatatggtcctgtggagttgccataaatgtattaagttgaaaagttacttcaaatagattagagattagtttgtaattttcgtaattaataaaatcctcccatcccaacaaaggcagagaaagttggaacctttgatcgtggacattgtacaatggccattttttgtaaggggtgtgcaaaaagtcatccaatctaattccaaccgatcgattcaattccaatcgatctaatagaatcggatatccaatcataattggatcggatcggatacaaattttaaaaattcaattggatcgaatcggatgttggatgagacatccaatccaatggataaccgaaccgatccaatccaatatcatccaatgtccatccaatcatatttaatatttataattttatatatttaattattttatttaatattttatatattattttattatttatgttagattattaggttttaa

SEQ ID NO: 368571 - DNA, 508 bp, Cannabis indica
tattatatttttaatttttttatatataatattaattttaatttttcggggccttcaaaattatggggcctggggcctaggcccctgatgccccaccctctggccgccatggagccgaaccaagagagagagaaagagaggttgaatttcctaatttcctttgattttctctattttttctaagtagataaaacttaattttaatttattatatgctgaaataaaattggctagtgtcaagccctaagataaccacctaatcctcccccttactaaatgaccaaaatgtcatttgtgcttaaacctaagctaattcaagcctagggataaaattgtcaaaaaccataaccccgctcaaacccaatattttatttatctccaatattaatcccactaagacaaggttctagtcatacccacgtgactcaaatggccatccatcgcattttttatcgtccccgagcaaaaattataaaaatagcataattcatatataacataaataata

SEQ ID NO: 368572 - DNA, 1010 bp, Cannabis indica
aatttatttaagggccctttttttaatatatatttaagatgcaaaaaaaaatattaaatgaaaaaaaatagtaaattgatttttaaaaaaaaaatatacagttttttaaattttgaaatacaataaatttaagggggattttttagttttatacggatattgtaaaataattatacaaatagtatcagccaaaaataatacacatttacgaaggcatttataccgaaccataaaaataaagcccaccaaatcatgataactgaccctccctttttagtttcaagtggttttttttttgctgaaatcgttttttttttttttgtctccttttttgtctttttatttattatatatatattatctttcctattcatcttttcaaaaaaaaaataaaatactagtcacactacataaaaaaatactaattattttattttagtttaaaaaatactatcgcaacttactttttgtttgatgcaatcattttgatatgtaaaaaacataaatatttactatcataaaaacaaaaatgatttaaataaaaagtataattttttttttatttatatctatatattttaccattgacattatgcatcagtagtaccaatactaccgtaaggtaacttttttgttaatgattagtgatattttacaaaaattattatattaaaatctttaattgcaacatataacagacacctcgtacgtagtggttagacatcactactatttcttttaaccaaagattaaataaactgttaatataagtaaaattaaccaattaatttcacaaattattatgttttattattattattttcatataataaaagttaccatgcattgttatttaagatagcttcacattcttttagtaacttttgttaccttaaatatgtatgataaaattacagagttatgataaagtatacttaatatcaaaattagtagagtcaattttttaatattaacaattctaatattgattaagatactatttggtttct

SEQ ID NO: 368573 - DNA, 1032 bp, Cannabis indica
cccgatcccagccgcctcacacaatccgactttgcccgaaccccagccacctcacacaaccaccgcgtcgtcgcccaatcgactccgaccgagacccgacgatcttcagcgcgtacgacaggaaaaaaaaatccccctcaggtctgatgggttcgattggcccaatatggtagccatcggaccctatcggtctaatcggacctcaacgaatcagaccatcggacccaacccaacgtggccatcggacccaacccatcagaccatcggacccatgcatcgggaccatcggacccaacccgtcggacccatcggacccccttcttccccaatggtttctcagatccaaatccatgaattataaaagagaaatttaaaaaattaccttagacatggtgcggttctcctgggtgggtctcctcctccatgcggcggtgatgacggtcggatagtgggtgggtctcggtcggagtcgattgggtgacggtgcggtggttgtgtgaggtggctggggttcgggcgaagtcggattgtgtgaggcagctgggatcgggcatgaggaaagagggaccgagagagagtttgagtggaagagagagaagggattgggatttttgacaaggctattttggggtttttttgaaaatttgtcctattttaaaaattacctacactaagtgttctccaaaccaattttgtattaaaaaatgcataataattcaaatttccctatcaaaattagaaaataaaagtacaaataagaaataatactagctaattaaatttaaatggtaaaatatacaaaatgatttattggtaaatacgtactattaaaaaaatttacaatacatccactactaaaggattcatcgatatacttcttatttattttaatattaaaaaaaaattaatctaatttttttcataattatctatattgtacttatttaggacaccctataaaagatttaatacgttaaaaacaggattcaaacattcaatttcacgtgcgtataaaataaaaggtaattactt

SEQ ID NO: 368574 - DNA, 591 bp, Cannabis indica
cctttaagaacataaataatacaactaagttgaaacctaaccatatcaggattaagatccatagacttaagatcaacattgatattgacttagaaagatataatggtaagtttataatatcttatccaagatcaatatcggtcccttccaatgtatactccatacatccgatacaggtaaacttttgttgcgattttatgccctaaataaaacccatttcaattctaatctgagttgttatcaatagaagattacaagtcatttatgtatacatgtagttttcatgtttatagtttaatttgtccaaaatctattaagtccagaacatataattattcacaattatactgatctcaacaccatggaaggtaattgtgattatatgcttcaaaagataatgtcccttgattcatcagtgtactggatttacactgatgtgataatcagcgataaagtatacttacaccttggataagtgttatgttctttccaaaacattggcaaagtatgctagtttcggatgtatggagtatacattggactcagactgatattgatcttggtaaagatattataatcttaccgttgtat

SEQ ID NO: 368575 - DNA, 588 bp, Cannabis indica
tgttgttcgcaacaaggctccactagttgctcagggctacactcaggttgaaggaattgattttgaagaaacttttgcaccagtggccagattggaatccattcgcatacttctcacggtggcttgctacttaaaaatcaagctacatcagatggatgttaagagcgcctttcttaatggtgttctacaagaggaggtgtatgtgaagaaaccccaaggatttgttgacccccaacatcctgaccatgtctacaagctccaaaaggcccaatatggactcaagcaggctccgagagcatggtatgacagattaacttcctttctcgtttcacacaaattcactcgaggtaatgctgacaatactctattcattaaacatttacaccctggtatttttgttgctcaaatatatgtagatgacattatttttgggtttaccagtgatgaggaagtgtcaaaatttgttaatctcatgactaatgagtttgaaatgagtctaataggggatcttagcttctttctagggttacagatcaaacaaactgatcaaggtattttcatttcacaatcaaaatatataaagaaaat

SEQ ID NO: 368576 - DNA, 532 bp, Cannabis indica
cattttccaaatttcataatcaaaagtgacagctatagagagaagtattctgatggatttgagcatggagaccagactaaaagtatcctcatagtccacaccttctctttgggtataaccctttgcaacaaatctagcttgaaaatttttgacttctccaccagcacctctttttttcttgtagacccatttacatacaattaaatgacaatcattaggtgcatctacatattcccatactttattctttttcatggaatccatttccgaattcaagcgagctgaccattgtttctgttatgaacttgtcattgcatgtttattggttaatgtatcatcatcaataccttcaccaatgaccatattgatttcaccaaccaagccataaccagctggtcttgtggagatcctcccactacaatgaagagtcgtgaccttctgaatgaattatcagtggtagatttctcgattgtgtcaacttgaattggttcaactaagggagtgggatcatcctctacttgagtagaagagg

SEQ ID NO: 368577 - DNA, 699 bp, Cannabis indica
aaggaaaaaaaaagagaagaaaaaaaaagtttgtagtattttattttttattttggctcctagaataaatgtagaagattgtctattttcgtttaaaaatcccaaaaagctggtttgtggtactctttacggtggtttgtccaaataattcataacgtatcttcgtttcaatgtttattcaaatatttgtcctaaattgatttattaatttctatttcgagtgctcacttttcaatttccaacttcatgagtgaaatccttagccataaataaatattttcaacctgtgaggctattggagttgagacttttacttagtatattatttcgaaagttttatgtgctatggttttgtggtaagaatctttatgtttggtgcacacactcgcaattctatatttattcaaagtaattttgatagcttttactggcttgttactaacattttgcttgaatatttgtgttatttttaaaatttgtaacctagtaaatatcatgttgacattctttttgttcgcttgaattgctagagactagcaataagttcaaatttgtatattttaagtctttaattgtaggcataaaattaatttaattaattattttcatgattttaatcataaaattattttaaatggaaatatttaatttataaagattttatgtgctattttttagatttggtgtacaaattgatga

SEQ ID NO: 368578 - DNA, 644 bp, Cannabis indica
acctcttctcttctttactaattttggatcagtcatctaaccgactttaattcgttctaacaacaaactcaatgctagatctgaccatatcctgtactaactgaggtgaaatctgaatcataccagctacctacccgggacccttcctgctcagggcatcgacctatacattggccttcccagggtggtaaaaaatctcacaggcgtaatccttaactaactccaaccaacgtctctgtctcatattcaaatctttctggttaaagaaatatttgagactttatggtcggtataatttcacatctttctccatagagataatgccgccaaaattttaaagcaaacaccaccgcggccaattctaggtcatgagtcagatattcctgttcataatctttcaactgatgggaggcataagcgataacccgatcggcttgcatcagcacgcattccagaacctgtctggatgcatcacaataaaccacgaacttctctttgtcaaaaggcagagctaacactggagctgtaattaatctttgcttcagctcctgaaaactagcttcacacttatctgaccatacaaaacgctgattctttttagtaagctcggttaagggtgttgaaattttagagaacccttccac

SEQ ID NO: 368579 - DNA, 582 bp, Cannabis indica
gttaattaaattagtttaacttaataaaattgattagcaacataattaatttcgaaatatatgaaattattttttcctttgaatattttgaaattaatttaagaaaaatacacttagtttaatgaaacttattcaagataaactatatgtatttttcttgtatttaattaaatatagaattataactaatttgattcttctgatgcttaattatttcaataaatatttttatgtaagttgtaaattagttattaataactaatttttgaatcaacttgaatatttttgaatttcataattaagttaaggaattctaggaattagttattaaaagattcttggaatattgttttaagttgaaagtttgttaatttttgatcaacttaaaatggaatatttttcaaattaagtggttagtaaattaatttgttatttaattaaatttgtttgaaaaaaatgtaagttggaaatttagttattttagaataacttgaattagatatttttcaaattttattttaatatattttaatttatttctttatttttcgaactttatatttatataattttcgaaaatta

SEQ ID NO: 368580 - DNA, 499 bp, Cannabis indica
attgtaaatcacattactgatggaatattttgaattccagttgtgaataaaataattatttctttcaaacaagtaattatgaagtgtaaaccctttaaaattacttgaggggcatatatgtatgatctggaaatacatagtacaatgcaaacccatcgtctcaaaaaataaattttttgaaaactttttaaaagggcctcgaccaaacctttctgacagaagaggggtcaaactgttataattccctgacaaaaccttttcgacggaagaggagtcaaatcgttataacgccttgatcaaacctttctgacgagagagggatcaaacaactgtaatttttgatttataacctgtctgacgagaaaggaaaatcaaaagttatgactagcacataaagttgaatactaacggcacacaataatggaaagtattaaacgagacacccaaatgtcttggaaaaatacttaaacccaacacgtgggtagaaattttaactact

SEQ ID NO: 368581 - DNA, 1099 bp, Cannabis indica
ttagggtgttaatcaacatacctgtgagtagatctaagatcctggtaaaataatttccaacactttgttcgtcaaacgcgagatttattgcagcacgcagttcatcctgatcatgatgcagagtgttgttatgaccctgcaagagtctgagcgcgtcacgaagattttacaatttggttgcatctccgatggtcgtctgggtgttggttccaggtggaacagtcgtattatggatgctctggtttggtgcggaactgttattcccagtctcttgcacactaggcgcaattctagtaacaggagttgtttcaccattcaccacgcttcctgtctgtccaggattaatagcaggcggaacccttgaactccctgggtcctgtaatgccggatccaacgtctatgaacttgctgggtcagacaggcctctacgagtttgtaccatcgtattggcggttgagtgtcgaataaagagcggtttgtgatcctactctcaatgaaaacaccaaaatgttgacttcgcttttagccaacgacaatgagtctattttataagcgataaacgatatatagtaacagatatatagtaaaacaataataagacacagtaattttataaaggttcagcctcgagcagttcggtaatagcctaatcctcgttatttgtattgacttaagaacaaggaagaagattcattttcttatagctcttacatcagtatctctgaatatataattcttagataatagtatagtcttagcttagttgcgtttcgacctatcccttttgcccagtgtatatgcataactatttatagggctgggaaacttgaggaggaagggtttcctctctcgttacaattcgtataaacagaaagatcgtgagatcaatgttgaatgcaaggatcgtgggattgaggctgagtacactaatattgggatcgtgtgtatgccatatccacgcaaattgatccctgagttatagggattgagctgatgactcatgatgcaaaagctgaattagctaagtgttgattgctctgcacggatcgctgaatatcttgctctggacatgccagcgagcagatgttccgagtgggct

SEQ ID NO: 368582 - DNA, 379 bp, Cannabis indica
agtccaccatacttagtcgacaccaagaccaaaaacaccattgatacacatcccttttttgtactttattggtttgtctttccccaaaaccttacaagcaccaactttgatcagatttaggaatattgagtctcccatgagtcctatgttcataagtctcgattaagatttctcctagaaatcttttgctatatttttatccacacactcttgagaacataactctggtgtgtcagatctgatcaataaaaataaaagtagatgtagccctattactatcatgacatggtgggtgaactactataaattcctagtgcccatattatttattgcagtttaatttagtcaaattaattcattacatgttggaaattatttt

SEQ ID NO: 368583 - DNA, 711 bp, Cannabis indica
attcgagaaaaataatgtcatgacatggcattgagttagttgacacactatatagaactatcgacatatcatcgatatcatatcgataaatattggcttcaagaacctattgaaacctttcgaatagcattcgagaaaggtcacccctaaccttgcaacacctgctttgagaactaatcgataaccaattgagaaaaatacaaaacccaaaagagtcataacgataaagattggcttcgagaacctatcgaaaacctaccaaaaagcattcgagaaaggtcatcactgaccttggaacatctgcttcgagaagttttcgagaactaatcgataatcagtcgagaaaaatacaaaacccagactactctgaaataataaatctcgcgattttaatgaaaattatacgaacaacaccatagatctaccgaaatatgctatacttttacaattatttaacaaatgttttaaaaaaaacacttacccatgaatccacaatgagagagaggtcgaggaggggcggcgcggtggtcagaatgaggcatgaaggatttccggcatccttcacggtggttgggctggttcgagtagctggccgaacgtcttcaacggttgtaggcggcggatctagaaagaaaggaggagggctttattttttaaaaaaaaaatgaagaaaaccattaatggagatgagaaagaagagttagttgatgg

SEQ ID NO: 368584 - DNA, 584 bp, Cannabis indica
taatatagaaaaaaaaaaactaacataaaatttagtatacgtgcctcgtacgtactttttgctagtatatatataacaattgataaatatttataatacatatataatcaagacaattttaatctagcaattaaaaatataaaaattattaatataataaacaataactcaaaaaatattatttcaatatataataaattaatagttatattatttaattatatcacattagttgtcatcatcgtatctcacttataattgtgatttttgtcacccagtaaatctactccgtacataaaacaaatcaagagttaactacttatttttataaaaataactaccacattatttttatcagtttaaaaaaataagtaaagaaatagattatggatagagagatttgatgattttagaatgactttttttttaaaaaaaaaacgtaaataggtattattaaatagagtagaattaaagagagtgtagatgtatttgtagtgttttagtaataacaatgtgactgtcttcacacatctcttttacttatatttaaaaacctttaagtttacttgtctacatgtcatctt

SEQ ID NO: 368585 - DNA, 579 bp, Cannabis indica
caatagattttatcaccaatgtcttccaagtcataacggggtgagtttcttgaaaccctcctactacaataaggtaccatgatgttctgtctaagaacctatgtggtattgacctcatcggttgtgtcaagatagcagaagcagtggtaccatcttatatagaataagatgatagaacacttttagaatcaagattatctcctctactttgttactttatttttagatttagtcatattcttagagaagtagtatttgttgaaacaaacactttcttatcttaatgaccatatgatggtcctcccataatcactttagaatagctatcaaacatgcaaacttaagttaatagttctagcttttcttaagttcatgatctgaacatccatgaatctagtaatggtatacactaagtacataatcattctatcattatgaaatttttctattactagggtatttccctagaaggacttaggtagctgttagtaactaagcatagaccttatactatcatcagtatgaaaaccaaatttttagggtaggtaagtttaatttgaagttcaacttaatgatctt

SEQ ID NO: 368586 - DNA, 912 bp, Cannabis indica
aaacatttttacaaaactacttttacttttttagaatcttcaaaaaaagtaattataattacaaaaatactacattcaccatttggtttctctcatttcgtttcttcttctttgtctccgattggtgatgaagggtggtggttcggcaactcagtttgcaagtcggataagtcaagctctaaccgccgcttccaactacacaaagataactcattcatggagtccttccctcaagaacgcattgcgcactgactccgttgtcgcaactcactcgttgcccgagtcatcgacccctttcttcttcctcaccactcacttgcacttggattcttcaactggacagcccaacaaccaggtttcagtcacactttcataacttaccaatcaatccttgaatctctttcttgttcccccaattcaatgccattgatactctcctcaagcaagtgaaaacccaaaaagttactcttcattattctatttatggctctgttagatttagacccaaaatatgtaactctttattagctactttagtttttgctggttattttgagcatgctcagaaggtgttcgataaaatgtcttaaaaaagtgttccttttacgattctaggatttggtgtgtttatatggagatatgtgagaaagttgaattgggtgttgttttaagtgtgttagatgaggttaaatgatgtgagtcattgattaatgagaactgtaaacttgattgtgtttgaagtatttcaatcaataaagaatgtgtttgagatagagaaagttttttttttttaaaaaaaaaaaaattaatagtgcactgataaaatagaaactcaactcttatataatataatataatatagaacagaagagaacagagcattcatgcaagaaaatccaaaattacacttca

SEQ ID NO: 368587 - DNA, 639 bp, Cannabis indica
gtgttgataacgtgttataaaattgaataatataaaatagataagaataaaagaacaataagatgaagagagaaagagaaagagaaactaaataagaatttatcagtattttattcaatggggtgatttttatttatacaaatatgtgagtcataaattaggaaactaatgaggagaatagtgattaattacaattaatgataattaatagaaaaatttgagtaatttagaaatctatataaataatattttataacaagttatcaattattgaatataaaagaggaaataacaaaattaggaaaataaataagactaaacctcaattattttaccgttacaataatgtaaaatttttttacttttggtgcataactattgcaaaaaaaaaaaagacctatgttataccatttgaggacgaatataaaataggagatttttatttttacacttttaaacagtttatttttttttttgtatttttacggaattctacatagaaacccctattgcaactagcgctgcaacctaaattgcaacaaaaaatcatacagaaacccctattgcaactagcgctacaaccactttagaaacccaaaccgtaaatttagaaaaaaaaaaggttaaaaaaatagtata

SEQ ID NO: 368588 - DNA, 776 bp, Cannabis indica
ccttttaccggcgcatttgacgaactgcgccggtaaaaatgccttttctgtagtgcttgtacatgtcgatgacaaaaatattgtaatgctaaggctcaaaaccttattatattatgtaataccttattaattaacaaaaggaatcggaaatgaaaaagaagaagcaaaataagaagctaataaaatgccttttgtgataagagaagtttgggccatatgtgtttgagaaatcctaaatggcactcattgtgtctaatatccccatgtaatgtcattagtccaatttaatatcaaccaattataagaacccatctctaagcttaacaatgatatgtaagcattatatattatatatcttttaaatttttttttaggaaaaatctggtattataataaattcaaagagtcatttacaataacagagtgaatagtgggaggaaaaccttcacaccacatacaatcattatccaacgctaaagcttgcttagccaagccatgggcggcttgatagcatcccgacgaacatgagatacacaaacattagggaaatagaattcacaaccacgacagagtcagtttctacataactcatttgaagctgcaaattccgagcccattgaagatcatgacacagggctttagcctccatttcgtgtgacttttaagttttcagcaattgattttgaaattgtagccacaactgaactagatgaatcacgaactattgctccaatccctgttcgattttgtgttgtgtctactgcagcatccacgtt

SEQ ID NO: 368589 - DNA, 551 bp, Cannabis indica
ttctcaaatgttgatgttggtaataactttatgaataagtatgcaagattgaccattaattgaatatgttggacactcttaacccgaaaactttttctggtgacatgaacatcaatgtttgacatgtagcaagaaggatgacgtcatgaagttgagtagactcgagtcctagcagccgacctgagaggagaccctagccctgtgcccaggttgacttcgggaacttcgagatggaagttcagacttcaataacttgaatatatttcactatgttttagtattttgtaccatgaagacatggagtaacccaatctaaaccgcaggagctaaaattacatgaacttgtaattcggaagccaacttgggcccctagggtttcgctcgtcgcccaagttgacattcccaacttgggtttcaatttttgagaccgtcttagtacaaatgagtcaaaacttgcattgggacatcaactagacataccacgaacatatttgaggtattagaatcatgatcgaagtaagttcatttttgagcacccagggtcccgaggt

SEQ ID NO: 368590 - DNA, 636 bp, Cannabis indica
tagaggggctagcttctgcatcattctgagttaacgcgaacacccttactggagcgggtttcactgcaatcttctattcttccttcttaagttgggggcaatcccttttataatgtcttggcatacgacactcgaagcacccctgccctctacactctcccagatgatgctttatacaactggggcattctaggtaagtgtatcaggttttagagctaacctgacgattacctcggccctggttctctcgaaatctcttgttttgacttgaaccaccggatgcagtatgtatctttcatttttggtcagtggttgagccactacctcccctactaaagcttgaggtaggaggagtaggagccccaccaaaaatctgagtccctcgagactcctgggtgcactcaactgcgccctcagctcgcagtgtcttacccaccatatcagcataggtggtgttgtcatcagtagtgatcattaggtcatgtcttatctttgaattcaacccatctaggtatttctccttcttactaaaataagttggcatgattcccgaagccaatcttgccaagcagtcaaactgagttgtgtatttggtaacactcatattttctttctgagtcagctgagtaaattcct

SEQ ID NO: 368591 - DNA, 617 bp, Cannabis indica
ttcggggagttcttctggccagtttcctttggcatcttcgagtttcttctttagtgtatccttcaaggttttattgactgcttcaacttgaccgtttgcttgaggatgtgccactgctgagaaacttttgatgataccatggttcgcacagaaatcagtgaaagattggctgtcgaactgtttgccattgtccgagactattttgtacggtagtccgaaccggcatataatgttcttcactataaagtcttgaaccttctttgatgtgatagttgcaagtggttcggcttcagtccacttagtgaagtagtcgactgctaccactgcgtactgcactccgcctttacctttaggtaactgcccgattaggtcaattccccaaatggcaaagggccacggactttgcatctgtgttagctcgttgggcggagctctcggtatctttgaaaatctctggcatttgtcccacttcttgacataggccctcgagtcttcaatcatcgttgcccagaagtagccttgccttagaattttctttgataagctctgttcggctgcgtgatttccacagaatctgtcgtgaacttcaaatgaagtcgtgcagcttcatcttgtgt

SEQ ID NO: 368592 - DNA, 1029 bp, Cannabis indica
tggtattggatcaaatggtactgattggaaaaaaaaattgtaaaatctagcgttccagcaaatttacctaatgctgcaaatttaagatctaatgctacaaaaatatcgtctgtagaagcaaagtctccagtaagttcaaaaaggataagatctcaggtaagaaattttgttccaatttgtcatttttgtggtattaaggggcatattcgacctaaacgtttcaccatgcaaaatttgtacaaaacaaattattttggtaatttgaatatttttcaaaagaaacatagtgctttgaaacaaaaatggattgaaaaagaaaaatatctagttggtttttctgataaaagtgatgcttctcaaatgtggtattttgacagtggttgttctagacatatgacaagattttttagtgaatatcagactaatgcaatgtggtgagatcgcgtttggtaataatttgacaagaaatgtcattagtatgggaactctcaattttgaagggttaccaaggttgaaaaattttatgcttgttgagggattaaaagctaatttacttagcattagtcaaatttgtaatcaagggtatgccgtcaattttgacaatgatcatttttttgttcaagattctcgtacaaaacacattgatataaatgttcattttattaaagaacttgttgaaaaccaaacattgcagttgtaatatgttgatactgaaaagtaattggctgatattttcactaaagccctagattcaagtcagtctgactccctcaaaaaatatttgggggtttgcattatttaattcttttcatttggttcattattttgtacaaaattttgagtagttcttatctttcatctatcattctttcattcttggttgacaaaacatgtttttgcttttggatgataattagcttagtgtcttgtactcttcatacttttgaggtcgggttaaaagattcaagttacttacatatgtgtcatcaggataaactaaagtattaatgtatagagttgagcgatttt

SEQ ID NO: 368593 - DNA, 1040 bp, Cannabis indica
ttagagattactttagtgacaaggtaatagaacatgtatggttaatcccgggcaacactgtgatggaggatgacactaagctggaccgattggtaaaattttgttttgatggagtagttgctaagggtgctagaagggttgaatctaattgaaggtgggaagagtatatcattcagaatgtagatataatggctaagcaactagaagttgtctggttttatgctcagatggttgagctaacccttactgttgggggtgcaagaactagattacgaaagacataatatgaaaggagattcatgaaagtaactgtctagtgttggaacgggtaaaaagtgttaaacctaacgatacttaaaaaaaaaaaagaaaaaaaaaaaaaaaaagttaccaacccaccagttatgggtcctagtgggagaatttaaagtaaccaaagtttccgacatggtgggaacaaaagatttgtaaacccattcagagggtcgagatgcaagggacaccagtaaaatgaacgctacatgagagcctgcattcaatgtggggtagtaggccatttgaaaagaaactgcccatggttacagtagcgggaatggaagaatgattaagagtttgtgtaaatttaatggtgtgttactgagtagttctggtaccttttcgtttactggaaaactggttattttccagtatgtggtctaaacccttcccagattgtgagggcaaggaaatagtttgttgtttcagttgtgctgaatttagaaaaatctaatattatactagggttgaactaatttgcaaggtataatgcaactatcgattgaaaagaaaggtggcaactcttgaatcaaaaagtgaggacccatttgtgttcttgggtaaggttcaaaggttccaaaatccattaatcccggtgtttaaggctgaaggggttattatgggagggatgtatcaacttttcagttagtgtggccaatattataaagggaacattagtaagattgggacacaatcttgtggctcaaggttctagatgcttttag

SEQ ID NO: 368594 - DNA, 714 bp, Cannabis indica
agatcctggtaaaatatttcttacatttcccccatcagggtacgtacgagtcctcgctctatgggtttgggaagcacgctggtgattcctagtaggtgatctccgttctcccggctgagttccaagatcttcctcattttgatgagggatttgtcgttcatcagtttccggttgtctcctttctggctgttcatctggattttcagggggtgtctcattttccctgggttgttcttcccgggccttttcctgtctcctggttcatgagccacaaggtttgccttgcagtcttctcactccaggttcaggttgattttgagcgttcctcccctgcgccgccctggtcgaggctgcctctcgttctcactcagtgtttcgatgatgtgcctcttccagacggcgtcttaggtggcggctttccgtttcataagttctttctcccatagattgggcacccccacggttgagctcttcatcccctgcatcaggattctatccattcccacgccgagttctcctcaagcgtgttgtctttgtactatgacaactgtcgggttgagttctccagggacatgtggtccgagcactgagacaatcctcaggttgggcccttttgaaacgggtagtccttctggacggtggatttgttgattttctagagcccataggctcttttctagaaagacggttagtttcctcatgtgaggtgttaat

SEQ ID NO: 368595 - DNA, 620 bp, Cannabis indica
acaacttattttggacaaagaggaggggtgtcgagatgttgatggattgttacatgaagttaggctcttaactcaacatccgtctattgtcgagatgcaggaactctctgataccacaattgactcaaatcatcaactagaggggctaagtacacatcaatatcattaccaggatgtgaatggcctgatatcaataatgtaagcatagtgaacttcatcttcactaccaaccaaggcggcaagttatacatcacaagcaaaactagtcagcaactatacttactactaagggtggtatgtagattgattctgttcacgaaaaggccaaaacggatattcctaggttcattgccaaattcaggccacctatcatcaattgacttccaagtgagtgagtcaactggatgtctcatcttaccatctaactttctatcgctggcatgcaagatcaaattttttgcatgattaacatttccaaagaaccaaatgaaacgaggtattaggggtaagtaccataatacctttgcagggacaccaacctttagctcgtcaaaattctttttcttttgccacctagactcaccacaagtgggacacgatattgcatccacaaacatctt

SEQ ID NO: 368596 - DNA, 776 bp, Cannabis indica
tacaaaccgtaaagttcaggtggtttagccgccaatatcccttgttttgagaatagttcccaatggatttcgcttgatccattggtaaactgttaacatccaccgggcattcctcataggggtgagggcccccacaaagctcacaaacaacttgagcctgttttgcctgcacagctatcagttttgtcaaggcctctacctggactgtcagttgggtgatggcgtctacctcatgcataccagccacattcttcgtttggcttctttcagttggccattgttgattattcagggccatttcttctagaaaatcataggcctcgtttgcactttttctcataaatgccccaccagttgcggcatctataatcgttcttgtattaccaataagcccgtttagaagttgtggaccagcatccacttctcaataccatgatgcggacacttcctgatgagatccttgaacctctcccaagcctcatggggatattcattgtctagctaacagaaattattaatttctcctcgcaacttagcagactttgctggaggaaagaatttagatagaaacttcgttgccaaatcagtccatgttgctatagaattcggtggcaaggagatcaaccaactcttagctcgctctctcagcgagaatggaaaaagtctcaagcggatggcatcatcactaactccattgaccttgaaagtctgacataactccatgaagtttgaaaagtgcaaattagggtcttcagagggaagcccaccaaactgga

SEQ ID NO: 368597 - DNA, 666 bp, Cannabis indica
atagatgataacatggggttagcaagcccttaaagccaggttatattccttcttaaactaatttatttttaattattattattattttctattttatgtcatataaacaaaatggatgaggttgagtacagatccttttattaataaatgcaattattattcatttatatattttataaatccttttatttgcaagagatttctattaaaaaaatatagttaatattttttttaaaaaaaatgagtaacaaaattattggttgattataatcaataaacattaatttgtttccacaaaatttaataaatgttttagcatgatatatagtttcaactcacttttcaaatgacttatattaggttagggatatttaagtttttccaagtacctaaatgaatatatatatataaattatatataaatatatagttagtaaattgtgtattattcatgaaaattttagtttcgtcccttttcatgtgttccttaattatattatggatgttatttcaaatatataattttcttttcattaatatcctatgagtgtgaataataataataataataataataataataataataataataataataataatctagcttatatactcatgtccatgtacatataatacatattctttagcttattcatttgg

SEQ ID NO: 368598 - DNA, 741 bp, Cannabis indica
tccaaatccagatcccgatctcgcgtcccacctgattccattttgggtgccgggtaacgagttgggtcctaggttcaagtcaaggtctagggtcgggtattgggtcccggtcctagtttcgctgcccaagtccctatcctgattttaggtcaaggtcccaatttttgtcgggtttttggtcccgatctaggtacgggtttgggtcctagtcacgattcgggtttgggtctcggtctacgtttttaattaggtttgggttcaggtctgggactttgtcctggtcctggtcctagtccttgtctggttctagttccagttgcgattccgagatcgagtttgggttagagttcgggtcgcggttcgagttcggttcggcgttcgagtgctggtccgagtttgggttcaggtccggatcgggctacggctgtgggttagggtcctaggtctgggtcgaagttcgggtccgagtcccaggttttgatctcgatctaagtcagggtttagttccgggtctaggtcctgggttccgatcctggtctgggttcgagtatatgtcttggtgcaggtctaggtttgggtctcattttgggtttgggtctgagttcgagtcccgggttcgggtttgattttgtgttcaggtctaggttcgggtttgattctagtatggattcctgtccaggttcttgtcatgatttgggtccagggcaggtttttgttgtgggtctgggtctgactttgaat

SEQ ID NO: 368599 - DNA, 812 bp, Cannabis indica
ttggctattagaatcacattttattattttagtatagcggggcggtatagttagacattgaaatgttgggattagacgggatttttgagtttcccaaattacccctaagtgcctttttaatccttttagtgtgggaagggcaaaatggtcctttttccccataagctttttgtctttagtgaggttaattaagatatactttaatctgatttttttatgttatgttggctgagatattttaataaaactaagctttatctcatttattcaaaaaataagaaaacttggtaaaggaagcactctctctctctcaaacattcctagggttgctagggttggaatttttcccagtaattcaagccattctcagctagttgttagtgatctcaagccaaggtatagtcttttaaacttctactcttattttcttgaattttaagaaatggacttttgcatgaaagggtgatttagctactgatgttgctgtagttgttagatgttgttttcagaagttaaattatgttagattatgttgattcaagcttgaaatgttggctgttggtagatttaaccaagttttgagtttagaactcaaactttgagctttaatggtggattttgttcctcagcttgtagaagtgttttattgcttggaagatgtttattgggatgtttagaacaagtctggaaggtttcatttgatttaaaggtggtttgggccgagttatgaaattttgaagatttcttgcactgaaccagaatttcggttcagggggacatgtaggaactggaattccggttggtccttagga

SEQ ID NO: 368600 - DNA, 537 bp, Cannabis indica
ccaggttgacctttcttgcggcgacaaactgtctccggaaattggtctgtagcttgttccaacagcccacggatcctggttccagcttcttgaaccattcctccgcggacccacttagagtaagtgggaagcacagacatttggcgtcattgctgactctcatgaccgtcatgacacggttgaaccgtgacaagtggtcgcttggatcggagttcccggtataagctgccatttcgggcatcttgaagttcttagggagctccgcctccaggatgtgcttagcacatggctcccggtcctcgctatctgagtcggagtcgtcccctttctgccttcgggagactcggcaatgtcttttcgaagtatggcgagttccgccataattccttcatttaacgtacccgtggagaccgcgggtccgtatcttttttggtcaaggtgatcccggaggtcaccttggttcccattgatttgatttctcagatcaacgggaggacatctctgtcctcttcttcctctacccccaggctcttggtg

SEQ ID NO: 368601 - DNA, 848 bp, Cannabis indica
aatccagaaaaaattcaagctctcctgagcatgcattccccaaagaaacacaaggatgaccagagcttaactgggaaggttgccgcaataagccgttttatttcccggtccacagacaaatgcattcccttcttcaacatcttgaagaagtgtcagaaattttaatggtccgacgagtgcaaggaggcattcaaaaaactgaaatagcacatggccaagccaccaatcctatcgaagcccgttctcagagaagacttgttcctatacttagccgtctccgagctacaaaccaagctttattacaagaagcgctagatcaagttgaagaactccaggacgagtcacaaatacgaatggcagtttatcaaaagaaggtgaccaaatattttaactccaaagttaaaaataaaaaattcacttataagcaaaaaaggatggatggaatcattgtgccacccaagaacccggagtgggggtacttgggccaaattgggaagggccatatgaaatcgaggacgaaatcagctctggaacttataagctaaaaaggatggatggaaccattgtgccaagggcctggaatgccgatcacctccgaaaatattaccaatagtccaaatgtgtagcttaggctttgtttaaaggatttgtaccgtctaagtgtatgcaacctctgtattttaaataaaactgagtaccttaaaagcaaagttttcacgccactcaagggggtactaaagcataccacacgaacagatggaaaacaagccgaaagtaaaatatcctgacctaaagggcaggtccaaaaaggaaaaattatgcatcaaaaaggagcatatgtataaata

SEQ ID NO: 368602 - DNA, 802 bp, Cannabis indica
ttgtatttgctcaaacaaagcatttatatcatcatattttacaactaaaccaatgaaatactaaaactaaattaaaaattgaagaaataaataactattagaaataatagaacaaacccaagagtttttacgtggttggagtgttaacaaactttagtcaacgagtcgatgttattatgtatttttagctagaaaagccttgggaatacaatatatgagtataagttctctatttttgcttgagcaagtattacaagaaaattcaacccttaatccaaataaattattgggtatttatagtgtttacagaaattatatacttaggttttttttttcttaatagggagtttatattacatgaaaatacataaagttgggctgtcttcgtgaggcccaggccataaaaagatcgatgtgctgactaggcaaatgagatatgattaagctgtcaataccgtgtcccataattgcagacacaattatttatgaattaattgcttgatcttcattttaggtaatttttatttttagtctttgatacgatcttctattcaagatttgaggagaatcaattcctaattcagtgtgctcagataaaaagaaaaaccgaattagtttccaaaaacatgttgtctggccctctgaaatcacgttgctggaactgcttccagatacaagctgtccttgacagaagcttgcctgatctatgaagtaagataccttcttggaatgtcttgtttaacttgagctaatatgaaaataaaatctaaataagtattgaaattaacataaaatagtgtga

SEQ ID NO: 368603 - DNA, 566 bp, Cannabis indica
aaagagttttatttagggcataaaacccaacaacgacgtggtttacattatcaacctcagaaagacatgggaaaagctctagctcgccaccagggttattgttgctatgttcccagcaagacatcctaaaacgatacactttacaacataattaatacacgtttgcattgacctggtaaaagcggaccaatcacagctgtgtgattttcaaataataaccgcatttattttacgtgggatgtaatcaaatcccacaattttaggggattattattgtaaaatattagtcaaatttgtaattaactgccctcctatgtaattataaataggagcaggttacactgaaaaatggacgaaaaattcattagagaaaaagcccttgaattgtatcagaaatctaataacattgactcgggaactatgcagaattttaactgcaaaaccacgtaaaaacctttgtgttcttacttttctttactgcttttatttctgtgccaatccatcacgagttaggctttaacatatttacaaaaatctgcattaacagcttggtgctttcattgaga

SEQ ID NO: 368604 - DNA, 467 bp, Cannabis indica
cagttctcctcttctaggaaactccaaactcacttaaagacctaattgaaaaaaaaaaatgctaggggagactttaagagactacatcagtaggtttacgactaaaactacaaaattgaaagcgtgtggaggcaatgttaaggtttatgccctgaaaagcttgttaagatatttttgattatttataagagttgaacactttgatatatgcatgaatgttaaattattaatatttaatattaaataatttatatataattatccaaaaatttattattcatgcatgaggttgtgacttgtagttctatagaggattaagatcacttagccatgaataaaacagtcagcaacatattaatgtttgggaatctttaatcaacagttgctagtgcggtgaactaatgcttgttattaggtgcaagtaatctcaattcggattactggtgtagcatgacatctaagtgaag

SEQ ID NO: 368605 - DNA, 428 bp, Cannabis indica
tatgattaatatatattaattgatattttgagtgatgtgtctctaaattattattactacatttttctagtacttattataattatctacgtcatattttttaagtatattaacgtgattattacatattattataacatgatgaattatgctttaattaattaatcttaatcatatatgcaatatatatatatatacgggagagagagagaaattaattaaggtacttcaataattattcctctgtagaagtggattcaataattttaacctttttttttttttgtaatatgaacagtgtaaaaataagaatactaaatttccactttaatttttttagtattattattcctcttctcatgcctaacctagctagagtagtgtaatatatattattgatataatatatttcttataataaaataaac

SEQ ID NO: 368606 - DNA, 425 bp, Cannabis indica
cgaatacgtctccaagaattcccacacaaactcctttaaggttcaccatagaagccagtcacacgaaacaaagggtatccgtcaagcttcaactccaaatcaatgtgattattactaaagctaagaagtttgccatcatcttgatttttccacaacattgcaagacccctactatgtccacgagcctcaacaacaaaacttccatcatagcccaataaagctctaacacaatcaactgtttctttcttgcaaattgtctcacacaaaaaaattaaattgggtctcttttgaaaaactatttctttaaggaattgaacaaactggggttcccaagcccactgcaattccaactcaacaaactcataactcaacaacaaaaatcacataccagacatgtcaaaacgacaagacaacttttataataa

SEQ ID NO: 368607 - DNA, 911 bp, Cannabis indica
acctgggactcggacccgaacctggacccagacccagccccctaaccaacacccagagctcgatccggacctagaccgagattcggacccgaacccaaactcggaccaagactccaacccagaccaaacatcgaacccaaactcgaactcgaaatcgcaattggaactggaaccggactaagaataggacaacgaccacgacaaggacccaaacctgaacccaaacccaaatgaaaacccagacagagacccaaactcgaaccgcaacgaggacccaaaccgaaacctagactgggacccaaacccagaccagaactgggagctggacccagaatcaggatagggacttcggcaacggaactaggaccgggacccaagacccgatacaagactcggacatgaacctaggtaccagctcgtgactcggaacccaaaatggaaccagatcgggacccgagatcaggatccgaatttgaaccagaggcttggaccgaacccgcagtcggtgtctggatttgagacccacccccagacctgaacctagaccaggaccctgacccgaacccagaccaggaccgaacctagtccctgacccaaacttggaaccgaacccgtaccctatgacccgaaattggaaccgaaaccggacgtagatcgggaccaggaacaggaccgaactaggacttggacctggacctggaagcataaccagacctcgacctagacctagaaccataacctgactaggactcggactcaaaccctgacctagacccgaactgggacccaaacccgaatcccaacccagacctagactcgagacccaaacctagacccgaactcagacccaaaaatggaactagactcgagacacagaactggggccgcgacccaaaaccgcaccctagtct

SEQ ID NO: 368608 - DNA, 644 bp, Cannabis indica
tttgatattatactgggaatggatttcttgtccaagtactcagccagtatcgattgtaagaggaagatggtaatcttccaattagaaggtgaagaaccgtttgtttttgtcagttcggttcagggatctcggatcccgacaatttcagttttaacagctaaagaattgttatgtgatggatgtctagggtttctagccttggtattggataccactcggcctgactctattcgactagaagacatcaaggtggttcgggagtttctagatgtttttcccgatgaacttccaggtttaccacctcagcaagaaattgatttggcacctggagcagagccggtttctaaagccccttatggaatggctccggctgaacttaaagaattaaaaattcaattacaggggttgcttgacatagggttttctcggcctagtgtgtcaccctggggagctcatgtactgtttgtcaagaaggaagatggttctttgcgaatgtgcattgactaccgggaattgaacaagctaacaatcaaaaataaatatcttttacctaggatcgatgatctttttgatccacttcaggtgaagatggtcttttcaaagattgatctccgatcgagttatctgttggatatattttacca

SEQ ID NO: 368609 - DNA, 521 bp, Cannabis indica
gttgaaagctaaatgcaagtgggccaaagagggtgatgctaactcgaaattttttcatgacatgttgaatgcgagaaaggcaagaaacacaatttcatgaattgaaagggaggatggatcatttatcaatgaagaagaagatgtggttgaagatttttttttaagagattatacacttctgagaagacaagagggagcagtattgaaggaattgagtggtaaaaaattttggatttcttggcgggacaaatagaaaggccttttgaagaagatgaagttaaaagtacggtctttagttgtgaaggtagtaaggctctaggtcctgatggttctagtattgcagtctttcaagctagctgggaagttattaaagaggatttgatggatatcttcaaatattataaggaagatggaacgattcaccataaccattgatgcaacaacttggttatatggaacaatggaatggacacgaaagtatggaggattgatcagaatacgcaaaagtatgcactgtaggg

SEQ ID NO: 368610 - DNA, 678 bp, Cannabis indica
aattatcaggcataccacaagccataggtttagatcaactcaaacctttaatactaggaacatgaagttttgttaagtccattgaatagacttactaacgaaatttcctttcttgtccttataatagaaaacttttggttgttccatatgaatggttttaaccatagttctcttggatttgcttcttagtttcttattctgacaatccattacttgtttaaactaacaatggattttcatcacaagtgtcttccaagtcataacagggtgagttccattaaaacctcccactatgacaaggtaccgtgactttctgcctaagaacataagtggaattatcctcttcggttgtgtcaagacaacaaaggcaatgggaccatcttatacagaataagatgatataacaatcaaaggcaagtgctgcaccaagcatatttgtgtctaagtctacagagaaatacgtacccttcttcatcattctcaaaggcaactaattcgagtggacaaaggaatgtgaaactacattccaggagctaaagaaatagattggctcggccacctgtgttgcccaaatccctagacaaagaagagctacgtgtgcaataagcagtcacagaacatgttgtgagtgttgggttttatgccctaaataaaactcatgtcaatataatcagattt

SEQ ID NO: 368611 - DNA, 566 bp, Cannabis indica
ttaaacaaatctatatttttttatgaaaataaaatatactcaagtttattcccgtaaaattcagtttttacaaattgaatttttaatatatttttttaatatctaaatgaattttctaataaaaaataaataatcttttatattgcttaattggttttaaaattttaatttatttttaattttcttaatcattcaaaataattttcttaagatttaaattaattttttaagatttactaaaaaaaatgttaaatttttctcatttttattttgagagggtacaatttgatagttgtcaaagttactaattagcaaagacacattatcatttaaacggaataatgaaacggagcctaacagaaggattaaattgctataaataccaccataatttattagtatactgttaaaagaaaacactccccagtccccacatattaaaaaatgaggaatgctaattacaacatcctattacaatctcttagtcaacctctacgtccgaaatcacatgtcgaaatatttttttaatttttttttattagcggtattcattatagttacaatat

SEQ ID NO: 368612 - DNA, 605 bp, Cannabis indica
tttttttgtcaatttttttctcaggtcatgcaaattatagttatttaagacatcctacaaaattatacgaaattcaaaaaagtttaacacgttgaaaattgcgttccaaatagtgtgttgcagtcgtgactattttattttatacgcgtgtaaatagactgtttgaacattattttctatattataaattattttgaatttctcaaaattttataaaatatcttaaatagctataacgtacatgaatataaaaaaaattagactaaattttttttagataccgaaacaagtaaagagtgtataaatacattttttttaattagagtgtatcgaagaatcacccaataataattactaacttaatttctaaatttaaatttaacatcattttaataacattggaaaattctagaatgcactcccttaaaatggatatattgatgcacccctatctgttttagcatccgaaataattttctagtcaaattttttctcatggtcatgtacgctatagttatttaagacatcttgcaaaattttaagaaatttggaaaagcttaacacgccgaaaattatgttcaaatagtgtgttgcacacgtgacta

SEQ ID NO: 368613 - DNA, 699 bp, Cannabis indica
tagggaggaacgaggtgaattataccttaagaggaagagcagaacgagaagaggtgaaggatactgcgaggcgtacagtgtctcataatcgatcaaagtgaggaggagggaatttcatcgcagcgatggtcagaaaagcataacgtagcatataggaagagcaaggtcagacaactgtcacgacgggtgtcacctacgagaacatttgagctcgagaaaacttgatcttcatcaatgacttggtccaaaacaaaaggatttactttatttatgagtgggcaagttagagaataagttcagacggcaccaagtcaaggaatccggaggcgatcgtggtatgattctgttaaagaattcgagtcagaagcctctggatcaaagaggggagatgattccaaaaggcagctcaaggataagaaacagaagaaacacaataaatatatacccctttatgctgaatatactgagcttaatgaaactcaagaaaatatctatctcgtgcatgtacaggaagtcatttttagcgagacaaaaactattagacatgcgagacgcaaaaaggacccaacaaaacaatgtgaataccgtggagatattagtcacaccacagaagagtgtcgtcagttgaaggatgagatagaaggtctcatagcgcgaggacacttccaacaatatgtaaaggggcagggcaatgcccat

SEQ ID NO: 368614 - DNA, 453 bp, Cannabis indica
tattttattggttgccgaaaatctcggtcaacattatataatataatatttttacacatttaatttttatttttttttaaaaaaaaattattctatgcaaatgtattgaactaatattattctataattactttaaatatttaagagttatctaaatatgaaaaaaaaattataaaaataagttaaagaaaacatacattgtactgaaattttagtagaataaaaaaatcgtgagcttgtaaacctaggtattacgacgatacctttcctttgattggagactagttagattgaagaagtgtttgtttgtttgttgagtgagatctctcatacttaatgatcaggtcacgtgtctatcacatggtactttttataacattggctattgatttgaaatggtgcagattttagctcgagtatgcgatagggtgcagaaagtgaggtgagtgaaga

SEQ ID NO: 368615 - DNA, 1571 bp, Cannabis indica
tctactttgtagtccgtgaactcgtggagcagctcccagactattgccacatatacagccatctttgctccgcacgtctgatattctcccgacacctcgtttactaccagttgcgaatcgctatagacttctactcttttagcccctacggcttttgccaatctcagccctgctatcagggcttcgtattcggcctcattattagaagctgggaattcgaatcgtagggtttcttggagtcgaagtccgttcggggatatcatcgcgacccccgctccggatctatttgtgttggaggcaccatccacgaagtactttccacgttaggactggtggtgcgggtatgtttgcggtagcttcagcttcatggcattccgtgatgaagtctgccaacgcctgcccttttatggaaatgcacggaatgtagtgtaggtcaaattggcttagctccattgcccatttgaggagccttctggatgcctcttgtttttgtaggacttgccggagcgggtggttggttaataccttgatggggtgagcttggaagtaaggtctcagctttctaaaggccattaggagacaaaaaactagtttttcgatcactgggcaccgcgtctctgctcctatcatgcgcttgctgacatagtacacgggatgttgagttttttcttcctcccatactagggccgcactgattgcgttctcggagacagctaagtataggaacaagtcctctccgagaacgggctttgataggattggcggcttagccatgtgctcttttagttttatgaatgcctcctcgcactcgtcgaaccattcaaatttttgacatttcttcaagatgttgaagaagggaatgcatttgtctgtggatcgggagataaagcggctcagggcggcaacctttccggttaagctctgaacatctttgtgtttctttggggaaaggcatgctcaggagagcttggattttctctggatttgcctcaattccccgctgactgacaatgaagcatagaaacgttcccgacttaaccccaaaagtgcacttctttaggttaagtttcattccgtatctttggaccacttcgaagcattcttctaggtcattcgcgtggctagcgtatgccttcaatttgaccagcaggtcgtccacgtatacctccatatttctccccagaagtcctttgaacattcggttcaccattctttggtaggttgcaccagcattctttagtccgaaaggcatgaccaggtaacagtatacccccttaacggtcctgaagctagtgcactcttgatccgcgatgtgcattttgatttgcttgtaatcagcatatgcgtccatgaaggaaaaaaggttgaatccggaggtggcatccaccatctggtcaattcttggcaaagggaaaaaatcttttgggcaggctttgtttagatcggtgaaatctatacaaacccgccatgttccgtttggctttggtaccagtactggattggctagccattctgggtaatatacgtcctggatcatgccactggttagcaatttgtccacctctttctct

SEQ ID NO: 368616 - DNA, 1290 bp, Cannabis indica
agctatgccgatctccatcgacggtaagttgagtttgatgttggtgattatgtcgtcttgaaagttactcctatgcatggtgtaacgagatttggagtgaagggtaagctagccctgcggtatattggaccttttgaggttatcgagaggattggggaggtcgcttaccgattaagcttacaaggacagttgggacatgctcataatgtgttccatgtgtctatgtttaggaagcatactccagatccatcacatgttattgagtatggggctatccctcttcaggaagatgtgacttatgaagaacaacctatcaaaatcttggcgagagagctaaaagtgttaaggaacagagagattccagtagtcaaggtcttatggaaaaaccacagggaagatgaggctacttgggagttagagtctgagatgtatatgaagtatcctgacttgtttaattttcaacttgaggttgtactttaaaatttcgggtcgaaatttctttaagaaggggagaatgcaaagactcagttttgaccgagtcaaatatatataataataattaaataataatatacatatatgtatgtataaatttttttaatatatacaataacagaccccttcgtcccctctctctctctctctatatatctctccttttctctctcttcaaaacacaacgaaaggaaaccccacaaacctccataaccaccactcttcggcgacccacctccggccttcaacaagccccacgcgatggacaaatcgaaagcccaagtgccggcgacctcacccccccaagcggcgccgcttctctcgccgccgttagctcgggattgcaagtcaaagtttggggtttcaaactttgaacggattttccgatcacctccggcgtccgtttgacgagacattttcaccactaaactcagctcgtcgaggagaacaacctacactaaaccatttttcccggttcgctactttttccggtgacatttttgtagctccgcccctttccggcgacttttcggtgacatcgtgtaccgttttgacaaacggttggtatgagtgtgatctactcgtcgaggtggtcgttttgatatacactactcctattttcggtgacatttccggtacaccaatttttaccgccaccgattgttaatgtgcaccgcttaggtgaggtttcggaaccctaaattttaaatatagtcatattatatgtcgttggactcggttttgaatgtagaatgcgatgatgataattatttaaccagttgatggtataggtga

SEQ ID NO: 368617 - DNA, 612 bp, Cannabis indica
gaaaaactgaagagacgcctggttagattcacatcaaatcacgaacagacgcacccaacacgtgtcacccattcaaatgtaaaggcagctcggatgaagtctccacgcaacttcagaaggttcgtgcagacttggggggcaaatgttatcccaattttcacactcttgacgtggcatttcatgttggtgacacgtggaagtgattccccatatatgcccaaaggagatagttccgagccgagcaccgtgtatacctgtacggatgaggtcctcccaggcgagcagtggacaattcgaacatcatatcaacacttagcaacttcagcatttgcatcatgaagcacaaaaagcaatccctattaatctgggatcgtatcacagagatatggcaagctatctaaatccctcaatcagtgtactctatataagtaaaggggaaatcttaccaattaaagacattagtaaaaaaagggaaaccttccctcaagcacatagccctataaatagttatctatcctcactgggtaaaagttcaaaagaataatctaagacgagtatactcagatattttcatttgtaagtagctctaaagagaaagaatacactatattc

SEQ ID NO: 368618 - DNA, 644 bp, Cannabis indica
tattgttttacattttttttgtgtgttttagtagttttttttattctaattttctaagattgggcttgcaaatatagctgctattgcacctggtattgaggttgtgcataatattgttagttttttgaatccctttttcctttcttttttgtttgatttgttttagtgttgttttacagttattttgccataattatttatttgtcgtcaattgcactattttttctcaatctcaccaaaaataatggttgttttccgattgttccggtgttccagtggtagtttcgcactactataaaaattgggctttagaagcagtttttaagggcttttagcgtcaattttgacgaaattcgttaccgatgctgttccaagtgacactgtaaggtaaataacaaccgacgccataagaaccctatggcgtcggttattatgaaaaaactgacgctatagggcccctatggcatctgttattgtgaaaaagctgacgccatagggtcttaatttttcagctttataatattgtgttatagcttaattttcatatatatatatattattttattattaatataattaaagtaaatataaattatatataataagcataaataaaaattaaattgaaaagttaaataaataca

SEQ ID NO: 368619 - DNA, 510 bp, Cannabis indica
tagcaaagctttacatgctatatttaatggagtatgtgaaggctatattaagcttatatcttcttgtgaatccgctaaagatgcttggcaaatccttcaaactcaatttgagagaacttctgatgttaagcgttctaggtttattatgctttagaccaaatttgatgatcttagaatgtctgaatctaaaaccctatctgagttttatgaaagattagctgatatagctaatcaatattttactcttggtgaaaagcttgatgaatttgttcttgtcagaaaaattgttagagttcttcctaataggtttgacactaaacttttggctatggaggaagcaaaagattttagcaagatgaaggtagatgagttaatgtgttctttgcgtacttttgaattgaatcaacaaatcaagtagaaggacaaaccaaggtccattgctgatagaggtaaaggtattgcttttaatgttgctgaaaaaagaaaattcagatgatgaagaagatgatg

SEQ ID NO: 368620 - DNA, 840 bp, Cannabis indica
aataattcctccacccctagagtaaccaccatctctaatattctgagttggtgtagataacaggtttctaatatacacccctatcatataatatatatgtcactttcataataactttcttgattgtctcccaatgttccttgtttgattacatcttagatggctcactcaatagtaagagtctggttaaattcgtacataggagtacattcaacctcttactattggttcttagggacatcttgttgtgacatattatcttagtctgaaacaataagttccttctagactaagtcatcaacatagcattccagtattagcattattataaaatacttgcttaagattaagtaatcacattagataccataaaacaattcacaaggattaggtattttgcctaagtcatttgaatagacattgtaaaattctcctattttgtccttgtacttgtcaagacagcgcgaccaggagtgtttggtctcaggacatcttggattgtattttgtagtcgatgtgtgatatgtttgtaaaagtattttgataacatttgtaaaagtttagatacgagatcccagcttatgtaaaatatatatttgtttataaagttttatagtttaaaacaaagttttaatttggcacaatttttgagaaaagccctttaattagaaaatgtggcacattaattgaaaaaaaaaatcattgtagcgcgcctatgtatcagggtgtacaacatgtaagtagaagaagatactttattaaattcaacatttaatttaaacatttcattagtagcataactcttccctacaaaagtatcattcttagtgatggtgtaca

SEQ ID NO: 368621 - DNA, 877 bp, Cannabis indica
tggactcaatttagacccaagttgagcttatcacgctttccaaggaattggcagctttgcttttttaatttgtttcctttattttgtctttgtttatttgaaaagttgtctttcttttagtttccttttttcttggttgtaagttggctatataaggccttgtaaacactttgaaaaatcaaaatattttggaataaaattttgagaggtttttttcttgagttcttgagagaactattcgaacttatcaaggagtattccttgtggcgttcaacctgacttatcaaacggatttccaccaccgtttgtggcgtcttccttcatatcaaggttcatgcttaactaagcattgggttacggttccacatccaaatttcaagaattcttagagtctgccatatttggtgtcaggtttcatcacaactgctggtgtggttcgtatcagttatcctccttgtccattttaatgaagaaaaaatactaagtgttggcaggttattcgcctcgttatgtctctttattttagttaagattgtgaagtgactgtctcgctatatgtaatccaaggttgtcgtatgtgattatatttattcttactcaaacgaatgaatatcttctttttgactatgtactttgatgcagacatatgtctcatcaatagtggttcaatagtttttatccttttctcgcttaagactatatggtcagcgaattttgaatattttctattaaacctttatttaataataatgagttatttaattctgcatttaacgatataaactttattatatcaggtgattcatattctatttgtaggacacgtgtcaacttctgaagtgtagctaagttttgggtataacaattgcccttaaaa

SEQ ID NO: 368622 - DNA, 860 bp, Cannabis indica
ttttttctatattttttttttttttgaaaatatccttccaagaaacgacatgtcgtttttctctatagtaaaaaaccaacacgtcgtttttaaccataaaaaatgcaacaatgaatgggaaatgacatgtattttccatatatagagggaaaatgacacgtcgttcatgtcgtcttcaagcgcaatctgggtcgacacatcatttttaaccataaaaaacgcaacaatgaatgagaaacaacataccatttttcatatgtagaggggaaacaacatgtcgttcatgtcgtcttcaagctcaatccgggtcgacgtgactcgtttatttgcaactcgggtccgaatgactcgacccaaaacccaactggattttacaattctgacgaccaaaatgcaaaaaatcaattccaaatgaatctaaatattaaaattaagagatccatataggttttaggcaagaaaaatacgtaaaaattagactttaactctacaaaacaccaacgagtctaaacgcggatttgaagaaaaatcacacgtttttatgatttttttttcaaattgattttcatgcacaaaatcactctataattttatatgaatgtgatgttgcataaaagattcgaaatatacaccaaaaattaaaaataaaaaatttcttataatacggaccgaaacttaaaactttcatgtatatatatattcctttacaatgtatattgtaacgccctgtccaacagggacgccacgtgtgtgcactttatttaaaataccaataattatataagatgtaatttatactaaaagtgtgggtaattaaatttttgatagttaaaactcaacctttaaattgtttaacaaaa

SEQ ID NO: 368623 - DNA, 672 bp, Cannabis indica
tgggatagatgaagaaaaaaaatggtgagaaggggtgttttcggctggagaaggtagggttttgaatgtggtgtttgatttgaaatgtagggatttgggatataaaaaggacaaactgaccaatctcgccgcggcgacatgtagcctcgccgcggcgagaatccgtaaaaatataggggattctgtaagtccaatctcgccgcggcggtatgtcccctcgccgcagcgagaaatcgcgaaaataagcctgtttctgtaagaccattctggccgcggccagacatcccatggccgcggccactgccaaaaattttattttattttatttatttatttatttatttatttttttagtaacgaaacagaatgaacatcaagaaaaataacagtaaacttaaaaagagttcaactaaatcaaaagatcactttccactcccattcattgatcagatgttagacaagttggcaggacaagagtactattgtttccttgatggatactcagggtatcaccaaatagctatagcaccggaggatcaagagaaaacaacattcacatgtgatgatactcagggtagtttgttaggctatttttagcctatgttttggatccaatttatgtgcatttctagctgtgttgggacggaattacgcttgttttctatgttttca

SEQ ID NO: 368624 - DNA, 603 bp, Cannabis indica
tagaaccgaacacagacctagcctcaaacccaaactgagactgaaactcgggcctgaatacggtcgtgtaccgagaacggaaatgagacctgggcctggatctaaatctggaacctgatcccaaacacagacttggacctagatagggatccggatacgaaccttgacaaggaccaagacccagactgggatagaaatgctggaccagatgtggaccgagatcttgatccagaccaaaactaggacccgcactcggcacacgaccttggacctggacccgaacctagacccagatcggggtccaaacctggacacgaacccgaacatatactccgacaaaaattcaaacccacacctagaatcagaccaaaagctagacccggactaggacccaaagtcgaacccagaccaagatcagaaccaacgacttagaaccagaactgaatccagactcagatcgggattggacttgggagtcggacccaacttagaccaagaccaaggacgtgaacccacagcttgatctggacctagattgaaatcgagatccgaacccaaaacttacagaccaggactcgaacttcgacctgaactcaaacccaa

SEQ ID NO: 368625 - DNA, 730 bp, Cannabis indica
tatataagttcagtcatgcttttcttatgtaagttaggctattaatattttggtatatttattatattttatgtcgtttactgcattctgccaatagtggtattttgtcgatttatgatatataatatgatatgctgtcaagttagaggtgagattcaatttatgcaagattaattaatttgcgcttttattatatacatcttccagttgtaattaatggtgtagaattgcaactgtgttttgaattaatatcggtattagaataggatttgcataactatatttctaccttaccaagttctttatctgatcacaccctttcactcatcattttattatttttacttcattcacatttctatcattttctatttacttaactaatctttagtggtaatttgcctccctgtggatacgacatatagcccgtttactaccgcgaccgcagtgtaactaattgggcgacatcaccaaccgatagtggagtcatatttaatattgttgtggctacgacgtcttacataataagaataataaagtaaataagacacatgattttatggaggttcagcgtccttagttagcgagtaatgacctactcctcttttgattatattaataccgagagataatactacttagatcactatagtgatgggatctgaagtagctctcttaagattataatgtatgagtatagtatgcaagtttcatgagagagagagagaga

SEQ ID NO: 368626 - DNA, 713 bp, Cannabis indica
ttgggtttgggactgggttcaggtccggatgtgggtacgggtccttgtcaggtttcggctccagggcttggtcccaaatccagacaccgactacgagtttcgtccaagccctaggtccagatctggatcccaatcttaggtcccagtctggttccatttctggtgcagtgtcacaagctgggtcctaggttcaagtttgggtctaggtcgggcactaggtcctactcctagttctgtttcccaggaccctatcctgattctaggtccaagtcccggttattgtgtgggtttgagtcccggtctaggttcgagttcgagtcctagtctcggttggggtttaggtctctgtctgggttttgatctgggttcgggttttggtttaggtcctgcacctggtcctagtcctagttcagttccagttccatttgcaattctgagttcgagtttgggttttaaatcgggtcggagtttgagtcctggtctgtgtttgggttcgggtccggatttcagtctaggtcaagattattctccgggtgtgggttcacgtccagtgtcttggtctaggttgggtacaagtctcaagttccaatctcgatctggggctggatacaaatcttggtctaagtccttggtttttatcctggtctgggttcgagtttgggtccgggtccaggtctagctttgggtgttattttaggtgtgggtttgagttc

SEQ ID NO: 368627 - DNA, 524 bp, Cannabis indica
taaataaaatctatgtctagaagtcgagaagcttctatagattgccattagaaaagaaaatgcttcagcatcttactaaagtaagttgcttggactagagtaagtaaattaccaagtacaccacaagccgtaggtttagataaactctaacctttaataccaggatcaggaagttttgttaagtccattgaatagacttactaaccaaaatttcctttcatgtccttgtaatagaaaacttttggttgttccacttgaattgttttaaccatagttctcttggctttgcttctcagtatcttattctgacaatctgttacttgtttaaactctcaatggattttatcactggtgtcttccaagtcataacatggtgagttccttgaaactctcccactacgacaaggtaccgtgatttttgtctaagaatctaaatggtattgtcctcatcagttgtgttaaaacaatagaggctttgggatcatcttgtctcgaataagatgatagaacacttatggaatcaa

SEQ ID NO: 368628 - DNA, 841 bp, Cannabis indica
agtatgattccaccaccgaaaccttcgctattagaagccccatcgacgtataacgtccatccttctccattcagtacaaccgtgtcaattttgtcatttatgagtgccacttcagtacttgggaactcaagaatgaaatctgccaaggcctgccccttgattgcagatctcagtttgtatgtgatgtcgaactagcttaacgctactgaccatttcaacaatcttcccgatgcttctggctttgctaagactttcctcaaagggtagtttgttaaaacttcaatgctatgagcctgaaaataaggtcgtagctttgttgacaatattaccagggcgaatgctaatttttccatttgaggatagcgagtctcagcctctaacaagcgtttactgacatagtacaccgggtattgtcgtccttgatcatcgcaaattagtaccgaactaattgcatattctgacaccgctaggtaaatggataagacttcgtcggatatgggttttgacaggattaggggctgccccaaatgcatttttaacgcttgaaaagcttcttcacatttctcggtccattagaacttcttattgccctttaaaatctgaaaaaactccttgcatttatcagaggatcgtgatttaaacggtttagagcggcgacgttacctgtgagactttcgacttcttttggcttagtcggtgattgtatttccactaatgctttgatctttgcggggtttgcctctattcctcgctgattaaccatgaatccaaggaatttccctaaaccgactccaaagacacacgttagaggatttagccgcattttatatcgtcccagtat

SEQ ID NO: 368629 - DNA, 664 bp, Cannabis indica
gggttgcacttaaattttagcaacccgaactttagattgggttagaaaatatataggataaaccgcccaaaccaaccgatgtacagccctagtttttcctaatgaacttccgggtttaccactgcagagagaaattaattttattattgatttagcacctacagcagaaccggtttctaaggccctttacagaatggctctagcagaatttaaagaattgaaaatttagcttcaagggttgcttgacttagggttttcacgacctagtgtgtcaccctggggagctcctgtatatttgtcaagaagaaagatggatctttgcgtatgtgtattgactaccgggaattgaacaaactgacaatcaataacaagtatcctttacctaggatcgatgatcttttcgatcaacttcaagggaagacaatcttctcaaagattgatcttcgatcgggctaccatcagttgagaatccgagaggaggacattctaaaaatggatttctgtactaggtatgggcactacgaacttatggttatgtcttttagactaaccaatgctcctatagcttctatggacctggtgaaaagggtattcaaggatttcctcgatatttgtattattgtatttattgaggatatccttgtgtactctcaatcagaagagg

SEQ ID NO: 368630 - DNA, 493 bp, Cannabis indica
gctattcttgttgtagttgattgctattgttttcagaggcttaattatgcttgattgaatagattaaaataggttttgatgcatgttagtgggatttaaccaagcttgagttttgaacacaaagcttggagcttaccgtctttgtaattatgtatgaagcttggttttgttacttttgaaatgttctttagggtctaaatagcaggtttggagaatttggtatatctggggttgaattgcatgagttatgaattttttaaggtttcctgcactgaactggaattccgcttcagaatggcctgtaggcactggaattccggttggtgtcctgggttcctcccagaatcggaattccggttgtagaaccggtttgtcggttgggaaaaatttgggaaccctagttcttcccatttttatgttatttagggtatttccatgttatttatcgatacggaaacttttagtttctagtttaagtccccaggaagtgatt

SEQ ID NO: 368631 - DNA, 901 bp, Cannabis indica
catgaagacgaacaatttctctaacatgtaactcagcatactgatcaacagagaagttcgtccaaacaggttgaaagtgcactgactttgtagacctatccactatgacccacacagagtcaaattgtctcgtggttctaggaaaacctaccacgaagtccatagcaatatcttcccatttccactctggtatcttcaatggctgcagcaaccctgcaggcctctgatgttcagcctttacttgctgacaggtaagacacttagcaacatactcaacaatggcattcttcatgcctggccaccagaacatggcctttaggtcttgatacatcttcgttgaccctggatgaactgagtaaggagtcgtataagacttattcataatctctattttaatacaatcatcaataggcacacgaacacgattcataaatcgcaacattcccgtttcatccactgtaaagtcactagccttcccagctgaaaccctatcccgggtttttaccaactctggatcttgcatttgtgcttctttgattcgctctaaaagagtagattgcagggtaatattagctaactgccctacaaccaacttaatcttagctcgggtcatctcctttggtagctgctgagagatttatttcacagtatttatctgactctgaccctttctgctcatggcatcagcaaccacgttggctttaccaggatgataaaagatctcacaatcataatccttcaccaactctagccagcgtctctgtctcatattcagatctctttgggcaaagaagtatttcagactcttatgatcagtgtatatctcacatttctcgccatataggtactgccaccgaatctttagcacaaaaaccactgttgcgagttctagatcgtgagt

SEQ ID NO: 368632 - DNA, 503 bp, Cannabis indica
aaaaaaaaaataaatatattatattgttagttaaaacttagaattgctcttgtttaaaattagataaatacttttgtcaaaaaaaaaaatagataaatacttgtgattgtactaaaatataattacacaacctattatttcacttcatacttttcaaaaacttctattagttgttttgttaaacattattaaagttgtacatttggcggtctgtcccgccggcttttataaaagcctattttttttaggacattttacataaatgtatatatttttttaaataattataaaaaatgtgcaaaaaaatacaattttaaaaatgcacatatttgaaaacatatttacaaaatttcatagaaattcttaattaaattataatagatatattaatgattcaactttttatatttagatttgtataactatttgtataaatattttcttattatgttttgttgtgtatggtattgtaatattttttttaatattgcttatatgttttt

SEQ ID NO: 368633 - DNA, 936 bp, Cannabis indica
acgaatggaaattggttggtgcatctaggtattatgagtctaggaggataaactttggaactcagaagagacatttgggcagtaaggaagcaatccattctaaaaatggatttcactaaaaagccagaaaggtttgtgaaaaatgacaagcttaagtcgcccttttatacacgaagttcagtgacaagaaagccaaagattgagaaatctaacggctgggaattgtgaagaatatgaatatgcgattcataatgatcttcgaaaccatacaaccgccataaccaaaggaggtgtcctttccaagaaaggattttgacaaaaatgccctccgtaataattaaaaagctctttttactaaaaaaaacattttaaggggcaattcttatacacaaaattcggttggaggacacgtgtcaagataaagagaatgtgaatcggtgccatatctttttatggaataactcattacttgcgtaagtactagagtatatttgtaacccgctgactgtaaggtcttaggcgaggaatcaatgtacaaactggtacttagtgtattaacaagaaaccatatatcgctaaaggttaatagcgaggcaccaaagaagaataatacataccttagcttacaataagcaaattaagtgtgaaagtcagaccggctcagagtacaagaatgcgagatgaccatctcgccacaaggaaactttctatagtttcatctaactaacggaagcgagactcataaccctggcaagtcagaagatttccatatactcgcaatcgacgtaacacatatcaagtcaaccttggaaagaagaacgattccagctcgccattgggatcactacaatcacgtttctgtaaagacatctctattttcaacaattaaagatgtgtttaatgcacgatattcttgacctagtaaaagcgggaaaa

SEQ ID NO: 368634 - DNA, 620 bp, Cannabis indica
cgtcggttctttgctaggaaccgacggcatagggtctccccttaataaccctctgcatcgtcttcttcttcctcacttcttcttctccagcctacccagccacttacagcagagagaaacccacgaaaaacccacgaaaaccctcgccaaccacctctaaaaacccacatatctctctcatttcttcaccatttcacctcatttttgtcttaaaagtttctattttcaatatctaatcccatacactaaaaaagttttgttttttcacccatttacactgtacccgaacctattttaaaaaaaggtggtggtttaactccgaccaccgcttttagcggagaaatcgttcaatctcaacgttcattaaggtataaatatgatttctgttcattttattaatgtacattggtattatttcgtttttgtaaattttttttaggattttttcattttattaatattatattgtgtgtgctataggtggccggatttttggtcgcaatttgtcgccggattgcgtttataaggtaaatatttatttacttgatatataatatatatgtatatattttattattgaatatgtgtttatatatatgttgtgtgtatatatattgtgt

SEQ ID NO: 368635 - DNA, 901 bp, Cannabis indica
aaaaaaaaaaaaaaagttatcaacaacaccactatcaaacaaaacaaaaccacacaaatagttaaaacttccaatctattacaaaactgaagattatctgttataatatagggataatatcattattattatgtttttttagggaaagctacttaagagaatccacagtaataaattggaatagaatattctaataatcagatactatcttcatccaaccaaattgtattttaacatgaaacactttagctcaaaaagaatagaacaaaaattaaaaatatcatcaattaaatcataaaaatactaattatatttaaatggtatatagttaagaataattagcaattttgccccttgaactttcgacaatattgattttggcccttaaaatatacagcttgttaagaatcccccttgaacttttacacatacagaaatttagtccttctgttaggttccgtctcattattccgtttaaatgctgacatgtctttttaaattagcaactttgccccctaaactttgacaactatcaaattgtaccccctcagaataaaaatgaaaaaaattcaacattttttttagtaaatctcaaaaaattaacgtagatcttaagaaaaggttattttgaatgattaagaaaattaaaaaataaattaaattttaaaactaattaagccatttaaaaaattatttattttttatttaaaaattcatttagatatttaaaaaatattaaaatttaatttttataaaaattaatttatttttttggtaaatctgcaagtgtattagatcaaacaaacactttatacaaccaaagagcaccctcataaaaggcctcaaaaaaaaaaaactaataatctttacaatgagttgaaccaactctcttcactactag

SEQ ID NO: 368636 - DNA, 574 bp, Cannabis indica
taataaatatttatttattaattgattatatttccataaaattgattgtaaatatttaagttctaataattataattactgactaattgtaattattgttaaaaagttatattaaaatacttaacattaaaaaagaaaacacatttaatttaatttagtagttaactcattaattgtaataaaaatatgaaaaatatgaagcacaattcaagcctataattcgtataagaaaatatgttagcttatttaagaaaaacgggacgacttaagtaacggatgatacaaattcgagcacaacacaaaaataatagacttatcttataatattattgttgacacatcacatacccatactttttatggtctaatacaatacaacccatatttttgtacactttttacaatacaagtaaggacagaggcatgatctcaaactaaggggatccaaatgcaaaagaaaaatattaagtgtgacagtcaatagtcccgtgatccgtaaggggaaataccaggtaagctgtacaatttcacaccgcctggggaaggtcaagtgggatgattctaagactgtgta

SEQ ID NO: 368637 - DNA, 514 bp, Cannabis indica
aaaggtattttttttatttgggcccccaaaatgagtgggcctaggcgtgagcctagcccacctatgcctagggccggttgtaacgccccgatgcttaggcgcgctacagtgattttccaaataacatactaccttactaatcaagggttttctttgaaaatcatgtcaaattaaaactgaataaaatatataaactttataaatatacaaatgtatatacattatataaccgggatcccgtgctaaaacttctataaatattttgaaaatacttttacaaacttgtcgcatagtgactacaaaatatatcccaagaagttctgagaccgaacactctagattgctatatcttgacatgtacaatcattacacgagcttggaactcactcatgttcagcttccgcattttcctttacctatacagaaaagtagaatctgtgagcctatagactcagtaagaaaagcatacaacaaaatataaataatcgacctgtctaggcgcccatacacctat

SEQ ID NO: 368638 - DNA, 712 bp, Cannabis indica
agagatttaacagtgttagatagcgggatgctgtatatttaagactagggtttgtgttccaaatagtgcggaacatagaaacgagattcttgaagaggctcataccactccatactccttgcatcctggcaccaccaaaatgtaccaagatcttaaaccctacttctggtggagcaggatgaagaagaatgtggtagaatttgtatcccggtgcttaacatgtcaacagatcaaggctaaacatcagagaccggcaggtttgttgcagcctttgacacttcctgagtggaagtgggaggatatcaccatggactttgtggttggattacctaaaaccacaggtttatatgattcaatttgggttgtggtagatcgattcaaaaagtctgcgcattttctaccagttaaaataacttttacagtggatcagtatgcagatttgtatgtcaagagatagtaagattacaaggtgtaccaaagtctatagtttcggatagggaaccgaagtttacctctaaactctggtagagtcttcagcgggctatgggtactaaactaaaattcagcacaactttccatcctcatactaatggacagtccgaaaggacacttcagatattggaagatatgttacgagtctgtgttatggatttcgagggctcctggagtaagtatctaccactgatagagttctcgtataataacaagttat

SEQ ID NO: 368639 - DNA, 728 bp, Cannabis indica
cgattggtcggaactgttaacctaggcaaagttattaggtatgacttctcttgacgaattactagacaaggtctgtccacctaccgcttggcccacaggcgaaacttgtgactagggattgggcggctgaccgttcagggtttgagaagcgttcacggctggatcttcgtcttactcgcccagagggatgatggttgtcggttgttgattggtagcctgataggctcttcgtatcagcacggtggcctatcttgtttgatcatcaatggctgcttgctgagccctcaatgtttccatctctttatctctccatttagcgaacagacgcctttgctcttaaaatgcaagattcaccgcagcacggagctcctcctagtcatgatgcagggtattagtatgaatttgcatgagtccaagagcagcacgaaggctctggatctcggtgtcatctcaaacggttgttcgaacattttagctggcggaactccagtattgggaataccctaattggttgctgaactggtatttccagtctcttgcacaccaggcgcgattccactcaaaggagtcatcacaccttgacctacgattggcggttgttcaggaaacctggccggtggaacttttgcattccctggattctgcagtgcgggatccactgccggtggattttctagatcaacctgttggaaattattttaccaagatcttagatctactcacaagta

SEQ ID NO: 368640 - DNA, 703 bp, Cannabis indica
gtcactactacgagtgtacattggcaccactatgtagaaccattatctgggtctaggttagtgattttgttacgaaactgatgactctgatacaatacggctaacttgattacatactttgtgcctcgggatccctaaacatctaaagtgatagtgtacatcggcactcctaagtagaaccctatttttgtattggttaatgattttgttatgaaactagtgaccctgataccctacacctaaaatgattacatacattgtgtcacgggaccaataagtgatagtgatagtgtcactactgcgagtgtacatcggcaccaataagtggaaccatactttggcatcggttattgatttcgttacaaaactggtgactctgataccctacacgtattttgattacatactatgtgtcacgggacccctaaacatctacattgatagtgtcactactgcgagtgtacatcggcacgactaagtagaactatatttcgatatcggctagtgattttgttacgaaattggtgacttcaataccctatacctaacttgattacatactttgtgtcatgggacccgtaaacatcaaaagttatagtgtcactactgcgagtttacattgacaccacaaagtagaaccctatttcggtatcggttagttgtttcgttacgaaactagtgactccgatacagtacacctaac

SEQ ID NO: 368641 - DNA, 675 bp, Cannabis indica
gcttgatactacctgtctccaaatgagcagttgattagtagtctttccaaccaaaagtgtagtcactaatgtctcgtatgattttggtaaagatgccaacaaaataatagcttgatcctcttcatcaattttgacatctacacttaacaattgagttatgcacttattaaatctatttatatgatccctaacatcttctccttgaaccatttttaattcatataaccgcttcatcaaatataatctatttgttagggattttgacatataaagcttttctaattttttccataactgaaacggacatgtttcattcaatacactatactttaattcaggagccaaacttaaatgaatagtgcttaccgcttttgcgtgcaactcttcccaatcttcatcagtcatactctcaggtttcttttcctgcagtgcctttaggagcccttattctaccaacacatctttcaccgtactctgccataaattgaaattattcttcccatcaaaaagctcgatctcaaattttatggaagacaccatctttgacattttctatgttaatctgaaccttggctctgataccacttgatgggaaaaatgataaacttcaagcgcattgaaataacaaagaaacgaagcaaagtaatttactcagtttgataaaactaccaaacc

SEQ ID NO: 368642 - DNA, 563 bp, Cannabis indica
tctatcactctgcccagaccaccgcccacaccacaaccacccttactccgcccagaccacccttcctccacccagaccaccactgcccaccacaaccgaactgcccacaccaccaaaaccacatctacacaccaacacacacacactactactactactactacacacacacacacacacaacacacacacacacacacacttaaaaatgcctaatttgtagggcatttaatagtttgttctaattgggtaatttcattgtaatattgtggtcttgaatgtaatatatttaaactaggattgattaaaatctttgttgttattcatctttaaacaatgtttatttttacttaatatttagtcataatattatcattttattacacttatgctattaattaaaccacttcattaatttataaataactgtatatttatttttaaatatcacattttttttacagttttaaaaaatcactaccgtatagtacatagattattataaatttctttaaaaaaatttaatagaatacacacatcaaacatgctaatatactatatata

SEQ ID NO: 368643 - DNA, 896 bp, Cannabis indica
gagatctgagcggaatgagtcatctaattttgctgcaaccactgtaaggtttctcaaactttatatgtgtttaaattacattgttttagaaattaatatttaggatgttaaataatatacatggtagtaaatctagatcctggtaaaatataatccaacacctcaatgcttggccgagtgaatttcctcactgcttagccaagtgacttttctcaatgcttagccgagtgactttccacaaaccaaggctaagtggcctccatcatgccatggatgagtgaccatccccaagccatggctgagtgaccttcctcaagtcatggaccattgaccttccttaagccaaggtcacgtgaccttcctcatgccatggtcgagtgaccttcctcaagccatggtcaagtgaccttcctcaagttgaggctgaatggccttcctcataccatggctgagtgaccttcctcaagccatggctgagtgtccttcctcatgccatggccgggtgaccttcctcaagccatggccgagtgaccttgctcaatccatgtccaagtgaccttcctcatgcaatggctgagtggccttgctcataccaaggtcgagtgactttctcccaggcatgttgggacacatattgttggaaattattttaccaggatcttagatctactcacaagtatgttgattaatatcctaaatatgaacttctaaaacgattataaatgtggacactactctatcactaagaggattcgaaacaatcaaggaagaaggaggaaagagataggcggctaggtttagtgtgatggctcaggtttttctctgaaaggaataagatgcaaaagttatttttcttgaagccatcactatctatttatagcatgccacatagggtt

SEQ ID NO: 368644 - DNA, 810 bp, Cannabis indica
cacaaggatttaggaaggttagagttgctactaagcatactccgcaccatgtccattaatgttcggtttcttctttctgcaacaccattttgctcgggtgtaccgggcaaggtgtaatgggcaacaatcccattttcttcaagaaacttcgcaaatgcaccaggtgcttgtccatcttctgtgtatctaccataatactcacctcctctatctgatctcactatcttaatttgcttgttgcattgtttctctacttcagctttaaatatcttaaagacatctaatgcttcacttttattatgaagtaagtagatatacatgtagcgtgagtaatcatctatgaatgagatgaagtatttctgaccatgtgactccatatctggactacatatatcagtatgtatgatttctaatatttcagaactcctatggacaccagttttgacagacttggaggtttgctttcccttaatgcaatccacacaagtatcaaagtcagtaaaatctaaggtattgagtaccccatcttttaccaaccttttaattctatcaatggagatatgtcccaatctccggtgccacaatgtacaggaatcctctttcataacacatcttttagtgccagcgtgaacatgcataacattattagtggtattattttgtaaattaaggcagtaaagaccatcagacaaaataccatttccaacacattcagatttataatataaattgaaatatttgtctgaaaatgtaaaggaaaaaccaaaaggtataagtcttgaaactgaaatcaagtttctagagaaactt

SEQ ID NO: 368645 - DNA, 565 bp, Cannabis indica
ctaaggtgagtatttgcaaatatgagagacacagctgtaggagtattcaactcgaactgggagggtccttatgtgattgaagcgatagtaggaactgaggtttgcaaattttctcagctgaatggctcgctcataaagaactactggaacgtggaacatttacgaccctactaccagtaaattaatgattgtaactcacatttttgatgtaatattttgaacttcagttgtgaataaagttagtcatttcttttttcaagtaattacaaagtgttattctttaaaattacttgaggggcatatgtgtatgattaaccggaatttatctagaaatacataatatagtgcaaacccaccactttaaattttttgaaattttttaaagttcttgatcaaaccattttgatgagaaaggaggatcaaactattatgaatagctttttgattaacaacttgtctgacgagaaacgaaaatcaaaagttataaatgagatataactcatgactcacaacacgaagccgaatactaacggctcgcattgtatagtgttgaccgaggttttcg

SEQ ID NO: 368646 - DNA, 947 bp, Cannabis indica
gtctaacctacatggcttgtgggttcgcaggctaagtcctaagtaatggacgcccaatgaaatgtcagaaggcagggagaattggtttagaccggaggtggtcggggtggtagaaatccccaaaacccctgtggacgcgatagaggccgcggtcgtgctccgagaggtggctaagaggatccacctcaggctttggctgattgggagcaaaggtttgctgagatgcaagccagaattgcgcaacaagaagatgagattcagagactcaggcaacgggatgctcctgttaagcttcccccgcaaccgcctgctgtggttcctgcagctcctgcggtgccagcagaatagcatgttgctggtaatcgtatggagcctttatatgagagattcaggaagtaagcacctcaagtgtttctgggaggccctgatgtacttaaggctgaacagtgactggctgttattgaaagaatattgaatttcatgagagtggtcgggaatgatagggtggcatgtgccacgtttcaatttcaggaggatgccttggtgtggtgggagatggtatccctcaccaaggatgttgctagaatgacctgggaggaatttcaggatttattaatgctaaatactacaatgaggcggcccgcagtccaaagcggaaagagtttgttgagttggtacaaggcgagggtatgtcagtgactgaatatacaaccaagtttgatcgctaggctaaattggcttaagggattgtaccaacggatttcagtaaaaaagagaagtacttggcggggttgaatgccaagattaagcatgatctggttatcactacaaatgacaccacaacttatgtgttaggctatttttagcctatattttggatcaactttacgttcgcttttcgttgttttaggatggaattatgcgggttttctatgttttcaggttct

SEQ ID NO: 368647 - DNA, 526 bp, Cannabis indica
actattaaacgtaatttatatataattttagtaaaaaatatataaatcagtttattcgggttatttgggcgggttagaataatattcaacccgcccaatatattcattgggcggtttcaattttttgtaaagttatccgggttgtattttttctcgatttattcaatttggttttggcggttattcgggttggacggtttgttaattttacctcggttacactttttgcgtcggggtacgagccgacgctaattgttatttttttgcttcagtcacacaatgaagcataaaatctctccttattttttgcctcgatcaaccaatttggtgagacgggttgacaccgacgcaaaaagtactttttgtagtagtgcatgagaaaatcagcctgacttcgtgttaacacacttccttctctgattatcacctgttgtacatgcattcttctctgcatactaatgcccaataatcccaagtagtactgcataaaagcttctagaacttctctgtaatatcccgaaaaaat

SEQ ID NO: 368648 - DNA, 979 bp, Cannabis indica
aatatatattaagggatcatttgtaagtattattttgttgtaggggtcaaagtgtggcatttaaccacccaagttatagatattacataactgtcacagtctagggttcgggtcgtgacacaagcattgtctataaagtgagttgtaacaactacatatcctctcttttgatgattgacagtccacatataccggtcaaagctattttacttttatttttctctaaaatttctctatatttttttttcttctcaagcttatgtagctccataatgtgagagcaaattgtattctttaacatcaattgaaacataagaacaatcgttttcacaaaatctataaattcactatgttcaaccatcaaggatactcatatcatatgaactaactttttttttcttagttctttagttcttgatcaagattggaggtgactacgagacttcattattaggaatgacatttgcatgttgttcctttaacactagacatctctctacgtgaagaggtacatgctttagctccttatcacttcctgtcgtcatgtgccctccctcaatgattacactacttttttattatatcattaatcgtttgcaaaagtaaatgatctcatacaatagatggttctccgtttttttttttttcgtccatgcactcttagtttcatctattttatcactagagtgcactttttcaaaactataatccatttggctagatttataacttacattaaggtttgcgtttgaaagtaactgtgtaattattagataaattaattactagggtggtaattacacaatatagtaattacactatattttaaaatacaaggtatgtttggatatgaggtgataattacatatgaattcctaatatcttgtttggcaaaatagttagtaattacatgggaaaataatatttttttagtagctaatatttaatatgaaaagtttttagtaattacacagtgtaa

SEQ ID NO: 368649 - DNA, 647 bp, Cannabis indica
atttgattcaggagctacacgctcatatgtggcaacatgagtaattgatcttttgggtaggccttgtgattttcttgaaagaaggtttggaaccctaaggcctagcggggagttggttatctccaataggcgcattaggtctatgccacttaggatcgaggatagggagttgagtgctgaccttatagaaatggaattaagagagtttgacatcatactggggatggattttctatccaactattcggccagtatagactgtaagcaaaaaatggtgacttttcagccagaaggtgaagatccatttgtttatgttggatcagttcaagggtctcggatcttgattatttctgtgctaagggctagggatctactacaccgtggatgtgtaggatttttagcagtggtgattgactctagcagacccgaatatttgggcctgaggtagtcagagttgttaaagactttctcgatatatttcccgagcagttgccgagattgccgccacaacgagaaattgactttgtaattgatttagcacctagagtcaaacctgattctaaagcttcgtataggatggctccaaaaagactcaaggagcataagttgcagctctaggggatgcttgatattgggcttacccaacc

SEQ ID NO: 368650 - DNA, 464 bp, Cannabis indica
aaaaatataacacagatgaatctaaatggctgtcagacacagtaacacaagagatttatgctggttcagatcctaagttcattgtgaacttagtcatactcaagtttgaaagaattaccaccaatctttattgataatgagaataagagatatcaatcccaggagctagctacaaggaaaaaatcacagcaagtcatccatggtgtaatccctcaacactcattaactcactaacccgagccaacataatcaacaatattgctcaatacaatttcccaatcccagctctctctctctcagatatctctctccctttctcactctaactcctctctctgctgtgtattgtccctctacttcttgcccttattcttgtgttttttctcttgtgattatctcttatgaaatgagaggagtagtctactttatataggccaatagacccaattgttgggttttatgcc

SEQ ID NO: 368651 - DNA, 961 bp, Cannabis indica
aaaatattttattcgaattatggtatctacgatacccacatatttcaatacaatctccgtaattaatcaattacgctttattattcatttactcatattttcctaatcaactcgtaattagtttaagtaggattataatcctactctaatacccacttaatcacatatttaataaaatatgtccaattaaaatatcaatatatttttcgggatattacaatggcactggcttcatcatccccgagaaagctgtccgagggaaggaaccaactagaggataaatgggctgaatggtccaagggaatgggcaccgggggtccagaacccatctgggaccgacctaaatagaggcctaagtgggagaaataatactccttggcatgattcccccaccgagtggaaggcatcctaaacctatggagacgttcatcgaaccctataggcctaaggctggtatactaacggacgtgaggaacataatgtattgttaaaggggacttaccggaacccaaagtgctggcatcgggagccccagtatttggtactgggaccacgggcttgggtttaagggtcctccgctccaacggagctccaatacgaagggccctcccggtggtcgcttgggccttaatgtaagccagctcctgttccctcttaaagaggtacttctggtacttgtcctccgccatggcaatgatttcaccccggagcaccttctccacggccagagctctcacgttcgggcagatgactttggaaagattgtagtcatccaccgactggtgccccaggatcaacttggccttctgacagtgctctatcgtgacaaactccccaacatcaagggctttcttgtcgtatgtggcaaaggtcttggcccgttgaagaaatatttgagtaggttcggtccgcatgtgaggggggatcctaacccactccgtgagaagctctggatggtcca

SEQ ID NO: 368652 - DNA, 635 bp, Cannabis indica
aaacaattaaaatcaaacaagaactactgatattaaaaagtaagtaattaataactagtaactaataatttaccataacagctaatggaacagcataaatcattatattaaagagtatacaaatggtaccaacaatggttgatcttttcttgtgagaatgtgtcaaagtcaaagtcaaaagagtgagaatagaaatgaaaacaagctcagcaagaacaactttaatccttttcttcttatctcaaaagattaagaagataattaagtatgtaaactcaattacaagacgagacccacttatagtaacaatcaaaatacttcctggattaataaaagggagcccataaagtgtccaaacaagacaatttataagtatagccaagtatggcacagctgagtattgctccattgattttcttttccatatttgaataaatgttggcctataattaataataataattaattaattagctacattattaaccacctttttatttgttcatcattattgtgacataataatcagggccggccctgaaaaaactggggaccaaagacgattataaaaatttttgggccccttaataaataagtggtccaagtaataccattcaacaatgaagcaaatgata

SEQ ID NO: 368653 - DNA, 651 bp, Cannabis indica
ttcataaaagtacaaaatctccgccggactgggagagccccatccccgggcggaagtaaaaaataaataagcctgaaagcaggcggtaagcttggggaatcagttggtatggcgcaaggccgaaaaatacaagaaagttaatgaaataatcttgaaggggaagcatggccccggacatcaaatgtgtctggctccaagccccgaagcctccatagttatggttgggcgtctccgcatctcggggcggccggtggtacgtctcggacgtcgagggcttgattccagccacctccacgatgttctccaactggtgagggcaagttagagtggagtgaagctcacccgcttcccatcccatagcacgaggtttgtacccctcctgggcaacgagacccagcataatgtcttctaggctagccagacacttaccccccttattggaagattttgagccggatgcagacatttttgattctaaaaaagagttaaaattccagcaattaggccccataccaaaccctaaaagaaaaaagggaatgggggtcccctaaccgctggaaagaggccccctccggacatctgtcaataagaaagccttagaaggatttcctggacaaaagtcaggtgcaaagatctcatagatggtggcat

SEQ ID NO: 368654 - DNA, 575 bp, Cannabis indica
atttgagggtaacgagtcttagcatctaacaaacgtttactgacatagtacaccgggtattaccgagcttggtcttcgcggattagtactgagctaatcgcatattcggacactactagataaatggataaaacttctccaggcattggttttgacaagattgggggctgtcccaaatgcatttttagtgcttgaaaagcttcttcgcatttttcggtccattggaacttcttgttgccttttaagatttgaaaaaattctttgcatttgtcagaggatcgtgatatgaaacgatttagagcagcgactttacctgttagactttggacttcttttggcttagtcagagatcgcatttctactaatgctttaatcttcgcagggtttgcctcaattcctcgctgattcaccataaacccgaggaatttccctgtgccgaccccaaagacacacttaagaggatttagccgcattttgtatcgtcccagtatttcaaacatcgcctgtaaatggttgacatggtctttggcatgttgagattttacgagcatatcgtcaacatacacttccatggt

SEQ ID NO: 368655 - DNA, 937 bp, Cannabis indica
aaataatctagataattttgaacatagccagatatttatcactttttgaaaaagtttgttatttttatttaaattaaattataaaatcagataaatgatatttatttattattttattttattagattttttaatttgtattttaaaaataacataaatttgaaaagttagttgataattttgaaagatatttaggtttgctataaacctatttttcaaattataagtttaattttaaattaattatttaaaaaaattcaaaattaaaattattttgtatttaaagatttatgaatttaattaattaattatttattttaaattaaatacatcctaaccaactatccaatgtttttacatgtgtgttttgtttattctttactcaaacttgttttataaaacttattattgtttgatctaaattgttatggttaacttgttgacagatccaatgatctgattttaaccatactcccattgtcaataggtccaataaataatttataacaggtaaatttgtaatcttctttattcagtgtataaacctagttacattataggatccatccaaatcagtgtgtacatgtgcttatatgtttgctttgggcctagatacatatagggagcccatttaattttgatgattaaaatggactaggttgctaaactgaaaatatcactttgatagtatttatttaggtccaattactattgggcttattcaatgaataataattttttaattaaggttaaatttctctcttttgggccttgtctgagagttaggggccattagtagtggatacgacatactgagcccaacactccctcacatgaataaccccaactgtgaagtctcataccttatttaaatgattgtaataggttaattacactagtttaatctaataaaattgattggtaacataattaattt

SEQ ID NO: 368656 - DNA, 1118 bp, Cannabis indica
ttttttatcaaccgtagtttaaatgttgtggcggatggtgcagctaagaaagctaggttagctagcgagttagcttgtttgtatcaaggggagggagatccccctgtgatccccatctcttttattaattaatgaactcaaagttctttcaaaaaaaaaaaatccttaaatccaacaatctcaatagttcagggtgcaaaaatcataattagccttaaattttattttattttattgcaatcagagatagtttctctacattcgagctaaataaattaagtaaaagcttgaagtttagtctttatgtgaaataatgttgaaaagaaagtgggaagttaaaaagaagtataagatttctgctctactttaattgttcattaagatgattatgttgttttgaatatggatggcatacaaggaattcaccaactacaattatggcatgttgtttgaatagtggaaaatataattcacaccaaaagaagtagattaacgtttgttgaaactttttattaaaaactaatattaattttatgaaaaaaaatcctataaaattgtataatgggcctttgaacactagtagtccaaacagtttccaaattaaagacacattaaccttgggcctaagatggcatccttagtagactcataagtcataataatggattggtccattctcatatgggccaagtctatccagtacacttcaaaaaaactagcaaaaatattgttgtatggagttttaaatatttttacagtttaattattttttctttataaattacagattattgatattttcatattattttgtagttattttcttattttttaaattatttgtatgttatctttatattgttttattattgtttctctattaagtctatgtttttttttttgttatttttatgttttcttaataagacaatgtaaacttgaaactaagaaaaataaaaaagccgtaaaataataaaaaaatatataaaatgtaaaaaaacttatttgaccgtaagaacattaaaattttgctaacaatagtactttgtgttatttttatttatttagggccagtttggcacaactgtgctgtggggaaaagcagctgtagctgtgct

SEQ ID NO: 368657 - DNA, 720 bp, Cannabis indica
cattgacaataaaccaagaaacttacccgagctgaccccaaaggaacactttaagggattgagttttcactgttatacttttctgaggactttgaagcattcatccagatcctctatgtgcccccaactttcttggatttgacgagcatatcatccacatatacctccatattttgtccgatctggtctttaaatattttttactagtctttggtaggtagctccagcattcttcagaccgaacgacattactttgtaatagtacagacccatatctgtttgaaaacttgtatgttcttggtctggtggatacattatgatttgattataccccgaataggcatccatgaagcttatgatttcatgtcttactgttgcatccatgagctaatcgattcttcgaagtggaaaaatagtccttgggacacgccttgttgaggtcggtaaaatcaatacatactcgtcatttttttgttcagcttgggtactggtacagggttagccacccaagccaggtagaaagcttcaatgatgaacttgtttgcgtgtagtctttctacctcttctcttaatgcttgcacctatttttttttccagtagtcttctcttttgttggacaggacgaaagtttgggtcaatttttagggcattagacatcatagtggggtcaatatagactatatcctcatgtgaccaggcaaaaatgtctaggtttgctct

SEQ ID NO: 368658 - DNA, 732 bp, Cannabis indica
ttatccgttttttttatttcttagagttgatgcaccctctgaagttgttttaatgtttatttaatttatatattataataaagttgttataaagttgtttgttgattgttgatacatatatttaatttttcatggtatatatatattaagattgttattatgttatttatttatttattcttaggtattttagattgtcgacacaatacttagtttagaaaatgggaattaactaaaaagatatataagtatttattttaattttgtttaaacaactaaatataggaatgacacattaactctgttataatatgcaaataaattaaatatcaacatatttcatcaaaacttaaaaataaccccaaaataaccttccaaaaaataaattaaaacttgaaaaccaccacaaattgtccatatatcaacttattatattaacactatagtttttccattggtgagttttacttgttttattaagattgtgtgttgttttttattttttgtttctttggacttatctacactatttattgatgtccaattgatttacatatgtagatagtgttgttatgccaaaaattttaatgttattagttttttttaatattacttatttatcaatcaaaattagtattatttgtttatggttattacttttattttttaagatttatttgtgttgttaattattaagtttgtttttgagtttgactataatttgttggtacc

SEQ ID NO: 368659 - DNA, 414 bp, Cannabis indica
tattagttaattaaatatctttagtgagtcatttatagtagaatatattatcttaactattttgggtttgttgaaatataacttaagaattgtctctcgcccggactaaaaagttttttaaccacaaggctaagcacaacagggatagaaaaaagttctgagcaggtttctattctatttttcttcgacttaataaaactattttcttttagtgtgttctgttttctttttctttttcaaaatatggaaaataaataaaaataatttattaattaaaatggaggacaattttggtattataaaaagattactcatcaaactcaaaaaaaggaaattttatttacatcccaaaaatttaaataaaaaatatacatacatgacttagaaaaaattatgcaaatgaaatcaaaataa

SEQ ID NO: 368660 - DNA, 733 bp, Cannabis indica
ttgaaaaaagattagaagctcataactagataaaaattacaaaagataaacatacttgacatgctcttcaaagtgtaaaaatggtagaaagaaaatggtaaaaatgaagagtgtggaatggagaagtgttttgggttgaagaggtgtttagggggtgaagagatgtgttttgaaatggtcttccaacaccatatttataggcaaaattagagaattaaattaatcaaaataaaataaataaaatgattaatttaattagtgttgggaagagaatggataaatagagtatgtgtaagagtattggaaaaaataaatatttgtttggatggaaaaatagtgaaaagatagggtaaaaataaattaggaatgtttatttaggtgaaataaattgggaagagtaaataggtatttatgtgtaatgtgtgggagaaaatattggcattttggcattttctaatcttttttgggctgagagaaaagcaaaataacaattcaattttttcttcttctttttcttctgcaggggacacttggcgtggcttggttggaggaggagctgacggagtgcatgcgtggcgttgctggttggctgggaacgctgacgaggcgggaccagctgggaaggaggcagctgctgggcgcacgcgtggcaggtcgtgattggagctgaagctgactcgtgggacccgcgtggaagaaaagcagcaggaggaaactgattgccactctcggc

SEQ ID NO: 368661 - DNA, 821 bp, Cannabis indica
aaaaaaaaaagataaaaaaatggcttaatatcacttaagtggccgaccactatagtagaccccactaaatttcaattttgttatttatttaataatttatctttttctttcacaaatgacatattttaattttaaacctttaaatgtcaaatctatttatttaataattataactaattatcaaataaaattgccatttaacttatttattaattagaccttacaaagtctcttaattgacaaataaactataaaacctctttccttctgaattaagtcattccttagtgaaaattcataaataagacattgtctattttaaaattctaattggttaattaaaactaattaactgagtctacaagccaatattatctcaactagtatggggaccatgggcctatataatcaaacttccaataagtagatctagaatttaccgagtaaatttcctaacttcttaattcttcctgactccactatagattcagaattgtactcttaattatatagaacactctatatattccaagatataaatacgttattaattatccattgttataatccaaataatcaaagattctccatagatgatttacattgagtagggataaatttaccgttctacccttcaatatattttatccttaaaatacttagattcctataaatgatatttcagtaaactaatataattactgaaccaagagctcttccattaatctctattaagtcaagctcgaatgaaatcatcatttcacttctatgtcaagatagaagctatagattttgtaactatgattaacgctcccactcaa

SEQ ID NO: 368662 - DNA, 698 bp, Cannabis indica
tgaatgtttatagtttaatcattatgtgataatgaaatatataattagctatttaatgtatccttctttattacttttcttgttgagtttatgtgactcatgggtgctctgtggtgcaggtaagggcaagaaaaatttagaatagccatggaatgatgatcttctctagcaatgtacatattgatcccaccggcttgcgtgtcgagttgtcaggagttgttttagattggttatatctactgtattttgaattgctattgtatatagtcttttgggtaaatcttttataactcggaacacatttttactatcgttataatgtctatttttagtgctttattttagtcaagtttttattatcctcacagtttttaataattaatttatatattagtattaagctagttttataaaatcacacacgtgacattcctatgaattagggtgttacaattatggtgatctacttggtacttgtatggttaatagaagaaaggtcaatcctgtaatagtttcgttgggtcgaatattggaggaaagtcaaggcatcagtctaatggcttacttctcccatgaagataaaacgagcagtgtttgtaatccatgacagtaatgttggattttatgccctaaataaaactcatttcaatataatcggatttacttattaatatagatcagaaataacatttaatgtt

SEQ ID NO: 368663 - DNA, 725 bp, Cannabis indica
gggcacgaaatatagcttcatggacgcttatcggggtacaatcaaatcaaaatgcatccacccgaccaagaacatacaagttttcgaacagatatgggtcttgttatccaaattttggcacactgatgtggcatcgcctaatggtgacatgtggaatcaactttgaatatctgctcggtgagtacagcccgaacaggatgcctcatatgcatgccgaagcaaagcgatcaaaaatccttgcagagcaaccaacacttagtgaattgagctttcacatcgtgagtcatcaaagaaatccctataacttgggatcacattgcaaagatatggcaagctgtccaaatcccacgaccagtgtattttgcatttatcatgcaatctttctgcttatatccattctaacgagaagggaaacacttcctctcaaagttcctagccctataaatagtgatgcattatctaagatttcatattcagagatattgtagtaagagctataagaaaaggaacatttctccttattcttaagtcaatacaaataacgaggataggctattaccaaactgctcagggttgaacctctacaaaattcttgtgtctttacattgctttactatataccaattgctataaattactcatcacttactaaataagactcactgtcgttggctaaaaagtgaggtcaacattttggtgctttcattgagagcagaatcaagaat

SEQ ID NO: 368664 - DNA, 503 bp, Cannabis indica
atccatttaagccctcttcaattgtgtagtcccatacctaaacagtctcagaaccatcccacttgaccttccccaggcggtgtggaattgcacagctcacctggtgtttctccttacggatcacgggactactgactgtcacaccacgtgaattttgtttgattattttatttttaaaataaaataaattaaatggataattatcttttgattattatattaaatatattataagataatgtattcaaaattaaaagataatataaactaaaagaatatagctaatttcgattattcaattatatgatatttatttttgaatttagattaaaataaaaattatcttttattttatatgattaaataattagtttttttataatatatatatgatatatatcataaaataatacaatagattaacagaaagagaacataatttgaaagttatttttcaatctcattttctttctccctctctctctctctacacgacacacata

SEQ ID NO: 368665 - DNA, 745 bp, Cannabis indica
tttttgatggtttttgatgcctttttacggcttatgtgccttttatggcttttgtgctagtcttatggcttatccctatttgtttaaggtagttttgtggtaggatcaatgagcaagggaagtgatccttttcgtgctcatattttctacttcaacgatcttttcgcttttaacagataaatatttcaagtccttttaagtccttatatttaatatggattacccctcgttctttcacattacatttctttattttattgtgtggtaatagagttttatttttgttgttttgtgggttatcttgtggaggacctacaattatagggaatttaccgataactttaattttaaatataatctgtttgatgtgaatttttaacagttttaattagggtgctagtttgttgttgctagccaaagggtaatacctttggctagttttacttagaaattttattggttttttagtttttaagaagtgttgagctaatgatatgggttgtgtgttactttctgagtttatttattaatttattttagagattgtcattctaatattactgtgttttttgatttgggttgcgatattttttcagttccgctagctctggcgaccactattattattgggaatgtatttttcaatatgatagggtgctgtttgaagaagttataggtttattgtctatatttttgggagtagtttctagggcggacccacattgtagcgaggggggggcagtcg

SEQ ID NO: 368666 - DNA, 730 bp, Cannabis indica
tggttatattacctattgttgaatgttatagtttaatcattttgtgataatgaaatgtataattagctatttaatgtatccttctttattacttttccttgctgagtctatgtgactcacgagtgctttgtggtgcaggtaagggcaaggcaaagttagaacaaccatgagatggcggtcttctccagcaatgtacatattgaccctaccagcctgcgtgttgagttactttaaagtgggtgtgtctgctgtattttgaattgttgttgtacatcgtcttttggataaatctttaataacagggatccttggaactcctttttacagccgttttaatgttcgtttttagtattttattttagtcaagtttttattatttttacagtttttattaattaattaatatattagtattaaagtagttttataaaatcacacacgtggcgttcctatggattaggacattacaacttggtatcagagtagccatggttttaaaggttctgaagactggtcgaatatgtacatgtgctgcgaagacaggtcgactcatggtatagtaagtgtttatgttatttgctattgccttacctattttgacaattataatgtatgataagaagaagtagtgtgtgaatagcatatgcatattgatgttgatattgtttgaattctaaatggttgaaggttttgggttacaagatattggatctgttgggttttgtgccct

SEQ ID NO: 368667 - DNA, 671 bp, Cannabis indica
ttagctactaacctagctttaaatttctttgaaccatcattagaatcaccttccttttctctgaaaatccacttgcagccaacaactctctttccagcaggtttcttgaccacaatccaagttctgttctttctaagtgaggtcatttcttcttgaattgcttgtaaccatgccttcccattcttaccattcactgcttcatagaaatttgaaggtactgagctgtcaatttcatcagcaacagtaagtgcaaaagcaatgaattctgcatatccaagtctatcaggtggctttgtttctcttctttctctgtctctggccaactgatagttgctgagatcctcctggtcatttcctgatctctcttgttcttcttcaatctgaatttcctgtgtctgatctgaatcatttggttccacctcaagctgtaaactgcttgaatttgtgtctgcagcaggagcagtttcagtctgtattttggttgttttcatggccatctcatcctctctaaacacaacatccctacttatgatacaccttttaaaaccattttcaagacacaatagcttgtatcctttgatcccatcaggatagcctaggaatagacacttgatggctctaggttgaagtttgtcttgcctaatgtgagcataggctgtgcatccaaatac

SEQ ID NO: 368668 - DNA, 534 bp, Cannabis indica
ctctctttttcgctctggagtttacttaacagcgaagggtactaaaatgaaatatgtgccaatgctatgggtatttataggcaagtcacgaaaagaggtaactgcatcaaagggacctcaggcgcctcagcttcccgcctaaaaaacgaatatgggaaatcaaaagtaatcgagtgcaaccatcaaccggggagagagaaaatcaaatttcaaaatattaattgtcaaagcatttagtagccgaaaatcgaagggacgctcagtcagcttcacatcaagtctcgaacggtcatgcttgacacgtgtccccatccaaaggcaaagccagcccgaaagaaatctacacgcaacctcagaggtcccgtacagacttggggggcaaatgttatcccaaattttgcactctgacatggcatacgagaatggtgacacgtggagtccacttggagcatctgctcgggaagaatgaaccaagcaggatgcctcgctaggacatccagaataagatattcagcgatccgtgcagagcactca

SEQ ID NO: 368669 - DNA, 613 bp, Cannabis indica
aaatagtgatgcacactcactggacaagtcgagattttaccctagagatattatctgagcattcatattcagagatactgttgtaagagctataagaaaaggaacctttctccttattcttaggtcaatacaaataacgagaattaggctattaccgaactgctcggagctgaacctctataaaattcttgtgtctttacattgctttactatatatcgattgctataaattacttatcgcttacaaaataagactcaatgtcgttgactaaaagctaggtcaacaaaagttaagcagtatttataattatcccccctgtaaaaggattttgaccccaaaatctaacttgaacaactgtggataatgagtcctcatgtcggactctaactccctgttggcttcttccaccttgatatttctctagagtaccttgaccaaagctatggtcttgttccgaagaaccttaacttttctgtctagaatctgaactggctgttctttgcatgataggtctgattgtagctcaagattctcataactcagcacatgagtaggatctgaaacgtacttttgtaacatggaaacatgaaacacgttgtgaactgttgaaag

SEQ ID NO: 368670 - DNA, 525 bp, Cannabis indica
ttttttttttaaattttgaaattaccaaattgcctttgataaatcataatgcagatcttctcaaaaaagaaaaaagaaaaaaaatcataacacagtacaatatttcataatcggagaatatttattacgtgtaagacaaatgtttgcctaaaatagaaagaaggaaatcggattattaattcaagtaattttaattgtcgataagagccaccaataattaattaattaaagagttttattttaataattcaactatattatttttatatatataaaaaaaattattaattatataatacatattatccgcgggaaataaataccatgcatgcacgaccaccccttctccatagaattcaattcaaccttgacaaaccaaaattgttaatataggtaatatttaataataaatattaattttaaaaatattaaactattagatttgagtctgatagcgaataataaaagaaaattttagtgcatgtttggcatcataactaaaaaattgttttttgtttttaaaaa

SEQ ID NO: 368671 - DNA, 639 bp, Cannabis indica
agatcacttgatcaatggagaaaagctcaattaaatgaaaattacccttccttgaatcctcaatttttcaacaaaggtgatgagctttggactaaacatgtgacaaatgagatcaagcttaatgtggacgctgcaatatttgacagcagcagccggtttggaatcggaattgtggtgtgggactgtgaggctgagttactgtcggtggtgggactgtctcggccagggaagcctaatcctgctgttgccaaagccatgggaatacgggaggcgctgagttggttgaaggacaagccgtttcatcaagcgtgcgtggagagtgatagcttagtttctgtacaagctattaatagttcggtggtgatgtattcggagtttggtttaattattcaagattgtaagtccttgttagagtctatgaacaatgtttcgttaaggtttgttaaacgttctgctaatcgagctgcacatgtggttgcacgtcagtctcgattatttgttgatcgtatgttcacgaaggatgatatcccttcggaacttaaagttgttcttttgagcgattgctcatgagttaatgaagtttatctttattcaaaaaaaaaaatatttactcatctgatttgggtacggatttttctt

SEQ ID NO: 368672 - DNA, 555 bp, Cannabis indica
ttatcttaggcccttcaagtctgtttcccaaatcttgggttttcgcagagctagtggcgtgttcaaatcataagtcaaatgatccttggggactcaatggctcttttccaggacgatgattggctccttcataaggattattttcttcgttgtcagctataagaggaatattattttttttgtagggaggattttttctgagctttgtcacgaaggctctcaatgaaagcaccaaactgttaacccaaattgttgttaactaaatttgagccaattagtgataatctcacacagaaaaatacaaacagtaaaggaaaacacaaaggattttttacgtggttttgcagttaaaattttgcgtagtccacgagtcattcttattagatttctaattatttttagggccttttccttatgatttttttatccatttttcagtctattctgcctctatttataatcacatagtaggcagttaattacatggttgactgatatttttacaatgattaccccctgaaattatggggtctgattacatatcacgttaaataa

SEQ ID NO: 368673 - DNA, 798 bp, Cannabis indica
aatcacgtaatacgcctatgttagttagggtgttacacacctgagttcatctacgaaagataacacacgagatgagtgttggatggaatattaaacgataaacaagcaaatatgccgaccaggagtactcaacagattaaagaacggctatgtctagagaaaagtcagaactcaagaagtcaaaaaattttcttgagttagggcaaaaaagttcatgaagcttagaataagcaagatgaaaggcggacgcaatgcagttcagagacaagctctatggctataaacccacatgaagacatgataaagaagaatcgcagaagtttctaaccctggggtttcctaagcatttttctacatcacagtaaaagttgcattcaaaatttaaacttgcaaagataagcataaaggaaatcaaaaacttactcaagattcaagtgtctgggttcaagcaacgtcaatccaaccagtagttgtatgaaggcacttcggcaactttgaagccagaaaattttcttttcgctatgcagctttcttagcaaagaagggtgatgaaatgagtttatgtgccaatgatgtgggtatttataggcaagtcacgaaaagaggtaactgtctcaaagaaacctcagatgcctcatcttcccacctcaaaaacgaatatgggaaatcaaaagtaatcgagcgcaaccgtcacctttggagagagaaaatcaaatttcgaaatattgattgtcagagcatttattagccgaaaactgaagggacgccaagtcagcttcacatcgagtctcgaacggt

SEQ ID NO: 368674 - DNA, 579 bp, Cannabis indica
cagaaactatagttatcagaattaaaacaatatcaacgtcgggaagttatatgacaagcaccaactctccatcaaagtgaactcagttctattcccaacgaggcatacccatatgataaggcttccttatatctaaaatatgcattcatctcagtccaataagagtgggatattcatagctgtgtgaattcttaataaaaatcgcatttacttagcgtgatttgtaattaaataccatgatttgagggaataattactgtaaagattacggtcaacttttgtaattaactacccactatgtaattataaatagtggcagacataatcaaaagggaaggggaaaaaaactaatacaagggaggccctaaaatataatcagaaatctgaataagattgactcgtggactatgcagaattttaactacaaaaccaagtaaaaaatcatgtgttcatatttttatagcttttttattttttacttgtgtgaaatcgctactatgaggctcaaatttacttaacgaaaatctgcgttaacacctagtattaaaggtttgagtttatctaaacctatggcttgtg

SEQ ID NO: 368675 - DNA, 542 bp, Cannabis indica
tggtttttttgttggaattgctgctcgaatcctctcttgtactatttgattagtttttaaaagaacttaaagaagaatacgagtggaaaaaggcagaggtgtgagcttatttgaaggtaaaagccatcgaatttgagtgaaaatacaagtgaaattgagtgacaaattattttgagcgaaacacgtgagggagtgtggtgaggtctttctttatttgttctaacattatttttgcagaattcaatcatgtcaaaagttctagaagaaaataccggtaatgaaactacaccatctacggctccaattctacaacttcaagctttgataggggagatgaggaggatgatgagagaggagtgtgaacaaatacatgcaatgttagataggatagaagagggaacacaatggaggccacggaggaatagggttcaccaaagggatgataatgaagtagatggagaagggataatttctgatgacgagtttgatgggttaccagcgggtaaccataggaggtatggtcgagagagagagagagagag

SEQ ID NO: 368676 - DNA, 402 bp, Cannabis indica
ctgcacccaatgtaaggcttcctaaactttatatgtgtttatttagtccagttcctagtctgggttcgggtccaggtctcggtcccagtctttatctgggttcaagtttgggtccttatgagggtctggatcctggtctcggtccctggtctcaggtctcagcgagtgttcaggattaggttaggtctaggtcccagtctaggttcgggtcccaagtctcatgtcccaatcctagtcaagatcccagtcctggtcttggtcttagtgggatatggtttgggctcggttctcatcttaagtctgggtcatagtcacagttccaattccaattcggggtccgagttttgttctcggtccaggttgggtcggggtccgagtcttggaacctggtctgggtccagg

SEQ ID NO: 368677 - DNA, 656 bp, Cannabis indica
ggaggaaatttgttaaaactgaaaacttataaatatggtaaacctaagttttaactccacctaaaccctaaagttaacctaaaaattttttaaaattttttttttacttttgccaaaacccagtaaagaaaaacgatgatggaattagtaatgactaaaaataaaccaagaaggaaaagaataaacacttactggttaaagaagtatgcctatgtacgggagagctttgtatttgggttcgagatgagtgacgagatgaaatctggggacgttcgagattggagatcaaatctgaggaaattcacaaaaaatatgtcaatgacaacgagggcatgccaagcttcaaaaaatcgagattggaatttctcagaaaagcttgaactttttgaaaaagcaaaaattgtggaaaaatgggtcctttgctgttttatacttcaaacttaattaccgtagcattaaagggcagaagatccaacagatagaaatgggagagaagtggaaaagatgattcattaatgctaataatgagcctcaaaaccattaaaccaccaaattcaaagacatgcatattttaaaattggattatgatggaaatacccatggtaatcatttaaaaagcactttttattaaaaaggactttttaaggggcaattgt

SEQ ID NO: 368678 - DNA, 550 bp, Cannabis indica
acaaagctgttaaattgggtacctacgaactaacgagataattttttgtgactgggatttatttatatcaaagtaaattttttgatgacttatctgcatcaaagttaaaatttttggagacttatgtcacaatgtaatatcaacatgtgatattttaaggggaattaacgggtcttttaaaaaagagaaaaaaacttacaagaatgtcaagccactacaaaaaatagggtctataaatgtcctcgttagaacttcacatgtcctcggtaaaacgatataacgaggaattgtcctcgctaaaaagtcctcattagaggcacgtcgttagaagttgctttctaccgaggacaacagtggtgttctcgttaaagagtctaccgaggacattgttgtcggcacaagcttggatatgttgtcggtaaaaactttcattttggcctaacgaacccatctataccgacgacattgtcccaggtacagagacttttaccgagaacaatttttttttttttataaaccacattttttttattcattattaattttcata

SEQ ID NO: 368679 - DNA, 799 bp, Cannabis indica
aaagtgatctttgaagtggtattgactttgtcagatcatgttatttaagagcaggtgcactgctgctgtgtaatacaaggcaatacattgctgcatgtgtattatgaggtgatccatcactgctgtgtattatgaggtgatccatcactgttgtgtattacgaggtgattcatcactgactgtgtattatgaggtgattcatcactgattgtgtattacaaggtgattcatcattgctgtgtattacgaggtgattcatcattgactgcgtattacgaggtgattcatcactgactgtgtattacaagcagctacaagagctttgttgcgagatgttgaatgtttatcaaaataacattcgacaatgctaaaatacctcacttcatgaaccttgtgatctttatttagatgagatcacctcacaggttgagtcctgagtttttttacctatcccacaatgtatttattgtgagaatttattatttatgccacgtagcattcaatttgaattttccattaaatagtctaaaaaataggtataataattgcctatgagttagtttttcgtggtttacacaaagctgacttattatgcattgccttcccattctttttggcaccactctaagcagcttgtttgtgtttctcatgatctatgcatggcagagtaggtgctacgacctgaagcatgtgagtatataatacgaccacatgcgtgagagtgtgtactacgaccagatgcgtaagagtgtgtactacgaccagaagcatggggagtatgtactacgaccagatgcat

SEQ ID NO: 368680 - DNA, 552 bp, Cannabis indica
acccggtgtttccccttacggatcacgggactactgactgtcacagtttgtgtgaactttttgggttttgggtccgtgtgggttttgatcggggttttggggttggcctggcctttttttctttttcaaaaaatataatttttcataaaaaagaaaatgaaagaaagaatataaaaagaagaagaaaataaagggatttttataaaaatactttgaacaaaaaattataattttactgtcacacgggaattttttacaaaaatattgcctttttataaaacaatcgtaaaacaatacaaaacaaaataaattaaaacaacaaatgaacagctaaaaaacaaccttaaaaacttacatagtacacagtataaaacttacacattatttttgaaaaaaaaaaaaatcgctccacagtaaaaagataaaaaaattaaaatttcagtatgtggtgtaaaaattccaaaataaaaacaatatatcattgttgagaatttagttttttttttctttaaatttatgtttttaggactgaatagaaaatgtatacaaaaa

SEQ ID NO: 368681 - DNA, 1179 bp, Cannabis indica
gaaacaataaaagtaagaagtataatttagttattatttggatattacaatttaaagaacattataaaaaaataaaaaagaaaaattcaatatctaaaacaatatatatttgacaaaaatacgtatatattttatatatgggacacgtattttgtttcgtgatgtactttcacagaatgtatttcgtggtatattagatgggtctcaggccacgttaccattttttaacccaatttacccatacgattaaccccagccctctagatcaaataattcctacatctaacacctgttacgtatatcacggtaatacaattccgtaaaagtatatcacgggataaaattagtgtcactatattttatatattagacaaaaatatatatttttagtaattaaaataaaaaataattgacaaacaataataataataaataataaaaaaaactatttagaataaatgaataaaaaaatatgaaacttcattggatataaagttgaaaaatacatttttttatccattaatcaaaagtaccctcatattatattttattaaaatatactcacttttttaagtgggttacttaatatactctcactctttacttgcgtttggaaagccataatgtaattggatttgtgtgtcattggaggtaattacacaatttggcatgtttgtctgaccatgtaattacactgtaactgtgtaattacaagtaattgaggggttccaattacaatctccaattctcatggcccaccatgagaattgcatgtaattacagtgtgtaattactaaaaactttccatattaaacattagctactaaaaatattattttccatgtgtattttgccaaacaagatattaggaattcatatgtaattaccaccttatatccaaacacaccttgtattttaaaatatagtgtaattactaaactatgtaattactatcctagtaattaccctacttggtaattctatagttacttccaaacacacatataatttacattaaccgtgagggtagaaaaaaaaacttatgttttcaaagagttttatgtagaagattatataccttaattacgaaagcgactttcgaaggcatgaacctctttacattaatatatctatctatgtctaatcacaaactatttcaggagatgttcactgcagggc

SEQ ID NO: 368682 - DNA, 931 bp, Cannabis indica
aaaaaaaaataaaaaaaaacgtactaaaaataagctacagcaaatattctaaaatttttattcattttaattaaagtttatttaaaatattattcatttataaaatattattcattactctaaacatattttattaattatttttgtacggggatatgtgtatacattaatattacatatttaaaataaataaaatataaaaacatttaaaaaaatatataggatttgaatgatgtattttaaataagttgatgcatagtgtaatacaaagtgtgttgtaaaaaaaaaaataagattttgatgatatattttaaatgataaaatagaaaagttgttaaaagtgctcttagcctctataataatgtcaagttcttataattattttgctaagacggtcaaaattgaaaggctcaaatcaaagcactttggaaaatttcatttctttctttagcaaggccgacgttgagttaattttagatttagaaaaacaattttttttaatttttattttttctttattttttatataaaaaaaaatataaaacaaatgacatttttaaaaaattgttataaaattgttgatccatatttttcgcacaatgtttgaagatctaatttgcagtgttaacccaccaaattaatttgaagtaggaattggaattagaagtaactagtcaaaatttatttgtattatatttgttctaatttaatgatatatattaatattaattaatatttgcttttggaaagcgtttaggaatatatcgtataactcaaaccataaagttgtctactaactgcatctacatttgtaatctttttccttttatgtgttaatcaaatatttagagattttgcacgaagttattagggctcatcataatgtcatatataatgtatttaatcatcaaaaaatatatattattatgta

SEQ ID NO: 368683 - DNA, 664 bp, Cannabis indica
ctttaaaacatcaaataagttaaataggtcaaaattggaactgttaaagcgaacaaccctaaatattttatatatatatgggttcttagcttttattatttaagcttatgaacttaatcatcatgatggcattaacaattatttataggttaattatactcaaaattagaggttaaaagaaagggagacacttagcctaattttgtgtaacaatctcacccgtgattggctcatgtgtacgtggcacacttctatggcaccacttgtcatcctctgattggtttatagcacgtgtggctatcactcatcaaaatcatacatatgaagtgaaagaggatatagcatcatataaagaaaaagaaaaagaaaagtcggttgatatgattagtaatttagtatgagtgaatgtaataaatagggttgtcggtaatgttaatttatttttaatactttaaattcgttgaacacatcaattcaggtaagaaattttttttggtggagggagacatctttgaagcactagggccctaaggtcttctaggagatttaaataacttgttatcaaaggaaaaatgagagcttctattttcttcacttttgattgactctcatcactaacaaaaattattattattaattttactcataatcaattctatttaaa

SEQ ID NO: 368684 - DNA, 574 bp, Cannabis indica
tttattttaaattagaaataatgacagccactaatgaggagattgagttacaattgacgtatctagctacatatctagttcaatattattatataacatacattgaaaaagactccttgtatgaattcttctcaaactggtcatatgtggttgatgaaaatattacaaggaaatgaaagtagatgttatagaatgtttaggatgaagaaggatgttttcatataattatgcaataaattagaagctaattatggatttaagggttcaaagagaatgtgtgctcttgaaatattaggcatgtttttatttacattaggttacggtgctgaaaatcggttaacacaagagcgattccagcactcagctcatgtgagacagttagtcgatatttcaacaaagttttagatgttttatgtcatatgagtatagatgtattaaaactaccagacccagacttttaagatgttcctggagagatattgaaagattccagatacatgcctcattttaaggtaagtcatactttaaaattatatattttttctagctagagtatatttttataatttagtgt

SEQ ID NO: 368685 - DNA, 558 bp, Cannabis indica
tgtagaccaggtgatacccctgtcgttaaaggagacaaattttgtcttaaacaatgccctaaaggaagccttgaaattcaagaaatgcaaaagattccctacgcttcagctgttgggagtctaatgtatgctcaagtttgtaggcatctgaatatacgtagcgtacattgttggagtgttaggcagatacttaagcaatccaggaattgatcactggaaagcagccaaaaaggttatgagatatttgaagagaacaagagagtacatgctcacatataggaggtcagatcactttgagatcattggatactatgactccgactttgcgggatgccaagatagtaggaaatctacttcggactacatatatctgttaggtggtggagctatatcatggaggagtgcaaaacaaacactcatagctttgtccaccatggcagcagaatttgttgtgtgttatgaggcatttaaccatggtatatggctgaggaaatttgtcattgggctgcgcattgtggatggaattgaaagaccacttaagttgtattgtgacaataa

SEQ ID NO: 368686 - DNA, 754 bp, Cannabis indica
ttttttttttgaggtctctggcagacgaagaagatgaagaagaagaaaagaaaagaaaaagaaaaaaaatatttttaaataatatatttatatatttattgttattttttaaaattaaaaataaaataataatttggaccaataatatttcgacacgtggcaattttagaaaagtaaacggctcagttaaaattaggactaacggacaaataaaaaacatgaccttgaggactattgccgctatttttcgaggttggggacttatctgtatcaaactgaaattttttgaggtcttttgtcgcaaatttccctaataattaatactatacaaaattactcaaacataatatttattattatttaatacaataggatatttatacattctacaaaacaagcccttatcacattattttgtatcatattttagtaattaaattgggttgagggaattatagatgtacaaatgtaatatccttcctaaaaatcattattaaaagcttttctcatggctttagttcaatttgtaagagcactcacaacaagtgagttgtaatagctaaaaggtaaaaaaaattgttaagagcttaaaattaaactccaacaaatgctttaaacccttagctattataactcatcctaaactccgagaaattcttctctacatttagctcatgaatagtaaagaggtaaaacatattttatattttttctctctctctctctttcactaaattaattaatttttttatta

SEQ ID NO: 368687 - DNA, 541 bp, Cannabis indica
aatcaccagcgttcttcccaaatccatagagcaaagactcgtacataccttaataggaaaaatatgaaaaaaatgctctcgggggggaaagaacagagtgtgaagaagcaagtgtgacctcgaggcagtcaagaactgatagtcgatcaacttgaagaggagaaagtactcaacgagctaatgatcgagagagtatgggaaccagtaaatctgcaagccactcaaagacaaagtctataagtgggacacgatctgtgagtaagacaaggtttgccagcaattactcccaaccggatctgtgagagaacttgaatcagaagaaacctgacctttgccaatagcttggtccaaagtaagaagatccaatccaattgcgaataaacaagatggagggcaagtttaggagatatcaagtgggggaattggggaaaccatttggatatgactttgacgaggggttcgagccgtatcatccagatataatgagtaccccttttccttcaggattcaaaaacctgcatgtctcgtcatatgacagaac

SEQ ID NO: 368688 - DNA, 505 bp, Cannabis indica
cttgattatccttgagttggtaaacacaaggttcatcatcgttttggtgaaagtcgtaggttttgattatttcatcaaagcttttgttccaagaatgagaagcttctttaagttcataactggacctattgagtttgcaaactttctcttcctaccctcgaagaacatagccttctagttgctccttatagatggtttcttcaagaattccgttaaggaaagctgtcttgacatccatttgccaaatttcataatcgaaagcagcaactattgagagaagaatttagatggatttgagcatggcgacaagaataaaattatcctcatagtccacaccttttctttaggtataacccttagcaaccaaactagctttaaaagttttgagtttgcctccagcacctcttttcttcttgtagacccacttacatccaattggacgataatcatcaggtgcatatacatttttccagactttgtctttttcatggaatccatttctgaa

SEQ ID NO: 368689 - DNA, 579 bp, Cannabis indica
atgcgggaccgggacccagatctcggacctggacccaaaccaggacccgggacccaaactcgggacccggactcggaccccagaacccggaccttggaccccggaccccggaacccggacccgggacgtggactcgggacccgaacccagacctcggactcgggacctggacccgaagccagacccacgcgggactcgggacctgaacccggactcggacccaggacccagacccggaccgggactcggacccgggacccagacctggactcggacccaggacctcggaccccgacccgggacctggacttggacccggaccaagacccggacccgcccgagactcaaactcgggacccgggacccggacccagaccttgaccctgacccggacccggacccggacccattgatataaaattaaaatggatataaaattataagttaatattaaaattctttaaaaaaattatcgggtcggatttgatccgatccgtatgaggcgggtcggatccgatccgatccgagtatctgatcgagcggggcggggcggggcagatccgtacatgatttggatca

SEQ ID NO: 368690 - DNA, 501 bp, Cannabis indica
ttttcttcatcaattctaggtgatcttagctcaattcaagtgtatccaagccaaggtaagttcttagcttcaatctttttagttgcttgaattataagaaactggagttttgcatgaaatgttgtttaaattgttgttcttgttgctgttgtttgattatgttttctgtagctatattatggtattgtagagtgatttgagcaggttttgttgcctggtttgttggaggagcaagctttgagtttttgaactcaagcttggctcatcaatgacatttcttgtttctgagtttgggtattggttttgctgcttgtaaattgttctctagggtgtatagagcaggtctggaaattttggtgtgaattggggttgatttggtcgagttatgaaattttagtcatgcctgcactgaaccggaattcaagttcagagaggcctgtaggaactgaaattcgggttggcttctaggaatttttttcccataaccgaaattccggttgg

SEQ ID NO: 368691 - DNA, 1056 bp, Cannabis indica
taccgtatgagtaattattcttgaaaccgcggataggtttcttacttatcgtttgctttaccgggcaacgatagtgacatacgcagctcgtggataatgagtggtgaggattggtaacggtcattactgttatgaataattattcttgaaaccgcggataggtttcttacttatcgtttgctgtatcgggcaacgatagtgacataagtagctcgtggttaacgagtggtaagggtactttataaagtaccaggattgtgtgattatgaagttgtgaaatgacttaagcatattattatgtgatgagttgtaatcggatacatctttgttataatgtgaatgaatggattttatattgcttaagaaattagtttcttttcttgtagagtcttagtgactcacggaatgtaagaattcgtgttcatagagatgtaagattagagtgctttatgaagcactgagattatgtggttatggtaatgtgtgaattagagtgttttatgaagcactgaaggtgagtatttataatgatgtatgtttagggtgttgtatgaaacacagagattgttgattatgaatagctataaatattcttgattatgtaataagtgtgctctcatagacgttaagttatttatgcaccttgaatgtgtatgacctattggtatgtatattacattgtaatgaaatttgctagcactttctatgattttatttagtagcttttcttgctgagtcattgtgactcacgggtgcttcgtggtgcaggtaaggaagttagaagctgtgttcggccatgagtcagaggtcttccagcgatgtacatatcagccgtggtgtcttggcttctgggaagcaggatcgaattcttttctatgtttggaaatgtaacctattgtaaaagaatttttataaacaagggatccccgtattatggtgtatttagtatataagttttatttcaatttaatcaaggaaaaaagtttttaattaaaccacactttttctaaaactaatagattagtatgaaataagtttgtaaaaagcacacacatg

SEQ ID NO: 368692 - DNA, 575 bp, Cannabis indica
agggcaccgtgctgatacgaagagcctatcaggctaccagctagcaacctacaaccatcatcctgttgggcgagtcagacgaagatcaagccgtgaacgcttctcaaaccctaaacagtcatctgctcaatcctcggtcacaggttccgcctgtgggccaagcgatgtaattctttaggagaagtcatacctaataactccgcccaagttaacggttccggcctactgctcggtcaaaccaaccagtcactgagacaacctggtgtatctatatttaatagattgggaacagctcatgatctcagagatgatctcaacagaaggagagggctagacgagcagtatgttgcaccaattattcagccaggggtcgtgttcaaaatcccgctcaaagagatcctgacgtgaccctagtcagcaaaaaggctgaacaagttaatccattcgtgcagcacagttggatgaactaaaaaatattttccaaggcctagccagtcagagaacaatgacctcgagttggaccgagcacgtggatccgctttctccccaaagatcaatgtcctagagttgcctca

SEQ ID NO: 368693 - DNA, 1081 bp, Cannabis indica
gtgatataggtttcattggctctattttctccgtataaaattcaggacttgtcaatgcgacaacaagtgcatttctatgctcaggagacatttgcagtgcatcataaacgcttaaaagagcagggatgcgttttagatgagccaatatatcatattttgctcgcgtcatctcatcttcaccagtgcttttacatcttcgattgtcattggcggattcttggttggccgaagatgaaggcttttgaaggtcttgtttagctttttcaagctctttcgcctctttttccttctttgcaaaaattttccgccgcatatcttgcaaggtaatttcatctacctctttttcactttcaggtgaggtagattcaggatcttcttttgttaaagtcatgcagcaatccgacacactgtcattacaactagctgccttgtcccgtaactcttttggtaaaaactcctccagagttactagatttcgttttggttgttcgagttcgtttcttttggaaacggccttttgcttgccgatccttttcttactcttttgatcctttatatctggtctactccgaaatttgactccggagcttccagatggcttccgagatggaatttttgccggttttttccgagtacatgtttgccatgtactttctaaatcctcttcactatcataccagtcctcccaaatttctagattaggctctgtcatgagctcatataatgtaggaatatttgggtttcctggccttggcatgtctgagtgggcttggactattgtaacttccttgtcgacttcaaatgccacagaaattatgtccctttgtgtgggatcatttggtatttggtcattctcagttaaggaagttgtatttgttgtcgctttcccaagagaagagtcaatctcaatctcttttctcttgatcatgccttcgataatatttttaaggatgtagcaatccgacagtgggtgactcacaatttggtggtacggacaataatttggatcatttgtcataccaacctcattgggccgtttcggctcggggagtcgtattgccttagcttttaacaactcatc

SEQ ID NO: 368694 - DNA, 833 bp, Cannabis indica
aaaaaacttctgtgtcgcaataatgtcgcgacattgtcgctaacacatcgacaataaaatacatattgcagaaaacatcaaaatactaattaataattaaatacttacaccatcgtgaagccactccccctttagaaacaatgttgtgaagaacttgacatcgccaacaccggtgtgcacattcctaggtcgggcattgggaatgtctccaatcaaccacctcttgaacgtacgaagcaatctacggtctgctggtctttccgggtctacgttctctggaacaactcgcctttttttcttttccgcagtgtagtccttcaagtacgtaggcggcttcctcttcctcacaaatggcacattttgtgggggtccaggtagaagtaggacttcgtcctgtgattgtgtatcaccaatggccgtgataattgcttccaatggagttgacggtgcctcgttatcatctgcttcccaatcttctgggaagacatcttcgttatcactctccatttgttcctcattttgcggtgcaggtgtgggctctccaggtgtgggctctccttttaccattgccatcaactcgtccatcttagccagtagagtctcattcagatctttctgactctccgtgaaggaccgcctcatactgagatggctatttactaaccccgtctgtgccaacatgacggcttcctgctgggactcaagcttctccagccaggcctcaaatgctatccaaacctctttgcaaaggtcattttccacggttgtactggttggagcagaaggaccggctgaagtagatggctcgtgtacttcaggtgctggtggtggtg

SEQ ID NO: 368695 - DNA, 601 bp, Cannabis indica
caaggccataacgagatggttttagcaggaaatgggttgaagctagattcggggatagttctccacttgagtttgccgacatgtatgaaccaggattaaaggtaagaaaaatatattttactacatggcacgttgtatgtaatacaattagtattgtaatgaatcgattaatattgagatatagttaatattgttatataataaaactattgattggttaagtattgttaatgtgatgatattatgcatgtgatatacgagctcacctgattaggtgatgcgattttcctagcgacgtactgggcgtcagtgatatatgatgagtatcgagcgtaggtacgaactcacctaattaggtgatgtgattttcttagcaacgtactgggcataagtgggagcttcaatgatatatgatgagtactgagcgtaggtacgaaatcacctgattaggtgatgcgatttccctaacgatgtactgggcgtaagtacgggcgtcagtgatatatgatgagtactgagcgtaggtgatgcaattttcttggcgatgtatcgggcacaggtacgtgcgtcagtgacatatgataagtgttggatatatttt

SEQ ID NO: 368696 - DNA, 1469 bp, Cannabis indica
agtaactttgtaatatataatgcaatgcagtttcaatcgcaattattaaattcaaaattacaaactgcatcgcacaatttagcaaaaatgcaaattacacccgcaacgcaaaagatttcaaactgcataaaagtgcagtgtgttcgaaggacacaatttagtagatatcaaagtttggaggcacaataatttaatacacaaactatcattgcattagtaaaattgaatgaaattagataaaagtctttaaatccaaccgtcttaatagcttatagaaattttttgaggcgtgaaaattttaataaatataatttcatacatgttaaagttaaagagtacaaattctaattaatctttaatttttttacacaaagtgttaattttaccataatttaacatctatacggtaaaataattctatatatatttataattttttaaggggcttttttattagtacatatatacaagtttttattcatttttacgttctttaataaatatttcatttatatataacattgatttgtttttacaaaaatgcaactcatacacaatcataaaaagaagccgtacaaatactataaaattactttagtgttatatgattattatatatatattgttgtaatcaaacaaaacaaactcaaacctattaatgatcaattaatcaacaagtaattaaagcagcaaaccaaaaattaaacaagataaataaacaataaaaacagagagaaaagacacaaggatttatcctagttcagatctcaaatttgagtcctactctagctctctcccaaggagatttctccactatgaatcagtaattacaagctccaattatagtacaatgcactcaagaacaatcacagtcagaattgactctacaacactcaacactagagcaaacttagccaactctgaacttgatcttcttgcagcattcttgctcagactctctctgtttctctcttactttctttccttaaattgaatacaatgaagagccttttatagtgttagtagctgacatgtccagcacttaacaactcatgacatgtcgattattaactaactaaccgacttcttaaaacaaagaagtttgcaactgaaaataatagcttgacaaactatatttggagaaaaaatcggtttagtttaaactggattatcttccacatatatatatgtactttagcaaatctttctatatatacaatttatttttatacaagtatgcaatgttgcatttttatacaacatataattattattcatgattttttggctacttttaatgttttcatttagtcattttgctcttatttgattctttgtctttcagccaagataataatttatttatatacagagaatgatagagtacatgttttagagtatttcacaatgttattttattttcgaaaataagaatgaaataaaaatttatagcttaaaaaatcaaatga

SEQ ID NO: 368697 - DNA, 740 bp, Cannabis indica
cacgattccttccgagtgtagtgtttcgtccaagtcacaaaatctattccacgtgtcacccagatggatgccacatcatcctttgtagaaatttagataacattttccctccaagtccgcgcgaggaatcttggtccactactacaaaaaccactattcccaactgtcttaaaaacacttttttgagggacagtcgctaaaaaaattcagtgagttttttaaattgtgctgaaaaataggttattctcaacagttttaaatactcgtgatgtattcccagcggtttttaagcgtgccttaaaaattacaattttttttttaaaagggaattgctgaggtttaaaaattgtggcctataatataggtgacagatttaaactgtggcctatagtataggcgatagttttgaaaccatccaaaccatcgcctatagtataggtcacggtttaaaaccatcccgtatagtgttattcccgacggtttttagcgtgccttaaaattgcaaattattttaaaggggaattgctgacgattagaaaccgtggcctatagtatagtccacggtttaaaatcgtcgcttatagtattataggccataattttaaactgacggcaatttgttcaaatcaatttttttttttaaataaagtgctttccctcgcaacaatatataatgtattttagagctaattttttttttcaaagcagtacgatttcaagatgtcgatctctctctctct

SEQ ID NO: 368698 - DNA, 453 bp, Cannabis indica
agatcaaatgatctcaatcctgcgatggttaggttttacttcagttgcattagttttgttctttaacctgttcattaaagttgaccaatggatcttctcgtgacatatagattaaggacatggtagttcaattgagtgggaacactaatcatagctacagaatctatagctttcatctggacatagaagtgaaacaatgatttccttcaagcttagcttaatagaattaaatggttgagtactcattttagtgattatataataagttcactgaaatatcatttataggtagctaagtgtttcaatgataaaatacattgaagggtgtaacggtaaatttgtccctactcagtgtagatcatctatagaggatcattaattattaggattataataaatagataattcatagtgtatctatatcatggaacatatagatgttggaaattattt

SEQ ID NO: 368699 - DNA, 841 bp, Cannabis indica
gtgatgacaagagcgtcatcgtgggggtgttctaattcagaggcttcccctcggttaaatgataagagcacgtcagggccattgctatcgattaacgtcatagcccttactgattggacccgtcgggcatgggccatcgaagctcgtactgaattcccgctcaggtctgaccctcccgagatgacatttacggttttcttaatgtacgctaaagggattgatcctggctttcgttactcccccgttggatgtggagtgcgacgtccgaaatgaggaagtcccggaagaatccttctttcaccacacggttaacctctatcttcaactgcctgcactcgtaggttgcgtgaccgtgctctccgtgaaaagcacaatatcgccccttatctctcttgacggggttcgtggtcattcttgggggccacttggtttccttcaatccccgcagtcgtcttatcaactcagttagggaaatggtcatccgtggtagctccttttctccccgctgggcgtgcggctgccccgcctcacccatactcaccattattgtcccttgggtgttcctttcgttggccgagcggttgtcagttctattatgaggtcgtacagctggtgtccggttcttagattcgaagaggaaagtatctcctgatgtcaaagtttcgcgcgacgcatcctcattgtgtcgcttctcttctacttccaaggccacatatccccttgccatggtcagggcccttgtgagggacaggtcaggttccactatgatctccttctttaattctgaaccgtgtatcaatccttgcattagtgcttttgtcgccactgaatcggtgcattt

SEQ ID NO: 368700 - DNA, 586 bp, Cannabis indica
catcgcatttttcgttgtgccgcgcaaaaattacaaaaattacatatttaacttataagacaaataatacccctagagtttaataaaatcttcggaattgagaaattatgactctaatactcatttctaatattggggtccacaaataattaatttcataaataatcataaaaatatcagaaattagtgctaattgcctttactaatcccaaatactaaagcggtcattacaattatccccccgttaaaaggatttcgccctcgaaatctaacctgaatagctctggatgttgagtcctcatgtcagtctctctaattctcaggtggcttcttccaccttactgttcttccagagcaccttaactaaagcaatgattttgttccgaagaaccttttcttttctgtctaatatctgtacaggtgtctcttcataggataagtctgattgcagctcaagggcttcataactcaaaacttgagtcgggtctgaaacatatttcctcaacattgaaatatggaatacatcatgaacagccgacaacgctggtggtaaggctagccgatacgctacctgcccgaccttctc

SEQ ID NO: 368701 - DNA, 707 bp, Cannabis indica
tgcttatttgatgatagtttagaaatcacaatatatgttactgaaataattttgtttgatctgaaattatttttctggaatttagacaaaaattaataaatttaggcttttacagaacctaaattggattttttatgaattagttatgattttttgaagttgaacgaaaatatcaggattggaaacacatacgcgcgagcgaacggttggacagcacccattcagacaaggcgttgaatggtggcccctgtctgaaggacagctcgcgcctgtgtccctctgtccttggccaaaacctcctttccgagcacgcaggggtatgcaatgcatacccctgtgcctcaaacttgttttcgtcataacttttgattcaaaaatcgtttttcattgaaacaaaagcaaatttttggtagaattttgtgtagaatctgaattttcaattaaaaatctaattgttagaataaaattaatttttattaatttcttaattaattaaaattagtttttgatattagtagactttaaattttgaaaatttgatttctcacaaaggagccttatggttaattttgaaaatttagattattttatttattttaattataagagcagatattattttttttattaaattttaaatgatcttactttgatattaaatattatcttttaaaaataatcttgtactaatttcaaaatttgctaac

SEQ ID NO: 368702 - DNA, 625 bp, Cannabis indica
aagacaatagtgtaaagacaaaaaaatgtgtaaaaatactataagctaggttccattattactatcatgtttccttaactttattaccattacatcaataatcaaaggctagaaaaatatccctaccataggacaaaaccaaggtctccactatagacatttcctatatataattatatatactaaatgttaggtagcacatgacttacacgtgcaatatttcctagttattcaaaaaaaaaaaaaaaaaaacttacccttccactgcccttttcgtccctctaattccctcgcgccaaatatgtgggttcttcaaaagcaactcaaaatattttgattacttttcttcctccttgttctcttctcgtatttatgctcctcttgaaattcttggcgatttatgtgagtcatctcctcaaatctttcaatatatttcagattttttaaacgttatatataatatatgtattgtgatttatgtgtttctctagttgctttattttgatttcattgaattagctaatggaatggcttgaccgatttcttagattcttgaactatttgttcttatgatttttgtacatcgattctgtaaagtcccttttttttggctaagttagttgac

SEQ ID NO: 368703 - DNA, 654 bp, Cannabis indica
aacttagattaataaaattgtaaaaatgtacaaaaataatatatattacatataatatatatgttcggtcggttctcggtttaatctgtcggtttgcgattgacactaaaaccgaccatgttaaggcggttttaaccgaaggcagttttttcggttttcgatttttttcggtgtcggttttttcggtgttcggacgatcggtttactcggtttggtcggtttcttggatttttcgctcacccctaccaccagtagctccatccatttgacccaaaatcgaaaaattgaaactgaaaataataaataaatataaagattatgaatatttgttggctaaggtttgtaaatggatgaaatggaagaagccattggagagggaaaacagggagagcttaaaccctaaatcgcaggggcctattcaatttcagggccgggattcctcacgcgcacattttcggcagaattcaggggttagaggagaggggtgtatatatattgatgtgagggaaaggaggagaggggtgtatatgtatatgtatatagaaagagaaagggattagagagagaaagatggtttctgcagaaaaacaagaagaaagaagaagaaagaagacgaaaaagaaaaaaaaagtaaattttttaaattaaaaaagt

SEQ ID NO: 368704 - DNA, 991 bp, Cannabis indica
ataatatatgattatttaaaattttattattattttttttaagtaagagcatacttatcataaattgaaaagacagttacaaaataggttgccaataaggaggaaactaggataaaccaagcatttggtgtgtgaaagtccacttaaccacatcatcacgagcagtataattacaagtcctactaatattaaaaaaaatattacagaactttatattttatatataagagttaagttctgcaaaattttcaaaagttttataagctggcagctaatctcaaaactcattttttttttggtggattgtgcacgtaaacacattatataagttacacaatttcattaatctatataaattgatatctaaaaacaataaaaaaataattaatttaaaaaataaaaataaatcattttaaaacaactacagctaaaaattattaaggaaaagtataaagttgtccatgtcattctaaaatcactctaaaattatttttgtcttctctccttaattctctcaatttcaatattttattaaagcataaatctacaaattaatattttacattttttttaataatttttactataaaaaagtataaatctacaaactaatattttactattattttaattttctataaaaatataaaatattttataaaagttagaaaataaaaataaattctaaaaaaatattaaaacttaaatcatataattaatcgtaaattacgtacatacataaaatatcaagcaatatatataatctaaatttttatatatatatataaagcagaaacataaagcggtgacatgatactctaaaattgctttaaagctatgcttcttttctctctttaattttctcattttttaatttttaattcatataaaattgttttaaaactatttttctcttttctccttaattctctcattttttaattttaattctataaaaaatacaaaaataactccataaaactcaaattat

SEQ ID NO: 368705 - DNA, 597 bp, Cannabis indica
aaataaagtttagttatagatattttgtttaaaactgaaaaaaaaagtattgataagttaaagtgatcaaaaatttatattttagaaaaatgtgaaaaagataaagtgaacaatttaattaaatagttatcatactaattatttttaaaaataaaatacaacttatttctatctacaaattttcttttttctttttttccatctcttttgatcctattttttaaaaaacttttaaaaaataattatagaaaaacttgacaaaaaattaatggtttttttaaactaattaataattatattagaaaaaaagaataaaaaataaatatcataatttagagaatataaccgcacaaagttcgtgcactcagggtggatggcgaattagtttggatagatgattttcctccatttctctatgatgtactaaactctgactatattcaatgaaagttcattataaaaaaaaaaaccgcacaaagttcaattttaattataattgaaatttttattttaaaaaaattagtgaataacttttatgtagttggtgttgataactataagattataaataaatacttaatatcataatttcgagaa

SEQ ID NO: 368706 - DNA, 1661 bp, Cannabis indica
agtgaccgagcaaacgtatgactcttggtcacttattttttccaaatatatcgcttatctgttcggtgttttgggtttgaccaaaccttttgtacgcactttaggtaaattataatcatgctgatgttttcgaatcaattgaagtttgaaataacatctttattcatttattgatcgaaaatgtatttgttaccgtagtaacttacatcaaagctatttgatctaatctgatcttttagcttaacatgaagttaaacaaattgtagtaatttgaaattgtaatgatggtcatccgacctgagtactttgtaatttcatccgaacccttgggcgtggtccgccgagaaggccattcacttaagagtaaatgttctttttgttttgtacttgaggtggtcatccgacctggtacttcaattggtagtattttgttaaatgttccccattccaataccgtggtactagaactagttgcattttttcatcatacttacccaatttgtatgctcctgatttgagaacttcgaccacctgatatggtccttcccagctaggtccgagtacacctgccgtactgtctttggtgtttagcaatactcttcttaggaccatatctcccacaaagaactttcgagcatttacttatttgttgaaataccgagctacttttgttgatgggctatcaactttaagtttgctgtgattcgcttctcttcgatttcatcaagtgattcgactaggagtacgtgatttgcttctttgttgtacgccaatcttctgtgggatgaaggtttgagttctacaggcagcattgcttcatatccacatgccatggcaaatggagtctgtccggttgccattttctcaattgttcggtacgaccacaaaacatcagcaagttcttccggccagtttccttttgcatcctcgagtcttttctttagtgtatcctttagggtcttgttgactgcttcaacttgactattttcttggggatgcaccactgcggagaaacttttgaagataccatggttcgcacaaaaatcagtgaaggactggttgtcaaactatttgccattgtccgaaactattttgtacggaaatctgaactggctgagtatattcttcacaacaaagtcttgaactttttcggatgtaatggttgccagtggttcgtgtttcgtccacttagtgaagtaattgaccgcaacctctgcatactgcactccacctttgcccctgggtaattgttcgatcaagtcaattccccaaatggcaaaaagccacggacttggcatctgagttaaattgttgggcggagctcgaggtatctttgaaaatctctagaatttgtcacactttttaacataggcctttgaatcttcaatcattgtcggccagaaataaccttgccttagaattttcttaaataaactttgcccgacggcatgatttcaaaaaaaaaccaatggtgcacttcagataaaaatacgtgcagcttcttcttgagtaacacatctgagcaacaacatggagaaacctcgtctgtacataattccctgtacaatgatataccgtccagccttccttctcatcttttgagcttcatttcgattatctgggagttccccagtgttgaggtaggctgctgttatcgtcat

SEQ ID NO: 368707 - DNA, 632 bp, Cannabis indica
aatatatattcagctaagaattctacaataagaaaaccctagaattaaacaaggctcaaacatacaaaaattccaaagacttaagtagcatcatgctcaaatcaaccaaggatttctaacatgcaacctaagatcaactccataaatttcatgcttttcattcactaaaatttagcaaccaagctacaatcaaagctgtaaaatttaccttaagtctcaagcaagaactaagcacaaacacttcgaaattcccaagcttaattcaagcaagctccaagcaattttctcaccaaatcaaagtgaaaaatcaagagagtttagagagagagagagggggggtcggctataggggaaacaaaaccagaaaattctattcattttcttaaaaattccatttcttggttaataatccaaaagagtcaaaagacaaaaatgcccctatgaccattactcacacccatgcatatttaaggctaaaaaggtcatatcatacataaacattttcaattaaaaattcagatttctcattatcaaataaggtgccaaataattcaatccaaattgcatttcgggcccgcacccggttcgacccgaaatactcggttgtgactataccgcgccagcctgtcaga

SEQ ID NO: 368708 - DNA, 819 bp, Cannabis indica
tgaagttgatcaaaagatcatcgatcctaggtaaaggagatttattcttgatatttagcttattcaattcccggtagtcaatgcacatttgtagagacccatctttcttcttgacaaacaataccgtagctcccaagggtgcacactaggccgagaaaaccctatgtcaagcaacccctggagttgaattttcaattctttaagttcagctggagccattctataaggggccttagaaaccagttctgctctcggtgccaaatcaataacaaaatcaatttctctctgaggtggtaaacttagaagttcatcaggaaaaacatctagaaattcctaaaccaccttgatgtcttctggccgaaccgagttaggccgagtggtatccaataccacagacagaaaccctagacatccatcacataacaattctttagctgttagtaccaaaattaccgggatccgagatccctgaattgatccgacaataacaaacggttccttgccttctggttggaagattaccatcttcctcttacaatcaatactggctgaatacttgtacaagaaatccattcacagtataatatcaaaatctgctaaactcatttctattaagtcagcactgaactccctatcctcgattctgatcggcatatacctaatccaccttttggagataactaactctctgccacgtaatagggttccaaaccctagttcataactatcgtgcggtctatccaacttactaaaaattctggctgccacatacgaatgagtggccccagagtcaaacaacaaagagaaataagagttgtt

SEQ ID NO: 368709 - DNA, 832 bp, Cannabis indica
atgtttagcgctcccactcaatcatactaccatgttcccaaaatgtacgtatcaccctgacccgaaagtaggcttaactaacaaatcaaagaacatgaataacactcctgagattgaacctaagcatgtcaggattaagatcttttgatctaagatcaactagtgatattgactcagaaagatacaacgataagattataatatctttaccaagatcaatatcagtcccaatccaatgtatactctatacattcgaaactagcatactttgccaatgttctggaaagaacataacacttattcaaagtgtaagtgcacttcatcgctgattatcacatttgtgtaaatccaatgcacaaatgaaacatggactttgtcttttgaagcatataatcacaatcacattccactatgttgacatcactgtaattgtaaatgactatatgttctcgacttaacagattttgtatacattatactataaacatgaaaactacatgtaaacataaatgacttctaatctttcattgataacaaattagattagattcaaatgggttttattttgggcataaaatcccagcagttcaatgaggaattaataagttagggaatttacttgagaaattctagatttgctaattggaaggtcgattatataggcccatggtcccgtcattagttgagataatagtgcttgtagactcagttaataaattttaattaatcaattataattttaaaattagactatgtcttatttatgaattttcactaagcaagggcttaactgtgaagaaatgaggttttggggtcaatttgttaattaaga

SEQ ID NO: 368710 - DNA, 1030 bp, Cannabis indica
cgaaaccttgggtgatagagtgacatgtccacacatagaaagtcaagtactcaatcatagtgagtaagacggtggtaaccaaacccgaaggagagaaagagatccaggctcatatcttgataatactctgcgacagaaaggaacaaggattagagatctgagcaagaggagtcattatattccgctgcaaccaatgtaaaattttcttaaactcttatgtgtttaatttcattgttttagagaattcatatttaggatgttaattcaacatacttgttagtaaatctgaatcctggtaaaatattcccaatagtgcgcacaccccatacactttttttccaagcggttattcaaagcatttactttttaaggttaaaccttttggcaacacataccctgtatgaattgtggtcctttattctctagttgcttcaacgcacgagcacaaaaccttctagggggcccaacagtcagattattgcatgtattttaccccactagcaagcttattgcaaaagtcctaggcgggtcatgggcatgtccatacctgcctcttagcttataaatacccttctatttccatacgaagagaacgtcagaaacaagatagccgaagctctgctaaaattcctttaagctttctgcttcttcaagtgaaaccaagagagcagagttagggtttcttgcaaacactattgtaaacacattatacaagcctcttaaggccaataatactcactcgtggactagagtttattaaccctcgaaccacataaaaactcttgtcttctttattactgcacttggttatttcttaagctaacattttattagtttctaaaaatctcagtaaacaaaataatttttattaagacaaagttacaagaaacaaaaattttaagaataacaaatgttgttttcatttttttttttaaataattgatttttttgttaatattgtttctctattttatcacatataatttcttttctcatccttttattacattattttatctctctctctctc

SEQ ID NO: 368711 - DNA, 723 bp, Cannabis indica
atgaaggaaaaggacccatgaagtctattccccacacatcaaacaattccacttccaagattcctgttaaaggcatttcgttcctccttgagatattacctgtacgttgacagcgatcacatgcctttacaaaagtactagcatctttaaatagtgttggccaaaagaatccactctgcaacaccttagcagaagttctagtcccaatttatttattggtagtagggtcgtaaatgttccacattcctatagttctttattaacgaggcgccgagtcgagccaatttataaactccaactccaactactacttcaatgacatatggaccctcccaattcgagttgaacactcatgcagatgcatctcttgtatttgcaaagacttgtctttgcaccaagtctccaacattgaatagtctttcttgacttttttgttgaagtattttgtaactcggtgttggtatgctgcgttggtgatttgcgactcagtttgtttttcctcaagtagatccaaggataattttaaaagttcctagtttttttcttgattataaaactctcttttgtgagtcgatatgttcacttcaacatgcagcattgcttccgagccaaatgctagcgagaagggagtgtgtcacgtagctgtcttctcagtagttctatgggcccagagtatccgaggtagctcgtcaacccatctacttcttcttgatagtatccttt

SEQ ID NO: 368712 - DNA, 816 bp, Cannabis indica
ttttctcagtttctgttaaattcttttacttttttggataatttttgtttccacattatatttacctaattcttcattcgtcagtcaaatgatcaatcaaagatacttaatttgctaatcaattgctctacccaaaccaaacaaatacattttattcatgtagctatataaaaactcttttggaattgattccattataactttaatttgggattcaaactgttgaatcgtttaaagattaagataaagttttacaatgttttagtttagtttttctagattatactatcttgtttttatttaataactttttatcaaaattaagataaaaaccttaaataaaacaaacattacgtggctcggcacgtaatatctacctagtatatataagtatatatatatatatattttgtgatatgaaccagcaagatcatgataatcttttctttctttttttttggtttttcttttattttctctgttatacattaacttgtgttttgggttagagttgattttaggattttgcatttgtgaatacttgttgaacgtgttgtaatggcgattactagtttagtattttttttttcatatatgtatattttagatatttatatcatcatatatgtatgatgtgtagttactaatttagttacttctttttaaaaattatataaaaaagttacttttatcttggttatcattttttatacagaaaaaaatatatatgtttttcattattttaaatatatattgaaattgttaaaaagaagaggtaatgtcaatgtatcttaaacaataaaataatataatata

SEQ ID NO: 368713 - DNA, 792 bp, Cannabis indica
gcataaaacccaacactcatattattttgtaaggggaatatgcaatcaatccaggttataaagaagtgtctggatgagttcaaagatatctcgtggcttcctataaatacaggtaaatctcagatgtactttggagggattggagaagaggctaagcaggttataaagagagaattaaatctgtctgagggtacttttcccctaaagtacctgggagttcctttgaggccgactaaattgatatctgaagattgtagtgtgataatcaagaagatcaaacaaagacttctttgttgggcaactagatacttttcttttgcaggaagagcgcaactaattcattcagttcttcttaggcttcgaaattactggatgagtatttttatcctgcctcaaagcatcactaaagagatagaaaagctatgtagagggttcctttggggttggaatgggaatagaagtaagctccatgtggtaagctaggagtaagtttgcctgcctaaacattatggaggttcgggattcaaagaggggactaaatggaatgaagctatcatagctaaatacctttgggccattttatccaagagtgacttgctatgggtgaaattgatcattaatatttatctaaaaaataattccatttggtcctatgatctcaagactgatacgagttggtactggaagaaaatttgtcatgttcgggataaattttctagatctgatattgttaatgcaagtgctaatgggaagttcagaaaaaatctggtttataatagcaaattgccgcag

SEQ ID NO: 368714 - DNA, 558 bp, Cannabis indica
acgtacacttgcgtaataaacagaaaatttcgttaaacagaaattttgaaaaagaaaatttttaataccctagaaacaaggttcaaactatcggttgtatgcgtgactcttttatttggagggatgcattacttcttaatttattgtgtaaatttaaatgtaaataccataattattattatgttattgtaatatgatattttgatttattgagttttatcgattctacagtattattatttttaaactaattagtagttttatttaaattattatttaaattttacaattgtggtgattttaataaattagtataatattaaaaaattgatataataataagaaatattatttttattatttttagtattgtggttggagtaaaaatagtttttgacaccaaatttagcgatattgtgataccaaatttggcgtgtaggttgaagatgctctaagcccataatattctaaagttaaaccctcaaaataaatagggattacttcacaaatacacaaaaattataaaaatgcagtttcacagaatttttaatattttta

SEQ ID NO: 368715 - DNA, 820 bp, Cannabis indica
ataacatacttgtgagtagatctaagatcctagtaaaataaattccaaaaactagcctcagagccatggtaattgatttactttcaagaaatttggacttaaaacgatttgtgtgtgatttggatggtttcatgttgatctgtgtgttatttgatgattgattgatgtttgtataatttcatggaaaataattgaattttcgtttctgttattagtttttttttggatagtctggaaaaaataaagcaattcacttttttacagaacttaattttgattttatttgaattagttatgaatttttgaaaatcagaaaaatatcagggtggcatcacccacccttacgtgcgcggatgccctgtttcctcgaacgagtgaggctttggacagcctcctgtctgaattttctcggtcaggacaaggggaattgtctgaagctggccccatgagcgcgcggagtggctgcttgcagcctccagcgccgagaaatctcggccagatgccttcccacgtaccacatgcaattttttttccaatttttcaattttttcatgctttttcatggaattaactttcgattttttgtgtagttttgtatttagatattcactattcctatttcaattctaattatcagaattaaattaattagattttttaaaattaatttaagatattagtgtaatttgaacctgaaaataggtaaatatctatctttttttgcttaattatctatctgattttaaattttgattactttatcttattttaaatttaaggtcagatattattatttttttaaattattctattttttaaa

SEQ ID NO: 368716 - DNA, 596 bp, Cannabis indica
aaattataggtttggagttagctttggagtatgttagttgatcaattaatatttaaattaattataataaaaatataattatggtgtagtttccaagagttaatttaagtcatttgattaaatcaatggttataaatcattatacctattaatagttaaaaattacaaaacctactattagctccctatataaaaatatgatatataatccaatttaatataatacagtacaatatgacctaatacaacgttccaaacgagccctaagtgatatgtataagcccggcccaagctcaagcccaagcccaaacccaagcccatggcgaaatgcctcttttcgagtcttttcttctcacttagccaaaccaacaaataagtcagacacacttcgtcgtaggggtgtacgtcggtcggtttagtcgggttatagcatagttttatcaacccaatataaatatcgggttgcaaatatttaatcgtaacccgcccaatcaaaaattagagaaagttcaacccgcccaatatttttgtcggtttggtcgggttaacccgtccaaaccgttcttcactttttttttataattattattgttagt

SEQ ID NO: 368717 - DNA, 646 bp, Cannabis indica
ttctattgttttagaaattcatatttaggatgttaaaaaaatatacttaatagtaaatcttaaatcctaagtaaaagtaatactctgacaactggcctcagagccatggtaatgatttactttcatgaaatatggatttaaaacaatgattatgttgatttggatgtgttcatgttggtttatgtgcatatttgatgattgtatagaaatcgtaattttacgatgataaataattttagtttcgttctggaattatttttgtgtggaaagtagatgaacaattaatgaattcaggcttttacataactcaatttggaatttttttataaattacttatcattttttgaattcggatgaaaatatcccaatacaagatcggactcgtttatgataagtttccttttctggtctgatttgctgcgtcagtatccgtttctgatgctgcagatcaagtttatcttaggaaagttttgtacagctgtagattcgaccttgtggctgtctctaggtttctatgttctataaatagaacctagagagcagccattcgaatcaactcttctagtattcatttttttgattttttttttgttttgtgagaagagagtttctttttgtgagaacctagttgttcatctaggttct

SEQ ID NO: 368718 - DNA, 626 bp, Cannabis indica
ggaatgtgaaaaagctttccaagatctgaaggcacaacttgcaaaacctcccgtactctcaaaacctctagacggagaagaactgggaatatacttagctgtcacgaaacataccgtgagtgccgtgctaatcagagaagagaacagcatacaacacccagtctattacatcagtaaaagactcattgaggccgagggccgatacccgttgatagaaaaactctcttactgccttattctagcaacaagaaagttaaggccttatttccaagctcatcctgttcgggtatacactgaccagccattacgccaaatactgcaaaagccagatgcttctggacggctacttaagtgggcggtagagttgggctagtatgaaatcactttccaaccccgagcaacaaccaaaggccaagccttagcagactttgtggtataatgcatagggaagaaagaaagcataccacaaagcaaccccgagtcggcacaaacacctcagccaattaacaatgaagataagccgacctagaaactacatgtagatgggtcagctacagatcagctatctggtgcaggaattgcccttgtcacacctgggggcaacacctgcacgctgcaatcaagtt

SEQ ID NO: 368719 - DNA, 1128 bp, Cannabis indica
tattgcacaataatactttttgtataatatttaatcattttcataaggttaaaatataattattgtattaatttttataatatatttttacacttataatgggagtgttatccacgttttcaaatggatgacatgtggcataataaggatgtaactgatatgcattatcagcaacccaagccttccagcatgtgaaacccgagaccaaaccagaggcgggccccaacccttcatacttctaggagcctcactaacggagaaaggatcctcctactcctggaaggccattatgccgacaagaagatgaagcgaacatgccctctggagagttaacgaggcacatctagatagggaagcccaagagataactgaaatcaaattattcataaatttaaacaattaattcaaaaattataataaagaagatttcgagcttcatcttcaatcttggactatctccaccaatctgtccaaccatccgactcaactcgctcggataacaatccaagttcaagcagctggagctgaaataagaagaaaaacaaacatggttagtaggtccagaattaataacccaatgggataataatactctaaaacacatgagtttatagcatagaaagaaatacctagtttccttgctagaaacttagggcattggggtttccagtggcccttttcattgtaatagaagcattttacttttggcttatctccgagattagcagcctatttgtttttaaatgtttttacagcttgaacaggcttcttgctattcttccacttcttcttgttgttgggttttgaagtagaggcaatctgtgcctcagccttagccatcccattagcattgctagaactaggagctttagatcctcctttctgtggtcctccaatcaaattttcaaatgtatgaagattgttgatcaactcatgaaagtcaagctccaacttattcatgacataatttgaagtaaagggtagaaaggctggagtcaaactgttcaagatcagactcacttgagttgtctgatccataatagctccacaattctcagcttcttggaagtaactcgtcttctggagaaggtgatcacgcacgctctgatgaggtctcatccgtgcatt

SEQ ID NO: 368720 - DNA, 644 bp, Cannabis indica
tttttttttttttaaatgtggtttgagatttttatctttgaagatttttttagctattgtggttatattggtgtgcattttgtatgtgattatatatacatattttatatgtagaataaaacccaagtaagatattgtggtgaatcgttatgtgccctattgattatatatatacgtattttatatgtagaataaaactcaagtaagatatcatggtgaatcgttatattctcgattgagcaaaattaaaccaataaaagtaaaaaaagtagttaaaaatatctataatattttaagtattttaaatttaaattaaaattttcttatacaaattatctatataatattttaagtattttaaatttaaattaaaaattctttatataaaatatctactattatgaaatattatttatagatgtccaaatcaccaaattaattatcaccagtaatgtttgattgtattttcctttattacatattgatttagtttctcattcctttagtcaatacttttgtataaataggggttcaccctattagaataaacaattaggaaattctcattcagtttctctttctctcttcatcttcttctgcttttcttcttatttattttatattatttttataatacgttatca

SEQ ID NO: 368721 - DNA, 950 bp, Cannabis indica
catatccccttgtcttaaaccatacaatactccaatcagacgccctcctgtgagatggactaaaaatattgctccctgaaaacttcctcaaaatctcatcaagtcatcccatcagtttccattgtcctggacaaggtctcccaccaatctgctgcaccaccctctaacttggtcacagtaaaagtaacttgatattcctcaggtgttcctattgtgttgaaatttttcttcatcagcgtcaaccgcctttcagctaccatgggatcttgtccacccttaaactcaggcacttggatccgatgaaagatctgaaaatgatgactctgtcgagcagcaggatccatctgatgagcgggaactgctcttaaggcttcgagaagggcgttcataaggaattcagctcttgtggaggttggacattagcttgagggacgtcttctccaaccgttctccttgtcttccttccttttggaggaattttcttaggtctaagaaccagaagctaatcagttagtgaggtttggatgctaataatataaatatgccttatacatataaatatcaagatacttattactattattatttaaaataaatctaaactatttggtgacacactccgagtaattaaacccagtgctctgataccatttttctgtcacgacccgagccctaggccgtggcagatatgtaatatccataacttggatggtcaaaggtcacactttgacccttgtaggaagataaagcttataaatgatccttttatttatatcacaaaataataatttaaaagtaatggattaactcctatatattaataagaaaatattagtaacaaaattaggaccactcatcaatataaaagaacaataatatccccaaagttatgtaatcaccgaatagatagatttaataagtcaataaaatatcaaaataatatcaagcat

SEQ ID NO: 368722 - DNA, 624 bp, Cannabis indica
acggctagaaacgctagacagccatcacataacaattctttagctgtgaaaactgaaattatcgggaaccgagatccctaaaccgaaccaacaaaaacaaacggttcttcaccctctggttggaagattttttggccgagagctgacctgttaccactgaaggacgggcttctgcatcagcttgagttatggcgaacacccttgatggagtgggtttcgctacagtcttcagtgcttcggtttttagttgaggataatttcacgtgtaatgtcgtggaacgccacactgaaagcacccctgccctctacactcccccagatgatgcttcttacaattggggcactctgggtaagtttatagggtctaagaactacacgggcgattgcctcgaccctggttccctcgaaacctcttgatcagacctgagccaccggttgcagtggatgccttttcttttatgtatccgtggccgaaccagtacctcccctgctaaaaccttatgcaggaggggtacgagcccgccaccaccggagtcccaacagactctgtcatgcatccaactcgcgcccgtccacgctcgcagtgtcttatccaccactctcagcataggtggttctgtcatc

SEQ ID NO: 368723 - DNA, 1004 bp, Cannabis indica
ttttttttttttttttcaattgtacgttgatatgattttttgttaattaacgcgcgcaagaaaatcataaataataagtaagatgaacacaagtatccgtcaaatcattataaaccgttaatcgaaaaagatttaacaaagatgaacatgagtattttatagtagttcattatctttcgttggtaataggttagtccacttgagttgttatcggtctcaatacttgaagagagttctccaaagctatgttcaccaaaagttcgtttaattagccgtattgtattgtatgggttcgtttggtacgctatataaggatcttattgtataaaataataaataacactatgcttagataaaacaatatattatattaattattacgatcaaattttttaatacaatgtattatttaatacttacactacaaggaaaattagaaataggggcgggcatattactggcggagcatgtcggtccctattagtagggttattatcggcagataccagtaaagttaaacgatttttttatttttaaataaaatgaacaataccaagcagaatgtcccgtcgatattgggtggtgtggatttgtgcgggaaaattctcatttttttggaaacaatcactacaaaattttttacttttagtcaaaataaaatttgtggctataagtaaaatagttgtggctaattacaaatcactatttctatgttgtgactaagaagtccgtggctaaaagtattagtcacaaaaatcacaaattgttgtgactaaatgcttttagtcacaatacttgttgtgactaaaactaaattagtgacaacttgtatctaaatactatgttatagtcacaagtaattttttgttgtgactaaaagttatatttagtcacaaaaaatttatgttgtgactaaaaagttgtcactaaagtagcagttttttgtagtgtgggtttgaatttctttttcaatttcaatttcacaatttattattaggcttact

SEQ ID NO: 368724 - DNA, 502 bp, Cannabis indica
gggcccacactttccgggggcccaaaataaaaaaataaaaaaaattattaggcttttatttaagtaaaatttaagtgtaatataaacaacaaatatttatagcttagttggttgaggtggaggacataatgtccaaggtcatgggttcaaatcccatgacactctttttttgatatatttttgagggccccaaaatttaattcgtcttgggcccataaattttcagggccggccctgttaagaccttatatgtaaaagcatggccgtcttaaatattttggaggccctattctaattttaaaaattgggcccctacaataaaaatacaatttataaataatattttttaaatattattatacggttatatattttataaaacaccaaaaagctctaaataatttataaaaattgttattgattgcaatctaacaaaaaaatgatagaaaaaaaatatgaaatgttgctatatttttaaatcgctacgcaagtatacgcaatc

SEQ ID NO: 368725 - DNA, 566 bp, Cannabis indica
ataatagaaaagttattgttatgaatttttttagtacacacgtatacgtattgtttacaagtaatagactcactagagtgaggtcgatcccacaaagattgtagttaattaccaaacaatttaatttctaattttgtttggtgataaatataagaaaagatgtttaaaatctattgacaaagataacaaataaattaaagtgtgatttaataatgattaaaacttagggtgattaatttcaattgaatctactttatatgatttagtacaattcaatttccaaattctaattttcatgtgatagcaaatttactaaagaactttatattcgggttaagatatttaaatctcaacctatatgtgaattttctattctcgtgataaatttaaacatataggaggcattaagcataaaaatcttaaatgctacacaaaccatatatgtactcttgtcttatattgaaatctgtgtctattccactatagaataatcaatactcacttctaagattttgtattaaaatcataaaatatttaattgaaggtcagacaattaaaagaaatta

SEQ ID NO: 368726 - DNA, 684 bp, Cannabis indica
agtgtatgtatatgttaagtgtatatgcatgcttatatgtttgttacactaccaacacttgtacagttatggtacagagtgtattggtatagtgtatattgttaaagagtacattacagtgataccagcacaagtaaaagaaagtataaggattctgtggtatatcactcagtggtactcagggtacgaaacaaaccttaccaacactcgtacagtaaggtattgttggaattatttaccaggatctcagagtatcaccaagatctgagtctgaatctccttctgttgaaacctgattcttcacagccttacacactatgattgagtaccacttgatgtgtgtgagcactccgtctttcactatagggctcgattttgaagagaggaagagagagagagtggtttcggctaggtataggaagagaggctcaaatttttactgaaggaatgagatgcatcatcatttcccttaagccatcactacctatttaaaggaaaccacttagggttaggttagatttaattagcattaaaataatagaaaaataaagtgacaaaatcaatccctagtggccgaccatggatggtattgggccccactttgtaattttgccattttgtcatttttctaacttaatttctcaaaaatgccaattttcaatttaaccacttaaatgccaattc

SEQ ID NO: 368727 - DNA, 581 bp, Cannabis indica
  modified_base (43)..(43): a, c, t, g, unknown or other
gtgtgatttctagacgaaaaagatctgtaattgacctccttgngtatcttggcactttgagacacgaaaaacacgaaaaacacgaagaacataaagaacatgaagaacatgaagaatatgtttgagttcttaaaaaaacacaagttttgatccgtgcaggtcctgctcagccaagaagggcttatgtaagacctgaccagccaaggagggctattagagggtctggctggcaaagggggtgtaccccataggctggctggctggcctattctttgaacaagggttcctggccggccactaggctgggtcatggggtctggctggccactaaggcctggaaccctggccaaccattcactttcttttttgtcaactccacgggttgttagaaagtgtagagggtactctaccaaaaatctttaaagtcaatctttcttagacagaataatctcagtttgtaccacttttaccattacacaattgggtttacactaaaaagtttatgaaaatattttatgcacaatttttttaacctaaaggataaaagtctaaaactaacctaaaataaataaaataaaaaa

SEQ ID NO: 368728 - DNA, 517 bp, Cannabis indica
ttttattattttattaaatataaataaaaagtcacacccatgaatttttcataaaccaaaaatttagttatataggcacactttatatagaatagatatatatgaaattagtaggattactttagatgtactatgcgtcatatcatcaaagatattgcagaattaattcagtagcataaatttatattgcaaaatatacaaaccatgcatgaatagcaacagaatagagaaaaagagaggattgattaggaggatatggttgtgcttttagattactatacagtaatcagaaccggaataaattaatggagaaatgtaacggaataatgaaaaataatcggaatcaatatttataatatattgtttactaaaattttttagaaatggaatagttgtgatttatcttgtttactttattaggaaacgtaatcggaatgcttaaattgactaaattgtccttttgagttaaactatattatatggtagttattttgcaagacatattttaaaggacaaa

SEQ ID NO: 368729 - DNA, 662 bp, Cannabis indica
tgatactccccctcaagatggatagtaaatgtttaccaatcccatcttgtctttaagtgtcttgaattggttaggaaacaatgctttagttagaatatctgcaatctgatcctttgatgagacatgatcagttttgacaatgccttgctgaaccttctcccttaccaagtaataatctatgtcaatatgctttgttctctcatgaaaaactgggttggctgcaatgtgttgagcttctttattatcacagtacatgatttttggtccctcatgttcaattctcatctctttaagtagtgaaagcaaccaaattaactcacttgtagtgttagccatagccctatattcagcttctgtagaataccttgaaacggtttgttgctttttgcttttccaagatatggctgagcttccaaggaaaatgcagaaaccacttgtagatcttctagtatcaacacaagcagcccaatctacatcagtatatgccctcaatttaatttctgatgcagcagagaaaagaattccttgtccaggagtggattttacatactgtaatatcctttgggcagcctgcaagtgcttggctttaggtcaaaagatagaaactgacttagctgttaaccgagtaaagccaaagtcaggtctagtgattacaagatatt

SEQ ID NO: 368730 - DNA, 510 bp, Cannabis indica
ttttctgtttttaaaaataaaatataattttttaggttatgatgctaaacatgcaataaatttttgtaaaaataaaaattgaggaaaaattttaataagttctgggataaaattattatagtgaaaattaaagcgacaaaattatattattcattaaaaagacaacaaaaaaaaaagtaaacagtgtgaaatatgttacagcctgttaattgtttagttagaattttcaattgatgtgttaagatttaattggttggactttggctctcgttaaaatcatatccggatattagtgtatcgtgtgtagcagccctatttttgaatttctaatttttagaatgtatcgacaatctataaagtaataataataaaactcctaatggctgttgacacataagagcatctttaataatagtactttttaagagtataaaaaatttccataatatttaaagggaaaaaaacagaaaaatacaaaaaagaaaaaaaattacaaaaatactttgggcc

SEQ ID NO: 368731 - DNA, 978 bp, Cannabis indica
cggaattccatgcacaattctcttcctcaagccagctcccattgcatctgggagatttggtcgaagtaaaatagcgaccaggcaaaccactccgggcatacatcagcagattcatgatggaagcgaccaaggtgtggcgagtaaccaaggatggaaagctgtccgcgatactggggggcattgaagtccttggcgaactgtggaaggatataaggaaaaatagaccggtcgactcaatgagtgatttccttgaccgggtcgaaggtttcatcaagctcgaggaagccattcagcgagcagaaggtgagcaaaagccgagcaaaaggaaggctccttctactggaacatccgcccaacttccccattattccagcaatcaaagtggcaagcgttcaggcaacaaccacaagcaaggaaacgggaagaagggaaaattcaccgaaaagtccggacagaatccccgtgatcatgccaaacacactgcattcactctcctaactaaagatatagagagtgtgtatatggaaactcatcattaatttcgtacaagaggtccgggcccatgaagaaagataccaacgaaagggacatgacgaaattttgtcggttccatggagactacggctacgacaccaatgaatgctacaacttgaagcaggaaatagaacttctgattaagaaaaacaacccgcacttacagaagtatgtcaaggccaaccaaggtcagaacaaccaggatctgttacctctaccgatagacggacacttgcaagtcattattggaggcccgcacattgctggagacacgggcaaagctcgagagagatatgcccgaacagctcagtacaagcaagaagaagtcatccttgccgtggaagagaggaagcctaaagttccacgagcaggagagataaccataacttttaacgatgaagatgctgtccagatcagattcccgcacaacgacccgctggtcgt

SEQ ID NO: 368732 - DNA, 554 bp, Cannabis indica
tgcgcggcacggttcgcagaacgcttaaacaaaaaacaaagaaacatttaacaaacttttaagcaaagttttacaatcctccaacaaaaaattaaaagaaatgtaaataaaacaaaaattgtgtttattttttaatatttctttttgtttttttgattatttttttttatttttaaaataatttttattgtatttaaatagttaaaatgacgtagactgttaaaattttaccacgggtatatttgtgtacatatcaaccatctacattgacacttaatagtttttaactaagagaatgtgagtttagaaagtattactactaaaaaaatcaatttgtaaagttaagtatcacaaacaagatgaaataatagggagccatgcatttacttttaatattttttttaattgttttttactttatttttgttaattccacatattatttttatttatatatttatctttgttctagtaaaatttttatataattgtttttttaatatttaaaatatattttatttttaaatatgtattcataatgtataactaaaaat

SEQ ID NO: 368733 - DNA, 502 bp, Cannabis indica
gacccggactcagacccagaacctaaccaagactcacacccgtaacccagacctgggtctgagtccgagtcttggtttgagtcttggaacatgaatctgactaagatccaaacccagacctgaactgtgacgcagacccgaatcaaaacttggattgggtctcaggttacgaacccaaacccagatacaaacttggacacagacctagacccaagaccttgaccgggattagagtctcagacctgtacccaggacccaaacctagattgggcactcaaactcaaaattaaaactagaatcgggactttagacttgggttgggacccaagacccgacacaagtcttggtcttagacaaggacccggacacggacacggaccgagacccaagatctgaagttgaacgtgatcgggactaaagattgggatctggatctagacccatgacccgaggcttggacccaacccgtattcggcgtctagatcttcgaatcataccaaga

SEQ ID NO: 368734 - DNA, 705 bp, Cannabis indica
gaccctagaacaagacaaggactgtgaacaagacctggacccagacctagaacagaacacagacctagccgaagaccaaaattgggactgaaactcgggcccggacatggtcctgtaactgataccagaacatggacctaaatttaggacacgatcccaaacacagacttggacctagatagggatcctgatacgaacttggactcggaccaagacccagacagggatcgaaatgctggacctagatttggaccgagatcttgacattgaccgaaacttgaaacgcactcaggacaccaacttggacatggacccgaacctagacccagatcggggttcagaccttgacacaaacctggacacagactctgacccgaactcaaacccacacctagaataagacccaaagctagacccggacccggacccaaactcaaacccagaccaagataagaactaaggacgtacaaccagaactgaatccagactcagatcgggattggaatttatgactcggacccaacctagaccaagacccaagacgagaacccacacccggagcctgatctggacctagactgaaattcagtcccgaacccaaactcaggccaggactcgaactgcgactcaaactcaaacccaaactcgaactcaaaatcgccaatggacctagaaccaaactaggactaggaccaggaccaggac

SEQ ID NO: 368735 - DNA, 592 bp, Cannabis indica
tttgtctatcaaggagctaaagataacaaacacaaatagaaaattatcatgatagttctacaaaatatagataataagcaaaaaaaaaaataaaaattgaatcactttggcatcctcattggattgaaagaactttatgatgtcgtccatcctcctaagaagcagggcttgacttgtctccattcttcacaaatgtaagtttacttcaaccatttttgtagaagcagaagtggagattgatgagtagtaggttcatattagggttgtacaaaaaaattcgtaaaccgtccaaaccgaataacctgcccaaaccaaaccgaaaaaaccaataaaaattacataccgaaataactcgaaaaaattataaaccgtccaatctgttaattgggtgggctgaaaataggtccaacttgcccaattaaaccgaataacccaaccaacccgactttagatttttttttactttttagtttttattacatataacataaatgattaaatataatatatatataaagttatatacttaattgttagtttcaaagtcatatatattgtgatgtgctttggtggtgtaacaccctaactaact

SEQ ID NO: 368736 - DNA, 812 bp, Cannabis indica
tccaatctaatccaatagaaaactagttaatacatccaatgattggaaccgatccaatccaatacatctattggatcggatcggaaaggatgactcaattcgattgaattagatcggatgataaaatttaatatccaataaataatttgattggatcggttggatcaaaatttattgaatgtgatctaatgaacacccctaaaatgtaggctcccaaataagtaaatatgaaatttaacaaatgaattttctaactttatgaatttttcatgactctactgtagacttagaatttcacagaacgcactatatacataatatatatgaattatctattattttaatcaatgatcctctataaatggtttacaatgagtagggactaaaattaccattttaccctatcaatgtattttatccttaaaatacttaggtgatatttgattgagaaaaataaaaatataggaatagaaatgagaataggaataagaataaaaatggaatgaaacaaaatttaaaatgtattaaaataaataaataaatcattaattttttctcatgttacattagaatggtctttctttctatttcaaaatggaatagtcattccaccaaaaatagtggaagggaattctattggaataacattctaatacttcaaaatacaactaaacaaatgaatggaataaaaattatttccttttcattcaattccatttcattacctccaaccaaacgctaccttagttattataaattatatttcagtaaactaatattagtactgaaatgagatctcaaccatttatccc

SEQ ID NO: 368737 - DNA, 558 bp, Cannabis indica
aaatattatgaatcacaatttatctatcctttcgatagaaaattaatgtatttgattataatatttaatagattgttcttacatgtgtatgagttctattttattgttttgtctaaagaactctagcatacatgatgatcatttgttattttgcgatcattcatttatgagaaaagagtacaaatgacatgatttttgttataacatgcatttaatagttattgctcttgtttctcattcagctttaagcgttccaagaaactctgccatgttgacgctaaatggaaccaaccacaagcagtgggttgaatccctcatgctaaatttgactctcatgagagtggacttggccttgagagtggatgcaccgcctaaacccgctgatgatgccactgaaaaggacaagaagtcctatgaggattgggagcattccaatcgttgttgtttgatgcttatgaggtatcacatggatgagtccattcgtgatagtattcctcaaactgaaaatgcaaaagattttcttgctgccattaaggaaaagtataagaagttctcaaa

SEQ ID NO: 368738 - DNA, 694 bp, Cannabis indica
atgaaactccatatgattattttggatgttgtttttgataaatattaatatatataatcagaacccaaatgaatttgctgggggaccaacctacaataaaagagtaacaagacctcgtagcggtaagggacactctcaatttataattaaaatcaatatgttatgtgagttggaatttgatacctaattatttttttacaataaaaaaggtctccatcttcattcctcacctcgatttcgtcaattgctaaaagaggtgccatctgaagcattttctctaccatccgtccctcgatgcaaacattgcaaagcaaagcgtttcattcatgaaacaacaggcttttgttgtgccgatggaaaaatttatctcgcaacaaacgatgtgccgaatgaactttatgaattgtttacttccagtagcgaagaatctacacattttcgaacatacattcgaacttacaacaataaatttgcttttacatcaatgggagttacttacgacaaatcgatgtgtcgaaggaataaaggaatatatactttccgaagccaagggcaaatctatcacacaatcaataatttactaccatctgatggacgtccctctaatctgcaactatatttttacgacaccgagaatgaattggagcaccgacttaatgattcaaaatgcagactggatccatctgttacaact

SEQ ID NO: 368739 - DNA, 721 bp, Cannabis indica
agggggtactgcaatgggtgtggtattctccatgatagagagaaaaaaaaaattgaatgatgcagagcttagggtttctgagaggaaagtgaagaagtgagactgatcactttccgtaggccttaagtataggcaccctgacacaactgaccaggcaaaaattaataagatttttttttaaatttgatttttgccaaggaaaacgtacgcgcccaaattgaatatttgccaccacataatacggcacactaaacgaaacaaaccaacgtcatcaggcaatgagtgtaataaagaaaccagaaatgtgacaaatataccaacaatatttgcattcagcccacacttagacaaaacagagaataataaaaaaacttagagatactcaaattttaaaaaaaaatggtatcaactgatcaatgaatacagtttctgagtacacacgtattgcacaccttgagcaacagatcattaccccatccccagccacaatgatactcatgagagcactaaaccttgaatctccatacgtgtgtgaacagtgatctcatgtggtccaagaagagtgaatatcagctggaccactctctcaactaagcaacaactgataatagaaaaatgacgatttttttttttatatgaagcctctttttttatatatatcactctggctcttgctttagtacccagacatggctttcactctcttccagagatgtagccg

SEQ ID NO: 368740 - DNA, 537 bp, Cannabis indica
ttgggtttgggactgggttcaggtccgagtgtgggttcgggtccttgtcaaggttcgggtccagggctaggtcccaaatccagacaccgactactgttttgtccaagccctaggtccagatccaagtcccaatttcgggtctcagtctggttccattttcggtgccgggtcatgagctgggtcctaggttcaagtttgggttttggtcgggtactaggtcccagtcctagttctgtttcccaagtccctatcctgattcttggtccaggtcccggttatagtgcgggtttgggtccaagtctcggttcgggttcgggtcatgtactatgtcccagtcctagttttgtttcccaggccactatcctgattatggatccatgtccaagttattgtgtgaattttggtcccggtctaggttcgggttcgagtcctagtctcggttcgggtttagatccctttctgggttttgatctgggttttgctcctggttttgctcctggtcctgtacctagtcctagttcggttctagttccattt

SEQ ID NO: 368741 - DNA, 533 bp, Cannabis indica
caccgtcttctagtaccagatgagtctgttgttgacccatctgcagaattacaggatcctcctcttcgcccttcaacttctatttccagcatctcagaggctcgcgatccagtataccctgccattttggcaaggttggagactgtggagagagggcagattgctttgagggaagggcagaccgctctgctaagaggacagacagcgattatggatcagttgaagaccataatgaaactcctggaagatcttggaaggccgacaccagattcacagtcacagccacagccacaaccacacccacagccacaaccagaagaagaggctcagtcaccggaaaatgaaatcattctcccaaattattatagaccggatgatgatgacatgttcttaacacctgagaacacgaatatcaccagcatcggggatactcaggattctgaggtacatgtgttagagacagctccagaactagtggagaaccggaggaagagaaaggagcctaggtggttcgatgagtacactgaaatgaa

SEQ ID NO: 368742 - DNA, 679 bp, Cannabis indica
cgttaagtaccttgggctccccttattcagatcaagacaaaaagacgctgactttaacttcattctggataatctgactgagaaacttcatggttggaaggcaaagacgctctccaaagcggggcgagcgactcttataaagtcggtggggttatctttgcctctgtacgctatgcaaactaccaagttgtctaaccgacttgcagctaaggttgatgggctggtgcgtgatttctggtggggctcggagaaggggaaccatggtttgtacctaaaagcctgggataaactttgccttcctaagtcgttaggaggcctaggttttcgcaaatccaaagaaatgaatcaggctttccttgctaaatggggatggaacctcctttcaggtaataaatctttatgctgccgtatcctcgaagccaaatacctgaagggcaaatctttcctagagtgtgatccgaagccctctgattcgtggttttggaaaaatgtgactaagtccaaatctattattcgaaaaggtgcttgcaggcttgttactaagggtcaggagacgaacatctggtctgatccttggattcctcatctaaaaggttttactccaataccggtggggccggtccagaatagagagtcaaaggttgctgagttattagagcctaacggtggatggaacatc

SEQ ID NO: 368743 - DNA, 469 bp, Cannabis indica
aaccaagaattttcgaacctaaaaattctctttgacacttgcattgtttcggctacagggaccaaatgaagagggcaatgatccgaagtggacacctccatattataaagcttagccaaaggaaactttgcaagccaactatgagaaacaagagctctatcaagccgagcctcaacccatgaatcagttcctctaccccgttcccacgtataaggatagccactcaaatccaagtcatgtaaaccacactcttccaacgtatcacaaaaaccattaatcaaccaattcggatataagttacctccatttttgtcttgttgagaagtaacattattaatatccccaacaatacaccaaggcaaattactctccattttcaatgcacgaataagatcccaagttcgcttccgcaaactacgattaggttcaccatataaccccgtaagtctccactccccatagtcacggt

SEQ ID NO: 368744 - DNA, 528 bp, Cannabis indica
ggagggaacccatccactgagcacgcgacgagcaaggtaaattttttttcccctttcggttttttaattttttttttcttattgattatggtgaaaatgttgtttgttgatagatttaggttggatatgtgcattcttgattagatctagggttagatggagtagatctagggtctgtgatctttctgggcatgaaaatctgattttctggtttgatatgagcttgaagatgaaggcccgatgcatggcccgatgcatggcccgatgtaggcctgatgcaggacccaatgcttgtgtaaagaaaatagaatttgatatggcctgatgggtccgatggtgggcccaatgaatgtgtaaaaaaatagaatttgatatggcccgatgggcccgatagtgggcccaatggggcccgatgacttgacagtgtagtgaaataaaagagagaagaagagacagggggttgatgtaaatggggagtattttaagggatattataaaatgtgttatattccacaaatatcaaatatt

SEQ ID NO: 368745 - DNA, 924 bp, Cannabis indica
taaacacaaataatacttatagcgaaatagacatctaaacaacaatgataaatagagaaagattcatatacccttttctcaaatagcgcaaccacatcaggttgcctcacatcgtgttttgcaactgaattggggatgctccagttcaacattcgagggaatatagttcctttgcactggccatactttttccccacatcttgcatgacctctaaggttagtgcatatccgtacatattatactttgcttctggttgagtaactttttcctccttcttggatttcttcttcatcttatctttcttacctaagaccttatccatgtagttttacctaagctactgcatattttgagttatggaagacaacgacttctaataagaaaggaagccccaaggatatttaaagaaattgtctacattttttactaatttcagtcatatctatatagatatatacacactcagctcgtgacaataaaataccttacaaaaaaaatgcacataaccccatcttgtacacatcgtttgtaacatcatgttgggttttgtgccctaaataaaacccatttcaatataatcagatttacttattaataaagatcagaaataacattttatgttgcatggttcacatgatttatttcatgattatatatataatgtatgaattctatttaagtccagaacatatgaatttgttaatgattatagtgttgtcagcacagtggaatataatcttaattatatgttcgaaagtttattccctgatttgtcagaacactggatttagactgacatggtataatcagcgataggtattcttacaccttggaaaagtttaccagtatcggatgtatggagtatacatcggaagggaccgatattgaactttgattagatatattaaaacttactgtaatat

SEQ ID NO: 368746 - DNA, 1342 bp, Cannabis indica
gcgtttgcttactaatgataactccctagtagcaaaagtttataaggcaagatacttccctaaaggcaatttcttatctgctgagttaggacccaacccaagctttttttggcgaagcatattggaggctaaaaatgttattcagttgggtgctttaaggtctatttgtgatgggaaatcaacgtcgattttaaaagacccttggcttccaaatatcgacaacatgtttgtaacaacttatcacccaagttttgagggtaaatcagttgatagcttactccaaatgaactcaagagaatgggatactgatttgattcaagacatgtttaatcaacatgattgtgagttaattctctccattcaactgggtagttctagtggtagtgattgctggtattggtctaaagagacaagtgggatttattcagtgcgaagtgcctacaaacttttgcaagctgttgatggagattggccgagtactggaggacagaatcattggaagcaaatctggaatttaaatgtccctgctaaggttcaacacctgctttggagagttattgcaggctgtctccccaccaaattgcagctctcgaacaaacatgttccagtcgacctcacctgccccatgtgcaaactggaacctgagacagcgtcccacgttatgctcaggtgcaacttcgcacgttctgctggaacttggcctcgactgatgctgctggtgctggtaacatggacttcagcagctggttttgtgacttgctgctgcactgtaggaaggtagtcgttgaggaagcggcaatgatcacttggcgaatctggatggctcgtaatgatcttttatggaataacaaatcgactactgctttggaggtaattcgatcggcaaaaactaatcttgacaattggcaaaatgctcaatcaaatggtaccatacctttactaaatgttaattttagtaagggtattgagcattggacaaaaccggtttcaacaaagttcaagatcaatgtcgatggggctatctttgcggctgataatcggtttggcatgggcttccttcttcgagataccaatggcaagctaattgaagctttctcaagtagtaaatttggtgcggtttctcctgagattgctgagattatgggggtcaaagaggctttaagctggatcaaaacgaattgaaactgactcattagttgttgctcaagctattaatggtctggttcaaatgccatctcagtttgggttacttgttcaggattgccgagtgctactttctgaattacataaggtttttctttcttttgtaaacgatctgctagggctgctcattgcattgcaa

SEQ ID NO: 368747 - DNA, 513 bp, Cannabis indica
cccggtctaagtcgcaaagacctaagcccaacgaaaaaagatctcagtaggcacggtccgctcgtagggaggaatccagacccactccgtgagaagctccggatgctccacagctcggaacccggaggagaagaagaagcgatggcgatactccttgacatgagtttgccgattgtaagggacgaccccatcatttgaagggtgggcccggaaaccataaaaaccgtctttaagtttgtccccatttttggggacggaaacaagttcataaaaatacaaaatctccgccggactgggagagccccatccccgggcggagtaaaaaataaaaaagcctgaaagcaggcggtaagcttgggaaatcagttggtatggcgcaaggcagacaaatacaagaaaattattaaaatagtcttgaagaggaagcatggccccggtcatcaggtgcgtctggctccaagccccgaagccgccgtaattatggttggcgtctccgcatctcggggcggctgg

SEQ ID NO: 368748 - DNA, 548 bp, Cannabis indica
ttttcttgaaaagtctaattagccgtaggttaaacgacacaagaatgcttgtcgtgttgtttaagtgctgccgtttagtctattttcacttagactaaggaaaagtcaaaagtgaccttaatactgataacaaattgtttttgttggtgtaggttaatatagtaaattcctacaggttcgataaatcaaacatcagacatcttcacaaaattattacctgtctcaccttttatttttttgagaaacaagttgacacttggtgtccacctgtgtcacttgaggggggatattgtaacactagatcaaaactaagaaaataactaagtgagacaaaggctaatactcctgactttgccattgccatgatgagttctccttaacccctttcaatgaaaaaaaaaggctaataaagatttttgccccttaaatttcgacatgtaccaaatcatgcttactgaacttttaaggtcattaaaaatactctctgaactgttgagattgtttgatttaaggacttttttctagttttagtaaaaaaatctaacatg

SEQ ID NO: 368749 - DNA, 572 bp, Cannabis indica
tatttataatttttatagggtgcaaatagagctcccctaaaattataatgatatattttatttttgagttaattacctcataaccccaaatattatcattttaaattgggatattggcggcttaaccacctgaattttacggtttgtaacacttaaccacaaaaactgaatttttagtggcaaaactacataaaccctggttccgttttgctctgcacacctccgtccaaaaattaccgttaagtgccacggtagactgtccacgtgtacacacttgtacacgtggcaaatttttagtggcccacctaatttttagtggtacgcactttgagacacacttttctcttctacctttcaaacacaaagctagagagttctaagatttgataattcctagaagtattttcacaaagccctaagggtttcatagagggggaaataatcttctggaacaaaggtgtagaaaccttgttcaagcttttggtgatccccatctccacttcgggtgtttattcttcttttcttgttttgttctattctctagttttatattgttctcttgttctcctcta

SEQ ID NO: 368750 - DNA, 538 bp, Cannabis indica
atatatcattctattatttattattaaaaaaattaagttcacaaaaattataatttattatatatatatatataatatcctagatctttggccaattaaaagtattattgagatatgactgatgagattttttttgttatcagtatctttcttggatgatattttaatttgttatctaattttttaaaaatatctttaatttatgttcgttatatatatgaattagcagtttgtgcagttaaaggttaaagtggatgagaaagtaatttagatggataatttctcattttttttattgatgatgtattaaactcaaattatttacagtgaatattgtttgttgttttaaaaaaaaaaaattattgagttatgacttatgaacatgtgacattattaccattcaacaaaagaaagaaaaacatccatctattttgcttttttagaaacacttgtctattttagttttttcttttttttaagaaattatgcaattttattaatagcaatctgcaatccaatcaggatatctcttttattg

SEQ ID NO: 368751 - DNA, 491 bp, Cannabis indica
gagttatatgtggaataaaaatttttaggttcggcgaccctgaagacccgataaataagcaaaatttgttaattacggaaatttatttgaaatatgtggatacaatatgagttatttgtgaaataaaaatattttcatgttcggcgaccctggagaaccgactggaggccaaaaatatcacaatagttttaattagaaatattgatggggttattggaatatattaattttagaaataccaggatattttagagtacttgaagttggccaaatactctagaagtagaggttttttagtgactaaaaaataataatataactattaataataaaatttttattaataatattatttatatttatttataaaacttaccgtaagtttattatatatatatcataagtttatatcagatgaaattgtacgaacaaaatctacattcttctttcaaatagaatatttggtaggagatatgaaataaattgaaaaa

SEQ ID NO: 368752 - DNA, 489 bp, Cannabis indica
cattatgttccttccgtccgtgagtataccagccttaggcatatagggttcgacgaacgtctccgtaggtttaggatgccttccacccggtgggggaatcatgccaaggagtattatttctcccacttaggccattatttaggtcggtcccgaatgggttctggacctccggtgcccattcccttggaccactcaaccaatttatcctctagttggttccttccctcggatagctttctcggggatgatgaagccagcactatgatttgggactttgctagggctgaattagagagtcagggtaggaatagctttatttctttttgttaagcgtatactgttctcatggatgttctaacacttgacttattttcttgttgcagcagccaggcccatggatgaactgttgggttttgtgccctaaataaaacccatttaaatataatcagatttacttattaataaagatcagaaataacattttatgtt

SEQ ID NO: 368753 - DNA, 310 bp, Cannabis indica
aacgggacaacgctggattctcatcttgatcgaataaaaggttgctagaatgtttgtcatttcagatgacctgactactctattcaatggatgatatcttttgactctcgcctaaacgggacactggtatcagtttgttggaaaccttgcaaattatttaggattgtaagttttagtattttcactagtcattcctatttgctaaatgcttaataatttctaaattgtgtatgaatttatattgaaccatgttattttctgttattaattgtagtttaatttcgcatcttcattgttggtctaacttggc

SEQ ID NO: 368754 - DNA, 503 bp, Cannabis indica
tactcgggggcgagtaagaatctagtttgggggaagtttgttaggctattcttagcctatattctagattgatttgacgtgtgtttttcactgtgttaggatggaattacacttgttttctatattttcaggttctttggaataatagaggtctcgggatgcaaaaatccagtaaaagacgagctgagccaagaaaaacaccattttgaagaagtatgcatatctggccgcagctagatcacgaagtagataggcaggattttgaggctacagtcgccgcggcgagactatacgtggccgcggcgagagcctgtacggcccaggggtatttttgtccaacgaaccctaaaaattagttataaatagaaaactgcaattggaagtgaggggaggtgatttggaaccctaaaacacagcagagagcgacaggaagagctgagtgattcaaagtgaagatccataattcatccaccaacagtttctttctctattcctctttaatt

SEQ ID NO: 368755 - DNA, 502 bp, Cannabis indica
cgggaagagctgagggcggagggtgaggttgttaccaaggccaaacgcgagctcctagaggctagggaagccttagacgaaatggccgccaaggtgaagtccttagaggaattgcaccaggcggacttggagtccagggcaaacctggccgtggagctgaaagagctcaaggactttaaagaccaagccttgaagaaggctaagaaagatgagctcctttctcccatctcttgcagtcgatgcattaagcgctacgacgatggcgtctatatggcctggtcaacaaatggccagaatatcaaggttgacttctacccgaaacccgcagagatgattgctaaatttcgggagaagaagaagaagcttgacgccatgctagaggcgcccattggtcctcgccttcctcctcgaattgactaggccgttctgaatacaacctggatcttttatctctttttttttatttacagctaatttgcttttgttcaagacaatctttatt

SEQ ID NO: 368756 - DNA, 588 bp, Cannabis indica
attatcttatttttaaatctttaaaaattatatctcacagtgttacgtactttcactcttatatatagcattatatatatttatttcttagttataaattatatatatatcatatataataataattaaaatcttttaatcctataaaatgagaagatagtatcatttgaatttaaaatttaaaatttaaattcaaaataaatatcatataactaaataacaaaatttacttatatccttttattttatattattttttgatttaaataccttatcctataatatatttaattcaaataattaaattataattatcatttattttgatttatcttattaaatcaaataatataaataaaataattagacttttatatgtcaccggctaagtcctacacacgtgcgccatattttaaaattcaaaattgatttcccattttttgcataaataagatttattatttcttttacaacaaataataatagactaattctcattaatctcttatttgactaggattaaaataaatattattttacactaaataatatttttctctctttaaatattatttaataataatatta

SEQ ID NO: 368757 - DNA, 580 bp, Cannabis indica
tttttttatggcattcctcatgacttttttctcatatttgtaagttttttttaaaaaaatgtcatatttagtgtaattaagtttttatgccatatatatcaaaacttacttttattttcccacatttttgtaaatagccctatcttctaagtactctctcgattagaattaatgtagtaatgaacctattttttagaagaattattaatgcactcgcatgaagtatcttttagtttgtatatatataaatcaaagcagatttaatttttaattacttctgtatagtaataaaaaaaaatatttatttatgtgattactataaacttatactcctaacaatcattgaattcaaatattttaataagcataaaataatcacaaatatatctactttttatactttttaagtgtactatttactaatttagttctaattttttagcgaagactttagtcatgataattatcaagaatttatagtaaaatttgttctgctattctcttttccatcgttttcaagaaaagtgttattattattattatacaagtgacttccaattttagtatattattttttttt

SEQ ID NO: 368758 - DNA, 636 bp, Cannabis indica
ataatataataatcttattattaacagtatacttaaataacaattttattatgtaggatgatgaattacccttcagcatttttcataatttattttaagggattatctcataaatatcaaaaaactaaaaataaaaataaaaaactttaccttttagaattattctgagtattttttacttactacggacattctttttctacaggccattgtttacatgctttttgtttttgtttttttaaaaaattattatttacacgttgttttgtaaaaatataaataataaaaaatattatatttagatgtattatgtaaattttttaaattttaatttaaggatattagtgattaaatcattaacctagcttgtaccattatatgtttagagttttcatatgatccacgtgactatttttttttctatagtggcgccttacataagtgaaatatatcttagaatatgtaaatcaaatttacccactaactagcagtgtgtgattaatgaaatgagcaaaagaatatatgattattttattttattgacaacacaagaatgatttttttattatattttattttttacaacacaattatttagttagggaaatttagatggtatactaacttttattaatt

SEQ ID NO: 368759 - DNA, 713 bp, Cannabis indica
attagcgttttgaaagataaaaactaatattttagatctaaagtttttttttctttaatcttatgtgttaaatgtatattaaatcaattaatatatatttttaaataaactatattaaatatataaatttataaatgtattttaaaaatatataaatataattagataaccattagatgataattggatcggtttggtcggttattcattggatcgaatgtcccatccaacaaccgatctaatctgattggattttcaaaatttacatccgatccaattatgattggatatctgattctattggatcggttagcattggatcggtcggttgtaattggattagatgactttctgcacacccctacagttcgtcgtcttcttcttctcccaaatcccaaaacaatcaacccccaaccatttagcctccacactcttaggttcaccaccagaacaacacccaccaccatgaccatggtgatgatgaccatgaccgtgccatggctatcactttgtcgcgagccctaatttgcgatgggttcggagtacggcgagcaaggttatgtggtcgtggcactcgttgctctcttcctccatcttggcgagaacgtatccgacgattcttccattgtagtcttcggctaccgtagaggagttgcagccatgagaggatgtggtagaggtagaggtagtcttcagatttgagtttttctttt

SEQ ID NO: 368760 - DNA, 660 bp, Cannabis indica
gtgttttttgttggttgttgatgttctgttgatattcctgagattgtgtagcagatatctttgcccctatcacaggattttgagcttactattgtgagattgagccatggcaaccaccaaatccaaatctcgtaagcgtaaagctccggccaacaccttgcccacacctccaccacaacaaccaacccaaccaaacccaccaacccttgccttgccttcctccaccacacactcaccaccccgtactcgtccccgtaaggcctcctcacctaaacccaaagctccaaccgccaaagccgctccctcaacctccaagggccaacccaagcctaagcgcaccacttccacatttccaccacctaaacagaaccccactactcgtcctaaagccaaagccgaccccgtccgtcatcaagagcggtttgagatattacgaacccgcagccagttggccgagcgcggctttctccctgccccggaagctttacctacatatattacaaatttgattgcggagcacaagtgggagaaattttgtgcaattcctaagcctgctgtggcctcggttgcccctgaattttatgctgcacttgatccaaagtatcctgatgtcgttagagtgaggggtcagagtgtccccttttctcctgatgtgattaa

SEQ ID NO: 368761 - DNA, 528 bp, Cannabis indica
taaaataataatataataaataaaattttttagtgttgtggttggaatataaaacaaaaaaattagtgttaaaataatatatttttagtgttgatttaataccatataaattttaccattagagttatcctgaagattgtaaactaatggtcatgagataattatataaaattattaaacaagttgagatggaaaaatgaaaggttgtattaaagaaaaaataattaacataaaaaaaatgtgctttcttttctttatataaaactagggaactaagccgcgcttcgcgcggtgttgtgcaactttcctataatgtattatataaatatattatacttgttgagtgatatgatttaaaatatagtatttttatacgtgtaagtagtagtattgaaattagaaacatattatttttaaaatatataaagatactttgtgataaatattaaaaatagtagaaataacaaatacacttgtggtcatagacataggttagtgatactacacttacactgaaaaagaagaagc

SEQ ID NO: 368762 - DNA, 617 bp, Cannabis indica
gttgttaatccaacatacttgttagtaaatctagaacctggtaaaataatttccaacatatgcctgaaagacttcgttggaattgtcgattgaagtcgaccaggttaacaaaatctcaacttgggcattgggtggctagtgtcaggtcaacctgggcgccgggtgcccagtgtcaagttaacatggtcagtttctcccctgaaagtgcttatttcctagttttggatgaagttgaagaaaatactcgggatagtcctttagtttgatgattggaagcgccctagattgacaatatgtcaacttgggaactgggtgcctggggcaccatgatgctctgagtgctcaaatttaaagttgccccgaatctgattcgaatgcctcaaatatgttcgtgaacatttctaattcatgtctttgtacaaattttgacccattttcactaagaggattctggaaacaaaaaccctagttggaatgtgattctaggtgctgggtgaaaaccctaagcgcccgggctgacttccgaggtgtttttgtgtattttcaacttctaagccttggactttgattcttcatgtcttcaagatacagaatactgaaaaatagtgagttgaaaa

SEQ ID NO: 368763 - DNA, 936 bp, Cannabis indica
cataaacgtgtaaaatacatgtaaacataaatcacttcaaaattctatattgataactaatcaaattgtaatgggttttatttagggcataaaacccaacatgatggacaatccgaaaggacaattcaaatactggaagatatgttatgagcctgtgttatgtatttcgagagctcctagagtaagtatctgccgttgatagagttctcgtacaatgaaagttatcagagtacaatagggatggctccctatgagctgttatatggcagaaaatgtagatctcctattcattgggatgaaattggggagaagaaatacttaggttcggaatcagtgcaacggactaatgacgcaattgaaaagattaaagtcacaatgcttgcctctcagagtaggcaaaagagttatgcaaatccaaaacgtagaaatatagagtttcacgtaggggatcatgtattcctccgagtgtctccaatgaaggggatcaagagttttgggaaaagaggcaagttatgccctagatttacaagaacttcgagattctcgagaaggttgcacaagtggcataccgattagctttgcctctagctctttcagcaattcacaacgtattccatgtctctatgctaagaaagtacgtttcagaccctgctcatgtacttagttatgaaaatcttgagctgcaaccagacatgtcatatgaagaatagccagttcaaatccttgacagaaaggataaggtcatttggaacaagaccatagctttggtcaaagtactctggagaaatagcaaggtgcaggaagccacctgggagttagaatccgacatgagagctcaatatccagagttgttcaggttagatttcgagaacgaaatcattttagggggataatgtaagaccgcttagctttaatttggaaattagcagataattt

SEQ ID NO: 368764 - DNA, 519 bp, Cannabis indica
attctttctaggaccaccactactaatctaactctaacatacaaagtatacgaaaccttacaatggttgcagcagaatataatgtctccttccactcagatctctaacccttgtatcctttctgttgtagagtattatcaagatctgagcccgaatgtccttcttgttgaatctggattcttcacgatcttccacaccatgattgaggtaccacttgatgtgtgtgggcactactctatcactcaagggtttcgaattttaatggtgaagaagaaggcttaaagtggcggctaggtttagggagagaaggctctctattttaaaaaaaaaagatatgtcatcttttctaaagccatcactacctatttataacaaacaactagggtagggttataattatttggcattaaaataatgaaaaaataaatgataaaaccctatagtattgtccggccatgaatgtggataatgggccccacttttataattttgttgttttatcatttctgcatctgattt

SEQ ID NO: 368765 - DNA, 555 bp, Cannabis indica
cccaattcgggtctaggtctgatttggagtctgggtcctggtccggttacggttctggatctaagtccaatttcagttatgattccaagtccaagtcctagttcctgtcccggtcaacttccagttttggttccaattttgggtcacagggtacagattcgggtacacatttgggtttgggacttggttcatgtccgggtgcgtgttcgagtccttctcaggttcgggtcctgggctaggtcccaaatccagacagcgactacggtttttttccaagcccttggtccagattcgaatcccaatctcgagtcccaatgttgttccatttctggtgccgggtcacaagctgggtcctatgttcaagttcgggcctgggtcgggtactagctcccagtcgtagttctgtttcccaggtccttatcctgattctgggtccaggtcctagttattgtgtgggtttgggtcccggtctaggtgtcggtccgagtcctagtctcggtttgggtttaggtctctgtttaggttttgatctgggttcaggttttggtttaggtc

SEQ ID NO: 368766 - DNA, 557 bp, Cannabis indica
tgtctggtgattgaaaaaaaataaaatagaaaaatctcaatcatggttagttgtgggaacacttcgggaaattttaaaattatgagaagcttgtgggttcttttgtgcttatgatacctttagccaaaattgtctttcattttccaaatatctaagccataaattctaaccttaaaaagtccttttgattccgaaaagaatgttgtcaacattagtggagagaggtaagcatgcaagcatattggctattagtttgtggactgatttgatggagtgaaacaattatgacattattttaatattgaagttagtttgtatctctacattgtgtgataagaagagcatcctaattaattgttagagtttttggaattgaaaatctagtttagttaatggaaggaaatttcacatgagccagcagtaatataattatctgatagcttagttaatcgagttttagtgttagtcttagtcttactcgagggcgagtaagaatctagtttgggggaatttgttaggctatttttagtctacattttgggtcactttttatagtt

SEQ ID NO: 368767 - DNA, 525 bp, Cannabis indica
agccctatctttaaatgtctcgtggcctcctcgcgtatactaacttgactggaggcttatcaaattggcttttgatgttttaaaagtttacttgtttaacattattactaatatggaattagctgctagttgctttttcaaacaatgaagtttacttgacagaaagttgcctcctttttaaaataagagatacattctaatgttctctttcgccattgttttgctggttgtcttctcaaagattaaaatttacttttattgtattaaagtttatgttgttgaaggaattttacaataccaaaataaattaataataaaatgatgaataagtgcgagtattcaacctagaacggcgagtactcgaactgggaacacaaatacttaacaaaaactggaaatacaaagaacacgagagagtatatggttcaatcagatcacggtctgcttagtctactgttgcaaggattcagtatatgtcccatttcacggtggatcactcctttatatacaaagcaagtgtcctat

SEQ ID NO: 368768 - DNA, 502 bp, Cannabis indica
ttcgagcaagctagaaccagccaaattagggagattttcttcagctattcttcctcatctcaagcagaatctaaccccaaatcaacctagaatcttgaggtaagcttcttccttatgttcttggtgatttcctaggttttaagctaggtttttattagttctttatgggtgttcatggctgtaggcttagatgaaatctgagcatgatttcttagttgaattaggtttgtttgagcatgttttaattgattccatggcaatttggattatattgtttttgaagaagctaaaggaaatgagtttctttcacttgagtatatgattttgagttagagattgaactactgtaatttgaagcttgggatatgttatatttatgttattatactgttctggaaatgttatttaggtctgtgatggctttggttcgagctggggaagaaaacccagaatttttctggtttgtgagaaacctgtcgactggtttttctggtgtactaga

SEQ ID NO: 368769 - DNA, 756 bp, Cannabis indica
ttctgtttcccaggtccctatcctaattttgggtccaggtgctgtttattgtgtgggtttgggtcctagtctaggttccggatccagtcctagtctccgttcgggtttagggctctgtttgggctttgatctgggttcgagtttgggtttaggtgctggtcctagtcctagtcctagttcgtttctagttctatttgcgattctgagttcgagttcgggtttgagttcgggtcggagttcgagtcttggtctgagtttgggtgtgggttcgcgtccttggtcttggtctaggttgggtccgagtcccaagttccaatcccgatctgagtctggattcagttctatgtctaagtccttggttctgatccttgtcttggttcgagtttgcgtccaggttcgggtctagctttgggtctgattgtaggtgtgggtgtttgagttcgggtccgagtctgtgtctgggtttgtgtccaggtgtggacctcgatctgggtctaggttcgggtctaggtccaagttcaagtcccgagtgcgtgtccaagtttgggtctgggttaggatctcggtccttatctaggtctagcatttccatcccagtctgggtcttggtccagtccaggttcgtatccggatccctatctaggttcaagtctgtggttgggatcctgtccaagatttaggtccaagtccgcgtctcagttccggtctgggtacacgaccacgtccgggcctgagttccagtctcagtttgggtct

SEQ ID NO: 368770 - DNA, 520 bp, Cannabis indica
acgctggaaaaaaaacgtcaaaaaacgactcccagaggtgccgcacgcgccccaacacgccgaggccgagaatgggcttcgcggttggcaagtcttattcttcttccagccgggttggaggcgggtcacgcgacccgatttcagaccagtcgggtctgacgtgaaaaactggccaaaaaacgacagaaaagcacgggaaaaggaggggttttgctcgtgattggatttctagtcgatctacactactaatttcggctattaatagctaaaaaatagatcttatggaaaaatacaatccgaaaattaaagaacttaaaaaaaaaattattgtaataccaatctcagccaaaatacgaaattaattatgtaagaacattcataaacaattgataatgagatattgataatcaattccagatcaaaaacaataaaattaaaaatcacaaattataatttcataaaaaccctaaaactttaaacttaaaattctcatcatatactcaatgattttatacatata

SEQ ID NO: 368771 - DNA, 510 bp, Cannabis indica
aatatttaaaattccgtaaaaccttatttttgttgttttttagttgtttttgtgcatttgtgaaattaaccctaacaaataacctcaattagctaccacaggctaataaagttattaactgagctgttttctaaatcatgtcatgtcctttttttcatatttgttttttaaacattgtattttaggaatattatgaagatattaaaaagtaatgttattaaagtttgcccacacatttgctttgctgatatatcccctagttgaaagtttatggctctgagtctctgactctgaaataattgatcgatgcaaaggaagacttctcaagtcaatgtcaatggtactttttaattaatttagatgaaaatttatatatgagcattgctattaggcaccaatagtgcttagtacttttgcgacatattgtgttgcgattggctaacgatactccctaaaagttattatattaaattatataggacccgatatttagttgaaccaatagcgata

SEQ ID NO: 368772 - DNA, 710 bp, Cannabis indica
gtgccccttgctgggcatgagcacccgaccaggcgcacatcccctttcagggtttgtggctcgattattatgagcgggaatgtaacagtccaactcgcccaggtagccatcctggtcgagagcccgcaggcacgcctcagtaacctttggcggagggctcaccaccctggcacccaaggtaccttgccttttatgaggaaccgcagtggtaagttcctaactgacgtagtccacaccctcaacctggacgtctccatcaggatcgactggctccctagcctcattgtatcccccatagtttgggggtgcaatctcttcctccgcctcagagggactgctaggacggacatcatcttgctccccaatttcctggacctcagcgtccccttcatgattcctctcctcctgaatggttggatcttgttcggcgctgggcatagtggtgtgccgagccacttgagggtcagatgcatcaaccatgcgcgttttctttttggtgcgagccatcattctatggctgggcgaaaagattcaagggagaatgtccttcacatgaagcaggtgggctataacaaagacaagggtggtcctcgtgcaagagttgaagcaagtcctggtcgattcgatgttcgctctcccaaaactcacctgggttcatctacaaaagacaacacacaagatgagtacttggttggaatatcgaacgttaa

SEQ ID NO: 368773 - DNA, 569 bp, Cannabis indica
tcatgatctcataataaaactgttaaaaaaataaaatttattcaatacgtattgacaattttattagtgtttaggaaaatgagaattaacattttaaatctaagattttttttctttaatctcatgtgttaaatgtatatattaaattaattaatatatatttttaaataaaatatattaaatatataaaattataaatctatttcaaaaatatataaatataattggatgaccattggatgataattggatcaggttagtcggttatccattggatcggtttgtccgatccgattggataattttcaaaatttacatatgatccgatccaattatgattggatatctgattctattggatcgtttgggattggatcggtcggttgtaattagattggatgactttctacacacccctagcgttgggtgcatcaccaggtcgacctgggcatcgggtgcctaggtgactctaatgggaagtgttctaattttgatttcggtgcctctagcatgcttgtggcatgtcttattcatgtctaagtataaagtttgagccatttgcactaaga

SEQ ID NO: 368774 - DNA, 521 bp, Cannabis indica
aaccatgcaacataaaatgttatttttgatccttattaataagtaaatctgattatattgaaatgggttttatttacggcacaaaacccaacaagtgtagtgttcagattgttttgaacagtactttcttaatgtctacttttaaaagttatttattttcgcttccgctattagttcaataatgattttttttttcattttgtcaatcattatgttgacattatgtttgacttcgaataattgaaaactgtttttactctggtggtctttttaaattatcattaacttccttagtttcctctttcaattttgtgaataatgtgcgtaagagctcttatattaaggtaacatccttatattgggttaaatttctgaaacaagtttgaacgattagttagagctaaaattcttcctcctcttgatacttctggttgggatacttgtgctgattgcacttgtggaaaattgactaaaagaagaaagaagattgctaattgcagtcaatctttattagagattat

SEQ ID NO: 368775 - DNA, 536 bp, Cannabis indica
tcaagaaatttggacttaaaacgatttgtatgtgatttgaatggtttcatgttgatctgtgtgttatttgatgattgattgatgtttgtgaaatttttatgaaaaataattgaatttttgttatgaaattatttttgttggatagtttgggaaaaattaagcaattcacttttatactgaacttaatgttgatttatttgaattagttatgatttttcgaagttttgaaaaaagataggggtggaagacaccccatacgcgtgcggattcgagtgatcactcggtcacgcgcgcttcagacaaggagatgtccgagttttctcggtcgggtgtctctgtttttgtctgaacaccctcgtccgcgcgcggaaaggctgcgtgcagcctccagcgccaaggattctcggtcatgcatcactctagacgcgcgcggatggtatgcactgcataccatcggtacaacttgcaattttttcatgctttttcatggaattaaattcgtattttttgtgtagttttgtattttgatttttact

SEQ ID NO: 368776 - DNA, 912 bp, Cannabis indica
aatcacgtttttccataaacctcgttgattagcaacgagctgcacagtacgtttaaaaatcacgtaatacgcctaaattagttagggtgttacaatttggatcagagccgccaggttgcttccgaagatcgtcacgacatgtacaatcatcatcagcagttagctcggttcacggttcagtaagcctttattgctttagtagtttattttattcagttatgaaaaagaaaagcctgttaggaagcatgttagtagcctgatagtagaataggcgcatgtttcgtttttaatttccaaattaagcggcattagtaagctctccttgaatacgacctgatatgccaactcttggtttcgcaggcggttctatattgtaatttttttttagtatttatagtatacatatgaaaaaattaaaaaaaaataggggaggcatggccaccctatagcctaaaagttctgccaatgaaaattggtaaaggttataggtaaaataaaataaacaaggaaaataaaattttaataaaatatttttaaaataaagtaaggtaccgattagaaaaaaaaaatgttcaaacataaatacatctacgtttaaatatatttaaggtcaatttgacacagttgtgctgtgaggaaaaactataattatgctgtaagaaaaagtaactgcaacaaaactgtaaaaaaaaaaactaaactaaatgtttggtaaattataaattttaaaatactctgagttgttaagatttattataatgattataataatgttataatctagtttatgataatcacaaatatataaaaatttattttatataatacttttattttatttttcaaagtataaatttatatacatttgataaaaaataatttatagtattttttatattatattttatcaaa

SEQ ID NO: 368777 - DNA, 1086 bp, Cannabis indica
aaataggacaatataaaaatggtatagagtgtaatttcctcattaataaacggttaaacggaagtaggatccatcaaaggtgtttggggcaagtacacactctgggcgaccgagctgaaactgaagaaattgcattatatacccactttattttttattttttttttaattttttaccttttatttttattattctttaagatatacctactgttatagatgatgtctctattatacctcttagattaatgtaaatcatgtgctacacttaagtggaatgtaaagatatattaagcaactcactcataacagtgggtagattttaataaaatatgagtatatttttaattaatggatacaaaaaagaagtattcctcaacttatcccgccgaaactcattcaaataagggcccaactaaagaaaaaaaaaaacgaaaaggaatcaatttaaccgagctgagtatgtatgtgttagaataagataaagcaactttgaaacaatacttaaatcactcatcctctaaatataagtcagtaatggtacttggaatcttatgttccaacatgtacaagtatccaagtaggttcatgtatgaaaactccgacgtacccttagcatacgtaagtgccttctctctgcacctccacgccttcacataactcatttagatatcataggtgtcaaacatgtccctctgtatgtttttagccttgtacttagttccatcttgggtgtatttccccttaataaggtggccaaccacctatggtgctacttgacggtgatctgaatgtctcgcattcagattacatgtgtgttcgttgtgaaatacagtgacctcaaatttgtcagaatgcatcttcttcctccccctcaatctccatttacaatctggagccttgcatgtagcgtacaacacatcgggggctgacttcttcaccatccactcaaaattgttattaagtgcaaacctacccaccacttgtctcaattcttccatattttcataaaaattgccaagttgtatctcccatgattccttactttgtaaacaagtagttagctcatgattttccattatatct

SEQ ID NO: 368778 - DNA, 640 bp, Cannabis indica
tacccgtcctggtccgagagttcgaaggcgcgcctccataagcttggacggaggacttacccacttggcgcccaaggcaccctgcctcctatgaggaaccgccgcagcgagctcctcactgatgtagtccatgccctcaaccaggacgtctccgtcagcatcgactggctgcccagcctcattgtactttccaaagtttggggttcaacctctccctccgcctcgaaaggactgcccggacgcacctcgtccaacttttcaacctcctggacctcagcgtccccctcacgatcctcctctattgggacggccgaatcttgttcagcgtcgggcagagtggcaagccaagccacttgaggatcagtagcgtcggccagacgcgtggttttctttgtacgagccatcattctatggctgggtacaaggccagaagaatgtccttcactagaaggaggactagaacgaagacggggatgatcttcgtacagaagttgaagcagatcctggttgatttgatgcacgagtacccaagactcacctgagttcatccacagaagacaacacacaagatgagtgttggatggaatatcaaacgataaacaaagcaaatatgccgaccaagagtactcaacagattaaa

SEQ ID NO: 368779 - DNA, 541 bp, Cannabis indica
tttccatggattttcgacctcattttagccatggcactagctttgcagctgcaagggcaagaacctgggaaaatcttgagtctaataattaatcatttttttaatctatatattttaataatcgaaattacttaatttaagttgatccaaaattaattttcatctataatttaatttttgaacaataattttgaaaatctatttataatttaaatataaaattttgaaattatataaaatataataaaataaatttctcaaaaatatctaatttaagttgttctaaaataacaaaattttcaacttaactaattgtcaaaaatttaattaaatatcaaattaagtatcttgaactaatcaccttaattttttaaaaaatatccctgtttaagttgatccaaaattaacaaattttcaacttcaaaaatattttaaagaatatctgaataactaatttcctagaaaattctacttaattattaatttcaaaattttctaatttaagttgatcgaaaattaatatattttctatgaaaatcca

SEQ ID NO: 368780 - DNA, 549 bp, Cannabis indica
ctctcaatttttcacactttttttcacacacatacaacaaactcctcatccaaatttttcctaaactaaagatctacttatggtataaaataaaggtaaaattttggatattcataggtttatcttttctaggctcagaatgtgaagaaataaaggataaatttaggcttaaaaagggtaactaagataaaattacatggatggcttgaaagacacaatcgatcaaaaaaatgcctaaatcactttcctaatcatgcataatttattatttcatctcaaatagcaagcaagcaagttctagaatttttttcaaacaactttccacatgtcaaattagcatacacaaaccaattcaattactagaaaattacctaatatgattccatgttcttttaaagcaaaaattaaaattagtcaagaatgtaatatcaccaagcacacgaatttttcgaaaaataaatgaactttccaaaccatatgcaatctacctactttcaaattgtaattgactcacattaagcaaattgactcacaacaataaaaactaaa

SEQ ID NO: 368781 - DNA, 885 bp, Cannabis indica
cccttaattcttataaataataaatatacaataaaataattttatgtatatagctatatgttcttacataaaattgtccaaaaattaataataatacagtagaacctctatttaagaatactctattcaagaataacctctaatttgttataaaaaaatcaagtcccaatttgggccagttataaataagaataacctctaaattgtaattagttatacattttttaagtcccgtattaacaaagtatacctctatataagaataattacatcttaataaaatatatacatatgttttgtaaatttatttacataaaattaataattttattccaaattataatatatgtattaacattatatttactctaaaataattctattataatatagtattaataattatttattgttattattattacattgatattttttggttttttaattttttttttctagtgtaactctatttagttataatctatctctcaattagaatataattttattggtccccaatttattcttaaatagagtaactactgtaataataatgataataatgtaaataggatttgattagattattattattattattatacatgtatatatatacataacataggatgtgataatcacatagataatgtttggaataaataaatcaaacagtaattttttaaaaattataaaaaagatactaaaatattgaataattaaattttagaatcactcataggttagaaagaaaacaaagaatcaattattgaaatcaactatatattttaataaaaatcaaatacaaatatctgatttatcaaaaaaaaaatatatatatatatatatactagcaaaaagtacgtgcgaggcacgtatact

SEQ ID NO: 368782 - DNA, 551 bp, Cannabis indica
gcgcacacgaggctacaaatgggtaagggaaaggctgctagtagcctgcttgaggggaaaatctcggtcaggaggggcttaggacaaaccttgtccgagtaaacttgaacatggtcttgtctaaagccgcgtcaagcccttgtctgcgcgcgcatgcgtgttgctcggtttcagatattttcatccaaattccaaaaaacataactaattcataaaaaatccaaatttagttctgtaaaaccctaaattaattaatttttcatctactttacaggaaaaatattttcagaacaaaactaaaaatatttatcaatctaaattgcgatttctatacaatcatcaaatatgcactcaaacgaacatgaacacatccaaatcaacacaaacattgttggggattattttcactggatccagatttactaccagtacgttgtttaacatcctaaatatgaatttataaaacaataaaatttaaacacatataaagttcaagaaaccttacattggttgcagcggaataaatgactcttccgctcagatctctaacc

SEQ ID NO: 368783 - DNA, 784 bp, Cannabis indica
aatgctctggaaagaacatagcacttatccacggtgcaagtaaactatgttgtagattctcatattagttaaaccctgtattctgataaatctaggaataaacattcaatcacataatcttgattactttccactgtgttgacgacacaataaacaagaatataaatgtgaaaagggtttggatgaatttataaatcaattagacaagtaaatgataacatgaaccaaatgacacacaaatgagtgataaatacttatgtttctttattgatatttaaaagaatagagattacattgaaatggagttttatttagggcataaaacccaacaagctcatctaaaatgaaaaaaattctagcaaccatttattcgatcgaaaagagaatccgacattgtcccgtttaggcgagagacaaggtcattcttatttcatgagcttccaccattatttcaaactttctctaccagtacatcccctcttgccacatattctctgatgatgtgatatttcctttctatatgcttgcttctcttgtggcttcaaggctccttactgttggctatggctccagtgttatcacaaagcaaaactagaggtttttccattccaggaatgacacccagtctagttaaaaacttctaagccaaacaagttctttggcagcctctactgcagctatgtattctgcctccatggtagagtctgaaatttgcggtttgtttagaacttctccaaaccactgctccaccgcaagagtaaacaccatcccagatgtagatttc

SEQ ID NO: 368784 - DNA, 629 bp, Cannabis indica
aaaaaaaaccatgctactaatgataaataaaatgtatatttattatacacgtattttttaaatacaaatgttagcatatgttaaaaaaatatgtataatttctaacacattattattattattattattattattattattatttgcaaaagtactaaaatatgtatcaattcaaaagagatgatcttaataattaaatattattttatcgagttagtttaggtgccaaaaaattatttattatatacagataaaagaattaaaagtgatactacattaaaatttaattaatacttatttttaatttttataaaagggaaagacctcgttaaaaaattttgccctaaacctcttatcatcttgagatacccttgaattgtataattttttttgtatgtatgtgtacacacataaatttatactaaaacactagctacatgtgatattaattttttttttctatttaatgggattcattttactaaaaaaattaatttggttacagaatttcacattttattttaatgtaattaaatgtttgtgtaccaaagtaataattatatacaatgatatcacattgtacatttgtaaagttgtgggtcgttatatgaagcaaattgtgttatttt

SEQ ID NO: 368785 - DNA, 815 bp, Cannabis indica
agaatattcaattatgtttcattagacgatcagcaaactaagtattttatgtagctagacatttcggtatcaatctggtcatagcattcttgagcataatgttccatctgatattcagactcttttgttattcaagatactaaatttactaatgaagttgctattttattttctaaaaaaaaaaaaaaaaaaaaaaaaactcaaaaaggctaatttaatcaatttaaagactcctattacacaacataaaatcgttatcattttatttccaaataattatagtaagggttattggcggcaaagcccttttatgttttgattttatacacttaatctccttatatttttggtgacaaaacccttttatgtttacttttctttacaaatttgaggagctagctagatatcactgttatataccaactagattatcaatgtattggcttcgaggtttattgtcacgtatacacaagtatacacaatggtcatttagatagtatttaacggtgatatttatctgacaccttaaatttgtaaaaaaaaaataaacttaaaggagttttgttacaaaaagaaaaataaaagattaagtgtataaaaattaaaacataattttcatcactaattacacttttagtagatataaatattgattcccattattcctttattctgttacattttttctttaacttaattctaaatagtatataaaaaaaatgactagggatgcacacggggcggggaattagcggggagtgctctccccgtccccatccccattcaggattttaatccccatccccgccccatcc

SEQ ID NO: 368786 - DNA, 610 bp, Cannabis indica
gatcactcatgatctgtaggcctttctcactgatatgccccaatctcctatgccatagaacagcctttaggtcttctggattgctagtgactgcagtgttacattgagtcactggttctccatctaaatagtacagcccttcatgcttgtggcctttaataattgtcatagctcccttacttagcttcattgaacctgattcaattttgctaacaatacccatgtcatctagaacacttatagaaattaaatttctagcaagattagggacatacctcacaccagttagggttctaacaattccatcaaacattttgaaactgacattacctgaaccttctatattgcatgtattgttgtttcccagtattactttgccacctttagagtctctgtagtcagttaggatttccctagagtttgtcatatgaaaagtacacccagaatctagtatccaatcatctttgaaagatgtggatgcaacataaacttcaccactgtcatagccatcagagtagttagcttcttgttgcttgtcattttgatgtttgttttgatctgttctttctggaaatctgcctcctttcctgttcttgtacttattgttgta

SEQ ID NO: 368787 - DNA, 541 bp, Cannabis indica
atatagagttaagaaaaccttacattactagggagagagagcggttgagctatgcaagagttatggttgaggtgatgatggatcagaaattttcagactttctggaatttgaaaatgaattcggttcaactactacagtgatgctgaagtatgagtggaaaccagtggcctgttctcactgttctgggtttggacatacagcggaggaatgtaggaaacactctaatgggaagccacaatgggtaatgaaaaaggacaataggaagcagattgaaacagatgaagagggctttgtgaaggtgactcgaaataagagtaaagctgagtataatgaatctgaattaactgggaagaagggggcaggtactagtaattcttttcagattttagaagataatgaagagagtttgatagaacaggaaaaggagaatgatcatgagatagaagggtttgatgctaaggaagtgattaaaacaagagaggggggagcaccctctctttccaatgataaattgttatgttggaacgtccgaggagccaa

SEQ ID NO: 368788 - DNA, 793 bp, Cannabis indica
caagagaaaaatattcattagctgtatcaaataatctttcataaaactcagacaaggattcaaattcaaacattctaagatcatcaaattcggtttgaagcataataaacttagaacgcttaacatcaaaagttccttcaaactgagtttgaaagatctgccaagcatccttagcggattcacaagaagatataagcttaatatagccttcacctactccaattaatatatcatgtaaagcttcactattataagctgacaatttatcatcttcaatagacctgtaacaccctaactattttaggcatgttaatgtgatttttaactaacagtgcaactcgttgctaatcaacgagtttatcaaaaattgttattaatttaagattttaattaaccaataataagcattaaaatattatacttataataaaccggcttcgattttgcaaaatatttacaaagctttcactatcaatattacaaaagtttatcgcctagcgacttttcaatatatgccctgatgtcccaaagaccgtacgctccaggcctaactgccccaatatgtacaatctccatctgctcgtactcacgactgcttagccttagccttgcccttacctacacatagaaatagaaattatgagtcaatagactatgtaagaaaagcataaaaaataatcatagcaataactcggattataatcaggcgcccacgcacccaaccatatcctatactcgtgtcccacacgttgctgagtctagatagttcatacgataatactatcgaccataa

SEQ ID NO: 368789 - DNA, 678 bp, Cannabis indica
aaaaaggatgcctgagataaaaaagaaggattcgaaggaaacttgggcgaaatattagtaagttatttgtcgcagttttttttcgcgctaatatttgttggttttgaaaataatatttgtaattcccttcctttatttaattgatgcagccaagccaatttcaaagcttatgttgctgcacatgcagataaatcaaaagcagatgtgggtgacttggagtgtgtcatggatcttttatttttaatgttttatttagcgttctttacttaataatcgagagtcttaatattacaggtccttgctagttttaaagtgtaatttaagcttcttagtgaggaagagattgagaagtgggcttcatatgaagttgaggcttcccctttgaaggttggtgttagagggaaagggaagaagttaaaggagacattatctgctgagctaggaattgagaacaatgaacgggtaggggatgttcaagtatctggttgttgctccttcgaacgtttgggtagaatagtcccacttctcaacgacgctcaaaaagaaagggtcagaaatgccggttttactacaatcttaagggaggatggcccgtacatcgatgctaagatagttagttggcttatcgatcacgtggatccaaccacttctctgttggaatttattttaccaggatct

SEQ ID NO: 368790 - DNA, 778 bp, Cannabis indica
cctcactgtgcttcacggcccctgcgtaacgtttcagctccttctgggtagttcttccgatttgaggtcctcctgagatcatggctactcttccgttgggtctcgacggtaggccaggaatttgttgggtttcccctgggggagcaattggggctaatgctccggctacaccccctggtgctccttggggcaaaggccctcctgcctgaaccggattgaggtgaggcaaccggttcttgatccattcgtaaagatgccccagttggatcaagttttcaatctcgtccttgaggtttttgcattcattagtgctatgcccaatgtcgttgtgatactcgcatcttttgttgggatccctcagggagctatccatgtacagaggaggcggtctctggtagtgcgtattttgcctggtagcaaaatacacatgctcttgggagtccgttagctctatgtactgggtatactggggagtgtacccccttttctgccgcttatcctccgtccggttgctgccttttgaggacctcttgctccgagagccttgagagggacctgctaaacttgcagtcagagcggagtgcgacgaggcttgtccactcatccctgagggatttccaaagtgagaagatgcaggggccaaggcctggccctgactatatccgggagtagcaaagatttgtatgccgctcatcgctggagcggctgttggtaaggtccctgggagctgagctccgggtacatatcccgctatcccggtggggtagtatcccccata

SEQ ID NO: 368791 - DNA, 697 bp, Cannabis indica
agctaaaaaaaaatattagttttttttttttttggtttagggattggaattattattttcttttgaatatgtattagaaaataaatacaactatttgcatacatagatagttgtacttgtacacaatgtaataatggtaaaaaattaattccgttatcccattttcaatttagtttttgtaaatatatttcaaaaattatataaataaaaattaataatttgttaaagacccagcgtagcacaatgaaatgatgtcacttattcaataaccatcccttaatatagtagaatgaaactataccacttattcattaccttaaaaaagcaatggttaataatttattaatataaattttaagaataataaagaggtttatgtatatactctattacaattatactgtcacacggtaggcagaatttgcaaaaatactgccctagcctatttttattatttttatactgtacgaacagaataatgtatatacgactccactttcaaaacgacgaatagaactagatgatcaacccagaaaaaaacccattaattccagctatacgaaggaaaaaaatgaaaatcgataacaaaacaataacaaacaagttgcatcaacaacataaaacaaacgaatacaaaaaacttaagaaacttaaaacccaacctaaaacttaattttaattacaaaattaaaaataa

SEQ ID NO: 368792 - DNA, 1515 bp, Cannabis indica
taaaaaatttaagatgcccgaaatggcagcttacaccagggatacgaaccccaacgatcatttgtctcagttcaacttagtaatgatggtcatgagagtcagcaatgacaccaagtgcctatgctttccactaacggtaagtgggtccgcagatgaatggttcagaaagttggaactaggattcgtggagtgctcgaataagttgcaagttagttttcggagacagtttgtcgccacgaggaaaattaatctcgaagtcagcgccctgactaacatcaagcaactacccacagagacattgaaaaatttcataaagaggttcaaggaagaagcctcgaagactaagaaagttgatgacagacaacagcttgcactccttcaagctgggatccgtacagggactccattctagaatgagttacaacaggaaggagctgcaaaccttcaagatttccagaagagagtccagaagtacatcaacttagaagaagctcaaatagtggcttacggaggatactatccgaccggagtggcagggtacgtgcccggagcccaactcccgagaaccctacctccgattactccacaaatgagtggtatacaattctctgctactaggatataatcagagccaggccttggctcttgcatgttcgcattatgggaacccctcaggaataagcgggcgtctcactccgctcctactgcaagcctaggcggaccttctcgaggctcccggagcaagaggtcctcaaaaggtagcaatcggacggaggacaagcgccaaaaagtggggtatactccccaatgcagtcagtacactgagttgacggactcccaagaacgtgtgtattttgccacgaggcaaagtacgcactaccgaagaccgcctcctctataaaatttttagaaaaatttcaagctctgataccaaatgaaagaacaacttatcctaatttcatgattcaatttaccgagttgctcaagattcaaattgattaatttcaacttgatcattgaagattcggattaaagagtaagcagaaaagaacatagtgacttacaagcttcgtctgcactgagaacaaatcttagccgactagtgcttgggttccccgaaccagggtaataacatctagtaaattcgaaagattcgtattacaatctccagttcacaattaggaatttaatacaatctttacaataattagtcatgtattaccaacaacaaccgagattcctagttgtacacataagattccctgtgtagaagctaagttcttcttcaatacttttcttcaatctgaaatcccttcagatctgatgacgaagataacaccaaactcccttcagtctgaactcagcaccacaaggctctgatctttctactatggatatccatcaccaagctatacaatcagacctgaaaacagcaacaaactatacaagataccacacacaatacaacacgatatatctgaactaactaagattatcaattagctagctgacccg

SEQ ID NO: 368793 - DNA, 497 bp, Cannabis indica
aaaaccagatgcttctggaagattgataaaatggtcaattgaattggggcaattcgacataacataccatcctcgaacatccatcaagggccaagctttggctgaattcttgatagaaggtataactccaaaagaaattccacctgatcagcgaggcgaggaaacctggaggttatacgtggatgccgcatccaacgagcaaggtttgggtgtagggataatattaatattggcagaaggctttaagtatcactatgctctgaggttccaatttgacgtatccaataacgaggttgagtataaagccttgatcaccaacttaaagatagcaaaggcattgaaagtcaaaaatctcatttgtcatagcgattcgcagctgatcgtaaaccacgtcctcggggaatacctggccaaaggcttaaaaatggaaaagtatttagagaatgttcgaaagaacttggaaagattcgattgttgaaatttattttaccaggatc

SEQ ID NO: 368794 - DNA, 470 bp, Cannabis indica
taatttaaatataattaatcaaattataatatttgagtactccaataatatttattaataatttaaaaatatctcaaaataaactactttaacgttaattctattacaatgtctcaaaattaaattaaattattaaaaaacgtaaacaaattattctataaaatcttcattaaggtctcgagttataaagttttgatccgtattattatcattatgagtttccgacgaatgtggcggaaaaagaacatatggttgatctgacgataaactaagtgttagatttcctagctgaacttggttgagaatagaagtcgaaaaaaattgttgctcttgcgacaaactcccaaacaatccaaaattagcaaaattttagctgagaggaggagtctttcatggagttctatataagaactgttttcccaaaatcagcacatggctcgaacttgttaaacctagtgttattcttttct

SEQ ID NO: 368795 - DNA, 676 bp, Cannabis indica
tactgtcttgttgggccttggctcatgggtgctttattgtgtaggaaagggtaagttggtagctgatcagccatgagttcgagggcttttacggttcattgtacatgtttaggcctagctagaccatgaaggttgggtctgtcgtggggaaaattgttgtaacctccacttttgcctcttaggtcgacgtgtactaatgaattgtaatatttttaaaaaattttacgggatctgaaaataaaatgtactcttttggatgtattttaaagtagaattattacaagttattattttattctgtattcaaaagaaagtttaatttctgcacttggctctagtatatcttgtattattgagattagtgtatgtttagtcgcagtacgtggcgttcctattgttaaggcgctacatggggtttggtggatctagctacctgaagtgattattctcgcttctcgagttgatgttgtcttgggtgtttccacccattcttagacctagccagttaaagatgggccttagaacaacttactctagaatgttccaaaaaggaatctcgcttttttggctagccaaaggtgcaccactaaggggctggctagccaagggctggccaagtggggatgttattgagccagagatccctggccaaccccccatgccactggttgccaaa

SEQ ID NO: 368796 - DNA, 848 bp, Cannabis indica
acctggagtgttcggtctcgggacatctaggagttgtattttgtagtcgctgagcgacctgtttattatgtgttttgggatattaggttttaaaagtttgaaaacgggatcccggtacttgtaaatattttaatatattatgaagtttgttaattaatataaaagttttaatttgacacgtttttcacgaaaattctttgattagcaaagattgcattgtatttgaaaaagaactgtagtgtgccttagcattagggcgttacaactcctctccttctattcagatcattccttaggccatgagttgtccccaaccttttgaatacagaagcgcctggctgccttagcgattgattttcctggttgacaggtggaatggcaccgttaatcttgttggaaccattaggtacgatctctcctgatgaattactagacaaggtctgcccgcctaccgcttggcccacaagtggaactcatgaccggggattaggcggttgacgatttgtagtctgggaagtattcatcgctggatctttgtccgtctcacccagggggatgacattcagaggttgttgacctatagtttgataggcttttcgtatcaacacggtaacttgccgactacgattttcaatctctgtatgatgagcccttagcgcttccatctctctatctctccactcggtaaacatgcgcctttgttcttcgaacgcgagatttatcgcagcgcagagatcttcatgatcatgatgtagggtattgttatgaccctacatgagtccaagaatgtcacagagattttgtaactcagtagcatctccaatggttgtttgagtgttggtaccgag

SEQ ID NO: 368797 - DNA, 651 bp, Cannabis indica
gagaacgcccgtcttattcttcagaagaaacacccataattttcttgaaaaataattaactatggaaagaaaatacctgcttctagagtgtgatgttattcttgaggggccccataaatcattgtgaatgtaactcagtaatcccttggtattctttttgccagtttcgaacttaactttacaagccttaccaataacacaatgttcatagaattctaactatccaagctttacctttccatgtaatccctgcttaataagttcacacaaccctcttccacttacatggccaagtctcttgtgccatattttagtttcattatcgtgcttgcttgaaacacatgcctttgtgtttgtcattgtggcaccttccagaggataaatctcatttgatttcctacatttcgtcaccaccatatatcctttacaaactttcatgattccattctcaactttgacaagaaatccttgatcatctagcattccaacagagatcaaattccttttgagatttggtaccaatctgacatcctttagtacccttttccatgccctcatgaactttcaatcttacagttccaattgtcaccatcttacgagacttattatcaccaagatacacagtctcatagtttccaggtttgaattctt

SEQ ID NO: 368798 - DNA, 983 bp, Cannabis indica
aaaactaatgtcctaactttaatttttatattcatcaaaatgcagatctacaaaaagttgaactagagttctcaaacaatcccactcatatataattactaaaaaaattacatcaatactatagtaaaatgtttatcctagtatattttcgttgttttccaaatttctaatagtaaatttgttcgtattaaatcacgaagatacatgtagatagagttacgtacgtgaaagtactcttttgatttttaatgtttcataacagttgcattacagttacataaacattttactaacagttatttctcccacatattactattaaggtacaagtaattatcgatcagtgacaaaaaaaaatactgacaaatagtttctttacatatacacattcacattttacattttttagttacaattaagttgcacgttagttggctcacaacagatatataatgttgcattacagtttcaacagcaacccacaatctatgtttcctgggattgaaaccgtctgatgcaaccttcggtcaaccacccagcaaccttcgtctaatgcaacctttggtcaactatccagcaactttcgtctgattgaaactttcgtttgatgcaacattgcacccaccacctagcaaccacccaacaaccttcgtctgattgtgtaagtgatagtgtaagagatattttggtaattaaaagcacataaaaggtataaatactgtccacaccttatagaggtatttttgtaaataaagtgtcaatttatatttccatataataattccataattttaaatactaaacatatattatgtaataaacatataagtcgtgaaatataaattaatgtttatatgtttaaatttcaagtgtttatattttattacttcaattgaaaattaaaaataatcaacattcttaaataataaacataaattatcaagagttagttgttacagttagttagttatagatatcacaat

SEQ ID NO: 368799 - DNA, 693 bp, Cannabis indica
atcagcgttgataaaatttttgagagcaaatctggacgttttttcctggtcacatgaggatatggtcagaattgatccttctataatttcacatgtcctaaatattgatcctaacttccggccagttcaacaaaagtgaaggctattggacaaagagcacgcactagccctgaaggaagaggtagaaaagctacgcaacaataatttcataattgaagctatctacccggcttgggttgataatcccgtactggtacccaagccgaacaaaaaatggcaagtttgtattgatttcacagacctcaataaggtgtgccccaaggactgttatccacttccaagaatctatcagcttgtggatgcaacagccgggcacaaaacattaagcttcatggacgcatattcggggtacaatcaaattaaaatgcatccaccagaccaagaacatacaagtttcagaacagataggggtctatatagctacaaagtcatgccatttggtctcaaaaatgctggagccacataccaatgattggtaaacaagatgttttagaccagatcgggcgaaacatggaagtatatgtggatgacatgctcgtcaaatccaggaaggctgggggggtacatagatgacctggacgaatgctcaaaagtcctcaagaagtacaacatgaaaactaaaatcccttaaaa

SEQ ID NO: 368800 - DNA, 593 bp, Cannabis indica
attataattgtaaacataaaaataaacatagtcaatattaacatatatataataatcaataattattaccatatatattataaaagaaattgaaaaaaagtttttaattatatataaaaatgtatgagaaaatgataataaatttttttgcacatattttgtaattaattaaaataatgtatacaaaattgtaaaatgccatataagtaatacatatttatatatttctgtaattactttaatctaatctttgtagctttggtttctaccgtccaggtatgatactttcagtggctatccacctgagattgtgaaaaaaaatgcctaaaaaggatttagctgaggaggtgatgcattttatattgcatctactattttaatttcaaagctattcctttttactatgtagtttatgttcatttcatttgatttttgattgaagatctagttattgttttattctccatcctatttatataaatacatacacacatacatatttattatattttttttttgttagaactatacagaatttgtttcttgtatctaaataaacaacaggtctggagacttcaaagcagccctggggg

SEQ ID NO: 368801 - DNA, 555 bp, Cannabis indica
aattacataaaagtaacatcaaagcaacaacaaagcaacataaaagaaataatgataaaaaatcaacaacaaaataacaagaatacaacataaaaatacaccaaaagactattttatataaataaaatctaaaaaattgtaaaaaatattaaaaactctgtatagacagtatttttgtaatttttttgttgtttttgtatgtttgaaattatcacgttattttatccataattttagtgaggtcttttgttcttcttgccctgtgattgataatgacttgtttgaacttattgatcttgttgtcaaaggtgttcgcggtacgggcgatgtgggttgtgacttatttttcaaatcaaaccacatatgtttgttattgtaatttctcaaactgcaaccgcaccgcaagattttaaaactattctctaactgtaccaatggtacatacctagttgggtcataagcatcctcacttctaggcacgtatctggtaaaattattggcatcttcattctttctttttgaattttgatcaccaccaccatcgtttctccttga

SEQ ID NO: 368802 - DNA, 520 bp, Cannabis indica
tcctcgagtaaaaatactaaaatgaaaaacaaaagttaaacaagtcaatctccagaacatgagtaattttcaagtagactcaataacaagattatgaaaaattttcacttacgcatacaatccagaatttcagttcaattacgcccttgacacacttcaatttaatttcatccagctcatgaaatcatagaacgcaatcaactaacaattgaaccaatttatgcatgccaattacaaccatcaatctactaacctaaaatttcatatgcttgcaatacttactccactaatacaaattaatgcacaaccaagaatcaaaaagtctttctaggcttgtaatgttaggcttaggtaagagtagttgaaatggtcatttaggcttttctatactataagtttctccaatcatgtcacccaaaagaaatttttcacacacaatcccaattttccttttctaattacatgagagaattttttttttcattttttttcaacaagattgcaacaactttatatttat

SEQ ID NO: 368803 - DNA, 535 bp, Cannabis indica
catcattagcattaaatgcccatattttccaattcttccttgttcccatccgttagatctttattcttttaatctaacggtgatcatttcccaggaataaaattcgagaacagatactcatttcgccgtttttgccttccagacaaaactttgttagaccagagtgcatcgtgatgccatgcccaagaagtagaatgattcggagtctaagctctctcgagtaaagcaggaaggtgaggagcaaggctatccaggcttaggctaatagaaagcttgagaaggccaaggttgacacgaaaaatagggtcaatagaattgctaggcggtctatcaagccttgttagccaatctcgagatggatttcagctttttggggaaagcagccgaagagatgcttgcatactgcaagtagaccaagaaagaggagactgaagatgcagacgaggttgaagaagatcaagaagaaccaactaaatcccctactatgtaggcttggtctttttatctctttttttatttatttaggaaaatggcc

SEQ ID NO: 368804 - DNA, 569 bp, Cannabis indica
tatatattattggtatcaaatataatagataagttacaaatctaatattcagatttgtaactctccataagttacaatttcaagagtaaatatattatatcacatgatatgactctcattaatatcatatattaatatcttattaatatataatattgtatatatcacttattttaatcttaatattatattatttaaataaataatataacataaaagtcttttttaaaacaatttaaaaacagcgctcgtaagaaaatattaaaataaataaataaataataataaaagtaatttgcggtataaatacctaaatctaactcttggttgtaaataaatacataagtaacttttagcggtaataatacttaagtcatatttctaaaactctgtaggtatatttaaatgtcaaattattatccacgattttaaatcgtcgcctatagtatagagcacggtttaaaaccgtcgcctatatcctattatagacgaaggttgtaaaccgtcagaaacgtaaaaaaaaaaaaaagaaaaaaaatacagatttttctgcattaatttttataatt

SEQ ID NO: 368805 - DNA, 868 bp, Cannabis indica
atgactattatcgacatgttgtcaacgatatgttgatggcatgtcgatggagaacattgacaagttgtttgagaagatgtcgacattctatcgatagtatgtcgaccaatagtgtcgactatatatcgatgcaatgtcgatttttgaactcgataattgaaaaaaaaaaaaccataaataaaacataaaataacataacatttcattaaaataagacaaaataacattataataaaagttcataaaaaaaaacaaacattaaataaaagttcataaaaaaaaaataaacattaaaaaaaactcaccacaagccataaaataacaaattattaaaattgtttggcttgtgggtgagacttgcaatacttgcataaagttccaggcttcaccggtttaccgttaaagatgcctaatttgcaacgacggcatccttcggggaaccctggtggtggagccggccatacaccagttttgctaaattgagcttcaagttgtatcaaccttaactcgttctgatttcgttctttttcgaaagctctatcggcgtctagaactttctgcatttgaggagtaattatgccaacatcaagctcctgcttgagctcttcaggagttaggattgggaatttgcccttgttctttctaggcgccatatttggaacttaagaataagagaattttgcctttaatttttaagtgtaagagagaagtagaagacaagagcacttatgaataagaaagggatttgcttttatagagcagtatacatgttgggaatgtaggaaaatttaatggccatcaaatgtgtaactgtacaggtgaaacgtatgaaatggtgtatttgtcgacagaatatcgatactatgtc

SEQ ID NO: 368806 - DNA, 696 bp, Cannabis indica
gtcgaaaccgccaacaccagcgtgaaagtccaattatgaaaaagatagatttgtgagtttgaaggcgcaagaaagatactttgaattgcaaaagagagccttcattatggattgaggtatggaatatgatgacaatcccatcccgaataacccattattcgagaccatgaggcaacaaattcagaatcgccactgggcgcagttactgaaaatttcagaaagaatgaattaaactctggctcttgaatttttagccaattgacccgaggcacaaaacgagagggtacgggtccgcaaaacaactgtgcgtgtaaacattaacaccatccatcaaatgtttggcatgccaagagaggaagaaattcttatggaggaaaggtagagacaatttatgcaagaaaagtttgaccttgtggacttggcggaaacagttggtatttcggggttgagattgcatgaggtggatgaagaaccccaaatgctttatcgttgtgaactgaaccaagtggctcgtgcttggatgttttttgtgagtgctaggcttatgcctagtaaaaatttatcggattttccattggataggctcagggttgttcacgcaatactgaagggaatttatgtgccagttggaggtatagttctgcagagttccgataacatggtcaaggaaactgcacatacaggaattggcctagc

SEQ ID NO: 368807 - DNA, 601 bp, Cannabis indica
aaaaagacagcatatggagctaagtgtggaaagttaaaaggaagtatcaaaaaagacttaccctggtgagctcctttaggactccacccaccaacacatccagagatgagtcgcgataagcaccagccagttgctcactgacctcgggaaccagccggttcatatagtgggccaacatctccttgccctttttggcctctggcagcacgggcaaaggtggagttggtgcctgcacccactcaggaacactcttaaccagttcagacccaaccgttgaaggtccaaactccttggacttggcagatttgcgggtagaagggtttgcagtagtcagctcctcggaaaggtcaatgacctctccagaaggtctcttctccgaggacccctcaccgcccttagacttcttggccggaggagatgcgctagagcttcggcccgttctctttcttagagaatcgagcatctaccgagacatgtctgcacagaacaaaaaagtgtggttagaaaatagccatcaaaaaacacaagacatgaaagtcaagaagctcaaaagtaaagaaaaatgcaaggtgaccgcccgcacagagaatcagaagtccat

SEQ ID NO: 368808 - DNA, 835 bp, Cannabis indica
ttaaaacccttaccttaactaacgtaacgttggatttttgggggttcgttcgacgtttccgttaaagtaaaacttaacgttttaaacgaactttagggggttttaaccgttttttcggtcctttttaggtaaaagtacttaaaggaagttagttccgttttaaaaacgaaggttaaaaaacttttttggacgaccttttttaaaaaaccggaaaaaacttttttcggtccttttttcccttccttcgtaccccttaaggcccgtacccgtaaaccccccttacccttccccttccttttcccctttttccctactttacttttttttaaatttttttcggaaaccctttaaaggttggttaggtaaaaagttacgtaagttcgttcccgaaaacgtaactacggaagttccttaaggggttgggggtttttaccgttcgaactttacgacttttaggtttaggttagggaacgttacgtaaggttaggttaacggttaaacccctttttactttacgttagtaactttttaaacgttaggaacggtacgtaaaatttttacgggttcgtttacaaaaaaagtctaactttaggaaaaaattaaagttacgttattggacgttacgtttttagggtttaaagggactttacgtaagggggaaggttaaagtacgaaattactttaagtacgtttgggaaagggaaaagtttacgggtagttttaaattttccggcctttgggttttcgtaaaacctaagggtagtttaaaggtttttcgttttaacgtttactttagggtttcgttaggtttaattttagtacggttttacgtttt

SEQ ID NO: 368809 - DNA, 833 bp, Cannabis indica
aagaggatccaatccaattacggataaacgagctggaggacaagttcaggagatatcaagtgggggaattagggaaattatctggatacgactccgacgaggagcttgagtcgtatcacccagatattatgaataccccttttcgtttgggatttaaaaacccgcatgtctcgtcctatgacagaaccacaaattcggtctcgcatttgaataactttaacacgataatgcgagcgagtaacatgacgaacaattcacgctgtagtttgtttcccacctcgcttgttggagcaccgagtatatggtttaacaagtttactcatcattcaataatttccttggagcagctgtccagggatttcaagaagaaatttcaggctgctagggataggtgacctgaagcgacctcgctaaccaatataaagcagcagactgacgaaatacttaaggcgtacttaagtcgttttagcatggctcccgctagggttagaaatttggatgacagcacacaacttacagcccttcaggcagggatctccactgatccattaattatcgggggtgacttgtgggatgatttacaaggacgtccggtaagtagcatcactgagttcaacgagagggctcaggtgcttgtctagaaggaagaagcccgaaaggaaatgaacttgttgaaaacaagctcgggaggtaaacccagcaacgtttcaacaggaactgcttccacgagaattgataactcgagggcttctagtccgaaaagaaaggacagaattagggaaccatcgaaggaaagaaagaaacaaaaagagcatgacaaatacgtgtcagtg

SEQ ID NO: 368810 - DNA, 626 bp, Cannabis indica
aaaccaacaattgccatagatactttttatatataaagatactagaagaaagttacgggcaagacacctatacttagttttatgttaggtactttttaatttaattaaaaatgatacaataaataattatataatttaatttattattatagtctaagtgtatatttttttagtctaagtgtattttttttttaataaagtcattaataagtctatggggttattctattggcaagagtagtccttaatcaatggagaaatgctcaacaaaggagaatggggtctctacttgttcccacgggttcaagagaggacttagagcattgggtgaaaccagttatgggaaagattaaggttaatgtcgatggtgcaatctttgcaagtgatggtcgatttggagcggcaggggtggcccgggattctcagggtcgattcattgaaggcttcacagttttacgagtggggcgtgtggattcggctatggctgaattggtaggggttaaggaggccttgagttggatcaagaggaaacattggggaccggttgaccttgaaaccgattctttggttgtcgtccaggcagtccaaagcacgatggagataccttctccttttggccttcaggt

SEQ ID NO: 368811 - DNA, 1006 bp, Cannabis indica
ctttcctcatcagtgagggataaggtagagtggagattgtccactacagtattcataaaggtgaaaaggggataatttagtgcaagaggaagaagccagcgatggaggatgatgaaggaaatagtggagggaacagttatcttgaaagatggttttgaaaaaaagatgaataaaatagttgaaaagagaaaaaaaccgttaaaaccttaacttcgacagaccccaaaagggcaccatttttgatactatctatgagctaattaaatatgtaagttagttaagagcgtctacccaatatttatgctttatggcagttaacagtccttttacgattttacttcagttttttcaattttcttctgttatagtgagatttctctcacctagaaactcgagaccatactcttaattagaggacacgtgtactcagttttccaatgaaagttgagtcgtctgcaagagattcctcgaagtttcaaacctcgctcaagatagagtcagtgagatacagcgaacatgaccaaactctgatgcgggacaagagagtaactcgcgtgtatcgaactatgtgcgagtatcctctccatgattcttgcataaacatagagaccgactctctataatgcaagttggtcccaatgaccctatagccttgataaaccgatatatactcgcatgtctaggttctgtcagttcatcatgcgatgtccacaaaggcgactacttaagaacgcagacatcctaaacgtaattaagtgttaggcccgtgagtttaacattagaatatgaacagtcaacttgcatgttaaaagggcgcatacgttgatgaatttagtaactgctattcatttattgatgttaacattatttagtttagttattataatgcaatgtgtaaaaacggattgacaatgaatgcaatctttgtataactaattggacacctgctttgtatataaaggggtgatccaccgagaaatgagaactacgaaactcttgctacagt

SEQ ID NO: 368812 - DNA, 664 bp, Cannabis indica
ggcataaaacccaacagtacctacgctcggtactcaaatatcactgacgcctgtacctaataaggtacaacgcccgacatatcgcatcacctaatcaagtttacccatataacccattcattgtatcatcacattgtcatttcttaattaattaatcttttcattatataacagtaataaccatatctcagtattaattaattcaaaacagtactaattgtattataatacaacgtactatgcagtacaataaatttttcttacctttaatccaggttcatacatgtcgcccaacccaagtggagaactatccccagtgatctcggtcctatctcacaacaacggttaaccaataagtgtttatcctaaaacattgcgtaatattttggatctaaaatatacaccatattgtaaagcttgtcccaagcttccaaacagtatgtagaatgtctaaaacggacacttgagtaaaaagttatgacaaaaatataaaatctaatctcctagatatttctaaacacagtgaaacttgaaaatctcaaattttgaactcaccgaaacactaccaaaacttatcaaaatcactccaaacttcacagggcacatatataccataaatattaccgtccttatgtaatagaaattaaaattgagcccttaattg

SEQ ID NO: 368813 - DNA, 572 bp, Cannabis indica
accctcgattagacaactaaaagtcaccatctcgtgacaatttttcgcttacctctcgcttatagtttcccacatgacataactgttaatcgcgaaactaggggcagtgttatagtgagaatttttcacctagaaactcgagaccaggctcgcataaaaatgacacgtggactcactctcctcaaggagggctgagatgttagcaggagatctcctaagtgtaaacctcgcatgaaccagactcagcaggatgatgtgaccttgacagagtctagtcacattcttatagtttgcataaagcaggaccaaagttcgggtttaagacttgcatataccgagatatatgcgagaaatataaaggtcttcctgcaaagtaggagagatcaattctctgcttagcgagctggtccagatgacccaacatcctcgataactcaataaagacttgcatgtcttaggttatcgacttgttacaggatgtctgtatatgcgactctaataggacgcagacatcttagactcgattagtcttgtacgcatcttgagcctacaagcttatgcgagaatatgaa

SEQ ID NO: 368814 - DNA, 512 bp, Cannabis indica
taacaagttacttagttactaaattatacatacatatatatatatatgtaatcaatcatatctcacactaatttaattttaaaaattttatttctaaactaattaaatccttccaatgccattagcattcacaataaatatatatatattacataaaatatatacaataaaatatacaaattgtatttgcataaaacttaatatacacacaatatatacacacattatatacacacatattcaataaaatataaaaatacatatatatactatatattgaggtttaaatttttactttataactgcaatccgacgaacaattccgcaaaaaatccggacactatgcacatacaacacaacaatattactaaaatgaaaaaaccccaaaaaaactaatttacaaaattccaaaaataaacaaatgtaaattataaaaatgaatagaaattatattataccttaaagggtgttgagatacaatgtttctcaacaaatgatggtggtcggagtta

SEQ ID NO: 368815 - DNA, 568 bp, Cannabis indica
acaaataaagtaataatgtcaagagtagctagaaagaacactctctcacacacttacacaactttgagtacgtatagaggaggagatcactaaattaactaataatgttcaaagattttcttttgtttttttgtaaactattaatgtggtgttttgttatggggttcttgtgaataggaatgtaaaactaaatttaatatttggtatgattttaaatgaaattttacttatgattattaagcaggtttcacttgtaagtttatttttagagtaaattatttcaaactccttaaatgattaagtttaagattctcttaatttcaacccctcttaactaaaatttactaaataaaattcttacaccaaacacctcatagtggtacacaaaactaaattgaattgcactagattggataagattgaattatgctggtgtagattattttatttatttctttttatataatgataaataaataaaaatgaataatttgtaataaaaaataaaataaaataaaataatatattatatataattaaatatatataataaatatataataaaata

SEQ ID NO: 368816 - DNA, 993 bp, Cannabis indica
tgggaagcggctgagctccattcactttgacctgcgcccactagctggagaagatcgtggtggtggcaggcatcaagccctcgacctccgggacctatcatcggctgccacgggacgaggagacgcctaaccataactacgggggattcggagcctggagccagacgcatctgatggtcggggctatgctccccctccaagactacttcattaatttccttgtatttttcaggcctttttattttctatgctgtccggagctggggctcgcgcagtccggcagaaattttgtatttttacaaactctcctctattcctaaaaagggagacaaacttaaggacggtttttatggcctctgggcccatcctttgaatgagggcccaatcccttttaaccagcagaagcacgtgaaggagtatcgtcactacttcttcttctccttcgttttccaagccatggaccgcccagagcttctcacggagtgggttaggatccctccttatctgtggactgagcctacccaaatatttcttcaacgggccaagacctttgccactcacaacaagaaggccctcgatgtcggggagttggtcacgacagagaactgttggaaggccaagttgattctggggcatcagtcggtggatgacttcaatctctctaaagtcatgtgtcttaacgtgagggctccggctgcagaaaaggtgttctgagacgacatcattgccacggtggaggacaagtatcagaagtacctcttcaggagggaacaggagctggcctacatcaaggcccaggcggccgccgggaagactctttgcctggaagctcctccggaacagaggacccgtagcccaagccagtggtcccagtcccaaataccggagctcccgatgccagcacttcgggttcaggtaagtcccctttatcaatacattatgttcctcccgtccgtgagtatacccgtcttaggcctatagggttcgacgagc

SEQ ID NO: 368817 - DNA, 650 bp, Cannabis indica
gtatatgtatttgcgagtgtaatttgacatggcctgaattgtgatgatataaacaggtatggtatgagtggggtgtcacatcaccaagcgcatcagccattcacaacagtaatggacggtcatactgggttggtctttaagagcatttccaatggcactctttttttttttttataaaatagctaaacagttaaaatagttaaaatagagtatttttattgttgttactctaatcatactctttactatagttagtgtttgattatttgcataatattttataatttaaatttataaatataaattaattttataaaaaaaaataaaaagtaataatgtttttgattaaaatacaagttaaaaaaaaagtagtttcttacatttagagtgtttcctatcaactttctattagtctttttaattttaagttttatttttttatttttaattaaggagtgtttagagagtatggttagagatattttaagttttaatcttcttaattgatatatatatatagctaactaggatttttgtcccttgaactttgacacgtattaaattatggtcgttaaaaatacttcttgaactattaagattgttgaatttaaggattttttttaattttagtaaaaaagtttaacatggat

SEQ ID NO: 368818 - DNA, 506 bp, Cannabis indica
ttaagtcatccattaaggtcttggaaaacaaagtggagcagttggcttctcaaaacactaacaggactcaaggtaacttgcctagcactactgaagtcaatccaaaggagaattgtaatgcaattaccttgagaagtggtaagacctatgatgggccaaacaaagacaagccaaaggaggaagatgatgtagagacaacacctacaccagagaaagagaagactactgatggtcttccacaaaaagaaacaccacctccaatcagcattgaccatcacatcaaaattccttatcctcaaagacttcacaagaacaagatggataagcagtttttgaaattccttgaaatattcaagaaactgcatatcaacatcccattcatagaggctttggaacagatgccaacttatctgaagttcatgaaagatatcctatctaagaaaagaaagttggaagaatttgagatggtggcacttactgaagagtgcagtgcggtcctgcaaaag

SEQ ID NO: 368819 - DNA, 709 bp, Cannabis indica
tttttcttttgcaatcaatagtggcgttgcattttgcaagccaatccatacccaaaataacatcaaagtcctccaaatttagttctattagatcaaccgataactcccttccttccacaaatactggaagggatcgcacccacctgctagagataaccagctctccagtaggcagtaaagttctgaagcctttagaaagtacatcactaggcctattcaacttctcaactattctacttgaaatataagaatgtgttgcaccagaattaattagaacaatcaataaggtaccagcaacagaaagttgacctgtcacggtggaagggtcagcatcagcctcaacctgagttagggcaaatacccgagcaggagcaggtttatcatccttcttttgttctggtcgcagcagttgtgggcaattcctcttcaagtgacccagtaccccacagtgaaaataggccctggcgtgacactcgccttggtggcgcctcttacatcttagacatttaggaaaagttcacaagtttttgttcccaccatgatggagaccttggttaccttgcatcttttatttgggcttgtaattaatggttcattaggccttttcttacgatcactagggtcattacccctaccagaaccaatgccagatgcctgcttccaagaatctcttcttgcaatatttttctttcgtatctgatcttctgca

SEQ ID NO: 368820 - DNA, 1015 bp, Cannabis indica
tattttgttttatttgtttttattctttatgttacagaaccggttatattttcattataacttgtttgagttattttgtgttatttattttcattcattatattatagaaccagttctaatttaattacaattagtttgagttattttgttttatttgtttttattctttatgttacaaaaccggttatatttcaattataaccgatttgagttattttgtgttatttattttcattcattatgttatagagctggttctatttttgtttatatttgagacatctacttcttgtgtctttttcagtaactttttccagcgacggtgatttttccaatgacttttctaacgccgataaaatttccgacgcatgtgacttttccgataaaacttattattgtttacaaatatgagatttctattttttttaccaaaaatatggcataaataaacccataaccccttaggattatttatttatgccataaaaaagtaaactcttataattttctcatatatagtgtaatttgtactaatttttttgaaattacatatcattattttgtaacaaaaatgaataaacatagggttttttttaatttttatacttgttaacattttttttttgtcattttttacgaaattctatatagaaacccctattgcaactggcgctgcacttaaatcgcacaaaaatcgtacagaaaccctattgcaactagcgctgcaactactttagaaaccgaaaccgtaaactttgaaaaaaaaagttaaaaaataagtatatgggtaagtttacccttacgatcatgaaatatataaaacaaatatttgtatatatcgtatcactgaaaaaaaataggggaattaccccatatactatttttttaacttttttttttcaaatttacggtttgggtttctaaagtggttgcagcgctagttgcaataggggtttctatataattttttgtggcaatttagattgcagcgctagttgcaataggaatttctat

SEQ ID NO: 368821 - DNA, 717 bp, Cannabis indica
gttattgtatggggtggccatgccccttaatattctaaagaatcatttttaatatatttataatttataaaaattaaatttagttattaaagaaatataattagtttagttaatctcaatgtacataaatagatggtgtattattatatacgggttctataggtgtattttatttcttatattaatttaaaaactatgtgtaggatttgtcccttgaattaatatgattatcaaatcgtcttttaaatttatttactattctctttcaactatgtcacaatgctaaatataagacttctaataagttttatccaatgtgactaataaaatagtaataggacttgcgtgtcattgttacataagtaccatatgtataatttttttaaaaaaaattaatatttaagaaatttcttttcttatcaataattaataagaaaatttaagattaatttatttttattcatataattttggataaataccattttagatcttgtattttgcaaaagttactaattggactctctatcttattaaatgacaaaatggactctatatttttcaaaaatatacaaataggacccataattaatttttttgtcaaaataaaattaaataataatctaatttaaagatgttgttatcctaaattttgcactctgaagtggcatcacgagaatagtgacacgtggagttcacttggagcatctgctcgga

SEQ ID NO: 368822 - DNA, 548 bp, Cannabis indica
tgtcctaatacctaagatgacgtagagatttcgctaaaataggagttggttaagttagtttttatttctaacaaacttaacaatttcaattcttacagccattggctttagaatcttgatcttaagcctataaataccacattcacttatcattttaaaataaactaaattcgagattaagaactcagttcagatgggattgaaactttgagagagaaaaaaattgagaggtagagagagaggtgcagagaaaagagagattgtgtttgagttttgtaagaagaatcttctatagatgaagaagattcttggatgtaagtgtgagagttaaaatacttagtgagaacttaacagaaaatctcgtctcaactatattgtacctattcttgctcaatcaaagaaggatgacagtggtattctagaagggaaattttattttttgcccttaataaaacccccaatatcaaaatttagaccctccactaatttgtacaaattaattccattgattacatgaacttcccattttaccctttaattaaaaaaaa

SEQ ID NO: 368823 - DNA, 589 bp, Cannabis indica
ttactattaatttttttttaaatttaaatattatttatttatttatcaacaaaatatatatatatatatatataaaaacattaaacatatccttccccttctccttctcattctcattatcattctcattctcattctccgtcgctataaccatcttctccacacttttaaaagcgccaactgagctaccgacgacgagctttctccatcgctagggctagagctattactctgcttgttgttattatccaagtgatcgaatttcgacctgggcatagtgaagttagaggtgatgagtataactcgttcattggaggaggaggaacgggtgtcatcgatacaaattctagcgccggttgtgtcgcagatatggtgaatgactgaaccgccttttttgattagtgctccggtcttagatgtcggacagaggaggcggaagaaggtgtccgacgttggggacttgaaggggagaggttgtattggggattgggaagagagagagtgagagacgacactatgaaaatataccaaaacaatttaaacggtatacgtggtactctaaaatttaaaatataaacagtataaaatc

SEQ ID NO: 368824 - DNA, 538 bp, Cannabis indica
gggcgaattttggagcaacagagtgtatgacaaggtgcatgtagtttcatctcaaaactaattgacaatgagaggagtgttggctatttttttgctcactaatcttgcacgacttgatcacaagtggctctttcggctcacggtgacttttttttggctcactatcctcgaatcacaagcaactctttgtagctcgtctttttgaatcgatttttggatttggatcgattactcgttagaattttagtttgtctctgataccatattagaatgcgaaagtgtatggttgaggaagtatgaataggtgagtgtatgacaaggtgcatgtagttctatcttaaaaccaattgacaataagatgagtagcctatgtattttatgtatggtatttatttaatttttatatattattaatgtgacattctctaacagcccaataaacatcccaatttttatttgctccacacgtggatagcacataggatgtaaaatattgatattataataatttacttcatagtaatttaaggtgacaaaa

SEQ ID NO: 368825 - DNA, 1447 bp, Cannabis indica
agggtgaattacaacatatacatattacatatttttttttctccattagtttcagcattaattatgtaaataggtatatttagtttttaaaaaaataaaaggtaaaaagacaaataaaaagaaactagctaactactaatactaactacactgttaatcataaaaattgagatacgaatatgattgatgatgactagtagtctaatagatcaaatataacaaaaatacaaatttgagattaaaagtaataaacaatattgatacaatgaacaaagagtaaatatcaaatacataccttctattaaccgttgataaatttgcctcaaaaaatttcaatgaatgatattattctccaattcttttattttttatatatatataaaaaagaaaactaaaaatatagatgatagcaaaatatatctaatatctttcttctcaattctcataaataattttgatttttgatgttgatgaaaagcttaaaatgggatatatatagtcatgtagatgaatataaaaagttttaaaaaaaaaataaattaaatggtattaataaatttagtactgttagtttattagaaactaagaaatttggtaattaattgactaatatttggtttataaaaaaataaaaataataattaaaaaggttaaaaattaatgaggttttgttgggagggagaagatggagagagataagaccaacgaattgaaaattagaatgctgaccaagtcagtttttttaaaaaataaaaaataaaataaattgggccattttcttgcgtgggccctgtgcagtaggtctgccagcacaccattaaggtcgggcctgtacaagagtaacagttgattaagatttaaagcacgctaacatattaaaaatacaaaataacaataacaaaaatactaatactaaataaaataaaaacaatatagcactaaaaagaataatataaataaaaataaatgttaaataaaatcatatttaataaaggttgtgaattaagttgtaacgccctaaataaataggcacgctcccaatatacttatgaaaccctaatcctctaattgggattactagtaaaattaccgcgaaaattaaactttaattacaaacagaatgaaaataaacttgtaatactttttcactttataaaataaaagatacaagtgttgggatcccaaaagtacttaacaaaatattattacaagtttgtttcctctagccgacctatgcggcaaaacagagtacaaaacacatcactggtagaccccaacccgcttggtctagtgtgacccgaacatgtacattcctcgtcgagcttctacactcatggttgatcaaacatagctttaccctttcctggacagtagagcacccatgagccaagcccagcaagacagtataaaatatcaataacatatttatcatattatataaacaata

SEQ ID NO: 368826 - DNA, 549 bp, Cannabis indica
tagaaccgaacacagacctagcctcagacccaaactgagacttgatctcgggttttgacacggtcgtcctacaggactgaaattgagaccaatacctggacctaaatctcagacccgatcccaaacactgacttggacctagatagggattcggatacatacctggactcggaccaagacctagactgggatcgaaatgctagacctagatcttgaccgagatactgacccagaccccaacttggacccgcactcgggactcgaacttagacctagaccagaacctagaccctgatcggggtccagacttggacacaaacccggatacaaactcggacccgtactcaaaaacccatgcctagaatcagacccaaagttagacccagacccggacccaaactcgaacccagaccaggatacgaaccaaggacctagaatcagaactgaatccacactctgatcgggattggaacttgggactccgacccaacctagaccaagacccaggacacgaaccacacccggagcctgatttggacctagactgaa

SEQ ID NO: 368827 - DNA, 530 bp, Cannabis indica
ctgagactattttgtacggtagtgcgaaatggcatatgatgttctcactataaattcgtgaactttctttgatgtgatagtcgcaagtggttcggcttcagtccacttagtaaagtaggcgactgataccactgcatactacactctccctttacctttaggtaactgtccgattaggtcaattccccaaatggcaaagggccacggactttgcatctgtgtcaactcattgggcggagctcttggtatctttgaaaatctctggcatttgtcgaacttctggacataggctctcgaatcatcaatcatcgttggccaaaagtagccttgccttagaattttctttgataaactctttccggctgcgtgatttccacagaatctgttgtgaacttcaaatagaagccgtgcagcttcatcttgtgtgacacatctgagtaatggcatcgagaatcctcttctgttcatgaccccttctactatgatgtaccgtgctgcctttcttctcattttccgagcttcatttcggt

SEQ ID NO: 368828 - DNA, 785 bp, Cannabis indica
gttaccctcaattgtgaaccgatttagggagttttagtcccatccctttagaagtcttttccactaaatctctagttagtggcttcgtaaacggatccgccaagttttcacttgatctcacataggatattgagatgactcctctttgaatcaactcacttacatatccatgtcttagactaatatgtctagacttcccattatatactccactatatgctctagccaatgttgcttggctatcacaatgtatcgatattgtagatacatcctctttaataattggaatctcaattaagagatctcttaaccattcggcctctttcccagtggcagctagagctataaactccgcttccattgtggaatgagaaatgcaagtttgtttcttggacccccaagaaaccgcccctccacctagggtaaatacccaaccagttgtggacaaattatccccaaggttggctatccaacttgcatcagtatatccttctaaaattgaaggaaatttggagtagtgaaggcataggtttttggttttctttagataacccaaaactctccctattgccttccaatgatccacacttggattactagtaaacctactaagtttactcaccgcaaatgatatatcgggccttgtacattgggaagcgtacataaagctccctatagcacttgcatactccaattgagccactgctctaccactatttttaactagtggtttactatgatcgaatggtgtgttggcctctttagcctttagatggctaaactta

SEQ ID NO: 368829 - DNA, 570 bp, Cannabis indica
cacaaatgatccagggtttgttttttccaccatgtgtaagaaactcggtattaggctgtacgagtcactagcattacctctcaagtcgtttactgcatgttccttacttctccaagctttcatatagttcattttgatgccatatctgtatttcaactccccttttatgtccatcgctgttgccttggtctttatgttcaagaacttcggttttatgcattcccctatcagtttcgatgttgcttgcctttggtcttcatgcctaatatttatggggcatgtgtgcatatttgagaacctattgaaacaaaaaaacaacaaaaacaacattaaaaaactattaaaacaaacctgttgcagataccaaacatgtgtatttcagtacaaattgtggaaaaagggcatttgttaaggctgacaacaaaaacaacattaaaaaactattaaaaacaaacctcctgattatgaatgtgtttgttgggccatttctcgatgctcttagtgaccaattgcagctttcgtaaacacatttcagactgtactcttgagagcaggacttccacactttgt

SEQ ID NO: 368830 - DNA, 504 bp, Cannabis indica
tttaaagaggagtctggtctcgagtttctaggtgagagaaatctcactataacaaaaataatactatttttttcttaaaaaaatatcagtaaaaaaattataacaacaaaaaaaaagtatgattttaaatattttatgtaaattttctatattaaaatctgcaataactaattgtatatatatattttgtaacgaactaacgggtgaaaatcgcttggttgcttaattaattgtataaattgattgaaacctgcatattatcataaacaaaaataaaatatatatatatatatatggaacatttttaatgggtattacttgtggatggatactaaataaatttaactataaatttaattttaaaaatattaaaccattagattttagtcagataatgaataataaaaaataaatttgaattttatacttaatttagctacttaattaaagaaaatataaaaaaatatctctttttattctatatcaaaaatatatttgtatgaa

SEQ ID NO: 368831 - DNA, 525 bp, Cannabis indica
ctattggtccaactaaatatcgagtcccatataatttaatataataacttttaggaagtatcgctagccaatcgtaacgaaacatgtcgagaaggtgctaggcaccactggtgcctactagcaatgctaaaaaaactctacataaattttaagggtgcacacgggtcaggttttcgggaactgagattaattaattaattaatatatatacaaacacacacagttacttacacagtaatagtacacatacacaactacacacacagacatttacctggtatgggatgcaactgagccgattggcaaggcgatgccactgctctgggatgggactccgccggcgaagagaaccagtcagtcgccgactcgccgtcgccggtcttgcagaagaagaagctgtgtggtggtgatcgactggtgtgggtgagtcagacggtcgggtcagtcaactggtgtggacggtgggtgtggccgtggtgtgtgggtgagtgatatactgtgatgtgtgtgtgatagtgatatact

SEQ ID NO: 368832 - DNA, 841 bp, Cannabis indica
cttcttttaatagttgtaattttatgaatgttagtagacgttgtaactatgttgcccataatgtggctaagtgggcttttacccaccgtaggtttggctgtattccggtctgttctttgccagagaacacgctttgtaatgaccgtgaggtctaattatattttcgttatctaatgcaacttgacgattattttcaaaaaaaataaataataaataaagagtgctaaaaaaagagtataataaaggaaagtctctatattatatttaattttatatgtacaaaacacaaaacctttttatatctattttatagtttgagttaatttggattctaaaaaaaatatttttttttgtttttataacagtaaatgatattttaaaattatttaaaaaatatgtatattattaaaaaaattatttggcctattaaaagtggaccctagacgcggccctaataaattaacatttttcgttaagtagccacatttaatataagaaatatgatttttgattattttttaaaactgaatcgcctgtgtaatttttgctatttcttgaactgtaatgaaagactttaaaactgtaaaactcatctagtgcacctcgcacgagcttctgagagaatagaagaagatagaattatagataaaaggttaaagttacccacaagcctcacatacagtactgtgttatgattcatgcatgcttctgcatttcaatattcttttttgggaaaaatatcttaatataaataactgagataatctatttttatacctatatctttatatattaaaagtgcctatctaacgccattttttggtttaacattcttggttta

SEQ ID NO: 368833 - DNA, 793 bp, Cannabis indica
gaagataactcttttattaagtgattatataaaaaaattaaattaaataagttaattaaaaatatttaaagcatactatttgaatttaaatttgattattagattcaattttatctattttcttattattaattaatagattttatttagtattttcatttatttttttaaaaaaatatattttagattcactttatatataaaagtgatcagtggcaaacttattgtttaatttattttatgtatagagaaaatctattggaaaatacagtaattaatgatattgactttgaatgtagtgatgactacaaatagatgttgtgatgacaacggttttaaaatcatatgataagctttttataaagtcatcaataattataattttttttgtatttcaaattaattgatttaaagaaaatacatatattataaaactagctgtataataagatatatctataattaattaaaataattaaaaaagttaagatctaccatattaattaggagaattatctcatacactattttttaattttacggtttgggttgctatgtgaatttgagttgcgatttaggttttttcgtttggtgactaggtgaattgcgatttcaaaggaagacttaatgaggattgttcaagatgataaatttattgttcatagagtcgatccatttaaagataaaaattggttttaatattagttttgagcaatgcgttaagttttctaaataattgatgagaacattgtcatgaataaggggttagtataaataccattttggaccctct

SEQ ID NO: 368834 - DNA, 662 bp, Cannabis indica
atatctttcttttggacctgccctttgggtcaggatgtttatacatatgcttttttcttttttgtgcatactttattggacctgccctttgggtcaggatgtattacttttgtcctgtcttttgtctgtcagtgtggtatgccctaatacccccatgggtggcagagaaactttgtttttaaggcactgagttttatttaaaatatagaggcggcatacacttagacggtacaaaccctttaaacaaagcctaagttatacttttggactattggtaatattttctgaggtgatcggcattccaggcccttggcacaatggttctgtccatcctttttagcttataggtgcctgaaccgatttcgtcctccgatttcatatggttcctgggttgtcgggaagactcttcttaagaccatatccccaatagcaaattttctgtttttaaatttggagttaaaatatttggtcacgttcttttgataagctaccatccgtatttgtgactcgtcccggagctcttcaacttgatccagagcttcttgaagtaaagcttgatttgtaactggatcgtaagtcgttctcttgtgggacgggaataacatttctaccgggaccatcgcttcacaaccgtacagcattgagaaaggtgagtggccggt

SEQ ID NO: 368835 - DNA, 884 bp, Cannabis indica
tcaccaagaaccttagaataaaataaggaatcaaaaatatacaaaaatatttaagaaaaacacctcagaaatggtaagaacgtggtcgctggcgttctcgtcggtttcgtcgccagtaaagtgtaactttgtctccgattgctcttgaagcgtcctttcgattggggaagctctccacagtgctcaggacctcaaaacgatcaagaaaagtggtccgagaaggcagatcggggtcgtctccttcgttggcggtgtaccgtctttaatggagtcaaaatattagtttttcgttttggacgttaaagcttcgttttcttacgtcaaaaacaatccttagggtcccatgcactcatatataacctcccttgacccaagaacaagcttaaacacgttcaaattcgagtctgtttccaagccgcaccttcgaagcttcaaaaatggcgaatctcgaaacgaggacctccgccccttataccacgttaaaaagcttccttaggtcgtatataagtgatcccaaacccccacgttcacccaggttgcggtccgcttgaagaaacaaaatttttcggtatcgtatacgccgtatacgttcactctctctctcgttggttctctgtttttggtgtacgaaaatagagctcaaaacctaatttctatcgtgtataaactcaagcaaagagatcgctttgaaccgaagtggaacgattctcattctaccaaaatctcggttcggttggatgtgcgatatacgttcgtatatacataacagaacagaaactatgataataaataataacagtacgtaataataataataataataacgttaataataataataataataagaataatattaataattataataatataataatata

SEQ ID NO: 368836 - DNA, 572 bp, Cannabis indica
aaaatgaaaaataattccacgtttaaagactacttggccagtcacgatgtcttaaaaaaaggccttatggccgaataagatataaataaaaaaattattgaagtatttaaacagctggagtcccaggctctcggttcaagtcttctgggccagtaggagctggaggatctattatttgagcggaaggaactacaacattctagccagaggtagttgcagtcacctcgggttcaccataagccaagtaatcgaaattttcctaagggttagccttccaaaaatcataaaagatctcgagaccggctatctctaaggcatgaactttctcttccagcctcgccacctcagctgtaagggcctcctccttagtcttcttctcttcttccagccgacggaagacagtccaaagaactcccctttcctcttgaaggttattcacttccgctgacagagtgtcaatggtagcttcaagctggtcggaggcctcaaggtccttagtcaactcgactatttttctctcagcagtaaaaagcttcttgttgacttcgtccagctccatccgaacagctcca

SEQ ID NO: 368837 - DNA, 725 bp, Cannabis indica
atcaagctttcttaaacactaatatattgcatccggtattcacttttaattgacaaaattataaactataatatttagatacacataataataatctcacctaataacaaataatattttttctttaatttttaattgtatcacttttaaataatatataaaaaaattagcataaaatttagtagacgtgcctcgcacgtagctttttgctagtatatatataattagctaaaaatgttaggtggagaccaataagacaactatttttgctaccctattggagatgccataatgggctcttatcataaaattttaaaattatgagattatttcataaatacataaaatgctaagattgacgaaaaatttacttttattgatctattattttttaatatatctttttatggatttttttttcaaaaatacagattcttatttttctgttgtcttcacgttgccaatacttaaaaacaacatgaaaaaaacttttttaactaaaaaaaaaaagtgaaaaacctataaaaaaaatgtaaaaaagtaaaagaaaaagttttattttaagtgcattgtgtaaatttacctaaatttatatctgttgactggatttttagcaaaccgatggggagtcgtaataaatgagatttaaaccaaaatcacaatagtaaatgcagttaataacaccgaaattcgcaataaatataaataaaagacaccggaattta

SEQ ID NO: 368838 - DNA, 618 bp, Cannabis indica
ctcaaaaacttgcccggttgccggaggaagacaggaatatcatccagttgacctccgatgataatctggtgaagtatgggctttaccctgaggacttttctcctaagtccgtggcagggaagaagaggaaatccggtgctggccgacctgaacgagctcatcaggaggatgagctcattcaacttaagcgagaggctaagttgaagggaggtgtcaaggccaagcagtatgctcaggagcctttggatcctgaagatgaggttgaggctgaggctgaggctgagcatgtgaccccattgaagaggaagaagagactcccagccacgcataggcctgttgaacatgcaattcgcataagggagcccacttcacctgttcgaccatctcccccctttgccggaaaagggaaggctgtcatgtctgaaataaaatcgatgtcgggtgatgatggacttcttattctctgtgcgggcggtcaccttgcattttatttcttttttgagcttcttgactttcatgccttgtgttttctgatggctattttctaaccacactatttttgttctgtgcaaacatgtctcggcaaatgcttgatgctctaaggaagagaatgggcgg

SEQ ID NO: 368839 - DNA, 620 bp, Cannabis indica
ccatttgggtagtcgtcgataggtatacaaaatctgcccattttctacagtacgcatgacttactccatggaccattttgctgaactttatgtgaatgagattgtgagattacatggggcaccgtattctattgtttgtgatcgagatgctcggttcacttcgtctttttgggaaagcttacagagagcaatgggaactcgattgaagttcagcactgcatatcatccagagacagatggtcagactgagagaacaaatcagatcttggaagatatgttgagggcatgtgtgatagatttccaaggatcatggagcaaatacctgcctttgattgaattttcttacaacaacagctatcagtctactatcggggtagcaccctatgagatgttgtatggaagaaaatgcaggtctccactgcattgggatgagttgggagagaacaaactcctagggccagatgcagttcagcacaccaacgaagctattcagaagatcagggctagaatgatcacagctcagagcagacagaaatcttatgcagacctgaagcggagagacattgagttcgaagtgggtgatcatgtgtttcttcgagtgacaccacgaaaaggactct

SEQ ID NO: 368840 - DNA, 654 bp, Cannabis indica
aaagaggatcaccttgtcgtaggactctttcgggagtaaagtaacctttgatagagccattgataagaatggagaaggagaccgaacggatgcaattcataattttagtagtccacttcttatcataacccaagcaaatcgtcatagtttccaaaaagtcccactcaactctatcgtacgcctttgacatatcaagcttgacgaccattttctttccatttccaaaacaaccttttcgcatacaatggaggctttcaaatccaataatggcattatcttgaataatccggcctccaatgaatgcactttggttggctgaaatgacggagctcatgctttgcttcatcctatttgctaaacacttcgagatcactttgtatatgacattacatagactaataggacgaaattcagacatcacggtgggctgttgaactttcagaatgaggcatatcagggtttcgttgagcattctacagtcggcatcattgtttaacacatctaggaaggccgaggtgacttcttcgcctactacatcccagtttttttggaaaaatgtcccggaagaccatctttaccttgagctttaagaggatttgcttggaatatggctgactttacttcatcactagtaaaaggtgttgggttttatgc

SEQ ID NO: 368841 - DNA, 686 bp, Cannabis indica
tgtctaatccaatccagtcatgcataccaaacgggcccctagggaaaaatgataaaagacaacgaacatctgaaattaaatctgaaaaactaaataaatctgcagatgtggttgagagagcgattgagactcttagagcatcagttacaacattagtaattggaatttggagttggttagcccagttgatgctgtggaaaagagctttcgcttctaaaacacccctatatcggtttagaaaaggcagtgatgacttgtcccaaataattttttatattattattatgtgatatttaaagtgcttaatattatactaatgtagtactcatttctaaattatttattaaattaaaatttatgagagttgatattgaaatgcatcattaataacggtatgctacatattatggtgcttgacaccttaatgcgacccttaatattttcgttattaatatgtacatatctttattaacttcgtttagaattttaaattttttccttaaggtgctcaatagtatatcgatgtggtacttaataattaattaataattttccaaatcatttatcaaatttaaatttgtgggagctgatattaaaatacacaaataacagcatgctaccttttgcggtgcttgacatcttaatgtgccccttaacattttcgttattaatatgtattttttttt

SEQ ID NO: 368842 - DNA, 573 bp, Cannabis indica
aggatgttaatcaaacatacttggtagtaaatctagatcctggtaaaatatttccaacaattagacaatggaggatggaatatccaaaaacttaacaggttgttcgatcatgagactatctcggctatcttgaaagggggcaatccgactggccatggaaaggatagctggccggtttcggactttgaaaagtaatggtcgtttctcttgcagatcaacttatagggcccaagctgttgaaagagcgactcaatgtgaggttgccacgtccatttggagagagttgtggaatagtaaagtccccgagaggctcaaggttctttggtagtgtatcctgtccaaagctctccctattcatttgttaattggtaaaagatgtaaagccctgacccttagggatgccacgtgtgtgcttttataaacttattataactaatctataaattttggaaaagtgtggtttaatttaaatctttaattaaattcaaaataaaaactttcattttaaatactgtcgtaatatagggatcccctgtttataaaaaaaaaatcttttgcagtaggttacatttt

SEQ ID NO: 368843 - DNA, 521 bp, Cannabis indica
actaagtggggatgctccctccaaattaaccaattcacttttttacagaacttaatttcgattttatttgaattagttatgattttttgaagatttaaaaaaaaataagggtggtgacacaccctcacgcacgcggactccgagttacacttggtcagacgcatgttcggacagcctcatgtctgaggaaacacgcttgggttgtcttgatgctcctcatgtgcgtgtggaatggctgcttccagcctccagcgccaaggaaactcggctcacctccctgttgtgcgcgcgcggacagtatgcaatgcatactgtccgtaccacatgcatttttttttcgttttcttcgatttttcatgctatttcatggaattaacttttgattttttgtgtagttttgtatttagatatttactattcctatttcaattctaattatcataattaaattaattggattttttttaaaattactttatgatattagtgtaatttgaacttgaaaataggtaaatatctat

SEQ ID NO: 368844 - DNA, 618 bp, Cannabis indica
atattttctaacaacctaaatttgaaattctagttaagatatattttaaatatcttattttaaaataaaaatatcttaacctactttctagttatctgttacatgtttgttatgtttgtttattgattaacttgttaacaaatcaaatgatttgattttaatcatagtctaattgtcaataaatcttataaataatttgtaacaggtaaatttcgcaatttctttcatctgtgtagacctagaaacatgatagggcccatctaaatcattggacctatgtgagcctatatgtttacttttgggcttagatgcatataggatgcccatttaagtttaattaattaaatggactagcttgctaaaataaaatatcacataagatagttttatttaggcctaattagtattgggcttattcaatgaataataattatttatttaattgttaaatttctctcctttagacattgtgtgagagttagggggcgttagtagtgggtacgacatactgaacccaggcctccctcacacgaagcagtccaatagtccaattgtgaagacccatttaccttatttaaataattgtattagattaattatattagtctaacctaatta

SEQ ID NO: 368845 - DNA, 935 bp, Cannabis indica
atatcgatcctaacatccagccaattcagcaaaaacaagactgctggataaagaatgagcagtagccctgaaagatgaagttgaaaagctgcgcaacaacaacttcataattgaagctttttactcagcttgggttgcgaatcccgtgcttgtgccaaagccgaacaagaaatggtgagtctgtattgatttcacagacctcaacaaagcatgccctaaagattgttttccacttccaaggatcgatcagctcgtagacgcaacagtcgggcataaaattttaagcttcatggacgcttactcaggctacaatcagatcaaaatgcatccgccagaccaagaacatacaagtttttgaacagatatgggtctctactactacaaagtcatgtcgtttggtctaaaaaatggtggagctacgtaccaaagattggtaaacaagatgtttaaagaccagatcgggcgaaatatggaagtgtacatggatgacatgctcgtcaaatccagaaaggttgggagcacacagatgacccggacgaatgtttcaaagtcttcaagaaatacaacatgaaactaaatcccttaaagtgctcctttggagtcagctcgggaaagttcctaggcttcatcgtcaatgcccgaggaattgaagcgaatccagaaaaaatccaagccctcctggatatgaactcgccaacaaaaaccaaagaggtgcaaagcctaactggtcaaatcgccgcacttagcagattcgtgtcaaaatcaacggacaaatgttttccattcttcaacatcctgcgaggaaataaaaagttcaacagacaaatgtgttccattcttcaaccactacaacaaatactgcaaaagccagacgcctttggacggttactcaagtgggtggtagaattgggtcagtaggaaatcaacttccaacc

SEQ ID NO: 368846 - DNA, 681 bp, Cannabis indica
ttgtttgttctaactggttccaggggttttgtatgggtcagctacataatttggaagtatctacttcagatcactgctcgctgcttcctgaaccaacggtgcgttctatcacggtgccatttcgtcaattctattttgaaaatgcctggcttcgtgaactattgtgccgccgggttattaaagatagttgggacctttgtgaaggtcagcatgttatgtaagaaaatctcttatcgtggggaatctcttcaagcgtcggggcgagattgtacaagcaattttaagaaaagaattagccattgcaagtcgggaaatccagtattggaagaaggggcgtgatgatatatacattcagaagttccgcgaggctggactgaatcttagtgaagttatgaaccaacgagaagtgttttggtgtcaacgctctaaacagttaatggcttcaagaaggtgatagtaacagtaagtactttcatgctaaagcaacttctagaaagaaatataatactataactcggcttatgaatgctgtgggtcatttggtcacttaggaggatgagttgccgaacgttatggttgattattttaataacttatttacttcaaatgtggccgattactcaactgtggtagaggtagatttacttcttcaattactgtggatcagaatttgtctttact

SEQ ID NO: 368847 - DNA, 2208 bp, Cannabis indica
cgacgttctaaaattctaaactagtccagaatatcctcaaaataatacatccattaatgtcatgatatttctaaccacatcgtcaaatttccacagtcgtcgggcccaaaaaatatttttatttcaaaaatggtatcgtcgatacccacataacccaatataacctccgtaattaataaattacgctttatataatcatttaataaaacctcactaattatcccaagtaagatcgtaatcttacttcattaccaaaataattacataattaataaaatatgtctatttaaatatcattttattttcaaggatattacagtttttatttttgtgttgaattatcattgtgaggctcaaatttggttaacgaaaatctgcgataacagtttggtgctttcattgagagcctctgtgaaaaagctcagaaaaaaaaaccttcccttctttttaaagaaaaaccttctcctttatggctaaaaatccagaaaatattagcatcctacatgaggaaactaaccatcgttttggaaaagagcccatgggctctagaagatctaccaatccgcaatccagaaggaccacctgttccaggagagctcaacctgaggatggacccagtgctcggaccacacgcccccggagaactcaactagacgttggtcctagtacgcggacaacacgctcgaggagaactcagcgtgggaatggtcggaattccaggactagggatgaagagctcaaccatggaggtgcccaatctgttggagaaataacttatgaaatagaaagtcgccgcctgagatgctgtctggaagagccacaatgtcaaaacgctgagttagaatgagaggtagcctcgaccagggcggcgcaggtgatgaacgatcaaaatcaacctgaacctagagtgagaagaccacgaggcagacctcgtggctcacgaaccaggagacaggtaaaggcccaggaagaacaacccaaagaatatgagacaccccctgagaatcaggatgaacagccagaaaggagataaccgggaactgatgaacgaagaatcccttatgaaaatgaggagcatcttggaactcagccaggagaacggagatcacctgctaggaatcaccagcattcttcccaaacccatagagcgaggactcgtacttaccctgatgggagaaatacgataaatcgctctcgggaggaaagaacagagcgtgaagaggtaagtgttacttcgaggcgatccaaaactcatagacgatcaactcgaagaggagaaaatactcaacgagctaatgatcgggagagtatgggaacaagtaaatccgcgagctacttaaaaacaaagtctgtaagtaggacacggtcaatgagtaagacgagatctgccagaaattacttacaaccggatctccgagagcacttgaatcggaagaaatctgacctttgccaatagcttggtccaaagtaagaggatccaatcctattgcgaataaacgagctggaggacaagttcaagggatatcaagtgggggcaatagggaaatcattagggaaatcatctggatatgactttggcgaggagcttgagccgtatcacccagttattatgaataccccttttccttcgagattcaaaaacctgcatgtctcatcctatgacggaaccacaaatctggtctcacatataaataactttaacacaataatgcgagcgagtaatgtgacgaacaatttatgctgtactttgttccccacctcgcttgttagagcagcaagtagctggtttaacaagttcactcgtcattcaataattacttgggagcagttgtctagggatttcaagaagcgatttcaagccactagggataggcgacccaaagcggcctcgctaacgaatataaagcagcagcttgaaaaaacacttaaggcgtacttaagatgttttagcacaactaccgctagggttagaaacttggatgatagcacacaacttatagccctttaggtgggaatctctcataaagatattgggcatacgaccgacgaatgtcgccaattgaaagatgagatatagagtcttatctctcgatgccattttaagcagtatgtgagaagacaggcccagggatacaaccagctctgttagcctgataacccaaataaccatgggttacaacctattcctgagttcaagatgaaagaaac

SEQ ID NO: 368848 - DNA, 339 bp, Cannabis indica
tttctgaagtttcaaaaaatatcgggatgaagcactcacccacgcgcgcggaaccgagtgatcctcggtcaggcgcgtgttcggacaagattttgtccgagcaacacgcccaggggtgtctgaaacccctcatccgcgcgcggacatgctgcaggtgtccctctgtgccgagttttctcggtcgtgcaccctcccttgcgcgcgcgggcagtatgcaatgcatattgtccgtacaactcgcaatttttttcgtatttcttcgatttttcatgctatttcatggaattagcttccgattttttgtgtagttttttatttagatttttatttttcaatttt

SEQ ID NO: 368849 - DNA, 534 bp, Cannabis indica
gttattatattttacaaaataataaagttaaggtcccacaatgtacccctttaaaaataatgtattgatgcatcgtctacttatttcggcatctagaataattttatagtgtaatttttttatatttgtgtacgttataattatttaagatatcctataaatttttgaaaaatttagaataatttacaatataaaaaaaaagtatttaaataatcaattttatatgcatataaaataaaataatcacacgtacatcacaatatttaaatcatattttcaacgtattaaatttgtctaaattttataaaattttataaaaaaaatattttaaataacaataacctacttgaccatgaaaaaatatttaactgaaaaattattccaaacattatagacatataaagttacgagtgattctacaatgcacccccttaaaagggatgtattgatgcacccttgacttgtttcggcttccagaagaattttttagtctatttttttttcatattcatgtacgttatagctatttaaaat

SEQ ID NO: 368850 - DNA, 782 bp, Cannabis indica
gaattaaaaatttagttttttttctttttctacagaaaccctcccagcctacaagaaacaaaaatacatattaacactctatttaatacataacaaacatccttttaactttttctttttcacgcctaatactataatatttgtttttcttttcatgtattttttcctttccccttttcctctttacaaatgcataggtatctttcaaatctaagcctttgtaaaattttattttttttctttacttttcgattggtgtatacatgtatataatatattttgtattaactgagatctttttagacgacaacatcactgagtcaaatctcattaaaattgttccgaaatttttgcttgagctaattcatggtgttttggtttagatcagaattctgagtcgtgccgagttgagactcggacttttctctgtggaatcgacgtgaactggttgtcgtagacggtggatgtcgaacacgaagccggtgtttcgtcaccgaacagtacggtctctagcgttagcggtaaacggagcgagcgagaagcaattaatgggctgggagggtttgttatgtattaaatagagtgttaatatgtatttttgttcttgtgggctgggagggtttctgcagaaaaagaagaagaagaagaagaaaaagaaaaaaaagttaatttttttttttaattttttaaattaaaaagagaaaaaaaataatatatttttttaatttttaatttttaatttttataaatatttatgattattttttaaaactaatattacg

SEQ ID NO: 368851 - DNA, 729 bp, Cannabis indica
aagtttggcggatgttccagtagaataatcctttgacttggcaggcttttgctcaccttccgcatattgaatggcttcttcgagcttgatgaagccttcggctcggtcaagaaaatcactcattgagtctaccggcccgttcttccttatatccttccaaagtttgccgaggactttgatacccccaagatcgcggataactttccatcttcagttacccgtgaaactttggtcgcctccgtcatgaatctactgatgtatgcccggagaggctcgcctggtcattgcttaacttcgaccaagtctcccaaatgcaatggaagttggcgtgaggaggagaattgtgcatggaattccgaagagaaggttttccatgaactaaactttctaggagccaacttgaaataccattactgagcggtttccgacagagtggtagggaaaattttgcagcatacatctcctcgtatcccttgcaaatccatttgcattttgaagtacttgagatgggaaaggggatcttctctcccagtgtacatcttccacgttggcatttaaacttgtgggcaacggcatgagattgatctcgggcgagacaggagttccaagtgctcggtccagctcaagatcattgttctttgtccagccatgccgtgaaacatattttcagttcgtctagcggtgcacgtacggctgggctaacctactcggcattctgatcaatttgaa

SEQ ID NO: 368852 - DNA, 716 bp, Cannabis indica
gtacctttgctttcagaagaatgccattcggattgtgtaacgcccctgctacttttcaaaggtgtatgatggctatcttttcagacttgattgaatcttgtattgagatctttatggatgatttctcggtctttggttcctccttcgatcattgtttagaaaatttagaaaaggtgctaactaggtgcgagaagtctaacttggtgctaaactgggagaagtgccactttatggtaacagaaggaattgttcttgggcacaaaatttcaaaagcaggaattgaggtggataaggctaaagtttcaacaatagagaatttgccacctccagtttctgtaaaaggagtaaggagtttcttaggacatgctggcttctaccgaagatttattaaggacttctcaaagatctccaaacctttgtccagtttacttgtcaatggcgttccatttgagtttggagaagattgcttaaaggcgttcaaagttctaaaggaaaaattgatttcagcaccaatagtcacttcaccaaattgggagttgcctttcgagttgatgtgcgacgcaagtgattatgcaattcgtaacaaaaatcaagcaaaaagatagatttttacttgttttcaaattcaaattacactaatatctaaaattaaatttaaaaaattcaaattaatttatttatgatattagatttgaaaattgaaaagtaaaaatcaa

SEQ ID NO: 368853 - DNA, 812 bp, Cannabis indica
aactccctgtggggtaaattaagagaattcaacttattatcctaattaattataaaaatattataaaatctgtatggggtaaaattattatacttatataattaattataagttatgtccattgttatacccgaaatttggctgccatctcaatggaagacacgtatcaagataaaggggatatgaatcgatgtgattgctttttatggaataactaattaattacgtaagcatcaaagtatatttgaaacctgctgactgtaaggtcttaggcaaggaatcaacatacaaactggcacttattatattagcgagaaaccatatgtcgctgaaagcggatagcgaggcatcaaggacagtacacataggaagacgaaatcgatatatatcaattgcgaaagcccttagtgtgcaaactaagggaacagtcgattagctcgagaccaaataattgaggtgtctgtctcgctatgggaagacttcctataacttcatcccgtcaacgctagtgaggctcacaaccctggcaagtcaagaagctaacatttaaataagcttcaaagaactctttgtaaataagaaccgcaatcgacacaagacatgcaccgttgacctcggaaggaaaaatggccccagctcgcttttcagatcattggaaccaagcttctggcgagacaactccagatacaataaataaggatagtgtttaaaataagatcattttgaaccagtaaaagtggacaaatcacagctaaaatgattttcctaaatctcaaccgccatttacactatgtgatatgtaatcaaatccc

SEQ ID NO: 368854 - DNA, 565 bp, Cannabis indica
acatcagcagattcatgacggaagcgaccaaggtatcacgggtaaccgaggatggaaagttatccgcgatactggggggcattgaagtccttggcgaactatggaaggacataaggaaaaacggatcggtcgactcaatgagtgatttccttgaccgggccgaaggcttcatcaagctcaaagaagccattctgcgagcagaaggtgagcaaaagccgaacaaaatgaaggttccttctactggaacgtctgcccagcttccccaatattccagcaattcaagtggcaagcgttcaggaaataaccacaagcaaggaaacgggaagaagggaaagttcgccgaaaaacccggagagactccccgtaatcacacaaaacacactgcattcactatcttaactgaagatatagaaagtgtgtacatagcgactcagtcgccaattccgtacaagaagcccgaacccatgaagaaagataccagcaaaagggacatgacaaagttttgtcggttccatggagactacggccacgacaccaacgaatgctacaacttgaagtgggaaat

SEQ ID NO: 368855 - DNA, 536 bp, Cannabis indica
attttatttacgaaaggtaactattattgattttatttataatatagagtaattagcaaatttctaatatacaagatttgtctcactacaacaaatttattaattaccggcggagccaaactgccggtattaattggttattaccggcggaattggtcatccgccggttatttttttttttgaaaaataaaaaaaaaattaataattttaaaaaaaaaggtaataccggcggatcacactattaccgacgaaaattccgcctctgattccttggacgggaattcgaccgcccaaaatttaaaacaactattaccggcggattagtagatgagggttccgccggtaatagtcaggggagtctgaccgttgtattattaccggcggaaccctttttaataccggcgagtcccaccgttaattaaattctataaaatatccccccaaggctgaaaacattttctattttccttcaaaaaaaaaccccacgactccttcaaggaaaacccatccagcctctggcgcatcccccttctgct

SEQ ID NO: 368856 - DNA, 589 bp, Cannabis indica
agagaaccaatggaagtctcctctgagaaatccgtatctctccattctgagaaggagattccagaggacattggagtttcctcagacagtgaggaaactgaactcgagccagagcctcctttgaccaaatctgcttccactcctgctcgatcctcttcagcagcaaaggcttctgctgctgccaaaggcaagcagccaatgaaggaatcctctcctggaaaaattcctacatctctctcctattgtcctcgtttctactatcgtgataatgagcgtgattggaatttgtatactacccaaaagtttgagagtgagaggaattacgatttgcatgctcatagggtatatggaattgttaaattcattcaatttcatcaatgggaaaacactctcactggtttcaacgggtacattgcaaacattgtcaaagatttctatgctaacctatctgatgattttcttgatgaaaattctagactttttcgaaaagtgtatgttagaggacattggttttcattctctgaaaaaagaaattactcaagccttgcaactgccagagaatgtcccaaatgccattatgtctatggat

SEQ ID NO: 368857 - DNA, 768 bp, Cannabis indica
acaaaaatctgaaagtgacaaaatatctcgtttgatttttagaattttctagattaaaatatatcttattttaaatttcaaataaggtcattttataaaattaattaaataatgtaaaatataagatatctgaccttatatttaaaaataagataaaataattcaattttaaaaataagataaccaaataagcaaaaaattagattttatccattttcaagttcaaaatctactaatgtttaaaattaattaataaaatttaataaattttattctgataattatatttgagatttgaaaaaaaaaaatctaaattccaaattacaccaaaaaattaaaaattaattccattaaaagtatgagaaaatgaaaaaataaaaaagttttgggtttggtgcagatggtatgcattgcataccatccgcgcgcgtagggaaggaaggcaattgaagtttcacacacaagcatcctgcaatgtaggattttttgcgtgcgcataacggttctgacaagggggccgtagaggttatttaggcaaagcctgtcctaatgtgcgcgcatatcgagtacactcgcgtccgcgcacacacgtgggtgatccccaccctgattttttatttcaaaaagttgaactaattcatataaaatcgaatcaaattctataaaaaagtgaattgcttaactattttccatactatccaagaaaataattccaaaagaaaattctaattatttcgtaaaaaatttgttacacatcaatcagtcatc

SEQ ID NO: 368858 - DNA, 749 bp, Cannabis indica
ggtaaaataattccaacagtacccacatgttgatcctcttgtcattacagttcaactcgccaacaagagaataaagagagtgttgggggataatggaagctcgataaatatcctttacaaagatacgttgaaggaaatgggactacaaaacgcaaagttaaaaccttgcatggtgagcttatgcagatttactaaagatagtgtcaccagtcaaggcatcattggactcccattaactataggagagccaccattgtctacaacattaatgcaagatttcttagttgttgatctaccatcagtttataacatattgatgggttgccctgcattgattggaccaggggcagtcagttcaatcaacaaacacctatatttaaaattcaaaacaccagcagaactaggtgtagtgcgaggtgaccagctattggctcgcgaatgctattgtgtagagcttcaaaatagaagagccaaccatcaattaatggtggtcataacagaagaaggcgatgttgggaatattttaccaggatctaggtttactaacaagtatattgattaacatcctaaatataaattctctaaaacaatgaaataaacacataagggtttaagaaaaccttacaatgattgcagcggaataatatgactccttctgttcaagatctctagcccttgattcctttctgtagtagagcattatcaagatctgaaccccgatctctttctctccttcaggtttggttacc

SEQ ID NO: 368859 - DNA, 751 bp, Cannabis indica
cgaacccgaacctagaccacgactcacacataaataaaaaccgagacctggacccagaataaggataaggacatggaaaacagaactagcaccgagacctagtacccgatccaaactcgaacttaaacctaggacatagctcgtgacttggcacaagaaatcgaacaagactgggacccgagattgggatccagatctggacccagggcttggaaaaaacccgtagtcggtgtctagatttgggacccagcacaggacctgaaccatgacaaggacccgaacccactcacggacctgaacccagtcccaaaccaaaaagtggacctgaacccgtacctatgacccaaaattggaaccaaaactggaagttgaccgggactggaactaggacttggacatggaatcataattgaaattggacttagatccagaaccgtaaccgggccaggacccaaactccaaatcacaccaagacccgaattagaagtcgaactcggatcccaacccaatcctggatttgggacccaaacccgaacttgaactcagacccaaacatggaaccagaaaagggacacagaacaggggttgtgacctagatccgcatcccagtctcgatcccgaacacaaactcagaaattggacctgggacctaaacctgaactagaccgagaccagagacagtgatccagatcttgactcgagattcgggtaacggggtctggaacagaccagtagtcggtgtctagactgg

SEQ ID NO: 368860 - DNA, 541 bp, Cannabis indica
gtccacttttgggtttgggactaggtttaggtcagggtgtggattcaagatcttcttagggtttgggtccagggatgggtcccaaatccagacactgactacgggttttgtccaagccctgggtccagatctagatgccaatctcggctcgcagtctcgttccatttctggtgccgggtcacgagctaggtcctaggttcaagttcgtgtttgggttgggtactaggtcgcggtccaagttctgtttcccaggtccctataattattttgggtccaggtccaggttattttgtgggtttgggtcccggtccaggttcaggtttaggtcactgtttgggttttgatatgggttcgggtttttgtttaggtcaaggtactggtcctggtcctagttcggttgtagttccatttgtgattctgtgttcgagtttgggtttgagttcgggtcggagttcgagtcctgttcttagtttgagttctggtccggatttaactctaggtccagatcaggctccgggtgtgggttcgcgtcctgggtctt

SEQ ID NO: 368861 - DNA, 1180 bp, Cannabis indica
aaaagaggtaaaaatgatagattttaaaaaagaaggtaaaaataaaagaggacaatataaaaagggtatagagtgtaatttcctcttttaagttcgcaggtttcggattcaaaacaatgtacccggatccggtttgtgaaatagatttttgaactcggacccagcccgtgaaatggtcaggttggccaacagtttcgcgggttgcgggttcatcgggtcaacaggttgactaggtcaacttttcttttttttagaagaaaaaaaactcaaattctatatgggtttttttatatattaaattaaacatataagtaataaacttatactaccataatctatattcgttagattaaaaaaaaaaatattaattttaaaaatataagttataaacttataacactgtaagctatagttatattttaaaaagaataattagtaattttttctcttgaacttttgacaatattgattttagctcctaaaatataaggtttgttaagaatccccttaaacttttatatttaaagaaatttagtccttttgttaggtttcatctcattattccgtttaaatgttgatgtgtgtttttatcaattaacaattttgccccctaaactttgacaattatcaaatcatgccccctcaatataaaaatgagaaagattcaatatttttttagtaaataattttatatttttattgaatttttaattttttttttctttatttgttaaggtatgagtttataaatataaataattttgattttttctttaaaaaatcttagttcatttaaattatttattagattctcaataattttggtgtaattttttaatatacatgttgctaaataaaataaagtttgaaaatattcttttaagtaaagttaatatttttatccaattttttaataatttaaaataattttttttttgctgaagtatacatcaatggcgacaaaatatatcaatgacgacaaagttgtcattgagatatatactaatgacgaaattttcgtcagtatttatttattttattatttattttttttttttttgtaaaaagaagccattaaaatgggcgggaattttccctctaaaacattcactggcgacaaagtcttcagtgatggactgccatgtaaagcccgcttagttaatttggaaattagcggttg

SEQ ID NO: 368862 - DNA, 502 bp, Cannabis indica
agtggaacaactgctcggcaaattacaggctcctaaatcacatcgataacaatatggataagtgatacgctaaatcacaaccggggacttaggttttaaactaaaaccctatctactgtaacttaacatggtaataccctaaactagcaggggattaaccaaccaaaattctgaaactagcacaaatcgacaacatgaatttctcgaggaacccagcagcaaatccagttaaccagttttacaggcattgtaaaaccagttagccggtttataccaaaaattccaaaaaattccaaaacctaaccaaatcgattccaaactttaccaaacctgcatattataccccaatagacatattccaagcaatataacaactacccaagctcataatcaaatttcaccattaaagagccaagcttgagttctaaaactcaaagcttgctcaatcaacaaaccagccatcaaaacatgcttaatttaacatatctaaacataaataaac

SEQ ID NO: 368863 - DNA, 734 bp, Cannabis indica
ttgtctaaaatgatagtaggaactgagtttgagttcaattcctcatcaaaagcaatgtctctaaccttatttcctaatgggatttattttaccaggatctagatttactaacaagtatgtttcattaacaccctaaatataaattttctaatacgatgaaattaaacacataagagtttagaagaccttacattgattgcagcggaataataacgactccttctgctcagatctctaattcttgttcctttctattgcagagtaataacaagatctgagcttggatctcattctctccttcgggtataccaccgtcttttgcactataattgagtacttgacttgctatgtgtaggcatggcactctatcactatggctcgatcactattacaaaatacactattcacgtcggtcaacgctactattcatagcgttgaccgacgtgaatagtagtcaaataattggggcgtcactttaaaaatgacactaataatatgttatttgcgtcttttagatatatgacgctaaaaactaaaccaacaaaaaaagtaggaaatttaaaaatttacgtttcattttgcgtctgttattaaaactcgtgtattgtattagcgagcttttaaaaacgacgcaaaatacaatactgagagttaataactgacgcaaaaaaaaaagtgaaaacccctaaaattaaaaaaacgcaaaaatcgtcagccctctctcttcagactat

SEQ ID NO: 368864 - DNA, 662 bp, Cannabis indica
catctaacttgccaaaaaaaaactttatagttgtgtctatactcaaagtgtatttattttgggtcgtctaatctccgacaatataatggtctattttgaagtcatgcactacttgaaaagaaaaaggagaggttaggaaaatagtatgtctcttaagttggatatgggtaaggcatatgatagggtggaatggggttatctttgtgcgatttttcttcaaatgggattcacagagagatgggttgatttgattcttacttaagtcacttcagtgtcttatactattgtgtacagtggtagagagatggggcctatctttccaactcgtggcattcaacaaggagatcaattgtctccatattaatttataatgtgtgtcgagggtctttcctcatagattcgagtatatgaatctcaaaagtggattaaaggaattaaagtttgcaggcaagctcctgttatctctcatatgttttttgttgaacaaaaggcaatcactaacttattttgatgataaataaatattaattattatttattactaatcatttatttatcattttgcaagaaaattcacaaagtatcaatatttgctcgataaagtcaaacataatcaaggaagtaggttcatcaagtatatcaattacttcatacttcataag

SEQ ID NO: 368865 - DNA, 680 bp, Cannabis indica
ttatggaattttcggtaattccttctctaaaatggaattttggttcagagggacctgtaggaaccgaaatgccggttggtccccaggaaaccatgtagaaccggaattccagttgggaactggtctaccagttggggcagttttgggaaccctagtttttcccatttttgtgttgtttagggtatttccatgctattcatcgatagggaaacttttagtttcgagtttaagtccccagaaagtgatttagcgtgtcacttacctatgttatgattgatgtgacttaggagcctgtaattcgccgagcagttgttccactcaggttcgccggcacacttgaattcgcaatcaaggtaagattagtataatgttatccatctgttattacatgtttagcgtacatgttgtttatgcctgttagattacattgatagcagtaatagtgtacatagagtcgtactgattactgataaatgtatgttggctaaaatattgatcgatgctgtcacatcattatggctagagtatgactagcgtatcgagtataggctgacattatgatcgatagtattgtcgaatgaatgttctaaactaagtaccgacggggattagggttatgattgggtgtatgggcgccaggttataaccagggttatttgtatgttatatgtcatgctttt

SEQ ID NO: 368866 - DNA, 788 bp, Cannabis indica
agcaagatggaaaacagacgcaatgcagttcaaaaataagccctacggctgaaagctaacaaaggacatggaaaagaagagtcccataagtttcaaactctatggtttcctaagcgttctttatacaacatagttacattcaaagcgtaagcatgcaaaggaaagaataaagggaattagaaacttactcaaagattcgaatgtccgggttcaggcaagccagcaatcgtctgtaggcacttcggcaactctgaagccagaaaactctctcttttcactctagagtttacttagcaacgaagggtgataaaagtgagtaatgtgcagtactccaagtatttataggcaaaaagggtaactgtacataaaggaaccttagacacctcggcttcctgcctcaaaagcgaatatgggaaatcaaaagtaatcgagtgcaaccgtcagccgaggagagagaaattagctgaaaaccgaagggacgcccagccagcttcacatcgagtctcgaacggtcatgctcgacacgtgtccccatccaaaggtagagtcagctcggaataagtctacacgcaacctcataggtcacgtacagacttgggggcaaatgttatcccaaatttagcactctgatgtggcatcacgagaatggtgacacgtggattccacttggagcatttgctaggaacaatatgccgagcaggatgcctcgctggcacatccagtatcgaatattcaacgagccgtgcagaatgatcaacacttagtgaattcagcttaacgcatcatga

SEQ ID NO: 368867 - DNA, 653 bp, Cannabis indica
gttttagtaggtaaattatgttttcatagagtgatttgagctggttttgatacgtagtttgttggatgagcaagatttgagtttttgaactcaagcttggctcatcaatggtgattttgaattctctgtatgggtagttgttttatcacttggaaaatgtttattggggtgtattatgcaggtctggaaagtttggttgggtttggaaacgatttggttaggggtttgaattttgttggttttctaagtaaaaccggttacccgaattttgtaataggggaaacccgttttttagcttgtcgtttcgtgtcagtttcaggtttctagttggttagctccctgctagtttagagtattaccatgttaagttgcagtagataggtttaaagatttggcagcattatttctatggagagaggtgtgaaatttacactgaccataaaagtctcatatatttctttacttagaaagatttgaatatgaaacagaggcattggttagagttggttaaggattacgattgtcaaatcctttaccatcctgggaaagttaatgtagtggctgatgctctgagcagaaagggtcccgagcaggtagctaatatgattcaaatctcacttcaattagcaaaagatatggtcagatcaagcatc

SEQ ID NO: 368868 - DNA, 1419 bp, Cannabis indica
tcttttactttgatgcttggctctgccaagcgttccacaggtactacccccagtttctcaatttcgctgtccgaagctaacttagccagacagtccgcatgagcattcttttccctagggattctttccactttatagttcgtgaactcgtggagcagttcccagactatcaccacatatgcggccattttttctccgcgtgtctgatattctcccaacacctggtttactaccagttgcgaatcactgtagacttctactcttttagcccccacggtttttgctaatctcagccctgctatcaggacttcgtatttggcctcattgttagaagctgagaattcgaatcgtagggctgcttggagtcgaagtccgttcggggatatcattgagacccctgctccagatccgttctcgttggaggcaccgtccacgaataccttccacgccgggactggtggtgtgggtatgtatgcagtagcttcagcttcattgcactccgtgatgaagtctgctagcgcctgcccttttatggaaatgcgtggaacgtagtgtagatcaaattggcttaactccattgcccatttgaggagccttctggatgcctctggcttttgtaagacttgccggagcgggtggttggttaatacccttattgggtgagcttggaagtaaggtctcaactttctcgaggccatcaggaggcaaaaaactagtttttcgataaccgggtatcgcgtttctgctcctatcatgcgcttgctaacatagtacacaggatgctgagttttttcctcttcccgtaccagggctgcgctaaccgcattctcagagacagccaagtatagaaacaagtcttctccgagaacaggcttcgataggattggtggctttcagttttttgaatgcctcctcgcactcgtcggaccattcaaatttttgacatttcttcaagatgttgaagaagggaatggatttatctgtggatcgagagataaaacggctcagggcagcaacctttccagttaagctctggacatctttatgcttcttgggggaaggcatgctcaagagggcttggattttttctggatttgcctcaattccccactgactgacgatgaagcccaaaaacttccacaacttaactccaaaagtgcacttctttgggttgagtttcattccgtatctccggactacttcgaagcattcttctaggtcatccgcgtggctagtgcacgcctttgacttcaccaccatgtcgtccacgtatacttccatatttcgccccaggaggcctttgaacatctggttccccattctttggtaagttgcaccagcattcttcagtccgaaaggcatgaccaggtagcagtatacccccttatcggtcctgaagctagtgcactcttgatctgc

SEQ ID NO: 368869 - DNA, 570 bp, Cannabis indica
gtcgccacaaacaacacatctgccttaaccacattcatcactacccttgatgcacaattcaaattaaaagaccttggccctctccacttcttcctcggtctagaaattgcacgatgtcctcaaggcatctttgtatctcaacgaccattcactattcaattgctcaaagattctggctgccttggttcaaaaccagtgtccactcccatggaaccgaacattaaacttagcactgaaacaggggacttactaccaaatccaactcaatatcgcagcctcattggcaagcttctatatctcacaataacacggcctgatatcagttttgccgtcaataaattgagtcaatttttacaagcccctcgacaacctcacttgactgcagccacaagaattttacactacctaaagaattctccagggcagggcctatttttccacgcatcatcatcatcaccacttcacctaaacgcttttgctgacgctgattggggagcatgcctcgacaccagatgctccatctctggctactgtgtatttcttggccaatccctaatctcctggaagtca

SEQ ID NO: 368870 - DNA, 646 bp, Cannabis indica
ggtaaaataatttccaacagcactgccgcgatatgtacaatcactaccaagcctcaactcactgctcctctagcttagcttttcctttccctacacaatgtagcaaactaatgagtcgacagactcagtaagatatgcataacatatatgaaagcatgctctaccggctttatgcttaagccgacttgagctcatcaactgagctcaccaaagggttaagaacgttcttaatggaagtacgaccactgcaccatatgcactagagtaccaactctgtactcgtgttggtagagtcttcactgtactcccatgagttactaagtgttgtaccacatgcacgacgtaccccctggtactcgtgtcggtaacactgtaactactctaaaatctcacactgtactaacacccttaaaatcatatttccattagtgttagtagtgtaaacaactactaaaatcatacattcagatatatatattatttatgctatcttaccttgttccagattcaagcgtgtcggtcgacttgaatggaaaattctcgagttgaacggaggtcctaagtcacattgcacaattgggtaaattccttgaataactattccgaaaccctaactcaaaaccaagggtaatcttaatgacatatt

SEQ ID NO: 368871 - DNA, 645 bp, Cannabis indica
tatgtcttatttatgaattttcactaagcaagggcttaattgtgaagaaaaaaagtgttgaggttaatttattaattaagagactttgtatggtctaattaataaatagtataaatgataattaattataattattaaataaatagttttggcatttataggattgaattggaaaatacagtattattgaaagaagaataagtggtcgaaaaaagtagcaaaattgtaactaaagattggtcatttacggctgaccctagtgttgaatttttgcctaatattttattcttttttaatccatataattcagccctaagccttaattgaaacactataaaaggaacatgatgctctcatctcatccgcttgtcaacttgactattcaacctaccaaacctagttttcattctctgacaacttatagatgagagacaccttgaatagtgatttcaaacctccttcattgtttatctaatttgaaaccttgagtgaaagagtgtcatgcccacacatagcaagtcaagtactcaatcatagtgagcaagacggtggtaaccaacctgaaggggaaaaagagatccaggttcagatcttaataatgttctgcgacaaaaaggaatcaagggctagagatcttgaacggaa

SEQ ID NO: 368872 - DNA, 643 bp, Cannabis indica
tacttgttttaaaaaaaaaaaaacctgttctcataataatttttacatgatattggcacttcaattcgataatcatgttccatatactacactggttcacttacctatggtaatttagtttttgatattgagaatattattttaaaataaaataaataaatataatgcatttgggccctccacgtgtccatatttatgaattaataacggaagtggtagtaacagtgtaaaagaattgtaacattaggtatttttgctaccaaaaataaacattaggtatttaagtgtataaaataaaaaatattaggtatttatgacgcaatttaccctttatattaaaataaatagactaaaataagtatctaaagaaagtacaactctttaaagtaatgagctttagttataaggatattcgatctccattgttggtcctacatggttaatatgttttcaatataacctcgagacgctagactttgttcccctaatggatggttattcgttgaagcaattaacaccgtaacaatctcttatgataagtattttgtaagttttcgtctctattaaactcttccctacggtgactgcttagagataaatttacgaaatatgaaacagtggtggaagcttattaaataagaat

SEQ ID NO: 368873 - DNA, 779 bp, Cannabis indica
aaaatacacaaggataaatattttactatagtattaatgtaattttatttaaattatacttgagttggattgtttggaaactccagttcaactttttgagatttgcatttcatggatctgaaaattgaagtcatgacattagttttaggcgcattaaattggatttcaagttgaattttagtttcgtagtagtttttatgcacttttttttttcattaattcgaaacaactcctattttgattaattccggtcgtcttctcaggtaaagttgctggaattaatagtggttctcttttttgttggatttcgtttcggttgtgttgggttgctgggtggttgcccgaaagttgcattagacgaatgtttcaatcccaagaagcatggatcgtgtgatgaaggtgtgtgtaagtggtatttgtgtaatttttttatttgggatgtatatttatttatttggctgattggaaatatttttataatattattactttttttagttaaaactaaaaaaaagcccataaatataactaaattcatataaataagaataattaaaaaattggaataattacataagacaccattttttgtaaaatatttacattttatgtttaaagaatattttttttttacatttttacggctttccaaaaaataacacgaaaataacataaaatcaacaagaaaactacataaaagtaacatgaaaataacaacaaaaaaataacatacagataacaaaaaatcaacaacatattaacaagattacaacataaaa

SEQ ID NO: 368874 - DNA, 504 bp, Cannabis indica
ttgttaatccaacatacatgatagtaaatagatcctggtaaaataatttccaacagtgcgagcctccaataatgacttgcaagtgtccatctatcgtggaggtagcagatcctgcttgttttgaccttggttggccttgacatacttctacaagtgcgggttttttttcttgatcagatattctatttctcgcttcaggttgtaacattcgttggtgtcgtggccgtagtctccttggaaccgacaaaattttgtcatgtcccttttgttggtatctttcttcatgggcccgggcttcttgtacggaattaacgactgagttgccatatacacactctctatatcttcagttagaatagtgaatgcagtgggtttggcatgatcacggggagtctgtccggatttatttgtgaactttcctttcttcctatttcattgcttgaacacttgccacttggattgttggaatagttgaaataccattgttgtgcggcctccgacaga

SEQ ID NO: 368875 - DNA, 1168 bp, Cannabis indica
tactaatcttacctcaattccgaaattcaggtgtgccggtcaacctgagtggaacaactactcggtgaattataggctcctaaatcacatcgataacaacacagataagtgactcgctaaatcacaactgggacttaggttataaaccaaaaacctatctactgcaacttaatatggcaataccctaaactagcagggaatcaaccaactagaaacctgaaactagaacgaatcgacgagctagatttttcgggacaccctactgcaaaattcgggtaaccggttttacaagcattagtaaacccaaaaacatccaaaccctaaccaaatcgattccaaacttaactaaacctttcagacctgcatattgtaccccaataaacattttccaaacaataaaacaactactcaagctcaaaattgaaaaacaccattaaagctccaagtttaagttctaaaactcaaaacttgaataaaactaccaatatcccttaattcatgctcaaatcaacacaatacatcataactaaacctctaaaaaataatatcaaacaactacatcaacaacagtaggaaaatcatccattcatgcacaaactctaaacttgaaactcaagaactagggaggaagttgcaagagacttacctagagatcaaggacactcaatccttgctacaacaagcttaaaatgaaggaaaaaaaattcagcaaccctagctgcttccatgggggtttcgaaagagagaggcaaggagagagagaacccttttcttgattttttcttatttttgaaaaatgagtaaaaagaatttggttttatctactaaatatcagcttaacattaaccttaaaaatcagatttaaaccaataataaattcagtaaaggacaaaagtcatttaggcaaaatgactattttgccctttttacactaaaagtcataaaatggcactaagggatattttgagaaattctaaaatcccgactaatctcgacattcccaactgtctaattatattgtcccgctatctaaaaatactaggatgtgattctatagtcaacaccgcgttcactattaccggacacaaactaatgcaaaacttataaaaatttttacttatatatttacatataaaaatagcatctgaaattcaaataaatacatcat

SEQ ID NO: 368876 - DNA, 669 bp, Cannabis indica
tggaaccctaacatggataccaggttcttggaggagaaggaaggggaaactttagctctttgcgagaagaccatgatggaggaagaagatggtgaggtcgaggaagaagaagaagatttgtccaagtctcccagcatgtagacttggtttatttatctcccttttcttttttggaaatggtcctttggtcgagacaatggttttgcccctagcggcactttttggtaaagataggtttgcaaggttggatggccaactttgctttttaatgcctcgcttttttaagtttaaactttattattcggatgtttgcttgcgttttattcacaatataaactatcacatgcataaagtttattaggggtttctattgcttgtcctttcctctgacgttaagtagttaatttcctactttacgtgcaagcagcttatttgcccgttcctcattctgcgagccatcatcgattccatctcgcggtcatcggaaatgatcttatattaagcacattcaaatatatttttaatgaacttgtcatcttgtatatattttcattgcttacatgagtagttaaattttctactcacgtgttaggtttaagtattttttcaagacaattggatgactcgttgaatacttttccttagcgcgagccgttagtatttagcttt

SEQ ID NO: 368877 - DNA, 584 bp, Cannabis indica
atttcaatgttaatttttatatacacatatataatttacgtataacaatataaaatttaattactcatccaaactaaatgaaaatattaattagttcgattgaatgttagatgtattggatttttgaacacctcatctaacgagattatttcacaaatacacaaaaataacaaaaaaaaaaaattaaaaaatatggtttcacagaattttaaatatttttacgaatttttttaattttatttacaaaaaatacggtctttttatgttgtactcttgttagtttattgttaattttttattatctttatgttattttttgttgttgttttgatattattaagatgctattttcgtgatacttttatttaatttttctgttgttttcatgttgtttctatgaaaaaccataaaaatgtaaaaaaacatacaaatgtaatttacttccatcataatattttttacggcccatttaaaagcgtttacactgatgagaattaattcattatcttgcaacaatttcaaacagtttttttttggaacttttattaatattatacattgacttatttttttttttttttgaa

SEQ ID NO: 368878 - DNA, 518 bp, Cannabis indica
tggatgaaagttcaggggcatgagttagtatatgtcaaaattcgatgggcatgatttggtagatatcaaagtttggggagcatgatttagtatatgaacaatcactgaaatagtaaaattgaatgaatttaaacaaaaatccttaaatctaacaatcacaatagttcagggggaatttttaaaggctagaaaaattcagagggcataatttggtacatgttaaagtttggggagtaaaaatcttaattagccttagaattacagatatagagatagatatacatcttactcaagggggaccatgaccgttgttagattttttgaaacttaaatatgtatggagaagatggggatattatgatgatgtgtcccctctccatttttcccttatttctttaacaccatgagatttacctaggtacaaaatatatatggcataaatgtatattcccaactaaggggtttttaatgaaaaattgaatgaatttacttatatgacataaataataatataaaaa

SEQ ID NO: 368879 - DNA, 631 bp, Cannabis indica
acacctttagaactatggaatggtcgtacacctagtttacgccattatagaatctgggggtgccctgctcatgtcttaagagagaaagacggcaaacttgaaaagaaaactgaggtttgcatgtttgttggaaattctaaagacactaggggtggactattttatagtcgaaaggatgataaagtgtttgtttctacaaatgccactttccttgaagatgactccaaagagaaggctttccatgaactaaactttccaggggccaacttgaaataccattactgagcggcttccgacagagtagcaagaaaaatactgcagcacacaacccctcgtactccttgcaaatccatttgcatttcgaaatacttgaggtgggagagaggatcttctctccctgtgtacatcttccatgttggcattttaaacttgtggggcagcgccaagagattgatctcgggagagaaaggcatgtggcgtgctcggtctaactcaagatcattgtttctctgtcgagccatgccatggaacatatttttcagttcctcgagctgtgcatgtacggctgggctaacttgctcggcattctggtcaatttgaatcatgtctgcatctttttgagcgggaattt

SEQ ID NO: 368880 - DNA, 748 bp, Cannabis indica
ggtagtcaggtcttgggtttcgggtctaaggtcgggtcctatgtctcgagtttggcgtcgagttttgggtctcgaaccccaggtttggggggtagttttgggtccaagtcccccatctaggtccagatcattggtccaagtctgggtccaggttcaggtttagggcctaggtcccccatctaggtcatagagttcggttcccaggtcccaattctgaatcttgggtcctgggtctcggtcccgatctagggtcccaggtcccgatcccaatccaagttctagtcccagtctagagggctcggtcctagtctaggtctgtgtcccagtcctgatctcgatccgggtctgagtctcgggtttgagtctgagtcctaggtttgagttcgaattctagtatgagtctgggtttgggtttgggtttgggactaggtcttggtcttggtctaggtctgggtctgggttcgggttctggtacgggtctaggttctagtctaggtcccgggtcccgggtcctaggctgcatgttctgggtcgcaggacctggcgcaattctaggttcatgtttgggtcttggtccgggtatcgatcccaatttgggtccacgttcgtgttcggttccgtgtctagatctagttatgtgtgcaggtccaattcctgttttaaggtcttgaatttgagtatgggtttgggtccacgtctagaaatggttccatgttcgggtcttggtacgattaaaagatcgagacac

SEQ ID NO: 368881 - DNA, 1001 bp, Cannabis indica
caaaagattttcataaccaacccatatatgatagcacctacaaaaatagaggacaccttatagaaaacaaaataaacaaaaacattggtgaaagaaaaattaaagaatcactttatcgtcattcaaattcctcaaagtcaataacaaaaaagggtaaagttgtaagtattatactccttttaggactctagagagctatgaaatcaaaaagtacctaaatctcaaatgagctatggagggaatcaaagatataaaaaaatatagagaaaaaataaaacccaaggaaaaggaaagggtctcttacctataagaccaaaccagatgaagcaaaaacacaaggacctgtggcgcataaaggggggaagagaagaaagggaaagagatagagagagagagatcgagctaaatatgagcttctctttgatacccaaaaaataaattgaagactatgtatgcattctagaaaaaaaaaaaatacacaaatcttggcaataggtagttgacgtctggagtaaaaataaacatgtgtcaagagtatcctttctacaaaagaaatatatttcatttttaaaaaatatatatttatttgcataaattatcaaataaataaaggttatttttgtaaattaactatgaaaggccaaaagatgaagtattctcttttttatagaagttatagatatatatatatactagaaaaaaaaaaactgcgtgcgaggcacgtatacttagttttatattagatgttttttactttatttaaaaatgatataattaatagttaaagaaaatatattattattgttgtttgaaattatttttaggtatattaaatagttatgttggaaattaaaattaaatactgaatgcaatatattaataattcttaaattaaaccaaaaataaaataaaaattaatgctcaaataataaagcaaacacaacttaaaattgtgtaaaataaaaaaaaattaaaaaataatctctaaattgttgataatt

SEQ ID NO: 368882 - DNA, 638 bp, Cannabis indica
atgagggttttttatgggtggtttgcgagggtttttccttggatatgggggctactatggctgttggttcttcatgttgaacattgtggtgaaatgaggaagacgaagctatgggttcttttatataaccctatggtatcggttatttggtattaatcgacgtcataggtacacatgtgtcgtataacgagtgcacctatatatggcgttggttaataccaaataaccgacgccataggattaataaaaaacccttaattttatccaacctccaaccgacgacgtaggtataattaaattctatacttacggtttttactaaaaatccgtctctaaatgtcaatttcaaaccaagtaggtattttcacactctttagcttccctttttataaaataagttgaaaaaacagactctaaaaaactcatattgtagtagtgtgataaaagtctcttttcttttttcttgtaatgatttttctttatttgacaataaaaatatgtatatattttaataaatatagttttgctaactgagaatgacgaaccataagcaagtcaataattttatataattttatgtatagcatcttaattttatcaatagatgcttagatgggtactattctcaaataattttt

SEQ ID NO: 368883 - DNA, 525 bp, Cannabis indica
gcaaattagctataaaagttaatgataccattaatactattgaaaatatacaaacaattaactttatttatattattttaataactataaaaatattttttttattaatgagtggcaaataggttattaaaaaggtggcatttattgtgggctaaactttggcacatgctatcttttgcgccaaatttagcacaatttttagcttgagccaaatttaacacacattttacatcaccattggagttaaattttagcaaaatattctaaaaaataaaaatacaccaaatttataactctccattagagatgctcttagagcactctaatcaaatgacaggactttcttgcctaatttcaaggaaaagggagaaagaattcactctgtttattttgtttgatggagagttcttgattcctgattaggaatcaagaataaagatcaggaatatcaaaaaaaaaatatatacgcatgattctttctcgattaaatctacgttacaaaagagaaatccattcttcgtgttt

SEQ ID NO: 368884 - DNA, 667 bp, Cannabis indica
gtctaattaatactaccactcatcctctacccaaaaagaattaaaaggaaaaataaagttaagttaatcaaagctaattagcttagcttataagtctttaataatactaatattaatagactatagttaatataataatatatacccttcatgtcatgcgtggctacgagaagggtgaaaaatattgtaatgatcatagttatcctatcccatctctccaatctttgagctatatttgacttgccttggtgaatatgtaataatcatgcattataaaaatgaaattgtatatatattataaaccaattaatcaatgtttgaaaaatgcatataactaatgagagttggtgtgtaactatttgtggattaattattaaagtatatatatagttattcatattagtatttggttttaattatattattatttgttctattaaaaatgactgattgagtaaagtaacttatattcatattgggacaatcaatattgacgagcctctaggtctctcttcctttttaaccaaataataattaagtatatgttaatttaattagctgtgtgttagagagagaggtctatcaaaattttgagtgtgttggaaaaaattgagggtcattcctcatgagaagtcgtcatgcttgacgtttttttttgctaattaac

SEQ ID NO: 368885 - DNA, 737 bp, Cannabis indica
gtttcgccagttgtagatcgaggagttgtattataagaccataggacttgcggtaactcgtctggccaagcccctttgcgatcttctagtttccctttaatggtgtgttttattattttgttaacagcttcagtctgtccattgctttgcgggtaagcaaccgcggagaatgcctttttgattcccaaatcgtcgcatagttgtcgcatctctttacaatcaaactgtcttccattgtctgagatgagtttgtatggaataccaaagcgacaaattatggaggtataaacaaactcgcgcaattttgttgccgtgatggttgcgagtgccttagcttcggcccatttcgtgaagtaatctactgcgaataccgcatatttgactccacctttccctttaggtagctcgctgattaagtcaatcccccatactgcaaagggccatggacttgtgatagaatggaggtcacttgaaggttggtgggtatatgtggctattcgctggcacctgtcacacttcttcgcaaatgcgatacaacctttggctacctcgcgaagtatataaccacaatcttccccgctgatgcatttgagtaaaggttgactaaaacttatgcgatacaacctttggtcatatattacataacgggcggctcgctgtcgcagttttcttgcttctattttgtcatcaggcaagagacccttttccagatatgcgacgataggagtcatccaggt

SEQ ID NO: 368886 - DNA, 547 bp, Cannabis indica
aatgtattgcgaggcaacagaaattgagtggacaaaagaatccgaggaggcctttcaaaatattaaaaggcatttggtgacgcctccagttttggcaaaaccagtgactggaaaaacattactcctctatctggcaatctcagaagacacgattagtgcagcaatagtgcgagaagaggcactacaagaaaacctaattttgccgacgcatttttgtgccggcaaaagtacactaaaggtgccggcaaaacatgtctgcgaatcttggtcggtaaaggactttttaccggggcgtaggtaaaatgcaccggtaaaggtgaatcgccggtgtaaaaggatacccttatccgttatgaacctgctttgataatcttttgccggcgcaatataacaccggtaaaaagaatcgcgccaatcctcaaattggcacgaaaagttttaccggcgctatagatgcaccggcaaaactattcaggattggcgcgaacctttttgttgctaccttttgaaactatttttttaaaaaattaattaattatatttaatt

SEQ ID NO: 368887 - DNA, 1324 bp, Cannabis indica
atattaaaaaaataaaattgttaaaaattgagctcagagtcctaattttaccattttagaaaatataaggtccattttatcatttaacaaaacagatggtcaaattgataacttttacaaaacacaagttttaaaatagtatttaccattatttagactaggaaattaatgccgaaaattccacaaaattagcaatatgattaatcataatcttccctataatttctgatatcaataagaatattcactattattatggtaataatatcattgaccaaatttacatttattagcaactatcaatagacaatatttaaggtataaatttttttttctttttttttaaaaaaaaataaaataaaatagcaacttcattaaaatttagtattcaaagtacaaaaggccttaaagatcaggcggtaaattctaaacatgaatgctataaccagataaaaatcgagagtgcctagccacatagctagtgggcaacttgattaactgatcgtttaagatatcacttgtcgggaggtttagaaatgctggaaccgtgtgggaatcggcaccatagtgaatgctggtgcgagtttttttgactggtgtgctgctactttctgcaacaacacggctgaggtgaactgcagagtggtggccatctgttgggccgtttggggagccagaaacaacctggtttggaataataaaccttttgtttttgaagatgttgttgcttttgcgttttgctaccttgattaatggaaatctgctcagaaatcctcggattcatcttggccagtccttatggctactgatgtttgtgagcagtggacacccccggttgataatagcatcaaggttaacgtggatgcggctatctttgaagatggtaagagctttggtttgggcatggttgcccgaaactctgttggttttttggttgaaggaaggttgaagcttacctcggctcaagttgatgtggttgttgcagaggcaattggcatccgtgaggtgctgagttggttaaaagatagacaatggccccaagtcttcatcgaaactgattccctatgtgtggtgcaagctcttcatagttcaattcatatgatatccttgtttggtagtgtcattcaagattgtaaaaatttgcttgcttcttttcataatgttgttgtgtcttttgttaagcgatcagctaatgtagtggctcatacctttgccaaagctgctagattatattgtactttcagtttggagtctattccaactgagttgctaccttgtttggtagcggatgtgagagtttaacttttcaataaagatgaaattt

SEQ ID NO: 368888 - DNA, 732 bp, Cannabis indica
tcatgaccctctcaatagcatgccaatgctctatactaggtctactggtaaacctgcataacaatcccacgacataggcaatgtcgggtctagtacagtcagtagcatatcggaggctgccgattatgctagcatactctgactgtcttactccatctccagtgttcttgaataattttacacttgggtcatatggggtacaagcaggtttacagttaaagtaattatatttctttagaatcttctcaatgtagtgagattgatctagagaaattcccttatcagacctagtaatctttattccaaggattacactcgcttctccgaggtctttcatatcaaagttggaacacaacattgattttacagtgttaacagcatgaatgttagagccaaaaatgagcaagtcatcaacatatagacatatgattgtgcatatgtcattttcagatttgtaatagatgcacttgtcactttcgttcactttaaagccatttgaaatgactaaagtgtcgaatttttcatgccactgtttaggtgcctgctttagaccgtacagagatttatccaacttgcaaaccatatgttcctggccagggatcacgaacccttcgggttgatccatgtagatttcctcttctaagtcaccattgaggaatgcagtcttcacatccatttggtgcacaactaagttgtgtatggcagctaaagaaattaaaactctaatggatg

SEQ ID NO: 368889 - DNA, 555 bp, Cannabis indica
gggtagttattgtattttgcaaagtatattttgtctttttctaacatctttctaaatttggagggattaaattttgaaggtttggagggagaatgtctcccttcatctgtcctctcccttcttctttccttcccaaacaagtgatttagtctctccttccatcactctccctccaaccctctccatctatcaatctccccctcctaccaaacatagtgcaagaattgataaacatagacctttattgatgttaaaaccagtataagagtgtgttgaatacaataaaaaaaggatgagcagaaattactatgaacctcaccaatgggaaccaagataagttactcttagttcccttgtacatccctccttttcactctatttattactacaatctgaatttacaacataactaaaaagtgtattacattgtctatttatagtatgtgaagttggctgtttgttgagacaactaactcggataccaattatcaaaacagttagtgacacatcaacaaaggataaaacataaaaaatggctgaactaaacaccacaaa

SEQ ID NO: 368890 - DNA, 529 bp, Cannabis indica
ttttatgaaatgaaattatgtattttacccaaatttaaataatatttaatttacattttaaaaaataaatatgtaatttaaattaaataaaataatatataaattaataaatatataattaaaatgtaattaaaattgtataattaaattaaaaaaaatttgaaaaaattgaaatgctcttgcttttggcgtcggttgctacgacacatatggcgtcggttcatataaaccctttagcgtcgctctgatcagtgtcggttgcgaatttcgcaaaaactgacgctgaaagggcttaaaaactgcctctaaaggggggtttttgtagtagtgtttattaaccaataaaatgaaagaaaaatagaggttcccactccaactgttgatgtttttattgtaaattcttaagtgatccaaatcactttgtcataataataataataataataatacagcgtaatataatagtcaaaattgattaaaaaaaaatgacttgataaaacccctaaatttattgatgaataaaagaaaa

SEQ ID NO: 368891 - DNA, 819 bp, Cannabis indica
gtggcctatacgtcattgtggcctggaaatgtgtgaggaataagtcgacgaaggtctcccacgtcgatatcgacgcctcaggtaattgggtaaaccaatcgtgggcattttcctcgagtgttgccgcaagaatgcggcactttgcgagctgtggtacctgatccacttccattatagtattaaatttttcaagataatctattgggttagaagtacctttatatttgagggattcggatagacgaaacccctttggaagctgagcttgtcgcacttctgtagtgaagggcgaggtaccatgcaacttgtatatgggcttccgttgctgctcgagcattttcaaagcctgcagaagcatgctctggtcaatccctccagtcgcaggagtcggggctgctacgactgcgggagtcgcaactactgcggcgagatttgctgggacatcgatcccagtggtcgcgatcggcgcggtaggcgggttattataaatgttgacaccctgatcgtccgcatggggatcacggagtgtctcagtattacgcggggcgcgagagcgtgccctaaaaactgcgttgaggtgatcacgcagatcaccccgatgtacctggtaatgtcctccctgttgtgtctgtacagagccggaccttgtgtatctacttggagtacgaccatgcgatgacgaagaggctgattctgcgtcgttgtctcttgatggtcgactgcgaggatttacaccgttcagggtcttcatcaacttgtgtgctttggttgggtccttgcagattgatccctcgaagttggatggttcaggtccaaacc

SEQ ID NO: 368892 - DNA, 747 bp, Cannabis indica
caccacgattttatagtatattgccccaattcattggtaatggggccatgtctcctcgaaattttattaatttgatcaacacttaaagcattcagtctaagtcgtgatagaaaaaatgcttgcagaagcctggcttagagcgtttggccttaattcaggaaaaaacatgcacttagtttatcagatctctattgtaatgtcctcactttaagcctcaattgggtgtccttccacgaaattatggctctaatacacaggtaagtcattttggctgcttcttggagtgacgactgaactttcaaaccaacatgagtatttctaacatgctttgtcctcactcgcacgcttcttaggaaaacttcccaggaggtcacccatcccaaaaaatctccaagtcaagtacacttaactatctaggtagtactaattaatctacttaagccttcttcaactatctagtcacatgcctacatagtctaagaatcatcacacgtgaccctccccaagcaatgtgagattgcacagcctcctcagtctttcgcattacaaattacgcgcctacttatgttacatctatagttctctagagattacaaaatatgaataatgaattgagtgagcctatttttggaatacgaagttgtatatttacatataaattaatagtaaaatattcaaataaatattttatttgtcttcaaattgatctgaatcatgagggcacaccatccaaatattgaccataga

SEQ ID NO: 368893 - DNA, 798 bp, Cannabis indica
ctcctcctctgcctctggtgcggaaaccctaggagcccaaatataaagcaacaaagaaagtatagaatcgacctcctgagtttcggaaactacgaaaataccagcactttgggtagggctgtagagtagttgtggcctcgctttacggccccataattcgagccccaatcgtcaattgggctttcctgtccctttccggtccaaagtaatctatttccatggcccgtttttaacgaagttttcacaaaatatttcttttttttttttttttacttatttgttattttttacatttttactgttatatttttttttacatctttactgttgtaaaattttcaaaaatactgtcttaaaatttcaaaaataacaaaaataataatgtttcaataaaacaaaaaaatcaactcaaatcaactaagacaactaaaaaataactatagtatgcagattgcagatgctttctttggacagggaagagtgtaatggcaggggttggatcagttgcttgggaaagtttatgcaacccgagaaaagaaggaggactaggtttgttgaatgttgctaaatggaatgttgcaacaatgtttaagcatgtttgggcagtggcaaacaagaaggactaggggtgttcgcggtgcgggtggtgcggtttttgaccattttttcaaaccaacccgcacatgcggtttttccaatttcccaaaccgcacccgcaccgcgaaactaaaaacccgcaaaaaccgcaccgcaaaaatagtgcggtgcggtgcggtttttgtggtttatgcagtttgg

SEQ ID NO: 368894 - DNA, 507 bp, Cannabis indica
aagttttttgttcattatatatacggaaatatcaggtaatttgtgcaatcttacatcgcttaggaaatgtcaagtgtgatgattctaaaactgtgtatgtgtaactacgcagttgaagatgacttaaaatggattgattggtactatttatatcaacaaggtacatcttctttttaagtagcctatcacgaaagaactccacagttaagcatactcgaaacattcgtgttagtctgtagaacgagttgtcagtccatgaagcagtcagggtaatacactcgtgtataaagagccataaatctatgggagaatgtccaatagaggcttgaagcggagacgctacagaaagagagggctcgaacccttggttggtcgacgatggtggctcatcagagtcatactaagaacaacgaggaagagagagggagacaagttgagaaacaaagagagaaaatcgaggtagggtttttgggtcttggggttttctgggtagggggttcttcaatt

SEQ ID NO: 368895 - DNA, 652 bp, Cannabis indica
accaagcataccgtatactctgagtaatccactataaaatgatactccggattacactatgaatttgaatatcagttcaaatatttgttttatttttattttattaatttattatatataaataatattttattattttattaaatataaataaaaaatcacccataaaattctcataaaacaagaattcagttatataggcacactttatatagaatagatatatatataatcatatataaaaagatattaaggcataatttttcatgaaaaattaaaaaattagtatttagttatttaaatataattttattattaagaaaataaatacatttttattttatatattaatgtagtaaattattatattactattttattaaacttaattaatttgtttgaatttaaaaatatatttagtaaattatttaataaatagtagtaaaattaactaattatattattcttaaaattaatatgagtatttttttgtttaagaaattacatatcattattaattttggtaatattaaattaaactccgttaaattttagcgtaacactcgtattttatttttaatataatgatttgattcattttttaaaaaaaaataattgtaaaaaatttaaaaatagtagtattttttattaa

SEQ ID NO: 368896 - DNA, 1519 bp, Cannabis indica
agcttgctgaggcggttcctcatcggaggcagggtgccttgggcgccggatgggtgagtcctccgtctaagatttcagaggcacgcctccgcactctcgaccaggacggatacctgggcgagctggactgcttcattcctgcccacgacaatcgcgcttcaaaccctagtgaggggatgtgcgcctggttgggggctcacggccagcaaggggcgttgatgcccttgtataagtacctccgggatgtggtggacttcttcggcctctgcccgacccagatcactcccaagggcattaagtattgtctaccctcttcgtcctctacgcttctcagggatggggcgttccttctcccaacaaggtcacttggttctttgacctgaagtctacccccaagcaaggcaggtcagggtaattttacttctctcagccaggcttcaagtggttgagcggaacggacaacaaggccatcagcaaaatagggcgttttgttgatgagtacttcatggtgaaggatccgaatatatcccggactcggtttcaacagattctgacatatcaccgtcctcccctcactcttacccttagggatagggctcagaagcttgcccagtttccagcgaaagacagggatattatccagttgacctccgatgcaaatctggtgcggtatgggctttaccttgcggacttttcttctaagtctgtgacggggaagaagaggaagtctgctgctgctcggcctgaacgagctcattcagaggatgagctgattcaacttaagcgcgaagctaagttgaagggaggtgcccgggcaaagcagtatgctcaggagtctatgaatcctgaagatgaggccgaggctgaggctgaggctgagcaggtgactcctttaaggaggaagaagaaactccggccacgcccaggcccgttgaacatgccattcgcataagggagcccatttcacctgttcggccatcccatccttatgttggaaaaggaaaggccgttacggctgagatatcaggtgatgatggacttctgactttctgggcggacagtcactctgcgctttacttcttttttagcttcttggcttccatactttgtattttatgttggtttttgctaaccatgctgtttttgctcttgtgtagacatgtctcggcagatgatggacgccttaaggaagaggatgagcgaaggctctagtgcttctcctccggccaagaagtcaaaggccgaggaggggtcttcagcgaagaggccttctggagaggtcattgacctttctgaggagctggctgctgcaaatccttctactccccaatctgccaagtctaaggagtctgggtgtaaagaccgcttagtttaatttggaaattagcagttaattatgtttaattatggaaaattatttatagatatttaaataattatttatgctgttattattgaattcggaaaatatgtcatatagtgaatttcataattttacatttccggtgcccggtaacat

SEQ ID NO: 368897 - DNA, 494 bp, Cannabis indica
aaacaagtcatcaatccttggtaatggctaccgattcttaatagtcaccgtgttcagttctcggtagtctatgcacattctcatagtatcgtctttctttttaacaaatagaactggtgcgccccacggagagtagctaggtctgataaaccctaacttaaacaattcttccaactgtattttgagttctttcaattcagatggtgccatcctatatggtgcgcgggaaactggtgctgtctcgggcactaattctataacaaactcgatttctctgtgtggtggtaacccgagtaactcctccgggaatacatcaagaaactcagcgactagccgtgtttccttcgactttctttcaattttcttggtgtcatcaaccacattaactagatatcctaagcacccacgctgcaatagttgcccagccttcattgccaaaataataggggtgtggggtttctttcctaccccctaaacttgaatgtctctccatc

SEQ ID NO: 368898 - DNA, 682 bp, Cannabis indica
aaaaaaatagtctaattttttcatagtctcatatattgtaggtattttttaggactacttattttttaaaaaattctaaataatttagttataaaattaaaacccttatttaatattacacgtttttaaaaaaataattatatgtgtaataaaagatttaaattttatttttagtactgtaaattatttaaaatttcttaaaacacaaataattttatgtaagtacaacgtacacactcataaaaaataatgaaactaaaaagtgttttttgatatccaaatttatatggatatacattatttaggtgtaccatacaattactattttttttacataataaattatataagcaagcaccccaatattaaaaagaaaatcaacttaaattaatttttaaaatttattcttaatatattcttttacagtattctgtgttaattttaataattttttttttcttttttcttttttctaaatttcttaaataatattttttttattcttagaaatttgtatatttctttttctttttaatatttaaaatatattttattttattttaaatatgtactttttttaaaaaaataaataaccagaagaaagtattttctttttaagtaaaaaagagattttataaatttaatttaattttttttattaataattattaatagtattata

SEQ ID NO: 368899 - DNA, 574 bp, Cannabis indica
ggacttggacttggaatcaaaattaaaattggacctagatcccgaaccctaaccggaccaggacccggattccaaatcagacctagacccgaattgcgagccggacccggatccccacccaaacctagactcaggacccgaacctgaactcagacacaaacatggaaccagactagggacatagaaccaaggtcagggaccaagaaccgcaccccagactcaatcccgaacccaaactcagaaatgcgacatgggacctaaaccagaacttgaccaagacccgtgacagtgatccagatattgactcgagattcaggtaacgaggcttcgaacagaccagttgtcggtgtctagatttgggactcagataaggaccagaaaccagacgaagaaccaaaccaaacccagacctagacctagaaccgaacacacacctaggccgagacccaaactcagactggaactcgtgcccagacacagtcgtgtacccagacagaaactgagacccggacctggtcctaaatctgggacccgatccctaacacatacttggacctagatagggatccggata

SEQ ID NO: 368900 - DNA, 522 bp, Cannabis indica
aattattaaaatattatactcaattttatttttaatactttaagtgctaaatcagtatgtcaatttcgggttagttcaaatcatttagtttttttaatttaaaaattaaataaaaactagtttaaaatctaataacaattataaaattaaaaacaaactaacttttttcttttatttctccttcctcatggtgttcaaaaaatatttgaaacaagtggaataaaattacatagtgaaacaatcaccgaaaaataacattgattgaggaggtggagcctcttatctctgaactctccacgctgattgattagctgtaattttatttatatttctagataatgtaattttgcggcttataatctggctaagtgagcttttgctaaaaatatataactgagatggtcgatcttgtcgagattccaaataacattttattctagtttttaattttaatttaaactcacttttattcaaaaaaaaaaaaaaaaaaactaccaccatgaacttggtgttttagttttt

SEQ ID NO: 368901 - DNA, 527 bp, Cannabis indica
aattatcattttatggagatttatttaaattcaagatgtattatttatgccatatatggaattttacgtttttatgttttgtgcctggcaacatcagaatgcggcgttttgcctttaaaatcacattttggtattttggtagtagtgggacaatatagctagacattgggaatgtcgagaatagtcgaggttttagaattgaccaaattacctctagaaggtgtttagactttttggttgagtgggggaaaatggtctttattccctaagatacttttgtcttctagtggaattttaggtgtgttataatctaagattagtgattaattaagctagatatacattagatttattcattttatccaaaaaggaagaaaatcaaaagaatcaaactctttctctctccaaactctctctctctctttctcgagccccctagaaccagctagggtttgggaattctgttggaaattattttaccaggatattagatctactcacaactatgttgattaacaccctaaata

SEQ ID NO: 368902 - DNA, 563 bp, Cannabis indica
atttagttagtgttttctaaaaaaatattgaccaaaagtaatatgttttttaaaatagaaaacaacattttgctattttcaaaaatcttattttttgtaactttgttttctgaaaactattttcaaaaaataaggccaaacaaacctagttgttttcaaaaaataattttttgtttttaaaaacgaaaaataattttttagttatgatgccaaacatccacttagtttttcgaatttaattaattcattggactttattcatttgtgtaattgtatatacatttgtttttttttaacaattaataacaattgtgtatacaattgttgaccgaggttttcgacaaccaattaagtagtagaatgagaggagctgtagaaagtttaatgcaggtgagttttacatggttggggcattaatgagccttagtccacgagtctttgttatttatgagagtgtttttacagagaattttcttggtgaattttctccctctcttctatactccccttaatgttggaaatattttaccaggatttagatttagtaccatgtatgtttcatt

SEQ ID NO: 368903 - DNA, 1124 bp, Cannabis indica
aattgcactcttaattatataaaacgctctatatattctacgatataaatacgctatgaattatctattgttataatcctaataatcaatgatcctctatagatgatctacatcaagtaggaataaccgttacacccttcaatgtattttatccttaaaaaacttagctacctataaataatatttcagtaaactaatataattactaaaataagtaatcatctatttatctctacaaagccaagctcgaaggaaatcatcatttcacttctatgtccagagagaagctatagatttaatatctatgattagcgctcccactcaattaaactaccatgtccttaatttatatgtcacgagaagatccattggtggactttaacgaacaaattgaagaacataaataattcaaccaaactagaacctaaccatctcaggattgagatcatttgatctaagaacaactaggtgatattgaattagatagatattgcgataagtttattatatcttatccaagtttaatatcggtcccttcccatgcatactctatacatccaatctaagcttactttaaccaataccctagaaaggacatagcacttatccaaggtacaagcaaactacattgtagattatcatatcagttaaatcctatgcatagataaatcataggaattcatttaattagataatattggttacttccactgtgttgacatcacaataaacaagaatatcaatgtgataagaatttggatgaatttataaattaaataaatgaacatgaaataaatatgtgaatcaaataacacattaaacaagtaataaaataaatatgtttctttattgataaatgaatatagaagatcacattgaaatagaattttatttatagcacaaaacccaacacatgatacttagtaaaccgtacttacaaccccattaaagaatttcaaaactttaaattagtagttaactattttattcatttcatgtgtatcttaattctctcgaactactataagtatcacattactcaataatgaatatagaatttttcaatttttacataaattattcaatcaatattaataattcaatataataatgtatactaataa

SEQ ID NO: 368904 - DNA, 546 bp, Cannabis indica
atcacatcttagtattttagtgtaacgggacagtatagttagacattggaaatgtccagaatagttgagattttataatttaccaaaatatccctaagtgaccttttatgacttttagtgtgggaagagcaaaattatctttttgcccattagtgttttgtccttttgtggttttaatttagttatttaatctgattttagaaatggcattaattaaataaaaaccctttttattatttcattttcactaaatataaaaaatagaagcaaaatcacattctatctctccattctctctttttcgaaacccttggagaaaccagcagcttgtggtgttcttggtgaatcccttgaaggtaatagctttagtaaccttctctttagtttccttatgttttgggttgagaattttgcatgatttatgaaattagttgttgttgttgttgttgttgttgctgttgttgtttgtagtatgcttctgatgtttagttatgtttagatatgttgaattaagcatgttttgatggctggtttgttgtttgagca

SEQ ID NO: 368905 - DNA, 1104 bp, Cannabis indica
agtaattaggggtgtttattggaatatcacatccaatagatttagacccaaccgatccaatccaattatttattggatattaaattttgtcatccaatctaatccaattgaattgagtcatctaatacgatctgatccaatggatgtattggattggatcggttcaaccattagatgcattgactggttttttactggattggattggatccattgatccaatctattttagctaccatttaagttaattttattaaaaagaaaaatatatatgaaaaaatataatttaaaacttaataatctaacatatataataaacattagtttagtccaatctaattctcataatctcataatgaaactgttaaaaaataaaatttattcaatatgtattgacaattttattagcgtttaggaatatgagaattaatattttaaatataaattttttttctttaatctcatgtgttaaatgtatattaaattaattaatatatatttctatataaaatatattaaatatgtaaaattataaatatattttaaaaatatataaatataattggatgactattagatgataattagatcagtttggtcgattatccattggatcggatgtccgaaccaacaaccgatccgatccgattggatttttaaaatttatatatgatccgatctaattatgtttggatatccgattgtattggatcgattaagattgaatcggtcggttgtaattggattggatgagtttctgcacacccctaaataattatctatctttccttaattactccatcttttctaccaatataaaagggtattccgaataaatgaggtacaatagctacaaagctaaattatatctcaaaactcttaaaatgacccttttaattagatgaactataatactttattaaaatttttaacttatgaatagtacatctccacatttagctaaggtttacctcttagctaaacatttattattattttcttctttttcttttcacatcctctatatctataaatacataaaataaattataaatgaataaaatatattaaaaatataatacttaaattatataaagagaaaat

SEQ ID NO: 368906 - DNA, 530 bp, Cannabis indica
agtagatctaagatcctggtaacataattccaacattttctacaatagaaacccagaaattaaagatacaaagctaaaagagaaaaagattgaagactttctaactgtttgaagcctagacatagtccagacaaagctgttcggatagctatgttagaaatctcacgactgatttgaagaaaattcctttttgctcagaatttgtttagtggagaaaatggtgaaagtagattatgaagaagttccagccttatttataggaaatttggtgaaaggagataatcatttcgaaatccttcagacgtttcgatttccccctacaaataaatattgggaaataaaaaagcaatcaagtgtaaccgtcaaagcgtgtaatggaaaccgtgtttcgaggcataaattaagtgagagcattaattagctgaaaactaaagagacgcatggtcagactcacatcgaatcacgaacagacgcacccaacacgtgtcacccattcaaatgtaaaggcagctcggatgaagtctctacgc

SEQ ID NO: 368907 - DNA, 545 bp, Cannabis indica
aatgtacccctgagactcatctaatgtaccacggaatatattccgtgaaaatacattacgggacaaaatcgtgtcccgtataatataatataatattttataatatttaatttatactgtacattatattatataattattacccttttattcatttttgtcatttataaaagtaaaatttgggtccctctttctgtatatttttgtttatttatccctactaaagtagttgctaaattattagttgtctaatattatattttaatatatttttctaagaaaatgtttttatgattgtgttaaaactagtatccagtttacataaaataaataggaaatattatatcataaatacataaaaataacaaaaaaaaattataaaagtaagaatgtacagaattttaaatatttttatgatttttatgattatttacagaaaatatgattttttttatgttatacacttgttaatttgttgttgatttttcattatctatatgttattttttgttgttgttttaatgttatttgaatgttatttttat

SEQ ID NO: 368908 - DNA, 684 bp, Cannabis indica
ttcacctaacatatcatccacatagacctccatgttttttcctatgtattttttgtaattttatgccctaaataaaacccttttcaatctaatctgatttgttctcaataaaagattaaaagtcatttatgtttacatgtggtaaatataatccaacaacaacttgtttgacatttataagtctttgtcaaagtcgcaaaatttaattttttttttttttatttttcaaaaatgagatataataactatagttaatatttagagtatatcaaattattttttctttaggggggtgtattagattatttataagtttactttttaataatactagaaaataaattttcccttgacgctgttttaatatttttttaaaaaaataatttcttaattatgaataaaatattaaatataatactttttaatttttttttcaataatatatgtatattgatcaagtaattataaaataaaacatattatatgtattttttaaaaaataatcaaatgtatgtaaaaaataaaataagagctaacttttggatatttgtataaatttaatcaattttttcaaatgtagacacatataactaataataatggagtaaaattgaagtattcaatcacttatacaaaatttaaaaaaaataaataataaacttttggacaaacaagcgcatgaag

SEQ ID NO: 368909 - DNA, 622 bp, Cannabis indica
atctttgtgtgtgtgtattttgtagtgtttctgggattgtttctgggtgagatcgatctgtagatcgagaaggatctctggttctagggttcgagaaccagagagaaaagagagaaagagagagagtttgagaaactctcgaatgttcgaatgagtgaaatgagctagggttagctctgatttcacttagttttgttcaaggcagaacgacaaatcgtttgattgaaacgatttgtcgtgcaggtgaatacgacagagtctctttgtcgtttggtacaaatctttaattaaaattttatgggacaagtttgtccctgtcgttttgattgaatgcttgagttggtgtagggcattcttggaatttcacatcaagaaatcctacagtggtatcagagctctggttcgagcataattcaactcaagaaaaggaatcaagaaagtgacaaaggctggaagaagaaggagaaacacaacaagaagttgtggacattggaaaaagctgtggaaaattccacaaattgataatcaatcaatttctataaactcaactcaatttaattttgatttttctaacatgagcaatatcaaagttgacattgatcgtttttgatggatctgttga

SEQ ID NO: 368910 - DNA, 643 bp, Cannabis indica
cagctactccaccaatgagcggcatacaattttttgctactctgggatatagtcaaggccaggcgttggcccccgcatcttcccattttggaaatccctcggggataagtggacaagccccgacgcactccgctccggccgcaagtttagtctgtccttctcaagcctcccggagcaaaaggtcctctaaaggcagcaaccggacggaggacaagcagcaaaaaagggggtataccccccaatatacccaatacacggagttaatggactcccaagaacgtgtatattttgctactaggaaaaatacgcactactggagaccgcctccctgtacaaagatagctcctggagggatcccaataagagatgcgagtaccacaatgacattgggcacaacaccaattaatgcagaaatctcaaaggcgagatcgataacgggagttccgtgaatatattattcaaggaggccttcactgcaataggcctaaccgaccgagatctttcaccaagtggtttccaactcacaggattaatggaacaaccattatcccgatgggaaaagtgaggctcccagtcaccttgtgcccggacacaccctaaagcactttcaacgtattgcacgtttgtggtggtggactgccaa

SEQ ID NO: 368911 - DNA, 580 bp, Cannabis indica
actcaggctgaccggcacacttgagcaccggaacgaggtatgatagcataataatgtatatatgaatgtatgcttgtattaaatgtttacactactaacactaattgtttatatgattttaagggtgttagtatagtgtaggttttttagagttgttacagtgttaccaacacgaataccaaggggtatgtcgtgcatgtggtacaacacttagtaacttctgggggtacaataatggctctaccaacacgagtacagggttggtactttagtgaatttggtacagtggtcgtacttcccttaagaacgttcttaaccatttggtgggctcggttgatgagctcagggcggcttaagcataaagccggtataacattgcttatatatatgttatgcatatcttactgagtctattgactcatcattttgctaccttgtgtaggtagagaaaaagctaagttggaggaacagtgagatggagctcggcagtgattgtacatatcgcggtagtgcaacctggagggtttcggtctttcaatattttgagttgtattttgtgttgcctgtcatttgtttaaaa

SEQ ID NO: 368912 - DNA, 546 bp, Cannabis indica
atactaggttgatgttacatgcaatgcacgtataattagttttttataattaggatcaattttgtgatttaagtggaatacatgtatgtttaattttttttattaggttatatattttttttaatttttaaataagattggagatttaaatctttaagaaaaaaaatttagctattgctccattggtgtatcatttggatatgattatatataaacgtatttttttaaattttcttaatattttttatttaggcaacgtattttttacttaattaggtaaaatttttaaatttaaaatttaaattttttaaattttagctattattatattggtgtgtcattttgatctttaagaaaaaaaaaattagttattgccacattggtgtgtcatataatcaaatttgagtgtattttatatacaggctcgattcgtaaatttgatataaaggttttttattcccattacgaaaaatatgatgtgtgaatcggtttaccataactaaaatggaaagcaattaattctttattacaaccattttaatttaa

SEQ ID NO: 368913 - DNA, 903 bp, Cannabis indica
gctgctgttagggtttgatgttgctttttgaggttaaatatgttgtttaatgtttatttgaaaatgtttttgtggctgatagaagagttaaccaagttttgagttttaaaactcaaacttggagatttaatggtgaaacttgtttctgagcttgtagttgtgttttattgccttgaatatgttctatgtggtctatatagcaggtgtggaggttatggtggtgtttggggttgatttgaagttgtagtgaatttttgaaattttcctgcattgaaccggaattctagttcagagggacctgtaggaaccagaattctggttggtccccaggaaaccccgcagaaccagaattcatgttggtaaccggtctactggttggggcagatttgggaaccctagtttttcccatttttgcgatgtttagggtattgccatgttatttatcgatagggaaacttttagtttcaagttgaagtccccggaaagtgatttagcgtgtcacttacttatattattaatgatgtgatttagcagcctgtaattcaccgagtaattgttccacgaaggttgcccggcacacctgaattcggaaatgaggtaagattagtataacagtatgcatatgtatttacatgtttagtgtgcatgttagtaagcctgttagattacattagatatttatgttggcttttgtactatctgacaggatcacatcggtacgcctagagtgtgactagcgtactgagtataggttgatattatggtcgatagtaccgtacttttgatagtatcacatcggtacagctagagtatgactagtgtaccgagtatatgctgttaccatgtcaaaagtaccgttgtacgaacgttctagactcagtactgtgcgggtgacggggatag

SEQ ID NO: 368914 - DNA, 1091 bp, Cannabis indica
gctatatccctataaacgtgtattacacgtatcagatatggacaaaaactataacacatcaaacggtatacgtggcataaaaaaattgaaaaaaaaaacggtataaaaccgtattatttaaagcgaggccaaatccgtaaataaatgcaaaattaggttccctggtgcaaaaacttcaaaaagaaaagaaaagaaaaaaaaaaataaaccacaaaaagaaaccacaaaaagacaaaatagttgaaccaaaaccaaaacactcattcatgtttatatatatgttatagattatagataaattatagataataaatagctctatcgactcttaatgaagctcagtcatgagatttggtagatcttaagaaaataaaaattattgaactttagttaaaatatttataatatttttaaaaaatactaaaaaataaatataattttaaaagagaatattctttaggtccttaagttaaatgagctctaatcgccagcctaattcgtcttagctcaactagatttgtttcaaacaaattctttaaaaatgaaaattatttaaatatctctacatgtagagaagcttttaaagcttctttatatatttttcaataataataatatattttttttttgttattttctcttccaattaattactttttaatattttttgtaatttttattattttttttttggaaaggaatttttcttttaattgaagtaattaaatatataaaaataaaatattttttatttgatgtagagaatagaataaaaaaattgttatatagtgtaatataaaaaattgaatgtaaaataaaaaaaaaaagtaaaaattaaaaaaaatagagtaaaaaaatgattaagagtgctatgtggatatgagtttatttaatttattttgtgtattagaaaaagaaaaagaagtgatattattgatcaaatctattcaaatttaataaacgagatgttcctttctatttcctttcacgacttactttgtggtagttgtcttatttaagcttgtcatcttttatatataggcttttgaattgaactaataaagttgtttataaatatgaaatgaaaccat

SEQ ID NO: 368915 - DNA, 923 bp, Cannabis indica
cctagatctggaccgagatcctgaccctgacaaaaacttggaccagcactcgagacccaaacttggacctagacccaaacctggacccaaatcggggtccagacctggaaacaaacccggacacagactcggacccgaactcaaacacccacacatagaatcagacccaaagctagacctagacccggacaaaaactcgaacccagaccacgatagaaaccaaggacatagacccagaacttaatccagacccagatcgtgattggaaattgggactcagacaaaacttataccaagacccaggaggtgaacttacacccggagcatgatctggacctagatcgaacccaaactcatactaggatacgacctccgacccgaactcaaaccgaaactcgaacagaatcacaaaaggaactagaaccgaactaggactaggaccaggaccagaacctaaacccaaacccgaacctagatcaaaacccagacagagacccaaacccgaactaagactaggactcgaacaccaacctagaccgggacccgaacccacacaataacagggacttggaaccagtattaagatagggacctgggaaatagaacgaggaccgggacctagtacccgaccaatacctgaacttgaacctaggaccgcgctcgtgaccctgcaccagaattggaaccagactgggacccgagattgggatctgggtctgaacccaaggcttggacaaaacccgtagtcggtgccaggatctggaacaaagccctggacccgaactctgagaaggacccgaacccacacccggtcctgaacccagtccccaaatcaaaagtggacccgaacctgtaccctgtgaccaaaaattggaaacaaaactggaagttgaccgggactggaactaggacttggacttgga

SEQ ID NO: 368916 - DNA, 510 bp, Cannabis indica
ggggatagttgtaaagaccgcttaacttaatttggaaattagcatataattaggatttaattatgaaaaatatttaataatgttaaattaattatttatgatgatttatttgaattcagaatgcattttatatgtcatatatagaaatttcatatttttgcatgttcggtgcccgtcaatattggaacgcagtgtatggctcaatagaataatatcttggtattttagtataatgggacggtattgatagacattgggaatgtcagaattagtcgggaatttcgaatttcccaaaatacccttagtaccccttttatgttgttttggtgtggaggggcaaaatggtcattttgccccatatgcattttgtcctttagtggacttggtttatttagtaaatggatttatgttggctgagattaatttaggaaatgtaagaaaggtttattttatctcattttacaaaaaaacaaagaaaaggaaaaatcatctctctttcaaagctctctc

SEQ ID NO: 368917 - DNA, 512 bp, Cannabis indica
ctaactctccgccaggtaatagggttcctaattcataactatcatgcgatctatcaaatttacttaaaattttggctgccacatagaaatgagttgcccaagagtcaaataaaataagagttgttgaccgagagctgacctgtgaccacagaagagatggcttctacatcagcccgagttattgcgaacaccctggctagagtggctttcactgcagtctttggtgtttcggtcctgagctctggacaatccctcttgtaatgccttggcatgccacacttaaagcacccctgccctatacactcccccagatggtgccttttacaactggggcactctgggtaagtgtatcgggttttagtgccactctggcgattgcctcgaccctggttcccccagaacctcttgtcctgacctaagccactggttgcagtggatgcctttcttttttgatctatggccgaaccactacctccccttctaaaacctgatgcaggaggggtaggagcccc

SEQ ID NO: 368918 - DNA, 601 bp, Cannabis indica
atttactataatttcccttttttcttctcaactatgtttagatcttaattttcaagagcaaggttgtgacccaacccaaaccaacccaacccataatgtatgggttgggtcgggttgggttatgcaaaaattataatttaaatgggttagaatattttaggccgatctcattgggttggcccattaaataaattcaacccagccaacccaacccatgatcagccctacccaaattcaacttaaataaaataaactaataaaaatagaaataaaatttacagaacacacatttattttttgtttttaaaattgaaaaacaaaagtagttataaaatgcatttttatttttcaaaatcaaaatatcaaaaataaaaattttggtggcgtttggtaactgtaacaccctaactagcataggcgtgttgacgtgacttttcacgtactgtgttgctaatcaacgaggttaatgaaaaacgtgattaattaaaattttatttatttaattaaatacttgtaatatagcatacaaaatactttgggatcccatttacaaaacactttacaaaaagtttgctattcaatacaaaatatttgtcgccca

SEQ ID NO: 368919 - DNA, 694 bp, Cannabis indica
gttgaattcttatttaattcaaaattatccttaagtttttcctcttagagttttcatttagaattttcttaatgttatatcattggatgaatagtttataaatcatctgcttatgatgtcattattatttctcttatgaaattgaatggcacagatgactatattcccgacattctatcctgaaatgatataaatccccaatcttagaaatctcctacttgtatttgcttactttaggcaactaaaacttagagttagattagtagttctggtctaagctagaatagttactcatgtatatttggtataaatttaattctttgactttaaattttaaattttactttcctagaatacattggacaatatagtatgactttcacaagttttttaatatttatattctatcaatggattcatactgtatgtttatgtatggaatatgagtttagtattctgtgaccaagattcacttggactattctatgaactctttattataactaaacctttttcattaaaagaccacaaccacattttagtatctatggcattttcatcttgttcatagtggttttgacaagatcatttttagtcaaagagtaaatatgcctatatccccttgaatgtaagttcatctacattcgaatatggatgtacattctggggtggatatgagttatcgttatattct

SEQ ID NO: 368920 - DNA, 526 bp, Cannabis indica
ctctctctctctctcaatcaaagcctctctctctttctctcagtcgatgcctctttctctttctctcaatcggagctactgctcctcttctccgataaccaacaacaccctttcccactctccctcctcagtcctcgaagccccaatctctcctctcagttcaacgtcttgctgccccgaacaaagccccaatctttcctcttctcagcgcaacaccacatttctcttccccctctttatttttccttctcctggagctcctgctcaggctagatggccatgcttcggtgatttggggcaggtggactgaggcgatttatggtttgatccatctactcctctaccaccatcttggttaactgaaggagacctctcagtctatgcatccctgtatgaaaaatcgggatttcgttatgctttacagattccatgtaggcaagagaaaattcttcaaaacgactcgtacatattattatatgtatgattatttgatcttttgtttgtctctctatttctctctctctct

SEQ ID NO: 368921 - DNA, 826 bp, Cannabis indica
agataaatataaagattgaatttaaagttcaaatcatccgccataaaaaaaatataatagtttaaactttttattttttatagatatgtatataaataatataatatattgattatatataataaaaatatatatacaaaaaaaaaactttcttaatcaagttggtcgggttaatttaggttgattgggcagatcgatattattttcaacccgcctaatataaagattggattggttatattttcgtcatatttttcgtcgggttatctggatttggtttgggtgagttgttcgggttgggcggtttacaaaaatttatgtacagccctacgagaaacggtaactcacttgaagataaagtcgtcgatacctaagagaaaataagactattaaaaatgcatcactagtatcatttgattacccacaatgaagaacgaaaagcatgaaaagtagaaccggaaaaacttacttgtagaaccaaccatcgagacccacaactgtaacaactataacaatggcagaacacgaataatgtacaccacacttgctccctcaagagtatgtacacgaaacgaagtgaaaaaaattgaaaattggagttttgcctaatcataaacgaaaatggaaaatgaagagttttgccctaatgtaaaagaaagaagaagttcgaagaagaagagggtgatgagtgaagaaggaagaagacgagaggatgacagttggggttgatataattgatggtggtcatgtcagtttttactttttaaaatttatcaattttttattacaaaaagtgaactggttaccaatatatttcatcttaaat

SEQ ID NO: 368922 - DNA, 760 bp, Cannabis indica
acatgtaacagacattaaacacagaaaccttataagctatctaaaccatataggtactctcatcctatattaaaattcagttctatctaactatagcataatcgacaatcacttctcagatctcgcatcaaaatcataaaacaattaattgatggtcagacaataaaaaaaattaagtacgaatgaaatagaatgcatagaaatttggggaaaataaatcatattaaaatcataaaataatatcaaacaatatccatctaaaccctaatcaagtgtttggctactcatgttcatggaagcaaaatcacacatattaacttaagaaagagaagaaaatagagaaaaaaatcatgctgaaaaccctctaaagaacgcctccattattccagttgatctctaaaatttgtgctgtatattctgctgtttatttccctcccaattgattgacgaaatcaactgaaattcactccttatataggcattgagggactaaaaagatagaaaaatatacatgctaaaaatcctattcagcattgaagtaggaaaccacaggcccacacgaggaaaattgatatttttgcatgctgaagggggcgggccgcaacgccactttggctaggctgcggcccatgtggctggtggagtgtaggtgattaaatgggtgggccgcagcccgtgtgctccaggtgccttcgttttccacgtgaaatatctttttttgggtaggattccgatttttttccacattgatatttttatg

SEQ ID NO: 368923 - DNA, 541 bp, Cannabis indica
tttacatttatttttgtattgttttagtagtttttttgttctattttttaagattgggattacaaatataagtgttattacattgggtattgaggatgtgcagaatattttttactttttttaatcgtgttttcctttcttttgtttgatttgttttagtgtgttttacagttattttgccgtgattatttatttgacgtcgatttcattgtattttttttttcttaatctcaccgaaattaatggttgttttttttaattgttctagtgttcctgtggtggttctgtccgtggatgtggaaaatagatgcctcattttttttttgtttacagtataaaagaaaaaaaaatcgaccaagattgtaaaacagaaatttatgtcgtgtggctgtacttttgtaaagataggagaaaaaaaatcagtatttttgtaaatttccctatatgtgtataaaagaaagtggtattcttcaagaaaattacattgtatatccactttactttatttgtttatatttttaccttcatttccatattcttt

SEQ ID NO: 368924 - DNA, 714 bp, Cannabis indica
tcatacatatcattttcaatataagcgccactatgcatactctatgtgctaatcactgtcttacctgttttcctgcaatgtcagaaatttcgaatccccgggtgctcctgatcaggtgctggtaatcctagtcacacaaatctgggattttcacaaatagggttaacccatgatttcacattcataaaatattcacatggcatttaaaattcagatattcagatagagctcaaaaagagctttctaacggtatatagaactcccaaatcggagtccgaatcacaaagttatgactatttgaagtttgcaaaaggatctgcctagaaagaaatgggcgcgccgcggcatgctaaataccatgccgcgacacctgggttcaaaacccagagaaacagcagcaagaacacgaaaatcagctccaaaacacaatcaaatcaccccaattcacaaccaaactctcaaatcatcaaatagggttgccagcaaataatagatgctcaaataagcatatttcatgcatcaaaatcccacaattaacccttaatttctgattgtaaaaaccaacttaaactcatgttcaaactccacaacttcaagttcaaaacttgggcttaaaatccttcaatccctaacattttcaacagcaagtaagcaaatagagatcaaattcaagtattaaacctctcctagggttacttccatagatcaaaagaa

SEQ ID NO: 368925 - DNA, 536 bp, Cannabis indica
atttatgccttaatatttttttaaattgatctctattttttttaaaaaattataatcagttttatgaggtattatgtgttatgaagtttttttttattgtagaactagttttatttttaatttatgtttcagtgtattacttgtttgtattcattatgttatgtaaccggttctattttagttataatcagtttgagttatttcgtgttatttgtttttattcattataacactattatagaaccggttctattttaattataactggtttgagttgttttatgttatttatatttaattataatcggttctgtaacataatagaaccggttatatttttagttatatctgagacatttaattctgatgacttttccagtgactttgccggcgacagtgacttttccgacgacggtgatttttccggtgccagtgactttttccggcaaaacttattgttggttttacaaatatgagatttttactttttttttacaaaaatatggcataagaaaacccatataaatagtaaaaaa

SEQ ID NO: 368926 - DNA, 682 bp, Cannabis indica
ccacaaagtaaaaattctgggtccgtcactggacactactaatttccaataacaatactcttataaaaatatctgctaaaataaaaataattaattgcagattaaatattaattataatccatatgcaagttggagaataaaataatttgagataagagaagtttccagagggattttccatttttcaggtatgggtgaaacaaatgggtatatataatatgtttattattattattaggggaatgtgttctaagttctgatcttaatttgtggtgatgacaatatcaatataataaagcttagcatcttttctctttacaaaacaaaaccattctaaaataagaaaaattatatttaaaaaacggggtaataataaaaagaataattaaatatttgtctcataaattttttacactataaaagttgtgtctccgactcggtaataatacccttaaaaatataatttttacaataatatagttcttttattatattttattcaattttctcgtgaaaagaataagtagtggaggatatagttaataaaaaatataaattaaaaatttaaaataaaactatgaattattataaaaatgaaaaagtcgtctatcctattattaactaaaggaaaaaaaaaagagttaaatgtatttaattttagggttaatttcacaaatgcac

SEQ ID NO: 368927 - DNA, 626 bp, Cannabis indica
tttttataaatttattttcttaaataatataaattaaatttatttttatatataatttttcattaaaaattatatataatatataaaataatttatattcagaaatatataataattttttaataaaatatataaattttattttaatttgttgttagttttattagttttaaataaaaaattaattttttttaaagagttgataaagttggctgggtcaacccgccaacccggtcaacccaaccaactgaaacccgccaacccgtgcccttttcatgtccaggttcggtttcatttttttgaacctgaaatctagtaaaccggcccgatgttcaccctagtttgagttatttcgtgttgtttgtttttattcattataacactgttatagaaccgattctattttaatgataattcgtttgagttgtttggtgttatttatttttattcattatgttacagaaccggttctatttttagttatatctgagacatctatttttggtgacttttctagtaacttttcccgcgatggtgacttttccggcctggcaacttttctggtgtcgttgacttttttggcgatccttattattattttacaaatatgaatttttacttttttt

SEQ ID NO: 368928 - DNA, 733 bp, Cannabis indica
actttactaatgcactctataccgcaaccgtacaagtgttggtagtgtatgaatcacaacttataagcatgcatatacactaaacatatacatacatttacatatccatatcacacattatatacaattcttaccttctttctagattcaagtgtgctggccgacctgaacgaaaagtctcgtgctagatggatgtcctaatcacataatgaaaccgagtaaatcacatgatcaaaaccctaatcctaggaaacccaaacctacaactctaggttctattataacatttatgggtcacactttaggaaacaaggaaacacccaactacgacactggaatgcacgagaattgagaaaatggagcattcggggaaccctgcaaaaattggctaaccggttttacagtacctgtaaaaccggttacctggtttgcaccagttcacccaaaaaatctatttcttgctcaaaaccccaccaaatgcatccataccttcccaaaacacctatacaatgcatatgcaacataatccaacaagtatttcccagaaaaactcaatataaacaaacatgccattaaagaccaaagataaggtttctatgctcaaacttgcacaaaacctaatccaaacatcaaaaccagctgctatagaaactaaattcaactcaaactaagcttagaattcgaattgcaacataacctaatcctaacagcccccatttcacaaaatcacata

SEQ ID NO: 368929 - DNA, 620 bp, Cannabis indica
caacaaggaattaattagtcagtgaatttacctagtaagttcttggtctgcttattggaaactcagatatataggcccatggtccccatactagttgagagaataatgcttttaattaagagacattgattagtctaattaataaatatattaaatgacaatatttttttataattaattttaagtatttaaataactggaattggcatttttgagaaaatgagatatagaaatgataaaatgacaaatttgtaaaagtggggcccattatcctttacatggccggccactcatgtagcttatttatcatttaatttttcattattttaatgccaaataaatctaacctaaacctaggtggtttgctataaataggtagtgatggcttcagaaaaaagatgatgcatctcattccttcagagaaaactcaaagccttcttcctcaacctagccgccaccttctctctctctttctctcttctgaaaactgaaccctatagtgagtgagtgagtgcccacacacatcaagtggtacctcaatcatagtgtggaagattgtgaagaatcaagattcaggagaaggacatttgggctcagctattggtgatactctgcgacag

SEQ ID NO: 368930 - DNA, 695 bp, Cannabis indica
aaccgaggcagaggtggatgccaaggttattcttaccttgaatgcccacattgtaagaaacatcacccagaagagtgcaatcggaagacatgctttctgtgtggcatggttgggcatttcaagaaggatttccctcaggcaaagaaagaagagctcaagaaggatttccctcaggcaaagaaagaagagcagaagccaagggcaaatcccgtacctgctcgggtttttgctatcactcaagttgatgctgcagccagtcattctgtggtgacaggtcagcttcttgtcaacaactcttattttacagtgttatttgactctggggctacacattcttatgtggcaacacggataattaatcaattgggtaggccttgtgattctattgaaagagggtttggaacccttctgtttagcggggagttggttatctccaataggcaaattaggtctatgccagttagggtcgaagataaagagttgagtgctgacctagtaaagttggaattagccgaatttaatatcatattttggatggatttcttgtccaagtattcggccagcattcattgtaagcggaaaatggtaactttttagtcggagggcgaagatccatttgtcatatataacacctttaaatcagattgttattaaattttatttagacaaaaaatcagttcagggtcttatttgta

SEQ ID NO: 368931 - DNA, 506 bp, Cannabis indica
ttcatttttttataacaaattagaggttattcttgaatagagtattcttgaatagaggttctactgtataaggatttttgaatttggataaattcctccccctcttcttaatctactatttcctaccatacaaacaattgacttttccttccattatttttcctccaacctccccattcctccataaatcctcctacctaacatatcatcatttaaatttgttcattattattatatacttgttcaccaataaaatgttacatacattttgtgtttttaatttaattttatgtttgaagtttttagatttatatatatatatttttcaagggttaatactattttagatcttgtattttgcaaaagttatagattggactctctattttgttaaatgacaaaatgaattctatattttataaaatagtaaaaatatgaccttgagcttaatttttgacaacttttttttaatataaccaactggaagacaattcttaacacgaaca

SEQ ID NO: 368932 - DNA, 904 bp, Cannabis indica
atttattattattttttttaaaaggaataaatttacatttattaaatgttataattataataaagaataacgttaacgccatcttaaaaaatgttaatgctacataatatacaaattaaaaataaatttcaaaatgaaacaaaaaaaatatgaaaatattacaacaatacaacttaaaaaatataataacaataaaaagtaaacataattttttggatctaaaattttacaaacagtgggaatcaacataaatttacctataaatataaacacaacaataatattatatttctatacagaagattggaatgaataaaacccttaaaaatatttaaaatcactttaatgttcgtagagcttcaagcacgaccatgaaaggaaactgaaacaacagacgagcttcaaacacggtcgacctcgacttggaaccacgtacgattagatacttgaacagaagagagagtgacccaccatgttgtttctcaagtaccaacaacctaagaaaattctcaacaccgaaaacaaaaccaataaacccagatctcgcaggccttcgaaatcaaaaaaccagactgagtgagatcggatacctcgagggagagagaactccaacgaggaaattgaggccgatgacgctgggctttgcctcgatcctccttctagaatcagggagagaagtcggtgatatatagtactacgctccgcatcgattctccttctgaaatcgcaaagagaagtaggtgaataatagggactgaaagggagatagagagaactacgagggagagagatagagtgggattagtgttggaaatatttttaccaggatctagatttactaccaagtatgtttgattaacatcctaatatgaattccaaaacaatgaaataaacacataagagt

SEQ ID NO: 368933 - DNA, 676 bp, Cannabis indica
ctttcgaggagcctcatcatcactatcaacattattcatttcttccatgggagcatacatacttgtagaacatcacaatcagcctatcacagtgtttctcaacattgaattcagagggaatatgtttcatgtcaataaagtattcagcaaacgatactacaaaacatctgcaatcactataaaataacattaaaacaacataaaagcaacaacaaaataacataaaaatatcataattttcaaaaaatttcaagttgcttaggtgataagaaaaccttgagctcttggataattttgaaggtacttatagacaaagcttttgcaacgaataaatttttctgatcataaatataatctcattcctatagcatttaaaacaacattacacaaactataaaacaactttctactatgaaatattttttttaaatgaatgaactacaaccagagaatatttcaaacaacacaaaataaaaaaataataatgtaaaccttggctaatatttttctttggtagcttgaactcgtcaacaacattagaagtcttaccatgaacatgaaaatattaggatgacaaatattaataaaataatgaactgctaaaaatacaattaatagttatacaaactataagtatatcacgaactgaacaacataaaaacaacaatataataac

SEQ ID NO: 368934 - DNA, 640 bp, Cannabis indica
tgatttgggcaaaatctgggtttagggtttgatttcgtcgggcccaatgcaagcctgacaccggtctaatagtatcacaggaaaattgaggaagacaaaggcccgatgggtccgatggtgagcccgatgcctgtgtaaaaaaaatagaattcaatatggcccaatgggcccgatagtgggcccaatggggcctgatggctcaacagtgtagtgaaataaaagagagaagaagagagaggggctgatgtaaatggggggtattttagggatattataaaatgtgtcatatgttgggctttgtgccctaaataaaactctatttcaatgtaatctttatcattcaattatcaataaagaaacagaagtatttccatcacttatttagtgtgtcatttggttcgtttattgtgtcgtcaacacagcagaaagtaatcaagaatatgtgattaaatgtattcccagatttatcagtacacagggtttaactgatatgataatctacaacatagttttcttgcaccttggataagtgctatgccctttccagggcattggttaaagtaaaacttgggttggatgcattggaagggactgatattgaatttggattagatatgataaatttaccataatatctatt

SEQ ID NO: 368935 - DNA, 526 bp, Cannabis indica
gttaacttggctcgatattggaactcaaagctaggcccatagctttgaagaccaaggacgtaggtggttgagttctatcgaaccttgtaaaaatcgagagtttataatttctaacccttaaactctttaatttacaagtttgatgttttgttataatatattacttgcctttatttgattgagtagttaattgcttaatgttttgttaaaagtttcaatttaccgaattagtttaaatttccaattgaccccctcttggaaacatatcttgggctaacaaaggtctatctgtagttttcttggtgattttgtatccatctaaatctttcttcttcaattgttatataacaatatactatatattattgcagtagtcgaccaactcgaagaaaagtgtgaccctcatttaatctttattgtagcctgaatgaataattgtaacgtccccgcttcaagcctccacttgggtccttacacccacacggaaataatggcgtcttatacacgagtacgtcactctggctgc

SEQ ID NO: 368936 - DNA, 1414 bp, Cannabis indica
aagagcagttcttaagttttctcagtacacttgtacgcatgccattgttggaatacaagtaaactaagtcactcacttatgtactaggcgagacgccttagcgaggtacatacagcagcatgtcctaatccatgtcagcattgacctccttcaaaacggtttaaatcacaggtgtgtgattttctgatattaactacacttatttacgtggagcataattaaagcccacaatttcagggaatattgttatggaatttgaatttaaatgtaattaactgcaaacttatattactataagtaggggcagattatacaaaaaaagggacgaaaaatcatagagagataaaggaatttactgattgtaaaaaaaaccctaattctgtatctagaaatatctaaataagacagactcgtggactatgcagagttaactgcaaagtcacgtaaaaaccttgtgtaatttttgtttttataatttttcttagatctcttacaatttttatgtcaaatctattacgaaaataggctcataattgttaatgaaaatttgtgttaacagtttggtgctttcattgagagcctacgtgataaaagctcagaaaaatccctcttaatcgaaaaaggaatttcttctctgtggctgataatggggaaaacgataacactcatcctaaagagactaatcgtcatcctagaaaagagccaatgggctcccggaggccacccaattcatgaacaatacgttcaagaagaagccaatgcgataatgatcaaaacctagaaactgggaatgaggaaaccaacacaaatgttggtgggtctacgcttatgagtgagggcgcctatgatcctactagatacgtactgttggtcaagttgaaaaatcgtcaactctagcaatgtttggctgaggcaaaccaacgaaacgctgagttggaaagggaggcagccgtaaccagggtgacacaagaaaacaacacacaaaacaaacatgttcctggagtgagaaggccgtgaggtagacctcggggctcaagaaccatgaggtaggagacggttcaggaaaacccacagaactctcagtaggagcaacttggggaaactggggaatgttccttaagatgaacaaccaaatgactaggcacctcgtcaagaaatgccttggagaccccagggattcacaacccagggcaatcaaaataatgatttactagagtcttctcgtagaaacaagaatagaagacaacccaagactagggaacaagaaatccctcgtggtaacgagagaaatctagggactcaacctaggacaagcgggttaccaccgagacaccgttgttaatgaagattttcgttaactaaaattgagcctcacattattgatctcacagagaaaaaataaaagctatagaaa

SEQ ID NO: 368937 - DNA, 914 bp, Cannabis indica
aagagaaggttttccatgaattaaactttccaggcgccaacttgaaataccattgctgagcggcatctgacagagtggctgggaagattctgcggcatacatctccccgtactccttgcaaatcgatttgcattttgaaatacttgagatgggaaagagggtcttctctcccagtgtacatcttccacgtcggcattttgaacttgtgggacagtggcaggagattgatctctggtgagaaaagagttctgcgtgctcggtccaactcaagatcattattcctttgtccacccatgccgtgaaacatatttttcagtttgtctaactgagcctgtacggctgggctgacctgctcgacattctggtcagcatctttctgagtgggaatttaagtacgggctccaggctgcacgatcgttgcaatattctgcttgtctactcccctccttctgttcagatcattccttaggtcatgggtttctcccaacctttcgaacacagaagtgcctggctgccttagagattgattcgcttggttgaccagacaaggtctgctcacctaccgctgggcgcacgggtataactcgtgaccggggattggacggctgaccatttgtagtctgagaggtattcatcgtcggatcttcgtctgttccacccaggggaatgacgtttggcgactgttggcctacagtttggtaggcttttcgtatcagcacggtagcctgccgactacggttttcgatctcttcatggtgagccctgaatgcctccatctctctatccctccattcgtcgaacatgcgcctttgttcgtcaaatgccagatttactgcagcacgcatttcgtcctggtcatgatgcaaggtgttgctatgattctgcatgagcccaagagcgtcgcagagattttg

SEQ ID NO: 368938 - DNA, 717 bp, Cannabis indica
aatttcaaatttattaattaattaatttgtcatataagataattttaatatcatatttcaaatagaaagataaagttatcttttaatttaaaatatgttaaatatcaaaatatctaatcttataattaaataatatataaatatttaagaaattaacaaatttttaaaattttataatttaataaatttaaaataatcaatttttaaatttaaacctcaaaatatcaaaattagtaataattattaaaaataaatattattaatttgaaatatgatatttaagttcaaatatatttaaaaattatgttttattttaaatttagggtttgaaaattggaaaaattggatttttgggaaaaaatcctacaaaattcggtttttgggtgaaatcacccgagctgtaccaggaggctgcacgctagacgtcaggaggctgcaagaggctagaacgcgcgcggaacgggggagtttgtagggtggttgtgcggcaaacttcggcagcagtaggcttcgtctgggcgcatgtgcagcatcctgggcgagacgcacgggttcagacaatggattgtctgaagctaagcgcgcgcgtaagcctggttgtccgagtccctggtgcactcgatgcacccactcgacagccatggccaccaaatttccaaaattcataacattttcaatttttatcggaatcgagtccataaaaaagaaaattgctta

SEQ ID NO: 368939 - DNA, 401 bp, Cannabis indica
tttctatttcccacatgctcacttatttcttatcacctatttcttatccattttccacaccctataaaacgaaaatcttaactctctaaaaccccactcacgccttcgcaccatcgccctcctctctcgctgtcttcctccctctctcgatctccctttcttctcgtccctctcgtccatcgatctccaaccacccctcctcccgtcggtctccctctcctctaccaccatcacctctcgtcgatgttcctctcatctccgtctcatacatcgaaccaccaccacctccccttcgtctccctctctccgagctcagtatagatatttatttatttttatacttttttatttattataaatatatttattttattattgtataaatttaatgtgttttaaag

SEQ ID NO: 368940 - DNA, 868 bp, Cannabis indica
aaagggttttatttagggcacaaaacccaacaagatagccattagaaaaatgctccagcaacttactatagtaagtcgcttgcactagagtagttaaatcaccaggcttaacacaagccataggattagataatctcaaacctttaataatactaggatcaggaagttttgttaagtccattgaatagacttattttcaaaattgcccttcttgtccatgtaataaaaaacttttggttactccatttgaatggttttaaccatagttctcttaactttgcttcttagttaattattttgacaatccattacttgtttaaactaacaatggattttgtcaccggtgtctttcaagtcataacagggtgagttccttgaaaccctcccactacgacaaggtaccgtgactttctgtctaagaacaataatagtattgttctcatctgttgtatcaagacaacagaggcagtgggaccatcttatatggaataagatgataaaacactttagaattttcaaatttagtcatatttttataaaagtagtatttattaaaacaaacactttcttatctaaatgatcataggatggtccacccctaatcacttagaatagctatcaaacttgcaaaccatagttaacagttctagcttttcttaagttcatgatcaggacatccatgaatttagtaatggttaacactaagtacataactatttcatcattatgaaattttcctagcactagggtatatccctaaaaggacttaggtagctactagtaactaatcaaaaaccttatactttcatcaatatgcaatccaaatttctggggaggtaagtttagatacaattcgaagttcaattta

SEQ ID NO: 368941 - DNA, 749 bp, Cannabis indica
tctttgctcactccctacaaacctgaaatctgggaaattaactataatcaatgggaaaatcaacctctcaaacacccctaacctacacagagagactgagagagagagagagaacgcaagagaaaagagagggaaagagagagacttacggaggtgggaaaatcgtcggttcgaaatcacagttctgagagcttcagaccttcgaaatcgcaagagagaaagaaaggggaaagagagagaccttcagaccttcgaaatcacaagagagaaagagagggaaagagagttgttcagagaaagagagggaaaagagagctcgaaaatgaaagtgtcattcgactgtttgggggtaagtgaacaataggagaatttgtgtcgttttctcacactcacaatctctttaccgtcggttttaaaacgccacacaaagcttgagtgaggcttttaaaacgacgctaataataaacgaatttttttaatttcttgacttttaccgtcggttgggtaattagtgacaaacatagaaccgacgcaatttgtttattttttgtgacattttaaaaatgacgaatatattgaatatagtactattcacgtcggtcaacgcaatgaacagtcacgttgaccgacgtaaatagtggattttgtagtagtgtattcagatttttcaggactaagcttctaaatatagctgtcattgcatacggtgttaatgttgtgcagaagatgtttatttttttttaattttt

SEQ ID NO: 368942 - DNA, 592 bp, Cannabis indica
tcatgtttctacattggtaaaacatgaattcattaaagcctcaattttcttttaacatctaaatttgtaatcctattcttgcagctatttcatccacctctaaatacgctgaaatcactagtgaaatccccaagcttacaagtgacaacttcaaaatctgtaaggaaagagttcttctccacctagcttgcactgacatggactatgcaataaggaaagacgaaccagctgcaatcactgatactagcactgctactgagattgcactgcgtgaaaagtgggagcaatccaatcgtctttgcatcatgttcattatgtccaaaattcctttgggaatgcgtggatcggtggagccacctgagaaggtgaaagattttatcaaagttatggatgagcagtttgacacttcagataaatctttattcaacaacctcatccaagagttctcgtccacaaaactgatcggtgctaaaggatttcgagaacacatctctaaaatgagggacatgttgagttttatgccctaaataaaactcatttcaatataatcagatttacttgttaataaagatcagaaataacattttatgtt

SEQ ID NO: 368943 - DNA, 977 bp, Cannabis indica
ctcaccgagctgttcgggtaatgggccttcaatgttgccatggttaaggtctataccggccactgtggtggtgttgaggggatcatttggtgtgggtgcacagtacactccggtgtagctgcacacatcgaaaccccaccagtcatcggtgagtttatttgggtctgaggtgatttgagctttccaaatttggagaactccgaatgcgttaatgattttttcgtttggcggccagttggattgttggtgagatggtttggagaaaattatgatggagaaaattacaaaaatggctaatgtgaaatgtgagttcttcatttttttttttttcgaaagagattgatatttgattgatgttgtgggagaaatgagctgacatgttgagatttatataaacgataaaattttgaggtttttggataatgcaaagttatgctaatttgttttctgctttggcgcttttaaataatattgatttacaatataattaccagttttggatccttgactatccttcatctaatatttttttttttaattagaataaaaataaatacaattagaaaataaacaaaatgaaataatgctccgattattaagagtacagcaagtgctgtgttttatattttgattttgactacgtactaaaggtattaaaaatgctataaagattgtgtatatatatttttttagcttgtatttataaaattaaactttaacagttagtgtataatgtgatttaaatttaatttttattaaaaattatgttaaatttggccgaatatagtataatctaaaatttgcaccaccataaattttacgtttttatttactcttttgccattaattaatgcattttaataatttttttatattttatttatgactacttacaaaagtatgaaaaaaatttaaggaataattacataatgtaccattttttataaaatatttacatttttacgttcaaagaatat

SEQ ID NO: 368944 - DNA, 504 bp, Cannabis indica
acatgtctctttttgtgacaatagtagcactccacttccctcaaagagcgtgaatgagcgtgatagtctcttctatcatcatatcttgctctcgatgtactcctaccacgatttgattctgaccttatcaaaagagcttgatcagtatgagacacaccacttagttgcttgatactatatgtctccaaaagagcagttgacacctcatctacagttaaagtagtctttccaattaaaagtgtagtcactattgtctcatatgattttggtaaagagaccaacaaaataatagcttgatcctcttcatcaattttgacctttacacttaacaattgagttatgcacttattaaatctatttatatgatccctaacatcttctccttcaactatttttaactcatataattgtttcttcaaatataatctatttgttagggattttgacatataaagcttttctaaatttttctataactcagacggacatgtttcattcaataca

SEQ ID NO: 368945 - DNA, 360 bp, Cannabis indica
tggtatcagagccaagttcatctcagtgggaggtgaacctggttggcctatcctagagaggatgtaggtgggtggacggatcgagatggtccgaatgttggaacaagtcgtcgttgagccagttagtcttttaaagaggatcagtaggctgagatggagttaagactggattgcttttcttcatgggaatattggacatcctagagaggagacgttgatggttgcttcgagtcaagttcagagatgctacaaagacaactaccacgtgaaattgtagagaggcgcaatagaatgtttgaaactcgtttgcatagtacaagattgaggggtaggtccaaactgtatgcttagtacactaga

SEQ ID NO: 368946 - DNA, 616 bp, Cannabis indica
ctaaatgttaaagtggccaggaaagctactagataaatattcagcctatgaaaaattttatacatttttggcgttattccagtaagagattaactattagtgttacttcctgactaacacagatatagtcgccaaatagttagaatctagtatccgaagaggagtagacatatagaaaggaatttcacaatatcaaagaatttttgactaaggaaatgtaatggtggagaaagtttgtattgaatacaacctgtcagatcctattacaaagataatactacatactacaattgatctggacatcaaggtactgagattaattgaaatgcacttttagttttatattagtgcaagtgggagtttattgagttttatgccctaaataaaatccatttcactataattagatttactaattaataaaagattataaatcagtttgtgttgaatggttcacatgatttatttcataattatatgtttaatgtataaattctattaaatccataacatatacttattcatgattatagtgttgtcaacacagtaaaatataatcattattatatgtttcaaagtttaagtcccatgatttgtcagtacactggatttagac

SEQ ID NO: 368947 - DNA, 513 bp, Cannabis indica
tactccttttttccctctaaattcgcttcactgaaattaacttcaattcaccctttatataggctttcagggactaaaaagatagaaaaatgcacatgttaaatgcctattcgaattaggaaaccaccaaagcccacgtgagagaaaaagatgatttttgggcagtttagggccgcgggccagctttatcatgtcgcggcccgtgttggagtttgacggtaattttactgttgcgtcgactaatagtattttggccataactctctttatattgcttggaattagatgattcatgatgttccaaaaaaataaaagagagatatagaacttttatgttttgacctttttcaaaatctaaacagaagatagtcgaattcaggcttgaagtttcagctttatttttttgcatactttcctctatttcaaatttcatctttttgtgagatatttttatctttttttttcctatctttttcctctgatattttctaatcttcttctattttaaatctg

SEQ ID NO: 368948 - DNA, 639 bp, Cannabis indica
ttcactggcaagaccgaacaagccccccaggagaatcctgccaagttactgcatttaccatcctaatggaggacatagaaagtgtttatatagctactcagtcattagccctgtataaggggcctgcacccatgaaaaaagatgtcaacaagagagatatgaccaagttttatcgatttcatggggattacggccactacaccaatgaatgcaacaacctaaagcgggaaatcaaattcctgataaggaaaagtaacctgcacgtacaaaagtatttcaaggctgatcaaaatcagtgaagagataacaaccaagacttgctaccaccaccagtatatggacatctgcaagtcattattggaggcccgcacatacctggagatttaagcaaagcccgggagaggtatgcacgaacagtacaacatgagcaagaagaagtagtcttggccgtagaagagaggaagttgaagatcccacgggtaggggaacccaccataacatttaatgatgaagatgctgtcaagattagatttctgcacaacgacctattggtcgtggaagtctagatagcgaacaagatgatggccagaaccatgatagataatggagcctcttccaacatcttattcaagacaacat

SEQ ID NO: 368949 - DNA, 510 bp, Cannabis indica
acacaaaataatactatatattaacaaacatggtaataatttaaaatatatatataaatataaaacacctcaataataaatacaattgataacatgtatataaaacttttatcttaatcacttttatgtacatagctcaatcgaattatatgtataattatcattataaaggaaacgtagacaattttatcattatgacagaaatatttgagaattaaattctggtgcaacccgtgcagagatggtcgagaatgaattgagtgaagaaatggaaaaatggaggagaattcaggagtggcaaaagttgaagggtaaaaaataggaagctgaaagagagacgcatggtgaggattttgttgatgaacccaaatctaggaaggcttggacacttaagggtgaatctgaagatgataaagtttcctctaccgaggaagttgagatgccatgggcagggccggccctaggcataggcgggctaggcccgtgcctagggcccacactttccggggg

SEQ ID NO: 368950 - DNA, 574 bp, Cannabis indica
aataaaacaataacccaagctcagaattcaaaatcaccattaatgagccaagcttgagttcaaaaactcaaagcttgctcaatcaacaaactacctatcaaagcctgctcaaatcaatctatataaacataatttagctggtgaaaacataactcaacactagcaacaagaacagcaaccaaaatcacaaaaacatgcatgatccatttccttaaaaatcaagaaactaaaggggaagttgcttaaaaccttaccttggcttggagattactaacacttgcagaaaatcacttgattcacaaaaaaaatcccaaccctagctagtctagagggtttcgaagagagagagagcttgagaaagaaatatgacttttccttagttttgaaaaaaatctgaaatgaaatgaaatttgatttttttttgtttaattaattttcagccaacatttagtaaataaatcagattattagctttaattaaaaaccactaaagacaaaatataaatgggcaaaaagaccattttgcccttctacactaaaaggcataaaaagacactaaggggtattttgggaa

SEQ ID NO: 368951 - DNA, 562 bp, Cannabis indica
aaggtgaaccaaaacatacacaaatgaatgaaaaatacttatgtttctttattgatatcgaataatctagattatattgaaatggagttttatttagggcataaaacccaacacacatggctaagccaccaatcctatcgaaccctgttctcggagaggatttgttcttatacttggttgtctccgagaatgcggttagcgcggtcctagtgctagaagaggaaaaaactcagcatcccgtgtactatgtcagcaagcgcatgatatgagcggagattcagtacccggtgattgaaaaactagtttttggcctcctaatggcctcaagaaagttgagaccttacttccaagctcacccaatcaaggtattaaccaaccacccactccggcaagtcttacaaaagccagaggcatccgtaaggctcctcaaatgggcaatggagttaagccaatttgatctgcactacattccacgcatttccataaaagggcaggcgttagcagacttcatcacggagtgcaatgaagttgaagctaccgcaaacatgttggaaattatttt

SEQ ID NO: 368952 - DNA, 797 bp, Cannabis indica
ccaaattaggttctgtaaaagcctaaattcattaactttttgtctaatttctagtaaaaatatgttcagaatgagacaaaaaatattttacagcatacattgtgatttctatacaatcatcaaacatgcacagaaactaacatgaaaccatccaaatcaacacaaacatcgttttaaatccatatttcatgaaagttaattattatcattgctatgaggccaatttttagggattatttaccaggatttagatttactaccatgtatgttatttaacatcctaaatatgaatttctaaaacaatgtaatttaaaaacatataaagtttaagaaaccttacattggttgcagcggaattaaatgaatccttccgctcagatctctaacccttgtatcctttctgtagcagagtatcaccaagatctgagcccgattctccttcacttgaatggattctgcacaatcttacacactatgattgaggactcacttgttatgtgtgggcatgcactcaatcactaaggcttgaattttgtttgtgaagatggctatatgattttgaaattagaagaagaaggaagaagatgaagtctcataaacctagttgccaaagagagaaaactaggtttttagcttttgaaacattaattggataatgagaccatagcttttcgattatagtaatttccactagggttagggttgatttatttgaaataaaaaattgataaaaatagattaaagttagcacctagtggccggccacttagtgggccttacactagttagatttttgc

SEQ ID NO: 368953 - DNA, 506 bp, Cannabis indica
ttatttttctttgcaaatttgacacgccaattaaatattaccgttaaatatcaactggatgaccactgtatacacctgtgtatatgtaacggtaaaacctcgaagtcgatatagtagtaatccagttagtatttaacggtaatttgcaaagaagttaaagtaaactgaagggggttttgccaccaaaacaaaagatagagggggttaagtgtataaaaattaaaatataagggggttttgccacaaaaaaaaaaaagataaaggggttaagtgtattaaaactaaaacataaggaggtttttccatcaaaaaaaaaagatagaagggttaagtgtgtaaaaattaaaacataaagaggtttcgccgcaaattactcaaaaaaaatatatttgaattaaattttatttaaaaataaacttgtataatgtataaaaaaaaaggttaattagtaatttttccccctaaactttgacatgtactaaatcatgcccctgaactttttggtc

SEQ ID NO: 368954 - DNA, 814 bp, Cannabis indica
attacaggattttgtgtcaaaacttgaaatccaattaaattagtcattaaacttaaccgtatattgaacatgtacctaattaattaagcttggcttcaaattcaatacttccacttgaacaaaatgtggtgaagtgaatgcaaaccttgtaaaagaggaaagttcttctcttgattttttcaattaccacattttcaattagctgcaatgcttaagtcggtttaaccaatctttatgtatttttttattcgtagagtacattgaatgtttaaaaataactataatagtgtatttgttattcatattgagaaattttatttactctacaatttgacagtaacaattaagaaattgaaagtttgagatttgggtagttgactactaattatagaggaaggtaacaagtgacaaaggatttaagaaaactttggtccacatggcataagtctctctcctccattcttgtgtgtaggggtgttcactaagtatccgatccaatccaatccgcacgatctaattcaatccaatccgcaaaatgtggatatccgcacttgcgcggattggattggattgaaaaatctaaaatcgacccttgtgcagattggatgttgtttgacctcaaaaagtaatcaatccaatcaaatccacacttaattaaaaatatttttaaaaaaattataatatataataaataattatatataattttctagtatataaaaaaagacacaaacttcaattttttaatactttttaataatatatttgagttggtatattttatttatttttataaataaaaataaactaaaaa

SEQ ID NO: 368955 - DNA, 548 bp, Cannabis indica
caatatgcccatcatcttcgtgtcatattacaatatgccattgccactattttcctagcaaattttatagtaattataagggatatttgcggcataaataccatatattttcaattttatacacttaaatattacatgttttttttttgacggattaaataccttaagttacattcccgttacttctgtcactacttttctgttaaatcctattcaaacatagagtatttgcagcataaatacttgatgttttaaatttcatacacttatataccacgtgttttttcttctgacggattaaatacttaaagttacatttacattaccttcatcactacaagtctcttaaatgggcaaagatgcaaaatgaccctaaatctaacaataaagttaataaatgtcctttttttaaaaaaattaacgaaatgtctattctgttaaaagtttgataatgaaattacaattataaccttgaataatctagtttatcgtttttatgtgcaataatatattaaaaaaactgaaaggtagtatatatatatatatat

SEQ ID NO: 368956 - DNA, 852 bp, Cannabis indica
cttgtattgtaatggtaagcttttaatttttcaaaattaatattttattaatttttatgatcaattgctatatttatttaaattaaaaattattgacatattatttaaattaaaaattatttacttgttgttatttacttattatcttgtagtacattgtttgtcatcatatatttttatatattagtaggaaagtgttagtgggtgggctttttaattattattttgtttgctttgaaattttcgtagtagtataacgttttgtgtattttagtatttatatattgttattgttgttgttgatgttgtataaatattagagataaactaaaatgaatattgaattttattctcctagctcaatttcactattgattcactcatagtcacaaatcaattcacataaaaaaatgatcaccatttgattttcattgcattgctcattgctcatatattgatatacatattttattttatttgcaaaaaaacataaaaaaaaaactcctttttagtagttccctttcatttctaaagttatgtgacttatgtcttgtattttcttttatgattttgatataccatatattttgctatatcatatattttgtaataataagataaacattgtcttgtctatatcatattattgtactcatatcattattttgtttgcaatttttgtaaagaccgcttatggttaatggttaataccttgaattatttaaggtttatgtatgagaatagttaataattatgaaatgtatattttagaaatatatttaatatcatttatgttattatgctatttaatgtaaaatacccaatttctgtgtttgtgttcggaagccgtgg

SEQ ID NO: 368957 - DNA, 749 bp, Cannabis indica
ttatgtagttttcttgttgattttatgttgttttcgtgttatttttggaaaatcgtaaaaatgtaaaaaaaaattctttgaacgtaaaaatgtaaacaatttacaaaaaattgtgccttatgtaattattcccttataaaatacttaatttgatctaattcataccatctaattcctaaagtatagatatttatatgtgtatggattagattgaaattaaaaaagaaataattacatggaaaatataaattcaaactttatttacaaaaatacctctataaggtgtggacaacacttatattttttatgtgcttttaattactaaaatacctcttataatatcacttacacaatcagacgatgattgcaaggtagttgttgggtgactcgccgaaggttgaattagacgaaggtttcaatcagacgatggttgcagggtggttgctaggtagttggtcgaaggttgcatcatacaaaagtttcaatcagatgaaggttgttgggttgttgctgggtggttggccgaaggttgcatcagacgaaggtttcaattagacaaaataactgttagcaaaatatttatgcaactgtaatgcaactattatgaaatattaaaaatcataacagtattttcacgtacgtaactctatctacatgtctcttcatgatttaatatgaacaaattcactattaggaatttacgaaacaacgaaaatacaccaagataaaattttactatagtattgatg

SEQ ID NO: 368958 - DNA, 1049 bp, Cannabis indica
tgaaattgctagttttttcttcatttccccctctttttggattgaagagggctccttactgcttgttgcagccacatttaactcaagaattttttcacttctcaaggttaccgctttccaatgctctttgccatctcttcttgggttttcagtgtcactaggcaaagtgccttgtggtctattcttcaaatcattggccaatttccccaattgaatttcgagattccgaagagatactgcctggctttgaattacagcgtcattcttggccatataatctctcattaagctctccaaagaactagtttgagagccttgaggttggtgtggttgttgaggtcttggttgttgagaaaaacccggtggaaatgattgctttccttgtgcttgtgctccacttgaacttgccccttgacctccccatgaaaagttcggatgatgcttccatgccggattgtaggagtttgagtatggattgttgttgcggttgaagttttgattacccacatagcaaaccgaagctggatttgaagggcaattttcaaaagtatgcccatcaccacaatacacacaagaaatttctgccctttgaatggcagcggctggttgtacacttcctcccatattcatattcttcaaaatgttggtcattgaggccatttgagcggttagagcggtcaaagcatctacttcaagaacacccgctacttttcggcttgtaggagctctattagttgaccattgatagttgttgctagctatcctttccaaaatctcaaaagcttcattgtaagacttggaaagaatggctccattagcggaagcatccaacaccatcctagaggccgcattgagaccattgtaaaatgtctcaagttggatacaatgaggaataccatggtgtgggcacttcctcaacaactccttgaatctttcccatgcatcactagtagtctcatcttccaattgttgaaaggacatgatctcgcttcgaaactttgcatttctgttggaggaaactttctcaagaatttttcagccaagtcatt

SEQ ID NO: 368959 - DNA, 884 bp, Cannabis indica
gcaacagtgaggtgtacatagagttgcgaccgagatcgaccaacagatatatgctaggctatcaattagtatggtattaactgctaccacatcagtacgactagagtaccgagtatagacgcggaattcgtcggttaatcatacgttgtcatggacgtccctgattctaagttagggttatggtcaggtgtatgggcgcttggttataacctaggatttagtatgttatattatattatgcttttcttcctgagtctgtcgactcacagtgctatgtttatgtgtaggtaagggcaaggcaaagctgaagaatcgtgaggacgagccaatgaagattgtacatgtcgggcggttaggcgtggaacgtacgatcctcgggacaacagtactattgtagttagtcgctcggcgacaagtattttgtaaagaactagtaaacttttgtaaagaattttgtaatcgggatcccgaactattttgtatgtaatatataagttttaattaaaaagcaaaattttaattaatcacgttttccataaacctcgttgattagcaatgagctgcacagtacgtttaaaaatcacgttaacacgcctatgctagttagggtgttacacaatgaatgatttcgagcttgctgctctgggttttgctctaaagatatggcgacattatctttatggtgaaaagtgtgagatttacactgatcataaaagtctcaagtactttttcacccagaaagatttaaatatgaggcggagaatttggcttgaactactaaaggattatgactgcgagattttgtatcaccctgggaaagccaatgttgtggcagatgcactaagtaggagaggtcctggagaggttttcactactgttatgat

SEQ ID NO: 368960 - DNA, 655 bp, Cannabis indica
caccactggtgcctaatagcaatcctcttttatttattattacctacgagagtactagctagtatgacgtagaaatgaagtggttaattatatatatctataggcgaataataatgaatgaacagtacaatgcataaataaaaattgaacgtacacaatgaaggttgttagttataaatattatattatttaactatacagtaattaataagtggagagagatagttgcacttgtatttattaatgtaattgagaaatgtcaaaaggtattacagcggtttacatttgttattaggcgcatagcacattctcgatatttgttaacgattatttttaaaagctattatattaaattatatgggacccgatacttaattgtaccaataacgatattgacacataggagggtactaggcaccactggtgccatttagcatttctcttcaatattagtggtatctatcattttttatagatttagttagcgatattttctaaaagttattttcttaagttatataagactcgatacttaattatacctataataatttaacattaaaacaattacgtatgcatggtatcagtggtaccttttaccaattctcttatataaaaagtattatagttgtatctagggtaaataccattttgg

SEQ ID NO: 368961 - DNA, 720 bp, Cannabis indica
ctaaaagagggttaaaaatcatgcatcaattagaggggttcaactaggtcttacttttccaagtaagatctagctttctaaatgttaaagctggccaaaaattaacattcaattaacatttcatcacatctaattgaacaaagacaagattactcaatcattcaaatcaaagcactagtccatacaagggttcataaccacccaaatctcaaagattttagttcatagatgaaattaaaaactcaaaaccagaaaatgacatgttcatggagtttaagagaatactaaagagtagaaaatgatacaaaatggaagaggagagcaagagaaaggagtttgtgtgctcaaatcttttctttggaggttgccttcttctccttcttcttaatcttcttcttctattctttgtactctcttcctttcctttctttctctgtacttcttttctgaaatttcgtactcccctctttcttcaagtgcagccacccttttctattatcctccttttttgctcctgaattagggtactaaagtttatcctaattggaaatccaagccatggtccacttgcccttcatttttcgacatatttgttgagtcattggccacattttcgccacctcagctccttttttccttcaataacgccagctcgactttctgccaaatacacttactaggctggcaattgctacgggatgattgctatagcaatgccag

SEQ ID NO: 368962 - DNA, 634 bp, Cannabis indica
gagccccttacctacaatgacaaagaggaatagttagtattcatagacaaatcaagtatcaaataaaaaacgacaaagaaatcaacactcctcactcacttaaggttctccatgaagtaggaaccacataatcactcgttccaaacaggtcacctttgacaaaacaatatttcttcctccaacccctcttgttgctagcaaccaactatgttacccaagcttttttgttttctcttagagtgaatatatattgacctttatctatatcgtgttgtttaagataataacttgacttgaaatttacgaggtcaactctctttcccttcactctaactatgacttctatacccaataataacctccaagcatttggcatgagttggctaggcgctaccccataatagtccaacatttcttgtacaaatgaagggaaaaggaatcgaaagccaatcctaaaaggaaattcatacatacaaacccagtcgccactatcccaagcgatagttggaagtcgcatttgtatagaagaatgaatctcatattgatgtcgcatgtgtaggatatcacccttagtcatactagacctcgggttgtccttcaaaaagtgaagggaccgcccgacatactcattctt

SEQ ID NO: 368963 - DNA, 633 bp, Cannabis indica
gtacagctgccagcgctgggggcatagccaacctgtacgctacatgccctatcctctcaaggatctcaaaaggccaatgaacctcgggctaagcttttctttcttaccaaagcgtttaatgcctttcatcggtgatatttggagaaataccatgtccccgatctgaaaatctatgtcctgacgctttgaattagcataactcttctgtctactctgagctgcgagcattcgcgctttgattttgtcaactgcctcgctggttctctgaacagcctcaggacccaagaactttctttcacccacttcatcccagttaataggtgatctacattttcttccatataaaagctcccatataaaagctcataaggggccatcccaattattgcctgatagctatttttgttagagaacttgatcagaggaaggtactttgcccatgacccttcaaagtcaagcacacaagctcgtagcatatcttctaagatctgaatagtcctctcggattgcccatctgtctgaggatgaaatgttgtcctgaactttaactgagtactcatagcttgatgtagactctcctagaatcttgatgtaaatttcggatccctatccaaaacaatggactttgggaca

SEQ ID NO: 368964 - DNA, 641 bp, Cannabis indica
atctctttctctccttcgggtttggttatcaccgtcttactcactatgattgagtacttagcttgctatgtgtgggcatggcactctatctttaaggctttgaatcactatagaaggtttctctcatctactagttgtttgacagagaaaactagattttggcaggttgaaagtcaagtggatgagatgagagcatcatgttccttttatagtatttcaactagggcttagagttgaattatatggattaacaaagaataaaatattaggcaaaatttcacttaatggccgaccataaagggaccattctctacttacaattttgtcattttatttcaactacttattcttctttcaataataccatatttttctaattcaatcctataaataattatcaaataaaattgctaatttatattatttattaattagaccatacaaagtttcttaattaataaattgacccctaaaaactcttttttcttcacaattaagccattgcttagtgaaaattcataaataaggcatagtttaattttcaaatcataattgattaattaaaatcaattaactgagtctgcaagcagtattatatcaggggaccatgggcctatataaccgagctttcaataagtaga

SEQ ID NO: 368965 - DNA, 443 bp, Cannabis indica
gcgtgcacttgcgtagtatttaataattttcgcaacaggagtataaagcaaaacgattatgaaagttgaggagtttagccctaatttttctaatctaggagattaatcgtgccaaacttcaaaattgagagaatttagtcgcaaattaccctaatatgaataatatataattgtggcatactcatcaaaattacatatacttacaattaatctcaaccatataattaaaaattatacaatccttacttaaaattatattggaccaaactgattacatgccattatagcattatatgtataaattgtgtgtaatttaagtgcaatatattatactcttttatttttaccctcttttcaaaagcctatcttttatctctttttttaaacactttaccaattttacccatgtcacctcaatatactctccatgtgacttccttatg

SEQ ID NO: 368966 - DNA, 508 bp, Cannabis indica
atcttataattagataataaataaatattaaagaagttaacaaatttttaaatctgaccataataggaaatatttaaaattagaaatattccaaaaaggaaatatttaaattggaaaaatttcaaattgaaaatatttaaaattggaaatatttcaatttagaaatatttaaaattggaaaaatgaatttttgggaaacaatcccatgaaaaaattaaattttggggaaaaaacccaaaaaattgcaactttgggtttggctgcccagtaggctgcgtctgcagcccaggagggctgctagcagccgatacgcgcgcggatcgtgaggaggggcactcggcgctagcagggttttgggccacgctcacgcgcgcacatccttggttgtccgagtgcctggtgtacaacgatgcacccactcgacaaccttgaatcccgattttccaaaattcataactttttcaatttttatcggaatcgagttccgtaaaaaaaaaaaattgcttaa

SEQ ID NO: 368967 - DNA, 516 bp, Cannabis indica
tttccttaattagaaatattcaaatagaaggatgttgtgatcataaagcatgaattttgttagctattgaagctaagactcttattctttctcggtcatattgtaagtctatgtggtttgagaggttggggtcaccctgttttgatttcgaattgtaagcaagcagttagtggataggattttgattaaggctttggatctcttagctctcattgattcttacaatgtcactattagatggttgtctagaattaaggtggaagcatcccataatttggttacttgggcttttaattctaattatttaagggaaacttacaaaaatactgggttaacttttacaaaaatactgtcacacggaaatttttcaaaaatactgtgtttttttataaaacaccagtcgaacacaaaacggaacaactcaaaacaacaacaaaacaactaaaaaacaccagtagaacaatagtgaaaacttaacacagtatactgcaatatgaaacttataaaaaaatacag

SEQ ID NO: 368968 - DNA, 608 bp, Cannabis indica
atctggttgtaaccggcatatgcgtccatgaaagacaatagcttgaatccagaggtggcatccaccatctggtcgattcttggtaaggggaaacaatcttttgggcaggctttgtttagatcggtaaagtctatacaaactcgccatgtcccgttgggcttcggcaccagtaccagattggctagccattctgggtaatacacatcccgaatcatgccactggttagcaatttgtccaccttctaaggcttcagccttcactgagtcgagggggcgtcatttctgttgaaccggtagcatgtccggattgacattaaggacgtgggttatgacgtgggggcttatgtcggtcatgtcttcttgacaccacgcaaaaacatccatggcccccattagtatctttattattttctctctttcctccggctctaagctctttcctagccggaggactttggtggagtcgaggttgcacactgacacttcctcaacgtcctccatgggttctacaattttttcggatcccacacagggatccaagtcatcttcttccgccatttctggctcaataatttttcggaccattaggacgggtaggtgggcagcaa

SEQ ID NO: 368969 - DNA, 575 bp, Cannabis indica
acgattaacactccaaacaacgactcactttttttatattaaaagatgggaaaacatcaaaggaaactcactttttaccaactgaaaataaccaaaagactcagaagaaaaccagacactcaggagtataaaaacaatcctcacaaccaaaggaccaccacgttgactcattagaaaagattaatcacaatggaacacagccgccgttggacattccaacactctcatcttgagagaaaagaaaaaattatttcattaattgaccctaataaaatacatcatatcaaaatttatacccttcactaatttatacaaaacaattccactattactcatttttacccaaaatacccctcaaatttaattttcctattctctctctctttccctctctttccctctctctctctctctctctctgtcgttcccctcctctctctctctgtcgttccctcttcgacttcgcctctgccccacgacgacgacccaacgaccacccgtgcccgtcaaaaccaccacgaactaccaccaaccaccacgaactgtcgccatcaccactacccgtggtcgtcgac

SEQ ID NO: 368970 - DNA, 573 bp, Cannabis indica
tatcttggtgcattgtaataatgtttgaaaatatactacttttgatcttaattttagtgtcacgcttttagtagcattacctcatttagaaaagacaaaccggtgttttagagatagcattataatgggcactagcagtgtgctcaacatcttttataggtgacgctcaataattaattaacgatatttttaaaaattattttcttaaattatatagaactgacagtataacatcgagaaaggtgctacacgcaaaaaaatatatgttagcctctcttaaaataaaaatatgcacgtacctatttgactcaacaaaaattcaaatgataaactagtcatattagatcagatagaagaaaaatacaagttctgatttttgccacatatataaattatacatatacatattttgtaaatcataacttgcagaagaagaaatgtgcaatatataaccatcattagataagcaatcataattagcagtgtttaattcactgagaaagaccttgtctacgtatgtatatactacaagtacatttgaccacgtatgaagaattctttcgaacacccccc

SEQ ID NO: 368971 - DNA, 1065 bp, Cannabis indica
caactaaacatcgaaattggctcatagctaccaaagaacaattctataaagtcagaatcttcgtaaccattctaattcacaaaactcctatacaaaaccaattattctaacataaataaaattaaactttaccttaagcttttcctcttcaaagatttgctatctcgctactatcagagcttagatcattaggtttcgagttgaaaatcaaaagaaaataataaaaggggatgagggtttcattgaactaagagaaaggagtttcattcgtactgatcttttaatataaacttaaaacatatatatatatataaacatagcagatacgttttataataataatataatattataataatattaataaaaattttattattgatagttaactttgagtatttcaaaatatttttaactaaaaccggtttaatatttttgacctccaatatatataaacgtatcttataataatataataaaataatattataatattataataataatatataatattattaataatattaataaaaactttattattgatagttatcttatcaattcttagccactaaaaaatctttatttttagggtatttggtcaactccgagtaccctaaaatatttctaactaaaaaaatctttatttttagggtattttgacatagtttgaaattgccatttaatatatttattaattagacttaataaaatctcttaattaataaataagacctagaacctcttttcttcacattaagcccttgcttagtgaaaattcataaactaaaaatagtctaattttagaattataattgattaattaaaatcaattatctgagtcttacaagtagtatggtctcaactagtatggggaccatgggcctatacaaccaagcttccaataagcagaactagaatttaccaagtaaattctctgacttattaattccttatttgcatccacgcataaaaacttggaattgcactctcagtcatatagaacgctcgatatgttccacgatatagatacactataaaaatttaaccatcgttctaatc

SEQ ID NO: 368972 - DNA, 650 bp, Cannabis indica
taattttagaacttctataggtacttggtcgttaagtgtcaagtcattatccacgtgtcatttacttattggtatatttaaatgaatttgtaaataaaaaataaaaatataatgacctagactaatcagggacttccacgtggccattggcttgacacttaacggccaggtacctacaaaagttcaagaaatataagttaggtattattatcgtaaaaaaataaacttaggtatttatttgaaatcagaagttaaacataggtatttctgccgaagaatactcttatgaaaatattattaaacacactttttggttaaaacccctttgattagaaaatgttagcatagtaattaagaaaaagaaacacagtagcgtgcctaagctagtagagtattataatttggtaacaaagttgtcaggttattctccgaagactagctagatatgtcaaataatcatcaggcacaagctcaagtcacagttcagtaagttgttatgtgatttagtagtttaaatatgatagtattgataggaagcatgttagcagtatgatagtcgaattagtgtatgcttaaatgaattaggcaagttaggcgatgatattttaacatataatttggaataattattatttgtttattattttatt

SEQ ID NO: 368973 - DNA, 588 bp, Cannabis indica
ttaatctaaaattaatactaaaaataacctaacacccaccatcggacccatcgggctatatcaaattctattgttttttacacaggcatcgggcccaccatcggacccatcaggccatatcaaattctatttttttacacaggtatcgggcccaccatcgggcccatcgggccatatcaaattctatttattttacataggaatcggccccatcgggcaaaccatcggacccatcgggcccatcgggcctttatcttcctcaattttcctgtgataccatcggaccaatgacagtcctgcatcgggcccgtcgaaatcaaaccccaaaccccgattttttccaaatcacatctgataaaaataaaaaataataataaaaaaaaaagaattcaaaccttcgacatctccgttcgaaagctcggtggtagggttggagtcgcatctcacggtggtctgggtaagcggtgatttggtgctcagtgagggtgagaagatgagagagcaacgagagagatagaggaagagagagagttgaggtttgaaaaatgagaagggtatttttgggtttaatgtaaagtagtcatattt

SEQ ID NO: 368974 - DNA, 592 bp, Cannabis indica
cacgagtccaagagcagcacagagattgtgtaactcagtatcatctccaatggtcatttaaagcgttggtaataggcaactatgttatgaatgccctggttgggtgctgaactgttattcccagtctcttgcacaccaggcgcaatttcatctatagaagttgttacatcgtgacccacgtttgccggctgttcgggattaacagctggcagaacccttgcgtttcttgggttctgcaatgcaggatccaccatctgtgcattggctagatcaacaggcccctacgagtctgcaccaccatcgtacatgtggttagattttgaatgaagagcgattcttgattccatctctcaatgaaagcaccaaaatgttgacctcgcttttagccaactatagtgagtcttatttagtaagcgataagtgatttatagcaattgatatatggtaaagcaatgtaaagacacaagaattttataaaggttcagccccgagcggttcggaaatagcctaatcctcgttatttgtattgactcaagaacaaggagaaagattcctttcttatagctcttacaacaatatctctgaatatgaa

SEQ ID NO: 368975 - DNA, 684 bp, Cannabis indica
taagccattgcttagtaaaaattgataaataatacatagtctaatttagaattttaattgattaattaaaactaattaattaactgagtctacaagctaatattatctcaactagtacaaggatcatgtgcctatataatcaagcttccaaattctctatcttattaatttctcctgactccactgtagattcagaattacactcttaattatatagaatactctatatgttttaaatatagatacactattaattattcattgtttcaattcaaataatcaatgatcttctatagattatctacatcgagtagcgacaaatttatcattctactaggggtgtacataaatttttgtaaatcatccaacccgataacttgcccaaactaaactgagattatccgacgaaaaatacaaaccaaaaaactcgacgaaaatataacccacccaatctttatattgggtaggttaaaaagaatattaacccacccaatcaatccgaactaacccaacgaacctgattaagagattttttttatatatattttaattatatataatctatatattatataatttatatacatatttataaaaaaatagaaagtacaaactactatatttttttatggtggatgatttgaactttaaatttaatctttatatttatctcattgtcacaat

SEQ ID NO: 368976 - DNA, 603 bp, Cannabis indica
ttttttttcagatgcttcttgaaggtggtctcgagtttgttttgtctaaattttcgagataatttagtcttatataagtcgctttgtagtgactcatattctgactttgtatatctttggctagacaattagcttgttgactagaagtttttctgcgtcgacgattgtcatagtgtgattttgatcactctttcaaaaaaaaaatggccacgttcatttctttttattttcttttttgaaatatagatataatatattataatggtatgtatatatatagttagttatataatttacaataatcccacacatatttcaaaaggaatgctaaaaaataaaactttcctaggtaaaatatatttatatatatatatataagtgtaaaatgctttgaatctggtgtcttttggactatgaaccagttctgaaaagataagacacaataaagagaatattggtgaaacttttaccttctatgaactaatactctttgatataaattataatcttatcaatcacattacacccccacaatttatgcagtttgacgcggtgttacgcaaataagctgtgtgcgtacttggtaattcataattgttatat

SEQ ID NO: 368977 - DNA, 634 bp, Cannabis indica
tttcggttggtcgggtttagcgggttggcgggttgacccggtcaactcagtcaactcggtcaactctttaaaaaaattaatttttattcaaataattattatttttttatttattaaattaagcatatataatataacaatttgttcatagtatctactattgaagaaaaaatgcattaatcaatccaaccaacaaacaaacaacctatttatcaaagattcaaatcaaacttcatattcatgttcatgaatcatgataaaagtgaaaactaaaatatttcaaaatacatccatatccaatatccatagtccataaaaatctaaagtccatattatatatataaaaatagtaataaaaaaatatatatatataatatatttataaaccgggttggcgggcgggttcgcgggttcaacccgaaacccggtacccctaaaatctcaacccgccaacccacccgaagggtaccgggttgaacccaacccgcccgaattttttaaaaaaatttttttgcgggttcaccagttcgggttcgggcgggttgctcgggttcgggttcgggcgggttgctcgggttcgggtcaacccgactcaaatgttcagccctaatagtaatagtataaatatagaact

SEQ ID NO: 368978 - DNA, 568 bp, Cannabis indica
ttttggtgctgtatgcataattgttactttaattataattctggagcttattggtgatagtttagattgttttaaattgtctttgtggattatatcaaggttttggcaaggattgagtttgaaaactcaaacctagctctctaatggtggattgagattttgttggatttgttgagttctgttagtggggtttggtttagtgtagtgtatgcaggtattctggaggttattacaaagtttgggattgaattgtgatgtggggatcggttttgaggtttccagctatgaaccggtcgaccggttctaggaaacctctagcaaccggtcgaccggttggtacccaggaactggggttccggttgggaaccggcctgccggttgggaatttttcccgaaccctagtttttcccgtttttaagtaatttagggtattggcatcctatttatcgatagggttaagtttagtttctattttaaatccccgataagtgttttagcgagtctctcatcggattttgaacattatggtttagggccctgtaaaacgtcgagctgcatttccactcag

SEQ ID NO: 368979 - DNA, 1199 bp, Cannabis indica
atacgactctaacgaggagcttgagccgtatcacccagatattatgaatacccattttccttcaggattcaaaaacctgcatgtctcatcctatgacggaaccacaaatccggtctcgcatttgaataactttaacacgataatgggagcgagtaacatgacgaacaatttatgctgtattttgttcccccacctcgcttgttagagcagcgagtagctggtttaaaaagtttactcgtcattcaataacttcctgggagcagttgtccagggattttaagaagcaatttcaggccgctagggataggcgacccgaaacggcctcactaactaatataaagcagcagcctggcgaaacactttaggcgtacttaagtcgttttagcatggctgccgctagggttagaaatttggatgatagtacgcaacttacagcccttcaggtggggatctccacttatccattaactgccgggggcgagttgtgggattatttacaaggacgtccggtaaaaaacatcactgacttcaacgagagggctcaggtgtttgtccgaaaggaagaagcccaaaaggaaatgaacttgttgaaaataagctcgggaggtaaacccaacaatgtttcttcaaggactgcttccacgagaattgataactcgggggtatttggtccaaaaagaaaggacaaaattagggaatcatcgaaggatagaaaaaataaaagaagcatgaaaaatacgtgttagtgtgtactatttataccgagcttaatgaaactcgggaaaatatttacatcgcacatgagcagaaggtagccttcgacaagcccgaaactatgaggaattcgaggagcaaaaaagatcctaacaaatattgtaaattccataaagatattgggcatacgaccgacgaatgtccccaatggaaagatgagatagagagtctcatcgctagaggccattttaaatagtatgtgaaaagacagggccagggatacaaccagcccagtcagcctaataatccaaacaaccaggggttacaacctattcttgtggaaggagaggacatcctggttatttcgagagggccgcatatcataagggaaagcaataacgctcaaaaaatgatatgtgaaggagataaagaacgagcagttggtctttgccccaaaaccttccaagaaggtgaaaaccgaggaa

SEQ ID NO: 368980 - DNA, 743 bp, Cannabis indica
gtatatgctacattttgtaaaaatggttcttttgttattatataagttcccacatactatcaatgcaaaacacaattatgtaataataataaaaaaaaaaaaaaaacaaaatacgaagtaaacaattaatacccatcttcaaaagaaaaaaaaagtaaatacaataatttataggattattttagcatttaatatttgtatattttgacaaagaaacaatggtttatttattttatttttaagaaaaatatggcttgagcaaaacgtagaaatattttttttgaaaaaaataaggagatgtgatatattattaattaaggtatcaacctaaataataaaatcaggtgggaatagtatatgacttagaaattacattaaagctaaacacaaagtttgttaatatttaacaattttaaatttgtttagtagaccgtattatattatactatattatatagtattattttaaattatattttacataaatacttttatgtaaaattatgtataagtgctaactttaatttataagtattaaatatataatattttagtataaattaaaatttaatataaactacaaaaaaatttacttttggtcacaacaaaatttgtgaactaaaaaataaaaaaataaaaaaaaaaattgtgactaattataaattatcattcttatgttgtgactaaaatatccgtggctaaagcattagtcacaaaaattacaatttgttgtgactaaatgt

SEQ ID NO: 368981 - DNA, 726 bp, Cannabis indica
gtgtgtgtacattcggaagaaccaggacgagcagttgaaatagcagcattaagtttctttaagggcgactaggatcagttcgcctcgaaccatggagagatgatagggattagaccctaatattatctgccatcatttaaatgtcgatccaaactacctagcaaagaggcagaaaggagacccttggattccgagaggtaaggggcactaaaataggaagtggataagttgttaatcaatgactttatacgcaaggtgtttcaccccttgtggataggtaatcctgttctcgtcccgaaacctaacagaacttggagaacttgtatcgacttttctgatctgaataaggcatgcccaaaagactgctcaggaacatatgagcttcgtaaccaacatgggactttactactataaggtcatgccatttgggctcaagaatgctagggtaacatatcaacgattggtgaacgagatattcgcaaatcaaatcggatgaaacatggaggtttatgtcgatgatatgttggtaaagttagtgaaaagtgggagtcataccacaaacctcacggaatgcttcgaaatattaaagaagtataatatgaagctaaacctaaaaaagtgttcctttggattttcctcaagaaaatttttgggattcatagtcaacgtgaggggtattgaagcaaaccctaaaaaaaatcaaggcttcgatagatatgtcgtcac

SEQ ID NO: 368982 - DNA, 1020 bp, Cannabis indica
attgatggtgtcattttttttttaaataattggtagtatcatttaagttgtgtatatatcactattatattattattacaccatttaataattttggatgtatatatatatgtgtgttctttttaaggattaattaattactattttttttttaactttattatttctcattgtgagaatttgtgtcaattatcgtttctacattaatcataaaaataattaatagttatgataatcataataatttttatactgttgctataaaattatattaagaatagggccgaacccgcgcgacgcgcggcttagtcccctagtatattaaaaaaaataaagtgatatattatatgtgggagctaataaaataggtattgtacattttacctatttatacctataatgatttatagtcattgatttaatcaaatggcttaaattaattcttggaaactacaccataattaatatttttttttatttataattaattttaaatattaataattagatccaactaacaatactccaaagttaactccaaacctataatttttcttacttatttaccttataattttttataattttaattaattagttatgttattaatttttaatttatatattaattttattttctactcaacaataattatagctaaaagagtacaaaataatcaatacaatcaataatataatcatagtgtaaatggtaaaattctcctacatcaactataatgtcataaattcaatcatttgtaaagaaatgctttttattatttttaatttaatagtttttaaattaattgaataatttgatttttcttccaaataataatttaaatttcttcaatattttttcattattagtatgagacaatccttatactataataatttaaagtttgtaattattgtggtgggaaatcttcaattttttttttgttaatatatatgggtaaatacaattttagacaccttgttttataaaagttaccaattagaccctctgttttatta

SEQ ID NO: 368983 - DNA, 509 bp, Cannabis indica
aaaatatgagaaaaaaaataataaataaatttaataaacttggaataataagtttcactataaaagttactggtgccggaaaagtcatcggtgttggaaaagtcaccgaaaaaattaccgatatcagaaaagttattgtcgccggaaaattcaccgtcgccaaaaaaatcactgaaaaaatcaccacaagtagatgtctcaaatataaataaaaatagaatcgattctataacataatgaataaaaacaaataactcaaaccggttataattgaaatataactggttctgtaacataatgaataaaaataaataacacaaaataactcaaaccaattataattaaaatagaaccggttctataacagtgttataatgaataaaaacaaatatcacgaaataactcaaactgattataactaaaatagaaccagttatataacataacactactacaaaaatgatttttctcgatattttcaaacagtcgtttaaagtattcccgtcagt

SEQ ID NO: 368984 - DNA, 951 bp, Cannabis indica
atagagttgcaccgagatgccatcagatatatgctaggctatcagatagtatggtttaacagctaccacatcaatgcgattagagtactgagtataggctggattcgcggttaatcatactttgtcaaggacgttcctgattcagttagggttatggttaggtgtatgggcgcctgacgataacccgggattttagtatgtttattatgttatgctttttcctacttagtctgtcgactcacagtgctattgctatgtgtaggtaagggcaaggctaaagctgaggaatcgtgagagcgagcagatgaagattgtacatgtcgaggaggttaggcctggagcgtacgatcctcgggagatcagggctttcgttgtttagtcgctaggcgacaaatcttttgtaaataaatagcaaacttttgtaattgtattttgtaaacgggatcccagaattttataagtataatatgttatgttttaattaaaaagaaaaattttaattaatcatgtgtttccaataacctcgttgttagcaacgagctgcacagtacgttaaaaatcacgctaacacgcctatgctagttagggtgttacaaccttcttgatatgtcgcgttgcgattggctattggctagcgatactttataaaaactattatattaaattatatgggatccgatatttagttgaaccaataataatattaacacataggagagtgctaaacactattagtaccctttaacattttaataggagatgttgattcgatgcgttataaacaaacgttaataatatatatgtttcaattatttcttccttgtgggtccaataacaggacctaccagagacctccaatgagaaatattgtccttataattatgcatgacatgaaatcaccactgctttttttttttcttttttttttttttttttttatttttactacga

SEQ ID NO: 368985 - DNA, 711 bp, Cannabis indica
taaccttgctacttttgtagcttatatcatgaatctacttatataagctctaagaggctctcctggtctttgtttcacttcgaccaagtcttctaaatgtaatgggagttggcgagaagaagagaattgtgcatggaactctgaggagaaagctttccatgaattaaagcttcttggtggtaacttaaattaccactgctgtgtggcttctaaaagtgtagcatggaatactctacactgcacatcacctcgtaccccttgtaaatccatttgcatttcaaaatatttaagatgtgataagggatcctctttccctgtgtaaatcttctaggtcggcattttgaacttgaggggtagctccaggacattgatctcggagtgaagggtgatccgcgtgctcagtccaactcaagattagtgagttcttggccggccaggccttagaacatattttttaattcatccaactatgcttgcaaagatgggtgaactagttcagcctcttggccgacctatgtcacatcaggatctctcagagttgggtcctgaatacggataccaggctgagcgactagttgaacatattgtttgtccagacctctccttctattcaaatcgttcctgatatcatgggttgtacctaatctgttgaatactgaatgttatagtgagatttctctcacctagaaactcgagacgagactcctattt

SEQ ID NO: 368986 - DNA, 406 bp, Cannabis indica
gttaccaaacggcacctatatattccaattctatcatgaactagatgtgcaggcggtgatagacgggagtccttggacttttaatagagtccctcttgtatttcatcgattacagaaaggtgaagatccacgaagtgtgcgcctccataagcttgatatgtgggtgcagatacatgatttacggtctggttttatgatggataaggtggtctgtagtgtaggggcgtatgttggtacatatgttaaatcggatccgaaaaattttagcggtatttggagagactatcatacattttaatcattaaataataaaatatatttattataattgtaaacataaaaatagacatagccaatttattgtaatttaagaaaataaaaatttatttaagttaactaaatttaa

SEQ ID NO: 368987 - DNA, 570 bp, Cannabis indica
ctgcaaaactggtctctacagtatcagaattacattatgcttgtgcaaacgtgttttatattttcgtatatattattgacatttgcaaaatctcaatttttcagataattacaatatcttattacaatttctttctcaacttccaaaacacatgttgtaatattttgctttttttattttttttattgtagtgttcgttatattcacaacatcactcttataattgtactattctgaatagtttacagtgttaaaaaatatatttaaatatttgaataagtgtagtaaattagaatatgagaatctatattcgatactgtaaatcattctaaatttataaaatatttacatgcttgatattataaatataagggatattggcggctaaaccacctgaactttacggtttgtaacacttaaccataaaaaccgaaattttggtggctaaactacctaaaccctggttccgttttgctctgcacaccttcgtccaaaaatcccagttaagtgtcacggtagactgtcaacgtgtacatactgttgggttttatgccctaaataaaactcttt

SEQ ID NO: 368988 - DNA, 1010 bp, Cannabis indica
aaaaataatatggaagaaaaataaaataaaatactatattttggatgatgtggagatatagagcatcttcaaagaatgttaccattggttttgcatatacctatttttgcatatataattattttatattaattaattttatgtttttaaaatttaaaaagttaaaataattttcaaaattatattttataaaacagtttttactattttaaattttttaattgagtggactccgactagaaccgatttaaatctgacttaaataaaatataaaaataaactttacaaaattcatttctagttatataattgaaaaaaaaaaattatagaagacatgtttatttttaaaaaataaattttttaaaaacataaattttttaaaaacataaatttttttttatttttgtaattaaaaaattaaaaaataaaaatattactacataaaaagagtacatcgatgccctatttgtttccatgaaagaatttttttcataattaagagtgcatttggcatctgaaggaaatgttctctcttttctatctttccaatttttttctttactaccaaactaatatctttttatttaagttttgaagatcattttagaattcaaaaaaaaaatctcaataccaaattcataccacactactgtaaactgtaccactaccacagttccaccagaaaaagagagaaaaaacaaacacaaaacacctaaaatcacatgcaatttagtacatgcttacccggtacaatccgtactatgatgattatgacgtcatttttaaaaaatacacttttcaatttatttttattcttttctagttatcttcaaattttcaactaaatcaaaaaaaaatatatcaaaagtaaataataataataataatttcttcgagctcaattttttctcatcatctaatatatgtacaattcaaaattaatttaaagtttaaaaaactaaaaaaataaaaaaaaaaagaaaaaagaaaaaaacgaacaagagaacaag

SEQ ID NO: 368989 - DNA, 547 bp, Cannabis indica
gggggggtgccccgttatcttgactcaatgcttggtcactagcagccttgcctccgcgaattcattgacccactaaagtcaaggtaagtcaaagaatgaccagataagcagagaaggatacaacgggttcatttgagaattaaacaaaggctggaggcactacttgctcgctacttgggcgtataaggtccaggctaacattcttgacacattgccagaaggccgtctagaacctttgaagaaacactcagcactagccatctttatggagcaaccagaaggctacgttcttccgagacaggaaaagaaagtttgcaaactcaataggtccatttatggacttaaacaagcttctcactcttggaataaaaggtttgatgaaataatcaagacctacggctttcactaaaacgatgatgaaccttgagtttaccaactcaaggatagtgaagtggtagtattcatggtcctttatgttgatgacattttgattattggtaacaatgccaagaaaatgactgacatcaaggaatggcttgacactcaa

SEQ ID NO: 368990 - DNA, 979 bp, Cannabis indica
ttatatttttttaaggctaattagcaatttttccctccgaactttgacatgtactaaatcatgccccttgaactattttggcagtttaaaatcttcaagattgttaaatataaggacttttaattatctaattttagtaaaaaaatttaacatggataaaagttcaggaggcatgatttagtacatatcaaagtttgaggagtatatgatttggtaaatatcaaagtgtggggagtatggtttagtacataaacaatcactgaaaaagtaaaattgaatgaaattagacaaaagtctttaaatctaacaatcttaatagtttaggggaatttttaacggccaaaaaagttcaggacatgatttggtatatttcaaagttcgggagaaaaaattgctaattagccttattttaaattaaaagtattttttgttatgaaacatattttattttttgttttaaatattaaaaaattaatgtatgtaataaacacatttttatgttatgatttcacttttgacttttgtaatcttaaaaatttaaaaataagaagtgctgtctctctaaacatttaattccgcacttaatttattatttcattttttatctcaattttttgaatgcttttaaaataataaaaaacgtgtagttttacattagttataaaattaaatatgtgagatcaccaaatattaaattatgtgttgagacctctccataaaaaatgtggcttttgccgaggttttttcaaagcttacgacgaataaacatttaggggcaagtatcaccaaagagtgtcggctaaaggtctcgctctggtgccaaggtttttttttttgggagtgagggaaactttaggaaagcgttttgtgagagtcctgtctgctaaacacgtaagtagttagtgcattttatctcaaacaaaagtagtaccacgatataattgcttgaagaagtttttagtggcagtggcccaggaag

SEQ ID NO: 368991 - DNA, 615 bp, Cannabis indica
tttattttggcatttataggattgaaaatgaaaaaagtggtatttgtgaaaaaaagataaatgattgaaaaaagtggaaaaaatctaactattgatggacccacatatgggctggccactaggtcctttttatcatttttttattctaaataattcaatactaactttaagtgaattagtataaaaagaaaaggaaggtctcactatccaactaatgcttctatatataactttaaacctagttttcattttgtcagacaactaagtgttttgagacttcttcttcttcttttctctctactaattttgaaattcttagttttcttcaccattaaaattcgagccttagtgattgagtgcatgcccacccataggaagttagtcctcaatcgtagtgtttaagaatgtgaagaatctaaacaactaaaggagtgtcgagctcagatcttggtgatactctgctacagaaaggatataagggttagagatttgagttgaaagagtcatttaattccgctgcaatcaatgtaaggtttctcataccttttatgtgtttaattttatatcattttagaagttcatatttaggcttttaaaaacatacttgtttgtaaa

SEQ ID NO: 368992 - DNA, 624 bp, Cannabis indica
taaatatgattggatggacattgaatgatattggattggatcggttcagttatccattggatcagatgtctcatccaacatccgatccaatctaattggatttttaaaatttgcatccgatccaatccaattatgattggatatccgattctattagatcggttggaattggattggatgactttctgcacacccctacctactgcaacagtttctacaattatacttttttagcggtggatgaaacaaaatataagtattcttaaagtaaattgtaatactgcaatctttttcatctgattttgttttaattatttttttttttaattaggcgactgattatttagttcttttttttttaatttctaatcacgatcgtatctcaaataacaaaaatatttcaattaaattacaaactattcttttaaataataacaattaataaaatttcataatttattaaaaaaaaaataataaagaataagcaaaatactgctatggctacataaatacactcatataaaaacaaaactgacgctctcaactacaaattgtttttatatttatatatgaaacaattcttcgtacgtaactatataaattaatttttaaaatattaaatta

SEQ ID NO: 368993 - DNA, 938 bp, Cannabis indica
gtgtgttttaggtttaattttatttaaggggtttttttttgtaatgaatgtaatgtgtttttagtaatgtaatatttatgttactatatgcaatatgatattttgatttattgtattttaataatttacataattaattatgaatatagtgagcttttcttttaatcttctatatatcaatattagtgaggatattatagaaaaaaaattaagatttctcgttcctaaatttatagctattagaagttgtcttttttctcaagtcaggcttgccgacttttgttgggcttaggcgtggcttggtcggggttgtattttcttattgtgattagtcttgtttctgtgatataattttgagtgttttagtcttgtcttagtggcataattttgagcatttttgtatcttgtctctgtgatataattttgagtattttagtcttgtttatgtaacattggttttttttttttttttttttttttttttttggttttgtttctgttgtcggttcttctttgttcttcgatggctcaccatcaaatcgttcttagtggttgggaatagcaaattcttggctactgaaaaggttgttagtagtgtatttacataccttatacaatagttgagtactcattacgaggttgaatgaatctaccgcagctgtttttactgttagtgtcttctgagcggtggatgaaatagaatatgtgtatttttaaggttaattgtgatgctgtaattttttttatatgattttattttagttgttttgtcaaacgatctagaaattagatggttattatttgacttatttttctaattctaatcttgatcgtgtgtttgagatgtccctaaattataattttagttgagtgccattaataagattttattatttatttcaaaaaaataatttacatgattaattagtaattttatt

SEQ ID NO: 368994 - DNA, 545 bp, Cannabis indica
ataaatgattaaatatataataatataaaattatatacttaattgttagtttcaaagtcatatacagtatattgtgttgtactttggtggaatttgatatttttaatttatctttttagttgactttgaaaccaaaaaaaaaagtttggccggtttgggcaggttaacccgaccaaaccgcccaaaccgttggtcggtttacaaattttttttttttagattgggcgggttgcacttaaattttagcaacccgaactttagatttggttagaaaatatataggataaaccgccgacatcgaccgatgtacaaccctactattttgtatcattttaaaaaatgtagaatccaatttatcatttagcaaaacaaaatatccaatcaataacttttaaaaaaactcataatccaaaaacgacattaacacttatttaggtgccgtttggtaacacttttgggttcctattttttaatcacaaaatgaaagtaaaatttttatttttaaaaattttgcttttgaaaaaaaaatgcgttctgtaaccact

SEQ ID NO: 368995 - DNA, 648 bp, Cannabis indica
atgaaatattatatatatagatgtcaaaatcatacaaatcaattattaccataaatactattatatttctctttatttcattgatttaatattttattcctttagctatacttttgtataaataagagttcaatctattaaaataaattgaaaaaatctctctttctctctatatcatctttttctttttttcttatctattttatcttattcataataatttatatcatttaattgagcattaattattaatatttttttaaatttaaggagcacccatgtttttcttaaaagcaaatgagcatcaatgtcattaacaattttaacataaaatattagtgtaattttatatagagtttacaaatttcattttaaattaaaaatgtggaactcatttactgcaacaatcaacattaagtatgaaatagctcaatcatagttctaataatctctttgatgcaaaaagctatgtttggaatttacagcaggattatcaaacaactcaatcttttacatctaagtccagcacttcagaggacttagcctagcctcaaattcactagcgattaatgctctaactcccactcctccccagcaaggttattacaagttaaatattgatgctgcttttgattccaacgctactac

SEQ ID NO: 368996 - DNA, 714 bp, Cannabis indica
aatgtttaattctttatttaatagtcagaaaatgtcttcacatgctttttagggcataaaccctaacaatctcccactcgctcaaaaagtatattgggcatctcctttagtcccatgttagcaatatgacccataaaagattttgctggtagcgtctttgtgaatggatctgccaggttatgttctgaagcgatcttcaagactgccacatcacctctctctactatattccttagtagatggtactttctcttaatgtgcttgcctctcttgtggctctttggttcctctgagttggccaccgctccactgttgtcacagtagagcaccagtggtttttctacttttggaattacttccagaactgtgtagaatttcttcaaccaaactgcttccttagttgcttcacaagctgctatatattcagcttccatggttgaatctgcaatactggtttccttaattcttctctagactacaactcctctaccaagagtaaatactaacctaaatgttgactttcgactatctttgtctaattgaaaatcagaagcagtatatcaagtaggacttaactctctatcgaaatatatatatataagcatgagatatcttgttctccaaagatacttgagaatgtgctttacaactatctagtgttccaaatatgtataagattgataactaacaatccctacaacatagcatatgtca

SEQ ID NO: 368997 - DNA, 537 bp, Cannabis indica
tttttacgtttaaagatttttttttaaagatttttacagctttctatagaaacaacacgaaaacaataagaaaattacataaaaatgacatgaaaataacatttaaataacatcaaaacaataacaaaaaataacatacagataacaaaaaattaacaacaaattaacaagagtacaacataaaaagaccgtattttccgtaaataaaataaaaaaaaatcgtaaaaatatttgaaattcagtgaaatcttatttttgtaattttttgttgtttttgtgtatttatgaaataatctccaattaatatgtaatgttgcatattgtgttaattaaaaataaataaaaaatcttatcattttattttaataaaatgtgtcaaaaatataaactaaatacatgtatctaaactacaaagcaacacacatataattaaaaaaaattcaagaaaaaattaaaaatatacatcataaaaaatatagacatgaatagaaaaacaactaaaaaataactgttgaataaaaaaaaatctaaaaaatt

SEQ ID NO: 368998 - DNA, 614 bp, Cannabis indica
cgatccaggaagctgactcttatttttttctttctattttgatgaaatggtttctaaaatttaagaaatgggaaaatcttggaatcataactttagttcccaaaaataaataatatatttatatggttgaatttcattgggtgatgtgaaacttggggctttagatcagacttttactttgccacgctatcttccctctaatggtaatcataattatgtgttattaattttgttaattaagttgtacaaaaataataattcgctgtaacattttatttaatcgtatataaacgctgcctactggcgccaggcacgctgattgtgttgagtttgtctcccggccccttgtttataattacttaattaatacatttatttctaaattaagatctattttttatttaatcatgcaaaaaatagtaatttagataagatctatttgctttaattactatgcttaaatcacatttcacagagttagttgtcaatctcatcctatcattgcgattagggatatatatatatactagcaaaaaattacgtgcgaggcacgtatattttatgctaggttttttctatgttatttgaaagtgagattattattgaatactgaa

SEQ ID NO: 368999 - DNA, 599 bp, Cannabis indica
acaagaagaaaagaggtgcttgtggcgaagtcaaaacttttaaagctagactggtcgctaagagttatacccaaagagaaggtgtggactatgaggataattttagtctggtcgccatgctcaaatccattagaattcttctctccatagctactgctttcgattatgaaatttagcaaatagatgtcaagacagcgttccttaatggaattcttgaagaaaccatttatatggagcaaccagaaggctatgttcttctagggcaagaaaagaaagtttgcaaactaaataggtccatttatggacttaaacaagcttctcgctccttgaataaaaggtatgataaaataatcaagacctacgacttttaccaaaatgatgatgaaccttgtctttaccaactcaagaataatcaagtggtagtattcatagtcttttatgttgatgacattttgattattggtaacactatcacgaaaatgactgacatcaaggaatggcttgacactcaattcaaaatgaaggatttgggtgaagctgtctatgttcttggtattcaaattatcaaaaaccggaagaaagatcccttgctctctctc

SEQ ID NO: 369000 - DNA, 779 bp, Cannabis indica
tttaaattaaatttgaataatgataaatgatttgtatttgttaaacattcacatagattatgaactatccaaacatacattaaacatcaatgttcataatcattaaaaaccaaaatcaatactttatttagagcatcacaaatgtaaaacacatacctcccatattggtattctccattgttgctaagacaccaaaaccttcaaagtgaataaatcaccaagttggtagaagagaacctatgagagcaaacccttttcttttttccacacaccctcactcaactcttactaaacacatattaccctttttatatgcaactcttaaccctaatgggttatattaggcttattgggctaatgagtataattagtggtggactatgatttaatgggccaattatagttttagggtactcccatgtgcctctaatacattattaattattaaccatctcattatagtagtgaataaatattgggcacataattaatgattgtgattatggtattatattagtccacaaataaataattctaacagtatttccaagtatctcactttttaaattaaaataatgaaatgttaattccctcaaacgcatgagtttcaaattcactccaagtctactttctcccgctctactctttccaactcaaactcaaatattagggtaaatggcggcaaaacccccaatactttcgttttagtttcattaaaccccccacaacccaaatttctgcgggtaaacccccaaaaccaggaaactgttagcaattta

SEQ ID NO: 369001 - DNA, 511 bp, Cannabis indica
aaattggaaagtacgtcgaccaaaaaaaaataaactattgactaattatccctctatagctaactacatgagcactctaattaatcaaataaactttgactactttacaaatatcactacatgagccctctagttaataaaaattttgtactactcaattgaaaacgacgtcgtgtttgattgtgatgataagttgagggaaagagttacgtcgggctttaatgattgtaatgaacataatgaactcattattaaaactacatgttaattaatcaaggagagcttaattatctttgagtgaatataagtggagatgattatttgtttatataatctatttaggattgtggtaaaggaaatatcgttgtgatcagatcttaaaattggttttttactcttgaattatgtgagagttctagatgaaagagtacaaagaatatgttcgtgttaatgataataataagaattatatggattcatataagatcttgctactttgactttttttttt

SEQ ID NO: 369002 - DNA, 594 bp, Cannabis indica
agaattcaatcagaggcaaatacttactccatgaccctccaaaatccatgacacaagctcgtaacaagtcttcaagtatttgaatagttcgttcagattgcccatctgtttgaggatgaaaggctatgctaaatttcaaattagttcccatagccttctgtaaactcacccaaaacttcgatgtaaatttagggtctctatctgaaacgatagacttcggtaccccatgaagacgaacaatttctttcacatacaaatcagcatactgatccacggtataggttaccttaacaggtaagaaatgtgctgactttgtaaagcgatccacaacaacccaaactgagtcgtacattcctgtggttctaggcaagccaaccacaaagtccatcgcaatgtcttcccacttccattctggaagtgttaatggctgaagtaaccctgccggtcgttgatgctcggctttaatttgctgacaagttaagcacttagtgacgtagtccaccacatccctcttcatcccataccaccaaaaatatggcttcaaatcttgatacattttggtggttcctggatgtaatgagtaaggggtagtat

SEQ ID NO: 369003 - DNA, 361 bp, Cannabis indica
tagtagggcgggcatatgaggaccacgaggggactcatatgtctccatgagttggagtactcatggacattatcgagccgacccggtagtgcgtctaaaaagctgccagaggttaacggatacgtttccattggcttcttggtatgccgcttgcacaggacatggcttaaaccttcaagagatgttgtagtacgtcttggccaccagtctcaacatgagatgacacgagtagtcatttgtgggctagtttgcatacgcgcatggtacggatgcaccatgttggaaagagacagaggtctattgtatgcaactagtttgatagcttgtctcgagggcttgccaacatgtgtcgaggcatgac

SEQ ID NO: 369004 - DNA, 765 bp, Cannabis indica
gctttttaacgtggtataaggggcggaggtcctcgtttcgagattcgccatttttgaagcttcgaaggtgcggcttggaaacggactcgaattcgaacatgtttaagcttgttcttgggtcaagggaggttatatatgagtgcatgggaccctaaggattgtttttgacgtaagaaaacgaagctttaacgtccaaaacgaagaaccaatattttgactccattaaagacggtacaccgccaacgaaggagacgaccccgatctgccttctcggaccacttttcttgatcgttttgaggtcctgagcactgtggagagcttccccaatcgaaaggacgcttcaagagcaatcggagacaaagttacactttaccggcgacgaaaccgaagagaacgccagcgaccacgttctgaccgtttttaaggtgtttttcttagatatttttgtatattttgattccttattttattctaaggctcttggtgaagtttcataattttctaaatttatttggaattattgtgaattaattagtttatttcatcaatcgtaagagtgagccatcactatttatttataggtaaccacctacgtttaggttagatttatttggcaataaaataatgaaaaaagtaaatggtaaaatctacactaagtggtcggccaaggaatggataatgggccccactttataattttgcattttgtcatttttccatttcattttctcaaaaacgccaatttaaccacttaaatgccaattc

SEQ ID NO: 369005 - DNA, 944 bp, Cannabis indica
agacatggctgaagctttagacattaaagaggcgttaagttggatcaagaatcatgaatggcataatgttgaactcgagtccgattgtctctcaattgtccaagctattcgaagtaacatcaccatggtttcgcctcttgggggagtggtgatggactgtcgacagtttctatctcttttaaacaatgtttctttatttttcattaaacaatctgctaatatggttgcacacaactttgctagagcgtcatattcttttctagatcaagtttttagtgaaagggatgttcctgttgaattacagtcttgtattttagctgatttagcaaattaaaatttcattttgcattcagaaaaaaaaaaaaaaacacgtttaaagactaattttaatttcatttaagagttatttggttaaaaattattttaaaaaaaattatattatatacttactttatttaaatttgagaaataaaatttttaaattcaaagtggaatttttctaataacacaaataaaatcttttatatcatatattatttttaaataatttatgttatatatatataatagcaaatatacaatttgttttaaaaaaaaaaacatacactttgttttagaatttaaaaaacctatttcaaaaagaaaaaaaatactcataaatagtaaattggattttttttttattttaactacttcaaaataatttttttttgtatttttataaaaatccacatagcagctcacctagcaactaacgaagcaatctaaattgcaagtcaaatctatatagcaacccacataaaaattaccaaagtaacctaaatcgtattttttttttaaaaaaaagattaaaaaaaaaatatatagataattctaaaaaaaaatacacataaataataaattcatatattattattatcatttaggggggaaattacaaaacg

SEQ ID NO: 369006 - DNA, 554 bp, Cannabis indica
tttcttgatgaagtaaccactttcttggtgatttttggcgataatgccaattccgacgacttttccgacatcggcagctactccggcaacttttccaacattgacagcaaactttagaaaagttgtcagaattggcatagtcgccgaaataatcatcaagagattttccagtgatttttttgacgattttttcggcaccggcagctactctggcaacttttccggttccaatagcgaacttcaaaaaagtcctcagaattgaaattgtcgccgaaaaattaccaagaaactgatttctttattaagaaattttattaagaaactagtttcttggtaatttttccagtaatttttctggcaacaatgccaaattcgatgacttttccggcatcggcaccaactcctgtgacttttctgatgccgatagtatgggtgttcacggattggtttggttcggattttcatagtttttgaaccaaaccagtataacggtattttgaatattagaaaccaaaccaaaccaaaaatttactcaaaccaaacccttaagaacg

SEQ ID NO: 369007 - DNA, 768 bp, Cannabis indica
ccctttgggttgaagaatgccggtgctacctaccagcgacttgtaaataaaatgttcgccgatcaaattggagtcaatatggaagtgtatgtggacgatatgctcgtcaagtccaaactctcaaagaaccacgttgacgacttggaagagtgtttctctatattgaaaagatacaacatgaagttgaacccactcaagtgctcctttggggtatcatcaggcaagttccttggctttatcgttaactcaagaggtattgaagcaaaccccgagaagataaaggcactaattgacatgccttccccaaaaagaaagaaggatgtccaaagcctgacaggacgcatagctgcactcaatcgtttcgtgtccaagtccaccgataggtgtttaccattcttcaacttattgcgaggaagcactaagattgaatggacagaagagtgtgaacaagcatttcaatcattgaagaaacacctggctgaaccccctatcttgtcaaaaccaatcatgggggaggtgttgtacctatacttggctgtaactgagcatgcattgagcgcggcattggtgcgtgaagaggagaagattcagaagccagtgtattacatcagcaaacgatttgtgggagcagagtcacgttatcccaccatggagaagctggcttattgcctagtccattcgtcaagaaagctacgaccttacttccaagcacatcccattcatgtcctaactaatcagcccttacgacaagtattaatgaaaccagag

SEQ ID NO: 369008 - DNA, 686 bp, Cannabis indica
aatttcaaatttattaattatttaatttatcatataaggtgattttaatataatatttcaaattaaaaagataaagttatcttttaattcaaaatatgtccaatattaaaatatctaatcttataattaaataatatataaatattaaagaaattaaaagattttaaatctaacaataatttcataaataaaataatcaatttttaaatttaaacctcaaaatataaaaaaaaataataataataatctattaaaaaataaatattaatctaaaaatgatatttaagtttaaatatattaaaaaatatatatttattttaattttgggtttgaaaattgcaaaaaatcaaaatttggggaaaaatctcacaaaaatcgcatttgtgggtgtggctgcaaggaggctgcacgtgcagcccagacaggctgcaagcagccgagacgcgcgcgcgaatgaagcaaactccagggccctgcgccgagaaatctcgacgattgcgggatttccgtgggcgagctgcagcctggaagggtgtttgaacgaggggtgagacgcggcttcagacagggaattaaactttcgaacatataatcatgattatattccactgtgtttacagtactataatcatgaacaactacatatgttctggactcaattgaatttatacattaaatataatcat

SEQ ID NO: 369009 - DNA, 717 bp, Cannabis indica
caggacccgaacctggacccatatcgggattcaaaaaacccatacccatactcagactaagactcggaccccaaccgcaacctggacccagacccagacccaaaaccaaaccaaaacccgaaattagaactggaattgtgactaggatccatacctgagaccaaaaccgaaccgaaaccataacccaaactcatacaagaaccttggccgagaccttgactacgactaggacttgagacttgggacacgaacctagactagcaaccgtaccgtgaccttgacctgacatggtcctaaaccctcactaagaccttagacccgcgacccagaccaggatccagaccctgacaaggacccaaacctgaacccgaaccaagactaggactgagacctagaacggaacccagactgggatctggactaaaactaagactcaataaccgaactcgaacctaggcccagactaggacctacgaacccgacttggatgagggacctagactagggaactaggtcctagaacccagacccagatctaaatccgggactcgaaccataaccaagacctaacctagacccgaaatctaaagttggacccaaccccgtacccgaaacctgcacaggacccagactaggacaagaacctagacacgaacccataccaagacaaaaccaaaacccagaccaaaatgcgggacccaaactaagacccagacc

SEQ ID NO: 369010 - DNA, 596 bp, Cannabis indica
ttttttatggtatttgatatgccctttttttgaaaacctattatccaaactcacatttcatgtttttgtttctagcttaattagttttatttttttagtttattttacatttacattttacggtttttttctatttaaaaaatttacacaaaatactaacttttttttttcaaacaatacatttataatttgacaagaattttttttacatttatactttttttaattttttttttaattttttaacgttttttacttattaaagtttcaaaaagtttttttttttgtcttttttatatatttttagccaattttagctctcttttttctttttattttttaagttcattgctgatttatttttttctctttctcttctctctctttctatttttctattttttttttaatttctctttgtgtctatctttttttttttaattttttttctcaaactattttttttctctttgtatatataaatataaatatatttaataaatgtacatttttatatcttatttttttttatagaaattaaacttgttttttttttatttaaactactatttgttttttttttgtttaaaagtaaa

SEQ ID NO: 369011 - DNA, 449 bp, Cannabis indica
tataaactataatatttatacatataataataaaaaaagatattttgaaaataaatattaaaattttaaatatggtatttttcaaaaaaaaacattgaaactttttccttttttaattttaccaatttatgtttttttggaccaaagtggaaagtcttgtacaacgggccagctcgctcaccatatttgggccgggtttgggccaatagggtaccttgtagcaataacccaaaacaagtttgagtcaagcttaagccatataacgccagaaaatttggttggagagttattaactcgagaaaattgcattgtatacccactttgctttatttattttaatttttaccttcatttccatattcattgagatatatccactttgatatatgatgttcctctggcccggccctgggcataggcgggctaggcctgtgcctagggcccaccta

SEQ ID NO: 369012 - DNA, 419 bp, Cannabis indica
gtcggtgttttgatttgggaaccggcactggacccgaaccctggcaaggacccgaacccacacccggacctgaaccaatcccaaaccaaaaagtggaccctaacccgtacccactgaccaaaaattggaacaaaaactggaagttgaacgggactggaactaggacttggacttggaatcataaatataattggacctagatccaaaactgtaacaagaccaggacttggactccaaataacacctagacccgaatttgaagctggacccgaatccaaacccaaacctagactcgagacccgaacccgaatgtgaactcagacacacacaaggaaccagactagggatacagaaccagggtcgggacttggaatcgcaccctagtctcgatcccgaacccaaactacagaaatagggac

SEQ ID NO: 369013 - DNA, 1222 bp, Cannabis indica
aacctcttgctcttcttcactttcttcaacttcctcaggaagagcccattgctcttcttgaccttctttagcttcctccagaagcgcctcctcctcatccactaagtcaatagtgtctggaggggcacttgaagaagctttcaagggagttgacacttgggaagaagttaaaggaacgggagcatcaggagtgtgagctccggtaagggcgcccaaaaatggcatccatggaattagctactacaacaaaagaaaagagtccagtgttagaatatctatgaaagcagtaaacgctcaaaaaagcaatcaagctagtcctacctgactctcgaattcggccctagcaaagttctgaatcttaatggtggctgcatcatccccgagatagctgtccgagggccggaattagctagaagaaagataggctgaagggtccaagagaacaggctccggaggtccagaacccatccgggaccgacctaggaaattgcctaagttggagaaataataatccttggcatgatctccccaccgggtcaagagcatcctaaacctaaggagacgctcatcgaaccctataggcctaaggctagcatattacctaacggaaggaacgtaatgtactgctaaaggagacttaccggtgcctaaagtgctggcgtcaggagcccctgtattcggcacctgaaccgaaggctttggcgtgggagccctcctctcaaccgggctcccaatgcgaagggacttctcggcaatcgtttggcttctcctctcgatcgggctccccacgcgaaggggcctcccgtaagccgcctgggccttggaataagccttctcctgggccttccggtagagatactcctggtacttcttctccgcggtggcaataagctcatcccggaaggtcttctccgcggcaggaaccctcacgttcgaacagataaccttagaaaggttagagtcttccactgactggttcggcaggatcagcttagccttccggcagttctccgtcgtgactaagcccccgacgtcgagatctgcccggtcataagtcgcaaagacctgagcccgccgaacaaagatctcggtaggcgcggtctgctcatatggagggatccagacccactccgtgagaagctccgggtgctccacagctcggaaccaggaggagaatcttaatattttaaaaatatcaacttaaaaaatatctaaagaatct
